United States Patent Application Publication US 2004/0234960 A1 - sequence listing, part 10

SEQ ID NO: 30304 - DNA, 831 bp, Artificial Sequence
  chemically treated genomic DNA (Homo sapiens) CpG-island No: 30304
acgaccgcccgcatatacgaaataaaaataaaatttaacaaataataaccactccgaaaaaaaaaaaaatctaaacaaccaaaaatccgcgcgaaatatactaaaaaaaaaaccgcgccaaaaaacgccacgtaccttactacgataccaaacgcgaaaactaaaaaaaaaatcgataaaaataacgaaacgaaaatccaaccctaaccgcgaactccctcccgaaacgaacgaaaccgccgccgccgcgaccgaacgcaaaaccgaacgaccgccgcctcgccaaaaacgctaaacaacgccactcacttaacccgaaaaaattaaacaacctccgccgcgacctcgacactcgacgaaaacaacacgtttaatttaaactttccaactccaatcccgacaaatccacactcacgcacacacgcgcgcgcgcgaacaacctctcaaaaacgcgcgaacgaaccccgataactctctaatcgcgtcttactctctccctcgctcttattaacgcgaaaataattattttatttatttatttcctcctcccgactccatccctcctccccgcgcctccctctccgacttcccctcctcctcctcctccccgatctacgaaaccgaccgcgacgatcgctccaactacaacgtaacgaaactacgcgacgaaacccgacgaaaacgcaacgaataaaaacgctccgaacgaaaacgcgaaaccgaacgaacgaaaacgccgaaactaccgccttaactaaaataaaaaaatataaaaaaaacgaaaaaaaaacgctaccgcctaccgcactatactataccgaaaacacccaa

SEQ ID NO: 30305 - DNA, 603 bp, Artificial Sequence
  chemically treated genomic DNA (Homo sapiens) CpG-island No: 30305
cgttgattcggtttttagagggcgattgggaggtcggatttgggcgtttagagttgggtgggtagcggggggcggtttggggttagggttaggtcggttcgcggttttcggaggagtcggtgggattcggggcggtttcgaagtttcgtcgatttcgtggttttcggttgcgggcgttcgcgtaggataaagacgaaagagggaagcggttcggggcgaggttttttggtgttcgcgtgggtcgtcgggtcgtttagttttttatttttgtcgtttttttcgttcggcgcgcggcggtcgttatcgttttagttacgggtagcgcgcgaaatggcgtttattaggtcgtcgcgttcggttgaggcgagcgcgggaggcgcggcgcgcgacgttttcgaggtttacggttttcgaaacggttttcgatattcggtcgttagcgttgcgtttcgcgggttttcggggttcgatttggtcgcgggttcgttttttgtttcgggttttttacgatcggggggacggaggaaaggaggaaggaaggaaagagagtcgtcgttattagtaaagtagttttgttcggttgggttcgtttgttagattagt

SEQ ID NO: 30306 - DNA, 603 bp, Artificial Sequence
  chemically treated genomic DNA (Homo sapiens) CpG-island No: 30306
actaatctaacaaacgaacccaaccgaacaaaactactttactaataacgacgactctctttccttccttcctcctttcctccgtccccccgatcgtaaaaaacccgaaacaaaaaacgaacccgcgaccaaatcgaaccccgaaaacccgcgaaacgcaacgctaacgaccgaatatcgaaaaccgtttcgaaaaccgtaaacctcgaaaacgtcgcgcgccgcgcctcccgcgctcgcctcaaccgaacgcgacgacctaataaacgccatttcgcgcgctacccgtaactaaaacgataacgaccgccgcgcgccgaacgaaaaaaacgacaaaaataaaaaactaaacgacccgacgacccacgcgaacaccaaaaaacctcgccccgaaccgcttccctctttcgtctttatcctacgcgaacgcccgcaaccgaaaaccacgaaatcgacgaaacttcgaaaccgccccgaatcccaccgactcctccgaaaaccgcgaaccgacctaaccctaaccccaaaccgccccccgctacccacccaactctaaacgcccaaatccgacctcccaatcgccctctaaaaaccgaatcaacg

SEQ ID NO: 30307 - DNA, 603 bp, Artificial Sequence
  chemically treated genomic DNA (Homo sapiens) CpG-island No: 30307
gttggtttggtaggcgggtttagtcgggtagggttgttttgttaatggcggcggttttttttttttttttttttttttttttcgttttttcggtcgtggggagttcggagtaggaggcgggttcgcggttaggtcgggtttcgagagttcgcggggcgtagcgttggcgatcgggtgtcgggggtcgtttcgggggtcgtgggtttcgggggcgtcgcgcgtcgcgtttttcgcgttcgttttagtcgggcgcggcggtttgatgggcgttatttcgcgcgttgttcgtggttggggcggtggcggtcgtcgcgcgtcgggcgggaggagcggtaggggtagggggttgggcgattcggcggtttacgcgggtattaggaggtttcgtttcggatcgtttttttttttcgtttttgttttgcgcgggcgttcgtagtcgagggttacggggtcggcggggtttcgaggtcgtttcgggttttatcggttttttcggaagtcgcggatcggtttggttttgattttaggtcgtttttcgttgtttatttagttttgggcgtttaggttcgattttttagtcgttttttgagagtcgagttagcg

SEQ ID NO: 30308 - DNA, 603 bp, Artificial Sequence
  chemically treated genomic DNA (Homo sapiens) CpG-island No: 30308
cgctaactcgactctcaaaaaacgactaaaaaatcgaacctaaacgcccaaaactaaataaacaacgaaaaacgacctaaaatcaaaaccaaaccgatccgcgacttccgaaaaaaccgataaaacccgaaacgacctcgaaaccccgccgaccccgtaaccctcgactacgaacgcccgcgcaaaacaaaaacgaaaaaaaaaaacgatccgaaacgaaacctcctaatacccgcgtaaaccgccgaatcgcccaaccccctacccctaccgctcctcccgcccgacgcgcgacgaccgccaccgccccaaccacgaacaacgcgcgaaataacgcccatcaaaccgccgcgcccgactaaaacgaacgcgaaaaacgcgacgcgcgacgcccccgaaacccacgacccccgaaacgacccccgacacccgatcgccaacgctacgccccgcgaactctcgaaacccgacctaaccgcgaacccgcctcctactccgaactccccacgaccgaaaaaacgaaaaaaaaaaaaaaaaaaaaaaaaaaaaccgccgccattaacaaaacaaccctacccgactaaacccgcctaccaaaccaac

SEQ ID NO: 30309 - DNA, 916 bp, Artificial Sequence
  chemically treated genomic DNA (Homo sapiens) CpG-island No: 30309
ttcggggttttggcggcgtagttgtcgtcgtcgggagagtgtttggggaagcggcgaggaaggagaggggaggaggaagaggaggaggaggaggaagaggaggagggtgagcgttcgggtcgggttttttagcggtgtattgtgggatgtgcggttattgggagtcgagttttcgtcgttagtcgtttttcgggtagtagtagtagtagcggcggcggtagcggtagtagtttcgggttcggtagtcgcggcggcggcgttttttttttttggttttcggttcggtcgtttcggtttcggttttttcgggggatattatgtattggttggcggcgtagggaggtcggcgttcggcggggatgtaagcgcggttcggggagggagaggtcgcggtcggtagtcgggcggtttaagttttcggtttcggttttggttcgagcgggcgagcgggcgggcgggcggcggcgtcgttaggttttgtcgttagtttcgcgttagagtcgggtcgagttagcgggtgagcgttacgtcgggcggtcgggcgggtattatgggtcggagttcgcgtttttcgggcgtttcgggtttcgttagttcgtttaggggattttcgggagtttttcgttgtcgtttcgagacggtggtcgagcgggcgggcgcgtaattttttcggaagggttattttttcgttttatttttgttttggggggagttagcgagatagtttttttcggggcgcgttggtaaggtgggagggggtgggggtttgtcgattggattttttcgcgtgtgtgtagaagcggtcgtcgtcgtcgtcgcggcggagacgataataatttgttggtttttaggttgggttaacggtatggagaatagttattttttttattattattattagtagttttcgtcgtag

SEQ ID NO: 30310 - DNA, 916 bp, Artificial Sequence
  chemically treated genomic DNA (Homo sapiens) CpG-island No: 30310
ctacgacgaaaactactaataataataataaaaaaaataactattctccataccgttaacccaacctaaaaaccaacaaattattatcgtctccgccgcgacgacgacgacgaccgcttctacacacacgcgaaaaaatccaatcgacaaacccccaccccctcccaccttaccaacgcgccccgaaaaaaactatctcgctaactccccccaaaacaaaaataaaacgaaaaaataacccttccgaaaaaattacgcgcccgcccgctcgaccaccgtctcgaaacgacaacgaaaaactcccgaaaatcccctaaacgaactaacgaaacccgaaacgcccgaaaaacgcgaactccgacccataatacccgcccgaccgcccgacgtaacgctcacccgctaactcgacccgactctaacgcgaaactaacgacaaaacctaacgacgccgccgcccgcccgcccgctcgcccgctcgaaccaaaaccgaaaccgaaaacttaaaccgcccgactaccgaccgcgacctctccctccccgaaccgcgcttacatccccgccgaacgccgacctccctacgccgccaaccaatacataatatcccccgaaaaaaccgaaaccgaaacgaccgaaccgaaaaccaaaaaaaaaaaacgccgccgccgcgactaccgaacccgaaactactaccgctaccgccgccgctactactactactacccgaaaaacgactaacgacgaaaactcgactcccaataaccgcacatcccacaatacaccgctaaaaaacccgacccgaacgctcaccctcctcctcttcctcctcctcctcctcttcctcctcccctctccttcctcgccgcttccccaaacactctcccgacgacgacaactacgccgccaaaaccccgaa

SEQ ID NO: 30311 - DNA, 916 bp, Artificial Sequence
  chemically treated genomic DNA (Homo sapiens) CpG-island No: 30311
ttgcggcgggggttgttggtggtggtggtggggggggtgattgttttttatgtcgttaatttaatttgaaaattagtaagttgttgtcgttttcgtcgcggcggcggcggcggtcgtttttatatatacgcgaaagaatttaatcggtaggtttttatttttttttattttgttagcgcgtttcgaaaggagttgtttcgttggttttttttaaaataagaatggagcgagagaataattttttcgggagaattacgcgttcgttcgttcggttatcgtttcggggcggtagcgaggggttttcgggggttttttgggcgggttggcggggttcggggcgttcggaggacgcggatttcggtttatggtgttcgttcggtcgttcggcgtggcgtttattcgttagttcggttcggttttggcgcgaggttggcggtagggtttggcggcgtcgtcgttcgttcgttcgttcgttcgttcgggttagggtcggggtcgggggtttgggtcgttcggttgtcggtcgcggttttttttttttcgagtcgcgtttatattttcgtcgggcgtcggtttttttgcgtcgttagttagtatatggtgtttttcgagggagtcgaggtcggggcggtcggatcgggggttaggaagggggggcgtcgtcgtcgcggttgtcgggttcggagttgttgtcgttgtcgtcgtcgttgttgttgttgttgttcgggaggcggttggcggcggaggttcggtttttagtagtcgtatattttataatatatcgttaaggagttcgattcgagcgtttatttttttttttttttttttttttttttttttttttttttttttttttttttcgtcgtttttttaggtattttttcggcggcggtagttgcgtcgttaaagtttcggg

SEQ ID NO: 30312 - DNA, 916 bp, Artificial Sequence
  chemically treated genomic DNA (Homo sapiens) CpG-island No: 30312
cccgaaactttaacgacgcaactaccgccgccgaaaaaatacctaaaaaaacgacgaaaaaaaaaaaaaaaaaaaaaaaaaaaaaaaaaaaaaaaaaaaaaaaaaaataaacgctcgaatcgaactccttaacgatatattataaaatatacgactactaaaaaccgaacctccgccgccaaccgcctcccgaacaacaacaacaacaacgacgacgacaacgacaacaactccgaacccgacaaccgcgacgacgacgcccccccttcctaacccccgatccgaccgccccgacctcgactccctcgaaaaacaccatatactaactaacgacgcaaaaaaaccgacgcccgacgaaaatataaacgcgactcgaaaaaaaaaaaaccgcgaccgacaaccgaacgacccaaacccccgaccccgaccctaacccgaacgaacgaacgaacgaacgaacgacgacgccgccaaaccctaccgccaacctcgcgccaaaaccgaaccgaactaacgaataaacgccacgccgaacgaccgaacgaacaccataaaccgaaatccgcgtcctccgaacgccccgaaccccgccaacccgcccaaaaaacccccgaaaacccctcgctaccgccccgaaacgataaccgaacgaacgaacgcgtaattctcccgaaaaaattattctctcgctccattcttattttaaaaaaaaccaacgaaacaactcctttcgaaacgcgctaacaaaataaaaaaaaataaaaacctaccgattaaattctttcgcgtatatataaaaacgaccgccgccgccgccgcgacgaaaacgacaacaacttactaattttcaaattaaattaacgacataaaaaacaatcaccccccccaccaccaccaccaacaacccccgccgcaa

SEQ ID NO: 30313 - DNA, 554 bp, Artificial Sequence
  chemically treated genomic DNA (Homo sapiens) CpG-island No: 30313
agggagattcgttgcggagcgtttaaattgaggtcgttttggtattttagtattttagggatttcgggtcgggttaggcgatttggggcgtttcgaatttatatttacgttttttagtacgttatagttggttttgatttgcgtttttattttttttttgcgtcgtattagtttttggacgtcgttgatagttacgacgtcggtttgcgaggagttttcgttttgtttcgttttttcgtcggatatcgtgaatttcgggtcgcgattttagagattcggttttcgggttagggacgacgttttagtcgatcgtaattacggtttcgtttatgcgttaaaatattatagtcgttcgcgaacgcgagaatagttaaggggcggggtttgggatggggtttagggcggagttgggttatcggaagtcgcgttttgtcggaatacgtgcgtttgtggtgattcggtaggagtagcgtcggaagtaatggatttttacgtaattgtatattaacgttaggggatgatttcgttttagttgatttatttttttattcgtg

SEQ ID NO: 30314 - DNA, 554 bp, Artificial Sequence
  chemically treated genomic DNA (Homo sapiens) CpG-island No: 30314
cacgaataaaaaaataaatcaactaaaacgaaatcatcccctaacgttaatatacaattacgtaaaaatccattacttccgacgctactcctaccgaatcaccacaaacgcacgtattccgacaaaacgcgacttccgataacccaactccgccctaaaccccatcccaaaccccgccccttaactattctcgcgttcgcgaacgactataatattttaacgcataaacgaaaccgtaattacgatcgactaaaacgtcgtccctaacccgaaaaccgaatctctaaaatcgcgacccgaaattcacgatatccgacgaaaaaacgaaacaaaacgaaaactcctcgcaaaccgacgtcgtaactatcaacgacgtccaaaaactaatacgacgcaaaaaaaaaataaaaacgcaaatcaaaaccaactataacgtactaaaaaacgtaaatataaattcgaaacgccccaaatcgcctaacccgacccgaaatccctaaaatactaaaataccaaaacgacctcaatttaaacgctccgcaacgaatctccct

SEQ ID NO: 30315 - DNA, 554 bp, Artificial Sequence
  chemically treated genomic DNA (Homo sapiens) CpG-island No: 30315
tacgaatgagaaaatgagttagttggggcgagattattttttagcgttggtgtgtaattgcgtggggatttattgttttcgacgttatttttgtcgggttattataggcgtacgtgtttcggtagggcgcggttttcggtgatttagtttcgttttaagttttattttaagtttcgttttttgattgttttcgcgttcgcggacggttgtggtgttttggcgtatgggcggagtcgtagttacggtcgattggggcgtcgtttttagttcgggagtcgggtttttggagtcgcggttcggggtttacgatgttcgacgaggaagcgaggtagagcggaggtttttcgtaggtcggcgtcgtgattgttagcgacgtttaggagttgatgcggcgtaaggaggagatagaagcgtagattaaggttaattatgacgtgttggaaagcgtgagtgtgggttcggggcgttttaagtcgtttaattcggttcggagtttttggggtattgggatgttagggcggttttagtttgggcgtttcgtaacggattttttt

SEQ ID NO: 30316 - DNA, 554 bp, Artificial Sequence
  chemically treated genomic DNA (Homo sapiens) CpG-island No: 30316
aaaaaaatccgttacgaaacgcccaaactaaaaccgccctaacatcccaataccccaaaaactccgaaccgaattaaacgacttaaaacgccccgaacccacactcacgctttccaacacgtcataattaaccttaatctacgcttctatctcctccttacgccgcatcaactcctaaacgtcgctaacaatcacgacgccgacctacgaaaaacctccgctctacctcgcttcctcgtcgaacatcgtaaaccccgaaccgcgactccaaaaacccgactcccgaactaaaaacgacgccccaatcgaccgtaactacgactccgcccatacgccaaaacaccacaaccgtccgcgaacgcgaaaacaatcaaaaaacgaaacttaaaataaaacttaaaacgaaactaaatcaccgaaaaccgcgccctaccgaaacacgtacgcctataataacccgacaaaaataacgtcgaaaacaataaatccccacgcaattacacaccaacgctaaaaaataatctcgccccaactaactcattttctcattcgta

SEQ ID NO: 30317 - DNA, 833 bp, Artificial Sequence
  chemically treated genomic DNA (Homo sapiens) CpG-island No: 30317
tcgttagggaatcgggatgttgttcgtttatttgaggtcgttggggttcgggttatcgtagaggtacgggtagggatacggatacgaatacgggatacggtaagggatcggatcggagttagcgttatcgtttttgcgagtagggaaggcggaagtcgcggtttagattttagggcgttgttgattttcgtttgggtcgtagggttcgcggggttggtttaaggttagtagcgtagtttcgcgcgtatttatcgggttcggacgatagggttatgtcgtcggtcgaaagggacggtcgtagggttggagtaaaggggacgcgttgggtagagcggagcggggttgttgggtattgaggttagtcggggttagggttcggttaggtcgcgtttcgtagtaggcgcgggggtcgggcgtttagagggcgtagcgttgcggattttcggttaggagggtttcgcgggaggagggagggtcgttttagtagggaggaagtcggttagtcgcgtgtagttttcgtcggtgttttatttgggcgcggagcggagtagagagagtcgagaggttatttgaagcgttcgggtcgcgtcgttaacgggaaatttgagagtagtaggggcgcggcggtcgttagggtttttggtcggaagtattcgtcgttttttgggtttcgcggggttcgcgtcgtagttcggagtagatgttagtcgggttttttagattttaattgcgttggtttcgtcgggtttttatatcgtttttcgtgtcgttcgggtttgttcgacgttttttttttttcgtataattttttttagcgcgagattttgggggtt

SEQ ID NO: 30318 - DNA, 833 bp, Artificial Sequence
  chemically treated genomic DNA (Homo sapiens) CpG-island No: 30318
aacccccaaaatctcgcgctaaaaaaaattatacgaaaaaaaaaaaacgtcgaacaaacccgaacgacacgaaaaacgatataaaaacccgacgaaaccaacgcaattaaaatctaaaaaacccgactaacatctactccgaactacgacgcgaaccccgcgaaacccaaaaaacgacgaatacttccgaccaaaaaccctaacgaccgccgcgcccctactactctcaaatttcccgttaacgacgcgacccgaacgcttcaaataacctctcgactctctctactccgctccgcgcccaaataaaacaccgacgaaaactacacgcgactaaccgacttcctccctactaaaacgaccctccctcctcccgcgaaaccctcctaaccgaaaatccgcaacgctacgccctctaaacgcccgacccccgcgcctactacgaaacgcgacctaaccgaaccctaaccccgactaacctcaatacccaacaaccccgctccgctctacccaacgcgtcccctttactccaaccctacgaccgtccctttcgaccgacgacataaccctatcgtccgaacccgataaatacgcgcgaaactacgctactaaccttaaaccaaccccgcgaaccctacgacccaaacgaaaatcaacaacgccctaaaatctaaaccgcgacttccgccttccctactcgcaaaaacgataacgctaactccgatccgatcccttaccgtatcccgtattcgtatccgtatccctacccgtacctctacgataacccgaaccccaacgacctcaaataaacgaacaacatcccgattccctaacga

SEQ ID NO: 30319 - DNA, 833 bp, Artificial Sequence
  chemically treated genomic DNA (Homo sapiens) CpG-island No: 30319
gatttttagagtttcgcgttgggaaaagttgtgcggggaggggaggacgtcgggtaagttcgggcggtacggggagcggtgtggaagttcggcggggttagcgtagttgaggtttggggagttcggttggtatttgtttcgggttgcggcgcgggtttcgcggagtttaggaggcggcgggtgttttcggttaagggttttggcggtcgtcgcgtttttgttgtttttaagtttttcgttggcggcgcggttcgggcgttttaggtagtttttcggttttttttgtttcgtttcgcgtttaggtagggtatcgacgggggttgtacgcggttggtcggttttttttttgttgaggcggtttttttttttttcgcggggtttttttggtcggggattcgtagcgttgcgttttttgaacgttcggttttcgcgtttgttgcggggcgcggtttggtcgggttttggtttcggttggttttagtgtttagtagtttcgtttcgttttgtttagcgcgttttttttgttttagttttgcggtcgtttttttcggtcggcggtatggttttgtcgttcgaattcggtgagtgcgcgcgaggttgcgttgttgattttgggttagtttcgcggattttgcggtttaggcgggaattagtagcgttttggggtttgaatcgcggttttcgttttttttgttcgtagaggcggtggcgttgatttcggttcgattttttgtcgtgtttcgtgttcgtgttcgtgtttttattcgtgtttttgcggtggttcgagttttagcggttttaggtgagcgggtagtatttcgattttttggcgg

SEQ ID NO: 30320 - DNA, 833 bp, Artificial Sequence
  chemically treated genomic DNA (Homo sapiens) CpG-island No: 30320
ccgccaaaaaatcgaaatactacccgctcacctaaaaccgctaaaactcgaaccaccgcaaaaacacgaataaaaacacgaacacgaacacgaaacacgacaaaaaatcgaaccgaaatcaacgccaccgcctctacgaacaaaaaaaacgaaaaccgcgattcaaaccccaaaacgctactaattcccgcctaaaccgcaaaatccgcgaaactaacccaaaatcaacaacgcaacctcgcgcgcactcaccgaattcgaacgacaaaaccataccgccgaccgaaaaaaacgaccgcaaaactaaaacaaaaaaaacgcgctaaacaaaacgaaacgaaactactaaacactaaaaccaaccgaaaccaaaacccgaccaaaccgcgccccgcaacaaacgcgaaaaccgaacgttcaaaaaacgcaacgctacgaatccccgaccaaaaaaaccccgcgaaaaaaaaaaaaaccgcctcaacaaaaaaaaaaccgaccaaccgcgtacaacccccgtcgataccctacctaaacgcgaaacgaaacaaaaaaaaccgaaaaactacctaaaacgcccgaaccgcgccgccaacgaaaaacttaaaaacaacaaaaacgcgacgaccgccaaaacccttaaccgaaaacacccgccgcctcctaaactccgcgaaacccgcgccgcaacccgaaacaaataccaaccgaactccccaaacctcaactacgctaaccccgccgaacttccacaccgctccccgtaccgcccgaacttacccgacgtcctcccctccccgcacaacttttcccaacgcgaaactctaaaaatc

SEQ ID NO: 30321 - DNA, 741 bp, Artificial Sequence
  chemically treated genomic DNA (Homo sapiens) CpG-island No: 30321
gttaagcgtcggtgttgagagaggcggcggtcgtcgcgttcgggaaaatgttgggtatgtacgtgtcggataggttttttttgaagttttttcgggtttaggacggtatggggttttatacggttcgtagagtgcgaaaggtgggtgattcggcggcggtttgcgcgtttttgtatttcgcgcgttttgtgtttttcggagtcgttttgtcgtagggttcggggcgcggcgggttttatttcggtcgtttttcgttcgggtcgggttaggcgttcgtgggaaggtcggggatcgcggggtacggcgggggtggtttttattcgttgcgttattcgagtaggtagcgttacgtaggtggcggcggggtgcgtttcgttgtcggtcggtttaggggcggaattgttatcggtttttttgtcgtaagatgttttttttttttttcgtaggaagtgagcgcggcgggagtttttttttttttcggttacgggtgtgagttgcgtttttgcgttggcgaaggtacgcgtgggcgggtgttttttttcgcgcgtacgttgtttcgttgtcgtttttttttttttaggatgaattaatgtggttagaaacgtttaattttttatgcggggatgggaggagtagtttagagcgtcgttttacgtaggtcgtagaattttatttatacgtttaggatttttttttttttttttggaatgtattatatgtgtttttagggaggtgttaatt

SEQ ID NO: 30322 - DNA, 741 bp, Artificial Sequence
  chemically treated genomic DNA (Homo sapiens) CpG-island No: 30322
aattaacacctccctaaaaacacatataatacattccaaaaaaaaaaaaaaaaatcctaaacgtataaataaaattctacgacctacgtaaaacgacgctctaaactactcctcccatccccgcataaaaaattaaacgtttctaaccacattaattcatcctaaaaaaaaaaaaacgacaacgaaacaacgtacgcgcgaaaaaaaacacccgcccacgcgtaccttcgccaacgcaaaaacgcaactcacacccgtaaccgaaaaaaaaaaaaactcccgccgcgctcacttcctacgaaaaaaaaaaaaaacatcttacgacaaaaaaaccgataacaattccgcccctaaaccgaccgacaacgaaacgcaccccgccgccacctacgtaacgctacctactcgaataacgcaacgaataaaaaccacccccgccgtaccccgcgatccccgaccttcccacgaacgcctaacccgacccgaacgaaaaacgaccgaaataaaacccgccgcgccccgaaccctacgacaaaacgactccgaaaaacacaaaacgcgcgaaatacaaaaacgcgcaaaccgccgccgaatcacccacctttcgcactctacgaaccgtataaaaccccataccgtcctaaacccgaaaaaacttcaaaaaaaacctatccgacacgtacatacccaacattttcccgaacgcgacgaccgccgcctctctcaacaccgacgcttaac

SEQ ID NO: 30323 - DNA, 741 bp, Artificial Sequence
  chemically treated genomic DNA (Homo sapiens) CpG-island No: 30323
ggttggtatttttttgaaggtatatataatatattttagaaggagggaaggaaattttgggcgtatgaatgagattttacggtttgcgtggagcggcgttttgggttgttttttttattttcgtatggaaagttaggcgtttttagttatattaatttattttaaaggaaaagaggcgatagcggagtagcgtgcgcgcgggggaaaatattcgtttacgcgtgttttcgttaacgtaaagacgtagtttatattcgtaatcgaggaagagggaggttttcgtcgcgtttattttttgcgggagagaggaaagatattttgcggtagggaggtcggtggtagtttcgtttttggatcggtcggtagcggagcgtatttcgtcgttatttacgtggcgttgtttgttcgggtggcgtagcgagtaaaggttattttcgtcgtgtttcgcggttttcggtttttttacggacgtttggttcggttcgggcgaggggcgatcggggtgaagttcgtcgcgtttcgggttttgcggtagggcgatttcgggaggtatagggcgcgcgaggtgtaggggcgcgtaggtcgtcgtcgggttatttatttttcgtattttgcgggtcgtgtagagttttatgtcgttttgaattcgggaggattttagggagaatttgttcggtacgtatatgtttagtattttttcgggcgcggcggtcgtcgttttttttaatatcggcgtttagt

SEQ ID NO: 30324 - DNA, 741 bp, Artificial Sequence
  chemically treated genomic DNA (Homo sapiens) CpG-island No: 30324
actaaacgccgatattaaaaaaaacgacgaccgccgcgcccgaaaaaatactaaacatatacgtaccgaacaaattctccctaaaatcctcccgaattcaaaacgacataaaactctacacgacccgcaaaatacgaaaaataaataacccgacgacgacctacgcgcccctacacctcgcgcgccctatacctcccgaaatcgccctaccgcaaaacccgaaacgcgacgaacttcaccccgatcgcccctcgcccgaaccgaaccaaacgtccgtaaaaaaaccgaaaaccgcgaaacacgacgaaaataacctttactcgctacgccacccgaacaaacaacgccacgtaaataacgacgaaatacgctccgctaccgaccgatccaaaaacgaaactaccaccgacctccctaccgcaaaatatctttcctctctcccgcaaaaaataaacgcgacgaaaacctccctcttcctcgattacgaatataaactacgtctttacgttaacgaaaacacgcgtaaacgaatattttcccccgcgcgcacgctactccgctatcgcctcttttcctttaaaataaattaatataactaaaaacgcctaactttccatacgaaaataaaaaaaacaacccaaaacgccgctccacgcaaaccgtaaaatctcattcatacgcccaaaatttccttccctccttctaaaatatattatatataccttcaaaaaaataccaacc

SEQ ID NO: 30325 - DNA, 557 bp, Artificial Sequence
  chemically treated genomic DNA (Homo sapiens) CpG-island No: 30325
tgcggggcgaggcggggcgcggggtagtcggtcgggtaggttttagtcggtcgttatcggcgtcggttgtagtttcggttttgtaatcggtttttgtttcgtatggttcggtcgcggagtcgtagcggttcggtttttttttcggttcgcgcgtttcgtttttcgtttgacgcgtagtttgtcgtaaagtcgcgatcgcgacgagttcgcggcgagcgcgtaatttatttcgttcggttgttttcgttcgggagcgggaaggcgaggttaggagggagtgatagcggtaatcggttaatgggaacgcgcggggttgagggggcgtcgcgtagtttcgtttttggggttggttgtatcgtgcgattttttaggagagggttggaggacgatgttgttgcgtttttgtattgtagagagcgggttgtagtttaggggcgggggcggcgggcgtgggagtcgtagtttcggttttagtttgagggattttgtcgaggagggttcgtttaggattttttttatttattcgttttatttggcgagaaggagtataagaggga

SEQ ID NO: 30326 - DNA, 557 bp, Artificial Sequence
  chemically treated genomic DNA (Homo sapiens) CpG-island No: 30326
tccctcttatactccttctcgccaaataaaacgaataaataaaaaaaatcctaaacgaaccctcctcgacaaaatccctcaaactaaaaccgaaactacgactcccacgcccgccgcccccgcccctaaactacaacccgctctctacaatacaaaaacgcaacaacatcgtcctccaaccctctcctaaaaaatcgcacgatacaaccaaccccaaaaacgaaactacgcgacgccccctcaaccccgcgcgttcccattaaccgattaccgctatcactccctcctaacctcgccttcccgctcccgaacgaaaacaaccgaacgaaataaattacgcgctcgccgcgaactcgtcgcgatcgcgactttacgacaaactacgcgtcaaacgaaaaacgaaacgcgcgaaccgaaaaaaaaaccgaaccgctacgactccgcgaccgaaccatacgaaacaaaaaccgattacaaaaccgaaactacaaccgacgccgataacgaccgactaaaacctacccgaccgactaccccgcgccccgcctcgccccgca

SEQ ID NO: 30327 - DNA, 557 bp, Artificial Sequence
  chemically treated genomic DNA (Homo sapiens) CpG-island No: 30327
ttttttttgtgttttttttcgttaaataaagcgaatgggtggaggaaattttgggcgagtttttttcggtagggttttttaagttggagtcgaaattgcgatttttacgttcgtcgttttcgtttttgaattgtagttcgttttttgtaatgtaaaaacgtagtagtatcgttttttagtttttttttgggggatcgtacggtgtaattaattttaaaaacgaagttgcgcgacgtttttttagtttcgcgcgtttttattggtcggttgtcgttgttatttttttttagtttcgttttttcgttttcgggcggaggtagtcgggcggggtaggttgcgcgttcgtcgcgggttcgtcgcggtcgcggttttgcggtaggttgcgcgttaggcggggagcggggcgcgcgggtcggggagggggtcgggtcgttgcggtttcgcggtcggattatgcggggtaggggtcggttgtagggtcggggttgtagtcggcgtcgatggcggtcgattaggatttgttcggtcggttgtttcgcgtttcgtttcgtttcgta

SEQ ID NO: 30328 - DNA, 557 bp, Artificial Sequence
  chemically treated genomic DNA (Homo sapiens) CpG-island No: 30328
tacgaaacgaaacgaaacgcgaaacaaccgaccgaacaaatcctaatcgaccgccatcgacgccgactacaaccccgaccctacaaccgacccctaccccgcataatccgaccgcgaaaccgcaacgacccgaccccctccccgacccgcgcgccccgctccccgcctaacgcgcaacctaccgcaaaaccgcgaccgcgacgaacccgcgacgaacgcgcaacctaccccgcccgactacctccgcccgaaaacgaaaaaacgaaactaaaaaaaaataacaacgacaaccgaccaataaaaacgcgcgaaactaaaaaaacgtcgcgcaacttcgtttttaaaattaattacaccgtacgatcccccaaaaaaaaactaaaaaacgatactactacgtttttacattacaaaaaacgaactacaattcaaaaacgaaaacgacgaacgtaaaaatcgcaatttcgactccaacttaaaaaaccctaccgaaaaaaactcgcccaaaatttcctccacccattcgctttatttaacgaaaaaaaacacaaaaaaaa

SEQ ID NO: 30329 - DNA, 541 bp, Artificial Sequence
  chemically treated genomic DNA (Homo sapiens) CpG-island No: 30329
gtagtttgcgtttttaaagtatagcgcggacgcgggtttttttttttcgaaaggttcggttaacgcgtatagttttggcgtttttttaattttttttgttttgcgtcgcgttacgttcggaaaatttattttttagattgtagttcgggttaggcggttcgcggtttttaagcgaaaatagagcgagtcgaagttagcgtcgagagataagatttgcgcgcgaagcgcggtttggggcgcgttaatttgttttaaaaaagcgcgtacgtagtgttttacggcgcgtgcgcggacgtagtagtttcggtgaatgagcggtgcgcggcgcgtcgcgttcggaattagtaacggcggtaaaggggttttgtacgtattcgcgcgcggttagggaacgtttgttgagggcgttgttgtcgttggtgttttgtatcgcgtttgttcgacgtttacgggttcgggggtttatggttagaagagatttaggaatggtagtttgttacggttgtgagttcgtttttggttagtatatattttacggatt

SEQ ID NO: 30330 - DNA, 541 bp, Artificial Sequence
  chemically treated genomic DNA (Homo sapiens) CpG-island No: 30330
aatccgtaaaatatatactaaccaaaaacgaactcacaaccgtaacaaactaccattcctaaatctcttctaaccataaacccccgaacccgtaaacgtcgaacaaacgcgatacaaaacaccaacgacaacaacgccctcaacaaacgttccctaaccgcgcgcgaatacgtacaaaacccctttaccgccgttactaattccgaacgcgacgcgccgcgcaccgctcattcaccgaaactactacgtccgcgcacgcgccgtaaaacactacgtacgcgcttttttaaaacaaattaacgcgccccaaaccgcgcttcgcgcgcaaatcttatctctcgacgctaacttcgactcgctctattttcgcttaaaaaccgcgaaccgcctaacccgaactacaatctaaaaaataaattttccgaacgtaacgcgacgcaaaacaaaaaaaattaaaaaaacgccaaaactatacgcgttaaccgaacctttcgaaaaaaaaaaacccgcgtccgcgctatactttaaaaacgcaaactac

SEQ ID NO: 30331 - DNA, 541 bp, Artificial Sequence
  chemically treated genomic DNA (Homo sapiens) CpG-island No: 30331
ggttcgtgaggtgtgtgttaattaagggcgggtttataatcgtgatagattgttatttttgagttttttttggttatgggttttcggattcgtgagcgtcgggtaggcgcggtatagaatattaacgatagtagcgtttttagtaagcgttttttggtcgcgcgcgggtacgtgtaggatttttttgtcgtcgttgttggtttcgggcgcggcgcgtcgcgtatcgtttatttatcgaggttattacgttcgcgtacgcgtcgtgaggtattgcgtgcgcgtttttttggagtagattggcgcgttttaggtcgcgtttcgcgcgtagattttgtttttcggcgttggtttcgattcgttttattttcgtttaaaaatcgcgggtcgtttggttcgggttgtagtttgggaggtggatttttcggacgtggcgcggcgtaaagtagaaaggattggagagacgttagagttgtgcgcgttaatcgggtttttcgagaggggggagttcgcgttcgcgttgtgttttgagagcgtagattat

SEQ ID NO: 30332 - DNA, 541 bp, Artificial Sequence
  chemically treated genomic DNA (Homo sapiens) CpG-island No: 30332
ataatctacgctctcaaaacacaacgcgaacgcgaactcccccctctcgaaaaacccgattaacgcgcacaactctaacgtctctccaatcctttctactttacgccgcgccacgtccgaaaaatccacctcccaaactacaacccgaaccaaacgacccgcgatttttaaacgaaaataaaacgaatcgaaaccaacgccgaaaaacaaaatctacgcgcgaaacgcgacctaaaacgcgccaatctactccaaaaaaacgcgcacgcaatacctcacgacgcgtacgcgaacgtaataacctcgataaataaacgatacgcgacgcgccgcgcccgaaaccaacaacgacgacaaaaaaatcctacacgtacccgcgcgcgaccaaaaaacgcttactaaaaacgctactatcgttaatattctataccgcgcctacccgacgctcacgaatccgaaaacccataaccaaaaaaaactcaaaaataacaatctatcacgattataaacccgcccttaattaacacacacctcacgaacc

SEQ ID NO: 30333 - DNA, 724 bp, Artificial Sequence
  chemically treated genomic DNA (Homo sapiens) CpG-island No: 30333
gtttaggtcggttttcgggtcggtttaggcgaatttagtttttttttgttttttttagaaggtttagtttcgttcgggcggtgttcgggcggcgtcggtcgggtttttcgtcgttttaggttcgtttataggttcggaatattatagttcgtttagatttggttggcgtcgagtcgggggtggagttagcgggttttcgttaaaatcgcgtagttggtttttttttcgcgggttacgtcgcgttttttttttttttttaaattcggagttgtattgggattggtggattgggtatttacgtggttaacggtcgcgggaagtcgcggagttcgaatttgagattggatttgaggagattttagtttcggtgttcgggtcgtttcgtttttgtcggaaagttcgcgtcgtcgttgtcgttatcgttcgtagttcgagcgtttcggagtcgtagtgtcgtcgcgtagagacgtcgcggttgcgattaggcgcgtttagtcgtacgtggcgattcgtttttaggttcgtagtgttttggatttcgtaggttttcgtttttttgttttcggtttcgtttttagggtcgcgatgagttttttgagtcgatagtagtcgtcgttatttcgtcgcgtcgggcggtttgtattttgcggtagaagttgattttttcgttttgtagcgattgtgaggaggaggaagaagaggaggaggaggagggtagcggtta

SEQ ID NO: 30334 - DNA, 724 bp, Artificial Sequence
  chemically treated genomic DNA (Homo sapiens) CpG-island No: 30334
taaccgctaccctcctcctcctcctcttcttcctcctcctcacaatcgctacaaaacgaaaaaatcaacttctaccgcaaaatacaaaccgcccgacgcgacgaaataacgacgactactatcgactcaaaaaactcatcgcgaccctaaaaacgaaaccgaaaacaaaaaaacgaaaacctacgaaatccaaaacactacgaacctaaaaacgaatcgccacgtacgactaaacgcgcctaatcgcaaccgcgacgtctctacgcgacgacactacgactccgaaacgctcgaactacgaacgataacgacaacgacgacgcgaactttccgacaaaaacgaaacgacccgaacaccgaaactaaaatctcctcaaatccaatctcaaattcgaactccgcgacttcccgcgaccgttaaccacgtaaatacccaatccaccaatcccaatacaactccgaatttaaaaaaaaaaaaaaaacgcgacgtaacccgcgaaaaaaaaaccaactacgcgattttaacgaaaacccgctaactccacccccgactcgacgccaaccaaatctaaacgaactataatattccgaacctataaacgaacctaaaacgacgaaaaacccgaccgacgccgcccgaacaccgcccgaacgaaactaaaccttctaaaaaaaacaaaaaaaaactaaattcgcctaaaccgacccgaaaaccgacctaaac

SEQ ID NO: 30335 - DNA, 724 bp, Artificial Sequence
  chemically treated genomic DNA (Homo sapiens) CpG-island No: 30335
tggtcgttgttttttttttttttttttttttttttttttttatagtcgttgtagggcgagaagattagtttttgtcgtaaggtgtaggtcgttcggcgcggcggggtggcggcggttgttgtcggtttaggaagtttatcgcggttttggggacggggtcgaggataggagagcggaggtttgcggggtttaggatattgcgggtttgggggcgggtcgttacgtgcggttgggcgcgtttagtcgtagtcgcggcgtttttgcgcggcggtattgcggtttcggggcgttcgggttgcggacggtggcggtagcggcggcgcggatttttcggtagaggcggggcggttcgagtatcgaggttgaggtttttttaggtttagttttaggttcgggtttcgcggtttttcgcgatcgttaattacgtgagtgtttagtttattaattttagtgtagtttcgggtttgaaaaaaaaaggagggcgcgacgtagttcgcgggggaaggattagttacgcgattttggcgggaattcgttggttttattttcggttcggcgttagttaagtttgggcgggttgtggtgtttcgggtttatgagcgagtttggggcggcggggggttcggtcggcgtcgttcgaatatcgttcggacggggttgggttttttgggaggggtaaaagagagttggattcgtttaagtcgattcgaaagtcggtttggat

SEQ ID NO: 30336 - DNA, 724 bp, Artificial Sequence
  chemically treated genomic DNA (Homo sapiens) CpG-island No: 30336
atccaaaccgactttcgaatcgacttaaacgaatccaactctcttttacccctcccaaaaaacccaaccccgtccgaacgatattcgaacgacgccgaccgaaccccccgccgccccaaactcgctcataaacccgaaacaccacaacccgcccaaacttaactaacgccgaaccgaaaataaaaccaacgaattcccgccaaaatcgcgtaactaatccttcccccgcgaactacgtcgcgccctcctttttttttcaaacccgaaactacactaaaattaataaactaaacactcacgtaattaacgatcgcgaaaaaccgcgaaacccgaacctaaaactaaacctaaaaaaacctcaacctcgatactcgaaccgccccgcctctaccgaaaaatccgcgccgccgctaccgccaccgtccgcaacccgaacgccccgaaaccgcaataccgccgcgcaaaaacgccgcgactacgactaaacgcgcccaaccgcacgtaacgacccgcccccaaacccgcaatatcctaaaccccgcaaacctccgctctcctatcctcgaccccgtccccaaaaccgcgataaacttcctaaaccgacaacaaccgccgccaccccgccgcgccgaacgacctacaccttacgacaaaaactaatcttctcgccctacaacgactataaaaaaaaaaaaaaaaaaaaaaaaaaaaaaaacaacgacca

SEQ ID NO: 30337 - DNA, 609 bp, Artificial Sequence
  chemically treated genomic DNA (Homo sapiens) CpG-island No: 30337
  unsure (312)
tcgattcgtcgttgtcgttcgcgcggagttttacggagttcgggttcgagcgtcgtcgttcgttcgggtcggttttcgggagtttcggcgagttggaggaggatttgttgttgttcggcgtttgttcgggcgcggacgaggcgggcggtggggcggagggcgattcgtgggaggaggagggtttcggtttttcgtcgtcggttaagtcgtcggcggttttttattttttgggtagttttttttcgtcggtgcgttgcggcggtttaggagatgcgtcgtcgcggggttgcggggcgcgtcgggcgggcgaanaggcgcgtcgtcgcggtcggattattcgggtatttcgttatataagatttttcgtaagttgcgatttttcgatatttcgtatacgtttaaggtgagagcggcgggcgcgggtattcggcggtcggggtcgcggcgtcggaggggttagcgtcgttgtttgggttcggttatagaagcggtcggtcgtttttttttcgtttttttgcgtcgttttttaaagttggtagtttttgtgtttggttttgtttcgaggttgttcgttgagattatgtaattgaataatgggtttcgtttgga

SEQ ID NO: 30338 - DNA, 609 bp, Artificial Sequence
  chemically treated genomic DNA (Homo sapiens) CpG-island No: 30338
  unsure (298)
tccaaacgaaacccattattcaattacataatctcaacgaacaacctcgaaacaaaaccaaacacaaaaactaccaactttaaaaaacgacgcaaaaaaacgaaaaaaaaacgaccgaccgcttctataaccgaacccaaacaacgacgctaacccctccgacgccgcgaccccgaccgccgaatacccgcgcccgccgctctcaccttaaacgtatacgaaatatcgaaaaatcgcaacttacgaaaaatcttatataacgaaatacccgaataatccgaccgcgacgacgcgcctnttcgcccgcccgacgcgccccgcaaccccgcgacgacgcatctcctaaaccgccgcaacgcaccgacgaaaaaaaactacccaaaaaataaaaaaccgccgacgacttaaccgacgacgaaaaaccgaaaccctcctcctcccacgaatcgccctccgccccaccgcccgcctcgtccgcgcccgaacaaacgccgaacaacaacaaatcctcctccaactcgccgaaactcccgaaaaccgacccgaacgaacgacgacgctcgaacccgaactccgtaaaactccgcgcgaacgacaacgacgaatcga

SEQ ID NO: 30339 - DNA, 609 bp, Artificial Sequence
  chemically treated genomic DNA (Homo sapiens) CpG-island No: 30339
  unsure (298)
tttagacgaggtttattgtttagttatataattttaacggataatttcggggtagggttaaatataagggttgttaattttggggggcggcgtaggaaagcgaggggggagcggtcggtcgtttttgtaatcgaatttaggtagcggcgttggttttttcggcgtcgcggtttcggtcgtcgggtgttcgcgttcgtcgtttttattttgggcgtgtgcggggtgtcgaagagtcgtagtttgcggaaggttttgtgtggcggggtgttcgggtggttcggtcgcggcgacgcgtttnttcgttcgttcggcgcgtttcgtaatttcgcggcgacgtattttttgggtcgtcgtagcgtatcggcgagaaagagttatttaggaagtagggggtcgtcggcgatttgatcggcgacgaggagtcgaagtttttttttttttacgagtcgtttttcgttttatcgttcgtttcgttcgcgttcgggtaggcgtcgggtagtaataggtttttttttagttcgtcggggttttcgggggtcggttcgggcgagcggcggcgttcgggttcgggtttcgtggggtttcgcgcgggcggtagcggcgagtcgg

SEQ ID NO: 30340 - DNA, 609 bp, Artificial Sequence
  chemically treated genomic DNA (Homo sapiens) CpG-island No: 30340
  unsure (312)
ccgactcgccgctaccgcccgcgcgaaaccccacgaaacccgaacccgaacgccgccgctcgcccgaaccgacccccgaaaaccccgacgaactaaaaaaaaacctattactacccgacgcctacccgaacgcgaacgaaacgaacgataaaacgaaaaacgactcgtaaaaaaaaaaaaacttcgactcctcgtcgccgatcaaatcgccgacgaccccctacttcctaaataactctttctcgccgatacgctacgacgacccaaaaaatacgtcgccgcgaaattacgaaacgcgccgaacgaacgaanaaacgcgtcgccgcgaccgaaccacccgaacaccccgccacacaaaaccttccgcaaactacgactcttcgacaccccgcacacgcccaaaataaaaacgacgaacgcgaacacccgacgaccgaaaccgcgacgccgaaaaaaccaacgccgctacctaaattcgattacaaaaacgaccgaccgctcccccctcgctttcctacgccgccccccaaaattaacaacccttatatttaaccctaccccgaaattatccgttaaaattatataactaaacaataaacctcgtctaaa

SEQ ID NO: 30341 - DNA, 643 bp, Artificial Sequence
  chemically treated genomic DNA (Homo sapiens) CpG-island No: 30341
ggcggaaaatgtcgtcggtgttttgacggtttcgtttttttagtagttgcgggggagttgttttgtcggcgcggttggagtttttgatttttagggttcggtggttggaagatgttttagagagacgaggttgcggcggaggaggtggcggcggcgaatcggtaacggcgttagggtggagagaaggcggtatcggcggcggcggcggcgtgaggggtcggcggtgtaaatagttcggatgcgcggttcgagatttcgaggggaatgcggcggttgagttagggtcgcgttttcgttggaaatttgggttgagtatcgcggcgggttagcgaggcgttacgatatttttttttttttttgttttaggtaaggtcgttcgtattttcgtcgagggtaacgcggttgatcggtttcgtcggaaggatgttcgtcgtttgtatagttttttagggtgtgtcgaaacgtattcggcgttcgtgttgttttaaatagtcgttggtgttatatcgtgttgaggagttagtgtatcgggaggttcggcgtcgggggtacgtatttcgtatttcgttatatgtgatgacgttgtgttttatgacgtaatttatattttttttttatattcgttttttatttaattaagcgg

SEQ ID NO: 30342 - DNA, 643 bp, Artificial Sequence
  chemically treated genomic DNA (Homo sapiens) CpG-island No: 30342
ccgcttaattaaataaaaaacgaatataaaaaaaaaatataaattacgtcataaaacacaacgtcatcacatataacgaaatacgaaatacgtacccccgacgccgaacctcccgatacactaactcctcaacacgatataacaccaacgactatttaaaacaacacgaacgccgaatacgtttcgacacaccctaaaaaactatacaaacgacgaacatccttccgacgaaaccgatcaaccgcgttaccctcgacgaaaatacgaacgaccttacctaaaacaaaaaaaaaaaaaaatatcgtaacgcctcgctaacccgccgcgatactcaacccaaatttccaacgaaaacgcgaccctaactcaaccgccgcattcccctcgaaatctcgaaccgcgcatccgaactatttacaccgccgacccctcacgccgccgccgccgccgataccgccttctctccaccctaacgccgttaccgattcgccgccgccacctcctccgccgcaacctcgtctctctaaaacatcttccaaccaccgaaccctaaaaatcaaaaactccaaccgcgccgacaaaacaactcccccgcaactactaaaaaaacgaaaccgtcaaaacaccgacgacattttccgcc

SEQ ID NO: 30343 - DNA, 643 bp, Artificial Sequence
  chemically treated genomic DNA (Homo sapiens) CpG-island No: 30343
tcgtttggttaggtgggagacgaatgtgggagaggagtataaattgcgttataggatatagcgttattatatatgacggaatgcgaggtacgtattttcgacgtcgggtttttcgatgtattagttttttagtacgatgtaatattagcgattatttgaaataatacgagcgtcggatgcgtttcgatatattttagaaaattgtgtaagcggcgggtattttttcggcgaggtcggttagtcgcgttgttttcggcggggatgcgggcggttttatttgaggtaagggagggagaagatgtcgtagcgtttcgttggttcgtcgcggtatttagtttaagtttttaacggaggcgcgattttgatttagtcgtcgtatttttttcggggtttcgaatcgcgtattcgggttgtttatatcgtcggttttttacgtcgtcgtcgtcgtcgatgtcgttttttttttattttagcgtcgttgtcgattcgtcgtcgttatttttttcgtcgtagtttcgtttttttggagtattttttaattatcgaattttgagaattagagattttagtcgcgtcggtaggataattttttcgtaattgttaggggaacgaggtcgttagagtatcggcggtatttttcgtt

SEQ ID NO: 30344 - DNA, 643 bp, Artificial Sequence
  chemically treated genomic DNA (Homo sapiens) CpG-island No: 30344
aacgaaaaataccgccgatactctaacgacctcgttcccctaacaattacgaaaaaattatcctaccgacgcgactaaaatctctaattctcaaaattcgataattaaaaaatactccaaaaaaacgaaactacgacgaaaaaaataacgacgacgaatcgacaacgacgctaaaataaaaaaaaaacgacatcgacgacgacgacgacgtaaaaaaccgacgatataaacaacccgaatacgcgattcgaaaccccgaaaaaaatacgacgactaaatcaaaatcgcgcctccgttaaaaacttaaactaaataccgcgacgaaccaacgaaacgctacgacatcttctccctcccttacctcaaataaaaccgcccgcatccccgccgaaaacaacgcgactaaccgacctcgccgaaaaaatacccgccgcttacacaattttctaaaatatatcgaaacgcatccgacgctcgtattatttcaaataatcgctaatattacatcgtactaaaaaactaatacatcgaaaaacccgacgtcgaaaatacgtacctcgcattccgtcatatataataacgctatatcctataacgcaatttatactcctctcccacattcgtctcccacctaaccaaacga

SEQ ID NO: 30345 - DNA, 699 bp, Artificial Sequence
  chemically treated genomic DNA (Homo sapiens) CpG-island No: 30345
tattcgcgcggtttcggttttttttttggacggtcgggtttaggacgtgttttggaatttgtaggaggtttttcgcgagagttttttggggcgcggaggtagttttaggtcgtgttttttgtttaggattaggagcgcgttcgggtttaggcgtaggaggtcgcggacgtgggtttcgttcgtttttaggaagtcgtgcggaattattttgagtttcgcgaggatgcgggtcgcgagttgttggtttcggtaattcgcgcgtttcgttttttgtttcgtttggcgtttgtcggggcgcgattcgcgttgggagttcgtttcgtcgagtgtttgttgttggtaggggacgcggcgggcgttcgggttatgtgcgagcgtttgttgcggttcgtacgttttgaggattttgcggggatcgtgtaggggatcgcgtattttttttggttttgcgcggtttttgcgtttgtacgtcggggattcgcggcgcgttatggaggatttttagacggtagtggagtagggggcgtcgtatcgggggggttgtgtgcgcgcgttgtggcgtcggggattgttgcgggtgttggcgggtagtttgtttttgggtacgttggattatgttatcgtttgtaggttgcggttcgaggaggcgttgttggtcgttaagttggtcgtgttttggaattagcgggggttgttgtt

SEQ ID NO: 30346 - DNA, 699 bp, Artificial Sequence
  chemically treated genomic DNA (Homo sapiens) CpG-island No: 30346
aacaacaacccccgctaattccaaaacacgaccaacttaacgaccaacaacgcctcctcgaaccgcaacctacaaacgataacataatccaacgtacccaaaaacaaactacccgccaacacccgcaacaatccccgacgccacaacgcgcgcacacaacccccccgatacgacgccccctactccactaccgtctaaaaatcctccataacgcgccgcgaatccccgacgtacaaacgcaaaaaccgcgcaaaaccaaaaaaaatacgcgatcccctacacgatccccgcaaaatcctcaaaacgtacgaaccgcaacaaacgctcgcacataacccgaacgcccgccgcgtcccctaccaacaacaaacactcgacgaaacgaactcccaacgcgaatcgcgccccgacaaacgccaaacgaaacaaaaaacgaaacgcgcgaattaccgaaaccaacaactcgcgacccgcatcctcgcgaaactcaaaataattccgcacgacttcctaaaaacgaacgaaacccacgtccgcgacctcctacgcctaaacccgaacgcgctcctaatcctaaacaaaaaacacgacctaaaactacctccgcgccccaaaaaactctcgcgaaaaacctcctacaaattccaaaacacgtcctaaacccgaccgtccaaaaaaaaaaccgaaaccgcgcgaata

SEQ ID NO: 30347 - DNA, 699 bp, Artificial Sequence
  chemically treated genomic DNA (Homo sapiens) CpG-island No: 30347
agtagtagttttcgttggttttagggtacgattagtttggcggttagtagcgttttttcgggtcgtagtttgtaggcggtgatatagtttagcgtgtttaggaataggttgttcgttagtattcgtagtagttttcggcgttatagcgcgcgtatatagttttttcggtgcggcgttttttgttttattatcgtttggaagttttttatggcgcgtcgcgagttttcggcgtgtaggcgtagaagtcgcgtagagttaggagaggtgcgcggttttttgtacggttttcgtagggtttttagggcgtgcgggtcgtagtaggcgttcgtatatggttcgggcgttcgtcgcgttttttgttagtagtaggtattcggcgaggcgggtttttagcgcgggtcgcgtttcggtaggcgttaggcgaagtaggagacggagcgcgcgggttatcggggttagtagttcgcggttcgtattttcgcggagtttagggtggtttcgtacggttttttggaagcgggcgaagtttacgttcgcggttttttgcgtttgagttcggacgcgtttttggttttggatagagaatacggtttggaattgttttcgcgttttagagggttttcgcggaaggttttttgtaggttttaaaatacgttttgggttcggtcgtttaggaagaaggtcgaggtcgcgcgggtg

SEQ ID NO: 30348 - DNA, 699 bp, Artificial Sequence
  chemically treated genomic DNA (Homo sapiens) CpG-island No: 30348
cacccgcgcgacctcgaccttcttcctaaacgaccgaacccaaaacgtattttaaaacctacaaaaaaccttccgcgaaaaccctctaaaacgcgaaaacaattccaaaccgtattctctatccaaaaccaaaaacgcgtccgaactcaaacgcaaaaaaccgcgaacgtaaacttcgcccgcttccaaaaaaccgtacgaaaccaccctaaactccgcgaaaatacgaaccgcgaactactaaccccgataacccgcgcgctccgtctcctacttcgcctaacgcctaccgaaacgcgacccgcgctaaaaacccgcctcgccgaatacctactactaacaaaaaacgcgacgaacgcccgaaccatatacgaacgcctactacgacccgcacgccctaaaaaccctacgaaaaccgtacaaaaaaccgcgcacctctcctaactctacgcgacttctacgcctacacgccgaaaactcgcgacgcgccataaaaaacttccaaacgataataaaacaaaaaacgccgcaccgaaaaaactatatacgcgcgctataacgccgaaaactactacgaatactaacgaacaacctattcctaaacacgctaaactatatcaccgcctacaaactacgacccgaaaaaacgctactaaccgccaaactaatcgtaccctaaaaccaacgaaaactactact

SEQ ID NO: 30349 - DNA, 1084 bp, Artificial Sequence
  chemically treated genomic DNA (Homo sapiens) CpG-island No: 30349
tgcgggttcgtttttgaagggtaaatttcgggttttgggtggcgcggcggttggaggaggagtcgcggttgtttcgtcggggcggtagtaggaggcgtcgttttggtttttaaggaagattttcgttttttagcgtttagggtcgttttggtggagtaggacgcgtcgatcgttcgggacgttttcgttggttattacggtgatggattttatttacgtgtttattttgttttttaattacgttttattggtagttcgtattcggtagttgttggaagacgaaagttacgacggcggggtcggggttgttagcgtttttgtttcgtcgcggagtttattttgtgtttcgtttatttcggtcgttgtaggcgattttttcgattgcgcgtattcgttcgacgtcgagtttaaggacgacgcgtattttttttatagcgatttttagtcgttcgttttaaagataaaggaggaggaggaaggcgcggaggttttcgcgttttttcgcgtttttattttgtggtcggtgttaatttcgtagttttttcggatttttcgttgggttatcgttttcgttgtcgtcgcgagcgattttatttagattcggggaagcggcggtgacggtcgtattcgttagtgttttagtttcgtttgcgtttttttcggggtcgattttggagtgtattttgtataaagcggagggcgcgtcgttagtagggtcgcgttcgcgtcgtcgttttgtaagcgtcgggcgagcggttgtttgttttcgcgggacggtttgttttttattttcgtttttatcgtcgtcgtcgggcggttttcgcgttttattttgtattcggttttaacgggttttcgtagttcggttattaggtcgtcgtgtttaaggagggtttgtcgtaggtttattcgttttattttaattatttgaggtgagggttcgggacggggtacgtttagcgcgttcgggagtagcggtttcgttggcggcggtcgttaatttttagttttagttttagcgtatcgttgcgtttttcggggcggtcggagagggtgggtagcgggatatagtataggggtagtt

SEQ ID NO: 30350 - DNA, 1084 bp, Artificial Sequence
  chemically treated genomic DNA (Homo sapiens) CpG-island No: 30350
aactacccctatactatatcccgctacccaccctctccgaccgccccgaaaaacgcaacgatacgctaaaactaaaactaaaaattaacgaccgccgccaacgaaaccgctactcccgaacgcgctaaacgtaccccgtcccgaaccctcacctcaaataattaaaataaaacgaataaacctacgacaaaccctccttaaacacgacgacctaataaccgaactacgaaaacccgttaaaaccgaatacaaaataaaacgcgaaaaccgcccgacgacgacgataaaaacgaaaataaaaaacaaaccgtcccgcgaaaacaaacaaccgctcgcccgacgcttacaaaacgacgacgcgaacgcgaccctactaacgacgcgccctccgctttatacaaaatacactccaaaatcgaccccgaaaaaaacgcaaacgaaactaaaacactaacgaatacgaccgtcaccgccgcttccccgaatctaaataaaatcgctcgcgacgacaacgaaaacgataacccaacgaaaaatccgaaaaaactacgaaattaacaccgaccacaaaataaaaacgcgaaaaaacgcgaaaacctccgcgccttcctcctcctcctttatctttaaaacgaacgactaaaaatcgctataaaaaaaatacgcgtcgtccttaaactcgacgtcgaacgaatacgcgcaatcgaaaaaatcgcctacaacgaccgaaataaacgaaacacaaaataaactccgcgacgaaacaaaaacgctaacaaccccgaccccgccgtcgtaactttcgtcttccaacaactaccgaatacgaactaccaataaaacgtaattaaaaaacaaaataaacacgtaaataaaatccatcaccgtaataaccaacgaaaacgtcccgaacgatcgacgcgtcctactccaccaaaacgaccctaaacgctaaaaaacgaaaatcttccttaaaaaccaaaacgacgcctcctactaccgccccgacgaaacaaccgcgactcctcctccaaccgccgcgccacccaaaacccgaaatttacccttcaaaaacgaacccgca

SEQ ID NO: 30351 - DNA, 1084 bp, Artificial Sequence
  chemically treated genomic DNA (Homo sapiens) CpG-island No: 30351
aattgtttttgtgttgtgtttcgttgtttatttttttcggtcgtttcggggagcgtagcggtgcgttggggttggggttgagggttggcggtcgtcgttaacggaatcgttattttcggacgcgttgggcgtgtttcgtttcgggtttttattttaggtagttgagatagggcgggtagatttgcggtaggttttttttgagtacggcggtttggtagtcgagttgcgggagttcgttgaggtcgagtgtagggtagagcgcgggggtcgttcggcggcggcggtagaggcggaggtggagggtaggtcgtttcgcgggagtaggtagtcgttcgttcggcgtttgtagggcggcggcgcgaacgcggttttgttggcggcgcgtttttcgttttgtataggatgtattttagggtcgatttcgaggaggacgtagacgagattgaggtattggcgggtgcggtcgttatcgtcgttttttcgggtttggatggggtcgttcgcggcggtagcgggggcggtggtttaacgggaaattcgggaaggttgcggggttggtatcggttataaggtaggaacgcggggaggcgcggaggttttcgcgttttttttttttttttttatttttagagcgggcggttggaagtcgttatagagagggtacgcgtcgtttttgggttcggcgtcgggcgggtacgcgtagtcggggaagtcgtttatagcgatcggggtggacgaggtatagggtgaatttcgcggcggggtaaaggcgttggtagtttcggtttcgtcgtcgtaattttcgttttttagtagttgtcgagtgcgggttgttaataaggcgtgattgagaggtaggataggtacgtggatgaaatttattatcgtggtggttagcggggacgtttcggacgatcggcgcgttttgttttattagggcgattttgggcgttgagaagcgggaattttttttggggattagggcgacgttttttgttgtcgtttcggcgggatagtcgcggttttttttttagtcgtcgcgttatttagagttcgaggtttgttttttagaagcggattcgta

SEQ ID NO: 30352 - DNA, 1084 bp, Artificial Sequence
  chemically treated genomic DNA (Homo sapiens) CpG-island No: 30352
tacgaatccgcttctaaaaaacaaacctcgaactctaaataacgcgacgactaaaaaaaaaaccgcgactatcccgccgaaacgacaacaaaaaacgtcgccctaatccccaaaaaaaattcccgcttctcaacgcccaaaatcgccctaataaaacaaaacgcgccgatcgtccgaaacgtccccgctaaccaccacgataataaatttcatccacgtacctatcctacctctcaatcacgccttattaacaacccgcactcgacaactactaaaaaacgaaaattacgacgacgaaaccgaaactaccaacgcctttaccccgccgcgaaattcaccctatacctcgtccaccccgatcgctataaacgacttccccgactacgcgtacccgcccgacgccgaacccaaaaacgacgcgtaccctctctataacgacttccaaccgcccgctctaaaaataaaaaaaaaaaaaaaaaacgcgaaaacctccgcgcctccccgcgttcctaccttataaccgataccaaccccgcaaccttcccgaatttcccgttaaaccaccgcccccgctaccgccgcgaacgaccccatccaaacccgaaaaaacgacgataacgaccgcacccgccaatacctcaatctcgtctacgtcctcctcgaaatcgaccctaaaatacatcctatacaaaacgaaaaacgcgccgccaacaaaaccgcgttcgcgccgccgccctacaaacgccgaacgaacgactacctactcccgcgaaacgacctaccctccacctccgcctctaccgccgccgccgaacgacccccgcgctctaccctacactcgacctcaacgaactcccgcaactcgactaccaaaccgccgtactcaaaaaaaacctaccgcaaatctacccgccctatctcaactacctaaaataaaaacccgaaacgaaacacgcccaacgcgtccgaaaataacgattccgttaacgacgaccgccaaccctcaaccccaaccccaacgcaccgctacgctccccgaaacgaccgaaaaaaataaacaacgaaacacaacacaaaaacaatt

SEQ ID NO: 30353 - DNA, 847 bp, Artificial Sequence
  chemically treated genomic DNA (Homo sapiens) CpG-island No: 30353
cgcgcggtacggggtttttgtcggtgttttttttttcggtcgtcgcgttttcgtaggcgtttttggttttcggtacggcgtaggtcgagattcgggtttgggcgcgtcgaggggtcgcggggttcgtatcgggtcgtttcgcgttttatttgttcggtagttcgtcggtagtttgtaattcgggagtttcggttttttgcgttttttacgtttttaacgtcgcgtcggcgtttcggttcgcggtcgggggttatgaatgggcgtagcggaagtatcgtttttttcggacgtgacgttcggttaatggtagcgcgggttgcgtggatggatgaggttagcgttgtcgtgtcgggaatggaatgtgtaagtgtaatatttagaatcgggtaatattcggcgatcgaacgcggcggtcggtagcgttcgcgcgggggtttgcgaagcgttgttcggggtcggtattgttcgcggggaggacgcgtcgtcgtcgttatttagcgtcgtcgtcgtcgtcgtttttagtcgggtcgtcgcgcgtttcgggggtcggtttcgcgagcgtaggagtaaatatcgtcggagttttggagtcgttgtagaagggaataaagagagatgtagggatttgtgaggttacggcgttttagttgtaagatgtattagtcggttgaattcgggatcggttgatttgttggaatcggagtgttttgtacggagagtggtggatgagttgaagttgttttttcggggtttattttttacgttgtcgagaggaattcgagaggtaaggtaattatttcgttttgttattgattgggtatcgggagtttttttttttttttttttt

SEQ ID NO: 30354 - DNA, 847 bp, Artificial Sequence
  chemically treated genomic DNA (Homo sapiens) CpG-island No: 30354
aaaaaaaaaaaaaaaaaaaactcccgatacccaatcaataacaaaacgaaataattaccttacctctcgaattcctctcgacaacgtaaaaaataaaccccgaaaaaacaacttcaactcatccaccactctccgtacaaaacactccgattccaacaaatcaaccgatcccgaattcaaccgactaatacatcttacaactaaaacgccgtaacctcacaaatccctacatctctctttattcccttctacaacgactccaaaactccgacgatatttactcctacgctcgcgaaaccgacccccgaaacgcgcgacgacccgactaaaaacgacgacgacgacgacgctaaataacgacgacgacgcgtcctccccgcgaacaataccgaccccgaacaacgcttcgcaaacccccgcgcgaacgctaccgaccgccgcgttcgatcgccgaatattacccgattctaaatattacacttacacattccattcccgacacgacaacgctaacctcatccatccacgcaacccgcgctaccattaaccgaacgtcacgtccgaaaaaaacgatacttccgctacgcccattcataacccccgaccgcgaaccgaaacgccgacgcgacgttaaaaacgtaaaaaacgcaaaaaaccgaaactcccgaattacaaactaccgacgaactaccgaacaaataaaacgcgaaacgacccgatacgaaccccgcgacccctcgacgcgcccaaacccgaatctcgacctacgccgtaccgaaaaccaaaaacgcctacgaaaacgcgacgaccgaaaaaaaaaacaccgacaaaaaccccgtaccgcgcg

SEQ ID NO: 30355 - DNA, 847 bp, Artificial Sequence
  chemically treated genomic DNA (Homo sapiens) CpG-island No: 30355
gagaggggagaaaaaaaaagttttcgatatttaattaatggtaagacgaagtgattgttttgtttttcggatttttttcggtagcgtggaaaatgagtttcgggaaggtaattttaatttatttattatttttcgtgtagagtatttcggttttaataagttagtcgatttcgggtttagtcggttagtgtattttgtagttggggcgtcgtaattttataaatttttgtatttttttttatttttttttgtagcggttttaagatttcggcggtgtttatttttgcgttcgcggggtcggttttcgggacgcgcggcggttcggttggaggcggcggcggcggcggcgttgggtggcggcggcggcgcgtttttttcgcgggtagtgtcggtttcgagtagcgtttcgtaggttttcgcgcgaacgttgtcgatcgtcgcgttcggtcgtcgaatgttattcggttttgaatgttatatttatatattttattttcgatacgatagcgttgattttatttatttacgtagttcgcgttgttattggtcgagcgttacgttcggggggggcggtgttttcgttgcgtttatttataattttcggtcgcgggtcgaggcgtcggcgcggcgttgggggcgtagggggcgtagggagtcggggttttcgggttgtaagttgtcggcgggttgtcgggtaggtggagcgcgggacggttcggtgcgagtttcgcggtttttcggcgcgtttaggttcggatttcggtttgcgtcgtgtcggggattagaggcgtttgcggaaacgcggcggtcggggaaggaggtatcggtaggggtttcgtgtcgcgcg

SEQ ID NO: 30356 - DNA, 847 bp, Artificial Sequence
  chemically treated genomic DNA (Homo sapiens) CpG-island No: 30356
cgcgcgacacgaaacccctaccgatacctccttccccgaccgccgcgtttccgcaaacgcctctaatccccgacacgacgcaaaccgaaatccgaacctaaacgcgccgaaaaaccgcgaaactcgcaccgaaccgtcccgcgctccacctacccgacaacccgccgacaacttacaacccgaaaaccccgactccctacgccccctacgcccccaacgccgcgccgacgcctcgacccgcgaccgaaaattataaataaacgcaacgaaaacaccgccccccccgaacgtaacgctcgaccaataacaacgcgaactacgtaaataaataaaatcaacgctatcgtatcgaaaataaaatatataaatataacattcaaaaccgaataacattcgacgaccgaacgcgacgatcgacaacgttcgcgcgaaaacctacgaaacgctactcgaaaccgacactacccgcgaaaaaaacgcgccgccgccgccacccaacgccgccgccgccgccgcctccaaccgaaccgccgcgcgtcccgaaaaccgaccccgcgaacgcaaaaataaacaccgccgaaatcttaaaaccgctacaaaaaaaaataaaaaaaaatacaaaaatttataaaattacgacgccccaactacaaaatacactaaccgactaaacccgaaatcgactaacttattaaaaccgaaatactctacacgaaaaataataaataaattaaaattaccttcccgaaactcattttccacgctaccgaaaaaaatccgaaaaacaaaacaatcacttcgtcttaccattaattaaatatcgaaaactttttttttctcccctctc

SEQ ID NO: 30357 - DNA, 525 bp, Artificial Sequence
  chemically treated genomic DNA (Homo sapiens) CpG-island No: 30357
tagcgcggtcgggaggcgttttcgttaagggtcgtgggggcgcgcggcgcgggtcgtttatttgttttttcgggatttcggttcggagcgcggtcgttcgttttttgttcggcgttcggttcggttcggcgtttgcgtcgttgtagttcggagcgggggaggcgtagggagcgtttgtaaagagcgaggagtttaataatgagttagggatcggagtaggaagcgtcgttttatttagtcgtcggtgtgttcgttagttcggaggttttcggcggttttggttagattcgttgtgatttttagtttgtatatagatgtgtcgtaggtttgtgtttgtatttgtacgtttacgagttatatacgtagttagtattttgtgtggtcgtagatattatttatattaggattatatacgcgtatgtacgtgggcgcgtatatataggtatataaacggttgtttttatatagatttagttagattattttatgtggttgtagatattatttagacgaggtttcggatat

SEQ ID NO: 30358 - DNA, 525 bp, Artificial Sequence
  chemically treated genomic DNA (Homo sapiens) CpG-island No: 30358
atatccgaaacctcgtctaaataatatctacaaccacataaaataatctaactaaatctatataaaaacaaccgtttatatacctatatatacgcgcccacgtacatacgcgtatataatcctaatataaataatatctacgaccacacaaaatactaactacgtatataactcgtaaacgtacaaatacaaacacaaacctacgacacatctatatacaaactaaaaatcacaacgaatctaaccaaaaccgccgaaaacctccgaactaacgaacacaccgacgactaaataaaacgacgcttcctactccgatccctaactcattattaaactcctcgctctttacaaacgctccctacgcctcccccgctccgaactacaacgacgcaaacgccgaaccgaaccgaacgccgaacaaaaaacgaacgaccgcgctccgaaccgaaatcccgaaaaaacaaataaacgacccgcgccgcgcgcccccacgacccttaacgaaaacgcctcccgaccgcgcta

SEQ ID NO: 30359 - DNA, 525 bp, Artificial Sequence
  chemically treated genomic DNA (Homo sapiens) CpG-island No: 30359
gtgttcgggatttcgtttaggtaatgtttgtagttatataggatgatttgattgaatttgtgtgaggataatcgtttgtgtgtttgtgtgtgcgcgtttacgtgtatgcgcgtgtgtggttttagtgtaggtgatgtttgcggttatataggatgttgattgcgtgtgtgattcgtgggcgtgtagatgtaagtataggtttacgatatatttgtgtataggttgaagattataacgggtttggttagggtcgtcgagggttttcgagttggcgagtatatcgacggttggatggggcgacgttttttgtttcggtttttaatttattattaagtttttcgttttttgtagacgttttttgcgtttttttcgtttcgggttgtagcggcgtaggcgtcgggtcgagtcgagcgtcgagtagggagcgggcggtcgcgtttcgggtcggggtttcgggggagtaggtgagcgattcgcgtcgcgcgtttttacggtttttggcgaaggcgtttttcggtcgcgttg

SEQ ID NO: 30360 - DNA, 525 bp, Artificial Sequence
  chemically treated genomic DNA (Homo sapiens) CpG-island No: 30360
caacgcgaccgaaaaacgccttcgccaaaaaccgtaaaaacgcgcgacgcgaatcgctcacctactcccccgaaaccccgacccgaaacgcgaccgcccgctccctactcgacgctcgactcgacccgacgcctacgccgctacaacccgaaacgaaaaaaacgcaaaaaacgtctacaaaaaacgaaaaacttaataataaattaaaaaccgaaacaaaaaacgtcgccccatccaaccgtcgatatactcgccaactcgaaaaccctcgacgaccctaaccaaacccgttataatcttcaacctatacacaaatatatcgtaaacctatacttacatctacacgcccacgaatcacacacgcaatcaacatcctatataaccgcaaacatcacctacactaaaaccacacacgcgcatacacgtaaacgcgcacacacaaacacacaaacgattatcctcacacaaattcaatcaaatcatcctatataactacaaacattacctaaacgaaatcccgaacac

SEQ ID NO: 30361 - DNA, 577 bp, Artificial Sequence
  chemically treated genomic DNA (Homo sapiens) CpG-island No: 30361
  unsure (38)
agttttggtgttacgcgggggttcgagtcgcgggggancggaggcgtttagagaggagcgtttcgggcggtcgtagtttcgaataagatgtagcgggtcggaggcggtagcgtttttgggggtaacggcgggggcggcggcgggggttcggtattgttttttttatcgattttttaatcgggtcgtcgtcgtcgcgtttcggttatttgttgtatatcggttattttatgtttatgttttatcggtcgttcgtgttgtcgtaggcgttggtttttgcgtcgttgttcgttggtttttcgtttttcgtttcgttagtttttttcgtcggtcgttttattaatattttttgcgcggggttgggttaggttgtgtttcgatggtggcgttgattatcgcgttgtttagtttcgcgagcgttcgacgttttttacgggttttaggagttcgtcgtcgtcgttgtcgtcgtcgtcgttattgtcgttcgaaataatttcgagttaggcgtcgacgttagagggtgggttggaagttgatgagttgttgtcggttcgggagaaagtggtagagtttttattat

SEQ ID NO: 30362 - DNA, 577 bp, Artificial Sequence
  chemically treated genomic DNA (Homo sapiens) CpG-island No: 30362
  unsure (540)
ataataaaaactctaccactttctcccgaaccgacaacaactcatcaacttccaacccaccctctaacgtcgacgcctaactcgaaattatttcgaacgacaataacgacgacgacgacaacgacgacgacgaactcctaaaacccgtaaaaaacgtcgaacgctcgcgaaactaaacaacgcgataatcaacgccaccatcgaaacacaacctaacccaaccccgcgcaaaaaatattaataaaacgaccgacgaaaaaaactaacgaaacgaaaaacgaaaaaccaacgaacaacgacgcaaaaaccaacgcctacgacaacacgaacgaccgataaaacataaacataaaataaccgatatacaacaaataaccgaaacgcgacgacgacgacccgattaaaaaatcgataaaaaaaacaataccgaacccccgccgccgcccccgccgttacccccaaaaacgctaccgcctccgacccgctacatcttattcgaaactacgaccgcccgaaacgctcctctctaaacgcctccgntcccccgcgactcgaacccccgcgtaacaccaaaact

SEQ ID NO: 30363 - DNA, 577 bp, Artificial Sequence
  chemically treated genomic DNA (Homo sapiens) CpG-island No: 30363
  unsure (540)
gtggtgggggttttgttattttttttcgggtcggtagtagtttattagtttttagtttattttttggcgtcggcgtttggttcggggttgtttcgggcggtagtggcggcggcggcggtagcggcggcggcgagtttttggggttcgtagaaagcgtcgggcgttcgcgaagttgggtagcgcggtggttagcgttattatcgaggtatagtttgatttagtttcgcgtagaaggtgttggtaaggcggtcggcgaaagaggttagcggggcgaggggcgggaggttagcgggtagcggcgtaggggttagcgtttgcggtagtacgagcggtcggtagggtatgaatatggggtagtcggtgtatagtaagtggtcggagcgcggcggcggcggttcgattagggagtcgatggagaaggtagtgtcgggttttcgtcgtcgttttcgtcgttgtttttaggggcgttatcgttttcggttcgttgtattttgttcggagttgcggtcgttcggggcgtttttttttgggcgttttcgntttttcgcggttcgggttttcgcgtgatattagggtt

SEQ ID NO: 30364 - DNA, 577 bp, Artificial Sequence
  chemically treated genomic DNA (Homo sapiens) CpG-island No: 30364
  unsure (38)
aaccctaatatcacgcgaaaacccgaaccgcgaaaaancgaaaacgcccaaaaaaaaacgccccgaacgaccgcaactccgaacaaaatacaacgaaccgaaaacgataacgcccctaaaaacaacgacgaaaacgacgacgaaaacccgacactaccttctccatcgactccctaatcgaaccgccgccgccgcgctccgaccacttactatacaccgactaccccatattcataccctaccgaccgctcgtactaccgcaaacgctaacccctacgccgctacccgctaacctcccgcccctcgccccgctaacctctttcgccgaccgccttaccaacaccttctacgcgaaactaaatcaaactatacctcgataataacgctaaccaccgcgctacccaacttcgcgaacgcccgacgctttctacgaaccccaaaaactcgccgccgccgctaccgccgccgccgccactaccgcccgaaacaaccccgaaccaaacgccgacgccaaaaaataaactaaaaactaataaactactaccgacccgaaaaaaaataacaaaacccccaccac

SEQ ID NO: 30365 - DNA, 943 bp, Artificial Sequence
  chemically treated genomic DNA (Homo sapiens) CpG-island No: 30365
  unsure (519)
ttgggggtagtttttggagaacggttttagagtttcggagacgttcgttattcgtagtttgttcgcggtgggtttgtcgtcggatttcggtatttttttttttttttttttcgaattatgatcgagatgagcgagaaggagaacgaatcggatgacgcggttatttatagttttttagggatcgttttcgttttttaggaaattaaggtaatttggggggcgtaaggtttgttcgcgttcgggttcggcgtttttttttcggcgggtttttttgtgggttcgggcgttttagggtcgcggtcgtaggttcgcgtgattattgaggtttcgcgtcgttttcgggggtaggagtgggttggcgacgaggggttataaggagttttcgattatatcggtatcgtacgttcgcgcgcgttatcgcgattttttggggaggcggttattggttttcgttggagagatgggcgtagcgaggtcggagggcgcgcgtggaacggtgcgggcggggtacgcgttcgnttgtgcgtgcgaggcgtattttttagcggtcgtcgggttttagtttcgggtttagttcgcgtttttattttcgttcgtgtttttgaatttgtttttataatttgcgtgtttgtgttttggtgtttttgtgtgcgttttttttcgtttttttcggcgttttcgggtgtttattttcgcgttttagggcgtttttttttgttttttcgtagttttgtatttttcgtttttagttttgttgggttcggggacgcgaggtcgcggtcgggggtgcgtagttgcggagttcgcgagggggtttgtagtagcgtcggtcgtcggttacgggcgaggacgggggtttgcggttgtggttttagattagaaagataggtagtttcgcgttttattacgggagcgggattagaggagggggagcgggtagaag

SEQ ID NO: 30366 - DNA, 943 bp, Artificial Sequence
  chemically treated genomic DNA (Homo sapiens) CpG-island No: 30366
  unsure (425)
cttctacccgctccccctcctctaatcccgctcccgtaataaaacgcgaaactacctatctttctaatctaaaaccacaaccgcaaacccccgtcctcgcccgtaaccgacgaccgacgctactacaaaccccctcgcgaactccgcaactacgcacccccgaccgcgacctcgcgtccccgaacccaacaaaactaaaaacgaaaaatacaaaactacgaaaaaacaaaaaaaaacgccctaaaacgcgaaaataaacacccgaaaacgccgaaaaaaacgaaaaaaaacgcacacaaaaacaccaaaacacaaacacgcaaattataaaaacaaattcaaaaacacgaacgaaaataaaaacgcgaactaaacccgaaactaaaacccgacgaccgctaaaaaatacgcctcgcacgcacaancgaacgcgtaccccgcccgcaccgttccacgcgcgccctccgacctcgctacgcccatctctccaacgaaaaccaataaccgcctccccaaaaaatcgcgataacgcgcgcgaacgtacgataccgatataatcgaaaactccttataacccctcgtcgccaacccactcctacccccgaaaacgacgcgaaacctcaataatcacgcgaacctacgaccgcgaccctaaaacgcccgaacccacaaaaaaacccgccgaaaaaaaaacgccgaacccgaacgcgaacaaaccttacgccccccaaattaccttaatttcctaaaaaacgaaaacgatccctaaaaaactataaataaccgcgtcatccgattcgttctccttctcgctcatctcgatcataattcgaaaaaaaaaaaaaaaaaaataccgaaatccgacgacaaacccaccgcgaacaaactacgaataacgaacgtctccgaaactctaaaaccgttctccaaaaactacccccaa

SEQ ID NO: 30367 - DNA, 943 bp, Artificial Sequence
  chemically treated genomic DNA (Homo sapiens) CpG-island No: 30367
  unsure (425)
tttttattcgtttttttttttttggtttcgttttcgtggtggggcgcggggttgtttgtttttttggtttggagttataatcgtaggttttcgttttcgttcgtgatcgacggtcggcgttgttgtaggttttttcgcggatttcgtagttgcgtattttcggtcgcggtttcgcgttttcgagtttaatagggttaggagcggggaatgtaggattgcggaggggtagggagagacgttttgagacgcggagataaatattcggagacgtcgggagagacggggagagacgtatatagagatattaagatatagatacgtaggttgtagagataaatttagagatacgagcgaggatagaggcgcggattgagttcgggattgggattcggcggtcgttggagggtgcgtttcgtacgtatagncgggcgcgtatttcgttcgtatcgttttacgcgcgtttttcggtttcgttgcgtttatttttttaacgaagattagtggtcgtttttttagaaggtcgcgatggcgcgcgcgggcgtgcggtgtcggtgtgatcgggggttttttgtggtttttcgtcgttaatttatttttattttcgggagcggcgcggagttttagtggttacgcgggtttgcgatcgcgattttaggacgttcgggtttataggaggattcgtcgggaagagggcgtcgggttcgggcgcggataggttttgcgttttttaagttattttggttttttggagggcggagacggtttttggggggttgtgggtggtcgcgttattcggttcgttttttttttcgtttatttcggttatggttcggggagaggggaggagagggtgtcgagattcgacggtaggtttatcgcgggtaggttgcgggtggcgggcgttttcgggattttgaagtcgttttttagaggttgtttttag

SEQ ID NO: 30368 - DNA, 943 bp, Artificial Sequence
  chemically treated genomic DNA (Homo sapiens) CpG-island No: 30368
  unsure (519)
ctaaaaacaacctctaaaaaacgacttcaaaatcccgaaaacgcccgccacccgcaacctacccgcgataaacctaccgtcgaatctcgacaccctctcctcccctctccccgaaccataaccgaaataaacgaaaaaaaaaacgaaccgaataacgcgaccacccacaaccccccaaaaaccgtctccgccctccaaaaaaccaaaataacttaaaaaacgcaaaacctatccgcgcccgaacccgacgccctcttcccgacgaatcctcctataaacccgaacgtcctaaaatcgcgatcgcaaacccgcgtaaccactaaaactccgcgccgctcccgaaaataaaaataaattaacgacgaaaaaccacaaaaaacccccgatcacaccgacaccgcacgcccgcgcgcgccatcgcgaccttctaaaaaaacgaccactaatcttcgttaaaaaaataaacgcaacgaaaccgaaaaacgcgcgtaaaacgatacgaacgaaatacgcgcccgnctatacgtacgaaacgcaccctccaacgaccgccgaatcccaatcccgaactcaatccgcgcctctatcctcgctcgtatctctaaatttatctctacaacctacgtatctatatcttaatatctctatatacgtctctccccgtctctcccgacgtctccgaatatttatctccgcgtctcaaaacgtctctccctacccctccgcaatcctacattccccgctcctaaccctattaaactcgaaaacgcgaaaccgcgaccgaaaatacgcaactacgaaatccgcgaaaaaacctacaacaacgccgaccgtcgatcacgaacgaaaacgaaaacctacgattataactccaaaccaaaaaaacaaacaaccccgcgccccaccacgaaaacgaaaccaaaaaaaaaaaaacgaataaaaa

SEQ ID NO: 30369 - DNA, 554 bp, Artificial Sequence
  chemically treated genomic DNA (Homo sapiens) CpG-island No: 30369
taacgggcggacgtatttggcgaggattttcggtagtcggattttgcgttagtgtagcgttcgtcggatttttttagtattcgtcgtcgttttttttttttagttagggttatttttacgtttcgttttaacgtggtagtcgtagtcgtagttacgttttgcgtttaatattttcgggagcgatattttttttcgtttattcgacgtatagttcgttacggtattttcgggatcggcggtagtttgggaggcggggtacgtttcgttggttggtggtttttgcggttatcggtttcggcgatcgtagaaatttttttttgaggggcggcgcgtagaatgtggatggggtagttaggattagtgggtaaaggattagtgtagagggtgttttcgtttggtcgaataatcgtcgtggttcgtaggaacgttacgtagtattagttttgtgaggcgtcggtagtttttggcgatattgttcgcgttaaattaggtggaaaatcgggttgtaagggttttattgtaatttgtgattgagtttttaaaattatttattt

SEQ ID NO: 30370 - DNA, 554 bp, Artificial Sequence
  chemically treated genomic DNA (Homo sapiens) CpG-island No: 30370
aaataaataattttaaaaactcaatcacaaattacaataaaacccttacaacccgattttccacctaatttaacgcgaacaatatcgccaaaaactaccgacgcctcacaaaactaatactacgtaacgttcctacgaaccacgacgattattcgaccaaacgaaaacaccctctacactaatcctttacccactaatcctaactaccccatccacattctacgcgccgcccctcaaaaaaaaatttctacgatcgccgaaaccgataaccgcaaaaaccaccaaccaacgaaacgtaccccgcctcccaaactaccgccgatcccgaaaataccgtaacgaactatacgtcgaataaacgaaaaaaaatatcgctcccgaaaatattaaacgcaaaacgtaactacgactacgactaccacgttaaaacgaaacgtaaaaataaccctaactaaaaaaaaaaaacgacgacgaatactaaaaaaatccgacgaacgctacactaacgcaaaatccgactaccgaaaatcctcgccaaatacgtccgcccgtta

SEQ ID NO: 30371 - DNA, 554 bp, Artificial Sequence
  chemically treated genomic DNA (Homo sapiens) CpG-island No: 30371
aagtgggtaattttaagaatttagttataaattataataaagtttttgtagttcgattttttatttggtttggcgcgggtagtgtcgttaggggttgtcgacgttttataggattagtgttacgtggcgtttttgcgggttacggcggttattcggttagacggggatattttttgtattagttttttatttattagttttggttattttatttatattttgcgcgtcgttttttagaaaagggtttttacgatcgtcggggtcgatgatcgtagaggttattaattagcggagcgtatttcgttttttaggttatcgtcggtttcggaagtgtcgtggcgggttgtgcgtcgggtgggcggggaaagatgtcgttttcggaagtgttgggcgtagggcgtggttgcggttgcggttgttacgttggaacggaacgtggaggtggttttggttggggaggaggggcggcggcgaatgttgggagagttcgacgagcgttgtattaacgtaggattcggttgtcgaaggttttcgttaggtgcgttcgttcgttg

SEQ ID NO: 30372 - DNA, 554 bp, Artificial Sequence
  chemically treated genomic DNA (Homo sapiens) CpG-island No: 30372
caacgaacgaacgcacctaacgaaaaccttcgacaaccgaatcctacgttaatacaacgctcgtcgaactctcccaacattcgccgccgcccctcctccccaaccaaaaccacctccacgttccgttccaacgtaacaaccgcaaccgcaaccacgccctacgcccaacacttccgaaaacgacatctttccccgcccacccgacgcacaacccgccacgacacttccgaaaccgacgataacctaaaaaacgaaatacgctccgctaattaataacctctacgatcatcgaccccgacgatcgtaaaaacccttttctaaaaaacgacgcgcaaaatataaataaaataaccaaaactaataaataaaaaactaatacaaaaaatatccccgtctaaccgaataaccgccgtaacccgcaaaaacgccacgtaacactaatcctataaaacgtcgacaacccctaacgacactacccgcgccaaaccaaataaaaaatcgaactacaaaaactttattataatttataactaaattcttaaaattacccactt

SEQ ID NO: 30373 - DNA, 626 bp, Artificial Sequence
  chemically treated genomic DNA (Homo sapiens) CpG-island No: 30373
cgggaagagagagaattttaatttttatagtgttttaatttcgtttttacgtttcgacgttgcgtacgttacgtcgcgttatatacgcggcgcgatttatagtgcggttcggtttcgttttacgttacgttacggttcgtcggcgtcgtagggagttcgaaggtttcgaggttgtttttatacgtattggtggaaggagaggtcgcgttttcggttgagtacggtgttacgggtgttgtagtttattgcggagtaatttcgggttatttttttgttacgtggggttttattttcggggttttcgcgatagtatgaattacgattattttagtttcgttcgttgattttgcggttacgatttttatttgttacgaaaggcgggttttagaggcgcgggatttttatatttttttttcgaaggttttgcgtcggtgtcgtagttaatgataggttacgttgtgttttagtagttaatcggaagggtttgagtttgaagacgtgtatttgatcgttttttttttcgcgttggaggcggaatagtgggttttgttgtaatcggtttattttttttttgtttttatttattttggtataatttggcgttatcgttttttttgtgaggttaa

SEQ ID NO: 30374 - DNA, 626 bp, Artificial Sequence
  chemically treated genomic DNA (Homo sapiens) CpG-island No: 30374
ttaacctcacaaaaaaaacgataacgccaaattataccaaaataaataaaaacaaaaaaaaaataaaccgattacaacaaaacccactattccgcctccaacgcgaaaaaaaaaacgatcaaatacacgtcttcaaactcaaacccttccgattaactactaaaacacaacgtaacctatcattaactacgacaccgacgcaaaaccttcgaaaaaaaaatataaaaatcccgcgcctctaaaacccgcctttcgtaacaaataaaaatcgtaaccgcaaaatcaacgaacgaaactaaaataatcgtaattcatactatcgcgaaaaccccgaaaataaaaccccacgtaacaaaaaaataacccgaaattactccgcaataaactacaacacccgtaacaccgtactcaaccgaaaacgcgacctctccttccaccaatacgtataaaaacaacctcgaaaccttcgaactccctacgacgccgacgaaccgtaacgtaacgtaaaacgaaaccgaaccgcactataaatcgcgccgcgtatataacgcgacgtaacgtacgcaacgtcgaaacgtaaaaacgaaattaaaacactataaaaattaaaattctctctcttcccg

SEQ ID NO: 30375 - DNA, 626 bp, Artificial Sequence
  chemically treated genomic DNA (Homo sapiens) CpG-island No: 30375
ttggttttataagaaggacgatggcgttagattgtgttagaatgggtgaaaatagaaggaaaataaatcggttgtagtaaaatttattatttcgtttttaacgcggagggaggagcggttaaatgtacgtttttaggtttaggttttttcgattggttgttgggatataacgtggtttgttattggttacggtatcggcgtagggttttcggagaggaagtgtggaagtttcgcgtttttaaagttcgtttttcgtgataaataaaggtcgtagtcgtagagttaacgggcggagttaaagtggtcgtgatttatgttgtcgcgggaatttcgaaggtggggttttacgtaataagaagatgattcgaagttgtttcgtagtgggttgtagtattcgtgatatcgtgtttagtcgggagcgcggtttttttttttattagtgcgtatgggagtagtttcgaagttttcgaattttttgcggcgtcggcgggtcgtggcgtggcgtggggcggggtcgggtcgtattgtgggtcgcgtcgcgtgtgtgacgcgacgtgacgtgcgtagcgtcggggcgtgggagcggaattggggtattgtgagaattgagatttttttttttttcg

SEQ ID NO: 30376 - DNA, 626 bp, Artificial Sequence
  chemically treated genomic DNA (Homo sapiens) CpG-island No: 30376
cgaaaaaaaaaaaaatctcaattctcacaataccccaattccgctcccacgccccgacgctacgcacgtcacgtcgcgtcacacacgcgacgcgacccacaatacgacccgaccccgccccacgccacgccacgacccgccgacgccgcaaaaaattcgaaaacttcgaaactactcccatacgcactaataaaaaaaaaaaccgcgctcccgactaaacacgatatcacgaatactacaacccactacgaaacaacttcgaatcatcttcttattacgtaaaaccccaccttcgaaattcccgcgacaacataaatcacgaccactttaactccgcccgttaactctacgactacgacctttatttatcacgaaaaacgaactttaaaaacgcgaaacttccacacttcctctccgaaaaccctacgccgataccgtaaccaataacaaaccacgttatatcccaacaaccaatcgaaaaaacctaaacctaaaaacgtacatttaaccgctcctccctccgcgttaaaaacgaaataataaattttactacaaccgatttattttccttctattttcacccattctaacacaatctaacgccatcgtccttcttataaaaccaa

SEQ ID NO: 30377 - DNA, 974 bp, Artificial Sequence
  chemically treated genomic DNA (Homo sapiens) CpG-island No: 30377
gttttttgcgcgtttaggggacgaggaggatgcgcgggcgcgatcgcgatagttttgtttgtttttttcgggagaaagcgttttaggtagttttttgagtttcggttttcgacgtagtaaaagagttcgggcgtttacgtcgttttcggggttttttattgttatcgggataaagttttgggaggagttttcgttttcgcgagtcggatagggcggaggttttttcgtcgcgcgcgttttatcgttttttagtttcggattcgtcgtttgcgtttttttttggcgcgttttacggtgtagcgggcggcggtttcgcgcgtttgcgggaggcgtttcgggatgttttcgtttggttttttttttcgtttttcgcgttgattttattcgtttttcgttttttgttcggagtcgtcgttacgcgggaagggagggagtcggtttcgagattgtattatttcgtatcggttgttgtagggttagagggagtaggtggagcgagagagcgagtcgcgagtcggagcgcgttagatttagggcgagattgtagtgacgcggttcgggagatatggcggacgggcgtttttgaataagtagaattcggagtttttcgttattcgcggtcgtcgtagttcgggttatgtcgtacggttgttgatcgtacgtaggggtcggtttcgaggatatatgcggcggtttttgtcgtttcgtttttgattttttgttttgttttttatgttgtatttttcgttagtttttcgggcggtgtagttgtcgttgttattagagtcggcggggtatcgcgttgtttatttattcggtcgtattttttttttcgtttttatttatttttttttattttttttttttttttttcgttagtttcgtatttattttttttatttcgtaatttttttttgtttttatttatcggggttatggtcgtagaagaggtattgtagacggtggattattat

SEQ ID NO: 30378 - DNA, 974 bp, Artificial Sequence
  chemically treated genomic DNA (Homo sapiens) CpG-island No: 30378
ataataatccaccgtctacaatacctcttctacgaccataaccccgataaataaaaacaaaaaaaaattacgaaataaaaaaaataaatacgaaactaacgaaaaaaaaaaaaaaaaaataaaaaaaaataaataaaaacgaaaaaaaaaatacgaccgaataaataaacaacgcgataccccgccgactctaataacaacgacaactacaccgcccgaaaaactaacgaaaaatacaacataaaaaacaaaacaaaaaatcaaaaacgaaacgacaaaaaccgccgcatatatcctcgaaaccgacccctacgtacgatcaacaaccgtacgacataacccgaactacgacgaccgcgaataacgaaaaactccgaattctacttattcaaaaacgcccgtccgccatatctcccgaaccgcgtcactacaatctcgccctaaatctaacgcgctccgactcgcgactcgctctctcgctccacctactccctctaaccctacaacaaccgatacgaaataatacaatctcgaaaccgactccctcccttcccgcgtaacgacgactccgaacaaaaaacgaaaaacgaataaaatcaacgcgaaaaacgaaaaaaaaaaccaaacgaaaacatcccgaaacgcctcccgcaaacgcgcgaaaccgccgcccgctacaccgtaaaacgcgccaaaaaaaaacgcaaacgacgaatccgaaactaaaaaacgataaaacgcgcgcgacgaaaaaacctccgccctatccgactcgcgaaaacgaaaactcctcccaaaactttatcccgataacaataaaaaaccccgaaaacgacgtaaacgcccgaactcttttactacgtcgaaaaccgaaactcaaaaaactacctaaaacgctttctcccgaaaaaaacaaacaaaactatcgcgatcgcgcccgcgcatcctcctcgtcccctaaacgcgcaaaaaac

SEQ ID NO: 30379 - DNA, 974 bp, Artificial Sequence
  chemically treated genomic DNA (Homo sapiens) CpG-island No: 30379
ataatggtttatcgtttgtaatattttttttgcggttatagtttcggtggatggaggtaggagggggttacggggtgggggagatggatgcgaagttggcggggaaagggagaaggaaatgggaagggatgggtggaaacggaaaagaaagtgcggtcggatgaatgagtagcgcgatgtttcgtcggttttggtggtagcggtagttatatcgttcgagaaattgacgagaaatgtaatatggagaatagggtagagggttaggggcgaggcggtaaaggtcgtcgtatgtgttttcggggtcggtttttgcgtgcggttagtagtcgtgcggtatggttcgggttgcggcggtcgcgggtagcgaggggtttcggattttgtttatttagagacgttcgttcgttatgtttttcgggtcgcgttattgtagtttcgttttgggtttggcgcgtttcggttcgcggttcgttttttcgttttatttgttttttttggttttgtagtagtcggtgcggaatgatgtagtttcggggtcggtttttttttttttcgcgtggcggcggtttcgagtagggggcggggagcggatggagttagcgcggggggcggagggaaggattagacggaaatatttcgaggcgtttttcgtaggcgcgcggggtcgtcgttcgttgtatcgtgaggcgcgttaggaggaggcgtaggcgacgggttcgggattgggaagcggtggggcgcgcgcggcgggggagttttcgttttgttcggttcgcgggggcgggagttttttttagggttttgtttcggtggtagtagaagatttcgagagcggcgtgggcgttcgggtttttttgttacgtcgagggtcgaagtttaggaaattgtttggaacgttttttttcgagaaaagtaaataaaattatcgcggtcgcgttcgcgtatttttttcgttttttgggcgcgtagaaggt

SEQ ID NO: 30380 - DNA, 974 bp, Artificial Sequence
  chemically treated genomic DNA (Homo sapiens) CpG-island No: 30380
accttctacgcgcccaaaaaacgaaaaaaatacgcgaacgcgaccgcgataattttatttacttttctcgaaaaaaaacgttccaaacaatttcctaaacttcgaccctcgacgtaacaaaaaaacccgaacgcccacgccgctctcgaaatcttctactaccaccgaaacaaaaccctaaaaaaaactcccgcccccgcgaaccgaacaaaacgaaaactcccccgccgcgcgcgccccaccgcttcccaatcccgaacccgtcgcctacgcctcctcctaacgcgcctcacgatacaacgaacgacgaccccgcgcgcctacgaaaaacgcctcgaaatatttccgtctaatccttccctccgccccccgcgctaactccatccgctccccgccccctactcgaaaccgccgccacgcgaaaaaaaaaaaaaccgaccccgaaactacatcattccgcaccgactactacaaaaccaaaaaaaacaaataaaacgaaaaaacgaaccgcgaaccgaaacgcgccaaacccaaaacgaaactacaataacgcgacccgaaaaacataacgaacgaacgtctctaaataaacaaaatccgaaacccctcgctacccgcgaccgccgcaacccgaaccataccgcacgactactaaccgcacgcaaaaaccgaccccgaaaacacatacgacgacctttaccgcctcgcccctaaccctctaccctattctccatattacatttctcgtcaatttctcgaacgatataactaccgctaccaccaaaaccgacgaaacatcgcgctactcattcatccgaccgcactttcttttccgtttccacccatcccttcccatttccttctccctttccccgccaacttcgcatccatctcccccaccccgtaaccccctcctacctccatccaccgaaactataaccgcaaaaaaaatattacaaacgataaaccattat

SEQ ID NO: 30381 - DNA, 789 bp, Artificial Sequence
  chemically treated genomic DNA (Homo sapiens) CpG-island No: 30381
gaagagaagtaaagcggcgcgtattttgtttagcgattcgtttcgttcgttcggtgaatttgcgtttgtagaacgcgttattgaaggttttttagcgttggttggttttttttttttcgtttcgttttttttttttagggattagtcgtagttttcgtcgtcgtcgattcgttaaggtttcgggtcgtagtatttagatcgtcgtggcgaacgatttttcgggggatgcggttaatttttaagttttttgggtcgtaattttcgagttttttagggcgtcggtttgaggaatcgttaatttttcggtttcgtgggtttttcggtagcgttgtggataagtgcgaatgagattttgtgttcgttggcgttcgcgtaggtggtagtggtgtttggtgcgcgcgtcggggaggtggtggtgggggggcgtcgcgtcgttatcgttgcggggtcgggtttcgcgttgtcgttgtcgtcgtttcgcgtcgttaaggtgtcgcgcgaggtggggggaggggaaatcgttcgtcgggagcgtgtaaatggggtcgcgcggcgttacgacgagaatttgttggggggggatataaacgcgtcggggcggaggagaggatagcggtgtcgttatttatattttttcgttcggattcgtggtcgaagtcgggtttcgggttcggtttcgcggtgtttttaacgtttcgaagaggtgttatttttttgtcggagatcggggcgcggggatgagagttggtgtatatgagtcgtgatcgggttcgcgattagttttggtag

SEQ ID NO: 30382 - DNA, 789 bp, Artificial Sequence
  chemically treated genomic DNA (Homo sapiens) CpG-island No: 30382
ctaccaaaactaatcgcgaacccgatcacgactcatatacaccaactctcatccccgcgccccgatctccgacaaaaaaataacacctcttcgaaacgttaaaaacaccgcgaaaccgaacccgaaacccgacttcgaccacgaatccgaacgaaaaaatataaataacgacaccgctatcctctcctccgccccgacgcgtttatatccccccccaacaaattctcgtcgtaacgccgcgcgaccccatttacacgctcccgacgaacgatttcccctccccccacctcgcgcgacaccttaacgacgcgaaacgacgacaacgacaacgcgaaacccgaccccgcaacgataacgacgcgacgcccccccaccaccacctccccgacgcgcgcaccaaacaccactaccacctacgcgaacgccaacgaacacaaaatctcattcgcacttatccacaacgctaccgaaaaacccacgaaaccgaaaaattaacgattcctcaaaccgacgccctaaaaaactcgaaaattacgacccaaaaaacttaaaaattaaccgcatcccccgaaaaatcgttcgccacgacgatctaaatactacgacccgaaaccttaacgaatcgacgacgacgaaaactacgactaatccctaaaaaaaaaaaacgaaacgaaaaaaaaaaaaccaaccaacgctaaaaaaccttcaataacgcgttctacaaacgcaaattcaccgaacgaacgaaacgaatcgctaaacaaaatacgcgccgctttacttctcttc

SEQ ID NO: 30383 - DNA, 789 bp, Artificial Sequence
  chemically treated genomic DNA (Homo sapiens) CpG-island No: 30383
ttgttaaagttgatcgcgagttcggttacggtttatatatattagtttttattttcgcgtttcgattttcgatagaaaggtggtattttttcggggcgttggagatatcgcgagatcgagttcgagattcggtttcgattacgaattcgggcgggggggtgtgggtaacggtatcgttgttttttttttcgtttcggcgcgtttgtatttttttttagtaggttttcgtcgtagcgtcgcgcggttttatttatacgttttcggcgagcggttttttttttttttatttcgcgcggtattttagcggcgcgaggcggcggtagcggtagcgcgagattcggtttcgtagcggtggcggcgcggcgtttttttattattattttttcggcgcgcgtattaaatattattgttatttgcgcgagcgttagcgggtatagggttttattcgtatttatttatagcgttgtcgggggatttacggggtcgagggattagcgattttttaggtcggcgttttgggaggttcggaagttgcggtttagggagtttggagattggtcgtatttttcggagagtcgttcgttacgacgatttagatgttgcggttcgggattttgacgaatcggcggcgacgaaagttgcgattagtttttgaggaaaaggggcggggcggaggggaggaggttagttagcgttggggaatttttagtggcgcgttttgtagacgtagatttatcgggcgggcggggcgaatcgttggataggatgcgcgtcgttttgttttttttt

SEQ ID NO: 30384 - DNA, 789 bp, Artificial Sequence
  chemically treated genomic DNA (Homo sapiens) CpG-island No: 30384
aaaaaaaaacaaaacgacgcgcatcctatccaacgattcgccccgcccgcccgataaatctacgtctacaaaacgcgccactaaaaattccccaacgctaactaacctcctcccctccgccccgccccttttcctcaaaaactaatcgcaactttcgtcgccgccgattcgtcaaaatcccgaaccgcaacatctaaatcgtcgtaacgaacgactctccgaaaaatacgaccaatctccaaactccctaaaccgcaacttccgaacctcccaaaacgccgacctaaaaaatcgctaatccctcgaccccgtaaatcccccgacaacgctataaataaatacgaataaaaccctatacccgctaacgctcgcgcaaataacaataatatttaatacgcgcgccgaaaaaataataataaaaaaacgccgcgccgccaccgctacgaaaccgaatctcgcgctaccgctaccgccgcctcgcgccgctaaaataccgcgcgaaataaaaaaaaaaaaaaccgctcgccgaaaacgtataaataaaaccgcgcgacgctacgacgaaaacctactaaaaaaaaatacaaacgcgccgaaacgaaaaaaaaaacaacgataccgttacccacacccccccgcccgaattcgtaatcgaaaccgaatctcgaactcgatctcgcgatatctccaacgccccgaaaaaataccacctttctatcgaaaatcgaaacgcgaaaataaaaactaatatatataaaccgtaaccgaactcgcgatcaactttaacaa

SEQ ID NO: 30385 - DNA, 680 bp, Artificial Sequence
  chemically treated genomic DNA (Homo sapiens) CpG-island No: 30385
tcggttttcgttttttattattttgggtatttcgttcgtttgtggtttcgaaattttttttattagtggcgtacggtttgacgggagttgtagtttttcggttttcgtttattattttaagtcgagataatggaaggggatggggcggggttatcggtaaagatggcggttgtagggtcggggcgattgcgatatgggatgtgtagtttaggcgtttggttttttttttgcggaaatgagggagaggattacgaaaaagatggcgatttcgtttttcgatttttgcgtcggtgtttgttgggaaatgtagttttttgtcgagtttaatagagaaaggacgtcgttgttgaaatgtgaatttcggcggatacgttaaattgcgaggcgacggaaacggaaagatttttttttttttttttcgttatcggtttttgaatagtttggcgggaaatgtagttttaagtttttattcgcgagtggaggggaaggatttatcgttatagtgggattagtgcgggtgggggagaaaacgtcgtgcgattcgggaataaagaatgtttgtttttatggagcgaggatttcgcgttttaggggagggtttttaaaggaggtagtaggaattagttttgtcgataggggggcgtgttttcgtcgagagttatttatattttggtttttag

SEQ ID NO: 30386 - DNA, 680 bp, Artificial Sequence
  chemically treated genomic DNA (Homo sapiens) CpG-island No: 30386
ctaaaaaccaaaatataaataactctcgacgaaaacacgcccccctatcgacaaaactaattcctactacctcctttaaaaaccctcccctaaaacgcgaaatcctcgctccataaaaacaaacattctttattcccgaatcgcacgacgttttctcccccacccgcactaatcccactataacgataaatccttcccctccactcgcgaataaaaacttaaaactacatttcccgccaaactattcaaaaaccgataacgaaaaaaaaaaaaaaaaatctttccgtttccgtcgcctcgcaatttaacgtatccgccgaaattcacatttcaacaacgacgtcctttctctattaaactcgacaaaaaactacatttcccaacaaacaccgacgcaaaaatcgaaaaacgaaatcgccatctttttcgtaatcctctccctcatttccgcaaaaaaaaaaccaaacgcctaaactacacatcccatatcgcaatcgccccgaccctacaaccgccatctttaccgataaccccgccccatccccttccattatctcgacttaaaataataaacgaaaaccgaaaaactacaactcccgtcaaaccgtacgccactaataaaaaaaatttcgaaaccacaaacgaacgaaatacccaaaataataaaaaacgaaaaccga

SEQ ID NO: 30387 - DNA, 680 bp, Artificial Sequence
  chemically treated genomic DNA (Homo sapiens) CpG-island No: 30387
ttagggattagagtgtgaatgattttcgacgagaatacgtttttttgtcgataagattgatttttgttgttttttttaagggtttttttttgaaacgcgaagttttcgttttatgagagtagatattttttattttcggatcgtacgacgtttttttttttattcgtattgattttattgtgacgataaattttttttttttattcgcgagtgaaagtttgggattatatttttcgttaggttgtttagaagtcggtggcggagagaggagaaaagagttttttcgttttcgtcgtttcgtaatttggcgtgttcgtcgggatttatattttaatagcgacgttttttttttgttggattcggtaaggaattatattttttagtaggtatcggcgtagaggtcgaggggcgaggtcgttatttttttcgtagtttttttttttattttcgtagggaagaggttagacgtttggattatatattttatgtcgtagtcgtttcggttttgtagtcgttatttttgtcggtggtttcgttttatttttttttattgtttcgatttgagatgatagacgggagtcgggagattgtaattttcgttaggtcgtgcgttattggtgggggggatttcgagattataggcgggcgaggtgtttaaggtggtggaaagcggagatcgg

SEQ ID NO: 30388 - DNA, 680 bp, Artificial Sequence
  chemically treated genomic DNA (Homo sapiens) CpG-island No: 30388
ccgatctccgctttccaccaccttaaacacctcgcccgcctataatctcgaaatcccccccaccaataacgcacgacctaacgaaaattacaatctcccgactcccgtctatcatctcaaatcgaaacaataaaaaaaaataaaacgaaaccaccgacaaaaataacgactacaaaaccgaaacgactacgacataaaatatataatccaaacgtctaacctcttccctacgaaaataaaaaaaaaaactacgaaaaaaataacgacctcgcccctcgacctctacgccgatacctactaaaaaatataattccttaccgaatccaacaaaaaaaaaacgtcgctattaaaatataaatcccgacgaacacgccaaattacgaaacgacgaaaacgaaaaaactcttttctcctctctccgccaccgacttctaaacaacctaacgaaaaatataatcccaaactttcactcgcgaataaaaaaaaaaaatttatcgtcacaataaaatcaatacgaataaaaaaaaaaacgtcgtacgatccgaaaataaaaaatatctactctcataaaacgaaaacttcgcgtttcaaaaaaaaacccttaaaaaaaacaacaaaaatcaatcttatcgacaaaaaaacgtattctcgtcgaaaatcattcacactctaatccctaa

SEQ ID NO: 30389 - DNA, 690 bp, Artificial Sequence
  chemically treated genomic DNA (Homo sapiens) CpG-island No: 30389
gcggatatttatcgcggtttacgtagcgtaggatatagattttgtcgcgtatttcgcgtttacgtggtttgaatatacggtttcggttttgtttcgcgcgttcggtcgtaattttcgtttttcgtttttaattcgcgcgttcgtttttaattttcgttttcggcggcgggtagggggcgttgagcgtttaggcgttttaagggggcgggttcgggtcggggcggggtcggtcgggtttttaggtttgggttttggtcgttcgcgttatcgggtcgtttcggggataggtcggggcggggcgcggcggtaggaaacggggcggggatttgcggaggcgttggggacgagagagggcgcgttaattttaggggggacgtaggtcgagagcgcggcgttcggtttggcgcggagtttgagtcgtcggacgggaggcggttttcgcgcggttcggtttcggttttagtttcgttagtatggtcggtcggattgtacgggtcgagattcggagtcgggttaaggatgatattaagaaggtgatggcgattatcgagaaggttcggagatggtgagcgttgttcgggggttagggacgggatatagcgggattattagtattaaaggcgtttacgttgttttcgttagttttgggtttcgggtgttcggtgtatttttatttattagttttgtttt

SEQ ID NO: 30390 - DNA, 690 bp, Artificial Sequence
  chemically treated genomic DNA (Homo sapiens) CpG-island No: 30390
aaaacaaaactaataaataaaaatacaccgaacacccgaaacccaaaactaacgaaaacaacgtaaacgcctttaatactaataatcccgctatatcccgtccctaacccccgaacaacgctcaccatctccgaaccttctcgataatcgccatcaccttcttaatatcatccttaacccgactccgaatctcgacccgtacaatccgaccgaccatactaacgaaactaaaaccgaaaccgaaccgcgcgaaaaccgcctcccgtccgacgactcaaactccgcgccaaaccgaacgccgcgctctcgacctacgtcccccctaaaattaacgcgccctctctcgtccccaacgcctccgcaaatccccgccccgtttcctaccgccgcgccccgccccgacctatccccgaaacgacccgataacgcgaacgaccaaaacccaaacctaaaaacccgaccgaccccgccccgacccgaacccgcccccttaaaacgcctaaacgctcaacgccccctacccgccgccgaaaacgaaaattaaaaacgaacgcgcgaattaaaaacgaaaaacgaaaattacgaccgaacgcgcgaaacaaaaccgaaaccgtatattcaaaccacgtaaacgcgaaatacgcgacaaaatctatatcctacgctacgtaaaccgcgataaatatccgc

SEQ ID NO: 30391 - DNA, 690 bp, Artificial Sequence
  chemically treated genomic DNA (Homo sapiens) CpG-island No: 30391
agggtaaagttagtgggtggagatatatcgaatattcggggtttagagttggcgagggtagcgtagacgtttttggtgttggtggtttcgttgtgtttcgtttttggttttcgagtagcgtttattattttcggattttttcgatggtcgttattatttttttgatgttatttttggttcggtttcgggtttcggttcgtatagttcggtcggttatgttggcggggttggggtcggggtcgagtcgcgcggaggtcgtttttcgttcggcggtttaggtttcgcgttaggtcgggcgtcgcgttttcggtttgcgttttttttggagttggcgcgttttttttcgtttttaacgttttcgtaagttttcgtttcgttttttgtcgtcgcgtttcgtttcggtttgttttcggagcggttcggtggcgcgggcggttagagtttaggtttggaagttcggtcggtttcgtttcgattcgggttcgtttttttggagcgtttggacgtttagcgttttttgttcgtcgtcgagagcgggagttggggacggacgcgcgagttggggacggagagcgggagttgcgatcggacgcgcgaggtagggtcgaggtcgtgtgtttagattacgtgggcgcggggtgcgcgatagggtttgtgttttgcgttgcgtgagtcgcggtgggtgttcgt

SEQ ID NO: 30392 - DNA, 690 bp, Artificial Sequence
  chemically treated genomic DNA (Homo sapiens) CpG-island No: 30392
acgaacacccaccgcgactcacgcaacgcaaaacacaaaccctatcgcgcaccccgcgcccacgtaatctaaacacacgacctcgaccctacctcgcgcgtccgatcgcaactcccgctctccgtccccaactcgcgcgtccgtccccaactcccgctctcgacgacgaacaaaaaacgctaaacgtccaaacgctccaaaaaaacgaacccgaatcgaaacgaaaccgaccgaacttccaaacctaaactctaaccgcccgcgccaccgaaccgctccgaaaacaaaccgaaacgaaacgcgacgacaaaaaacgaaacgaaaacttacgaaaacgttaaaaacgaaaaaaaacgcgccaactccaaaaaaaacgcaaaccgaaaacgcgacgcccgacctaacgcgaaacctaaaccgccgaacgaaaaacgacctccgcgcgactcgaccccgaccccaaccccgccaacataaccgaccgaactatacgaaccgaaacccgaaaccgaaccaaaaataacatcaaaaaaataataacgaccatcgaaaaaatccgaaaataataaacgctactcgaaaaccaaaaacgaaacacaacgaaaccaccaacaccaaaaacgtctacgctaccctcgccaactctaaaccccgaatattcgatatatctccacccactaactttaccct

SEQ ID NO: 30393 - DNA, 561 bp, Artificial Sequence
  chemically treated genomic DNA (Homo sapiens) CpG-island No: 30393
gagagacggaatttagcgggaggaggcggggcgagttgtttcgcggcgtttaggtcgagttttcgggtagtagttggtttaggtcgttttcggtgcggtttagttattcgcggtagaggtcgtaaacgcggagttttagtattttggcggggaagatttcggtggcggaggcggttgaggcggtggcggcggggggttcggtcggggttcgcggttggcgcgtttagcgcgttagtaaggttttacggcggcgtttagggttcgggttttggcgtcgcgttttttaggcggcgtaggtcggcgcgcgcgggtttagttcggtttggcggcgatatattgcgtttagtagcgggggtagcgcggttatcgtcgcgtttagtcgtagtcgttcgtgtattggtagtttcgcgtggttcggagtcggggcgtttaggtcggttatcggtagtcgcggcggcgagaagttgggtagttcgaaggggtttttttggagttgtatttgcggagatacggtcggcgggttagcggggtttcggagtacgggtagggggttgttaattg

SEQ ID NO: 30394 - DNA, 561 bp, Artificial Sequence
  chemically treated genomic DNA (Homo sapiens) CpG-island No: 30394
caattaacaaccccctacccgtactccgaaaccccgctaacccgccgaccgtatctccgcaaatacaactccaaaaaaaccccttcgaactacccaacttctcgccgccgcgactaccgataaccgacctaaacgccccgactccgaaccacgcgaaactaccaatacacgaacgactacgactaaacgcgacgataaccgcgctacccccgctactaaacgcaatatatcgccgccaaaccgaactaaacccgcgcgcgccgacctacgccgcctaaaaaacgcgacgccaaaacccgaaccctaaacgccgccgtaaaaccttactaacgcgctaaacgcgccaaccgcgaaccccgaccgaaccccccgccgccaccgcctcaaccgcctccgccaccgaaatcttccccgccaaaatactaaaactccgcgtttacgacctctaccgcgaataactaaaccgcaccgaaaacgacctaaaccaactactacccgaaaactcgacctaaacgccgcgaaacaactcgccccgcctcctcccgctaaattccgtctctc

SEQ ID NO: 30395 - DNA, 561 bp, Artificial Sequence
  chemically treated genomic DNA (Homo sapiens) CpG-island No: 30395
tagttaatagttttttgttcgtgtttcggggtttcgttgattcgtcggtcgtgttttcgtaggtgtagttttagggagattttttcgggttgtttagtttttcgtcgtcgcggttgtcggtggtcggtttgagcgtttcggtttcgagttacgcggggttgttagtgtacgagcggttgcggttggacgcggcggtggtcgcgttgttttcgttgttggacgtagtgtgtcgtcgttaggtcgagttgaattcgcgcgcgtcggtttgcgtcgtttggaggacgcggcgttaaggttcgggttttgggcgtcgtcgtggagttttgttggcgcgttgggcgcgttaatcgcgggtttcggtcgagtttttcgtcgttatcgttttagtcgttttcgttatcggggtttttttcgttaaggtgttggggtttcgcgtttgcggtttttatcgcgagtggttgagtcgtatcgagggcgatttgggttagttgttgttcgggggttcggtttgagcgtcgcggggtagttcgtttcgttttttttcgttgggtttcgtttttt

SEQ ID NO: 30396 - DNA, 561 bp, Artificial Sequence
  chemically treated genomic DNA (Homo sapiens) CpG-island No: 30396
aaaaaacgaaacccaacgaaaaaaaacgaaacgaactaccccgcgacgctcaaaccgaacccccgaacaacaactaacccaaatcgccctcgatacgactcaaccactcgcgataaaaaccgcaaacgcgaaaccccaacaccttaacgaaaaaaaccccgataacgaaaacgactaaaacgataacgacgaaaaactcgaccgaaacccgcgattaacgcgcccaacgcgccaacaaaactccacgacgacgcccaaaacccgaaccttaacgccgcgtcctccaaacgacgcaaaccgacgcgcgcgaattcaactcgacctaacgacgacacactacgtccaacaacgaaaacaacgcgaccaccgccgcgtccaaccgcaaccgctcgtacactaacaaccccgcgtaactcgaaaccgaaacgctcaaaccgaccaccgacaaccgcgacgacgaaaaactaaacaacccgaaaaaatctccctaaaactacacctacgaaaacacgaccgacgaatcaacgaaaccccgaaacacgaacaaaaaactattaacta

SEQ ID NO: 30397 - DNA, 747 bp, Artificial Sequence
  chemically treated genomic DNA (Homo sapiens) CpG-island No: 30397
gtttcgcggagataaaggtcggcggcgtagttttgggaagggttaaggttatagacgtagttttgcgcgtgttagagcggtcggtggcggattttcggttggggcgcgggcgcgcgtcgcgtgttttcgattcgtcgaggttgagatttcgggtaattttagtagtgcgtagggttgtattgttttcgtttgcggtttgtagtaagcgggtaggggatatgtcgcgtggtttcgtttggtttgcggcgggaaattcgtatttaggttagattttttcgtagggttcgtattcgcgatttgggttgtgggtagtatcgtggtttttcggggcgttataggggcgtgaggatttcgggcgagttgggggcgggcggtttttttagtttttttgcgttatggaatttattgtatgttcgttatgtagttaggaaagttgaggtcgggaaggagggcgttacgttgtaatttcggagattagttgtttttcgcgttgtcgtagtcggtagaggcgtggtcggagttattttcggtttttagtgcggttgtaagagcgggcgttcgagggcgttttgtttcgggtttttattcgcgagttgatcgtgttaggcgcgttatatacggcgttttttattttttttttatttcgcgaggtagaagttgtcgttttcgtgttatagatagaaaaatagtttggggtgatttattcggagttaagatttaggtttgtggtttagtcgggaaggatag

SEQ ID NO: 30398 - DNA, 747 bp, Artificial Sequence
  chemically treated genomic DNA (Homo sapiens) CpG-island No: 30398
ctatccttcccgactaaaccacaaacctaaatcttaactccgaataaatcaccccaaactatttttctatctataacacgaaaacgacaacttctacctcgcgaaataaaaaaaaaataaaaaacgccgtatataacgcgcctaacacgatcaactcgcgaataaaaacccgaaacaaaacgccctcgaacgcccgctcttacaaccgcactaaaaaccgaaaataactccgaccacgcctctaccgactacgacaacgcgaaaaacaactaatctccgaaattacaacgtaacgccctccttcccgacctcaactttcctaactacataacgaacatacaataaattccataacgcaaaaaaactaaaaaaaccgcccgcccccaactcgcccgaaatcctcacgcccctataacgccccgaaaaaccacgatactacccacaacccaaatcgcgaatacgaaccctacgaaaaaatctaacctaaatacgaatttcccgccgcaaaccaaacgaaaccacgcgacatatcccctacccgcttactacaaaccgcaaacgaaaacaatacaaccctacgcactactaaaattacccgaaatctcaacctcgacgaatcgaaaacacgcgacgcgcgcccgcgccccaaccgaaaatccgccaccgaccgctctaacacgcgcaaaactacgtctataaccttaacccttcccaaaactacgccgccgacctttatctccgcgaaac

SEQ ID NO: 30399 - DNA, 747 bp, Artificial Sequence
  chemically treated genomic DNA (Homo sapiens) CpG-island No: 30399
ttatttttttcgattgagttatagatttgagttttgatttcggataaattattttagattgtttttttgtttgtgatacgggaacggtagtttttgtttcgcgaggtggagagagaatgagaagcgtcgtgtgtggcgcgtttgatacggttagttcgcgggtggaggttcggagtagaacgttttcgggcgttcgtttttgtagtcgtattggagatcgggaatggtttcggttacgtttttgtcgattgcggtaacgcgagggatagttggttttcggggttgtagcgtaacgttttttttttcggttttagtttttttgattgtataacgggtatatagtgggttttatggcgtaagggagttgaagaagtcgttcgtttttagttcgttcgggatttttacgtttttataacgtttcgaggggttacgatgttgtttatagtttagatcgcgagtgcggattttgcgggagggtttggtttagatgcgagtttttcgtcgtagattaggcgaggttacgcgatatattttttattcgtttattgtaggtcgtagacggagatagtgtagttttgcgtattgttgaggttgttcgaggttttagtttcggcgggtcgggaatacgcggcgcgcgttcgcgttttaatcggaagttcgttatcggtcgttttagtacgcgtagggttgcgtttgtggttttaattttttttaaggttgcgtcgtcggtttttgttttcgcggagt

SEQ ID NO: 30400 - DNA, 747 bp, Artificial Sequence
  chemically treated genomic DNA (Homo sapiens) CpG-island No: 30400
actccgcgaaaacaaaaaccgacgacgcaaccttaaaaaaaattaaaaccacaaacgcaaccctacgcgtactaaaacgaccgataacgaacttccgattaaaacgcgaacgcgcgccgcgtattcccgacccgccgaaactaaaacctcgaacaacctcaacaatacgcaaaactacactatctccgtctacgacctacaataaacgaataaaaaatatatcgcgtaacctcgcctaatctacgacgaaaaactcgcatctaaaccaaaccctcccgcaaaatccgcactcgcgatctaaactataaacaacatcgtaacccctcgaaacgttataaaaacgtaaaaatcccgaacgaactaaaaacgaacgacttcttcaactcccttacgccataaaacccactatatacccgttatacaatcaaaaaaactaaaaccgaaaaaaaaaacgttacgctacaaccccgaaaaccaactatccctcgcgttaccgcaatcgacaaaaacgtaaccgaaaccattcccgatctccaatacgactacaaaaacgaacgcccgaaaacgttctactccgaacctccacccgcgaactaaccgtatcaaacgcgccacacacgacgcttctcattctctctccacctcgcgaaacaaaaactaccgttcccgtatcacaaacaaaaaaacaatctaaaataatttatccgaaatcaaaactcaaatctataactcaatcgaaaaaaataa

SEQ ID NO: 30401 - DNA, 515 bp, Artificial Sequence
  chemically treated genomic DNA (Homo sapiens) CpG-island No: 30401
cgggcggtttgggggcggcgcggaatagttgtatttcgcgtttagttttagttcgtttgttttttatggcgtcgattgttcggttcggttttttcgcggcgttttcgatagttcgttgtttttcggttttttcggttttttttgtgcgtcgggcgtcgttttcgcgatattcgacgtttcggggtagcgtcgcgggtttatttgggggatagcggggagcggtcgtagtttcggtgttcgcggcgagggcgtagggcgagttagcgagcgattttagtagtttcgagtttcgtttcgtttagagttagacgggaggagagcgtttcgttcgtcgttcgcgtattttttcgttttcgtcgttttaattcgtgattttattttcggttcgggttttcgtcgcgttttgtcgggggtcgttttttaggagtataggtgggacgtaggaggtcgttcggaggaagtcggcgttgtgttcgttttttgttatttttattttattattttttttatttttt

SEQ ID NO: 30402 - DNA, 515 bp, Artificial Sequence
  chemically treated genomic DNA (Homo sapiens) CpG-island No: 30402
aaaaaataaaaaaaataataaaataaaaataacaaaaaacgaacacaacgccgacttcctccgaacgacctcctacgtcccacctatactcctaaaaaacgacccccgacaaaacgcgacgaaaacccgaaccgaaaataaaatcacgaattaaaacgacgaaaacgaaaaaatacgcgaacgacgaacgaaacgctctcctcccgtctaactctaaacgaaacgaaactcgaaactactaaaatcgctcgctaactcgccctacgccctcgccgcgaacaccgaaactacgaccgctccccgctatcccccaaataaacccgcgacgctaccccgaaacgtcgaatatcgcgaaaacgacgcccgacgcacaaaaaaaaccgaaaaaaccgaaaaacaacgaactatcgaaaacgccgcgaaaaaaccgaaccgaacaatcgacgccataaaaaacaaacgaactaaaactaaacgcgaaatacaactattccgcgccgcccccaaaccgcccg

SEQ ID NO: 30403 - DNA, 515 bp, Artificial Sequence
  chemically treated genomic DNA (Homo sapiens) CpG-island No: 30403
agaaaatgaagggagtgatagggtgggggtggtagggaacgggtataacgtcggtttttttcggacggttttttgcgttttatttgtgtttttgaaaagcggttttcgatagggcgcggcgggaattcgagtcgggagtagggttacgagttaaagcggcgggggcgggaggatgcgcgggcggcggacggggcgtttttttttcgtttgattttgggcggagcggggttcgaggttgttggagtcgttcgttgattcgttttgcgttttcgtcgcggatatcggagttgcggtcgtttttcgttgttttttaggtgagttcgcggcgttgtttcggggcgtcgggtgtcgcgggaacggcgttcggcgtatagggagggtcggggaggtcgggaggtagcgagttgtcggggacgtcgcgggaaggtcgggtcgggtagtcggcgttatggagggtaggcgggttggagttgggcgcgagatgtagttgtttcgcgtcgtttttaagtcgttcg

SEQ ID NO: 30404 - DNA, 515 bp, Artificial Sequence
  chemically treated genomic DNA (Homo sapiens) CpG-island No: 30404
cgaacgacttaaaaacgacgcgaaacaactacatctcgcgcccaactccaacccgcctaccctccataacgccgactacccgacccgaccttcccgcgacgtccccgacaactcgctacctcccgacctccccgaccctccctatacgccgaacgccgttcccgcgacacccgacgccccgaaacaacgccgcgaactcacctaaaaaacaacgaaaaacgaccgcaactccgatatccgcgacgaaaacgcaaaacgaatcaacgaacgactccaacaacctcgaaccccgctccgcccaaaatcaaacgaaaaaaaaacgccccgtccgccgcccgcgcatcctcccgcccccgccgctttaactcgtaaccctactcccgactcgaattcccgccgcgccctatcgaaaaccgcttttcaaaaacacaaataaaacgcaaaaaaccgtccgaaaaaaaccgacgttatacccgttccctaccacccccaccctatcactcccttcattttct

SEQ ID NO: 30405 - DNA, 527 bp, Artificial Sequence
  chemically treated genomic DNA (Homo sapiens) CpG-island No: 30405
cgggggacgtcgtttcgttttcgtttttttaggttcgggcgtagattgcgagtcgtcgggtaggttttcgtagtagtcggcgtcgtagtcgttttcgtttttgtcgttttttttttttttttcgttgttttcggagtttttcggggagtgcggaggggcgtgagcgagtttatggttttggggggcggttttttgttcgtcgcgcgtcgaggttcgagcgtttttaattgtttcgggtgtttttcggggattcgcgtttcgggattttacgttttaggtgacggcgagggttgttgtaggtttcgttcgtgtttttcggcgtgtttacgtgggagggtgtttgcggtattttaggcgtttttcgcggttgtcgaagaggtcgttatcgtagttgcgttgtcgttcggagttttagtttttcggtgtcgcggggatttcgtttttttcggagtttggatagcgttttttttagagggttcgttattttttttgttttagtcgcgaggtttattttcgttagggggaga

SEQ ID NO: 30406 - DNA, 527 bp, Artificial Sequence
  chemically treated genomic DNA (Homo sapiens) CpG-island No: 30406
tctccccctaacgaaaataaacctcgcgactaaaacaaaaaaaataacgaaccctctaaaaaaaacgctatccaaactccgaaaaaaacgaaatccccgcgacaccgaaaaactaaaactccgaacgacaacgcaactacgataacgacctcttcgacaaccgcgaaaaacgcctaaaataccgcaaacaccctcccacgtaaacacgccgaaaaacacgaacgaaacctacaacaaccctcgccgtcacctaaaacgtaaaatcccgaaacgcgaatccccgaaaaacacccgaaacaattaaaaacgctcgaacctcgacgcgcgacgaacaaaaaaccgccccccaaaaccataaactcgctcacgcccctccgcactccccgaaaaactccgaaaacaacgaaaaaaaaaaaaaaaacgacaaaaacgaaaacgactacgacgccgactactacgaaaacctacccgacgactcgcaatctacgcccgaacctaaaaaaacgaaaacgaaacgacgtcccccg

SEQ ID NO: 30407 - DNA, 527 bp, Artificial Sequence
  chemically treated genomic DNA (Homo sapiens) CpG-island No: 30407
tttttttttggcgggggtgagtttcgcggttaaggtagaggggatggcggattttttgaggaggacgttgtttaggtttcggggaaggcggggttttcgcggtatcggggggttagggtttcgggcggtagcgtagttgcggtggcggttttttcggtagtcgcgggagacgtttggggtgtcgtagatatttttttacgtgagtacgtcgggggatacgggcggagtttatagtagttttcgtcgttatttgaggcgtggggtttcggggcgcgggttttcggagggtattcggagtagttgggggcgttcgggtttcggcgcgcggcgggtaggaggtcgttttttagagttatgggttcgtttacgttttttcgtatttttcggagggtttcgaggatagcggagaggaggaggaagacgataaggacgaagacgattacgacgtcgattattacgaaaatttgttcggcggttcgtagtttgcgttcgagtttgagggggcggaggcggaacggcgtttttcg

SEQ ID NO: 30408 - DNA, 527 bp, Artificial Sequence
  chemically treated genomic DNA (Homo sapiens) CpG-island No: 30408
cgaaaaacgccgttccgcctccgccccctcaaactcgaacgcaaactacgaaccgccgaacaaattttcgtaataatcgacgtcgtaatcgtcttcgtccttatcgtcttcctcctcctctccgctatcctcgaaaccctccgaaaaatacgaaaaaacgtaaacgaacccataactctaaaaaacgacctcctacccgccgcgcgccgaaacccgaacgcccccaactactccgaataccctccgaaaacccgcgccccgaaaccccacgcctcaaataacgacgaaaactactataaactccgcccgtatcccccgacgtactcacgtaaaaaaatatctacgacaccccaaacgtctcccgcgactaccgaaaaaaccgccaccgcaactacgctaccgcccgaaaccctaaccccccgataccgcgaaaaccccgccttccccgaaacctaaacaacgtcctcctcaaaaaatccgccatcccctctaccttaaccgcgaaactcacccccgccaaaaaaaaa

SEQ ID NO: 30409 - DNA, 1355 bp, Artificial Sequence
  chemically treated genomic DNA (Homo sapiens) CpG-island No: 30409
cgtttcggttcgtatcggagtttcgtcgttttcgttttttttcgcggtttttttaattttcggttttgcgtattcgtttttttcgtagcggggatgtttagggtgcgatttcgaagtataattattgatggaattttgatattcgaagaggacgatttttttaatagtttatacgttttcgcgggtattttttttatttattgaaatttttacgaaagcggttaacgtatttagagcgggttttttcggtttacggacgtaggtaaatagcgttatttaaaaaaatgtcgttcgcgattcggttttaggcggtagagggagtagcgggcggtttggcgcgggagttttttcggggttcgtagtattttttgtcgcgcgcgaaggtcggggtcgcgtttatttggtaataaaggcgaagttcgtcgttcgtaggtgggaggtcggagtcgaggtttcggtgtcgcgcgagggagcgtacggggttcgcgcggggtcgtttttggagaaagtttagtcgcggatttcggcgggagaggagcgttttggtattgtttcgggggagggcgggcgggcgttcgggggtattgggttttcggaggaggtggcggcgcgcgggcgggttgggggttgggtcggtcgaggcggacggtcgtttttagtagtttcgacgttttttatttggtttttgcggcggttgaggtagttcgatttttagcgttaagtattgcgttaagtagggacgggcgggggagggcgcgttagattcgtcgtagagtcggattttcggcgtcgtatcgtcgtttcgttttgtcgcggatttcgttgttcgttcgtagttcgcgttttttcggcgggcgaaggagacgatttttcggcgttcgtcggtttttatttcgatgtagtcggttagcgttaaggtaggcgcgtggagtttattagtagtagaagtaggagtttgttcgtggttgcggcggtcgcggtttcggtggtcgtatttttcgtcgggtcgttttagcgcgcggtttttaagtttatatattcggatttttcgtttagtatatcgcgatttagaagtatttaaagcgagttcgtcgtcgcgttaggggttttatattaatcggaattgattttatattattacgtcgtttttttgcggattttaatgtcggcgcgtagaacgttttaatgatcggcgtttttgcggttcgagattaattaggagatggaagatgttgttgattacgaacgggttaaacgcgcgtttatcgatcgttgtcgtattagttcgcgtatggtttgattaggttgcgggatattgtagcgttagtcggtgggagtttttcgggagagtttgg

SEQ ID NO: 30410 - DNA, 1355 bp, Artificial Sequence
  chemically treated genomic DNA (Homo sapiens) CpG-island No: 30410
ccaaactctcccgaaaaactcccaccgactaacgctacaatatcccgcaacctaatcaaaccatacgcgaactaatacgacaacgatcgataaacgcgcgtttaacccgttcgtaatcaacaacatcttccatctcctaattaatctcgaaccgcaaaaacgccgatcattaaaacgttctacgcgccgacattaaaatccgcaaaaaaacgacgtaataatataaaatcaattccgattaatataaaacccctaacgcgacgacgaactcgctttaaatacttctaaatcgcgatatactaaacgaaaaatccgaatatataaacttaaaaaccgcgcgctaaaacgacccgacgaaaaatacgaccaccgaaaccgcgaccgccgcaaccacgaacaaactcctacttctactactaataaactccacgcgcctaccttaacgctaaccgactacatcgaaataaaaaccgacgaacgccgaaaaatcgtctccttcgcccgccgaaaaaacgcgaactacgaacgaacaacgaaatccgcgacaaaacgaaacgacgatacgacgccgaaaatccgactctacgacgaatctaacgcgccctcccccgcccgtccctacttaacgcaatacttaacgctaaaaatcgaactacctcaaccgccgcaaaaaccaaataaaaaacgtcgaaactactaaaaacgaccgtccgcctcgaccgacccaacccccaacccgcccgcgcgccgccacctcctccgaaaacccaatacccccgaacgcccgcccgccctcccccgaaacaataccaaaacgctcctctcccgccgaaatccgcgactaaactttctccaaaaacgaccccgcgcgaaccccgtacgctccctcgcgcgacaccgaaacctcgactccgacctcccacctacgaacgacgaacttcgcctttattaccaaataaacgcgaccccgaccttcgcgcgcgacaaaaaatactacgaaccccgaaaaaactcccgcgccaaaccgcccgctactccctctaccgcctaaaaccgaatcgcgaacgacatttttttaaataacgctatttacctacgtccgtaaaccgaaaaaacccgctctaaatacgttaaccgctttcgtaaaaatttcaataaataaaaaaaatacccgcgaaaacgtataaactattaaaaaaatcgtcctcttcgaatatcaaaattccatcaataattatacttcgaaatcgcaccctaaacatccccgctacgaaaaaaacgaatacgcaaaaccgaaaattaaaaaaaccgcgaaaaaaaacgaaaacgacgaaactccgatacgaaccgaaacg

SEQ ID NO: 30411 - DNA, 1355 bp, Artificial Sequence
  chemically treated genomic DNA (Homo sapiens) CpG-island No: 30411
ttagattttttcgggggatttttatcggttagcgttataatgtttcgtagtttgattaggttatacgcggattagtgcggtaacgatcggtgagcgcgcgtttgattcgttcgtgattagtagtattttttattttttgattggtttcgagtcgtaagggcgtcggttattgaggcgttttgcgcgtcggtattgagattcgtagaaggacggcgtggtaatatgaagttagtttcggttggtgtaaaatttttggcgcggcggcgaattcgttttagatgtttttgggtcgcggtgtgttaagcgaggagttcgagtgtgtgagtttgagagtcgcgcgttagagcgattcggcgagggatgcggttatcgggatcgcggtcgtcgtagttacgggtaggtttttgtttttgttgttggtgggttttacgcgtttgttttggcgttggtcggttatatcgaggtggggatcggcgaacgtcggagagtcgtttttttcgttcgtcggaggagcgcggattgcgggcgggtagcggggttcgcggtagggcggagcggcggtgcggcgtcgggggttcggttttgcggcgggtttggcgcgttttttttcgttcgtttttgtttggcgtagtgtttagcgttggaggtcgggttgttttagtcgtcgtagaggttaaatgaaaggcgtcggggttgttgggggcggtcgttcgtttcggtcgatttagtttttaattcgttcgcgcgtcgttatttttttcggggatttagtgttttcgggcgttcgttcgttttttttcgggataatgttagggcgtttttttttcgtcggagttcgcggttgggttttttttaggggcggtttcgcgcggatttcgtacgttttttcgcgcggtatcggggtttcggtttcggttttttatttgcgagcggcgggtttcgtttttgttgttaggtggacgcggtttcggttttcgcgcgcggtaagggatgttgcgagtttcgggggagttttcgcgttaggtcgttcgttgttttttttgtcgtttggggtcgggtcgcggacgatatttttttaagtggcgttgtttgtttgcgttcgtagatcgaggaaattcgttttgggtgcgttgatcgttttcgtgagggttttagtgagtagggaaggtgttcgcgaaggcgtgtaaattgttggaaaaatcgtttttttcgggtgttagaattttattagtggttgtgtttcgaggtcgtattttgagtattttcgttgcgagaaaggcgaatgcgtagggtcgggggttggggaggtcgcgggagggggcgggggcggcggggtttcggtgcgggtcggagcg

SEQ ID NO: 30412 - DNA, 1355 bp, Artificial Sequence
  chemically treated genomic DNA (Homo sapiens) CpG-island No: 30412
cgctccgacccgcaccgaaaccccgccgcccccgccccctcccgcgacctccccaacccccgaccctacgcattcgcctttctcgcaacgaaaatactcaaaatacgacctcgaaacacaaccactaataaaattctaacacccgaaaaaaacgatttttccaacaatttacacgccttcgcgaacaccttccctactcactaaaaccctcacgaaaacgatcaacgcacccaaaacgaatttcctcgatctacgaacgcaaacaaacaacgccacttaaaaaaatatcgtccgcgacccgaccccaaacgacaaaaaaaacaacgaacgacctaacgcgaaaactcccccgaaactcgcaacatcccttaccgcgcgcgaaaaccgaaaccgcgtccacctaacaacaaaaacgaaacccgccgctcgcaaataaaaaaccgaaaccgaaaccccgataccgcgcgaaaaaacgtacgaaatccgcgcgaaaccgcccctaaaaaaaacccaaccgcgaactccgacgaaaaaaaaacgccctaacattatcccgaaaaaaaacgaacgaacgcccgaaaacactaaatccccgaaaaaaataacgacgcgcgaacgaattaaaaactaaatcgaccgaaacgaacgaccgcccccaacaaccccgacgcctttcatttaacctctacgacgactaaaacaacccgacctccaacgctaaacactacgccaaacaaaaacgaacgaaaaaaaacgcgccaaacccgccgcaaaaccgaacccccgacgccgcaccgccgctccgccctaccgcgaaccccgctacccgcccgcaatccgcgctcctccgacgaacgaaaaaaacgactctccgacgttcgccgatccccacctcgatataaccgaccaacgccaaaacaaacgcgtaaaacccaccaacaacaaaaacaaaaacctacccgtaactacgacgaccgcgatcccgataaccgcatccctcgccgaatcgctctaacgcgcgactctcaaactcacacactcgaactcctcgcttaacacaccgcgacccaaaaacatctaaaacgaattcgccgccgcgccaaaaattttacaccaaccgaaactaacttcatattaccacgccgtccttctacgaatctcaataccgacgcgcaaaacgcctcaataaccgacgcccttacgactcgaaaccaatcaaaaaataaaaaatactactaatcacgaacgaatcaaacgcgcgctcaccgatcgttaccgcactaatccgcgtataacctaatcaaactacgaaacattataacgctaaccgataaaaatcccccgaaaaaatctaa

SEQ ID NO: 30413 - DNA, 622 bp, Artificial Sequence
  chemically treated genomic DNA (Homo sapiens) CpG-island No: 30413
tcggcgtggggtagcggtcgtggggtttatagatattatttttacgtagatttcgcgaatgtcgtggaattttattttcgggaggcgttttgtttttgaggaagatggagaggagtcgggagaagcgtttagaaatcgtattgatttagatattaattttggtcggtttttttcgtttgtcgagttgcggggtcgcgtcgtttcgttttcgagaagcggatttagggtacgtcgggtttcgtcgagcgggtaaagggagcggtttgcgtcgttatttcgcgttcgcggtttcgacgtcgtagtcgttacgttaatatcgatttttcgtggttaataggtttttcgtagtttttcgagtcggtagcgtcgttcgcgttttttttttagtcgggtcggcgggacgtttttagagtttgtgttttttcgaggtcgtcgagtttattgagttcggtcggggcgttggttcgcgtgggtcgcggggaataggtttcgtttttttaacgattacggtttcggcggttgcgaaacggttattttcgatttttgagttcgttagagtcgtttttttttttatatttgtaagtaaaataatatacgtaatagtgatatcgaggtatttttt

SEQ ID NO: 30414 - DNA, 622 bp, Artificial Sequence
  chemically treated genomic DNA (Homo sapiens) CpG-island No: 30414
aaaaaatacctcgatatcactattacgtatattattttacttacaaatataaaaaaaaaaacgactctaacgaactcaaaaatcgaaaataaccgtttcgcaaccgccgaaaccgtaatcgttaaaaaaacgaaacctattccccgcgacccacgcgaaccaacgccccgaccgaactcaataaactcgacgacctcgaaaaaacacaaactctaaaaacgtcccgccgacccgactaaaaaaaaaacgcgaacgacgctaccgactcgaaaaactacgaaaaacctattaaccacgaaaaatcgatattaacgtaacgactacgacgtcgaaaccgcgaacgcgaaataacgacgcaaaccgctccctttacccgctcgacgaaacccgacgtaccctaaatccgcttctcgaaaacgaaacgacgcgaccccgcaactcgacaaacgaaaaaaaccgaccaaaattaatatctaaatcaatacgatttctaaacgcttctcccgactcctctccatcttcctcaaaaacaaaacgcctcccgaaaataaaattccacgacattcgcgaaatctacgtaaaaataatatctataaaccccacgaccgctaccccacgccga

SEQ ID NO: 30415 - DNA, 622 bp, Artificial Sequence
  chemically treated genomic DNA (Homo sapiens) CpG-island No: 30415
gaaaagtgtttcgatgttattattacgtatgttgttttgtttgtaaatgtgaaagggagagcgattttggcggatttaagggtcggaggtggtcgtttcgtagtcgtcggggtcgtggtcgttggagaagcgggatttgtttttcgcggtttacgcgaattagcgtttcggtcgggtttagtgggttcggcggtttcgagagagtataagttttgagggcgtttcgtcggttcggttggaagagggacgcgggcggcgttgtcgattcggagggttgcgagaaatttgttggttacgaggaatcggtgttggcgtggcggttgcggcgtcgaggtcgcgggcgcggggtggcggcgtaggtcgttttttttgttcgttcggcggagttcggcgtattttaggttcgtttttcggggacggggcggcgcggtttcgtagttcggtaggcggagggagtcggttaggattgatgtttaaattaatgcggtttttaggcgtttttttcgatttttttttattttttttaaaggtaaagcgtttttcgaggatggagttttacgatattcgcgaagtttgcgtgaggatggtgtttgtgggttttacggtcgttgttttacgtcgg

SEQ ID NO: 30416 - DNA, 622 bp, Artificial Sequence
  chemically treated genomic DNA (Homo sapiens) CpG-island No: 30416
ccgacgtaaaacaacgaccgtaaaacccacaaacaccatcctcacgcaaacttcgcgaatatcgtaaaactccatcctcgaaaaacgctttacctttaaaaaaaataaaaaaaaatcgaaaaaaacgcctaaaaaccgcattaatttaaacatcaatcctaaccgactccctccgcctaccgaactacgaaaccgcgccgccccgtccccgaaaaacgaacctaaaatacgccgaactccgccgaacgaacaaaaaaaacgacctacgccgccaccccgcgcccgcgacctcgacgccgcaaccgccacgccaacaccgattcctcgtaaccaacaaatttctcgcaaccctccgaatcgacaacgccgcccgcgtccctcttccaaccgaaccgacgaaacgccctcaaaacttatactctctcgaaaccgccgaacccactaaacccgaccgaaacgctaattcgcgtaaaccgcgaaaaacaaatcccgcttctccaacgaccacgaccccgacgactacgaaacgaccacctccgacccttaaatccgccaaaatcgctctccctttcacatttacaaacaaaacaacatacgtaataataacatcgaaacacttttc

SEQ ID NO: 30417 - DNA, 525 bp, Artificial Sequence
  chemically treated genomic DNA (Homo sapiens) CpG-island No: 30417
gttcgtttttcggggtagttgcggtttcggagtggttgcgtttggcgttcgtcgggcgtggtttcgttttaggttcgggagggtaggttggttgtttcggcgagcggtagagtttttttggatagttttcgtttatttaaatagaagacgtcggcgtcggagcgggttcggatatggcgaggttgcgagtcggttcgagcggcggggttcggtgattttttttttttttttcgtttttttttttttttcgtacgtacgtttcgttcgtttttatttcgtttttatttcgggcgagttcgttcgtagttcggggcgtatattcgtacgcgtatttttttttatttattttcgcgttcgtttttattttcgtagtcgagtttcgttacgcgcgttttgttcgttcgtcggtcgttttcgtcgttttcgtcgttttcgggttttgatggattgaatgaaggttgtttatatcgtttatcgatgttttattaaagatttagaaggttgcgttatgaattcggagttgat

SEQ ID NO: 30418 - DNA, 525 bp, Artificial Sequence
  chemically treated genomic DNA (Homo sapiens) CpG-island No: 30418
atcaactccgaattcataacgcaaccttctaaatctttaataaaacatcgataaacgatataaacaaccttcattcaatccatcaaaacccgaaaacgacgaaaacgacgaaaacgaccgacgaacgaacaaaacgcgcgtaacgaaactcgactacgaaaataaaaacgaacgcgaaaataaataaaaaaaaatacgcgtacgaatatacgccccgaactacgaacgaactcgcccgaaataaaaacgaaataaaaacgaacgaaacgtacgtacgaaaaaaaaaaaaaaacgaaaaaaaaaaaaaaaatcaccgaaccccgccgctcgaaccgactcgcaacctcgccatatccgaacccgctccgacgccgacgtcttctatttaaataaacgaaaactatccaaaaaaactctaccgctcgccgaaacaaccaacctaccctcccgaacctaaaacgaaaccacgcccgacgaacgccaaacgcaaccactccgaaaccgcaactaccccgaaaaacgaac

SEQ ID NO: 30419 - DNA, 525 bp, Artificial Sequence
  chemically treated genomic DNA (Homo sapiens) CpG-island No: 30419
gttagtttcgggtttatggcgtagttttttaggtttttggtgaggtatcgataggcggtgtaggtagtttttatttagtttattagggttcgggggcggcgggggcggcgggggcggtcggcgggcgggtaaggcgcgcgtggcggggttcggttgcgggagtgggggcgggcgcgggagtgagtggagaggagtgcgcgtgcgggtgtgcgtttcgggttgcgggcgggttcgttcggggtgggggcggggtgggggcggacggggcgtgcgtgcgggagaggggaggggacggggagggagggagggattatcgggtttcgtcgttcgggtcggttcgtagtttcgttatgttcgagttcgtttcggcgtcgacgttttttgtttgggtgagcgggagttgtttagaagggttttgtcgttcgtcggggtagttaatttattttttcggatttggggcggggttacgttcgacgggcgttaagcgtaattatttcgaggtcgtagttgtttcgggaggcgggt

SEQ ID NO: 30420 - DNA, 525 bp, Artificial Sequence
  chemically treated genomic DNA (Homo sapiens) CpG-island No: 30420
acccgcctcccgaaacaactacgacctcgaaataattacgcttaacgcccgtcgaacgtaaccccgccccaaatccgaaaaaataaattaactaccccgacgaacgacaaaacccttctaaacaactcccgctcacccaaacaaaaaacgtcgacgccgaaacgaactcgaacataacgaaactacgaaccgacccgaacgacgaaacccgataatccctccctccctccccgtcccctcccctctcccgcacgcacgccccgtccgcccccaccccgcccccaccccgaacgaacccgcccgcaacccgaaacgcacacccgcacgcgcactcctctccactcactcccgcgcccgcccccactcccgcaaccgaaccccgccacgcgcgccttacccgcccgccgaccgcccccgccgcccccgccgcccccgaaccctaataaactaaataaaaactacctacaccgcctatcgatacctcaccaaaaacctaaaaaactacgccataaacccgaaactaac

SEQ ID NO: 30421 - DNA, 1072 bp, Artificial Sequence
  chemically treated genomic DNA (Homo sapiens) CpG-island No: 30421
tacgggtcggtcggcggcggtagtggcgggggcggcggcgggggcggcgggggcggcggcgggggttcgggttatgagtaggagttgttggttagttttagtttttattacgcgggtcgcggcgtcgttggttcgttgcggggtttttcgtcgtttttaatcgcgtattaggagttgggtacggcggtagcggcggtagcggcggcgtcgcgttcggttatggttattagtatggtttcgattttggacggcggcgattatcggttcgagttttttatttcgttgtattacgttatgagtatgttttgcgattcgttttcgtttggtatgggtatgagtaatatttatattacgttgatatcgttttagtcgttgttatttatttttatcgtgtttgataagttttattatttttattcgtattattattcgtattattattattattattattattagcgtttgttcggtaacgttagcggtagttttatttttatgcgcgacgagcgcgggttttcggttatgaataatttttatagtttttataaggagatgttcggtatgagttagagtttgttttcgttggtcgttacgtcgttgggtaacgggttaggcggtttttataacgcgtagtagagtttgtttaattacggttcgtcgggttacgataaaatgtttagttttaatttcgacgcgtattatattgttatgttgattcgcggtgagtaatatttgtttcgcggtttgggtattttatttgcggttatgatgtcgtatttgaacggtttgtattattcgggttatatttagttttacgggtcggtgttggtatttagtcgcgagcggttattttcgtttttatcgggttcgtaggtggttacgtcgggttagttggaagaaattaatattaaagaggtggtttagcgtattatagcggagttgaagcgttatagtattttttaggcgatttttgcgtagagggtgttgtgtcggttttaggggatttttttcgatttgtttcggaatttaaaatcgtggagtaaatttaaatttggtagggagatttttcgta

SEQ ID NO: 30422 - DNA, 1072 bp, Artificial Sequence
  chemically treated genomic DNA (Homo sapiens) CpG-island No: 30422
tacgaaaaatctccctaccaaatttaaatttactccacgattttaaattccgaaacaaatcgaaaaaaatcccctaaaaccgacacaacaccctctacgcaaaaatcgcctaaaaaatactataacgcttcaactccgctataatacgctaaaccacctctttaatattaatttcttccaactaacccgacgtaaccacctacgaacccgataaaaacgaaaataaccgctcgcgactaaataccaacaccgacccgtaaaactaaatataacccgaataatacaaaccgttcaaatacgacatcataaccgcaaataaaatacccaaaccgcgaaacaaatattactcaccgcgaatcaacataacaatataatacgcgtcgaaattaaaactaaacattttatcgtaacccgacgaaccgtaattaaacaaactctactacgcgttataaaaaccgcctaacccgttacccaacgacgtaacgaccaacgaaaacaaactctaactcataccgaacatctccttataaaaactataaaaattattcataaccgaaaacccgcgctcgtcgcgcataaaaataaaactaccgctaacgttaccgaacaaacgctaataataataataataataataatacgaataataatacgaataaaaataataaaacttatcaaacacgataaaaataaataacaacgactaaaacgatatcaacgtaatataaatattactcatacccataccaaacgaaaacgaatcgcaaaacatactcataacgtaatacaacgaaataaaaaactcgaaccgataatcgccgccgtccaaaatcgaaaccatactaataaccataaccgaacgcgacgccgccgctaccgccgctaccgccgtacccaactcctaatacgcgattaaaaacgacgaaaaaccccgcaacgaaccaacgacgccgcgacccgcgtaataaaaactaaaactaaccaacaactcctactcataacccgaacccccgccgccgcccccgccgcccccgccgccgcccccgccactaccgccgccgaccgacccgta

SEQ ID NO: 30423 - DNA, 1072 bp, Artificial Sequence
  chemically treated genomic DNA (Homo sapiens) CpG-island No: 30423
tgcggaaggtttttttgttagatttgagtttattttacggttttggatttcggagtaggtcggagagagttttttgagatcggtatagtattttttgcgtaaagatcgtttgggggatattgtagcgttttagtttcgttgtgatgcgttgggttatttttttggtgttgattttttttagttggttcgacgtggttatttgcgagttcgatgaggacgagggtggtcgttcgcgattgggtgttagtatcggttcgtgagattgagtgtggttcgggtggtgtaggtcgtttaggtgcgatattatggtcgtaggtggggtgtttaggtcgcgggataggtgttgtttatcgcgggttagtatggtagtgtggtgcgcgtcgaagttggggttgagtattttgtcgtggttcggcggatcgtagttgggtagattttgttgcgcgttgtggaggtcgtttagttcgttgtttagcggcgtggcggttagcggggataggttttggtttatgtcgggtatttttttgtagggattgtagaggttgtttatggtcgggagttcgcgttcgtcgcgtatgagggtgaagttgtcgttgacgttgtcggataggcgttggtggtggtggtggtggtggtggtgcggatggtggtgcgggtgagggtggtggaatttgttagatacggtggagatgggtggtagcggttggagcggtgttagcgtggtgtaggtgttgtttatgtttatgttaggcggagacgagtcgtaggatatgtttatggcgtggtgtagcgggatggagagttcgggtcggtagtcgtcgtcgtttaggatcgaggttatgttggtgattatggtcgagcgcgacgtcgtcgttgtcgtcgttgtcgtcgtgtttagtttttggtgcgcggttggaggcggcggagggtttcgtagcgagttagcggcgtcgcggttcgcgtggtgggggttggggttggttagtagtttttgtttatggttcgggttttcgtcgtcgttttcgtcgttttcgtcgtcgttttcgttattgtcgtcgtcggtcggttcgtg

SEQ ID NO: 30424 - DNA, 1072 bp, Artificial Sequence
  chemically treated genomic DNA (Homo sapiens) CpG-island No: 30424
cacgaaccgaccgacgacgacaataacgaaaacgacgacgaaaacgacgaaaacgacgacgaaaacccgaaccataaacaaaaactactaaccaaccccaacccccaccacgcgaaccgcgacgccgctaactcgctacgaaaccctccgccgcctccaaccgcgcaccaaaaactaaacacgacgacaacgacgacaacgacgacgtcgcgctcgaccataatcaccaacataacctcgatcctaaacgacgacgactaccgacccgaactctccatcccgctacaccacgccataaacatatcctacgactcgtctccgcctaacataaacataaacaacacctacaccacgctaacaccgctccaaccgctaccacccatctccaccgtatctaacaaattccaccaccctcacccgcaccaccatccgcaccaccaccaccaccaccaccaccaacgcctatccgacaacgtcaacgacaacttcaccctcatacgcgacgaacgcgaactcccgaccataaacaacctctacaatccctacaaaaaaatacccgacataaaccaaaacctatccccgctaaccgccacgccgctaaacaacgaactaaacgacctccacaacgcgcaacaaaatctacccaactacgatccgccgaaccacgacaaaatactcaaccccaacttcgacgcgcaccacactaccatactaacccgcgataaacaacacctatcccgcgacctaaacaccccacctacgaccataatatcgcacctaaacgacctacaccacccgaaccacactcaatctcacgaaccgatactaacacccaatcgcgaacgaccaccctcgtcctcatcgaactcgcaaataaccacgtcgaaccaactaaaaaaaatcaacaccaaaaaaataacccaacgcatcacaacgaaactaaaacgctacaatatcccccaaacgatctttacgcaaaaaatactataccgatctcaaaaaactctctccgacctactccgaaatccaaaaccgtaaaataaactcaaatctaacaaaaaaaccttccgca

SEQ ID NO: 30425 - DNA, 507 bp, Artificial Sequence
  chemically treated genomic DNA (Homo sapiens) CpG-island No: 30425
cggtcggcgttatgacgcgtttcgacgttcgtcggaagtgtacggaggagtttcgggggttaggcggtcgtcgcgagtttggtattttgagtttcgtgagttgagcgttgttgtttcgcggtggagttatcgtatcgttttcgggattatggtgttttattttattagtagtagcggtgagtgggcgttacgtttttttggattttgttggatagcgggtttcgaagtcgggattcgtagttcgtcgttgcgtttgattttcgttttaaaatgttttttggatgcgagtgttttttttcgcggtttttcggttttttagtatattcgttttttttacggttgtaggatttttttcggcgttttttcgttatggcgtggggggcgcggaggggcgatgttattgttatgtttgtatcggggagttttcgttttttaatcggaaagacgtttcgttattttttgggattgggtagagtttgtgggtttttttatatattttattttaag

SEQ ID NO: 30426 - DNA, 507 bp, Artificial Sequence
  chemically treated genomic DNA (Homo sapiens) CpG-island No: 30426
cttaaaataaaatatataaaaaaacccacaaactctacccaatcccaaaaaataacgaaacgtctttccgattaaaaaacgaaaactccccgatacaaacataacaataacatcgcccctccgcgccccccacgccataacgaaaaaacgccgaaaaaaatcctacaaccgtaaaaaaaacgaatatactaaaaaaccgaaaaaccgcgaaaaaaaacactcgcatccaaaaaacattttaaaacgaaaatcaaacgcaacgacgaactacgaatcccgacttcgaaacccgctatccaacaaaatccaaaaaaacgtaacgcccactcaccgctactactaataaaataaaacaccataatcccgaaaacgatacgataactccaccgcgaaacaacaacgctcaactcacgaaactcaaaataccaaactcgcgacgaccgcctaacccccgaaactcctccgtacacttccgacgaacgtcgaaacgcgtcataacgccgaccg

SEQ ID NO: 30427 - DNA, 507 bp, Artificial Sequence
  chemically treated genomic DNA (Homo sapiens) CpG-island No: 30427
tttgggataaggtgtgtggaggagtttataggttttgtttaattttagggagtgacgggacgttttttcgattaggggacgagaatttttcgatataaatatagtagtggtatcgttttttcgcgttttttacgttatgacgaggggacgtcgggggaaattttgtagtcgtgggagggacggatgtgttgggggatcgagaggtcgcgggaagaggtattcgtatttagaaggtattttagagcgagggttaggcgtagcggcggattgcgggtttcggtttcggagttcgttgtttagtagggtttaggaggacgtggcgtttatttatcgttgttgttggtgaagtagaatattatgatttcgggagcggtgcggtgattttatcgcggagtagtagcgtttaatttacgaagtttaggatattagattcgcggcggtcgtttggttttcggaattttttcgtgtattttcggcggacgtcggggcgcgttataacgtcggtcg

SEQ ID NO: 30428 - DNA, 507 bp, Artificial Sequence
  chemically treated genomic DNA (Homo sapiens) CpG-island No: 30428
cgaccgacgttataacgcgccccgacgtccgccgaaaatacacgaaaaaattccgaaaaccaaacgaccgccgcgaatctaatatcctaaacttcgtaaattaaacgctactactccgcgataaaatcaccgcaccgctcccgaaatcataatattctacttcaccaacaacaacgataaataaacgccacgtcctcctaaaccctactaaacaacgaactccgaaaccgaaacccgcaatccgccgctacgcctaaccctcgctctaaaataccttctaaatacgaatacctcttcccgcgacctctcgatcccccaacacatccgtccctcccacgactacaaaatttcccccgacgtcccctcgtcataacgtaaaaaacgcgaaaaaacgataccactactatatttatatcgaaaaattctcgtcccctaatcgaaaaaacgtcccgtcactccctaaaattaaacaaaacctataaactcctccacacaccttatcccaaa

SEQ ID NO: 30429 - DNA, 1135 bp, Artificial Sequence
  chemically treated genomic DNA (Homo sapiens) CpG-island No: 30429
cgcgttttcgtgttaataggtcggaaaggtagatagaagggaaaaggtttcgcgcgtttttacgttaataggtcggaaaggtagatagaagggaaaaggtttcgcgcgtttttacgttaataggtcggaaaggtagatagaagggaaaaggtttcgcgcgtttttacgttaataggtcggaaaggtagatagaagggaaaaggtttcgcgcgtttttacgttaataggtcggaaaggtagatagaagggaaaaggtttcgcgcgtttttacgttaataggtcggaaaggtagatagaagggaaaaggtttcgcgcgtttttacgttaataggtcggaaaggtagatagaagggaaaaggtttcgcgcgtttttacgttaataggtcggaaaggtagatagaagggaaaaggtttcgcgcgtttttacgttaataggtcggaaaggtagatagaagggaaaaggtttcgcgcgtttttacgttaataggtcggaaaggtagatagaagggaaaaggtttcgcgcgtttttacgttaataggtcggaaaggtagatagaagggaaaaggtttcgcgcgtttttacgttaataggtcggaaaggtagatagaagggaaaaggtttcgcgcgtttttacgttaataggtcggaaaggtagatagaagggaaaaggtttcgcgcgtttttacgttaataggtcggaaaggtagatagaagggaaaaggtttcgcgcgtttttacgttaataggtcggaaaggtagatagaaggggaaaggtttcgcgcgtttttaagttaataggtcggaaaggtagatagaaggggaaaggtttcgcgcgtttttatgttaataggtcggaaaggtagatagaaggggaaaggtttcgcgcgtttttatgttaataggtcggaaaggaagatagaagggaaaacgtttcgcgcgttttcgtgttaagaggtcggaaaggtagatagaagggaaaaggtttcgcgcgtttttgtgtttagaggtcggaaaggtagatagaagggaaaaggtttcgcgcgtttttgtgttaagaggttagaaaggaagatagaagagaaaacgttttgtatgttacggggttggggtgtgtagttagggttttttttttta

SEQ ID NO: 30430 - DNA, 1135 bp, Artificial Sequence
  chemically treated genomic DNA (Homo sapiens) CpG-island No: 30430
taaaaaaaaaaaccctaactacacaccccaaccccgtaacatacaaaacgttttctcttctatcttcctttctaacctcttaacacaaaaacgcgcgaaaccttttcccttctatctacctttccgacctctaaacacaaaaacgcgcgaaaccttttcccttctatctacctttccgacctcttaacacgaaaacgcgcgaaacgttttcccttctatcttcctttccgacctattaacataaaaacgcgcgaaacctttccccttctatctacctttccgacctattaacataaaaacgcgcgaaacctttccccttctatctacctttccgacctattaacttaaaaacgcgcgaaacctttccccttctatctacctttccgacctattaacgtaaaaacgcgcgaaaccttttcccttctatctacctttccgacctattaacgtaaaaacgcgcgaaaccttttcccttctatctacctttccgacctattaacgtaaaaacgcgcgaaaccttttcccttctatctacctttccgacctattaacgtaaaaacgcgcgaaaccttttcccttctatctacctttccgacctattaacgtaaaaacgcgcgaaaccttttcccttctatctacctttccgacctattaacgtaaaaacgcgcgaaaccttttcccttctatctacctttccgacctattaacgtaaaaacgcgcgaaaccttttcccttctatctacctttccgacctattaacgtaaaaacgcgcgaaaccttttcccttctatctacctttccgacctattaacgtaaaaacgcgcgaaaccttttcccttctatctacctttccgacctattaacgtaaaaacgcgcgaaaccttttcccttctatctacctttccgacctattaacgtaaaaacgcgcgaaaccttttcccttctatctacctttccgacctattaacgtaaaaacgcgcgaaaccttttcccttctatctacctttccgacctattaacgtaaaaacgcgcgaaaccttttcccttctatctacctttccgacctattaacgtaaaaacgcgcgaaaccttttcccttctatctacctttccgacctattaacacgaaaacgcg

SEQ ID NO: 30431 - DNA, 1135 bp, Artificial Sequence
  chemically treated genomic DNA (Homo sapiens) CpG-island No: 30431
tggaaaggaaaattttgattgtatattttagtttcgtaatatgtagagcgtttttttttttgtttttttttttggttttttgatatagaaacgcgcggggtttttttttttttgtttgttttttcggtttttggatatagaaacgcgcggggtttttttttttttgtttgttttttcggttttttgatacggaaacgcgcggagcgtttttttttttgttttttttttcggtttgttgatatggaaacgcgcggagtttttttttttttgtttgttttttcggtttgttgatatggagacgcgcggggtttttttttttttgtttgttttttcggtttgttgatttggagacgcgcggggtttttttttttttgtttgttttttcggtttgttgacgtggagacgcgcggggtttttttttttttgtttgttttttcggtttgttgacgtggagacgcgcggggtttttttttttttgtttgttttttcggtttgttgacgtggagacgcgcggggtttttttttttttgtttgttttttcggtttgttgacgtggagacgcgcggggtttttttttttttgtttgttttttcggtttgttgacgtggagacgcgcggggtttttttttttttgtttgttttttcggtttgttgacgtggagacgcgcggggtttttttttttttgtttgttttttcggtttgttgacgtggagacgcgcggggtttttttttttttgtttgttttttcggtttgttgacgtggagacgcgcggggtttttttttttttgtttgttttttcggtttgttgacgtggagacgcgcggggtttttttttttttgtttgttttttcggtttgttgacgtggagacgcgcggggtttttttttttttgtttgttttttcggtttgttgacgtggagacgcgcggggtttttttttttttgtttgttttttcggtttgttgacgtggagacgcgcggggtttttttttttttgtttgttttttcggtttgttgacgtggagacgcgcggggtttttttttttttgtttgttttttcggtttgttgacgtggagacgcgcggggtttttttttttttgtttgttttttcggtttgttgatacggagacgcg

SEQ ID NO: 30432 - DNA, 1135 bp, Artificial Sequence
  chemically treated genomic DNA (Homo sapiens) CpG-island No: 30432
cgcgtctccgtatcaacaaaccgaaaaaacaaacaaaaaaaaaaaaaccccgcgcgtctccacgtcaacaaaccgaaaaaacaaacaaaaaaaaaaaaaccccgcgcgtctccacgtcaacaaaccgaaaaaacaaacaaaaaaaaaaaaaccccgcgcgtctccacgtcaacaaaccgaaaaaacaaacaaaaaaaaaaaaaccccgcgcgtctccacgtcaacaaaccgaaaaaacaaacaaaaaaaaaaaaaccccgcgcgtctccacgtcaacaaaccgaaaaaacaaacaaaaaaaaaaaaaccccgcgcgtctccacgtcaacaaaccgaaaaaacaaacaaaaaaaaaaaaaccccgcgcgtctccacgtcaacaaaccgaaaaaacaaacaaaaaaaaaaaaaccccgcgcgtctccacgtcaacaaaccgaaaaaacaaacaaaaaaaaaaaaaccccgcgcgtctccacgtcaacaaaccgaaaaaacaaacaaaaaaaaaaaaaccccgcgcgtctccacgtcaacaaaccgaaaaaacaaacaaaaaaaaaaaaaccccgcgcgtctccacgtcaacaaaccgaaaaaacaaacaaaaaaaaaaaaaccccgcgcgtctccacgtcaacaaaccgaaaaaacaaacaaaaaaaaaaaaaccccgcgcgtctccacgtcaacaaaccgaaaaaacaaacaaaaaaaaaaaaaccccgcgcgtctccacgtcaacaaaccgaaaaaacaaacaaaaaaaaaaaaaccccgcgcgtctccaaatcaacaaaccgaaaaaacaaacaaaaaaaaaaaaaccccgcgcgtctccatatcaacaaaccgaaaaaacaaacaaaaaaaaaaaaactccgcgcgtttccatatcaacaaaccgaaaaaaaaaacaaaaaaaaaaacgctccgcgcgtttccgtatcaaaaaaccgaaaaaacaaacaaaaaaaaaaaaaccccgcgcgtttctatatccaaaaaccgaaaaaacaaacaaaaaaaaaaaaaccccgcgcgtttctatatcaaaaaaccaaaaaaaaaaacaaaaaaaaaaacgctctacatattacgaaactaaaatatacaatcaaaattttcctttcca

SEQ ID NO: 30433 - DNA, 523 bp, Artificial Sequence
  chemically treated genomic DNA (Homo sapiens) CpG-island No: 30433
ggaggcggggtttttgttggggtttttgtagttcgcgttgggttttcgaattttcgcgttgtaagtcggaattttaggttagcgggcgtcgcggcgggttcggagatcggtgtaggacgtacggtttagttagaattataattttcgacgtgcgcggcggttaacgttggttttatttttgtttgttgttttttttttttttttcgttttttgcgacggagattgttgtttaggaagtgcgtagtagtgattttagagaggttggaagtttttttggcgacgttggggtcgcgaagggtttacgtaatgatttttatttttggtgagcgtaggcgttgcggaatttatcgttttataggacgtgttttcgggggtatattaattgtggttggacgtagtggcgcggtagtttaatttttcggcggttgtagattgacgggacgagatggttttggtagggtttattaggaaattcggtaattgttagtttgtttttcgtttaaggtatttttcgcgttttggt

SEQ ID NO: 30434 - DNA, 523 bp, Artificial Sequence
  chemically treated genomic DNA (Homo sapiens) CpG-island No: 30434
accaaaacgcgaaaaataccttaaacgaaaaacaaactaacaattaccgaatttcctaataaaccctaccaaaaccatctcgtcccgtcaatctacaaccgccgaaaaattaaactaccgcgccactacgtccaaccacaattaatatacccccgaaaacacgtcctataaaacgataaattccgcaacgcctacgctcaccaaaaataaaaatcattacgtaaacccttcgcgaccccaacgtcgccaaaaaaacttccaacctctctaaaatcactactacgcacttcctaaacaacaatctccgtcgcaaaaaacgaaaaaaaaaaaaaaaacaacaaacaaaaataaaaccaacgttaaccgccgcgcacgtcgaaaattataattctaactaaaccgtacgtcctacaccgatctccgaacccgccgcgacgcccgctaacctaaaattccgacttacaacgcgaaaattcgaaaacccaacgcgaactacaaaaaccccaacaaaaaccccgcctcc

SEQ ID NO: 30435 - DNA, 523 bp, Artificial Sequence
  chemically treated genomic DNA (Homo sapiens) CpG-island No: 30435
gttagagcgcggggggtgttttgggcgaggggtaagttgatagttatcgagttttttgatgagttttgttaggattatttcgtttcgttaatttgtagtcgtcggagaattaaattgtcgcgttattgcgtttagttataattaatgtattttcggaaatacgttttgtgggacggtgagtttcgtaacgtttgcgtttattaggagtaggagttattacgtgagtttttcgcggttttagcgtcgttaggagagtttttagtttttttagaattattattgcgtattttttggatagtagttttcgtcgtaagaagcggagggaaaaaaaaaagtaataagtagggatagaattagcgttggtcgtcgcgtacgtcgggagttgtagttttggttaggtcgtgcgttttgtatcgattttcgggttcgtcgcggcgttcgttggtttggggtttcggtttatagcgcgggaattcgggaatttagcgcgggttgtagaggttttagtaggagtttcgttttt

SEQ ID NO: 30436 - DNA, 523 bp, Artificial Sequence
  chemically treated genomic DNA (Homo sapiens) CpG-island No: 30436
aaaaacgaaactcctactaaaacctctacaacccgcgctaaattcccgaattcccgcgctataaaccgaaaccccaaaccaacgaacgccgcgacgaacccgaaaatcgatacaaaacgcacgacctaaccaaaactacaactcccgacgtacgcgacgaccaacgctaattctatccctacttattacttttttttttccctccgcttcttacgacgaaaactactatccaaaaaatacgcaataataattctaaaaaaactaaaaactctcctaacgacgctaaaaccgcgaaaaactcacgtaataactcctactcctaataaacgcaaacgttacgaaactcaccgtcccacaaaacgtatttccgaaaatacattaattataactaaacgcaataacgcgacaatttaattctccgacgactacaaattaacgaaacgaaataatcctaacaaaactcatcaaaaaactcgataactatcaacttacccctcgcccaaaacaccccccgcgctctaac

SEQ ID NO: 30437 - DNA, 1581 bp, Artificial Sequence
  chemically treated genomic DNA (Homo sapiens) CpG-island No: 30437
gagataattacggaagtttaacggttaaggtcgtatttattttgtcgtagttcggcggtttttataggataagcgaggggatttcgttggtttttaggagcgagcgtagtagggtattttggtttacggttttgttttgttcgaagtaattttgtagcgtgttaggacgtatcgtgtcggttagcggtttgttttgtagtatttgtcggattttttcggtagttagcgttcgggggtgcgggcggttttcgttattggtttcgaaggcggtggcggtttcggtagcgttcgcgttttagtgtttcgggtcgttttcgtcgttcgcgttcgcgttttcgtcgttatcgtcgtcgtttacggtttttttttttttttgcgttttcgtttcgttttagttgcgcggagacgcgtttttcgtcgcggcggcggtcgtcggtttttttttcgatttttttttttcggggttgttggagcgggttatcgggaagtcggggataaggcgggcgtcgttgggtgtgggcggcgcgtcgtagttttcgcggttttcggtttcgtcgtcgtcgtcgttttttttattttcgttttcgttgttttcggttgtcgtcggggtggttggttgttttagcgtcgagtttttcgatagtcgtcgttttttggcgtcgggcggcgagggttttttggttcgtttttcggcgcggtgcgattcggtcgcgggtttcgcgtgtttcgtcgggtggagtagtagatagcggtttaggtgcgagttgatgtgcgcggcgggtattatttgttggtatacggggtattgtatttggtgtagttgcgaaaggaaggggtcgtttttcggttcgtttatttttatggcggtcgtcgtttttttcggcgttcggcgcggtcgtagtaattcgtgcgtacgcggaggttttcgatgtttttcgttaggtttcgcgtcgcgagattttcgttcggggaattagtaggacgttcgcgggtcggaggagggcgtcgtttatgttttacgttcgtagttttcgcgttcgttcgttttcggtcggtcgttggtagcgttttacgcggcgtgtcgggaagtgtagttcgtggtcgtttgtttcggcggcggaggcgtttcgcgcggtatgtaagtaagtgtagttcgtggtcgtttgttttaattatcgtcgagaatatttcgcgcggtatttcgggaagtgtagttcgcggttattcgttttagttgtcgtgcgtttattttcgattttgagaatagttttgcgggggcgggggaggggcgggggggggggttgcgaggcgagcgtggtgcgcgtgcgcgaggttgcgcggtggcggacgtagtttttcgtttaggtatgcgagtcgcgcgagggtagggaggagttacggattgcgcgaggttgttggagcggcgagcgtcgttttttcggtttttcgtgttgggttgttgaatgggtttgtggggataagtaggaggcggtcgtagcgggtcgtttgtaacgaaagggaaatgggggaaaaaatttaaaagtttttaatagaaaattagtgttttattggacgtgaata

SEQ ID NO: 30438 - DNA, 1581 bp, Artificial Sequence
  chemically treated genomic DNA (Homo sapiens) CpG-island No: 30438
tattcacgtccaataaaacactaattttctattaaaaacttttaaattttttcccccatttccctttcgttacaaacgacccgctacgaccgcctcctacttatccccacaaacccattcaacaacccaacacgaaaaaccgaaaaaacgacgctcgccgctccaacaacctcgcgcaatccgtaactcctccctaccctcgcgcgactcgcatacctaaacgaaaaactacgtccgccaccgcgcaacctcgcgcacgcgcaccacgctcgcctcgcaacccccccccccgcccctcccccgcccccgcaaaactattctcaaaatcgaaaataaacgcacgacaactaaaacgaataaccgcgaactacacttcccgaaataccgcgcgaaatattctcgacgataattaaaacaaacgaccacgaactacacttacttacataccgcgcgaaacgcctccgccgccgaaacaaacgaccacgaactacacttcccgacacgccgcgtaaaacgctaccaacgaccgaccgaaaacgaacgaacgcgaaaactacgaacgtaaaacataaacgacgccctcctccgacccgcgaacgtcctactaattccccgaacgaaaatctcgcgacgcgaaacctaacgaaaaacatcgaaaacctccgcgtacgcacgaattactacgaccgcgccgaacgccgaaaaaaacgacgaccgccataaaaataaacgaaccgaaaaacgaccccttcctttcgcaactacaccaaatacaataccccgtataccaacaaataatacccgccgcgcacatcaactcgcacctaaaccgctatctactactccacccgacgaaacacgcgaaacccgcgaccgaatcgcaccgcgccgaaaaacgaaccaaaaaaccctcgccgcccgacgccaaaaaacgacgactatcgaaaaactcgacgctaaaacaaccaaccaccccgacgacaaccgaaaacaacgaaaacgaaaataaaaaaaacgacgacgacgacgaaaccgaaaaccgcgaaaactacgacgcgccgcccacacccaacgacgcccgccttatccccgacttcccgataacccgctccaacaaccccgaaaaaaaaaaatcgaaaaaaaaaccgacgaccgccgccgcgacgaaaaacgcgtctccgcgcaactaaaacgaaacgaaaacgcaaaaaaaaaaaaaaaccgtaaacgacgacgataacgacgaaaacgcgaacgcgaacgacgaaaacgacccgaaacactaaaacgcgaacgctaccgaaaccgccaccgccttcgaaaccaataacgaaaaccgcccgcacccccgaacgctaactaccgaaaaaatccgacaaatactacaaaacaaaccgctaaccgacacgatacgtcctaacacgctacaaaattacttcgaacaaaacaaaaccgtaaaccaaaataccctactacgctcgctcctaaaaaccaacgaaatcccctcgcttatcctataaaaaccgccgaactacgacaaaataaatacgaccttaaccgttaaacttccgtaattatctc

SEQ ID NO: 30439 - DNA, 1581 bp, Artificial Sequence
  chemically treated genomic DNA (Homo sapiens) CpG-island No: 30439
tgtttacgtttaatagaatattggttttttattggaggtttttgggtttttttttttatttttttttcgttataaacgattcgttgcggtcgttttttgtttgtttttataggtttatttaatagtttagtacggaaggtcgggaaagcggcgttcgtcgttttaataatttcgcgtagttcgtggtttttttttgttttcgcgcgattcgtatgtttgggcggagggttgcgttcgttatcgcgtaatttcgcgtacgcgtattacgttcgtttcgtaattttttttttcgtttttttttcgttttcgtaaggttgtttttagagtcggaaatggacgtacggtagttggggcgaatggtcgcggattatatttttcgaagtgtcgcgcgaggtattttcggcggtgattggggtaaacggttacggattatatttatttatatgtcgcgcgaggcgttttcgtcgtcggggtaaacggttacgaattatatttttcgatacgtcgcgtgaggcgttgttagcggtcggtcgagggcgggcggacgcgggagttgcggacgtgaggtatgagcggcgttttttttcggttcgcgagcgttttgttggtttttcgagcgagggtttcgcggcgcggggtttagcggagggtatcgaaggttttcgcgtgcgtacgggttgttgcggtcgcgtcgggcgtcggggagggcggcggtcgttatggaggtgagcgggtcggaagacgatttttttttttcgtagttgtattaggtgtagtgtttcgtgtgttagtagatgatgttcgtcgcgtatattaattcgtatttggatcgttgtttgttgttttattcggcggggtacgcggagttcgcggtcgggtcgtatcgcgtcggggagcgggttaaggggttttcgtcgttcggcgttaagaggcggcggttgtcggagagttcggcgttgaagtagttagttatttcgacggtagtcgagagtagcgagggcgagggtgaggagggcgacgacggcggcgagatcgagagtcgcgagagttacgacgcgtcgtttatatttagcggcgttcgttttattttcgatttttcggtggttcgttttagtagtttcgggaggaaggggtcggggaagaggtcggcggtcgtcgtcgcggcggggagcgcgttttcgcgtagttgggacgaggcggaggcgtaggaggaggaggaggtcgtgggcgacggcgatggcgacggggacgcggacgcggacggcgaggacgattcggggtattgggacgcggacgttgtcgaagtcgttatcgttttcggggttagtggcgggggtcgttcgtattttcgggcgttggttgtcgaggagattcgatagatgttatagggtaagtcgttggtcgatacgatgcgttttgatacgttgtaggattatttcgggtagagtaaggtcgtgggttaggatattttgttgcgttcgtttttggagattaacgaaattttttcgtttattttgtgggggtcgtcgggttgcggtaaggtgagtgcggttttggtcgttgggttttcgtagttatttt

SEQ ID NO: 30440 - DNA, 1581 bp, Artificial Sequence
  chemically treated genomic DNA (Homo sapiens) CpG-island No: 30440
aaaataactacgaaaacccaacgaccaaaaccgcactcaccttaccgcaacccgacgacccccacaaaataaacgaaaaaatttcgttaatctccaaaaacgaacgcaacaaaatatcctaacccacgaccttactctacccgaaataatcctacaacgtatcaaaacgcatcgtatcgaccaacgacttaccctataacatctatcgaatctcctcgacaaccaacgcccgaaaatacgaacgacccccgccactaaccccgaaaacgataacgacttcgacaacgtccgcgtcccaataccccgaatcgtcctcgccgtccgcgtccgcgtccccgtcgccatcgccgtcgcccacgacctcctcctcctcctacgcctccgcctcgtcccaactacgcgaaaacgcgctccccgccgcgacgacgaccgccgacctcttccccgaccccttcctcccgaaactactaaaacgaaccaccgaaaaatcgaaaataaaacgaacgccgctaaatataaacgacgcgtcgtaactctcgcgactctcgatctcgccgccgtcgtcgccctcctcaccctcgccctcgctactctcgactaccgtcgaaataactaactacttcaacgccgaactctccgacaaccgccgcctcttaacgccgaacgacgaaaaccccttaacccgctccccgacgcgatacgacccgaccgcgaactccgcgtaccccgccgaataaaacaacaaacaacgatccaaatacgaattaatatacgcgacgaacatcatctactaacacacgaaacactacacctaatacaactacgaaaaaaaaaaatcgtcttccgacccgctcacctccataacgaccgccgccctccccgacgcccgacgcgaccgcaacaacccgtacgcacgcgaaaaccttcgataccctccgctaaaccccgcgccgcgaaaccctcgctcgaaaaaccaacaaaacgctcgcgaaccgaaaaaaaacgccgctcatacctcacgtccgcaactcccgcgtccgcccgccctcgaccgaccgctaacaacgcctcacgcgacgtatcgaaaaatataattcgtaaccgtttaccccgacgacgaaaacgcctcgcgcgacatataaataaatataatccgtaaccgtttaccccaatcaccgccgaaaatacctcgcgcgacacttcgaaaaatataatccgcgaccattcgccccaactaccgtacgtccatttccgactctaaaaacaaccttacgaaaacgaaaaaaaaacgaaaaaaaaaattacgaaacgaacgtaatacgcgtacgcgaaattacgcgataacgaacgcaaccctccgcccaaacatacgaatcgcgcgaaaacaaaaaaaaaccacgaactacgcgaaattattaaaacgacgaacgccgctttcccgaccttccgtactaaactattaaataaacctataaaaacaaacaaaaaacgaccgcaacgaatcgtttataacgaaaaaaaaataaaaaaaaaaacccaaaaacctccaataaaaaaccaatattctattaaacgtaaaca

SEQ ID NO: 30441 - DNA, 603 bp, Artificial Sequence
  chemically treated genomic DNA (Homo sapiens) CpG-island No: 30441
  unsure (2, 105, 132, 140, 142, 148, 159, 165, 171, 182, 195, 220)
  unsure (222, 263, 281, 292, 296, 325, 339, 354, 384, 387, 419, 473)
  unsure (489, 546, 570)
gntttttttatattattcgttttcgcgtatatttgtgttttcgatttttttatatattttattttcgtatttattttcgttcgtattttacgtatttcgtcgttntcgcgtcgtttacgcgtatatacgttngtattcgngntttttntgtttacgcgnttattnggacgngtatttttttncgagtttatacgntcggtcggattatattcgagtattntntaattttttttatatttttcgtatttatttcgtgtattttnacggtttacgtatcgcgngtatattattnattnttttcgcgtatttcgtatatattattgtncgtatatttcgcgnattttacgcgttcgntcgcgttttattagtttattttttacgatnttngtacgcggtgattatttatttttcgtacgcgnatatttacgtttacgtatatatatttttttattttgtagtttcgatacgtattnatattgttgttcgatngtatatatttatttatattcgtattatgacgtaatcgatatatattgagtattatancgttgttgttattttttagattancgtgttacgttacgtttttatagtatttttcga

SEQ ID NO: 30442 - DNA, 603 bp, Artificial Sequence
  chemically treated genomic DNA (Homo sapiens) CpG-island No: 30442
  unsure (34, 58, 115, 131, 185, 217, 220, 250, 265, 279, 308, 312)
  unsure (323, 341, 382, 384, 409, 422, 433, 439, 445, 456, 462, 464)
  unsure (472, 499, 602)
tcgaaaaatactataaaaacgtaacgtaacacgntaatctaaaaaataacaacaacgntataatactcaatatatatcgattacgtcataatacgaatataaataaatatatacnatcgaacaacaatatnaatacgtatcgaaactacaaaataaaaaaatatatatacgtaaacgtaaatatncgcgtacgaaaaataaataatcaccgcgtacnaanatcgtaaaaaataaactaataaaacgcgancgaacgcgtaaaatncgcgaaatatacgnacaataatatatacgaaatacgcgaaaanaatnaataatatacncgcgatacgtaaaccgtnaaaatacacgaaataaatacgaaaaatataaaaaaaattananaatactcgaatataatccgaccgancgtataaactcgnaaaaaaatacncgtccnaataancgcgtaaacanaaaaancncgaatacnaacgtatatacgcgtaaacgacgcganaacgacgaaatacgtaaaatacgaacgaaaataaatacgaaaataaaatatataaaaaaatcgaaaacacaaatatacgcgaaaacgaataatataaaaaaanc

SEQ ID NO: 30443 - DNA, 603 bp, Artificial Sequence
  chemically treated genomic DNA (Homo sapiens) CpG-island No: 30443
  unsure (34, 58, 115, 131, 185, 217, 220, 250, 265, 279, 308, 312)
  unsure (323, 341, 382, 384, 409, 422, 433, 439, 445, 456, 462, 464)
  unsure (472, 499, 602)
tcgagagatattgtgaaagcgtagcgtagtacgntgatttagagagtgatagtagcgntgtggtgtttagtgtgtgtcggttacgttatagtgcgagtgtgagtgagtgtgtgtngtcgagtaatagtgtnagtgcgtgtcgagattatagagtgagagagtgtgtgtacgtgagcgtgagtgtncgcgtgcgaaaggtaagtggttatcgcgtgtnagnatcgtgagaggtgagttagtggagcgcgancgagcgcgtagggtncgcgaggtgtgcgnatagtgatgtgtgcggagtgcgcgagagnagtnagtagtgtgtncgcggtacgtgagtcgtnaaagtgtacgaggtgggtgcgagaggtgtgagagaggttananagtattcgagtgtgattcgatcgancgtgtgggttcgngagagagtgtncgtttnagtgancgcgtgagtanagagantncgagtgtnagcgtgtgtgcgcgtgagcggcgcganagcggcgaggtgcgtggagtgcgagcgagagtgagtgcgagagtgaggtgtgtgaggaggtcgagagtataagtgtgcgcgagagcgagtggtgtggagagant

SEQ ID NO: 30444 - DNA, 603 bp, Artificial Sequence
  chemically treated genomic DNA (Homo sapiens) CpG-island No: 30444
  unsure (2, 105, 132, 140, 142, 148, 159, 165, 171, 182, 195, 220)
  unsure (222, 263, 281, 292, 296, 325, 339, 354, 384, 387, 419, 473)
  unsure (489, 546, 570)
antctctccacaccactcgctctcgcgcacacttatactctcgacctcctcacacacctcactctcgcactcactctcgctcgcactccacgcacctcgccgctntcgcgccgctcacgcgcacacacgctnacactcgnantctctntactcacgcgntcactnaaacgnacactctctcncgaacccacacgntcgatcgaatcacactcgaatactntntaacctctctcacacctctcgcacccacctcgtacactttnacgactcacgtaccgcgnacacactactnactnctctcgcgcactccgcacacatcactatncgcacacctcgcgnaccctacgcgctcgntcgcgctccactaactcacctctcacgatnctnacacgcgataaccacttacctttcgcacgcgnacactcacgctcacgtacacacactctctcactctataatctcgacacgcactnacactattactcgacnacacacactcactcacactcgcactataacgtaaccgacacacactaaacaccacancgctactatcactctctaaatcancgtactacgctacgctttcacaatatctctcga

SEQ ID NO: 30445 - DNA, 505 bp, Artificial Sequence
  chemically treated genomic DNA (Homo sapiens) CpG-island No: 30445
gggttattagttttagtcgttcgggttgtacgcgtaggcggtttattcggggggcggcggcggcggtttggtcgggatgttggcggcgggcggtggcggcgcggggtcgggtttgtattacgcgttgtacgaggatggttacgaggcgtagttggagtcgtcgtcgtcgtcgtatttgggcgtttacggatacgtatacggatatgtatacgcgggcggtttgtacgcggcggcggcgtatttgtattcgggcgcgggcggcggcggtttatcggtgggcgagtattcggacgaggatgcgtttagttcggacgatttggagtagttcgttaagtagtttaagtagcggcgtattaagttgggttttacgtaggtcgacgtggggttggcgttgggtacgttttacggtaacgtgttttcgtagattattatttgtcgtttcgaggttttgtagttgagttttaagaatatgtgtaagtttaagtcgttgtttaataagtggttg

SEQ ID NO: 30446 - DNA, 505 bp, Artificial Sequence
  chemically treated genomic DNA (Homo sapiens) CpG-island No: 30446
caaccacttattaaacaacgacttaaacttacacatattcttaaaactcaactacaaaacctcgaaacgacaaataataatctacgaaaacacgttaccgtaaaacgtacccaacgccaaccccacgtcgacctacgtaaaacccaacttaatacgccgctacttaaactacttaacgaactactccaaatcgtccgaactaaacgcatcctcgtccgaatactcgcccaccgataaaccgccgccgcccgcgcccgaatacaaatacgccgccgccgcgtacaaaccgcccgcgtatacatatccgtatacgtatccgtaaacgcccaaatacgacgacgacgacgactccaactacgcctcgtaaccatcctcgtacaacgcgtaatacaaacccgaccccgcgccgccaccgcccgccgccaacatcccgaccaaaccgccgccgccgccccccgaataaaccgcctacgcgtacaacccgaacgactaaaactaataaccc

SEQ ID NO: 30447 - DNA, 505 bp, Artificial Sequence
  chemically treated genomic DNA (Homo sapiens) CpG-island No: 30447
tagttatttgttgagtagcggtttgagtttgtatatgtttttgaagtttagttgtagggtttcgaagcggtagatggtggtttgcgagaatacgttatcgtagagcgtgtttagcgttagttttacgtcggtttgcgtaaagtttagtttgatgcgtcgttgtttgaattgtttggcgaattgttttaggtcgttcgagttgggcgtattttcgttcgagtgttcgtttatcgatgagtcgtcgtcgttcgcgttcgggtgtaggtgcgtcgtcgtcgcgtgtaggtcgttcgcgtgtgtatgttcgtgtgcgtgttcgtgggcgtttagatgcggcggcggcgacggttttagttgcgtttcgtggttattttcgtgtagcgcgtggtgtaggttcggtttcgcgtcgttatcgttcgtcgttagtatttcggttaggtcgtcgtcgtcgtttttcgggtaggtcgtttgcgcgtatagttcgagcggttggggttggtggttt

SEQ ID NO: 30448 - DNA, 505 bp, Artificial Sequence
  chemically treated genomic DNA (Homo sapiens) CpG-island No: 30448
aaaccaccaaccccaaccgctcgaactatacgcgcaaacgacctacccgaaaaacgacgacgacgacctaaccgaaatactaacgacgaacgataacgacgcgaaaccgaacctacaccacgcgctacacgaaaataaccacgaaacgcaactaaaaccgtcgccgccgccgcatctaaacgcccacgaacacgcacacgaacatacacacgcgaacgacctacacgcgacgacgacgcacctacacccgaacgcgaacgacgacgactcatcgataaacgaacactcgaacgaaaatacgcccaactcgaacgacctaaaacaattcgccaaacaattcaaacaacgacgcatcaaactaaactttacgcaaaccgacgtaaaactaacgctaaacacgctctacgataacgtattctcgcaaaccaccatctaccgcttcgaaaccctacaactaaacttcaaaaacatatacaaactcaaaccgctactcaacaaataacta

SEQ ID NO: 30449 - DNA, 765 bp, Artificial Sequence
  chemically treated genomic DNA (Homo sapiens) CpG-island No: 30449
gaaggcggaagtcgcggtttagattttagggcgttgttgattttcgtttgggtcgtagggttcgcggggttggtttaaggttagtagcgtagtttcgcgcgtatttatcgggttcggacgatagggttatgtcgtcggtcgaaagggacggtcgtagggttggagtaaaggggacgcgttgggtagagcggagcggggttgttgggtattgaggttagtcggggttagggttcggttaggtcgcgtttcgtagtaggcgcgggggtcgggcgtttagagggcgtagcgttgcggattttcggttaggagggtttcgcgggaggagggagggtcgttttagtagggaggaagtcggttagtcgcgtgtagttttcgtcggtgttttatttgggcgcggagcggagtagagagagtcgagaggttatttgaagcgttcgggtcgcgtcgttaacgggaaatttgagagtagtaggggcgcggcggtcgttagggtttttggtcggaagtattcgtcgttttttgggtttcgcggggttcgcgtcgtagttcggagtagatgttagtcgggttttttagattttaattgcgttggtttcgtcgggtttttatatcgtttttcgtgtcgttcgggtttgttcgacgttttttttttttcgtataattttttttagcgcgagattttgggggtttcggtttcgtataggtgatttgttttttgtagttgtagtaattcgtaagtattggttttttttaggcgtttttttg

SEQ ID NO: 30450 - DNA, 765 bp, Artificial Sequence
  chemically treated genomic DNA (Homo sapiens) CpG-island No: 30450
caaaaaaacgcctaaaaaaaaccaatacttacgaattactacaactacaaaaaacaaatcacctatacgaaaccgaaacccccaaaatctcgcgctaaaaaaaattatacgaaaaaaaaaaaacgtcgaacaaacccgaacgacacgaaaaacgatataaaaacccgacgaaaccaacgcaattaaaatctaaaaaacccgactaacatctactccgaactacgacgcgaaccccgcgaaacccaaaaaacgacgaatacttccgaccaaaaaccctaacgaccgccgcgcccctactactctcaaatttcccgttaacgacgcgacccgaacgcttcaaataacctctcgactctctctactccgctccgcgcccaaataaaacaccgacgaaaactacacgcgactaaccgacttcctccctactaaaacgaccctccctcctcccgcgaaaccctcctaaccgaaaatccgcaacgctacgccctctaaacgcccgacccccgcgcctactacgaaacgcgacctaaccgaaccctaaccccgactaacctcaatacccaacaaccccgctccgctctacccaacgcgtcccctttactccaaccctacgaccgtccctttcgaccgacgacataaccctatcgtccgaacccgataaatacgcgcgaaactacgctactaaccttaaaccaaccccgcgaaccctacgacccaaacgaaaatcaacaacgccctaaaatctaaaccgcgacttccgccttc

SEQ ID NO: 30451 - DNA, 765 bp, Artificial Sequence
  chemically treated genomic DNA (Homo sapiens) CpG-island No: 30451
tagaaggacgtttggaagaaattaatgtttgcgggttgttgtaattatagggagtaagttatttgtgcggggtcgagatttttagagtttcgcgttgggaaaagttgtgcggggaggggaggacgtcgggtaagttcgggcggtacggggagcggtgtggaagttcggcggggttagcgtagttgaggtttggggagttcggttggtatttgtttcgggttgcggcgcgggtttcgcggagtttaggaggcggcgggtgttttcggttaagggttttggcggtcgtcgcgtttttgttgtttttaagtttttcgttggcggcgcggttcgggcgttttaggtagtttttcggttttttttgtttcgtttcgcgtttaggtagggtatcgacgggggttgtacgcggttggtcggttttttttttgttgaggcggtttttttttttttcgcggggtttttttggtcggggattcgtagcgttgcgttttttgaacgttcggttttcgcgtttgttgcggggcgcggtttggtcgggttttggtttcggttggttttagtgtttagtagtttcgtttcgttttgtttagcgcgttttttttgttttagttttgcggtcgtttttttcggtcggcggtatggttttgtcgttcgaattcggtgagtgcgcgcgaggttgcgttgttgattttgggttagtttcgcggattttgcggtttaggcgggaattagtagcgttttggggtttgaatcgcggttttcgttttt

SEQ ID NO: 30452 - DNA, 765 bp, Artificial Sequence
  chemically treated genomic DNA (Homo sapiens) CpG-island No: 30452
aaaaacgaaaaccgcgattcaaaccccaaaacgctactaattcccgcctaaaccgcaaaatccgcgaaactaacccaaaatcaacaacgcaacctcgcgcgcactcaccgaattcgaacgacaaaaccataccgccgaccgaaaaaaacgaccgcaaaactaaaacaaaaaaaacgcgctaaacaaaacgaaacgaaactactaaacactaaaaccaaccgaaaccaaaacccgaccaaaccgcgccccgcaacaaacgcgaaaaccgaacgttcaaaaaacgcaacgctacgaatccccgaccaaaaaaaccccgcgaaaaaaaaaaaaaccgcctcaacaaaaaaaaaaccgaccaaccgcgtacaacccccgtcgataccctacctaaacgcgaaacgaaacaaaaaaaaccgaaaaactacctaaaacgcccgaaccgcgccgccaacgaaaaacttaaaaacaacaaaaacgcgacgaccgccaaaacccttaaccgaaaacacccgccgcctcctaaactccgcgaaacccgcgccgcaacccgaaacaaataccaaccgaactccccaaacctcaactacgctaaccccgccgaacttccacaccgctccccgtaccgcccgaacttacccgacgtcctcccctccccgcacaacttttcccaacgcgaaactctaaaaatctcgaccccgcacaaataacttactccctataattacaacaacccgcaaacattaatttcttccaaacgtccttcta

SEQ ID NO: 30453 - DNA, 838 bp, Artificial Sequence
  chemically treated genomic DNA (Homo sapiens) CpG-island No: 30453
gcgagcgcggtggcggcgaagggaaacgagtaggagagtggttatcgcgggtggagtttggattcgaattttttttcgttcggattcgaattttttttcgttttttttacgagttattgttttttcgcgggttttttataatttttgttcggaggtcgaggttcgggcgcgtatcgggtcggagtcgggttcggtaggtttcgggagcgcgcgtttttttttcgaggtttcgggtagttgtagatacggggagagtaggagagtcgggaaagaggaggggaaggggcgggggcggtcgtcggcggcgggcggggaggagtcgtcgcgcgcgggttttggttaggggaggaggtagtggcggcggcggcggcggtagaggaggaggaggaggcggtgttcgcgtcgggcggtagagcggcgttgggatttatgcggtcgtgattttcggttttttagaggtttagcgtagtcgtagcggataaaggagtatgttcgcgtcggggaaggttcgtttttcggtcgttataaggtttcggtcgtcgttgggttcgcgtcgcgtttttgttcgttcgggtttcggggcggttcgttaggttagtgcgtcgtcgttcgtttcgtaggtttcggttcgtagtatggagttattcggacgtcggggggtcgcgggtagtcgtcgttggtgttgtcgttttcgttgttagcgttgttcgcgttgttggaagtcggcggcgtcggcggcgtcgcggcgttgttcgtcggttgtaagtacgatgggcggtttcgaggggttggtagggcggcgggcgtgaatttagggggtggagtttgtagtgagtcg

SEQ ID NO: 30454 - DNA, 838 bp, Artificial Sequence
  chemically treated genomic DNA (Homo sapiens) CpG-island No: 30454
cgactcactacaaactccaccccctaaattcacgcccgccgccctaccaacccctcgaaaccgcccatcgtacttacaaccgacgaacaacgccgcgacgccgccgacgccgccgacttccaacaacgcgaacaacgctaacaacgaaaacgacaacaccaacgacgactacccgcgaccccccgacgtccgaataactccatactacgaaccgaaacctacgaaacgaacgacgacgcactaacctaacgaaccgccccgaaacccgaacgaacaaaaacgcgacgcgaacccaacgacgaccgaaaccttataacgaccgaaaaacgaaccttccccgacgcgaacatactcctttatccgctacgactacgctaaacctctaaaaaaccgaaaatcacgaccgcataaatcccaacgccgctctaccgcccgacgcgaacaccgcctcctcctcctcctctaccgccgccgccgccgccactacctcctcccctaaccaaaacccgcgcgcgacgactcctccccgcccgccgccgacgaccgcccccgccccttcccctcctctttcccgactctcctactctccccgtatctacaactacccgaaacctcgaaaaaaaaacgcgcgctcccgaaacctaccgaacccgactccgacccgatacgcgcccgaacctcgacctccgaacaaaaattataaaaaacccgcgaaaaaacaataactcgtaaaaaaaacgaaaaaaaattcgaatccgaacgaaaaaaaattcgaatccaaactccacccgcgataaccactctcctactcgtttcccttcgccgccaccgcgctcgc

SEQ ID NO: 30455 - DNA, 838 bp, Artificial Sequence
  chemically treated genomic DNA (Homo sapiens) CpG-island No: 30455
cggtttattgtaagttttattttttgggtttacgttcgtcgttttgttagtttttcggggtcgtttatcgtgtttgtagtcggcgggtagcgtcgcggcgtcgtcggcgtcgtcggtttttagtagcgcgagtagcgttaatagcgagagcggtagtattagcggcggttgttcgcggtttttcggcgttcgggtggttttatgttgcgggtcggggtttgcggggcgagcggcggcgtattggtttagcgggtcgtttcggagttcgggcgggtaggagcgcggcgcgggtttagcggcgatcggagttttatggcggtcggaggacgggtttttttcggcgcggatatgtttttttgttcgttgcggttgcgttgggtttttagggagtcgggggttacggtcgtatgggttttagcgtcgttttatcgttcggcgcgagtatcgtttttttttttttttttgtcgtcgtcgtcgtcgttattgtttttttttttggttaggattcgcgcgcggcggttttttttcgttcgtcgtcggcggtcgttttcgttttttttttttttttttttcggtttttttgtttttttcgtgtttgtagttgttcgggatttcggggaggaggcgcgcgttttcgggatttgtcgagttcgatttcgattcggtgcgcgttcgggtttcggttttcgggtaggagttgtggggagttcgcgggaaggtagtaattcgtagagagaacggaggaaagttcgagttcgaacggaggaaagttcgagtttaaattttattcgcggtggttatttttttgttcgttttttttcgtcgttatcgcgttcgt

SEQ ID NO: 30456 - DNA, 838 bp, Artificial Sequence
  chemically treated genomic DNA (Homo sapiens) CpG-island No: 30456
acgaacgcgataacgacgaaaaaaaacgaacaaaaaaataaccaccgcgaataaaatttaaactcgaactttcctccgttcgaactcgaactttcctccgttctctctacgaattactaccttcccgcgaactccccacaactcctacccgaaaaccgaaacccgaacgcgcaccgaatcgaaatcgaactcgacaaatcccgaaaacgcgcgcctcctccccgaaatcccgaacaactacaaacacgaaaaaaacaaaaaaaccgaaaaaaaaaaaaaaaaaaaacgaaaacgaccgccgacgacgaacgaaaaaaaaccgccgcgcgcgaatcctaaccaaaaaaaaaaacaataacgacgacgacgacgacaaaaaaaaaaaaaaaaacgatactcgcgccgaacgataaaacgacgctaaaacccatacgaccgtaacccccgactccctaaaaacccaacgcaaccgcaacgaacaaaaaaacatatccgcgccgaaaaaaacccgtcctccgaccgccataaaactccgatcgccgctaaacccgcgccgcgctcctacccgcccgaactccgaaacgacccgctaaaccaatacgccgccgctcgccccgcaaaccccgacccgcaacataaaaccacccgaacgccgaaaaaccgcgaacaaccgccgctaatactaccgctctcgctattaacgctactcgcgctactaaaaaccgacgacgccgacgacgccgcgacgctacccgccgactacaaacacgataaacgaccccgaaaaactaacaaaacgacgaacgtaaacccaaaaaataaaacttacaataaaccg

SEQ ID NO: 30457 - DNA, 949 bp, Artificial Sequence
  chemically treated genomic DNA (Homo sapiens) CpG-island No: 30457
gtcgtttttgtgtttttcggttaggcggttggatcgtagcgtgtatagtagcgtcgggattttacgtattgagtagagcggtacgagtatcgcggtcgatcgggtcgcgcgcggagtcgggtcgtggtttttgttagtagtcggcggtagcgtagttcgttttcggtcgataggtagtcgggtagtatgttaagttttgcgcggtcgggatattgagggcgcgggatcgggcgagggaagaggcggggcgaggcggggcggggcgtttagttcgggttttttcgaaagttgagagggagaaggggtagttcgcgcgacgcgtttcgtttggggggttgtagagcggtagcggcgtcggggggttttagtggggtgggtttgttcgtgggcggggttttttcggagacggggtttcggtgggattgggtttgttcgggggcggggtttgtttgaaggcgggttttcggtgggatagggtttattagggggcggggtttgtttgaagcggggtttcggtgggacgcgttgagtttttcggatgggagggacggagggcggcggggcggggcggggcggggtttgcgcgggagtcggattcggacgttattgttaaagggcgcggggtttagtaggtaatcgaggttggggcgggttggggcggggtttggatcggagtttttgttacgaaggattggggggcgtggttaggaggattgtgttttcgtagggtcgggcgtggtcgggggtgtggtcgcggggagggagatgggcgcggagttgtaggattgtcggttgtgtttttcgagattttgaaattacgcgaatcgtgaagcgttcggcgatcgttttcggttcgttgggttttggcgttggggtgtttgatgaagtttcgtcggtttttattggttcgttttttttttaggggttttaggatgtacggagtcgggat

SEQ ID NO: 30458 - DNA, 949 bp, Artificial Sequence
  chemically treated genomic DNA (Homo sapiens) CpG-island No: 30458
atcccgactccgtacatcctaaaacccctaaaaaaaaaacgaaccaataaaaaccgacgaaacttcatcaaacaccccaacgccaaaacccaacgaaccgaaaacgatcgccgaacgcttcacgattcgcgtaatttcaaaatctcgaaaaacacaaccgacaatcctacaactccgcgcccatctccctccccgcgaccacacccccgaccacgcccgaccctacgaaaacacaatcctcctaaccacgccccccaatccttcgtaacaaaaactccgatccaaaccccgccccaacccgccccaacctcgattacctactaaaccccgcgccctttaacaataacgtccgaatccgactcccgcgcaaaccccgccccgccccgccccgccgccctccgtccctcccatccgaaaaactcaacgcgtcccaccgaaaccccgcttcaaacaaaccccgccccctaataaaccctatcccaccgaaaacccgccttcaaacaaaccccgcccccgaacaaacccaatcccaccgaaaccccgtctccgaaaaaaccccgcccacgaacaaacccaccccactaaaaccccccgacgccgctaccgctctacaaccccccaaacgaaacgcgtcgcgcgaactaccccttctccctctcaactttcgaaaaaacccgaactaaacgccccgccccgcctcgccccgcctcttccctcgcccgatcccgcgccctcaatatcccgaccgcgcaaaacttaacatactacccgactacctatcgaccgaaaacgaactacgctaccgccgactactaacaaaaaccacgacccgactccgcgcgcgacccgatcgaccgcgatactcgtaccgctctactcaatacgtaaaatcccgacgctactatacacgctacgatccaaccgcctaaccgaaaaacacaaaaacgac

SEQ ID NO: 30459 - DNA, 949 bp, Artificial Sequence
  chemically treated genomic DNA (Homo sapiens) CpG-island No: 30459
atttcggtttcgtatattttggagtttttaggggagggacggattagtgggggtcggcggggttttattagatattttaacgttaggatttaacggatcgaggacggtcgtcgggcgttttacggttcgcgtggttttaggatttcggagaatataatcggtagttttgtagtttcgcgtttattttttttttcgcggttatattttcggttacgttcggttttgcgaaagtatagtttttttggttacgttttttagtttttcgtagtaaaagtttcggtttaggtttcgttttagttcgttttaatttcgattgtttattaggtttcgcgttttttggtagtaacgttcgagttcggttttcgcgtaggtttcgtttcgtttcgtttcgtcgtttttcgttttttttattcgggggatttaacgcgttttatcgaggtttcgttttaaataggtttcgttttttaatggattttgttttatcgaggattcgtttttaaataggtttcgttttcgaatagatttagttttatcgaggtttcgttttcgggaaggtttcgtttacgaatagatttattttattgaggtttttcgacgtcgttgtcgttttgtagttttttaggcgggacgcgtcgcgcgggttgtttttttttttttttagttttcggagggattcgggttgagcgtttcgtttcgtttcgtttcgttttttttttcgttcgatttcgcgtttttagtgtttcggtcgcgtaggatttgatatgttgttcgattgtttgtcggtcgagggcgagttgcgttgtcgtcggttgttggtaggggttacggttcggtttcgcgcgcggttcggtcggtcgcggtgttcgtgtcgttttgtttagtgcgtggggtttcggcgttgttgtatacgttgcggtttagtcgtttgatcgggaggtataagggcgat

SEQ ID NO: 30460 - DNA, 949 bp, Artificial Sequence
  chemically treated genomic DNA (Homo sapiens) CpG-island No: 30460
atcgcccttatacctcccgatcaaacgactaaaccgcaacgtatacaacaacgccgaaaccccacgcactaaacaaaacgacacgaacaccgcgaccgaccgaaccgcgcgcgaaaccgaaccgtaacccctaccaacaaccgacgacaacgcaactcgccctcgaccgacaaacaatcgaacaacatatcaaatcctacgcgaccgaaacactaaaaacgcgaaatcgaacgaaaaaaaaaacgaaacgaaacgaaacgaaacgctcaacccgaatccctccgaaaactaaaaaaaaaaaaaaacaacccgcgcgacgcgtcccgcctaaaaaactacaaaacgacaacgacgtcgaaaaacctcaataaaataaatctattcgtaaacgaaaccttcccgaaaacgaaacctcgataaaactaaatctattcgaaaacgaaacctatttaaaaacgaatcctcgataaaacaaaatccattaaaaaacgaaacctatttaaaacgaaacctcgataaaacgcgttaaatcccccgaataaaaaaaacgaaaaacgacgaaacgaaacgaaacgaaacctacgcgaaaaccgaactcgaacgttactaccaaaaaacgcgaaacctaataaacaatcgaaattaaaacgaactaaaacgaaacctaaaccgaaacttttactacgaaaaactaaaaaacgtaaccaaaaaaactatactttcgcaaaaccgaacgtaaccgaaaatataaccgcgaaaaaaaaaataaacgcgaaactacaaaactaccgattatattctccgaaatcctaaaaccacgcgaaccgtaaaacgcccgacgaccgtcctcgatccgttaaatcctaacgttaaaatatctaataaaaccccgccgacccccactaatccgtccctcccctaaaaactccaaaatatacgaaaccgaaat

SEQ ID NO: 30461 - DNA, 829 bp, Artificial Sequence
  chemically treated genomic DNA (Homo sapiens) CpG-island No: 30461
tgcggggtcgtttagtcgcgttttgattggtaagcgggttgtacgtttttggtaaatagaggtttggtcggaagggcgagcgggtacgaatgtttttttattttcgattggtgcgcgaagatgttattcgagtttttttattggtcgagatttgttttagtaggtcgtaatcgtcgtcgattggttttcgtttttcggatttcgtatttgtttgtttcggattgggcggtggtatcgtcgcgtaattggcgagttcgttgttcgggcgcgcgtttttaattcgattagttttaggttttagaggcggggtttgggaacgggattcgggttgggttgtcgttcgttcgaggggtttttcgggcgcggcgtattttcgcgtttattcgcgttgttttagacgtttgttcgttttgtttagtttcggtttagtagggttgttgtcgtagttgtcgtcgtcgttgttatcggtgttttgcgcgttttttcgttttgggggtcgaaggacgtagggttttgacgtttcgagttttgcgttttatttcgtgcgtttttacgttattttttatcggtttaatattcgtttttcgatttgcgtatgcgttcgttcgaggtttgcgtttgtttttatggtaataggttttttatggatgtcgttacgtatcgttttttttgcggtttggttcgtttttaggtttaagggcgattttaaagatttttttattcgtatttttaaggtttcgcgttgttgtttaagttagtgataatggtcgtagggtaaattttcgggattatttgcgtgtcgggtttcggattaaattggttaagagta

SEQ ID NO: 30462 - DNA, 829 bp, Artificial Sequence
  chemically treated genomic DNA (Homo sapiens) CpG-island No: 30462
tactcttaaccaatttaatccgaaacccgacacgcaaataatcccgaaaatttaccctacgaccattatcactaacttaaacaacaacgcgaaaccttaaaaatacgaataaaaaaatctttaaaatcgcccttaaacctaaaaacgaaccaaaccgcaaaaaaaacgatacgtaacgacatccataaaaaacctattaccataaaaacaaacgcaaacctcgaacgaacgcatacgcaaatcgaaaaacgaatattaaaccgataaaaaataacgtaaaaacgcacgaaataaaacgcaaaactcgaaacgtcaaaaccctacgtccttcgacccccaaaacgaaaaaacgcgcaaaacaccgataacaacgacgacgacaactacgacaacaaccctactaaaccgaaactaaacaaaacgaacaaacgtctaaaacaacgcgaataaacgcgaaaatacgccgcgcccgaaaaacccctcgaacgaacgacaacccaacccgaatcccgttcccaaaccccgcctctaaaacctaaaactaatcgaattaaaaacgcgcgcccgaacaacgaactcgccaattacgcgacgataccaccgcccaatccgaaacaaacaaatacgaaatccgaaaaacgaaaaccaatcgacgacgattacgacctactaaaacaaatctcgaccaataaaaaaactcgaataacatcttcgcgcaccaatcgaaaataaaaaaacattcgtacccgctcgcccttccgaccaaacctctatttaccaaaaacgtacaacccgcttaccaatcaaaacgcgactaaacgaccccgca

SEQ ID NO: 30463 - DNA, 829 bp, Artificial Sequence
  chemically treated genomic DNA (Homo sapiens) CpG-island No: 30463
tgtttttgattagtttggttcggggttcggtacgtaagtaatttcgaaggtttgttttacggttattgttattaatttaggtagtagcgcggggttttgggggtgcgggtaaaggggtttttgaggtcgtttttagatttgaggacgagttaagtcgtaggaagaacggtacgtggcggtatttatgaggggtttgttgttatgggaataaacgtaggtttcgggcgggcgtatgcgtagatcggggagcgggtgttgaatcggtgaaaggtgacgtaaaagcgtacggggtggggcgtagggttcgggacgttaaagttttgcgtttttcggtttttagagcggagaagcgcgtaaggtatcggtggtagcggcgacggtagttgcgatagtaattttgttgggtcgaaattgggtagagcgagtagacgtttgaagtagcgcgagtgagcgcgagggtacgtcgcgttcggaagatttttcgggcgaacggtagtttagttcgggtttcgtttttaagtttcgtttttagggtttgggattaatcggattgagagcgcgcgttcgggtagcgaattcgttaattgcgcgacggtgttatcgtttaattcggagtagataggtgcgaggttcggaaggcggaggttaatcggcggcggttgcgatttgttggggtaggtttcggttaataaggaggttcgagtgatattttcgcgtattaatcgggagtgagggagtattcgtgttcgttcgttttttcggttagatttttatttattaggggcgtgtagttcgtttgttaattagagcgcggttgagcggtttcgta

SEQ ID NO: 30464 - DNA, 829 bp, Artificial Sequence
  chemically treated genomic DNA (Homo sapiens) CpG-island No: 30464
tacgaaaccgctcaaccgcgctctaattaacaaacgaactacacgcccctaataaataaaaatctaaccgaaaaaacgaacgaacacgaatactccctcactcccgattaatacgcgaaaatatcactcgaacctccttattaaccgaaacctaccccaacaaatcgcaaccgccgccgattaacctccgccttccgaacctcgcacctatctactccgaattaaacgataacaccgtcgcgcaattaacgaattcgctacccgaacgcgcgctctcaatccgattaatcccaaaccctaaaaacgaaacttaaaaacgaaacccgaactaaactaccgttcgcccgaaaaatcttccgaacgcgacgtaccctcgcgctcactcgcgctacttcaaacgtctactcgctctacccaatttcgacccaacaaaattactatcgcaactaccgtcgccgctaccaccgataccttacgcgcttctccgctctaaaaaccgaaaaacgcaaaactttaacgtcccgaaccctacgccccaccccgtacgcttttacgtcacctttcaccgattcaacacccgctccccgatctacgcatacgcccgcccgaaacctacgtttattcccataacaacaaacccctcataaataccgccacgtaccgttcttcctacgacttaactcgtcctcaaatctaaaaacgacctcaaaaacccctttacccgcacccccaaaaccccgcgctactacctaaattaataacaataaccgtaaaacaaaccttcgaaattacttacgtaccgaaccccgaaccaaactaatcaaaaaca

SEQ ID NO: 30465 - DNA, 621 bp, Artificial Sequence
  chemically treated genomic DNA (Homo sapiens) CpG-island No: 30465
gggggtcgatcggttgggcggtttagtaggtgtttgtggggtttcggtatcggtttcgggtcggttaatttgcgttttagtttttttgttttgttttttcggtttagtttttttcgttcggttcggtattttcggtttttcgtttagtttcggcggttcgaattcgttgacgttataggatttattcgttgttttttcgagttaagtcgattttggtttcggtttcgtttttttttggcgttttgatttcgtttttcggattttatttttgttttttttcgggattttattttcgtttttttttaggattttaaggtcgtttttgttaaagaattttgtttttttcgttttcggcgttaagtacgttttttaaggtttagttacgttttttttgttttcgagtagtttttacgtttcgttttttgtttatcggtcgtttcgttaaggttttgttacgtttttttcggttttttcggttattttcgtttttattagtttcgtttttattagtttcgtttttcgttttagtcggagttttttcggttttttagtttagttcgttttggtttttgttttatttatagttcgaattttgtttttttttgtttgttcgggtttttt

SEQ ID NO: 30466 - DNA, 621 bp, Artificial Sequence
  chemically treated genomic DNA (Homo sapiens) CpG-island No: 30466
aaaaaacccgaacaaacaaaaaaaaacaaaattcgaactataaataaaacaaaaaccaaaacgaactaaactaaaaaaccgaaaaaactccgactaaaacgaaaaacgaaactaataaaaacgaaactaataaaaacgaaaataaccgaaaaaaccgaaaaaaacgtaacaaaaccttaacgaaacgaccgataaacaaaaaacgaaacgtaaaaactactcgaaaacaaaaaaaacgtaactaaaccttaaaaaacgtacttaacgccgaaaacgaaaaaaacaaaattctttaacaaaaacgaccttaaaatcctaaaaaaaaacgaaaataaaatcccgaaaaaaaacaaaaataaaatccgaaaaacgaaatcaaaacgccaaaaaaaaacgaaaccgaaaccaaaatcgacttaactcgaaaaaacaacgaataaatcctataacgtcaacgaattcgaaccgccgaaactaaacgaaaaaccgaaaataccgaaccgaacgaaaaaaactaaaccgaaaaaacaaaacaaaaaaactaaaacgcaaattaaccgacccgaaaccgataccgaaaccccacaaacacctactaaaccgcccaaccgatcgaccccc

SEQ ID NO: 30467 - DNA, 621 bp, Artificial Sequence
  chemically treated genomic DNA (Homo sapiens) CpG-island No: 30467
agaggattcgggtaggtaggaaagggtaggattcgaattgtgggtgggatagaggttaggacggattgagttaagagatcgagagaatttcggttagggcgaggggcggggttggtggaggcggggttggtgggggcggagatggtcggaagggtcgaaaggggcgtggtaagattttggcgaggcggtcggtaggtagggggcggggcgtgggaattattcgggagtagagggggcgtggttagattttagggggcgtgtttaacgtcgggagcgaaggagatagaattttttggtaggggcgattttagaattttggggaggagcgagaatggaatttcggggaggaataggggtggaattcggggggcggggttagaacgttaggagggggcggggtcggagttagggtcggtttgattcgggggagtagcgggtggattttgtgacgttagcgggttcgaatcgtcggagttgagcgagaggtcgggggtgtcgagtcgggcggggagagttgggtcgggagagtagaatagggaggttagagcgtaggttaatcggttcggagtcgatgtcggagttttataggtatttattaaatcgtttagtcgatcggttttt

SEQ ID NO: 30468 - DNA, 621 bp, Artificial Sequence
  chemically treated genomic DNA (Homo sapiens) CpG-island No: 30468
aaaaaccgatcgactaaacgatttaataaatacctataaaactccgacatcgactccgaaccgattaacctacgctctaacctccctattctactctcccgacccaactctccccgcccgactcgacacccccgacctctcgctcaactccgacgattcgaacccgctaacgtcacaaaatccacccgctactcccccgaatcaaaccgaccctaactccgaccccgccccctcctaacgttctaaccccgccccccgaattccacccctattcctccccgaaattccattctcgctcctccccaaaattctaaaatcgcccctaccaaaaaattctatctccttcgctcccgacgttaaacacgccccctaaaatctaaccacgccccctctactcccgaataattcccacgccccgccccctacctaccgaccgcctcgccaaaatcttaccacgcccctttcgacccttccgaccatctccgcccccaccaaccccgcctccaccaaccccgcccctcgccctaaccgaaattctctcgatctcttaactcaatccgtcctaacctctatcccacccacaattcgaatcctaccctttcctacctacccgaatcctct

SEQ ID NO: 30469 - DNA, 653 bp, Artificial Sequence
  chemically treated genomic DNA (Homo sapiens) CpG-island No: 30469
ttttagaacggtaggttttttttttttaggattttagttttcgcggttaaggttgtcgttgcgggggtttcgcgcgggattggttaggtttttttattaattttgtttggttcggtcgatttcgtcgcgattcgagcgtttttcggtttcgtagtatagggcgtttaggattcgttattttcgtcgttcgttttttttttcggagagttcggcggggtcgttaggttgtcgagataaagggtatcgcggcgttagaggtcgaggtttagtcgcgtttgtttttttttttttttcgtttattgttaatttttagtcgttcgtagaattttcgttgtttcggcgcgattttatcgttatttcggggttgtcgttcgggatcggtaagtcgggtagtcgcgaggcggtcgcggtatgttagggtcgaggagggggcggcggtcgttattatgtttgttcgttttttttagaagtagtgtgtttagcggataaagcgtagcggcggcgcgggcgtttaggtcgatttcgtcgattttcgcggaataagcggggttaggagtttcggaaattcggcgttttaatgtaataaataggaaatcgcggggatgatttgggtttcgggggaagtggaattattttttattagcgaagagatt

SEQ ID NO: 30470 - DNA, 653 bp, Artificial Sequence
  chemically treated genomic DNA (Homo sapiens) CpG-island No: 30470
aatctcttcgctaataaaaaataattccacttcccccgaaacccaaatcatccccgcgatttcctatttattacattaaaacgccgaatttccgaaactcctaaccccgcttattccgcgaaaatcgacgaaatcgacctaaacgcccgcgccgccgctacgctttatccgctaaacacactacttctaaaaaaaacgaacaaacataataacgaccgccgccccctcctcgaccctaacataccgcgaccgcctcgcgactacccgacttaccgatcccgaacgacaaccccgaaataacgataaaatcgcgccgaaacaacgaaaattctacgaacgactaaaaattaacaataaacgaaaaaaaaaaaaaaacaaacgcgactaaacctcgacctctaacgccgcgataccctttatctcgacaacctaacgaccccgccgaactctccgaaaaaaaaaacgaacgacgaaaataacgaatcctaaacgccctatactacgaaaccgaaaaacgctcgaatcgcgacgaaatcgaccgaaccaaacaaaattaataaaaaaacctaaccaatcccgcgcgaaacccccgcaacgacaaccttaaccgcgaaaactaaaatcctaaaaaaaaaaaacctaccgttctaaaa

SEQ ID NO: 30471 - DNA, 653 bp, Artificial Sequence
  chemically treated genomic DNA (Homo sapiens) CpG-island No: 30471
gattttttcgttggtaaaaaataattttatttttttcggaatttagattattttcgcgattttttgtttattgtattaaggcgtcgggttttcggggtttttggtttcgtttatttcgcgggggtcggcggggtcggtttgggcgttcgcgtcgtcgttgcgttttgttcgttgggtatattgtttttgggaggggcgggtagatatggtggcggtcgtcgtttttttttcggttttagtatgtcgcggtcgtttcgcggttattcggtttgtcggtttcgagcggtagtttcggggtggcgatggggtcgcgtcgaggtagcggaggttttgcgggcgattggaggttggtagtgggcgggagaaagaggaaggtaggcgcggttgggtttcggtttttggcgtcgcggtattttttgtttcggtagtttgacggtttcgtcgggtttttcggagaggggaacgggcggcgagggtggcgggttttgggcgttttgtgttgcggggtcgagaggcgttcgggtcgcggcgggatcggtcggattagatagggttaatggaagagtttggttagtttcgcgcggggttttcgtagcgatagttttggtcgcggggattggagttttgagggggagaagtttgtcgttttgaag

SEQ ID NO: 30472 - DNA, 653 bp, Artificial Sequence
  chemically treated genomic DNA (Homo sapiens) CpG-island No: 30472
cttcaaaacgacaaacttctccccctcaaaactccaatccccgcgaccaaaactatcgctacgaaaaccccgcgcgaaactaaccaaactcttccattaaccctatctaatccgaccgatcccgccgcgacccgaacgcctctcgaccccgcaacacaaaacgcccaaaacccgccaccctcgccgcccgttcccctctccgaaaaacccgacgaaaccgtcaaactaccgaaacaaaaaataccgcgacgccaaaaaccgaaacccaaccgcgcctaccttcctctttctcccgcccactaccaacctccaatcgcccgcaaaacctccgctacctcgacgcgaccccatcgccaccccgaaactaccgctcgaaaccgacaaaccgaataaccgcgaaacgaccgcgacatactaaaaccgaaaaaaaaacgacgaccgccaccatatctacccgcccctcccaaaaacaatatacccaacgaacaaaacgcaacgacgacgcgaacgcccaaaccgaccccgccgacccccgcgaaataaacgaaaccaaaaaccccgaaaacccgacgccttaatacaataaacaaaaaatcgcgaaaataatctaaattccgaaaaaaataaaattattttttaccaacgaaaaaatc

SEQ ID NO: 30473 - DNA, 659 bp, Artificial Sequence
  chemically treated genomic DNA (Homo sapiens) CpG-island No: 30473
taggtgcggatatttcgttagttagttagttagcgatgtttgcgggtaaaattcgatataggttttatcggtaattataatcgttttatcgcgggttaattttagtagggtgcgaaaattttgcggattgattagttgttcggtcgggttattggggttgtaaatataaattatttttacgtcgtttagtttgtcggaaatgttttgtaagtttagttgttagatgtatagcgttggtattgtgcggtattttacgttaatcgttttggcgttgacgttgtatatgtcgtacgttggcgggtagtagaggatggcgtttttattcggttcgtaaaaagcgcgaattagtagtttaatattttcgttcgcgttacggttgattagtatttgtttcggttttacgtttgtatattgcgcgtaatttttaattatcgttttcggttggtatttcgggtagcggttgagcgtttgttgagtaagttgaaattttacggtagtggggtattcgttggcgtttagttagatatcgtcgttatcgtttagacgacgcgtcgattgatacggcgttaggttgcggacgtttttacgcgttaaatcggtaatagttacggtgtttatgtttgttttttaagggcgttaatacgtaaagtaacggtatt

SEQ ID NO: 30474 - DNA, 659 bp, Artificial Sequence
  chemically treated genomic DNA (Homo sapiens) CpG-island No: 30474
aataccgttactttacgtattaacgcccttaaaaaacaaacataaacaccgtaactattaccgatttaacgcgtaaaaacgtccgcaacctaacgccgtatcaatcgacgcgtcgtctaaacgataacgacgatatctaactaaacgccaacgaataccccactaccgtaaaatttcaacttactcaacaaacgctcaaccgctacccgaaataccaaccgaaaacgataattaaaaattacgcgcaatatacaaacgtaaaaccgaaacaaatactaatcaaccgtaacgcgaacgaaaatattaaactactaattcgcgctttttacgaaccgaataaaaacgccatcctctactacccgccaacgtacgacatatacaacgtcaacgccaaaacgattaacgtaaaataccgcacaataccaacgctatacatctaacaactaaacttacaaaacatttccgacaaactaaacgacgtaaaaataatttatatttacaaccccaataacccgaccgaacaactaatcaatccgcaaaattttcgcaccctactaaaattaacccgcgataaaacgattataattaccgataaaacctatatcgaattttacccgcaaacatcgctaactaactaactaacgaaatatccgcaccta

SEQ ID NO: 30475 - DNA, 659 bp, Artificial Sequence
  chemically treated genomic DNA (Homo sapiens) CpG-island No: 30475
aatgtcgttattttgcgtgttaacgtttttaaggagtaagtatgagtatcgtgattattatcgatttagcgcgtgaaaacgttcgtaatttgacgtcgtattagtcggcgcgtcgtttgggcggtaacggcgatgtttggttgaacgttaacgaatattttattgtcgtggagttttagtttatttagtaaacgtttaatcgttattcggaatgttagtcgaaagcggtgattgaaaattacgcgtaatatgtaggcgtaaaatcggagtaggtgttggttagtcgtggcgcggacgaaggtattgaattgttgattcgcgttttttgcgaatcgggtaaagacgttattttttattgttcgttaacgtacggtatgtatagcgttagcgttaaaacgattggcgtggagtgtcgtatagtgttaacgttgtatatttggtaattgaatttatagggtattttcgataagttggacggcgtaaaagtggtttatgtttgtagttttaataattcgatcgggtaattgattaattcgtaggattttcgtattttgttggagttaattcgcggtaaggcgattgtggttgtcgatgaagtttatatcgagttttgttcgtaggtatcgttggttggttggttggcggaatattcgtatttg

SEQ ID NO: 30476 - DNA, 659 bp, Artificial Sequence
  chemically treated genomic DNA (Homo sapiens) CpG-island No: 30476
caaatacgaatattccgccaaccaaccaaccaacgatacctacgaacaaaactcgatataaacttcatcgacaaccacaatcgccttaccgcgaattaactccaacaaaatacgaaaatcctacgaattaatcaattacccgatcgaattattaaaactacaaacataaaccacttttacgccgtccaacttatcgaaaataccctataaattcaattaccaaatatacaacgttaacactatacgacactccacgccaatcgttttaacgctaacgctatacataccgtacgttaacgaacaataaaaaataacgtctttacccgattcgcaaaaaacgcgaatcaacaattcaataccttcgtccgcgccacgactaaccaacacctactccgattttacgcctacatattacgcgtaattttcaatcaccgctttcgactaacattccgaataacgattaaacgtttactaaataaactaaaactccacgacaataaaatattcgttaacgttcaaccaaacatcgccgttaccgcccaaacgacgcgccgactaatacgacgtcaaattacgaacgttttcacgcgctaaatcgataataatcacgatactcatacttactccttaaaaacgttaacacgcaaaataacgacatt

SEQ ID NO: 30477 - DNA, 535 bp, Artificial Sequence
  chemically treated genomic DNA (Homo sapiens) CpG-island No: 30477
gggcggttaggcgttcggcggcggttagtgtttttatggttgaagttagcgcggagaatttttttttcgatagtttttgtacggttatgcgtttttggaaatttgttagttcgaggttggaataggtggcggtgtaatcgtaagtcggtagaacgtggttggtgtcggaggcgtaattatttgtcgatttcggtgattagttattaagaaatatcgaatcggcgttggtgatgttatcgattagtttacgggcgttgtcgggtttgaatgattaggtgtttcgggtcgtattggttggagattttaagtattgcgttaaatttttagttattattaaagcggtttgcgtttaatgtttggcgggtcgggttcggtacgtcggtagttttgttatttggcgttcgacgggtttggaaacgcgacgcgttttattaatagcgggtcgtagtaaaaataatttgttaattcggggtcgggtttatttggaagagttaattagaattttcgaaattcggggtaacggttttgtaaataa

SEQ ID NO: 30478 - DNA, 535 bp, Artificial Sequence
  chemically treated genomic DNA (Homo sapiens) CpG-island No: 30478
ttatttacaaaaccgttaccccgaatttcgaaaattctaattaactcttccaaataaacccgaccccgaattaacaaattatttttactacgacccgctattaataaaacgcgtcgcgtttccaaacccgtcgaacgccaaataacaaaactaccgacgtaccgaacccgacccgccaaacattaaacgcaaaccgctttaataataactaaaaatttaacgcaatacttaaaatctccaaccaatacgacccgaaacacctaatcattcaaacccgacaacgcccgtaaactaatcgataacatcaccaacgccgattcgatatttcttaataactaatcaccgaaatcgacaaataattacgcctccgacaccaaccacgttctaccgacttacgattacaccgccacctattccaacctcgaactaacaaatttccaaaaacgcataaccgtacaaaaactatcgaaaaaaaaattctccgcgctaacttcaaccataaaaacactaaccgccgccgaacgcctaaccgccc

SEQ ID NO: 30479 - DNA, 535 bp, Artificial Sequence
  chemically treated genomic DNA (Homo sapiens) CpG-island No: 30479
ttgtttataaggtcgttatttcggatttcgggggttttgattggtttttttaggtgaattcggtttcggattaataagttatttttattacggttcgttgttaatagggcgcgtcgcgtttttaagttcgtcgaacgttaaatggtaaaattgtcggcgtgtcgaattcggttcgttaggtattgaacgtaagtcgttttaatggtgattaaagatttagcgtagtgtttggaatttttaattagtacggttcggagtatttgattatttagattcggtaacgttcgtgaattggtcgatagtattattagcgtcggttcggtattttttggtgattggttatcggaatcggtaggtgattacgttttcggtattaattacgttttatcgatttacggttatatcgttatttgttttagtttcgggttggtagatttttagaagcgtatgatcgtataggaattgtcgaaagaggggtttttcgcgttggttttaattatagaaatattggtcgtcgtcgagcgtttgatcgttt

SEQ ID NO: 30480 - DNA, 535 bp, Artificial Sequence
  chemically treated genomic DNA (Homo sapiens) CpG-island No: 30480
aaacgatcaaacgctcgacgacgaccaatatttctataattaaaaccaacgcgaaaaacccctctttcgacaattcctatacgatcatacgcttctaaaaatctaccaacccgaaactaaaacaaataacgatataaccgtaaatcgataaaacgtaattaataccgaaaacgtaatcacctaccgattccgataaccaatcaccaaaaaataccgaaccgacgctaataatactatcgaccaattcacgaacgttaccgaatctaaataatcaaatactccgaaccgtactaattaaaaattccaaacactacgctaaatctttaatcaccattaaaacgacttacgttcaatacctaacgaaccgaattcgacacgccgacaattttaccatttaacgttcgacgaacttaaaaacgcgacgcgccctattaacaacgaaccgtaataaaaataacttattaatccgaaaccgaattcacctaaaaaaaccaatcaaaacccccgaaatccgaaataacgaccttataaacaa

SEQ ID NO: 30481 - DNA, 684 bp, Artificial Sequence
  chemically treated genomic DNA (Homo sapiens) CpG-island No: 30481
gcgttcgatattttgttgttcggcgggtcgtagttcgtacggtcgcgatggatgtagttatttttcggtggtggcggtagcgggtcgttttttatgaagcggtcgagaacgttttttattagtcgcgagatgttgtttttcgtcggatcgtcgttgttttacggtagcgaatcgtagaacgcgatcgagttgaaggcgaagtagtcgtcgtcgttgggcgtttcgtgataggcgatgtcggagcgtattcgcgggtgttgcgtgtcgtttagattttgttggttgaagtcgtagttttttattattagtagatagttttcggtgtggcgatcggttgacgtggcgattattagcgtgtgcggcggcgaatcgagtatcgtgtcgacgatgtcgagtttagtgttcgcggcgtcgtcgtttacgaggtcgaagttgtcgagtttttcgtcgtagtcgatgttttcgaaggtttacgcgacgcgcgggtcgttgtttttcggtgttcgcgagtagtagttcgagatgtcgaaattttcggacgatatgtcggtgtcggttatcgtgttaggttacggttagaaagcggttaatggtattaaattatcgtgattggtgaaaatacgttcgaacggatttagattggattttattgaaagggtattcggtaaaattcggttaaatgtt

SEQ ID NO: 30482 - DNA, 684 bp, Artificial Sequence
  chemically treated genomic DNA (Homo sapiens) CpG-island No: 30482
aacatttaaccgaattttaccgaataccctttcaataaaatccaatctaaatccgttcgaacgtattttcaccaatcacgataatttaataccattaaccgctttctaaccgtaacctaacacgataaccgacaccgacatatcgtccgaaaatttcgacatctcgaactactactcgcgaacaccgaaaaacaacgacccgcgcgtcgcgtaaaccttcgaaaacatcgactacgacgaaaaactcgacaacttcgacctcgtaaacgacgacgccgcgaacactaaactcgacatcgtcgacacgatactcgattcgccgccgcacacgctaataatcgccacgtcaaccgatcgccacaccgaaaactatctactaataataaaaaactacgacttcaaccaacaaaatctaaacgacacgcaacacccgcgaatacgctccgacatcgcctatcacgaaacgcccaacgacgacgactacttcgccttcaactcgatcgcgttctacgattcgctaccgtaaaacaacgacgatccgacgaaaaacaacatctcgcgactaataaaaaacgttctcgaccgcttcataaaaaacgacccgctaccgccaccaccgaaaaataactacatccatcgcgaccgtacgaactacgacccgccgaacaacaaaatatcgaacgc

SEQ ID NO: 30483 - DNA, 684 bp, Artificial Sequence
  chemically treated genomic DNA (Homo sapiens) CpG-island No: 30483
aatatttggtcggattttatcggatgtttttttaatgggatttaatttgggttcgttcgggcgtatttttattagttacggtgatttggtgttattggtcgttttttggtcgtaatttgatacggtagtcggtatcggtatgtcgttcgaaggtttcgatatttcgagttattattcgcggatatcggagagtaacgattcgcgcgtcgcgtgggttttcgaaggtatcggttacgacgagaagttcggtaatttcggtttcgtgggcggcggcgtcgcgggtattgaattcgatatcgtcgatacgatgttcggttcgtcgtcgtatacgttggtggtcgttacgttagtcggtcgttatatcgaaggttatttgttggtgatggaggattacggttttaattagtagggtttggacggtacgtagtattcgcgagtgcgtttcgatatcgtttattacgagacgtttaacggcggcggttgtttcgtttttagttcgatcgcgttttgcggttcgttgtcgtggaataacggcgattcggcgaagaataatatttcgcggttggtgaagaacgttttcgatcgttttatgaaggacggttcgttgtcgttattatcgaaggatggttatatttatcgcggtcgtgcggattacgattcgtcgggtaataaggtgtcgaacgt

SEQ ID NO: 30484 - DNA, 684 bp, Artificial Sequence
  chemically treated genomic DNA (Homo sapiens) CpG-island No: 30484
acgttcgacaccttattacccgacgaatcgtaatccgcacgaccgcgataaatataaccatccttcgataataacgacaacgaaccgtccttcataaaacgatcgaaaacgttcttcaccaaccgcgaaatattattcttcgccgaatcgccgttattccacgacaacgaaccgcaaaacgcgatcgaactaaaaacgaaacaaccgccgccgttaaacgtctcgtaataaacgatatcgaaacgcactcgcgaatactacgtaccgtccaaaccctactaattaaaaccgtaatcctccatcaccaacaaataaccttcgatataacgaccgactaacgtaacgaccaccaacgtatacgacgacgaaccgaacatcgtatcgacgatatcgaattcaatacccgcgacgccgccgcccacgaaaccgaaattaccgaacttctcgtcgtaaccgataccttcgaaaacccacgcgacgcgcgaatcgttactctccgatatccgcgaataataactcgaaatatcgaaaccttcgaacgacataccgataccgactaccgtatcaaattacgaccaaaaaacgaccaataacaccaaatcaccgtaactaataaaaatacgcccgaacgaacccaaattaaatcccattaaaaaaacatccgataaaatccgaccaaatatt

SEQ ID NO: 30485 - DNA, 709 bp, Artificial Sequence
  chemically treated genomic DNA (Homo sapiens) CpG-island No: 30485
tagtatcgttttttttttataaaagcgtttaggcgcgggtagggggatgcgtttcgaagagaagttggtttttaggttttttttttgaataaaattaaagggaatttcgcgcggttcgataaggtttgggaggacgtagtgtacgcgcgaggattcggcgtgggttatatcgaattcggcggttcgagttcggttcgtattatatcggtgcgcgttaggtcgggtcgttttcgggtattcgcggtcggattcgagcggcggggatagggagtgcggtaagggggttcgcgcggtatttacgcggcggttcggtggcggcggcggtagttgtaaggtgtttcggtttgagtttttttggtcgttcgcgtttttttttttcgcgtttttcgttggttcgttcgttttttcgtttttcgttcgcgcggttcgcgtttttttttttcgttcggcgtcgttgtcgagtgaattggaattagttttcgcggtcggttttttataatgtatagcgcgtcgttcgttatattttttcgcggtttcgagcgttcggttttcgcgttcgtgtcgttcggcgtttcggttttgatttcgggttcgcgttttattcgttgacgtcggtcgttttgcgtttaggtattagttcgtatttcggacgcgaggtttgatttatgatttcggggacgtttagagtttagtttttgggaagggttag

SEQ ID NO: 30486 - DNA, 709 bp, Artificial Sequence
  chemically treated genomic DNA (Homo sapiens) CpG-island No: 30486
ctaacccttcccaaaaactaaactctaaacgtccccgaaatcataaatcaaacctcgcgtccgaaatacgaactaatacctaaacgcaaaacgaccgacgtcaacgaataaaacgcgaacccgaaatcaaaaccgaaacgccgaacgacacgaacgcgaaaaccgaacgctcgaaaccgcgaaaaaatataacgaacgacgcgctatacattataaaaaaccgaccgcgaaaactaattccaattcactcgacaacgacgccgaacgaaaaaaaaaaacgcgaaccgcgcgaacgaaaaacgaaaaaacgaacgaaccaacgaaaaacgcgaaaaaaaaaaacgcgaacgaccaaaaaaactcaaaccgaaacaccttacaactaccgccgccgccaccgaaccgccgcgtaaataccgcgcgaacccccttaccgcactccctatccccgccgctcgaatccgaccgcgaatacccgaaaacgacccgacctaacgcgcaccgatataatacgaaccgaactcgaaccgccgaattcgatataacccacgccgaatcctcgcgcgtacactacgtcctcccaaaccttatcgaaccgcgcgaaattccctttaattttattcaaaaaaaaaacctaaaaaccaacttctcttcgaaacgcatccccctacccgcgcctaaacgcttttataaaaaaaaaacgatacta

SEQ ID NO: 30487 - DNA, 709 bp, Artificial Sequence
  chemically treated genomic DNA (Homo sapiens) CpG-island No: 30487
ttggttttttttaaggattgggttttgggcgttttcggggttatgggttagatttcgcgttcggggtgcgggttggtgtttgggcgtagagcggtcggcgttaacgggtagggcgcgggttcggggttaaggtcggggcgtcgggcggtacgggcgcggaggtcggacgttcggggtcgcgaagggatgtgacgagcggcgcgttgtgtattgtgggaagtcggtcgcgaggattggttttagtttattcggtagcggcgtcgggcggagggggagagcgcgggtcgcgcgggcgggaagcgaagaggcgggcgggttagcgaggagcgcggagagaaaaggcgcgagcggttaggagggtttaggtcgagatattttgtagttgtcgtcgtcgttatcgagtcgtcgcgtaagtgtcgcgcgggtttttttgtcgtattttttgttttcgtcgttcgggttcggtcgcgggtgttcgggagcggttcggtttggcgcgtatcggtgtggtgcgggtcgggttcgggtcgtcgggttcggtgtggtttacgtcgggttttcgcgcgtgtattacgtttttttaggttttgtcgggtcgcgcgggattttttttggttttgtttaaaaaagaaatttggaaattaattttttttcgaaacgtatttttttgttcgcgtttgggcgtttttgtgggaaaaaagcggtgttg

SEQ ID NO: 30488 - DNA, 709 bp, Artificial Sequence
  chemically treated genomic DNA (Homo sapiens) CpG-island No: 30488
caacaccgcttttttcccacaaaaacgcccaaacgcgaacaaaaaaatacgtttcgaaaaaaaattaatttccaaatttcttttttaaacaaaaccaaaaaaaatcccgcgcgacccgacaaaacctaaaaaaacgtaatacacgcgcgaaaacccgacgtaaaccacaccgaacccgacgacccgaacccgacccgcaccacaccgatacgcgccaaaccgaaccgctcccgaacacccgcgaccgaacccgaacgacgaaaacaaaaaatacgacaaaaaaacccgcgcgacacttacgcgacgactcgataacgacgacgacaactacaaaatatctcgacctaaaccctcctaaccgctcgcgccttttctctccgcgctcctcgctaacccgcccgcctcttcgcttcccgcccgcgcgacccgcgctctccccctccgcccgacgccgctaccgaataaactaaaaccaatcctcgcgaccgacttcccacaatacacaacgcgccgctcgtcacatcccttcgcgaccccgaacgtccgacctccgcgcccgtaccgcccgacgccccgaccttaaccccgaacccgcgccctacccgttaacgccgaccgctctacgcccaaacaccaacccgcaccccgaacgcgaaatctaacccataaccccgaaaacgcccaaaacccaatccttaaaaaaaaccaa

SEQ ID NO: 30489 - DNA, 770 bp, Artificial Sequence
  chemically treated genomic DNA (Homo sapiens) CpG-island No: 30489
ggacgatttttgggtggtcggtagtttcgggggggttttttcgcgtggtagtaatgtttggcgtcgcggagaagagggtggtttcgtcgggtgatgcggttggtaagggagtgtcgtaggtgagtttagtgtagtggcgtaggtgagatcgtttagtggtaggattttggggcggtggtttagcggatggtgcgttttttttcggttttttcgataggcgatttgttcgggttagagagatcgcgggttcgaataaattttttcgtgaggtagtagtttttacgttttgttttcggaaggatcgggttttagttagttttatgtatatatgataaagtcgggaattgaacgcgggtgatgatacgagtataggattttatttttacggggtcgttcgttttagggtcgggggtgcgtatcgagtttggcgtggttgacggggaggttggggatttgagatgttagtcgttcgaggagttgtaggatggttaggattgtgatatattcgaggacgttgatattttattagtgtgtcggtggtgataagttagcgcgttaggtaggagtagcgttaagacggtagatataagtatttcgttattgtaaggttcgtttatgtgcgttttatttttagggttttggcgttaatatttgttttggcgatacgggtcggattcgagtcgacgggtgttttttttttcgtttgatatattttttagttttgttcggtaaatggagggtattgtgtatgtataatggtcgagttatag

SEQ ID NO: 30490 - DNA, 770 bp, Artificial Sequence
  chemically treated genomic DNA (Homo sapiens) CpG-island No: 30490
ctataactcgaccattatacatacacaataccctccatttaccgaacaaaactaaaaaatatatcaaacgaaaaaaaaaacacccgtcgactcgaatccgacccgtatcgccaaaacaaatattaacgccaaaaccctaaaaataaaacgcacataaacgaaccttacaataacgaaatacttatatctaccgtcttaacgctactcctacctaacgcgctaacttatcaccaccgacacactaataaaatatcaacgtcctcgaatatatcacaatcctaaccatcctacaactcctcgaacgactaacatctcaaatccccaacctccccgtcaaccacgccaaactcgatacgcacccccgaccctaaaacgaacgaccccgtaaaaataaaatcctatactcgtatcatcacccgcgttcaattcccgactttatcatatatacataaaactaactaaaacccgatccttccgaaaacaaaacgtaaaaactactacctcacgaaaaaatttattcgaacccgcgatctctctaacccgaacaaatcgcctatcgaaaaaaccgaaaaaaaacgcaccatccgctaaaccaccgccccaaaatcctaccactaaacgatctcacctacgccactacactaaactcacctacgacactcccttaccaaccgcatcacccgacgaaaccaccctcttctccgcgacgccaaacattactaccacgcgaaaaaacccccccgaaactaccgaccacccaaaaatcgtcc

SEQ ID NO: 30491 - DNA, 770 bp, Artificial Sequence
  chemically treated genomic DNA (Homo sapiens) CpG-island No: 30491
ttgtaattcggttattgtatatgtataatattttttatttatcggatagaattagggagtatattagacggaaaggagggtattcgtcgattcgaattcgattcgtgtcgttaaaataagtgttggcgttaggattttggagatagggcgtatatgagcggattttgtagtggcgagatatttgtatttatcgttttagcgttatttttgtttgacgcgttgatttgttattatcggtatattagtgaggtgttaacgttttcgagtatattatagttttggttattttgtaatttttcgggcgattagtattttaaatttttagttttttcgttaattacgttaggttcgatacgtattttcggttttggaacgaacggtttcgtggaaatgaggttttgtgttcgtgttattattcgcgtttaattttcggttttattatgtatgtataaggttggttggaattcggttttttcgggggtaagacgtggaagttgttgttttacgaaaagatttattcgagttcgcgatttttttaattcggatagatcgtttgtcgaagaaatcgaaaaagagcgtattattcgttggattatcgttttaaaattttgttattaggcgattttatttgcgttattgtattgagtttatttgcggtatttttttattaatcgtattattcggcggggttattttttttttcgcggcgttaaatattgttgttacgcgggaaaattttttcggaattatcggttatttaaagatcgttt

SEQ ID NO: 30492 - DNA, 770 bp, Artificial Sequence
  chemically treated genomic DNA (Homo sapiens) CpG-island No: 30492
aaacgatctttaaataaccgataattccgaaaaaattttcccgcgtaacaacaatatttaacgccgcgaaaaaaaaaataaccccgccgaataatacgattaataaaaaaataccgcaaataaactcaatacaataacgcaaataaaatcgcctaataacaaaattttaaaacgataatccaacgaataatacgctctttttcgatttcttcgacaaacgatctatccgaattaaaaaaatcgcgaactcgaataaatcttttcgtaaaacaacaacttccacgtcttacccccgaaaaaaccgaattccaaccaaccttatacatacataataaaaccgaaaattaaacgcgaataataacacgaacacaaaacctcatttccacgaaaccgttcgttccaaaaccgaaaatacgtatcgaacctaacgtaattaacgaaaaaactaaaaatttaaaatactaatcgcccgaaaaattacaaaataaccaaaactataatatactcgaaaacgttaacacctcactaatataccgataataacaaatcaacgcgtcaaacaaaaataacgctaaaacgataaatacaaatatctcgccactacaaaatccgctcatatacgccctatctccaaaatcctaacgccaacacttattttaacgacacgaatcgaattcgaatcgacgaataccctcctttccgtctaatatactccctaattctatccgataaataaaaaatattatacatatacaataaccgaattacaa

SEQ ID NO: 30493 - DNA, 976 bp, Artificial Sequence
  chemically treated genomic DNA (Homo sapiens) CpG-island No: 30493
tagtacgtttgtttgattatttgaattatttgtcgttataggattttgtttcgattttgtttttcgtaattatttttatttatcgttgttcgttttagtttcgcgttacgttatttttttttacgggttattcgagtatcgtaatttcgttaatttattggtttattagtttgttttttcgttgttgtaaatttgtttattttcgttattataattttttattattatatattacgtagttcggtaacgtattaatacgttgttaatacgttatggcgcgttgattttatattgtagttgtatatttatatttttattattttaaatatgtcgttttgtcgttttttatttggtttcgtttttttttttacgtttcggcgtaatatttttgttttcggtggtttaggtcgtgttatttttaattgtatattcgcgttttatatcgtcggtcgcgcggtacgtacggtcgcgtttttttgtcggttattttgggcgttcgtttttttttttttcgtttttttttttttcgtttttttattttgaatttttcgttttgacgttttttcgggtttcgttttcgcgttttgttcggtcgtacgtcgggttattttacgtttttaatttttatatagcgttcggcgttaatttacgcggttttatttttattacgtatattttacgggtcgtattaattcgttagcgtaaaagtaaataattgttgtacgttatataaagggtttacggttattatagggttttaaggtaaattcgtttaaaaatagggtttcgcgaatcgtttttggtcgtttttaatttaataagggtttcgcgttttaattatgaacgaagttatttataattaaatttaacgtttttacgtttattaacgtgcgcgaaaaatttttattaggattttttatattattatttatttcgttattttttttataaaaatattttatcgttatagtttttt

SEQ ID NO: 30494 - DNA, 976 bp, Artificial Sequence
  chemically treated genomic DNA (Homo sapiens) CpG-island No: 30494
aaaaaactataacgataaaatatttttataaaaaaaataacgaaataaataataatataaaaaatcctaataaaaatttttcgcgcacgttaataaacgtaaaaacgttaaatttaattataaataacttcgttcataattaaaacgcgaaacccttattaaattaaaaacgaccaaaaacgattcgcgaaaccctatttttaaacgaatttaccttaaaaccctataataaccgtaaaccctttatataacgtacaacaattatttacttttacgctaacgaattaatacgacccgtaaaatatacgtaataaaaataaaaccgcgtaaattaacgccgaacgctatataaaaattaaaaacgtaaaataacccgacgtacgaccgaacaaaacgcgaaaacgaaacccgaaaaaacgtcaaaacgaaaaattcaaaataaaaaaacgaaaaaaaaaaaaacgaaaaaaaaaaaaacgaacgcccaaaataaccgacaaaaaaacgcgaccgtacgtaccgcgcgaccgacgatataaaacgcgaatatacaattaaaaataacacgacctaaaccaccgaaaacaaaaatattacgccgaaacgtaaaaaaaaaaacgaaaccaaataaaaaacgacaaaacgacatatttaaaataataaaaatataaatatacaactacaatataaaatcaacgcgccataacgtattaacaacgtattaatacgttaccgaactacgtaatatataataataaaaaattataataacgaaaataaacaaatttacaacaacgaaaaaacaaactaataaaccaataaattaacgaaattacgatactcgaataacccgtaaaaaaaaataacgtaacgcgaaactaaaacgaacaacgataaataaaaataattacgaaaaacaaaatcgaaacaaaatcctataacgacaaataattcaaataatcaaacaaacgtacta

SEQ ID NO: 30495 - DNA, 976 bp, Artificial Sequence
  chemically treated genomic DNA (Homo sapiens) CpG-island No: 30495
aaggggttgtagcgatggaatgtttttataggggggatagcggggtgggtagtggtgtagaaggttttggtgggggtttttcgcgtacgttggtgagcgtggaggcgttagatttggttgtgaatggtttcgtttatggttggggcgcgaggtttttattgggttaggagcggttaggggcgattcgcggggttttgtttttaggcgggtttgttttgggattttgtggtggtcgtgggttttttgtgtggcgtgtagtagttgtttgtttttgcgttggcgggttagtgcggttcgtggagtgtgcgtggtgggaataaagtcgcgtgagttagcgtcgggcgttgtgtgaaagttgagggcgtggagtagttcggcgtgcggtcgggtagggcgcgagagcggagttcggaggggcgttagggcggagggtttagggtggaggggcggaggggagaggggcggagagagggagggcgggcgtttagagtagtcggtagagaggcgcggtcgtgcgtgtcgcgcggtcggcggtgtggggcgcgagtgtgtagttgagagtggtacggtttgggttatcggaggtaggggtgttgcgtcggagcgtgggagaaggggcggggttaggtggagggcggtagagcggtatatttagagtggtggaggtgtaggtgtgtagttgtagtgtagggttagcgcgttatggcgtgttagtagcgtgttagtgcgttgtcgggttgcgtagtgtgtggtggtggaaggttgtgatggcgggagtaagtaagtttgtagtagcgggaaagtaggttagtgagttagtgagttagcgaagttgcgatgttcgggtagttcgtgaaaagaggtggcgtggcgcgaagttgaagcgagtagcggtgggtgggagtagttgcggaaggtagggtcgaggtaaagttttgtagcggtaggtggtttaagtagttaagtaaacgtgttg

SEQ ID NO: 30496 - DNA, 976 bp, Artificial Sequence
  chemically treated genomic DNA (Homo sapiens) CpG-island No: 30496
caacacgtttacttaactacttaaaccacctaccgctacaaaactttacctcgaccctaccttccgcaactactcccacccaccgctactcgcttcaacttcgcgccacgccacctcttttcacgaactacccgaacatcgcaacttcgctaactcactaactcactaacctactttcccgctactacaaacttacttactcccgccatcacaaccttccaccaccacacactacgcaacccgacaacgcactaacacgctactaacacgccataacgcgctaaccctacactacaactacacacctacacctccaccactctaaatataccgctctaccgccctccacctaaccccgccccttctcccacgctccgacgcaacacccctacctccgataacccaaaccgtaccactctcaactacacactcgcgccccacaccgccgaccgcgcgacacgcacgaccgcgcctctctaccgactactctaaacgcccgccctccctctctccgcccctctcccctccgcccctccaccctaaaccctccgccctaacgcccctccgaactccgctctcgcgccctacccgaccgcacgccgaactactccacgccctcaactttcacacaacgcccgacgctaactcacgcgactttattcccaccacgcacactccacgaaccgcactaacccgccaacgcaaaaacaaacaactactacacgccacacaaaaaacccacgaccaccacaaaatcccaaaacaaacccgcctaaaaacaaaaccccgcgaatcgcccctaaccgctcctaacccaataaaaacctcgcgccccaaccataaacgaaaccattcacaaccaaatctaacgcctccacgctcaccaacgtacgcgaaaaacccccaccaaaaccttctacaccactacccaccccgctatcccccctataaaaacattccatcgctacaacccctt

SEQ ID NO: 30497 - DNA, 527 bp, Artificial Sequence
  chemically treated genomic DNA (Homo sapiens) CpG-island No: 30497
tgcggtgaaacgcgatttggaagggacgtcgtagtcgagacgtttagtttcgggtagcgatttcgggttggcggttgggacggcgtggcgtggtagggtgtcgtcgagaggaagttcgttacgcgggaggtaggtcgtttttggttcgttgtagacgtcgttgcgtaggggagtcgcgggtcgcgtggtcggtggcgggcgcgttcgggtgggttcgcggtagaggtcggaggggttagtggcgtgtgattgcgtttttcgagatcgaggggaatgtgtgatgagcgggttgcgcgcgcgggtgtgtgtgtgtgtgtgtgtgtgtgtgtgtgtgtatacgtcgcggttcggggcggtcgggcgcgtattttatttttgacgaaattggcggtggagttttcgtcgtcgtcgtcgggtttcgttatacgtttcgcgtcggtgtttgcgtcgaaggtaggttttagttttagtatttttagagtcgatagtttggggttagcgggtattgagtgcgggaggaggggtag

SEQ ID NO: 30498 - DNA, 527 bp, Artificial Sequence
  chemically treated genomic DNA (Homo sapiens) CpG-island No: 30498
ctacccctcctcccgcactcaatacccgctaaccccaaactatcgactctaaaaatactaaaactaaaacctaccttcgacgcaaacaccgacgcgaaacgtataacgaaacccgacgacgacgacgaaaactccaccgccaatttcgtcaaaaataaaatacgcgcccgaccgccccgaaccgcgacgtatacacacacacacacacacacacacacacacacacccgcgcgcgcaacccgctcatcacacattcccctcgatctcgaaaaacgcaatcacacgccactaacccctccgacctctaccgcgaacccacccgaacgcgcccgccaccgaccacgcgacccgcgactcccctacgcaacgacgtctacaacgaaccaaaaacgacctacctcccgcgtaacgaacttcctctcgacgacaccctaccacgccacgccgtcccaaccgccaacccgaaatcgctacccgaaactaaacgtctcgactacgacgtcccttccaaatcgcgtttcaccgca

SEQ ID NO: 30499 - DNA, 527 bp, Artificial Sequence
  chemically treated genomic DNA (Homo sapiens) CpG-island No: 30499
ttgttttttttttcgtatttagtgttcgttagttttaagttgtcggttttgggggtattgaggttgggatttgttttcggcgtagatatcggcgcggggcgtgtgacggagttcggcgacgacggcgggagttttatcgttagtttcgttagaggtaaggtacgcgttcggtcgtttcgggtcgcggcgtgtgtatatatatatatatatatatatatatatatattcgcgcgcgtaattcgtttattatatatttttttcgatttcgagaagcgtaattatacgttattagttttttcggtttttgtcgcgaatttattcgagcgcgttcgttatcgattacgcggttcgcggtttttttacgtagcggcgtttgtagcgggttaggggcggtttgtttttcgcgtggcgggttttttttcggcgatattttgttacgttacgtcgttttagtcgttagttcgaagtcgttgttcggagttgaacgtttcggttgcggcgttttttttaagtcgcgttttatcgta

SEQ ID NO: 30500 - DNA, 527 bp, Artificial Sequence
  chemically treated genomic DNA (Homo sapiens) CpG-island No: 30500
tacgataaaacgcgacttaaaaaaaacgccgcaaccgaaacgttcaactccgaacaacgacttcgaactaacgactaaaacgacgtaacgtaacaaaatatcgccgaaaaaaaacccgccacgcgaaaaacaaaccgcccctaacccgctacaaacgccgctacgtaaaaaaaccgcgaaccgcgtaatcgataacgaacgcgctcgaataaattcgcgacaaaaaccgaaaaaactaataacgtataattacgcttctcgaaatcgaaaaaaatatataataaacgaattacgcgcgcgaatatatatatatatatatatatatatatatatacacacgccgcgacccgaaacgaccgaacgcgtaccttacctctaacgaaactaacgataaaactcccgccgtcgtcgccgaactccgtcacacgccccgcgccgatatctacgccgaaaacaaatcccaacctcaatacccccaaaaccgacaacttaaaactaacgaacactaaatacgaaaaaaaaaacaa

SEQ ID NO: 30501 - DNA, 538 bp, Artificial Sequence
  chemically treated genomic DNA (Homo sapiens) CpG-island No: 30501
gaatagcggtagattttttagcgttaggttttcggtgacggtgattttgaagtttatatcggaaagacgtttgatcgcggtgatgttcgtttcgttttacgttacgtttgcggtttgcgcgttacggttgcggtgataaattatttgtttaatgtttgtatcgtagttattgttgcgtttgtttttaggtttagtaatcggttagttcgatttgtacgtcgtcgttaaatttttttgttacgtttagcgcgtttttggcggtgttgatattcgtatagtaaattatcgttatttagttagcgttggtttcgaagtatatacgcgaaaggattttgtttgtatcggtaattttggcgtttgttagtacgattttgtgcgggtagagcgtttttaggttacgaatcgtacgtacgttttcgtttacgtatagaatggtgtttatttcgataatgtcgattttttcggtaattaggcgagtggtttcgtaggcgttatttatagtttggttgtttagcgcgatttgtaatatcggtaatga

SEQ ID NO: 30502 - DNA, 538 bp, Artificial Sequence
  chemically treated genomic DNA (Homo sapiens) CpG-island No: 30502
tcattaccgatattacaaatcgcgctaaacaaccaaactataaataacgcctacgaaaccactcgcctaattaccgaaaaaatcgacattatcgaaataaacaccattctatacgtaaacgaaaacgtacgtacgattcgtaacctaaaaacgctctacccgcacaaaatcgtactaacaaacgccaaaattaccgatacaaacaaaatcctttcgcgtatatacttcgaaaccaacgctaactaaataacgataatttactatacgaatatcaacaccgccaaaaacgcgctaaacgtaacaaaaaaatttaacgacgacgtacaaatcgaactaaccgattactaaacctaaaaacaaacgcaacaataactacgatacaaacattaaacaaataatttatcaccgcaaccgtaacgcgcaaaccgcaaacgtaacgtaaaacgaaacgaacatcaccgcgatcaaacgtctttccgatataaacttcaaaatcaccgtcaccgaaaacctaacgctaaaaaatctaccgctattc

SEQ ID NO: 30503 - DNA, 538 bp, Artificial Sequence
  chemically treated genomic DNA (Homo sapiens) CpG-island No: 30503
ttattatcgatgttgtaagtcgcgttggataattagattatggatagcgtttacgaaattattcgtttgattgtcgaagaagtcgatattatcgaagtgggtattattttgtgcgtgggcgaaggcgtgcgtgcggttcgtgatttgaaagcgttttattcgtataaaatcgtattggtagacgttaaaattgtcgatgtaggtaaaattttttcgcgtatgtgtttcgaagttaacgttgattgggtgacggtaatttgttgtgcggatattaatatcgttaaaggcgcgttggacgtggtaaaagagtttaacggcgacgtgtagatcgaattgatcggttattggatttgggaataggcgtaatagtggttgcgatgtaggtattgggtaggtggtttattatcgtagtcgtgacgcgtaggtcgtaggcgtggcgtggggcgaagcggatattatcgcgattaaacgttttttcgatatgggttttaaagttatcgttatcggaggtttggcgttggaagatttgtcgttgttt

SEQ ID NO: 30504 - DNA, 538 bp, Artificial Sequence
  chemically treated genomic DNA (Homo sapiens) CpG-island No: 30504
aaacaacgacaaatcttccaacgccaaacctccgataacgataactttaaaacccatatcgaaaaaacgtttaatcgcgataatatccgcttcgccccacgccacgcctacgacctacgcgtcacgactacgataataaaccacctacccaatacctacatcgcaaccactattacgcctattcccaaatccaataaccgatcaattcgatctacacgtcgccgttaaactcttttaccacgtccaacgcgcctttaacgatattaatatccgcacaacaaattaccgtcacccaatcaacgttaacttcgaaacacatacgcgaaaaaattttacctacatcgacaattttaacgtctaccaatacgattttatacgaataaaacgctttcaaatcacgaaccgcacgcacgccttcgcccacgcacaaaataatacccacttcgataatatcgacttcttcgacaatcaaacgaataatttcgtaaacgctatccataatctaattatccaacgcgacttacaacatcgataataa

SEQ ID NO: 30505 - DNA, 506 bp, Artificial Sequence
  chemically treated genomic DNA (Homo sapiens) CpG-island No: 30505
gttttgcggatacggtaatggcggtatttaacgatattttcggttttcgtaaaaattagtttgaagtgatgcgcgaataagacgcgtcgattattgtcgattagttgttggtattttgtgatggtgaacgtatcgaagaaggtatgcgcgttaatattcgcgtggttgtgtagtatatcgaagcgtggatttttggtaacggttgtgtgtcgatttatggtttgatggaagatgcggcgacggttgaaatttttcgtatttcgatttggtagtggatttattattaaaaaacgttgagtaatggtaaatcggtgattaaagttttgtttcgttagatgttgggcgaagagatgaaagttattgttagcgaattgggcgaagaacgttttttttaggggcgttttgacgatgtcgtacgtttgatggaatagattattattttcgatgagttaattgattttttgattttgttaggttatcgtttgttagcgtaaattattatataa

SEQ ID NO: 30506 - DNA, 506 bp, Artificial Sequence
  chemically treated genomic DNA (Homo sapiens) CpG-island No: 30506
ttatataataatttacgctaacaaacgataacctaacaaaatcaaaaaatcaattaactcatcgaaaataataatctattccatcaaacgtacgacatcgtcaaaacgcccctaaaaaaaacgttcttcgcccaattcgctaacaataactttcatctcttcgcccaacatctaacgaaacaaaactttaatcaccgatttaccattactcaacgttttttaataataaatccactaccaaatcgaaatacgaaaaatttcaaccgtcgccgcatcttccatcaaaccataaatcgacacacaaccgttaccaaaaatccacgcttcgatatactacacaaccacgcgaatattaacgcgcataccttcttcgatacgttcaccatcacaaaataccaacaactaatcgacaataatcgacgcgtcttattcgcgcatcacttcaaactaatttttacgaaaaccgaaaatatcgttaaataccgccattaccgtatccgcaaaac

SEQ ID NO: 30507 - DNA, 506 bp, Artificial Sequence
  chemically treated genomic DNA (Homo sapiens) CpG-island No: 30507
ttatgtggtggtttacgttaataggcggtagtttggtagggttaggaaattaattaatttatcggaagtggtgatttgttttattaagcgtgcggtatcgttaaaacgtttttgggagaaacgtttttcgtttagttcgttggtaatgatttttattttttcgtttagtatttggcggaataaggttttggttatcggtttgttattgtttaacgttttttgatgatggatttattgttagatcgaggtacgggaaattttagtcgtcgtcgtattttttattaggttataaatcggtatatagtcgttgttagagatttacgtttcgatgtattgtatagttacgcgaatgttggcgcgtatatttttttcggtgcgtttattattataaggtgttagtagttgatcggtagtaatcggcgcgttttgttcgcgtattattttaagttgatttttacgggagtcgagaatgtcgttgaatatcgttattgtcgtgttcgtaaggt

SEQ ID NO: 30508 - DNA, 506 bp, Artificial Sequence
  chemically treated genomic DNA (Homo sapiens) CpG-island No: 30508
accttacgaacacgacaataacgatattcaacgacattctcgactcccgtaaaaatcaacttaaaataatacgcgaacaaaacgcgccgattactaccgatcaactactaacaccttataataataaacgcaccgaaaaaaatatacgcgccaacattcgcgtaactatacaatacatcgaaacgtaaatctctaacaacgactatataccgatttataacctaataaaaaatacgacgacgactaaaatttcccgtacctcgatctaacaataaatccatcatcaaaaaacgttaaacaataacaaaccgataaccaaaaccttattccgccaaatactaaacgaaaaaataaaaatcattaccaacgaactaaacgaaaaacgtttctcccaaaaacgttttaacgataccgcacgcttaataaaacaaatcaccacttccgataaattaattaatttcctaaccctaccaaactaccgcctattaacgtaaaccaccacataa

SEQ ID NO: 30509 - DNA, 835 bp, Artificial Sequence
  chemically treated genomic DNA (Homo sapiens) CpG-island No: 30509
  unsure (381)
ggtattatatcggaataatggtttgataacgtttaacgcgacgttggcgggatattcgttttatcgataagatgaacgtgaaaggcgatatttaagggaatattcgcgttcgggttgataatattggcggcgtcgtgtataaacggttaacggtattgaatttattgaggttggcggtaattttgtaggtaatttcgcgttgattatcggaattgtcgaagttggggtttacgtttatacgttggttaaagggaaggggaatgacgagaaaaattggtatttgattagtaaatgggacggcgtaacgttagcggatatattcgattttattaataatttttttgttgtggattcggaagtttattagtttatcgttcgagntcggaagttatattagtaatatgtcgtagttaattcgttgtttagttatcgtttatacgatcgtttgggtgagtcgtagtatatagatttattgtatttttaggggtcggtaagtagtatgtgatgcgttatgtcggagggtacgaacgtttaagggtcggtgacggttagttaaatatttaggttaatcgttatgtattgtagttaggcggcgatttggcgtagtggagtagtaacgcgtaggatcgttggtattttggcgtgatggtaggttacgttaattagtatagtaatatttagagtaatcgtgtgggttataaatcggatgggcgtattagcggttatagcgttgggttgtacgcgatttggtattagaacgatgcgaataagatcggcgtttatgttgatagttgggcgttgtataattggtttgataatagcgttagtttcgata

SEQ ID NO: 30510 - DNA, 835 bp, Artificial Sequence
  chemically treated genomic DNA (Homo sapiens) CpG-island No: 30510
  unsure (455)
tatcgaaactaacgctattatcaaaccaattatacaacgcccaactatcaacataaacgccgatcttattcgcatcgttctaataccaaatcgcgtacaacccaacgctataaccgctaatacgcccatccgatttataacccacacgattactctaaatattactatactaattaacgtaacctaccatcacgccaaaataccaacgatcctacgcgttactactccactacgccaaatcgccgcctaactacaatacataacgattaacctaaatatttaactaaccgtcaccgacccttaaacgttcgtaccctccgacataacgcatcacatactacttaccgacccctaaaaatacaataaatctatatactacgactcacccaaacgatcgtataaacgataactaaacaacgaattaactacgacatattactaatataacttccganctcgaacgataaactaataaacttccgaatccacaacaaaaaaattattaataaaatcgaatatatccgctaacgttacgccgtcccatttactaatcaaataccaatttttctcgtcattccccttccctttaaccaacgtataaacgtaaaccccaacttcgacaattccgataatcaacgcgaaattacctacaaaattaccgccaacctcaataaattcaataccgttaaccgtttatacacgacgccgccaatattatcaacccgaacgcgaatattcccttaaatatcgcctttcacgttcatcttatcgataaaacgaatatcccgccaacgtcgcgttaaacgttatcaaaccattattccgatataatacc

SEQ ID NO: 30511 - DNA, 835 bp, Artificial Sequence
  chemically treated genomic DNA (Homo sapiens) CpG-island No: 30511
  unsure (455)
tatcggaattgacgttgttattaaattagttatatagcgtttagttgttaatataagcgtcggttttattcgtatcgttttgatattaggtcgcgtatagtttagcgttgtaatcgttgatgcgtttattcgatttataatttatacgattattttgagtattattgtgttgattggcgtagtttgttattacgttaagatgttagcgattttgcgcgttgttattttattgcgttaaatcgtcgtttagttgtaatatatagcggttagtttgagtatttagttgatcgttatcggtttttgaacgttcgtgtttttcgatatgacgtattatatattgtttgtcgatttttgagaatgtagtgaatttgtatattgcggtttatttagacggtcgtgtaaacgatggttaaatagcgagttggttgcggtatgttgttgatatagttttcggnttcgggcgataaattgatgggttttcggatttataatagggggattattgatgggatcgggtgtattcgttggcgttacgtcgttttatttattggttagatattagtttttttcgttattttttttttttttagttagcgtgtagacgtaagttttagtttcgatagtttcggtggttagcgcgaagttatttgtagaattatcgttaattttaatgagtttaatatcgttgatcgtttgtgtacgacgtcgttaatgttattaattcgaacgcgagtgtttttttgggtatcgttttttacgtttattttatcggtggggcgaatatttcgttagcgtcgcgttgaacgttattaggttattgtttcggtatagtgtt

SEQ ID NO: 30512 - DNA, 835 bp, Artificial Sequence
  chemically treated genomic DNA (Homo sapiens) CpG-island No: 30512
  unsure (381)
aacactataccgaaacaataacctaataacgttcaacgcgacgctaacgaaatattcgccccaccgataaaataaacgtaaaaaacgatacccaaaaaaacactcgcgttcgaattaataacattaacgacgtcgtacacaaacgatcaacgatattaaactcattaaaattaacgataattctacaaataacttcgcgctaaccaccgaaactatcgaaactaaaacttacgtctacacgctaactaaaaaaaaaaaaaataacgaaaaaaactaatatctaaccaataaataaaacgacgtaacgccaacgaatacacccgatcccatcaataatccccctattataaatccgaaaacccatcaatttatcgcccgaanccgaaaactatatcaacaacataccgcaaccaactcgctatttaaccatcgtttacacgaccgtctaaataaaccgcaatatacaaattcactacattctcaaaaatcgacaaacaatatataatacgtcatatcgaaaaacacgaacgttcaaaaaccgataacgatcaactaaatactcaaactaaccgctatatattacaactaaacgacgatttaacgcaataaaataacaacgcgcaaaatcgctaacatcttaacgtaataacaaactacgccaatcaacacaataatactcaaaataatcgtataaattataaatcgaataaacgcatcaacgattacaacgctaaactatacgcgacctaatatcaaaacgatacgaataaaaccgacgcttatattaacaactaaacgctatataactaatttaataacaacgtcaattccgata

SEQ ID NO: 30513 - DNA, 875 bp, Artificial Sequence
  chemically treated genomic DNA (Homo sapiens) CpG-island No: 30513
tcgggagaggagcggtgggtaacgtgtttgtgttcggtcgaatgcgtatattttagttaggtcgttggttcggatttagaaatgttttcgttttttttagtgtttgtttcgtttaggtttcgttttttgggtttcgttcgacggttcgggagcgcgcgcggtcgcgtgcgggagggggcgggtggggaaggatcgtaggcgagattacgaggcgaggttcgcgcgttcgttttcgttttggtttttagtgtttattcggtcggttcgggtatagttatgattaaggcgattttaatttttaataattacgggaagtcgcggttttttaagttttattagttttacgtgagtatttagtcgtcgttgattcgggcgagggggagtcgttggcgacgggtagcgtttagcgcggtttttttagagcgatttttttcggcgcgttgcggtttttgtttcgtttcggtcgtttggcgttcgttagttgttagttttttggtgggtgtggatagggtgtttatttttttgtcgcgcggttagttatcgacgtggttttgttcgggcggttttttcgttcgtcggtgggttgtatgtttttttggttgcgcgggcgaggttttggagatttttcggggttcggttttcgtcgatcgggtagtcgtagtttagtcgcgtcgcggagttttgcgtttagtttttaagagtttatttcgcgcggttgtttttttgtcgttcgcggttgtagttagttcgggaggaggaagacggcgtggaattcgtttttttcgttttttttcgtcgatttttattttttttaggtggatttttttttgttttttggatagatgggttatcgttttttattgtggtttttttat

SEQ ID NO: 30514 - DNA, 875 bp, Artificial Sequence
  chemically treated genomic DNA (Homo sapiens) CpG-island No: 30514
ataaaaaaaccacaataaaaaacgataacccatctatccaaaaaacaaaaaaaaatccacctaaaaaaaataaaaatcgacgaaaaaaaacgaaaaaaacgaattccacgccgtcttcctcctcccgaactaactacaaccgcgaacgacaaaaaaacaaccgcgcgaaataaactcttaaaaactaaacgcaaaactccgcgacgcgactaaactacgactacccgatcgacgaaaaccgaaccccgaaaaatctccaaaacctcgcccgcgcaaccaaaaaaacatacaacccaccgacgaacgaaaaaaccgcccgaacaaaaccacgtcgataactaaccgcgcgacaaaaaaataaacaccctatccacacccaccaaaaaactaacaactaacgaacgccaaacgaccgaaacgaaacaaaaaccgcaacgcgccgaaaaaaatcgctctaaaaaaaccgcgctaaacgctacccgtcgccaacgactccccctcgcccgaatcaacgacgactaaatactcacgtaaaactaataaaacttaaaaaaccgcgacttcccgtaattattaaaaattaaaatcgccttaatcataactatacccgaaccgaccgaataaacactaaaaaccaaaacgaaaacgaacgcgcgaacctcgcctcgtaatctcgcctacgatccttccccacccgccccctcccgcacgcgaccgcgcgcgctcccgaaccgtcgaacgaaacccaaaaaacgaaacctaaacgaaacaaacactaaaaaaaacgaaaacatttctaaatccgaaccaacgacctaactaaaatatacgcattcgaccgaacacaaacacgttacccaccgctcctctcccga

SEQ ID NO: 30515 - DNA, 875 bp, Artificial Sequence
  chemically treated genomic DNA (Homo sapiens) CpG-island No: 30515
atgagaggattatagtgaaaaacggtagtttatttgtttaaagaatagaaagaagtttatttggaaaggatgggagtcggcggaggggggcgagaagaacgagttttacgtcgttttttttttttcgggttaattgtagtcgcgggcggtaggaaggtagtcgcgcggggtgggtttttggggattgggcgtagggtttcgcggcgcggttgggttgcggttgttcgatcggcgagggtcgggtttcgggaagtttttagggtttcgttcgcgtagttaggaaagtatgtagtttatcgacgggcggaggaatcgttcgggtaaagttacgtcggtggttgatcgcgcggtagggaggtgggtattttgtttatatttattaggaggttgatagttggcgagcgttaggcggtcgggacgggataagggtcgtagcgcgtcggagggggtcgttttgagaaagtcgcgttgggcgttgttcgtcgttaacgattttttttcgttcggattagcggcggttggatatttacgtagggttggtagaatttggagagtcgcggtttttcgtggttgttgaagattaggatcgttttgattatggttgtgttcgggtcgatcgggtgggtattgggggttagggcgggggcgggcgcgcgagtttcgtttcgtaatttcgtttgcgatttttttttattcgttttttttcgtacgcgatcgcgcgcgttttcgagtcgtcgggcggggtttaaggggcggggtttgggcggggtaggtattaaggaaagcggaaatatttttaggttcgagttagcggtttaattggagtgtgcgtattcgatcgagtatagatacgttgtttatcgtttttttttcga

SEQ ID NO: 30516 - DNA, 875 bp, Artificial Sequence
  chemically treated genomic DNA (Homo sapiens) CpG-island No: 30516
tcgaaaaaaaaacgataaacaacgtatctatactcgatcgaatacgcacactccaattaaaccgctaactcgaacctaaaaatatttccgctttccttaatacctaccccgcccaaaccccgccccttaaaccccgcccgacgactcgaaaacgcgcgcgatcgcgtacgaaaaaaaacgaataaaaaaaaatcgcaaacgaaattacgaaacgaaactcgcgcgcccgcccccgccctaacccccaatacccacccgatcgacccgaacacaaccataatcaaaacgatcctaatcttcaacaaccacgaaaaaccgcgactctccaaattctaccaaccctacgtaaatatccaaccgccgctaatccgaacgaaaaaaaatcgttaacgacgaacaacgcccaacgcgactttctcaaaacgaccccctccgacgcgctacgacccttatcccgtcccgaccgcctaacgctcgccaactatcaacctcctaataaatataaacaaaatacccacctccctaccgcgcgatcaaccaccgacgtaactttacccgaacgattcctccgcccgtcgataaactacatactttcctaactacgcgaacgaaaccctaaaaacttcccgaaacccgaccctcgccgatcgaacaaccgcaacccaaccgcgccgcgaaaccctacgcccaatccccaaaaacccaccccgcgcgactaccttcctaccgcccgcgactacaattaacccgaaaaaaaaaaaacgacgtaaaactcgttcttctcgcccccctccgccgactcccatcctttccaaataaacttctttctattctttaaacaaataaactaccgtttttcactataatcctctcat

SEQ ID NO: 30517 - DNA, 569 bp, Artificial Sequence
  chemically treated genomic DNA (Homo sapiens) CpG-island No: 30517
ttcgttcgcggtattttcgtagtttagttttattttttagcgcgggatatttattaagcgtgatcgagcggtagtagaggaaagggagtgagttacgaaaggatagttcgcggcgtttttttttcgttattagttttatagtcgttaatttattcgatttcggtatcgtcgagagtcgttgggaggcgggacggtggtttttatagttaatcgcggtcggtagagttgttcggtagcgttcgttttttagttcggtttttattaattaaaaggaaattagaggcgatgattcgttaggattttttttcgtggttggaagggcggggagaagaggcggggataaagttttagggtcgaggaagtggtgtgagagattgacgtgaggtggtacgagagtttagttgttaatgacggagttgcgagatacggcgagagttaacgggagcggagtgagaggtttttcgattaattgggattaagtgagaggagatgcgggttaatgggtatttcgcgttttatcgttggagagatggttaaatgtgggaggcgaggtggttttagtttgggag

SEQ ID NO: 30518 - DNA, 569 bp, Artificial Sequence
  chemically treated genomic DNA (Homo sapiens) CpG-island No: 30518
ctcccaaactaaaaccacctcgcctcccacatttaaccatctctccaacgataaaacgcgaaatacccattaacccgcatctcctctcacttaatcccaattaatcgaaaaacctctcactccgctcccgttaactctcgccgtatctcgcaactccgtcattaacaactaaactctcgtaccacctcacgtcaatctctcacaccacttcctcgaccctaaaactttatccccgcctcttctccccgcccttccaaccacgaaaaaaaatcctaacgaatcatcgcctctaatttccttttaattaataaaaaccgaactaaaaaacgaacgctaccgaacaactctaccgaccgcgattaactataaaaaccaccgtcccgcctcccaacgactctcgacgataccgaaatcgaataaattaacgactataaaactaataacgaaaaaaaaacgccgcgaactatcctttcgtaactcactccctttcctctactaccgctcgatcacgcttaataaatatcccgcgctaaaaaataaaactaaactacgaaaataccgcgaacgaa

SEQ ID NO: 30519 - DNA, 569 bp, Artificial Sequence
  chemically treated genomic DNA (Homo sapiens) CpG-island No: 30519
tttttaagttgggattatttcgttttttatatttgattatttttttagcggtgggacgcggagtatttattggttcgtatttttttttatttagttttaattggtcggagaattttttatttcgttttcgttggttttcgtcgtatttcgtagtttcgttattggtaattgggttttcgtgttattttacgttagttttttatattattttttcggttttgagattttgttttcgtttttttttttcgtttttttagttacgagggaaaattttagcgagttatcgtttttagtttttttttgattggtagaagtcggattggggggcgggcgttgtcgggtaattttatcggtcgcgattggttgtgggagttatcgtttcgttttttagcgattttcggcggtgtcggagtcgggtgggttggcggttataaagttggtggcgaaggggaggcgtcgcggattgttttttcgtggtttatttttttttttttgttgtcgttcggttacgtttggtgagtgtttcgcgttggggagtagaattgggttgcggaggtgtcgcgggcggg

SEQ ID NO: 30520 - DNA, 569 bp, Artificial Sequence
  chemically treated genomic DNA (Homo sapiens) CpG-island No: 30520
cccgcccgcgacacctccgcaacccaattctactccccaacgcgaaacactcaccaaacgtaaccgaacgacaacaaaaaaaaaaaaataaaccacgaaaaaacaatccgcgacgcctccccttcgccaccaactttataaccgccaacccacccgactccgacaccgccgaaaatcgctaaaaaacgaaacgataactcccacaaccaatcgcgaccgataaaattacccgacaacgcccgccccccaatccgacttctaccaatcaaaaaaaaactaaaaacgataactcgctaaaattttccctcgtaactaaaaaaacgaaaaaaaaaaacgaaaacaaaatctcaaaaccgaaaaaataatataaaaaactaacgtaaaataacacgaaaacccaattaccaataacgaaactacgaaatacgacgaaaaccaacgaaaacgaaataaaaaattctccgaccaattaaaactaaataaaaaaaaatacgaaccaataaatactccgcgtcccaccgctaaaaaaataatcaaatataaaaaacgaaataatcccaacttaaaaa

SEQ ID NO: 30521 - DNA, 580 bp, Artificial Sequence
  chemically treated genomic DNA (Homo sapiens) CpG-island No: 30521
tttatttgtcgttcggttaataataattattgcgcggtttgcgttttatcgtcgattttttttagtaggcgttcgtatagtggattgtcggtggttttacgtagataggcgatgcgtaattcgtggatattgttacggatacgatcgcgtaattttgtcgtggtagtttcggtaaaggtgattattagtagttttttaacggttagcgggcggggaaaggcggcggaatcgtttagtttaagtaataggcgtaaatagagcgtcgtaatcgtaaaggttttgtttgtgtcggtagaggttttaattaggcgtttattttgtaagggtaagcgtaaaggatttagtgtttcggcgatattatttattttttttatttattaggggtattgtttgttgtaacgcgttgacgtttttttatattttttagtttttagggtgtatatattcggttttttcgttttggttgtcggaaatttgcgatagaatagttatgttttggcggttcgatatcgttgatggaagaaattagtaagtttttgcggcgttagttagtttatttgggtacgattttttacgcgaa

SEQ ID NO: 30522 - DNA, 580 bp, Artificial Sequence
  chemically treated genomic DNA (Homo sapiens) CpG-island No: 30522
ttcgcgtaaaaaatcgtacccaaataaactaactaacgccgcaaaaacttactaatttcttccatcaacgatatcgaaccgccaaaacataactattctatcgcaaatttccgacaaccaaaacgaaaaaaccgaatatatacaccctaaaaactaaaaaatataaaaaaacgtcaacgcgttacaacaaacaatacccctaataaataaaaaaaataaataatatcgccgaaacactaaatcctttacgcttacccttacaaaataaacgcctaattaaaacctctaccgacacaaacaaaacctttacgattacgacgctctatttacgcctattacttaaactaaacgattccgccgcctttccccgcccgctaaccgttaaaaaactactaataatcacctttaccgaaactaccacgacaaaattacgcgatcgtatccgtaacaatatccacgaattacgcatcgcctatctacgtaaaaccaccgacaatccactatacgaacgcctactaaaaaaaatcgacgataaaacgcaaaccgcgcaataattattattaaccgaacgacaaataaa

SEQ ID NO: 30523 - DNA, 580 bp, Artificial Sequence
  chemically treated genomic DNA (Homo sapiens) CpG-island No: 30523
ttcgcgtaaaaaatcgtgtttagataaattggttgacgtcgtaaaaatttgttgattttttttattagcggtgtcgagtcgttaaggtatggttattttgtcgtagattttcggtagttagaacgggaaagtcgaatatgtatattttgaaggttggaaagtgtgggagaacgttagcgcgttgtagtaaataatgtttttgatgagtgaaaagaatgagtgatgtcgtcgagatattagattttttgcgtttgtttttatagggtgagcgtttgattgaagtttttgtcggtataggtaaaatttttacgattgcggcgttttatttgcgtttgttatttggattaggcggtttcgtcgttttttttcgttcgttgatcgttgaagaattgttggtggttatttttatcgaggttgttacggtagaattgcgcggtcgtattcgtagtaatatttacgagttgcgtatcgtttgtttgcgtgaaattatcgataatttattgtacgaacgtttgttggaagagatcgacgataaagcgtaagtcgcgtagtggttgttgttagtcgaacggtagatgga

SEQ ID NO: 30524 - DNA, 580 bp, Artificial Sequence
  chemically treated genomic DNA (Homo sapiens) CpG-island No: 30524
tccatctaccgttcgactaacaacaaccactacgcgacttacgctttatcgtcgatctcttccaacaaacgttcgtacaataaattatcgataatttcacgcaaacaaacgatacgcaactcgtaaatattactacgaatacgaccgcgcaattctaccgtaacaacctcgataaaaataaccaccaacaattcttcaacgatcaacgaacgaaaaaaaacgacgaaaccgcctaatccaaataacaaacgcaaataaaacgccgcaatcgtaaaaattttacctataccgacaaaaacttcaatcaaacgctcaccctataaaaacaaacgcaaaaaatctaatatctcgacgacatcactcattcttttcactcatcaaaaacattatttactacaacgcgctaacgttctcccacactttccaaccttcaaaatatacatattcgactttcccgttctaactaccgaaaatctacgacaaaataaccataccttaacgactcgacaccgctaataaaaaaaatcaacaaatttttacgacgtcaaccaatttatctaaacacgattttttacgcgaa

SEQ ID NO: 30525 - DNA, 600 bp, Artificial Sequence
  chemically treated genomic DNA (Homo sapiens) CpG-island No: 30525
tgttgttgttttttttcggttgtaggtcgataatggttatcggtttggattgttcgcgtataaagcgtgagacgtcggtgatagtgtcggtcgtttttatgttggagataaaatgagtgatgcgttcgtcggtttgttgttagattttcggtttagtggtggtgtaatgcgtataagggttatcgggattattgaattgatcgagtagttttttttcgttacgattcgttatttttagcgttagatcgcgcgtattttttatgttttgttttttggtgataagaattagtttcgtattataagtacgtatcgtcgtacggcgtttttggtttatgttgtcgggtattagtaattttatgcgatagttttttagcgcggtaattattgttagcgtaatgtcggtgttattattggtggtttcgattaagatattattcggtttaattttttcgcgttttttcgtttcgacgattatcgaaagtgtcgtacgattttttatcgaatttgtcgggttattgttttttagttttaattatattttattgtcgttattcggttttattcgttgtaattttattagaggcgtattgtttattgttt

SEQ ID NO: 30526 - DNA, 600 bp, Artificial Sequence
  chemically treated genomic DNA (Homo sapiens) CpG-island No: 30526
aaacaataaacaatacgcctctaataaaattacaacgaataaaaccgaataacgacaataaaatataattaaaactaaaaaacaataacccgacaaattcgataaaaaatcgtacgacactttcgataatcgtcgaaacgaaaaaacgcgaaaaaattaaaccgaataatatcttaatcgaaaccaccaataataacaccgacattacgctaacaataattaccgcgctaaaaaactatcgcataaaattactaatacccgacaacataaaccaaaaacgccgtacgacgatacgtacttataatacgaaactaattcttatcaccaaaaaacaaaacataaaaaatacgcgcgatctaacgctaaaaataacgaatcgtaacgaaaaaaaactactcgatcaattcaataatcccgataacccttatacgcattacaccaccactaaaccgaaaatctaacaacaaaccgacgaacgcatcactcattttatctccaacataaaaacgaccgacactatcaccgacgtctcacgctttatacgcgaacaatccaaaccgataaccattatcgacctacaaccgaaaaaaaacaacaaca

SEQ ID NO: 30527 - DNA, 600 bp, Artificial Sequence
  chemically treated genomic DNA (Homo sapiens) CpG-island No: 30527
aaataataggtaatacgtttttggtgaagttgtagcgaatggggtcggataacggtagtgaagtgtggttaaaattggaaggtaataattcggtaggttcggtgaaagatcgtgcggtattttcgatgatcgtcgaggcggaaaagcgcggggaaattaaatcgggtgatgttttaatcgaagttattagtggtaatatcggtattgcgttggtaatgattgtcgcgttgaaaggttatcgtatgaaattgttgatgttcgataatatgagttaggaacgtcgtgcggcgatgcgtgtttatggtgcggaattgatttttgttattaaagagtagggtatggaaggtgcgcgcgatttggcgttggagatggcgaatcgtggcgaaggaaagttgttcgattagtttaataatttcgataatttttatgcgtattatattattattgggtcggaaatttggtagtaaatcggcgggcgtattatttattttgtttttagtatggggacgatcggtattattatcggcgttttacgttttatgcgcgaataatttaaatcggtgattattgtcggtttgtaatcggaagagggtagtagta

SEQ ID NO: 30528 - DNA, 600 bp, Artificial Sequence
  chemically treated genomic DNA (Homo sapiens) CpG-island No: 30528
tactactaccctcttccgattacaaaccgacaataatcaccgatttaaattattcgcgcataaaacgtaaaacgccgataataataccgatcgtccccatactaaaaacaaaataaataatacgcccgccgatttactaccaaatttccgacccaataataatataatacgcataaaaattatcgaaattattaaactaatcgaacaactttccttcgccacgattcgccatctccaacgccaaatcgcgcgcaccttccataccctactctttaataacaaaaatcaattccgcaccataaacacgcatcgccgcacgacgttcctaactcatattatcgaacatcaacaatttcatacgataacctttcaacgcgacaatcattaccaacgcaataccgatattaccactaataacttcgattaaaacatcacccgatttaatttccccgcgcttttccgcctcgacgatcatcgaaaataccgcacgatctttcaccgaacctaccgaattattaccttccaattttaaccacacttcactaccgttatccgaccccattcgctacaacttcaccaaaaacgtattacctattattt

SEQ ID NO: 30529 - DNA, 614 bp, Artificial Sequence
  chemically treated genomic DNA (Homo sapiens) CpG-island No: 30529
ggtaggacggttatttcgtacgtttaacgcgtttgattttgtcggtacgtttaatatacggaggacgacgtgaattttgaaattgtaacgtgttaacgttttttaatagtcggatattgtggttttcgcggatgttttgcgagagttttcgtgataatatatcgtttcgtattattttttgagggtagcgggagcgaatatattacgggcgtcggtgttttagtggattttcgtgtgttgatttttcggtttatttagcgaagaaatttcgtttttgtggttttgaaatcgggtgattatataggagcgaaattggttggtgcgagtaagtatttgttacggtgattcgtgtagagtcgtttaatacgataagggttggggtcgattgagacgtaggtcgtgatatagcgcgtgggatatatcgttttatattagagcgaggcgatatcgtaagatcgatatgagtggaagaagtatcgcggtacgcgcggataggtatattcggttgtttatatatttagagaatgaacggtcgcgtttgatacgataagttgtttcgcgcgattcgatggcggcgcggagtatataaaaatattcgtgaatttggagcggtt

SEQ ID NO: 30530 - DNA, 614 bp, Artificial Sequence
  chemically treated genomic DNA (Homo sapiens) CpG-island No: 30530
aaccgctccaaattcacgaatatttttatatactccgcgccgccatcgaatcgcgcgaaacaacttatcgtatcaaacgcgaccgttcattctctaaatatataaacaaccgaatatacctatccgcgcgtaccgcgatacttcttccactcatatcgatcttacgatatcgcctcgctctaatataaaacgatatatcccacgcgctatatcacgacctacgtctcaatcgaccccaacccttatcgtattaaacgactctacacgaatcaccgtaacaaatacttactcgcaccaaccaatttcgctcctatataatcacccgatttcaaaaccacaaaaacgaaatttcttcgctaaataaaccgaaaaatcaacacacgaaaatccactaaaacaccgacgcccgtaatatattcgctcccgctaccctcaaaaaataatacgaaacgatatattatcacgaaaactctcgcaaaacatccgcgaaaaccacaatatccgactattaaaaaacgttaacacgttacaatttcaaaattcacgtcgtcctccgtatattaaacgtaccgacaaaatcaaacgcgttaaacgtacgaaataaccgtcctacc

SEQ ID NO: 30531 - DNA, 614 bp, Artificial Sequence
  chemically treated genomic DNA (Homo sapiens) CpG-island No: 30531
ggtcgttttagatttacgggtgtttttatgtgtttcgcgtcgttatcgggtcgcgcgaggtagtttgtcgtattaagcgcggtcgtttattttttgaatgtgtaaataatcgggtgtgtttattcgcgcgtgtcgcgatattttttttatttatatcggttttgcggtatcgtttcgttttgatgtgggacggtatgttttacgcgttgtattacggtttgcgttttagtcgattttagtttttgtcgtgttggacgattttatacggattatcgtggtaagtgtttgttcgtattagttagtttcgtttttgtgtaattattcggttttaagattataagggcgagattttttcgttgggtgagtcggaaggttaatatacgagagtttattgggatatcggcgttcgtggtgtattcgttttcgttgtttttagagaatagtacggggcgatatgttattacgagggttttcgtagaatattcgcggggattataatgttcgattgttggaagacgttagtacgttgtaattttagagtttacgtcgtttttcgtgtgttgggcgtgtcgataaagttaagcgcgttagacgtgcgggataatcgttttatt

SEQ ID NO: 30532 - DNA, 614 bp, Artificial Sequence
  chemically treated genomic DNA (Homo sapiens) CpG-island No: 30532
aataaaacgattatcccgcacgtctaacgcgcttaactttatcgacacgcccaacacacgaaaaacgacgtaaactctaaaattacaacgtactaacgtcttccaacaatcgaacattataatccccgcgaatattctacgaaaaccctcgtaataacatatcgccccgtactattctctaaaaacaacgaaaacgaatacaccacgaacgccgatatcccaataaactctcgtatattaaccttccgactcacccaacgaaaaaatctcgcccttataatcttaaaaccgaataattacacaaaaacgaaactaactaatacgaacaaacacttaccacgataatccgtataaaatcgtccaacacgacaaaaactaaaatcgactaaaacgcaaaccgtaatacaacgcgtaaaacataccgtcccacatcaaaacgaaacgataccgcaaaaccgatataaataaaaaaaatatcgcgacacgcgcgaataaacacacccgattatttacacattcaaaaaataaacgaccgcgcttaatacgacaaactacctcgcgcgacccgataacgacgcgaaacacataaaaacacccgtaaatctaaaacgacc

SEQ ID NO: 30533 - DNA, 637 bp, Artificial Sequence
  chemically treated genomic DNA (Homo sapiens) CpG-island No: 30533
tgacgcgtcggattaggtatggcgcgaatcggcgattcgttttgtgttcgaatttatgggcgaagtgaatcgtttgtagggaattattcgcggcgggtagttttatgttggcgcgtatcgttggtcgttgggttatatatttgcgtattaggggtcggtggatttttttttgcgtttttgggaagtggatattagtcgtcgtattagtttcgattcgtcgttgtcggtataggtattggaagttagttcgaaaggttattatatttaattagtggtgtagtcgttggggtggtataacgaatcgttgacggtcgtgatgtatggcgacgatgtttcgtagcgtggcgagcgtttattcgttggtttgtaatatgcgcggttgtataacggcgacgagcgtatcgaaattcgcgatgaggaatttgttttcgtataaagcgtttgataggttgagtgaatgttaaacgttcggaggcgtttttcgcgattcgggttttttaatggtaaggtttgtaatttgtaggtttgataagacgcggtaagcgtcgtattaggtattgagtatttaatgtcggatgcgtcgtgaacgttttattcggtttataaacgtacgaagatttaatatgttgtaatagat

SEQ ID NO: 30534 - DNA, 637 bp, Artificial Sequence
  chemically treated genomic DNA (Homo sapiens) CpG-island No: 30534
atctattacaacatattaaatcttcgtacgtttataaaccgaataaaacgttcacgacgcatccgacattaaatactcaatacctaatacgacgcttaccgcgtcttatcaaacctacaaattacaaaccttaccattaaaaaacccgaatcgcgaaaaacgcctccgaacgtttaacattcactcaacctatcaaacgctttatacgaaaacaaattcctcatcgcgaatttcgatacgctcgtcgccgttatacaaccgcgcatattacaaaccaacgaataaacgctcgccacgctacgaaacatcgtcgccatacatcacgaccgtcaacgattcgttataccaccccaacgactacaccactaattaaatataataacctttcgaactaacttccaatacctataccgacaacgacgaatcgaaactaatacgacgactaatatccacttcccaaaaacgcaaaaaaaaatccaccgacccctaatacgcaaatatataacccaacgaccaacgatacgcgccaacataaaactacccgccgcgaataattccctacaaacgattcacttcgcccataaattcgaacacaaaacgaatcgccgattcgcgccatacctaatccgacgcgtca

SEQ ID NO: 30535 - DNA, 637 bp, Artificial Sequence
  chemically treated genomic DNA (Homo sapiens) CpG-island No: 30535
atttattgtaatatgttgaattttcgtgcgtttgtaggtcggataaggcgtttacgacgtattcggtattaggtgtttaatgtttgatgcgacgtttgtcgcgttttattaggtttataggttataaattttgttattaagaagttcggatcgcgggaagcgttttcgggcgtttaatatttatttaatttattaggcgttttgtgcgagagtaagttttttatcgcgggtttcgatacgttcgtcgtcgttatatagtcgcgtatgttgtagattaacgaataaacgttcgttacgttgcggggtatcgtcgttatgtattacgatcgttagcggttcgttgtattattttagcggttgtattattaattgggtgtagtgatttttcgggttggtttttagtatttgtatcggtagcggcgaatcgaggttggtacggcggttgatatttattttttaagggcgtaggaagagatttatcggtttttgatacgtaggtgtgtagtttagcggttagcgatgcgcgttaatatggaattgttcgtcgcgaatggttttttgtaggcggtttatttcgtttataaattcgagtataaaacgggtcgtcggttcgcgttatatttgattcggcgcgtta

SEQ ID NO: 30536 - DNA, 637 bp, Artificial Sequence
  chemically treated genomic DNA (Homo sapiens) CpG-island No: 30536
taacgcgccgaatcaaatataacgcgaaccgacgacccgttttatactcgaatttataaacgaaataaaccgcctacaaaaaaccattcgcgacgaacaattccatattaacgcgcatcgctaaccgctaaactacacacctacgtatcaaaaaccgataaatctcttcctacgcccttaaaaaataaatatcaaccgccgtaccaacctcgattcgccgctaccgatacaaatactaaaaaccaacccgaaaaatcactacacccaattaataatacaaccgctaaaataatacaacgaaccgctaacgatcgtaatacataacgacgataccccgcaacgtaacgaacgtttattcgttaatctacaacatacgcgactatataacgacgacgaacgtatcgaaacccgcgataaaaaacttactctcgcacaaaacgcctaataaattaaataaatattaaacgcccgaaaacgcttcccgcgatccgaacttcttaataacaaaatttataacctataaacctaataaaacgcgacaaacgtcgcatcaaacattaaacacctaataccgaatacgtcgtaaacgccttatccgacctacaaacgcacgaaaattcaacatattacaataaat

SEQ ID NO: 30537 - DNA, 642 bp, Artificial Sequence
  chemically treated genomic DNA (Homo sapiens) CpG-island No: 30537
gtgatgaggttggtggtagtatgaataattttaacggttatgtcgtcggtattaacgtttacggtagcgtcgggaagttgaaggtttataatgttagtatgaacggcgtggagattaatacgggttttatcgttggtacggtagatattattgtgagttttgataaacgtagtggaaggtagtaatttgatcgacgttgacgttattattttaacgttcgtggtatggattgttaaaggtagtatcgatgttagcggtaacgttgacgttattatgagttataatgtttatatcgatgtggtaatagatgtttcggtgaatgatatcgcgaaagtattggatgcgggttatattaataacgaattgtttattagtttgaacgtcggtacgattgttgaattgaatagtgttttgaaataggttagcggtagttaggcgattacggtatttcgcgaagcgcgcgtgttaagtaatcgttttagtatgttggtagatgtcgcgtcgaaagtgggtaacggtttggcgtttaacgttgtcgcgaaaggcgattcgcgtgtcgagttaggtaataatatcgaatacgatatgttggtattgcgtaaaattatcgatttgagcgaaagttagacgatgagtttggag

SEQ ID NO: 30538 - DNA, 642 bp, Artificial Sequence
  chemically treated genomic DNA (Homo sapiens) CpG-island No: 30538
ctccaaactcatcgtctaactttcgctcaaatcgataattttacgcaataccaacatatcgtattcgatattattacctaactcgacacgcgaatcgcctttcgcgacaacgttaaacgccaaaccgttacccactttcgacgcgacatctaccaacatactaaaacgattacttaacacgcgcgcttcgcgaaataccgtaatcgcctaactaccgctaacctatttcaaaacactattcaattcaacaatcgtaccgacgttcaaactaataaacaattcgttattaatataacccgcatccaatactttcgcgatatcattcaccgaaacatctattaccacatcgatataaacattataactcataataacgtcaacgttaccgctaacatcgatactacctttaacaatccataccacgaacgttaaaataataacgtcaacgtcgatcaaattactaccttccactacgtttatcaaaactcacaataatatctaccgtaccaacgataaaacccgtattaatctccacgccgttcatactaacattataaaccttcaacttcccgacgctaccgtaaacgttaataccgacgacataaccgttaaaattattcatactaccaccaacctcatcac

SEQ ID NO: 30539 - DNA, 642 bp, Artificial Sequence
  chemically treated genomic DNA (Homo sapiens) CpG-island No: 30539
ttttagatttatcgtttggttttcgtttaggtcgatagttttacgtaatgttagtatgtcgtattcggtattattatttaattcggtacgcggatcgtttttcgcgataacgttgaacgttagatcgttatttattttcggcgcggtatttgttagtatattaaagcggttgtttaatacgcgcgtttcgcggaatatcgtggtcgtttggttatcgttgatttgttttagagtattgtttagtttagtagtcgtgtcgacgtttaggttggtaaatagttcgttgttggtgtaattcgtatttagtgttttcgcgatgttatttatcgaggtatttgttgttatatcggtgtaggtattgtggtttatggtgacgttaacgttatcgttggtatcggtgttgtttttggtagtttatattacggacgttgaggtgatggcgttagcgtcggttaggttgttattttttattacgtttattaaaatttatagtggtgtttgtcgtattagcggtaaagttcgtgttaatttttacgtcgtttatgttggtattgtgaatttttagtttttcggcgttgtcgtaaacgttggtatcgacgatatagtcgttgaggttgtttatgttgttattagttttattat

SEQ ID NO: 30540 - DNA, 642 bp, Artificial Sequence
  chemically treated genomic DNA (Homo sapiens) CpG-island No: 30540
ataataaaactaataacaacataaacaacctcaacgactatatcgtcgataccaacgtttacgacaacgccgaaaaactaaaaattcacaataccaacataaacgacgtaaaaattaacacgaactttaccgctaatacgacaaacaccactataaattttaataaacgtaataaaaaataacaacctaaccgacgctaacgccatcacctcaacgtccgtaatataaactaccaaaaacaacaccgataccaacgataacgttaacgtcaccataaaccacaatacctacaccgatataacaacaaatacctcgataaataacatcgcgaaaacactaaatacgaattacaccaacaacgaactatttaccaacctaaacgtcgacacgactactaaactaaacaatactctaaaacaaatcaacgataaccaaacgaccacgatattccgcgaaacgcgcgtattaaacaaccgctttaatatactaacaaataccgcgccgaaaataaataacgatctaacgttcaacgttatcgcgaaaaacgatccgcgtaccgaattaaataataataccgaatacgacatactaacattacgtaaaactatcgacctaaacgaaaaccaaacgataaatctaaaa

SEQ ID NO: 30541 - DNA, 672 bp, Artificial Sequence
  chemically treated genomic DNA (Homo sapiens) CpG-island No: 30541
tttcggtacgaaggcggcgttaaattgtaattcgttatttattattagttttggtgcgcgtttacggacgatttttgtcgtttgttggacgttagtaatataggggtgacgggcgttattattgttggaaaacgatagtatcgttacgcgcggttttttttcggtgatggcgcgttaggtttcggtattggtaagcgcgatattcgttagttgcgtcgtcgtcggttgtggtattacgttgtaatcggtaaagtttaacgtcgggtcgttgtattgtggtaatattaggaaaatggaagagagcgttttatagtttggttgtaagtcgataatgcgtaattcggtacgtagtatatttgtcgtggaagagaggttgttcgcgatatagatattcgttttatcggcgttgattattgttgcggcgaatattagagggtcggtaagtttttttagcgtattcggcggcgttttttcgttcgcgcgggttagttagcgatgagtaaatttttttcgtattgcgaggttgttatgcggattaattatttgtagttcgtttatcgttacgtcgtgattgagcgtaaattgacgaagtttaaacggattggcgattagaatgggcgttgttagattttgttgatgtaaatattgcgcggtttttagtatacgttggtt

SEQ ID NO: 30542 - DNA, 672 bp, Artificial Sequence
  chemically treated genomic DNA (Homo sapiens) CpG-island No: 30542
aaccaacgtatactaaaaaccgcgcaatatttacatcaacaaaatctaacaacgcccattctaatcgccaatccgtttaaacttcgtcaatttacgctcaatcacgacgtaacgataaacgaactacaaataattaatccgcataacaacctcgcaatacgaaaaaaatttactcatcgctaactaacccgcgcgaacgaaaaaacgccgccgaatacgctaaaaaaacttaccgaccctctaatattcgccgcaacaataatcaacgccgataaaacgaatatctatatcgcgaacaacctctcttccacgacaaatatactacgtaccgaattacgcattatcgacttacaaccaaactataaaacgctctcttccattttcctaatattaccacaatacaacgacccgacgttaaactttaccgattacaacgtaataccacaaccgacgacgacgcaactaacgaatatcgcgcttaccaataccgaaacctaacgcgccatcaccgaaaaaaaaccgcgcgtaacgatactatcgttttccaacaataataacgcccgtcacccctatattactaacgtccaacaaacgacaaaaatcgtccgtaaacgcgcaccaaaactaataataaataacgaattacaatttaacgccgccttcgtaccgaaa

SEQ ID NO: 30543 - DNA, 672 bp, Artificial Sequence
  chemically treated genomic DNA (Homo sapiens) CpG-island No: 30543
gattaacgtgtgttgaaagtcgcgtaatatttatattaataaggtttggtaacgtttattttggtcgttaattcgtttgaatttcgttagtttgcgtttagttacggcgtggcgatggacgggttataggtgattgattcgtatggtaatttcgtaatgcgggaagaatttgtttatcgttggttggttcgcgcgggcgaaaaaacgtcgtcggatgcgttggaaaaatttatcgattttttgatgttcgtcgtagtaatggttagcgtcggtaaagcggatgtttgtatcgcgggtaattttttttttacggtaaatgtgttgcgtgtcggattacgtattatcggtttgtagttaggttgtaaaacgtttttttttatttttttgatgttgttatagtatagcggttcggcgttgggttttgtcgattgtagcgtggtgttatagtcgacggcggcgtagttggcggatatcgcgtttgttagtgtcgaaatttggcgcgttattatcggagaagagtcgcgcgtggcgatgttgtcgttttttagtaatggtagcgttcgttatttttgtgttgttaacgtttagtaggcgatagaaatcgttcgtgagcgcgtattaaagttggtggtggatggcgagttatagtttgacgtcgttttcgtgtcggaa

SEQ ID NO: 30544 - DNA, 672 bp, Artificial Sequence
  chemically treated genomic DNA (Homo sapiens) CpG-island No: 30544
ttccgacacgaaaacgacgtcaaactataactcgccatccaccaccaactttaatacgcgctcacgaacgatttctatcgcctactaaacgttaacaacacaaaaataacgaacgctaccattactaaaaaacgacaacatcgccacgcgcgactcttctccgataataacgcgccaaatttcgacactaacaaacgcgatatccgccaactacgccgccgtcgactataacaccacgctacaatcgacaaaacccaacgccgaaccgctatactataacaacatcaaaaaaataaaaaaaaacgttttacaacctaactacaaaccgataatacgtaatccgacacgcaacacatttaccgtaaaaaaaaaattacccgcgatacaaacatccgctttaccgacgctaaccattactacgacgaacatcaaaaaatcgataaatttttccaacgcatccgacgacgttttttcgcccgcgcgaaccaaccaacgataaacaaattcttcccgcattacgaaattaccatacgaatcaatcacctataacccgtccatcgccacgccgtaactaaacgcaaactaacgaaattcaaacgaattaacgaccaaaataaacgttaccaaaccttattaatataaatattacgcgactttcaacacacgttaatc

SEQ ID NO: 30545 - DNA, 578 bp, Artificial Sequence
  chemically treated genomic DNA (Homo sapiens) CpG-island No: 30545
gtttcgtttagtataatcgtcgtgtcgtgggtcgtatttagttcgaagttttgttttagtagttttgtcgttaggtttattacgcgttttttatcgttttcgcgtacggaaagtagcgtacgatcgtgtttttttatggtggagttgttgtttagttgcgttttggtaaacgttttagcgaaggtgcggtttacgtttatgattttttcggtagagcgtatttttggttttaatagcgggttaacgttcgggaatttattgaacggtagtattattttttttatcgagtagtacggcgggataatttttttggttacgttttgtttagttagcgatttgttagttattacgcgcgtcgttatttttgttagcggtacgtcggtggttttggagacgaacggaacggtacgcgtcgtacgcgggttaattttaattaggtagatttcgttgttttttatcgtaaattgtacgtttattaggtcgcgtatttgtaattcgaaggttagttttgtatttgttggcgtattatattttgaattttttgatttaaggtgtaggtgggtaaagaattttcggag

SEQ ID NO: 30546 - DNA, 578 bp, Artificial Sequence
  chemically treated genomic DNA (Homo sapiens) CpG-island No: 30546
ctccgaaaattctttacccacctacaccttaaatcaaaaaattcaaaatataatacgccaacaaatacaaaactaaccttcgaattacaaatacgcgacctaataaacgtacaatttacgataaaaaacaacgaaatctacctaattaaaattaacccgcgtacgacgcgtaccgttccgttcgtctccaaaaccaccgacgtaccgctaacaaaaataacgacgcgcgtaataactaacaaatcgctaactaaacaaaacgtaaccaaaaaaattatcccgccgtactactcgataaaaaaaataatactaccgttcaataaattcccgaacgttaacccgctattaaaaccaaaaatacgctctaccgaaaaaatcataaacgtaaaccgcaccttcgctaaaacgtttaccaaaacgcaactaaacaacaactccaccataaaaaaacacgatcgtacgctactttccgtacgcgaaaacgataaaaaacgcgtaataaacctaacgacaaaactactaaaacaaaacttcgaactaaatacgacccacgacacgacgattatactaaacgaaac

SEQ ID NO: 30547 - DNA, 578 bp, Artificial Sequence
  chemically treated genomic DNA (Homo sapiens) CpG-island No: 30547
tttcggaggttttttgtttatttatattttaagttaggaaatttaggatgtgatgcgttagtaggtgtagaattggttttcgaattgtaggtgcgcggtttgatgaacgtgtagtttgcggtgaaaaataacgaagtttatttgattgaagttaattcgcgtgcggcgcgtatcgtttcgttcgtttttaaagttatcggcgtatcgttggtaaaagtggcggcgcgcgtgatggttggtaaatcgttggttgagtagggcgtaattaaagaagttatttcgtcgtattattcggtgaaagaagtggtgttgtcgtttaataaattttcgggcgttgattcgttgttagggttagaaatgcgttttatcggggaagttatgggcgtgggtcgtattttcgttgaagcgtttgttaaagcgtagttgggtagtaattttattatgaagaaatacggtcgtgcgttgtttttcgtgcgcgaaggcgataaagaacgcgtggtggatttggcggtaaaattgttgaaatagggtttcgagttggatgcgatttacggtacggcgattgtgttgggcgaagt

SEQ ID NO: 30548 - DNA, 578 bp, Artificial Sequence
  chemically treated genomic DNA (Homo sapiens) CpG-island No: 30548
acttcgcccaacacaatcgccgtaccgtaaatcgcatccaactcgaaaccctatttcaacaattttaccgccaaatccaccacgcgttctttatcgccttcgcgcacgaaaaacaacgcacgaccgtatttcttcataataaaattactacccaactacgctttaacaaacgcttcaacgaaaatacgacccacgcccataacttccccgataaaacgcatttctaaccctaacaacgaatcaacgcccgaaaatttattaaacgacaacaccacttctttcaccgaataatacgacgaaataacttctttaattacgccctactcaaccaacgatttaccaaccatcacgcgcgccgccacttttaccaacgatacgccgataactttaaaaacgaacgaaacgatacgcgccgcacgcgaattaacttcaatcaaataaacttcgttatttttcaccgcaaactacacgttcatcaaaccgcgcacctacaattcgaaaaccaattctacacctactaacgcatcacatcctaaatttcctaacttaaaatataaataaacaaaaaacctccgaaa

SEQ ID NO: 30549 - DNA, 594 bp, Artificial Sequence
  chemically treated genomic DNA (Homo sapiens) CpG-island No: 30549
gcggacgggcgggggcgttggagaggggttgaacggggtcgggggacggcgacggggggcggggcgtaggggggttggcgggcggggcggggggcgggtgtcgcgggcggcggtgtgggggcgaggcgtagtcgggggggtcgcgcggggcggtggggcgggggtggagcggggcgggcggggcgggtagtggcggggcgagaggggggcggaggtggcgcgcgggagggaggcggtacgggcgcggtagggagggtcgcgggggggcgcggggggggggggagttgggcgcgggggagggggggcggggggggcgggtggggcgcgcggggcgggtaaggtcggggggcgtcgagggtcgggggggggcggggggggggcgggggtggggggggggggggggcgcgcggggggtggggggggcgcgggggcgggggggggttcggggggggggggggggggggatcgggggagggggaggggggggcggtgggatggggtggggttgggggtggtgaggtggggtgcggttgggggtggtggggtggggtggggttgggcggggggggcgggggtagggtagatttttgtttt

SEQ ID NO: 30550 - DNA, 594 bp, Artificial Sequence
  chemically treated genomic DNA (Homo sapiens) CpG-island No: 30550
aaaacaaaaatctaccctacccccgccccccccgcccaaccccaccccaccccaccacccccaaccgcaccccacctcaccacccccaaccccaccccatcccaccgcccccccctccccctcccccgatccccccccccccccccccccgaacccccccccgcccccgcgccccccccaccccccgcgcgccccccccccccccccacccccgccccccccccgcccccccccgaccctcgacgccccccgaccttacccgccccgcgcgccccacccgccccccccgccccccctcccccgcgcccaactccccccccccccgcgcccccccgcgaccctccctaccgcgcccgtaccgcctccctcccgcgcgccacctccgcccccctctcgccccgccactacccgccccgcccgccccgctccacccccgccccaccgccccgcgcgacccccccgactacgcctcgcccccacaccgccgcccgcgacacccgccccccgccccgcccgccaacccccctacgccccgccccccgtcgccgtcccccgaccccgttcaacccctctccaacgcccccgcccgtccgc

SEQ ID NO: 30551 - DNA, 594 bp, Artificial Sequence
  chemically treated genomic DNA (Homo sapiens) CpG-island No: 30551
gaggtaagaatttattttgttttcgtttttttcgtttaattttattttattttattatttttaatcgtattttattttattatttttaattttattttattttatcgtttttttttttttttttttcggttttttttttttttttttttcgggttttttttcgttttcgcgttttttttatttttcgcgcgttttttttttttttttattttcgtttttttttcgttttttttcggttttcggcgtttttcgattttgttcgtttcgcgcgttttattcgtttttttcgttttttttttttcgcgtttagtttttttttttttcgcgttttttcgcggttttttttgtcgcgttcgtgtcgtttttttttcgcgcgttattttcgtttttttttcgtttcgttattgttcgtttcgttcgtttcgttttattttcgttttatcgtttcgcgcggttttttcggttgcgtttcgtttttatatcgtcgttcgcggtattcgtttttcgtttcgttcgttagtttttttgcgtttcgtttttcgtcgtcgtttttcggtttcgtttagtttttttttagcgttttcgttcgttcgt

SEQ ID NO: 30552 - DNA, 594 bp, Artificial Sequence
  chemically treated genomic DNA (Homo sapiens) CpG-island No: 30552
acgaacgaacgaaaacgctaaaaaaaaactaaacgaaaccgaaaaacgacgacgaaaaacgaaacgcaaaaaaactaacgaacgaaacgaaaaacgaataccgcgaacgacgatataaaaacgaaacgcaaccgaaaaaaccgcgcgaaacgataaaacgaaaataaaacgaaacgaacgaaacgaacaataacgaaacgaaaaaaaaacgaaaataacgcgcgaaaaaaaaacgacacgaacgcgacaaaaaaaaccgcgaaaaaacgcgaaaaaaaaaaaaactaaacgcgaaaaaaaaaaaacgaaaaaaacgaataaaacgcgcgaaacgaacaaaatcgaaaaacgccgaaaaccgaaaaaaaacgaaaaaaaaacgaaaataaaaaaaaaaaaaaaacgcgcgaaaaataaaaaaaacgcgaaaacgaaaaaaaacccgaaaaaaaaaaaaaaaaaaaaccgaaaaaaaaaaaaaaaaaaacgataaaataaaataaaattaaaaataataaaataaaatacgattaaaaataataaaataaaataaaattaaacgaaaaaaacgaaaacaaaataaattcttacctc

SEQ ID NO: 30553 - DNA, 561 bp, Artificial Sequence
  chemically treated genomic DNA (Homo sapiens) CpG-island No: 30553
tcgtcgacgtttttcgacgtggtattcgcgttaaggcgtgtcgagtagttttaaggtcgaggatttgggcgcgtttcgtattttttttttcggttttagggcgtggtcgtcggtttttgcgttcggttcgagaagggcgtttgtcgcggttgcggcgcgttcgttcggtgtatcggattcgattatattttgggtgggtttttcgtttcggcgtcgtatttatcgtgtagtttcgtttcgagttcgagattttggtgtttttattcgcgttgttgtagtaagaaataaaagagcggcgttcgtttttagttttatatacgtcgcgtttcgtttcgttttttattcgtcgtagtaggggcggtgttggtattcgaggggcgggagtagcgcgggttgtttttcgttttgtcgcgtttttcgttgggttattagatcggttgggcgcggtttttttcgcgtcgggtatttttagttcgtagtgtgtttagcgtgggggttgtagtcgtcgttagagtgggcgttaggttttcggttttgtttttgcggttatatttttttttt

SEQ ID NO: 30554 - DNA, 561 bp, Artificial Sequence
  chemically treated genomic DNA (Homo sapiens) CpG-island No: 30554
aaaaaaaaaatataaccgcaaaaacaaaaccgaaaacctaacgcccactctaacgacgactacaacccccacgctaaacacactacgaactaaaaatacccgacgcgaaaaaaaccgcgcccaaccgatctaataacccaacgaaaaacgcgacaaaacgaaaaacaacccgcgctactcccgcccctcgaataccaacaccgcccctactacgacgaataaaaaacgaaacgaaacgcgacgtatataaaactaaaaacgaacgccgctcttttatttcttactacaacaacgcgaataaaaacaccaaaatctcgaactcgaaacgaaactacacgataaatacgacgccgaaacgaaaaacccacccaaaatataatcgaatccgatacaccgaacgaacgcgccgcaaccgcgacaaacgcccttctcgaaccgaacgcaaaaaccgacgaccacgccctaaaaccgaaaaaaaaaatacgaaacgcgcccaaatcctcgaccttaaaactactcgacacgccttaacgcgaataccacgtcgaaaaacgtcgacga

SEQ ID NO: 30555 - DNA, 561 bp, Artificial Sequence
  chemically treated genomic DNA (Homo sapiens) CpG-island No: 30555
aaaggggaaatgtagtcgtaaaagtaaagtcgggggtttggcgtttattttggcggcgattatagtttttacgttgggtatattgcgagttgggggtgttcggcgcgggagaagtcgcgtttagtcggtttggtagtttagcggggggcgcggtagggcgaggagtagttcgcgttgttttcgtttttcgggtgttagtatcgtttttgttgcggcgggtgaggggcggggcggggcgcggcgtatataaggttaggggcgggcgtcgtttttttgttttttgttgtagtaacgcgagtgggagtattaggatttcgggttcggaacgagattgtacggtgagtgcggcgtcggggcggggggtttatttagggtgtggtcggattcggtgtatcgggcgggcgcgtcgtaatcgcgataggcgtttttttcggatcggacgtaggggtcggcgattacgttttgggatcgagaagaggggtgcgggacgcgtttagattttcggttttggggttgttcggtacgttttggcgcgagtgttacgtcgagaggcgtcggcgg

SEQ ID NO: 30556 - DNA, 561 bp, Artificial Sequence
  chemically treated genomic DNA (Homo sapiens) CpG-island No: 30556
ccgccgacgcctctcgacgtaacactcgcgccaaaacgtaccgaacaaccccaaaaccgaaaatctaaacgcgtcccgcacccctcttctcgatcccaaaacgtaatcgccgacccctacgtccgatccgaaaaaaacgcctatcgcgattacgacgcgcccgcccgatacaccgaatccgaccacaccctaaataaaccccccgccccgacgccgcactcaccgtacaatctcgttccgaacccgaaatcctaatactcccactcgcgttactacaacaaaaaacaaaaaaacgacgcccgcccctaaccttatatacgccgcgccccgccccgcccctcacccgccgcaacaaaaacgatactaacacccgaaaaacgaaaacaacgcgaactactcctcgccctaccgcgccccccgctaaactaccaaaccgactaaacgcgacttctcccgcgccgaacacccccaactcgcaatatacccaacgtaaaaactataatcgccgccaaaataaacgccaaacccccgactttacttttacgactacatttccccttt

SEQ ID NO: 30557 - DNA, 585 bp, Artificial Sequence
  chemically treated genomic DNA (Homo sapiens) CpG-island No: 30557
ggtcgtttttttcgcgttcggaacgtttttttcggaggtatagggcgggttgcggagtttacggtttagggtttcgcgggcgggagaggcggcgtgggagtcgggatttatttgtcgggtcggtgggcgcgcgcgtgttcggggtcgttcggcgtttgggagcgcgtaattagcgttcggcgttgcggggttcgtcgtgagtttattttttcgcgcggcgtcggggaagggtcggttcgttcgcgttatttgtcgggttttcgggtattgtttggtttttaggtcgtttcggaagtcgcgtcgtttgcgtgggattttgcgacgttgttatttagtcgtaagcggaattcgtttggttcgttatttttttattcggtgcgtttgggtcgtgttcgggtttacgtcggattcgtcggtatttcgattttgcgcgtggtttcgtatttagtttttttcggagtttaggtgtattgggtcgggagatatcgttgggttgcgcggcgtgggaagagtttgtagagcgcgtggtggggatttggtggtaggaggaatagtattagttttggtcgtattatttttttcgtt

SEQ ID NO: 30558 - DNA, 585 bp, Artificial Sequence
  chemically treated genomic DNA (Homo sapiens) CpG-island No: 30558
aacgaaaaaaataatacgaccaaaactaatactattcctcctaccaccaaatccccaccacgcgctctacaaactcttcccacgccgcgcaacccaacgatatctcccgacccaatacacctaaactccgaaaaaaactaaatacgaaaccacgcgcaaaatcgaaataccgacgaatccgacgtaaacccgaacacgacccaaacgcaccgaataaaaaaataacgaaccaaacgaattccgcttacgactaaataacaacgtcgcaaaatcccacgcaaacgacgcgacttccgaaacgacctaaaaaccaaacaatacccgaaaacccgacaaataacgcgaacgaaccgacccttccccgacgccgcgcgaaaaaataaactcacgacgaaccccgcaacgccgaacgctaattacgcgctcccaaacgccgaacgaccccgaacacgcgcgcgcccaccgacccgacaaataaatcccgactcccacgccgcctctcccgcccgcgaaaccctaaaccgtaaactccgcaacccgccctatacctccgaaaaaaacgttccgaacgcgaaaaaaacgacc

SEQ ID NO: 30559 - DNA, 585 bp, Artificial Sequence
  chemically treated genomic DNA (Homo sapiens) CpG-island No: 30559
agcggggaaagtggtgcgattagggttgatgttgttttttttgttattaggtttttattacgcgttttgtaggttttttttacgtcgcgtagtttagcggtgtttttcggtttagtgtatttgagtttcggggagggttgggtgcggggttacgcgtaagatcgaggtgtcggcgggttcggcgtgggttcggatacggtttaggcgtatcgggtgaaggggtgacgagttaagcgagtttcgtttgcggttgggtggtagcgtcgtagggttttacgtaggcggcgcggttttcggggcggtttggaggttaggtagtgttcgggggttcggtaggtggcgcgggcgagtcgattttttttcggcgtcgcgcgaggagatgagtttacggcgggtttcgtagcgtcggacgttggttgcgcgtttttaggcgtcgagcggtttcgggtacgcgcgcgtttatcggttcggtaggtgggtttcggtttttacgtcgtttttttcgttcgcgggattttgggtcgtgggtttcgtagttcgttttgtgttttcgggaggggcgtttcgggcgcggggggaacggtt

SEQ ID NO: 30560 - DNA, 585 bp, Artificial Sequence
  chemically treated genomic DNA (Homo sapiens) CpG-island No: 30560
aaccgttccccccgcgcccgaaacgcccctcccgaaaacacaaaacgaactacgaaacccacgacccaaaatcccgcgaacgaaaaaaacgacgtaaaaaccgaaacccacctaccgaaccgataaacgcgcgcgtacccgaaaccgctcgacgcctaaaaacgcgcaaccaacgtccgacgctacgaaacccgccgtaaactcatctcctcgcgcgacgccgaaaaaaaatcgactcgcccgcgccacctaccgaacccccgaacactacctaacctccaaaccgccccgaaaaccgcgccgcctacgtaaaaccctacgacgctaccacccaaccgcaaacgaaactcgcttaactcgtcaccccttcacccgatacgcctaaaccgtatccgaacccacgccgaacccgccgacacctcgatcttacgcgtaaccccgcacccaaccctccccgaaactcaaatacactaaaccgaaaaacaccgctaaactacgcgacgtaaaaaaaacctacaaaacgcgtaataaaaacctaataacaaaaaaaacaacatcaaccctaatcgcaccactttccccgct

SEQ ID NO: 30561 - DNA, 674 bp, Artificial Sequence
  chemically treated genomic DNA (Homo sapiens) CpG-island No: 30561
gggcgtgcgcggggttcggtcgtcggtgtttttggagatgtttttttggtttggtgtgatacgtgtgtatatagttttcgttttttcgtgagcgttcgggtgcgtgtgttttttttcgattattttgaggagcgagggtgttggttttcgagagggcggcgagaaggacggaggtagaggttatttatacggttcggcgggtgcggttcggtttagcgtttttcgttttttttagtttttcgcgtagttttaatagtaaaattttattgagttcggacgaaattggcgggtttttgggttaattatcgtgtagtttttcgttagacgttggattaatggttgtgcgtttgaggtttggtaatcgtttttcgtaagatattatcgggtaatgtagtttttcgcgattaagggtaggatagttggacggcgtatagttttttgggagatgtagttcggttgttcgcgggcgcgcgagttcgatcgacgcgttagaaggaggtgttttgcgaagtcgggttgcgattttaggggtcgtcgtgttttggcgtgtgattcgaaagttagtttgtaggcggggtttaaggttagggcgcggtagatttgattcgttttttttaaattttgttaatgttagaattcggataattttaatttggtaaagatggtaggaagtt

SEQ ID NO: 30562 - DNA, 674 bp, Artificial Sequence
  chemically treated genomic DNA (Homo sapiens) CpG-island No: 30562
aacttcctaccatctttaccaaattaaaattatccgaattctaacattaacaaaatttaaaaaaaacgaatcaaatctaccgcgccctaaccttaaaccccgcctacaaactaactttcgaatcacacgccaaaacacgacgacccctaaaatcgcaacccgacttcgcaaaacacctccttctaacgcgtcgatcgaactcgcgcgcccgcgaacaaccgaactacatctcccaaaaaactatacgccgtccaactatcctacccttaatcgcgaaaaactacattacccgataatatcttacgaaaaacgattaccaaacctcaaacgcacaaccattaatccaacgtctaacgaaaaactacacgataattaacccaaaaacccgccaatttcgtccgaactcaataaaattttactattaaaactacgcgaaaaactaaaaaaaacgaaaaacgctaaaccgaaccgcacccgccgaaccgtataaataacctctacctccgtccttctcgccgccctctcgaaaaccaacaccctcgctcctcaaaataatcgaaaaaaaacacacgcacccgaacgctcacgaaaaaacgaaaactatatacacacgtatcacaccaaaccaaaaaaacatctccaaaaacaccgacgaccgaaccccgcgcacgccc

SEQ ID NO: 30563 - DNA, 674 bp, Artificial Sequence
  chemically treated genomic DNA (Homo sapiens) CpG-island No: 30563
ggttttttgttatttttattaagttgagattattcgggttttggtattaatagagtttgaggaaagcgggttaagtttatcgcgttttaattttggatttcgtttgtaggttgattttcgagttatacgttagagtacggcgatttttaaggtcgtagttcggtttcgtaaggtatttttttttaacgcgtcggtcgaattcgcgcgttcgcgagtagtcggattatattttttaggaagttgtgcgtcgtttagttgttttgtttttggtcgcgaaggattatattattcggtgatattttgcgggaggcggttgttagattttaagcgtataattattggtttagcgtttggcggggagttgtacggtgattggtttaggagttcgttagtttcgttcgagtttagtagagttttgttgttaagattgcgcgaggagttagagagagcggagagcgttgagtcgggtcgtattcgtcgagtcgtgtgagtaatttttattttcgtttttttcgtcgttttttcggggattagtattttcgttttttagggtggtcgggagggagtatacgtattcgggcgtttacgagagggcggggattgtgtatatacgtgttatattagattagagaagtatttttagggatatcggcggtcgagtttcgcgtacgttt

SEQ ID NO: 30564 - DNA, 674 bp, Artificial Sequence
  chemically treated genomic DNA (Homo sapiens) CpG-island No: 30564
aaacgtacgcgaaactcgaccgccgatatccctaaaaatacttctctaatctaatataacacgtatatacacaatccccgccctctcgtaaacgcccgaatacgtatactccctcccgaccaccctaaaaaacgaaaatactaatccccgaaaaaacgacgaaaaaaacgaaaataaaaattactcacacgactcgacgaatacgacccgactcaacgctctccgctctctctaactcctcgcgcaatcttaacaacaaaactctactaaactcgaacgaaactaacgaactcctaaaccaatcaccgtacaactccccgccaaacgctaaaccaataattatacgcttaaaatctaacaaccgcctcccgcaaaatatcaccgaataatataatccttcgcgaccaaaaacaaaacaactaaacgacgcacaacttcctaaaaaatataatccgactactcgcgaacgcgcgaattcgaccgacgcgttaaaaaaaaataccttacgaaaccgaactacgaccttaaaaatcgccgtactctaacgtataactcgaaaatcaacctacaaacgaaatccaaaattaaaacgcgataaacttaacccgctttcctcaaactctattaataccaaaacccgaataatctcaacttaataaaaataacaaaaaacc

SEQ ID NO: 30565 - DNA, 621 bp, Artificial Sequence
  chemically treated genomic DNA (Homo sapiens) CpG-island No: 30565
ttatttgaatcggttaatgtcggcgggttagggggcgggggttgaaaattttataaaggcgtcgatcggtcggataggcggtagcggcggtttttgtagcggtggtcggttgttgggtgtggagttttttagcgtttttcgggttcgattttttgagcgttttgtttcggcgttagtttatttcgtttttcggcgttatgattataattattatttttaagggagtcgattttaatagtaggaatagttttcggtgaggcgatcgggtcgcgttcgagtcgcgcggggttgaggggttgggagggtcgttgtcggcggggtttcgcgtcggtcgttgcgggtaacgagtttcgtgcgttgtgttcgcgtcggggcgggtggcggggttttgtcgtcgcgtcgtttttgtgtcgtttggcgagttttgcgcgtcggttttattcgggtttttgttgttttttatttattttttttacggagttaggggttgaggaggtcggggttggtcgtttttcggagtacggtcggttttcgttaatcggaattttcggggagggtttcgtttttttttgtgtgtatttcggttggtgtatttttagggtggtgggtttgttttttagg

SEQ ID NO: 30566 - DNA, 621 bp, Artificial Sequence
  chemically treated genomic DNA (Homo sapiens) CpG-island No: 30566
cctaaaaaacaaacccaccaccctaaaaatacaccaaccgaaatacacacaaaaaaaaacgaaaccctccccgaaaattccgattaacgaaaaccgaccgtactccgaaaaacgaccaaccccgacctcctcaacccctaactccgtaaaaaaaataaataaaaaacaacaaaaacccgaataaaaccgacgcgcaaaactcgccaaacgacacaaaaacgacgcgacgacaaaaccccgccacccgccccgacgcgaacacaacgcacgaaactcgttacccgcaacgaccgacgcgaaaccccgccgacaacgaccctcccaacccctcaaccccgcgcgactcgaacgcgacccgatcgcctcaccgaaaactattcctactattaaaatcgactcccttaaaaataataattataatcataacgccgaaaaacgaaataaactaacgccgaaacaaaacgctcaaaaaatcgaacccgaaaaacgctaaaaaactccacacccaacaaccgaccaccgctacaaaaaccgccgctaccgcctatccgaccgatcgacgcctttataaaattttcaacccccgccccctaacccgccgacattaaccgattcaaataa

SEQ ID NO: 30567 - DNA, 621 bp, Artificial Sequence
  chemically treated genomic DNA (Homo sapiens) CpG-island No: 30567
tttggggggtaagtttattattttggggatgtattagtcgggatgtatataggagaaagcgaagtttttttcgaaggtttcgattaacgaaaatcggtcgtgtttcgaggggcgattagtttcggtttttttagtttttgatttcgtggaaggaatgaatggagagtagtagggattcgggtggggtcggcgcgtagggttcgttaggcggtataaaggcggcgcgacggtagaatttcgttattcgtttcggcgcgagtatagcgtacggggttcgttattcgtaacgatcggcgcgaggtttcgtcggtagcggtttttttagttttttagtttcgcgcggttcgggcgcgattcggtcgttttatcgggagttatttttgttgttggggtcgatttttttgaaggtggtggttgtggttatggcgtcgaggagcgaggtaggttggcgtcggagtagaacgtttaaagggtcggattcgaggggcgttgggaaattttatatttaatagtcgattatcgttgtaggagtcgtcgttgtcgtttgttcggtcgatcgacgtttttatagggtttttaattttcgttttttaattcgtcggtattggtcgatttaaatga

SEQ ID NO: 30568 - DNA, 621 bp, Artificial Sequence
  chemically treated genomic DNA (Homo sapiens) CpG-island No: 30568
tcatttaaatcgaccaataccgacgaattaaaaaacgaaaattaaaaaccctataaaaacgtcgatcgaccgaacaaacgacaacgacgactcctacaacgataatcgactattaaatataaaatttcccaacgcccctcgaatccgaccctttaaacgttctactccgacgccaacctacctcgctcctcgacgccataaccacaaccaccaccttcaaaaaaatcgaccccaacaacaaaaataactcccgataaaacgaccgaatcgcgcccgaaccgcgcgaaactaaaaaactaaaaaaaccgctaccgacgaaacctcgcgccgatcgttacgaataacgaaccccgtacgctatactcgcgccgaaacgaataacgaaattctaccgtcgcgccgcctttataccgcctaacgaaccctacgcgccgaccccacccgaatccctactactctccattcattccttccacgaaatcaaaaactaaaaaaaccgaaactaatcgcccctcgaaacacgaccgattttcgttaatcgaaaccttcgaaaaaaacttcgctttctcctatatacatcccgactaatacatccccaaaataataaacttaccccccaaa

SEQ ID NO: 30569 - DNA, 634 bp, Artificial Sequence
  chemically treated genomic DNA (Homo sapiens) CpG-island No: 30569
ggttcgttatcgagtttttttatagcgtcgaattttaggtttttagaagtcgttcggacgttaatgtttttcgtttaggtttttcgtttagagttggttgcgagataagatttcgtttgggcgttttttgtagcgtttgtaagtttaaatttttagtgttgcggcgttgtttttttttagttacggttatttttttgcggttttttgtacgcgttttttttttttggcgtcgatagtaaattagggaaaatagcgtcgaggattgattgtatttagagtatcgcgttaataggattaggcggcgtcggggatattttggtgtcgagcggagaaaaggttttcggagacggcgggaggggtaggaggatttcggggttggagacggtgcgaatgcgcgtgcgtaggttggggcggcggtatttgggtgggaattcgtgcgggatttaggttttagtaagcgtataacgttttttaattttgggagttttcgttatatttcggtttttattttagtgtcgtcgtagttatttgtttaaatttcgatagttaaacgggtttgtgttggaaagtaatcgtttttatttttatattagaatatatataagaggtacgggaataaaatcgatatttttga

SEQ ID NO: 30570 - DNA, 634 bp, Artificial Sequence
  chemically treated genomic DNA (Homo sapiens) CpG-island No: 30570
tcaaaaatatcgattttattcccgtacctcttatatatattctaatataaaaataaaaacgattactttccaacacaaacccgtttaactatcgaaatttaaacaaataactacgacgacactaaaataaaaaccgaaatataacgaaaactcccaaaattaaaaaacgttatacgcttactaaaacctaaatcccgcacgaattcccacccaaataccgccgccccaacctacgcacgcgcattcgcaccgtctccaaccccgaaatcctcctacccctcccgccgtctccgaaaaccttttctccgctcgacaccaaaatatccccgacgccgcctaatcctattaacgcgatactctaaatacaatcaatcctcgacgctattttccctaatttactatcgacgccaaaaaaaaaaaacgcgtacaaaaaaccgcaaaaaaataaccgtaactaaaaaaaaacaacgccgcaacactaaaaatttaaacttacaaacgctacaaaaaacgcccaaacgaaatcttatctcgcaaccaactctaaacgaaaaacctaaacgaaaaacattaacgtccgaacgacttctaaaaacctaaaattcgacgctataaaaaaactcgataacgaacc

SEQ ID NO: 30571 - DNA, 634 bp, Artificial Sequence
  chemically treated genomic DNA (Homo sapiens) CpG-island No: 30571
ttaggggtatcgattttgttttcgtgttttttgtgtgtgttttagtgtggaagtggaggcgattgttttttagtataagttcgtttgattgtcggggtttggataagtggttgcgacgatattaaggtggagatcgggatgtagcgaggatttttagagttgggagacgttgtacgtttattgggatttaaatttcgtacgagtttttatttaagtgtcgtcgttttagtttacgtacgcgtattcgtatcgtttttagtttcggggtttttttgtttttttcgtcgttttcgggggtttttttttcgttcggtattagggtgttttcggcgtcgtttgattttgttagcgcggtattttgagtgtagttagttttcggcgttgttttttttgatttgttgtcgacgttaggaaggaaggacgcgtgtagaggatcgtagaggggtggtcgtggttgagaggagatagcgtcgtagtattgagggtttgggtttgtaggcgttgtaggagacgtttaggcggagttttgtttcgtagttagttttgagcgggaggtttgagcgggaagtattggcgttcgagcgatttttaggagtttggggttcggcgttatggaggagttcgatggcgagtt

SEQ ID NO: 30572 - DNA, 634 bp, Artificial Sequence
  chemically treated genomic DNA (Homo sapiens) CpG-island No: 30572
aactcgccatcgaactcctccataacgccgaaccccaaactcctaaaaatcgctcgaacgccaatacttcccgctcaaacctcccgctcaaaactaactacgaaacaaaactccgcctaaacgtctcctacaacgcctacaaacccaaaccctcaatactacgacgctatctcctctcaaccacgaccacccctctacgatcctctacacgcgtccttccttcctaacgtcgacaacaaatcaaaaaaaacaacgccgaaaactaactacactcaaaataccgcgctaacaaaatcaaacgacgccgaaaacaccctaataccgaacgaaaaaaaaacccccgaaaacgacgaaaaaaacaaaaaaaccccgaaactaaaaacgatacgaatacgcgtacgtaaactaaaacgacgacacttaaataaaaactcgtacgaaatttaaatcccaataaacgtacaacgtctcccaactctaaaaatcctcgctacatcccgatctccaccttaatatcgtcgcaaccacttatccaaaccccgacaatcaaacgaacttatactaaaaaacaatcgcctccacttccacactaaaacacacacaaaaaacacgaaaacaaaatcgatacccctaa

SEQ ID NO: 30573 - DNA, 1015 bp, Artificial Sequence
  chemically treated genomic DNA (Homo sapiens) CpG-island No: 30573
ttttgattatgttttattacgaaggaggataatatagtttcgtttagagttaggcgcgttttcgggcgggtcgggtgcgcgtgttcgtttatttttcgtcggtcgggcgcgtttggtttaggacgcggtggttgggacggggggtgggggtggttatgtaagcgttgtcgttttcggaggcgttagtaatgggaggtttcggttattcgtgttcgcgtagtagggtggggggagggagcgtacgacgtgcgcgtatttttttttttcgtttatcgttgtcgttttttttttttgtcgtttttggtgttgtttgtgtgttcgtttggtgcggatttggtattttttttgtgaagcggtagttgaggagatttcggcgttcgttatggtcgacgaaaagtttaaggtgagttcgtcgtcggttttttcgtttcgtcgcgcggtgggggttatggcgcgggtcggggttcggttagagttcgtcgttggtttttagcgttttttcgggttttttacggggtcggtcgcggtttaggttcgggcgtttcgcgttatttttttttttttttttttttttttttttcgcgtcgaaggaggtttcgtcgttttttttcgttttcggcggttttcgagtgcgcgtcgggcgcgagttgggcgggtagaaagcggacgttcgcggatttattagtttcgaacggggatttttggtttagtcggtcggcgcgcgtgaggaggggcgttagggcgcgcggggtttttattttttgtcgatttcgcgtcgggtgttgtagttttcgaggcggcgaggagttttttgggttcgggttttatttttcgggtaggaatcgcgggtatttggggatttttgtttggggtcgcggcggcggggcgagggttcggggcgaattaatgggttgcggacgggtaggaatttggatgttcgcgggtcgtcgttttgggtttgggggtagggggattttcgtggagtattttttattttaatagttttaggggttcg

SEQ ID NO: 30574 - DNA, 1015 bp, Artificial Sequence
  chemically treated genomic DNA (Homo sapiens) CpG-island No: 30574
cgaacccctaaaactattaaaataaaaaatactccacgaaaatccccctacccccaaacccaaaacgacgacccgcgaacatccaaattcctacccgtccgcaacccattaattcgccccgaaccctcgccccgccgccgcgaccccaaacaaaaatccccaaatacccgcgattcctacccgaaaaataaaacccgaacccaaaaaactcctcgccgcctcgaaaactacaacacccgacgcgaaatcgacaaaaaataaaaaccccgcgcgccctaacgcccctcctcacgcgcgccgaccgactaaaccaaaaatccccgttcgaaactaataaatccgcgaacgtccgctttctacccgcccaactcgcgcccgacgcgcactcgaaaaccgccgaaaacgaaaaaaaacgacgaaacctccttcgacgcgaaaaaaaaaaaaaaaaaaaaaaaaaaaaataacgcgaaacgcccgaacctaaaccgcgaccgaccccgtaaaaaacccgaaaaaacgctaaaaaccaacgacgaactctaaccgaaccccgacccgcgccataacccccaccgcgcgacgaaacgaaaaaaccgacgacgaactcaccttaaacttttcgtcgaccataacgaacgccgaaatctcctcaactaccgcttcacaaaaaaaataccaaatccgcaccaaacgaacacacaaacaacaccaaaaacgacaaaaaaaaaaaacgacaacgataaacgaaaaaaaaaaatacgcgcacgtcgtacgctccctccccccaccctactacgcgaacacgaataaccgaaacctcccattactaacgcctccgaaaacgacaacgcttacataaccacccccaccccccgtcccaaccaccgcgtcctaaaccaaacgcgcccgaccgacgaaaaataaacgaacacgcgcacccgacccgcccgaaaacgcgcctaactctaaacgaaactatattatcctccttcgtaataaaacataatcaaaa

SEQ ID NO: 30575 - DNA, 1015 bp, Artificial Sequence
  chemically treated genomic DNA (Homo sapiens) CpG-island No: 30575
cgggtttttgaggttattaaagtgggaaatattttacgggaatttttttatttttaggtttaggacggcggttcgcgggtatttaggtttttgttcgttcgtagtttattgattcgtttcgaattttcgtttcgtcgtcgcggttttaggtaggggtttttagatgttcgcggtttttattcgagaggtgaagttcgagtttagaggatttttcgtcgtttcggagattgtaatattcgacgcggggtcgatagaaggtggagatttcgcgcgttttaacgtttttttttacgcgcgtcggtcggttgggttaagaattttcgttcggggttggtgggttcgcgggcgttcgttttttgttcgtttaattcgcgttcggcgcgtattcggaggtcgtcgggggcgggagagagcggcggggtttttttcggcgcgggagggaggaagagagggagggaggaaaatggcgcggagcgttcgggtttgagtcgcggtcggtttcgtggggggttcgggaaagcgttgggagttagcggcgggttttggtcggatttcggttcgcgttatgatttttatcgcgcggcgaggcgaaggggtcggcggcgagtttattttgggtttttcgtcggttatggcgagcgtcggagtttttttagttgtcgttttataaaagaggtattaggttcgtattaaacgagtatataagtagtattaggagcggtagaagaaggaggcggtagcggtggacgaggggagagggtgcgcgtacgtcgtgcgttttttttttttattttgttgcgcgagtacgagtagtcgaagttttttattgttggcgttttcgggagcggtaacgtttatataattatttttatttttcgttttagttatcgcgttttgggttaggcgcgttcggtcggcgggaagtaggcggatacgcgtattcggttcgttcgggggcgcgtttggttttgggcggggttgtattgttttttttcgtggtggagtataattaaaa

SEQ ID NO: 30576 - DNA, 1015 bp, Artificial Sequence
  chemically treated genomic DNA (Homo sapiens) CpG-island No: 30576
ttttaattatactccaccacgaaaaaaaacaatacaaccccgcccaaaaccaaacgcgcccccgaacgaaccgaatacgcgtatccgcctacttcccgccgaccgaacgcgcctaacccaaaacgcgataactaaaacgaaaaataaaaataattatataaacgttaccgctcccgaaaacgccaacaataaaaaacttcgactactcgtactcgcgcaacaaaataaaaaaaaaaaacgcacgacgtacgcgcaccctctcccctcgtccaccgctaccgcctccttcttctaccgctcctaatactacttatatactcgtttaatacgaacctaatacctcttttataaaacgacaactaaaaaaactccgacgctcgccataaccgacgaaaaacccaaaataaactcgccgccgaccccttcgcctcgccgcgcgataaaaatcataacgcgaaccgaaatccgaccaaaacccgccgctaactcccaacgctttcccgaaccccccacgaaaccgaccgcgactcaaacccgaacgctccgcgccattttcctccctccctctcttcctccctcccgcgccgaaaaaaaccccgccgctctctcccgcccccgacgacctccgaatacgcgccgaacgcgaattaaacgaacaaaaaacgaacgcccgcgaacccaccaaccccgaacgaaaattcttaacccaaccgaccgacgcgcgtaaaaaaaaacgttaaaacgcgcgaaatctccaccttctatcgaccccgcgtcgaatattacaatctccgaaacgacgaaaaatcctctaaactcgaacttcacctctcgaataaaaaccgcgaacatctaaaaacccctacctaaaaccgcgacgacgaaacgaaaattcgaaacgaatcaataaactacgaacgaacaaaaacctaaatacccgcgaaccgccgtcctaaacctaaaaataaaaaaattcccgtaaaatatttcccactttaataacctcaaaaacccg

SEQ ID NO: 30577 - DNA, 516 bp, Artificial Sequence
  chemically treated genomic DNA (Homo sapiens) CpG-island No: 30577
  unsure (393)
ttttcgcggttttggttggtttcgtgtgcggcgggggggggttcgtttggggtttttaggggtttgcggaggtatgtatagagcggggagtcgtttttgtatgtagggcgggaggggttcgcggcgtgtcggggcgttttttttgttcgttgagggaattttcgattggtcggggtcgttatatttattttttgaagttaaagggtatcgtgtcgtcgtcgggggtgggagcgttgtaggttaggcgggcgcggcgtcgcgtggtttcgagttcgttgttaacgtttttttcggtcgtttcgttttcgtcgggggtttttttgatattcgttattcgttattcgttattcgtttttcgttgtcgggaagtgacgtttcgtacgttattgggtncgtcgttcggtcgtttttttcgttattcggttaaaggggttcgcggaggtagggaaggggcggagagtcgaggttgtcggaagggaagggagtttttaaagattttagtatttatttttttaa

SEQ ID NO: 30578 - DNA, 516 bp, Artificial Sequence
  chemically treated genomic DNA (Homo sapiens) CpG-island No: 30578
  unsure (124)
ttaaaaaaataaatactaaaatctttaaaaactcccttcccttccgacaacctcgactctccgccccttccctacctccgcgaacccctttaaccgaataacgaaaaaaacgaccgaacgacgnacccaataacgtacgaaacgtcacttcccgacaacgaaaaacgaataacgaataacgaataacgaatatcaaaaaaacccccgacgaaaacgaaacgaccgaaaaaaacgttaacaacgaactcgaaaccacgcgacgccgcgcccgcctaacctacaacgctcccacccccgacgacgacacgataccctttaacttcaaaaaataaatataacgaccccgaccaatcgaaaattccctcaacgaacaaaaaaaacgccccgacacgccgcgaacccctcccgccctacatacaaaaacgactccccgctctatacatacctccgcaaacccctaaaaaccccaaacgaacccccccccgccgcacacgaaaccaaccaaaaccgcgaaaa

SEQ ID NO: 30579 - DNA, 516 bp, Artificial Sequence
  chemically treated genomic DNA (Homo sapiens) CpG-island No: 30579
  unsure (124)
ttgaaggaatgagtattggagtttttggggatttttttttttttcgatagtttcgatttttcgttttttttttgttttcgcgggtttttttaatcgggtggcggaaggggcggtcgggcggcgngtttaatggcgtgcggagcgttatttttcggtagcgggaggcgagtggcgagtggcgagtggcgagtgttaggggggttttcggcgggggcggggcggtcggaggaggcgttggtagcgggttcgaaattacgcggcgtcgcgttcgtttggtttgtagcgtttttattttcggcggcggtacgatgttttttgattttaggaggtgagtgtggcgatttcggttagtcgggagtttttttagcgggtagagggagcgtttcggtacgtcgcggatttttttcgttttgtatgtaaaagcggtttttcgttttgtgtatgttttcgtaggtttttagggattttaggcgagttttttttcgtcgtatacgaagttagttagagtcgcggagg

SEQ ID NO: 30580 - DNA, 516 bp, Artificial Sequence
  chemically treated genomic DNA (Homo sapiens) CpG-island No: 30580
  unsure (393)
cctccgcgactctaactaacttcgtatacgacgaaaaaaaactcgcctaaaatccctaaaaacctacgaaaacatacacaaaacgaaaaaccgcttttacatacaaaacgaaaaaaatccgcgacgtaccgaaacgctccctctacccgctaaaaaaactcccgactaaccgaaatcgccacactcacctcctaaaatcaaaaaacatcgtaccgccgccgaaaataaaaacgctacaaaccaaacgaacgcgacgccgcgtaatttcgaacccgctaccaacgcctcctccgaccgccccgcccccgccgaaaacccccctaacactcgccactcgccactcgccactcgcctcccgctaccgaaaaataacgctccgcacgccattaaacncgccgcccgaccgccccttccgccacccgattaaaaaaacccgcgaaaacaaaaaaaaaacgaaaaatcgaaactatcgaaaaaaaaaaaaatccccaaaaactccaatactcattccttcaa

SEQ ID NO: 30581 - DNA, 1016 bp, Artificial Sequence
  chemically treated genomic DNA (Homo sapiens) CpG-island No: 30581
  unsure (429, 469, 482)
gggtcggtcgtggaggtttgtaggaggtagcgggcgaggaggggttcgcgattagtttgacgcgcggtttttttttttttatgtttttttttttgttcgtatagagagcgttttcgttgatacgtgacgttcgcgcgttttagttaggttcgttttagcgtttgtttgtcgtttagtagttacgacgcggttaatttcgataataacgagttcgagaataattaggtggtggttaagttgggttatttcggttgggtcgcgtttcgggtttatcgttatcgacgtcgcggtcgtcgttattttcgtgcgggtttcgtgagcgttcgcggttcgcgtcgtcgtcggcgttattggaggtcgatttgcgtttttacgtaatacgcgggttcgacgtgaatttgtcggtcgatcgtaaagtggtttgcgatnaacggttcgaacggcggcgtacgttggtttttttcgagantttcgttgcggtnacgcgagagttttttcgtggaggtgggtcgttcggggttggcggcgttcggcgcgttggttttcggtattacgtcgtgcgattcgggcgtgttacggtttaacgagttgttcgtcgatttagacgcgttgttcgatcgtaaagagtattgggtggtggcgcgcgtcgggttcgtgtcgagcggcggcgacgcgtttagttttacgttgcggttcggcggcgacgtgtttttgggtattaacgggcgttcgcgcggtcgtttgttgtgcgtcgatattacgtaggcgttttgggtttttttcgtcgtgcgcggcggcgtcgcgggttagttgcgttttttcggtgagttttcggtttcgcgtgcgcgaggtttcgtttttttttcgtttcgtgtcgttttatttcgttgcgttttttttcggtttcgtttttttcgttaggcgttgtatcgttcgaggttagttcgcggtttttaattttaagcgttcgggtacgatttatttcgtttaaaattgtcggattttattttagagtt

SEQ ID NO: 30582 - DNA, 1016 bp, Artificial Sequence
  chemically treated genomic DNA (Homo sapiens) CpG-island No: 30582
  unsure (535, 548, 588)
aactctaaaataaaatccgacaattttaaacgaaataaatcgtacccgaacgcttaaaattaaaaaccgcgaactaacctcgaacgatacaacgcctaacgaaaaaaacgaaaccgaaaaaaaacgcaacgaaataaaacgacacgaaacgaaaaaaaaacgaaacctcgcgcacgcgaaaccgaaaactcaccgaaaaaacgcaactaacccgcgacgccgccgcgcacgacgaaaaaaacccaaaacgcctacgtaatatcgacgcacaacaaacgaccgcgcgaacgcccgttaatacccaaaaacacgtcgccgccgaaccgcaacgtaaaactaaacgcgtcgccgccgctcgacacgaacccgacgcgcgccaccacccaatactctttacgatcgaacaacgcgtctaaatcgacgaacaactcgttaaaccgtaacacgcccgaatcgcacgacgtaataccgaaaaccaacgcgccgaacgccgccaaccccgaacgacccacctccacgaaaaaactctcgcgtnaccgcaacgaaantctcgaaaaaaaccaacgtacgccgccgttcgaaccgttnatcgcaaaccactttacgatcgaccgacaaattcacgtcgaacccgcgtattacgtaaaaacgcaaatcgacctccaataacgccgacgacgacgcgaaccgcgaacgctcacgaaacccgcacgaaaataacgacgaccgcgacgtcgataacgataaacccgaaacgcgacccaaccgaaataacccaacttaaccaccacctaattattctcgaactcgttattatcgaaattaaccgcgtcgtaactactaaacgacaaacaaacgctaaaacgaacctaactaaaacgcgcgaacgtcacgtatcaacgaaaacgctctctatacgaacaaaaaaaaaaacataaaaaaaaaaaaaccgcgcgtcaaactaatcgcgaacccctcctcgcccgctacctcctacaaacctccacgaccgaccc

SEQ ID NO: 30583 - DNA, 1016 bp, Artificial Sequence
  chemically treated genomic DNA (Homo sapiens) CpG-island No: 30583
  unsure (535, 548, 588)
aattttggggtggagttcggtaattttggacggggtggatcgtgttcgggcgtttaaagttgggaatcgcgggttggtttcgggcggtgtagcgtttagcgagaggggcggggtcggggaagagcgtagcggggtgagacggtacgggacgggggaggggcggggtttcgcgtacgcggggtcggggatttatcgaggagacgtagttggttcgcgacgtcgtcgcgtacggcgaagaaggtttagagcgtttgcgtggtgtcgacgtatagtaggcggtcgcgcggacgttcgttgatgtttaggagtacgtcgtcgtcgggtcgtagcgtgaagttgagcgcgtcgtcgtcgttcggtacgggttcggcgcgcgttattatttagtattttttgcggtcgagtagcgcgtttgggtcggcgggtagttcgttgggtcgtagtacgttcgggtcgtacgacgtgatgtcgaaggttagcgcgtcgggcgtcgttagtttcggacggtttatttttacgaagaggttttcgcgtngtcgtagcggggntttcggagaagattagcgtgcgtcgtcgttcgggtcgttngtcgtaggttattttgcggtcggtcgataggtttacgtcgggttcgcgtgttgcgtggaagcgtaggtcggtttttagtagcgtcggcgacgacgcgggtcgcgggcgtttacggggttcgtacgagaatggcggcggtcgcggcgtcggtggcggtgggttcggggcgcggtttagtcgaggtggtttagtttggttattatttggttgttttcgagttcgttgttgtcgaagttggtcgcgtcgtggttgttgggcggtaggtaggcgttgaagcgggtttggttgaggcgcgcgggcgttacgtgttagcgaaggcgttttttgtgcggataaagggagggatatggagggggagaggtcgcgcgttaggttggtcgcgagttttttttcgttcgttgttttttgtaggtttttacgatcgattt

SEQ ID NO: 30584 - DNA, 1016 bp, Artificial Sequence
  chemically treated genomic DNA (Homo sapiens) CpG-island No: 30584
  unsure (429, 469, 482)
aaatcgatcgtaaaaacctacaaaaaacaacgaacgaaaaaaaactcgcgaccaacctaacgcgcgacctctccccctccatatccctccctttatccgcacaaaaaacgccttcgctaacacgtaacgcccgcgcgcctcaaccaaacccgcttcaacgcctacctaccgcccaacaaccacgacgcgaccaacttcgacaacaacgaactcgaaaacaaccaaataataaccaaactaaaccacctcgactaaaccgcgccccgaacccaccgccaccgacgccgcgaccgccgccattctcgtacgaaccccgtaaacgcccgcgacccgcgtcgtcgccgacgctactaaaaaccgacctacgcttccacgcaacacgcgaacccgacgtaaacctatcgaccgaccgcaaaataacctacgacnaacgacccgaacgacgacgcacgctaatcttctccgaaanccccgctacgacnacgcgaaaacctcttcgtaaaaataaaccgtccgaaactaacgacgcccgacgcgctaaccttcgacatcacgtcgtacgacccgaacgtactacgacccaacgaactacccgccgacccaaacgcgctactcgaccgcaaaaaatactaaataataacgcgcgccgaacccgtaccgaacgacgacgacgcgctcaacttcacgctacgacccgacgacgacgtactcctaaacatcaacgaacgtccgcgcgaccgcctactatacgtcgacaccacgcaaacgctctaaaccttcttcgccgtacgcgacgacgtcgcgaaccaactacgtctcctcgataaatccccgaccccgcgtacgcgaaaccccgcccctcccccgtcccgtaccgtctcaccccgctacgctcttccccgaccccgcccctctcgctaaacgctacaccgcccgaaaccaacccgcgattcccaactttaaacgcccgaacacgatccaccccgtccaaaattaccgaactccaccccaaaatt

SEQ ID NO: 30585 - DNA, 701 bp, Artificial Sequence
  chemically treated genomic DNA (Homo sapiens) CpG-island No: 30585
cggtcgaggggtacggggaaggggattcggggagggagagagggaggagcggcgaggttaaggtaggtggtacgtcgtcgttttttcggtcgttcgtatttcggaggttagttttagttggtagcgagtttttttttttttcgttgggtttggagcgcggcgcgggttcggtttttggggacgcgttaagagtaggtcggatagtagggcgggggtcgggtcgcgagtttatggcgcggcgagcggatttagtttcgaggttgatgacgtttttttttttggtttgcggcgtttggtttggtagggcgggtgacgttatcgtttcgttacgtgattattatttaaataaatattttttttttttttgcgcgcgggtttggttcgtttcgttttttagaggtcgtatataaacgcgtttttcgggttaggttcgttgcgaaggatatttgggttgtgtgtgcgacgcgggtcggaggggtagtcgggggaatcgcgaagaagtcgaggagttcggagtttcgcgtgacgttttttttttagtttaaaagcggtttttggttcggcgtagagagattcgggggtttagttttttttcgaaaagcgtcgttttgtttttggtttcgagaatagataaagagtatcgtagggtcgattacgttgggggcgttgaggtcggttatggttatggaagtgggtatttt

SEQ ID NO: 30586 - DNA, 701 bp, Artificial Sequence
  chemically treated genomic DNA (Homo sapiens) CpG-island No: 30586
aaaatacccacttccataaccataaccgacctcaacgcccccaacgtaatcgaccctacgatactctttatctattctcgaaaccaaaaacaaaacgacgcttttcgaaaaaaaactaaacccccgaatctctctacgccgaaccaaaaaccgcttttaaactaaaaaaaaaacgtcacgcgaaactccgaactcctcgacttcttcgcgattcccccgactacccctccgacccgcgtcgcacacacaacccaaatatccttcgcaacgaacctaacccgaaaaacgcgtttatatacgacctctaaaaaacgaaacgaaccaaacccgcgcgcaaaaaaaaaaaaaatatttatttaaataataatcacgtaacgaaacgataacgtcacccgccctaccaaaccaaacgccgcaaaccaaaaaaaaaaacgtcatcaacctcgaaactaaatccgctcgccgcgccataaactcgcgacccgacccccgccctactatccgacctactcttaacgcgtccccaaaaaccgaacccgcgccgcgctccaaacccaacgaaaaaaaaaaaaactcgctaccaactaaaactaacctccgaaatacgaacgaccgaaaaaacgacgacgtaccacctaccttaacctcgccgctcctccctctctccctccccgaatccccttccccgtacccctcgaccg

SEQ ID NO: 30587 - DNA, 701 bp, Artificial Sequence
  chemically treated genomic DNA (Homo sapiens) CpG-island No: 30587
agggtgtttatttttatgattatggtcggttttagcgtttttagcgtgatcggttttgcggtgttttttgtttgttttcggggttaagggtagggcggcgtttttcgaggaaaagttagattttcgggtttttttgcgtcgaattaaaagtcgtttttggattgagagaggagcgttacgcggggtttcgggtttttcggttttttcgcggttttttcgattgttttttcgattcgcgtcgtatatatagtttaaatgtttttcgtagcgagtttggttcggggagcgcgtttatatgcggtttttgggggacggggcgggttagattcgcgcgtagggggagggggggtgtttgtttgaatggtgattacgtgacggggcggtgacgttattcgttttgttaggttaggcgtcgtaagttagagggggagacgttattagtttcggagttgggttcgttcgtcgcgttataggttcgcggttcggttttcgttttgttgttcggtttgtttttggcgcgtttttagggatcggattcgcgtcgcgttttaggtttagcggggaggaggagggttcgttgttagttgaggttgattttcgggatgcgagcggtcgggagaacggcgacgtgttatttgttttggtttcgtcgttttttttttttttttttttcgagttttttttttcgtgtttttcggtcg

SEQ ID NO: 30588 - DNA, 701 bp, Artificial Sequence
  chemically treated genomic DNA (Homo sapiens) CpG-island No: 30588
cgaccgaaaaacacgaaaaaaaaaactcgaaaaaaaaaaaaaaaaaaaacgacgaaaccaaaacaaataacacgtcgccgttctcccgaccgctcgcatcccgaaaatcaacctcaactaacaacgaaccctcctcctccccgctaaacctaaaacgcgacgcgaatccgatccctaaaaacgcgccaaaaacaaaccgaacaacaaaacgaaaaccgaaccgcgaacctataacgcgacgaacgaacccaactccgaaactaataacgtctccccctctaacttacgacgcctaacctaacaaaacgaataacgtcaccgccccgtcacgtaatcaccattcaaacaaacaccccccctccccctacgcgcgaatctaacccgccccgtcccccaaaaaccgcatataaacgcgctccccgaaccaaactcgctacgaaaaacatttaaactatatatacgacgcgaatcgaaaaaacaatcgaaaaaaccgcgaaaaaaccgaaaaacccgaaaccccgcgtaacgctcctctctcaatccaaaaacgacttttaattcgacgcaaaaaaacccgaaaatctaacttttcctcgaaaaacgccgccctacccttaaccccgaaaacaaacaaaaaacaccgcaaaaccgatcacgctaaaaacgctaaaaccgaccataatcataaaaataaacaccct

SEQ ID NO: 30589 - DNA, 500 bp, Artificial Sequence
  chemically treated genomic DNA (Homo sapiens) CpG-island No: 30589
  unsure (134)
cgttggaggtttgcgggcgttgttgggggagcgagcggcgtaatgtttgttgttggattgtcgtttttttttcgtttttaacgtcggttatatcgtcggttttgttaacgtgcgttttagtattatcgtgcggncgtcgggttaagggcgttatgggtttggagtatatcgtcgttaacgtcgagtttcgcgatcgtttgttggcggcgtttattacgtcgtgtgttgttggacgagcgtagtcgttttggacggcgtaagcggatcggtattttggttttggcggcggcgtttttgtcgtaggcggtcgcgtaagtttttttttttaaaggtacgttttcggggaagttcggggcgggtcgtatatttttgaggttttgttcggtatttttggttttcggttttcgggggatcgttttatttgtagcgcgtgggcgttggagtatatttatttttggaatttgttattggttttgtttggttttggaaataaagatttg

SEQ ID NO: 30590 - DNA, 500 bp, Artificial Sequence
  chemically treated genomic DNA (Homo sapiens) CpG-island No: 30590
  unsure (367)
caaatctttatttccaaaaccaaacaaaaccaataacaaattccaaaaataaatatactccaacgcccacgcgctacaaataaaacgatcccccgaaaaccgaaaaccaaaaataccgaacaaaacctcaaaaatatacgacccgccccgaacttccccgaaaacgtacctttaaaaaaaaaaacttacgcgaccgcctacgacaaaaacgccgccgccaaaaccaaaataccgatccgcttacgccgtccaaaacgactacgctcgtccaacaacacacgacgtaataaacgccgccaacaaacgatcgcgaaactcgacgttaacgacgatatactccaaacccataacgcccttaacccgacgnccgcacgataatactaaaacgcacgttaacaaaaccgacgatataaccgacgttaaaaacgaaaaaaaaacgacaatccaacaacaaacattacgccgctcgctcccccaacaacgcccgcaaacctccaacg

SEQ ID NO: 30591 - DNA, 500 bp, Artificial Sequence
  chemically treated genomic DNA (Homo sapiens) CpG-island No: 30591
  unsure (367)
taagtttttgtttttagagttaaataaagttaatgataagttttagagataaatgtattttagcgtttacgcgttgtaggtggggcgatttttcgggagtcgagagttaggggtatcgggtaaaattttaggggtgtgcggttcgtttcgagttttttcgagggcgtatttttgaggaagaagatttgcgcggtcgtttgcggtagaggcgtcgtcgttagggttagggtgtcgattcgtttgcgtcgtttagggcggttgcgttcgtttagtaatatacggcgtggtaggcgtcgttagtaggcggtcgcggagttcggcgttggcgacgatgtgttttaggtttatggcgtttttggttcggcgntcgtacgatggtgttgaagcgtacgttgatagagtcggcgatgtggtcggcgttgaaagcgaagaaggagcggtagtttagtagtaggtattgcgtcgttcgtttttttagtagcgttcgtaggtttttagcg

SEQ ID NO: 30592 - DNA, 500 bp, Artificial Sequence
  chemically treated genomic DNA (Homo sapiens) CpG-island No: 30592
  unsure (134)
cgctaaaaacctacgaacgctactaaaaaaacgaacgacgcaatacctactactaaactaccgctccttcttcgctttcaacgccgaccacatcgccgactctatcaacgtacgcttcaacaccatcgtacgancgccgaaccaaaaacgccataaacctaaaacacatcgtcgccaacgccgaactccgcgaccgcctactaacgacgcctaccacgccgtatattactaaacgaacgcaaccgccctaaacgacgcaaacgaatcgacaccctaaccctaacgacgacgcctctaccgcaaacgaccgcgcaaatcttcttcctcaaaaatacgccctcgaaaaaactcgaaacgaaccgcacacccctaaaattttacccgatacccctaactctcgactcccgaaaaatcgccccacctacaacgcgtaaacgctaaaatacatttatctctaaaacttatcattaactttatttaactctaaaaacaaaaactta

SEQ ID NO: 30593 - DNA, 598 bp, Artificial Sequence
  chemically treated genomic DNA (Homo sapiens) CpG-island No: 30593
agagtcgttttgcgcgtgcgtattatttaggcggttagatttgaatattttattgaggcgagtcgggcgttgtgagcggattgttagaggcggttgtttgttttcgttttaaggaaatttagagcgtgtggattttaaataagtttgcgtaaaatttgtcgaggaggtttgtcgcggtaggtaaagagaatgattttttcgttttgggttttagggaaggtttcgggttttgtttgggcgttttgaagtttttgcggtgggaggtagggtacgtttttttagtttggcggttttcgttagcgtcgggtcgagtagacgtttttgtttcgggtcgggtatattgtgttttttttttttttttcggtttgtacgttgtgtcgtttttcgtttttttaatattttttcgtttgtatttcggttttttcggttattcggttcgggttgtttgttcgtcgtttttttggcgttttttttcgtttcgttttgtcgttttttgttagggttcgcggattttttttgtatttttgtcgtttttttttagggatttttcggttgtttgtattttttatttaagttttttttggttttaaatgaagtg

SEQ ID NO: 30594 - DNA, 598 bp, Artificial Sequence
  chemically treated genomic DNA (Homo sapiens) CpG-island No: 30594
cacttcatttaaaaccaaaaaaaacttaaataaaaaatacaaacaaccgaaaaatccctaaaaaaaaacgacaaaaatacaaaaaaaatccgcgaaccctaacaaaaaacgacaaaacgaaacgaaaaaaaacgccaaaaaaacgacgaacaaacaacccgaaccgaataaccgaaaaaaccgaaatacaaacgaaaaaatattaaaaaaacgaaaaacgacacaacgtacaaaccgaaaaaaaaaaaaaaaacacaatatacccgacccgaaacaaaaacgtctactcgacccgacgctaacgaaaaccgccaaactaaaaaaacgtaccctacctcccaccgcaaaaacttcaaaacgcccaaacaaaacccgaaaccttccctaaaacccaaaacgaaaaaatcattctctttacctaccgcgacaaacctcctcgacaaattttacgcaaacttatttaaaatccacacgctctaaatttccttaaaacgaaaacaaacaaccgcctctaacaatccgctcacaacgcccgactcgcctcaataaaatattcaaatctaaccgcctaaataatacgcacgcgcaaaacgactct

SEQ ID NO: 30595 - DNA, 598 bp, Artificial Sequence
  chemically treated genomic DNA (Homo sapiens) CpG-island No: 30595
tattttatttagagttaaaaaaagtttaagtgagaaatataaatagtcgagaggtttttagggaagagcggtaggggtgtaagaagagttcgcgagttttgatagaggacggtagggcggggcggaagaggacgttaagagagcgacggataagtaattcgagtcgggtggtcggaggggtcgaggtgtaggcggagaagtgttagggaagcgggaggcggtataacgtataggtcgaggaggggaaaaagggtatagtgtgttcggttcggggtaggggcgtttattcggttcggcgttaacggaggtcgttaggttgagggagcgtattttattttttatcgtaggaattttagggcgtttagataaaattcgaagttttttttgaagtttagaacgaaagagttattttttttatttgtcgcggtaaattttttcgataaattttgcgtagatttgtttggggtttatacgttttgagtttttttagagcggaaatagatagtcgtttttagtagttcgtttataacgttcggttcgttttagtgaagtatttaaatttaatcgtttaggtgatgcgtacgcgtaaagcggtttt

SEQ ID NO: 30596 - DNA, 598 bp, Artificial Sequence
  chemically treated genomic DNA (Homo sapiens) CpG-island No: 30596
aaaaccgctttacgcgtacgcatcacctaaacgattaaatttaaatacttcactaaaacgaaccgaacgttataaacgaactactaaaaacgactatctatttccgctctaaaaaaactcaaaacgtataaaccccaaacaaatctacgcaaaatttatcgaaaaaatttaccgcgacaaataaaaaaaataactctttcgttctaaacttcaaaaaaaacttcgaattttatctaaacgccctaaaattcctacgataaaaaataaaatacgctccctcaacctaacgacctccgttaacgccgaaccgaataaacgcccctaccccgaaccgaacacactataccctttttcccctcctcgacctatacgttataccgcctcccgcttccctaacacttctccgcctacacctcgacccctccgaccacccgactcgaattacttatccgtcgctctcttaacgtcctcttccgccccgccctaccgtcctctatcaaaactcgcgaactcttcttacacccctaccgctcttccctaaaaacctctcgactatttatatttctcacttaaactttttttaactctaaataaaata

SEQ ID NO: 30597 - DNA, 574 bp, Artificial Sequence
  chemically treated genomic DNA (Homo sapiens) CpG-island No: 30597
agggcggaagcggggagaaggcggattcgggaggcggggatacgttacgtcgacgcgggcgtgattttgggcgagagggtttggcgggaattttgaaagtcgttggcggatcgcgcgtagcggttagagatcgagttttaaggagagtgcggcgtttttcgaggcgtgtagttgggaattgtaatttatttgggttgtgcgtagaaggttggggtaagcgagtagagaagtggagcgtaagttaggggcgttgggggtcgtgcgggtcgggcgcgtgttacgttcgcggggtgaagtcggagcgcggggtttgttggagagaggagcgttgcggatcgaggtgagtgtgtgaggcgtaggttgggttttttagagtcgcggttcgttttcgtttatttgcgttttggtcggtttagtgtttagcggtagttggggttttcgcgcgtagtgtgaaattcggacgtggtagggcgtgttcgcgttcgatcgatttttagttgttggggcgaaaatataagtggattttagtttttagaattaggggagaaatattagagtttttataggtaatatt

SEQ ID NO: 30598 - DNA, 574 bp, Artificial Sequence
  chemically treated genomic DNA (Homo sapiens) CpG-island No: 30598
aatattacctataaaaactctaatatttctcccctaattctaaaaactaaaatccacttatattttcgccccaacaactaaaaatcgatcgaacgcgaacacgccctaccacgtccgaatttcacactacgcgcgaaaaccccaactaccgctaaacactaaaccgaccaaaacgcaaataaacgaaaacgaaccgcgactctaaaaaacccaacctacgcctcacacactcacctcgatccgcaacgctcctctctccaacaaaccccgcgctccgacttcaccccgcgaacgtaacacgcgcccgacccgcacgacccccaacgcccctaacttacgctccacttctctactcgcttaccccaaccttctacgcacaacccaaataaattacaattcccaactacacgcctcgaaaaacgccgcactctccttaaaactcgatctctaaccgctacgcgcgatccgccaacgactttcaaaattcccgccaaaccctctcgcccaaaatcacgcccgcgtcgacgtaacgtatccccgcctcccgaatccgccttctccccgcttccgccct

SEQ ID NO: 30599 - DNA, 574 bp, Artificial Sequence
  chemically treated genomic DNA (Homo sapiens) CpG-island No: 30599
ggtgttgtttataaaggttttaatgttttttttttagttttaaagattgaggtttatttgtgttttcgttttagtagttgagggtcggtcgggcgcggatacgttttgttacgttcgggttttatattgcgcgcggaggttttaattgtcgttgagtattggatcggttaggacgtaggtgggcgaggacgagtcgcggttttggagggtttagtttgcgttttatatatttatttcggttcgtagcgtttttttttttagtaggtttcgcgtttcgattttatttcgcgggcgtggtacgcgttcgattcgtacggtttttaacgtttttggtttacgttttatttttttattcgtttgttttagttttttgcgtataatttagatgagttgtagtttttagttgtacgtttcgggaagcgtcgtattttttttagggttcggtttttggtcgttgcgcgcggttcgttagcggtttttagaattttcgttaaattttttcgtttagggttacgttcgcgtcgacgtaacgtattttcgtttttcggattcgtttttttttcgttttcgtttt

SEQ ID NO: 30600 - DNA, 574 bp, Artificial Sequence
  chemically treated genomic DNA (Homo sapiens) CpG-island No: 30600
aaaacgaaaacgaaaaaaaaacgaatccgaaaaacgaaaatacgttacgtcgacgcgaacgtaaccctaaacgaaaaaatttaacgaaaattctaaaaaccgctaacgaaccgcgcgcaacgaccaaaaaccgaaccctaaaaaaaatacgacgcttcccgaaacgtacaactaaaaactacaactcatctaaattatacgcaaaaaactaaaacaaacgaataaaaaaataaaacgtaaaccaaaaacgttaaaaaccgtacgaatcgaacgcgtaccacgcccgcgaaataaaatcgaaacgcgaaacctactaaaaaaaaaaacgctacgaaccgaaataaatatataaaacgcaaactaaaccctccaaaaccgcgactcgtcctcgcccacctacgtcctaaccgatccaatactcaacgacaattaaaacctccgcgcgcaatataaaacccgaacgtaacaaaacgtatccgcgcccgaccgaccctcaactactaaaacgaaaacacaaataaacctcaatctttaaaactaaaaaaaaaacattaaaacctttataaacaacacc

SEQ ID NO: 30601 - DNA, 511 bp, Artificial Sequence
  chemically treated genomic DNA (Homo sapiens) CpG-island No: 30601
tatttttttttttcgtttttcgggattcgggtgtttaatttatttttttttattttcgcgcgttcggtggttttcgggtcggggttttatcgtttggttcggtcgggaattgttcggttttttcgtttttattttttaatacgaagtggcgtcggttggtttttttttttacgttgttagattttacgtcgtcgtttattgatgtcgaaagcggtttttaggaatacgttatgtttggcgtcgtagttttaaacgacgcggacgcgcgaaaattacgttataggagattagcgcgtatgcgatcggtagagagagaaggcgataggcgaacggcgggaaggggaaggaggggttttgtttttgaattaaaaggcgcggggtatttaaattagttgtgtgcgtttgcgtagtgcgtttgcgtagtataaagagttaggagttcggattagtcggatttgttattatggaaattataggtttggttttttcgatttttagggagtttaattgt

SEQ ID NO: 30602 - DNA, 511 bp, Artificial Sequence
  chemically treated genomic DNA (Homo sapiens) CpG-island No: 30602
acaattaaactccctaaaaatcgaaaaaaccaaacctataatttccataataacaaatccgactaatccgaactcctaactctttatactacgcaaacgcactacgcaaacgcacacaactaatttaaataccccgcgccttttaattcaaaaacaaaacccctccttccccttcccgccgttcgcctatcgccttctctctctaccgatcgcatacgcgctaatctcctataacgtaattttcgcgcgtccgcgtcgtttaaaactacgacgccaaacataacgtattcctaaaaaccgctttcgacatcaataaacgacgacgtaaaatctaacaacgtaaaaaaaaaaaccaaccgacgccacttcgtattaaaaaataaaaacgaaaaaaccgaacaattcccgaccgaaccaaacgataaaaccccgacccgaaaaccaccgaacgcgcgaaaataaaaaaaaataaattaaacacccgaatcccgaaaaacgaaaaaaaaaaata

SEQ ID NO: 30603 - DNA, 511 bp, Artificial Sequence
  chemically treated genomic DNA (Homo sapiens) CpG-island No: 30603
ataattgagttttttgggagtcggagaaattagatttatggtttttatggtgatagattcggttagttcggatttttggttttttatattgcgtaagcgtattgcgtaagcgtatataattgatttggatatttcgcgttttttggtttaaagataaagtttttttttttttttttcgtcgttcgtttatcgttttttttttttgtcggtcgtatgcgcgttggttttttgtgacgtagttttcgcgcgttcgcgtcgtttggagttgcgacgttaaatatggcgtgtttttagaagtcgttttcggtattagtaggcggcggcgtggggtttggtagcgtggggagagggattaatcgacgttatttcgtgttgggaagtgggagcgggagggtcgggtaattttcgatcgaattaaacggtgaggtttcggttcgagagttatcgagcgcgcgggagtggaagggagtgggttgggtattcgagtttcgagaggcgagggaggaaagtg

SEQ ID NO: 30604 - DNA, 511 bp, Artificial Sequence
  chemically treated genomic DNA (Homo sapiens) CpG-island No: 30604
cactttcctccctcgcctctcgaaactcgaatacccaacccactcccttccactcccgcgcgctcgataactctcgaaccgaaacctcaccgtttaattcgatcgaaaattacccgaccctcccgctcccacttcccaacacgaaataacgtcgattaatccctctccccacgctaccaaaccccacgccgccgcctactaataccgaaaacgacttctaaaaacacgccatatttaacgtcgcaactccaaacgacgcgaacgcgcgaaaactacgtcacaaaaaaccaacgcgcatacgaccgacaaaaaaaaaaaacgataaacgaacgacgaaaaaaaaaaaaaaaaactttatctttaaaccaaaaaacgcgaaatatccaaatcaattatatacgcttacgcaatacgcttacgcaatataaaaaaccaaaaatccgaactaaccgaatctatcaccataaaaaccataaatctaatttctccgactcccaaaaaactcaattat

SEQ ID NO: 30605 - DNA, 613 bp, Artificial Sequence
  chemically treated genomic DNA (Homo sapiens) CpG-island No: 30605
attcgggaagtgattcgtttggtttaagacgtcgaggtggagttggagcggtagcgtgggttgttgtagtagatcggggatgttttgtcgagttagcgggggagggtgtttatcgcggtttttttcgtttagtcgcgtgtgtttgtgatttttcgcgtcggcggtgatttttattttggttatcgtttgtgatcgtagtattgttcggcgttgtttggataagttgttgtattatcggttttcggttgagtttttttttattatcgttagttaggattgcgggtacgaggagacggtttaggttatcgttttttacggtagcgcggttacgtatattcggtagttcgatttgagtagtattgcggtgtcgtcggattatcgtaagttttaggttattataagatcgcgcgttattatcgttgggcgttgggttaggtttttcggtagtttcgttttttcgcggtcgtggtggtggaggatgatttggaggtggtttcggattttttcgagtattttcgggttatttattcgttgttgaaggtcgatttttttttgtggtgcgtttcggtttggaatgataacggtaaggagtagatggtggacgttagtaggt

SEQ ID NO: 30606 - DNA, 613 bp, Artificial Sequence
  chemically treated genomic DNA (Homo sapiens) CpG-island No: 30606
acctactaacgtccaccatctactccttaccgttatcattccaaaccgaaacgcaccacaaaaaaaaatcgaccttcaacaacgaataaataacccgaaaatactcgaaaaaatccgaaaccacctccaaatcatcctccaccaccacgaccgcgaaaaaacgaaactaccgaaaaacctaacccaacgcccaacgataataacgcgcgatcttataataacctaaaacttacgataatccgacgacaccgcaatactactcaaatcgaactaccgaatatacgtaaccgcgctaccgtaaaaaacgataacctaaaccgtctcctcgtacccgcaatcctaactaacgataataaaaaaaaactcaaccgaaaaccgataatacaacaacttatccaaacaacgccgaacaatactacgatcacaaacgataaccaaaataaaaatcaccgccgacgcgaaaaatcacaaacacacgcgactaaacgaaaaaaaccgcgataaacaccctcccccgctaactcgacaaaacatccccgatctactacaacaacccacgctaccgctccaactccacctcgacgtcttaaaccaaacgaatcacttcccgaat

SEQ ID NO: 30607 - DNA, 613 bp, Artificial Sequence
  chemically treated genomic DNA (Homo sapiens) CpG-island No: 30607
gtttgttggcgtttattatttgttttttgtcgttgttattttaggtcgagacgtattatagggaggggtcggtttttagtagcggataggtggttcgaaagtattcgaagaagttcggggttatttttaggttattttttattattacggtcgcggggaagcgaaattgtcggaagatttggtttagcgtttagcggtagtggcgcgcgattttgtagtagtttggaatttgcggtggttcggcggtatcgtaatgttgtttaggtcgggttgtcggatgtgcgtgatcgcgttgtcgtaggaggcgatggtttgggtcgttttttcgtgttcgtagttttggttaacgatgatggggaagagtttagtcgagggtcgataatgtagtagtttgtttaggtagcgtcgaatagtgttgcggttataggcgatgattaggatgggaattatcgtcggcgcggggggttataggtatacgcggttgggcgggaggggtcgcggtgggtattttttttcgttggttcgatagggtattttcgatttgttgtagtagtttacgttgtcgttttagttttatttcggcgttttgggttaggcgaattatttttcgggt

SEQ ID NO: 30608 - DNA, 613 bp, Artificial Sequence
  chemically treated genomic DNA (Homo sapiens) CpG-island No: 30608
acccgaaaaataattcgcctaacccaaaacgccgaaataaaactaaaacgacaacgtaaactactacaacaaatcgaaaataccctatcgaaccaacgaaaaaaaatacccaccgcgacccctcccgcccaaccgcgtatacctataaccccccgcgccgacgataattcccatcctaatcatcgcctataaccgcaacactattcgacgctacctaaacaaactactacattatcgaccctcgactaaactcttccccatcatcgttaaccaaaactacgaacacgaaaaaacgacccaaaccatcgcctcctacgacaacgcgatcacgcacatccgacaacccgacctaaacaacattacgataccgccgaaccaccgcaaattccaaactactacaaaatcgcgcgccactaccgctaaacgctaaaccaaatcttccgacaatttcgcttccccgcgaccgtaataataaaaaataacctaaaaataaccccgaacttcttcgaatactttcgaaccacctatccgctactaaaaaccgacccctccctataatacgtctcgacctaaaataacaacgacaaaaaacaaataataaacgccaacaaac

SEQ ID NO: 30609 - DNA, 656 bp, Artificial Sequence
  chemically treated genomic DNA (Homo sapiens) CpG-island No: 30609
tggggttagattgtggtacggcgattattaacggcgcggcgttttgttttggtaacgtcgtgcgtcgcggtaatatcggtattgttggcgtattcggtatcggtagttaggagttgagcgttcgtatttatgaatttggcggcggcgtttcgtaattgattggtatcggcgggcgcgatttgagcgagaaaatcggcggtttgatgatgttcgacgttatcgggatgttggaaaacgattcgtaaattgaaattattgcgtttatttttaaatcgtttgcgtttgcggtggttcgtaaagtgttggaacgtgcgcgcgtttgtcgtaagtcggtggtcgtttgttttttcgatcgtggcgaaacgttagtggatgagtaggggttatagtttgttcgcggtattaaagaggtagcgttaaaagcggtgatgtttttcggcgtgaaataggaaaatttcgatttgtatacgtttaattagtcgttgattgcggatgtgcgtgcgcgtttgtaatcgtagtagaaatatattcgtggtttgttttgcggcggtacgttgtgcgacgaaattatgttcgcggtgatggaaaaatatggcgatgtttatagtaatatttagttcgattcggaatttcgtttgaaagatattaatcgtagt

SEQ ID NO: 30610 - DNA, 656 bp, Artificial Sequence
  chemically treated genomic DNA (Homo sapiens) CpG-island No: 30610
actacgattaatatctttcaaacgaaattccgaatcgaactaaatattactataaacatcgccatatttttccatcaccgcgaacataatttcgtcgcacaacgtaccgccgcaaaacaaaccacgaatatatttctactacgattacaaacgcgcacgcacatccgcaatcaacgactaattaaacgtatacaaatcgaaattttcctatttcacgccgaaaaacatcaccgcttttaacgctacctctttaataccgcgaacaaactataacccctactcatccactaacgtttcgccacgatcgaaaaaacaaacgaccaccgacttacgacaaacgcgcgcacgttccaacactttacgaaccaccgcaaacgcaaacgatttaaaaataaacgcaataatttcaatttacgaatcgttttccaacatcccgataacgtcgaacatcatcaaaccgccgattttctcgctcaaatcgcgcccgccgataccaatcaattacgaaacgccgccgccaaattcataaatacgaacgctcaactcctaactaccgataccgaatacgccaacaataccgatattaccgcgacgcacgacgttaccaaaacaaaacgccgcgccgttaataatcgccgtaccacaatctaacccca

SEQ ID NO: 30611 - DNA, 656 bp, Artificial Sequence
  chemically treated genomic DNA (Homo sapiens) CpG-island No: 30611
gttgcggttgatattttttaggcggaatttcggatcgggttgaatgttgttgtagatatcgttatgtttttttattatcgcgaatatggtttcgtcgtatagcgtgtcgtcgtagaataggttacgaatgtatttttgttgcggttgtagacgcgtacgtatattcgtaattaacggttggttaagcgtatgtaggtcgagatttttttgttttacgtcggagagtattatcgtttttagcgttgtttttttggtgtcgcgggtaaattgtagtttttgtttatttattggcgtttcgttacgatcgaggaagtagacgattatcggtttgcggtaggcgcgcgtacgttttagtattttgcgggttatcgtaggcgtaggcggtttggagataagcgtaatgattttagtttgcggatcgttttttagtatttcgatggcgtcgagtattattaggtcgtcgattttttcgtttaggtcgcgttcgtcggtgttaattagttgcgaaacgtcgtcgttaaatttatgaatgcggacgtttaatttttgattgtcggtgtcggatgcgttaataatatcgatgttgtcgcgacgtacggcgttattaaaatagagcgtcgcgtcgttgataatcgtcgtgttatagtttggtttta

SEQ ID NO: 30612 - DNA, 656 bp, Artificial Sequence
  chemically treated genomic DNA (Homo sapiens) CpG-island No: 30612
taaaaccaaactataacacgacgattatcaacgacgcgacgctctattttaataacgccgtacgtcgcgacaacatcgatattattaacgcatccgacaccgacaatcaaaaattaaacgtccgcattcataaatttaacgacgacgtttcgcaactaattaacaccgacgaacgcgacctaaacgaaaaaatcgacgacctaataatactcgacgccatcgaaatactaaaaaacgatccgcaaactaaaatcattacgcttatctccaaaccgcctacgcctacgataacccgcaaaatactaaaacgtacgcgcgcctaccgcaaaccgataatcgtctacttcctcgatcgtaacgaaacgccaataaataaacaaaaactacaatttacccgcgacaccaaaaaaacaacgctaaaaacgataatactctccgacgtaaaacaaaaaaatctcgacctacatacgcttaaccaaccgttaattacgaatatacgtacgcgtctacaaccgcaacaaaaatacattcgtaacctattctacgacgacacgctatacgacgaaaccatattcgcgataataaaaaaacataacgatatctacaacaacattcaacccgatccgaaattccgcctaaaaaatatcaaccgcaac

SEQ ID NO: 30613 - DNA, 697 bp, Artificial Sequence
  chemically treated genomic DNA (Homo sapiens) CpG-island No: 30613
gaaatttacgtaaagtcggaattgtttgcgttatatttacgttatcgttaacgtatagtatcggtttttgcgtttttgttagtatttggcgcgtttgtttaatttcggtatgtgggaaagttatttcgtttttaacggtggtgaattacggttttaggttatcgttggttaattggatattttttgggatatcgattagaatcggattaggacgatttgagtaggtaacgtcgaatgttttagttatgatgcgcggtaatttttttagcgattgtattagaaagttgtgtttggtataggttaacgataattttaggatatttattttttgaaatgcgttagtgtcgataacggtgcggatatttgatcggtgatggtaataatagggatggaatttaatagtgcgttcgtaagttcggttattaggttggttgcgttcggattagacgtggcgatatatacgttagttttgtcggtagtacgagtatatcgatagtcgttattgtcgtattttgtttatgtcggtatagtaagtgttttacgtcgtcgttatataatgtatcgtaaatcggtataattgcgttattcggataatcgaaaacggtgtttatattttgtgttcgtaacgtatgtattatttattgtgcgttatttatagttagtttttcgttttgaattttgagaaatagaattttgt

SEQ ID NO: 30614 - DNA, 697 bp, Artificial Sequence
  chemically treated genomic DNA (Homo sapiens) CpG-island No: 30614
acaaaattctatttctcaaaattcaaaacgaaaaactaactataaataacgcacaataaataatacatacgttacgaacacaaaatataaacaccgttttcgattatccgaataacgcaattataccgatttacgatacattatataacgacgacgtaaaacacttactataccgacataaacaaaatacgacaataacgactatcgatatactcgtactaccgacaaaactaacgtatatatcgccacgtctaatccgaacgcaaccaacctaataaccgaacttacgaacgcactattaaattccatccctattattaccatcaccgatcaaatatccgcaccgttatcgacactaacgcatttcaaaaaataaatatcctaaaattatcgttaacctataccaaacacaactttctaatacaatcgctaaaaaaattaccgcgcatcataactaaaacattcgacgttacctactcaaatcgtcctaatccgattctaatcgatatcccaaaaaatatccaattaaccaacgataacctaaaaccgtaattcaccaccgttaaaaacgaaataactttcccacataccgaaattaaacaaacgcgccaaatactaacaaaaacgcaaaaaccgatactatacgttaacgataacgtaaatataacgcaaacaattccgactttacgtaaatttc

SEQ ID NO: 30615 - DNA, 697 bp, Artificial Sequence
  chemically treated genomic DNA (Homo sapiens) CpG-island No: 30615
ataaaattttgttttttaagatttaggacggggaattaattatgaatggcgtatagtgggtggtatatgcgttgcgggtatagggtgtgaatatcgttttcggttattcgggtggcgtaattatgtcggtttacgatgtattgtatgacggcggcgtggagtatttgttatgtcgatatgagtagggtgcggtaatggcggttatcggtatgttcgtgttatcggtaaaattggcgtatgtatcgttacgtttggttcgggcgtaattaatttgataatcgggtttgcgaacgtattgttagattttatttttgttgttgttattatcggttaagtgttcgtatcgttatcggtattgacgtattttaggaagtggatgttttgggattgtcgttagtttgtattaagtatagttttttggtgtagtcgttggaagagttgtcgcgtattatggttgaagtattcgacgttgtttgtttaggtcgttttggttcggttttggtcgatattttaaaagatatttagttagttagcggtgatttggaatcgtggtttattatcgttgaaaacgaagtgatttttttatatgtcgaagttgagtaagcgcgttagatgttggtaaaagcgtaaaaatcgatgttgtacgttggcggtggcgtgggtatggcgtaggtagtttcggttttgcgtgaatttt

SEQ ID NO: 30616 - DNA, 697 bp, Artificial Sequence
  chemically treated genomic DNA (Homo sapiens) CpG-island No: 30616
aaaattcacgcaaaaccgaaactacctacgccatacccacgccaccgccaacgtacaacatcgatttttacgcttttaccaacatctaacgcgcttactcaacttcgacatataaaaaaatcacttcgttttcaacgataataaaccacgattccaaatcaccgctaactaactaaatatcttttaaaatatcgaccaaaaccgaaccaaaacgacctaaacaaacaacgtcgaatacttcaaccataatacgcgacaactcttccaacgactacaccaaaaaactatacttaatacaaactaacgacaatcccaaaacatccacttcctaaaatacgtcaataccgataacgatacgaacacttaaccgataataacaacaacaaaaataaaatctaacaatacgttcgcaaacccgattatcaaattaattacgcccgaaccaaacgtaacgatacatacgccaattttaccgataacacgaacataccgataaccgccattaccgcaccctactcatatcgacataacaaatactccacgccgccgtcatacaatacatcgtaaaccgacataattacgccacccgaataaccgaaaacgatattcacaccctatacccgcaacgcatataccacccactatacgccattcataattaattccccgtcctaaatcttaaaaaacaaaattttat

SEQ ID NO: 30617 - DNA, 501 bp, Artificial Sequence
  chemically treated genomic DNA (Homo sapiens) CpG-island No: 30617
tatgttttttcgttggttggcgaaaatattattttttcgttatatatttagcgtaattattcggagttgtaaaaacggttgaatggttggttgtcggcggcgttgaaaacggcgcgtattttgatagtttgcgtggcggtaatgttgttgttgagcgtatggggattgttcgatttttggaattggttgtaaaacggcgcggggtagaaaatcgtagatattttgattcgtatcgtatttattttttttttttcggcggttggttggacggtgttcgttagtttgatcgaaaatcggttggtttcggatatttatggtcgttcgttatttagcgttcgtacgcgtattttgtttacgttgtttcgtaacgcgttggcggtgattattagtattattattattatgattgtgttgtcggaaatcggcgttaatatcgcgttattgttggtaggtgtcggggtattaggtttggttatttcgtttggttcgtaaacgttggtg

SEQ ID NO: 30618 - DNA, 501 bp, Artificial Sequence
  chemically treated genomic DNA (Homo sapiens) CpG-island No: 30618
caccaacgtttacgaaccaaacgaaataaccaaacctaataccccgacacctaccaacaataacgcgatattaacgccgatttccgacaacacaatcataataataataatactaataatcaccgccaacgcgttacgaaacaacgtaaacaaaatacgcgtacgaacgctaaataacgaacgaccataaatatccgaaaccaaccgattttcgatcaaactaacgaacaccgtccaaccaaccgccgaaaaaaaaaaaataaatacgatacgaatcaaaatatctacgattttctaccccgcgccgttttacaaccaattccaaaaatcgaacaatccccatacgctcaacaacaacattaccgccacgcaaactatcaaaatacgcgccgttttcaacgccgccgacaaccaaccattcaaccgtttttacaactccgaataattacgctaaatatataacgaaaaaataatattttcgccaaccaacgaaaaaacata

SEQ ID NO: 30619 - DNA, 501 bp, Artificial Sequence
  chemically treated genomic DNA (Homo sapiens) CpG-island No: 30619
tattagcgtttgcgaattaaacgagatagttagatttaatgtttcggtatttgttagtaatggcgcgatattgacgtcgattttcgataatataattatgatggtgatggtattgataattatcgttagcgcgttacgaaatagcgtaagtagggtacgcgtgcgggcgttgggtagcgggcggttatgaatattcgaagttagtcggttttcgattaaattggcgagtatcgtttagttaatcgtcgagaagaaaagaatgagtgcgatacggattaggatatttacggttttttgtttcgcgtcgttttgtagttagttttagaaatcgaataatttttatgcgtttaatagtaatattatcgttacgtagattgttagaatacgcgtcgtttttagcgtcgtcgatagttagttatttaatcgtttttgtagtttcggatagttacgttgagtatgtggcgagagagtgatgttttcgttagttagcgggaaaatata

SEQ ID NO: 30620 - DNA, 501 bp, Artificial Sequence
  chemically treated genomic DNA (Homo sapiens) CpG-island No: 30620
tatattttcccgctaactaacgaaaacatcactctctcgccacatactcaacgtaactatccgaaactacaaaaacgattaaataactaactatcgacgacgctaaaaacgacgcgtattctaacaatctacgtaacgataatattactattaaacgcataaaaattattcgatttctaaaactaactacaaaacgacgcgaaacaaaaaaccgtaaatatcctaatccgtatcgcactcattcttttcttctcgacgattaactaaacgatactcgccaatttaatcgaaaaccgactaacttcgaatattcataaccgcccgctacccaacgcccgcacgcgtaccctacttacgctatttcgtaacgcgctaacgataattatcaataccatcaccatcataattatattatcgaaaatcgacgtcaatatcgcgccattactaacaaataccgaaacattaaatctaactatctcgtttaattcgcaaacgctaata

SEQ ID NO: 30621 - DNA, 568 bp, Artificial Sequence
  chemically treated genomic DNA (Homo sapiens) CpG-island No: 30621
ttagatgtttgatgcgacgtttgcgcgttttattaggtttataattattgtcgattttgtgaggtttggattgaaggtattttgtgttcgtatgtcgtgtaattaatgtttgatgcgacgttgtgcgcgtgtttatgtaggttataattgttgtcgattttgtaggtcggataaggtatttgtgtcgtattcggtaattaatgtttgatgcgacgtttgacgcgttttattaggtttataatcggtgtcgtattcggtaattggtgtataatgtttgatgcgatgtttgacgtattttattaggtttataatgggtatcggatcggtaggtcggataaggcgtttacgtcgtattcggtaagaatagagtattagttaatcgaatttattttgcgtttaaattacgtcgttggtatatttcggcggtagtagcgggattaaggtttttagcgtcgtagttagacgcgatgtgtcgttgtcggttaaatttagatgttttattttacgtttcggacggatttttttgtcgtattagtgtagatgtattagcggtagttttagttagtta

SEQ ID NO: 30622 - DNA, 568 bp, Artificial Sequence
  chemically treated genomic DNA (Homo sapiens) CpG-island No: 30622
taactaactaaaactaccgctaatacatctacactaatacgacaaaaaaatccgtccgaaacgtaaaataaaacatctaaatttaaccgacaacgacacatcgcgtctaactacgacgctaaaaaccttaatcccgctactaccgccgaaatataccaacgacgtaatttaaacgcaaaataaattcgattaactaatactctattcttaccgaatacgacgtaaacgccttatccgacctaccgatccgatacccattataaacctaataaaatacgtcaaacatcgcatcaaacattatacaccaattaccgaatacgacaccgattataaacctaataaaacgcgtcaaacgtcgcatcaaacattaattaccgaatacgacacaaataccttatccgacctacaaaatcgacaacaattataacctacataaacacgcgcacaacgtcgcatcaaacattaattacacgacatacgaacacaaaataccttcaatccaaacctcacaaaatcgacaataattataaacctaataaaacgcgcaaacgtcgcatcaaacatctaa

SEQ ID NO: 30623 - DNA, 568 bp, Artificial Sequence
  chemically treated genomic DNA (Homo sapiens) CpG-island No: 30623
tgattggttgaaattgtcgttggtgtatttgtattggtacgataaagaagttcgttcggggcgtaaagtggggtatttgaatttgatcgatagcgatatatcgcgtttgattgcgacgttggaagttttaatttcgttgttgtcgtcggaatatgttagcggcgtgatttgggcgtagagtaagttcggttaattggtgttttatttttgtcggatgcggcgtaaacgttttattcggtttatcgattcggtatttattgtaggtttgataagatgcgttaagtatcgtattaggtattgtgtattaattgtcggatgcggtatcggttgtaggtttgataagacgcgttaagcgtcgtattaggtattgattgtcggatgcggtataagtgttttattcggtttataggatcggtaatagttgtagtttgtataagtacgcgtatagcgtcgtattaggtattgattgtacggtatgcggatataaagtgtttttagtttaggttttatagagtcggtaataattgtaggtttgataagacgcgtaagcgtcgtattaggtatttgg

SEQ ID NO: 30624 - DNA, 568 bp, Artificial Sequence
  chemically treated genomic DNA (Homo sapiens) CpG-island No: 30624
ccaaatacctaatacgacgcttacgcgtcttatcaaacctacaattattaccgactctataaaacctaaactaaaaacactttatatccgcataccgtacaatcaatacctaatacgacgctatacgcgtacttatacaaactacaactattaccgatcctataaaccgaataaaacacttataccgcatccgacaatcaatacctaatacgacgcttaacgcgtcttatcaaacctacaaccgataccgcatccgacaattaatacacaatacctaatacgatacttaacgcatcttatcaaacctacaataaataccgaatcgataaaccgaataaaacgtttacgccgcatccgacaaaaataaaacaccaattaaccgaacttactctacgcccaaatcacgccgctaacatattccgacgacaacaacgaaattaaaacttccaacgtcgcaatcaaacgcgatatatcgctatcgatcaaattcaaataccccactttacgccccgaacgaacttctttatcgtaccaatacaaatacaccaacgacaatttcaaccaatca

SEQ ID NO: 30625 - DNA, 520 bp, Artificial Sequence
  chemically treated genomic DNA (Homo sapiens) CpG-island No: 30625
atcgttagcgcggtcggatttggcggttagttgatggtattgacgtcgttttgggagtagggtgttatcgttgtttgtggttagataattaggagttagaacgtaattgtcgtacggcgggcgtggttggttcggtggtcggggttatgggtattttgtaggtattggaagttattaagttattaagcggtatagagatatttgcgggagaatttcgattgttcgacggtaaatcgagttagtggcgtagtttggcgttgcgtcgcgttagtggttgttcggtatgcggaggaagtaatgtagattttgtttaacgattaagcgatgtagtgcgtcgtcgggtaaattgtttacgaattattggagtaattcgattaacgataagcgggcgcggttttggcgattaattagtaaatcgtttcgcgtgagtagtgggcgtaatatatcgtgtaggatggcgattagattttgtttttttaggttattgtagggggttgaaatgttacgtattgcggataaa

SEQ ID NO: 30626 - DNA, 520 bp, Artificial Sequence
  chemically treated genomic DNA (Homo sapiens) CpG-island No: 30626
tttatccgcaatacgtaacatttcaaccccctacaataacctaaaaaaacaaaatctaatcgccatcctacacgatatattacgcccactactcacgcgaaacgatttactaattaatcgccaaaaccgcgcccgcttatcgttaatcgaattactccaataattcgtaaacaatttacccgacgacgcactacatcgcttaatcgttaaacaaaatctacattacttcctccgcataccgaacaaccactaacgcgacgcaacgccaaactacgccactaactcgatttaccgtcgaacaatcgaaattctcccgcaaatatctctataccgcttaataacttaataacttccaatacctacaaaatacccataaccccgaccaccgaaccaaccacgcccgccgtacgacaattacgttctaactcctaattatctaaccacaaacaacgataacaccctactcccaaaacgacgtcaataccatcaactaaccgccaaatccgaccgcgctaacgat

SEQ ID NO: 30627 - DNA, 520 bp, Artificial Sequence
  chemically treated genomic DNA (Homo sapiens) CpG-island No: 30627
tttgttcgtaatacgtaatattttaattttttgtaataatttgaaaaagtaggatttggtcgttattttgtacgatatgttgcgtttattgtttacgcgggacgatttgttgattaatcgttagagtcgcgttcgtttgtcgttggtcgagttgttttagtagttcgtgaatagtttgttcggcggcgtattgtatcgtttgatcgttaaataggatttgtattgtttttttcgtatatcgggtaattattggcgcggcgtaacgttaggttgcgttattggttcgatttatcgtcgaatagtcggagttttttcgtaggtgtttttatatcgtttaataatttaatggtttttagtgtttgtaaagtgtttataatttcgattatcgggttaattacgttcgtcgtgcggtagttgcgttttggtttttggttatttggttataggtagcggtaatattttgtttttagggcggcgttagtattattaattgatcgttaaattcgatcgcgttggcggt

SEQ ID NO: 30628 - DNA, 520 bp, Artificial Sequence
  chemically treated genomic DNA (Homo sapiens) CpG-island No: 30628
accgccaacgcgatcgaatttaacgatcaattaataatactaacgccgccctaaaaacaaaatattaccgctacctataaccaaataaccaaaaaccaaaacgcaactaccgcacgacgaacgtaattaacccgataatcgaaattataaacactttacaaacactaaaaaccattaaattattaaacgatataaaaacacctacgaaaaaactccgactattcgacgataaatcgaaccaataacgcaacctaacgttacgccgcgccaataattacccgatatacgaaaaaaacaatacaaatcctatttaacgatcaaacgatacaatacgccgccgaacaaactattcacgaactactaaaacaactcgaccaacgacaaacgaacgcgactctaacgattaatcaacaaatcgtcccgcgtaaacaataaacgcaacatatcgtacaaaataacgaccaaatcctactttttcaaattattacaaaaaattaaaatattacgtattacgaacaaa

SEQ ID NO: 30629 - DNA, 512 bp, Artificial Sequence
  chemically treated genomic DNA (Homo sapiens) CpG-island No: 30629
tcgcgcgagcgtcgcgtagtcgaggaagtcgtttcgagcggttgtttatcgtacgtttatggtagtcgcgtcgcgcgtcggtcgtttgcgttttcgttttttttcgtcgtcgtcggttcgcgtttttcgcgttttcggtttcgcgttttgttgtttcggggttgtcgcgcgcgtcgttttcgtttttttagcgtttttttttttggttcgattcggtcgagcgagcggtcgcgtttacgtttttttcgcgttttttcgcgttcgtttcgttttcggttcgcgtttgttttcgtcgggtattttttcgttcgtttttttttgcgcgttttggttttattcgcgcgggttttttttttttttcgttgtattagcgtcgggatgaagtcgggagtaaagtttttttcggggcggtttagcgtttattttcggcgagtatttaaggtgtcgttgttgttggggtcgtttttatattttaaattatttagtaagtgttgggcgagaggatggggagt

SEQ ID NO: 30630 - DNA, 512 bp, Artificial Sequence
  chemically treated genomic DNA (Homo sapiens) CpG-island No: 30630
actccccatcctctcgcccaacacttactaaataatttaaaatataaaaacgaccccaacaacaacgacaccttaaatactcgccgaaaataaacgctaaaccgccccgaaaaaaactttactcccgacttcatcccgacgctaatacaacgaaaaaaaaaaaaaacccgcgcgaataaaaccaaaacgcgcaaaaaaaaacgaacgaaaaaatacccgacgaaaacaaacgcgaaccgaaaacgaaacgaacgcgaaaaaacgcgaaaaaaacgtaaacgcgaccgctcgctcgaccgaatcgaaccaaaaaaaaaaacgctaaaaaaacgaaaacgacgcgcgcgacaaccccgaaacaacaaaacgcgaaaccgaaaacgcgaaaaacgcgaaccgacgacgacgaaaaaaaacgaaaacgcaaacgaccgacgcgcgacgcgactaccataaacgtacgataaacaaccgctcgaaacgacttcctcgactacgcgacgctcgcgcga

SEQ ID NO: 30631 - DNA, 512 bp, Artificial Sequence
  chemically treated genomic DNA (Homo sapiens) CpG-island No: 30631
gttttttattttttcgtttaatatttgttaggtagtttggggtgtagaagcgattttagtagtagcggtattttaggtgttcgtcgaaggtgaacgttggatcgtttcgggaagggttttgttttcgattttatttcgacgttggtgtaacgggaaaaagagagagttcgcgcgagtggggttagggcgcgtaggagagggcgggcgagaaagtgttcggcgagggtaggcgcgggtcgagggcggggcgggcgcgggagggcgcgagaggggcgtgggcgcggtcgttcgttcggtcgggtcgggttagggggaggggcgttgggagagcgagagcggcgcgcgcggtagtttcgaggtagtagagcgcggagtcgggagcgcggggagcgcgggtcggcggcggcgagggaggacgggggcgtagacggtcggcgcgcggcgcggttattatgggcgtgcggtgagtagtcgttcgggacgattttttcggttgcgcggcgttcgcgcgg

SEQ ID NO: 30632 - DNA, 512 bp, Artificial Sequence
  chemically treated genomic DNA (Homo sapiens) CpG-island No: 30632
ccgcgcgaacgccgcgcaaccgaaaaaatcgtcccgaacgactactcaccgcacgcccataataaccgcgccgcgcgccgaccgtctacgcccccgtcctccctcgccgccgccgacccgcgctccccgcgctcccgactccgcgctctactacctcgaaactaccgcgcgcgccgctctcgctctcccaacgcccctccccctaacccgacccgaccgaacgaacgaccgcgcccacgcccctctcgcgccctcccgcgcccgccccgccctcgacccgcgcctaccctcgccgaacactttctcgcccgccctctcctacgcgccctaaccccactcgcgcgaactctctctttttcccgttacaccaacgtcgaaataaaatcgaaaacaaaacccttcccgaaacgatccaacgttcaccttcgacgaacacctaaaataccgctactactaaaatcgcttctacaccccaaactacctaacaaatattaaacgaaaaaataaaaaac

SEQ ID NO: 30633 - DNA, 982 bp, Artificial Sequence
  chemically treated genomic DNA (Homo sapiens) CpG-island No: 30633
ggagtggttaattgggagatattaaacgcggtaagggaggagagcgtaacgtgtttgcggggtcgggcggttcggcggtcgcgaatgattttcggcggagtagggttagcgttttcgtgtggtagcgggcgcgtggtcgaggttcgaggagggttcggaggtttggtcgaggttcgaggaggggttcggaggtttggtcgaggttcgaggaggggttcggaggtttggtcgaggttcgaggaggggttcggaggtttggtcgaggttcgaggaggggttcggaggtttggtcgaggttcgaggaggggttcggaggtttggtcgaggttcgaggaggggttcggaggtttggtcgaggttcgaggaggggttcggaggtttggtcgaggttcgaggaggggttcggaggtttggtcgaggttcgaggagggttcggaggtttggtcgaggttcgaggaggggttcggaggtttggtcgaggttcgaggaggggttcggaggtttggtcgaggttcgaggaggggttcggaggtttggtcgaggttcgaggagggttcggaggtttggtcgaggttcgaggaggggttcggaggtttggtcgaggttcgaggaggggttcggaggtttggtcgaggttcgaggaggggttcggaggtttggtcgaggttcgaggagggttcggaggtttggtcgaggttcgaggagggttcggaggtttggtcgaggttcgaggaggggttcggaggtttggtcgaggttcgaggaggggttcggaggtttggtcgaggttcgaggaggggttcggaggtttggtcgaggttcgaggaggggttcggaggtttggtcgaggttcgaggaggggtttggaggtttggtcgaggttcgaggagggttcggaggtttgaaagcgtagattgtagggtagattattgtaggatttaggcgttgacgaataggaaagagggtgggaagtaagagaaga

SEQ ID NO: 30634 - DNA, 982 bp, Artificial Sequence
  chemically treated genomic DNA (Homo sapiens) CpG-island No: 30634
tcttctcttacttcccaccctctttcctattcgtcaacgcctaaatcctacaataatctaccctacaatctacgctttcaaacctccgaaccctcctcgaacctcgaccaaacctccaaacccctcctcgaacctcgaccaaacctccgaacccctcctcgaacctcgaccaaacctccgaacccctcctcgaacctcgaccaaacctccgaacccctcctcgaacctcgaccaaacctccgaacccctcctcgaacctcgaccaaacctccgaaccctcctcgaacctcgaccaaacctccgaaccctcctcgaacctcgaccaaacctccgaacccctcctcgaacctcgaccaaacctccgaacccctcctcgaacctcgaccaaacctccgaacccctcctcgaacctcgaccaaacctccgaaccctcctcgaacctcgaccaaacctccgaacccctcctcgaacctcgaccaaacctccgaacccctcctcgaacctcgaccaaacctccgaacccctcctcgaacctcgaccaaacctccgaaccctcctcgaacctcgaccaaacctccgaacccctcctcgaacctcgaccaaacctccgaacccctcctcgaacctcgaccaaacctccgaacccctcctcgaacctcgaccaaacctccgaacccctcctcgaacctcgaccaaacctccgaacccctcctcgaacctcgaccaaacctccgaacccctcctcgaacctcgaccaaacctccgaacccctcctcgaacctcgaccaaacctccgaacccctcctcgaacctcgaccaaacctccgaaccctcctcgaacctcgaccacgcgcccgctaccacacgaaaacgctaaccctactccgccgaaaatcattcgcgaccgccgaaccgcccgaccccgcaaacacgttacgctctcctcccttaccgcgtttaatatctcccaattaaccactcc

SEQ ID NO: 30635 - DNA, 982 bp, Artificial Sequence
  chemically treated genomic DNA (Homo sapiens) CpG-island No: 30635
tttttttttattttttatttttttttttgttcgttagcgtttagattttgtagtagtttgttttgtagtttgcgtttttagattttcggatttttttcggatttcggttagatttttagattttttttcggatttcggttagattttcggattttttttcggatttcggttagattttcggattttttttcggatttcggttagattttcggattttttttcggatttcggttagattttcggattttttttcggatttcggttagattttcgggtttttttcggatttcggttagattttcgggtttttttcggatttcggttagattttcggattttttttcggatttcggttagattttcggattttttttcggatttcggttagattttcggattttttttcggatttcggttagattttcgggtttttttcggatttcggttagattttcggattttttttcggatttcggttagattttcggattttttttcggatttcggttagattttcggattttttttcggatttcggttagattttcgggtttttttcggatttcggttagattttcggattttttttcggatttcggttagattttcggattttttttcggatttcggttagattttcggattttttttcggatttcggttagattttcggattttttttcggatttcggttagattttcgggttttttttcggatttcggttagattttcgggttttttttcggatttcggttagattttcgggttttttttcggatttcggttagattttcgggttttttttcggatttcggttagattttcgggtttttttcggatttcggttacgcgttcgttgttatacgggggcgttgattttgtttcgtcgaaggttattcgcggtcgtcgagtcgttcggtttcgtaggtacgttgcgttttttttttttgtcgcgtttaatgttttttagttgattatttt

SEQ ID NO: 30636 - DNA, 982 bp, Artificial Sequence
  chemically treated genomic DNA (Homo sapiens) CpG-island No: 30636
aaaataatcaactaaaaaacattaaacgcgacaaaaaaaaaaaacgcaacgtacctacgaaaccgaacgactcgacgaccgcgaataaccttcgacgaaacaaaatcaacgcccccgtataacaacgaacgcgtaaccgaaatccgaaaaaaacccgaaaatctaaccgaaatccgaaaaaaaacccgaaaatctaaccgaaatccgaaaaaaaacccgaaaatctaaccgaaatccgaaaaaaaacccgaaaatctaaccgaaatccgaaaaaaaacccgaaaatctaaccgaaatccgaaaaaaaatccgaaaatctaaccgaaatccgaaaaaaaatccgaaaatctaaccgaaatccgaaaaaaaatccgaaaatctaaccgaaatccgaaaaaaaatccgaaaatctaaccgaaatccgaaaaaaacccgaaaatctaaccgaaatccgaaaaaaaatccgaaaatctaaccgaaatccgaaaaaaaatccgaaaatctaaccgaaatccgaaaaaaaatccgaaaatctaaccgaaatccgaaaaaaacccgaaaatctaaccgaaatccgaaaaaaaatccgaaaatctaaccgaaatccgaaaaaaaatccgaaaatctaaccgaaatccgaaaaaaaatccgaaaatctaaccgaaatccgaaaaaaacccgaaaatctaaccgaaatccgaaaaaaacccgaaaatctaaccgaaatccgaaaaaaaatccgaaaatctaaccgaaatccgaaaaaaaatccgaaaatctaaccgaaatccgaaaaaaaatccgaaaatctaaccgaaatccgaaaaaaaatccgaaaatctaaccgaaatccgaaaaaaaatctaaaaatctaaccgaaatccgaaaaaaatccgaaaatctaaaaacgcaaactacaaaacaaactactacaaaatctaaacgctaacgaacaaaaaaaaaaataaaaaataaaaaaaaa

SEQ ID NO: 30637 - DNA, 554 bp, Artificial Sequence
  chemically treated genomic DNA (Homo sapiens) CpG-island No: 30637
cgttgttgagatgcgtggagttgatgataatgtagtaatattttatggggtagtcgtcgtttttttcgtcgtagtcgtcgtttttacgtatttcgcgtttatagtcgtagcgcgtcggggtcggcgacggtgggttgggaattcgttacgagggtacgtagttattttcggtacgttttttggagattggtttattgtatttttttgtggtgagcgtcgaggttttttcgttttcgtatgttcgtcgcgttttttttttagtttttcgtttttgtttttttttagattcgcgtcgggacgacgagtttcgcgggaggattttagtttaggagggggtcgggtcggcgaaacggaatcgagcgggagttagtgttcgcgcggtggtcgggcggagcggggttgcgggagtcgttcgcgcggtagtagaagcggcggcggcggtagtatttttcgcgttcggcgtttgtattcggagttgttgttgttggtaggtatgagtgttattatagtgagcggcgttgtcggtttattgtattgagttaatggtagggagt

SEQ ID NO: 30638 - DNA, 554 bp, Artificial Sequence
  chemically treated genomic DNA (Homo sapiens) CpG-island No: 30638
actccctaccattaactcaatacaataaaccgacaacgccgctcactataataacactcatacctaccaacaacaacaactccgaatacaaacgccgaacgcgaaaaatactaccgccgccgccgcttctactaccgcgcgaacgactcccgcaaccccgctccgcccgaccaccgcgcgaacactaactcccgctcgattccgtttcgccgacccgaccccctcctaaactaaaatcctcccgcgaaactcgtcgtcccgacgcgaatctaaaaaaaaacaaaaacgaaaaactaaaaaaaaaacgcgacgaacatacgaaaacgaaaaaacctcgacgctcaccacaaaaaaatacaataaaccaatctccaaaaaacgtaccgaaaataactacgtaccctcgtaacgaattcccaacccaccgtcgccgaccccgacgcgctacgactataaacgcgaaatacgtaaaaacgacgactacgacgaaaaaaacgacgactaccccataaaatattactacattatcatcaactccacgcatctcaacaacg

SEQ ID NO: 30639 - DNA, 554 bp, Artificial Sequence
  chemically treated genomic DNA (Homo sapiens) CpG-island No: 30639
gttttttgttattggtttagtgtaatggatcggtaacgtcgtttattataataatatttatgtttgttagtagtagtaatttcgagtgtaggcgtcgagcgcgggggatgttgtcgtcgtcgtcgtttttgttgtcgcgcgggcggttttcgtagtttcgtttcgttcggttatcgcgcgggtattgattttcgttcggtttcgtttcgtcggttcggtttttttttaggttggaattttttcgcggggttcgtcgtttcgacgcgaatttgaggagaaataggagcgagagattgaggggagagcgcggcgagtatgcggaggcgggggagtttcggcgtttattatagaggggtgtagtgagttagtttttagaggacgtgtcgggggtggttgcgtgttttcgtggcgggtttttagtttatcgtcgtcggtttcggcgcgttgcggttgtgggcgcggggtgcgtggaagcggcggttgcggcggaggaggcggcggttgttttatggagtgttattatattgttattagttttacgtattttagtaacg

SEQ ID NO: 30640 - DNA, 554 bp, Artificial Sequence
  chemically treated genomic DNA (Homo sapiens) CpG-island No: 30640
cgttactaaaatacgtaaaactaataacaatataataacactccataaaacaaccgccgcctcctccgccgcaaccgccgcttccacgcaccccgcgcccacaaccgcaacgcgccgaaaccgacgacgataaactaaaaacccgccacgaaaacacgcaaccacccccgacacgtcctctaaaaactaactcactacacccctctataataaacgccgaaactcccccgcctccgcatactcgccgcgctctcccctcaatctctcgctcctatttctcctcaaattcgcgtcgaaacgacgaaccccgcgaaaaaattccaacctaaaaaaaaaccgaaccgacgaaacgaaaccgaacgaaaatcaatacccgcgcgataaccgaacgaaacgaaactacgaaaaccgcccgcgcgacaacaaaaacgacgacgacgacaacatcccccgcgctcgacgcctacactcgaaattactactactaacaaacataaatattattataataaacgacgttaccgatccattacactaaaccaataacaaaaaac

SEQ ID NO: 30641 - DNA, 556 bp, Artificial Sequence
  chemically treated genomic DNA (Homo sapiens) CpG-island No: 30641
tttcggtttttgcgtatttggcggcgttcgatttttgcggcggcgttttatttttgcggcgtcgttttttattgtcgttttgtggatttttcgtagtttcgcgttttaggtgtggtattcgggattcgggtattcgtggtcgatggagtaggatcgtttggtttaggcgtttttagaagttgaagcgttttttcgtggtggcgattttttagacgtttaataattcgtttttgagtcgtcgcggttttaggtagtttttttatttcgttttttagttttaaatttgcgatttatttttaaattcgcgatttatttaaaaatcgtaatttatttttaaatttttggtcgtgttattcgtcgtttttttttgacggagttcgggatcgttggttagaagtagttcgtagttatcggggatgggattgagcggtaggttttcgtttttgtgtagtcgtcgtcgggcggatcgtttggttcggtagtagttatagggatatttggttttggtttttagatgttcggagagtaggcgggtttagaggtttttcggaggttg

SEQ ID NO: 30642 - DNA, 556 bp, Artificial Sequence
  chemically treated genomic DNA (Homo sapiens) CpG-island No: 30642
caacctccgaaaaacctctaaacccgcctactctccgaacatctaaaaaccaaaaccaaatatccctataactactaccgaaccaaacgatccgcccgacgacgactacacaaaaacgaaaacctaccgctcaatcccatccccgataactacgaactacttctaaccaacgatcccgaactccgtcaaaaaaaaacgacgaataacacgaccaaaaatttaaaaataaattacgatttttaaataaatcgcgaatttaaaaataaatcgcaaatttaaaactaaaaaacgaaataaaaaaactacctaaaaccgcgacgactcaaaaacgaattattaaacgtctaaaaaatcgccaccacgaaaaaacgcttcaacttctaaaaacgcctaaaccaaacgatcctactccatcgaccacgaatacccgaatcccgaataccacacctaaaacgcgaaactacgaaaaatccacaaaacgacaataaaaaacgacgccgcaaaaataaaacgccgccgcaaaaatcgaacgccgccaaatacgcaaaaaccgaaa

SEQ ID NO: 30643 - DNA, 556 bp, Artificial Sequence
  chemically treated genomic DNA (Homo sapiens) CpG-island No: 30643
tagttttcgggaaatttttaagttcgtttgtttttcgaatatttaagaattaggattagatgtttttgtggttgttgtcgagttaggcggttcgttcgacggcggttgtataggggcgagaatttgtcgtttaattttattttcggtggttgcggattgtttttggttagcggtttcgagtttcgttagaggaggacggcgggtggtacgattagggatttgagggtagattgcggtttttgggtggatcgcggatttgggggtggatcgtagatttagggttgggaggcggggtggaaaggttatttggagtcgcggcggtttaggagcgggttgttgagcgtttgagaagtcgttattacgaggaagcgttttagtttttggagacgtttgggttaggcggttttgttttatcgattacgagtattcggatttcgggtattatatttgggacgcggaattgcggaagatttatagggcggtagtgaggggcgacgtcgtagaggtggagcgtcgtcgtagaggtcgagcgtcgttagatgcgtagaagtcggga

SEQ ID NO: 30644 - DNA, 556 bp, Artificial Sequence
  chemically treated genomic DNA (Homo sapiens) CpG-island No: 30644
tcccgacttctacgcatctaacgacgctcgacctctacgacgacgctccacctctacgacgtcgcccctcactaccgccctataaatcttccgcaattccgcgtcccaaatataatacccgaaatccgaatactcgtaatcgataaaacaaaaccgcctaacccaaacgtctccaaaaactaaaacgcttcctcgtaataacgacttctcaaacgctcaacaacccgctcctaaaccgccgcgactccaaataacctttccaccccgcctcccaaccctaaatctacgatccacccccaaatccgcgatccacccaaaaaccgcaatctaccctcaaatccctaatcgtaccacccgccgtcctcctctaacgaaactcgaaaccgctaaccaaaaacaatccgcaaccaccgaaaataaaattaaacgacaaattctcgcccctatacaaccgccgtcgaacgaaccgcctaactcgacaacaaccacaaaaacatctaatcctaattcttaaatattcgaaaaacaaacgaacttaaaaatttcccgaaaacta

SEQ ID NO: 30645 - DNA, 588 bp, Artificial Sequence
  chemically treated genomic DNA (Homo sapiens) CpG-island No: 30645
gcggttggagaagttgagggtcgcgtggttcgggaggttttcggaggagggaagggtttattttagcgaggggtataggcggggaaggtgcggggcgaggcggtcgcgggtttttggtattttttttcgtatatttaggttaagttggcggtgttgtttgtgacgttggtggtcgtcgcggttttttatttgcggatgtagtagaagttgcggcggggcgtggtttcgcgttagttttgtatttcgcggttttagtataaggtgcgcggttatcgttatttggaggaggataattcggacgagagcgacgcggagggcgagtatggggacggcgcggaggaggaggcgtcgttttcggtgtttaggtttggttttaagttcgttggattcggtcgtcggttttgtttttacgaataggcgtaggggggcgacgggtcggaggagtagtgaggggtcgtttggttttcggatttagttttttttttcgtcggttttagtttattacgttttaggtcggggggatttttttcgagtttcgtgttgtttttaaaggttttagtttttttttttttacgttggggacgtttt

SEQ ID NO: 30646 - DNA, 588 bp, Artificial Sequence
  chemically treated genomic DNA (Homo sapiens) CpG-island No: 30646
aaaacgtccccaacgtaaaaaaaaaaaaactaaaacctttaaaaacaacacgaaactcgaaaaaaatccccccgacctaaaacgtaataaactaaaaccgacgaaaaaaaaaactaaatccgaaaaccaaacgacccctcactactcctccgacccgtcgcccccctacgcctattcgtaaaaacaaaaccgacgaccgaatccaacgaacttaaaaccaaacctaaacaccgaaaacgacgcctcctcctccgcgccgtccccatactcgccctccgcgtcgctctcgtccgaattatcctcctccaaataacgataaccgcgcaccttatactaaaaccgcgaaatacaaaactaacgcgaaaccacgccccgccgcaacttctactacatccgcaaataaaaaaccgcgacgaccaccaacgtcacaaacaacaccgccaacttaacctaaatatacgaaaaaaaataccaaaaacccgcgaccgcctcgccccgcaccttccccgcctatacccctcgctaaaataaacccttccctcctccgaaaacctcccgaaccacgcgaccctcaacttctccaaccgc

SEQ ID NO: 30647 - DNA, 588 bp, Artificial Sequence
  chemically treated genomic DNA (Homo sapiens) CpG-island No: 30647
ggggcgtttttaacgtgggggaggagagattggggtttttgaagatagtacgggattcggagggggttttttcgatttaagacgtggtaaattgaggtcggcgaggagggaggttgagttcgggaattaggcggttttttattgttttttcggttcgtcgtttttttgcgtttgttcgtaggggtagggtcggcggtcgagtttagcgggtttggggttaggtttgggtatcgggggcggcgttttttttttcgcgtcgtttttatgttcgtttttcgcgtcgttttcgttcgagttgtttttttttaagtagcggtaatcgcgtattttgtgttggggtcgcgggatgtagggttggcgcggggttacgtttcgtcgtagtttttgttgtattcgtaggtaggagatcgcggcggttattagcgttataagtagtatcgttagtttagtttgggtgtacggagagggatgttagggattcgcggtcgtttcgtttcgtatttttttcgtttatgtttttcgttgagataggtttttttttttttcgggagtttttcgggttacgcgatttttaatttttttagtcgt

SEQ ID NO: 30648 - DNA, 588 bp, Artificial Sequence
  chemically treated genomic DNA (Homo sapiens) CpG-island No: 30648
acgactaaaaaaattaaaaatcgcgtaacccgaaaaactcccgaaaaaaaaaaaaacctatctcaacgaaaaacataaacgaaaaaaatacgaaacgaaacgaccgcgaatccctaacatccctctccgtacacccaaactaaactaacgatactacttataacgctaataaccgccgcgatctcctacctacgaatacaacaaaaactacgacgaaacgtaaccccgcgccaaccctacatcccgcgaccccaacacaaaatacgcgattaccgctacttaaaaaaaaacaactcgaacgaaaacgacgcgaaaaacgaacataaaaacgacgcgaaaaaaaaaacgccgcccccgatacccaaacctaaccccaaacccgctaaactcgaccgccgaccctacccctacgaacaaacgcaaaaaaacgacgaaccgaaaaaacaataaaaaaccgcctaattcccgaactcaacctccctcctcgccgacctcaatttaccacgtcttaaatcgaaaaaaccccctccgaatcccgtactatcttcaaaaaccccaatctctcctcccccacgttaaaaacgcccc

SEQ ID NO: 30649 - DNA, 528 bp, Artificial Sequence
  chemically treated genomic DNA (Homo sapiens) CpG-island No: 30649
acgaaggagattttgttttaatacgcggatttgattatttcgtacgtatagttttttttttgtatacgaaggagattttgttttaatacgcggatttgattattttttacgtatagttttttttttgtatatgaaggagattttgttttaatacgcggatttgattatttcgtacgtagttttttttttgtatacgaaggagattttgttttaatacgcggatttgattatttcgtacgtatagttttttttttgtatacgaaggagattttgttttaatacgcggatttgattattttttacgtatagttttttttttgtatatgaaggagattttgttttaatacgcggatttgattatttcgtacgtagttttttttttgtatacgaaggagattttgttttaatacgcggatttgattatttcgtacgtatagttttttttttgtatatgaaggagaatttgttttaatacgcggatttgattattttttacgtatagtttttttttcgtatatgaaggagaat

SEQ ID NO: 30650 - DNA, 528 bp, Artificial Sequence
  chemically treated genomic DNA (Homo sapiens) CpG-island No: 30650
attctccttcatatacgaaaaaaaaactatacgtaaaaaataatcaaatccgcgtattaaaacaaattctccttcatatacaaaaaaaaaactatacgtacgaaataatcaaatccgcgtattaaaacaaaatctccttcgtatacaaaaaaaaaactacgtacgaaataatcaaatccgcgtattaaaacaaaatctccttcatatacaaaaaaaaaactatacgtaaaaaataatcaaatccgcgtattaaaacaaaatctccttcgtatacaaaaaaaaaactatacgtacgaaataatcaaatccgcgtattaaaacaaaatctccttcgtatacaaaaaaaaaactacgtacgaaataatcaaatccgcgtattaaaacaaaatctccttcatatacaaaaaaaaaactatacgtaaaaaataatcaaatccgcgtattaaaacaaaatctccttcgtatacaaaaaaaaaactatacgtacgaaataatcaaatccgcgtattaaaacaaaatctccttcgt

SEQ ID NO: 30651 - DNA, 528 bp, Artificial Sequence
  chemically treated genomic DNA (Homo sapiens) CpG-island No: 30651
atttttttttatgtacggggaggagattgtacgtgagagatagttagattcgcgtgttagagtagatttttttttatgtatagggaggagattgtacgtgcgagatagttagattcgcgtgttagagtagagtttttttcgtgtatagggaagagattacgtgcgagatagttagattcgcgtgttagagtagagttttttttatgtgtagggaggagattgtacgtgagagatagttagattcgcgtgttagagtagagtttttttcgtgtatagggaagagattgtacgtgcgagatagttagattcgcgtgttagagtagagtttttttcgtgtatagggaagagattacgtgcgagatagttagattcgcgtgttagagtagagttttttttatgtgtagggaggagattgtacgtgagagatagttagattcgcgtgttagagtagagtttttttcgtgtatagggaagagattgtacgtgcgagatagttagattcgcgtgttagagtagagtttttttcgt

SEQ ID NO: 30652 - DNA, 528 bp, Artificial Sequence
  chemically treated genomic DNA (Homo sapiens) CpG-island No: 30652
acgaaaaaaactctactctaacacgcgaatctaactatctcgcacgtacaatctcttccctatacacgaaaaaaactctactctaacacgcgaatctaactatctctcacgtacaatctcctccctacacataaaaaaaactctactctaacacgcgaatctaactatctcgcacgtaatctcttccctatacacgaaaaaaactctactctaacacgcgaatctaactatctcgcacgtacaatctcttccctatacacgaaaaaaactctactctaacacgcgaatctaactatctctcacgtacaatctcctccctacacataaaaaaaactctactctaacacgcgaatctaactatctcgcacgtaatctcttccctatacacgaaaaaaactctactctaacacgcgaatctaactatctcgcacgtacaatctcctccctatacataaaaaaaaatctactctaacacgcgaatctaactatctctcacgtacaatctcctccccgtacataaaaaaaaat

SEQ ID NO: 30653 - DNA, 679 bp, Artificial Sequence
  chemically treated genomic DNA (Homo sapiens) CpG-island No: 30653
tatagtacgtagttcgcgcgcggtataatttttttttttaattatattcggcgcgttcgagcgtttttttcgcgcggcggtcggcgtgggaggcgttgcggttggaggttacgatgggagtcggcgggtggtcgtttggggagattcggatatttaggggacgagtttaggtagcgttgatacgaattttttaagtcgcgtttcgggttgtggatcgttagagttgaacgtagtggtttttttttagcgtttcgggtttttttaggtcggggttcgcgggcggggggtgaggcgtggtttcgattgtcgggtcgcgataagcgttttgcgattcggttgaaagcgtatacgtgttttgtcgcgttgagtcgttagtaggattggtattatcgttttttttcggggttagggttattttgtcgtgatacgtagggataagttaaatattttcgttttcgggatcgaacggaatgaattagagtgattaattacgagaattattaggcgtttattgggttgattagtatttcgtttgatttagttgggtttggtcgtcgttattggtcggagcgtcgaagtatcggggacgttgacgtataggttgtttagttataagcgttgttcgtatttagagtaagttaaatgggtggtttttggtgaatgggattttgagaaagtg

SEQ ID NO: 30654 - DNA, 679 bp, Artificial Sequence
  chemically treated genomic DNA (Homo sapiens) CpG-island No: 30654
cactttctcaaaatcccattcaccaaaaaccacccatttaacttactctaaatacgaacaacgcttataactaaacaacctatacgtcaacgtccccgatacttcgacgctccgaccaataacgacgaccaaacccaactaaatcaaacgaaatactaatcaacccaataaacgcctaataattctcgtaattaatcactctaattcattccgttcgatcccgaaaacgaaaatatttaacttatccctacgtatcacgacaaaataaccctaaccccgaaaaaaaacgataataccaatcctactaacgactcaacgcgacaaaacacgtatacgctttcaaccgaatcgcaaaacgcttatcgcgacccgacaatcgaaaccacgcctcaccccccgcccgcgaaccccgacctaaaaaaacccgaaacgctaaaaaaaaaccactacgttcaactctaacgatccacaacccgaaacgcgacttaaaaaattcgtatcaacgctacctaaactcgtcccctaaatatccgaatctccccaaacgaccacccgccgactcccatcgtaacctccaaccgcaacgcctcccacgccgaccgccgcgcgaaaaaaacgctcgaacgcgccgaatataattaaaaaaaaaaattataccgcgcgcgaactacgtactata

SEQ ID NO: 30655 - DNA, 679 bp, Artificial Sequence
  chemically treated genomic DNA (Homo sapiens) CpG-island No: 30655
tatttttttagaattttatttattagaaattatttatttaatttgttttgggtgcgagtagcgtttgtgattgggtaatttgtgcgttagcgttttcggtgtttcggcgtttcggttagtgacggcgattaaatttagttaggttagacgaggtattgattagtttaatgagcgtttggtgattttcgtagttaattattttggtttatttcgttcgatttcggaggcgggagtgtttggtttgtttttgcgtgttacggtagggtgattttagtttcgagggagggcggtggtattagttttgttggcggtttagcgcggtaggatacgtgtgcgtttttagtcgggtcgtagggcgtttatcgcggttcggtagtcggggttacgttttatttttcgttcgcgaatttcgatttggggaaattcggggcgttggggaggggttattgcgtttagttttggcggtttatagttcgaagcgcggtttaggaagttcgtgttagcgttgtttgagttcgttttttggatgttcgggtttttttaggcggttattcgtcggtttttatcgtgatttttagtcgtagcgttttttacgtcggtcgtcgcgcgaggggagcgttcgggcgcgtcgggtgtggttgggggaaggggttgtgtcgcgcgcgggttgcgtgttgtg

SEQ ID NO: 30656 - DNA, 679 bp, Artificial Sequence
  chemically treated genomic DNA (Homo sapiens) CpG-island No: 30656
cacaacacgcaacccgcgcgcgacacaaccccttcccccaaccacacccgacgcgcccgaacgctcccctcgcgcgacgaccgacgtaaaaaacgctacgactaaaaatcacgataaaaaccgacgaataaccgcctaaaaaaacccgaacatccaaaaaacgaactcaaacaacgctaacacgaacttcctaaaccgcgcttcgaactataaaccgccaaaactaaacgcaataacccctccccaacgccccgaatttccccaaatcgaaattcgcgaacgaaaaataaaacgtaaccccgactaccgaaccgcgataaacgccctacgacccgactaaaaacgcacacgtatcctaccgcgctaaaccgccaacaaaactaataccaccgccctccctcgaaactaaaatcaccctaccgtaacacgcaaaaacaaaccaaacactcccgcctccgaaatcgaacgaaataaaccaaaataattaactacgaaaatcaccaaacgctcattaaactaatcaatacctcgtctaacctaactaaatttaatcgccgtcactaaccgaaacgccgaaacaccgaaaacgctaacgcacaaattacccaatcacaaacgctactcgcacccaaaacaaattaaataaataatttctaataaataaaattctaaaaaaata

SEQ ID NO: 30657 - DNA, 605 bp, Artificial Sequence
  chemically treated genomic DNA (Homo sapiens) CpG-island No: 30657
tacgagatcgtattgtagttagtgcggttgtttgggggatttcgtcgataattcgtgtttttgttcggtttttggggttttatcgaggggcgggagggtagggcggtttcgcggtttatttacgtttttatttagttcgatttttatttttttttgggagatgtttttttggatttttttgttgaagttggcgttgtttgtcgttcggtcgtatcgtttattattttttcgtaggtagtatagttgttcggggttcggttcggtcgttttcgggggtttagtcgttgagatcgttttcgcgttcggtattttagtttcggtgttcgcgtcggtttcgtttttcgtcgaggcggcggcggtcgcggtagcgattattgcggttattgcggcggtcgtattttcgtcgcggtttatttcgttaggcgtgaagtcgtttatgttttcgagttttcgaggtcggcgttgatagaaatttttttttttttggtcgtttcgttttttttcgtttcggtagcggtaatttattttgtatattaagttagatagcggtacggttaaatattaattgtttcgggtttgttggtttttgttggtatcgaaatagt

SEQ ID NO: 30658 - DNA, 605 bp, Artificial Sequence
  chemically treated genomic DNA (Homo sapiens) CpG-island No: 30658
actatttcgataccaacaaaaaccaacaaacccgaaacaattaatatttaaccgtaccgctatctaacttaatatacaaaataaattaccgctaccgaaacgaaaaaaaacgaaacgaccaaaaaaaaaaaaatttctatcaacgccgacctcgaaaactcgaaaacataaacgacttcacgcctaacgaaataaaccgcgacgaaaatacgaccgccgcaataaccgcaataatcgctaccgcgaccgccgccgcctcgacgaaaaacgaaaccgacgcgaacaccgaaactaaaataccgaacgcgaaaacgatctcaacgactaaacccccgaaaacgaccgaaccgaaccccgaacaactatactacctacgaaaaaataataaacgatacgaccgaacgacaaacaacgccaacttcaacaaaaaaatccaaaaaaacatctcccaaaaaaaaataaaaatcgaactaaataaaaacgtaaataaaccgcgaaaccgccctaccctcccgcccctcgataaaaccccaaaaaccgaacaaaaacacgaattatcgacgaaatcccccaaacaaccgcactaactacaatacgatctcgta

SEQ ID NO: 30659 - DNA, 605 bp, Artificial Sequence
  chemically treated genomic DNA (Homo sapiens) CpG-island No: 30659
attgtttcggtgttagtagagattagtaggttcgggatagttggtgtttggtcgtgtcgttgtttaatttggtgtgtagagtgaattgtcgttgtcggagcggagagaggcggagcggttaggagagaggggatttttgttagcgtcggtttcgggagttcggagatatgaacggttttacgtttgacgagatgagtcgcggcggggatgcggtcgtcgtagtggtcgtagtggtcgttgtcgcggtcgtcgtcgtttcggcggggaacgggatcggcgcgggtatcggggttgaggtgtcgggcgcgggggcggttttagcggttgggttttcgggggcggtcgggtcgggtttcgggtaattgtgttgtttgcgggaggatggtgagcggtgcggtcgggcggtaggtaacgttagttttagtaagaggatttagaagagtattttttagaagaaggtgaagatcgagttggataagagcgtaagtaaatcgcgggatcgttttgttttttcgtttttcggtggggttttaggagtcgggtaaaggtacgggttgtcggcggggttttttagataatcgtattggttgtagtgcggtttcgtg

SEQ ID NO: 30660 - DNA, 605 bp, Artificial Sequence
  chemically treated genomic DNA (Homo sapiens) CpG-island No: 30660
cacgaaaccgcactacaaccaatacgattatctaaaaaaccccgccgacaacccgtacctttacccgactcctaaaaccccaccgaaaaacgaaaaaacaaaacgatcccgcgatttacttacgctcttatccaactcgatcttcaccttcttctaaaaaatactcttctaaatcctcttactaaaactaacgttacctaccgcccgaccgcaccgctcaccatcctcccgcaaacaacacaattacccgaaacccgacccgaccgcccccgaaaacccaaccgctaaaaccgcccccgcgcccgacacctcaaccccgatacccgcgccgatcccgttccccgccgaaacgacgacgaccgcgacaacgaccactacgaccactacgacgaccgcatccccgccgcgactcatctcgtcaaacgtaaaaccgttcatatctccgaactcccgaaaccgacgctaacaaaaatcccctctctcctaaccgctccgcctctctccgctccgacaacgacaattcactctacacaccaaattaaacaacgacacgaccaaacaccaactatcccgaacctactaatctctactaacaccgaaacaat

SEQ ID NO: 30661 - DNA, 1156 bp, Artificial Sequence
  chemically treated genomic DNA (Homo sapiens) CpG-island No: 30661
ttcgttttcgacgcgttttttaatatataaatttttagaattcgtttttagtttatagcgcgacgttagttcgttttagtcgatttggaggtttcgggtttgagttatatagaaagattattttcgtcggtatttttatatatagttcgatattcggcgcgtcggttttttcgtttgatatattaacgttcgtcgttttcgcgtaatttgttatgtttcggttcgagtttttgatttaaaaattttagcgaaacggagagtcgtagagtcggtttcgggcggtttttgatggttttgttattgtttgggtttgaatcgatacgtttttttttattttttttttttcgcggttttatatttagttttcgtttttttttacgtttcgcgtttttttttttttattttggcgttttttttttttcgttacgtcgtggcggcgtagagattattttgatcgcgagagttgggcggggcgggggcggggcgcgtcgagttatgtagattaatcggtttttggttggttggagtagcgttggtaggggcggggtcggggcgcggttatagagcgcgcggggcgggggtcgaggggagtcgtttagtttcgtcgtttttttatttttttttttttttcggtcggttcggtagttttgtttttcgttttggtttttcggagaggtttcgtttcgttttcgttcgtcgcgtttttttcgcgcgtttttttcgtcggcgcgttttttttttttatttttggttgcggggcgagtcgggcgtttgttgtagcggtcgcggtggttgaggaggttcgagaggagtcggtggtagcggcggcggcgggatcggtagtagtagtagtagtagtagtagtaattattagttttttgtttcgcggcgttgtcgtacgagttttacgagtcgtttatttcgtcgtttttagcgttgttcgatttcgttggcgcgttttttcgtcgttagtttcggtagcgtttttagttgtttttcgattcgttttcggtttttcgcgttagtcgtagcgatagtcgtaacgttattcgtagttatagttatagttatagttttaggtatagttttcggtatagtttcggtttcggtttttgcgatagtttttttgggtatcgtttttgcgtcgatattttgg

SEQ ID NO: 30662 - DNA, 1156 bp, Artificial Sequence
  chemically treated genomic DNA (Homo sapiens) CpG-island No: 30662
ccaaaatatcgacgcaaaaacgatacccaaaaaaactatcgcaaaaaccgaaaccgaaactataccgaaaactatacctaaaactataactataactataactacgaataacgttacgactatcgctacgactaacgcgaaaaaccgaaaacgaatcgaaaaacaactaaaaacgctaccgaaactaacgacgaaaaaacgcgccaacgaaatcgaacaacgctaaaaacgacgaaataaacgactcgtaaaactcgtacgacaacgccgcgaaacaaaaaactaataattactactactactactactactactaccgatcccgccgccgccgctaccaccgactcctctcgaacctcctcaaccaccgcgaccgctacaacaaacgcccgactcgccccgcaaccaaaaataaaaaaaaaaaacgcgccgacgaaaaaaacgcgcgaaaaaaacgcgacgaacgaaaacgaaacgaaacctctccgaaaaaccaaaacgaaaaacaaaactaccgaaccgaccgaaaaaaaaaaaaaaataaaaaaacgacgaaactaaacgactcccctcgacccccgccccgcgcgctctataaccgcgccccgaccccgcccctaccaacgctactccaaccaaccaaaaaccgattaatctacataactcgacgcgccccgcccccgccccgcccaactctcgcgatcaaaataatctctacgccgccacgacgtaacgaaaaaaaaaaaacgccaaaataaaaaaaaaaaaacgcgaaacgtaaaaaaaaacgaaaactaaatataaaaccgcgaaaaaaaaaaaataaaaaaaaacgtatcgattcaaacccaaacaataacaaaaccatcaaaaaccgcccgaaaccgactctacgactctccgtttcgctaaaatttttaaatcaaaaactcgaaccgaaacataacaaattacgcgaaaacgacgaacgttaatatatcaaacgaaaaaaccgacgcgccgaatatcgaactatatataaaaataccgacgaaaataatctttctatataactcaaacccgaaacctccaaatcgactaaaacgaactaacgtcgcgctataaactaaaaacgaattctaaaaatttatatattaaaaaacgcgtcgaaaacgaa

SEQ ID NO: 30663 - DNA, 1156 bp, Artificial Sequence
  chemically treated genomic DNA (Homo sapiens) CpG-island No: 30663
ttaggatgtcggcgtagggacggtgtttagaggagttgtcgtaggagtcggagtcggggttgtgtcgaaggttatgtttggggttgtggttgtggttgtggttgcgggtggcgttgcggttgtcgttgcggttggcgcggaaggtcgagggcgagtcggaggataattgagggcgttgtcgggattggcggcgggagggcgcgttagcggggtcgggtagcgttgagaacggcggggtgagcggttcgtggggttcgtgcggtagcgtcgcggggtaggaggttagtggttgttgttgttgttgttgttgttgttgtcggtttcgtcgtcgtcgttgttatcgatttttttcgggtttttttagttatcgcggtcgttgtagtagacgttcggttcgtttcgtagttaggagtaaaggggaggagcgcgtcggcggggagggcgcgcggggagggcgcggcgggcggggacggggcggggttttttcgggaggttaaggcggggagtagggttgtcgggtcggtcgagggaggagagggggtggggaagcggcgggattgggcgatttttttcggttttcgtttcgcgcgttttgtggtcgcgtttcggtttcgtttttgttagcgttattttagttaattagaggtcgattgatttgtataattcggcgcgtttcgttttcgtttcgtttagttttcgcggttagaatggtttttacgtcgttacgacgtggcgggaaggaaaaggcgttaaaatggagggggaggggcgcggggcgtgaggggaggcgggagttgggtgtagggtcgcgagggaggaaggatggggaggggcgtatcgatttaaatttaaataataataaagttattaaaggtcgttcgaggtcggttttgcggtttttcgtttcgttgaggtttttgggttaagggttcgagtcggagtataataagttgcgcggagacgacgggcgttagtgtgttaggcggggaggtcggcgcgtcgggtgtcggattgtgtgtggggatgtcgacgagggtggtttttttgtgtgatttagattcgagatttttaagtcggttggggcgggttgacgtcgcgttgtaggttgggggcggattttgggggtttgtgtgttggggggcgcgtcgggggcgaa

SEQ ID NO: 30664 - DNA, 1156 bp, Artificial Sequence
  chemically treated genomic DNA (Homo sapiens) CpG-island No: 30664
ttcgcccccgacgcgccccccaacacacaaacccccaaaatccgcccccaacctacaacgcgacgtcaacccgccccaaccgacttaaaaatctcgaatctaaatcacacaaaaaaaccaccctcgtcgacatccccacacacaatccgacacccgacgcgccgacctccccgcctaacacactaacgcccgtcgtctccgcgcaacttattatactccgactcgaacccttaacccaaaaacctcaacgaaacgaaaaaccgcaaaaccgacctcgaacgacctttaataactttattattatttaaatttaaatcgatacgcccctccccatccttcctccctcgcgaccctacacccaactcccgcctcccctcacgccccgcgcccctccccctccattttaacgccttttccttcccgccacgtcgtaacgacgtaaaaaccattctaaccgcgaaaactaaacgaaacgaaaacgaaacgcgccgaattatacaaatcaatcgacctctaattaactaaaataacgctaacaaaaacgaaaccgaaacgcgaccacaaaacgcgcgaaacgaaaaccgaaaaaaatcgcccaatcccgccgcttccccaccccctctcctccctcgaccgacccgacaaccctactccccgccttaacctcccgaaaaaaccccgccccgtccccgcccgccgcgccctccccgcgcgccctccccgccgacgcgctcctcccctttactcctaactacgaaacgaaccgaacgtctactacaacgaccgcgataactaaaaaaacccgaaaaaaatcgataacaacgacgacgacgaaaccgacaacaacaacaacaacaacaacaacaaccactaacctcctaccccgcgacgctaccgcacgaaccccacgaaccgctcaccccgccgttctcaacgctacccgaccccgctaacgcgccctcccgccgccaatcccgacaacgccctcaattatcctccgactcgccctcgaccttccgcgccaaccgcaacgacaaccgcaacgccacccgcaaccacaaccacaaccacaaccccaaacataaccttcgacacaaccccgactccgactcctacgacaactcctctaaacaccgtccctacgccgacatcctaa

SEQ ID NO: 30665 - DNA, 686 bp, Artificial Sequence
  chemically treated genomic DNA (Homo sapiens) CpG-island No: 30665
ttcgttttcgcgtttagtttcgtttttcgttcggtttaggattcggtttcgtttatttggattttttgataggtcgagatcgttcgtcggtttttcgtttgttttttttcgatgaggtttagttttagttcgaaggttagaaagattgttcggtcgtaagggttcgcgtagttttaggttcgtattacgaattgtcgttgtaatcgcgtcgttagttcggttatcgattggcggaagaagcggagacggttagggagttcgagttcgattttgcgaggtttcgcgttcggttttgcggtttagtttggacgtttttcgcggatatagttcgtcgtcgggttcggtcgttttaagtcgtaggttcggtcgggtttgttcgtgaagcgtagtagtagcgttcgatttagttgtaggtcgcggtttagcgtttgtcgtatcgttatggtggcgtcgcggttcggtgttttcgtagtcgtcgttgtcgttattatcggcgtttttcgtcggttataataaatttggggcggtgtttttgcgtaggcgtaggcgttggtgggcggggtcggttttcgcggtagtttttcgattcggcgcgtgggggcgttatgttggtattggcgtttttagtagtgattttttttttgtattttggatttacgtggagggtttgtcggtttaggtaggtt

SEQ ID NO: 30666 - DNA, 686 bp, Artificial Sequence
  chemically treated genomic DNA (Homo sapiens) CpG-island No: 30666
aacctacctaaaccgacaaaccctccacgtaaatccaaaatacaaaaaaaaaatcactactaaaaacgccaataccaacataacgcccccacgcgccgaatcgaaaaactaccgcgaaaaccgaccccgcccaccaacgcctacgcctacgcaaaaacaccgccccaaatttattataaccgacgaaaaacgccgataataacgacaacgacgactacgaaaacaccgaaccgcgacgccaccataacgatacgacaaacgctaaaccgcgacctacaactaaatcgaacgctactactacgcttcacgaacaaacccgaccgaacctacgacttaaaacgaccgaacccgacgacgaactatatccgcgaaaaacgtccaaactaaaccgcaaaaccgaacgcgaaacctcgcaaaatcgaactcgaactccctaaccgtctccgcttcttccgccaatcgataaccgaactaacgacgcgattacaacgacaattcgtaatacgaacctaaaactacgcgaacccttacgaccgaacaatctttctaaccttcgaactaaaactaaacctcatcgaaaaaaaacaaacgaaaaaccgacgaacgatctcgacctatcaaaaaatccaaataaacgaaaccgaatcctaaaccgaacgaaaaacgaaactaaacgcgaaaacgaa

SEQ ID NO: 30667 - DNA, 686 bp, Artificial Sequence
  chemically treated genomic DNA (Homo sapiens) CpG-island No: 30667
gatttgtttgaatcggtaagttttttacgtgggtttaaagtgtaaagggaaagttattgttagaggcgttagtattagtatagcgtttttacgcgtcgagtcggggaattgtcgcgggggtcggtttcgtttattagcgtttgcgtttgcgtagaggtatcgttttaagtttgttgtgatcggcgggggacgtcggtggtggcggtagcggcggttgcgggggtatcgggtcgcggcgttattatggcggtgcgataggcgttgggtcgcggtttgtagttgggtcgagcgttgttgttgcgttttacgggtaagttcggtcgggtttacggtttggggcggtcgggttcggcggcgggttgtgttcgcggggagcgtttaggttgggtcgtaggatcgggcgcggagtttcgtagggtcgggttcgggttttttaatcgttttcgtttttttcgttagtcggtggtcgggttggcggcgcggttgtagcggtagttcgtggtgcgggtttggggttgcgcgggtttttgcggtcgggtagtttttttggttttcgggttagggttgggttttatcgaggaaaaataggcggagagtcggcgggcggtttcggtttgttaggagatttaggtgagcggggtcgggttttaagtcgagcggaggacggagttaagcgcgggggcggg

SEQ ID NO: 30668 - DNA, 686 bp, Artificial Sequence
  chemically treated genomic DNA (Homo sapiens) CpG-island No: 30668
cccgcccccgcgcttaactccgtcctccgctcgacttaaaacccgaccccgctcacctaaatctcctaacaaaccgaaaccgcccgccgactctccgcctatttttcctcgataaaacccaaccctaacccgaaaaccaaaaaaactacccgaccgcaaaaacccgcgcaaccccaaacccgcaccacgaactaccgctacaaccgcgccgccaacccgaccaccgactaacgaaaaaaacgaaaacgattaaaaaacccgaacccgaccctacgaaactccgcgcccgatcctacgacccaacctaaacgctccccgcgaacacaacccgccgccgaacccgaccgccccaaaccgtaaacccgaccgaacttacccgtaaaacgcaacaacaacgctcgacccaactacaaaccgcgacccaacgcctatcgcaccgccataataacgccgcgacccgatacccccgcaaccgccgctaccgccaccaccgacgtcccccgccgatcacaacaaacttaaaacgatacctctacgcaaacgcaaacgctaataaacgaaaccgacccccgcgacaattccccgactcgacgcgtaaaaacgctatactaatactaacgcctctaacaataactttccctttacactttaaacccacgtaaaaaacttaccgattcaaacaaatc

SEQ ID NO: 30669 - DNA, 816 bp, Artificial Sequence
  chemically treated genomic DNA (Homo sapiens) CpG-island No: 30669
gcgtcgcggagtttcgaggagtttgcgttgtgtttttttcgcggtgtttcgttattttcgggaagattcggcgtttgggttcgcgttttttgggtaagtttttcgggaagttttttcgggagttcgttggttttggttttagaagtttgcggattcgtttagggaggataagtagttgaaagatcgcgcggtgtcgtttcgaggtttcgggacgtgggtttatggtcggtttggcgttattttttcgggggaagttacgcgtattaggtatcgtacgcggttttgtattcgcgtcgtcggatttgaaattcggcggagggtatacggggttgtcgttgcgggtttcggattaatttatgtttatttcggagtttgtatcggcgtcgacgggtcggatttttttgcgcggtgtcgtttagcgggttcgtgcgaaaggcggggtcgattatacgcggtgtcgcgttttgagatcgtttatttgtagttaacgtagtttttcggtttagtttgggaagatgcgcgaatcgggaattttagagcgcggtggttagatcgggtttcgtcgttttttttatagttttttttttaatcgtttagacggagtttggtcgatttcgtcggagattgttaggtgagaggttttagagatattaagggtaaaaataaatttagcgttagcggcgggtattttgtaggtttgttggatcggagacgcgagcgaggggtttagttttttttgtttgtatattcggtgacgggcgcgtgtttgtttattgttgtaaggtgttggcgtgggtttttttgtttgtttttatt

SEQ ID NO: 30670 - DNA, 816 bp, Artificial Sequence
  chemically treated genomic DNA (Homo sapiens) CpG-island No: 30670
aataaaaacaaacaaaaaaacccacgccaacaccttacaacaataaacaaacacgcgcccgtcaccgaatatacaaacaaaaaaaactaaacccctcgctcgcgtctccgatccaacaaacctacaaaatacccgccgctaacgctaaatttatttttacccttaatatctctaaaacctctcacctaacaatctccgacgaaatcgaccaaactccgtctaaacgattaaaaaaaaaactataaaaaaaacgacgaaacccgatctaaccaccgcgctctaaaattcccgattcgcgcatcttcccaaactaaaccgaaaaactacgttaactacaaataaacgatctcaaaacgcgacaccgcgtataatcgaccccgcctttcgcacgaacccgctaaacgacaccgcgcaaaaaaatccgacccgtcgacgccgatacaaactccgaaataaacataaattaatccgaaacccgcaacgacaaccccgtataccctccgccgaatttcaaatccgacgacgcgaatacaaaaccgcgtacgatacctaatacgcgtaacttcccccgaaaaaataacgccaaaccgaccataaacccacgtcccgaaacctcgaaacgacaccgcgcgatctttcaactacttatcctccctaaacgaatccgcaaacttctaaaaccaaaaccaacgaactcccgaaaaaacttcccgaaaaacttacccaaaaaacgcgaacccaaacgccgaatcttcccgaaaataacgaaacaccgcgaaaaaaacacaacgcaaactcctcgaaactccgcgacgc

SEQ ID NO: 30671 - DNA, 816 bp, Artificial Sequence
  chemically treated genomic DNA (Homo sapiens) CpG-island No: 30671
aataaaagtaagtaagaaaatttacgttaatattttataatagtaaatagatacgcgttcgttatcgggtgtataaatagaaaaggttgggtttttcgttcgcgttttcggtttagtaggtttatagggtattcgtcgttggcgttgggtttatttttatttttagtgtttttggggttttttatttggtagttttcggcgaagtcgattaggtttcgtttgaacgattaggaaaggggttgtgggggaggcggcggagttcggtttagttatcgcgttttggggttttcgattcgcgtatttttttaggttgagtcgggaggttgcgttgattgtagataaacggttttagggcgcggtatcgcgtgtagtcggtttcgtttttcgtacgaattcgttgggcgatatcgcgtagggaggttcgattcgtcggcgtcggtataggtttcggagtaagtatgggttggttcggggttcgtagcggtagtttcgtgtgtttttcgtcgggttttaggttcggcggcgcgggtgtagagtcgcgtgcgatgtttggtgcgcgtggtttttttcggaaaggtggcgttaggtcgattatgggtttacgtttcggggtttcggagcggtatcgcgcggttttttagttgtttattttttttgggcgggttcgtaggtttttggggttaggattagcgagttttcgggaaagtttttcggaaagtttatttagagagcgcggatttaggcgtcgagttttttcggagatgacgagatatcgcgagaggagtatagcgtaggtttttcgggatttcgcggcgt

SEQ ID NO: 30672 - DNA, 816 bp, Artificial Sequence
  chemically treated genomic DNA (Homo sapiens) CpG-island No: 30672
acgccgcgaaatcccgaaaaacctacgctatactcctctcgcgatatctcgtcatctccgaaaaaactcgacgcctaaatccgcgctctctaaataaactttccgaaaaactttcccgaaaactcgctaatcctaaccccaaaaacctacgaacccgcccaaaaaaaataaacaactaaaaaaccgcgcgataccgctccgaaaccccgaaacgtaaacccataatcgacctaacgccacctttccgaaaaaaaccacgcgcaccaaacatcgcacgcgactctacacccgcgccgccgaacctaaaacccgacgaaaaacacacgaaactaccgctacgaaccccgaaccaacccatacttactccgaaacctataccgacgccgacgaatcgaacctccctacgcgatatcgcccaacgaattcgtacgaaaaacgaaaccgactacacgcgataccgcgccctaaaaccgtttatctacaatcaacgcaacctcccgactcaacctaaaaaaatacgcgaatcgaaaaccccaaaacgcgataactaaaccgaactccgccgcctcccccacaacccctttcctaatcgttcaaacgaaacctaatcgacttcgccgaaaactaccaaataaaaaaccccaaaaacactaaaaataaaaataaacccaacgccaacgacgaataccctataaacctactaaaccgaaaacgcgaacgaaaaacccaaccttttctatttatacacccgataacgaacgcgtatctatttactattataaaatattaacgtaaattttcttacttacttttatt

SEQ ID NO: 30673 - DNA, 708 bp, Artificial Sequence
  chemically treated genomic DNA (Homo sapiens) CpG-island No: 30673
cgggtgttgcgattggttgacgtttaggcgttgggaatcgtttcgcgttcgtttttcgattgaatttttggtttaggtgtaagaggcggtaggttttttgcggggtttacggggagaaggggacgttgggcgtagtatcgttttcggggcggtttttttttagttatatttcgattcggcgcggttattcggttttagttcgtaggttttattgttgcgttttttcggggacgcgaatgtttcgcgtcgggcgggcgttcgcggagggaggtttcgttttagggacgcggagttttagatgtttgcgtttaaggtttttcgtttggcgtcggttggtttcgaatttcggggtatgggtatttaggaagggggttgcgcgtgttgggaggttcgttttttcgtcgcgaattttcggggtagtcggggaatttatttgcggagcgggaagtttaggaacgttcgaagaggtcgtgggagtcgggttcgtttttcgcgggagggatttcggcgcgggaacgtcgaggaggggtcgcgtttatacgttggtgtagcgtcggttttatttgatcgcgattttgattttagggtgtggttttaggtaggacgcggcggcgaatttagagcgcgggagaagttgttaagtgtcgttggggttttggttaggagtttttttgttcgaggggcgtcgtgttgtttaatttttttttt

SEQ ID NO: 30674 - DNA, 708 bp, Artificial Sequence
  chemically treated genomic DNA (Homo sapiens) CpG-island No: 30674
aaaaaaaaaattaaacaacacgacgcccctcgaacaaaaaaactcctaaccaaaaccccaacgacacttaacaacttctcccgcgctctaaattcgccgccgcgtcctacctaaaaccacaccctaaaatcaaaatcgcgatcaaataaaaccgacgctacaccaacgtataaacgcgacccctcctcgacgttcccgcgccgaaatccctcccgcgaaaaacgaacccgactcccacgacctcttcgaacgttcctaaacttcccgctccgcaaataaattccccgactaccccgaaaattcgcgacgaaaaaacgaacctcccaacacgcgcaacccccttcctaaatacccataccccgaaattcgaaaccaaccgacgccaaacgaaaaaccttaaacgcaaacatctaaaactccgcgtccctaaaacgaaacctccctccgcgaacgcccgcccgacgcgaaacattcgcgtccccgaaaaaacgcaacaataaaacctacgaactaaaaccgaataaccgcgccgaatcgaaatataactaaaaaaaaaccgccccgaaaacgatactacgcccaacgtccccttctccccgtaaaccccgcaaaaaacctaccgcctcttacacctaaaccaaaaattcaatcgaaaaacgaacgcgaaacgattcccaacgcctaaacgtcaaccaatcgcaacacccg

SEQ ID NO: 30675 - DNA, 708 bp, Artificial Sequence
  chemically treated genomic DNA (Homo sapiens) CpG-island No: 30675
agagaaagagttgagtagtacggcgtttttcgggtagaggggtttttggttaaggttttagcgatatttggtaatttttttcgcgttttgggttcgtcgtcgcgttttatttgaggttatattttgaaattaaaatcgcggttaggtgaagtcggcgttgtattaacgtgtaagcgcggttttttttcggcgttttcgcgtcgaggtttttttcgcggagggcgggttcggtttttacgattttttcgagcgtttttgggtttttcgtttcgtaggtgggtttttcggttgtttcggaggttcgcggcgagaggacgggttttttaatacgcgtagttttttttttgggtgtttatgtttcgaagttcgggattagtcggcgttaggcgaggggttttgggcgtaggtatttggagtttcgcgtttttggagcgggattttttttcgcgggcgttcgttcggcgcggggtattcgcgttttcgagagggcgtagtagtggggtttgcgagttggggtcgggtggtcgcgtcgggtcggagtgtggttggagaggggtcgtttcggaagcggtgttgcgtttaacgttttttttttttcgtaagtttcgtaaggagtttgtcgttttttgtatttgagttaggagtttagtcgggaggcgggcgcggagcggtttttagcgtttggacgttagttagtcgtaatattcg

SEQ ID NO: 30676 - DNA, 708 bp, Artificial Sequence
  chemically treated genomic DNA (Homo sapiens) CpG-island No: 30676
cgaatattacgactaactaacgtccaaacgctaaaaaccgctccgcgcccgcctcccgactaaactcctaactcaaatacaaaaaacgacaaactccttacgaaacttacgaaaaaaaaaaaacgttaaacgcaacaccgcttccgaaacgacccctctccaaccacactccgacccgacgcgaccacccgaccccaactcgcaaaccccactactacgccctctcgaaaacgcgaataccccgcgccgaacgaacgcccgcgaaaaaaaatcccgctccaaaaacgcgaaactccaaatacctacgcccaaaacccctcgcctaacgccgactaatcccgaacttcgaaacataaacacccaaaaaaaaaactacgcgtattaaaaaacccgtcctctcgccgcgaacctccgaaacaaccgaaaaacccacctacgaaacgaaaaacccaaaaacgctcgaaaaaatcgtaaaaaccgaacccgccctccgcgaaaaaaacctcgacgcgaaaacgccgaaaaaaaaccgcgcttacacgttaatacaacgccgacttcacctaaccgcgattttaatttcaaaatataacctcaaataaaacgcgacgacgaacccaaaacgcgaaaaaaattaccaaatatcgctaaaaccttaaccaaaaacccctctacccgaaaaacgccgtactactcaactctttctct

SEQ ID NO: 30677 - DNA, 504 bp, Artificial Sequence
  chemically treated genomic DNA (Homo sapiens) CpG-island No: 30677
ttttcgggttttcgtgcgtagcgcgatttcgttttttatttttttaaggagttgcgatttaatttcgttcggttttcggcggttattcgggcgtttatcgggttgcggtaggaggcgggaggcgtaggtaggggcggcggcggcggcgggtataggtcggggcgggaggaggttatttcgtacggtgcggtattgtttttaaaatacgtttgttcggggtatttcgtaaatagttgatgaggtttcgtttttttgcgcgttacgtcgaggattgattaatggcgagtgaagcgttaagtttcgggttgggtcgttgttagggacggttacgaatgtacgaatttttttatggaaatattgtaaggggtcgagtaaaatttcgatcgtcgttagaagcgtagtcggagcgtcgtcgttagtgcggattttgtttttaatataggttttggaagcgttagagagtttttgaattttttgtattaggtgtgggagagggggcgttaa

SEQ ID NO: 30678 - DNA, 504 bp, Artificial Sequence
  chemically treated genomic DNA (Homo sapiens) CpG-island No: 30678
ttaacgccccctctcccacacctaatacaaaaaattcaaaaactctctaacgcttccaaaacctatattaaaaacaaaatccgcactaacgacgacgctccgactacgcttctaacgacgatcgaaattttactcgaccccttacaatatttccataaaaaaattcgtacattcgtaaccgtccctaacaacgacccaacccgaaacttaacgcttcactcgccattaatcaatcctcgacgtaacgcgcaaaaaaacgaaacctcatcaactatttacgaaataccccgaacaaacgtattttaaaaacaataccgcaccgtacgaaataacctcctcccgccccgacctatacccgccgccgccgccgcccctacctacgcctcccgcctcctaccgcaacccgataaacgcccgaataaccgccgaaaaccgaacgaaattaaatcgcaactccttaaaaaaataaaaaacgaaatcgcgctacgcacgaaaacccgaaaa

SEQ ID NO: 30679 - DNA, 504 bp, Artificial Sequence
  chemically treated genomic DNA (Homo sapiens) CpG-island No: 30679
ttggcgtttttttttttatatttaatatagaggatttagggattttttggcgtttttagagtttgtgttagggatagaattcgtattggcgacggcgtttcgattgcgtttttggcgacggtcggaattttgttcggttttttgtaatgtttttatgggaaggttcgtatattcgtgatcgtttttggtagcggtttagttcgggatttggcgttttattcgttattggttagttttcggcgtgacgcgtaggggggcggggttttattagttgtttgcgggatgtttcgagtaggcgtattttggaaataatatcgtatcgtgcggagtggttttttttcgtttcggtttgtgttcgtcgtcgtcgtcgtttttgtttgcgtttttcgttttttgtcgtagttcggtgagcgttcgggtggtcgtcgggggtcgggcggagttggatcgtagttttttggggaagtggggagcggagtcgcgttgcgtacgggggttcgggaa

SEQ ID NO: 30680 - DNA, 504 bp, Artificial Sequence
  chemically treated genomic DNA (Homo sapiens) CpG-island No: 30680
ttcccgaacccccgtacgcaacgcgactccgctccccacttccccaaaaaactacgatccaactccgcccgacccccgacgaccacccgaacgctcaccgaactacgacaaaaaacgaaaaacgcaaacaaaaacgacgacgacgacgaacacaaaccgaaacgaaaaaaaaccactccgcacgatacgatattatttccaaaatacgcctactcgaaacatcccgcaaacaactaataaaaccccgcccccctacgcgtcacgccgaaaactaaccaataacgaataaaacgccaaatcccgaactaaaccgctaccaaaaacgatcacgaatatacgaaccttcccataaaaacattacaaaaaaccgaacaaaattccgaccgtcgccaaaaacgcaatcgaaacgccgtcgccaatacgaattctatccctaacacaaactctaaaaacgccaaaaaatccctaaatcctctatattaaatataaaaaaaaaaacgccaa

SEQ ID NO: 30681 - DNA, 843 bp, Artificial Sequence
  chemically treated genomic DNA (Homo sapiens) CpG-island No: 30681
ttttagacgtcgttttttaggttattttttttttcgtataatttagaatacgcgggttacggtcgttaggttgcgttcgttttgttcgcgttttagcggcgcggaggttcggacggcgttatgatatgagtagtggtggcgatttacgcgtattcgtcgtttcgagtgttgtagtttagcgtttagcgagagcgcgtcgcgtatttgtcggttttgtcggtttttcggcgttcgtttagttttttagcgcgaaggtttagttcggtttacggcgttcgttcggttcggtcgcgcgttttattagcggtagtagtttttcgaggtttttagcgtgaagttaacgcgcgtggttcgcgtgaagggtagtagtattttggggatgttgagtttggtcgtagcggcggaggggttcgtcgttaatagtatcgatagcgttagtagtagtagttttcggtttcgcgtcgttattttcgtcgcgcgttatttttcgcgattttgcgttcggtcgttcgcgtcgtttcgttgtttttcgttttcgttcgcgcgcgcgttaggttagtaggtgatgagcgcgggggcggggcgagggtcgtcggcggtcgtcgttttttgggtttgagcgcgggaattttgggggtcgagttcgcggcgattttatttttagttcggttttcgcgtagggacgcggggttgggggatgggcgcgcgttcgggttttcggagttgagggagaaggtttggggcgcgttcgcggggatttttggattttagaagttttaagggggagttttcgggcgtttcgtagtacgtatttcgttttggtatttgtttttggcggtggag

SEQ ID NO: 30682 - DNA, 843 bp, Artificial Sequence
  chemically treated genomic DNA (Homo sapiens) CpG-island No: 30682
ctccaccgccaaaaacaaataccaaaacgaaatacgtactacgaaacgcccgaaaactcccccttaaaacttctaaaatccaaaaatccccgcgaacgcgccccaaaccttctccctcaactccgaaaacccgaacgcgcgcccatcccccaaccccgcgtccctacgcgaaaaccgaactaaaaataaaatcgccgcgaactcgacccccaaaattcccgcgctcaaacccaaaaaacgacgaccgccgacgaccctcgccccgcccccgcgctcatcacctactaacctaacgcgcgcgcgaacgaaaacgaaaaacaacgaaacgacgcgaacgaccgaacgcaaaatcgcgaaaaataacgcgcgacgaaaataacgacgcgaaaccgaaaactactactactaacgctatcgatactattaacgacgaacccctccgccgctacgaccaaactcaacatccccaaaatactactacccttcacgcgaaccacgcgcgttaacttcacgctaaaaacctcgaaaaactactaccgctaataaaacgcgcgaccgaaccgaacgaacgccgtaaaccgaactaaaccttcgcgctaaaaaactaaacgaacgccgaaaaaccgacaaaaccgacaaatacgcgacgcgctctcgctaaacgctaaactacaacactcgaaacgacgaatacgcgtaaatcgccaccactactcatatcataacgccgtccgaacctccgcgccgctaaaacgcgaacaaaacgaacgcaacctaacgaccgtaacccgcgtattctaaattatacgaaaaaaaaaataacctaaaaaacgacgtctaaaa

SEQ ID NO: 30683 - DNA, 843 bp, Artificial Sequence
  chemically treated genomic DNA (Homo sapiens) CpG-island No: 30683
ttttatcgttaggggtaaatattagggcgggatgcgtgttgcggggcgttcgggggtttttttttgggatttttagggtttaggggttttcgcgggcgcgttttaagtttttttttttagtttcgggggttcgggcgcgcgtttattttttagtttcgcgtttttgcgcgagggtcgggttgggggtggggtcgtcgcgagttcggtttttagagttttcgcgtttaggtttaggaagcggcggtcgtcgacggttttcgtttcgttttcgcgtttattatttgttggtttggcgcgcgcgcgggcgggagcggagggtaacggggcggcgcgggcggtcgggcgtagggtcgcgggaggtgacgcgcggcgaggatggcggcgcggggtcgggggttgttgttgttgacgttgtcggtgttgttggcggcgggttttttcgtcgttgcggttaagtttaatatttttaaagtgttgttgttttttacgcgggttacgcgcgttaattttacgttggaggtttcggagggttgttatcgttggtgaggcgcgcggtcgggtcgggcgggcgtcgtgggtcgggttgggttttcgcgttgagaggttgggcgggcgtcgggaggtcggtagagtcggtaggtgcgcggcgcgttttcgttgggcgttaggttgtagtattcggagcggcgggtgcgcgtgggtcgttattattgtttatgttatggcgtcgttcgggttttcgcgtcgttgaggcgcgagtagagcgggcgtagtttggcggtcgtgattcgcgtgttttgggttgtgcgggaggaggggtggtttggggagcggcgtttggga

SEQ ID NO: 30684 - DNA, 843 bp, Artificial Sequence
  chemically treated genomic DNA (Homo sapiens) CpG-island No: 30684
tcccaaacgccgctccccaaaccacccctcctcccgcacaacccaaaacacgcgaatcacgaccgccaaactacgcccgctctactcgcgcctcaacgacgcgaaaacccgaacgacgccataacataaacaataataacgacccacgcgcacccgccgctccgaatactacaacctaacgcccaacgaaaacgcgccgcgcacctaccgactctaccgacctcccgacgcccgcccaacctctcaacgcgaaaacccaacccgacccacgacgcccgcccgacccgaccgcgcgcctcaccaacgataacaaccctccgaaacctccaacgtaaaattaacgcgcgtaacccgcgtaaaaaacaacaacactttaaaaatattaaacttaaccgcaacgacgaaaaaacccgccgccaacaacaccgacaacgtcaacaacaacaacccccgaccccgcgccgccatcctcgccgcgcgtcacctcccgcgaccctacgcccgaccgcccgcgccgccccgttaccctccgctcccgcccgcgcgcgcgccaaaccaacaaataataaacgcgaaaacgaaacgaaaaccgtcgacgaccgccgcttcctaaacctaaacgcgaaaactctaaaaaccgaactcgcgacgaccccacccccaacccgaccctcgcgcaaaaacgcgaaactaaaaaataaacgcgcgcccgaacccccgaaactaaaaaaaaaaacttaaaacgcgcccgcgaaaacccctaaaccctaaaaatcccaaaaaaaaacccccgaacgccccgcaacacgcatcccgccctaatatttacccctaacgataaaa

SEQ ID NO: 30685 - DNA, 992 bp, Artificial Sequence
  chemically treated genomic DNA (Homo sapiens) CpG-island No: 30685
aagcggcgcggaggcggtgggtagagtttacggtcgcgggtagaatttacggtcgcgtttcgtcgggtgggcgttcggaacgtttcgggtttttcggagcgcgtcgttttaattcggtatgttttttagtttttcgcgttttcgagtgcggtttttttaggtttggaaagcgtttagaattaaaggtagaatatgaggagagattttacgtcgtttaggggtttttcgcggtagaggtcgacgtcgagtttaaggatacgttttcggggatattaaagttaaaggttaaaggttaagttcgagttttagttcgcgttcgcggcgattttcggaggtcgaagggcgtgggaattacgggcgtaagtcggttgtttattttcgtttcgggtcgttttttttaggagattagtgtagggcgagcggtcggaattcgggaatcgtagtcgataggtagtttatttacgtcgcgttagtcgggtacgaatttgtataacgcgatttttattaattttgcgttagcgcgtattgacgtagcgtttatgttcggtatttaggattaatagaaagtttcgaaggggatttgggttaattatattgcgtcgttttgagtcgtgttttcgtttcgcgtttgttacggaggtttacgacgtttaggcgttttcgcgattattcggagtgattgttcggtagagcgcggtaggtgttaacgcggggttttcgcgtagttggttcggttgggtgttaaagatttggtcggttttttttttaggttgcgtcgttcggttcgtgttttagcgtaggttttcggggcgtcgagtttgggggtgttcgtttcgcgggttttttttatttttaggaaaacgcgtcgcggggtttttcgtttgtttgttttgtatatacgtgttgttaaattttttcgtatcgtttttagatttggattggtcgttttattttttttttttattgatttatgttttgtttttttttttttt

SEQ ID NO: 30686 - DNA, 992 bp, Artificial Sequence
  chemically treated genomic DNA (Homo sapiens) CpG-island No: 30686
aaaaaaaaaaaaaacaaaacataaatcaataaaaaaaaaaaataaaacgaccaatccaaatctaaaaacgatacgaaaaaatttaacaacacgtatatacaaaacaaacaaacgaaaaaccccgcgacgcgttttcctaaaaataaaaaaaacccgcgaaacgaacacccccaaactcgacgccccgaaaacctacgctaaaacacgaaccgaacgacgcaacctaaaaaaaaaaccgaccaaatctttaacacccaaccgaaccaactacgcgaaaaccccgcgttaacacctaccgcgctctaccgaacaatcactccgaataatcgcgaaaacgcctaaacgtcgtaaacctccgtaacaaacgcgaaacgaaaacacgactcaaaacgacgcaatataattaacccaaatccccttcgaaactttctattaatcctaaataccgaacataaacgctacgtcaatacgcgctaacgcaaaattaataaaaatcgcgttatacaaattcgtacccgactaacgcgacgtaaataaactacctatcgactacgattcccgaattccgaccgctcgccctacactaatctcctaaaaaaaacgacccgaaacgaaaataaacaaccgacttacgcccgtaattcccacgcccttcgacctccgaaaatcgccgcgaacgcgaactaaaactcgaacttaacctttaacctttaactttaatatccccgaaaacgtatccttaaactcgacgtcgacctctaccgcgaaaaacccctaaacgacgtaaaatctctcctcatattctacctttaattctaaacgctttccaaacctaaaaaaaccgcactcgaaaacgcgaaaaactaaaaaacataccgaattaaaacgacgcgctccgaaaaacccgaaacgttccgaacgcccacccgacgaaacgcgaccgtaaattctacccgcgaccgtaaactctacccaccgcctccgcgccgctt

SEQ ID NO: 30687 - DNA, 992 bp, Artificial Sequence
  chemically treated genomic DNA (Homo sapiens) CpG-island No: 30687
aggaaaagaaaaagtaaaatatagattaatgaagggagaaggtggggcggttagtttagatttaaagacggtgcggggggatttggtaatacgtgtgtgtaagatagatagacgggaggtttcgcggcgcgtttttttaggaatgaaagggattcgcggggcgagtatttttaaattcggcgtttcggggatttgcgttgagatacgggtcgggcggcgtagtttgaggagaaagtcggttaggtttttgatatttagtcggattaattgcgcggagatttcgcgttgatatttatcgcgttttgtcgggtaattatttcgggtggtcgcggaagcgtttgggcgtcgtgggttttcgtagtaaacgcggggcgggagtacgatttagggcggcgtaatgtgattggtttaggtttttttcggagttttttattggttttgggtatcgagtatgggcgttgcgttagtgcgcgttggcgtaaggttggtggaagtcgcgttgtgtaggttcgtgttcggttggcgcggcgtgggtaagttgtttgtcggttacggttttcggatttcggtcgttcgttttgtattaattttttgggagaggcggttcggggcgggggtgggtagtcggtttgcgttcgtggtttttacgtttttcggttttcgggggtcgtcgcgggcgcgggttggggttcggatttggtttttggtttttggttttggtgttttcgggagcgtgtttttgggttcggcgtcggtttttgtcgcgggaggtttttgggcggcgtggggtttttttttatgttttgtttttggttttaggcgttttttaggtttagggaaatcgtattcggggacgcggggaattggggaatatgtcgggttggggcggcgcgtttcggggaattcgggacgtttcgagcgtttattcggcgggacgcggtcgtgagttttgttcgcggtcgtgagttttgtttatcgttttcgcgtcgttt

SEQ ID NO: 30688 - DNA, 992 bp, Artificial Sequence
  chemically treated genomic DNA (Homo sapiens) CpG-island No: 30688
aaacgacgcgaaaacgataaacaaaactcacgaccgcgaacaaaactcacgaccgcgtcccgccgaataaacgctcgaaacgtcccgaattccccgaaacgcgccgccccaacccgacatattccccaattccccgcgtccccgaatacgatttccctaaacctaaaaaacgcctaaaaccaaaaacaaaacataaaaaaaaaccccacgccgcccaaaaacctcccgcgacaaaaaccgacgccgaacccaaaaacacgctcccgaaaacaccaaaaccaaaaaccaaaaaccaaatccgaaccccaacccgcgcccgcgacgacccccgaaaaccgaaaaacgtaaaaaccacgaacgcaaaccgactacccacccccgccccgaaccgcctctcccaaaaaattaatacaaaacgaacgaccgaaatccgaaaaccgtaaccgacaaacaacttacccacgccgcgccaaccgaacacgaacctacacaacgcgacttccaccaaccttacgccaacgcgcactaacgcaacgcccatactcgatacccaaaaccaataaaaaactccgaaaaaaacctaaaccaatcacattacgccgccctaaatcgtactcccgccccgcgtttactacgaaaacccacgacgcccaaacgcttccgcgaccacccgaaataattacccgacaaaacgcgataaatatcaacgcgaaatctccgcgcaattaatccgactaaatatcaaaaacctaaccgactttctcctcaaactacgccgcccgacccgtatctcaacgcaaatccccgaaacgccgaatttaaaaatactcgccccgcgaatccctttcattcctaaaaaaacgcgccgcgaaacctcccgtctatctatcttacacacacgtattaccaaatccccccgcaccgtctttaaatctaaactaaccgccccaccttctcccttcattaatctatattttactttttcttttcct

SEQ ID NO: 30689 - DNA, 867 bp, Artificial Sequence
  chemically treated genomic DNA (Homo sapiens) CpG-island No: 30689
attcgcggggtacgtcggcgatcgtagggtcggggcgagtcgggagtttcggcggttgggttgggcggaggacgggtagtcgaggttcggtttttagcggcgcgtatcggtttcgggtttttttgggcgttggcgggttcgtttttttataaataaaatatagggcgtcgattttcgtaagtgatttcgaggagtttttttaagcggattttacgttagttcgacgatcgggcgttcgtttcgttcggttttcgggttttagtttcggggattttcgtttttttttttagttttcgtttcgttttcgggatcggtcgcgcgggcgtttttaggatttcgcgtttcgttcgttttttttttttttcgagtcgcgaattttttcggaggcggcggtttcggttgtcgttgggtttcggggtcgcgggttttgattgcgtcgttttttcgcgtagagttcgtcggcgtttcgacgggtttcggagtagcggttttcggtcgggtgagtgggagacgcgggaggaggaagggggttgttttaggtcgggcgggagggaacgtggcgcggtcgggcggggcggacgggggcgatcgcggggtttagtcgggggaggaaggaatcgtagagtcgtgttcgggagggatcgtagcgttattttttgcggggcgtcgttttcgcgttatcgagggtagttaatttttagtagaggatcggggtcgcggtcgtcgggggcgtagcgcggttagggcggttttcgtttacggtttaggtattttcgttgggttttgtcgggttttattttttttcgcgtagcgattcgggaagtaggatattttgtggagagtttaggattcgggagacgttttggg

SEQ ID NO: 30690 - DNA, 867 bp, Artificial Sequence
  chemically treated genomic DNA (Homo sapiens) CpG-island No: 30690
cccaaaacgtctcccgaatcctaaactctccacaaaatatcctacttcccgaatcgctacgcgaaaaaaaataaaacccgacaaaacccaacgaaaatacctaaaccgtaaacgaaaaccgccctaaccgcgctacgcccccgacgaccgcgaccccgatcctctactaaaaattaactaccctcgataacgcgaaaacgacgccccgcaaaaaataacgctacgatccctcccgaacacgactctacgattccttcctcccccgactaaaccccgcgatcgcccccgtccgccccgcccgaccgcgccacgttccctcccgcccgacctaaaacaacccccttcctcctcccgcgtctcccactcacccgaccgaaaaccgctactccgaaacccgtcgaaacgccgacgaactctacgcgaaaaaacgacgcaatcaaaacccgcgaccccgaaacccaacgacaaccgaaaccgccgcctccgaaaaaattcgcgactcgaaaaaaaaaaaaaacgaacgaaacgcgaaatcctaaaaacgcccgcgcgaccgatcccgaaaacgaaacgaaaactaaaaaaaaaaacgaaaatccccgaaactaaaacccgaaaaccgaacgaaacgaacgcccgatcgtcgaactaacgtaaaatccgcttaaaaaaactcctcgaaatcacttacgaaaatcgacgccctatattttatttataaaaaaacgaacccgccaacgcccaaaaaaacccgaaaccgatacgcgccgctaaaaaccgaacctcgactacccgtcctccgcccaacccaaccgccgaaactcccgactcgccccgaccctacgatcgccgacgtaccccgcgaat

SEQ ID NO: 30691 - DNA, 867 bp, Artificial Sequence
  chemically treated genomic DNA (Homo sapiens) CpG-island No: 30691
tttagggcgtttttcgggttttgggttttttataggatgttttatttttcgagtcgttgcgcggggaagggtgaggttcggtagggtttagcgggagtgtttgggtcgtgggcgggggtcgttttaatcgcgttgcgttttcggcggtcgcgatttcggttttttgttaggagttagttgttttcggtggcgcgggaacggcgtttcgtagagagtggcgttgcggtttttttcggatacggttttgcggtttttttttttttcggttgggtttcgcgatcgttttcgttcgtttcgttcggtcgcgttacgttttttttcgttcggtttgggatagtttttttttttttttcgcgttttttatttattcggtcgggggtcgttgtttcggggttcgtcggggcgtcggcgagttttgcgcggggaaacggcgtaattagggttcgcgatttcgggatttagcggtagtcgaggtcgtcgttttcggaaaagttcgcggttcgggaggggaggagagcgggcgggacgcggggttttagaggcgttcgcgcggtcgatttcgggagcggggcgggaattaggggaaggggcgggggttttcgaggttggggttcgggggtcggacggggcgggcgttcggtcgtcgggttgacgtggagttcgtttagaaaggtttttcggggttatttgcgaaagtcgacgttttgtattttatttatggaggagcgagttcgttagcgtttaggagggttcgaggtcggtgcgcgtcgttggaggtcggatttcggttgttcgtttttcgtttagtttagtcgtcgaggttttcggttcgtttcgattttgcggtcgtcggcgtgtttcgcgggt

SEQ ID NO: 30692 - DNA, 867 bp, Artificial Sequence
  chemically treated genomic DNA (Homo sapiens) CpG-island No: 30692
acccgcgaaacacgccgacgaccgcaaaatcgaaacgaaccgaaaacctcgacgactaaactaaacgaaaaacgaacaaccgaaatccgacctccaacgacgcgcaccgacctcgaaccctcctaaacgctaacgaactcgctcctccataaataaaatacaaaacgtcgactttcgcaaataaccccgaaaaacctttctaaacgaactccacgtcaacccgacgaccgaacgcccgccccgtccgacccccgaaccccaacctcgaaaacccccgccccttcccctaattcccgccccgctcccgaaatcgaccgcgcgaacgcctctaaaaccccgcgtcccgcccgctctcctcccctcccgaaccgcgaacttttccgaaaacgacgacctcgactaccgctaaatcccgaaatcgcgaaccctaattacgccgtttccccgcgcaaaactcgccgacgccccgacgaaccccgaaacaacgacccccgaccgaataaataaaaaacgcgaaaaaaaaaaaaaaactatcccaaaccgaacgaaaaaaaacgtaacgcgaccgaacgaaacgaacgaaaacgatcgcgaaacccaaccgaaaaaaaaaaaaaccgcaaaaccgtatccgaaaaaaaccgcaacgccactctctacgaaacgccgttcccgcgccaccgaaaacaactaactcctaacaaaaaaccgaaatcgcgaccgccgaaaacgcaacgcgattaaaacgacccccgcccacgacccaaacactcccgctaaaccctaccgaacctcacccttccccgcgcaacgactcgaaaaataaaacatcctataaaaaacccaaaacccgaaaaacgccctaaa

SEQ ID NO: 30693 - DNA, 875 bp, Artificial Sequence
  chemically treated genomic DNA (Homo sapiens) CpG-island No: 30693
ttcgcgtcgcgtttcgttttttttcggtttcggttttttttcgtttagcgcggggaggcggggacgcgtcggcggcggaggtttttttagtcgcgttttttttatttattggggagttcggcggtggcggtatttttcgaggtagattcgttgagttgttagttcgtcggttagcgagtgagaggtcggatagattgtggagtcgatagattgaaggatagcggtatcgttagacggttagaaagtttcgttatgagttggggtacggagttgtgggtgagtcggggagaggggcgtttcgtacggatttcggtttttgagaagcgcgggttgggcgggcgtcgcggattttcggcggtgaaagcgcgtttcgtcgttttcggttcggcgttggcggagggtgagggtttcgttcgtttttgtgtgtagatttttttttttttttcggtcgggggtttagggggtcgttagttcgtgttttcgtttttgtcgtcgtggtgtagttcgggcggcgttcgggacggtcgggggagtagttcgcgggtttttgcgtgcgtcgtgatttttttttgtttttttttttttttttatttttatttttttcgacgtttggtttcgcgttcggcggtttttttttttttttgtattttttttttcggaggcgggggagggggtttattgtttttaaggggcgttgttcgagggcggggaggggatcggtcgcgatttttcgttcgggttaggttcgcggggttagggcgtcgttcgtttggggcggcgtcgtttagagttttcgttttaggtatggggatttaggcggttttgttcggagttcggtttcgggttagttaggtttagtttatacgtatattttt

SEQ ID NO: 30694 - DNA, 875 bp, Artificial Sequence
  chemically treated genomic DNA (Homo sapiens) CpG-island No: 30694
aaaaatatacgtataaactaaacctaactaacccgaaaccgaactccgaacaaaaccgcctaaatccccatacctaaaacgaaaactctaaacgacgccgccccaaacgaacgacgccctaaccccgcgaacctaacccgaacgaaaaatcgcgaccgatcccctccccgccctcgaacaacgccccttaaaaacaataaaccccctcccccgcctccgaaaaaaaaaatacaaaaaaaaaaaaaaaccgccgaacgcgaaaccaaacgtcgaaaaaaataaaaataaaaaaaaaaaaaaaaacaaaaaaaaatcacgacgcacgcaaaaacccgcgaactactcccccgaccgtcccgaacgccgcccgaactacaccacgacgacaaaaacgaaaacacgaactaacgaccccctaaacccccgaccgaaaaaaaaaaaaaaatctacacacaaaaacgaacgaaaccctcaccctccgccaacgccgaaccgaaaacgacgaaacgcgctttcaccgccgaaaatccgcgacgcccgcccaacccgcgcttctcaaaaaccgaaatccgtacgaaacgcccctctccccgactcacccacaactccgtaccccaactcataacgaaactttctaaccgtctaacgataccgctatccttcaatctatcgactccacaatctatccgacctctcactcgctaaccgacgaactaacaactcaacgaatctacctcgaaaaataccgccaccgccgaactccccaataaataaaaaaaacgcgactaaaaaaacctccgccgccgacgcgtccccgcctccccgcgctaaacgaaaaaaaaccgaaaccgaaaaaaaacgaaacgcgacgcgaa

SEQ ID NO: 30695 - DNA, 875 bp, Artificial Sequence
  chemically treated genomic DNA (Homo sapiens) CpG-island No: 30695
agaaatgtgcgtgtgggttgggtttggttggttcgaggtcgggtttcgaataaagtcgtttgggtttttatatttggggcgagggttttgggcggcgtcgttttagacgggcgacgttttagtttcgcggatttggttcgggcgaggaatcgcggtcggtttttttttcgttttcgaatagcgttttttggggataatgggttttttttttcgttttcgggaggagagatataaaggaagagaggagtcgtcgggcgcgaagttaggcgtcgggaaaagtgaaggtggaggagggagaaggaataagaggggattacggcgtacgtaggagttcgcgggttgttttttcggtcgtttcgggcgtcgttcgagttgtattacggcggtaaaggcgggagtacggattagcggttttttagattttcggtcgagaagggaagaggagtttgtatataaagacgagcgggatttttatttttcgttagcgtcggatcgaggacggcggagcgcgtttttatcgtcgagggttcgcggcgttcgtttaattcgcgttttttaggggtcggggttcgtgcggggcgttttttttttcgatttatttatagtttcgtgttttagtttatggcggaattttttggtcgtttggcggtgtcgttgttttttagtttgtcggttttatagtttgttcgattttttattcgttggtcggcgggttagtagtttagcgggtttatttcgaaaggtgtcgttatcgtcgggttttttagtgagtgagaaagacgcgattggagaagttttcgtcgtcgacgcgttttcgttttttcgcgttgggcgggagggggtcggggtcgaggggaggcggaacgcggcgcggg

SEQ ID NO: 30696 - DNA, 875 bp, Artificial Sequence
  chemically treated genomic DNA (Homo sapiens) CpG-island No: 30696
cccgcgccgcgttccgcctcccctcgaccccgaccccctcccgcccaacgcgaaaaaacgaaaacgcgtcgacgacgaaaacttctccaatcgcgtctttctcactcactaaaaaacccgacgataacgacacctttcgaaataaacccgctaaactactaacccgccgaccaacgaataaaaaatcgaacaaactataaaaccgacaaactaaaaaacaacgacaccgccaaacgaccaaaaaattccgccataaactaaaacacgaaactataaataaatcgaaaaaaaaaacgccccgcacgaaccccgacccctaaaaaacgcgaattaaacgaacgccgcgaaccctcgacgataaaaacgcgctccgccgtcctcgatccgacgctaacgaaaaataaaaatcccgctcgtctttatatacaaactcctcttcccttctcgaccgaaaatctaaaaaaccgctaatccgtactcccgcctttaccgccgtaatacaactcgaacgacgcccgaaacgaccgaaaaaacaacccgcgaactcctacgtacgccgtaatcccctcttattccttctccctcctccaccttcacttttcccgacgcctaacttcgcgcccgacgactcctctcttcctttatatctctcctcccgaaaacgaaaaaaaaaacccattatccccaaaaaacgctattcgaaaacgaaaaaaaaaccgaccgcgattcctcgcccgaaccaaatccgcgaaactaaaacgtcgcccgtctaaaacgacgccgcccaaaaccctcgccccaaatataaaaacccaaacgactttattcgaaacccgacctcgaaccaaccaaacccaacccacacgcacatttct

SEQ ID NO: 30697 - DNA, 1281 bp, Artificial Sequence
  chemically treated genomic DNA (Homo sapiens) CpG-island No: 30697
cgcgcgttattgttatattttaggcgttcgttacgtcgttaggtgtgttcggtcgattcggaagtagcggtatttttagtgcgttgcggagacgttattttgtcgcggtataggggcgggagcgtttgtggttttgcgtatttgcgttattacgtaggttggcggggtttcgtgatggggaggtgacgtaggcgatacggaagcggcggtgggcggggatagggagttagcggaatttagtttcgttttttaaagttttttaattttttcggagttagcgtagcgcgaacgttgggtgcggcgtttttaagcgtcgcggtgatacgtgtgtgaggcgtcggaggttcggatggtgcgcgtgttgggtcgcgggtcgaaggagtcgttagggttgcgtaggtttgtggcgcgttcgcggagaggtcggggtaggttggggtcgggtcggggcggtgcgtaggtttggggacgagatcggggcggggggtttcgcgaggtttggggcgcgggaagggttggcgggcgtagtcgggacgtttagggagaacgtgggcgcgggttcgcgtagggtttcggtcgttttcgaggaggattcgggatgtttcgttcgttcgcgagttcgtttttttagagttcgggtattttcgaggagggttcggggtcgggttgttttcgtcggttttcgtcgtttttcgggtttcgggtcggtgatgggggtcgtcggggttcgttgtttgtgtaggatttaggttaatttcggagaggttgaagtcggaattagggcgagggcgtcgcgtgcggtcgtagagtttagcggggcgggtgcggtttcggggcgggtatttttttcgtggttgcggaggaggttatggagttcggggcggggtgcggtttcgatgttgttgtttttggcgggtggcgtgggggttttgggtttggggttggagtggcggtcgttaaatttagatatacgagaggggagatttcgcgcgttttcgtttacgtaacgttcgttacggagttatgttcggggagaggtgttcgggtcgttgtgttcgcggtcgggttcggggtaggcgttgcggagtcgttcgggaggtttttggagcgcggcgttgggtttcgggaggtcgttgttttcgtgggtttttttttttagtacgtggttgattttgcgagcgttcgttgtagtttattttggaaaagtgattttagaaggaggagggagcgggaatgagtttaaatggtgttggttggggttcgcgtaggtggaaatgtgga

SEQ ID NO: 30698 - DNA, 1281 bp, Artificial Sequence
  chemically treated genomic DNA (Homo sapiens) CpG-island No: 30698
tccacatttccacctacgcgaaccccaaccaacaccatttaaactcattcccgctccctcctccttctaaaatcacttttccaaaataaactacaacgaacgctcgcaaaatcaaccacgtactaaaaaaaaaaacccacgaaaacaacgacctcccgaaacccaacgccgcgctccaaaaacctcccgaacgactccgcaacgcctaccccgaacccgaccgcgaacacaacgacccgaacacctctccccgaacataactccgtaacgaacgttacgtaaacgaaaacgcgcgaaatctcccctctcgtatatctaaatttaacgaccgccactccaaccccaaacccaaaacccccacgccacccgccaaaaacaacaacatcgaaaccgcaccccgccccgaactccataacctcctccgcaaccacgaaaaaaatacccgccccgaaaccgcacccgccccgctaaactctacgaccgcacgcgacgccctcgccctaattccgacttcaacctctccgaaattaacctaaatcctacacaaacaacgaaccccgacgacccccatcaccgacccgaaacccgaaaaacgacgaaaaccgacgaaaacaacccgaccccgaaccctcctcgaaaatacccgaactctaaaaaaacgaactcgcgaacgaacgaaacatcccgaatcctcctcgaaaacgaccgaaaccctacgcgaacccgcgcccacgttctccctaaacgtcccgactacgcccgccaacccttcccgcgccccaaacctcgcgaaaccccccgccccgatctcgtccccaaacctacgcaccgccccgacccgaccccaacctaccccgacctctccgcgaacgcgccacaaacctacgcaaccctaacgactccttcgacccgcgacccaacacgcgcaccatccgaacctccgacgcctcacacacgtatcaccgcgacgcttaaaaacgccgcacccaacgttcgcgctacgctaactccgaaaaaattaaaaaactttaaaaaacgaaactaaattccgctaactccctatccccgcccaccgccgcttccgtatcgcctacgtcacctccccatcacgaaaccccgccaacctacgtaataacgcaaatacgcaaaaccacaaacgctcccgcccctataccgcgacaaaataacgtctccgcaacgcactaaaaataccgctacttccgaatcgaccgaacacacctaacgacgtaacgaacgcctaaaatataacaataacgcgcg

SEQ ID NO: 30699 - DNA, 1281 bp, Artificial Sequence
  chemically treated genomic DNA (Homo sapiens) CpG-island No: 30699
tttatatttttatttgcgcgaattttagttagtattatttaggtttattttcgtttttttttttttttaaagttatttttttaggatgaattgtaacggacgttcgtagggttaattacgtgttggggagaggagtttacggaagtagcggtttttcggggtttagcgtcgcgttttaggggtttttcgggcgatttcgtagcgtttgtttcgagttcggtcgcggatatagcgattcgagtattttttttcgagtatggtttcgtggcgagcgttacgtaaacgggggcgcgcggagttttttttttcgtgtgtttgggtttggcggtcgttattttagttttaggtttaggatttttacgttattcgttagaagtagtagtatcggaatcgtatttcgtttcgggttttatggtttttttcgtaattacgaggaaggtgttcgtttcggggtcgtattcgtttcgttgagttttgcggtcgtacgcgacgttttcgttttgatttcgattttaattttttcgaagttgatttgaattttgtatagatagcgggtttcggcgatttttattatcggttcggagttcgggggacggcggagatcggcgaggatagttcggtttcggatttttttcgggaatattcgggttttggagaagcgagttcgcgagcgggcggagtatttcgggtttttttcggggacggtcgaagttttgcgcggattcgcgtttacgttttttttgagcgtttcggttgcgttcgttagtttttttcgcgttttaggtttcgcggaatttttcgtttcggtttcgtttttaggtttgcgtatcgtttcgattcgattttagtttatttcggttttttcgcgggcgcgttataagtttacgtagttttggcgattttttcggttcgcggtttagtacgcgtattattcgggttttcggcgttttatatacgtgttatcgcgacgtttaaaggcgtcgtatttagcgttcgcgttgcgttaatttcgaaagggttgggaggttttaagaggcggggttagatttcgttaattttttgttttcgtttatcgtcgttttcgtgtcgtttacgttatttttttattacgggatttcgttagtttacgtgatgacgtaagtgcgtagagttataggcgttttcgtttttgtgtcgcggtagggtgacgttttcgtagcgtattagaggtgtcgttattttcgggtcggtcgagtatatttggcggcgtggcggacgtttgaagtgtgatagtggcgcgcg

SEQ ID NO: 30700 - DNA, 1281 bp, Artificial Sequence
  chemically treated genomic DNA (Homo sapiens) CpG-island No: 30700
cgcgcgccactatcacacttcaaacgtccgccacgccgccaaatatactcgaccgacccgaaaataacgacacctctaatacgctacgaaaacgtcaccctaccgcgacacaaaaacgaaaacgcctataactctacgcacttacgtcatcacgtaaactaacgaaatcccgtaataaaaaaataacgtaaacgacacgaaaacgacgataaacgaaaacaaaaaattaacgaaatctaaccccgcctcttaaaacctcccaaccctttcgaaattaacgcaacgcgaacgctaaatacgacgcctttaaacgtcgcgataacacgtatataaaacgccgaaaacccgaataatacgcgtactaaaccgcgaaccgaaaaaatcgccaaaactacgtaaacttataacgcgcccgcgaaaaaaccgaaataaactaaaatcgaatcgaaacgatacgcaaacctaaaaacgaaaccgaaacgaaaaattccgcgaaacctaaaacgcgaaaaaaactaacgaacgcaaccgaaacgctcaaaaaaaacgtaaacgcgaatccgcgcaaaacttcgaccgtccccgaaaaaaacccgaaatactccgcccgctcgcgaactcgcttctccaaaacccgaatattcccgaaaaaaatccgaaaccgaactatcctcgccgatctccgccgtcccccgaactccgaaccgataataaaaatcgccgaaacccgctatctatacaaaattcaaatcaacttcgaaaaaattaaaatcgaaatcaaaacgaaaacgtcgcgtacgaccgcaaaactcaacgaaacgaatacgaccccgaaacgaacaccttcctcgtaattacgaaaaaaaccataaaacccgaaacgaaatacgattccgatactactacttctaacgaataacgtaaaaatcctaaacctaaaactaaaataacgaccgccaaacccaaacacacgaaaaaaaaaactccgcgcgcccccgtttacgtaacgctcgccacgaaaccatactcgaaaaaaaatactcgaatcgctatatccgcgaccgaactcgaaacaaacgctacgaaatcgcccgaaaaacccctaaaacgcgacgctaaaccccgaaaaaccgctacttccgtaaactcctctccccaacacgtaattaaccctacgaacgtccgttacaattcatcctaaaaaaataactttaaaaaaaaaaaaaaacgaaaataaacctaaataatactaactaaaattcgcgcaaataaaaatataaa

SEQ ID NO: 30701 - DNA, 1210 bp, Artificial Sequence
  chemically treated genomic DNA (Homo sapiens) CpG-island No: 30701
gagcggcgtttttatcgcggtgtttttcgggttttatattcgcgtttcggtaggcggcgacgtatcggatcggcggttatcgggtttagattttcgcgggtagggtcgtttcggagttcgcgtttcgtcggcggcgtcgtttttcgtttttatttttgaataaagacgtggatcgggtataattcgttgacgtcgagagcggtcggaaattgcggggaacgcgggttcggttattcgcgcgttcgtttcgagtttcgtagaggggcggtagggttagcgatttttatttttcggtttttcgggattcggattgcgatttttgtttcggggattttagcgattttaacgatttttattttttagagtttttgagattttgtttcgcgattttaacgatttttattttttagagttcgcggcgatttttggtttcgcgagatcgcgagttcggtttgtgattttcgttttagttatttatattttttagcgtcgttagcgatttcggtttcggcgatttttattttttaaaattttttgcgattttcgtttcgcgagggtttcgcgtatcgttcgttcgtcggtcgtttcgggtttcgcgtttcgtattagtgttttcgggaaacgttagtcgtcgtaagcgttgtcggacggtcgggttcggaggggattgggggatagcgagggggaagcgttcgtcgtcggggcgtattgatcgtagttgtcgtttttttttatggtgcgggagtcgggtttcgcgtttcggttcgtcgttcgcgtttcgtcgcgttattcgcgttttcgttcgttttagttcggttcggagtttcgttttcggcgtttcgcgtttcgcgtttcgttcgttcgcgtttgcgtttgcgttcgttttttgttttcggttcgaggtttcgtttttcgttcgaggtttcgtttttttttcgcgcgcgtcgtatttcgggtattcggttttttttcgaggtttcggtttgcgtacgcgcgtttattcgaggttttttttttgttttcgtttttagattacgttttcgtttcgagatatatatattttttttttttttttcggttcgttttttggggtcgagtaggtttcggtttttgaagggcggtgtaagttttcggggtggcggattcgatttggtttgtagttaggttattgtacgaaagtttaaggtcgtgttcggttattgaagggtag

SEQ ID NO: 30702 - DNA, 1210 bp, Artificial Sequence
  chemically treated genomic DNA (Homo sapiens) CpG-island No: 30702
ctacccttcaataaccgaacacgaccttaaactttcgtacaataacctaactacaaaccaaatcgaatccgccaccccgaaaacttacaccgcccttcaaaaaccgaaacctactcgaccccaaaaaacgaaccgaaaaaaaaaaaaaaaatatatatatctcgaaacgaaaacgtaatctaaaaacgaaaacaaaaaaaaaacctcgaataaacgcgcgtacgcaaaccgaaacctcgaaaaaaaaccgaatacccgaaatacgacgcgcgcgaaaaaaaaacgaaacctcgaacgaaaaacgaaacctcgaaccgaaaacaaaaaacgaacgcaaacgcaaacgcgaacgaacgaaacgcgaaacgcgaaacgccgaaaacgaaactccgaaccgaactaaaacgaacgaaaacgcgaataacgcgacgaaacgcgaacgacgaaccgaaacgcgaaacccgactcccgcaccataaaaaaaaacgacaactacgatcaatacgccccgacgacgaacgcttccccctcgctatcccccaatcccctccgaacccgaccgtccgacaacgcttacgacgactaacgtttcccgaaaacactaatacgaaacgcgaaacccgaaacgaccgacgaacgaacgatacgcgaaaccctcgcgaaacgaaaatcgcaaaaaattttaaaaaataaaaatcgccgaaaccgaaatcgctaacgacgctaaaaaatataaataactaaaacgaaaatcacaaaccgaactcgcgatctcgcgaaaccaaaaatcgccgcgaactctaaaaaataaaaatcgttaaaatcgcgaaacaaaatctcaaaaactctaaaaaataaaaatcgttaaaatcgctaaaatccccgaaacaaaaatcgcaatccgaatcccgaaaaaccgaaaaataaaaatcgctaaccctaccgcccctctacgaaactcgaaacgaacgcgcgaataaccgaacccgcgttccccgcaatttccgaccgctctcgacgtcaacgaattatacccgatccacgtctttattcaaaaataaaaacgaaaaacgacgccgccgacgaaacgcgaactccgaaacgaccctacccgcgaaaatctaaacccgataaccgccgatccgatacgtcgccgcctaccgaaacgcgaatataaaacccgaaaaacaccgcgataaaaacgccgctc

SEQ ID NO: 30703 - DNA, 1210 bp, Artificial Sequence
  chemically treated genomic DNA (Homo sapiens) CpG-island No: 30703
ttgttttttagtggtcggatacgattttgggttttcgtgtagtagtttggttgtaggttaggtcgagttcgttatttcggggatttgtatcgttttttagaaatcgaaatttgttcggttttaggaggcggatcgggagaaggggggggggtgtgtgtgtttcgggacgggggcgtggtttagaggcgggggtaggggaggagtttcgggtggacgcgcgtgcgtaggtcggagtttcgggaggaggtcgggtattcggggtgcggcgcgcgcgggaggaaggcggggtttcgggcgaggggcggggtttcgggtcgggggtagggggcgggcgtaggcgtaggcgcgggcgggcggggcgcggggcgcggggcgtcgggggcggggtttcgagtcgggttgaggcgagcgggggcgcgggtggcgcggcgggacgcgagcggcgagtcggagcgcggagttcggttttcgtattatggaggaggacgatagttacggttagtgcgtttcggcggcggacgtttttttttcgttgttttttagtttttttcgggttcggtcgttcggtagcgtttgcggcggttggcgtttttcggggatattggtgcgggacgcggagttcggggcgatcggcgggcgagcggtgcgcggggttttcgcggggcgggggtcgtagggggttttgagggatgagggtcgtcggggtcggggtcgttggcggcgttgagggatgtgggtggttggggcgggggttataggtcgggttcgcggtttcgcggggttaggggtcgtcgcgagttttgaggaatgagggtcgttggggtcgcggggtaggattttaggggttttgagggatgagagtcgttggggtcgttggggttttcggggtaggggtcgtagttcgggtttcggggggtcgaggggtggaggtcgttggttttgtcgtttttttgcggggttcggggcggacgcgcggatggtcgggttcgcgtttttcgtagttttcggtcgttttcggcgttagcgagttgtgttcggtttacgtttttgtttagaaatgagaacggggagcggcgtcgtcggcgaggcgcgggtttcgggacggttttgttcgcgggagtttgggttcggtagtcgtcggttcggtgcgtcgtcgtttgtcgagacgcgggtgtggagttcgaggggtatcgcggtggggacgtcgttt

SEQ ID NO: 30704 - DNA, 1210 bp, Artificial Sequence
  chemically treated genomic DNA (Homo sapiens) CpG-island No: 30704
aaacgacgtccccaccgcgatacccctcgaactccacacccgcgtctcgacaaacgacgacgcaccgaaccgacgactaccgaacccaaactcccgcgaacaaaaccgtcccgaaacccgcgcctcgccgacgacgccgctccccgttctcatttctaaacaaaaacgtaaaccgaacacaactcgctaacgccgaaaacgaccgaaaactacgaaaaacgcgaacccgaccatccgcgcgtccgccccgaaccccgcaaaaaaacgacaaaaccaacgacctccacccctcgaccccccgaaacccgaactacgacccctaccccgaaaaccccaacgaccccaacgactctcatccctcaaaacccctaaaatcctaccccgcgaccccaacgaccctcattcctcaaaactcgcgacgacccctaaccccgcgaaaccgcgaacccgacctataacccccgccccaaccacccacatccctcaacgccgccaacgaccccgaccccgacgaccctcatccctcaaaaccccctacgacccccgccccgcgaaaaccccgcgcaccgctcgcccgccgatcgccccgaactccgcgtcccgcaccaatatccccgaaaaacgccaaccgccgcaaacgctaccgaacgaccgaacccgaaaaaaactaaaaaacaacgaaaaaaaaacgtccgccgccgaaacgcactaaccgtaactatcgtcctcctccataatacgaaaaccgaactccgcgctccgactcgccgctcgcgtcccgccgcgccacccgcgcccccgctcgcctcaacccgactcgaaaccccgcccccgacgccccgcgccccgcgccccgcccgcccgcgcctacgcctacgcccgccccctacccccgacccgaaaccccgcccctcgcccgaaaccccgccttcctcccgcgcgcgccgcaccccgaatacccgacctcctcccgaaactccgacctacgcacgcgcgtccacccgaaactcctcccctacccccgcctctaaaccacgcccccgtcccgaaacacacacaccccccccccttctcccgatccgcctcctaaaaccgaacaaatttcgatttctaaaaaacgatacaaatccccgaaataacgaactcgacctaacctacaaccaaactactacacgaaaacccaaaatcgtatccgaccactaaaaaacaa

SEQ ID NO: 30705 - DNA, 869 bp, Artificial Sequence
  chemically treated genomic DNA (Homo sapiens) CpG-island No: 30705
gcgcgtgacgggcgcgcgtgacgtcgagggggtaggtttgagaagtaggttgcgtcgggattcggcggtcggttttcgcggaaggggcgggttaggttagggggcggtgtttaatgggagttggttttggggtcgggttttcgcgtgcgttggtttggcggcgagagcgcgcggcgggggcgtgttcggcgggcggggcggggttagtcgggggcggggcggggcgcggtttaacggcggcggcggcggcggcgacggcgatagtagcggtggtggtgtttggttagttcggcggttgtagatttcgcggcgacgtttgcgagggattcgggtcgcgggtcgaggcgggcggcgtttgcgagggattcgtgtcgcgggtagaggcgggcggcgcgcggcggcggcgttcggcgatggtaggcgtttttggagcggtcgttttttagcgtaagtggggcgtgaatgcgggcggtcgaggggggcgtgtgagggtttgcggtttcgtaggcgcggtgatttcgagtgtttcgggcgcgaggtcgggagtggaaattgaggttcgaagcggggcggcggatttaaggttacgtagcggggcgggttttttcgggtttttgaggttatttcgtcgttttttgcgtcgttcgaagagttcggggtttacggtgtgagggaaattgtggggttcgcggtttcggaatttaggtcgggtcggcgtttatgggatttgtcggcgggtaagaattattttgttgttttagcgttggggttacgaagttcggtttttggggaaatattatattcgttcgatgttgagggttggaggagatgagaatggtttttcggagggtttgtttgagcgtaggttt

SEQ ID NO: 30706 - DNA, 869 bp, Artificial Sequence
  chemically treated genomic DNA (Homo sapiens) CpG-island No: 30706
aaacctacgctcaaacaaaccctccgaaaaaccattctcatctcctccaaccctcaacatcgaacgaatataatatttccccaaaaaccgaacttcgtaaccccaacgctaaaacaacaaaataattcttacccgccgacaaatcccataaacgccgacccgacctaaattccgaaaccgcgaaccccacaatttccctcacaccgtaaaccccgaactcttcgaacgacgcaaaaaacgacgaaataacctcaaaaacccgaaaaaacccgccccgctacgtaaccttaaatccgccgccccgcttcgaacctcaatttccactcccgacctcgcgcccgaaacactcgaaatcaccgcgcctacgaaaccgcaaaccctcacacgcccccctcgaccgcccgcattcacgccccacttacgctaaaaaacgaccgctccaaaaacgcctaccatcgccgaacgccgccgccgcgcgccgcccgcctctacccgcgacacgaatccctcgcaaacgccgcccgcctcgacccgcgacccgaatccctcgcaaacgtcgccgcgaaatctacaaccgccgaactaaccaaacaccaccaccgctactatcgccgtcgccgccgccgccgccgccgttaaaccgcgccccgccccgcccccgactaaccccgccccgcccgccgaacacgcccccgccgcgcgctctcgccgccaaaccaacgcacgcgaaaacccgaccccaaaaccaactcccattaaacaccgccccctaacctaacccgccccttccgcgaaaaccgaccgccgaatcccgacgcaacctacttctcaaacctaccccctcgacgtcacgcgcgcccgtcacgcgc

SEQ ID NO: 30707 - DNA, 869 bp, Artificial Sequence
  chemically treated genomic DNA (Homo sapiens) CpG-island No: 30707
gagtttgcgtttaaataggtttttcgaggggttatttttattttttttaatttttaatatcgggcgggtgtagtatttttttaggagtcggatttcgtggttttagcgttgggataataaaatgatttttgttcgtcggtaagttttatggacgtcggttcggtttaagtttcgaggtcgcgggttttataattttttttatatcgtgagtttcgagtttttcgggcggcgtaggaagcgacggggtggttttaggagttcgggaaggttcgtttcgttgcgtgattttggattcgtcgtttcgtttcgggttttagtttttattttcggtttcgcgttcggggtattcggaattatcgcgtttgcggagtcgtaggtttttatacgtttttttcggtcgttcgtatttacgttttatttacgttggaaggcggtcgttttagggacgtttattatcgtcgagcgtcgtcgtcgcgcgtcgttcgtttttattcgcgatacgggtttttcgtaggcgtcgttcgtttcgattcgcggttcgggtttttcgtaggcgtcgtcgcgagatttgtagtcgtcgagttaattagatattattatcgttgttgtcgtcgtcgtcgtcgtcgtcgtcgtcgttaggtcgcgtttcgtttcgttttcggttggtttcgtttcgttcgtcgggtacgttttcgtcgcgcgttttcgtcgttaggttaacgtacgcggaagttcggttttaagattagtttttattaagtatcgttttttaatttgattcgtttttttcgcgggaatcgatcgtcgaatttcggcgtagtttgttttttagatttgttttttcggcgttacgcgcgttcgttacgcgt

SEQ ID NO: 30708 - DNA, 869 bp, Artificial Sequence
  chemically treated genomic DNA (Homo sapiens) CpG-island No: 30708
acgcgtaacgaacgcgcgtaacgccgaaaaaacaaatctaaaaaacaaactacgccgaaattcgacgatcgattcccgcgaaaaaaacgaatcaaattaaaaaacgatacttaataaaaactaatcttaaaaccgaacttccgcgtacgttaacctaacgacgaaaacgcgcgacgaaaacgtacccgacgaacgaaacgaaaccaaccgaaaacgaaacgaaacgcgacctaacgacgacgacgacgacgacgacgacgacaacaacgataataatatctaattaactcgacgactacaaatctcgcgacgacgcctacgaaaaacccgaaccgcgaatcgaaacgaacgacgcctacgaaaaacccgtatcgcgaataaaaacgaacgacgcgcgacgacgacgctcgacgataataaacgtccctaaaacgaccgccttccaacgtaaataaaacgtaaatacgaacgaccgaaaaaaacgtataaaaacctacgactccgcaaacgcgataattccgaataccccgaacgcgaaaccgaaaataaaaactaaaacccgaaacgaaacgacgaatccaaaatcacgcaacgaaacgaaccttcccgaactcctaaaaccaccccgtcgcttcctacgccgcccgaaaaactcgaaactcacgatataaaaaaaattataaaacccgcgacctcgaaacttaaaccgaaccgacgtccataaaacttaccgacgaacaaaaatcattttattatcccaacgctaaaaccacgaaatccgactcctaaaaaaatactacacccgcccgatattaaaaattaaaaaaaataaaaataacccctcgaaaaacctatttaaacgcaaactc

SEQ ID NO: 30709 - DNA, 527 bp, Artificial Sequence
  chemically treated genomic DNA (Homo sapiens) CpG-island No: 30709
ggagttttttagtagggattatttttagtaatgcggtagcggtcgttttatgatatattaattattatttgtttttttttttcgtcgcggttataggaggcgttgcgggtgggcggtgaggtgggatcgcgggcggatttgtggggcggggggcgggggtattgtggaatacgagtggaggtggagggggcgcggttcgtcgaagtgtttttttgggtgtttagtttggttttttcggggttcggggttgcgtatcgtcgtgcgtttttcgtagaggttttgtcgatgtcgtatcgtttcgtatcgcgataaaagtttttttcggttttaatattataatcgttaagcgtggtttttgatattttcgttggcgttttcgttcgcgcgtttttttttcgtgttaaggtatacgtatacgtatcgatttatttattgttttttattttaggtgttaaaatttttcgaagtaggtgtagtttttcgttcggtaggtttaggttggttcggcgttttttcgtttattttat

SEQ ID NO: 30710 - DNA, 527 bp, Artificial Sequence
  chemically treated genomic DNA (Homo sapiens) CpG-island No: 30710
ataaaataaacgaaaaaacgccgaaccaacctaaacctaccgaacgaaaaactacacctacttcgaaaaattttaacacctaaaataaaaaacaataaataaatcgatacgtatacgtataccttaacacgaaaaaaaaacgcgcgaacgaaaacgccaacgaaaatatcaaaaaccacgcttaacgattataatattaaaaccgaaaaaaacttttatcgcgatacgaaacgatacgacatcgacaaaacctctacgaaaaacgcacgacgatacgcaaccccgaaccccgaaaaaaccaaactaaacacccaaaaaaacacttcgacgaaccgcgccccctccacctccactcgtattccacaatacccccgccccccgccccacaaatccgcccgcgatcccacctcaccgcccacccgcaacgcctcctataaccgcgacgaaaaaaaaaaacaaataataattaatatatcataaaacgaccgctaccgcattactaaaaataatccctactaaaaaactcc

SEQ ID NO: 30711 - DNA, 527 bp, Artificial Sequence
  chemically treated genomic DNA (Homo sapiens) CpG-island No: 30711
ataaggtgagcgagggggcgtcgggttagtttggatttgtcgggcgaggggttgtatttgtttcgagaagttttggtatttgggatggaaagtaatgagtgggtcggtgcgtgtgcgtgtgttttggtacggggggagggcgcgcgaacgaagacgttagcgggagtgttagagattacgtttggcgattgtgatgttggaatcgggaagggtttttgtcgcggtgcggggcggtgcgatatcggtagagtttttgcggagggcgtacggcggtgcgtagtttcggatttcggagggattaggttgggtatttaggggggtatttcggcgagtcgcgttttttttatttttattcgtgttttataatattttcgtttttcgttttatagattcgttcgcgattttattttatcgtttattcgtagcgttttttgtgatcgcggcgagggggagaggtaaatagtaattaatatgttatggggcggtcgttgtcgtattgttaagaataatttttgttggagagtttt

SEQ ID NO: 30712 - DNA, 527 bp, Artificial Sequence
  chemically treated genomic DNA (Homo sapiens) CpG-island No: 30712
aaaactctccaacaaaaattattcttaacaatacgacaacgaccgccccataacatattaattactatttacctctccccctcgccgcgatcacaaaaaacgctacgaataaacgataaaataaaatcgcgaacgaatctataaaacgaaaaacgaaaatattataaaacacgaataaaaataaaaaaaacgcgactcgccgaaatacccccctaaatacccaacctaatccctccgaaatccgaaactacgcaccgccgtacgccctccgcaaaaactctaccgatatcgcaccgccccgcaccgcgacaaaaacccttcccgattccaacatcacaatcgccaaacgtaatctctaacactcccgctaacgtcttcgttcgcgcgccctccccccgtaccaaaacacacgcacacgcaccgacccactcattactttccatcccaaataccaaaacttctcgaaacaaatacaacccctcgcccgacaaatccaaactaacccgacgccccctcgctcaccttat

SEQ ID NO: 30713 - DNA, 672 bp, Artificial Sequence
  chemically treated genomic DNA (Homo sapiens) CpG-island No: 30713
ttttttcggtgggatatacgattttttcgtaacgggcgtattgggggtttatgatcgcggttttcgggggcggcggcggcggcggttgttggtttttaggagtcgttgtgatatttttcggcgagtttcgtatcgttttttggtaggcgggagggttgcgggcggcgggcgtcgggtagggagtcggcgtcgggttacgggtgagtgtacggggagggcgacggggtttggcgtttggggtcggtcgcgttttcgggttcgtaggcgttgggtttcggtttcggtttcggtttcgcgtcgttggttttgcgtcgttcgtattttaggtacgggtgatttatatagttattcgcgttcgtttttcgcgtttattcgttttttcgtttcgtcgtcgtcgtcgcgtaggttaaatttatcggcgcgttcggatcgaagtggtagggaacgtgtacgtcgggtattttgggagggagggcgtagcgggggagggggcgggtagagattcggaaagtttcgtagatcgtcgtgggtgcgattgtgcggtttggggagtgagtttcgcgttatcgtcgttgtaggtcggggagtttaggtgggcggcggttggggagggagggatttaggcgggggaggtgataaatatcggtggggagagtgtttaaattcgcgtat

SEQ ID NO: 30714 - DNA, 672 bp, Artificial Sequence
  chemically treated genomic DNA (Homo sapiens) CpG-island No: 30714
atacgcgaatttaaacactctccccaccgatatttatcacctcccccgcctaaatccctccctccccaaccgccgcccacctaaactccccgacctacaacgacgataacgcgaaactcactccccaaaccgcacaatcgcacccacgacgatctacgaaactttccgaatctctacccgccccctcccccgctacgccctccctcccaaaatacccgacgtacacgttccctaccacttcgatccgaacgcgccgataaatttaacctacgcgacgacgacgacgaaacgaaaaaacgaataaacgcgaaaaacgaacgcgaataactatataaatcacccgtacctaaaatacgaacgacgcaaaaccaacgacgcgaaaccgaaaccgaaaccgaaacccaacgcctacgaacccgaaaacgcgaccgaccccaaacgccaaaccccgtcgccctccccgtacactcacccgtaacccgacgccgactccctacccgacgcccgccgcccgcaaccctcccgcctaccaaaaaacgatacgaaactcgccgaaaaatatcacaacgactcctaaaaaccaacaaccgccgccgccgccgcccccgaaaaccgcgatcataaacccccaatacgcccgttacgaaaaaatcgtatatcccaccgaaaaaa

SEQ ID NO: 30715 - DNA, 672 bp, Artificial Sequence
  chemically treated genomic DNA (Homo sapiens) CpG-island No: 30715
gtacgcgggtttgagtattttttttatcggtgtttgttatttttttcgtttggatttttttttttttagtcgtcgtttatttgggtttttcggtttgtagcggcggtggcgcgaggtttattttttaggtcgtatagtcgtatttacggcggtttgcggagtttttcgggtttttgttcgttttttttttcgttgcgtttttttttttagggtgttcgacgtgtacgttttttgttatttcggttcgggcgcgtcggtgggtttggtttgcgcggcggcggcggcgaggcgggggagcgagtgagcgcgaggggcgggcgcgagtgattgtgtgagttattcgtatttggagtgcgagcgacgtagagttagcggcgcggagtcggagtcggagtcgagatttagcgtttgcgagttcgagagcgcggtcggttttaggcgttaggtttcgtcgtttttttcgtgtatttattcgtggttcggcgtcgattttttattcggcgttcgtcgttcgtagttttttcgtttgttaggaggcggtgcggggttcgtcgggggatgttatagcggtttttgggagttagtagtcgtcgtcgtcgtcgttttcgggaatcgcgattatgaatttttagtgcgttcgttgcggaaaagtcgtgtattttatcgagaaag

SEQ ID NO: 30716 - DNA, 672 bp, Artificial Sequence
  chemically treated genomic DNA (Homo sapiens) CpG-island No: 30716
ctttctcgataaaatacacgacttttccgcaacgaacgcactaaaaattcataatcgcgattcccgaaaacgacgacgacgacgactactaactcccaaaaaccgctataacatcccccgacgaaccccgcaccgcctcctaacaaacgaaaaaactacgaacgacgaacgccgaataaaaaatcgacgccgaaccacgaataaatacacgaaaaaaacgacgaaacctaacgcctaaaaccgaccgcgctctcgaactcgcaaacgctaaatctcgactccgactccgactccgcgccgctaactctacgtcgctcgcactccaaatacgaataactcacacaatcactcgcgcccgcccctcgcgctcactcgctcccccgcctcgccgccgccgccgcgcaaaccaaacccaccgacgcgcccgaaccgaaataacaaaaaacgtacacgtcgaacaccctaaaaaaaaaaacgcaacgaaaaaaaaaacgaacaaaaacccgaaaaactccgcaaaccgccgtaaatacgactatacgacctaaaaaataaacctcgcgccaccgccgctacaaaccgaaaaacccaaataaacgacgactaaaaaaaaaaaaatccaaacgaaaaaaataacaaacaccgataaaaaaaatactcaaacccgcgtac

SEQ ID NO: 30717 - DNA, 1594 bp, Artificial Sequence
  chemically treated genomic DNA (Homo sapiens) CpG-island No: 30717
ggtttcgggacggttgttttttgcgtgcggtcgcgggattgcggataaagttgtagtgtggtcgggagcgcggggtcgggagcgcggggtcggttcggcggtaggaagggcgtggtcgtggggtgtagcgaggacggttcgtgcgggaggaacgtgcgtagcgtggagtttgggggtcgagaagtttttattgtaaggttggttttcgagattcgcgttcgggcgtcgcggtgcgggaagcggtcgttttcgcggggacgtttttgcgtcgggtgttaggtgcggattacgggtagtttcggtttcgcgggcgtcgggcgggggtttacgtttttttcgttcgttagttttagtcgtagatcgcgcgggcggggcgttcgagagggttttttttttttttggttaaatttcggttacgtgaatcgttttttatttatttttgcgttaatcgcgcggcgcggacggatttcgagaggggttacggttcgtcgtcggcggggttattttataacgcgtcgtgcgtgacgtgaggggtttttgttgtaatggcgagttaagtcggaggatgtgtagttgcggcggcggcgtcggttacgaagaggacggggataggcgtcgtgcgaatcgagtttagttagtcggaggacgcgggtagggcgggacgggagttcggattcgtttgtcgtcgtcgtcgtcgtcgtcgtgtcggtttcgcgttttcgcgcgcgagcgggaggagtcgtcgttatttcgcgttcgagtcgtcgttagcgcgcgtcgggtatggtttttttttaaaggcgtaggtcgcggcggcgggggcgggcgtgcggaataaagcgtcggcgcggggtttgcgggcggttcgggggtcgcgatgggcgcggcgggttcgcggcggcggcggcgttgttcgggtcgggtttcgcggcgttagggcgggttggttttcgcgggcgggggtagcgggttgagggcgcgcggagtttgcggcggcggttcggcgggcggagcggcgcgggtatggtcgcgcgcggtcggcgcgtttggtttagcgtgttgttcgggttcgttttgggtttcgtgttggtttcgcggttcgttttgtttcgggttttcgagttgaagcgagcgggtttacggcgtcgcgttagtttcgagggttgtcggttcgggtaggcggcggttttttaggtcggcggggcgcgcggcgatgcgcgcggggcgtagttttggtcgttcggttcggatttagatggcggttcgcgcgataggaatttttttttcgtgggagttatgatcgtttagaaatatttgtagattcgggtcgtggtcgtttataggtgagtttttgtttttcgggtatcgttttttgcgttcggtatttcggcggtcggtatttcgggtgtttttttggttttcgttttcgttcgttttttaggttttttttgggttttcggcgggatcgggttgtttttcgggagacgtcgggtcgagggagaaaagattagaggcgggatggtgagcgcggcgtttaggaatatggtttttggggttagatggattagtgtggtttcgttgggtgtatttttta

SEQ ID NO: 30718 - DNA, 1594 bp, Artificial Sequence
  chemically treated genomic DNA (Homo sapiens) CpG-island No: 30718
taaaaaatacacccaacgaaaccacactaatccatctaaccccaaaaaccatattcctaaacgccgcgctcaccatcccgcctctaatcttttctccctcgacccgacgtctcccgaaaaacaacccgatcccgccgaaaacccaaaaaaaacctaaaaaacgaacgaaaacgaaaaccaaaaaaacacccgaaataccgaccgccgaaataccgaacgcaaaaaacgatacccgaaaaacaaaaactcacctataaacgaccacgacccgaatctacaaatatttctaaacgatcataactcccacgaaaaaaaaattcctatcgcgcgaaccgccatctaaatccgaaccgaacgaccaaaactacgccccgcgcgcatcgccgcgcgccccgccgacctaaaaaaccgccgcctacccgaaccgacaaccctcgaaactaacgcgacgccgtaaacccgctcgcttcaactcgaaaacccgaaacaaaacgaaccgcgaaaccaacacgaaacccaaaacgaacccgaacaacacgctaaaccaaacgcgccgaccgcgcgcgaccatacccgcgccgctccgcccgccgaaccgccgccgcaaactccgcgcgccctcaacccgctacccccgcccgcgaaaaccaacccgccctaacgccgcgaaacccgacccgaacaacgccgccgccgccgcgaacccgccgcgcccatcgcgacccccgaaccgcccgcaaaccccgcgccgacgctttattccgcacgcccgcccccgccgccgcgacctacgcctttaaaaaaaaaccatacccgacgcgcgctaacgacgactcgaacgcgaaataacgacgactcctcccgctcgcgcgcgaaaacgcgaaaccgacacgacgacgacgacgacgacgacaaacgaatccgaactcccgtcccgccctacccgcgtcctccgactaactaaactcgattcgcacgacgcctatccccgtcctcttcgtaaccgacgccgccgccgcaactacacatcctccgacttaactcgccattacaacaaaaacccctcacgtcacgcacgacgcgttataaaataaccccgccgacgacgaaccgtaacccctctcgaaatccgtccgcgccgcgcgattaacgcaaaaataaataaaaaacgattcacgtaaccgaaatttaaccaaaaaaaaaaaaaaccctctcgaacgccccgcccgcgcgatctacgactaaaactaacgaacgaaaaaaacgtaaacccccgcccgacgcccgcgaaaccgaaactacccgtaatccgcacctaacacccgacgcaaaaacgtccccgcgaaaacgaccgcttcccgcaccgcgacgcccgaacgcgaatctcgaaaaccaaccttacaataaaaacttctcgacccccaaactccacgctacgcacgttcctcccgcacgaaccgtcctcgctacaccccacgaccacgcccttcctaccgccgaaccgaccccgcgctcccgaccccgcgctcccgaccacactacaactttatccgcaatcccgcgaccgcacgcaaaaaacaaccgtcccgaaacc

SEQ ID NO: 30719 - DNA, 1594 bp, Artificial Sequence
  chemically treated genomic DNA (Homo sapiens) CpG-island No: 30719
tgagaggtatatttagcgaggttatattagtttatttgattttaaaggttatgtttttgagcgtcgcgtttattatttcgtttttgattttttttttttcggttcggcgtttttcgagaggtaattcgatttcgtcggaagtttaagaagggtttaggaagcgggcggaggcgagagttaggagagtattcgggatgtcggtcgtcgggatgtcggacgtaggaggcggtgttcggggagtaggggtttatttgtaggcggttacggttcgagtttgtaggtatttttgggcggttatgatttttacgaagagaaagtttttgtcgcgcgggtcgttatttgggttcgagtcgggcggttagagttgcgtttcgcgcgtatcgtcgcgcgtttcgtcggtttgggaagtcgtcgtttgttcggatcggtagttttcggggttggcgcggcgtcgtgggttcgttcgttttagttcggaagttcggggtaggacgagtcgcgaggttagtacgaagtttaggacgagttcgagtagtacgttgagttaggcgcgtcggtcgcgcgcggttatgttcgcgtcgtttcgttcgtcgggtcgtcgtcgtaggtttcgcgcgtttttagttcgttgttttcgttcgcggaggttagttcgttttagcgtcgcgaggttcggttcgggtagcgtcgtcgtcgtcgcgggttcgtcgcgtttatcgcggttttcgagtcgttcgtaggtttcgcgtcggcgttttgtttcgtacgttcgttttcgtcgtcgcggtttgcgtttttaagaggggattatgttcggcgcgcgttagcggcggttcgggcgcgaggtggcggcggtttttttcgttcgcgcgcggggacgcggggtcggtacgacggcgacgacggcggcggtagacgagttcgggttttcgtttcgttttgttcgcgtttttcggttggttgggttcggttcgtacggcgtttgttttcgtttttttcgtagtcggcgtcgtcgtcgtagttgtatatttttcggtttagttcgttattgtaataggagttttttacgttacgtacggcgcgttatgaagtggtttcgtcggcggcgagtcgtggtttttttcgggattcgttcgcgtcgcgcgattggcgtaaaagtgaatgaggggcggtttacgtggtcgaagtttgattaaaaaaaaaaaaagttttttcgggcgtttcgttcgcgcggtttgcgattggagttggcgggcggagggggcgtgggttttcgttcggcgttcgcggggtcggagttgttcgtgattcgtatttagtattcggcgtaagggcgttttcgcgaggacggtcgtttttcgtatcgcggcgttcgggcgcgaatttcgggagttagttttgtagtgggggtttttcggtttttagattttacgttgcgtacgtttttttcgtacgggtcgttttcgttgtattttacggttacgttttttttgtcgtcgggtcggtttcgcgttttcggtttcgcgttttcgattatattgtagttttgttcgtagtttcgcggtcgtacgtagggaatagtcgtttcggagtt

SEQ ID NO: 30720 - DNA, 1594 bp, Artificial Sequence
  chemically treated genomic DNA (Homo sapiens) CpG-island No: 30720
aactccgaaacgactattccctacgtacgaccgcgaaactacgaacaaaactacaatataatcgaaaacgcgaaaccgaaaacgcgaaaccgacccgacgacaaaaaaaacgtaaccgtaaaatacaacgaaaacgacccgtacgaaaaaaacgtacgcaacgtaaaatctaaaaaccgaaaaacccccactacaaaactaactcccgaaattcgcgcccgaacgccgcgatacgaaaaacgaccgtcctcgcgaaaacgcccttacgccgaatactaaatacgaatcacgaacaactccgaccccgcgaacgccgaacgaaaacccacgccccctccgcccgccaactccaatcgcaaaccgcgcgaacgaaacgcccgaaaaaactttttttttttttaatcaaacttcgaccacgtaaaccgcccctcattcacttttacgccaatcgcgcgacgcgaacgaatcccgaaaaaaaccacgactcgccgccgacgaaaccacttcataacgcgccgtacgtaacgtaaaaaactcctattacaataacgaactaaaccgaaaaatatacaactacgacgacgacgccgactacgaaaaaaacgaaaacaaacgccgtacgaaccgaacccaaccaaccgaaaaacgcgaacaaaacgaaacgaaaacccgaactcgtctaccgccgccgtcgtcgccgtcgtaccgaccccgcgtccccgcgcgcgaacgaaaaaaaccgccgccacctcgcgcccgaaccgccgctaacgcgcgccgaacataatcccctcttaaaaacgcaaaccgcgacgacgaaaacgaacgtacgaaacaaaacgccgacgcgaaacctacgaacgactcgaaaaccgcgataaacgcgacgaacccgcgacgacgacgacgctacccgaaccgaacctcgcgacgctaaaacgaactaacctccgcgaacgaaaacaacgaactaaaaacgcgcgaaacctacgacgacgacccgacgaacgaaacgacgcgaacataaccgcgcgcgaccgacgcgcctaactcaacgtactactcgaactcgtcctaaacttcgtactaacctcgcgactcgtcctaccccgaacttccgaactaaaacgaacgaacccacgacgccgcgccaaccccgaaaactaccgatccgaacaaacgacgacttcccaaaccgacgaaacgcgcgacgatacgcgcgaaacgcaactctaaccgcccgactcgaacccaaataacgacccgcgcgacaaaaactttctcttcgtaaaaatcataaccgcccaaaaatacctacaaactcgaaccgtaaccgcctacaaataaacccctactccccgaacaccgcctcctacgtccgacatcccgacgaccgacatcccgaatactctcctaactctcgcctccgcccgcttcctaaacccttcttaaacttccgacgaaatcgaattacctctcgaaaaacgccgaaccgaaaaaaaaaaaatcaaaaacgaaataataaacgcgacgctcaaaaacataacctttaaaatcaaataaactaatataacctcgctaaatatacctctca

SEQ ID NO: 30721 - DNA, 614 bp, Artificial Sequence
  chemically treated genomic DNA (Homo sapiens) CpG-island No: 30721
cgttgtttcggtttcggcgagcgtagtcgggatttttttttcgttacgtttttcggttacgtttttttgcgtttggtttagcgacggggcggggtcggtttgcgattggtcgggattacgatcgcgttcgggcgcgttacgtgtgcgtaggagcgtatcggaagcgttcggttggaggcgcggcggtagggttgggcggcggcggcggcggcggttatggaacgttaagaggagtttttgttcgcgcggtcggttttggagatcgaggggttgcgttttttgtatattacgggtgagtcgttgcggggtagtcgggcgcgcgtcgttatttttgcgacgcgtagttatgatgggtgggtcgttcgtcgttgtatcgggcgtcggagtttgggaggtttgggaacggtcgggcgttggcgtttacgcggattttgggtagtaggttcggattttgcgcggaggtttttcgggagtcgtatttttttgggcggttcggttgttttttgtttgcgtaagttttttttgcgaattaagttttttttgtggtagttattggggttattcggtcgttggcgtttgtttttgggattcgttttatatagttttatatatat

SEQ ID NO: 30722 - DNA, 614 bp, Artificial Sequence
  chemically treated genomic DNA (Homo sapiens) CpG-island No: 30722
atatatataaaactatataaaacgaatcccaaaaacaaacgccaacgaccgaataaccccaataactaccacaaaaaaaacttaattcgcaaaaaaaacttacgcaaacaaaaaacaaccgaaccgcccaaaaaaatacgactcccgaaaaacctccgcgcaaaatccgaacctactacccaaaatccgcgtaaacgccaacgcccgaccgttcccaaacctcccaaactccgacgcccgatacaacgacgaacgacccacccatcataactacgcgtcgcaaaaataacgacgcgcgcccgactaccccgcaacgactcacccgtaatatacaaaaaacgcaacccctcgatctccaaaaccgaccgcgcgaacaaaaactcctcttaacgttccataaccgccgccgccgccgccgcccaaccctaccgccgcgcctccaaccgaacgcttccgatacgctcctacgcacacgtaacgcgcccgaacgcgatcgtaatcccgaccaatcgcaaaccgaccccgccccgtcgctaaaccaaacgcaaaaaaacgtaaccgaaaaacgtaacgaaaaaaaaatcccgactacgctcgccgaaaccgaaacaacg

SEQ ID NO: 30723 - DNA, 614 bp, Artificial Sequence
  chemically treated genomic DNA (Homo sapiens) CpG-island No: 30723
gtgtgtatggggttgtgtgggacgggttttagaggtaaacgttaacggtcgagtgattttagtaattattataggaagggtttggttcgtaaaaaagatttgcgtaaataagggatagtcgagtcgtttagggaagtgcggttttcgagaagttttcgcgtaaggttcgggtttgttgtttaaggttcgcgtaagcgttaacgttcgatcgtttttaggttttttaggtttcggcgttcggtgtagcggcggacgatttatttattatggttgcgcgtcgtaaaagtggcggcgcgcgttcggttgtttcgtaacgatttattcgtggtgtgtaggaagcgtagtttttcggtttttagggtcggtcgcgcggatagagattttttttggcgttttatgatcgtcgtcgtcgtcgtcgtttagttttgtcgtcgcgtttttagtcgggcgttttcggtgcgtttttacgtatacgtggcgcgttcggacgcggtcgtggtttcggttaatcgtaggtcgatttcgtttcgtcgttgggttaaacgtaggggggcgtggtcgaggggcgtggcgggggagaaatttcggttacgttcgtcggggtcgggatagcg

SEQ ID NO: 30724 - DNA, 614 bp, Artificial Sequence
  chemically treated genomic DNA (Homo sapiens) CpG-island No: 30724
cgctatcccgaccccgacgaacgtaaccgaaatttctcccccgccacgcccctcgaccacgcccccctacgtttaacccaacgacgaaacgaaatcgacctacgattaaccgaaaccacgaccgcgtccgaacgcgccacgtatacgtaaaaacgcaccgaaaacgcccgactaaaaacgcgacgacaaaactaaacgacgacgacgacgacgatcataaaacgccaaaaaaaatctctatccgcgcgaccgaccctaaaaaccgaaaaactacgcttcctacacaccacgaataaatcgttacgaaacaaccgaacgcgcgccgccacttttacgacgcgcaaccataataaataaatcgtccgccgctacaccgaacgccgaaacctaaaaaacctaaaaacgatcgaacgttaacgcttacgcgaaccttaaacaacaaacccgaaccttacgcgaaaacttctcgaaaaccgcacttccctaaacgactcgactatcccttatttacgcaaatcttttttacgaaccaaacccttcctataataattactaaaatcactcgaccgttaacgtttacctctaaaacccgtcccacacaaccccatacacac

SEQ ID NO: 30725 - DNA, 559 bp, Artificial Sequence
  chemically treated genomic DNA (Homo sapiens) CpG-island No: 30725
ttttgtgcgcgcgttacgattttcggtaagaacgttttcggaggcgtggtttttcgattgtttcggtttggcggtcgagttgcgcgcgtattcggcggttgcgattggtgttgtttggcggcggggcgcggggtacgttgggacgtttcgttggcgggaggttacgggttttttatagcgcgggggaacgggaggttgtaggatggttaagttgacggcggagttgatcgagtaggcggcgtagtatattaacgcggtgcgcgatcgggagttggattttcggggtgagttcgggggcgtgggcggttagtttttaggcggtatcgagtcgttttatttttcgcgttttgtcgcgtgtatcgaaggtcggagtttggttcgcgggtcggttgtttgggtttcgatcgggttgcgtagggaacgtcgggtttgatttttgtcgttgttgttagatgagtattcggttaagtttttgggagttttttgttagcgtcgtgttttttgataggtacgggtgattttattattttttggtgcgttttcgtggggttttgttagg

SEQ ID NO: 30726 - DNA, 559 bp, Artificial Sequence
  chemically treated genomic DNA (Homo sapiens) CpG-island No: 30726
cctaacaaaaccccacgaaaacgcaccaaaaaataataaaatcacccgtacctatcaaaaaacacgacgctaacaaaaaactcccaaaaacttaaccgaatactcatctaacaacaacgacaaaaatcaaacccgacgttccctacgcaacccgatcgaaacccaaacaaccgacccgcgaaccaaactccgaccttcgatacacgcgacaaaacgcgaaaaataaaacgactcgataccgcctaaaaactaaccgcccacgcccccgaactcaccccgaaaatccaactcccgatcgcgcaccgcgttaatatactacgccgcctactcgatcaactccgccgtcaacttaaccatcctacaacctcccgttcccccgcgctataaaaaacccgtaacctcccgccaacgaaacgtcccaacgtaccccgcgccccgccgccaaacaacaccaatcgcaaccgccgaatacgcgcgcaactcgaccgccaaaccgaaacaatcgaaaaaccacgcctccgaaaacgttcttaccgaaaatcgtaacgcgcgcacaaaa

SEQ ID NO: 30727 - DNA, 559 bp, Artificial Sequence
  chemically treated genomic DNA (Homo sapiens) CpG-island No: 30727
tttaatagggttttacgaggacgtattaggaagtaatgaagttattcgtgtttgttaagaggtacggcgttaatagaaggtttttaggagtttaatcggatgtttatttggtaataacggtaagaattaggttcggcgttttttgcgtagttcggtcggagtttagataatcggttcgcgggttaagtttcggttttcggtgtacgcggtaaagcgcggaaaataaggcggttcggtgtcgtttggggattggtcgtttacgttttcggatttatttcggaggtttagttttcggtcgcgtatcgcgttggtgtattgcgtcgtttgttcgattagtttcgtcgttagtttgattattttgtagtttttcgttttttcgcgttgtggaaagttcgtggtttttcgttagcgagacgttttagcgtgtttcgcgtttcgtcgttaggtagtattaatcgtagtcgtcgagtgcgcgcgtagttcgatcgttaggtcgaagtaatcgaagagttacgttttcgggggcgtttttgtcggaagtcgtggcgcgcgtataggg

SEQ ID NO: 30728 - DNA, 559 bp, Artificial Sequence
  chemically treated genomic DNA (Homo sapiens) CpG-island No: 30728
ccctatacgcgcgccacgacttccgacaaaaacgcccccgaaaacgtaactcttcgattacttcgacctaacgatcgaactacgcgcgcactcgacgactacgattaatactacctaacgacgaaacgcgaaacacgctaaaacgtctcgctaacgaaaaaccacgaactttccacaacgcgaaaaaacgaaaaactacaaaataatcaaactaacgacgaaactaatcgaacaaacgacgcaatacaccaacgcgatacgcgaccgaaaactaaacctccgaaataaatccgaaaacgtaaacgaccaatccccaaacgacaccgaaccgccttattttccgcgctttaccgcgtacaccgaaaaccgaaacttaacccgcgaaccgattatctaaactccgaccgaactacgcaaaaaacgccgaacctaattcttaccgttattaccaaataaacatccgattaaactcctaaaaaccttctattaacgccgtacctcttaacaaacacgaataacttcattacttcctaatacgtcctcgtaaaaccctattaaa

SEQ ID NO: 30729 - DNA, 573 bp, Artificial Sequence
  chemically treated genomic DNA (Homo sapiens) CpG-island No: 30729
tgtttacgttttttttaagagtcgtagttttaacgaaaatagaaatgggattgttaagtagtaaattatttgtttttttcgtatatacgcgtatatttcgtggagtcgttgggtagttagtcggttgttttttttgggtagtttagcgatcgtagtttttgttgtggaggaggacgcgttttttatttacgtcgtagtcggtcgggtgaagttgttttgaagttcgttatcgtttttagttttgttgttttcggggtttaggtattttttagttgcgttcgttcgtttgtttgtcggcgcgtcggaggtcgtagcgttgtacgcggttgatgggttttggggtttaggcgttttggtcgtgggagattagcggtttcggcgcgtttcgcgcgtttttacggttcggtttcgcgagtttagtagtcggcgcggcgttgttcggcgtttattttcgtttgtgtttttttttcgggcgtcgcgggtttttcgggttttgggtcggtttttcgggcgttttttttttttttttcgtttttttttagcgtgggaattcgatgttggttttttagggtt

SEQ ID NO: 30730 - DNA, 573 bp, Artificial Sequence
  chemically treated genomic DNA (Homo sapiens) CpG-island No: 30730
aaccctaaaaaaccaacatcgaattcccacgctaaaaaaaaacgaaaaaaaaaaaaaaaacgcccgaaaaaccgacccaaaacccgaaaaacccgcgacgcccgaaaaaaaaacacaaacgaaaataaacgccgaacaacgccgcgccgactactaaactcgcgaaaccgaaccgtaaaaacgcgcgaaacgcgccgaaaccgctaatctcccacgaccaaaacgcctaaaccccaaaacccatcaaccgcgtacaacgctacgacctccgacgcgccgacaaacaaacgaacgaacgcaactaaaaaatacctaaaccccgaaaacaacaaaactaaaaacgataacgaacttcaaaacaacttcacccgaccgactacgacgtaaataaaaaacgcgtcctcctccacaacaaaaactacgatcgctaaactacccaaaaaaaacaaccgactaactacccaacgactccacgaaatatacgcgtatatacgaaaaaaacaaataatttactacttaacaatcccatttctattttcgttaaaactacgactcttaaaaaaaacgtaaaca

SEQ ID NO: 30731 - DNA, 573 bp, Artificial Sequence
  chemically treated genomic DNA (Homo sapiens) CpG-island No: 30731
agttttgggaagttagtatcgggtttttacgttggggaggagcgagaggaaaggagaggacgttcgaggggtcggtttagggttcgggggattcgcggcgttcgagggaggagtatagacgggggtgggcgtcgagtagcgtcgcgtcggttgttgagttcgcggggtcgggtcgtgagaacgcgcggggcgcgtcggggtcgttggttttttacggttagggcgtttgggttttagagtttattagtcgcgtgtagcgttgcggttttcggcgcgtcggtaggtaagcgagcgggcgtagttgggggatgtttggatttcggaggtagtagggttggaggcggtggcgggttttagggtaattttattcggtcggttgcggcgtgggtaagaggcgcgtttttttttatagtaaaagttgcgatcgttgggttgtttagagaaggtagtcggttaattgtttagcggttttacgaggtgtgcgcgtgtgtgcgagagagataaatgatttattgtttagtagttttatttttgttttcgttaggattgcggtttttggagaaagcgtgagta

SEQ ID NO: 30732 - DNA, 573 bp, Artificial Sequence
  chemically treated genomic DNA (Homo sapiens) CpG-island No: 30732
tactcacgctttctccaaaaaccgcaatcctaacgaaaacaaaaataaaactactaaacaataaatcatttatctctctcgcacacacgcgcacacctcgtaaaaccgctaaacaattaaccgactaccttctctaaacaacccaacgatcgcaacttttactataaaaaaaaacgcgcctcttacccacgccgcaaccgaccgaataaaattaccctaaaacccgccaccgcctccaaccctactacctccgaaatccaaacatcccccaactacgcccgctcgcttacctaccgacgcgccgaaaaccgcaacgctacacgcgactaataaactctaaaacccaaacgccctaaccgtaaaaaaccaacgaccccgacgcgccccgcgcgttctcacgacccgaccccgcgaactcaacaaccgacgcgacgctactcgacgcccacccccgtctatactcctccctcgaacgccgcgaatcccccgaaccctaaaccgacccctcgaacgtcctctcctttcctctcgctcctccccaacgtaaaaacccgatactaacttcccaaaact

SEQ ID NO: 30733 - DNA, 746 bp, Artificial Sequence
  chemically treated genomic DNA (Homo sapiens) CpG-island No: 30733
gttatttacggagagtacgttaattatagagagtacgttaattatagagagtacgttaattacggagagtacgttaattagagagagtacgttaattacggagagtacgttaattacggagagtacgttaattacggagagtacgttaattagagagagtacgttaattacggagagtacgttaattacggagagtacgttaattagagagagtacgttatttacggagagtacgttaattacggagagtatattatttatggagagtacgttaattatggagagtacgttaattacggagaatatattaattacggagaatacgttaattacggagagtacgttaattacggagagtacgttaattatagagagtacgttaattacggagagtacgttaattacggcgagtacgttaattatggagagagtatattaattacggagagtacgttaattacggagagtacgttaaatacggagagtatgttaattagggagggtatattaattagggagggtacgttaattacggagggtacgttaattacggagagtacgttaattacggagagtacgttaattacggagagtacgttaattacggagagtacgttaattatggagagagtatattaattacggagagtacgttaattacggagaatacgttaattatggggagtatattaattatggagagtacgttttttgtaacgttttatattattgtagtatagtttagt

SEQ ID NO: 30734 - DNA, 746 bp, Artificial Sequence
  chemically treated genomic DNA (Homo sapiens) CpG-island No: 30734
actaaactatactacaataatataaaacgttacaaaaaacgtactctccataattaatatactccccataattaacgtattctccgtaattaacgtactctccgtaattaatatactctctccataattaacgtactctccgtaattaacgtactctccgtaattaacgtactctccgtaattaacgtactctccgtaattaacgtaccctccgtaattaacgtaccctccctaattaatataccctccctaattaacatactctccgtatttaacgtactctccgtaattaacgtactctccgtaattaatatactctctccataattaacgtactcgccgtaattaacgtactctccgtaattaacgtactctctataattaacgtactctccgtaattaacgtactctccgtaattaacgtattctccgtaattaatatattctccgtaattaacgtactctccataattaacgtactctccataaataatatactctccgtaattaacgtactctccgtaaataacgtactctctctaattaacgtactctccgtaattaacgtactctccgtaattaacgtactctctctaattaacgtactctccgtaattaacgtactctccgtaattaacgtactctccgtaattaacgtactctctctaattaacgtactctccgtaattaacgtactctctataattaacgtactctctataattaacgtactctccgtaaataac

SEQ ID NO: 30735 - DNA, 746 bp, Artificial Sequence
  chemically treated genomic DNA (Homo sapiens) CpG-island No: 30735
attgggttgtgttgtagtggtgtgggacgttgtagagagcgtgttttttatggttagtgtgttttttatggttagcgtgtttttcgtggttagcgtgtttttcgtggttagtgtgttttttttatggttagcgtgtttttcgtggttagcgtgtttttcgtggttagcgtgtttttcgtggttagcgtgtttttcgtggttaacgtgtttttcgtggttagcgtgttttttttggttagtgtgttttttttggttagtatgtttttcgtgtttagcgtgtttttcgtggttagcgtgtttttcgtggttagtgtgttttttttatggttagcgtgttcgtcgtggttagcgtgtttttcgtggttagcgtgttttttgtggttaacgtgtttttcgtggttagcgtgtttttcgtggttagcgtgtttttcgtggttagtgtgtttttcgtggttagcgtgttttttatggttagcgtgttttttatggatagtgtgtttttcgtggttagcgtgtttttcgtgggtagcgtgttttttttggttagcgtgtttttcgtggttagcgtgtttttcgtggttagcgtgttttttttggttagcgtgtttttcgtggttagcgtgtttttcgtggttagcgtgtttttcgtggttagcgtgttttttttggttagcgtgtttttcgtggttagcgtgttttttgtggttagcgtgttttttgtggttagcgtgtttttcgtggatagt

SEQ ID NO: 30736 - DNA, 746 bp, Artificial Sequence
  chemically treated genomic DNA (Homo sapiens) CpG-island No: 30736
actatccacgaaaaacacgctaaccacaaaaaacacgctaaccacaaaaaacacgctaaccacgaaaaacacgctaaccaaaaaaaacacgctaaccacgaaaaacacgctaaccacgaaaaacacgctaaccacgaaaaacacgctaaccaaaaaaaacacgctaaccacgaaaaacacgctaaccacgaaaaacacgctaaccaaaaaaaacacgctacccacgaaaaacacgctaaccacgaaaaacacactatccataaaaaacacgctaaccataaaaaacacgctaaccacgaaaaacacactaaccacgaaaaacacgctaaccacgaaaaacacgctaaccacgaaaaacacgttaaccacaaaaaacacgctaaccacgaaaaacacgctaaccacgacgaacacgctaaccataaaaaaaacacactaaccacgaaaaacacgctaaccacgaaaaacacgctaaacacgaaaaacatactaaccaaaaaaaacacactaaccaaaaaaaacacgctaaccacgaaaaacacgttaaccacgaaaaacacgctaaccacgaaaaacacgctaaccacgaaaaacacgctaaccacgaaaaacacgctaaccataaaaaaaacacactaaccacgaaaaacacgctaaccacgaaaaacacgctaaccataaaaaacacactaaccataaaaaacacgctctctacaacgtcccacaccactacaacacaacccaat

SEQ ID NO: 30737 - DNA, 578 bp, Artificial Sequence
  chemically treated genomic DNA (Homo sapiens) CpG-island No: 30737
cgtcgggaggagggaatttcgaggtcgggtttggcggggcgcgtttagtcggttacgtgggagattgagtttttcgattttagtcgcggttttcgagttcgggatcgatttggcgaggttgtttttggtttttgaggagtcggggtcggggcgggggcggtcggtttttttttttttttttcgtttttttttttttttcgttgtcgttttttttttttttaataaataatttttttattttatgtagaaaagttttttttttttgtttgtttttaaagtcgtttttattttttcgttcgggtgacggaatttcgggtttgtttttttttgtttaatgtcgttgtcgggattacggtggtcgcgcgttaggcgtagggagtttcggaggcggcggtttagagcgcggttagttcgttcggtttttgcgtttcggttcggtttttgcggttatcgcgggttttcggttttgtttttcgagcgttttgcgtttttttttttttttttttgttttttcgtaggtttgtttatagtcgttattaggggagacgttatacgggttttattttaggattggtgat

SEQ ID NO: 30738 - DNA, 578 bp, Artificial Sequence
  chemically treated genomic DNA (Homo sapiens) CpG-island No: 30738
atcaccaatcctaaaataaaacccgtataacgtctcccctaataacgactataaacaaacctacgaaaaaacaaaaaaaaaaaaaaaaaaacgcaaaacgctcgaaaaacaaaaccgaaaacccgcgataaccgcaaaaaccgaaccgaaacgcaaaaaccgaacgaactaaccgcgctctaaaccgccgcctccgaaactccctacgcctaacgcgcgaccaccgtaatcccgacaacgacattaaacaaaaaaaaacaaacccgaaattccgtcacccgaacgaaaaaataaaaacgactttaaaaacaaacaaaaaaaaaaaacttttctacataaaataaaaaaattatttattaaaaaaaaaaaaaacgacaacgaaaaaaaaaaaaaaacgaaaaaaaaaaaaaaaaaccgaccgcccccgccccgaccccgactcctcaaaaaccaaaaacaacctcgccaaatcgatcccgaactcgaaaaccgcgactaaaatcgaaaaactcaatctcccacgtaaccgactaaacgcgccccgccaaacccgacctcgaaattccctcctcccgacg

SEQ ID NO: 30739 - DNA, 578 bp, Artificial Sequence
  chemically treated genomic DNA (Homo sapiens) CpG-island No: 30739
attattaattttaaaataaaattcgtgtaacgttttttttagtagcggttataaataaatttacgaggaggtaggaggaagaggaaaggggcgtagggcgttcggggagtagagtcgggggttcgcggtggtcgtagaggtcgggtcggggcgtagaggtcgggcgagttggtcgcgttttgggtcgtcgttttcggaattttttgcgtttggcgcgcggttatcgtggtttcggtaacggtattaaatagagggaaatagattcgggatttcgttattcgggcggggggataaggacggttttgagagtagataggaaaagggagtttttttgtatggggtgaaaaaattatttattgaaggaggaggaggcggtagcggaggaaggggaggggcgggaggagggaagaaaaatcggtcgttttcgtttcggtttcggttttttaggagttaagggtagtttcgttaggtcggtttcgggttcgaggatcgcggttggggtcgaggggtttagttttttacgtgatcggttgggcgcgtttcgttagattcggtttcgggatttttttttttcggcg

SEQ ID NO: 30740 - DNA, 578 bp, Artificial Sequence
  chemically treated genomic DNA (Homo sapiens) CpG-island No: 30740
cgccgaaaaaaaaaaatcccgaaaccgaatctaacgaaacgcgcccaaccgatcacgtaaaaaactaaacccctcgaccccaaccgcgatcctcgaacccgaaaccgacctaacgaaactacccttaactcctaaaaaaccgaaaccgaaacgaaaacgaccgatttttcttccctcctcccgcccctccccttcctccgctaccgcctcctcctccttcaataaataattttttcaccccatacaaaaaaactcccttttcctatctactctcaaaaccgtccttatccccccgcccgaataacgaaatcccgaatctatttccctctatttaataccgttaccgaaaccacgataaccgcgcgccaaacgcaaaaaattccgaaaacgacgacccaaaacgcgaccaactcgcccgacctctacgccccgacccgacctctacgaccaccgcgaacccccgactctactccccgaacgccctacgcccctttcctcttcctcctacctcctcgtaaatttatttataaccgctactaaaaaaaacgttacacgaattttattttaaaattaataat

SEQ ID NO: 30741 - DNA, 1525 bp, Artificial Sequence
  chemically treated genomic DNA (Homo sapiens) CpG-island No: 30741
tacgcgcgcgagggttttgcgagtggtttcgtgattttgtttttaatttcgggtgtttttttttttttattagcgttcggcgtttggttttggtttcggttttcgaggttttcgggatttttttcgagcgtttttcgagttggcgcggggggtggaggcggggttatggagcgcgtttcggggatcgttgtattcggaggcggtcgtcgtgcggttttttttcgtttcgagagtgaggtggtcgggttttgacgagaaggtttacgtttgtcgcgggggtggttcgcgatggtagtcggggttcgagtttcgtttggggggttgtttttgttggagaaaacgtttttttgagggcggcggtaaacgcgtagcgaggtttcgtgtcgcgttagaagttattttgagaaaggggtatcgggatatcgaggggtttttattttttttttagtttgtgacgttcgcgttttcgggtgggttcgaggggcgtttgggtacggttagtcgaggttttcgagagttttagtgtcgttttttattttaggtttttttttttgaggtagagttcgggatttcgcgttttcgttttaggtttcggtttacgttttcgttcggtcgttaggcgcgtaacggaaagcgttttcgtttcgtttcgtttcgtttattgcgtgacgcgtattcggtcgagttaattagagttcgtggcgcgcgttttatacgtcggtttttttcgttttttagtttaagaaagggcgcgcggattcggtaggttagagtgtcgagtagcgcggtgggtgcggttgtgagacggtaggagatttttgtttcgcggtgtacgcgattttcgagacgatagcgcggttattgttagtagcgaaggcgtttttcgcggagcgtttcgacggcgttcgttcgtttatgtcgagttgagcgcggtagcggcggcgggatgttggcgttgttggtcgttagcgtggcgttcgtcgtggtcgttggggtttaggatagttcggcgttcggtagtcgtttcgtgtgtacggtattgtttttagaggcggtgtacgtcggttgttcgttgttcgcgatgtttatgtagggcggcgcgtagagtttcgaggaggagttgagggtcgcggtgttgtagttgcgcgagatcgtcgtgtagtagaaggagacgttgggcgcgtagcgcgaggttattcgcgagtttacgggtaagttagcgcgttgcgaggggttggcgggcggtaaggcgcgcggcgcgggggttacgggtaaggatattatgggcgatttgtcgcgggatttcggttacgtcgtggagtagtttagtcgttcgttgtagatttttaaggatcgtttggagagtttcgaggtagcggttcgcggggagcgcgggggatttggaatggggacgttttcgagtcgggggcggaagattcgggaggatggggaaagggggtttggttttggggagggtgtgatcgttcgtgggggtgagttggatttgagggtgaaaggcggggat

SEQ ID NO: 30742 - DNA, 1525 bp, Artificial Sequence
  chemically treated genomic DNA (Homo sapiens) CpG-island No: 30742
atccccgcctttcaccctcaaatccaactcacccccacgaacgatcacaccctccccaaaaccaaaccccctttccccatcctcccgaatcttccgcccccgactcgaaaacgtccccattccaaatcccccgcgctccccgcgaaccgctacctcgaaactctccaaacgatccttaaaaatctacaacgaacgactaaactactccacgacgtaaccgaaatcccgcgacaaatcgcccataatatccttacccgtaacccccgcgccgcgcgccttaccgcccgccaacccctcgcaacgcgctaacttacccgtaaactcgcgaataacctcgcgctacgcgcccaacgtctccttctactacacgacgatctcgcgcaactacaacaccgcgaccctcaactcctcctcgaaactctacgcgccgccctacataaacatcgcgaacaacgaacaaccgacgtacaccgcctctaaaaacaataccgtacacacgaaacgactaccgaacgccgaactatcctaaaccccaacgaccacgacgaacgccacgctaacgaccaacaacgccaacatcccgccgccgctaccgcgctcaactcgacataaacgaacgaacgccgtcgaaacgctccgcgaaaaacgccttcgctactaacaataaccgcgctatcgtctcgaaaatcgcgtacaccgcgaaacaaaaatctcctaccgtctcacaaccgcacccaccgcgctactcgacactctaacctaccgaatccgcgcgccctttcttaaactaaaaaacgaaaaaaaccgacgtataaaacgcgcgccacgaactctaattaactcgaccgaatacgcgtcacgcaataaacgaaacgaaacgaaacgaaaacgctttccgttacgcgcctaacgaccgaacgaaaacgtaaaccgaaacctaaaacgaaaacgcgaaatcccgaactctacctcaaaaaaaaaaacctaaaataaaaaacgacactaaaactctcgaaaacctcgactaaccgtacccaaacgcccctcgaacccacccgaaaacgcgaacgtcacaaactaaaaaaaaaataaaaacccctcgatatcccgatacccctttctcaaaataacttctaacgcgacacgaaacctcgctacgcgtttaccgccgccctcaaaaaaacgttttctccaacaaaaacaaccccccaaacgaaactcgaaccccgactaccatcgcgaaccacccccgcgacaaacgtaaaccttctcgtcaaaacccgaccacctcactctcgaaacgaaaaaaaaccgcacgacgaccgcctccgaatacaacgatccccgaaacgcgctccataaccccgcctccaccccccgcgccaactcgaaaaacgctcgaaaaaaatcccgaaaacctcgaaaaccgaaaccaaaaccaaacgccgaacgctaataaaaaaaaaaaaacacccgaaattaaaaacaaaatcacgaaaccactcgcaaaaccctcgcgcgcgta

SEQ ID NO: 30743 - DNA, 1525 bp, Artificial Sequence
  chemically treated genomic DNA (Homo sapiens) CpG-island No: 30743
attttcgttttttatttttaagtttagtttatttttacggacgattatattttttttagggttaggttttttttttttattttttcgagtttttcgttttcgattcgggagcgtttttattttaggtttttcgcgtttttcgcgggtcgttatttcgaggttttttaggcggtttttgagggtttgtagcgagcggttgagttgttttacgacgtggtcggggtttcgcggtaggtcgtttatagtgtttttgttcgtggttttcgcgtcgcgcgttttgtcgttcgttagtttttcgtagcgcgttagtttgttcgtgagttcgcggatggtttcgcgttgcgcgtttagcgtttttttttgttgtacgacggtttcgcgtagttgtagtatcgcggtttttagttttttttcgggattttgcgcgtcgttttgtatgggtatcgcgggtagcgggtagtcggcgtgtatcgtttttgggggtagtgtcgtgtatacgaagcggttatcgggcgtcgggttgttttgggttttagcggttacggcgagcgttacgttggcggttagtagcgttagtatttcgtcgtcgttgtcgcgtttagttcggtatgggcgagcgggcgtcgtcggggcgtttcgcgggaggcgttttcgttgttggtagtagtcgcgttgtcgtttcgagggtcgcgtgtatcgcggggtagaagttttttgtcgttttatagtcgtatttatcgcgttgttcggtattttggtttgtcgggttcgcgcgtttttttttaagttgaggggcggagggggtcggcgtgtggggcgcgcgttacgagttttgattggttcggtcgggtgcgcgttacgtagtgggcggagcggggcggggcgggggcgtttttcgttgcgcgtttggcggtcgggcgggagcgtgggtcggagtttgaggcgagagcgcgaggtttcgggttttgttttaggaaaggaggtttgaggtggaaaacgatattggggttttcgagagtttcggttggtcgtgtttaggcgtttttcgaatttattcgaggacgcgggcgttataggttgaggagaaagtgggaatttttcggtgtttcggtgttttttttttagggtggtttttggcgcggtacggggtttcgttgcgcgtttgtcgtcgtttttagggaggcgttttttttagtaggagtagttttttaggcgggattcgaatttcgattgttatcgcgagttattttcgcggtaggcgtgggttttttcgttaaggttcggttattttattttcgaggcgggaaggagtcgtacgacggtcgttttcggatgtaacggttttcgggacgcgttttatggtttcgtttttatttttcgcgttaattcggaaaacgttcgggaagaatttcgggggtttcggggatcgggattaggattaggcgtcggacgttgatgggaaggaggggatattcggagttagggataaagttacgaggttattcgtagagttttcgcgcgcgtg

SEQ ID NO: 30744 - DNA, 1525 bp, Artificial Sequence
  chemically treated genomic DNA (Homo sapiens) CpG-island No: 30744
cacgcgcgcgaaaactctacgaataacctcgtaactttatccctaactccgaatatcccctccttcccatcaacgtccgacgcctaatcctaatcccgatccccgaaacccccgaaattcttcccgaacgttttccgaattaacgcgaaaaataaaaacgaaaccataaaacgcgtcccgaaaaccgttacatccgaaaacgaccgtcgtacgactccttcccgcctcgaaaataaaataaccgaaccttaacgaaaaaacccacgcctaccgcgaaaataactcgcgataacaatcgaaattcgaatcccgcctaaaaaactactcctactaaaaaaaacgcctccctaaaaacgacgacaaacgcgcaacgaaaccccgtaccgcgccaaaaaccaccctaaaaaaaaaacaccgaaacaccgaaaaattcccactttctcctcaacctataacgcccgcgtcctcgaataaattcgaaaaacgcctaaacacgaccaaccgaaactctcgaaaaccccaatatcgttttccacctcaaacctcctttcctaaaacaaaacccgaaacctcgcgctctcgcctcaaactccgacccacgctcccgcccgaccgccaaacgcgcaacgaaaaacgcccccgccccgccccgctccgcccactacgtaacgcgcacccgaccgaaccaatcaaaactcgtaacgcgcgccccacacgccgaccccctccgcccctcaacttaaaaaaaaacgcgcgaacccgacaaaccaaaataccgaacaacgcgataaatacgactataaaacgacaaaaaacttctaccccgcgatacacgcgaccctcgaaacgacaacgcgactactaccaacaacgaaaacgcctcccgcgaaacgccccgacgacgcccgctcgcccataccgaactaaacgcgacaacgacgacgaaatactaacgctactaaccgccaacgtaacgctcgccgtaaccgctaaaacccaaaacaacccgacgcccgataaccgcttcgtatacacgacactacccccaaaaacgatacacgccgactacccgctacccgcgatacccatacaaaacgacgcgcaaaatcccgaaaaaaaactaaaaaccgcgatactacaactacgcgaaaccgtcgtacaacaaaaaaaaacgctaaacgcgcaacgcgaaaccatccgcgaactcacgaacaaactaacgcgctacgaaaaactaacgaacgacaaaacgcgcgacgcgaaaaccacgaacaaaaacactataaacgacctaccgcgaaaccccgaccacgtcgtaaaacaactcaaccgctcgctacaaaccctcaaaaaccgcctaaaaaacctcgaaataacgacccgcgaaaaacgcgaaaaacctaaaataaaaacgctcccgaatcgaaaacgaaaaactcgaaaaaataaaaaaaaaaaacctaaccctaaaaaaaatataatcgtccgtaaaaataaactaaacttaaaaataaaaaacgaaaat

SEQ ID NO: 30745 - DNA, 529 bp, Artificial Sequence
  chemically treated genomic DNA (Homo sapiens) CpG-island No: 30745
cgttcggttgggttcggttcggaaagtttcgcgaagttttcgttcggtcggtttagggcggcgcgaataagcggttttttttgcgtcggcggttttcggtagttggatcgcggttcgttggggcgcggacgtattcgagttggggcgggggcgggggcggggcggtcgcgttgttaaggtgattcgggcgcgggaaggcggtttcggttcgcgcgggtcgggtcgggcggcggcggcggtattatgagcggtcggaagcgtagttttattttcggggtttacggcgggtagggcgtggcgcggcgcggggcggggcgcgtgcgcgcgtgtgcgtgtgtacgcgtgggggggagttcgtgcggggtgtgttcgcgtttgggcgggtgggtttgggttatgattgttgtgggggttgagcgtttgattttagtgcgcgtatggttgtcgtgttgtggcgtttgtgtgtgtgtgtttttgtttttgtgtttgtgtgtgtttttattgcgtgtttatgtgtatgtgtggggag

SEQ ID NO: 30746 - DNA, 529 bp, Artificial Sequence
  chemically treated genomic DNA (Homo sapiens) CpG-island No: 30746
ctccccacacatacacataaacacgcaataaaaacacacacaaacacaaaaacaaaaacacacacacacaaacgccacaacacgacaaccatacgcgcactaaaatcaaacgctcaacccccacaacaatcataacccaaacccacccgcccaaacgcgaacacaccccgcacgaactcccccccacgcgtacacacgcacacgcgcgcacgcgccccgccccgcgccgcgccacgccctacccgccgtaaaccccgaaaataaaactacgcttccgaccgctcataataccgccgccgccgcccgacccgacccgcgcgaaccgaaaccgccttcccgcgcccgaatcaccttaacaacgcgaccgccccgcccccgcccccgccccaactcgaatacgtccgcgccccaacgaaccgcgatccaactaccgaaaaccgccgacgcaaaaaaaaccgcttattcgcgccgccctaaaccgaccgaacgaaaacttcgcgaaactttccgaaccgaacccaaccgaacg

SEQ ID NO: 30747 - DNA, 529 bp, Artificial Sequence
  chemically treated genomic DNA (Homo sapiens) CpG-island No: 30747
ttttttatatatgtatatggatacgtaatgggaatatatatagatatagaaatagaaatatatatatataggcgttatagtacgatagttatgcgcgtattgaggttaaacgtttagtttttatagtagttatagtttaggtttattcgtttaaacgcgagtatatttcgtacgggtttttttttacgcgtgtatacgtatacgcgcgtacgcgtttcgtttcgcgtcgcgttacgttttattcgtcgtaggtttcgaaggtgaagttgcgttttcggtcgtttatggtgtcgtcgtcgtcgttcggttcggttcgcgcgagtcggagtcgttttttcgcgttcgggttattttggtaacgcggtcgtttcgttttcgttttcgttttagttcggatacgttcgcgttttagcgggtcgcggtttagttgtcgggggtcgtcggcgtagaaagggtcgtttgttcgcgtcgttttgggtcggtcgggcgggggtttcgcgggatttttcgagtcgggtttagtcgggcg

SEQ ID NO: 30748 - DNA, 529 bp, Artificial Sequence
  chemically treated genomic DNA (Homo sapiens) CpG-island No: 30748
cgcccgactaaacccgactcgaaaaatcccgcgaaacccccgcccgaccgacccaaaacgacgcgaacaaacgaccctttctacgccgacgacccccgacaactaaaccgcgacccgctaaaacgcgaacgtatccgaactaaaacgaaaacgaaaacgaaacgaccgcgttaccaaaataacccgaacgcgaaaaaacgactccgactcgcgcgaaccgaaccgaacgacgacgacgacaccataaacgaccgaaaacgcaacttcaccttcgaaacctacgacgaataaaacgtaacgcgacgcgaaacgaaacgcgtacgcgcgtatacgtatacacgcgtaaaaaaaaacccgtacgaaatatactcgcgtttaaacgaataaacctaaactataactactataaaaactaaacgtttaacctcaatacgcgcataactatcgtactataacgcctatatatatatatttctatttctatatctatatatattcccattacgtatccatatacatatataaaaaa

SEQ ID NO: 30749 - DNA, 711 bp, Artificial Sequence
  chemically treated genomic DNA (Homo sapiens) CpG-island No: 30749
ggagacggtcgcgattagataatgttttgtatttatcgcggtttcggttaattataggtcggcgtttttcggtttcgtgcggcgttatcggttattgtttcggtcggaggaaaatttggttttagtcggttatttgcggttaatttagttagagcgcgcggcgtttttacggcgttcggttcggggaaggggtttgggtagtaggcgtcgcggcgtatttcggggtagggtcgcgaattgagggtaggacgcgtcgtttttttcgttcgaacgcggcgttgtttttttaagatgatttttttttcggggttaagtagcgcgttggcggtttcgtcgtagggggtagcgatattcgggttatcggattggcgacggcggcggtttttcgggtagtttttagttttcgcgggatgttcggtttatcgtcgtcggagaagaggagttttttaggttaaaaaaatttttttaagtttagggtcgtatcgcggcggtcgcggtatgtgtcgttattcgttttcgattcgtagatttcggggtcgggacgtcggggttagtacgcgggtcgcgaacgtttagtttgcggggtcgcgcggcgcgcgttcgttttaggatcgttttattttttgcgcgtgtttagggggcggggcgtttttgattagttaattagcgttagattttagggatcgtttttgaagtttttttagggggcgg

SEQ ID NO: 30750 - DNA, 711 bp, Artificial Sequence
  chemically treated genomic DNA (Homo sapiens) CpG-island No: 30750
ccgccccctaaaaaaacttcaaaaacgatccctaaaatctaacgctaattaactaatcaaaaacgccccgccccctaaacacgcgcaaaaaataaaacgatcctaaaacgaacgcgcgccgcgcgaccccgcaaactaaacgttcgcgacccgcgtactaaccccgacgtcccgaccccgaaatctacgaatcgaaaacgaataacgacacataccgcgaccgccgcgatacgaccctaaacttaaaaaaatttttttaacctaaaaaactcctcttctccgacgacgataaaccgaacatcccgcgaaaactaaaaactacccgaaaaaccgccgccgtcgccaatccgataacccgaatatcgctaccccctacgacgaaaccgccaacgcgctacttaaccccgaaaaaaaaatcatcttaaaaaaacaacgccgcgttcgaacgaaaaaaacgacgcgtcctaccctcaattcgcgaccctaccccgaaatacgccgcgacgcctactacccaaaccccttccccgaaccgaacgccgtaaaaacgccgcgcgctctaactaaattaaccgcaaataaccgactaaaaccaaattttcctccgaccgaaacaataaccgataacgccgcacgaaaccgaaaaacgccgacctataattaaccgaaaccgcgataaatacaaaacattatctaatcgcgaccgtctcc

SEQ ID NO: 30751 - DNA, 711 bp, Artificial Sequence
  chemically treated genomic DNA (Homo sapiens) CpG-island No: 30751
tcgttttttaagaagattttaggggcggtttttggagtttggcgttgattggttgattagaagcgtttcgttttttgggtacgcgtaggaggtggggcggttttgaggcgggcgcgcgtcgcgcggtttcgtaggttgagcgttcgcgattcgcgtgttggtttcggcgtttcggtttcggagtttgcgagtcggaggcgggtggcggtatatgtcgcggtcgtcgcggtgcgattttgggtttggggggatttttttggtttggagggtttttttttttcggcggcggtgagtcgggtatttcgcggggattgggagttgttcgaggggtcgtcgtcgtcgttagttcggtagttcggatgtcgttgttttttgcggcggggtcgttaacgcgttgtttggtttcgggaggaggattattttaaagggatagcgtcgcgttcgggcggagggggcggcgcgttttgtttttagttcgcgattttgtttcggggtacgtcgcggcgtttgttgtttagatttttttttcgggtcgggcgtcgtgggagcgtcgcgcgttttgattggattagtcgtagatggtcgattagagttaggttttttttcggtcggagtagtggtcggtggcgtcgtacggggtcgggaggcgtcggtttgtgattggtcgaggtcgcggtgaatgtaggatattgtttggtcgcggtcgttttt

SEQ ID NO: 30752 - DNA, 711 bp, Artificial Sequence
  chemically treated genomic DNA (Homo sapiens) CpG-island No: 30752
aaaaacgaccgcgaccaaacaatatcctacattcaccgcgacctcgaccaatcacaaaccgacgcctcccgaccccgtacgacgccaccgaccactactccgaccgaaaaaaaacctaactctaatcgaccatctacgactaatccaatcaaaacgcgcgacgctcccacgacgcccgacccgaaaaaaaaatctaaacaacaaacgccgcgacgtaccccgaaacaaaatcgcgaactaaaaacaaaacgcgccgccccctccgcccgaacgcgacgctatccctttaaaataatcctcctcccgaaaccaaacaacgcgttaacgaccccgccgcaaaaaacaacgacatccgaactaccgaactaacgacgacgacgacccctcgaacaactcccaatccccgcgaaatacccgactcaccgccgccgaaaaaaaaaaaccctccaaaccaaaaaaatccccccaaacccaaaatcgcaccgcgacgaccgcgacatataccgccacccgcctccgactcgcaaactccgaaaccgaaacgccgaaaccaacacgcgaatcgcgaacgctcaacctacgaaaccgcgcgacgcgcgcccgcctcaaaaccgccccacctcctacgcgtacccaaaaaacgaaacgcttctaatcaaccaatcaacgccaaactccaaaaaccgcccctaaaatcttcttaaaaaacga

SEQ ID NO: 30753 - DNA, 2074 bp, Artificial Sequence
  chemically treated genomic DNA (Homo sapiens) CpG-island No: 30753
gtcgcgtagcgtcggaaatttttcgcggtagttaggagggtcgtagttttttcggagtttcgttttttgtttcggggcggcgtattcggtttcgggaaggtgtcgcgcgggagacgtggtagtagtttttttagttcgcgttcgggcgtagcggtcgagcgtttcgtgtagtcgggtaaggaagatttcgcggtagtagcgtatcggtcggcggggagattcgtttgaagcgtcggcgttcgttaggggacgggaagtggcgttcggttcgtttttgcggttcgcggttcgcggtttagtagtttcgcgtcgttttttttttttcggtttttttttcggttttcgttatttcggtcgaatttttgtataaattatgttaggcgcgtttgacgttaggtggcggcgcgcgggcgcgggcgcgggcgcggcgcggttcggagggagttggcggcgggcgcgcgcggtttcgcggtttcgggtgcgcgcggcgtgtcggacgcgcgtaggcgttggcgtgttggggtcgcggcggcggcggcggcggcggcggtagcggcggcggcggcggcggcgcgggggttgagtcgtggtggtgcggacgcgttcgtgttcgggaattatcggattaaatttgaatcgagtgaaattatataaaggagcgtcgcggaggaggcggttcggggattcggatattttgaaatttattagagattcgttcgttttcggttaatttcgtgttcgtggatttagttttttggtcgtagttgtcgagttaatttcggagttcgttttgcgttttgtttttttttcggtattaggtagcggaggagttcgatcgattcggtgagcgcgagagttcgttcggcgttttcgggaggggcggcggcggcggcggcggtaggaaatcgtttcgggtcggggtcggggtcgcgttaggagttgggagcgaggagttgggcgtgtgcggggcgaggggcgaggggcgagggcgggagggggtcggggttagcgtaggagcgtagcgtcgttcgcgtagtgtcgtcggcgtcgtcgttcgcggggttcgaattcgcgtttcgagcgtcgttcggcgttttaatttttgtttgcgttcgtcgggtcggcggcggcgggggcgcgcggtgcggtcgagggttattttttcgtatgtaaatggttttttgttgtgttgtcggcgtggggggggggtacgggggataggagggagcgtgtttgcgcgcgggggagcgcgagcgcgttttttttcgtcggcgtcgagtacgagttgtcggttttatcgagagaaaaaggaaggaggaaaagttgggttttaatttaagtgcgagcgggcgatgggcgcgcgggcgcggggcggttgagtagcggcggcggcggttcggggacggcggcgattttcgtttttcgttttcgtttttcgtttcggatcgattacgtcgcgttcgtcgggagttgcggtcgtatcggcgcgaataaagtgcgtttttttcggcgcggcggcgttagttcgcgcggggatcgttatcgagcgaggtgggtcggcggcggggaaagtgcgcggggcgtcgcgtggggcgggggtagcgcgaatacgcggcgcgggaggcgtttcgagtttagttagtgtcggtcgcgggcgcggagttgcgagttcggagttgggggtttttggggtttttcggcggtttttaagtgcgttaggaggagaagaaagggagcggggtcggggcgagcgtcgggaggcgcggcgaggaggggattttattttgtcgagttggtcgggtcgtcggcggcggtagttgtataatagcgattttaattttttaacgtaattcggttttttcgttttttaattcgtcgggggttagcgtcggtggggggtggttattaggtggttttcgaggtgattcgggtgcgttttgttttcgtagagagtcgcggtttggagcgtgaacggtcgaggtggttggaggttaagcggttagcggggagaggaaaggagggcggtgggggacgcgttgtttgtttggttcgtatcggggattgggttcgttgg

SEQ ID NO: 30754 - DNA, 2074 bp, Artificial Sequence
  chemically treated genomic DNA (Homo sapiens) CpG-island No: 30754
ccaacgaacccaatccccgatacgaaccaaacaaacaacgcgtcccccaccgccctcctttcctctccccgctaaccgcttaacctccaaccacctcgaccgttcacgctccaaaccgcgactctctacgaaaacaaaacgcacccgaatcacctcgaaaaccacctaataaccaccccccaccgacgctaacccccgacgaattaaaaaacgaaaaaaccgaattacgttaaaaaattaaaatcgctattatacaactaccgccgccgacgacccgaccaactcgacaaaataaaatcccctcctcgccgcgcctcccgacgctcgccccgaccccgctccctttcttctcctcctaacgcacttaaaaaccgccgaaaaaccccaaaaacccccaactccgaactcgcaactccgcgcccgcgaccgacactaactaaactcgaaacgcctcccgcgccgcgtattcgcgctacccccgccccacgcgacgccccgcgcactttccccgccgccgacccacctcgctcgataacgatccccgcgcgaactaacgccgccgcgccgaaaaaaacgcactttattcgcgccgatacgaccgcaactcccgacgaacgcgacgtaatcgatccgaaacgaaaaacgaaaacgaaaaacgaaaatcgccgccgtccccgaaccgccgccgccgctactcaaccgccccgcgcccgcgcgcccatcgcccgctcgcacttaaattaaaacccaacttttcctccttcctttttctctcgataaaaccgacaactcgtactcgacgccgacgaaaaaaaacgcgctcgcgctcccccgcgcgcaaacacgctccctcctatcccccgtaccccccccccacgccgacaacacaacaaaaaaccatttacatacgaaaaaataaccctcgaccgcaccgcgcgcccccgccgccgccgacccgacgaacgcaaacaaaaattaaaacgccgaacgacgctcgaaacgcgaattcgaaccccgcgaacgacgacgccgacgacactacgcgaacgacgctacgctcctacgctaaccccgaccccctcccgccctcgcccctcgcccctcgccccgcacacgcccaactcctcgctcccaactcctaacgcgaccccgaccccgacccgaaacgatttcctaccgccgccgccgccgccgcccctcccgaaaacgccgaacgaactctcgcgctcaccgaatcgatcgaactcctccgctacctaataccgaaaaaaaaacaaaacgcaaaacgaactccgaaattaactcgacaactacgaccaaaaaactaaatccacgaacacgaaattaaccgaaaacgaacgaatctctaataaatttcaaaatatccgaatccccgaaccgcctcctccgcgacgctcctttatataatttcactcgattcaaatttaatccgataattcccgaacacgaacgcgtccgcaccaccacgactcaacccccgcgccgccgccgccgccgccgctaccgccgccgccgccgccgccgccgcgaccccaacacgccaacgcctacgcgcgtccgacacgccgcgcgcacccgaaaccgcgaaaccgcgcgcgcccgccgccaactccctccgaaccgcgccgcgcccgcgcccgcgcccgcgcgccgccacctaacgtcaaacgcgcctaacataatttatacaaaaattcgaccgaaataacgaaaaccgaaaaaaaaaccgaaaaaaaaaaaacgacgcgaaactactaaaccgcgaaccgcgaaccgcaaaaacgaaccgaacgccacttcccgtcccctaacgaacgccgacgcttcaaacgaatctccccgccgaccgatacgctactaccgcgaaatcttccttacccgactacacgaaacgctcgaccgctacgcccgaacgcgaactaaaaaaactactaccacgtctcccgcgcgacaccttcccgaaaccgaatacgccgccccgaaacaaaaaacgaaactccgaaaaaactacgaccctcctaactaccgcgaaaaatttccgacgctacgcgac

SEQ ID NO: 30755 - DNA, 2074 bp, Artificial Sequence
  chemically treated genomic DNA (Homo sapiens) CpG-island No: 30755
ttagcgagtttaattttcggtgcgaattaaataaataacgcgttttttatcgtttttttttttttttttcgttgatcgtttggtttttagttatttcggtcgtttacgttttaagtcgcggttttttgcgagggtagagcgtattcgggttatttcgggggttatttggtgattattttttatcggcgttgattttcggcgggttggggggcgggggagtcgagttgcgttggaaggttaaagtcgttattatgtagttgtcgtcgtcggcggttcggttagttcgataaggtggggtttttttttcgtcgcgtttttcggcgttcgtttcggtttcgtttttttttttttttttttagcgtatttgggagtcgtcggggagttttaggagtttttaatttcgggttcgtaatttcgcgttcgcgatcggtattggttgagttcgggacgtttttcgcgtcgcgtgttcgcgttgttttcgttttacgcggcgtttcgcgtatttttttcgtcgtcgatttatttcgttcggtggcggttttcgcgcgggttggcgtcgtcgcgtcgggaggaacgtattttgttcgcgtcggtgcggtcgtagttttcggcgagcgcggcgtggtcggttcggagcggggggcgggggcgggaggcgggggtcgtcgtcgttttcgagtcgtcgtcgtcgttgtttagtcgtttcgcgttcgcgcgtttatcgttcgttcgtatttgagttggagtttaatttttttttttttttttttttttcgatggagtcggtaattcgtgttcggcgtcggcgggaggaaacgcgttcgcgttttttcgcgcgtagatacgtttttttttgtttttcgtattttttttttacgtcggtagtataataaaaagttatttatatgcgaggaagtgattttcggtcgtatcgcgcgttttcgtcgtcgtcggttcggcggacgtaggtaaaagttggggcgtcgggcggcgttcggggcgcgggttcgggtttcgcgggcggcgacgtcggcgatattacgcgggcggcgttgcgtttttgcgttggtttcggttttttttcgttttcgtttttcgtttttcgtttcgtatacgtttaatttttcgtttttaatttttagcgcggtttcggtttcggttcggagcgattttttgtcgtcgtcgtcgtcgtcgtttttttcgggggcgtcgggcgaattttcgcgtttatcgggtcggtcgggttttttcgttgtttagtgtcgaggggaaaataaaacgtagagcgggtttcggagttggttcggtagttgcggttagggggttgaatttacgggtacggagttggtcgggggcgaacgggtttttggtgagttttagggtgttcgggttttcgggtcgtttttttcgcggcgtttttttgtgtaattttattcgatttaagtttaattcgatagttttcgagtacgagcgcgttcgtattattacgatttaattttcgcgtcgtcgtcgtcgtcgtcgttgtcgtcgtcgtcgtcgtcgtcgtcgcggttttagtacgttagcgtttgcgcgcgttcggtacgtcgcgcgtattcgaagtcgcggggtcgcgcgcgttcgtcgttagtttttttcgggtcgcgtcgcgttcgcgttcgcgttcgcgcgtcgttatttgacgttaggcgcgtttggtataatttatgtaagaattcggtcggggtggcggaggtcgagggagaggtcgagagaaaaggggcggcgcggagttgttgggtcgcgggtcgcgggtcgtaagggcgggtcgggcgttatttttcgttttttggcgggcgtcggcgttttaggcgggttttttcgtcggtcggtgcgttgttgtcgcggagttttttttgttcggttgtacggagcgttcggtcgttgcgttcgggcgcggattggaggggttgttgttacgtttttcgcgcggtattttttcggagtcgggtgcgtcgtttcggggtaggaagcggggtttcgggagggttgcgatttttttggttgtcgcgaagggttttcgacgttgcgcggt

SEQ ID NO: 30756 - DNA, 2074 bp, Artificial Sequence
  chemically treated genomic DNA (Homo sapiens) CpG-island No: 30756
accgcgcaacgtcgaaaacccttcgcgacaaccaaaaaaatcgcaaccctcccgaaaccccgcttcctaccccgaaacgacgcacccgactccgaaaaaataccgcgcgaaaaacgtaacaacaacccctccaatccgcgcccgaacgcaacgaccgaacgctccgtacaaccgaacaaaaaaaactccgcgacaacaacgcaccgaccgacgaaaaaacccgcctaaaacgccgacgcccgccaaaaaacgaaaaataacgcccgacccgcccttacgacccgcgacccgcgacccaacaactccgcgccgccccttttctctcgacctctccctcgacctccgccaccccgaccgaattcttacataaattataccaaacgcgcctaacgtcaaataacgacgcgcgaacgcgaacgcgaacgcgacgcgacccgaaaaaaactaacgacgaacgcgcgcgaccccgcgacttcgaatacgcgcgacgtaccgaacgcgcgcaaacgctaacgtactaaaaccgcgacgacgacgacgacgacgacgacaacgacgacgacgacgacgacgcgaaaattaaatcgtaataatacgaacgcgctcgtactcgaaaactatcgaattaaacttaaatcgaataaaattacacaaaaaaacgccgcgaaaaaaacgacccgaaaacccgaacaccctaaaactcaccaaaaacccgttcgcccccgaccaactccgtacccgtaaattcaaccccctaaccgcaactaccgaaccaactccgaaacccgctctacgttttattttcccctcgacactaaacaacgaaaaaacccgaccgacccgataaacgcgaaaattcgcccgacgcccccgaaaaaaacgacgacgacgacgacgacaaaaaatcgctccgaaccgaaaccgaaaccgcgctaaaaattaaaaacgaaaaattaaacgtatacgaaacgaaaaacgaaaaacgaaaacgaaaaaaaaccgaaaccaacgcaaaaacgcaacgccgcccgcgtaatatcgccgacgtcgccgcccgcgaaacccgaacccgcgccccgaacgccgcccgacgccccaacttttacctacgtccgccgaaccgacgacgacgaaaacgcgcgatacgaccgaaaatcacttcctcgcatataaataactttttattatactaccgacgtaaaaaaaaaatacgaaaaacaaaaaaaaacgtatctacgcgcgaaaaaacgcgaacgcgtttcctcccgccgacgccgaacacgaattaccgactccatcgaaaaaaaaaaaaaaaaaaaaaaattaaactccaactcaaatacgaacgaacgataaacgcgcgaacgcgaaacgactaaacaacgacgacgacgactcgaaaacgacgacgacccccgcctcccgcccccgccccccgctccgaaccgaccacgccgcgctcgccgaaaactacgaccgcaccgacgcgaacaaaatacgttcctcccgacgcgacgacgccaacccgcgcgaaaaccgccaccgaacgaaataaatcgacgacgaaaaaaatacgcgaaacgccgcgtaaaacgaaaacaacgcgaacacgcgacgcgaaaaacgtcccgaactcaaccaataccgatcgcgaacgcgaaattacgaacccgaaattaaaaactcctaaaactccccgacgactcccaaatacgctaaaaaaaaaaaaaaaaaaacgaaaccgaaacgaacgccgaaaaacgcgacgaaaaaaaaaccccaccttatcgaactaaccgaaccgccgacgacgacaactacataataacgactttaaccttccaacgcaactcgactcccccgccccccaacccgccgaaaatcaacgccgataaaaaataatcaccaaataacccccgaaataacccgaatacgctctaccctcgcaaaaaaccgcgacttaaaacgtaaacgaccgaaataactaaaaaccaaacgatcaacgaaaaaaaaaaaaaaaaacgataaaaaacgcgttatttatttaattcgcaccgaaaattaaactcgctaa

SEQ ID NO: 30757 - DNA, 771 bp, Artificial Sequence
  chemically treated genomic DNA (Homo sapiens) CpG-island No: 30757
tgcgaaagaggaagttcggaaggagcgaggaatggggtgggtggtagcgggggcggtttagtcgttgtcgtttttgtttattagtacggcgttcgatttttcggtgatttttagtagcgcgtgtacgtcggggttgttttcgcgtcgtaggtcgtcggttttttcgcgtttcgtcgttttcgtcgtcgtcggcgtttatttttattatttcggtggttttgagtatttttatttggttttcgcggatttttttgacgtggaaggtgaagggtggtattttgtagatcgcggttttggagcgcgcgtatattacgtggtcgggcgtgaaggatttgcgtaatttgtttcgcgacgtttttagtttttcgcgtcgttcggcgggtattaggcgcgtgtttagtttgtttatgcgtttttttagggtgtgtcgcgttttttttaggttttttttggttttgaggcgcgttttttttaggttttcgcgggtacgtattttggttttttttattttttttttggagaaggtttttttgaagtcgtttacgcgtcgtagtgtttgcgtttgatacgttttgcgcgggattttttaataatttttttaatttttatcgtttcgttcgacgaaagttttagcgtcgttgcgtttttttcgggtcgttcgttttcgtttagtttttcgttttttttttttggtagcgttttcgatttttttagcgatttgttgatgtttagtttggtcggtagttttattttattttaagggaagaggag

SEQ ID NO: 30758 - DNA, 771 bp, Artificial Sequence
  chemically treated genomic DNA (Homo sapiens) CpG-island No: 30758
ctcctcttcccttaaaataaaataaaactaccgaccaaactaaacatcaacaaatcgctaaaaaaatcgaaaacgctaccaaaaaaaaaaaacgaaaaactaaacgaaaacgaacgacccgaaaaaaacgcaacgacgctaaaactttcgtcgaacgaaacgataaaaattaaaaaaattattaaaaaatcccgcgcaaaacgtatcaaacgcaaacactacgacgcgtaaacgacttcaaaaaaaccttctccaaaaaaaaaataaaaaaaaccaaaatacgtacccgcgaaaacctaaaaaaaacgcgcctcaaaaccaaaaaaaacctaaaaaaaacgcgacacaccctaaaaaaacgcataaacaaactaaacacgcgcctaatacccgccgaacgacgcgaaaaactaaaaacgtcgcgaaacaaattacgcaaatccttcacgcccgaccacgtaatatacgcgcgctccaaaaccgcgatctacaaaataccacccttcaccttccacgtcaaaaaaatccgcgaaaaccaaataaaaatactcaaaaccaccgaaataataaaaataaacgccgacgacgacgaaaacgacgaaacgcgaaaaaaccgacgacctacgacgcgaaaacaaccccgacgtacacgcgctactaaaaatcaccgaaaaatcgaacgccgtactaataaacaaaaacgacaacgactaaaccgcccccgctaccacccaccccattcctcgctccttccgaacttcctctttcgca

SEQ ID NO: 30759 - DNA, 771 bp, Artificial Sequence
  chemically treated genomic DNA (Homo sapiens) CpG-island No: 30759
tttttttttttttaggatgaagtgaagttgtcggttaaattgagtattagtaaatcgttgaaagagtcggaggcgttgttagagaaggagggcgaggagttgggcgagggcgagcggttcgaggaggacgtagcggcgttggagttttcgtcggacgaggcggtggaggttgaggaggttattgaggagtttcgcgtagagcgtattaagcgtagatattgcggcgcgtggacgattttaagaaggttttttttaaggagaagatggagaagattaaggtgcgtattcgcgagaatttggagaagacgcgttttaagattaaggaaaatttggagaagacgcggtatattttggagaagcgtatgaataagttgggtacgcgtttggtgttcgtcgagcggcgcgagaaattgaagacgtcgcgggataagttgcgtaaattttttacgttcgattacgtggtgtacgcgcgttttaagatcgcggtttataaggtgttattttttattttttacgttaagaagattcgcgagggttaggtggaagtgtttaaggttatcgagatggtggaggtgggcgtcgacgacgacgagggcggcggagcgcggggaggtcggcgatttgcggcgcgggagtagtttcgacgtgtacgcgttgttggagattatcgaggagtcggacgtcgtgttggtggataagagcgatagcgattgagtcgttttcgttgttatttattttatttttcgtttttttcgaattttttttttcgta

SEQ ID NO: 30760 - DNA, 771 bp, Artificial Sequence
  chemically treated genomic DNA (Homo sapiens) CpG-island No: 30760
tacgaaaaaaaaaattcgaaaaaaacgaaaaataaaataaataacaacgaaaacgactcaatcgctatcgctcttatccaccaacacgacgtccgactcctcgataatctccaacaacgcgtacacgtcgaaactactcccgcgccgcaaatcgccgacctccccgcgctccgccgccctcgtcgtcgtcgacgcccacctccaccatctcgataaccttaaacacttccacctaaccctcgcgaatcttcttaacgtaaaaaataaaaaataacaccttataaaccgcgatcttaaaacgcgcgtacaccacgtaatcgaacgtaaaaaatttacgcaacttatcccgcgacgtcttcaatttctcgcgccgctcgacgaacaccaaacgcgtacccaacttattcatacgcttctccaaaatataccgcgtcttctccaaattttccttaatcttaaaacgcgtcttctccaaattctcgcgaatacgcaccttaatcttctccatcttctccttaaaaaaaaccttcttaaaatcgtccacgcgccgcaatatctacgcttaatacgctctacgcgaaactcctcaataacctcctcaacctccaccgcctcgtccgacgaaaactccaacgccgctacgtcctcctcgaaccgctcgccctcgcccaactcctcgccctccttctctaacaacgcctccgactctttcaacgatttactaatactcaatttaaccgacaacttcacttcatcctaaaaaaaaaaaaa

SEQ ID NO: 30761 - DNA, 1185 bp, Artificial Sequence
  chemically treated genomic DNA (Homo sapiens) CpG-island No: 30761
gggcgtttaattttttttttgttttttttttatttcgtgagaaagtcgacgtttttattcgtttggttttttcgaaatacgtttcgggtggttaatgcgatttttagggtttaaagattagattttcgcgttttttattaagatatcgacgcgaagcgtagaggtggaatcgcggacgttttggtaggttcgggatatattgattttggtggcgcgatgtttttttcgtacgcggacgtattcgtagttttatttttttaaattttattgcgggaaggaattttcgattcgtatcgttttcgtttcgtagtaacggcgatattttgaggttcggacgagcggcgtttttttttagtttcggttattttttagcgaagttttaggcgatcgagacgaagaaagagagttcgaggaattggatatttacgagtttatcgtttattttgtcggcggggaggaaggtcgttttcgttcgtcgtggtatgcgtttcgcgggtgtttttttaatattgtagcgcggagggtttttttttacgtcggcgattgtttatcgcgtttttcgttttttttcggttttcggtttttgttttagtttttttttttcggtttttttttttttttgttttgtttttttttcgtttttttattttttttattcggtcggtaattttacgtttcgtttttttttagcggcggttattttatcgtcggggtgttaggggtatttcgaggttttacgcggggcgatttttatttcggtcgtagtttattgttttagtttcgtattagtaagttttaagagtgtggatgcgataggcgcgcgtagagggcgttcgcgaatttttgtgttatcgttttttttcggcgcgcggggtcgagcgagattagagtgtgttggattgcgtgttcggatttcgtgaatgaagggagcgggaggaaggagcgggggtgggcggtaggtatggagggggcgtttggtttttagagtttcgcgtttgtggattgcgcgtttttggagggtagttttttatttttttcggttcgggcgtttttttgagttttgttttcgttttatttcgcgtatttaggtttcggttttttcgttttggaaagcggttttcgtttttttttagttagttagagcgcggaggttttatttagtaatcgagcgggggataagggggg

SEQ ID NO: 30762 - DNA, 1185 bp, Artificial Sequence
  chemically treated genomic DNA (Homo sapiens) CpG-island No: 30762
ccccccttatcccccgctcgattactaaataaaacctccgcgctctaactaactaaaaaaaaacgaaaaccgctttccaaaacgaaaaaaccgaaacctaaatacgcgaaataaaacgaaaacaaaactcaaaaaaacgcccgaaccgaaaaaaataaaaaactaccctccaaaaacgcgcaatccacaaacgcgaaactctaaaaaccaaacgccccctccatacctaccgcccacccccgctccttcctcccgctcccttcattcacgaaatccgaacacgcaatccaacacactctaatctcgctcgaccccgcgcgccgaaaaaaaacgataacacaaaaattcgcgaacgccctctacgcgcgcctatcgcatccacactcttaaaacttactaatacgaaactaaaacaataaactacgaccgaaataaaaatcgccccgcgtaaaacctcgaaatacccctaacaccccgacgataaaataaccgccgctaaaaaaaaacgaaacgtaaaattaccgaccgaataaaaaaaataaaaaaacgaaaaaaaaacaaaacaaaaaaaaaaaaaaaccgaaaaaaaaaaactaaaacaaaaaccgaaaaccgaaaaaaaacgaaaaacgcgataaacaatcgccgacgtaaaaaaaaaccctccgcgctacaatattaaaaaaacacccgcgaaacgcataccacgacgaacgaaaacgaccttcctccccgccgacaaaataaacgataaactcgtaaatatccaattcctcgaactctctttcttcgtctcgatcgcctaaaacttcgctaaaaaataaccgaaactaaaaaaaaacgccgctcgtccgaacctcaaaatatcgccgttactacgaaacgaaaacgatacgaatcgaaaattccttcccgcaataaaatttaaaaaaataaaactacgaatacgtccgcgtacgaaaaaaacatcgcgccaccaaaatcaatatatcccgaacctaccaaaacgtccgcgattccacctctacgcttcgcgtcgatatcttaataaaaaacgcgaaaatctaatctttaaaccctaaaaatcgcattaaccacccgaaacgtatttcgaaaaaaccaaacgaataaaaacgtcgactttctcacgaaataaaaaaaaaacaaaaaaaaaattaaacgccc

SEQ ID NO: 30763 - DNA, 1185 bp, Artificial Sequence
  chemically treated genomic DNA (Homo sapiens) CpG-island No: 30763
ttttttttatttttcgttcggttgttgggtggggttttcgcgttttggttagttgggagggggcgagggtcgttttttagggcgggaagatcggagtttaggtgcgcggggtggggcggggatagagtttagagaggcgttcgggtcggagaaggtagggggttgttttttagagacgcgtagtttatagacgcgaagttttggggattaagcgttttttttatgtttgtcgtttattttcgtttttttttttcgttttttttatttacgaggttcgagtacgtagtttagtatattttagtttcgttcggtttcgcgcgtcgaggggaggcgatgatatagaggttcgcggacgttttttacgcgcgtttgtcgtatttatatttttgggatttgttaatgcggggttggagtagtgggttgcggtcggggtggaggtcgtttcgcgtggggtttcggggtatttttagtatttcggcggtggagtggtcgtcgttggagggaggcgagacgtgggattgtcggtcgggtaaaaggagtgagggggcggggaggaggtagagtaaggggaggaagaggtcgggagaagagggttagagtaaagatcgagagtcggagaaaggcgaaaggcgcggtgagtaatcgtcgacgtagagaggggtttttcgcgttgtaatattgagaaggtattcgcgggacgtatgttacggcggacggaggcggttttttttttcgtcggtagggtggacggtgggttcgtgagtatttagtttttcgaatttttttttttcgtttcggtcgtttgaggtttcgttggaaagtggtcgaggttgggagggggcgtcgttcgttcggattttagggtgtcgtcgttgttgcggggcgggagcggtgcgagtcgggggttttttttcgtagtggagtttgggggagtggggttgcgagtgcgttcgcgtgcgaagagggtatcgcgttattaggattaatatgtttcgggtttgttagggcgttcgcgattttatttttgcgtttcgcgtcggtgttttggtggggaacgcgggagtttagtttttagattttagaaatcgtattgattattcgaagcgtatttcggaaagattaggcgggtggaagcgtcggtttttttacgggatagggagaggataaggaaggggttgggcgttt

SEQ ID NO: 30764 - DNA, 1185 bp, Artificial Sequence
  chemically treated genomic DNA (Homo sapiens) CpG-island No: 30764
aaacgcccaaccccttccttatcctctccctatcccgtaaaaaaaccgacgcttccacccgcctaatctttccgaaatacgcttcgaataatcaatacgatttctaaaatctaaaaactaaactcccgcgttccccaccaaaacaccgacgcgaaacgcaaaaataaaatcgcgaacgccctaacaaacccgaaacatattaatcctaataacgcgataccctcttcgcacgcgaacgcactcgcaaccccactcccccaaactccactacgaaaaaaaacccccgactcgcaccgctcccgccccgcaacaacgacgacaccctaaaatccgaacgaacgacgccccctcccaacctcgaccactttccaacgaaacctcaaacgaccgaaacgaaaaaaaaaaattcgaaaaactaaatactcacgaacccaccgtccaccctaccgacgaaaaaaaaaaccgcctccgtccgccgtaacatacgtcccgcgaataccttctcaatattacaacgcgaaaaacccctctctacgtcgacgattactcaccgcgcctttcgcctttctccgactctcgatctttactctaaccctcttctcccgacctcttcctccccttactctacctcctccccgccccctcactccttttacccgaccgacaatcccacgtctcgcctccctccaacgacgaccactccaccgccgaaatactaaaaataccccgaaaccccacgcgaaacgacctccaccccgaccgcaacccactactccaaccccgcattaacaaatcccaaaaatataaatacgacaaacgcgcgtaaaaaacgtccgcgaacctctatatcatcgcctcccctcgacgcgcgaaaccgaacgaaactaaaatatactaaactacgtactcgaacctcgtaaataaaaaaaacgaaaaaaaaaaacgaaaataaacgacaaacataaaaaaaacgcttaatccccaaaacttcgcgtctataaactacgcgtctctaaaaaacaaccccctaccttctccgacccgaacgcctctctaaactctatccccgccccaccccgcgcacctaaactccgatcttcccgccctaaaaaacgaccctcgccccctcccaactaaccaaaacgcgaaaaccccacccaacaaccgaacgaaaaataaaaaaaa

SEQ ID NO: 30765 - DNA, 787 bp, Artificial Sequence
  chemically treated genomic DNA (Homo sapiens) CpG-island No: 30765
ttggaataaattcgggtatttgatttttcgtattttcggagttgttttgggaagtcgaaataagtttgggcgttcggattgcggagattggaaagtagggggcggagggcgggagattgggggcgggaagtggaggtgtaggttgtagttggggatcgcggtgggcgttggaggggagggtttgtgtgcgcggttgttttttagcgttgggggagcggacgggttaggggttttagggaagcggcgtttcgggatcggggtggttttttcgtttttgtgtgcgcggcgatttttatatttagttcgggcggaggagtttgagagaagcgttattgagagtggggtgggcgttttggggaaaggtttgcgtgcgttcggttttatcgttgttagagaagtggaagagagagagtgggcgtcgggagggggtttataggcgtcgcgatttattttatttttttttacgtttgtgggagtgagtggggaaggggttttgggagaggcggcgcgcgggtattgaggttatcgtgagtttttcggatttgatagtattaaaggaaaattttggcgagtagtaggttagcgagcgattttagtagtagggacgcggtcgtgcgagattcgcggataggcgaagggggattttaggggagtagttgttgtttacgggttacgggcgatgtacggagtggagaagtgaacgtggtttataggatttttgttcggaaggtggagagcgttataggggaattttttcgatttttgttcgtttcgtaatttggtaaaa

SEQ ID NO: 30766 - DNA, 787 bp, Artificial Sequence
  chemically treated genomic DNA (Homo sapiens) CpG-island No: 30766
ttttaccaaattacgaaacgaacaaaaatcgaaaaaattcccctataacgctctccaccttccgaacaaaaatcctataaaccacgttcacttctccactccgtacatcgcccgtaacccgtaaacaacaactactcccctaaaatcccccttcgcctatccgcgaatctcgcacgaccgcgtccctactactaaaatcgctcgctaacctactactcgccaaaattttcctttaatactatcaaatccgaaaaactcacgataacctcaatacccgcgcgccgcctctcccaaaaccccttccccactcactcccacaaacgtaaaaaaaaataaaataaatcgcgacgcctataaaccccctcccgacgcccactctctctcttccacttctctaacaacgataaaaccgaacgcacgcaaacctttccccaaaacgcccaccccactctcaataacgcttctctcaaactcctccgcccgaactaaatataaaaatcgccgcgcacacaaaaacgaaaaaaccaccccgatcccgaaacgccgcttccctaaaacccctaacccgtccgctcccccaacgctaaaaaacaaccgcgcacacaaaccctcccctccaacgcccaccgcgatccccaactacaacctacacctccacttcccgcccccaatctcccgccctccgccccctactttccaatctccgcaatccgaacgcccaaacttatttcgacttcccaaaacaactccgaaaatacgaaaaatcaaatacccgaatttattccaa

SEQ ID NO: 30767 - DNA, 787 bp, Artificial Sequence
  chemically treated genomic DNA (Homo sapiens) CpG-island No: 30767
ttttgttaagttacgagacggataggaatcgaggagatttttttgtagcgttttttatttttcggatagaaattttgtagattacgtttatttttttatttcgtgtatcgttcgtggttcgtgggtagtagttgtttttttgggattttttttcgtttgttcgcgagtttcgtacggtcgcgtttttgttgttggggtcgttcgttggtttgttgttcgttaggatttttttttgatgttgttaagttcgggaagtttacgatgattttagtgttcgcgcgtcgttttttttaaagttttttttttatttatttttataagcgtggagggagatggggtaggtcgcggcgtttatagattttttttcggcgtttatttttttttttttatttttttagtagcggtagggtcgagcgtacgtaaatttttttttaaaacgtttattttatttttagtagcgttttttttaggttttttcgttcgagttgggtgtggggatcgtcgcgtatatagagacgggaaagttatttcggtttcggagcgtcgtttttttagagtttttggttcgttcgtttttttagcgttggaggatagtcgcgtatatagatttttttttttaacgtttatcgcggtttttagttgtagtttgtatttttatttttcgtttttagtttttcgtttttcgttttttgttttttagttttcgtagttcgggcgtttagatttgtttcgattttttagggtagtttcgagggtgcggaagattaagtgttcgggtttgttttag

SEQ ID NO: 30768 - DNA, 787 bp, Artificial Sequence
  chemically treated genomic DNA (Homo sapiens) CpG-island No: 30768
ctaaaacaaacccgaacacttaatcttccgcaccctcgaaactaccctaaaaaatcgaaacaaatctaaacgcccgaactacgaaaactaaaaaacaaaaaacgaaaaacgaaaaactaaaaacgaaaaataaaaatacaaactacaactaaaaaccgcgataaacgttaaaaaaaaaaatctatatacgcgactatcctccaacgctaaaaaaacgaacgaaccaaaaactctaaaaaaacgacgctccgaaaccgaaataactttcccgtctctatatacgcgacgatccccacacccaactcgaacgaaaaaacctaaaaaaaacgctactaaaaataaaataaacgttttaaaaaaaaatttacgtacgctcgaccctaccgctactaaaaaaataaaaaaaaaaaaataaacgccgaaaaaaaatctataaacgccgcgacctaccccatctccctccacgcttataaaaataaataaaaaaaaaactttaaaaaaaacgacgcgcgaacactaaaatcatcgtaaacttcccgaacttaacaacatcaaaaaaaaatcctaacgaacaacaaaccaacgaacgaccccaacaacaaaaacgcgaccgtacgaaactcgcgaacaaacgaaaaaaaatcccaaaaaaacaactactacccacgaaccacgaacgatacacgaaataaaaaaataaacgtaatctacaaaatttctatccgaaaaataaaaaacgctacaaaaaaatctcctcgattcctatccgtctcgtaacttaacaaaa

SEQ ID NO: 30769 - DNA, 716 bp, Artificial Sequence
  chemically treated genomic DNA (Homo sapiens) CpG-island No: 30769
  unsure (30, 32)
gtatttttcgttttttttttttttatttangnaatttttttttttatatattttttaatttttcgttttagttttttaaatttttatttttttcgttaagtagcgtcgtcgtttcggttttttattagatttttttagtttcgcgttttatcggtgtcgtcgtttttttttttttttagtttcggttttatataaagtttcggatttatcgcgcggtcggtttcgggagtcgttattttcgatttcgcgggtttcgggtcgtagagtcgtcgttgttacggggtttaggtcgttattcgttttcgcggttttttttttttattttatttcggtttcggtttcggtttcggttttggttttttgtttttttttcgcgttttttcgtttcgttcggtcggtgtcgttgtgttcggggtcgcgggttttttagtcgtcgttatcgtcgtcgtcgtcgcgattcgggataattagagttattcggaagacgcggatattggattgttaggttttcggattcggatttcgcgtttgtgtggagtttggagtcggtgagcgtaggggaaattcggaatttggatgaaggagcgaaattttgggtttcggaatgcgcgtttattcggagtttagattagggagttttagtttagggaatgttggaaaattcggcgtgtcggttagaattaagataaatttaaagaaatttggattagagagtt

SEQ ID NO: 30770 - DNA, 716 bp, Artificial Sequence
  chemically treated genomic DNA (Homo sapiens) CpG-island No: 30770
  unsure (685, 687)
aactctctaatccaaatttctttaaatttatcttaattctaaccgacacgccgaattttccaacattccctaaactaaaactccctaatctaaactccgaataaacgcgcattccgaaacccaaaatttcgctccttcatccaaattccgaatttcccctacgctcaccgactccaaactccacacaaacgcgaaatccgaatccgaaaacctaacaatccaatatccgcgtcttccgaataactctaattatcccgaatcgcgacgacgacgacgataacgacgactaaaaaacccgcgaccccgaacacaacgacaccgaccgaacgaaacgaaaaaacgcgaaaaaaaaacaaaaaaccaaaaccgaaaccgaaaccgaaaccgaaataaaataaaaaaaaaaaaccgcgaaaacgaataacgacctaaaccccgtaacaacgacgactctacgacccgaaacccgcgaaatcgaaaataacgactcccgaaaccgaccgcgcgataaatccgaaactttatataaaaccgaaactaaaaaaaaaaaaaaacgacgacaccgataaaacgcgaaactaaaaaaatctaataaaaaaccgaaacgacgacgctacttaacgaaaaaaataaaaatttaaaaaactaaaacgaaaaattaaaaaatatataaaaaaaaaaattncntaaataaaaaaaaaaaaaacgaaaaatac

SEQ ID NO: 30771 - DNA, 716 bp, Artificial Sequence
  chemically treated genomic DNA (Homo sapiens) CpG-island No: 30771
  unsure (685, 687)
agttttttaatttaggtttttttgagtttattttggttttaatcggtacgtcgggttttttagtattttttgagttaagattttttaatttgggtttcgggtgagcgcgtatttcgagatttaggatttcgtttttttatttaggtttcgggttttttttgcgtttatcggttttagattttatataagcgcggaattcggattcgagggtttggtagtttagtgttcgcgtttttcgggtgattttggttgtttcggatcgcggcggcggcggcggtggcggcggttgagggattcgcggtttcggatatagcggtatcggtcgggcggggcggagaggcgcggggagggggtagagagttagagtcggagtcggagtcggagtcggggtggggtgggggggaggggtcgcgggaacggatggcggtttgggtttcgtagtagcggcggttttacggttcggggttcgcgaggtcggaggtggcggttttcgggatcggtcgcgcggtgagttcggagttttgtgtggagtcgggattgggggaggaaagaggcggcggtatcgatggggcgcggggttgaggggatttgatggggggtcggggcggcggcgttgtttgacggaggaagtgggggtttggggggttggggcggagagttggaaggtgtgtaggggggggggttntntgggtggggggggggggggcgaggggtgt

SEQ ID NO: 30772 - DNA, 716 bp, Artificial Sequence
  chemically treated genomic DNA (Homo sapiens) CpG-island No: 30772
  unsure (30, 32)
acacccctcgccccccccccccccacccananaacccccccccctacacaccttccaactctccgccccaaccccccaaacccccacttcctccgtcaaacaacgccgccgccccgaccccccatcaaatcccctcaaccccgcgccccatcgataccgccgcctctttcctcccccaatcccgactccacacaaaactccgaactcaccgcgcgaccgatcccgaaaaccgccacctccgacctcgcgaaccccgaaccgtaaaaccgccgctactacgaaacccaaaccgccatccgttcccgcgacccctcccccccaccccaccccgactccgactccgactccgactctaactctctaccccctccccgcgcctctccgccccgcccgaccgataccgctatatccgaaaccgcgaatccctcaaccgccgccaccgccgccgccgccgcgatccgaaacaaccaaaatcacccgaaaaacgcgaacactaaactaccaaaccctcgaatccgaattccgcgcttatataaaatctaaaaccgataaacgcaaaaaaaacccgaaacctaaataaaaaaacgaaatcctaaatctcgaaatacgcgctcacccgaaacccaaattaaaaaatcttaactcaaaaaatactaaaaaacccgacgtaccgattaaaaccaaaataaactcaaaaaaacctaaattaaaaaact

SEQ ID NO: 30773 - DNA, 505 bp, Artificial Sequence
  chemically treated genomic DNA (Homo sapiens) CpG-island No: 30773
  unsure (173, 333)
gtcggtacgtttacgttcgcggatttttagacgttttagataatcggtcgcgtcgttagttagcgcgcgttatttatttagtttttcgttatagttcgatgcgataatattatcgtcgcgtattagtatcggcgggtgtgtcgatgattgttcgttttagtagatcgcgtagntcggtaaattcgtttatttttttacgtagcgtttgtatcggtgtattatcgatagtttttaattgcgtacgagtttcggtagttgttggaaagcgtggcgtatacgggttagatcgcgtgggcgagtagttcgtaaagttagacgtgttagaatacgttntaggtcgtcgattgacgtagtatcggttgtagtcggcggtgaaattttgtatgcgttaatagttgttgggtttagtatacgcggtatcgtattgtatatgagtagcgtttagtatacggtgttatcgcgtgagggttagtcgagaagaagtagcgtattttcgtatattcgt

SEQ ID NO: 30774 - DNA, 505 bp, Artificial Sequence
  chemically treated genomic DNA (Homo sapiens) CpG-island No: 30774
  unsure (173, 333)
acgaatatacgaaaatacgctacttcttctcgactaaccctcacgcgataacaccgtatactaaacgctactcatatacaatacgataccgcgtatactaaacccaacaactattaacgcatacaaaatttcaccgccgactacaaccgatactacgtcaatcgacgacctanaacgtattctaacacgtctaactttacgaactactcgcccacgcgatctaacccgtatacgccacgctttccaacaactaccgaaactcgtacgcaattaaaaactatcgataatacaccgatacaaacgctacgtaaaaaaataaacgaatttaccganctacgcgatctactaaaacgaacaatcatcgacacacccgccgatactaatacgcgacgataatattatcgcatcgaactataacgaaaaactaaataaataacgcgcgctaactaacgacgcgaccgattatctaaaacgtctaaaaatccgcgaacgtaaacgtaccgac

SEQ ID NO: 30775 - DNA, 505 bp, Artificial Sequence
  chemically treated genomic DNA (Homo sapiens) CpG-island No: 30775
  unsure (173, 333)
gcgggtgtgcgaaaatacgttgttttttttcgattgatttttacgcgatggtatcgtatgttgaacgttgtttatatgtagtgcgatatcgcgtgtgttgagtttagtaattattggcgtatgtaggattttatcgtcggttatagtcggtattgcgttagtcggcgatttgnaacgtattttggtacgtttggttttacgaattgttcgtttacgcgatttggttcgtatgcgttacgttttttagtaattgtcggagttcgtgcgtagttagaaattgtcgatagtgtatcggtataggcgttacgtgagaagatgggcgagtttgtcganttgcgcgatttgttggagcgagtaattatcgatatattcgtcggtgttggtacgcgacggtggtgttatcgtatcgggttataacgaagagttggatgagtggcgcgcgttggttgacggcgcgatcgattatttggagcgtttggaagttcgcgagcgtgaacgtatcggt

SEQ ID NO: 30776 - DNA, 505 bp, Artificial Sequence
  chemically treated genomic DNA (Homo sapiens) CpG-island No: 30776
  unsure (173, 333)
accgatacgttcacgctcgcgaacttccaaacgctccaaataatcgatcgcgccgtcaaccaacgcgcgccactcatccaactcttcgttataacccgatacgataacaccaccgtcgcgtaccaacaccgacgaatatatcgataattactcgctccaacaaatcgcgcaantcgacaaactcgcccatcttctcacgtaacgcctataccgatacactatcgacaatttctaactacgcacgaactccgacaattactaaaaaacgtaacgcatacgaaccaaatcgcgtaaacgaacaattcgtaaaaccaaacgtaccaaaatacgttncaaatcgccgactaacgcaataccgactataaccgacgataaaatcctacatacgccaataattactaaactcaacacacgcgatatcgcactacatataaacaacgttcaacatacgataccatcgcgtaaaaatcaatcgaaaaaaaacaacgtattttcgcacacccgc

SEQ ID NO: 30777 - DNA, 956 bp, Artificial Sequence
  chemically treated genomic DNA (Homo sapiens) CpG-island No: 30777
cgtttgcgtagtgggttttaggcgttgcgcgttgcgggagttaggagattttcgtttttggtttttcgtttcggtttttcgttttttagtttacgtttttttttgcgaacgcgtacgtgaacgggagcgcggacgcgttcgagaatgcgttttatttcgtagaagcgggtgggttttgtggagagtcgcgggttcgcgggtagtagcgttttttttatttcggcgggttcgggttcggtcggtcgtttatcggattggcggattggttgattgatacgtttcgtttgttttcgttttcgttcgtgtttcgtttagttttattttttttttcgtttttcgggttcgggggtagacggtagacggaggcgttttttttttttcgttttttttttcggttttttttttttttagtatttcggttgttgttcggtagcggtagtagttgcgtcggcggtttatatagtagcgagaggcgagaggaggttgtttcgaggatgaagtgtaaatttaattagatacggatttacgatttcgaggggtttaagaagcgggcggcgtgtttgtgttttcggagcgagcgcgaggacgaggttttgttagtgagtagtagtcggtattcggatcgttggatcgtgtcgggcggggtatggagttcgaggaggagtcgggcggtgcggcggttcgagaggtgtacgaagaggcgggagttaaggggaagttaggtcggtttttgggcgttttcgaatagaattaggattttaagtatagaacgtacgtgtatgtattgattgttacggagttgttggaggattgggaagattcggttagtattgggaggaagcgagagtggtttaaagtcgaagatgttattaaggttttttagtgttataagttcgtgtacgtcgaatatttggagaaattaaagttgggcggttttttaattaatggaaatttta

SEQ ID NO: 30778 - DNA, 956 bp, Artificial Sequence
  chemically treated genomic DNA (Homo sapiens) CpG-island No: 30778
taaaatttccattaattaaaaaaccgcccaactttaatttctccaaatattcgacgtacacgaacttataacactaaaaaaccttaataacatcttcgactttaaaccactctcgcttcctcccaatactaaccgaatcttcccaatcctccaacaactccgtaacaatcaatacatacacgtacgttctatacttaaaatcctaattctattcgaaaacgcccaaaaaccgacctaacttccccttaactcccgcctcttcgtacacctctcgaaccgccgcaccgcccgactcctcctcgaactccataccccgcccgacacgatccaacgatccgaataccgactactactcactaacaaaacctcgtcctcgcgctcgctccgaaaacacaaacacgccgcccgcttcttaaacccctcgaaatcgtaaatccgtatctaattaaatttacacttcatcctcgaaacaacctcctctcgcctctcgctactatataaaccgccgacgcaactactaccgctaccgaacaacaaccgaaatactaaaaaaaaaaaaaaccgaaaaaaaaaacgaaaaaaaaaaaacgcctccgtctaccgtctacccccgaacccgaaaaacgaaaaaaaaaataaaactaaacgaaacacgaacgaaaacgaaaacaaacgaaacgtatcaatcaaccaatccgccaatccgataaacgaccgaccgaacccgaacccgccgaaataaaaaaaacgctactacccgcgaacccgcgactctccacaaaacccacccgcttctacgaaataaaacgcattctcgaacgcgtccgcgctcccgttcacgtacgcgttcgcaaaaaaaaacgtaaactaaaaaacgaaaaaccgaaacgaaaaaccaaaaacgaaaatctcctaactcccgcaacgcgcaacgcctaaaacccactacgcaaacg

SEQ ID NO: 30779 - DNA, 956 bp, Artificial Sequence
  chemically treated genomic DNA (Homo sapiens) CpG-island No: 30779
tggagtttttattggttggggaatcgtttagttttagtttttttagatattcggcgtgtacgggtttgtggtattggagaattttgatggtattttcgattttgaattattttcgtttttttttaatgttaatcgaatttttttaattttttagtagtttcgtgatagttagtatatatacgtacgttttgtgtttggggttttggttttgttcgaagacgtttaggagtcggtttaatttttttttgattttcgttttttcgtatatttttcggatcgtcgtatcgttcggttttttttcgggttttatgtttcgttcggtacgatttagcggttcgggtatcggttgttatttattaataggatttcgttttcgcgttcgtttcggaagtataggtacgtcgttcgttttttgaatttttcggggtcgtaggttcgtgtttggttgggtttgtattttattttcgaggtagttttttttcgtttttcgttgttgtgtgggtcgtcgacgtagttgttgtcgttgtcgggtagtagtcgaggtgttgggaagagaaagggtcgaggagaggggcggggagagagaggcgttttcgtttgtcgtttgttttcgagttcggggagcggagggagagatgaagttgggcggggtacgggcggaggcgggggtaagcgaggcgtgttagttagttagttcgttagttcgatgggcggtcggtcgaattcgggttcgtcggagtggaggaggcgttgttgttcgcgagttcgcgattttttatagagtttattcgtttttgcgaggtgaagcgtattttcgggcgcgttcgcgttttcgtttacgtgcgcgttcgtaggggagggcgtgggttgaggggcgaggaatcggggcgaggggttaggggcgggggttttttggttttcgtagcgcgtaacgtttggggtttattgcgtaggcg

SEQ ID NO: 30780 - DNA, 956 bp, Artificial Sequence
  chemically treated genomic DNA (Homo sapiens) CpG-island No: 30780
cgcctacgcaataaaccccaaacgttacgcgctacgaaaaccaaaaaacccccgcccctaacccctcgccccgattcctcgcccctcaacccacgccctcccctacgaacgcgcacgtaaacgaaaacgcgaacgcgcccgaaaatacgcttcacctcgcaaaaacgaataaactctataaaaaatcgcgaactcgcgaacaacaacgcctcctccactccgacgaacccgaattcgaccgaccgcccatcgaactaacgaactaactaactaacacgcctcgcttacccccgcctccgcccgtaccccgcccaacttcatctctccctccgctccccgaactcgaaaacaaacgacaaacgaaaacgcctctctctccccgcccctctcctcgaccctttctcttcccaacacctcgactactacccgacaacgacaacaactacgtcgacgacccacacaacaacgaaaaacgaaaaaaaactacctcgaaaataaaatacaaacccaaccaaacacgaacctacgaccccgaaaaattcaaaaaacgaacgacgtacctatacttccgaaacgaacgcgaaaacgaaatcctattaataaataacaaccgatacccgaaccgctaaatcgtaccgaacgaaacataaaacccgaaaaaaaaccgaacgatacgacgatccgaaaaatatacgaaaaaacgaaaatcaaaaaaaaattaaaccgactcctaaacgtcttcgaacaaaaccaaaaccccaaacacaaaacgtacgtatatatactaactatcacgaaactactaaaaaattaaaaaaattcgattaacattaaaaaaaaacgaaaataattcaaaatcgaaaataccatcaaaattctccaataccacaaacccgtacacgccgaatatctaaaaaaactaaaactaaacgattccccaaccaataaaaactcca

SEQ ID NO: 30781 - DNA, 609 bp, Artificial Sequence
  chemically treated genomic DNA (Homo sapiens) CpG-island No: 30781
ttggtcgcgtcgttttcgcggttatttgttcgcggtcggtttttttcggttcgcgtttcgagtcgtttttatttgagtcggagatgtggattcggagcgggcggtttttgttcgaggacgacgagaggtcgttttgtgagcggtcgcgggggttcgggttttcgggaagttagcgtagggtaggcgtcgtcggcggggcgggcgtttcgggttcggggattgggatcgtcgtcgtttgttcggtcggatcgatcggggacgtcgcggggcgttagttcgtttcggttatcggttttcggcggcggggtcggagtatcgggtggggtcggcgtcgagggttgcgttgttcgttgttgttcggttttgtttcgcgcgtcgcgattcggaggtagcgagaagggcggggaggtggacgtcgggcgtcgaggagtcggtgcggagggcgggaggaggaagaggatagaaaagtttgtataggaaggagtcgtttatagtcggttttcgttttagcgggcgaaagttgtagggttcggagttgggtcgttttcggtgttcgcgaatttgttcggttgttttttttttaagtttcgggtattggttttcggtagg

SEQ ID NO: 30782 - DNA, 609 bp, Artificial Sequence
  chemically treated genomic DNA (Homo sapiens) CpG-island No: 30782
cctaccgaaaaccaatacccgaaacttaaaaaaaaaacaaccgaacaaattcgcgaacaccgaaaacgacccaactccgaaccctacaactttcgcccgctaaaacgaaaaccgactataaacgactccttcctatacaaacttttctatcctcttcctcctcccgccctccgcaccgactcctcgacgcccgacgtccacctccccgcccttctcgctacctccgaatcgcgacgcgcgaaacaaaaccgaacaacaacgaacaacgcaaccctcgacgccgaccccacccgatactccgaccccgccgccgaaaaccgataaccgaaacgaactaacgccccgcgacgtccccgatcgatccgaccgaacaaacgacgacgatcccaatccccgaacccgaaacgcccgccccgccgacgacgcctaccctacgctaacttcccgaaaacccgaacccccgcgaccgctcacaaaacgacctctcgtcgtcctcgaacaaaaaccgcccgctccgaatccacatctccgactcaaataaaaacgactcgaaacgcgaaccgaaaaaaaccgaccgcgaacaaataaccgcgaaaacgacgcgaccaa

SEQ ID NO: 30783 - DNA, 609 bp, Artificial Sequence
  chemically treated genomic DNA (Homo sapiens) CpG-island No: 30783
tttgtcgggggttagtgttcggggtttgggggaggagtagtcgggtaggttcgcgggtatcgagggcggtttagtttcgagttttgtagttttcgttcgttggagcgagagtcggttgtaggcggtttttttttgtgtaaatttttttgtttttttttttttttcgtttttcgtatcggtttttcggcgttcggcgtttattttttcgtttttttcgttgttttcgggtcgcggcgcgcggggtagagtcgggtagtagcgggtagcgtagttttcggcgtcggttttattcggtgtttcggtttcgtcgtcgggagtcgatggtcgaggcgggttggcgtttcgcggcgttttcggtcgattcggtcgggtaggcggcggcggttttagttttcgagttcgaggcgttcgtttcgtcggcggcgtttgttttgcgttggtttttcggggattcgagttttcgcggtcgtttatagagcgatttttcgtcgttttcgagtaggggtcgttcgtttcgggtttatattttcggtttaggtaagagcggttcggggcgcgggtcggggagggtcggtcgcgggtaggtggtcgcgagggcgacgcggttaa

SEQ ID NO: 30784 - DNA, 609 bp, Artificial Sequence
  chemically treated genomic DNA (Homo sapiens) CpG-island No: 30784
ttaaccgcgtcgccctcgcgaccacctacccgcgaccgaccctccccgacccgcgccccgaaccgctcttacctaaaccgaaaatataaacccgaaacgaacgacccctactcgaaaacgacgaaaaatcgctctataaacgaccgcgaaaactcgaatccccgaaaaaccaacgcaaaacaaacgccgccgacgaaacgaacgcctcgaactcgaaaactaaaaccgccgccgcctacccgaccgaatcgaccgaaaacgccgcgaaacgccaacccgcctcgaccatcgactcccgacgacgaaaccgaaacaccgaataaaaccgacgccgaaaactacgctacccgctactacccgactctaccccgcgcgccgcgacccgaaaacaacgaaaaaaacgaaaaaataaacgccgaacgccgaaaaaccgatacgaaaaacgaaaaaaaaaaaaaaacaaaaaaatttacacaaaaaaaaaccgcctacaaccgactctcgctccaacgaacgaaaactacaaaactcgaaactaaaccgccctcgatacccgcgaacctacccgactactcctcccccaaaccccgaacactaacccccgacaaa

SEQ ID NO: 30785 - DNA, 1034 bp, Artificial Sequence
  chemically treated genomic DNA (Homo sapiens) CpG-island No: 30785
cgtaggttgcgatggtgtttaggagttgtcgttgtcgttgttttatcgcgtttagtagttgttgggcgcgtttttttcggggcggttgtgggggtggtttttcgtcgagttttagtttcgttttttcgcggtttacgtcggtagtttttttgttcgggagagagcgagagatagacggttagggtcggcgtttgcgcggggttaagtttttttttttcgtttcgacgggtttttttttattttcgtgattagtttgagttcgggttttattttattttcgtttgcgcggttcgattatcgtttttttttcggtcgtttttttttttagcgttgcgttagggtttcgtaaggttgcgtttcgtttcgtttttatcggttttttttaatttttttgggggtcgtggtttttttaagttgttcggcgtagaggcggggtcgagttttttggatcggaagttggttgggagcgttattttttttcggaagcgggtttgggcggatgttttcggcgcgtcggtgtagggggatgagggtcgcggtggttgttagcgtggggttgagcgaggggtttgttggttttcggagcggtcgtttttttcgttcgtcgagtttcgtttcggcggttttcggcgttcggttgttgcggttttcggggagcggggtcgtgtaggtcgcgagttcggagcgcgtcggttggatcgaggcgttgcgggtcgtcgtggtcgagttgcgcgtcggcgtcgtggtggtcgtttttatcgatacgttgtacggtttggtttgcgcggcgagttgttcggcggttttgcgcgttgtgtatcgttttaagggtcgtagcgaggttaagtttttggtcgtatgtttcggtcgcgtggtcgacgtttataggtaaggtcgtttcgattcggtttcgttaggggcggtatcgcgggaggggttttcggtgataggtttgggagattgaggcgtagagagcgggaggggtttgtttaggtttattaaggaattcggaattggaaatatgtatcgaggat

SEQ ID NO: 30786 - DNA, 1034 bp, Artificial Sequence
  chemically treated genomic DNA (Homo sapiens) CpG-island No: 30786
atcctcgatacatatttccaattccgaattccttaataaacctaaacaaacccctcccgctctctacgcctcaatctcccaaacctatcaccgaaaacccctcccgcgataccgcccctaacgaaaccgaatcgaaacgaccttacctataaacgtcgaccacgcgaccgaaacatacgaccaaaaacttaacctcgctacgacccttaaaacgatacacaacgcgcaaaaccgccgaacaactcgccgcgcaaaccaaaccgtacaacgtatcgataaaaacgaccaccacgacgccgacgcgcaactcgaccacgacgacccgcaacgcctcgatccaaccgacgcgctccgaactcgcgacctacacgaccccgctccccgaaaaccgcaacaaccgaacgccgaaaaccgccgaaacgaaactcgacgaacgaaaaaaacgaccgctccgaaaaccaacaaacccctcgctcaaccccacgctaacaaccaccgcgaccctcatccccctacaccgacgcgccgaaaacatccgcccaaacccgcttccgaaaaaaaataacgctcccaaccaacttccgatccaaaaaactcgaccccgcctctacgccgaacaacttaaaaaaaccacgacccccaaaaaaattaaaaaaaaccgataaaaacgaaacgaaacgcaaccttacgaaaccctaacgcaacgctaaaaaaaaaaacgaccgaaaaaaaaacgataatcgaaccgcgcaaacgaaaataaaataaaacccgaactcaaactaatcacgaaaataaaaaaaaacccgtcgaaacgaaaaaaaaaaacttaaccccgcgcaaacgccgaccctaaccgtctatctctcgctctctcccgaacaaaaaaactaccgacgtaaaccgcgaaaaaacgaaactaaaactcgacgaaaaaccacccccacaaccgccccgaaaaaaacgcgcccaacaactactaaacgcgataaaacaacgacaacgacaactcctaaacaccatcgcaacctacg

SEQ ID NO: 30787 - DNA, 1034 bp, Artificial Sequence
  chemically treated genomic DNA (Homo sapiens) CpG-island No: 30787
gttttcggtatatatttttagtttcggattttttggtgagtttggataagtttttttcgttttttgcgttttagttttttaagtttgttatcggaaatttttttcgcggtgtcgtttttagcggggtcgggtcggggcggttttatttgtagacgtcggttacgcggtcgaggtatacggttagaggtttggtttcgttgcgatttttgaggcggtatatagcgcgtagagtcgtcgagtagttcgtcgcgtaggttaggtcgtatagcgtatcggtggggacggttattacggcgtcggcgcgtagttcggttacggcggttcgtagcgtttcggtttagtcggcgcgtttcgggttcgcggtttgtacggtttcgtttttcgggagtcgtaatagtcgggcgtcgggggtcgtcggagcgggattcggcgggcggaagaggcgatcgtttcgggagttagtaggtttttcgtttaattttacgttggtagttatcgcggtttttatttttttgtatcgacgcgtcggagatattcgtttaggttcgttttcgggaggaagtgacgtttttagttagttttcggtttaggagattcggtttcgtttttgcgtcgggtagtttaaagggattacgatttttaggaggattgaaggagatcggtggggacggggcggggcgtagttttgcgaagttttaacgtagcgttggggaggggggcggtcgaaaggggggcggtggtcgggtcgcgtaagcggagatggaatggggttcgggtttagattggttacgggggtgagagggggttcgtcggggcgggaggaaggggtttggtttcgcgtaagcgtcggttttgatcgtttgtttttcgttttttttcgggtagggaggttgtcggcgtggatcgcgggaaggcggggttggggttcggcgggaggttatttttatagtcgtttcgggaggagcgcgtttagtagttgttggacgcggtggagtagcggtagcggtagtttttggatattatcgtagtttgcg

SEQ ID NO: 30788 - DNA, 1034 bp, Artificial Sequence
  chemically treated genomic DNA (Homo sapiens) CpG-island No: 30788
cgcaaactacgataatatccaaaaactaccgctaccgctactccaccgcgtccaacaactactaaacgcgctcctcccgaaacgactataaaaataacctcccgccgaaccccaaccccgccttcccgcgatccacgccgacaacctccctacccgaaaaaaaacgaaaaacaaacgatcaaaaccgacgcttacgcgaaaccaaaccccttcctcccgccccgacgaaccccctctcacccccgtaaccaatctaaacccgaaccccattccatctccgcttacgcgacccgaccaccgcccccctttcgaccgcccccctccccaacgctacgttaaaacttcgcaaaactacgccccgccccgtccccaccgatctccttcaatcctcctaaaaatcgtaatccctttaaactacccgacgcaaaaacgaaaccgaatctcctaaaccgaaaactaactaaaaacgtcacttcctcccgaaaacgaacctaaacgaatatctccgacgcgtcgatacaaaaaaataaaaaccgcgataactaccaacgtaaaattaaacgaaaaacctactaactcccgaaacgatcgcctcttccgcccgccgaatcccgctccgacgacccccgacgcccgactattacgactcccgaaaaacgaaaccgtacaaaccgcgaacccgaaacgcgccgactaaaccgaaacgctacgaaccgccgtaaccgaactacgcgccgacgccgtaataaccgtccccaccgatacgctatacgacctaacctacgcgacgaactactcgacgactctacgcgctatataccgcctcaaaaatcgcaacgaaaccaaacctctaaccgtatacctcgaccgcgtaaccgacgtctacaaataaaaccgccccgacccgaccccgctaaaaacgacaccgcgaaaaaaatttccgataacaaacttaaaaaactaaaacgcaaaaaacgaaaaaaacttatccaaactcaccaaaaaatccgaaactaaaaatatataccgaaaac

SEQ ID NO: 30789 - DNA, 788 bp, Artificial Sequence
  chemically treated genomic DNA (Homo sapiens) CpG-island No: 30789
gtatttcgttttttttacgggtatttacgtttcgttttgatcgtttcgtttttgtgtcgttttagggtcgtcgtcggcgtcgcgggatttgtagtatagtttgagtcgttcgtcgttggtgttgcgattgcgttggttgtcgtcggtcgattcgggaggtcgttcggacgttatttattcgttgttgtgtttgcgttgcggtcgcgagggttcggcgggcgtttgcgagtcgtgcgggtcgcgcgtggtttttttatcgcgttaggtagggttgcgggagcgagtcgttacgttgttgtatttgcggttcggcgcgcgttatatcgtgcgcgtggtcgcgtttaacggcgtttcgggttcggcggtcgtcgcgggaattatttacgcgtaggttatcgtttttatcgggttcgggggtaaggtcgttcgcgttttttatttcgaggttatcgcgtttgtcgtttttgcgtttttttggggtcgtttcgtcggttttgcgggagttttatttatttattttagagaagttattttttgtatacgtatttcgttttttttcgggatataaagttattttttcggacgttttagcgttagtcgttttttcgagtgtgcgagagggattgaggatgtaggcgtttttttattattgggttagaggggaggcgcgcggttttgttgcgtttgcgggaagtatttgtgtgttcgttttttttttggattttttgtataaagtttttgtttcgtttacggttttgtagttggtttcgtcgttgattttttaggga

SEQ ID NO: 30790 - DNA, 788 bp, Artificial Sequence
  chemically treated genomic DNA (Homo sapiens) CpG-island No: 30790
tccctaaaaaatcaacgacgaaaccaactacaaaaccgtaaacgaaacaaaaactttatacaaaaaatccaaaaaaaaaacgaacacacaaatacttcccgcaaacgcaacaaaaccgcgcgcctcccctctaacccaataataaaaaaacgcctacatcctcaatccctctcgcacactcgaaaaaacgactaacgctaaaacgtccgaaaaaataactttatatcccgaaaaaaaacgaaatacgtatacaaaaaataacttctctaaaataaataaataaaactcccgcaaaaccgacgaaacgaccccaaaaaaacgcaaaaacgacaaacgcgataacctcgaaataaaaaacgcgaacgaccttacccccgaacccgataaaaacgataacctacgcgtaaataattcccgcgacgaccgccgaacccgaaacgccgttaaacgcgaccacgcgcacgatataacgcgcgccgaaccgcaaatacaacaacgtaacgactcgctcccgcaaccctacctaacgcgataaaaaaaccacgcgcgacccgcacgactcgcaaacgcccgccgaaccctcgcgaccgcaacgcaaacacaacaacgaataaataacgtccgaacgacctcccgaatcgaccgacgacaaccaacgcaatcgcaacaccaacgacgaacgactcaaactatactacaaatcccgcgacgccgacgacgaccctaaaacgacacaaaaacgaaacgatcaaaacgaaacgtaaatacccgtaaaaaaaacgaaatac

SEQ ID NO: 30791 - DNA, 788 bp, Artificial Sequence
  chemically treated genomic DNA (Homo sapiens) CpG-island No: 30791
tttttgagaaattagcggcgaggttaattgtagagtcgtgagcgggatagaggttttgtgtaaggagtttaggagaaaggcgagtatataggtgtttttcgtagacgtaatagaatcgcgcgttttttttttggtttagtagtaaggggacgtttgtatttttagtttttttcgtatattcgggagggcgattgacgttggggcgttcgggggggtgattttgtgtttcggagaggggcggggtgcgtgtatagaggatggtttttttggggtgggtgggtggggttttcgtaggatcgacggggcggttttaagagggcgtaggggcggtaggcgcggtggtttcggggtggggggcgcggacggttttattttcgggttcggtggagacggtgatttgcgcgtaggtggttttcgcggcggtcgtcgggttcgagacgtcgttgagcgcggttacgcgtacggtgtagcgcgcgtcgggtcgtaggtgtagtagcgtggcggttcgttttcgtagttttgtttggcgcggtaggaaggttacgcgcggttcgtacggttcgtaggcgttcgtcgggttttcgcggtcgtagcgtaggtatagtagcgagtaggtgacgttcgagcggtttttcgagtcggtcggcggtagttagcgtagtcgtagtattagcggcgagcggtttaggttgtattgtaggtttcgcggcgtcgacggcggttttgaggcggtataggggcggggcggttagggcggggcgtgggtgttcgtgagaggggcgggatgt

SEQ ID NO: 30792 - DNA, 788 bp, Artificial Sequence
  chemically treated genomic DNA (Homo sapiens) CpG-island No: 30792
acatcccgcccctctcacgaacacccacgccccgccctaaccgccccgcccctataccgcctcaaaaccgccgtcgacgccgcgaaacctacaatacaacctaaaccgctcgccgctaatactacgactacgctaactaccgccgaccgactcgaaaaaccgctcgaacgtcacctactcgctactatacctacgctacgaccgcgaaaacccgacgaacgcctacgaaccgtacgaaccgcgcgtaaccttcctaccgcgccaaacaaaactacgaaaacgaaccgccacgctactacacctacgacccgacgcgcgctacaccgtacgcgtaaccgcgctcaacgacgtctcgaacccgacgaccgccgcgaaaaccacctacgcgcaaatcaccgtctccaccgaacccgaaaataaaaccgtccgcgccccccaccccgaaaccaccgcgcctaccgcccctacgccctcttaaaaccgccccgtcgatcctacgaaaaccccacccacccaccccaaaaaaaccatcctctatacacgcaccccgcccctctccgaaacacaaaatcacccccccgaacgccccaacgtcaatcgccctcccgaatatacgaaaaaaactaaaaatacaaacgtccccttactactaaaccaaaaaaaaaacgcgcgattctattacgtctacgaaaaacacctatatactcgcctttctcctaaactccttacacaaaacctctatcccgctcacgactctacaattaacctcgccgctaatttctcaaaaa

SEQ ID NO: 30793 - DNA, 594 bp, Artificial Sequence
  chemically treated genomic DNA (Homo sapiens) CpG-island No: 30793
tttcgtgattgtagtagtatttttggcgtcgcgggtatttgtaaggagatttttaacgtttattatttggaaattgaggtcgatttgggtcgtgggcgttttcgtttaggcggtagtcggtttcgtaaaatcgatacgatcgcggcggacgagagttttacgtagggcgatttgggtgagcgtaagatgaagttgaatatagaggtgcgcgagatcggatcgtttagtcggcggggtttttatttggttttttaggacgtgggcgtatgcgtggcgtttgtttcggtgcgcgtttattataagtagtgtcgcgttatcgtgcggggtttggttacgtttttagttatcgtagtcgagagcgttttttttatattggtggaagtggtcggaacgtgcgtggcgtattcggaaggggagtttggtagttttttacgtatgtattgcggcgtcgacggcgagtggttggtgtttgtgggtcgttgtagttgtagcgcgggattttaggagcgtggtgatttttgcgaaggtatttagttggttgggggtcgtggggtgggagtgtagagcgtaggtggtaattgagagagagtgtgt

SEQ ID NO: 30794 - DNA, 594 bp, Artificial Sequence
  chemically treated genomic DNA (Homo sapiens) CpG-island No: 30794
acacactctctctcaattaccacctacgctctacactcccaccccacgacccccaaccaactaaataccttcgcaaaaatcaccacgctcctaaaatcccgcgctacaactacaacgacccacaaacaccaaccactcgccgtcgacgccgcaatacatacgtaaaaaactaccaaactccccttccgaatacgccacgcacgttccgaccacttccaccaatataaaaaaaacgctctcgactacgataactaaaaacgtaaccaaaccccgcacgataacgcgacactacttataataaacgcgcaccgaaacaaacgccacgcatacgcccacgtcctaaaaaaccaaataaaaaccccgccgactaaacgatccgatctcgcgcacctctatattcaacttcatcttacgctcacccaaatcgccctacgtaaaactctcgtccgccgcgatcgtatcgattttacgaaaccgactaccgcctaaacgaaaacgcccacgacccaaatcgacctcaatttccaaataataaacgttaaaaatctccttacaaatacccgcgacgccaaaaatactactacaatcacgaaa

SEQ ID NO: 30795 - DNA, 594 bp, Artificial Sequence
  chemically treated genomic DNA (Homo sapiens) CpG-island No: 30795
gtatatttttttttaattgttatttacgttttatatttttattttacggtttttagttaattggatattttcgtagaagttattacgtttttggaatttcgcgttgtagttgtagcggtttataggtattagttattcgtcgtcggcgtcgtagtgtatgcgtggggggttgttaggtttttttttcgagtgcgttacgtacgtttcggttatttttattagtgtggagaaggcgttttcggttgcggtggttgggaacgtggttaggtttcgtacggtggcgcggtattgtttgtagtagacgcgtatcgagataagcgttacgtatgcgtttacgttttgaaaggttaggtggaaatttcgtcggttgagcggttcgatttcgcgtatttttgtgtttagttttattttgcgtttatttaggtcgttttgcgtgaagttttcgttcgtcgcgatcgtgtcgattttgcggggtcggttgtcgtttaggcggggacgtttacggtttaggtcggttttagtttttaggtagtagacgttgaaggtttttttgtaggtattcgcggcgttagggatgttgttgtagttacggag

SEQ ID NO: 30796 - DNA, 594 bp, Artificial Sequence
  chemically treated genomic DNA (Homo sapiens) CpG-island No: 30796
ctccgtaactacaacaacatccctaacgccgcgaatacctacaaaaaaaccttcaacgtctactacctaaaaactaaaaccgacctaaaccgtaaacgtccccgcctaaacgacaaccgaccccgcaaaatcgacacgatcgcgacgaacgaaaacttcacgcaaaacgacctaaataaacgcaaaataaaactaaacacaaaaatacgcgaaatcgaaccgctcaaccgacgaaatttccacctaacctttcaaaacgtaaacgcatacgtaacgcttatctcgatacgcgtctactacaaacaataccgcgccaccgtacgaaacctaaccacgttcccaaccaccgcaaccgaaaacgccttctccacactaataaaaataaccgaaacgtacgtaacgcactcgaaaaaaaaacctaacaaccccccacgcatacactacgacgccgacgacgaataactaatacctataaaccgctacaactacaacgcgaaattccaaaaacgtaataacttctacgaaaatatccaattaactaaaaaccgtaaaataaaaatataaaacgtaaataacaattaaaaaaaaatatac

SEQ ID NO: 30797 - DNA, 920 bp, Artificial Sequence
  chemically treated genomic DNA (Homo sapiens) CpG-island No: 30797
atcgacgcgcgtttttttttttttttcgtttcgttttcgttttcgttttcgtcgcgtcgtttttttttcgcgtttcggaaggtttgcgttttcgttttttagttaggcgttattatttgtcgtttaggtagttaggcgatttttttttcgcgggttacgcggtttgatttaggtttttgtttttgtggtttcgaaattcgtcgttcgttgggttttgcgttgtattcggcgtgtagttttttttcggttcgcggttatttggttcgcgtcgtttgcgttttgtgtgtcgagttcgttcgtattgcggggataggtcgggcgtcgtttacgtcgcgttttgtcgggcgtatagtttgtttgggaagcgcgcggtcgggcgggcggttatggcgcggtacgttgggaggtagcgcggcggttgtaggagcgtatagtcggttatggttcggcggcggcgtcgcgtttgtatcgttttgtttttggtgttgtttttcgttttcggtatttttatgggtttgcgtacgtttaaggtttcggacggattttcggcgttgggttcgggtttggagttggcgttttttgagcgacgtttagagggggttttcgcgttcgttgttagggtttcggtagtttttgtcgcgtcgttttcgtcgtcgtcgtcgtttcgtatcgcggattttggcggtttttttgggtcggtattcgcggaggtcgagttcgttttcgtgtagagtttgcgcgtttattcggatttgtacgttttttattattcgtggtacgggagttcgcggcgcgagggttattatatttattgggattacgttatggtgtcgtattgggattttaagatttcggttagttattttcgcggtcgttatagttttttagacgatttgggttttagtttttattcggagttg

SEQ ID NO: 30798 - DNA, 920 bp, Artificial Sequence
  chemically treated genomic DNA (Homo sapiens) CpG-island No: 30798
caactccgaataaaaactaaaacccaaatcgtctaaaaaactataacgaccgcgaaaataactaaccgaaatcttaaaatcccaatacgacaccataacgtaatcccaataaatataataaccctcgcgccgcgaactcccgtaccacgaataataaaaaacgtacaaatccgaataaacgcgcaaactctacacgaaaacgaactcgacctccgcgaataccgacccaaaaaaaccgccaaaatccgcgatacgaaacgacgacgacgacgaaaacgacgcgacaaaaactaccgaaaccctaacaacgaacgcgaaaaccccctctaaacgtcgctcaaaaaacgccaactccaaacccgaacccaacgccgaaaatccgtccgaaaccttaaacgtacgcaaacccataaaaataccgaaaacgaaaaacaacaccaaaaacaaaacgatacaaacgcgacgccgccgccgaaccataaccgactatacgctcctacaaccgccgcgctacctcccaacgtaccgcgccataaccgcccgcccgaccgcgcgcttcccaaacaaactatacgcccgacaaaacgcgacgtaaacgacgcccgacctatccccgcaatacgaacgaactcgacacacaaaacgcaaacgacgcgaaccaaataaccgcgaaccgaaaaaaaactacacgccgaatacaacgcaaaacccaacgaacgacgaatttcgaaaccacaaaaacaaaaacctaaatcaaaccgcgtaacccgcgaaaaaaaaatcgcctaactacctaaacgacaaataataacgcctaactaaaaaacgaaaacgcaaaccttccgaaacgcgaaaaaaaaacgacgcgacgaaaacgaaaacgaaaacgaaacgaaaaaaaaaaaaaaacgcgcgtcgat

SEQ ID NO: 30799 - DNA, 920 bp, Artificial Sequence
  chemically treated genomic DNA (Homo sapiens) CpG-island No: 30799
tagtttcgggtagaagttggagtttaagtcgtttggggggttgtggcggtcgcgggggtagttggtcgagattttggggttttagtgcggtattatgacgtggttttagtgaatgtagtggttttcgcgtcgcgggttttcgtattacgagtagtagaaggcgtgtaggttcgagtagacgcgtaggttttgtacgggggcgggttcggttttcgcgggtgtcggtttaggggagtcgttagggttcgcggtgcggggcggcggcggcggcgggggcggcgcggtaggggttgtcggggttttggtagcgggcgcgggggttttttttgggcgtcgtttaaagggcgttagttttaggttcgggtttagcgtcgggagttcgttcggagttttgagcgtgcgtagatttatgagggtgtcgaaggcgaagagtagtattaggaatagagcgatgtaggcgcggcgtcgtcgtcgggttatggtcgattgtgcgtttttgtagtcgtcgcgttattttttagcgtgtcgcgttatggtcgttcgttcggtcgcgcgttttttaggtagattgtgcgttcggtagagcgcggcgtgggcggcgttcggtttgttttcgtagtgcgggcgggttcggtatataggacgtaggcggcgcggattaagtggtcgcgagtcgagggggaattgtacgtcgagtgtaacgtaaggtttagcgaacggcgagtttcggggttataggagtaggggtttgagttaggtcgcgtgattcgcgaaagaagagtcgtttggttgtttgggcggtaggtggtggcgtttggttggggagcggggacgtaggtttttcggagcgcgggagagaggcggcgcggcgggggcgggggcggaggcggggcgggggggggaaagaagcgcgcgtcggt

SEQ ID NO: 30800 - DNA, 920 bp, Artificial Sequence
  chemically treated genomic DNA (Homo sapiens) CpG-island No: 30800
accgacgcgcgcttctttcccccccccgccccgcctccgcccccgcccccgccgcgccgcctctctcccgcgctccgaaaaacctacgtccccgctccccaaccaaacgccaccacctaccgcccaaacaaccaaacgactcttctttcgcgaatcacgcgacctaactcaaacccctactcctataaccccgaaactcgccgttcgctaaaccttacgttacactcgacgtacaattccccctcgactcgcgaccacttaatccgcgccgcctacgtcctatataccgaacccgcccgcactacgaaaacaaaccgaacgccgcccacgccgcgctctaccgaacgcacaatctacctaaaaaacgcgcgaccgaacgaacgaccataacgcgacacgctaaaaaataacgcgacgactacaaaaacgcacaatcgaccataacccgacgacgacgccgcgcctacatcgctctattcctaatactactcttcgccttcgacaccctcataaatctacgcacgctcaaaactccgaacgaactcccgacgctaaacccgaacctaaaactaacgccctttaaacgacgcccaaaaaaaacccccgcgcccgctaccaaaaccccgacaacccctaccgcgccgcccccgccgccgccgccgccccgcaccgcgaaccctaacgactcccctaaaccgacacccgcgaaaaccgaacccgcccccgtacaaaacctacgcgtctactcgaacctacacgccttctactactcgtaatacgaaaacccgcgacgcgaaaaccactacattcactaaaaccacgtcataataccgcactaaaaccccaaaatctcgaccaactacccccgcgaccgccacaaccccccaaacgacttaaactccaacttctacccgaaacta

SEQ ID NO: 30801 - DNA, 691 bp, Artificial Sequence
  chemically treated genomic DNA (Homo sapiens) CpG-island No: 30801
gacgtcgcgtattttttttcgttatattaggggttcgcggaggtttggtggggacgcggagttttaggggtcggtcggtgtagggatacggtcgggttgggggtggggacgcgcggttttgtttttttgtcggtttgcggtttttagggtcggttcgtacggttgttggatagcgttatgtttacgtattttcgaatttagcggtttttatttcggaatttttagttttacgcggttggggtcgagttggggttcgcgggtaggcgttttgagtattcgcgtgacggtatttgtggtggtagtattttttaagttgcggcggcggcggcggcggcgacgggggcggtagtaggggcggagcgcggcgtgcgcgttttcggttcgtagttcggtgcgtggcgtttttttttttttttttggtcgtcgggtgttcgtttttttattttttattttttatttttattttttcgtttcgtcgtttttcgtacgtgcgtttagcggcgtgcgtatgcgtagtcgaattatattcgcgtttttcgttcgttttttggtggatatcggagggaagtatggacggtcgggtcgggtcgggtcgggcggagcgtgaagtcgggttagggttcgtcgggtttgggtttatcggtttttatcggttattaagaatttgtagaaagtcgggtacggtggttcg

SEQ ID NO: 30802 - DNA, 691 bp, Artificial Sequence
  chemically treated genomic DNA (Homo sapiens) CpG-island No: 30802
cgaaccaccgtacccgactttctacaaattcttaataaccgataaaaaccgataaacccaaacccgacgaaccctaacccgacttcacgctccgcccgacccgacccgacccgaccgtccatacttccctccgatatccaccaaaaaacgaacgaaaaacgcgaatataattcgactacgcatacgcacgccgctaaacgcacgtacgaaaaacgacgaaacgaaaaaataaaaataaaaaataaaaaataaaaaaacgaacacccgacgaccaaaaaaaaaaaaaaaaacgccacgcaccgaactacgaaccgaaaacgcgcacgccgcgctccgcccctactaccgcccccgtcgccgccgccgccgccgccgcaacttaaaaaatactaccaccacaaataccgtcacgcgaatactcaaaacgcctacccgcgaaccccaactcgaccccaaccgcgtaaaactaaaaattccgaaataaaaaccgctaaattcgaaaatacgtaaacataacgctatccaacaaccgtacgaaccgaccctaaaaaccgcaaaccgacaaaaaaacaaaaccgcgcgtccccacccccaacccgaccgtatccctacaccgaccgacccctaaaactccgcgtccccaccaaacctccgcgaacccctaatataacgaaaaaaaatacgcgacgtc

SEQ ID NO: 30803 - DNA, 691 bp, Artificial Sequence
  chemically treated genomic DNA (Homo sapiens) CpG-island No: 30803
cgagttatcgtgttcggttttttgtaagtttttgatgatcgatgagagtcggtgggtttaaattcggcgggttttaattcggttttacgtttcgttcggttcggttcggttcggtcgtttatattttttttcggtgtttattagagggcgaacgggagacgcgaatgtggttcgattacgtatgcgtacgtcgttgggcgtacgtgcggagggcggcggggcgggagggtaaaggtaggaggtgagaggtgaaggggcgggtattcggcggttaggagagagagggagggcgttacgtatcggattgcgggtcgagagcgcgtacgtcgcgtttcgtttttgttgtcgttttcgtcgtcgtcgtcgtcgtcgtcgtagtttgggaggtgttgttattataggtatcgttacgcgggtgtttagggcgtttgttcgcgggttttagttcgattttagtcgcgtggagttgggagtttcggaatgggggtcgttaggttcgggggtgcgtgggtatggcgttgtttagtagtcgtgcgggtcggttttggagatcgtaggtcggtaaggaggtagggtcgcgcgtttttatttttaattcggtcgtgtttttgtatcggtcggtttttggagtttcgcgtttttattagattttcgcgggtttttggtgtgacggggggagatgcgcggcgtt

SEQ ID NO: 30804 - DNA, 691 bp, Artificial Sequence
  chemically treated genomic DNA (Homo sapiens) CpG-island No: 30804
aacgccgcgcatctccccccgtcacaccaaaaacccgcgaaaatctaataaaaacgcgaaactccaaaaaccgaccgatacaaaaacacgaccgaattaaaaataaaaacgcgcgaccctacctccttaccgacctacgatctccaaaaccgacccgcacgactactaaacaacgccatacccacgcacccccgaacctaacgacccccattccgaaactcccaactccacgcgactaaaatcgaactaaaacccgcgaacaaacgccctaaacacccgcgtaacgatacctataataacaacacctcccaaactacgacgacgacgacgacgacgacgaaaacgacaacaaaaacgaaacgcgacgtacgcgctctcgacccgcaatccgatacgtaacgccctccctctctctcctaaccgccgaatacccgccccttcacctctcacctcctacctttaccctcccgccccgccgccctccgcacgtacgcccaacgacgtacgcatacgtaatcgaaccacattcgcgtctcccgttcgccctctaataaacaccgaaaaaaaatataaacgaccgaaccgaaccgaaccgaacgaaacgtaaaaccgaattaaaacccgccgaatttaaacccaccgactctcatcgatcatcaaaaacttacaaaaaaccgaacacgataactcg

SEQ ID NO: 30805 - DNA, 609 bp, Artificial Sequence
  chemically treated genomic DNA (Homo sapiens) CpG-island No: 30805
attgggagggttcgggcgttacgtagatttgcgcggaatgagtcgttagaggtcgttggtagtcgtatagagaagtttatcgttttttattatttgggattcgacggacgtttacgcgcgtgcgtagcggttttatcgaggtattcgttttattggttgtggttggttcgtaaaagtggtattgcgtatgcgcgtttttttgcgcgagtcgggttgtcgggtgtgttttgttttttagttttcgtcgtttttgtagtatttcgggtttttttttagagcgttagttttaggagttcggaatgttcgtggaatttaataatttgtttaatattattttcgatagggcggagtaggtaagaggtttcgttggtcggaagggggcgggatttggtagggtagcggaatattgtattcgggaggcggtgcgtacgatttcggggaatggcgcgacgattcggtacggggtatttgggagttgtagttcgtagaggatcgattcggggattggattggaggtttgggttcgtcgaaagtgggtttttgggttatttcgtatatttttaacggttgtgcgtgtttttaaaagtttttgggaagcggtcgggcgcg

SEQ ID NO: 30806 - DNA, 609 bp, Artificial Sequence
  chemically treated genomic DNA (Homo sapiens) CpG-island No: 30806
cgcgcccgaccgcttcccaaaaacttttaaaaacacgcacaaccgttaaaaatatacgaaataacccaaaaacccactttcgacgaacccaaacctccaatccaatccccgaatcgatcctctacgaactacaactcccaaataccccgtaccgaatcgtcgcgccattccccgaaatcgtacgcaccgcctcccgaatacaatattccgctaccctaccaaatcccgcccccttccgaccaacgaaacctcttacctactccgccctatcgaaaataatattaaacaaattattaaattccacgaacattccgaactcctaaaactaacgctctaaaaaaaaacccgaaatactacaaaaacgacgaaaactaaaaaacaaaacacacccgacaacccgactcgcgcaaaaaaacgcgcatacgcaataccacttttacgaaccaaccacaaccaataaaacgaatacctcgataaaaccgctacgcacgcgcgtaaacgtccgtcgaatcccaaataataaaaaacgataaacttctctatacgactaccaacgacctctaacgactcattccgcgcaaatctacgtaacgcccgaaccctcccaat

SEQ ID NO: 30807 - DNA, 609 bp, Artificial Sequence
  chemically treated genomic DNA (Homo sapiens) CpG-island No: 30807
cgcgttcggtcgttttttagggatttttaaggatacgtatagtcgttgagaatatgcgagatggtttagaagtttattttcggcgggtttaagtttttagtttaattttcgggtcgattttttgcggattataatttttaggtatttcgtgtcgggtcgtcgcgttatttttcggggtcgtgcgtatcgtttttcggatgtagtatttcgttgttttgttaggtttcgttttttttcggttagcgggattttttatttgtttcgttttgtcgggggtggtgttaagtaggttattaagttttacgaatatttcgagtttttgggattagcgttttggaggagaattcggagtgttgtagagacgacggaggttggagagtaaaatatattcgatagttcggttcgcgtaaggaagcgcgtatgcgtaatgttatttttgcgagttagttatagttaatgaggcgggtgtttcgatgggatcgttgcgtacgcgcgtagacgttcgtcgagttttaggtggtaggaaacgatgggtttttttgtgcgattgttagcggtttttggcggtttatttcgcgtagatttgcgtggcgttcgagtttttttagt

SEQ ID NO: 30808 - DNA, 609 bp, Artificial Sequence
  chemically treated genomic DNA (Homo sapiens) CpG-island No: 30808
actaaaaaaactcgaacgccacgcaaatctacgcgaaataaaccgccaaaaaccgctaacaatcgcacaaaaaaacccatcgtttcctaccacctaaaactcgacgaacgtctacgcgcgtacgcaacgatcccatcgaaacacccgcctcattaactataactaactcgcaaaaataacattacgcatacgcgcttccttacgcgaaccgaactatcgaatatattttactctccaacctccgtcgtctctacaacactccgaattctcctccaaaacgctaatcccaaaaactcgaaatattcgtaaaacttaataacctacttaacaccacccccgacaaaacgaaacaaataaaaaatcccgctaaccgaaaaaaaacgaaacctaacaaaacaacgaaatactacatccgaaaaacgatacgcacgaccccgaaaaataacgcgacgacccgacacgaaatacctaaaaattataatccgcaaaaaatcgacccgaaaattaaactaaaaacttaaacccgccgaaaataaacttctaaaccatctcgcatattctcaacgactatacgtatccttaaaaatccctaaaaaacgaccgaacgcg

SEQ ID NO: 30809 - DNA, 704 bp, Artificial Sequence
  chemically treated genomic DNA (Homo sapiens) CpG-island No: 30809
gggcgggcgaggcgggagcgttttttttgttcgcgggaggggattcgcggtcggttcggagggggcgggggtagcggcgggcggcggcgaggggttgcggagtttcgtagtcgtcgggtcggtcggggcgggaggaagcgatgaatatttagagggggaggggaagggagggggtcgagcgttcgtcgcggttttttgtagttttagtcgtatgacgcgcggaggaggtagcgggagtagtcgcgggagtcgggatcgggtagtcgcgcgttgggggtgggcgtcgttcgtttcgtttcgcgaagtttttgcgcgtttagggacgcggttttttcgcggtagtcgcgttaggtttcggcgtgtggtcgcggtcgtcgtcgtcgttgttatgttttcggggaagttcggggcgggcggagcggggacgaggcggatcggttggcggaggaggaggcgaaggagacggtaggaggcggcgacgacggtgttcgggttcgggcgtacggcggggttcgattcgcgcgttcggggtacgttttagggcgcgcggggtatgaagtcggcggcgcgggaggcgcggttgttttcgcgttcgttcgggttgcgttgggcgttgtcgttgttgttgttgttgttgcgtttgggttaggtaagcgtcgggtgggttcgggcggggggtaggaggttggggcgggattggtatt

SEQ ID NO: 30810 - DNA, 704 bp, Artificial Sequence
  chemically treated genomic DNA (Homo sapiens) CpG-island No: 30810
aataccaatcccgccccaacctcctaccccccgcccgaacccacccgacgcttacctaacccaaacgcaacaacaacaacaacaacgacaacgcccaacgcaacccgaacgaacgcgaaaacaaccgcgcctcccgcgccgccgacttcataccccgcgcgccctaaaacgtaccccgaacgcgcgaatcgaaccccgccgtacgcccgaacccgaacaccgtcgtcgccgcctcctaccgtctccttcgcctcctcctccgccaaccgatccgcctcgtccccgctccgcccgccccgaacttccccgaaaacataacaacgacgacgacgaccgcgaccacacgccgaaacctaacgcgactaccgcgaaaaaaccgcgtccctaaacgcgcaaaaacttcgcgaaacgaaacgaacgacgcccacccccaacgcgcgactacccgatcccgactcccgcgactactcccgctacctcctccgcgcgtcatacgactaaaactacaaaaaaccgcgacgaacgctcgaccccctcccttcccctccccctctaaatattcatcgcttcctcccgccccgaccgacccgacgactacgaaactccgcaacccctcgccgccgcccgccgctacccccgccccctccgaaccgaccgcgaatcccctcccgcgaacaaaaaaaacgctcccgcctcgcccgccc

SEQ ID NO: 30811 - DNA, 704 bp, Artificial Sequence
  chemically treated genomic DNA (Homo sapiens) CpG-island No: 30811
aatgttagtttcgttttagttttttgtttttcgttcgagtttattcggcgtttatttggtttaggcgtagtagtagtagtagtagcggtagcgtttagcgtagttcgggcgagcgcggaggtagtcgcgtttttcgcgtcgtcggttttatgtttcgcgcgttttggaacgtgtttcggacgcgcgaatcgggtttcgtcgtgcgttcgagttcgggtatcgtcgtcgtcgttttttgtcgtttttttcgttttttttttcgttagtcggttcgtttcgttttcgtttcgttcgtttcgggttttttcggagatatggtagcggcggcggcggtcgcggttatacgtcggagtttagcgcggttgtcgcgggggggtcgcgtttttgagcgcgtaggggtttcgcggggcggagcgagcggcgtttatttttagcgcgcggttattcggtttcggttttcgcggttgttttcgttgtttttttcgcgcgttatgcggttggggttgtagggagtcgcggcgagcgttcggttttttttttttttttttttttttgaatatttatcgttttttttcgtttcggtcggttcggcggttgcggagtttcgtagtttttcgtcgtcgttcgtcgttgttttcgtttttttcgagtcggtcgcggattttttttcgcgggtagaggaagcgttttcgtttcgttcgttt

SEQ ID NO: 30812 - DNA, 704 bp, Artificial Sequence
  chemically treated genomic DNA (Homo sapiens) CpG-island No: 30812
aaacgaacgaaacgaaaacgcttcctctacccgcgaaaaaaaatccgcgaccgactcgaaaaaaacgaaaacaacgacgaacgacgacgaaaaactacgaaactccgcaaccgccgaaccgaccgaaacgaaaaaaaacgataaatattcaaaaaaaaaaaaaaaaaaaaaaaaccgaacgctcgccgcgactccctacaaccccaaccgcataacgcgcgaaaaaaacaacgaaaacaaccgcgaaaaccgaaaccgaataaccgcgcgctaaaaataaacgccgctcgctccgccccgcgaaacccctacgcgctcaaaaacgcgacccccccgcgacaaccgcgctaaactccgacgtataaccgcgaccgccgccgccgctaccatatctccgaaaaaacccgaaacgaacgaaacgaaaacgaaacgaaccgactaacgaaaaaaaaaacgaaaaaaacgacaaaaaacgacgacgacgatacccgaactcgaacgcacgacgaaacccgattcgcgcgtccgaaacacgttccaaaacgcgcgaaacataaaaccgacgacgcgaaaaacgcgactacctccgcgctcgcccgaactacgctaaacgctaccgctactactactactactacgcctaaaccaaataaacgccgaataaactcgaacgaaaaacaaaaaactaaaacgaaactaacatt

SEQ ID NO: 30813 - DNA, 631 bp, Artificial Sequence
  chemically treated genomic DNA (Homo sapiens) CpG-island No: 30813
cgttaggtatatacggcgtattttcgtttttttgcgtagtttttggttttcgcgtttcgcgggttgggcgtttaggtggttttatagtagtagttgtagggcgcgtagtaggaggtcgacgcgcgcgattatttcgtcgttttcggtgtagttcggttcggggagttattgcgcgtagggaattagtcggtagttagtcgcgttcgggatttcggggatgggattgttttgcgtcgttttcgtacggagagggattgtttcggggtttcgttagtgttttagttgcgcgttttgggtcgttttttcgttgtttttcgtcgggagtcggttagacgtcgtttagttcgggtagtgtttgttcgcgggttcgtcggtttcggggatcgagggagggaggaaggaaaggtaggcggagggggcggaggttcggtattttcgttttatttatttcgcgtcgttgttggaacgcgaggcggtttcggagtttttttcgttcgttgtatagtttcgttttgcgttcgttatcgttttgcggatcggttttttcgttcgttatttttagttgattcggatttgtttagggagggtgaaggaagaaaggtttttttttggtaagcgtggttatttaaga

SEQ ID NO: 30814 - DNA, 631 bp, Artificial Sequence
  chemically treated genomic DNA (Homo sapiens) CpG-island No: 30814
tcttaaataaccacgcttaccaaaaaaaaacctttcttccttcaccctccctaaacaaatccgaatcaactaaaaataacgaacgaaaaaaccgatccgcaaaacgataacgaacgcaaaacgaaactatacaacgaacgaaaaaaactccgaaaccgcctcgcgttccaacaacgacgcgaaataaataaaacgaaaataccgaacctccgccccctccgcctacctttccttcctccctccctcgatccccgaaaccgacgaacccgcgaacaaacactacccgaactaaacgacgtctaaccgactcccgacgaaaaacaacgaaaaaacgacccaaaacgcgcaactaaaacactaacgaaaccccgaaacaatccctctccgtacgaaaacgacgcaaaacaatcccatccccgaaatcccgaacgcgactaactaccgactaattccctacgcgcaataactccccgaaccgaactacaccgaaaacgacgaaataatcgcgcgcgtcgacctcctactacgcgccctacaactactactataaaaccacctaaacgcccaacccgcgaaacgcgaaaaccaaaaactacgcaaaaaaacgaaaatacgccgtatatacctaacg

SEQ ID NO: 30815 - DNA, 631 bp, Artificial Sequence
  chemically treated genomic DNA (Homo sapiens) CpG-island No: 30815
ttttaggtagttacgtttgttaggagaaggtttttttttttttattttttttggatagattcgggttaattggaggtggcgggcgagaggatcgattcgtagggcggtggcgggcgtagggcgaggttgtgtagcgaacggaagaggtttcgggatcgtttcgcgttttagtagcggcgcggggtgggtggggcgggagtgtcgggttttcgtttttttcgtttgttttttttttttttttttttcggttttcggggtcggcggattcgcgggtaggtattgttcgggttggacgacgtttggtcggttttcggcgaagggtagcggaggagcggtttagagcgcgtagttagggtattggcgaaatttcgggatagttttttttcgtgcgggggcggcgtagagtagttttattttcggggtttcgggcgcggttgattgtcggttggttttttgcgcgtagtagtttttcgagtcgggttgtatcggaggcggcgagatggtcgcgcgcgtcggttttttgttgcgcgttttgtagttgttattgtggggttatttggacgtttagttcgcggagcgcggaggttaggagttgcgtaaggaggcggaggtacgtcgtgtgtatttggcg

SEQ ID NO: 30816 - DNA, 631 bp, Artificial Sequence
  chemically treated genomic DNA (Homo sapiens) CpG-island No: 30816
cgccaaatacacacgacgtacctccgcctccttacgcaactcctaacctccgcgctccgcgaactaaacgtccaaataaccccacaataacaactacaaaacgcgcaacaaaaaaccgacgcgcgcgaccatctcgccgcctccgatacaacccgactcgaaaaactactacgcgcaaaaaaccaaccgacaatcaaccgcgcccgaaaccccgaaaataaaactactctacgccgcccccgcacgaaaaaaaactatcccgaaatttcgccaataccctaactacgcgctctaaaccgctcctccgctacccttcgccgaaaaccgaccaaacgtcgtccaacccgaacaatacctacccgcgaatccgccgaccccgaaaaccgaaaaaaaaaaaaaaaaaaaacaaacgaaaaaaacgaaaacccgacactcccgccccacccaccccgcgccgctactaaaacgcgaaacgatcccgaaacctcttccgttcgctacacaacctcgccctacgcccgccaccgccctacgaatcgatcctctcgcccgccacctccaattaacccgaatctatccaaaaaaaataaaaaaaaaaaaaccttctcctaacaaacgtaactacctaaaa

SEQ ID NO: 30817 - DNA, 649 bp, Artificial Sequence
  chemically treated genomic DNA (Homo sapiens) CpG-island No: 30817
gtgacgtattcggcgtagtattggggcgtttgcggcgtgatatagtataggattttgcgttttttttcgattttttttttgatttgtaggtattcgaagtaggggttggttttgtcgttgtggtagggttcgatggtatttagtttgatggcgtttacgatggcggttagcgtttgttggattatttttcgcgtttgttgcgtggacgtgtttagttgttgttgtagttgttgggtggagcgttgaaagcggcgtttgcgcggatgttgggtttgggcgtcgtcgttttcggagtcgcgggttttggttttggtgatcggggtaggggtgggggcgtattttttttcggaggggggcgggttttgtttgttttggttcgcgagtatttgcgttcggtttttggttatgcgttgagggattttttttattcggggggttttcggggtttcggtcgtgggttttggttttgcggttttcggttggatgtcgttaggagggttttcggttggggcggcggtacgggaggttttagtgtcgttttcggggtcggtatcgtttgcggtttgagtttgtgttatagtgttcggggcggggtcgttaggggtatagagggacgcggcgggggggtttttagttttagttttttggt

SEQ ID NO: 30818 - DNA, 649 bp, Artificial Sequence
  chemically treated genomic DNA (Homo sapiens) CpG-island No: 30818
accaaaaaactaaaactaaaaacccccccgccgcgtccctctatacccctaacgaccccgccccgaacactataacacaaactcaaaccgcaaacgataccgaccccgaaaacgacactaaaacctcccgtaccgccgccccaaccgaaaaccctcctaacgacatccaaccgaaaaccgcaaaaccaaaacccacgaccgaaaccccgaaaaccccccgaataaaaaaaatccctcaacgcataaccaaaaaccgaacgcaaatactcgcgaaccaaaacaaacaaaacccgcccccctccgaaaaaaaatacgcccccacccctaccccgatcaccaaaaccaaaacccgcgactccgaaaacgacgacgcccaaacccaacatccgcgcaaacgccgctttcaacgctccacccaacaactacaacaacaactaaacacgtccacgcaacaaacgcgaaaaataatccaacaaacgctaaccgccatcgtaaacgccatcaaactaaataccatcgaaccctaccacaacgacaaaaccaacccctacttcgaatacctacaaatcaaaaaaaaaatcgaaaaaaaacgcaaaatcctatactatatcacgccgcaaacgccccaatactacgccgaatacgtcac

SEQ ID NO: 30819 - DNA, 649 bp, Artificial Sequence
  chemically treated genomic DNA (Homo sapiens) CpG-island No: 30819
attagggggttgaggttgaaggttttttcgtcgcgtttttttgtgtttttgacggtttcgtttcgaatattgtggtataagtttaggtcgtagacggtgtcggtttcgaggacgatattgaggtttttcgtgtcgtcgttttagtcgaaggtttttttggcggtatttagtcggaagtcgtagaattaaaatttacggtcgaagtttcgaaggtttttcgagtggaggagattttttagcgtatgattaggaatcgggcgtagatgttcgcgaattagagtaagtagggttcgttttttttcgagaaggagtgcgtttttatttttgtttcggttattagggttaaggttcgcggtttcgaggacgacgacgtttaggtttagtattcgcgtaaacgtcgtttttagcgttttatttagtagttgtagtagtagttgaatacgtttacgtagtagacgcgggaggtgatttagtagacgttggtcgttatcgtggacgttattaagttggatgttatcgagttttattatagcgatagggttaatttttatttcgaatatttgtagattaggaagaagatcgaggagaagcgtaagattttgtgttgtattacgtcgtaggcgttttagtgttacgtcgagtacgttat

SEQ ID NO: 30820 - DNA, 649 bp, Artificial Sequence
  chemically treated genomic DNA (Homo sapiens) CpG-island No: 30820
ataacgtactcgacgtaacactaaaacgcctacgacgtaatacaacacaaaatcttacgcttctcctcgatcttcttcctaatctacaaatattcgaaataaaaattaaccctatcgctataataaaactcgataacatccaacttaataacgtccacgataacgaccaacgtctactaaatcacctcccgcgtctactacgtaaacgtattcaactactactacaactactaaataaaacgctaaaaacgacgtttacgcgaatactaaacctaaacgtcgtcgtcctcgaaaccgcgaaccttaaccctaataaccgaaacaaaaataaaaacgcactccttctcgaaaaaaaacgaaccctacttactctaattcgcgaacatctacgcccgattcctaatcatacgctaaaaaatctcctccactcgaaaaaccttcgaaacttcgaccgtaaattttaattctacgacttccgactaaataccgccaaaaaaaccttcgactaaaacgacgacacgaaaaacctcaatatcgtcctcgaaaccgacaccgtctacgacctaaacttataccacaatattcgaaacgaaaccgtcaaaaacacaaaaaaacgcgacgaaaaaaccttcaacctcaaccccctaat

SEQ ID NO: 30821 - DNA, 1714 bp, Artificial Sequence
  chemically treated genomic DNA (Homo sapiens) CpG-island No: 30821
ttatttcgtagatacgtattattttttatttcgtagatacgcgttattttttatttcgtagatacgcgttatttattttttatttcgtagatacgcgttattttttatttcgtagatacgcgttattttttatttcgtagatatgcgttatttattttttatttcgtagatacgtattattttttatttcgtagatacgcgttatttattttttattttatagatacgcgttatttattttttatttcgtagatacgcgttatttattttttatttcgtagatacgcgttatttattttttatttcgtagatacgcgttatttattttttatttcgtagatacgcgttatttattttttatttcgtagatacgcgttatttattttttatttcgtagatacgcgttattttttatttcgtagatacgttatttattttttatttcgtagatacgtattattttttatttcgtagatacgcgttatttattttttatttcgtagatacgcgttatttattttttatttcgtagatacgcgttatttattttttatttcgtagatacgcgttattttttatttcgtagatacgcgttatttattttttttttcgtagatacgcgttatttattttttttttcgtagatacgtgttattttttatttcgtagatacgcgttatttattttttatttcgtagatacgcgttatttattttttatttcgtagatacgcgttattttttatttcgtagatacgcgttatttattttttatttcgtagatacgcgttatttattttttatttcgtagatacgcgttatttattttttatttcgtagatacgcgttattttttatttcgtagatacgcgttatttattttttatttcgtagatacgcgttattttttatttcgtagatacgcgttatttattttttatttcgtagatacgcgttatttattttttatttcgtagatacgcgttatttattttttatttcgtagatacgcgttattttttatttcgtagatacgcgttatttattttttatttcgtagatacgcgttattttttatttcgtagatacgcgttatttattttttatttcgtagatacgcgttatttattttttatttcgtagatacgcgttattttttatttcgtagatacgcgttattttttatttcgtagatacgcgttatttattttttatttcgtagatacgtattattttttattgtgtagatacgtgttattttttatttcgtagatacgcgttatttattttttatttcgtagatacgcgttattttttatttcgtagatacgcgttatttattttttatttcgtagatacgcgttattttttattttatagatatgcgttattttttatttcgtagatacgcgttatttattttttatttcgtagatacgcgttattttttattttatagatacgcgttatttattttttatttcgtagatacgtgcgttattttttaggagggagacggtgcgatatatatagcgtttgggacgtggggagggggacggtgcgatatatatagcgttcgggacgtggggagggggtagtgtgatatatatagcgttcgggacgtggggagggggatagtgcgatatatatagtattcgggacgtggggagggggacggtgcgatatatatattgtttttttttattagtaagttt

SEQ ID NO: 30822 - DNA, 1714 bp, Artificial Sequence
  chemically treated genomic DNA (Homo sapiens) CpG-island No: 30822
aaacttactaataaaaaaaaacaatatatatatcgcaccgtccccctccccacgtcccgaatactatatatatcgcactatccccctccccacgtcccgaacgctatatatatcacactaccccctccccacgtcccgaacgctatatatatcgcaccgtccccctccccacgtcccaaacgctatatatatcgcaccgtctccctcctaaaaaataacgcacgtatctacgaaataaaaaataaataacgcgtatctataaaataaaaaataacgcgtatctacgaaataaaaaataaataacgcgtatctacgaaataaaaaataacgcatatctataaaataaaaaataacgcgtatctacgaaataaaaaataaataacgcgtatctacgaaataaaaaataacgcgtatctacgaaataaaaaataaataacgcgtatctacgaaataaaaaataacacgtatctacacaataaaaaataatacgtatctacgaaataaaaaataaataacgcgtatctacgaaataaaaaataacgcgtatctacgaaataaaaaataacgcgtatctacgaaataaaaaataaataacgcgtatctacgaaataaaaaataaataacgcgtatctacgaaataaaaaataacgcgtatctacgaaataaaaaataaataacgcgtatctacgaaataaaaaataacgcgtatctacgaaataaaaaataaataacgcgtatctacgaaataaaaaataaataacgcgtatctacgaaataaaaaataaataacgcgtatctacgaaataaaaaataacgcgtatctacgaaataaaaaataaataacgcgtatctacgaaataaaaaataacgcgtatctacgaaataaaaaataaataacgcgtatctacgaaataaaaaataaataacgcgtatctacgaaataaaaaataaataacgcgtatctacgaaataaaaaataacgcgtatctacgaaataaaaaataaataacgcgtatctacgaaataaaaaataaataacgcgtatctacgaaataaaaaataacacgtatctacgaaaaaaaaaataaataacgcgtatctacgaaaaaaaaaataaataacgcgtatctacgaaataaaaaataacgcgtatctacgaaataaaaaataaataacgcgtatctacgaaataaaaaataaataacgcgtatctacgaaataaaaaataaataacgcgtatctacgaaataaaaaataatacgtatctacgaaataaaaaataaataacgtatctacgaaataaaaaataacgcgtatctacgaaataaaaaataaataacgcgtatctacgaaataaaaaataaataacgcgtatctacgaaataaaaaataaataacgcgtatctacgaaataaaaaataaataacgcgtatctacgaaataaaaaataaataacgcgtatctacgaaataaaaaataaataacgcgtatctataaaataaaaaataaataacgcgtatctacgaaataaaaaataatacgtatctacgaaataaaaaataaataacgcatatctacgaaataaaaaataacgcgtatctacgaaataaaaaataacgcgtatctacgaaataaaaaataaataacgcgtatctacgaaataaaaaataacgcgtatctacgaaataaaaaataatacgtatctacgaaataa

SEQ ID NO: 30823 - DNA, 1714 bp, Artificial Sequence
  chemically treated genomic DNA (Homo sapiens) CpG-island No: 30823
aggtttattgatggggaaaggtagtgtgtgtgtcgtatcgtttttttttttacgtttcgagtgttgtgtgtgtcgtattgtttttttttttacgtttcgagcgttgtgtgtgttatattgttttttttttacgtttcgagcgttgtgtgtgtcgtatcgtttttttttttacgttttaagcgttgtgtgtgtcgtatcgttttttttttgggaggtagcgtacgtgtttgcggagtgggaggtaggtggcgcgtgtttgtggagtgggaggtggcgcgtgtttgcggagtgggaggtaagtggcgcgtgtttgcggagtgggaggtggcgtatgtttgtggaatgggaggtggcgcgtgtttgcggagtgggaggtaggtggcgcgtgtttgcggagtgggaggtggcgcgtgtttgcggagtgggaggtaggtggcgcgtgtttgcggagtgggaggtggtacgtgtttgtatagtgggaggtggtgcgtgtttgcggagtgggaggtaggtggcgcgtgtttgcggagtgggaggtggcgcgtgtttgcggagtgggaggtggcgcgtgtttgcggagtgggaggtaagtggcgcgtgtttgcggagtgggaggtgggtggcgcgtgtttgcggagtgggaggtggcgcgtgtttgcggagtgggaggtaggtggcgcgtgtttgcggagtgggaggtggcgcgtgtttgcggagtgggaggtgggtggcgcgtgtttgcggagtgggaggtgggtggcgcgtgtttgcggagtgggaggtgggtggcgcgtgtttgcggagtgggaggtggcgcgtgtttgcggagtgggaggtaggtggcgcgtgtttgcggagtgggaggtggcgcgtgtttgcggagtgggaggtgggtggcgcgtgtttgcggagtgggaggtgggtggcgcgtgtttgcggagtgggaggtgggtggcgcgtgtttgcggagtgggaggtggcgcgtgtttgcggagtgggaggtaagtggcgcgtgtttgcggagtgggaggtaggtggcgcgtgtttgcggagtgggaggtggtacgtgtttgcggagggggaggtaggtggcgcgtgtttgcggagggggaggtaagtggcgcgtgtttgcggagtgggaggtggcgcgtgtttgcggagtgggaggtaggtggcgcgtgtttgcggagtgggaggtaggtggcgcgtgtttgcggagtgggaggtaggtggcgcgtgtttgcggagtgggaggtggtgcgtgtttgcggagtgggaggtaagtggcgtgtttgcggagtgggaggtggcgcgtgtttgcggagtgggaggtagatggcgcgtgtttgcggagtgggaggtgggtggcgcgtgtttgcggagtgggaggtgggtggcgcgtgtttgcggagtgggaggtgggtggcgcgtgtttgcggagtgggaggtgggtggcgcgtgtttgcggagtgggaggtgggtggcgcgtgtttgtggagtgggaggtgggtggcgcgtgtttgcggagtgggaggtggtgcgtgtttgcggagtgggaggtaagtggcgtatgtttgcggagtgggaggtggcgcgtgtttgcggagtgggaggtggcgcgtgtttgcggagtgggaggtaggtggcgcgtgtttgcggagtgggaggtggcgcgtgtttgcggagtgggaggtagtgcgtgtttgcggagtga

SEQ ID NO: 30824 - DNA, 1714 bp, Artificial Sequence
  chemically treated genomic DNA (Homo sapiens) CpG-island No: 30824
tcactccgcaaacacgcactacctcccactccgcaaacacgcgccacctcccactccgcaaacacgcgccacctacctcccactccgcaaacacgcgccacctcccactccgcaaacacgcgccacctcccactccgcaaacatacgccacttacctcccactccgcaaacacgcaccacctcccactccgcaaacacgcgccacccacctcccactccacaaacacgcgccacccacctcccactccgcaaacacgcgccacccacctcccactccgcaaacacgcgccacccacctcccactccgcaaacacgcgccacccacctcccactccgcaaacacgcgccacccacctcccactccgcaaacacgcgccatctacctcccactccgcaaacacgcgccacctcccactccgcaaacacgccacttacctcccactccgcaaacacgcaccacctcccactccgcaaacacgcgccacctacctcccactccgcaaacacgcgccacctacctcccactccgcaaacacgcgccacctacctcccactccgcaaacacgcgccacctcccactccgcaaacacgcgccacttacctccccctccgcaaacacgcgccacctacctccccctccgcaaacacgtaccacctcccactccgcaaacacgcgccacctacctcccactccgcaaacacgcgccacttacctcccactccgcaaacacgcgccacctcccactccgcaaacacgcgccacccacctcccactccgcaaacacgcgccacccacctcccactccgcaaacacgcgccacccacctcccactccgcaaacacgcgccacctcccactccgcaaacacgcgccacctacctcccactccgcaaacacgcgccacctcccactccgcaaacacgcgccacccacctcccactccgcaaacacgcgccacccacctcccactccgcaaacacgcgccacccacctcccactccgcaaacacgcgccacctcccactccgcaaacacgcgccacctacctcccactccgcaaacacgcgccacctcccactccgcaaacacgcgccacccacctcccactccgcaaacacgcgccacttacctcccactccgcaaacacgcgccacctcccactccgcaaacacgcgccacctcccactccgcaaacacgcgccacctacctcccactccgcaaacacgcaccacctcccactatacaaacacgtaccacctcccactccgcaaacacgcgccacctacctcccactccgcaaacacgcgccacctcccactccgcaaacacgcgccacctacctcccactccgcaaacacgcgccacctcccattccacaaacatacgccacctcccactccgcaaacacgcgccacttacctcccactccgcaaacacgcgccacctcccactccacaaacacgcgccacctacctcccactccgcaaacacgtacgctacctcccaaaaaaaaaacgatacgacacacacaacgcttaaaacgtaaaaaaaaaaacgatacgacacacacaacgctcgaaacgtaaaaaaaaaacaatataacacacacaacgctcgaaacgtaaaaaaaaaaacaatacgacacacacaacactcgaaacgtaaaaaaaaaaacgatacgacacacacactacctttccccatcaataaacct

SEQ ID NO: 30825 - DNA, 655 bp, Artificial Sequence
  chemically treated genomic DNA (Homo sapiens) CpG-island No: 30825
agttttttttcgttcgttttatagacgtcgcgtaggtttcgagttttcgagcggcggttttagaattcgcgggttattcgggagtttttttcgtagtattagtcgaaagtttttagtgtcgaggagggcgggtagttgtttttttcgatttcgtttcgttcgcgcggacgttttcggttttacgcggggattatttcgggattttcgtcggatttcgcgcgttcgcggttaatttgcgtgtatttgcgtttcgcgttacgttttcggcgttttacgtttagtttttattgggtttcgttttttagtggttttaagtttcgttttttcgttggttatcgtaagtttcgtttttcgaggtttcgtttttgtaaggttcgtttttttacgatttaggtttcgtttattacggttagttcgggtttaggtttcgtttcgatacgatttaggtttcgttttcggttagtttcgtttttcgcgcgtttcgtttagtaattttcgttgaattcggcgcggtttttttagcgttgttttacgtcgtagtttagcgtttggagttcgcgcgtttcgagtttttgttcgtttatgcgtagttgggttatttaggtgtatttatttttttgttgtttcgtcgttttttttgtttttatttcgttta

SEQ ID NO: 30826 - DNA, 655 bp, Artificial Sequence
  chemically treated genomic DNA (Homo sapiens) CpG-island No: 30826
taaacgaaataaaaacaaaaaaaacgacgaaacaacaaaaaaataaatacacctaaataacccaactacgcataaacgaacaaaaactcgaaacgcgcgaactccaaacgctaaactacgacgtaaaacaacgctaaaaaaaccgcgccgaattcaacgaaaattactaaacgaaacgcgcgaaaaacgaaactaaccgaaaacgaaacctaaatcgtatcgaaacgaaacctaaacccgaactaaccgtaataaacgaaacctaaatcgtaaaaaaacgaaccttacaaaaacgaaacctcgaaaaacgaaacttacgataaccaacgaaaaaacgaaacttaaaaccactaaaaaacgaaacccaataaaaactaaacgtaaaacgccgaaaacgtaacgcgaaacgcaaatacacgcaaattaaccgcgaacgcgcgaaatccgacgaaaatcccgaaataatccccgcgtaaaaccgaaaacgtccgcgcgaacgaaacgaaatcgaaaaaaacaactacccgccctcctcgacactaaaaactttcgactaatactacgaaaaaaactcccgaataacccgcgaattctaaaaccgccgctcgaaaactcgaaacctacgcgacgtctataaaacgaacgaaaaaaaact

SEQ ID NO: 30827 - DNA, 655 bp, Artificial Sequence
  chemically treated genomic DNA (Homo sapiens) CpG-island No: 30827
taggcggggtgggggtagggagggcggcgggatagtaaggaagtgggtgtatttgggtgatttagttgcgtatgagcgggtaggggttcggggcgcgcggattttaggcgttggattgcggcgtggagtagcgttggggaaatcgcgtcgggtttagcgaggattgttgggcggggcgcgcgaggagcgaagttggtcgggggcggggtttgagtcgtgtcggggcggggtttagattcgggttggtcgtgatgggcggggtttgagtcgtgaaggggcgggttttgtaggggcggggtttcgaggggcggagtttgcggtgattagcgagggggcggggtttagagttattaagaagcgggatttagtgagggttaaacgtggggcgtcgggggcgtggcgcggggcgtaggtgtacgtaggttggtcgcgggcgcgcggggttcggcgggagtttcggggtggttttcgcgtggggtcgggggcgttcgcgcgggcggggcgaggtcggggagggtagttgttcgtttttttcggtattgggagttttcggttggtattgcgggaggagttttcgggtgattcgcgggttttgaaatcgtcgttcgggagttcggggtttgcgcggcgtttatggggcgagcgagggagaatt

SEQ ID NO: 30828 - DNA, 655 bp, Artificial Sequence
  chemically treated genomic DNA (Homo sapiens) CpG-island No: 30828
aattctccctcgctcgccccataaacgccgcgcaaaccccgaactcccgaacgacgatttcaaaacccgcgaatcacccgaaaactcctcccgcaataccaaccgaaaactcccaataccgaaaaaaacgaacaactaccctccccgacctcgccccgcccgcgcgaacgcccccgaccccacgcgaaaaccaccccgaaactcccgccgaaccccgcgcgcccgcgaccaacctacgtacacctacgccccgcgccacgcccccgacgccccacgtttaaccctcactaaatcccgcttcttaataactctaaaccccgccccctcgctaatcaccgcaaactccgcccctcgaaaccccgcccctacaaaacccgccccttcacgactcaaaccccgcccatcacgaccaacccgaatctaaaccccgccccgacacgactcaaaccccgcccccgaccaacttcgctcctcgcgcgccccgcccaacaatcctcgctaaacccgacgcgatttccccaacgctactccacgccgcaatccaacgcctaaaatccgcgcgccccgaacccctacccgctcatacgcaactaaatcacccaaatacacccacttccttactatcccgccgccctccctacccccaccccgccta

SEQ ID NO: 30829 - DNA, 624 bp, Artificial Sequence
  chemically treated genomic DNA (Homo sapiens) CpG-island No: 30829
tttagtttcgggtttacgcgttgttattggtttttttcgatcgttcggttttatttttagacgtcgcgattggttatttcgcggggtttcgtttcgtttttttggaaagtttttggaaatttgttaaagtatttttttttattgtttagggttttagattcggcgacggggttcgcgtatttcgttcgggttttatcgtttagttcgcggttttaggaagacgttgttttcgggaagggttggaacgcggtagataaaggattaggtagtagttcgtttcgtttcgttcgtttggttcgtttttttcgttttcgtaggcggttcgcgttattgttttttagtttttgttttgcgttcgcgcgtttcgggagtttatttagtacgcgtttcgcgtttattggttttttttagtcgtcgtcgtttagtcgagtttttatttcggagtcgtcgttgtcgcggggatatggttttttgcgtttaggggtaagcgcggttttttgtttttttttcggttattacgaggggcgtacgggagaataggggtttcgtgttagttgtcgggtattgggagggtttgacgggttagaggtgattgagcgtagacggattttaggagtaaggttt

SEQ ID NO: 30830 - DNA, 624 bp, Artificial Sequence
  chemically treated genomic DNA (Homo sapiens) CpG-island No: 30830
aaaccttactcctaaaatccgtctacgctcaatcacctctaacccgtcaaaccctcccaatacccgacaactaacacgaaacccctattctcccgtacgcccctcgtaataaccgaaaaaaaaacaaaaaaccgcgcttacccctaaacgcaaaaaaccatatccccgcgacaacgacgactccgaaataaaaactcgactaaacgacgacgactaaaaaaaaccaataaacgcgaaacgcgtactaaataaactcccgaaacgcgcgaacgcaaaacaaaaactaaaaaacaataacgcgaaccgcctacgaaaacgaaaaaaacgaaccaaacgaacgaaacgaaacgaactactacctaatcctttatctaccgcgttccaacccttcccgaaaacaacgtcttcctaaaaccgcgaactaaacgataaaacccgaacgaaatacgcgaaccccgtcgccgaatctaaaaccctaaacaataaaaaaaaatactttaacaaatttccaaaaactttccaaaaaaacgaaacgaaaccccgcgaaataaccaatcgcgacgtctaaaaataaaaccgaacgatcgaaaaaaaccaataacaacgcgtaaacccgaaactaaa

SEQ ID NO: 30831 - DNA, 624 bp, Artificial Sequence
  chemically treated genomic DNA (Homo sapiens) CpG-island No: 30831
gagttttgtttttgaggttcgtttgcgtttagttatttttggttcgttaagtttttttaatgttcggtagttagtacgaagtttttgttttttcgtgcgtttttcgtggtggtcgggaagggggtagagagtcgcgtttatttttgaacgtagaggattatgttttcgcggtagcggcgatttcggagtggggattcggttggacggcggcggttggagggaattagtgggcgcggagcgcgtgttgggtaggttttcggggcgcgcgggcgtaggatagggattgagaggtagtggcgcggatcgtttgcgagggcgaggggggcgggttagacgagcggggcggggcgagttgttgtttaattttttgtttgtcgcgttttagtttttttcggaagtagcgtttttttagaatcgcgggttgagcggtggggttcgggcggggtgcgcgggtttcgtcgtcgggtttggggttttgagtagtgaaaggaaatattttgatagatttttaagaattttttaggaaaacggggcggggtttcgcgaggtgattaatcgcgacgtttgaaggtggagtcgagcggtcggggagggttaatagtagcgcgtggattcggggttgaa

SEQ ID NO: 30832 - DNA, 624 bp, Artificial Sequence
  chemically treated genomic DNA (Homo sapiens) CpG-island No: 30832
ttcaaccccgaatccacgcgctactattaaccctccccgaccgctcgactccaccttcaaacgtcgcgattaatcacctcgcgaaaccccgccccgttttcctaaaaaattcttaaaaatctatcaaaatatttcctttcactactcaaaaccccaaacccgacgacgaaacccgcgcaccccgcccgaaccccaccgctcaacccgcgattctaaaaaaacgctacttccgaaaaaaactaaaacgcgacaaacaaaaaattaaacaacaactcgccccgccccgctcgtctaacccgcccccctcgccctcgcaaacgatccgcgccactacctctcaatccctatcctacgcccgcgcgccccgaaaacctacccaacacgcgctccgcgcccactaattccctccaaccgccgccgtccaaccgaatccccactccgaaatcgccgctaccgcgaaaacataatcctctacgttcaaaaataaacgcgactctctacccccttcccgaccaccacgaaaaacgcacgaaaaaacaaaaacttcgtactaactaccgaacattaaaaaaacttaacgaaccaaaaataactaaacgcaaacgaacctcaaaaacaaaactc

SEQ ID NO: 30833 - DNA, 940 bp, Artificial Sequence
  chemically treated genomic DNA (Homo sapiens) CpG-island No: 30833
  unsure (421)
tttttcgcgggtcgtatttgttaaggtcgtatcgttagcgttttttgtcgttttttttgtatagagattcgcgtttattttcgtattcgtattcgtattcgtatttgtttttatttcgcgttcgtttcgcgtcgaggtcgcgtagtttgcgggtagtggcgggggtacgaggatgcgaatttaggcggggtcgggagttgggcgcgttttttagaattttcgttacggttaggtttgagttttatttatttacgtcgtattttttttttttcgtgggggtttatatggtcgtgtcgggcgcggtttcgcgggcgcggcgatcgggcgataacgcggcggggacggtcgcgggttcggttgtggcgtatcgcgagtcgaggcggggacggttaggcggcgcgggttagtggggcggcgtatnttttataggtcgttcgggatgtcgtcgttattttcgttacgtttggatcgcgaggtttcgcgggtggtttagtagtttttggcggcgcgggcgaaggttcgttatttgttcgtcgtcgttgttttcgtgtcgtcgtttgtttttttatagtttcgtcgttcggttttcggcgtcgtcgcggttcggttcgttttagcgggttcgtaggacgttcgcgtatgcgttattttttgtcgcgtaggggttcgcgttgttcgggttcgcgtcgtttcgagttcgcgcgcgaatttacgcgtcgttgttgcgcgttagcggagggaaattcgcgagaagttattggattgttcggtttcggatcggtttttagaatcgttggttcggggtttttagttgtagtaaatttcggagggggcgaagtcggttaggtgggcgattttttttattcggattttttattcgttttcgtttttagtgttttttgtttgcgtttcgagatggttataggttttttggtcggag

SEQ ID NO: 30834 - DNA, 940 bp, Artificial Sequence
  chemically treated genomic DNA (Homo sapiens) CpG-island No: 30834
  unsure (520)
ctccgaccaaaaaacctataaccatctcgaaacgcaaacaaaaaacactaaaaacgaaaacgaataaaaaatccgaataaaaaaaatcgcccacctaaccgacttcgccccctccgaaatttactacaactaaaaaccccgaaccaacgattctaaaaaccgatccgaaaccgaacaatccaataacttctcgcgaatttccctccgctaacgcgcaacaacgacgcgtaaattcgcgcgcgaactcgaaacgacgcgaacccgaacaacgcgaacccctacgcgacaaaaaataacgcatacgcgaacgtcctacgaacccgctaaaacgaaccgaaccgcgacgacgccgaaaaccgaacgacgaaactataaaaaaacaaacgacgacacgaaaacaacgacgacgaacaaataacgaaccttcgcccgcgccgccaaaaactactaaaccacccgcgaaacctcgcgatccaaacgtaacgaaaataacgacgacatcccgaacgacctataaaanatacgccgccccactaacccgcgccgcctaaccgtccccgcctcgactcgcgatacgccacaaccgaacccgcgaccgtccccgccgcgttatcgcccgatcgccgcgcccgcgaaaccgcgcccgacacgaccatataaacccccacgaaaaaaaaaaaatacgacgtaaataaataaaactcaaacctaaccgtaacgaaaattctaaaaaacgcgcccaactcccgaccccgcctaaattcgcatcctcgtacccccgccactacccgcaaactacgcgacctcgacgcgaaacgaacgcgaaataaaaacaaatacgaatacgaatacgaatacgaaaataaacgcgaatctctatacaaaaaaaacgacaaaaaacgctaacgatacgaccttaacaaatacgacccgcgaaaaa

SEQ ID NO: 30835 - DNA, 940 bp, Artificial Sequence
  chemically treated genomic DNA (Homo sapiens) CpG-island No: 30835
  unsure (520)
tttcgattaggaggtttgtggttatttcggggcgtaggtaggaggtattggaagcggaagcgagtggggagttcgggtagagggagtcgtttatttgatcggtttcgtttttttcggggtttgttgtagttgagggtttcggattagcgattttagaagtcggttcggggtcgggtagtttaatagtttttcgcggattttttttcgttggcgcgtagtagcggcgcgtggattcgcgcgcgggttcgggacggcgcgagttcgggtagcgcgagtttttgcgcggtagggagtggcgtatgcgcgggcgttttgcgagttcgttggggcgagtcgagtcgcggcggcgtcgggagtcgggcggcggagttgtgaagaagtaagcggcggtacgggagtagcggcgacggataggtggcgagttttcgttcgcgtcgttaggggttgttgggttattcgcggagtttcgcggtttagacgtggcgggggtggcggcggtatttcggacggtttgtgaggnatgcgtcgttttattggttcgcgtcgtttgatcgttttcgtttcgattcgcggtgcgttatagtcgggttcgcggtcgttttcgtcgcgttgtcgttcggtcgtcgcgttcgcggggtcgcgttcggtacggttatgtggatttttacggaggaggagaaatacggcgtaggtaggtgaggtttaggtttggtcgtggcgggggttttgggggacgcgtttagttttcggtttcgtttggattcgtattttcgtgttttcgttattgttcgtaggttgcgcggtttcggcgcggggcgagcgcggggtgggggtaggtgcgggtgcgggtgcgggtgcgggggtgggcgcgggtttttgtgtagagagggcggtagggggcgttggcggtgcggttttggtaggtgcggttcgcgggagg

SEQ ID NO: 30836 - DNA, 940 bp, Artificial Sequence
  chemically treated genomic DNA (Homo sapiens) CpG-island No: 30836
  unsure (421)
cctcccgcgaaccgcacctaccaaaaccgcaccgccaacgccccctaccgccctctctacacaaaaacccgcgcccacccccgcacccgcacccgcacccgcacctacccccaccccgcgctcgccccgcgccgaaaccgcgcaacctacgaacaataacgaaaacacgaaaatacgaatccaaacgaaaccgaaaactaaacgcgtcccccaaaacccccgccacgaccaaacctaaacctcacctacctacgccgtatttctcctcctccgtaaaaatccacataaccgtaccgaacgcgaccccgcgaacgcgacgaccgaacgacaacgcgacgaaaacgaccgcgaacccgactataacgcaccgcgaatcgaaacgaaaacgatcaaacgacgcgaaccaataaaacgacgcatncctcacaaaccgtccgaaataccgccgccacccccgccacgtctaaaccgcgaaactccgcgaataacccaacaacccctaacgacgcgaacgaaaactcgccacctatccgtcgccgctactcccgtaccgccgcttacttcttcacaactccgccgcccgactcccgacgccgccgcgactcgactcgccccaacgaactcgcaaaacgcccgcgcatacgccactccctaccgcgcaaaaactcgcgctacccgaactcgcgccgtcccgaacccgcgcgcgaatccacgcgccgctactacgcgccaacgaaaaaaaatccgcgaaaaactattaaactacccgaccccgaaccgacttctaaaatcgctaatccgaaaccctcaactacaacaaaccccgaaaaaaacgaaaccgatcaaataaacgactccctctacccgaactccccactcgcttccgcttccaatacctcctacctacgccccgaaataaccacaaacctcctaatcgaaa

SEQ ID NO: 30837 - DNA, 1157 bp, Artificial Sequence
  chemically treated genomic DNA (Homo sapiens) CpG-island No: 30837
gcggcgtcgatgtcggcgtagaggtttttttcggagggtttgttcgagttgacgtcgtatttcgagtagtcgtaggagaagatgttgtagttgatgcgggagtcgaggttaatgtagaagttgtatatttggtttaggtttacggcgttgtcgtgcgagaagagtagcgtgtagcggttggagggcgcgtagcgtacgaatatgtagtcgagtcggttgtttcgggtcgtgcgcgagaagaagatttcgacggcgtttagttcgcgttgcgagtattgttagtcggcgcgttcgttgaggtgtaggttgtacgtatcgggtttcgcgttcgcgtttttttcgggttgttgcggtgtcggttgggtcgcggcggcggcggcggtagtttgggtcggggtcggggcggacgcgtcggcgtcgcgttgtttcggcgttagtatcgtgtaggtgggttcgggcggtaggaaggttagtttggcggcgatgcggttcgggtagggcgggtagtagaagagttagtatagtttatttagcgagaagtcgtttattttggggtttggttcgggtatcgggacggtttggtgttcgtcgtcggttcggttggttggttggttggttggttcgggaggacggaggacggacgcgcggcgagggagttggtaggcgagcgcggagggcggttgtagttcgttcgttcggcggtaggaggaggcggaggcggaggagggtaggaggcggggtcggttcggcgggcgcggcgttcggagttcgggcgggttagcggcggtttcggaatttaggcgaggcgcgggcggttcgggttcgcgcgcggtatataaagtcggcggcggcgtttatggtcggttcgtgcgcgtcgtttttcgttttcgttttcgttttcgtacgttcgtcgtcgtcgtcgtcgtcgtcgttattttcgggttatcgcgcggcggcgtcgtcgttgggacgcggcgtagagtcgggtatcggggcggggcgttgcgggtaagggcgcgggtatttttttcggtttgggaagtattttttcgatttgcggtcgacgggggtttttaggcggtttcggggttcggagaagttgggtgtcggggttgggggttttgcgttcggatagttgggtcgatttgtagagggga

SEQ ID NO: 30838 - DNA, 1157 bp, Artificial Sequence
  chemically treated genomic DNA (Homo sapiens) CpG-island No: 30838
tcccctctacaaatcgacccaactatccgaacgcaaaacccccaaccccgacacccaacttctccgaaccccgaaaccgcctaaaaacccccgtcgaccgcaaatcgaaaaaatacttcccaaaccgaaaaaaatacccgcgcccttacccgcaacgccccgccccgatacccgactctacgccgcgtcccaacgacgacgccgccgcgcgataacccgaaaataacgacgacgacgacgacgacgacgaacgtacgaaaacgaaaacgaaaacgaaaaacgacgcgcacgaaccgaccataaacgccgccgccgactttatataccgcgcgcgaacccgaaccgcccgcgcctcgcctaaattccgaaaccgccgctaacccgcccgaactccgaacgccgcgcccgccgaaccgaccccgcctcctaccctcctccgcctccgcctcctcctaccgccgaacgaacgaactacaaccgccctccgcgctcgcctaccaactccctcgccgcgcgtccgtcctccgtcctcccgaaccaaccaaccaaccaaccaaccgaaccgacgacgaacaccaaaccgtcccgatacccgaaccaaaccccaaaataaacgacttctcgctaaataaactatactaactcttctactacccgccctacccgaaccgcatcgccgccaaactaaccttcctaccgcccgaacccacctacacgatactaacgccgaaacaacgcgacgccgacgcgtccgccccgaccccgacccaaactaccgccgccgccgccgcgacccaaccgacaccgcaacaacccgaaaaaaacgcgaacgcgaaacccgatacgtacaacctacacctcaacgaacgcgccgactaacaatactcgcaacgcgaactaaacgccgtcgaaatcttcttctcgcgcacgacccgaaacaaccgactcgactacatattcgtacgctacgcgccctccaaccgctacacgctactcttctcgcacgacaacgccgtaaacctaaaccaaatatacaacttctacattaacctcgactcccgcatcaactacaacatcttctcctacgactactcgaaatacgacgtcaactcgaacaaaccctccgaaaaaaacctctacgccgacatcgacgccgc

SEQ ID NO: 30839 - DNA, 1157 bp, Artificial Sequence
  chemically treated genomic DNA (Homo sapiens) CpG-island No: 30839
ttttttttgtagatcggtttagttgttcgggcgtagagtttttagtttcggtatttagttttttcgggtttcggagtcgtttggaagttttcgtcggtcgtaggtcgagaaggtgttttttaggtcggggaaggtgttcgcgtttttgttcgtagcgtttcgtttcgatgttcggttttgcgtcgcgttttagcggcggcgtcgtcgcgcggtaattcggaagtggcggcggcggcggcggcggcggcgggcgtgcgggagcgggaacgggagcggggggcggcgcgtacgagtcggttatggacgtcgtcgtcggttttgtgtgtcgcgcgcgggttcgggtcgttcgcgtttcgtttgggtttcggggtcgtcgttgattcgttcgggtttcgagcgtcgcgttcgtcgggtcggtttcgttttttgttttttttcgttttcgtttttttttgtcgtcgggcgggcgggttgtagtcgtttttcgcgttcgtttgttagttttttcgtcgcgcgttcgtttttcgttttttcgggttagttagttagttagttagtcgggtcggcggcgggtattaggtcgtttcgatgttcgagttaggttttaggatgaacggtttttcgttgggtgagttgtgttggtttttttgttgttcgttttgttcgagtcgtatcgtcgttaagttggtttttttgtcgttcgagtttatttatacggtgttggcgtcggagtagcgcggcgtcggcgcgttcgtttcggtttcggtttaggttatcgtcgtcgtcgtcgcggtttagtcggtatcgtagtagttcgaggagggcgcgggcgcggggttcggtgcgtgtagtttgtattttagcgagcgcgtcgattggtagtattcgtagcgcgagttggacgtcgtcgaggtttttttttcgcgtacggttcgggataatcggttcggttgtatgttcgtgcgttgcgcgttttttagtcgttatacgttgtttttttcgtacggtaacgtcgtggatttgggttagatgtgtagtttttatattggtttcggttttcgtattaattgtaatatttttttttacgattattcgggatacggcgttagttcgggtaagtttttcgagaagaatttttacgtcgatatcgacgtcgt

SEQ ID NO: 30840 - DNA, 1157 bp, Artificial Sequence
  chemically treated genomic DNA (Homo sapiens) CpG-island No: 30840
acgacgtcgatatcgacgtaaaaattcttctcgaaaaacttacccgaactaacgccgtatcccgaataatcgtaaaaaaaaatattacaattaatacgaaaaccgaaaccaatataaaaactacacatctaacccaaatccacgacgttaccgtacgaaaaaaacaacgtataacgactaaaaaacgcgcaacgcacgaacatacaaccgaaccgattatcccgaaccgtacgcgaaaaaaaaacctcgacgacgtccaactcgcgctacgaatactaccaatcgacgcgctcgctaaaatacaaactacacgcaccgaaccccgcgcccgcgccctcctcgaactactacgataccgactaaaccgcgacgacgacgacgataacctaaaccgaaaccgaaacgaacgcgccgacgccgcgctactccgacgccaacaccgtataaataaactcgaacgacaaaaaaaccaacttaacgacgatacgactcgaacaaaacgaacaacaaaaaaaccaacacaactcacccaacgaaaaaccgttcatcctaaaacctaactcgaacatcgaaacgacctaatacccgccgccgacccgactaactaactaactaactaacccgaaaaaacgaaaaacgaacgcgcgacgaaaaaactaacaaacgaacgcgaaaaacgactacaacccgcccgcccgacgacaaaaaaaaacgaaaacgaaaaaaaacaaaaaacgaaaccgacccgacgaacgcgacgctcgaaacccgaacgaatcaacgacgaccccgaaacccaaacgaaacgcgaacgacccgaacccgcgcgcgacacacaaaaccgacgacgacgtccataaccgactcgtacgcgccgccccccgctcccgttcccgctcccgcacgcccgccgccgccgccgccgccgccgccacttccgaattaccgcgcgacgacgccgccgctaaaacgcgacgcaaaaccgaacatcgaaacgaaacgctacgaacaaaaacgcgaacaccttccccgacctaaaaaacaccttctcgacctacgaccgacgaaaacttccaaacgactccgaaacccgaaaaaactaaataccgaaactaaaaactctacgcccgaacaactaaaccgatctacaaaaaaaa

SEQ ID NO: 30841 - DNA, 984 bp, Artificial Sequence
  chemically treated genomic DNA (Homo sapiens) CpG-island No: 30841
cgagtgcgtgtgaaaagaagtcgaagtttttttttcgaggtcgggattattttcgcgggaggcgacgtttttttgcgttaagcgaaggagcgtaggttcggcggtttcgcgtacgttttttttacgtcgtttttttgttttatagggtttggtttatcgtttcgtacgtggtttgttttagttcggttttatttttttcggggttcgttttagggttcgtttcgtttggtcgcgggtttaataattgttttagttgtagcgttaggggttgcggtttcgttatcgttattagttttcggtttatttcgtttcgcgtacgtaaatgtgcggtttaattttcggtttcgaagttttttttttgtcggattttttcgttttgattcgatttttcgatttcgttagagatcgcgcggaggttattttatagttttggatcggttattttcgggaggcgcgcgggagggggcggggtttgcgcgttattgcgggcgttgttagtatgaaggcggaagcgcgtagaaggttgaagggattggagtcgtatgggcgcgtgtgcgcgtgcgcgtgcgagtgcgcgggaaggggcggtgcggaagcgcgttaaggtacgtgatcgtttttgtcgttgagatgcgattgcgatgcgcgcggttagtgtttttttgtataaaatatgtttcgagatttgtgcgagattcgtttaggaataaagtatagcgtagtcgtggtttacggtggttgatttgggaaggaggagggagtagggtttaagttgttcgaatcgcgggtgcgtattcgggtacgtagagattgggatttaaagtaggtttgttatttcgtaatttatagtagtttgaggtcgggtatacgtttttcgttttttagcggttaggatttgggaattttatgttagggatacgtacgtgtaagtgtgtggcggattgttggcgttttttttaatgggaatatttaggaatcgttgtg

SEQ ID NO: 30842 - DNA, 984 bp, Artificial Sequence
  chemically treated genomic DNA (Homo sapiens) CpG-island No: 30842
cacaacgattcctaaatattcccattaaaaaaaacgccaacaatccgccacacacttacacgtacgtatccctaacataaaattcccaaatcctaaccgctaaaaaacgaaaaacgtatacccgacctcaaactactataaattacgaaataacaaacctactttaaatcccaatctctacgtacccgaatacgcacccgcgattcgaacaacttaaaccctactccctcctccttcccaaatcaaccaccgtaaaccacgactacgctatactttattcctaaacgaatctcgcacaaatctcgaaacatattttatacaaaaaaacactaaccgcgcgcatcgcaatcgcatctcaacgacaaaaacgatcacgtaccttaacgcgcttccgcaccgccccttcccgcgcactcgcacgcgcacgcgcacacgcgcccatacgactccaatcccttcaaccttctacgcgcttccgccttcatactaacaacgcccgcaataacgcgcaaaccccgccccctcccgcgcgcctcccgaaaataaccgatccaaaactataaaataacctccgcgcgatctctaacgaaatcgaaaaatcgaatcaaaacgaaaaaatccgacaaaaaaaaaacttcgaaaccgaaaattaaaccgcacatttacgtacgcgaaacgaaataaaccgaaaactaataacgataacgaaaccgcaacccctaacgctacaactaaaacaattattaaacccgcgaccaaacgaaacgaaccctaaaacgaaccccgaaaaaaataaaaccgaactaaaacaaaccacgtacgaaacgataaaccaaaccctataaaacaaaaaaacgacgtaaaaaaaacgtacgcgaaaccgccgaacctacgctccttcgcttaacgcaaaaaaacgtcgcctcccgcgaaaataatcccgacctcgaaaaaaaaacttcgacttcttttcacacgcactcg

SEQ ID NO: 30843 - DNA, 984 bp, Artificial Sequence
  chemically treated genomic DNA (Homo sapiens) CpG-island No: 30843
tatagcgatttttaagtatttttattaagaaagacgttagtagttcgttatatatttatacgtgcgtatttttgatataggatttttaaattttggtcgttgaagggcgggaggcgtgtgttcggttttagattattataaattgcgaaatgataaatttgttttgggttttagtttttgcgtgttcgagtgcgtattcgcgattcgagtagtttaagttttattttttttttttttttaaattagttatcgtgggttacggttacgttatgttttatttttaagcgaatttcgtataaatttcgaggtatattttgtataaggggatattggtcgcgcgtatcgtaatcgtattttagcgatagaagcggttacgtgttttggcgcgttttcgtatcgttttttttcgcgtattcgtacgcgtacgcgtatacgcgtttatacggttttaatttttttaattttttgcgcgttttcgtttttatgttagtaacgttcgtagtgacgcgtaggtttcgttttttttcgcgcgtttttcggaagtggtcggtttagagttgtggggtggttttcgcgcggtttttggcggagtcggggaatcggattaaggcgagaggattcggtagggaaggagtttcggggtcgggggttgggtcgtatatttacgtgcgcgaagcggagtggatcgggagttggtgacgatggcggggtcgtagtttttggcgttgtaattggaatagttgttgaattcgcgattaagcgaggcggattttgaagcggatttcgaggaaggtgaggtcggattggggtaggttacgtgcggagcggtgggttaggttttgtggggtaagggggcggcgtgggaggggcgtgcgcgaggtcgtcgggtttgcgttttttcgtttggcgtagaggaacgtcgtttttcgcgagggtggtttcggtttcgggaggagggtttcggtttttttttatacgtattcg

SEQ ID NO: 30844 - DNA, 984 bp, Artificial Sequence
  chemically treated genomic DNA (Homo sapiens) CpG-island No: 30844
cgaatacgtataaaaaaaaaccgaaaccctcctcccgaaaccgaaaccaccctcgcgaaaaacgacgttcctctacgccaaacgaaaaaacgcaaacccgacgacctcgcgcacgcccctcccacgccgcccccttaccccacaaaacctaacccaccgctccgcacgtaacctaccccaatccgacctcaccttcctcgaaatccgcttcaaaatccgcctcgcttaatcgcgaattcaacaactattccaattacaacgccaaaaactacgaccccgccatcgtcaccaactcccgatccactccgcttcgcgcacgtaaatatacgacccaacccccgaccccgaaactccttccctaccgaatcctctcgccttaatccgattccccgactccgccaaaaaccgcgcgaaaaccaccccacaactctaaaccgaccacttccgaaaaacgcgcgaaaaaaaacgaaacctacgcgtcactacgaacgttactaacataaaaacgaaaacgcgcaaaaaattaaaaaaattaaaaccgtataaacgcgtatacgcgtacgcgtacgaatacgcgaaaaaaaacgatacgaaaacgcgccaaaacacgtaaccgcttctatcgctaaaatacgattacgatacgcgcgaccaatatccccttatacaaaatatacctcgaaatttatacgaaattcgcttaaaaataaaacataacgtaaccgtaacccacgataactaatttaaaaaaaaaaaaaaaataaaacttaaactactcgaatcgcgaatacgcactcgaacacgcaaaaactaaaacccaaaacaaatttatcatttcgcaatttataataatctaaaaccgaacacacgcctcccgcccttcaacgaccaaaatttaaaaatcctatatcaaaaatacgcacgtataaatatataacgaactactaacgtctttcttaataaaaatacttaaaaatcgctata

SEQ ID NO: 30845 - DNA, 570 bp, Artificial Sequence
  chemically treated genomic DNA (Homo sapiens) CpG-island No: 30845
  unsure (184)
gggggggtgggataggtggttttcgtagttcgttttatcgttgatcgatagcgacgagaagggcgggttgggttcgaagatttcggtcgatatggagtgtagaggttcgggtaggttgggttcggggttgggcgagttttcgggtgggtgcgttaggatgtcggtaaatcgttgcgtttcgttngacgggtggtggttcggtagcgggtgttttaggttatttaggggcgtttcggacggtttagatgacggtacgaagggtaggtttattggtgtttgggtttgcgaggacggggggttttgcgggaagaagtcgtagttgttttcgggttcgtagtattcgttttggtaatttgcggagcggcggggagggcgtaggacgttagggttcggtcgggggggtcggcgggatcgaaagggagggaagacgcgatttcggcgggttgaggaaggttacgcggggaattcgcggatcgcggggagttttcgcgggtttgggtgtagggaggaggttgggcgtaagttcgggagttgttttttattagttattttcgttatttagggtcgtga

SEQ ID NO: 30846 - DNA, 570 bp, Artificial Sequence
  chemically treated genomic DNA (Homo sapiens) CpG-island No: 30846
  unsure (387)
tcacgaccctaaataacgaaaataactaataaaaaacaactcccgaacttacgcccaacctcctccctacacccaaacccgcgaaaactccccgcgatccgcgaattccccgcgtaaccttcctcaacccgccgaaatcgcgtcttccctccctttcgatcccgccgacccccccgaccgaaccctaacgtcctacgccctccccgccgctccgcaaattaccaaaacgaatactacgaacccgaaaacaactacgacttcttcccgcaaaaccccccgtcctcgcaaacccaaacaccaataaacctacccttcgtaccgtcatctaaaccgtccgaaacgcccctaaataacctaaaacacccgctaccgaaccaccacccgtcnaacgaaacgcaacgatttaccgacatcctaacgcacccacccgaaaactcgcccaaccccgaacccaacctacccgaacctctacactccatatcgaccgaaatcttcgaacccaacccgcccttctcgtcgctatcgatcaacgataaaacgaactacgaaaaccacctatcccaccccccc

SEQ ID NO: 30847 - DNA, 570 bp, Artificial Sequence
  chemically treated genomic DNA (Homo sapiens) CpG-island No: 30847
  unsure (387)
ttacggttttgaataacgggggtagttggtaaggggtagttttcgggtttgcgtttagttttttttttgtatttaggttcgcgagggtttttcgcgattcgcgagtttttcgcgtggttttttttagttcgtcgaggtcgcgttttttttttttttcggtttcgtcggttttttcggtcgggttttgacgttttgcgtttttttcgtcgtttcgtagattattagagcgagtattacgggttcgggggtaattacgattttttttcgtaaggtttttcgttttcgtaggtttagatattagtggatttatttttcgtgtcgttatttgggtcgttcgggacgtttttgggtggtttggagtattcgttgtcgggttattattcgttnagcgaggcgtagcggtttatcgatattttggcgtatttattcggggattcgtttagtttcgagtttagtttgttcgggtttttgtattttatgtcggtcgaggttttcggatttagttcgtttttttcgtcgttgtcggttaacggtggggcgagttacggaaattatttgttttattttttt

SEQ ID NO: 30848 - DNA, 570 bp, Artificial Sequence
  chemically treated genomic DNA (Homo sapiens) CpG-island No: 30848
  unsure (184)
aaaaaaataaaacaaataatttccgtaactcgccccaccgttaaccgacaacgacgaaaaaaacgaactaaatccgaaaacctcgaccgacataaaatacaaaaacccgaacaaactaaactcgaaactaaacgaatccccgaataaatacgccaaaatatcgataaaccgctacgcctcgctnaacgaataataacccgacaacgaatactccaaaccacccaaaaacgtcccgaacgacccaaataacgacacgaaaaataaatccactaatatctaaacctacgaaaacgaaaaaccttacgaaaaaaaatcgtaattacccccgaacccgtaatactcgctctaataatctacgaaacgacgaaaaaaacgcaaaacgtcaaaacccgaccgaaaaaaccgacgaaaccgaaaaaaaaaaaaaacgcgacctcgacgaactaaaaaaaaccacgcgaaaaactcgcgaatcgcgaaaaaccctcgcgaacctaaatacaaaaaaaaaactaaacgcaaacccgaaaactaccccttaccaactacccccgttattcaaaaccgtaa

SEQ ID NO: 30849 - DNA, 683 bp, Artificial Sequence
  chemically treated genomic DNA (Homo sapiens) CpG-island No: 30849
cgatgcgtagattagacggaagttgaaacgggggaaatgttcggggaagcggagtcgtagtgaatttgggttggtagggaatttcgttgtgtagatggaatatttttttcggacgaacggggaagttgttttagagaatttggtttgcgtttcgtggaatcgtggggttttagggttttgttaacgtttttttgttgatttcgttcgtatcgtttagtaattttaaggtttataggtagtttttcgttttgtcgtcggcgttattatgttatggaaatcgaagtcgcggagattcgtagtgcgattcgttggcgttttgttttgattcgtgggtgtcgggattttaacgttttttttatatttttttgtatatatatatgtgggtttttcgttgcgggtcggaggagcgtaggggattagttagtttcggcgcgtcgtcggttttcgtcggtcgtttttagatttcgacgcggggtagggtagaggatggagaaggcggttttgcgatttagggggcgggtttcgcgggttcggattcggtttcgcgttttttttgcggattcggtatttttcggcggaagacgatcggtattcggtaggtttttggtattttcgtaagcgttaaaagtcgtgtggtatggggtttttattttttttattcggatttttaggcgttttttagt

SEQ ID NO: 30850 - DNA, 683 bp, Artificial Sequence
  chemically treated genomic DNA (Homo sapiens) CpG-island No: 30850
actaaaaaacgcctaaaaatccgaataaaaaaaataaaaaccccataccacacgacttttaacgcttacgaaaataccaaaaacctaccgaataccgatcgtcttccgccgaaaaataccgaatccgcaaaaaaaacgcgaaaccgaatccgaacccgcgaaacccgccccctaaatcgcaaaaccgccttctccatcctctaccctaccccgcgtcgaaatctaaaaacgaccgacgaaaaccgacgacgcgccgaaactaactaatcccctacgctcctccgacccgcaacgaaaaacccacatatatatatacaaaaaaatataaaaaaaacgttaaaatcccgacacccacgaatcaaaacaaaacgccaacgaatcgcactacgaatctccgcgacttcgatttccataacataataacgccgacgacaaaacgaaaaactacctataaaccttaaaattactaaacgatacgaacgaaatcaacaaaaaaacgttaacaaaaccctaaaaccccacgattccacgaaacgcaaaccaaattctctaaaacaacttccccgttcgtccgaaaaaaatattccatctacacaacgaaattccctaccaacccaaattcactacgactccgcttccccgaacatttcccccgtttcaacttccgtctaatctacgcatcg

SEQ ID NO: 30851 - DNA, 683 bp, Artificial Sequence
  chemically treated genomic DNA (Homo sapiens) CpG-island No: 30851
gttgggaggcgtttgggggttcgggtggaagaagtggggattttatgttatacggtttttggcgtttgcgggggtgttagaagtttatcgagtatcggtcgtttttcgtcgggaagtgtcgggttcgtaggaggagcgcgaagtcgagttcgagttcgcggagttcgttttttagatcgtagaatcgttttttttattttttgttttgtttcgcgtcggggtttgggagcgatcggcggaggtcggcggcgcgtcggagttgattagttttttacgttttttcggttcgtagcggggagtttatatgtgtatgtgtaagaaggtgtggagaaggcgttagggtttcggtatttacgggttagggtagaacgttaacgagtcgtattgcgggttttcgcggtttcggtttttatgatatggtgacgtcggcggtaaggcggggggttgtttgtgggttttgaggttgttgggcggtgcgggcggagttagtaaaggggcgttggtaaagttttaaaattttacggttttacggagcgtaagttagattttttgaagtagttttttcgttcgttcgaagagggtattttatttgtatagcgggattttttgttagtttaggtttattgcgatttcgttttttcgagtatttttttcgttttagttttcgtttggtttgcgtatcg

SEQ ID NO: 30852 - DNA, 683 bp, Artificial Sequence
  chemically treated genomic DNA (Homo sapiens) CpG-island No: 30852
cgatacgcaaaccaaacgaaaactaaaacgaaaaaaatactcgaaaaaacgaaatcgcaataaacctaaactaacaaaaaatcccgctatacaaataaaataccctcttcgaacgaacgaaaaaactacttcaaaaaatctaacttacgctccgtaaaaccgtaaaattttaaaactttaccaacgcccctttactaactccgcccgcaccgcccaacaacctcaaaacccacaaacaaccccccgccttaccgccgacgtcaccatatcataaaaaccgaaaccgcgaaaacccgcaatacgactcgttaacgttctaccctaacccgtaaataccgaaaccctaacgccttctccacaccttcttacacatacacatataaactccccgctacgaaccgaaaaaacgtaaaaaactaatcaactccgacgcgccgccgacctccgccgatcgctcccaaaccccgacgcgaaacaaaacaaaaaataaaaaaaacgattctacgatctaaaaaacgaactccgcgaactcgaactcgacttcgcgctcctcctacgaacccgacacttcccgacgaaaaacgaccgatactcgataaacttctaacacccccgcaaacgccaaaaaccgtataacataaaatccccacttcttccacccgaacccccaaacgcctcccaac

SEQ ID NO: 30853 - DNA, 1147 bp, Artificial Sequence
  chemically treated genomic DNA (Homo sapiens) CpG-island No: 30853
gcggcggtcgtcggggtggtcgtggtcgtagtcgagggatgtttggttttggaatagtatttcggtgttttgcgcgatgcgcgttatgttgggttagtcggtggtagcgtcgttcgtgtagttgtaggggtagtaggggaagtagatgttgtcgttttagagaaaggcgtttacgaagtgtaggttgttcgcgttttcgtatagtttgaggcgttttagtttttgcgtggttaggttgcgttttttcgtgtttttgagcgcgatggtcgtgtcgtggtcggatgtcgcggggttgtagcggttcgtcgttttcggtttaggtagtacgtaggtggcggttatcgttaggtattagcggttgtttcggttcgcgcggtatattacgtcggtcgtcgagttttgcgggtggtacgatattatttcggtgtcgttgcgtagggagttgcggtttaggttgtttaggggtcgtatttcgtaggcgtttcggtcgaaggtttagtcggtgagtagtagtttttcgaggtcggtcgttttttcgcggtagggtagtagtagtttgttgaagttgttttcgggtcggggtcgcgcggggggcgttagcgagatcggttttgtgtagttgttcgtttggtttcggtataggcgcgagaggttgtgttttaggttgtagtttagttggtttaggtagttgtcgttcgttataaatacgtcgtttttttggttcgtcgcgatggtttcgatggtttgtttcgatcgttatacgggttcgttcgcgtttcggtcgggagtcgttagtgttagtagataggcgagtaggggtagtggcgttgcggggcgcggggggcgcggcggcgttttttttcgggagatttttatggggttgggggggtcgttttcgggtagggcgcgcggcggcgacggcggtttaggcgcgcggtaacggagacgcgggcggcggcggcggcggtttttgcgcgcgttcgggttttcgcggtcgttttattttcgtagttcgtttaggaaggagagcggggagggcggcgcgcggtaggttcgtttcggtagtttgtgtagcggcggtggcggtagtaagttttgcgcgtttcggtatcgtttttttttcgttttttttcgtcggagagttttt

SEQ ID NO: 30854 - DNA, 1147 bp, Artificial Sequence
  chemically treated genomic DNA (Homo sapiens) CpG-island No: 30854
aaaaactctccgacgaaaaaaaacgaaaaaaaaacgataccgaaacgcgcaaaacttactaccgccaccgccgctacacaaactaccgaaacgaacctaccgcgcgccgccctccccgctctccttcctaaacgaactacgaaaataaaacgaccgcgaaaacccgaacgcgcgcaaaaaccgccgccgccgccgcccgcgtctccgttaccgcgcgcctaaaccgccgtcgccgccgcgcgccctacccgaaaacgacccccccaaccccataaaaatctcccgaaaaaaaacgccgccgcgccccccgcgccccgcaacgccactacccctactcgcctatctactaacactaacgactcccgaccgaaacgcgaacgaacccgtataacgatcgaaacaaaccatcgaaaccatcgcgacgaaccaaaaaaacgacgtatttataacgaacgacaactacctaaaccaactaaactacaacctaaaacacaacctctcgcgcctataccgaaaccaaacgaacaactacacaaaaccgatctcgctaacgccccccgcgcgaccccgacccgaaaacaacttcaacaaactactactaccctaccgcgaaaaaacgaccgacctcgaaaaactactactcaccgactaaaccttcgaccgaaacgcctacgaaatacgacccctaaacaacctaaaccgcaactccctacgcaacgacaccgaaataatatcgtaccacccgcaaaactcgacgaccgacgtaatataccgcgcgaaccgaaacaaccgctaatacctaacgataaccgccacctacgtactacctaaaccgaaaacgacgaaccgctacaaccccgcgacatccgaccacgacacgaccatcgcgctcaaaaacacgaaaaaacgcaacctaaccacgcaaaaactaaaacgcctcaaactatacgaaaacgcgaacaacctacacttcgtaaacgcctttctctaaaacgacaacatctacttcccctactacccctacaactacacgaacgacgctaccaccgactaacccaacataacgcgcatcgcgcaaaacaccgaaatactattccaaaaccaaacatccctcgactacgaccacgaccaccccgacgaccgccgc

SEQ ID NO: 30855 - DNA, 1147 bp, Artificial Sequence
  chemically treated genomic DNA (Homo sapiens) CpG-island No: 30855
aggaatttttcggcgaaggagggcgaggaggaaacggtgtcggagcgcgtagggtttgttgtcgttatcgtcgttgtataggttgtcggagcgagtttgtcgcgcgtcgtttttttcgtttttttttttgggcgagttgcggggatggggcggtcgcgggagttcgagcgcgcgtaggaatcgtcgtcgtcgtcgttcgcgttttcgttgtcgcgcgtttgagtcgtcgtcgtcgtcgcgcgttttgttcgggggcggtttttttagttttatggaggtttttcggaggaaggcgtcgtcgcgtttttcgcgtttcgtagcgttattgtttttgttcgtttatttgttggtattggcggttttcggtcggggcgcggacgagttcgtgtggcggtcggagtaagttatcggagttatcgcggcgagttaggaggacggcgtgtttgtggcgagcggtagttgtttggattagttggattatagtttggagtatagtttttcgcgtttgtatcgggattaagcgggtaattgtatagagtcggtttcgttggcgtttttcgcgcggtttcggttcgggagtagttttagtaagttgttgttgttttatcgcgagggggcggtcggtttcggggggttgttgtttatcggttggattttcgatcggggcgtttgcgaggtgcggtttttgggtaatttgagtcgtaattttttgcgtaacggtatcgaggtggtgtcgtgttattcgtagggttcgacggtcggcgtggtgtatcgcgcgggtcggaataatcgttggtatttggcggtggtcgttatttacgtgttgtttgagtcggagacggcgagtcgttgtaatttcgcggtattcgattacgatacggttatcgcgtttaaggatacggaggggcgtagtttggttacgtaggagttggggcgttttaagttgtgcgagggcgcgggtagtttgtatttcgtggacgtttttttttggaacggtagtatttattttttttattatttttataattatacgagcggcgttgttatcggttggtttagtatggcgcgtatcgcgtagagtatcgaggtgttgttttagggttaggtatttttcgattgcggttacggttatttcgacggtcgtcgt

SEQ ID NO: 30856 - DNA, 1147 bp, Artificial Sequence
  chemically treated genomic DNA (Homo sapiens) CpG-island No: 30856
acgacgaccgtcgaaataaccgtaaccgcaatcgaaaaatacctaaccctaaaacaacacctcgatactctacgcgatacgcgccatactaaaccaaccgataacaacgccgctcgtataattataaaaataataaaaaaaataaatactaccgttccaaaaaaaaacgtccacgaaatacaaactacccgcgccctcgcacaacttaaaacgccccaactcctacgtaaccaaactacgcccctccgtatccttaaacgcgataaccgtatcgtaatcgaataccgcgaaattacaacgactcgccgtctccgactcaaacaacacgtaaataacgaccaccgccaaataccaacgattattccgacccgcgcgatacaccacgccgaccgtcgaaccctacgaataacacgacaccacctcgataccgttacgcaaaaaattacgactcaaattacccaaaaaccgcacctcgcaaacgccccgatcgaaaatccaaccgataaacaacaaccccccgaaaccgaccgccccctcgcgataaaacaacaacaacttactaaaactactcccgaaccgaaaccgcgcgaaaaacgccaacgaaaccgactctatacaattacccgcttaatcccgatacaaacgcgaaaaactatactccaaactataatccaactaatccaaacaactaccgctcgccacaaacacgccgtcctcctaactcgccgcgataactccgataacttactccgaccgccacacgaactcgtccgcgccccgaccgaaaaccgccaataccaacaaataaacgaacaaaaacaataacgctacgaaacgcgaaaaacgcgacgacgccttcctccgaaaaacctccataaaactaaaaaaaccgcccccgaacaaaacgcgcgacgacgacgacgactcaaacgcgcgacaacgaaaacgcgaacgacgacgacgacgattcctacgcgcgctcgaactcccgcgaccgccccatccccgcaactcgcccaaaaaaaaaaacgaaaaaaacgacgcgcgacaaactcgctccgacaacctatacaacgacgataacgacaacaaaccctacgcgctccgacaccgtttcctcctcgccctccttcgccgaaaaattcct

SEQ ID NO: 30857 - DNA, 525 bp, Artificial Sequence
  chemically treated genomic DNA (Homo sapiens) CpG-island No: 30857
ttgtggcgcggtcgtaggtcggtttcgtatttatttgtcgttttatcggttttcgttttatttgcgcgtcgtttttttggggcggtttttggcgttttcgttttcgttcgtcgggtttggtttttacgggtcgagtgcgggaagtcggggcggtttatttgtcgcgagcggttgttaggcgcggcgagtttagcgtcgaggcgtttttaaagggcgggatcggcgtttagtaatgttttttaggcgggtgcgttttcgaataaagtcggggtgtacggttttttttcgcgcggttggatttaaagtcgttgttcggggttgttgggtttaagagcggtcgtcgttttttttgtttttttttagaagggttcgcgtgttttcgttgttcgtcgtttaatattcgtttttttttttgtatcgaatatttcgggtttattgacgcgtcgtttttattttaagttttaaatttttaaagtgtaggagataattgttacgttattttgtaaaaaatgttaacgtttgata

SEQ ID NO: 30858 - DNA, 525 bp, Artificial Sequence
  chemically treated genomic DNA (Homo sapiens) CpG-island No: 30858
tatcaaacgttaacattttttacaaaataacgtaacaattatctcctacactttaaaaatttaaaacttaaaataaaaacgacgcgtcaataaacccgaaatattcgatacaaaaaaaaaaacgaatattaaacgacgaacaacgaaaacacgcgaacccttctaaaaaaaaacaaaaaaaacgacgaccgctcttaaacccaacaaccccgaacaacgactttaaatccaaccgcgcgaaaaaaaaccgtacaccccgactttattcgaaaacgcacccgcctaaaaaacattactaaacgccgatcccgccctttaaaaacgcctcgacgctaaactcgccgcgcctaacaaccgctcgcgacaaataaaccgccccgacttcccgcactcgacccgtaaaaaccaaacccgacgaacgaaaacgaaaacgccaaaaaccgccccaaaaaaacgacgcgcaaataaaacgaaaaccgataaaacgacaaataaatacgaaaccgacctacgaccgcgccacaa

SEQ ID NO: 30859 - DNA, 525 bp, Artificial Sequence
  chemically treated genomic DNA (Homo sapiens) CpG-island No: 30859
tattagacgttagtattttttgtagggtgacgtgatagttgttttttgtattttgaaggtttggggtttaggatggagacggcgcgttagtgagttcgaagtgttcggtgtaggaggaagagcgggtgttgggcggcggatagcgggggtacgcgggtttttttggggagaagtaggaggggcggcggtcgtttttggatttagtagtttcgggtagcgattttgggtttagtcgcgcggggagaggtcgtgtatttcgattttgttcgggggcgtattcgtttgaaagatattgttgggcgtcggtttcgttttttggggacgtttcggcgttggattcgtcgcgtttggtagtcgttcgcggtagatgggtcgtttcggtttttcgtattcggttcgtgggaattaggttcggcgggcgggggcgagggcgttaggaatcgttttaggggagcggcgcgtagatggggcgggggtcggtgaggcggtagatgggtgcgaggtcggtttgcggtcgcgttataa

SEQ ID NO: 30860 - DNA, 525 bp, Artificial Sequence
  chemically treated genomic DNA (Homo sapiens) CpG-island No: 30860
ttataacgcgaccgcaaaccgacctcgcacccatctaccgcctcaccgacccccgccccatctacgcgccgctcccctaaaacgattcctaacgccctcgcccccgcccgccgaacctaattcccacgaaccgaatacgaaaaaccgaaacgacccatctaccgcgaacgactaccaaacgcgacgaatccaacgccgaaacgtccccaaaaaacgaaaccgacgcccaacaatatctttcaaacgaatacgcccccgaacaaaatcgaaatacacgacctctccccgcgcgactaaacccaaaatcgctacccgaaactactaaatccaaaaacgaccgccgcccctcctacttctccccaaaaaaacccgcgtacccccgctatccgccgcccaacacccgctcttcctcctacaccgaacacttcgaactcactaacgcgccgtctccatcctaaaccccaaaccttcaaaatacaaaaaacaactatcacgtcaccctacaaaaaatactaacgtctaata

SEQ ID NO: 30861 - DNA, 556 bp, Artificial Sequence
  chemically treated genomic DNA (Homo sapiens) CpG-island No: 30861
tcgaagttggaattttcgggggtcgagggttgtcggttcgggtttcgtttagtatttttaacggcgagattagcgttttgacggtcgaggtgagatttagattcgattattagattatttttatatcgacggggaaacggaggttagagagggcgtgggcgtttgtattattttcgttttatttttgcgggtatttggttatgcgggggtgtttaaggagtttggaaaaagcgttttttcgtcgtgttttttggggaagggggcgttcgttgcgttcggagcggcgttttttttaattcgtcggttttattttttttcgtttttataggcggtatgcgtttttgcggacgatcgtattttgtgtcgttgaagcgttttttttagggatcggcggattttagttatttagggggtaagaggaattacgtgttttgtgggttttttttaacgcgtttcgtcggatttgagggagaataagatcgatcggcggttattgcgtttttaattgtatttagtttggggttgaggttgaggtattggcgaggagagggcgttt

SEQ ID NO: 30862 - DNA, 556 bp, Artificial Sequence
  chemically treated genomic DNA (Homo sapiens) CpG-island No: 30862
aaacgccctctcctcgccaatacctcaacctcaaccccaaactaaatacaattaaaaacgcaataaccgccgatcgatcttattctccctcaaatccgacgaaacgcgttaaaaaaaacccacaaaacacgtaattcctcttaccccctaaataactaaaatccgccgatccctaaaaaaaacgcttcaacgacacaaaatacgatcgtccgcaaaaacgcataccgcctataaaaacgaaaaaaaataaaaccgacgaattaaaaaaaacgccgctccgaacgcaacgaacgcccccttccccaaaaaacacgacgaaaaaacgctttttccaaactccttaaacacccccgcataaccaaatacccgcaaaaataaaacgaaaataatacaaacgcccacgccctctctaacctccgtttccccgtcgatataaaaataatctaataatcgaatctaaatctcacctcgaccgtcaaaacgctaatctcgccgttaaaaatactaaacgaaacccgaaccgacaaccctcgacccccgaaaattccaacttcga

SEQ ID NO: 30863 - DNA, 556 bp, Artificial Sequence
  chemically treated genomic DNA (Homo sapiens) CpG-island No: 30863
gagcgtttttttttcgttagtgttttagttttagttttaggttggatgtagttaagggcgtagtggtcgtcgatcggttttgtttttttttagattcggcgaggcgcgttgggggagatttatagagtacgtaattttttttgttttttggatggttggggttcgtcggtttttgggggaggcgttttagcgatataagatgcgatcgttcgtaggaacgtatgtcgtttgtgaaaacgagaagaaatgagatcggcgggttggaagggacgtcgtttcgagcgtagcgaacgtttttttttttaggaagtacgacgggggagcgttttttttaggttttttaggtattttcgtatagttaggtattcgtaaggatgggacggaagtggtgtaagcgtttacgttttttttggttttcgttttttcgtcggtataaggatgatttagtggtcggatttggattttatttcggtcgttagggcgttgatttcgtcgttgagggtgttgagcggagttcggatcggtagttttcggttttcgggggttttaatttcgg

SEQ ID NO: 30864 - DNA, 556 bp, Artificial Sequence
  chemically treated genomic DNA (Homo sapiens) CpG-island No: 30864
ccgaaattaaaacccccgaaaaccgaaaactaccgatccgaactccgctcaacaccctcaacgacgaaatcaacgccctaacgaccgaaataaaatccaaatccgaccactaaatcatccttataccgacgaaaaaacgaaaaccaaaaaaaacgtaaacgcttacaccacttccgtcccatccttacgaatacctaactatacgaaaatacctaaaaaacctaaaaaaaacgctcccccgtcgtacttcctaaaaaaaaaaacgttcgctacgctcgaaacgacgtcccttccaacccgccgatctcatttcttctcgttttcacaaacgacatacgttcctacgaacgatcgcatcttatatcgctaaaacgcctcccccaaaaaccgacgaaccccaaccatccaaaaaacaaaaaaaattacgtactctataaatctcccccaacgcgcctcgccgaatctaaaaaaaaacaaaaccgatcgacgaccactacgcccttaactacatccaacctaaaactaaaactaaaacactaacgaaaaaaaaacgctc

SEQ ID NO: 30865 - DNA, 814 bp, Artificial Sequence
  chemically treated genomic DNA (Homo sapiens) CpG-island No: 30865
aaagacgcgggagacgcggtatttatcggcgagtagttcgggttaggtcgagttcgcgtttagcgtttcgcgttcgtcgcgttttttatatcgggaattgttcgtatttgttcgatacgtcgggatgcgttgcggggttcgcgacgtcggcgttttttacggcgtcgcgttcgtcgttcgcgagttaggaagttatcgcggtttgcggtttttcgttatcgtcgttcgtttttttttttagggatacggcgagttggttgaaagcgtaaaggagcgagtagaagtcgtaggttatatatagtattacgacgcgtaggtagcgtcgtatcgtttcggtcgcgtttttttttcgtcgtcgtcgtcgcgttcgtttcgacgaattggagcggagggaggggtatcgcgtagtcgcgggcgtaataagttttttattcgtagtcgtcgtcgtcgttttgcgttcgttttttttttttttttttcgtttattatttaggcgagcgtagtcgcggtttcggagtcgaaggattattcgttcggaagtttggatatcgtttttgtcgtcgcgcgtttaagggttagcggtagcgacgtaatttcgtttttttttcgggcgggagggttggacgcgtcggcgtagttcgcgtgggagggacgtagggttggcgcgtagagggtggtgtgagtgcgcggaacgcggcgcgtttgagggttatagttagcgtaggtcgacgcgtaggtgaatgggagttttgtgggtttcgatcgtcgagagagggggagcgaaagttttagggttttggaggtagttgattta

SEQ ID NO: 30866 - DNA, 814 bp, Artificial Sequence
  chemically treated genomic DNA (Homo sapiens) CpG-island No: 30866
taaatcaactacctccaaaaccctaaaactttcgctccccctctctcgacgatcgaaacccacaaaactcccattcacctacgcgtcgacctacgctaactataaccctcaaacgcgccgcgttccgcgcactcacaccaccctctacgcgccaaccctacgtccctcccacgcgaactacgccgacgcgtccaaccctcccgcccgaaaaaaaaacgaaattacgtcgctaccgctaacccttaaacgcgcgacgacaaaaacgatatccaaacttccgaacgaataatccttcgactccgaaaccgcgactacgctcgcctaaataataaacgaaaaaaaaaaaaaaaaaacgaacgcaaaacgacgacgacgactacgaataaaaaacttattacgcccgcgactacgcgatacccctccctccgctccaattcgtcgaaacgaacgcgacgacgacgacgaaaaaaaaacgcgaccgaaacgatacgacgctacctacgcgtcgtaatactatatataacctacgacttctactcgctcctttacgctttcaaccaactcgccgtatccctaaaaaaaaaaacgaacgacgataacgaaaaaccgcaaaccgcgataacttcctaactcgcgaacgacgaacgcgacgccgtaaaaaacgccgacgtcgcgaaccccgcaacgcatcccgacgtatcgaacaaatacgaacaattcccgatataaaaaacgcgacgaacgcgaaacgctaaacgcgaactcgacctaacccgaactactcgccgataaataccgcgtctcccgcgtcttt

SEQ ID NO: 30867 - DNA, 814 bp, Artificial Sequence
  chemically treated genomic DNA (Homo sapiens) CpG-island No: 30867
taggttaattgtttttagagttttgaggttttcgttttttttttttcggcggtcgagatttatagggtttttatttatttgcgcgtcggtttgcgttagttatagtttttaggcgcgtcgcgtttcgcgtatttatattattttttgcgcgttagttttgcgttttttttacgcgaattgcgtcggcgcgtttagttttttcgttcgggggaggggcggggttgcgtcgttgtcgttgatttttgagcgcgcggcggtagaggcggtgtttaggttttcgggcgggtagtttttcggtttcggagtcgcgattgcgttcgtttaggtggtgggcggggagggaaggaagggagcgggcgtaaggcggcggcggcggttgcgggtgaggaatttgttgcgttcgcggttgcgcggtgttttttttttcgttttagttcgtcggggcgggcgcggcggcggcggcgaaggaggagcgcggtcggggcgatgcggcgttatttgcgcgtcgtggtgttgtgtgtggtttgcggtttttgttcgtttttttacgtttttagttagttcgtcgtgtttttggaagaaggaacgggcggcggtggcgggaagtcgtaggtcgcggtggttttttggttcgcgggcggcggacgcggcgtcgtgagaggcgtcggcgtcgcgggtttcgtagcgtatttcggcgtgtcggataggtacgggtagttttcggtgtgggggacgcggcgggcgcggggcgttgggcgcgggttcggtttagttcgggttgttcgtcggtgggtgtcgcgtttttcgcgttttt

SEQ ID NO: 30868 - DNA, 814 bp, Artificial Sequence
  chemically treated genomic DNA (Homo sapiens) CpG-island No: 30868
aaaaacgcgaaaaacgcgacacccaccgacgaacaacccgaactaaaccgaacccgcgcccaacgccccgcgcccgccgcgtcccccacaccgaaaactacccgtacctatccgacacgccgaaatacgctacgaaacccgcgacgccgacgcctctcacgacgccgcgtccgccgcccgcgaaccaaaaaaccaccgcgacctacgacttcccgccaccgccgcccgttccttcttccaaaaacacgacgaactaactaaaaacgtaaaaaaacgaacaaaaaccgcaaaccacacacaacaccacgacgcgcaaataacgccgcatcgccccgaccgcgctcctccttcgccgccgccgccgcgcccgccccgacgaactaaaacgaaaaaaaaaacaccgcgcaaccgcgaacgcaacaaattcctcacccgcaaccgccgccgccgccttacgcccgctcccttccttccctccccgcccaccacctaaacgaacgcaatcgcgactccgaaaccgaaaaactacccgcccgaaaacctaaacaccgcctctaccgccgcgcgctcaaaaatcaacgacaacgacgcaaccccgcccctcccccgaacgaaaaaactaaacgcgccgacgcaattcgcgtaaaaaaaacgcaaaactaacgcgcaaaaaataatataaatacgcgaaacgcgacgcgcctaaaaactataactaacgcaaaccgacgcgcaaataaataaaaaccctataaatctcgaccgccgaaaaaaaaaaaacgaaaacctcaaaactctaaaaacaattaaccta

SEQ ID NO: 30869 - DNA, 553 bp, Artificial Sequence
  chemically treated genomic DNA (Homo sapiens) CpG-island No: 30869
cggtcgcgtagtatttattagtcgtcgcgatcggttttcgtcggattaggttattaattaggtcggagtagtagtttaagaagtcgatgtagaggagtcgcgggtcggttagtttgggcgggggtaggtttcgggttttattcggtagaaatcgtaagggttttgggtttcgtcgtgcgattatggtgacgtcgtttttatttgaggtttggttttagattacgaattataaggaaaattacgacgattattattcgggtttaagcggttagtttttttttttttttttgcgcgtcggatttacgggtacggtatagcgcggtatagcgtttaaacgtttttcggtacgtgttgttgcgggaatcgggtacgaaaagtttcgggttattaagttttattttgttcgttcgttcgcgttaattttttggtgggagtgggatttacgggtttggtaacgcggggtcgaggagtattttaaacgagttaaattgggcgaagattaggagatattgattttttttttttttaatttttttaattagtaatagttttt

SEQ ID NO: 30870 - DNA, 553 bp, Artificial Sequence
  chemically treated genomic DNA (Homo sapiens) CpG-island No: 30870
aaaaactattactaattaaaaaaattaaaaaaaaaaaaaatcaatatctcctaatcttcgcccaatttaactcgtttaaaatactcctcgaccccgcgttaccaaacccgtaaatcccactcccaccaaaaaattaacgcgaacgaacgaacaaaataaaacttaataacccgaaacttttcgtacccgattcccgcaacaacacgtaccgaaaaacgtttaaacgctataccgcgctataccgtacccgtaaatccgacgcgcaaaaaaaaaaaaaaaaactaaccgcttaaacccgaataataatcgtcgtaattttccttataattcgtaatctaaaaccaaacctcaaataaaaacgacgtcaccataatcgcacgacgaaacccaaaacccttacgatttctaccgaataaaacccgaaacctacccccgcccaaactaaccgacccgcgactcctctacatcgacttcttaaactactactccgacctaattaataacctaatccgacgaaaaccgatcgcgacgactaataaatactacgcgaccg

SEQ ID NO: 30871 - DNA, 553 bp, Artificial Sequence
  chemically treated genomic DNA (Homo sapiens) CpG-island No: 30871
agaggttattgttggttgggaaagttgggagaaaagaaaattagtattttttagttttcgtttagtttggttcgtttggggtatttttcgatttcgcgttattaggttcgtgaattttatttttattagagaattagcgcgggcggacgagtaaagtgaaatttagtagttcggaatttttcgtgttcggttttcgtagtaatacgtatcgggaagcgtttgggcgttgtatcgcgttgtgtcgtgttcgtgagttcggcgcgtagaggaggaggagaaagttgatcgtttaggttcgggtagtggtcgtcgtggttttttttgtagttcgtggtttgagattaggttttaagtggaaacggcgttattatgatcgtacggcggaatttagaatttttacggtttttgtcggatgaggttcggagtttgttttcgtttaagttgatcgattcgcggtttttttatatcggttttttgggttattgtttcggtttgattgataatttgattcggcggaggtcgatcgcgacggttggtgagtgttgcgcggtcg

SEQ ID NO: 30872 - DNA, 553 bp, Artificial Sequence
  chemically treated genomic DNA (Homo sapiens) CpG-island No: 30872
cgaccgcgcaacactcaccaaccgtcgcgatcgacctccgccgaatcaaattatcaatcaaaccgaaacaataacccaaaaaaccgatataaaaaaaccgcgaatcgatcaacttaaacgaaaacaaactccgaacctcatccgacaaaaaccgtaaaaattctaaattccgccgtacgatcataataacgccgtttccacttaaaacctaatctcaaaccacgaactacaaaaaaaaccacgacgaccactacccgaacctaaacgatcaactttctcctcctcctctacgcgccgaactcacgaacacgacacaacgcgatacaacgcccaaacgcttcccgatacgtattactacgaaaaccgaacacgaaaaattccgaactactaaatttcactttactcgtccgcccgcgctaattctctaataaaaataaaattcacgaacctaataacgcgaaatcgaaaaataccccaaacgaaccaaactaaacgaaaactaaaaaatactaattttcttttctcccaactttcccaaccaacaataacctct

SEQ ID NO: 30873 - DNA, 613 bp, Artificial Sequence
  chemically treated genomic DNA (Homo sapiens) CpG-island No: 30873
tcggttagcgtgaagtaggggttggttcggcgcgtgttggaggcggcgcggtagtcgttggagcgtgagtagtgtttggcgttgttggcgttgggcgcgcgtttttacgtgggcggcgcggaggagttgtcgcgtcgcgtgggttgttagttgttgtacgtggtcggtcgttattatttcgacgttttcgtcgagttttttagcgcgcgtcgcgtgttgcgtttgttgtagggtggcgtcggtttttcgggttttcgcgcgttcgtttgcgtgtagttgggtttgtagttgttgttcgaggggtttgcggtcgacgaggtgttcgcgttgttgcggcgcgaggtgttgcgtatcgtgtgcgagcgttcgggtttcgcggtttgcgcgtaggtggtacggttgttggttcgttattcgcgttgtgtgttcgacggattttatcgtttgtttttttgttagtagttggtgcgttgtttcggtcgttttcgttgtttagtcgaaggcgaggagggcgtcgtggagtttttagagtaggtttagtaggtgagcgggtttttggcgtagttgtggcgcgtatagttcgtcgttattttgttttgttttaaagagttgt

SEQ ID NO: 30874 - DNA, 613 bp, Artificial Sequence
  chemically treated genomic DNA (Homo sapiens) CpG-island No: 30874
acaactctttaaaacaaaacaaaataacgacgaactatacgcgccacaactacgccaaaaacccgctcacctactaaacctactctaaaaactccacgacgccctcctcgccttcgactaaacaacgaaaacgaccgaaacaacgcaccaactactaacaaaaaaacaaacgataaaatccgtcgaacacacaacgcgaataacgaaccaacaaccgtaccacctacgcgcaaaccgcgaaacccgaacgctcgcacacgatacgcaacacctcgcgccgcaacaacgcgaacacctcgtcgaccgcaaacccctcgaacaacaactacaaacccaactacacgcaaacgaacgcgcgaaaacccgaaaaaccgacgccaccctacaacaaacgcaacacgcgacgcgcgctaaaaaactcgacgaaaacgtcgaaataataacgaccgaccacgtacaacaactaacaacccacgcgacgcgacaactcctccgcgccgcccacgtaaaaacgcgcgcccaacgccaacaacgccaaacactactcacgctccaacgactaccgcgccgcctccaacacgcgccgaaccaacccctacttcacgctaaccga

SEQ ID NO: 30875 - DNA, 613 bp, Artificial Sequence
  chemically treated genomic DNA (Homo sapiens) CpG-island No: 30875
atagttttttgaggtagggtaggatggcggcgggttgtgcgcgttatagttgcgttaggagttcgtttatttgttgggtttgttttaggaattttacggcgtttttttcgttttcggttgggtagcggaagcggtcgaggtaacgtattagttgttggtagaagagtaggcggtggggttcgtcgggtatatagcgcgggtggcgagttagtagtcgtgttatttgcgcgtaggtcgcggggttcgggcgttcgtatacggtgcgtagtatttcgcgtcgtagtagcgcgaatatttcgtcggtcgtaggtttttcgggtagtagttgtagatttagttgtacgtaggcgagcgcgcgggggttcggggggtcggcgttattttgtagtaggcgtagtacgcgacgcgcgttgaagaattcggcgaagacgtcggggtggtggcggtcggttacgtgtagtagttggtagtttacgcggcgcggtagttttttcgcgtcgtttacgtagaggcgcgcgtttagcgttagtagcgttaggtattgtttacgttttagcggttgtcgcgtcgtttttagtacgcgtcgaattagtttttgttttacgttgatcgg

SEQ ID NO: 30876 - DNA, 613 bp, Artificial Sequence
  chemically treated genomic DNA (Homo sapiens) CpG-island No: 30876
ccgatcaacgtaaaacaaaaactaattcgacgcgtactaaaaacgacgcgacaaccgctaaaacgtaaacaatacctaacgctactaacgctaaacgcgcgcctctacgtaaacgacgcgaaaaaactaccgcgccgcgtaaactaccaactactacacgtaaccgaccgccaccaccccgacgtcttcgccgaattcttcaacgcgcgtcgcgtactacgcctactacaaaataacgccgaccccccgaacccccgcgcgctcgcctacgtacaactaaatctacaactactacccgaaaaacctacgaccgacgaaatattcgcgctactacgacgcgaaatactacgcaccgtatacgaacgcccgaaccccgcgacctacgcgcaaataacacgactactaactcgccacccgcgctatatacccgacgaaccccaccgcctactcttctaccaacaactaatacgttacctcgaccgcttccgctacccaaccgaaaacgaaaaaaacgccgtaaaattcctaaaacaaacccaacaaataaacgaactcctaacgcaactataacgcgcacaacccgccgccatcctaccctacctcaaaaaactat

SEQ ID NO: 30877 - DNA, 540 bp, Artificial Sequence
  chemically treated genomic DNA (Homo sapiens) CpG-island No: 30877
gtggtttacgcggttggatatggttttttgtcgtttgcgttcgtttgtcgggttggggtgggggcgttcgggatttttcgtttgaaggtcggtgcgtttcgttcggggttcgttgcgttttaagggtttcggagattttgagttgcggttcgggatagagttgtcggattcgggttgttcggttgagtcgcgtttttcgtcgttcgtttaaggaagtagtgatcgggcggtgatagttgttagggtcgcggtcgtcgtttcgtttttttttttttttcgtagttttagtaggcggggtcgacgagtcgtcgtcgcgtttattcgtgttgtagacgtgtagtttattcgcgatgtttttatttttttttttaaagatgattattagttttcggatggttatcgttcggtgttcgtgtcgggcgcgggggatcggtttcgtgaaggaagaaattcgtttttagttgaggaggttgggagtcgttatttttttaattttcgtttttttgtttataatgtatcgttttcgttttaatcggttgt

SEQ ID NO: 30878 - DNA, 540 bp, Artificial Sequence
  chemically treated genomic DNA (Homo sapiens) CpG-island No: 30878
acaaccgattaaaacgaaaacgatacattataaacaaaaaaacgaaaattaaaaaaataacgactcccaacctcctcaactaaaaacgaatttcttccttcacgaaaccgatcccccgcgcccgacacgaacaccgaacgataaccatccgaaaactaataatcatctttaaaaaaaaaaataaaaacatcgcgaataaactacacgtctacaacacgaataaacgcgacgacgactcgtcgaccccgcctactaaaactacgaaaaaaaaaaaaaaacgaaacgacgaccgcgaccctaacaactatcaccgcccgatcactacttccttaaacgaacgacgaaaaacgcgactcaaccgaacaacccgaatccgacaactctatcccgaaccgcaactcaaaatctccgaaacccttaaaacgcaacgaaccccgaacgaaacgcaccgaccttcaaacgaaaaatcccgaacgcccccaccccaacccgacaaacgaacgcaaacgacaaaaaaccatatccaaccgcgtaaaccac

SEQ ID NO: 30879 - DNA, 540 bp, Artificial Sequence
  chemically treated genomic DNA (Homo sapiens) CpG-island No: 30879
gtagtcggttgaggcgggagcggtgtattgtgggtagaggggcgggggttgggaagatggcggtttttagtttttttaattggaggcgagtttttttttttacggggtcggtttttcgcgttcggtacggatatcgagcggtggttattcgggagttgatgattatttttggagggggaaatgagggtatcgcggatgagttgtacgtttataatacgggtaggcgcggcggcggttcgtcggtttcgtttgttggagttgcggagggggaggggaggcgaggcggcggtcgcggttttgatagttgttatcgttcggttattgtttttttgggcgggcggcggggagcgcggtttagtcgggtagttcgggttcggtagttttgtttcggatcgtagtttaggattttcggggtttttggggcgtaacggatttcgagcggggcgtatcggtttttaggcgggggatttcggacgtttttattttagttcgataggcggacgtaggcgatagaagattatgtttaatcgcgtgggttat

SEQ ID NO: 30880 - DNA, 540 bp, Artificial Sequence
  chemically treated genomic DNA (Homo sapiens) CpG-island No: 30880
ataacccacgcgattaaacataatcttctatcgcctacgtccgcctatcgaactaaaataaaaacgtccgaaatcccccgcctaaaaaccgatacgccccgctcgaaatccgttacgccccaaaaaccccgaaaatcctaaactacgatccgaaacaaaactaccgaacccgaactacccgactaaaccgcgctccccgccgcccgcccaaaaaaacaataaccgaacgataacaactatcaaaaccgcgaccgccgcctcgcctcccctccccctccgcaactccaacaaacgaaaccgacgaaccgccgccgcgcctacccgtattataaacgtacaactcatccgcgataccctcatttccccctccaaaaataatcatcaactcccgaataaccaccgctcgatatccgtaccgaacgcgaaaaaccgaccccgtaaaaaaaaaaactcgcctccaattaaaaaaactaaaaaccgccatcttcccaacccccgcccctctacccacaatacaccgctcccgcctcaaccgactac

SEQ ID NO: 30881 - DNA, 2476 bp, Artificial Sequence
  chemically treated genomic DNA (Homo sapiens) CpG-island No: 30881
  unsure (1031)
tatttgcgcgcggttatttttagcgttcgcgtttagggcgggggttcggtcggtgcgcgcgtgcgcgtaattttattaggttttttcgtttatttattttttttttttcgaggtagagcgttttcgaagttaatttatatacgatcggtcggaggtagaacggtagtttttcggcggtcggtcggcgtacgcgttatatcggttcgaatttatcgcgatcgtttatacggttcgcgcgtattcgttagaggggagtacgggacgtgcgtttatcgagagtaggcgggcgttttttttcgcgtgggaggggcgcgtttcgtttcgttttatttaaatcgtttcgaattttatatcgacgagtttttttaggatttacgcgcggatatcgcggcggcgatcggaggagggggcgtcgggggcgggaacgatatattatcgttcggtttcgggtatttgagggataattcggagcgttttaggagtatcgtaagggtttaggcggagtcgacgttcgcgtaaattttttcgagagggtagtacgacgggtcggcggggacggtatttttatcgtcgcggaggggggtcgttcgtaagtcgataattattggaggcgatagcgagggttgtttgtcgcgttagaggatttcgtcggttcgtttcgcgacgtagaaggcggcgggcgggacggcgaggtcgggtcggggttcgtattttacgtttttttatacgtatcgtcggcgggcggggagaggagagacgaggggattttcgcggggcggagcgagaaggacggtttcgttcgttacgaacgttcgtttttcgttcgtcgcggttcggattcggttcgggagagtacgacgttattatatcgattaagaagagtttttcgggagcggaggtcggtcggtcggttagcgagtcgatcggtttcggttaattttttatttcggggaaggggcggcggataatttcgcggagacgagaacgtttgatacgtacggtacggagttagcggggtggggttgtcgcgntcgtttttcgggcgttcgtagcggagagcgtacgggggtacggtggttttcgtcgtttttttcgtcgttttcgggtgggttagagattcggattcgggtcggtatcgggagtcgggacgttcggacgcgcgagagagtagtaggttcgcgggtttcggtaggcggtttaagtaggagcgcggtcggttagtcgggttatcggtaggttagagtttcgcgcgtattcggaggtttaatttttttagcgataggtcgttagaggatagcgtgttagtaataattcggcggtttaaaatgtcgattcggagcgaaagatatatttttttcggggtcgggaggtcgcgttatcgattacgtcgtcggtttaggcgacgcgcgatacggatatttgtttttaaaaacgttattatcgtagttatatacggagcgttcggggttttttggttaattttaggatatacgcgggagtagcgtcgggtcgggggacgttttttcggtcgttcgtgttatacgtagggggtcggttcgtgtttttagagcgggagtcggaagtattttcggtcggttttttttacgatcgggatatacgagggatcgaaggtcggttaggcgcgatttttttggtcgtacgcgcgtttatggagcgtttttcgatttcgtacggggattttttagaaaggatcgcggtagagggatcgcggttcggttcggggatcgtttttcggtattcgggggacgggggcgggatagttttcggttttttacggggattttgaaacgaattcggtcgtcgttttagacggttaggatgagcgcggattcgcgatcgggtcgggaagggggtttttagtttttcgcgttacgcgcggggggttttcgcgggtcgcgggtcgggtttttggagttacggcgcgttggtcgatcgggtcgggtagatttacgttcgtttcgggtttagaagcgtagcgatagttttttttttatataaatttgtacgttagagttgtgatttataagcgacgcgttatagttttggcgttatcgggttagtcgggttgacgatcgcgggtttttcggagttttgtttattttatagcggggacggggttttttttttgtagttgttatcgtagtttcggaagtcgagagtacgattttaaagcggtcgttagatggagttcgataatcgtcgcggacgttagcgagatagattcggttggtagggcggttcgtggatcgcgaaagcgaaatcgtgagtcgagaagtttttttcgaggtcgaaaacgtagtttttttgttttaattttatataaacggtgtttaaaacgcgtttttgtttcgatcgcgatagagttagaagataatttacggcgcgtgggtgtttggagatgtttttttgaagtacggagggagggagggagggagggagggagggagaaagaata

SEQ ID NO: 30882 - DNA, 2476 bp, Artificial Sequence
  chemically treated genomic DNA (Homo sapiens) CpG-island No: 30882
  unsure (1446)
tattctttctccctccctccctccctccctccctccctccgtacttcaaaaaaacatctccaaacacccacgcgccgtaaattatcttctaactctatcgcgatcgaaacaaaaacgcgttttaaacaccgtttatataaaattaaaacaaaaaaactacgttttcgacctcgaaaaaaacttctcgactcacgatttcgctttcgcgatccacgaaccgccctaccaaccgaatctatctcgctaacgtccgcgacgattatcgaactccatctaacgaccgctttaaaatcgtactctcgacttccgaaactacgataacaactacaaaaaaaaaaccccgtccccgctataaaataaacaaaactccgaaaaacccgcgatcgtcaacccgactaacccgataacgccaaaactataacgcgtcgcttataaatcacaactctaacgtacaaatttatataaaaaaaaaactatcgctacgcttctaaacccgaaacgaacgtaaatctacccgacccgatcgaccaacgcgccgtaactccaaaaacccgacccgcgacccgcgaaaaccccccgcgcgtaacgcgaaaaactaaaaacccccttcccgacccgatcgcgaatccgcgctcatcctaaccgtctaaaacgacgaccgaattcgtttcaaaatccccgtaaaaaaccgaaaactatcccgcccccgtcccccgaataccgaaaaacgatccccgaaccgaaccgcgatccctctaccgcgatcctttctaaaaaatccccgtacgaaatcgaaaaacgctccataaacgcgcgtacgaccaaaaaaatcgcgcctaaccgaccttcgatccctcgtatatcccgatcgtaaaaaaaaccgaccgaaaatacttccgactcccgctctaaaaacacgaaccgaccccctacgtataacacgaacgaccgaaaaaacgtcccccgacccgacgctactcccgcgtatatcctaaaattaaccaaaaaaccccgaacgctccgtatataactacgataataacgtttttaaaaacaaatatccgtatcgcgcgtcgcctaaaccgacgacgtaatcgataacgcgacctcccgaccccgaaaaaaatatatctttcgctccgaatcgacattttaaaccgccgaattattactaacacgctatcctctaacgacctatcgctaaaaaaattaaacctccgaatacgcgcgaaactctaacctaccgataacccgactaaccgaccgcgctcctacttaaaccgcctaccgaaacccgcgaacctactactctctcgcgcgtccgaacgtcccgactcccgataccgacccgaatccgaatctctaacccacccgaaaacgacgaaaaaaacgacgaaaaccaccgtacccccgtacgctctccgctacgaacgcccgaaaaacgancgcgacaaccccaccccgctaactccgtaccgtacgtatcaaacgttctcgtctccgcgaaattatccgccgccccttccccgaaataaaaaattaaccgaaaccgatcgactcgctaaccgaccgaccgacctccgctcccgaaaaactcttcttaatcgatataataacgtcgtactctcccgaaccgaatccgaaccgcgacgaacgaaaaacgaacgttcgtaacgaacgaaaccgtccttctcgctccgccccgcgaaaatcccctcgtctctcctctccccgcccgccgacgatacgtataaaaaaacgtaaaatacgaaccccgacccgacctcgccgtcccgcccgccgccttctacgtcgcgaaacgaaccgacgaaatcctctaacgcgacaaacaaccctcgctatcgcctccaataattatcgacttacgaacgacccccctccgcgacgataaaaataccgtccccgccgacccgtcgtactaccctctcgaaaaaatttacgcgaacgtcgactccgcctaaacccttacgatactcctaaaacgctccgaattatccctcaaatacccgaaaccgaacgataatatatcgttcccgcccccgacgccccctcctccgatcgccgccgcgatatccgcgcgtaaatcctaaaaaaactcgtcgatataaaattcgaaacgatttaaataaaacgaaacgaaacgcgcccctcccacgcgaaaaaaaacgcccgcctactctcgataaacgcacgtcccgtactcccctctaacgaatacgcgcgaaccgtataaacgatcgcgataaattcgaaccgatataacgcgtacgccgaccgaccgccgaaaaactaccgttctacctccgaccgatcgtatataaattaacttcgaaaacgctctacctcgaaaaaaaaaaaataaataaacgaaaaaacctaataaaattacgcgcacgcgcgcaccgaccgaacccccgccctaaacgcgaacgctaaaaataaccgcgcgcaaata

SEQ ID NO: 30883 - DNA, 2476 bp, Artificial Sequence
  chemically treated genomic DNA (Homo sapiens) CpG-island No: 30883
  unsure (1446)
tgtttttttttttttttttttttttttttttttttttttcgtgttttagagaggtatttttaaatatttacgcgtcgtgggttgttttttgattttgtcgcggtcgaggtagagacgcgttttgggtatcgtttgtgtggggttggggtagaggggttgcgttttcggtttcgggaagagtttttcgatttacggtttcgttttcgcggtttacgggtcgttttgttagtcggatttgtttcgttgacgttcgcggcggttgtcgggttttatttggcggtcgttttgagatcgtgttttcggttttcggagttgcggtggtagttgtagagggagggtttcgttttcgttgtgagataggtagagtttcggaaagttcgcggtcgttagttcggttggttcggtggcgttagagttgtggcgcgtcgtttgtgagttatagttttggcgtgtaggtttatgtgggggagaggttgtcgttgcgtttttgggttcgaggcgggcgtgggtttgttcggttcggtcgattagcgcgtcgtagttttagaggttcgattcgcgattcgcggggatttttcgcgcgtggcgcgggaggttggggatttttttttcggttcggtcgcgggttcgcgtttattttggtcgtttgaggcggcggtcgaattcgttttagagttttcgtggggagtcggggattgtttcgttttcgtttttcgggtgtcggggagcggttttcgggtcgggtcgcggtttttttgtcgcgattttttttggagagttttcgtgcggagtcggagagcgttttatgagcgcgcgtgcggttagagaggtcgcgtttggtcggttttcggtttttcgtgtgtttcggtcgtaggaggggtcggtcgaaaatgttttcggttttcgttttggagatacgggtcggttttttgcgtgtggtacgggcggtcgggagggcgtttttcggttcggcgttgttttcgcgtgtgttttggggttgattagagggtttcgggcgtttcgtgtgtggttgcgatggtggcgtttttggggataggtgttcgtgtcgcgcgtcgtttgggtcggcggcgtggtcggtgacgcgatttttcggtttcgggggaggtatatttttcgtttcgagtcggtattttgggtcgtcgggttattgttgatacgttgttttttggcgatttgtcgttggagaggttgggttttcggatgcgcgcggggttttggtttatcggtgattcggttagtcggtcgcgtttttgtttgagtcgtttgtcggggttcgcgggtttgttgttttttcgcgcgttcgagcgtttcgattttcggtgtcggttcgggttcgggtttttgatttattcgggggcggcggggaaggcggcgagggttatcgtgttttcgtgcgtttttcgttgcgggcgttcggggggcggncgcgataattttatttcgttggtttcgtgtcgtgcgtgttaggcgttttcgttttcgcggggttgttcgtcgtttttttttcggagtggggggttggtcggagtcgatcggttcgttggtcggtcggtcggttttcgttttcggggggttttttttgatcgatgtggtgacgtcgtgttttttcgggtcgggttcgagtcgcgacgggcgaggggcggacgttcgtggcgaacgggatcgtttttttcgtttcgtttcgcgggggttttttcgtttttttttttttcgttcgtcggcggtgcgtgtgggaaggcgtggggtgcggatttcggttcgatttcgtcgtttcgttcgtcgttttttgcgtcgcggggcgggtcggcggggttttttgacgcggtagatagttttcgttgtcgtttttagtggttgtcgatttgcgggcggttttttttcgcggcggtgggggtgtcgttttcgtcggttcgtcgtgttgttttttcgggggggtttgcgcgagcgtcggtttcgtttgggtttttgcggtgtttttggagcgtttcgggttgttttttaggtgttcgaggtcgaacggtggtgtgtcgttttcgttttcggcgttttttttttcggtcgtcgtcgcggtgttcgcgcgtgggttttgagggagttcgtcggtgtggggttcgaggcggtttgagtgagacgagacgagacgcgttttttttacgcggggaagggcgttcgtttgttttcggtgagcgtacgtttcgtgtttttttttggcgggtgcgcgcgggtcgtgtgagcgatcgcggtgggttcgggtcggtgtgacgcgtgcgtcggtcggtcgtcgaggggttgtcgttttgttttcgatcggtcgtgtgtgggttgatttcggaggcgttttgtttcggaaggaaggaggtgggtggacgggggggtttggtggggttgcgcgtacgcgcgtatcggtcgggttttcgttttgaacgcgaacgttagaggtggtcgcgcgtaggtg

SEQ ID NO: 30884 - DNA, 2476 bp, Artificial Sequence
  chemically treated genomic DNA (Homo sapiens) CpG-island No: 30884
  unsure (1031)
cacctacgcgcgaccacctctaacgttcgcgttcaaaacgaaaacccgaccgatacgcgcgtacgcgcaaccccaccaaacccccccgtccacccacctccttccttccgaaacaaaacgcctccgaaatcaacccacacacgaccgatcgaaaacaaaacgacaacccctcgacgaccgaccgacgcacgcgtcacaccgacccgaacccaccgcgatcgctcacacgacccgcgcgcacccgccaaaaaaaaacacgaaacgtacgctcaccgaaaacaaacgaacgcccttccccgcgtaaaaaaaacgcgtctcgtctcgtctcactcaaaccgcctcgaaccccacaccgacgaactccctcaaaacccacgcgcgaacaccgcgacgacgaccgaaaaaaaaaacgccgaaaacgaaaacgacacaccaccgttcgacctcgaacacctaaaaaacaacccgaaacgctccaaaaacaccgcaaaaacccaaacgaaaccgacgctcgcgcaaacccccccgaaaaaacaacacgacgaaccgacgaaaacgacacccccaccgccgcgaaaaaaaaccgcccgcaaatcgacaaccactaaaaacgacaacgaaaactatctaccgcgtcaaaaaaccccgccgacccgccccgcgacgcaaaaaacgacgaacgaaacgacgaaatcgaaccgaaatccgcaccccacgccttcccacacgcaccgccgacgaacgaaaaaaaaaaaaacgaaaaaacccccgcgaaacgaaacgaaaaaaacgatcccgttcgccacgaacgtccgcccctcgcccgtcgcgactcgaacccgacccgaaaaaacacgacgtcaccacatcgatcaaaaaaaaccccccgaaaacgaaaaccgaccgaccgaccaacgaaccgatcgactccgaccaaccccccactccgaaaaaaaaacgacgaacaaccccgcgaaaacgaaaacgcctaacacgcacgacacgaaaccaacgaaataaaattatcgcgnccgccccccgaacgcccgcaacgaaaaacgcacgaaaacacgataaccctcgccgccttccccgccgcccccgaataaatcaaaaacccgaacccgaaccgacaccgaaaatcgaaacgctcgaacgcgcgaaaaaacaacaaacccgcgaaccccgacaaacgactcaaacaaaaacgcgaccgactaaccgaatcaccgataaaccaaaaccccgcgcgcatccgaaaacccaacctctccaacgacaaatcgccaaaaaacaacgtatcaacaataacccgacgacccaaaataccgactcgaaacgaaaaatatacctcccccgaaaccgaaaaatcgcgtcaccgaccacgccgccgacccaaacgacgcgcgacacgaacacctatccccaaaaacgccaccatcgcaaccacacacgaaacgcccgaaaccctctaatcaaccccaaaacacacgcgaaaacaacgccgaaccgaaaaacgccctcccgaccgcccgtaccacacgcaaaaaaccgacccgtatctccaaaacgaaaaccgaaaacattttcgaccgacccctcctacgaccgaaacacacgaaaaaccgaaaaccgaccaaacgcgacctctctaaccgcacgcgcgctcataaaacgctctccgactccgcacgaaaactctccaaaaaaaatcgcgacaaaaaaaccgcgacccgacccgaaaaccgctccccgacacccgaaaaacgaaaacgaaacaatccccgactccccacgaaaactctaaaacgaattcgaccgccgcctcaaacgaccaaaataaacgcgaacccgcgaccgaaccgaaaaaaaaatccccaacctcccgcgccacgcgcgaaaaatccccgcgaatcgcgaatcgaacctctaaaactacgacgcgctaatcgaccgaaccgaacaaacccacgcccgcctcgaacccaaaaacgcaacgacaacctctcccccacataaacctacacgccaaaactataactcacaaacgacgcgccacaactctaacgccaccgaaccaaccgaactaacgaccgcgaactttccgaaactctacctatctcacaacgaaaacgaaaccctccctctacaactaccaccgcaactccgaaaaccgaaaacacgatctcaaaacgaccgccaaataaaacccgacaaccgccgcgaacgtcaacgaaacaaatccgactaacaaaacgacccgtaaaccgcgaaaacgaaaccgtaaatcgaaaaactcttcccgaaaccgaaaacgcaacccctctaccccaaccccacacaaacgatacccaaaacgcgtctctacctcgaccgcgacaaaatcaaaaaacaacccacgacgcgtaaatatttaaaaatacctctctaaaacacgaaaaaaaaaaaaaaaaaaaaaaaaaaaaaaaaaaaaaca

SEQ ID NO: 30885 - DNA, 513 bp, Artificial Sequence
  chemically treated genomic DNA (Homo sapiens) CpG-island No: 30885
gtagacgtcgtttttgttttattttggttgggtagcgcgtttagtattcggcgcggtttcggatcgtacgttcggagagagttttgagatttgtttatcgtttattcgcggtttttgtcggtcgtttatattttggggcggtttcgagtagtcgagtcggtaggattcggtcgtttcgtatttttgcgaggtttattcggagtcgttgttcgagttggggtcgggacgacgtttcgtcgatcgcgtttgtagcgggtgtcgttgattcgttcgtcgtatttgtagattttgttttagtttagtttttcggtatttttttcgcgtttcgtagtcgttttagttttagtttcgtttcgttttttcggtttcggtttttttcgtttttggttttttttgtttttagcgatgttaatcgtcggttttattattttttgtttcgtatagttttttcgaattcgtttttttttttgtagttttttttttttttttttggcgttttcgttcgggtaggtg

SEQ ID NO: 30886 - DNA, 513 bp, Artificial Sequence
  chemically treated genomic DNA (Homo sapiens) CpG-island No: 30886
cacctacccgaacgaaaacgccaaaaaaaaaaaaaaaaaactacaaaaaaaaaaacgaattcgaaaaaactatacgaaacaaaaaataataaaaccgacgattaacatcgctaaaaacaaaaaaaaccaaaaacgaaaaaaaccgaaaccgaaaaaacgaaacgaaactaaaactaaaacgactacgaaacgcgaaaaaaataccgaaaaactaaactaaaacaaaatctacaaatacgacgaacgaatcaacgacacccgctacaaacgcgatcgacgaaacgtcgtcccgaccccaactcgaacaacgactccgaataaacctcgcaaaaatacgaaacgaccgaatcctaccgactcgactactcgaaaccgccccaaaatataaacgaccgacaaaaaccgcgaataaacgataaacaaatctcaaaactctctccgaacgtacgatccgaaaccgcgccgaatactaaacgcgctacccaaccaaaataaaacaaaaacgacgtctac

SEQ ID NO: 30887 - DNA, 513 bp, Artificial Sequence
  chemically treated genomic DNA (Homo sapiens) CpG-island No: 30887
tatttgttcgggcgggggcgttagaggggaagaggggggattgtagggaaaggggcgggttcggggggattgtgcggggtaggaggtggtggagtcggcggttggtatcgttggaggtagaggggattaggagcgggagaagtcggggtcggaaaggcgaggcggggttggggttggggcggttgcggggcgcgggggagatgtcgaggggttgggttggggtagggtttgtaggtgcggcgggcggattagcggtattcgttgtagacgcggtcggcgaaacgtcgtttcggttttagttcgagtagcggtttcgggtggatttcgtagggatgcggagcggtcggattttgtcgattcgattgttcggggtcgttttagggtgtgggcggtcggtagggatcgcgggtgagcggtgggtaggttttaggatttttttcggacgtgcggttcggggtcgcgtcgggtgttgggcgcgttatttagttaaggtgaggtaggagcggcgtttgt

SEQ ID NO: 30888 - DNA, 513 bp, Artificial Sequence
  chemically treated genomic DNA (Homo sapiens) CpG-island No: 30888
acaaacgccgctcctacctcaccttaactaaataacgcgcccaacacccgacgcgaccccgaaccgcacgtccgaaaaaaatcctaaaacctacccaccgctcacccgcgatccctaccgaccgcccacaccctaaaacgaccccgaacaatcgaatcgacaaaatccgaccgctccgcatccctacgaaatccacccgaaaccgctactcgaactaaaaccgaaacgacgtttcgccgaccgcgtctacaacgaataccgctaatccgcccgccgcacctacaaaccctaccccaacccaacccctcgacatctcccccgcgccccgcaaccgccccaaccccaaccccgcctcgcctttccgaccccgacttctcccgctcctaatcccctctacctccaacgataccaaccgccgactccaccacctcctaccccgcacaatccccccgaacccgcccctttccctacaatcccccctcttcccctctaacgcccccgcccgaacaaata

SEQ ID NO: 30889 - DNA, 619 bp, Artificial Sequence
  chemically treated genomic DNA (Homo sapiens) CpG-island No: 30889
gtcggggaggtgtacgttggtttttggggtcgtttggcggaatgtttttttttttcgtagtggggcggggtttgggggggcgtggtttgtcggcgggtttttgaggtattggggtttcgtggttttcgtcgatttaacgttttttttcgttgtaggcgggtttttggggtacggagcggagcgtattttggcggtgttcgtgcgtattgacgtttagggtcgtttggtgttttacgtggtgtcggtagttacgtttagagtaggggtacgagttcgtagggtcgtttcggttcggatttcgagttttttcggaggtaacgaggaggagtttggtagttattttttttataatgttacggtttttggtcgagatttgtatttgcggttggggtttaacgttcgtttcgtggcgttcggggttattatggagtggtagggcgagaagggtattattcgcgtggagtttttgttcgggagttgtttttacgtcggagacgtggtcggtttattcgaagttttttttgtggcgtttagtaattgcgatgggttggtgagtacgtatttttttagttttttttttttcgttgttttcgtttgggttttggaaaagggttatttg

SEQ ID NO: 30890 - DNA, 619 bp, Artificial Sequence
  chemically treated genomic DNA (Homo sapiens) CpG-island No: 30890
caaataacccttttccaaaacccaaacgaaaacaacgaaaaaaaaaaaactaaaaaaatacgtactcaccaacccatcgcaattactaaacgccacaaaaaaaacttcgaataaaccgaccacgtctccgacgtaaaaacaactcccgaacaaaaactccacgcgaataatacccttctcgccctaccactccataataaccccgaacgccacgaaacgaacgttaaaccccaaccgcaaatacaaatctcgaccaaaaaccgtaacattataaaaaaaataactaccaaactcctcctcgttacctccgaaaaaactcgaaatccgaaccgaaacgaccctacgaactcgtacccctactctaaacgtaactaccgacaccacgtaaaacaccaaacgaccctaaacgtcaatacgcacgaacaccgccaaaatacgctccgctccgtaccccaaaaacccgcctacaacgaaaaaaaacgttaaatcgacgaaaaccacgaaaccccaatacctcaaaaacccgccgacaaaccacgcccccccaaaccccgccccactacgaaaaaaaaaaacattccgccaaacgaccccaaaaaccaacgtacacctccccgac

SEQ ID NO: 30891 - DNA, 619 bp, Artificial Sequence
  chemically treated genomic DNA (Homo sapiens) CpG-island No: 30891
taggtaatttttttttaaaatttaggcgagagtagcggagagaaaggagttagagaagtgcgtatttattagtttatcgtagttgttgagcgttatagaggaggtttcggataggtcggttacgttttcgacgtagagatagttttcgagtaggggttttacgcgggtggtgtttttttcgttttgttattttatagtggtttcgggcgttacgaggcgggcgttgggttttagtcgtaggtgtaggtttcggttaaagatcgtgatattgtagaagaggtgattgttaggttttttttcgttgttttcgggaaagttcggggttcggatcggggcggttttgcgggttcgtatttttgttttggacgtagttgtcgatattacgtgggatattaagcggttttgggcgttagtgcgtacgggtatcgttaggatgcgtttcgtttcgtgttttaggggttcgtttgtaacgggaaggggcgttagatcggcggagattacggagttttagtgttttagagattcgtcggtaagttacgtttttttagatttcgttttattgcgaagggaaggggtatttcgttaggcgattttagaagttagcgtgtattttttcggt

SEQ ID NO: 30892 - DNA, 619 bp, Artificial Sequence
  chemically treated genomic DNA (Homo sapiens) CpG-island No: 30892
accgaaaaaatacacgctaacttctaaaatcgcctaacgaaataccccttcccttcgcaataaaacgaaatctaaaaaaacgtaacttaccgacgaatctctaaaacactaaaactccgtaatctccgccgatctaacgccccttcccgttacaaacgaacccctaaaacacgaaacgaaacgcatcctaacgatacccgtacgcactaacgcccaaaaccgcttaatatcccacgtaatatcgacaactacgtccaaaacaaaaatacgaacccgcaaaaccgccccgatccgaaccccgaactttcccgaaaacaacgaaaaaaaacctaacaatcacctcttctacaatatcacgatctttaaccgaaacctacacctacgactaaaacccaacgcccgcctcgtaacgcccgaaaccactataaaataacaaaacgaaaaaaacaccacccgcgtaaaacccctactcgaaaactatctctacgtcgaaaacgtaaccgacctatccgaaacctcctctataacgctcaacaactacgataaactaataaatacgcacttctctaactcctttctctccgctactctcgcctaaattttaaaaaaaaattaccta

SEQ ID NO: 30893 - DNA, 521 bp, Artificial Sequence
  chemically treated genomic DNA (Homo sapiens) CpG-island No: 30893
ttatcgagtagttcgtattacgtaggtttagtatttttcgtttatcgtaggaaacgtcgcggacggttcggggtgttttgttcggcgttttatttttttcggggtcggggaagcggcgtgattaggaaagttatttcggaatatagtcggattttgcgttattagttggagttcgtcgggattttatttcgcgggttgggcgggggcggattcgggggcggggcggggaggggtcggtttggaaaggcggaagtttttagtttaggggtggttgtagaattcggatttcggagttatacgttttacggagcggggcgtcgggagacggcgggcgagaaaattcggcgttcggaagttcgtgttttttttgacgtaagggttcgagacgtagtcgtcgtcggtcgagcgttcggttagaagcgatattagacggagttttcggagttttttcgtttttatttcgtcgggttttggagtcgtagtttttttagttgtttttttcgtggttatggagtgtttat

SEQ ID NO: 30894 - DNA, 521 bp, Artificial Sequence
  chemically treated genomic DNA (Homo sapiens) CpG-island No: 30894
ataaacactccataaccacgaaaaaaacaactaaaaaaactacgactccaaaacccgacgaaataaaaacgaaaaaactccgaaaactccgtctaatatcgcttctaaccgaacgctcgaccgacgacgactacgtctcgaacccttacgtcaaaaaaaacacgaacttccgaacgccgaattttctcgcccgccgtctcccgacgccccgctccgtaaaacgtataactccgaaatccgaattctacaaccacccctaaactaaaaacttccgcctttccaaaccgacccctccccgccccgcccccgaatccgcccccgcccaacccgcgaaataaaatcccgacgaactccaactaataacgcaaaatccgactatattccgaaataactttcctaatcacgccgcttccccgaccccgaaaaaaataaaacgccgaacaaaacaccccgaaccgtccgcgacgtttcctacgataaacgaaaaatactaaacctacgtaatacgaactactcgataa

SEQ ID NO: 30895 - DNA, 521 bp, Artificial Sequence
  chemically treated genomic DNA (Homo sapiens) CpG-island No: 30895
gtggatattttatggttacgaggagggtagttgggaggattgcggttttaggattcggcgaggtgggggcggaggaatttcggaggtttcgtttggtgtcgtttttagtcgggcgttcggtcgacggcggttgcgtttcgagtttttgcgttaaagaaagtacgggttttcggacgtcgggttttttcgttcgtcgtttttcggcgtttcgtttcgtagaacgtgtaatttcgagattcgggttttgtagttatttttagattggaggttttcgtttttttaggtcggttttttttcgtttcgttttcgggttcgttttcgtttagttcgcggggtggggtttcggcgagttttagttggtggcgtagagttcggttgtgtttcgaagtgatttttttagttacgtcgttttttcggtttcgggaagggtggggcgtcgagtagggtatttcgggtcgttcgcggcgttttttgcggtgggcggaggatattgaatttacgtggtgcggattattcggtgg

SEQ ID NO: 30896 - DNA, 521 bp, Artificial Sequence
  chemically treated genomic DNA (Homo sapiens) CpG-island No: 30896
ccaccgaataatccgcaccacgtaaattcaatatcctccgcccaccgcaaaaaacgccgcgaacgacccgaaataccctactcgacgccccacccttcccgaaaccgaaaaaacgacgtaactaaaaaaatcacttcgaaacacaaccgaactctacgccaccaactaaaactcgccgaaaccccaccccgcgaactaaacgaaaacgaacccgaaaacgaaacgaaaaaaaaccgacctaaaaaaacgaaaacctccaatctaaaaataactacaaaacccgaatctcgaaattacacgttctacgaaacgaaacgccgaaaaacgacgaacgaaaaaacccgacgtccgaaaacccgtactttctttaacgcaaaaactcgaaacgcaaccgccgtcgaccgaacgcccgactaaaaacgacaccaaacgaaacctccgaaattcctccgcccccacctcgccgaatcctaaaaccgcaatcctcccaactaccctcctcgtaaccataaaatatccac

SEQ ID NO: 30897 - DNA, 701 bp, Artificial Sequence
  chemically treated genomic DNA (Homo sapiens) CpG-island No: 30897
cgttttggtgttgtagcggtgagtgcggttacgggtcggtttcgtagcgtattcgaggtcgcggttttgtcgggtttgtcgtttaggggtcgtaggcggtcggcgcgcggattcggggaggggcgagggcgagtcgggttcggcgggttggggagggtacgcgatgaggcgggcgcgtgcgggagcggcggcggtttttttgtttttcgaggttcgacggtcgggttagcgaaggagagggtcgcgaggggcgggagttcgcggaggtttcgagcgcgtgggggtagcggtaggcggggattttggttagttgcgtgcgtttttgtttcgttttgtcgtggtcgggggttgtgttcgttcgtgttgcggggtcgtttgtggggcgggtgttcggttttcgaggggcggtcgtacgtgtggcggggttcgcgtcgcgttttttcgtagatagggcgggaagagcgtcgtttttcgggcgtagttttgtttgggttgcggggcgcgcggggtttttttttttcgtcgaattcggttcgggttttttttttttttttcgtaggttcgggtatttcgaaatttcgagaggcgttgggagttcgggcggcggaggtcggggttttttattcgttagggatggtgaagtttgaaaataggttgcgggttgagaagttcggaggttgagttaatagttgttttggagg

SEQ ID NO: 30898 - DNA, 701 bp, Artificial Sequence
  chemically treated genomic DNA (Homo sapiens) CpG-island No: 30898
cctccaaaacaactattaactcaacctccgaacttctcaacccgcaacctattttcaaacttcaccatccctaacgaataaaaaaccccgacctccgccgcccgaactcccaacgcctctcgaaatttcgaaatacccgaacctacgaaaaaaaaaaaaaaaacccgaaccgaattcgacgaaaaaaaaaaaccccgcgcgccccgcaacccaaacaaaactacgcccgaaaaacgacgctcttcccgccctatctacgaaaaaacgcgacgcgaaccccgccacacgtacgaccgcccctcgaaaaccgaacacccgccccacaaacgaccccgcaacacgaacgaacacaacccccgaccacgacaaaacgaaacaaaaacgcacgcaactaaccaaaatccccgcctaccgctacccccacgcgctcgaaacctccgcgaactcccgcccctcgcgaccctctccttcgctaacccgaccgtcgaacctcgaaaaacaaaaaaaccgccgccgctcccgcacgcgcccgcctcatcgcgtaccctccccaacccgccgaacccgactcgccctcgcccctccccgaatccgcgcgccgaccgcctacgacccctaaacgacaaacccgacaaaaccgcgacctcgaatacgctacgaaaccgacccgtaaccgcactcaccgctacaacaccaaaacg

SEQ ID NO: 30899 - DNA, 701 bp, Artificial Sequence
  chemically treated genomic DNA (Homo sapiens) CpG-island No: 30899
tttttaaagtagttgttggtttagttttcgagttttttagttcgtagtttgtttttaaattttattatttttgacggatgaaagatttcgattttcgtcgttcgagtttttagcgtttttcggggtttcgaggtgttcgagtttgcggagaagggaaaggaaattcgggtcgggttcggcggaggagaggagtttcgcgcgtttcgtagtttagataaagttgcgttcggagagcggcgtttttttcgttttgtttgcggagaagcgcggcgcgggtttcgttatacgtgcggtcgtttttcgggggtcggatattcgttttataggcgatttcgtaatacggacgggtatagttttcggttacggtagggcggggtaagggcgtacgtagttggttagggttttcgtttgtcgttgtttttacgcgttcgaggttttcgcggattttcgtttttcgcggttttttttttcgttggttcggtcgtcgggtttcgggaaataaaggagtcgtcgtcgttttcgtacgcgttcgttttatcgcgtattttttttagttcgtcgggttcggttcgttttcgttttttttcgagttcgcgcgtcggtcgtttgcggtttttagacggtaggttcggtagagtcgcggtttcgggtgcgttgcggggtcggttcgtggtcgtatttatcgttgtagtattaggacg

SEQ ID NO: 30900 - DNA, 701 bp, Artificial Sequence
  chemically treated genomic DNA (Homo sapiens) CpG-island No: 30900
cgtcctaatactacaacgataaatacgaccacgaaccgaccccgcaacgcacccgaaaccgcgactctaccgaacctaccgtctaaaaaccgcaaacgaccgacgcgcgaactcgaaaaaaaacgaaaacgaaccgaacccgacgaactaaaaaaaatacgcgataaaacgaacgcgtacgaaaacgacgacgactcctttatttcccgaaacccgacgaccgaaccaacgaaaaaaaaaaccgcgaaaaacgaaaatccgcgaaaacctcgaacgcgtaaaaacaacgacaaacgaaaaccctaaccaactacgtacgcccttaccccgccctaccgtaaccgaaaactatacccgtccgtattacgaaatcgcctataaaacgaatatccgacccccgaaaaacgaccgcacgtataacgaaacccgcgccgcgcttctccgcaaacaaaacgaaaaaaacgccgctctccgaacgcaactttatctaaactacgaaacgcgcgaaactcctctcctccgccgaacccgacccgaatttcctttcccttctccgcaaactcgaacacctcgaaaccccgaaaaacgctaaaaactcgaacgacgaaaatcgaaatctttcatccgtcaaaaataataaaatttaaaaacaaactacgaactaaaaaactcgaaaactaaaccaacaactactttaaaaa

SEQ ID NO: 30901 - DNA, 559 bp, Artificial Sequence
  chemically treated genomic DNA (Homo sapiens) CpG-island No: 30901
gtttattaggaagtcgtcgttcgttatgatcgcgtagtcgcgcgttatttgtattggggtgaaggacgttgaatttagcgttagcgattcggtgtggataatgttttgtgtcgggaagtcgaagcgttgtagatattttgtagcgtagtcgacgtttatcgttcgtattgcgcgtattattattacgtttttcgattgatttagtttttgacgtaagcgaattggattagtatattgcggtggtgagtttttcggttgttagttagaatcggtatttgtattttagcgagaaattggtatatcgtttaatatatttgttagcgttagatttttatttatcgtcgcggtgtaaaggaacggtttgatgttggaatttatttgacgtagtgtttgggtggcgcggttaaatttgttttgattgaaattaaagttatcgattagcgttataacggtatcgttttgcggattgatcgatattagcgtcgagtttatttttcggtaatttgtgttagtttatttattggttattttcggggtttttaattgacgattagaatgt

SEQ ID NO: 30902 - DNA, 559 bp, Artificial Sequence
  chemically treated genomic DNA (Homo sapiens) CpG-island No: 30902
acattctaatcgtcaattaaaaaccccgaaaataaccaataaataaactaacacaaattaccgaaaaataaactcgacgctaatatcgatcaatccgcaaaacgataccgttataacgctaatcgataactttaatttcaatcaaaacaaatttaaccgcgccacccaaacactacgtcaaataaattccaacatcaaaccgttcctttacaccgcgacgataaataaaaatctaacgctaacaaatatattaaacgatataccaatttctcgctaaaatacaaataccgattctaactaacaaccgaaaaactcaccaccgcaatatactaatccaattcgcttacgtcaaaaactaaatcaatcgaaaaacgtaataataatacgcgcaatacgaacgataaacgtcgactacgctacaaaatatctacaacgcttcgacttcccgacacaaaacattatccacaccgaatcgctaacgctaaattcaacgtccttcaccccaatacaaataacgcgcgactacgcgatcataacgaacgacgacttcctaataaac

SEQ ID NO: 30903 - DNA, 559 bp, Artificial Sequence
  chemically treated genomic DNA (Homo sapiens) CpG-island No: 30903
gtattttggtcgttagttgggggtttcgaaaatggttaatgggtgggttggtataagttgtcggaaagtgaattcggcgttggtgtcgattaattcgtaaaacggtgtcgttatggcgttggtcggtggttttgattttaattagagtaagtttaatcgcgttatttaggtattgcgttaggtgggttttaatattaaatcgtttttttatatcgcggcgatggataaaggtttgacgttggtaagtatgttgaacgatgtgttaatttttcgttgggatgtaagtgtcggttttgattggtagtcgaagaatttattatcgtagtatgttggtttaattcgtttacgttaggggttgggttagtcgaaaaacgtggtgatggtacgcgtaatgcgggcgatgggcgtcgattacgttgtagaatatttgtaacgtttcggtttttcggtataaaatattgtttatatcgaatcgttggcgttgggtttagcgttttttattttaatgtaggtggcgcgcggttacgcggttatggcgaacggcggttttttggtggat

SEQ ID NO: 30904 - DNA, 559 bp, Artificial Sequence
  chemically treated genomic DNA (Homo sapiens) CpG-island No: 30904
atccaccaaaaaaccgccgttcgccataaccgcgtaaccgcgcgccacctacattaaaataaaaaacgctaaacccaacgccaacgattcgatataaacaatattttataccgaaaaaccgaaacgttacaaatattctacaacgtaatcgacgcccatcgcccgcattacgcgtaccatcaccacgtttttcgactaacccaacccctaacgtaaacgaattaaaccaacatactacgataataaattcttcgactaccaatcaaaaccgacacttacatcccaacgaaaaattaacacatcgttcaacatacttaccaacgtcaaacctttatccatcgccgcgatataaaaaaacgatttaatattaaaacccacctaacgcaatacctaaataacgcgattaaacttactctaattaaaatcaaaaccaccgaccaacgccataacgacaccgttttacgaattaatcgacaccaacgccgaattcactttccgacaacttataccaacccacccattaaccattttcgaaacccccaactaacgaccaaaatac

SEQ ID NO: 30905 - DNA, 656 bp, Artificial Sequence
  chemically treated genomic DNA (Homo sapiens) CpG-island No: 30905
aatgcgatataacgtggcgggaggagtttaagggacgaggaaaggcgagtgttttgtttgcgtagacgtaaggttgggtattttttcgggagtgagggttgttgggtttgatgacgtggtttggtaacgtttttatcgtcgttgtttttcgggaatttggcgtcgtcggaattgatcgcggtttagtttcgacgcgtgtgtgttagtgagtcggagtcggcgacggcggtagtggcggttcggtttgtaggagttcgacggggtttttgttatgggggagtgacgcgtttgtattcgttgtttcgcggtagcggcgagatatgaggagatttcgcgataggggtagcggcggcggttcgtgagtttcgggatggaggagaaatacggcggggacgtgttggtcggtttcggcggcggcggcggttttgggtcggtggacgtatttagcgttcggtaagggatcgattcggaaggtagcgatcggtcgggtggtttaggatgtatttttttcggttttttttcggttttcgttgatagttcgggacgtttcggggtcggcgcgttttttttttttgtttgtttttttgcgcgtaggttgttttcgggtttttcgggtttttcgggtgtttgttgtagaaggaaggcgttaaagttaa

SEQ ID NO: 30906 - DNA, 656 bp, Artificial Sequence
  chemically treated genomic DNA (Homo sapiens) CpG-island No: 30906
ttaactttaacgccttccttctacaacaaacacccgaaaaacccgaaaaacccgaaaacaacctacgcgcaaaaaaacaaacaaaaaaaaaaaacgcgccgaccccgaaacgtcccgaactatcaacgaaaaccgaaaaaaaaccgaaaaaaatacatcctaaaccacccgaccgatcgctaccttccgaatcgatcccttaccgaacgctaaatacgtccaccgacccaaaaccgccgccgccgccgaaaccgaccaacacgtccccgccgtatttctcctccatcccgaaactcacgaaccgccgccgctacccctatcgcgaaatctcctcatatctcgccgctaccgcgaaacaacgaatacaaacgcgtcactcccccataacaaaaaccccgtcgaactcctacaaaccgaaccgccactaccgccgtcgccgactccgactcactaacacacacgcgtcgaaactaaaccgcgatcaattccgacgacgccaaattcccgaaaaacaacgacgataaaaacgttaccaaaccacgtcatcaaacccaacaaccctcactcccgaaaaaatacccaaccttacgtctacgcaaacaaaacactcgcctttcctcgtcccttaaactcctcccgccacgttatatcgcatt

SEQ ID NO: 30907 - DNA, 656 bp, Artificial Sequence
  chemically treated genomic DNA (Homo sapiens) CpG-island No: 30907
ttggttttagcgttttttttttgtagtaggtattcgaagagttcggggagttcggaggtagtttgcgcgtagggaggtaggtagagggagagggcgcgtcgatttcgggacgtttcgggttgttagcggagatcggagggaggtcggagaaagtgtattttgagttattcggtcggtcgttgtttttcggatcggttttttatcgagcgttgggtacgtttatcggtttaaggtcgtcgtcgtcgtcggggtcggttagtacgttttcgtcgtattttttttttatttcggggtttacgagtcgtcgtcgttgtttttgtcgcggggtttttttatgtttcgtcgttgtcgcggaatagcgggtgtaggcgcgttatttttttatggtagagatttcgtcgggtttttgtaggtcgggtcgttattgtcgtcgtcgtcggtttcggtttattagtatatacgcgtcgggattaggtcgcgattagtttcggcggcgttaggttttcgggaagtagcggcggtagggacgttgttaagttacgttattaggtttagtaatttttattttcgggggagtgtttagttttgcgtttgcgtaagtagaatattcgttttttttcgttttttaggtttttttcgttacgttgtgtcgtatt

SEQ ID NO: 30908 - DNA, 656 bp, Artificial Sequence
  chemically treated genomic DNA (Homo sapiens) CpG-island No: 30908
aatacgacacaacgtaacgaaaaaaacctaaaaaacgaaaaaaaacgaatattctacttacgcaaacgcaaaactaaacactcccccgaaaataaaaattactaaacctaataacgtaacttaacaacgtccctaccgccgctacttcccgaaaacctaacgccgccgaaactaatcgcgacctaatcccgacgcgtatatactaataaaccgaaaccgacgacgacgacaataacgacccgacctacaaaaacccgacgaaatctctaccataaaaaaataacgcgcctacacccgctattccgcgacaacgacgaaacataaaaaaaccccgcgacaaaaacaacgacgacgactcgtaaaccccgaaataaaaaaaaaatacgacgaaaacgtactaaccgaccccgacgacgacgacgaccttaaaccgataaacgtacccaacgctcgataaaaaaccgatccgaaaaacaacgaccgaccgaataactcaaaatacactttctccgacctccctccgatctccgctaacaacccgaaacgtcccgaaatcgacgcgccctctccctctacctacctccctacgcgcaaactacctccgaactccccgaactcttcgaatacctactacaaaaaaaaaacgctaaaaccaa

SEQ ID NO: 30909 - DNA, 714 bp, Artificial Sequence
  chemically treated genomic DNA (Homo sapiens) CpG-island No: 30909
agtacgcggggttagttgttcgattattttcgagattttgaagggatagtgggttagatttagggttcgtttttttttacgtttcgttatcgtttttttttcgattggttgatcgggggtattatagttaattttagacggcgattggttaggttatcgttagggtcgttttattcgtatacgtttaagattaataaggttttggcggaggagcgggggatttcggtagtaggtataggatttatttgttaagatgttgtacggttgtcgtaaggttcgaattttcggcgtcggatttattttattgttcggtttaataggtttaaagttttatttttatatatattcgcgggcgtcgttattggtttttcgtagaggcgcggttatcgttttgtttttgttatcgtttttatttttcgacgtcgtcgttatagttagtatcgtttttatcgtttaagatgcggaaacgcgataaattgttttatttgaacgattttattagtagacgttattttgttgtttattatgattttcgagaaggggtagttttcggggcgcgagcgagtcgcggcgattattggagtttcgggtagttgtgggcggtgttttttcggacgttacggaggcggagatcggattgggttttttttcgtcgtggggttggtttcgttttttgtgtttgatttcgtttattttttttttttattaggattt

SEQ ID NO: 30910 - DNA, 714 bp, Artificial Sequence
  chemically treated genomic DNA (Homo sapiens) CpG-island No: 30910
aaatcctaataaaaaaaaaaaataaacgaaatcaaacacaaaaaacgaaaccaaccccacgacgaaaaaaaacccaatccgatctccgcctccgtaacgtccgaaaaaacaccgcccacaactacccgaaactccaataatcgccgcgactcgctcgcgccccgaaaactaccccttctcgaaaatcataataaacaacaaaataacgtctactaataaaatcgttcaaataaaacaatttatcgcgtttccgcatcttaaacgataaaaacgatactaactataacgacgacgtcgaaaaataaaaacgataacaaaaacaaaacgataaccgcgcctctacgaaaaaccaataacgacgcccgcgaatatatataaaaataaaactttaaacctattaaaccgaacaataaaataaatccgacgccgaaaattcgaaccttacgacaaccgtacaacatcttaacaaataaatcctatacctactaccgaaatcccccgctcctccgccaaaaccttattaatcttaaacgtatacgaataaaacgaccctaacgataacctaaccaatcgccgtctaaaattaactataatacccccgatcaaccaatcgaaaaaaaaacgataacgaaacgtaaaaaaaaacgaaccctaaatctaacccactatcccttcaaaatctcgaaaataatcgaacaactaaccccgcgtact

SEQ ID NO: 30911 - DNA, 714 bp, Artificial Sequence
  chemically treated genomic DNA (Homo sapiens) CpG-island No: 30911
ggattttagtagggagaaggggtgggcggggttaggtatagggggcggagttagttttacggcggaggagagtttagttcggttttcgttttcgtgacgttcggggaagtatcgtttatagttgttcgggattttagtgatcgtcgcggttcgttcgcgtttcggaaattgttttttttcgggggttatgatgggtagtaagatggcgtttgttagtagggtcgtttaggtaaagtaatttgtcgcgttttcgtattttgggcggtagggacggtgttgattatggcgacggcgtcggggagtaaaggcggtggtagaggtagagcggtgatcgcgtttttgcggagggttagtgacggcgttcgcgggtgtgtgtgaggatgggattttgagtttgttggatcgggtagtgaggtgggttcggcgtcgagggttcgagttttgcggtaatcgtgtagtattttggtaggtaggttttgtatttattgtcgggatttttcgttttttcgttaggattttgttagttttaggcgtgtgcgggtgaggcgattttggcggtagtttggttaatcgtcgtttaggattggttgtggtgttttcgattagttaatcggaaggaaggcggtagcggggcgtggaaggaagcgaattttggatttgatttattgtttttttaaggtttcgggaatggtcgggtaattggtttcgcgtatt

SEQ ID NO: 30912 - DNA, 714 bp, Artificial Sequence
  chemically treated genomic DNA (Homo sapiens) CpG-island No: 30912
aatacgcgaaaccaattacccgaccattcccgaaaccttaaaaaaacaataaatcaaatccaaaattcgcttccttccacgccccgctaccgccttccttccgattaactaatcgaaaacaccacaaccaatcctaaacgacgattaaccaaactaccgccaaaatcgcctcacccgcacacgcctaaaactaacaaaatcctaacgaaaaaacgaaaaatcccgacaataaatacaaaacctacctaccaaaatactacacgattaccgcaaaactcgaaccctcgacgccgaacccacctcactacccgatccaacaaactcaaaatcccatcctcacacacacccgcgaacgccgtcactaaccctccgcaaaaacgcgatcaccgctctacctctaccaccgcctttactccccgacgccgtcgccataatcaacaccgtccctaccgcccaaaatacgaaaacgcgacaaattactttacctaaacgaccctactaacaaacgccatcttactacccatcataacccccgaaaaaaaacaatttccgaaacgcgaacgaaccgcgacgatcactaaaatcccgaacaactataaacgatacttccccgaacgtcacgaaaacgaaaaccgaactaaactctcctccgccgtaaaactaactccgccccctatacctaaccccgcccaccccttctccctactaaaatcc

SEQ ID NO: 30913 - DNA, 524 bp, Artificial Sequence
  chemically treated genomic DNA (Homo sapiens) CpG-island No: 30913
tcgttttggttttgtcgcggcggcggggagaagagggtgggacggtttgattttcgtagttaatgaaagtagtgagtttttggttcgatatttagcgcgattttttagtggttatttttcgggtaacgggttacggattttcggtatttcgagataattgttaggcggagggtgagtttcggtttttgggcggcgggtgcggattgggatgggcgcggagttaggtggcgtgagtttgtagtttttcgtgttcggagtgcgcgcgttatagtggagttcgtcgcgtcgttgatcgggtgcgcgttgttttttttgttttgggtgcgcgggaaggggttgggtgttcgcgcgttttttttttttgtcgtttttggtattttttatatttattaacgtttgtgcgtcgggtggtgtggaagcgtagtatcgtcggtgggatagttagaaatagaagagtacgtttggcgtggtaggggtttagagttacgggaatacgggtgatagggatagcgggatttaaggta

SEQ ID NO: 30914 - DNA, 524 bp, Artificial Sequence
  chemically treated genomic DNA (Homo sapiens) CpG-island No: 30914
taccttaaatcccgctatccctatcacccgtattcccgtaactctaaacccctaccacgccaaacgtactcttctatttctaactatcccaccgacgatactacgcttccacaccacccgacgcacaaacgttaataaatataaaaaataccaaaaacgacaaaaaaaaaaaacgcgcgaacacccaaccccttcccgcgcacccaaaacaaaaaaaacaacgcgcacccgatcaacgacgcgacgaactccactataacgcgcgcactccgaacacgaaaaactacaaactcacgccacctaactccgcgcccatcccaatccgcacccgccgcccaaaaaccgaaactcaccctccgcctaacaattatctcgaaataccgaaaatccgtaacccgttacccgaaaaataaccactaaaaaatcgcgctaaatatcgaaccaaaaactcactactttcattaactacgaaaatcaaaccgtcccaccctcttctccccgccgccgcgacaaaaccaaaacga

SEQ ID NO: 30915 - DNA, 524 bp, Artificial Sequence
  chemically treated genomic DNA (Homo sapiens) CpG-island No: 30915
tgttttaagtttcgttgtttttgttattcgtgttttcgtggttttgggtttttgttacgttaggcgtgtttttttgtttttggttgttttatcggcgatgttgcgtttttatattattcggcgtataggcgttggtagatgtggaaggtattaagagcggtaggaggaaggggcgcgcggatatttagttttttttcgcgtatttagagtaggaagagtagcgcgtattcggttagcgacgcggcgggttttattgtggcgcgcgtatttcgagtacggagggttgtaggtttacgttatttggtttcgcgtttattttaattcgtattcgtcgtttaggaatcggggtttatttttcgtttgataattgtttcggggtgtcgagggttcgtggttcgttgttcgggaggtgattattgaggagtcgcgttgggtatcggattaggaatttattgtttttattggttgcggaggttagatcgttttattttttttttttcgtcgtcgcggtaaggttagggcga

SEQ ID NO: 30916 - DNA, 524 bp, Artificial Sequence
  chemically treated genomic DNA (Homo sapiens) CpG-island No: 30916
tcgccctaaccttaccgcgacgacgaaaaaaaaaaaataaaacgatctaacctccgcaaccaataaaaacaataaattcctaatccgatacccaacgcgactcctcaataatcacctcccgaacaacgaaccacgaaccctcgacaccccgaaacaattatcaaacgaaaaataaaccccgattcctaaacgacgaatacgaattaaaataaacgcgaaaccaaataacgtaaacctacaaccctccgtactcgaaatacgcgcgccacaataaaacccgccgcgtcgctaaccgaatacgcgctactcttcctactctaaatacgcgaaaaaaaactaaatatccgcgcgccccttcctcctaccgctcttaataccttccacatctaccaacgcctatacgccgaataatataaaaacgcaacatcgccgataaaacaaccaaaaacaaaaaaacacgcctaacgtaacaaaaacccaaaaccacgaaaacacgaataacaaaaacaacgaaacttaaaaca

SEQ ID NO: 30917 - DNA, 589 bp, Artificial Sequence
  chemically treated genomic DNA (Homo sapiens) CpG-island No: 30917
tgcgtttggaaaggcgttcgttcgtggcgcgtattttcgggttttcgtaagcgatttcggtgatagggataatcgtttcggttttagcgattgtagatagattgggacgagacggttggaggtttttttttaagggatgttggaggggttgcgtcgtattttgcgtttggttttggcgcgcggttttaggtcgtggtatttagcgttttatgggtcgtgcgtcggggtttggttatatcgtttgttttcgtttttagtcgcgcgtttcgtgttattgcggttttttgaagtttcgtgttttcgtagtttttttatggttagtttcgttttttttttttgcggtttttgttcgttaggtatttcgaattcgggcgtttgcggaaggggggaggattggaattcgggtttcggtagttcgcgggtttggtcgggcgttttgtcgtcgttttttgtattattttttttcgttttgttttttatttcgtttttagcgaggcgttttttttttttcgtatttttgttcgaaatttggagttttagtttgtaatttttattttttcgaggttttcgttgtttaggtttagtattt

SEQ ID NO: 30918 - DNA, 589 bp, Artificial Sequence
  chemically treated genomic DNA (Homo sapiens) CpG-island No: 30918
aaatactaaacctaaacaacgaaaacctcgaaaaaataaaaattacaaactaaaactccaaatttcgaacaaaaatacgaaaaaaaaaaaacgcctcgctaaaaacgaaataaaaaacaaaacgaaaaaaaataatacaaaaaacgacgacaaaacgcccgaccaaacccgcgaactaccgaaacccgaattccaatcctccccccttccgcaaacgcccgaattcgaaatacctaacgaacaaaaaccgcaaaaaaaaaaaacgaaactaaccataaaaaaactacgaaaacacgaaacttcaaaaaaccgcaataacacgaaacgcgcgactaaaaacgaaaacaaacgatataaccaaaccccgacgcacgacccataaaacgctaaataccacgacctaaaaccgcgcgccaaaaccaaacgcaaaatacgacgcaacccctccaacatcccttaaaaaaaaacctccaaccgtctcgtcccaatctatctacaatcgctaaaaccgaaacgattatccctatcaccgaaatcgcttacgaaaacccgaaaatacgcgccacgaacgaacgcctttccaaacgca

SEQ ID NO: 30919 - DNA, 589 bp, Artificial Sequence
  chemically treated genomic DNA (Homo sapiens) CpG-island No: 30919
gggtgttagatttgggtagcgggaatttcgaagaggtggagattgtaggttgggattttagatttcgggtagggatgcggggaagggaagacgtttcgttggaggcggaatggagggtaaggcgaaggaggatggtgtaggaaacggcgataaggcgttcggttaggttcgcgagttatcgagattcgggttttaatttttttttttttcgtaaacgttcgggttcgaggtatttggcgggtaagggtcgtagaggagagaagcggggttggttatggggaggttgcggggatacggggttttaaaaaatcgtagtggtacggagcgcgcggttggaagcgaaagtaggcggtgtggttaagtttcggcgtacggtttatagggcgttgggtattacgatttggggtcgcgcgttagggttaggcgtagggtacgacgtaatttttttagtattttttggggaggagtttttaatcgtttcgttttagtttgtttgtagtcgttaaaatcgaagcggttgtttttgttatcggggtcgtttgcggaggttcgagaatgcgcgttacgaacgagcgtttttttaagcgta

SEQ ID NO: 30920 - DNA, 589 bp, Artificial Sequence
  chemically treated genomic DNA (Homo sapiens) CpG-island No: 30920
tacgcttaaaaaaacgctcgttcgtaacgcgcattctcgaacctccgcaaacgaccccgataacaaaaacaaccgcttcgattttaacgactacaaacaaactaaaacgaaacgattaaaaactcctccccaaaaaatactaaaaaaattacgtcgtaccctacgcctaaccctaacgcgcgaccccaaatcgtaatacccaacgccctataaaccgtacgccgaaacttaaccacaccgcctactttcgcttccaaccgcgcgctccgtaccactacgattttttaaaaccccgtatccccgcaacctccccataaccaaccccgcttctctcctctacgacccttacccgccaaatacctcgaacccgaacgtttacgaaaaaaaaaaaaattaaaacccgaatctcgataactcgcgaacctaaccgaacgccttatcgccgtttcctacaccatcctccttcgccttaccctccattccgcctccaacgaaacgtcttcccttccccgcatccctacccgaaatctaaaatcccaacctacaatctccacctcttcgaaattcccgctacccaaatctaacaccc

SEQ ID NO: 30921 - DNA, 608 bp, Artificial Sequence
  chemically treated genomic DNA (Homo sapiens) CpG-island No: 30921
ttcgatacggttcgattttaacgatttttatcgtttttttttttttcgtatcgttcgtattggtacgttcggcgtagggttcgttatttgttcggtttgtcgacggttatttttatcgatggtagtcgttttttatatttttttttttcgtatttttttttttttattcgtatttttttttttaatttatcgcgattcgaggggttattcgtttacgtcgacgcgatttcgtacgatttgacgtttttatttcgtttcgtcggcgattttttatttatttttttatcgcgattcgattcgtaacgttattcgtatttgttttcgtatttcgttcgtttaattgttatcgttgtacgtttttattattttttttcgtttattggtcgtcgaattttagttagttttcgacggttttcggatagttattttcgataattcgttattatttcgtcgaatttcggttacgcgaaatacgttaattgtatttgtgttattttcgtttattatttttatcgaattcgttttatcgtatagttcgagtatcgtcgaaatcgtaatttggttttagatcgtatttcgcgcgtttcggtcgattttcgtgcgttacg

SEQ ID NO: 30922 - DNA, 608 bp, Artificial Sequence
  chemically treated genomic DNA (Homo sapiens) CpG-island No: 30922
cgtaacgcacgaaaatcgaccgaaacgcgcgaaatacgatctaaaaccaaattacgatttcgacgatactcgaactatacgataaaacgaattcgataaaaataataaacgaaaataacacaaatacaattaacgtatttcgcgtaaccgaaattcgacgaaataataacgaattatcgaaaataactatccgaaaaccgtcgaaaactaactaaaattcgacgaccaataaacgaaaaaaaataataaaaacgtacaacgataacaattaaacgaacgaaatacgaaaacaaatacgaataacgttacgaatcgaatcgcgataaaaaaataaataaaaaatcgccgacgaaacgaaataaaaacgtcaaatcgtacgaaatcgcgtcgacgtaaacgaataacccctcgaatcgcgataaattaaaaaaaaaaatacgaataaaaaaaaaaaaatacgaaaaaaaaaaatataaaaaacgactaccatcgataaaaataaccgtcgacaaaccgaacaaataacgaaccctacgccgaacgtaccaatacgaacgatacgaaaaaaaaaaaaacgataaaaatcgttaaaatcgaaccgtatcgaa

SEQ ID NO: 30923 - DNA, 608 bp, Artificial Sequence
  chemically treated genomic DNA (Homo sapiens) CpG-island No: 30923
cgtgacgtacgggagtcgatcgaggcgcgcgagatgcgatttggagttagattgcgatttcgacgatattcgagttatgcgatagggcgggttcggtggaggtgatagacgagagtggtataagtgtagttggcgtatttcgcgtagtcggggttcgacgaggtggtggcgagttatcgaaggtgattgttcgggggtcgtcgagggttggttgaggttcgacggttaatagacgagagaagatggtaagagcgtatagcggtagtagttgggcgagcggagtgcggaggtaggtgcgagtagcgttgcgagtcggatcgcggtggagagatgggtgggaggtcgtcgacggggcggggtggagacgttaagtcgtacggggtcgcgtcggcgtgagcgggtggtttttcgagtcgcggtgggttagggaggggagtgcgggtgaagagaggggagtgcgggggaggagggtatggggagcggttgttatcggtggggatggtcgtcggtagatcgagtagatagcgggttttgcgtcgggcgtgttagtgcggacggtgcggagaggagggaagcggtgaggatcgttagagtcgaatcgtgtcgga

SEQ ID NO: 30924 - DNA, 608 bp, Artificial Sequence
  chemically treated genomic DNA (Homo sapiens) CpG-island No: 30924
tccgacacgattcgactctaacgatcctcaccgcttccctcctctccgcaccgtccgcactaacacgcccgacgcaaaacccgctatctactcgatctaccgacgaccatccccaccgataacaaccgctccccataccctcctcccccgcactcccctctcttcacccgcactcccctccctaacccaccgcgactcgaaaaaccacccgctcacgccgacgcgaccccgtacgacttaacgtctccaccccgccccgtcgacgacctcccacccatctctccaccgcgatccgactcgcaacgctactcgcacctacctccgcactccgctcgcccaactactaccgctatacgctcttaccatcttctctcgtctattaaccgtcgaacctcaaccaaccctcgacgacccccgaacaatcaccttcgataactcgccaccacctcgtcgaaccccgactacgcgaaatacgccaactacacttataccactctcgtctatcacctccaccgaacccgccctatcgcataactcgaatatcgtcgaaatcgcaatctaactccaaatcgcatctcgcgcgcctcgatcgactcccgtacgtcacg

SEQ ID NO: 30925 - DNA, 708 bp, Artificial Sequence
  chemically treated genomic DNA (Homo sapiens) CpG-island No: 30925
ttcggtttttttttttttacgttatttcgttttttttatcgttaacgttttattcgttttttatttttaattcgtcggcgtttttattttttttttcgtattggtttttattcgtttattttttcgtttcgaggtttttttattttatttttatattttatttatcgtttttatttttttattataaacgtttttttttttttttcgtttcgcgttaatacgtttatcgtcgtttttttttttttataaatttaggcgtttttcgcgttttttttttattatatattttaagcgcggcgttcggttttatttttataattagttattttcggcgttttttcgtttaatataaatttatcgcgcgttcgtttttttgtcgtttattaatagttcgggcgggtcgcgcgtcgtttttttttattaaatatcgtggtttttcgtttttaattatataacggttttttcgtttttttttttttcgaaaatttacgggttttttttcggttttttttattaattttaatcgttcgttttttttttttattttaataatttagttttcgcgtcgggtcgtttcgtattttttaattagtcgggcgcgtttcgttcgttttattattttcgttttgcgttttcgtttttttttttttttttattattcgcgaaggtttattttcgatggtgtagttttttcgatatgtagatggg

SEQ ID NO: 30926 - DNA, 708 bp, Artificial Sequence
  chemically treated genomic DNA (Homo sapiens) CpG-island No: 30926
cccatctacatatcgaaaaaactacaccatcgaaaataaaccttcgcgaataataaaaaaaaaaaaaaaaacgaaaacgcaaaacgaaaataataaaacgaacgaaacgcgcccgactaattaaaaaatacgaaacgacccgacgcgaaaactaaattattaaaataaaaaaaaaaaacgaacgattaaaattaataaaaaaaaccgaaaaaaaacccgtaaattttcgaaaaaaaaaaaaacgaaaaaaccgttatataattaaaaacgaaaaaccacgatatttaataaaaaaaaacgacgcgcgacccgcccgaactattaataaacgacaaaaaaacgaacgcgcgataaatttatattaaacgaaaaaacgccgaaaataactaattataaaaataaaaccgaacgccgcgcttaaaatatataataaaaaaaaaacgcgaaaaacgcctaaatttataaaaaaaaaaaaacgacgataaacgtattaacgcgaaacgaaaaaaaaaaaaaaacgtttataataaaaaaataaaaacgataaataaaatataaaaataaaataaaaaaacctcgaaacgaaaaaataaacgaataaaaaccaatacgaaaaaaaaaataaaaacgccgacgaattaaaaataaaaaacgaataaaacgttaacgataaaaaaaacgaaataacgtaaaaaaaaaaaaaccgaa

SEQ ID NO: 30927 - DNA, 708 bp, Artificial Sequence
  chemically treated genomic DNA (Homo sapiens) CpG-island No: 30927
tttatttgtatatcgggggggttatattatcgggggtgggttttcgcgggtggtaggggaggggggggaggcggggacgtagggcgggggtggtggggcgggcggggcgcgttcggttggttggggggtgcggggcgattcggcgcgagggttgggttgttggggtggagggggggggcgggcggttggggttagtgaggagggtcgggggggggttcgtgggttttcggggagggggggggcgggggggtcgttgtgtggttgggagcggggggttacggtgtttggtgaggagaggcggcgcgcggttcgttcgagttgttgataggcggtaaggaggcggacgcgcggtgggtttgtgttaggcggggaggcgtcgggggtggttgattgtgagggtggggtcgggcgtcgcgtttgagatgtgtgatgaggggagggcgcgggaggcgtttgggtttgtgggagagggggggcggcggtgggcgtattggcgcggggcgaagggggggggggggcgtttgtagtgggggggtgggggcggtggatggggtgtgggagtggggtgggggggtttcggggcggggaggtaggcgggtgggggttagtgcggggaggggggtgggagcgtcggcgggttgggagtggggggcgggtggggcgttgacggtggggaggacgggatggcgtgaggggagggaggtcggg

SEQ ID NO: 30928 - DNA, 708 bp, Artificial Sequence
  chemically treated genomic DNA (Homo sapiens) CpG-island No: 30928
cccgacctccctcccctcacgccatcccgtcctccccaccgtcaacgccccacccgccccccactcccaacccgccgacgctcccacccccctccccgcactaacccccacccgcctacctccccgccccgaaacccccccaccccactcccacaccccatccaccgcccccacccccccactacaaacgcccccccccccccttcgccccgcgccaatacgcccaccgccgccccccctctcccacaaacccaaacgcctcccgcgccctcccctcatcacacatctcaaacgcgacgcccgaccccaccctcacaatcaaccacccccgacgcctccccgcctaacacaaacccaccgcgcgtccgcctccttaccgcctatcaacaactcgaacgaaccgcgcgccgcctctcctcaccaaacaccgtaaccccccgctcccaaccacacaacgacccccccgccccccccctccccgaaaacccacgaacccccccccgaccctcctcactaaccccaaccgcccgccccccccctccaccccaacaacccaaccctcgcgccgaatcgccccgcaccccccaaccaaccgaacgcgccccgcccgccccaccacccccgccctacgtccccgcctcccccccctcccctaccacccgcgaaaacccacccccgataatataacccccccgatatacaaataaa

SEQ ID NO: 30929 - DNA, 584 bp, Artificial Sequence
  chemically treated genomic DNA (Homo sapiens) CpG-island No: 30929
cgcgggcggcgggtttagttttggggttcgtatttcgttgggttattttttcggtcggagtcgggggggttacgcggtttcggaataaagtttcgcgggaggagttgttttgagtcgacgggtaagcgttagtttttcgcgggttagagcgttacgtgttaggattcgttgaatgcgcggtgtacgggcgtagtaacggtagtcgagtagttttcgtatttattgtcgtttttggagattcgtatagttacgttttttcgaggtcgtcgtcggtcgcgttaacgtttgtgcgtttgcgcgttcgcgaaagtttcgtttttttaggtttttagcgcgcggggtcgcgtttttttatgatcgtcgtcgtagtgtgtggtatttagcgggggcgcgcggcgggttcgaggacgcgcgaaacggcggcggcggcggcggttaggggggagtcggggcggtcgttgcggggcgcgtttttaagaggcggcggcggtttagggtgtttcgtcggtttcggcgtcgggaataggcggtggcgttgttcgcggtggcgggggttgtagacggagcgtgttggtattaggatt

SEQ ID NO: 30930 - DNA, 584 bp, Artificial Sequence
  chemically treated genomic DNA (Homo sapiens) CpG-island No: 30930
aatcctaataccaacacgctccgtctacaacccccgccaccgcgaacaacgccaccgcctattcccgacgccgaaaccgacgaaacaccctaaaccgccgccgcctcttaaaaacgcgccccgcaacgaccgccccgactcccccctaaccgccgccgccgccgccgtttcgcgcgtcctcgaacccgccgcgcgcccccgctaaataccacacactacgacgacgatcataaaaaaacgcgaccccgcgcgctaaaaacctaaaaaaacgaaactttcgcgaacgcgcaaacgcacaaacgttaacgcgaccgacgacgacctcgaaaaaacgtaactatacgaatctccaaaaacgacaataaatacgaaaactactcgactaccgttactacgcccgtacaccgcgcattcaacgaatcctaacacgtaacgctctaacccgcgaaaaactaacgcttacccgtcgactcaaaacaactcctcccgcgaaactttattccgaaaccgcgtaacccccccgactccgaccgaaaaaataacccaacgaaatacgaaccccaaaactaaacccgccgcccgcg

SEQ ID NO: 30931 - DNA, 584 bp, Artificial Sequence
  chemically treated genomic DNA (Homo sapiens) CpG-island No: 30931
ggttttggtattaatacgtttcgtttataattttcgttatcgcgggtagcgttatcgtttattttcggcgtcgagatcgacgggatattttgggtcgtcgtcgttttttgagagcgcgtttcgtaacggtcgtttcggtttttttttggtcgtcgtcgtcgtcgtcgtttcgcgcgttttcgagttcgtcgcgcgttttcgttaaatattatatattgcggcggcggttatgaggaggcgcggtttcgcgcgttgggagtttgggggggcggggttttcgcgggcgcgtaggcgtataggcgttggcgcggtcggcggcggtttcgggggggcgtaattgtgcgggtttttaaaggcggtagtaggtgcgggggttattcggttatcgttgttgcgttcgtgtatcgcgtatttaacggattttggtacgtggcgttttggttcgcgagaagttagcgtttgttcgtcggtttaaggtagtttttttcgcggagttttgtttcggggtcgcgtgattttttcggtttcgatcggaggggtagtttagcgggatgcgagttttagggttgggttcgtcgttcgcg

SEQ ID NO: 30932 - DNA, 584 bp, Artificial Sequence
  chemically treated genomic DNA (Homo sapiens) CpG-island No: 30932
cgcgaacgacgaacccaaccctaaaactcgcatcccgctaaactacccctccgatcgaaaccgaaaaaatcacgcgaccccgaaacaaaactccgcgaaaaaaactaccttaaaccgacgaacaaacgctaacttctcgcgaaccaaaacgccacgtaccaaaatccgttaaatacgcgatacacgaacgcaacaacgataaccgaataacccccgcacctactaccgcctttaaaaacccgcacaattacgcccccccgaaaccgccgccgaccgcgccaacgcctatacgcctacgcgcccgcgaaaaccccgcccccccaaactcccaacgcgcgaaaccgcgcctcctcataaccgccgccgcaatatataatatttaacgaaaacgcgcgacgaactcgaaaacgcgcgaaacgacgacgacgacgacgaccaaaaaaaaaccgaaacgaccgttacgaaacgcgctctcaaaaaacgacgacgacccaaaatatcccgtcgatctcgacgccgaaaataaacgataacgctacccgcgataacgaaaattataaacgaaacgtattaataccaaaacc

SEQ ID NO: 30933 - DNA, 553 bp, Artificial Sequence
  chemically treated genomic DNA (Homo sapiens) CpG-island No: 30933
  unsure (62, 161, 193, 391, 443..444, 464, 519, 525, 535, 550)
ggggacgacgggagggcgcgttaggaagggcgtacgaaggggttagagggtcgggggttcgngttagtattagaggcgtacgtcggagatcgggcgagcgatcgggagaagggagcggtcggaacggggggaattagacgcggtcgcgggacgggtcggtngcgagtcgtcggggaatttcgagagttttcgngtcggtcgcggaggaaacgggggtcgggagaggggttttaagggaagaggggaaatcggtcgcggcgggggcgacgggggaacggggggcgagggaatcgtacgggagcggggtttataaggcgatacgggggaggagaaaggagggtatttttttttcgacgggggcgggagagggggaggaaagaggggggcgcgngagaaaggggcgagaggagggggatcgttcgcggcggcgggggcgggggggnngtcgcgtcgaggggcggggntcgagagatcggtatcgcggggatagcgtcggcgcgcgagcgggggagggggcgnaggagngggggtagtntagggcggagggcgntcg

SEQ ID NO: 30934 - DNA, 553 bp, Artificial Sequence
  chemically treated genomic DNA (Homo sapiens) CpG-island No: 30934
  unsure (4, 19, 29, 35, 90, 110..111, 163, 361, 393, 492)
cgancgccctccgccctanactacccccnctcctncgccccctcccccgctcgcgcgccgacgctatccccgcgataccgatctctcganccccgcccctcgacgcgacnncccccccgcccccgccgccgcgaacgatccccctcctctcgcccctttctcncgcgcccccctctttcctccccctctcccgcccccgtcgaaaaaaaaataccctcctttctcctcccccgtatcgccttataaaccccgctcccgtacgattccctcgccccccgttcccccgtcgcccccgccgcgaccgatttcccctcttcccttaaaacccctctcccgacccccgtttcctccgcgaccgacncgaaaactctcgaaattccccgacgactcgcnaccgacccgtcccgcgaccgcgtctaattccccccgttccgaccgctcccttctcccgatcgctcgcccgatctccgacgtacgcctctaatactaacncgaacccccgaccctctaaccccttcgtacgcccttcctaacgcgccctcccgtcgtcccc

SEQ ID NO: 30935 - DNA, 553 bp, Artificial Sequence
  chemically treated genomic DNA (Homo sapiens) CpG-island No: 30935
  unsure (4, 19, 29, 35, 90, 110..111, 163, 361, 393, 492)
cggncgtttttcgttttgngttgtttttntttttncgttttttttttcgttcgcgcgtcggcgttgttttcgcggtgtcggtttttcggntttcgtttttcggcgcggtnnttttttcgttttcgtcgtcgcgggcggttttttttttttcgttttttttttncgcgttttttttttttttttttttttttcgttttcgtcggggggggggtgttttttttttttttttttcgtgtcgttttgtgggtttcgttttcgtgcggttttttcgtttttcgttttttcgtcgttttcgtcgcggtcggttttttttttttttttggggtttttttttcggttttcgtttttttcgcggtcggtncgggggttttcggggtttttcggcggttcgtngtcggttcgtttcgcggtcgcgtttggtttttttcgtttcggtcgtttttttttttcggtcgttcgttcggttttcggcgtgcgtttttggtgttggtncgggttttcggttttttggttttttcgtgcgttttttttggcgcgttttttcgtcgttttt

SEQ ID NO: 30936 - DNA, 553 bp, Artificial Sequence
  chemically treated genomic DNA (Homo sapiens) CpG-island No: 30936
  unsure (62, 161, 193, 391, 443..444, 464, 519, 525, 535, 550)
aaaaacgacgaaaaaacgcgccaaaaaaaacgcacgaaaaaaccaaaaaaccgaaaacccgnaccaacaccaaaaacgcacgccgaaaaccgaacgaacgaccgaaaaaaaaaaacgaccgaaacgaaaaaaaccaaacgcgaccgcgaaacgaaccgacnacgaaccgccgaaaaaccccgaaaacccccgnaccgaccgcgaaaaaaacgaaaaccgaaaaaaaaaccccaaaaaaaaaaaaaaaaccgaccgcgacgaaaacgacgaaaaaacgaaaaacgaaaaaaccgcacgaaaacgaaacccacaaaacgacacgaaaaaaaaaaaaaaaaaacaccccccccccgacgaaaacgaaaaaaaaaaaaaaaaaaaaaaaacgcgnaaaaaaaaaacgaaaaaaaaaaaaccgcccgcgacgacgaaaacgaaaaaannaccgcgccgaaaaacgaaanccgaaaaaccgacaccgcgaaaacaacgccgacgcgcgaacgaaaaaaaaaacgnaaaaanaaaaacaacncaaaacgaaaaacgnccg

SEQ ID NO: 30937 - DNA, 867 bp, Artificial Sequence
  chemically treated genomic DNA (Homo sapiens) CpG-island No: 30937
tttggatattcgtatttcgtatgttacggattcggcgggtaatcggttgtcggattcggagttgtattcggatagtatatttatagtgtggtcggataatcgtatcgcggaggatgcgtattatgtttatcgttacgatgaatacggtaggttgacggagaagacggatcgtatttcggcgggtgtgatacggacggacgacgagcggatttattattattattacgatagttagtatcgtttggtgttttatacgcggatatagtatggcgagttattggtcgagagtcgttatttttacgattcgttgggacggcgaatggtaaaacgggtttggcggcgggagcgtgatttgacggggtggatgtcgttgtcgcgtaaatcggaggtgacgtggtatggttgggacggagataggttgacgacggtgtagattgatattatacgtatttagacggtatacgagtcgggaagttttacgtcgtttatacgggtcgagatagagaacggcgagcggtaaaaagcgtaacggcgtagtttggtagagacgttttagtaggaagggagtgagaacggttacggcgtggtgttttcggttgaattggtgcggttgttggataggttggaggaagaaattcgggtagttcgcgtgagtagtgaaagtcgggcgtggtttgcgtagtgcgggttgacggtggagtaattggttagataggtggagtcggaatatatatcggcgcgaaaagtttatttttattattgcgattatcggggattgtcgttggcgtttattagcgaagacggtaatacggcgtggagcgcggaatatgatgaatggggtaattagtttaatgaggagaattcgta

SEQ ID NO: 30938 - DNA, 867 bp, Artificial Sequence
  chemically treated genomic DNA (Homo sapiens) CpG-island No: 30938
tacgaattctcctcattaaactaattaccccattcatcatattccgcgctccacgccgtattaccgtcttcgctaataaacgccaacgacaatccccgataatcgcaataataaaaataaacttttcgcgccgatatatattccgactccacctatctaaccaattactccaccgtcaacccgcactacgcaaaccacgcccgactttcactactcacgcgaactacccgaatttcttcctccaacctatccaacaaccgcaccaattcaaccgaaaacaccacgccgtaaccgttctcactcccttcctactaaaacgtctctaccaaactacgccgttacgctttttaccgctcgccgttctctatctcgacccgtataaacgacgtaaaacttcccgactcgtataccgtctaaatacgtataatatcaatctacaccgtcgtcaacctatctccgtcccaaccataccacgtcacctccgatttacgcgacaacgacatccaccccgtcaaatcacgctcccgccgccaaacccgttttaccattcgccgtcccaacgaatcgtaaaaataacgactctcgaccaataactcgccatactatatccgcgtataaaacaccaaacgatactaactatcgtaataataataataaatccgctcgtcgtccgtccgtatcacacccgccgaaatacgatccgtcttctccgtcaacctaccgtattcatcgtaacgataaacataatacgcatcctccgcgatacgattatccgaccacactataaatatactatccgaatacaactccgaatccgacaaccgattacccgccgaatccgtaacatacgaaatacgaatatccaaa

SEQ ID NO: 30939 - DNA, 867 bp, Artificial Sequence
  chemically treated genomic DNA (Homo sapiens) CpG-island No: 30939
tgcgggttttttttattaagttggttgttttatttattatatttcgcgttttacgtcgtattgtcgttttcgttgataagcgttagcggtagttttcggtggtcgtagtgataaagatgagtttttcgcgtcggtgtgtatttcggttttatttgtttggttagttgttttatcgttagttcgtattgcgtaagttacgttcggtttttattgtttacgcggattgttcggatttttttttttagtttgtttagtagtcgtattagtttagtcgggaatattacgtcgtggtcgtttttattttttttttgttggagcgtttttgttaggttgcgtcgttgcgttttttatcgttcgtcgttttttgtttcgattcgtatgagcggcgtgaagtttttcggttcgtatatcgtttggatacgtgtggtgttagtttgtatcgtcgttagtttgttttcgttttagttatattacgttattttcggtttacgcgatagcgatatttatttcgttaggttacgttttcgtcgttagattcgttttgttattcgtcgttttagcgggtcgtagaggtagcggttttcgattagtggttcgttatgttgtattcgcgtgtagaatattaggcggtgttggttgtcgtagtggtagtggtgggttcgttcgtcgttcgttcgtattatattcgtcgggatgcggttcgtttttttcgttagtttgtcgtatttatcgtggcggtagatatagtgcgtatttttcgcgatgcggttattcggttatattgtgagtgtattgttcgggtgtagtttcgggttcggtagtcggttgttcgtcgggttcgtggtatacgggatgcggatgtttagg

SEQ ID NO: 30940 - DNA, 867 bp, Artificial Sequence
  chemically treated genomic DNA (Homo sapiens) CpG-island No: 30940
cctaaacatccgcatcccgtataccacgaacccgacgaacaaccgactaccgaacccgaaactacacccgaacaatacactcacaatataaccgaataaccgcatcgcgaaaaatacgcactatatctaccgccacgataaatacgacaaactaacgaaaaaaacgaaccgcatcccgacgaatataatacgaacgaacgacgaacgaacccaccactaccactacgacaaccaacaccgcctaatattctacacgcgaatacaacataacgaaccactaatcgaaaaccgctacctctacgacccgctaaaacgacgaataacaaaacgaatctaacgacgaaaacgtaacctaacgaaataaatatcgctatcgcgtaaaccgaaaataacgtaatataactaaaacgaaaacaaactaacgacgatacaaactaacaccacacgtatccaaacgatatacgaaccgaaaaacttcacgccgctcatacgaatcgaaacaaaaaacgacgaacgataaaaaacgcaacgacgcaacctaacaaaaacgctccaacaaaaaaaaaataaaaacgaccacgacgtaatattcccgactaaactaatacgactactaaacaaactaaaaaaaaaaatccgaacaatccgcgtaaacaataaaaaccgaacgtaacttacgcaatacgaactaacgataaaacaactaaccaaacaaataaaaccgaaatacacaccgacgcgaaaaactcatctttatcactacgaccaccgaaaactaccgctaacgcttatcaacgaaaacgacaatacgacgtaaaacgcgaaatataataaataaaacaaccaacttaataaaaaaaacccgca

SEQ ID NO: 30941 - DNA, 950 bp, Artificial Sequence
  chemically treated genomic DNA (Homo sapiens) CpG-island No: 30941
tcgatttggcgtttgcggtcgaattcggtttttagcggtaggatcgataggtagttcgattgtacgtcgtagtcgtcgtaattttcgtatacggtcgggttgattattatgcggcgcgtcgggtcggggaagacggttttgttaggtttgttttttttgcggcggcgacgtttttcggcggcgtatgtttggtcgtatattagtatcgttacgtcggggatgacgcgtaagtcgcgttggatgatatcgagttcgtttcgatggtgtacggttacgtcgtcgggtagttttatttgcgtatagtttttcggttgggtcggtgacgattacggttttgcgcgcgttttcgtttattatttgttgtacgatttgcggtacggatagggtgtcgtttatcggttggtcggtcggttatcgcgatcgcgtcgttgtataggattttataggtgatgttggtgcgcgtagttacggtttggcggatcgtttagcgaattcgaatggtaaaaggtttcgtcgtttaaggttttggaatacgtgcggtttgtttatgaagcgcgaggacgcgatttagttgacgttttcgtcgtttatatgtaataggtaattcgtgtcgcgttttatttaggtgattatgaagtggtagtcgatgtcggtataggttcgtttgtttttcggtatacgggtttaggtattgtgcgggtagttttagtagaagttcggcgtgcgttttacgtcgtcggtatcgttggagggtagcggtagcgggcgtaggaagttcggtaagtatgcgtgttaggtcgagttgcgggaagcgcggcgttagttagtgtatgacggtcggcgtgatgcgcgaagatcgtagttcgtttagtttcgatagtagcggttattatttcgttaggttttgtcgattagggagggagggtttatttgtgggtaggatatagaat

SEQ ID NO: 30942 - DNA, 950 bp, Artificial Sequence
  chemically treated genomic DNA (Homo sapiens) CpG-island No: 30942
attctatatcctacccacaaataaaccctccctccctaatcgacaaaacctaacgaaataataaccgctactatcgaaactaaacgaactacgatcttcgcgcatcacgccgaccgtcatacactaactaacgccgcgcttcccgcaactcgacctaacacgcatacttaccgaacttcctacgcccgctaccgctaccctccaacgataccgacgacgtaaaacgcacgccgaacttctactaaaactacccgcacaatacctaaacccgtataccgaaaaacaaacgaacctataccgacatcgactaccacttcataatcacctaaataaaacgcgacacgaattacctattacatataaacgacgaaaacgtcaactaaatcgcgtcctcgcgcttcataaacaaaccgcacgtattccaaaaccttaaacgacgaaaccttttaccattcgaattcgctaaacgatccgccaaaccgtaactacgcgcaccaacatcacctataaaatcctatacaacgacgcgatcgcgataaccgaccgaccaaccgataaacgacaccctatccgtaccgcaaatcgtacaacaaataataaacgaaaacgcgcgcaaaaccgtaatcgtcaccgacccaaccgaaaaactatacgcaaataaaactacccgacgacgtaaccgtacaccatcgaaacgaactcgatatcatccaacgcgacttacgcgtcatccccgacgtaacgatactaatatacgaccaaacatacgccgccgaaaaacgtcgccgccgcaaaaaaaacaaacctaacaaaaccgtcttccccgacccgacgcgccgcataataatcaacccgaccgtatacgaaaattacgacgactacgacgtacaatcgaactacctatcgatcctaccgctaaaaaccgaattcgaccgcaaacgccaaatcga

SEQ ID NO: 30943 - DNA, 950 bp, Artificial Sequence
  chemically treated genomic DNA (Homo sapiens) CpG-island No: 30943
gttttatattttgtttataggtaagttttttttttttggtcggtaaggtttggcgagatggtaatcgttgttgtcggagttgggcgagttgcgattttcgcgtattacgtcggtcgttatgtattggttggcgtcgcgtttttcgtagttcgatttggtacgtatgtttgtcggattttttgcgttcgttgtcgttgttttttaacggtgtcgacggcgtaaagcgtacgtcgaatttttgttagggttgttcgtataatatttagattcgtgtgtcggaaggtagacgaatttatgtcggtatcggttgttattttatggttatttggatgaagcgcgatacgaattatttgttatatatgggcggcgaaggcgttagttgggtcgcgttttcgcgttttatggataagtcgtacgtgttttagaattttgggcgacgggattttttattattcgggttcgttggacgattcgttaggtcgtggttgcgcgtattaatattatttataagattttgtataacgacgcggtcgcgatgatcggtcggttagtcggtggacggtattttgttcgtgtcgtagatcgtgtagtaggtggtgagcgaaggcgcgcgtaagatcgtggtcgttatcgatttagtcggaaaattatgcgtaagtgaagttgttcgacggcgtgatcgtgtattatcggagcgagttcgatgttatttagcgcgatttgcgcgttattttcggcgtgacggtgttggtgtacgattagatatgcgtcgtcgagaagcgtcgtcgtcgtaagaagaataagtttggtaagatcgtttttttcgattcggcgcgtcgtatggtgattaattcggtcgtgtgcgaaggttgcggcgattgcggcgtgtagtcgaattgtttgtcgattttgtcgttggagatcgaattcggtcgtaagcgttagatcga

SEQ ID NO: 30944 - DNA, 950 bp, Artificial Sequence
  chemically treated genomic DNA (Homo sapiens) CpG-island No: 30944
tcgatctaacgcttacgaccgaattcgatctccaacgacaaaatcgacaaacaattcgactacacgccgcaatcgccgcaaccttcgcacacgaccgaattaatcaccatacgacgcgccgaatcgaaaaaaacgatcttaccaaacttattcttcttacgacgacgacgcttctcgacgacgcatatctaatcgtacaccaacaccgtcacgccgaaaataacgcgcaaatcgcgctaaataacatcgaactcgctccgataatacacgatcacgccgtcgaacaacttcacttacgcataattttccgactaaatcgataacgaccacgatcttacgcgcgccttcgctcaccacctactacacgatctacgacacgaacaaaataccgtccaccgactaaccgaccgatcatcgcgaccgcgtcgttatacaaaatcttataaataatattaatacgcgcaaccacgacctaacgaatcgtccaacgaacccgaataataaaaaatcccgtcgcccaaaattctaaaacacgtacgacttatccataaaacgcgaaaacgcgacccaactaacgccttcgccgcccatatataacaaataattcgtatcgcgcttcatccaaataaccataaaataacaaccgataccgacataaattcgtctaccttccgacacacgaatctaaatattatacgaacaaccctaacaaaaattcgacgtacgctttacgccgtcgacaccgttaaaaaacaacgacaacgaacgcaaaaaatccgacaaacatacgtaccaaatcgaactacgaaaaacgcgacgccaaccaatacataacgaccgacgtaatacgcgaaaatcgcaactcgcccaactccgacaacaacgattaccatctcgccaaaccttaccgaccaaaaaaaaaaaacttacctataaacaaaatataaaac

SEQ ID NO: 30945 - DNA, 549 bp, Artificial Sequence
  chemically treated genomic DNA (Homo sapiens) CpG-island No: 30945
gtcggcgggttaatgattttgatcgtatcgcgtgtattcggggattttttcggtttcgttaataatatttcgtcgtagtgtcgggatttgttttttttttgggggtcgggggtttggttttttgatatgcgtttttcggaggtttagtcgtttttacggttttttcgcgcgcgtacgacgttagagtcggagttacgatttattcgttttttcggatgtatttgatatttgtttattcggcgtttttcggcgcggcgtgcgtaatcgtcgttgtttttatttacgtatttttttgcgttgttatgtatatttttttttattaattttttatcgcggcgttcgatatttatttattttcgatttattcgttagttacgcgtatagtttttagataatgtgtttcgtgtttgtcgcgtttttaatattttatcgttcgttcgtttttttatcgtcgttttttatatttttaatttgttttattcgattacgtttgatatttatagtcgcgttattttgaacgtttagttcgtatatatttatttcgttatt

SEQ ID NO: 30946 - DNA, 549 bp, Artificial Sequence
  chemically treated genomic DNA (Homo sapiens) CpG-island No: 30946
aataacgaaataaatatatacgaactaaacgttcaaaataacgcgactataaatatcaaacgtaatcgaataaaacaaattaaaaatataaaaaacgacgataaaaaaacgaacgaacgataaaatattaaaaacgcgacaaacacgaaacacattatctaaaaactatacgcgtaactaacgaataaatcgaaaataaataaatatcgaacgccgcgataaaaaattaataaaaaaaaatatacataacaacgcaaaaaaatacgtaaataaaaacaacgacgattacgcacgccgcgccgaaaaacgccgaataaacaaatatcaaatacatccgaaaaaacgaataaatcgtaactccgactctaacgtcgtacgcgcgcgaaaaaaccgtaaaaacgactaaacctccgaaaaacgcatatcaaaaaaccaaacccccgacccccaaaaaaaaaacaaatcccgacactacgacgaaatattattaacgaaaccgaaaaaatccccgaatacacgcgatacgatcaaaatcattaacccgccgac

SEQ ID NO: 30947 - DNA, 549 bp, Artificial Sequence
  chemically treated genomic DNA (Homo sapiens) CpG-island No: 30947
agtggcgaggtgagtatatacgagttagacgtttagaatggcgcgattatggatattagacgtgatcgagtgaagtaggttaaggatgtggggaacggcgatgagagagcgagcgaacggtggagtattgaaagcgcggtaagtacgggatatattatttagaggttatacgcgtggttgacgagtgggtcgagagtaagtgagtatcggacgtcgcgatgagaagttgatgaagaagagtgtatatagtagcgtaggaaggtgcgtaggtgggagtagcggcgattacgtacgtcgcgtcgagagacgtcgagtgagtaaatgttaagtatattcgaggagacgagtaggtcgtggtttcgattttaacgtcgtgcgcgcgcgagggaatcgtaagaacggttaagttttcgggaagcgtatgttagggagttaggttttcggtttttaagggaggagtaggtttcggtattgcggcgaagtgttgttgacggaatcgggaaaattttcgggtatacgcgatgcggttagggttattggttcgtcggt

SEQ ID NO: 30948 - DNA, 549 bp, Artificial Sequence
  chemically treated genomic DNA (Homo sapiens) CpG-island No: 30948
accgacgaaccaataaccctaaccgcatcgcgtatacccgaaaattttcccgattccgtcaacaacacttcgccgcaataccgaaacctactcctcccttaaaaaccgaaaacctaactccctaacatacgcttcccgaaaacttaaccgttcttacgattccctcgcgcgcgcacgacgttaaaatcgaaaccacgacctactcgtctcctcgaatatacttaacatttactcactcgacgtctctcgacgcgacgtacgtaatcgccgctactcccacctacgcaccttcctacgctactatatacactcttcttcatcaacttctcatcgcgacgtccgatactcacttactctcgacccactcgtcaaccacgcgtataacctctaaataatatatcccgtacttaccgcgctttcaatactccaccgttcgctcgctctctcatcgccgttccccacatccttaacctacttcactcgatcacgtctaatatccataatcgcgccattctaaacgtctaactcgtatatactcacctcgccact

SEQ ID NO: 30949 - DNA, 616 bp, Artificial Sequence
  chemically treated genomic DNA (Homo sapiens) CpG-island No: 30949
tgtatagttcgttgttgtcggtgtgatcgttattgagaaatagcgtcggtaatgcgttatagatatttagtttttttgaggcgtgaattaacgtgtcgacgcgatagttgtattagggatcgtttagtttaatcgttattttaatggtataaattttcgttacggtgtttgtttcgttattttttagtacgaatatatagttttgtttatttttgggtagttcgttttgttaggttttgattgttttttcgatacgcgtcgaaagcgtggttttattggcgggaagcgacgttaggtcgtcgttcgttttgttggtaagttgtattagcgtcgagatatttgatcgtttaacgggacggatgattattatgatgaatttcggttaataaagtgttcgtaagtagttgtaaagcgatttagttcggtcgttatttttttttcgttgatattgagcgtaggcgtaaaacgtattacgttgttattcgtaattagtattattacgtttgttttcgtcgttttttgagagatttgtttcgtttgttcggcgtaatcggtatttagtatatagttaattagtaaatttaagtcgcgaattttattgaataaattatagcgg

SEQ ID NO: 30950 - DNA, 616 bp, Artificial Sequence
  chemically treated genomic DNA (Homo sapiens) CpG-island No: 30950
ccgctataatttattcaataaaattcgcgacttaaatttactaattaactatatactaaataccgattacgccgaacaaacgaaacaaatctctcaaaaaacgacgaaaacaaacgtaataatactaattacgaataacaacgtaatacgttttacgcctacgctcaatatcaacgaaaaaaaaataacgaccgaactaaatcgctttacaactacttacgaacactttattaaccgaaattcatcataataatcatccgtcccgttaaacgatcaaatatctcgacgctaatacaacttaccaacaaaacgaacgacgacctaacgtcgcttcccgccaataaaaccacgctttcgacgcgtatcgaaaaaacaatcaaaacctaacaaaacgaactacccaaaaataaacaaaactatatattcgtactaaaaaataacgaaacaaacaccgtaacgaaaatttataccattaaaataacgattaaactaaacgatccctaatacaactatcgcgtcgacacgttaattcacgcctcaaaaaaactaaatatctataacgcattaccgacgctatttctcaataacgatcacaccgacaacaacgaactataca

SEQ ID NO: 30951 - DNA, 616 bp, Artificial Sequence
  chemically treated genomic DNA (Homo sapiens) CpG-island No: 30951
tcgttatggtttgtttagtgaagttcgcggtttaggtttgttgattggttgtgtattgaatgtcgattacgtcgggtaagcgaaatagattttttaggaagcggcgaaagtaggcgtgatggtattgattgcgggtggtaacgtggtgcgttttgcgtttgcgtttaatgttagcgaagaagaggtgacgatcggattggatcgttttgtagttgtttgcgaatattttgttagtcgaggtttattatgatggttattcgtttcgttgagcgattagatgtttcggcgttgatgtagtttgttagtaaaacgggcggcggtttgacgtcgtttttcgttaatgaagttacgttttcggcgcgtatcgaaagggtaattaaaatttggtaaggcgaattgtttaaaagtgagtagggttatgtgttcgtgttggaagatagcgagataggtatcgtggcggggatttgtgttattgaggtggcggttgggttgaacgatttttggtataattatcgcgtcggtacgttggtttacgttttaaaagagttgaatgtttataacgtattgtcgacgttgttttttagtaacgattatatcggtagtagcgagttgtgta

SEQ ID NO: 30952 - DNA, 616 bp, Artificial Sequence
  chemically treated genomic DNA (Homo sapiens) CpG-island No: 30952
tacacaactcgctactaccgatataatcgttactaaaaaacaacgtcgacaatacgttataaacattcaactcttttaaaacgtaaaccaacgtaccgacgcgataattataccaaaaatcgttcaacccaaccgccacctcaataacacaaatccccgccacgatacctatctcgctatcttccaacacgaacacataaccctactcacttttaaacaattcgccttaccaaattttaattaccctttcgatacgcgccgaaaacgtaacttcattaacgaaaaacgacgtcaaaccgccgcccgttttactaacaaactacatcaacgccgaaacatctaatcgctcaacgaaacgaataaccatcataataaacctcgactaacaaaatattcgcaaacaactacaaaacgatccaatccgatcgtcacctcttcttcgctaacattaaacgcaaacgcaaaacgcaccacgttaccacccgcaatcaataccatcacgcctactttcgccgcttcctaaaaaatctatttcgcttacccgacgtaatcgacattcaatacacaaccaatcaacaaacctaaaccgcgaacttcactaaacaaaccataacga

SEQ ID NO: 30953 - DNA, 1159 bp, Artificial Sequence
  chemically treated genomic DNA (Homo sapiens) CpG-island No: 30953
tgtcgggtacgggcggtatttgtatattcgttatatgtgtacgcgttgattatatattaaacgtattagggggttgcgcgtttatacgcgcgttaacgtgttcgtaggttcgttattttttcggtgttcggtcgacgtcgtggcgcggtgcgtgcgtaaatataaatgtatatggacgtgtgcgtacgtcgtcgatcgtttattaggtacgcggattttcggattattcgttcggagcggtttcgtttttcggtttagttttgtcgaggtttggggcgtttttttttcggtcgttcgttcgattgttcgtttgtatcgcggggtcgttcggttttcggtcgttattcggataaaaggggtggggggggttttcgtttcgatttcgggggattcgcggtttcgcgggggcggcgtattttcgatcggtggttcggtttttattttcgttcgtcgcgagtttttgggattcggacgtcgggtatcgtcgtcgggaaagcgggtcgggtttgcggttcggagggggcgtatagtcggtacgcgtttacgtcgttcgttttcgttcggcggttacgcgggatatatttcgttcgtggtttcggttttcgttcggtttcggcgtcgcgtatttcgaattgttagtgggtcgtttgtagtagttgtttcgtttggtcggtcgcgtagttcgtcgttagtacgaattggttgattatgatttggtgtttgagttcgtttatgtttacggatatggcgtcgtcgcgttgttcgtttcggtttttttttttcgttcgcgttttcgttttacgcgtttattattagcgagtcggtttcggttaatataaatatttattgtgcggttttgatttatcgcgtttcgtttcgtttcgtcggcgtcgcggtatgttgggatatgtagtttttacggtgcgtcgggcgtttcgggggagcggggtcggtattttaggggacgcgaagttcgggaaggggcgtgtttgagtatcgagcgttcgttgtgcggatgttcgggtcgtaattcgagtcgggcgcgtttacgtcgttttcgttgttttcggtggtattcgtgtttttgttttggtacggatgggggttcgttggcgggggttacgtttgtgtatgggcgtaaatgtttgattataggatt

SEQ ID NO: 30954 - DNA, 1159 bp, Artificial Sequence
  chemically treated genomic DNA (Homo sapiens) CpG-island No: 30954
aatcctataatcaaacatttacgcccatacacaaacgtaacccccgccaacgaacccccatccgtaccaaaacaaaaacacgaataccaccgaaaacaacgaaaacgacgtaaacgcgcccgactcgaattacgacccgaacatccgcacaacgaacgctcgatactcaaacacgccccttcccgaacttcgcgtcccctaaaataccgaccccgctcccccgaaacgcccgacgcaccgtaaaaactacatatcccaacataccgcgacgccgacgaaacgaaacgaaacgcgataaatcaaaaccgcacaataaatatttatattaaccgaaaccgactcgctaataataaacgcgtaaaacgaaaacgcgaacgaaaaaaaaaaaccgaaacgaacaacgcgacgacgccatatccgtaaacataaacgaactcaaacaccaaatcataatcaaccaattcgtactaacgacgaactacgcgaccgaccaaacgaaacaactactacaaacgacccactaacaattcgaaatacgcgacgccgaaaccgaacgaaaaccgaaaccacgaacgaaatatatcccgcgtaaccgccgaacgaaaacgaacgacgtaaacgcgtaccgactatacgccccctccgaaccgcaaacccgacccgctttcccgacgacgatacccgacgtccgaatcccaaaaactcgcgacgaacgaaaataaaaaccgaaccaccgatcgaaaatacgccgcccccgcgaaaccgcgaatcccccgaaatcgaaacgaaaaccccccccaccccttttatccgaataacgaccgaaaaccgaacgaccccgcgatacaaacgaacaatcgaacgaacgaccgaaaaaaaaacgccccaaacctcgacaaaactaaaccgaaaaacgaaaccgctccgaacgaataatccgaaaatccgcgtacctaataaacgatcgacgacgtacgcacacgtccatatacatttatatttacgcacgcaccgcgccacgacgtcgaccgaacaccgaaaaaataacgaacctacgaacacgttaacgcgcgtataaacgcgcaaccccctaatacgtttaatatataatcaacgcgtacacatataacgaatatacaaataccgcccgtacccgaca

SEQ ID NO: 30955 - DNA, 1159 bp, Artificial Sequence
  chemically treated genomic DNA (Homo sapiens) CpG-island No: 30955
gattttgtggttaggtatttgcgtttatgtatagacgtggttttcgttagcggatttttattcgtgttagagtaggggtacgggtgttatcgagagtaacgaggacgacgtggacgcgttcggttcgggttacggttcggatattcgtatagcgggcgttcggtgtttagatacgttttttttcgggtttcgcgttttttagggtgtcggtttcgttttttcggggcgttcggcgtatcgtggggattatatattttagtatgtcgcggcgtcggcggagcgaggcgaggcgcggtgagttagagtcgtatagtaaatatttgtattagtcggagtcggttcgttaatggtggacgcgtgaggcggaggcgcgggcggaggagggaggtcggagcgggtagcgcggcggcgttatgttcgtgaatatggacgagtttaagtattaggttatgattaattagttcgtgttgacggcgggttgcgcggtcgattaggcgaagtaattgttgtaggcggtttattggtagttcgaggtgcgcggcgtcggagtcgggcgagggtcggggttacgggcggagtgtgtttcgcgtggtcgtcgggcgggggcggacggcgtggacgcgtgtcggttgtgcgtttttttcgggtcgtagattcgattcgttttttcgacggcggtgttcggcgttcggattttaagggttcgcggcgggcggaggtgggaatcgggttatcggtcggggatacgtcgttttcgcggggtcgcgagtttttcgggatcgagacggggattttttttattttttttgttcgggtaacggtcgagggtcgggcggtttcgcggtgtagacggatagtcgggcgggcggtcggaaggaggacgttttaggtttcggtagagttgggtcggagggcggagtcgtttcgggcgagtggttcgagggttcgcgtgtttggtgggcggtcggcggcgtgcgtatacgtttatgtgtatttgtgtttacgtacgtatcgcgttacggcgtcggtcgggtatcggggaggtggcggatttgcgggtacgttggcgcgcgtgtgaacgcgtagttttttggtgcgtttggtgtgtgattaacgcgtatatatgtggcgggtgtgtagatgtcgttcgtgttcggta

SEQ ID NO: 30956 - DNA, 1159 bp, Artificial Sequence
  chemically treated genomic DNA (Homo sapiens) CpG-island No: 30956
taccgaacacgaacgacatctacacacccgccacatatatacgcgttaatcacacaccaaacgcaccaaaaaactacgcgttcacacgcgcgccaacgtacccgcaaatccgccacctccccgatacccgaccgacgccgtaacgcgatacgtacgtaaacacaaatacacataaacgtatacgcacgccgccgaccgcccaccaaacacgcgaaccctcgaaccactcgcccgaaacgactccgccctccgacccaactctaccgaaacctaaaacgtcctccttccgaccgcccgcccgactatccgtctacaccgcgaaaccgcccgaccctcgaccgttacccgaacaaaaaaaataaaaaaaatccccgtctcgatcccgaaaaactcgcgaccccgcgaaaacgacgtatccccgaccgataacccgattcccacctccgcccgccgcgaacccttaaaatccgaacgccgaacaccgccgtcgaaaaaacgaatcgaatctacgacccgaaaaaaacgcacaaccgacacgcgtccacgccgtccgcccccgcccgacgaccacgcgaaacacactccgcccgtaaccccgaccctcgcccgactccgacgccgcgcacctcgaactaccaataaaccgcctacaacaattacttcgcctaatcgaccgcgcaacccgccgtcaacacgaactaattaatcataacctaatacttaaactcgtccatattcacgaacataacgccgccgcgctacccgctccgacctccctcctccgcccgcgcctccgcctcacgcgtccaccattaacgaaccgactccgactaatacaaatatttactatacgactctaactcaccgcgcctcgcctcgctccgccgacgccgcgacatactaaaatatataatccccacgatacgccgaacgccccgaaaaaacgaaaccgacaccctaaaaaacgcgaaacccgaaaaaaaacgtatctaaacaccgaacgcccgctatacgaatatccgaaccgtaacccgaaccgaacgcgtccacgtcgtcctcgttactctcgataacacccgtacccctactctaacacgaataaaaatccgctaacgaaaaccacgtctatacataaacgcaaatacctaaccacaaaatc

SEQ ID NO: 30957 - DNA, 925 bp, Artificial Sequence
  chemically treated genomic DNA (Homo sapiens) CpG-island No: 30957
tggcgttggcggagtaaggtttcggggtatttttggttcgtgtggtcgtgttaagggtgttattgcggatggacggggttatgcgggtcgggtcggttttttggggagaaacgggtgggcgtaaggggatcggcgttatcgagggtggagaaatcgtagggaatttcggttgttcgttttggggcgttaaggaagatgttcgtcgtttataatgttaattttgagttattacggtatcgattagtcgtttaggttttttcgtcggaggcggggtcgtcgtttagggtgtgcgattattgggtgacggttgacgcgtatcgtttttttttgtatatcgttcgtagtatttttcgacgacgtatcgcggcgttgcgaggggttcggtttcggggcgcgtcggcgattggcgggggaatcggattcgggggcgcggtcgttcgcggattggcgaggtacggcgggggcgggttcgcgtatgtttttaagtggtagcggcggggacggggttagtgttaagatgtcgacggcggcggtttcggagttgaagtagattagtcgggtggaggcgatgcgtttagggtcgggttggagttattcgtgttacgttatgttgtacgtcgttaattttgggtagtttttcggtcgtatttttatgcgtttttcggtgttggtgaggacgggcgagggcgcgggcgagggtgtcggcgcgggcgggttcgggcgggggcgttcgtcgatttcgcggttgtgattcgcgtttttttgtagatgtagatgcgtttcgacgggttgttgggttttttcgggggtttcgtggatcggcgtttttggtcgttggaggacggtttgaatcgggtgttgggtttgggtttgggttgtttgcgttttatcgaggtcgattatttgagttcgtatttgatcgagg

SEQ ID NO: 30958 - DNA, 925 bp, Artificial Sequence
  chemically treated genomic DNA (Homo sapiens) CpG-island No: 30958
cctcgatcaaatacgaactcaaataatcgacctcgataaaacgcaaacaacccaaacccaaacccaacacccgattcaaaccgtcctccaacgaccaaaaacgccgatccacgaaacccccgaaaaaacccaacaacccgtcgaaacgcatctacatctacaaaaaaacgcgaatcacaaccgcgaaatcgacgaacgcccccgcccgaacccgcccgcgccgacaccctcgcccgcgccctcgcccgtcctcaccaacaccgaaaaacgcataaaaatacgaccgaaaaactacccaaaattaacgacgtacaacataacgtaacacgaataactccaacccgaccctaaacgcatcgcctccacccgactaatctacttcaactccgaaaccgccgccgtcgacatcttaacactaaccccgtccccgccgctaccacttaaaaacatacgcgaacccgcccccgccgtacctcgccaatccgcgaacgaccgcgcccccgaatccgattcccccgccaatcgccgacgcgccccgaaaccgaacccctcgcaacgccgcgatacgtcgtcgaaaaatactacgaacgatatacaaaaaaaaacgatacgcgtcaaccgtcacccaataatcgcacaccctaaacgacgaccccgcctccgacgaaaaaacctaaacgactaatcgataccgtaataactcaaaattaacattataaacgacgaacatcttccttaacgccccaaaacgaacaaccgaaattccctacgatttctccaccctcgataacgccgatccccttacgcccacccgtttctccccaaaaaaccgacccgacccgcataaccccgtccatccgcaataacacccttaacacgaccacacgaaccaaaaataccccgaaaccttactccgccaacgcca

SEQ ID NO: 30959 - DNA, 925 bp, Artificial Sequence
  chemically treated genomic DNA (Homo sapiens) CpG-island No: 30959
tttcggttaggtgcgagtttaggtagtcggtttcggtgaggcgtaggtagtttaggtttaggtttagtattcggtttaggtcgttttttagcgattagaagcgtcggtttacgaagttttcggggaagtttagtagttcgtcgaaacgtatttgtatttgtaagggagcgcgggttatagtcgcggggtcgacggacgttttcgttcgggttcgttcgcgtcggtattttcgttcgcgttttcgttcgtttttattagtatcgagaagcgtatggggatgcggtcgaagagttgtttagggttggcggcgtatagtatggcgtggtacgagtggttttagttcggttttaggcgtatcgtttttattcggttgatttgttttagtttcggaatcgtcgtcgtcgatattttggtattgatttcgttttcgtcgttgttatttaagagtatgcgcgagttcgttttcgtcgtgtttcgttaattcgcgggcggtcgcgttttcgggttcggttttttcgttaatcgtcggcgcgtttcgggatcgagtttttcgtagcgtcgcggtgcgtcgtcgagaggtgttgcgggcggtgtgtaaaggagggcggtgcgcgttagtcgttatttaatagtcgtatattttgggcggcggtttcgttttcgacgggagagtttagacgattggtcggtgtcgtggtggtttaaggttgatattgtgggcgacgaatattttttttggcgttttaaagcggatagtcgaaattttttgcggtttttttattttcgatggcgtcgatttttttgcgtttattcgtttttttttaggaggtcgattcggttcgtatggtttcgtttattcgtaatggtatttttggtacgattatacgagttagagatgtttcggagttttgtttcgttagcgtta

SEQ ID NO: 30960 - DNA, 925 bp, Artificial Sequence
  chemically treated genomic DNA (Homo sapiens) CpG-island No: 30960
taacgctaacgaaacaaaactccgaaacatctctaactcgtataatcgtaccaaaaataccattacgaataaacgaaaccatacgaaccgaatcgacctcctaaaaaaaaacgaataaacgcaaaaaaatcgacgccatcgaaaataaaaaaaccgcaaaaaatttcgactatccgctttaaaacgccaaaaaaaatattcgtcgcccacaatatcaaccttaaaccaccacgacaccgaccaatcgtctaaactctcccgtcgaaaacgaaaccgccgcccaaaatatacgactattaaataacgactaacgcgcaccgccctcctttacacaccgcccgcaacacctctcgacgacgcaccgcgacgctacgaaaaactcgatcccgaaacgcgccgacgattaacgaaaaaaccgaacccgaaaacgcgaccgcccgcgaattaacgaaacacgacgaaaacgaactcgcgcatactcttaaataacaacgacgaaaacgaaatcaataccaaaatatcgacgacgacgattccgaaactaaaacaaatcaaccgaataaaaacgatacgcctaaaaccgaactaaaaccactcgtaccacgccatactatacgccgccaaccctaaacaactcttcgaccgcatccccatacgcttctcgatactaataaaaacgaacgaaaacgcgaacgaaaataccgacgcgaacgaacccgaacgaaaacgtccgtcgaccccgcgactataacccgcgctcccttacaaatacaaatacgtttcgacgaactactaaacttccccgaaaacttcgtaaaccgacgcttctaatcgctaaaaaacgacctaaaccgaatactaaacctaaacctaaactacctacgcctcaccgaaaccgactacctaaactcgcacctaaccgaaa

SEQ ID NO: 30961 - DNA, 573 bp, Artificial Sequence
  chemically treated genomic DNA (Homo sapiens) CpG-island No: 30961
gtggggtcgcgcgaaggttcggggtagtaacgaggttcggagggggtcgagtagggcgtttcgtttcgagttttcgttttcgcgttcgtcgggttcgcgttttagcgcgtgtttagtagttcgcgtttggggtcgggcgtttatcggatttcggagggtagcgataggtcgagttcgtttggatgtcgatgttttttattttcgcgatgcggcggttgagaatggagtttatggtgcgcggcgttgtcgggtagaggggttagggtcggaacgggagcggcgatagcggcggggtttttacgcggatatggttcggattaggtcgtacggacgttcgtttacggtcgcggaggcgtttcgagtttttattttcggttcggttcggggatcgacgttacggcggtttttcgtttttcggtttcggggtacgtcgggaaatggagttttttcgtcgtcgaaggcgtcgggaagtagcgcgggaagttcgtttgggaattattttttttaggatgtttcgtttttaggttttttgacgggttgataagtatttcgggataaattaaatggatttaa

SEQ ID NO: 30962 - DNA, 573 bp, Artificial Sequence
  chemically treated genomic DNA (Homo sapiens) CpG-island No: 30962
ttaaatccatttaatttatcccgaaatacttatcaacccgtcaaaaaacctaaaaacgaaacatcctaaaaaaaataattcccaaacgaacttcccgcgctacttcccgacgccttcgacgacgaaaaaactccatttcccgacgtaccccgaaaccgaaaaacgaaaaaccgccgtaacgtcgatccccgaaccgaaccgaaaataaaaactcgaaacgcctccgcgaccgtaaacgaacgtccgtacgacctaatccgaaccatatccgcgtaaaaaccccgccgctatcgccgctcccgttccgaccctaacccctctacccgacaacgccgcgcaccataaactccattctcaaccgccgcatcgcgaaaataaaaaacatcgacatccaaacgaactcgacctatcgctaccctccgaaatccgataaacgcccgaccccaaacgcgaactactaaacacgcgctaaaacgcgaacccgacgaacgcgaaaacgaaaactcgaaacgaaacgccctactcgaccccctccgaacctcgttactaccccgaaccttcgcgcgaccccac

SEQ ID NO: 30963 - DNA, 573 bp, Artificial Sequence
  chemically treated genomic DNA (Homo sapiens) CpG-island No: 30963
ttaggtttatttggtttgtttcggagtgtttgttaattcgttagagggtttgggaacggagtattttgggaaagatagtttttagacgggtttttcgcgttgtttttcggcgttttcggcggcgagaggattttatttttcgacgtgtttcgggatcgggaggcggagggtcgtcgtggcgtcggttttcgggtcgagtcgggggtgggggttcgaggcgttttcgcggtcgtggacgagcgttcgtgcggtttggttcgggttatgttcgcgtgaggatttcgtcgttgtcgtcgttttcgtttcggttttggtttttttgttcggtagcgtcgcgtattatgggttttatttttagtcgtcgtatcgcgggggtggaggatatcgatatttaggcgaattcggtttatcgttatttttcgaagttcggtgagcgttcggttttaggcgcggattgttaggtacgcgttggaacgcggattcggcgggcgcgggggcggggattcggggcggggcgttttgttcggtttttttcgggtttcgttgttatttcgagttttcgcgcggttttat

SEQ ID NO: 30964 - DNA, 573 bp, Artificial Sequence
  chemically treated genomic DNA (Homo sapiens) CpG-island No: 30964
ataaaaccgcgcgaaaactcgaaataacaacgaaacccgaaaaaaaccgaacaaaacgccccgccccgaatccccgcccccgcgcccgccgaatccgcgttccaacgcgtacctaacaatccgcgcctaaaaccgaacgctcaccgaacttcgaaaaataacgataaaccgaattcgcctaaatatcgatatcctccacccccgcgatacgacgactaaaaataaaacccataatacgcgacgctaccgaacaaaaaaaccaaaaccgaaacgaaaacgacgacaacgacgaaatcctcacgcgaacataacccgaaccaaaccgcacgaacgctcgtccacgaccgcgaaaacgcctcgaacccccacccccgactcgacccgaaaaccgacgccacgacgaccctccgcctcccgatcccgaaacacgtcgaaaaataaaatcctctcgccgccgaaaacgccgaaaaacaacgcgaaaaacccgtctaaaaactatctttcccaaaatactccgttcccaaaccctctaacgaattaacaaacactccgaaacaaaccaaataaacctaa

SEQ ID NO: 30965 - DNA, 727 bp, Artificial Sequence
  chemically treated genomic DNA (Homo sapiens) CpG-island No: 30965
gttgcgtttagttcgtgaatgtcggtatggatatgtttatggtgtcggacgattggaaggtttttatcgttagtattattaaataggtagaaagcggcgaaatttcgatggcgcgtatcgacgacgtcgtgattcgtatcgtgcgcgtgaagttgcgcgtcgggttgttcggtaagcggttttcgattaatgtttatgtcggtaaggacgcggtattgtaagatcgcgttttggcgcggcgcgtcgtacgttagtcgttggtgttgttgaagaacgagggtttaacgttgtcgttggtaaagggtaagaagattttggtggtcggtaagatcgtcgatagtatttcgaattagatcggcggttggtcgtttatttggtagggtacggttaatattaacgtcgatttttcgaacgtcgatagtattttggtcggaattcgcgaagcggtcggcgtcgcgtatgtggtttatagcgtcgatgcggtaggcgtgaacgtggtcgattacgacgcggtgatcgtcgtgatcggcgaaatttcgtatgtcgaaggcgacggcgatatcggttcgatcggtacgttgcgttatagcggtcgttatacggaagatttggtcgtgttgcgggcggttgtcggtaaggtttattttgggggtttcgtgttaatgtatcggtcggtcgtgttgtttaatatatattggtgtagtttttttattatattttgtcgtcg

SEQ ID NO: 30966 - DNA, 727 bp, Artificial Sequence
  chemically treated genomic DNA (Homo sapiens) CpG-island No: 30966
cgacgacaaaatataataaaaaaactacaccaatatatattaaacaacacgaccgaccgatacattaacacgaaacccccaaaataaaccttaccgacaaccgcccgcaacacgaccaaatcttccgtataacgaccgctataacgcaacgtaccgatcgaaccgatatcgccgtcgccttcgacatacgaaatttcgccgatcacgacgatcaccgcgtcgtaatcgaccacgttcacgcctaccgcatcgacgctataaaccacatacgcgacgccgaccgcttcgcgaattccgaccaaaatactatcgacgttcgaaaaatcgacgttaatattaaccgtaccctaccaaataaacgaccaaccgccgatctaattcgaaatactatcgacgatcttaccgaccaccaaaatcttcttaccctttaccaacgacaacgttaaaccctcgttcttcaacaacaccaacgactaacgtacgacgcgccgcgccaaaacgcgatcttacaataccgcgtccttaccgacataaacattaatcgaaaaccgcttaccgaacaacccgacgcgcaacttcacgcgcacgatacgaatcacgacgtcgtcgatacgcgccatcgaaatttcgccgctttctacctatttaataatactaacgataaaaaccttccaatcgtccgacaccataaacatatccataccgacattcacgaactaaacgcaac

SEQ ID NO: 30967 - DNA, 727 bp, Artificial Sequence
  chemically treated genomic DNA (Homo sapiens) CpG-island No: 30967
cggcgataaaatgtaatgaagaaattatattaatgtatattaaataatacggtcggtcggtatattaatacggggtttttaggataggttttgtcggtaatcgttcgtagtacggttaggtttttcgtatggcggtcgttgtggcgtagcgtgtcggtcgggtcgatgtcgtcgtcgttttcggtatacggggtttcgtcgattacggcgattatcgcgtcgtagtcggttacgtttacgtttgtcgtatcggcgttgtaggttatatgcgcggcgtcggtcgtttcgcggatttcggttaggatgttgtcggcgttcgggaagtcggcgttggtattggtcgtgttttgttaggtgagcgattagtcgtcggtttggttcgagatgttgtcggcggttttgtcgattattaggatttttttgttttttgttagcggtagcgttgggttttcgttttttagtagtattagcgattggcgtacggcgcgtcgcgttagggcgcggttttgtaatgtcgcgtttttgtcggtataggtattggtcgaaggtcgtttgtcgaatagttcggcgcgtagttttacgcgtacgatgcgggttacggcgtcgtcgatgcgcgttatcgggatttcgtcgttttttatttgtttggtggtgttggcgatgaaggttttttagtcgttcggtattatgaatatgtttatgtcggtatttacggattgggcgtagt

SEQ ID NO: 30968 - DNA, 727 bp, Artificial Sequence
  chemically treated genomic DNA (Homo sapiens) CpG-island No: 30968
actacgcccaatccgtaaataccgacataaacatattcataataccgaacgactaaaaaaccttcatcgccaacaccaccaaacaaataaaaaacgacgaaatcccgataacgcgcatcgacgacgccgtaacccgcatcgtacgcgtaaaactacgcgccgaactattcgacaaacgaccttcgaccaatacctataccgacaaaaacgcgacattacaaaaccgcgccctaacgcgacgcgccgtacgccaatcgctaatactactaaaaaacgaaaacccaacgctaccgctaacaaaaaacaaaaaaatcctaataatcgacaaaaccgccgacaacatctcgaaccaaaccgacgactaatcgctcacctaacaaaacacgaccaataccaacgccgacttcccgaacgccgacaacatcctaaccgaaatccgcgaaacgaccgacgccgcgcatataacctacaacgccgatacgacaaacgtaaacgtaaccgactacgacgcgataatcgccgtaatcgacgaaaccccgtataccgaaaacgacgacgacatcgacccgaccgacacgctacgccacaacgaccgccatacgaaaaacctaaccgtactacgaacgattaccgacaaaacctatcctaaaaaccccgtattaatataccgaccgaccgtattatttaatatacattaatataatttcttcattacattttatcgccg

SEQ ID NO: 30969 - DNA, 776 bp, Artificial Sequence
  chemically treated genomic DNA (Homo sapiens) CpG-island No: 30969
cggtttcgaacgtttttcgtcgtttcgttcggtcgtagtcggtttttcgtgtttttcgttcggcgtttattggtcgtcgtcgtttcgaggttgtttagcgtttttttttagtttttgttcggggggtagcgggttttgttcgtcgttttttcgttagaagggcggttagggttgggataggaatgaattttttgcgggttcggtatttttttttagtttggggcgtcggtagcgcggcgggtagtgttgggattcgtggcgttcgcgttttagttttcgtttcgggtcgttatttttcggcggggttcgcggggcgtaggttgttttgtcgttggggtttcggttcgtttgtattgtgacgtgggtagtagttggggcgggtagtgtttcggttttcgttcggggacgcggtgattttttttttttttttcgattgtcggagttcgtggtggtggtgttggggggcggggtcggcgtgggtagagttgcgggggttgtcgcggaggtcgttttaggagggagggggcggatcggggtgtgaggtgagcggtcgtaatgagtattcgtaggagtaaggggttcggcgcgggtttttagggcgggaggttttgacgcggggaggaggcggtcgggcggttaagggtttttttggggagtgtgcggaggtcgggacggagtagcgcgtaattagggagaggataggtcgggttggtggagatgcggggagagattagttaaagttaaagagttaaagtaaaggtgttgcggggaggata

SEQ ID NO: 30970 - DNA, 776 bp, Artificial Sequence
  chemically treated genomic DNA (Homo sapiens) CpG-island No: 30970
tatcctccccgcaacacctttactttaactctttaactttaactaatctctccccgcatctccaccaacccgacctatcctctccctaattacgcgctactccgtcccgacctccgcacactccccaaaaaaacccttaaccgcccgaccgcctcctccccgcgtcaaaacctcccgccctaaaaacccgcgccgaaccccttactcctacgaatactcattacgaccgctcacctcacaccccgatccgccccctccctcctaaaacgacctccgcgacaacccccgcaactctacccacgccgaccccgccccccaacaccaccaccacgaactccgacaatcgaaaaaaaaaaaaaaaatcaccgcgtccccgaacgaaaaccgaaacactacccgccccaactactacccacgtcacaatacaaacgaaccgaaaccccaacgacaaaacaacctacgccccgcgaaccccgccgaaaaataacgacccgaaacgaaaactaaaacgcgaacgccacgaatcccaacactacccgccgcgctaccgacgccccaaactaaaaaaaaataccgaacccgcaaaaaattcattcctatcccaaccctaaccgcccttctaacgaaaaaacgacgaacaaaacccgctaccccccgaacaaaaactaaaaaaaaacgctaaacaacctcgaaacgacgacgaccaataaacgccgaacgaaaaacacgaaaaaccgactacgaccgaacgaaacgacgaaaaacgttcgaaaccg

SEQ ID NO: 30971 - DNA, 776 bp, Artificial Sequence
  chemically treated genomic DNA (Homo sapiens) CpG-island No: 30971
tgtttttttcgtagtatttttgttttggttttttagttttggttggttttttttcgtatttttattagttcggtttattttttttttagttacgcgttgtttcgtttcggttttcgtatattttttagggaggtttttggtcgttcggtcgtttttttttcgcgttagggtttttcgttttggaggttcgcgtcgggttttttgtttttgcgagtgtttattacggtcgtttattttatatttcggttcgtttttttttttttagggcggttttcgcggtagttttcgtagttttgtttacgtcgatttcgttttttagtattattattacgggtttcggtagtcggaaaaaaaaaagaaaattatcgcgttttcgagcggagatcgaggtattgttcgttttagttgttgtttacgttatagtgtaggcggatcggagttttagcggtagagtagtttgcgtttcgcgggtttcgtcgaagagtagcggttcggggcgggggttggagcgcgggcgttacgagttttagtattgttcgtcgcgttgtcggcgttttaggttggaggaggatgtcggattcgtagggaatttatttttgttttagttttggtcgtttttttgacggaggagcggcgggtaaaattcgttgtttttcgagtagaagttgaggggagacgttaggtagtttcggggcgacggcggttagtgggcgtcgagcgaggagtacgaagaatcggttgcggtcgggcgaggcggcgggaagcgttcggagtcg

SEQ ID NO: 30972 - DNA, 776 bp, Artificial Sequence
  chemically treated genomic DNA (Homo sapiens) CpG-island No: 30972
cgactccgaacgcttcccgccgcctcgcccgaccgcaaccgattcttcgtactcctcgctcgacgcccactaaccgccgtcgccccgaaactacctaacgtctcccctcaacttctactcgaaaaacaacgaattttacccgccgctcctccgtcaaaaaaacgaccaaaactaaaacaaaaataaattccctacgaatccgacatcctcctccaacctaaaacgccgacaacgcgacgaacaatactaaaactcgtaacgcccgcgctccaacccccgccccgaaccgctactcttcgacgaaacccgcgaaacgcaaactactctaccgctaaaactccgatccgcctacactataacgtaaacaacaactaaaacgaacaatacctcgatctccgctcgaaaacgcgataattttcttttttttttccgactaccgaaacccgtaataataatactaaaaaacgaaatcgacgtaaacaaaactacgaaaactaccgcgaaaaccgccctaaaaaaaaaaaaacgaaccgaaatataaaataaacgaccgtaataaacactcgcaaaaacaaaaaacccgacgcgaacctccaaaacgaaaaaccctaacgcgaaaaaaaaacgaccgaacgaccaaaaacctccctaaaaaatatacgaaaaccgaaacgaaacaacgcgtaactaaaaaaaaaataaaccgaactaataaaaatacgaaaaaaaaccaaccaaaactaaaaaaccaaaacaaaaatactacgaaaaaaaca

SEQ ID NO: 30973 - DNA, 663 bp, Artificial Sequence
  chemically treated genomic DNA (Homo sapiens) CpG-island No: 30973
tttatttcgtttcggtcgaattttgtgttgggtattggttttttaaggagttgttacgatggcgtcgttggtttcgttcggcggggagggtcgagaggtacgggaggggttggtggtggttgcgggtaaggggaaagcggggggggttgggggggggggtttgggtttatttttagtttcgggtcgggttacgtgacgggagtgacgttttcgaatgttgttgttggtggcggcggcgagcggagtcggaggagtcgtcgttaaagatggaggagtcgtcgaggaggtgttgtcgtcgttgtcgtcgtcgttgttgtcgtcgtcgttcgcgaagtcggagttcgagtcgtagcgggtgagcgcgtcgtttcggtttagattttatttttttcggatttcgggacgcgaggcggcgttttttttttttgttgtttttgttcgcgggtttttagcgcgcgcgtcgcgtttcgcgtttttttttttttttttcggttttgggagttagtcggcgtttttcgggagtatcggtagttcgtgagcgggatatcggggttgttgcgcgcgtttttttttgttttttttagataggggcgttttttttataggtaagggaggggttcgttttttcgcgttttgcgtttttaaatggttcggagatcggtt

SEQ ID NO: 30974 - DNA, 663 bp, Artificial Sequence
  chemically treated genomic DNA (Homo sapiens) CpG-island No: 30974
aaccgatctccgaaccatttaaaaacgcaaaacgcgaaaaaacgaacccctcccttacctataaaaaaaacgcccctatctaaaaaaaacaaaaaaaaacgcgcgcaacaaccccgatatcccgctcacgaactaccgatactcccgaaaaacgccgactaactcccaaaaccgaaaaaaaaaaaaaaaaacgcgaaacgcgacgcgcgcgctaaaaacccgcgaacaaaaacaacaaaaaaaaaaaacgccgcctcgcgtcccgaaatccgaaaaaaataaaatctaaaccgaaacgacgcgctcacccgctacgactcgaactccgacttcgcgaacgacgacgacaacaacgacgacgacaacgacgacaacacctcctcgacgactcctccatctttaacgacgactcctccgactccgctcgccgccgccaccaacaacaacattcgaaaacgtcactcccgtcacgtaacccgacccgaaactaaaaataaacccaaacccccccccccaaccccccccgctttccccttacccgcaaccaccaccaacccctcccgtacctctcgaccctccccgccgaacgaaaccaacgacgccatcgtaacaactccttaaaaaaccaatacccaacacaaaattcgaccgaaacgaaataaa

SEQ ID NO: 30975 - DNA, 663 bp, Artificial Sequence
  chemically treated genomic DNA (Homo sapiens) CpG-island No: 30975
ggtcggttttcgagttatttgggggcgtagggcgcgagaaggcgggttttttttttatttgtagggaaggcgtttttgtttgggaggggtagggaggggcgcgcgtagtaatttcgatgtttcgtttacgggttgtcgatgttttcggggggcgtcggttggtttttagggtcgggaggaaggaaggggggcgcggagcgcggcgcgcgcgttgggagttcgcggatagagatagtaggaggagggggcgtcgtttcgcgtttcggggttcggggaagatgggatttgggtcggggcggcgcgtttattcgttgcggttcgagtttcggtttcgcgggcggcggcggtagtagcggcggcggtagcggcggtagtattttttcgacggtttttttatttttggcggcggttttttcggtttcgttcgtcgtcgttattaataataatattcggagacgttattttcgttacgtgattcgattcggagttaaaaatagatttagatttttttttttagtttttttcgttttttttttgttcgtagttattattaatttttttcgtgtttttcggtttttttcgtcgggcggggttagcgacgttatcgtgatagttttttaaagggttagtgtttagtatagggttcggtcgagacggggtgga

SEQ ID NO: 30976 - DNA, 663 bp, Artificial Sequence
  chemically treated genomic DNA (Homo sapiens) CpG-island No: 30976
tccaccccgtctcgaccgaaccctatactaaacactaaccctttaaaaaactatcacgataacgtcgctaaccccgcccgacgaaaaaaaccgaaaaacacgaaaaaaattaataataactacgaacaaaaaaaaaacgaaaaaaactaaaaaaaaaaatctaaatctatttttaactccgaatcgaatcacgtaacgaaaataacgtctccgaatattattattaataacgacgacgaacgaaaccgaaaaaaccgccgccaaaaataaaaaaaccgtcgaaaaaatactaccgccgctaccgccgccgctactaccgccgccgcccgcgaaaccgaaactcgaaccgcaacgaataaacgcgccgccccgacccaaatcccatcttccccgaaccccgaaacgcgaaacgacgccccctcctcctactatctctatccgcgaactcccaacgcgcgcgccgcgctccgcgccccccttccttcctcccgaccctaaaaaccaaccgacgccccccgaaaacatcgacaacccgtaaacgaaacatcgaaattactacgcgcgcccctccctacccctcccaaacaaaaacgccttccctacaaataaaaaaaaaacccgccttctcgcgccctacgcccccaaataactcgaaaaccgacc

SEQ ID NO: 30977 - DNA, 620 bp, Artificial Sequence
  chemically treated genomic DNA (Homo sapiens) CpG-island No: 30977
gacgtcgattagggagttggcggtgaagcgtcgggtttcgcgttgggatcgtcggtcggcgagttggtgcgaatcgaggttaggaacgcgcgttttagttatcggtttttttattttcgcgtgtagaatagttgcgggtgttagtttcggtcgttcggtttaggttcggtagcggttttttgcgttattaggatattttttattttatcgtggcggtattcgtagatcgaagtatatttgattttttttattgatgtcgatgaaggtcgggacgtttatggtgtaggttcgggtatagcggatattttattcgtaagattacgtcgatcggaaaagggaattgggtcgcgcgacgttgttggcgtaattgttttcgggttattttgagcggcgatttgttggggcggggttttgagagttaattttatcgcgcgttttcgtcgcggaatgtagtagggcgtggtagacgcgttcgggttggtttagtgggtgggatttattgggtttttatttagcgacgtttgtcgcggtttttagtttttaggttcgtgtagttaattgtattgatgttgtttttcgttggcgtttttttaagtttatttttttttgaaatgttaagt

SEQ ID NO: 30978 - DNA, 620 bp, Artificial Sequence
  chemically treated genomic DNA (Homo sapiens) CpG-island No: 30978
acttaacatttcaaaaaaaaataaacttaaaaaaacgccaacgaaaaacaacatcaatacaattaactacacgaacctaaaaactaaaaaccgcgacaaacgtcgctaaataaaaacccaataaatcccacccactaaaccaacccgaacgcgtctaccacgccctactacattccgcgacgaaaacgcgcgataaaattaactctcaaaaccccgccccaacaaatcgccgctcaaaataacccgaaaacaattacgccaacaacgtcgcgcgacccaattcccttttccgatcgacgtaatcttacgaataaaatatccgctatacccgaacctacaccataaacgtcccgaccttcatcgacatcaataaaaaaaatcaaatatacttcgatctacgaataccgccacgataaaataaaaaatatcctaataacgcaaaaaaccgctaccgaacctaaaccgaacgaccgaaactaacacccgcaactattctacacgcgaaaataaaaaaaccgataactaaaacgcgcgttcctaacctcgattcgcaccaactcgccgaccgacgatcccaacgcgaaacccgacgcttcaccgccaactccctaatcgacgtc

SEQ ID NO: 30979 - DNA, 620 bp, Artificial Sequence
  chemically treated genomic DNA (Homo sapiens) CpG-island No: 30979
gtttaatattttaagggaaggtggatttagggaggcgttagcgggaggtaatattaatgtagttagttatacgggtttgaaaattggaggtcgcgataagcgtcgttgagtggaggtttagtaagttttatttattaggttagttcgagcgcgtttgttacgttttgttgtatttcgcggcgagagcgcgcgataggattggtttttaaggtttcgttttaataggtcgtcgtttagggtgattcggaagtagttgcgttagtagcgtcgcgcggtttagttttttttttcggtcggcgtggttttgcgagtggagtgttcgttgtgttcgggtttgtattatgagcgtttcggtttttatcgatattagtgaagaagattaggtgtgtttcggtttacgggtgtcgttacggtggggtgggggatgttttagtagcgtaagggatcgttgtcgagtttgggtcgggcggtcggggttgatattcgtagttgttttatacgcgagaatggggaggtcggtggttggggcgcgcgtttttggtttcgattcgtattagttcgtcggtcggcggttttagcgcggggttcgacgttttatcgttagttttttggtcggcgtt

SEQ ID NO: 30980 - DNA, 620 bp, Artificial Sequence
  chemically treated genomic DNA (Homo sapiens) CpG-island No: 30980
aacgccgaccaaaaaactaacgataaaacgtcgaaccccgcgctaaaaccgccgaccgacgaactaatacgaatcgaaaccaaaaacgcgcgccccaaccaccgacctccccattctcgcgtataaaacaactacgaatatcaaccccgaccgcccgacccaaactcgacaacgatcccttacgctactaaaacatcccccaccccaccgtaacgacacccgtaaaccgaaacacacctaatcttcttcactaatatcgataaaaaccgaaacgctcataatacaaacccgaacacaacgaacactccactcgcaaaaccacgccgaccgaaaaaaaaaactaaaccgcgcgacgctactaacgcaactacttccgaatcaccctaaacgacgacctattaaaacgaaaccttaaaaaccaatcctatcgcgcgctctcgccgcgaaatacaacaaaacgtaacaaacgcgctcgaactaacctaataaataaaacttactaaacctccactcaacgacgcttatcgcgacctccaattttcaaacccgtataactaactacattaatattacctcccgctaacgcctccctaaatccaccttcccttaaaatattaaac

SEQ ID NO: 30981 - DNA, 696 bp, Artificial Sequence
  chemically treated genomic DNA (Homo sapiens) CpG-island No: 30981
taatgcgcggcgcgagcgtcggtcgcgattcgttttttttcgcgagagttcggcggggatataagggggagttgcgggttaggcggcggttttttagcgtcgcgtagggtcggggattgcgcggcggtgttaggtcgggcgtgggcgagagtacgaacgggttgtttgcgggttgagagcgtcgagttgttattatgggtgattacgtttggagttttttaaaggattttttggtcgggggcgtcgtcgttgtcgtttttaagatcgcggtcgtttttatcgagagggttaaattgttgttgtaggtgaggatcgcgcggtgtaagaggcgggcgcgggcgcggcgggtcgggcggggcgcgcgatgcggcgcgagttgtagggcgcggggcgtcgcggaaaatttgcgttaggttttagggtcgggcgttcgttcgttcgttcgtttttcgttcgcgggggaagaaggtgttttttgcgtagagataggtttagcgttagtcgtagatttttggtgtcgggtggcgttcggcgttcgggtgtttatatatggaaatttattcggagtcggtttacgtgtgttagattttgcgttcgtgatagtacgggcgtgtatttaggttcggaggtatttagtgattgttagtatttttggtatcgttttatgcgtacgtatttttataataaaaatattaa

SEQ ID NO: 30982 - DNA, 696 bp, Artificial Sequence
  chemically treated genomic DNA (Homo sapiens) CpG-island No: 30982
ttaatatttttattataaaaatacgtacgcataaaacgataccaaaaatactaacaatcactaaatacctccgaacctaaatacacgcccgtactatcacgaacgcaaaatctaacacacgtaaaccgactccgaataaatttccatatataaacacccgaacgccgaacgccacccgacaccaaaaatctacgactaacgctaaacctatctctacgcaaaaaacaccttcttcccccgcgaacgaaaaacgaacgaacgaacgaacgcccgaccctaaaacctaacgcaaattttccgcgacgccccgcgccctacaactcgcgccgcatcgcgcgccccgcccgacccgccgcgcccgcgcccgcctcttacaccgcgcgatcctcacctacaacaacaatttaaccctctcgataaaaacgaccgcgatcttaaaaacgacaacgacgacgcccccgaccaaaaaatcctttaaaaaactccaaacgtaatcacccataataacaactcgacgctctcaacccgcaaacaacccgttcgtactctcgcccacgcccgacctaacaccgccgcgcaatccccgaccctacgcgacgctaaaaaaccgccgcctaacccgcaactcccccttatatccccgccgaactctcgcgaaaaaaaacgaatcgcgaccgacgctcgcgccgcgcatta

SEQ ID NO: 30983 - DNA, 696 bp, Artificial Sequence
  chemically treated genomic DNA (Homo sapiens) CpG-island No: 30983
ttgatgtttttattgtaaaggtgcgtgcgtataagacggtgttaaaaatattggtaattattaggtgttttcgggtttgagtgtacgttcgtgttgttacgggcgtaggatttggtatacgtaaatcggtttcgggtgggtttttatatatagatattcgaacgtcgggcgttattcgatattaggaatttgcgattgacgttggatttgtttttacgtagagggtatttttttttttcgcgggcggggggcgggcgggcgggcgggcgttcggttttggggtttggcgtagatttttcgcggcgtttcgcgttttgtagttcgcgtcgtatcgcgcgtttcgttcggttcgtcgcgttcgcgttcgttttttgtatcgcgcggtttttatttgtagtagtagtttgattttttcgatgggggcgatcgcggttttggagacggtagcggcgacgttttcggttaggaagttttttaggaagttttaagcgtgattatttatggtgatagttcgacgtttttagttcgtaggtagttcgttcgtgttttcgtttacgttcggtttggtatcgtcgcgtagttttcgattttgcgcgacgttagggggtcgtcgtttggttcgtagtttttttttatattttcgtcgggttttcgcgagaggaggcgggtcgcggtcggcgttcgcgtcgcgtattg

SEQ ID NO: 30984 - DNA, 696 bp, Artificial Sequence
  chemically treated genomic DNA (Homo sapiens) CpG-island No: 30984
caatacgcgacgcgaacgccgaccgcgacccgcctcctctcgcgaaaacccgacgaaaatataaaaaaaaactacgaaccaaacgacgaccccctaacgtcgcgcaaaatcgaaaactacgcgacgataccaaaccgaacgtaaacgaaaacacgaacgaactacctacgaactaaaaacgtcgaactatcaccataaataatcacgcttaaaacttcctaaaaaacttcctaaccgaaaacgtcgccgctaccgtctccaaaaccgcgatcgcccccatcgaaaaaatcaaactactactacaaataaaaaccgcgcgatacaaaaaacgaacgcgaacgcgacgaaccgaacgaaacgcgcgatacgacgcgaactacaaaacgcgaaacgccgcgaaaaatctacgccaaaccccaaaaccgaacgcccgcccgcccgcccgccccccgcccgcgaaaaaaaaaaataccctctacgtaaaaacaaatccaacgtcaatcgcaaattcctaatatcgaataacgcccgacgttcgaatatctatatataaaaacccacccgaaaccgatttacgtataccaaatcctacgcccgtaacaacacgaacgtacactcaaacccgaaaacacctaataattaccaatatttttaacaccgtcttatacgcacgcacctttacaataaaaacatcaa

SEQ ID NO: 30985 - DNA, 581 bp, Artificial Sequence
  chemically treated genomic DNA (Homo sapiens) CpG-island No: 30985
atcggtcgtagtatttagttttcggtatcgcggtgaggatcgcgttcgcgttacgcgcgtcgaaaggatttcgcgagtttttgtaggtaacgggttcggtgtagttcggagtttagattaggtagttgttgagttatgttcgggcgagatcggtgttttttagggtgggaggtttagaaatttaggcgcgcgagtttttgggtagtggtaagggcgggttgggagtcgggttcggcgagtttaaaggaggttttcgggttgtagaggtttcggtaggttgttttcgttttacgagtttttttttttgcggttttttggattgcggcgacgaagcgtcggggttggggttttagtcgtttggggatgcgttgcgcgtttagggcggtttcggggttttgaggcgggattgagggtgcgggagggcggaagggggcgcggacgtttcggaatttacggttcgggttgaattagggtttggaagattttcgggaaagtacgggcgttttgtgttcgggatgtgtgttgcgggtcggattgggggttaggttgagaagggggtattaagatttattttattttat

SEQ ID NO: 30986 - DNA, 581 bp, Artificial Sequence
  chemically treated genomic DNA (Homo sapiens) CpG-island No: 30986
ataaaataaaataaatcttaatacccccttctcaacctaacccccaatccgacccgcaacacacatcccgaacacaaaacgcccgtactttcccgaaaatcttccaaaccctaattcaacccgaaccgtaaattccgaaacgtccgcgcccccttccgccctcccgcaccctcaatcccgcctcaaaaccccgaaaccgccctaaacgcgcaacgcatccccaaacgactaaaaccccaaccccgacgcttcgtcgccgcaatccaaaaaaccgcaaaaaaaaaaactcgtaaaacgaaaacaacctaccgaaacctctacaacccgaaaacctcctttaaactcgccgaacccgactcccaacccgcccttaccactacccaaaaactcgcgcgcctaaatttctaaacctcccaccctaaaaaacaccgatctcgcccgaacataactcaacaactacctaatctaaactccgaactacaccgaacccgttacctacaaaaactcgcgaaatcctttcgacgcgcgtaacgcgaacgcgatcctcaccgcgataccgaaaactaaatactacgaccgat

SEQ ID NO: 30987 - DNA, 581 bp, Artificial Sequence
  chemically treated genomic DNA (Homo sapiens) CpG-island No: 30987
ataaaataaagtaaattttagtgttttttttttaatttaatttttagttcgattcgtagtatatatttcggatatagaacgttcgtattttttcgagggttttttaagttttggtttagttcggatcgtgagtttcggagcgttcgcgttttttttcgttttttcgtatttttagtttcgttttagggtttcgaagtcgttttgggcgcgtagcgtatttttaggcgattggagttttagtttcgacgtttcgtcgtcgtagtttaggagatcgtaggagaaggggttcgtggggcggagatagtttgtcggggtttttgtagttcgggagttttttttggattcgtcgaattcgatttttaattcgtttttattattgtttagaggttcgcgcgtttgggtttttgagttttttattttgaaggatatcgatttcgttcggatataatttagtaattgtttggtttgggtttcggattgtatcgagttcgttatttgtaggagttcgcggagttttttcggcgcgcgtggcgcgggcgcggtttttatcgcggtgtcgggaattgagtgttgcggtcggt

SEQ ID NO: 30988 - DNA, 581 bp, Artificial Sequence
  chemically treated genomic DNA (Homo sapiens) CpG-island No: 30988
accgaccgcaacactcaattcccgacaccgcgataaaaaccgcgcccgcgccacgcgcgccgaaaaaactccgcgaactcctacaaataacgaactcgatacaatccgaaacccaaaccaaacaattactaaattatatccgaacgaaatcgatatccttcaaaataaaaaactcaaaaacccaaacgcgcgaacctctaaacaataataaaaacgaattaaaaatcgaattcgacgaatccaaaaaaaactcccgaactacaaaaaccccgacaaactatctccgccccacgaaccccttctcctacgatctcctaaactacgacgacgaaacgtcgaaactaaaactccaatcgcctaaaaatacgctacgcgcccaaaacgacttcgaaaccctaaaacgaaactaaaaatacgaaaaaacgaaaaaaaacgcgaacgctccgaaactcacgatccgaactaaaccaaaacttaaaaaaccctcgaaaaaatacgaacgttctatatccgaaatatatactacgaatcgaactaaaaattaaattaaaaaaaaaacactaaaatttactttattttat

SEQ ID NO: 30989 - DNA, 1520 bp, Artificial Sequence
  chemically treated genomic DNA (Homo sapiens) CpG-island No: 30989
cgcgggatgggcgcgcggttggtgtttgggttgttgtttttttttgtcgttttcgtttagtttggcggtcgttaagtagttttttcggtatcggttggtcgaggagggtttcgtcgacgttcgtatcggtaacgtggttttagatttgggtatcgtgatcggatcgggtgaggtgatttttagtttggagttcggtttcgagtatttgaagatcgataattttattggcgagttgagtacgagcgagcggcgtatcgatcgcgagaagttgttttagtgttagatgattttcgacgagaacgagtgttttttggatttcgaggtgtcggtgatcgggttttcgtagagttgggtggatttgtttgagggttaggttatcgtgtttgatattaacgataatacgtttattttttcgtcgttcgtgtttacgtttacggtggaggagaatcggtcggtgggtatattttatttgttgtttatagttatcgatcgcgatttcggtcgtaacggtatcgagcgttacgagttgttttaggagttcggaggcggcggtagcggcggcgagagtcggcgcgtcggggcggtcgatagcgtttttttatttcgggggcggcgggaacggcgcgagcggcggcggttcgggaggttttaagcggcggttggacgtattagagggcggcggcggtattaatttcggcggtcgtagtagcgtgttcgagttgtaggtggcggatatttcggacggcgagaagtagtcgtagttgatcgtgaagggggcgttggatcgcgagtagcgcgatttttacgagttgattttgcgagtgcgcgacggcggcgattcgtttcgtttttcgtaggttattttacgggtttttattatcgacgtgaacgataatagttttcgtttcgagaagagcgtgtacgaggtcgatttggttgagaatagcgtttcggggatttttattttgtaattgcgcgtagtcgatttggacgtgggggttaacgggtagatcgaatacgtgttcggggcggttatcgagtcggtgaggcggttgttgcgttttgacgagacgttcggttggtttagcgttttgtatcggatcgatcgcgaggaggtgaattagttgcgttttacggttatggttcgcgatcgcgggtagttttttaagatcgataaggttatcgtggtttttaatattaaagacgagaacgataacgtgtcgtttattgaaattcgtaagattgggcgtattttttttaaggacggggtggttaacgtggtcgaggacgttttggtcgatatttttatcgttttggtgtaggtgttcgatcgagattaaggcgagaacggggtggttatttgtatcgtggtgggcgacgtgtttttttagtttaagttagttagcgatatcgagggcgattagaataagaaaaagtattttttgtatatttcgatttttttggattatgaggttattcgggagtttaacgtggttatcgtggcggtggatttaggtagt

SEQ ID NO: 30990 - DNA, 1520 bp, Artificial Sequence
  chemically treated genomic DNA (Homo sapiens) CpG-island No: 30990
actacctaaatccaccgccacgataaccacgttaaactcccgaataacctcataatccaaaaaaatcgaaatatacaaaaaatactttttcttattctaatcgccctcgatatcgctaactaacttaaactaaaaaaacacgtcgcccaccacgatacaaataaccaccccgttctcgccttaatctcgatcgaacacctacaccaaaacgataaaaatatcgaccaaaacgtcctcgaccacgttaaccaccccgtccttaaaaaaaatacgcccaatcttacgaatttcaataaacgacacgttatcgttctcgtctttaatattaaaaaccacgataaccttatcgatcttaaaaaactacccgcgatcgcgaaccataaccgtaaaacgcaactaattcacctcctcgcgatcgatccgatacaaaacgctaaaccaaccgaacgtctcgtcaaaacgcaacaaccgcctcaccgactcgataaccgccccgaacacgtattcgatctacccgttaacccccacgtccaaatcgactacgcgcaattacaaaataaaaatccccgaaacgctattctcaaccaaatcgacctcgtacacgctcttctcgaaacgaaaactattatcgttcacgtcgataataaaaacccgtaaaataacctacgaaaaacgaaacgaatcgccgccgtcgcgcactcgcaaaatcaactcgtaaaaatcgcgctactcgcgatccaacgcccccttcacgatcaactacgactacttctcgccgtccgaaatatccgccacctacaactcgaacacgctactacgaccgccgaaattaataccgccgccgccctctaatacgtccaaccgccgcttaaaacctcccgaaccgccgccgctcgcgccgttcccgccgcccccgaaataaaaaaacgctatcgaccgccccgacgcgccgactctcgccgccgctaccgccgcctccgaactcctaaaacaactcgtaacgctcgataccgttacgaccgaaatcgcgatcgataactataaacaacaaataaaatatacccaccgaccgattctcctccaccgtaaacgtaaacacgaacgacgaaaaaataaacgtattatcgttaatatcaaacacgataacctaaccctcaaacaaatccacccaactctacgaaaacccgatcaccgacacctcgaaatccaaaaaacactcgttctcgtcgaaaatcatctaacactaaaacaacttctcgcgatcgatacgccgctcgctcgtactcaactcgccaataaaattatcgatcttcaaatactcgaaaccgaactccaaactaaaaatcacctcacccgatccgatcacgatacccaaatctaaaaccacgttaccgatacgaacgtcgacgaaaccctcctcgaccaaccgataccgaaaaaactacttaacgaccgccaaactaaacgaaaacgacaaaaaaaaacaacaacccaaacaccaaccgcgcgcccatcccgcg

SEQ ID NO: 30991 - DNA, 1520 bp, Artificial Sequence
  chemically treated genomic DNA (Homo sapiens) CpG-island No: 30991
gttgtttgagtttatcgttacgatgattacgttgaattttcgggtggttttatagtttagaggggtcgaggtgtgtaagaagtatttttttttgttttggtcgttttcggtgtcgttggttggtttgagttggaagggtacgtcgtttattacggtgtaggtgattatttcgttttcgttttggtttcggtcggatatttgtattagagcgatgggggtgtcgattagaacgttttcggttacgttggttatttcgtttttgagggggatgcgtttaattttgcggattttaatggacggtacgttgtcgttttcgtttttgatgttaaggattacggtggttttgtcggttttggggggttgttcgcggtcgcgggttatgatcgtgaagcgtagttggtttattttttcgcggtcgattcggtgtaggacgttgagttagtcggacgtttcgttaaggcgtagtagtcgttttatcgattcggtggtcgtttcgaatacgtattcgatttgttcgttgatttttacgtttaagtcggttgcgcgtagttgtaggatgggggttttcggggcgttgtttttagttaagtcggtttcgtatacgtttttttcgaagcgggggttgttgtcgtttacgtcggtgatgaggattcgtaggatggtttgcgaggagcgaggcgggtcgtcgtcgtcgcgtattcgtagggttagttcgtaggagtcgcgttgttcgcggtttagcgttttttttacgattagttgcggttgtttttcgtcgttcggggtgttcgttatttgtagttcgaatacgttgttgcggtcgtcggggttggtgtcgtcgtcgttttttgatgcgtttagtcgtcgtttggagtttttcgagtcgtcgtcgttcgcgtcgttttcgtcgttttcggggtaggggggcgttgtcggtcgtttcggcgcgtcggttttcgtcgtcgttgtcgtcgttttcgggtttttggagtagttcgtagcgttcgatgtcgttgcggtcgaagtcgcggtcggtggttgtgggtagtaggtaaagtgtgtttatcggtcgatttttttttatcgtgagcgtgagtacgggcgacgggaaggtgggcgtgttgtcgttgatgttaagtacgatgatttgatttttaaataggtttatttagttttgcgagggttcgattatcgatatttcgaagtttaggaagtattcgttttcgtcgaagattatttgatattggggtagtttttcgcggtcgatgcgtcgttcgttcgtgtttagttcgttagtgaggttgtcgatttttaggtattcggaatcggattttaggttgaaagttattttattcgattcggttacgatgtttaggtttgaagttacgttgtcgatgcggacgtcggcggggtttttttcggttagtcggtatcggaggagttgtttggcggtcgttaggttgagcgagagcggtaggaggaggtagtagtttaagtattagtcgcgcgtttatttcgcg

SEQ ID NO: 30992 - DNA, 1520 bp, Artificial Sequence
  chemically treated genomic DNA (Homo sapiens) CpG-island No: 30992
cgcgaaataaacgcgcgactaatacttaaactactacctcctcctaccgctctcgctcaacctaacgaccgccaaacaactcctccgataccgactaaccgaaaaaaaccccgccgacgtccgcatcgacaacgtaacttcaaacctaaacatcgtaaccgaatcgaataaaataactttcaacctaaaatccgattccgaatacctaaaaatcgacaacctcactaacgaactaaacacgaacgaacgacgcatcgaccgcgaaaaactaccccaatatcaaataatcttcgacgaaaacgaatacttcctaaacttcgaaatatcgataatcgaaccctcgcaaaactaaataaacctatttaaaaatcaaatcatcgtacttaacatcaacgacaacacgcccaccttcccgtcgcccgtactcacgctcacgataaaaaaaaatcgaccgataaacacactttacctactacccacaaccaccgaccgcgacttcgaccgcaacgacatcgaacgctacgaactactccaaaaacccgaaaacgacgacaacgacgacgaaaaccgacgcgccgaaacgaccgacaacgcccccctaccccgaaaacgacgaaaacgacgcgaacgacgacgactcgaaaaactccaaacgacgactaaacgcatcaaaaaacgacgacgacaccaaccccgacgaccgcaacaacgtattcgaactacaaataacgaacaccccgaacgacgaaaaacaaccgcaactaatcgtaaaaaaaacgctaaaccgcgaacaacgcgactcctacgaactaaccctacgaatacgcgacgacgacgacccgcctcgctcctcgcaaaccatcctacgaatcctcatcaccgacgtaaacgacaacaacccccgcttcgaaaaaaacgtatacgaaaccgacttaactaaaaacaacgccccgaaaacccccatcctacaactacgcgcaaccgacttaaacgtaaaaatcaacgaacaaatcgaatacgtattcgaaacgaccaccgaatcgataaaacgactactacgccttaacgaaacgtccgactaactcaacgtcctacaccgaatcgaccgcgaaaaaataaaccaactacgcttcacgatcataacccgcgaccgcgaacaaccccccaaaaccgacaaaaccaccgtaatccttaacatcaaaaacgaaaacgacaacgtaccgtccattaaaatccgcaaaattaaacgcatccccctcaaaaacgaaataaccaacgtaaccgaaaacgttctaatcgacacccccatcgctctaatacaaatatccgaccgaaaccaaaacgaaaacgaaataatcacctacaccgtaataaacgacgtacccttccaactcaaaccaaccaacgacaccgaaaacgaccaaaacaaaaaaaaatacttcttacacacctcgacccctctaaactataaaaccacccgaaaattcaacgtaatcatcgtaacgataaactcaaacaac

SEQ ID NO: 30993 - DNA, 874 bp, Artificial Sequence
  chemically treated genomic DNA (Homo sapiens) CpG-island No: 30993
tgtttcggaacggtttacggtcgtttaagaaggtcgatttttgtcggtttttttgttaggggaggagaaattttagattttatagcgaacgttttaggttcgttgaaacgagtttttttgtttttacgaaatttcgttttaggggtttggcgcggtgggttttttatcgtgttagtttcgtgggcgtttttcggttgttcgtttcgtttcgtgtttcggtgttcgtcgcgtgtttatttagtcgttttgagtttgtagttaggcgcggtgttgttttatgagtcgcgagtttagtaaggttattaggcgttggtagtttcgggcgacgtcgtttttttgtttttttagtcgcggttggaagttttattttttttatcgggcggttattagcggttttttttttagtagcgtttttgcgaaggttacgagcgttattattttgttttaggtggggtcggggttgtcggagagtacggaattcgttattagcgttattagttcgaagcggttttcggggtagtcgaggtaggcggagaaaaaggatcggtgaatttgtcgtaatttggcggtcgcggagcgtagtacggcggtttcgggcgtggatggcgtcggttcgggggtgtcgggttttcgggcgtagtattttaggtagtcggttagtaatagttcggtgcgttttcgtagcgggtcggttatggtggtgcgttttcgtaattggttaattatggttcggtttttgttggggggtcgggttttcgttggtttttttggttcggtcgcgttttttttagggtagggttgtcgtgtttcgtttcggttttcggttttcggttttcggtatattgttttttaggattgagagaagagtttttga

SEQ ID NO: 30994 - DNA, 874 bp, Artificial Sequence
  chemically treated genomic DNA (Homo sapiens) CpG-island No: 30994
tcaaaaactcttctctcaatcctaaaaaacaatataccgaaaaccgaaaaccgaaaaccgaaacgaaacacgacaaccctaccctaaaaaaaacgcgaccgaaccaaaaaaaccaacgaaaacccgaccccccaacaaaaaccgaaccataattaaccaattacgaaaacgcaccaccataaccgacccgctacgaaaacgcaccgaactattactaaccgactacctaaaatactacgcccgaaaacccgacacccccgaaccgacgccatccacgcccgaaaccgccgtactacgctccgcgaccgccaaattacgacaaattcaccgatcctttttctccgcctacctcgactaccccgaaaaccgcttcgaactaataacgctaataacgaattccgtactctccgacaaccccgaccccacctaaaacaaaataataacgctcgtaaccttcgcaaaaacgctactaaaaaaaaaaccgctaataaccgcccgataaaaaaaataaaacttccaaccgcgactaaaaaaacaaaaaaacgacgtcgcccgaaactaccaacgcctaataaccttactaaactcgcgactcataaaacaacaccgcgcctaactacaaactcaaaacgactaaataaacacgcgacgaacaccgaaacacgaaacgaaacgaacaaccgaaaaacgcccacgaaactaacacgataaaaaacccaccgcgccaaacccctaaaacgaaatttcgtaaaaacaaaaaaactcgtttcaacgaacctaaaacgttcgctataaaatctaaaatttctcctcccctaacaaaaaaaccgacaaaaatcgaccttcttaaacgaccgtaaaccgttccgaaaca

SEQ ID NO: 30995 - DNA, 874 bp, Artificial Sequence
  chemically treated genomic DNA (Homo sapiens) CpG-island No: 30995
ttaaaggttttttttttagttttgaaaaataatatatcgggggtcgggggtcgggggtcggggcggggtacggtagttttattttgggggaggcgcggtcgggttaagaaaattagcgaaggttcggttttttagtagaggtcggattatggttgattagttgcgggagcgtattattatggtcgattcgttgcgggagcgtatcgagttgttgttggtcgattatttggggtattgcgttcgggaattcggtattttcgagtcggcgttatttacgttcgaggtcgtcgtgttgcgtttcgcggtcgttaggttacggtagatttatcggtttttttttttcgtttatttcggttatttcgggaatcgtttcgagttggtggcgttgatggcggatttcgtgtttttcgatagtttcggttttatttggggtagagtggtgacgttcgtgattttcgtagggacgttgttggagagagggtcgttggtgatcgttcggtggaagaagtggggtttttagtcgcggttaaaggagtaggagggcgacgtcgttcgggattgttagcgtttggtggttttgttgagttcgcggtttatggggtagtatcgcgtttggttgtaggtttagggcggttgggtgagtacgcggcggatatcgggatacggggcgggacgggtagtcgggaagcgtttacgaggttggtacggtgaggaatttatcgcgttaggtttttggaacgaggtttcgtgaaagtagaaaggttcgttttagcgggtttggaacgttcgttgtgaagtttggggtttttttttttttggtagaaaggtcggtagaaatcggtttttttagacggtcgtgaatcgtttcgaagta

SEQ ID NO: 30996 - DNA, 874 bp, Artificial Sequence
  chemically treated genomic DNA (Homo sapiens) CpG-island No: 30996
tacttcgaaacgattcacgaccgtctaaaaaaaccgatttctaccgacctttctaccaaaaaaaaaaaaaccccaaacttcacaacgaacgttccaaacccgctaaaacgaacctttctactttcacgaaacctcgttccaaaaacctaacgcgataaattcctcaccgtaccaacctcgtaaacgcttcccgactacccgtcccgccccgtatcccgatatccgccgcgtactcacccaaccgccctaaacctacaaccaaacgcgatactaccccataaaccgcgaactcaacaaaaccaccaaacgctaacaatcccgaacgacgtcgccctcctactcctttaaccgcgactaaaaaccccacttcttccaccgaacgatcaccaacgaccctctctccaacaacgtccctacgaaaatcacgaacgtcaccactctaccccaaataaaaccgaaactatcgaaaaacacgaaatccgccatcaacgccaccaactcgaaacgattcccgaaataaccgaaataaacgaaaaaaaaaaaccgataaatctaccgtaacctaacgaccgcgaaacgcaacacgacgacctcgaacgtaaataacgccgactcgaaaataccgaattcccgaacgcaataccccaaataatcgaccaacaacaactcgatacgctcccgcaacgaatcgaccataataatacgctcccgcaactaatcaaccataatccgacctctactaaaaaaccgaaccttcgctaattttcttaacccgaccgcgcctcccccaaaataaaactaccgtaccccgccccgacccccgacccccgacccccgatatattatttttcaaaactaaaaaaaaaacctttaa

SEQ ID NO: 30997 - DNA, 670 bp, Artificial Sequence
  chemically treated genomic DNA (Homo sapiens) CpG-island No: 30997
tcgggagtcgatagtcgtcggtgattttggttttgttagttttatagttttgtagggttcggtattcgtcggtaagtagggggtcggcggttcgatgaatgtagtcgtttattgcgggaagggcgggcgcgattgagttggtttggtaaggttgcggtttcggggtgagtatttttagtttcgagaagtttttcggcgatgcgaggatttatgcggagtcgcgttttaatttcgtggttttcggtcgcggtcgttgtttttattttcgttcggaatgttttatatttggggaaatcgaggcgtagagcgggacggttttgggtttggcgggaagtcgcgtaaggaggtcggtagggggcgtattcggtttattttgttttttttaggtcgcgtcgttagggtttaggtagggcggtttcgggaggcgggggtcgtcgggataggaatcgtcgttcgagtcggggtgacggggaagttttattttttttttcgacgtttttttttagttttgtttcgggcgcgttgtagggttcgcgattagtcgttgttttcgttcgggttttagagtcggtgcgattttaaggtttatttttttaggcggcgttttattacggggcggcggtaaattttaggatttattttgcggatgaggaaatcgaggttattttgt

SEQ ID NO: 30998 - DNA, 670 bp, Artificial Sequence
  chemically treated genomic DNA (Homo sapiens) CpG-island No: 30998
acaaaataacctcgatttcctcatccgcaaaataaatcctaaaatttaccgccgccccgtaataaaacgccgcctaaaaaaataaaccttaaaatcgcaccgactctaaaacccgaacgaaaacaacgactaatcgcgaaccctacaacgcgcccgaaacaaaactaaaaaaaaacgtcgaaaaaaaaaataaaacttccccgtcaccccgactcgaacgacgattcctatcccgacgacccccgcctcccgaaaccgccctacctaaaccctaacgacgcgacctaaaaaaaacaaaataaaccgaatacgccccctaccgacctccttacgcgacttcccgccaaacccaaaaccgtcccgctctacgcctcgatttccccaaatataaaacattccgaacgaaaataaaaacaacgaccgcgaccgaaaaccacgaaattaaaacgcgactccgcataaatcctcgcatcgccgaaaaacttctcgaaactaaaaatactcaccccgaaaccgcaaccttaccaaaccaactcaatcgcgcccgcccttcccgcaataaacgactacattcatcgaaccgccgaccccctacttaccgacgaataccgaaccctacaaaactataaaactaacaaaaccaaaatcaccgacgactatcgactcccga

SEQ ID NO: 30999 - DNA, 670 bp, Artificial Sequence
  chemically treated genomic DNA (Homo sapiens) CpG-island No: 30999
ataaggtggtttcggtttttttattcgtaaaatgggttttagggtttgtcgtcgtttcgtgatggggcgtcgtttggggaggtgggttttgggatcgtatcgattttgaggttcgggcggaggtagcgattggtcgcgggttttgtagcgcgttcgggatagggttagggaggggcgtcggggaggaaggtgaagttttttcgttatttcggttcgggcggcggtttttgtttcggcggttttcgtttttcggagtcgttttgtttgggttttggcggcgcggtttggaagggatagggtgggtcgggtgcgttttttgtcggtttttttgcgcgatttttcgttaggtttagggtcgtttcgttttgcgtttcggtttttttagatgtgaaatatttcgggcgggggtgggggtagcggtcgcggtcggaggttacggggttggggcgcggtttcgtatgggttttcgtatcgtcgagaggtttttcgggattgagggtgtttatttcggggtcgtagttttgttaggttagtttagtcgcgttcgtttttttcgtagtggacggttgtatttatcgggtcgtcggttttttgtttatcgacgagtgtcggattttgtagagttgtaagattggtaaggttaagattatcggcggttatcggttttcgg

SEQ ID NO: 31000 - DNA, 670 bp, Artificial Sequence
  chemically treated genomic DNA (Homo sapiens) CpG-island No: 31000
ccgaaaaccgataaccgccgataatcttaaccttaccaatcttacaactctacaaaatccgacactcgtcgataaacaaaaaaccgacgacccgataaatacaaccgtccactacgaaaaaaacgaacgcgactaaactaacctaacaaaactacgaccccgaaataaacaccctcaatcccgaaaaacctctcgacgatacgaaaacccatacgaaaccgcgccccaaccccgtaacctccgaccgcgaccgctacccccacccccgcccgaaatatttcacatctaaaaaaaccgaaacgcaaaacgaaacgaccctaaacctaacgaaaaatcgcgcaaaaaaaccgacaaaaaacgcacccgacccaccctatcccttccaaaccgcgccgccaaaacccaaacaaaacgactccgaaaaacgaaaaccgccgaaacaaaaaccgccgcccgaaccgaaataacgaaaaaacttcaccttcctccccgacgcccctccctaaccctatcccgaacgcgctacaaaacccgcgaccaatcgctacctccgcccgaacctcaaaatcgatacgatcccaaaacccacctccccaaacgacgccccatcacgaaacgacgacaaaccctaaaacccattttacgaataaaaaaaccgaaaccaccttat

SEQ ID NO: 31001 - DNA, 558 bp, Artificial Sequence
  chemically treated genomic DNA (Homo sapiens) CpG-island No: 31001
tttcgtcgtcgtcgtcgcgaggggagaggcggtcgtatagtttggtttttcgcgttttgttcgtcgtcgtcgttcgcgcgggtatcgtcgttggttttcgtttcgtcgtcgagcgtattcgtttcgggtatacgtatttcgtcgttggacgtatttttcgtatttttttcgcggtttcgtcgggcgttcgagtcgggtagatgcgtcgtcgcgcgtttttcgtttcgggttcgttatcgtgttttgtcgcgcgtcgggggtttttttttcgggtttttttgggcgtttttcggttttggttttcgttcgttttttggaataatttttgaggttttagtcgttatcgtaaagtttttcgaggagattcgttttttcggtcgttgcgtaggtagggttggttgtatcgggcgggggtcggggttcgcgcgtttgggatagggcgttagagtcgacggggcgggggtcgggggttcgggggtatcgaagcgttacggggttaggtagtttggttttgttttagagcggcgggagatgggacgtttagtttttgggatttgg

SEQ ID NO: 31002 - DNA, 558 bp, Artificial Sequence
  chemically treated genomic DNA (Homo sapiens) CpG-island No: 31002
ccaaatcccaaaaactaaacgtcccatctcccgccgctctaaaacaaaaccaaactacctaaccccgtaacgcttcgatacccccgaacccccgacccccgccccgtcgactctaacgccctatcccaaacgcgcgaaccccgacccccgcccgatacaaccaaccctacctacgcaacgaccgaaaaaacgaatctcctcgaaaaactttacgataacgactaaaacctcaaaaattattccaaaaaacgaacgaaaaccaaaaccgaaaaacgcccaaaaaaacccgaaaaaaaaacccccgacgcgcgacaaaacacgataacgaacccgaaacgaaaaacgcgcgacgacgcatctacccgactcgaacgcccgacgaaaccgcgaaaaaaatacgaaaaatacgtccaacgacgaaatacgtatacccgaaacgaatacgctcgacgacgaaacgaaaaccaacgacgatacccgcgcgaacgacgacgacgaacaaaacgcgaaaaaccaaactatacgaccgcctctcccctcgcgacgacgacgacgaaa

SEQ ID NO: 31003 - DNA, 558 bp, Artificial Sequence
  chemically treated genomic DNA (Homo sapiens) CpG-island No: 31003
ttaaattttaaaggttgggcgttttatttttcgtcgttttggggtaaagttaggttgtttgatttcgtggcgtttcggtgttttcgggttttcggttttcgtttcgtcggttttggcgttttgttttagacgcgcggatttcgattttcgttcggtgtagttagttttatttgcgtagcggtcggggaggcgggttttttcgggaaattttgcggtgacggttggagttttaggggttattttaaggagcgggcgggaattagagtcggagggcgtttaggggggttcgggagaggagttttcggcgcgcggtagagtacggtggcgggttcggagcggggggcgcgcggcggcgtatttgttcggttcgggcgttcggcggagtcgcgggaggagtgcggggggtgcgtttagcggcggggtgcgtgtgttcggggcgggtgcgttcggcggcggggcggggattagcggcggtgttcgcgcgagcggcggcggcgagtagggcgcggggaattaggttgtgcggtcgttttttttttcgcggcggcggcggcgggg

SEQ ID NO: 31004 - DNA, 558 bp, Artificial Sequence
  chemically treated genomic DNA (Homo sapiens) CpG-island No: 31004
ccccgccgccgccgccgcgaaaaaaaaaacgaccgcacaacctaattccccgcgccctactcgccgccgccgctcgcgcgaacaccgccgctaatccccgccccgccgccgaacgcacccgccccgaacacacgcaccccgccgctaaacgcaccccccgcactcctcccgcgactccgccgaacgcccgaaccgaacaaatacgccgccgcgcgccccccgctccgaacccgccaccgtactctaccgcgcgccgaaaactcctctcccgaacccccctaaacgccctccgactctaattcccgcccgctccttaaaataacccctaaaactccaaccgtcaccgcaaaatttcccgaaaaaacccgcctccccgaccgctacgcaaataaaactaactacaccgaacgaaaatcgaaatccgcgcgtctaaaacaaaacgccaaaaccgacgaaacgaaaaccgaaaacccgaaaacaccgaaacgccacgaaatcaaacaacctaactttaccccaaaacgacgaaaaataaaacgcccaacctttaaaatttaa

SEQ ID NO: 31005 - DNA, 583 bp, Artificial Sequence
  chemically treated genomic DNA (Homo sapiens) CpG-island No: 31005
gataacgtttagttttttttttatatatttgtcggtagggaggcggtaacggcggtggttgtaatagcggcggtagtagagcggacggttttgtaacgcgtatgcgtttcgtagttttttttttttttttcgtttaatcgcgcgttttcgtatcgcgtcggcgtagaatcggcgtagggtagcggtgagtcggcgcgtaggtggagcgttcgttaggttggtcgagggttttcgattaggaggaggcgggagcgcggaggagcgtcgcgtcgggaatgacgtgcggttagagttcgttttttcgtagggttgcgtttgtaattatggtaacggcggcgttaggtttggttgtttatttaggtcgtgagtcgcgcgtcgttgggggtcgggtggttggtagtattttttttgcggttagcgattttttggtttcgcgcgtagtagtcggcggtatagttatttttttaggcggttaatcgcgtttcgatttttaaagtatttgtttttttagagttttagcgcgcgtagcggaagtttttggaaatttttttattttttagattttgatttttgaaattttttt

SEQ ID NO: 31006 - DNA, 583 bp, Artificial Sequence
  chemically treated genomic DNA (Homo sapiens) CpG-island No: 31006
aaaaaaatttcaaaaatcaaaatctaaaaaataaaaaaatttccaaaaacttccgctacgcgcgctaaaactctaaaaaaacaaatactttaaaaatcgaaacgcgattaaccgcctaaaaaaataactataccgccgactactacgcgcgaaaccaaaaaatcgctaaccgcaaaaaaaatactaccaaccacccgacccccaacgacgcgcgactcacgacctaaataaacaaccaaacctaacgccgccgttaccataattacaaacgcaaccctacgaaaaaacgaactctaaccgcacgtcattcccgacgcgacgctcctccgcgctcccgcctcctcctaatcgaaaaccctcgaccaacctaacgaacgctccacctacgcgccgactcaccgctaccctacgccgattctacgccgacgcgatacgaaaacgcgcgattaaacgaaaaaaaaaaaaaaaactacgaaacgcatacgcgttacaaaaccgtccgctctactaccgccgctattacaaccaccgccgttaccgcctccctaccgacaaatatataaaaaaaaaactaaacgttatc

SEQ ID NO: 31007 - DNA, 583 bp, Artificial Sequence
  chemically treated genomic DNA (Homo sapiens) CpG-island No: 31007
aaaggaattttaagagttaagatttggaaggtgggaaagtttttaaagattttcgttacgcgcgttagggttttggaggggtaggtattttagaggtcgagacgcgattggtcgtttgggaaggtggttgtgtcgtcggttgttacgcgcggggttaaggagtcgttggtcgtaggggaggtgttgttaattattcggtttttagcggcgcgcgatttacggtttgggtgagtagttaggtttggcgtcgtcgttgttatagttatagacgtagttttgcgagggggcgggttttggtcgtacgttattttcggcgcgacgttttttcgcgttttcgtttttttttggtcggagattttcggttagtttagcgggcgttttatttgcgcgtcggtttatcgttgttttgcgtcggttttgcgtcggcgcggtacgagggcgcgcggttgggcggggggggggggggaagttgcgaggcgtatgcgcgttgtagggtcgttcgttttgttgtcgtcgttgttgtagttatcgtcgttgtcgtttttttgtcggtaagtgtgtgaagaagaagttgagcgttgtt

SEQ ID NO: 31008 - DNA, 583 bp, Artificial Sequence
  chemically treated genomic DNA (Homo sapiens) CpG-island No: 31008
aacaacgctcaacttcttcttcacacacttaccgacaaaaaaacgacaacgacgataactacaacaacgacgacaacaaaacgaacgaccctacaacgcgcatacgcctcgcaacttccccccccccccccgcccaaccgcgcgccctcgtaccgcgccgacgcaaaaccgacgcaaaacaacgataaaccgacgcgcaaataaaacgcccgctaaactaaccgaaaatctccgaccaaaaaaaaacgaaaacgcgaaaaaacgtcgcgccgaaaataacgtacgaccaaaacccgccccctcgcaaaactacgtctataactataacaacgacgacgccaaacctaactactcacccaaaccgtaaatcgcgcgccgctaaaaaccgaataattaacaacacctcccctacgaccaacgactccttaaccccgcgcgtaacaaccgacgacacaaccaccttcccaaacgaccaatcgcgtctcgacctctaaaatacctacccctccaaaaccctaacgcgcgtaacgaaaatctttaaaaactttcccaccttccaaatcttaactcttaaaattccttt

SEQ ID NO: 31009 - DNA, 828 bp, Artificial Sequence
  chemically treated genomic DNA (Homo sapiens) CpG-island No: 31009
tcggcgcgtcgcgcgtagatcggacggaggggaaagttggtaagagcgcggcgttcgcgggagaaagcgttaatgggcggtcgggtgggagtagcgcgttcgttcgtttacgttacgtcggtgcgggttcggttgacgatcgcggcgtttggggacgtcggcgcgtttcgttcgttaggtgtttcgtttggaaatgtttttattagttgtcgtcggtttttcgttggagcgcgcgcgtcgagttttcgcgcggagttttcgcgggttgcggggagcggtttagcgttatcgtaggtaggtgaggtttttcgttttcgttttcgtttcggggtttcgagattttttttttttttcgaggaggcggaggtttcgcgcggtcgtcgaggggagcgggcggcggcggttgcggcgatttttcggtgcgtttcgggttgcgagttgtttttcgcggtttcggtagttatacggcgcgggcgggagtttttttagtttaggtagggagtgggtttcgtcgtataaattttgcgaggattgtttttgcgtttaaggggataaagtttgttattcgtcgttaggttttttagaggtcgttgcgtttgttgtaagttgcgggaagtagggtgcgcgggtcggcgcggggcggggggtggggggttcggagtggttaggtttgagttttggacgttcggacggcgtttcgtttagttttaggtcgtatttagggagtaagcggcgggggcgtagcgggagagaggagggagagggtcgcgggtttttatggagggcggttgggaatttagagatttatcgtttgtttttgtggttttt

SEQ ID NO: 31010 - DNA, 828 bp, Artificial Sequence
  chemically treated genomic DNA (Homo sapiens) CpG-island No: 31010
aaaaaccacaaaaacaaacgataaatctctaaattcccaaccgccctccataaaaacccgcgaccctctccctcctctctcccgctacgcccccgccgcttactccctaaatacgacctaaaactaaacgaaacgccgtccgaacgtccaaaactcaaacctaaccactccgaaccccccaccccccgccccgcgccgacccgcgcaccctacttcccgcaacttacaacaaacgcaacgacctctaaaaaacctaacgacgaataacaaactttatccccttaaacgcaaaaacaatcctcgcaaaatttatacgacgaaacccactccctacctaaactaaaaaaactcccgcccgcgccgtataactaccgaaaccgcgaaaaacaactcgcaacccgaaacgcaccgaaaaatcgccgcaaccgccgccgcccgctcccctcgacgaccgcgcgaaacctccgcctcctcgaaaaaaaaaaaaaatctcgaaaccccgaaacgaaaacgaaaacgaaaaacctcacctacctacgataacgctaaaccgctccccgcaacccgcgaaaactccgcgcgaaaactcgacgcgcgcgctccaacgaaaaaccgacgacaactaataaaaacatttccaaacgaaacacctaacgaacgaaacgcgccgacgtccccaaacgccgcgatcgtcaaccgaacccgcaccgacgtaacgtaaacgaacgaacgcgctactcccacccgaccgcccattaacgctttctcccgcgaacgccgcgctcttaccaactttcccctccgtccgatctacgcgcgacgcgccga

SEQ ID NO: 31011 - DNA, 828 bp, Artificial Sequence
  chemically treated genomic DNA (Homo sapiens) CpG-island No: 31011
aggagttatagggataagcggtgaatttttggatttttaatcgttttttatgggggttcgcggtttttttttttttttttttcgttgcgttttcgtcgtttgttttttgggtacggtttgaggttggacggagcgtcgttcgggcgtttaggatttaggtttggttatttcgagttttttatttttcgtttcgcgtcggttcgcgtattttgtttttcgtaatttgtagtaaacgtagcggtttttggagagtttagcgacgggtagtaaattttgtttttttaagcgtaagagtaattttcgtaaagtttgtgcggcggagtttattttttatttgagttggggaagttttcgttcgcgtcgtgtggttgtcggggtcgcggggagtagttcgtagttcgggacgtatcggggagtcgtcgtagtcgtcgtcgttcgtttttttcggcggtcgcgcggagttttcgttttttcggaaggggggaggggtttcggaatttcggggcgggggcgggagcgggggattttatttatttgcggtggcgttgggtcgtttttcgtagttcgcgagggtttcgcgcggaagttcggcgcgcgcgttttagcggggagtcggcgataattaatggagatatttttaggcggagtatttggcgagcggagcgcgtcggcgtttttaggcgtcgcggtcgttagtcgagttcgtatcggcgtgacgtgggcgagcgagcgcgttgtttttattcggtcgtttattaacgttttttttcgcgggcgtcgcgtttttgttaattttttttttcgttcggtttgcgcgcggcgcgtcgg

SEQ ID NO: 31012 - DNA, 828 bp, Artificial Sequence
  chemically treated genomic DNA (Homo sapiens) CpG-island No: 31012
ccgacgcgccgcgcgcaaaccgaacgaaaaaaaaaattaacaaaaacgcgacgcccgcgaaaaaaaacgttaataaacgaccgaataaaaacaacgcgctcgctcgcccacgtcacgccgatacgaactcgactaacgaccgcgacgcctaaaaacgccgacgcgctccgctcgccaaatactccgcctaaaaatatctccattaattatcgccgactccccgctaaaacgcgcgcgccgaacttccgcgcgaaaccctcgcgaactacgaaaaacgacccaacgccaccgcaaataaataaaatcccccgctcccgcccccgccccgaaattccgaaacccctccccccttccgaaaaaacgaaaactccgcgcgaccgccgaaaaaaacgaacgacgacgactacgacgactccccgatacgtcccgaactacgaactactccccgcgaccccgacaaccacacgacgcgaacgaaaacttccccaactcaaataaaaaataaactccgccgcacaaactttacgaaaattactcttacgcttaaaaaaacaaaatttactacccgtcgctaaactctccaaaaaccgctacgtttactacaaattacgaaaaacaaaatacgcgaaccgacgcgaaacgaaaaataaaaaactcgaaataaccaaacctaaatcctaaacgcccgaacgacgctccgtccaacctcaaaccgtacccaaaaaacaaacgacgaaaacgcaacgaaaaaaaaaaaaaaaaaaaccgcgaacccccataaaaaacgattaaaaatccaaaaattcaccgcttatccctataactcct

SEQ ID NO: 31013 - DNA, 962 bp, Artificial Sequence
  chemically treated genomic DNA (Homo sapiens) CpG-island No: 31013
gttattatgcgttttgaaatagtttttcggtagttttacgattttattaagtgttcgtcgtttttacgagagaggtggttatggttgcgtattgaatatgtttgggagaggtaaagatggatggcgtagtttttatttttatatttagtgttgagcgcgagtcgttcgttgtgtgtgtattatttgttgtgcgtgtgttatttgttgtgtatgtttgcgttatttgttgtgtatgtgttatttgttgtgtatgcgtgtgtcgtttgttgtgggcgcgtgagttatttgttttgtgtgtttgtgtcgtttgttgtgtttgcgttatcgtttgttgtgcgtgtgttatttgtgcgtgtgttatttgttgtgcgtgagttatttgttgtgcgtgtgttatttgtgcgtgtgttatttgttgtgcgtgcgtgtgttttttattgtgggtgtgtttattatttgttgtgcgtgtattgtttgttgtgcgtgcgtcgtttgttgtgcgtgcgtcgtttgttgtgcgtgcgtcgtttgttgtgcgtgcgtcgtttgttgtgcgagtcgtttgttgtgcgtgcgtcgtttgttgtgcgtgagtcgtttgttgtgcgtgcgtcgtttgttgtgcgtgcgtcgtttgttgtgcgtgcgtcgtttgttgtgcgtgagtcgtttgttgtgcgtgtgtcgtttgttgtgcgtgagtcgtttgttgtgcgtgtgtcgtttgttgtgcgtgtgtcgtttgttgtgcgtgtgttattttttgtgtgtgcgtgtcgtttgttgtgtatgtgtgtattgtttattgtttgttgtgtatgtatcgtttgttttgcgtgcgtgcgttatttgttgtgcgtgtgttatttgttgtgcgtgtgttatttgttgcgggtgtattatttgttgtgcgtgcgtgtgttatttgtgtttgtgtgtatcgtttgttgtgtgtgtgttgt

SEQ ID NO: 31014 - DNA, 962 bp, Artificial Sequence
  chemically treated genomic DNA (Homo sapiens) CpG-island No: 31014
acaacacacacacaacaaacgatacacacaaacacaaataacacacgcacgcacaacaaataatacacccgcaacaaataacacacgcacaacaaataacacacgcacaacaaataacgcacgcacgcaaaacaaacgatacatacacaacaaacaataaacaatacacacatacacaacaaacgacacgcacacacaaaaaataacacacgcacaacaaacgacacacgcacaacaaacgacacacgcacaacaaacgactcacgcacaacaaacgacacacgcacaacaaacgactcacgcacaacaaacgacgcacgcacaacaaacgacgcacgcacaacaaacgacgcacgcacaacaaacgactcacgcacaacaaacgacgcacgcacaacaaacgactcgcacaacaaacgacgcacgcacaacaaacgacgcacgcacaacaaacgacgcacgcacaacaaacgacgcacgcacaacaaacaatacacgcacaacaaataataaacacacccacaataaaaaacacacgcacgcacaacaaataacacacgcacaaataacacacgcacaacaaataactcacgcacaacaaataacacacgcacaaataacacacgcacaacaaacgataacgcaaacacaacaaacgacacaaacacacaaaacaaataactcacgcgcccacaacaaacgacacacgcatacacaacaaataacacatacacaacaaataacgcaaacatacacaacaaataacacacgcacaacaaataatacacacacaacgaacgactcgcgctcaacactaaatataaaaataaaaactacgccatccatctttacctctcccaaacatattcaatacgcaaccataaccacctctctcgtaaaaacgacgaacacttaataaaatcgtaaaactaccgaaaaactatttcaaaacgcataataac

SEQ ID NO: 31015 - DNA, 962 bp, Artificial Sequence
  chemically treated genomic DNA (Homo sapiens) CpG-island No: 31015
ataatatatatatagtagacgatgtatataggtatagatggtatacgtacgtatagtagatgatgtattcgtagtagatggtatacgtatagtagatgatatacgtatagtagatgacgtacgtacgtagagtagacgatgtatgtatagtagataatggataatgtatatatgtatagtagacggtacgtatatatagaagatgatatacgtatagtagacggtatacgtatagtaaacgatatacgtatagtagacgatttacgtatagtagacggtatacgtatagtagacgatttacgtatagtagacggcgtacgtatagtagacggcgtacgtatagtagacggcgtacgtatagtagacgatttacgtatagtagacgacgtacgtatagtagacgattcgtatagtaggcgacgtacgtatagtagacggcgtacgtatagtagacggcgtacgtatagtagacggcgtacgtatagtagataatgtacgtatagtagatgatgaatatatttatagtagagggtatacgtacgtatagtagatgatatacgtatagatgatatacgtatagtagatgatttacgtatagtagatgatatacgtatagatgatatacgtatagtagacgatgacgtaggtatagtagacggtataagtatatagagtagatgatttacgcgtttatagtagacgatatacgtatgtataatagatgatatatatatagtagatgacgtaggtatgtatagtagatgatatacgtatagtagatgatgtatatatagcggacgattcgcgtttagtattgggtgtgagggtagagattacgttatttatttttgttttttttaagtatatttaatgcgtaattataattatttttttcgtgagagcggcgggtatttggtgaggtcgtgaagttgtcgaggggttgttttagggcgtatggtgat

SEQ ID NO: 31016 - DNA, 962 bp, Artificial Sequence
  chemically treated genomic DNA (Homo sapiens) CpG-island No: 31016
atcaccatacgccctaaaacaacccctcgacaacttcacgacctcaccaaatacccgccgctctcacgaaaaaaataattataattacgcattaaatatacttaaaaaaaacaaaaataaataacgtaatctctaccctcacacccaatactaaacgcgaatcgtccgctatatatacatcatctactatacgtatatcatctactatacatacctacgtcatctactatatatatatcatctattatacatacgtatatcgtctactataaacgcgtaaatcatctactctatatacttataccgtctactatacctacgtcatcgtctactatacgtatatcatctatacgtatatcatctactatacgtaaatcatctactatacgtatatcatctatacgtatatcatctactatacgtacgtataccctctactataaatatattcatcatctactatacgtacattatctactatacgtacgccgtctactatacgtacgccgtctactatacgtacgccgtctactatacgtacgtcgcctactatacgaatcgtctactatacgtacgtcgtctactatacgtaaatcgtctactatacgtacgccgtctactatacgtacgccgtctactatacgtacgccgtctactatacgtaaatcgtctactatacgtataccgtctactatacgtaaatcgtctactatacgtatatcgtttactatacgtataccgtctactatacgtatatcatcttctatatatacgtaccgtctactatacatatatacattatccattatctactatacatacatcgtctactctacgtacgtacgtcatctactatacgtatatcatctactatacgtataccatctactacgaatacatcatctactatacgtacgtataccatctatacctatatacatcgtctactatatatatattat

SEQ ID NO: 31017 - DNA, 596 bp, Artificial Sequence
  chemically treated genomic DNA (Homo sapiens) CpG-island No: 31017
ggggtacgcgcggggtttggttaatggcggcggggcggtggaggttgagttgtcgtgggtagggttagtgtgagaggtgcggcgggggaggtaatgatgatggtggcggaggagaaaggcgggggagggggtgttgggcgttgagcggtggttttggtagggtttggtagggtgggggacggtcgcggggcgatttgttagggagggggtgggcgtgaggggcgtcgttcgtttgaggggttgtagatttcggttatcgcgagcgtcgtggttggtttggttgttttatgtggtttcggcggggatggaggattcggtggcggcggcggttgttgttgcggcggcgacggaggagcggttatgagaagggaacggggttagatttagttcgatagcgggattagaggtgtgaggagggggcgggagtggacgagcggcggggtcggggttcggggttcgggttggggttttttggtatcgtttgggtgatagggatcgcggacgagttatcgtttgttttcgttggggggtaggggtttgggtttcgtgcgtgaggagattgggtttcggcggattgtttttttgaggatggggga

SEQ ID NO: 31018 - DNA, 596 bp, Artificial Sequence
  chemically treated genomic DNA (Homo sapiens) CpG-island No: 31018
tcccccatcctcaaaaaaacaatccgccgaaacccaatctcctcacgcacgaaacccaaacccctaccccccaacgaaaacaaacgataactcgtccgcgatccctatcacccaaacgataccaaaaaaccccaacccgaaccccgaaccccgaccccgccgctcgtccactcccgccccctcctcacacctctaatcccgctatcgaactaaatctaaccccgttcccttctcataaccgctcctccgtcgccgccgcaacaacaaccgccgccgccaccgaatcctccatccccgccgaaaccacataaaacaaccaaaccaaccacgacgctcgcgataaccgaaatctacaacccctcaaacgaacgacgcccctcacgcccaccccctccctaacaaatcgccccgcgaccgtcccccaccctaccaaaccctaccaaaaccaccgctcaacgcccaacaccccctcccccgcctttctcctccgccaccatcatcattacctcccccgccgcacctctcacactaaccctacccacgacaactcaacctccaccgccccgccgccattaaccaaaccccgcgcgtacccc

SEQ ID NO: 31019 - DNA, 596 bp, Artificial Sequence
  chemically treated genomic DNA (Homo sapiens) CpG-island No: 31019
ttttttatttttagggaaatagttcgtcggagtttagtttttttacgtacggagtttagatttttgttttttagcggagataggcggtggttcgttcgcggtttttgttatttaggcgatattagaagattttagttcggatttcgagtttcggtttcgtcgttcgtttattttcgttttttttttatatttttaatttcgttgtcgggttgagtttggtttcgttttttttttatagtcgttttttcgtcgtcgtcgtagtagtagtcgtcgtcgttatcgagttttttattttcgtcggagttatatggaatagttaagttagttacggcgttcgcggtagtcgggatttgtagttttttaggcggacggcgttttttacgtttattttttttttgatagatcgtttcgcgatcgttttttattttattaagttttgttagagttatcgtttagcgtttagtattttttttttcgtttttttttttcgttattattattattatttttttcgtcgtattttttatattaattttatttacggtagtttaatttttatcgtttcgtcgttattggttaggtttcgcgcgtgtttt

SEQ ID NO: 31020 - DNA, 596 bp, Artificial Sequence
  chemically treated genomic DNA (Homo sapiens) CpG-island No: 31020
aaaacacgcgcgaaacctaaccaataacgacgaaacgataaaaattaaactaccgtaaataaaattaatataaaaaatacgacgaaaaaaataataataataataacgaaaaaaaaaaacgaaaaaaaaaatactaaacgctaaacgataactctaacaaaacttaataaaataaaaaacgatcgcgaaacgatctatcaaaaaaaaaataaacgtaaaaaacgccgtccgcctaaaaaactacaaatcccgactaccgcgaacgccgtaactaacttaactattccatataactccgacgaaaataaaaaactcgataacgacgacgactactactacgacgacgacgaaaaaacgactataaaaaaaaaacgaaaccaaactcaacccgacaacgaaattaaaaatataaaaaaaaaacgaaaataaacgaacgacgaaaccgaaactcgaaatccgaactaaaatcttctaatatcgcctaaataacaaaaaccgcgaacgaaccaccgcctatctccgctaaaaaacaaaaatctaaactccgtacgtaaaaaaactaaactccgacgaactatttccctaaaaataaaaaa

SEQ ID NO: 31021 - DNA, 504 bp, Artificial Sequence
  chemically treated genomic DNA (Homo sapiens) CpG-island No: 31021
tataaattcggggttagtcgtttattgttgttgttgttgttgtcgttgtcgtcgtcgtcgtcgtcgttgttttcgtcggttttgcgaattcgggattttttatgtattatatttttcgtttgttttttttcgtgttttgaaaagtgcgatcgtttttttaaggaatttttacggtaagtatggagattagaaaggggtgtggacgtgtgtgcgtatttaagaggggtgggtgcgagggcggtcggtttgtttaggaatttggttaatttttcgggttcgttttttagggattcgggcggttttttttggacgggggtagggattgggattcggattggcgcgttttggattatcgcgacggagtttttcggtatcggcgttttgcgcgtttcgtgcgttgtttcgtttaaatttttcgttttgagttttttttaatgtgttttatttggggagggggggaggtgtaagggggagggattagacgcgggaattggataagttggg

SEQ ID NO: 31022 - DNA, 504 bp, Artificial Sequence
  chemically treated genomic DNA (Homo sapiens) CpG-island No: 31022
cccaacttatccaattcccgcgtctaatccctcccccttacacctccccccctccccaaataaaacacattaaaaaaaactcaaaacgaaaaatttaaacgaaacaacgcacgaaacgcgcaaaacgccgataccgaaaaactccgtcgcgataatccaaaacgcgccaatccgaatcccaatccctacccccgtccaaaaaaaaccgcccgaatccctaaaaaacgaacccgaaaaattaaccaaattcctaaacaaaccgaccgccctcgcacccacccctcttaaatacgcacacacgtccacacccctttctaatctccatacttaccgtaaaaattccttaaaaaaacgatcgcacttttcaaaacacgaaaaaaaacaaacgaaaaatataatacataaaaaatcccgaattcgcaaaaccgacgaaaacaacgacgacgacgacgacgacaacgacaacaacaacaacaacaataaacgactaaccccgaatttata

SEQ ID NO: 31023 - DNA, 504 bp, Artificial Sequence
  chemically treated genomic DNA (Homo sapiens) CpG-island No: 31023
tttaatttgtttaattttcgcgtttggttttttttttttgtatttttttttttttttaaataaaatatattaaggaaaatttaagacggaaagtttgagcgaggtagcgtacggagcgcgtagggcgtcgatgtcgagaggtttcgtcgcgatgatttaagacgcgttagttcgagttttagtttttgttttcgtttagagggaatcgttcgaatttttaggaaacggattcggaaagttagttaggtttttgaataagtcggtcgttttcgtatttattttttttgggtacgtatatacgtttatatttttttttgatttttatatttgtcgtggaaattttttgggagaacggtcgtattttttaggatacggagggaagtaggcggagagtgtggtgtatgaaaagtttcgggttcgtagagtcggcggaggtagcggcggcggcggcggcggtagcggtagtagtagtagtagtagtaggcggttggtttcgggtttgtg

SEQ ID NO: 31024 - DNA, 504 bp, Artificial Sequence
  chemically treated genomic DNA (Homo sapiens) CpG-island No: 31024
cacaaacccgaaaccaaccgcctactactactactactactaccgctaccgccgccgccgccgccgctacctccgccgactctacgaacccgaaacttttcatacaccacactctccgcctacttccctccgtatcctaaaaaatacgaccgttctcccaaaaaatttccacgacaaatataaaaatcaaaaaaaaatataaacgtatatacgtacccaaaaaaaataaatacgaaaacgaccgacttattcaaaaacctaactaactttccgaatccgtttcctaaaaattcgaacgattccctctaaacgaaaacaaaaactaaaactcgaactaacgcgtcttaaatcatcgcgacgaaacctctcgacatcgacgccctacgcgctccgtacgctacctcgctcaaactttccgtcttaaattttccttaatatattttatttaaaaaaaaaaaaaaatacaaaaaaaaaaaaccaaacgcgaaaattaaacaaattaaa

SEQ ID NO: 31025 - DNA, 671 bp, Artificial Sequence
  chemically treated genomic DNA (Homo sapiens) CpG-island No: 31025
tgaaggttggcggttttacggttttacgtagttcggaaatttttcgggttttcgggtttttcgtattttcgttttcgtatttcgttcgtatttcggggtttcggaggttgttttatcggcgcgtcgttcgtaggtatcggcggcgttcggttgtcgtttttggggcggggcggggcgtggcgtggcggggtaggtcggaggtgcgggatttattttttgtttttgttttttggacgcgttttcgggagtcgattttttttttttcggcgttagggtcgcgggttaggaggaggagtttcgttcgcgggtatcgcggggaggcgggcggcgtacgtgcggataggcggggaatttcggcgtcgggggcggggtattcggaagcgcgcgtggatttggcgtatcgaattcgggcgggcggaggggcggttggtacggcgcggggaggcgggcgtttcgttcgggtcgcggcggtttgtggttataggtgggcgtttgcggagagggagcggtcgagcggagttcgggtttcggagatttttgtcgttacgttcggggtttcgcgtagtagagatcgggagacgcgtttgtgttttcggggaagtcgatttatttttttttcgtttttttggttgtagttgtattttcggttagagggtaggtaattttttttt

SEQ ID NO: 31026 - DNA, 671 bp, Artificial Sequence
  chemically treated genomic DNA (Homo sapiens) CpG-island No: 31026
aaaaaaaaattacctaccctctaaccgaaaatacaactacaaccaaaaaaacgaaaaaaaaataaatcgacttccccgaaaacacaaacgcgtctcccgatctctactacgcgaaaccccgaacgtaacgacaaaaatctccgaaacccgaactccgctcgaccgctccctctccgcaaacgcccacctataaccacaaaccgccgcgacccgaacgaaacgcccgcctccccgcgccgtaccaaccgcccctccgcccgcccgaattcgatacgccaaatccacgcgcgcttccgaataccccgcccccgacgccgaaattccccgcctatccgcacgtacgccgcccgcctccccgcgatacccgcgaacgaaactcctcctcctaacccgcgaccctaacgccgaaaaaaaaaaaatcgactcccgaaaacgcgtccaaaaaacaaaaacaaaaaataaatcccgcacctccgacctaccccgccacgccacgccccgccccgccccaaaaacgacaaccgaacgccgccgatacctacgaacgacgcgccgataaaacaacctccgaaaccccgaaatacgaacgaaatacgaaaacgaaaatacgaaaaacccgaaaacccgaaaaatttccgaactacgtaaaaccgtaaaaccgccaaccttca

SEQ ID NO: 31027 - DNA, 671 bp, Artificial Sequence
  chemically treated genomic DNA (Homo sapiens) CpG-island No: 31027
gaagggaagttatttgttttttggtcggaggtgtaattgtagttaaagaggcggaggggagatgggtcggttttttcggaggtatagacgcgtttttcgatttttgttacgcggagtttcgggcgtgacggtaggagttttcgggattcgggtttcgttcggtcgtttttttttcgtagacgtttatttgtgattatagatcgtcgcggttcgggcggggcgttcgttttttcgcgtcgtgttaatcgttttttcgttcgttcgggttcggtgcgttaggtttacgcgcgttttcgggtgtttcgttttcggcgtcggggtttttcgtttgttcgtacgtgcgtcgttcgttttttcgcggtgttcgcgggcgaggtttttttttttggttcgcggttttggcgtcgggaaggggaaaatcggttttcgagagcgcgtttaggaggtaggggtaggaggtgggtttcgtattttcggtttgtttcgttacgttacgtttcgtttcgttttagaggcggtagtcgggcgtcgtcggtgtttgcgggcggcgcgtcggtgggatagttttcggagtttcggggtgcggacgaggtgcggagacggaaatacgggaaattcgggaattcggaggattttcgaattacgtgagatcgtggagtcgttagttttta

SEQ ID NO: 31028 - DNA, 671 bp, Artificial Sequence
  chemically treated genomic DNA (Homo sapiens) CpG-island No: 31028
taaaaactaacgactccacgatctcacgtaattcgaaaatcctccgaattcccgaatttcccgtatttccgtctccgcacctcgtccgcaccccgaaactccgaaaactatcccaccgacgcgccgcccgcaaacaccgacgacgcccgactaccgcctctaaaacgaaacgaaacgtaacgtaacgaaacaaaccgaaaatacgaaacccacctcctacccctacctcctaaacgcgctctcgaaaaccgattttccccttcccgacgccaaaaccgcgaaccaaaaaaaaaaacctcgcccgcgaacaccgcgaaaaaacgaacgacgcacgtacgaacaaacgaaaaaccccgacgccgaaaacgaaacacccgaaaacgcgcgtaaacctaacgcaccgaacccgaacgaacgaaaaaacgattaacacgacgcgaaaaaacgaacgccccgcccgaaccgcgacgatctataatcacaaataaacgtctacgaaaaaaaaacgaccgaacgaaacccgaatcccgaaaactcctaccgtcacgcccgaaactccgcgtaacaaaaatcgaaaaacgcgtctatacctccgaaaaaaccgacccatctcccctccgcctctttaactacaattacacctccgaccaaaaaacaaataacttcccttc

SEQ ID NO: 31029 - DNA, 557 bp, Artificial Sequence
  chemically treated genomic DNA (Homo sapiens) CpG-island No: 31029
cgttatttttgtgttgttacgcggggaagttttatttgaattggggttttatgattttcggtatttttattcgaacgtagtttgcgtttttgtttggaatttggttttcgttttgaaggatttttatttagtatttttgcgggttgtcgggattttacggtttcgtaggcggagagattaggcgcgatttttgcgcgttttttttttttttgcgttttagggggtcggtttttagggggcggggtagtatcgcgcgtaaggtttgtcggttgttcggggtcgtatgacgtatttttttagttcgagtttttacgaggtcgtgggtacgatcggaagtcgtaggtgggtgaagcggaaacgttttaaatcgggatgttgcgggtcgtagcgcgtgggcggtcgtggggttttgggcgcgcgcggtgtttttggcggtgggttaggatttgcgggtcgttttcgtcggtgttgaagttttttgtgtgtatattttttttttagtatttgggacgatttaattttattgttaggaacggttgatttcgaatataggaggg

SEQ ID NO: 31030 - DNA, 557 bp, Artificial Sequence
  chemically treated genomic DNA (Homo sapiens) CpG-island No: 31030
ccctcctatattcgaaatcaaccgttcctaacaataaaattaaatcgtcccaaatactaaaaaaaaaatatacacacaaaaaacttcaacaccgacgaaaacgacccgcaaatcctaacccaccgccaaaaacaccgcgcgcgcccaaaaccccacgaccgcccacgcgctacgacccgcaacatcccgatttaaaacgtttccgcttcacccacctacgacttccgatcgtacccacgacctcgtaaaaactcgaactaaaaaaatacgtcatacgaccccgaacaaccgacaaaccttacgcgcgatactaccccgccccctaaaaaccgaccccctaaaacgcaaaaaaaaaaaaaacgcgcaaaaatcgcgcctaatctctccgcctacgaaaccgtaaaatcccgacaacccgcaaaaatactaaataaaaatccttcaaaacgaaaaccaaattccaaacaaaaacgcaaactacgttcgaataaaaataccgaaaatcataaaaccccaattcaaataaaacttccccgcgtaacaacacaaaaataacg

SEQ ID NO: 31031 - DNA, 557 bp, Artificial Sequence
  chemically treated genomic DNA (Homo sapiens) CpG-island No: 31031
tttttttgtgttcgggattaatcgtttttaatagtgaaattaggtcgttttaagtgttgaggagaaagtgtgtatataagaggttttaatatcggcggaggcgattcgtaagttttgatttatcgttagaaatatcgcgcgcgtttaagattttacggtcgtttacgcgttacggttcgtaatatttcggtttgaagcgttttcgttttatttatttgcggttttcggtcgtatttacggtttcgtgagggttcgagttggaaaagtgcgttatacgatttcgagtaatcggtaggttttgcgcgcgatgttgtttcgttttttgagggtcggttttttgaagcgtaagagaaggaggggcgcgtagggatcgcgtttagttttttcgtttgcggagtcgtggggtttcggtagttcgtaggagtgttaagtaagggttttttagggcgggaattaggttttaggtagggacgtaggttacgttcgaataaaagtatcgaaggttataaggttttagtttagatgggattttttcgcgtgatagtatagagataacg

SEQ ID NO: 31032 - DNA, 557 bp, Artificial Sequence
  chemically treated genomic DNA (Homo sapiens) CpG-island No: 31032
cgttatctctatactatcacgcgaaaaaatcccatctaaactaaaaccttataaccttcgatacttttattcgaacgtaacctacgtccctacctaaaacctaattcccgccctaaaaaacccttacttaacactcctacgaactaccgaaaccccacgactccgcaaacgaaaaaactaaacgcgatccctacgcgcccctccttctcttacgcttcaaaaaaccgaccctcaaaaaacgaaacaacatcgcgcgcaaaacctaccgattactcgaaatcgtataacgcacttttccaactcgaaccctcacgaaaccgtaaatacgaccgaaaaccgcaaataaataaaacgaaaacgcttcaaaccgaaatattacgaaccgtaacgcgtaaacgaccgtaaaatcttaaacgcgcgcgatatttctaacgataaatcaaaacttacgaatcgcctccgccgatattaaaacctcttatatacacactttctcctcaacacttaaaacgacctaatttcactattaaaaacgattaatcccgaacacaaaaaaa

SEQ ID NO: 31033 - DNA, 895 bp, Artificial Sequence
  chemically treated genomic DNA (Homo sapiens) CpG-island No: 31033
gtgttgtcgagttttcggtcggtagttgtgttcgtcgttgttttttatagtcgttttcgttgttagcgtttaatttcgttcgttacggtttcgtattcgttatttttgttcgtttgtagtcgtttttttagagattttttagtttagtagtagtattttttttatttcgcgtattttcgtagtttttatttggagtttcgggttttttttcgggtttttcggttcgtcgttttgtttagagtttattttcgcgattgttagttttcggttttagcgggggatataagaatcgtttattttttatttttcgttttttttttttttttttttatttttaaatcgttttggtttcgtttcggcggatcggaggaaggacggagttcgcgggaaggaggagggggcggttagcgttagttagtgtcgtcgtggtttcgtttttacgttttgtatcggagtggggttcgttttttattttttcggcgttttagttttgttttcgtttcgttcgtttttaggttcggtgcgtacgcgtatttggttcgattttttttttcgcggggtttataagtcgtgcgcgcgtttttacgtacggagcgacgcgtacgtttatttgtttgttttatagggtatttaggagggatttttttttggtttattcgcgtcgcgtaggcgtacgtttacgtagcgtttagacgttcgagtcgagcgtttcgttttttagtaattagtcgttagtttttttttttacgatttattttttaatttttgtttgaggttgtcgtatttggatggaacgcgtatgcgtaaggttgtttttcgtagtttcgtttttttttagtttgaaatatttgttgtttcgcggcgggggttttgtgttattttttttagggtttgg

SEQ ID NO: 31034 - DNA, 895 bp, Artificial Sequence
  chemically treated genomic DNA (Homo sapiens) CpG-island No: 31034
ccaaaccctaaaaaaaataacacaaaacccccgccgcgaaacaacaaatatttcaaactaaaaaaaaacgaaactacgaaaaacaaccttacgcatacgcgttccatccaaatacgacaacctcaaacaaaaattaaaaaataaatcgtaaaaaaaaaaactaacgactaattactaaaaaacgaaacgctcgactcgaacgtctaaacgctacgtaaacgtacgcctacgcgacgcgaataaaccaaaaaaaaatccctcctaaataccctataaaacaaacaaataaacgtacgcgtcgctccgtacgtaaaaacgcgcgcacgacttataaaccccgcgaaaaaaaaaatcgaaccaaatacgcgtacgcaccgaacctaaaaacgaacgaaacgaaaacaaaactaaaacgccgaaaaaataaaaaacgaaccccactccgatacaaaacgtaaaaacgaaaccacgacgacactaactaacgctaaccgccccctcctccttcccgcgaactccgtccttcctccgatccgccgaaacgaaaccaaaacgatttaaaaataaaaaaaaaaaaaaaaaaaacgaaaaataaaaaataaacgattcttatatcccccgctaaaaccgaaaactaacaatcgcgaaaataaactctaaacaaaacgacgaaccgaaaaacccgaaaaaaaacccgaaactccaaataaaaactacgaaaatacgcgaaataaaaaaaatactactactaaactaaaaaatctctaaaaaaacgactacaaacgaacaaaaataacgaatacgaaaccgtaacgaacgaaattaaacgctaacaacgaaaacgactataaaaaacaacgacgaacacaactaccgaccgaaaactcgacaacac

SEQ ID NO: 31035 - DNA, 895 bp, Artificial Sequence
  chemically treated genomic DNA (Homo sapiens) CpG-island No: 31035
ttaagttttgggaaaagtggtataaagttttcgtcgcgaagtagtaggtgttttaagttgagggaaggcggggttgcgagagatagttttgcgtatgcgcgttttatttaggtgcggtagttttaggtagagattaagaaatgagtcgtggaaaagggggttagcggttggttattaggagacgggacgttcggttcgggcgtttaggcgttgcgtgggcgtgcgtttgcgcggcgcggatgggttagaaaggggttttttttaggtgttttgtaaggtaggtaggtagacgtacgcgtcgtttcgtgcgtaggagcgcgcgtacggtttgtagatttcgcgagaaggaaggtcgagttaggtacgcgtgcgtatcgggtttgggggcgagcgggacggaagtaaagttggggcgtcggggaggtggaagacgagttttatttcggtatagagcgtgagggcggggttacggcggtattggttggcgttaatcgtttttttttttttttcgcgggtttcgtttttttttcgattcgtcggggcggggttaggacgatttgggggtgggaagggaggagaaaggggcggaggatggagagtgggcggtttttgtatttttcgttgaggtcgagagttgatagtcgcggggatgagttttgggtaggacggcgggtcgaggagttcggggagggattcggagttttaggtagaagttgcggaggtgcgcggggtggggagagtgttgttattggattggaaggtttttgagaaggcggttgtaagcgggtaggagtggcgggtgcggggtcgtggcgggcggagttgggcgttagtagcgggagcggttgtgaggggtagcggcgggtatagttgtcggtcggaagttcggtagtat

SEQ ID NO: 31036 - DNA, 895 bp, Artificial Sequence
  chemically treated genomic DNA (Homo sapiens) CpG-island No: 31036
atactaccgaacttccgaccgacaactatacccgccgctacccctcacaaccgctcccgctactaacgcccaactccgcccgccacgaccccgcacccgccactcctacccgcttacaaccgccttctcaaaaaccttccaatccaataacaacactctccccaccccgcgcacctccgcaacttctacctaaaactccgaatccctccccgaactcctcgacccgccgtcctacccaaaactcatccccgcgactatcaactctcgacctcaacgaaaaatacaaaaaccgcccactctccatcctccgcccctttctcctcccttcccacccccaaatcgtcctaaccccgccccgacgaatcgaaaaaaaaacgaaacccgcgaaaaaaaaaaaaaaacgattaacgccaaccaataccgccgtaaccccgccctcacgctctataccgaaataaaactcgtcttccacctccccgacgccccaactttacttccgtcccgctcgcccccaaacccgatacgcacgcgtacctaactcgaccttccttctcgcgaaatctacaaaccgtacgcgcgctcctacgcacgaaacgacgcgtacgtctacctacctaccttacaaaacacctaaaaaaaacccctttctaacccatccgcgccgcgcaaacgcacgcccacgcaacgcctaaacgcccgaaccgaacgtcccgtctcctaataaccaaccgctaacccccttttccacgactcatttcttaatctctacctaaaactaccgcacctaaataaaacgcgcatacgcaaaactatctctcgcaaccccgccttccctcaacttaaaacacctactacttcgcgacgaaaactttataccacttttcccaaaacttaa

SEQ ID NO: 31037 - DNA, 881 bp, Artificial Sequence
  chemically treated genomic DNA (Homo sapiens) CpG-island No: 31037
atgcgaggtaattattttgtcgcggttcgacggcgtagagttgggaaatcgaggcggagacgcgagaggggaggcgggcggcgcggttcgattgttttgtgttggggttcggttgtcgggtcgggagttgggagttcggacggcgtataaagaaggttatcggcgagggtgcgttcggttggcggagggcgcgggttttcggagacgtgattttggcgttataattgttagaaggcgttttagtttttttttggcgacgtgttcggttgttttacgttaaggcgttaatttcggttataggattattgaggtttaatttgagaagaattttagttcggttttattcgggtagtgggattttttcgatttataggcgcgtggttcgggttcgcggatttttttagttgggtgatacgatgttgttagcggtagttcgggatttttgcgtcggagttttatgtaataatgtggtttattgaggggttgtcggttcgcgggttttcggattagtgacgtgcgtacgtttattggttgcgcggggagggtgtgtgcgtttacggatcgttcgtcgtcgtggcgtagttaattatcgtttacggttcgcgggcgcggtcgtttagatatcggagtcggtagtttggggaggcgcgtcgggggcggggggcgggggaggggcggggcgtttgagatgggacgtgtggttcgtggttaaaggttgggacggaaaggcgtatgagttatcgtcgcgttaggttcggttatgggtggggggagcgtgatcgcggattcggggtgtggggcgattggaaaaacgggtttttggattagtatacgttttgtgcggagagatattgtttggtatttcgggattatgtgagggg

SEQ ID NO: 31038 - DNA, 881 bp, Artificial Sequence
  chemically treated genomic DNA (Homo sapiens) CpG-island No: 31038
cccctcacataatcccgaaataccaaacaatatctctccgcacaaaacgtatactaatccaaaaacccgtttttccaatcgccccacaccccgaatccgcgatcacgctccccccacccataaccgaacctaacgcgacgataactcatacgcctttccgtcccaacctttaaccacgaaccacacgtcccatctcaaacgccccgcccctcccccgccccccgcccccgacgcgcctccccaaactaccgactccgatatctaaacgaccgcgcccgcgaaccgtaaacgataattaactacgccacgacgacgaacgatccgtaaacgcacacaccctccccgcgcaaccaataaacgtacgcacgtcactaatccgaaaacccgcgaaccgacaacccctcaataaaccacattattacataaaactccgacgcaaaaatcccgaactaccgctaacaacatcgtatcacccaactaaaaaaatccgcgaacccgaaccacgcgcctataaatcgaaaaaatcccactacccgaataaaaccgaactaaaattcttctcaaattaaacctcaataatcctataaccgaaattaacgccttaacgtaaaacaaccgaacacgtcgccaaaaaaaaactaaaacgccttctaacaattataacgccaaaatcacgtctccgaaaacccgcgccctccgccaaccgaacgcaccctcgccgataaccttctttatacgccgtccgaactcccaactcccgacccgacaaccgaaccccaacacaaaacaatcgaaccgcgccgcccgcctcccctctcgcgtctccgcctcgatttcccaactctacgccgtcgaaccgcgacaaaataattacctcgcat

SEQ ID NO: 31039 - DNA, 881 bp, Artificial Sequence
  chemically treated genomic DNA (Homo sapiens) CpG-island No: 31039
ttttttatatgatttcgagatgttagatagtgttttttcgtatagggcgtgtgttggtttagaggttcgtttttttagtcgttttatatttcgggttcgcgattacgttttttttatttatagtcgagtttgacgcggcggtggtttatgcgttttttcgttttagtttttagttacggattatacgttttattttaggcgtttcgtttttttttcgtttttcgttttcggcgcgtttttttaggttgtcggtttcggtgtttgagcggtcgcgttcgcgagtcgtgagcgatgattggttgcgttacggcggcgggcggttcgtgggcgtatatatttttttcgcgtagttaatgggcgtgcgtacgttattgattcggaggttcgcgggtcggtagttttttaataagttatattgttgtatgaaatttcggcgtaggagtttcgggttgtcgttggtaatatcgtgttatttagttaagaaaattcgcgggttcgagttacgcgtttgtgaatcggagaggttttattgttcgagtggagtcgggttgagattttttttaagttgagttttagtgattttgtggtcgaagttagcgttttgacgtgggataatcggatacgtcgttaggagagaattgaggcgttttttagtagttgtgacgttaaaattacgttttcggagattcgcgtttttcgttagtcgggcgtattttcgtcggtagttttttttgtgcgtcgttcggatttttagttttcggttcggtagtcgagttttagtataaagtagtcggatcgcgtcgttcgttttttttttcgcgttttcgtttcggttttttaattttgcgtcgtcgggtcgcggtaggatgattgtttcgtat

SEQ ID NO: 31040 - DNA, 881 bp, Artificial Sequence
  chemically treated genomic DNA (Homo sapiens) CpG-island No: 31040
atacgaaacaatcatcctaccgcgacccgacgacgcaaaattaaaaaaccgaaacgaaaacgcgaaaaaaaaaacgaacgacgcgatccgactactttatactaaaactcgactaccgaaccgaaaactaaaaatccgaacgacgcacaaaaaaaactaccgacgaaaatacgcccgactaacgaaaaacgcgaatctccgaaaacgtaattttaacgtcacaactactaaaaaacgcctcaattctctcctaacgacgtatccgattatcccacgtcaaaacgctaacttcgaccacaaaatcactaaaactcaacttaaaaaaaatctcaacccgactccactcgaacaataaaacctctccgattcacaaacgcgtaactcgaacccgcgaattttcttaactaaataacacgatattaccaacgacaacccgaaactcctacgccgaaatttcatacaacaatataacttattaaaaaactaccgacccgcgaacctccgaatcaataacgtacgcacgcccattaactacgcgaaaaaaatatatacgcccacgaaccgcccgccgccgtaacgcaaccaatcatcgctcacgactcgcgaacgcgaccgctcaaacaccgaaaccgacaacctaaaaaaacgcgccgaaaacgaaaaacgaaaaaaaaacgaaacgcctaaaataaaacgtataatccgtaactaaaaactaaaacgaaaaaacgcataaaccaccgccgcgtcaaactcgactataaataaaaaaaacgtaatcgcgaacccgaaatataaaacgactaaaaaaacgaacctctaaaccaacacacgccctatacgaaaaaacactatctaacatctcgaaatcatataaaaaa

SEQ ID NO: 31041 - DNA, 989 bp, Artificial Sequence
  chemically treated genomic DNA (Homo sapiens) CpG-island No: 31041
tcgaggcgcgtgagtcggatacgaggtgcgcgttgtagggttggggaatcggggacgcgtgggttatttgtattgtttgaaaagttggttcgattttttgaagtcgttgttgagtagtatgttgatgtcggttagggttagtttcgcgttttgtaggggcgtcgtcgtcgtcgttgtcgcgttcgagttttcgtcgtttcgtcgtcgcggtcgttgttgtttcgagtcggttatgggcgtgcgaggttttgcgttgggtcgaggcgagatcgggagtagttgttgcggtttcgcgcgcgttcggagttcggttttatttgttcggagttaagcggagtcgggaggggaggggaggggaggggagaagacgggagggaagaggagggaaggatcgcggagggaggagtcgcggttcggttgcggcgcggcgtgggaggtgggcgttcggtcgtcgtcgcggggattatttagtagtattcgttcgtttttttcgcgtttttcgaagtatttaattcgcgcgggtttcgaagcggaattcgttttcgggtgttttttatttcgttaagtcggttttcgagcggcggtcgtttttattttttgtagttttcgcgtttcggtttttttcgggtttttaagtcgcgttttcgtttatcgtttaggattgttcggatatacgtacgcgagattcggagattcgagcgttttattttttttcgaaggggtcggatttaggagtcgggaggagggtaaggcgcggagggagaacgagcgtgcggatgtggaaggaaagggaaagggaaggggaatttcgttcgggtcgttatgttagcgcgcggcgttttgtttacgagtaattgaaattttacgagtaattgaaattttacgtagttcgcgttcgcgattttagattttatttcgattttggggtcgttttttaggattagggtagttaattttcgaggaggtgggcggcgggggcggggtttttg

SEQ ID NO: 31042 - DNA, 989 bp, Artificial Sequence
  chemically treated genomic DNA (Homo sapiens) CpG-island No: 31042
caaaaaccccgcccccgccgcccacctcctcgaaaattaactaccctaatcctaaaaaacgaccccaaaatcgaaataaaatctaaaatcgcgaacgcgaactacgtaaaatttcaattactcgtaaaatttcaattactcgtaaacaaaacgccgcgcgctaacataacgacccgaacgaaattccccttccctttccctttccttccacatccgcacgctcgttctccctccgcgccttaccctcctcccgactcctaaatccgaccccttcgaaaaaaaataaaacgctcgaatctccgaatctcgcgtacgtatatccgaacaatcctaaacgataaacgaaaacgcgacttaaaaacccgaaaaaaaccgaaacgcgaaaactacaaaaaataaaaacgaccgccgctcgaaaaccgacttaacgaaataaaaaacacccgaaaacgaattccgcttcgaaacccgcgcgaattaaatacttcgaaaaacgcgaaaaaaacgaacgaatactactaaataatccccgcgacgacgaccgaacgcccacctcccacgccgcgccgcaaccgaaccgcgactcctccctccgcgatccttccctcctcttccctcccgtcttctcccctcccctcccctcccctcccgactccgcttaactccgaacaaataaaaccgaactccgaacgcgcgcgaaaccgcaacaactactcccgatctcgcctcgacccaacgcaaaacctcgcacgcccataaccgactcgaaacaacaacgaccgcgacgacgaaacgacgaaaactcgaacgcgacaacgacgacgacgacgcccctacaaaacgcgaaactaaccctaaccgacatcaacatactactcaacaacgacttcaaaaaatcgaaccaacttttcaaacaatacaaataacccacgcgtccccgattccccaaccctacaacgcgcacctcgtatccgactcacgcgcctcga

SEQ ID NO: 31043 - DNA, 989 bp, Artificial Sequence
  chemically treated genomic DNA (Homo sapiens) CpG-island No: 31043
tagagatttcgttttcgtcgtttattttttcgggaattggttgttttggttttagggggcggttttagggtcgggatgaagtttggggtcgcgggcgcgggttgcgtggggttttagttattcgtggagttttagttattcgtggataaagcgtcgcgcgttagtatagcggttcgggcggagttttttttttttttttttttttttttatattcgtacgttcgtttttttttcgcgttttgtttttttttcgatttttgggttcggttttttcgggggagggtggggcgttcgggttttcgggtttcgcgtgcgtgtgttcgagtagttttgggcggtgggcgaaggcgcggtttggggattcgggaggggtcggggcgcgggggttgtaggaagtggaggcggtcgtcgttcggggatcggtttggcggggtgagagatattcggaaacggatttcgtttcggggttcgcgcgagttgggtgtttcggagggcgcgagaggagcgggcgggtgttgttgagtaattttcgcggcggcggtcggacgtttattttttacgtcgcgtcgtagtcgggtcgcggttttttttttcgcggtttttttttttttttttttttcgttttttttttttttttttttttttttttcggtttcgtttggtttcgggtaggtagagtcgggtttcgggcgcgcgcggggtcgtagtagttgttttcgatttcgtttcggtttagcgtagggtttcgtacgtttatggtcggttcggagtagtagcggtcgcggcggcgggacgacggagattcggacgcggtagcggcggcggcggcgtttttgtaggacgcggagttggttttggtcggtattaatatgttgtttaataacggttttagggagtcggattagttttttaaataatataggtgatttacgcgttttcgattttttaattttgtagcgcgtatttcgtgttcggtttacgcgtttcga

SEQ ID NO: 31044 - DNA, 989 bp, Artificial Sequence
  chemically treated genomic DNA (Homo sapiens) CpG-island No: 31044
tcgaaacgcgtaaaccgaacacgaaatacgcgctacaaaattaaaaaatcgaaaacgcgtaaatcacctatattatttaaaaaactaatccgactccctaaaaccgttattaaacaacatattaataccgaccaaaaccaactccgcgtcctacaaaaacgccgccgccgccgctaccgcgtccgaatctccgtcgtcccgccgccgcgaccgctactactccgaaccgaccataaacgtacgaaaccctacgctaaaccgaaacgaaatcgaaaacaactactacgaccccgcgcgcgcccgaaacccgactctacctacccgaaaccaaacgaaaccgaaaaaaaaaaaaaaaaaaaaaaaaaaaacgaaaaaaaaaaaaaaaaaaaaaccgcgaaaaaaaaaaccgcgacccgactacgacgcgacgtaaaaaataaacgtccgaccgccgccgcgaaaattactcaacaacacccgcccgctcctctcgcgccctccgaaacacccaactcgcgcgaaccccgaaacgaaatccgtttccgaatatctctcaccccgccaaaccgatccccgaacgacgaccgcctccacttcctacaacccccgcgccccgacccctcccgaatccccaaaccgcgccttcgcccaccgcccaaaactactcgaacacacgcacgcgaaacccgaaaacccgaacgccccaccctcccccgaaaaaaccgaacccaaaaatcgaaaaaaaaacaaaacgcgaaaaaaaaacgaacgtacgaatataaaaaaaaaaaaaaaaaaaaaaaaaactccgcccgaaccgctatactaacgcgcgacgctttatccacgaataactaaaactccacgaataactaaaaccccacgcaacccgcgcccgcgaccccaaacttcatcccgaccctaaaaccgccccctaaaaccaaaacaaccaattcccgaaaaaataaacgacgaaaacgaaatctcta

SEQ ID NO: 31045 - DNA, 589 bp, Artificial Sequence
  chemically treated genomic DNA (Homo sapiens) CpG-island No: 31045
tggtcgcgtgcgtatagatcgtggtgagtttggcggtcgtagggtagtttatttcgtttacgtcgtcggagtcgtcgcgtagtagttttaggtagattttcgcgttcggtttcgttcgggagaagagcgtcggtaagaggggttcggatcgcggtagtttcgagtatcggtagcggcgcgagcgtaataatatcgtcgtgcgtaagagtcgcgataaggttaagcggcgtaattaggagatgtagtagaagttggtggagttgtcggttgagaacgagaagttgtattagcgcgtggagtagtttacgcgggatttggtcggttttcggtagttttttaagtagttgtttagttcgttttttttgtcggtcgtcgggatagtagattgtcggtaacgcgcggtcggggcgggagagatttagtaacgatttatattttagattcgacggttcggagcggagcgcgttttgttttggcgtagttagagtcgtcgggtgttcgttgtagttttttgggatataggagcgtaaagaagttatagtttggatttattattattaaattgcgagagaagttaaacgtgtttatt

SEQ ID NO: 31046 - DNA, 589 bp, Artificial Sequence
  chemically treated genomic DNA (Homo sapiens) CpG-island No: 31046
aataaacacgtttaacttctctcgcaatttaataataataaatccaaactataacttctttacgctcctatatcccaaaaaactacaacgaacacccgacgactctaactacgccaaaacaaaacgcgctccgctccgaaccgtcgaatctaaaatataaatcgttactaaatctctcccgccccgaccgcgcgttaccgacaatctactatcccgacgaccgacaaaaaaaacgaactaaacaactacttaaaaaactaccgaaaaccgaccaaatcccgcgtaaactactccacgcgctaatacaacttctcgttctcaaccgacaactccaccaacttctactacatctcctaattacgccgcttaaccttatcgcgactcttacgcacgacgatattattacgctcgcgccgctaccgatactcgaaactaccgcgatccgaacccctcttaccgacgctcttctcccgaacgaaaccgaacgcgaaaatctacctaaaactactacgcgacgactccgacgacgtaaacgaaataaactaccctacgaccgccaaactcaccacgatctatacgcacgcgacca

SEQ ID NO: 31047 - DNA, 589 bp, Artificial Sequence
  chemically treated genomic DNA (Homo sapiens) CpG-island No: 31047
aataaatacgtttagtttttttcgtagtttagtggtggtaagtttaggttgtagtttttttgcgtttttatgttttaagaaattgtagcgggtattcggcggttttggttgcgttagggtagggcgcgtttcgtttcgggtcgtcgggtttgaggtatgggtcgttgttgagtttttttcgtttcggtcgcgcgttatcggtagtttgttgtttcggcggtcggtaggaagggcgggttgggtagttgtttgaagaattgtcggaggtcggttaggtttcgcgtgagttgttttacgcgttggtgtagtttttcgtttttagtcgatagttttattaatttttgttgtattttttggttgcgtcgtttggttttgtcgcggtttttgcgtacggcgatgttgttgcgttcgcgtcgttgtcggtattcggggttgtcgcggttcgggttttttttgtcggcgtttttttttcgggcggggtcgggcgcgggggtttgtttggggttgttgcgcggcggtttcggcgacgtgggcggggtgggttgttttgcggtcgttaagtttattacggtttgtgcgtacgcggtta

SEQ ID NO: 31048 - DNA, 589 bp, Artificial Sequence
  chemically treated genomic DNA (Homo sapiens) CpG-island No: 31048
taaccgcgtacgcacaaaccgtaataaacttaacgaccgcaaaacaacccaccccgcccacgtcgccgaaaccgccgcgcaacaaccccaaacaaacccccgcgcccgaccccgcccgaaaaaaaaacgccgacaaaaaaaacccgaaccgcgacaaccccgaataccgacaacgacgcgaacgcaacaacatcgccgtacgcaaaaaccgcgacaaaaccaaacgacgcaaccaaaaaatacaacaaaaattaataaaactatcgactaaaaacgaaaaactacaccaacgcgtaaaacaactcacgcgaaacctaaccgacctccgacaattcttcaaacaactacccaacccgcccttcctaccgaccgccgaaacaacaaactaccgataacgcgcgaccgaaacgaaaaaaactcaacaacgacccatacctcaaacccgacgacccgaaacgaaacgcgccctaccctaacgcaaccaaaaccgccgaatacccgctacaatttcttaaaacataaaaacgcaaaaaaactacaacctaaacttaccaccactaaactacgaaaaaaactaaacgtatttatt

SEQ ID NO: 31049 - DNA, 576 bp, Artificial Sequence
  chemically treated genomic DNA (Homo sapiens) CpG-island No: 31049
cgggcgcgggagttggcggcggacgttcgggtttgcggggtcggggagtagcgttcggtcggagagttcgtatttcgaggagtcggcggaggacgcggtgtcgtgatcgcgttttttttatttgttttgtttttggcgatagcgtttcgtcggtttttcggttaggacgtagtagtcgcgtttttgggtttcgatttttagggtcggtcggattcgggattttcgaggagagtagcgagaatcggttcggatttttcgaggcgttcgagtgcggtgcgggtagtttttttcgtttgttaggtcgtcgttgtttttacgtttggttttttacgttttttttcgtatttggttttacggtggaggcgcggggcgagggttttacgcgcgtgtttacggtcggggggcgtttttggacgcgcgggtttttttttacgggtttttatttttcgtttttcggcgataggagtcggtttgggacgcgcgcgttgcggttaagttttggttttgattttatttttaatttcgaggagcgaggaggttttaagtttataaataggaagaagagaaggttttgga

SEQ ID NO: 31050 - DNA, 576 bp, Artificial Sequence
  chemically treated genomic DNA (Homo sapiens) CpG-island No: 31050
tccaaaaccttctcttcttcctatttataaacttaaaacctcctcgctcctcgaaattaaaaataaaatcaaaaccaaaacttaaccgcaacgcgcgcgtcccaaaccgactcctatcgccgaaaaacgaaaaataaaaacccgtaaaaaaaaacccgcgcgtccaaaaacgccccccgaccgtaaacacgcgcgtaaaaccctcgccccgcgcctccaccgtaaaaccaaatacgaaaaaaaacgtaaaaaaccaaacgtaaaaacaacgacgacctaacaaacgaaaaaaactacccgcaccgcactcgaacgcctcgaaaaatccgaaccgattctcgctactctcctcgaaaatcccgaatccgaccgaccctaaaaatcgaaacccaaaaacgcgactactacgtcctaaccgaaaaaccgacgaaacgctatcgccaaaaacaaaacaaataaaaaaaacgcgatcacgacaccgcgtcctccgccgactcctcgaaatacgaactctccgaccgaacgctactccccgaccccgcaaacccgaacgtccgccgccaactcccgcgcccg

SEQ ID NO: 31051 - DNA, 576 bp, Artificial Sequence
  chemically treated genomic DNA (Homo sapiens) CpG-island No: 31051
tttagggtttttttttttttttgtttgtgggtttggaattttttcgtttttcggggttgggagtgaaattaaaattaggatttggtcgtagcgcgcgcgttttaggtcggtttttgtcgtcggagggcggggggtggagattcgtgggagaggattcgcgcgtttaaggacgtttttcgatcgtgggtacgcgcgtgaggttttcgtttcgcgtttttatcgtgggattagatgcgggaagaggcgtgggggattagacgtggggatagcggcggtttggtaggcggggagggttgttcgtatcgtattcgggcgtttcggggaattcgggtcggttttcgttgtttttttcggaggtttcgggttcggtcggttttgggggtcgaggtttagagacgcggttgttgcgttttggtcgaaaggtcgacgggacgttgtcgttaaaagtagagtagatgggggagacgcggttacgatatcgcgtttttcgtcggtttttcgaggtgcgggtttttcggtcggacgttatttttcgatttcgtagattcgggcgttcgtcgttagttttcgcgttcg

SEQ ID NO: 31052 - DNA, 576 bp, Artificial Sequence
  chemically treated genomic DNA (Homo sapiens) CpG-island No: 31052
cgaacgcgaaaactaacgacgaacgcccgaatctacgaaatcgaaaaataacgtccgaccgaaaaacccgcacctcgaaaaaccgacgaaaaacgcgatatcgtaaccgcgtctcccccatctactctacttttaacgacaacgtcccgtcgacctttcgaccaaaacgcaacaaccgcgtctctaaacctcgacccccaaaaccgaccgaacccgaaacctccgaaaaaaacaacgaaaaccgacccgaattccccgaaacgcccgaatacgatacgaacaaccctccccgcctaccaaaccgccgctatccccacgtctaatcccccacgcctcttcccgcatctaatcccacgataaaaacgcgaaacgaaaacctcacgcgcgtacccacgatcgaaaaacgtccttaaacgcgcgaatcctctcccacgaatctccaccccccgccctccgacgacaaaaaccgacctaaaacgcgcgcgctacgaccaaatcctaattttaatttcactcccaaccccgaaaaacgaaaaaattccaaacccacaaacaaaaaaaaaaaaaaaccctaaa

SEQ ID NO: 31053 - DNA, 547 bp, Artificial Sequence
  chemically treated genomic DNA (Homo sapiens) CpG-island No: 31053
tgttcggattgtgatttgggtaagaagagaaaggagatagcggtaattatcgatgtttttgtgattttgtaattgttttagcgtcgttttttttttgcggaaattatattcggcggtagaggtcgtagtttcggtggtttttggcggtaagaattgtttgagggcgtcggggggcgagttagggttgtcgtagtagcgaattcgatatatcgaggcggaggagtcgttatttagacggttttgtatttgttatagtcgttcgaaggtttttagaaaacgcggcggtttcgcgttttaggcgtagtcggatttcgttatcggtgtgggttaagggtacggatacgggagttgacgcgacgtttgaggtaggtcggtcgggttcgcggttatattttcgttagtcggattagcggtttcgtagggagggatttgtagtcgttttatcgattttcgggattttaagtagttatgatatcggaagtcgtggtgtattcgagttttagaagtcggaaatggaggaagagtttattatataggtcgaaggagg

SEQ ID NO: 31054 - DNA, 547 bp, Artificial Sequence
  chemically treated genomic DNA (Homo sapiens) CpG-island No: 31054
cctccttcgacctatataataaactcttcctccatttccgacttctaaaactcgaatacaccacgacttccgatatcataactacttaaaatcccgaaaatcgataaaacgactacaaatccctccctacgaaaccgctaatccgactaacgaaaatataaccgcgaacccgaccgacctacctcaaacgtcgcgtcaactcccgtatccgtacccttaacccacaccgataacgaaatccgactacgcctaaaacgcgaaaccgccgcgttttctaaaaaccttcgaacgactataacaaatacaaaaccgtctaaataacgactcctccgcctcgatatatcgaattcgctactacgacaaccctaactcgccccccgacgccctcaaacaattcttaccgccaaaaaccaccgaaactacgacctctaccgccgaatataatttccgcaaaaaaaaaacgacgctaaaacaattacaaaatcacaaaaacatcgataattaccgctatctcctttctcttcttacccaaatcacaatccgaaca

SEQ ID NO: 31055 - DNA, 547 bp, Artificial Sequence
  chemically treated genomic DNA (Homo sapiens) CpG-island No: 31055
tttttttcggtttgtatgataggttttttttttattttcggtttttgggattcgggtgtattacggttttcggtgttatggttgtttgaagtttcgggagtcggtgaggcggttgtaggtttttttttgcggagtcgttggttcggttggcggagatgtgatcgcgggttcggtcggtttgttttaggcgtcgcgttagttttcgtgttcgtgtttttaatttatatcgatggcgggattcggttgcgtttggggcgcggagtcgtcgcgttttttggaggttttcgggcggttgtggtaggtatagagtcgtttgggtagcggttttttcgtttcggtgtatcgggttcgttgttgcggtaattttggttcgtttttcggcgtttttaagtagtttttgtcgttaggaattatcggggttgcggtttttgtcgtcgagtatggttttcgtaaagagagggcggcgttggaatagttgtagggttatagaaatatcggtaattgtcgttgttttttttttttttttgtttaggttatagttcgagta

SEQ ID NO: 31056 - DNA, 547 bp, Artificial Sequence
  chemically treated genomic DNA (Homo sapiens) CpG-island No: 31056
tactcgaactataacctaaacaaaaaaaaaaaaaaaacaacgacaattaccgatatttctataaccctacaactattccaacgccgccctctctttacgaaaaccatactcgacgacaaaaaccgcaaccccgataattcctaacgacaaaaactacttaaaaacgccgaaaaacgaaccaaaattaccgcaacaacgaacccgatacaccgaaacgaaaaaaccgctacccaaacgactctatacctaccacaaccgcccgaaaacctccaaaaaacgcgacgactccgcgccccaaacgcaaccgaatcccgccatcgatataaattaaaaacacgaacacgaaaactaacgcgacgcctaaaacaaaccgaccgaacccgcgatcacatctccgccaaccgaaccaacgactccgcaaaaaaaaacctacaaccgcctcaccgactcccgaaacttcaaacaaccataacaccgaaaaccgtaatacacccgaatcccaaaaaccgaaaataaaaaaaaaacctatcatacaaaccgaaaaaaa

SEQ ID NO: 31057 - DNA, 657 bp, Artificial Sequence
  chemically treated genomic DNA (Homo sapiens) CpG-island No: 31057
tcggaggtcgtgttcgaggttaagtttaagcgtagtcgcgagtcgtttttgtcgttggggttgcggttgttgagtcgttcgcgttcggaggagcgcggtttttttcgtggggtcgaggaggaggatggtatatatcggtttagttcggcggggatttcgttggagttggtgcgacggtttgagcgtttacgttcggtgtaggattttagggttgtcggagagtttggtttcgttcgtcgtttttcgttgttattgttttagcggttgcggcggatttttttcgcgtagcgttattcggtttgggaggttcgcggcggggacggagagagttcggagggcgggagttcggcgcggggtttttcggtgttggcgatgcgtaggcggttgagttttattttggagcggttgtttagtcgattgtagcgtagtggtagtagcgaggattcggggggcgcgtcgggtcgtagtacgtcgttgttcggacggtttcgtagggttacgttcgagggcgagagtttgcggcgttttggtttttcgtataattagttggtcgtttaggtcggcgttattacgtttttcgtcgagtttttgggtttcgaggttagcgttacgtcgggttttttaggtgaggaggggtaggggtagggtagtaggtgt

SEQ ID NO: 31058 - DNA, 657 bp, Artificial Sequence
  chemically treated genomic DNA (Homo sapiens) CpG-island No: 31058
acacctactaccctacccctacccctcctcacctaaaaaacccgacgtaacgctaacctcgaaacccaaaaactcgacgaaaaacgtaataacgccgacctaaacgaccaactaattatacgaaaaaccaaaacgccgcaaactctcgccctcgaacgtaaccctacgaaaccgtccgaacaacgacgtactacgacccgacgcgccccccgaatcctcgctactaccactacgctacaatcgactaaacaaccgctccaaaataaaactcaaccgcctacgcatcgccaacaccgaaaaaccccgcgccgaactcccgccctccgaactctctccgtccccgccgcgaacctcccaaaccgaataacgctacgcgaaaaaaatccgccgcaaccgctaaaacaataacaacgaaaaacgacgaacgaaaccaaactctccgacaaccctaaaatcctacaccgaacgtaaacgctcaaaccgtcgcaccaactccaacgaaatccccgccgaactaaaccgatatataccatcctcctcctcgaccccacgaaaaaaaccgcgctcctccgaacgcgaacgactcaacaaccgcaaccccaacgacaaaaacgactcgcgactacgcttaaacttaacctcgaacacgacctccga

SEQ ID NO: 31059 - DNA, 657 bp, Artificial Sequence
  chemically treated genomic DNA (Homo sapiens) CpG-island No: 31059
gtatttgttgttttatttttgtttttttttatttgaggagttcgacgtggcgttggtttcggagtttagggattcggcggaaggcgtggtggcgtcggtttgggcggttaattggttgtgcggaaggttaaggcgtcgtagattttcgttttcggacgtggttttgcgaagtcgttcgaatagcggcgtgttgcggttcgacgcgtttttcgagttttcgttgttgttattgcgttgtaatcggttggatagtcgttttagggtgaagtttagtcgtttgcgtatcgttagtatcggggagtttcgcgtcgagttttcgtttttcgagtttttttcgttttcgtcgcgggttttttaggtcgggtggcgttgcgcgggaggggttcgtcgtagtcgttgggatagtgatagcgagaggcggcggacgaggttaggtttttcgatagttttgaggttttgtatcgagcgtgagcgtttaggtcgtcgtattagttttagcggggttttcgtcgggttgggtcggtatatgttattttttttttcggttttacggaaggggtcgcgttttttcgagcgcgaacggtttagtagtcgtagttttagcgataggggcgattcgcggttgcgtttgaatttggtttcgaatacggttttcga

SEQ ID NO: 31060 - DNA, 657 bp, Artificial Sequence
  chemically treated genomic DNA (Homo sapiens) CpG-island No: 31060
tcgaaaaccgtattcgaaaccaaattcaaacgcaaccgcgaatcgcccctatcgctaaaactacgactactaaaccgttcgcgctcgaaaaaacgcgaccccttccgtaaaaccgaaaaaaaaaataacatataccgacccaacccgacgaaaaccccgctaaaactaatacgacgacctaaacgctcacgctcgatacaaaacctcaaaactatcgaaaaacctaacctcgtccgccgcctctcgctatcactatcccaacgactacgacgaacccctcccgcgcaacgccacccgacctaaaaaacccgcgacgaaaacgaaaaaaactcgaaaaacgaaaactcgacgcgaaactccccgatactaacgatacgcaaacgactaaacttcaccctaaaacgactatccaaccgattacaacgcaataacaacaacgaaaactcgaaaaacgcgtcgaaccgcaacacgccgctattcgaacgacttcgcaaaaccacgtccgaaaacgaaaatctacgacgccttaaccttccgcacaaccaattaaccgcccaaaccgacgccaccacgccttccgccgaatccctaaactccgaaaccaacgccacgtcgaactcctcaaataaaaaaaaacaaaaataaaacaacaaatac

SEQ ID NO: 31061 - DNA, 722 bp, Artificial Sequence
  chemically treated genomic DNA (Homo sapiens) CpG-island No: 31061
cgtcgtcgtcgtcgtcgtagagttgtagttcggggtcgagggtaaggaggcgagtcgggagcgggaggttcgggagagtttcgcgggttttcgcgtttagtttttagtcgcgtttcgatttcgtcgtttcgggtttcggttcgtttttcgtatttttttttgtttttttatcgttcgtcgttgtaggcggtcggtcgtcgcgatgaaggcgagttcgggggattaggggagtttttcgtgttttttgcgtttttcgcggtttgtgcgggtggtaagtggcgtcgaggtcgagtttaagtgcgtggttttgggggagtcgtcgtttgtagtggtgtgggagaagggcgggtagtagttggcggtttcggaacgtttgagtttttcggcggacggcgcggagtacggtttgttgttgatcgtcgtattgtttatcgacgcgggggtttacgtgtgtcgcgttcgtaacgcggtcggcgaggtttacgcggcggtcgtcgttatcgtgttggagtcgtcggttttcgatttcgagttgtagttcgtcgagcgttcgttgttatcgtcggggttcggggagggcgtttcggttttttttacggggtttcgattttagtgggtgttgcggggggcggaggtggtgttgacgtgtcgggcggggggttttttcgagtttatattgtattgggagaaggacgggatggttttggacgaagtgtgggata

SEQ ID NO: 31062 - DNA, 722 bp, Artificial Sequence
  chemically treated genomic DNA (Homo sapiens) CpG-island No: 31062
tatcccacacttcgtccaaaaccatcccgtccttctcccaatacaatataaactcgaaaaaaccccccgcccgacacgtcaacaccacctccgccccccgcaacacccactaaaatcgaaaccccgtaaaaaaaaccgaaacgccctccccgaaccccgacgataacaacgaacgctcgacgaactacaactcgaaatcgaaaaccgacgactccaacacgataacgacgaccgccgcgtaaacctcgccgaccgcgttacgaacgcgacacacgtaaacccccgcgtcgataaacaatacgacgatcaacaacaaaccgtactccgcgccgtccgccgaaaaactcaaacgttccgaaaccgccaactactacccgcccttctcccacaccactacaaacgacgactcccccaaaaccacgcacttaaactcgacctcgacgccacttaccacccgcacaaaccgcgaaaaacgcaaaaaacacgaaaaactcccctaatcccccgaactcgccttcatcgcgacgaccgaccgcctacaacgacgaacgataaaaaaacaaaaaaaaatacgaaaaacgaaccgaaacccgaaacgacgaaatcgaaacgcgactaaaaactaaacgcgaaaacccgcgaaactctcccgaacctcccgctcccgactcgcctccttaccctcgaccccgaactacaactctacgacgacgacgacgacg

SEQ ID NO: 31063 - DNA, 722 bp, Artificial Sequence
  chemically treated genomic DNA (Homo sapiens) CpG-island No: 31063
tgttttatatttcgtttagggttatttcgttttttttttagtatagtgtgggttcggggaggtttttcgttcggtacgttagtattattttcgtttttcgtagtatttattgggatcgaggtttcgtgaggaagatcggggcgtttttttcggatttcggcgatggtagcgggcgttcggcgggttgtagttcggggtcggaggtcggcggttttagtacggtgacggcggtcgtcgcgtaggtttcgtcggtcgcgttgcgggcgcggtatacgtagattttcgcgtcggtgggtagtgcggcggttagtagtaggtcgtgtttcgcgtcgttcgtcgggaagtttaggcgtttcgaggtcgttagttgttgttcgttttttttttatattattataggcggcggtttttttaggattacgtatttgagttcggtttcggcgttatttattattcgtataggtcgcgggaagcgtaggaagtacggggggtttttttgatttttcgagttcgtttttatcgcggcggtcgatcgtttgtagcggcgaacggtgggggggtaggggggggtgcggagggcgagtcgaggttcggggcggcggggtcggggcgcggttggggattgggcgcggggattcgcggagttttttcgggtttttcgttttcggttcgtttttttattttcggtttcgagttgtagttttgcggcggcggcggcggcg

SEQ ID NO: 31064 - DNA, 722 bp, Artificial Sequence
  chemically treated genomic DNA (Homo sapiens) CpG-island No: 31064
cgccgccgccgccgccgcaaaactacaactcgaaaccgaaaataaaaaaacgaaccgaaaacgaaaaacccgaaaaaactccgcgaatccccgcgcccaatccccaaccgcgccccgaccccgccgccccgaacctcgactcgccctccgcacccccccctacccccccaccgttcgccgctacaaacgatcgaccgccgcgataaaaacgaactcgaaaaatcaaaaaaaccccccgtacttcctacgcttcccgcgacctatacgaataataaataacgccgaaaccgaactcaaatacgtaatcctaaaaaaaccgccgcctataataatataaaaaaaaaacgaacaacaactaacgacctcgaaacgcctaaacttcccgacgaacgacgcgaaacacgacctactactaaccgccgcactacccaccgacgcgaaaatctacgtataccgcgcccgcaacgcgaccgacgaaacctacgcgacgaccgccgtcaccgtactaaaaccgccgacctccgaccccgaactacaacccgccgaacgcccgctaccatcgccgaaatccgaaaaaaacgccccgatcttcctcacgaaacctcgatcccaataaatactacgaaaaacgaaaataatactaacgtaccgaacgaaaaacctccccgaacccacactatactaaaaaaaaaacgaaataaccctaaacgaaatataaaaca

SEQ ID NO: 31065 - DNA, 583 bp, Artificial Sequence
  chemically treated genomic DNA (Homo sapiens) CpG-island No: 31065
atttcgcgttttagtcgggtcgcgtcgaggacggtttcggcgcgagtttggtattgcgtattttggcggttcggttgtcggatttcggcgtttacgtgtgttacgttcgtaacgcgtacggttacgcgtaggcgggggcgttgttttaggtgtattagtttttcgagagttcgttcgcggatttcgacgaggttttcgcgtcggtggtggagtcgtttaagtgcgcgtttaagattttttgggtgaacgagggtaagtacgttaagtttcgttgttacgtgatgggtaagttcgagttcgagatcgaatggtattgggagggtcgttcgttgttttcggatcgtcgtcgttttatgtatcgcgatcgcgacggcggtttcgtgtttaaggtgttttattgttaggttaaggatcgtgggttttacgtttgcgtcgcgcgtaattcggcgggttagacgtttagtgtcgtgtagttgtacgtgaaaggtacggcggagttcgggatttagggaggggtttcgagtgtttttcgaggtttttcgaattttagtttttttcggtgtttagcgttgtttttaagatt

SEQ ID NO: 31066 - DNA, 583 bp, Artificial Sequence
  chemically treated genomic DNA (Homo sapiens) CpG-island No: 31066
aatcttaaaaacaacgctaaacaccgaaaaaaactaaaattcgaaaaacctcgaaaaacactcgaaacccctccctaaatcccgaactccgccgtacctttcacgtacaactacacgacactaaacgtctaacccgccgaattacgcgcgacgcaaacgtaaaacccacgatccttaacctaacaataaaacaccttaaacacgaaaccgccgtcgcgatcgcgatacataaaacgacgacgatccgaaaacaacgaacgaccctcccaataccattcgatctcgaactcgaacttacccatcacgtaacaacgaaacttaacgtacttaccctcgttcacccaaaaaatcttaaacgcgcacttaaacgactccaccaccgacgcgaaaacctcgtcgaaatccgcgaacgaactctcgaaaaactaatacacctaaaacaacgcccccgcctacgcgtaaccgtacgcgttacgaacgtaacacacgtaaacgccgaaatccgacaaccgaaccgccaaaatacgcaataccaaactcgcgccgaaaccgtcctcgacgcgacccgactaaaacgcgaaat

SEQ ID NO: 31067 - DNA, 583 bp, Artificial Sequence
  chemically treated genomic DNA (Homo sapiens) CpG-island No: 31067
agttttgggggtagcgttgggtatcgaggagggttggagttcggagggtttcggaggatattcgaggtttttttttaggtttcgggtttcgtcgtattttttacgtgtagttgtacggtattgagcgtttggttcgtcgagttgcgcgcggcgtagacgtagagtttacgatttttggtttggtagtaaagtattttgagtacgaagtcgtcgtcgcggtcgcggtatatgaggcggcggcggttcgggagtagcgggcggtttttttagtgttattcgatttcgggttcgggtttgtttattacgtagtagcggaatttggcgtgtttgttttcgtttatttagaaggttttaggcgcgtatttgagcggttttattatcggcgcgggggtttcgtcggggttcgcgggcgggttttcggggggttggtgtatttggagtagcgttttcgtttgcgcgtggtcgtgcgcgttgcgggcgtggtatacgtagacgtcggaattcggtagtcgagtcgttaggatgcgtagtgttaggttcgcgtcggggtcgttttcggcgcggttcggttggagcgcgaagt

SEQ ID NO: 31068 - DNA, 583 bp, Artificial Sequence
  chemically treated genomic DNA (Homo sapiens) CpG-island No: 31068
acttcgcgctccaaccgaaccgcgccgaaaacgaccccgacgcgaacctaacactacgcatcctaacgactcgactaccgaattccgacgtctacgtataccacgcccgcaacgcgcacgaccacgcgcaaacgaaaacgctactccaaatacaccaaccccccgaaaacccgcccgcgaaccccgacgaaacccccgcgccgataataaaaccgctcaaatacgcgcctaaaaccttctaaataaacgaaaacaaacacgccaaattccgctactacgtaataaacaaacccgaacccgaaatcgaataacactaaaaaaaccgcccgctactcccgaaccgccgccgcctcatataccgcgaccgcgacgacgacttcgtactcaaaatactttactaccaaaccaaaaatcgtaaactctacgtctacgccgcgcgcaactcgacgaaccaaacgctcaataccgtacaactacacgtaaaaaatacgacgaaacccgaaacctaaaaaaaaacctcgaatatcctccgaaaccctccgaactccaaccctcctcgatacccaacgctacccccaaaact

SEQ ID NO: 31069 - DNA, 855 bp, Artificial Sequence
  chemically treated genomic DNA (Homo sapiens) CpG-island No: 31069
ttcgtcggttcgcggtttttgggttttttaggttcgtttttcggttttttcgcgttgttcggagagggcggttgggcggcggcggggtttacggttcgcgatgttttgggggtggagggtcgagagaagagcgggggttcgtcgggttttcgaggggatggggtacgttgtagcgtggcgcgtagggattcgtgcgagcgtattagtttttttcgcgacgtggagcggcggatgcggtttagtttttgggcgaagcgtagttcgaggtttgaggtcgggttgcgttgacgcgtgcgttcgtttagcgaggtcgttttttgttggaataggcggcgtcgttcggttacgttgtttggcgttcgtagttttttttgcgaggtttcgggggtgttttacggtgcgtcgcgtttcgatttgggttgttttagagagcgggttttgcgtaggggtatttagggtcgtaggggcgtcggcggcgagtcgttgcgttttagggtgcgtcgtcgtttttcgaagaattgtagtttgtttaggatgcgggagtcggcgcgtattagtataggcgatcggtttaacgtcgataggcggtttgaggtttcgtttagtggcgtttggggtcgggatttcgcggtgttcgttagggagggttcggacgatttggattttttttttcgttttttttcggtggtggtgttttcgggtagtataggtttttgagtgcgacggtggggcgacgtgggggtggtcgcgggttgggtcgggggtttcggcggggatcgtttttcgattcgaggggacggtggggggagtagcgcggatttggaaggaggcggttgggtagggcggcgtggggtt

SEQ ID NO: 31070 - DNA, 855 bp, Artificial Sequence
  chemically treated genomic DNA (Homo sapiens) CpG-island No: 31070
aaccccacgccgccctacccaaccgcctccttccaaatccgcgctactccccccaccgtcccctcgaatcgaaaaacgatccccgccgaaacccccgacccaacccgcgaccacccccacgtcgccccaccgtcgcactcaaaaacctatactacccgaaaacaccaccaccgaaaaaaaacgaaaaaaaaaatccaaatcgtccgaaccctccctaacgaacaccgcgaaatcccgaccccaaacgccactaaacgaaacctcaaaccgcctatcgacgttaaaccgatcgcctatactaatacgcgccgactcccgcatcctaaacaaactacaattcttcgaaaaacgacgacgcaccctaaaacgcaacgactcgccgccgacgcccctacgaccctaaatacccctacgcaaaacccgctctctaaaacaacccaaatcgaaacgcgacgcaccgtaaaacacccccgaaacctcgcaaaaaaaactacgaacgccaaacaacgtaaccgaacgacgccgcctattccaacaaaaaacgacctcgctaaacgaacgcacgcgtcaacgcaacccgacctcaaacctcgaactacgcttcgcccaaaaactaaaccgcatccgccgctccacgtcgcgaaaaaaactaatacgctcgcacgaatccctacgcgccacgctacaacgtaccccatcccctcgaaaacccgacgaacccccgctcttctctcgaccctccacccccaaaacatcgcgaaccgtaaaccccgccgccgcccaaccgccctctccgaacaacgcgaaaaaaccgaaaaacgaacctaaaaaacccaaaaaccgcgaaccgacgaa

SEQ ID NO: 31071 - DNA, 855 bp, Artificial Sequence
  chemically treated genomic DNA (Homo sapiens) CpG-island No: 31071
agttttacgtcgttttgtttagtcgtttttttttaaattcgcgttgttttttttatcgttttttcgggtcgggaagcggttttcgtcgggattttcggtttagttcgcggttatttttacgtcgttttatcgtcgtatttaggagtttgtgttgttcgaggatattattatcgaagagaagcgagggaagaagtttaagtcgttcgggttttttttggcgggtatcgcggaatttcgattttagacgttattgagcgaggttttaggtcgtttgtcggcgttgggtcgatcgtttatgttggtgcgcgtcggttttcgtattttggataagttgtagtttttcgaggagcgacggcgtattttggagcgtagcgattcgtcgtcggcgtttttgcggttttgggtgtttttgcgtaaggttcgttttttggagtagtttaagtcggagcgcggcgtatcgtggggtattttcggggtttcgtaggaagaattgcgggcgttaggtagcgtggtcgagcggcgtcgtttgttttagtagaaagcggtttcgttggacgagcgtacgcgttagcgtagttcggttttagatttcgagttgcgtttcgtttaggagttgggtcgtattcgtcgttttacgtcgcgggaggagttggtgcgttcgtacgagtttttgcgcgttacgttgtagcgtgttttattttttcgagagttcggcgagttttcgtttttttttcggttttttatttttaagatatcgcgggtcgtgagtttcgtcgtcgtttagtcgtttttttcgagtagcgcggagaagtcgggggacgagtttgggaggtttaggagtcgcgggtcggcggg

SEQ ID NO: 31072 - DNA, 855 bp, Artificial Sequence
  chemically treated genomic DNA (Homo sapiens) CpG-island No: 31072
cccgccgacccgcgactcctaaacctcccaaactcgtcccccgacttctccgcgctactcgaaaaaaacgactaaacgacgacgaaactcacgacccgcgatatcttaaaaataaaaaaccgaaaaaaaaacgaaaactcgccgaactctcgaaaaaataaaacacgctacaacgtaacgcgcaaaaactcgtacgaacgcaccaactcctcccgcgacgtaaaacgacgaatacgacccaactcctaaacgaaacgcaactcgaaatctaaaaccgaactacgctaacgcgtacgctcgtccaacgaaaccgctttctactaaaacaaacgacgccgctcgaccacgctacctaacgcccgcaattcttcctacgaaaccccgaaaataccccacgatacgccgcgctccgacttaaactactccaaaaaacgaaccttacgcaaaaacacccaaaaccgcaaaaacgccgacgacgaatcgctacgctccaaaatacgccgtcgctcctcgaaaaactacaacttatccaaaatacgaaaaccgacgcgcaccaacataaacgatcgacccaacgccgacaaacgacctaaaacctcgctcaataacgtctaaaatcgaaattccgcgatacccgccaaaaaaaacccgaacgacttaaacttcttccctcgcttctcttcgataataatatcctcgaacaacacaaactcctaaatacgacgataaaacgacgtaaaaataaccgcgaactaaaccgaaaatcccgacgaaaaccgcttcccgacccgaaaaaacgataaaaaaaacaacgcgaatttaaaaaaaaacgactaaacaaaacgacgtaaaact

SEQ ID NO: 31073 - DNA, 924 bp, Artificial Sequence
  chemically treated genomic DNA (Homo sapiens) CpG-island No: 31073
tcggacgtcgttagtgtatgttagggtgggcggaatagggatgcggagcgggaagtttagaggttcgggattaggggttgggggcgggggaaagaatagggacgaggtttatagggtcgtggggcggggttcgtcggagttaggggcggggtttgtttcggtggggcgggatttgttcgagtttgggcggggtagcgaggggttcgaaagggtaattaggcgggtagatttttttgtcggatgcggacgcgggtttcgggttttagcgggcggttttcgagtttttagcgtttcgtggtttcgattttcgatacggtgtattcgaacgtagcgtcgtcgttttcgcgggcgtttatcgatcgtagttcggagagtatcgttatagtacgttttggggcggagttcggggcgtgagcggggcggggttaaagggtagttatcggtacgttttttttacgttttttttttagaagtacgcgcggttattagggttcggggaagatagtttcgtaagtttcgcgtttaaagtagtgtttagtttttatattattttgtatttatcgcgtacggttaggcggatcggttcggcgcgggttgtttttatcgcgtagttgtaggtttcggcgttagaggggtcgtagcgttatagttggagaaggcggcgcgtgtagagggtatggagtcggagtcgcgggataggcgtaagcgcgttttcgttataggggcgggagttgtagagggtcggggcgagttcggatgggtataggcgatttcggtcgtggtaggcggcgtattttttgttgatgttaagcggtttcgaggcgcgtttatgcgtgtttcgtgtttttaggttggggtcggattgtttttaagtttttggggtcgtgttaggagtttttttgaaaaagcgttattttttgggga

SEQ ID NO: 31074 - DNA, 924 bp, Artificial Sequence
  chemically treated genomic DNA (Homo sapiens) CpG-island No: 31074
tccccaaaaaataacgctttttcaaaaaaactcctaacacgaccccaaaaacttaaaaacaatccgaccccaacctaaaaacacgaaacacgcataaacgcgcctcgaaaccgcttaacatcaacaaaaaatacgccgcctaccacgaccgaaatcgcctatacccatccgaactcgccccgaccctctacaactcccgcccctataacgaaaacgcgcttacgcctatcccgcgactccgactccataccctctacacgcgccgccttctccaactataacgctacgacccctctaacgccgaaacctacaactacgcgataaaaacaacccgcgccgaaccgatccgcctaaccgtacgcgataaatacaaaataatataaaaactaaacactactttaaacgcgaaacttacgaaactatcttccccgaaccctaataaccgcgcgtacttctaaaaaaaaaacgtaaaaaaaacgtaccgataactaccctttaaccccgccccgctcacgccccgaactccgccccaaaacgtactataacgatactctccgaactacgatcgataaacgcccgcgaaaacgacgacgctacgttcgaatacaccgtatcgaaaatcgaaaccacgaaacgctaaaaactcgaaaaccgcccgctaaaacccgaaacccgcgtccgcatccgacaaaaaaatctacccgcctaattaccctttcgaacccctcgctaccccgcccaaactcgaacaaatcccgccccaccgaaacaaaccccgcccctaactccgacgaaccccgccccacgaccctataaacctcgtccctattctttcccccgcccccaacccctaatcccgaacctctaaacttcccgctccgcatccctattccgcccaccctaacatacactaacgacgtccga

SEQ ID NO: 31075 - DNA, 924 bp, Artificial Sequence
  chemically treated genomic DNA (Homo sapiens) CpG-island No: 31075
tttttaaagggtgacgtttttttaaagaggtttttggtacgattttaaaggtttggggatagttcgattttagtttgggaatacgagatacgtataaacgcgtttcgagatcgtttggtattaataaagggtgcgtcgtttgttacggtcggggtcgtttgtgtttattcgggttcgtttcgattttttgtaattttcgtttttatgacgggaacgcgtttacgtttatttcgcggtttcggttttatgttttttgtacgcgtcgttttttttagttgtgacgttgcggtttttttgacgtcgggatttatagttgcgcggtggggatagttcgcgtcggatcggttcgtttgatcgtgcgcggtgggtatagggtgatgtggaggttgggtattgttttgggcgcgagatttgcggagttgtttttttcggattttgatgatcgcgcgtgtttttagaaagggggcgtggagggggcgtgtcggtaattgttttttggtttcgtttcgtttacgtttcgggtttcgttttagagcgtattgtggcggtatttttcgagttgcggtcggtgagcgttcgcgaaggcgacggcgttacgttcgagtgtatcgtgtcggaggtcgagattacggggcgttgggagttcggaggtcgttcgttgagattcggagttcgcgttcgtattcgataggaaggtttgttcgtttggttattttttcgggtttttcgttgtttcgtttaggttcgaatagatttcgttttatcgggataagtttcgtttttggtttcgacgggtttcgttttacggttttgtgagtttcgtttttgttttttttttcgtttttagtttttagtttcggatttttaggtttttcgtttcgtatttttgtttcgtttattttagtatatattaacggcgttcga

SEQ ID NO: 31076 - DNA, 924 bp, Artificial Sequence
  chemically treated genomic DNA (Homo sapiens) CpG-island No: 31076
tcgaacgccgttaatatatactaaaataaacgaaacaaaaatacgaaacgaaaaacctaaaaatccgaaactaaaaactaaaaacgaaaaaaaaaacaaaaacgaaactcacaaaaccgtaaaacgaaacccgtcgaaaccaaaaacgaaacttatcccgataaaacgaaatctattcgaacctaaacgaaacaacgaaaaacccgaaaaaataaccaaacgaacaaaccttcctatcgaatacgaacgcgaactccgaatctcaacgaacgacctccgaactcccaacgccccgtaatctcgacctccgacacgatacactcgaacgtaacgccgtcgccttcgcgaacgctcaccgaccgcaactcgaaaaataccgccacaatacgctctaaaacgaaacccgaaacgtaaacgaaacgaaaccaaaaaacaattaccgacacgccccctccacgccccctttctaaaaacacgcgcgatcatcaaaatccgaaaaaaacaactccgcaaatctcgcgcccaaaacaatacccaacctccacatcaccctatacccaccgcgcacgatcaaacgaaccgatccgacgcgaactatccccaccgcgcaactataaatcccgacgtcaaaaaaaccgcaacgtcacaactaaaaaaaacgacgcgtacaaaaaacataaaaccgaaaccgcgaaataaacgtaaacgcgttcccgtcataaaaacgaaaattacaaaaaatcgaaacgaacccgaataaacacaaacgaccccgaccgtaacaaacgacgcaccctttattaataccaaacgatctcgaaacgcgtttatacgtatctcgtattcccaaactaaaatcgaactatccccaaacctttaaaatcgtaccaaaaacctctttaaaaaaacgtcaccctttaaaaa

SEQ ID NO: 31077 - DNA, 509 bp, Artificial Sequence
  chemically treated genomic DNA (Homo sapiens) CpG-island No: 31077
ggggtacgtatgagatggtgcgttcgcggtaaaggttgtggtcgggtttgttttatgaattttgggttttgattttgttcgcgggtatgttttcgaaggagttgcgcgagaaagggtcgtcgcgggtgttggagtcgttgaaagacgcggtgttgatcgaaagtagcgcggttaagtttatttgtcgtattttggttttttcggatttatttattcgttggagtaaggacggtaaggagttacgtgacggttttaagtatcgttacgttttcgaggattttgacgtggtggtattggtggtgcgcgacggcgagttggtagatttgggttagtatagtattaacgttattaattttttcggttagtgtttcgattcggcgcgtattttcgtggaaggtacgcgcgtttcgggcgtagcgttagggcgtagattagtattatttagttagagttcgtagttcggtttagttgcgcgtgtttatttttgggtttagttatagggttttcgt

SEQ ID NO: 31078 - DNA, 509 bp, Artificial Sequence
  chemically treated genomic DNA (Homo sapiens) CpG-island No: 31078
acgaaaaccctataactaaacccaaaaataaacacgcgcaactaaaccgaactacgaactctaactaaataatactaatctacgccctaacgctacgcccgaaacgcgcgtaccttccacgaaaatacgcgccgaatcgaaacactaaccgaaaaaattaataacgttaatactatactaacccaaatctaccaactcgccgtcgcgcaccaccaataccaccacgtcaaaatcctcgaaaacgtaacgatacttaaaaccgtcacgtaactccttaccgtccttactccaacgaataaataaatccgaaaaaaccaaaatacgacaaataaacttaaccgcgctactttcgatcaacaccgcgtctttcaacgactccaacacccgcgacgaccctttctcgcgcaactccttcgaaaacatacccgcgaacaaaatcaaaacccaaaattcataaaacaaacccgaccacaacctttaccgcgaacgcaccatctcatacgtacccc

SEQ ID NO: 31079 - DNA, 509 bp, Artificial Sequence
  chemically treated genomic DNA (Homo sapiens) CpG-island No: 31079
gcggggattttgtagttaggtttagaggtaaatacgcgtagttggatcgggttgcgggttttggttgagtggtgttggtttgcgttttggcgttgcgttcggggcgcgcgtattttttacgaggatgcgcgtcgagtcggagtattggtcgaaggggttggtgacgttgatgttgtattggtttaggtttgttagttcgtcgtcgcgtattattagtgttattacgttagggttttcgaagacgtagcggtatttgggatcgttacgtagttttttgtcgtttttattttagcggatgaatgggttcgggaaagttaaaatgcggtaagtgagtttggtcgcgttgttttcgattagtatcgcgttttttagcggttttagtattcgcggcggttttttttcgcgtagttttttcggggatatattcgcgggtagagttagggtttagagtttataagataggttcggttatagtttttatcgcgagcgtattattttatacgtgtttt

SEQ ID NO: 31080 - DNA, 509 bp, Artificial Sequence
  chemically treated genomic DNA (Homo sapiens) CpG-island No: 31080
aaaacacgtataaaataatacgctcgcgataaaaactataaccgaacctatcttataaactctaaaccctaactctacccgcgaatatatccccgaaaaaactacgcgaaaaaaaaccgccgcgaatactaaaaccgctaaaaaacgcgatactaatcgaaaacaacgcgaccaaactcacttaccgcattttaactttcccgaacccattcatccgctaaaataaaaacgacaaaaaactacgtaacgatcccaaataccgctacgtcttcgaaaaccctaacgtaataacactaataatacgcgacgacgaactaacaaacctaaaccaatacaacatcaacgtcaccaaccccttcgaccaatactccgactcgacgcgcatcctcgtaaaaaatacgcgcgccccgaacgcaacgccaaaacgcaaaccaacaccactcaaccaaaacccgcaacccgatccaactacgcgtatttacctctaaacctaactacaaaatccccgc

SEQ ID NO: 31081 - DNA, 688 bp, Artificial Sequence
  chemically treated genomic DNA (Homo sapiens) CpG-island No: 31081
gcgttcgacgtcgacgcgcgcgcgttggttagtgagtatttttatttggcgtcgtagttttcgtagttttttttcgtagagttcggttattcgcgtcggttcgcggtttttgagtcggtttatttcggcggcgagcgtcgcgttttgttgttttaggaagcgtattttttcgatgtagttggcgaagcggttattgagtttttgtagttttattttttcgttggtgcgcgtggttagaaatttttggtttatcgcgtcggttagtgagaagtttagtagttcgtttgcgtcgtaggaggagggcgtgcgggtggtttttagtcggttggttcgtagcgattttaggttttcggtttcgttcgacgtgcgcgatatttggtatacgcgggacgttatcgagttggaggagtttttagagtcgaaattcgttcgcgggaatacgggcgaatttagcggggagtcgagtgggaagttcggggtttcgtcgaaggtgcggcggtaggaggatacgcgttggttggacgagtaggtttggtttatggtgacggcgcgggcgaggttggcgggcgtacggaggaggcggcgggtaggcggtcggtcggagagtggatgcggcgaggggagatagggtttttagtcgtcggtattatttgtattttttttgatattagttttcgttttttttttt

SEQ ID NO: 31082 - DNA, 688 bp, Artificial Sequence
  chemically treated genomic DNA (Homo sapiens) CpG-island No: 31082
aaaaaaaaaaacgaaaactaatatcaaaaaaaatacaaataataccgacgactaaaaaccctatctcccctcgccgcatccactctccgaccgaccgcctacccgccgcctcctccgtacgcccgccaacctcgcccgcgccgtcaccataaaccaaacctactcgtccaaccaacgcgtatcctcctaccgccgcaccttcgacgaaaccccgaacttcccactcgactccccgctaaattcgcccgtattcccgcgaacgaatttcgactctaaaaactcctccaactcgataacgtcccgcgtataccaaatatcgcgcacgtcgaacgaaaccgaaaacctaaaatcgctacgaaccaaccgactaaaaaccacccgcacgccctcctcctacgacgcaaacgaactactaaacttctcactaaccgacgcgataaaccaaaaatttctaaccacgcgcaccaacgaaaaaataaaactacaaaaactcaataaccgcttcgccaactacatcgaaaaaatacgcttcctaaaacaacaaaacgcgacgctcgccgccgaaataaaccgactcaaaaaccgcgaaccgacgcgaataaccgaactctacgaaaaaaaactacgaaaactacgacgccaaataaaaatactcactaaccaacgcgcgcgcgtcgacgtcgaacgc

SEQ ID NO: 31083 - DNA, 688 bp, Artificial Sequence
  chemically treated genomic DNA (Homo sapiens) CpG-island No: 31083
gggaggggaggcgggggttgatgttaggagggatataaatagtgtcgacggttgggggttttgttttttttcgtcgtatttatttttcggtcggtcgtttgttcgtcgtttttttcgtgcgttcgttagtttcgttcgcgtcgttattatgagttaggtttattcgtttagttagcgcgtgtttttttatcgtcgtattttcggcggggtttcgggttttttattcggtttttcgttgagttcgttcgtgttttcgcgggcgggtttcggttttaagggtttttttagttcggtgacgtttcgcgtgtattaggtgtcgcgtacgtcgggcggggtcgggggtttggggtcgttgcgggttagtcggttggggattattcgtacgttttttttttacggcgtaggcgagttgttggattttttattggtcgacgcggtgaattaggagtttttgattacgcgtattaacgagaaggtggagttgtaggagtttaatgatcgtttcgttaattatatcgagaaggtgcgttttttggagtagtagaacgcggcgttcgtcgtcgaagtgaatcggtttaagggtcgcgagtcgacgcgagtggtcgagttttacgaggaggagttgcgggagttgcggcgttaggtggaggtgtttattaattagcgcgcgcgcgtcgacgtcgagcgt

SEQ ID NO: 31084 - DNA, 688 bp, Artificial Sequence
  chemically treated genomic DNA (Homo sapiens) CpG-island No: 31084
acgctcgacgtcgacgcgcgcgcgctaattaataaacacctccacctaacgccgcaactcccgcaactcctcctcgtaaaactcgaccactcgcgtcgactcgcgacccttaaaccgattcacttcgacgacgaacgccgcgttctactactccaaaaaacgcaccttctcgatataattaacgaaacgatcattaaactcctacaactccaccttctcgttaatacgcgtaatcaaaaactcctaattcaccgcgtcgaccaataaaaaatccaacaactcgcctacgccgtaaaaaaaaaacgtacgaataatccccaaccgactaacccgcaacgaccccaaacccccgaccccgcccgacgtacgcgacacctaatacacgcgaaacgtcaccgaactaaaaaaacccttaaaaccgaaacccgcccgcgaaaacacgaacgaactcaacgaaaaaccgaataaaaaacccgaaaccccgccgaaaatacgacgataaaaaaacacgcgctaactaaacgaataaacctaactcataataacgacgcgaacgaaactaacgaacgcacgaaaaaaacgacgaacaaacgaccgaccgaaaaataaatacgacgaaaaaaaacaaaacccccaaccgtcgacactatttatatccctcctaacatcaacccccgcctcccctccc

SEQ ID NO: 31085 - DNA, 660 bp, Artificial Sequence
  chemically treated genomic DNA (Homo sapiens) CpG-island No: 31085
cgttcgcgcgttgcggtttataattcgagatcggggtttagtttttagggtttaaaagtgggaagagatttttgtttttatttgcggtttttcgagagtagcggggagtttcggttttgcggtcggtagaagacggtttagcgaagttcgttatgggggagagtagtttgtcggacggggatacgtttcggcgtttcgtttcgaggtttcgtttttttacgcgtagcgcggggcggggttagaagagcgggttaagacgtcggaggaggtggcggcggttgggagaggcgagggttttggtcggtaagtggagttgtggagaggtttagggtggttagggttcgcggttggtcgtgagtcgcggcggatttggtgttgcgggtcgattaggttacgcgaggtggtggagtttgtttatttaggcgagtaggaatcggaagatatggttttttttgatgtagttcgtacgcgcgttggggtgtttattcgttttttagcgcgttgttttgaggatcgggttgattcgcgtttttattgagggtttggggtcgagttttgtcgttaggagaagcgatggtttttttttgaaggtcgtcgttgttttgttttcgtgtgatatagtgattttattagttggattgattattttggggattgtaa

SEQ ID NO: 31086 - DNA, 660 bp, Artificial Sequence
  chemically treated genomic DNA (Homo sapiens) CpG-island No: 31086
ttacaatccccaaaataatcaatccaactaataaaatcactatatcacacgaaaacaaaacaacgacgaccttcaaaaaaaaaccatcgcttctcctaacgacaaaactcgaccccaaaccctcaataaaaacgcgaatcaacccgatcctcaaaacaacgcgctaaaaaacgaataaacaccccaacgcgcgtacgaactacatcaaaaaaaaccatatcttccgattcctactcgcctaaataaacaaactccaccacctcgcgtaacctaatcgacccgcaacaccaaatccgccgcgactcacgaccaaccgcgaaccctaaccaccctaaacctctccacaactccacttaccgaccaaaaccctcgcctctcccaaccgccgccacctcctccgacgtcttaacccgctcttctaaccccgccccgcgctacgcgtaaaaaaacgaaacctcgaaacgaaacgccgaaacgtatccccgtccgacaaactactctcccccataacgaacttcgctaaaccgtcttctaccgaccgcaaaaccgaaactccccgctactctcgaaaaaccgcaaataaaaacaaaaatctcttcccacttttaaaccctaaaaactaaaccccgatctcgaattataaaccgcaacgcgcgaacg

SEQ ID NO: 31087 - DNA, 660 bp, Artificial Sequence
  chemically treated genomic DNA (Homo sapiens) CpG-island No: 31087
ttgtagtttttaaagtgattaatttagttagtgaaattattgtattatacggagataagataacggcggtttttaggaggagattatcgttttttttggcggtaaggttcggttttaagtttttagtaggggcgcgagttagttcggtttttagggtagcgcgttggaaggcgagtgaatattttagcgcgcgtgcgggttgtattagaggaagttatgtttttcgatttttgttcgtttaggtgggtaggttttattatttcgcgtggtttagtcggttcgtagtattaagttcgtcgcggtttacggttaatcgcgagttttggttattttgaatttttttataattttatttatcggttagaattttcgttttttttagtcgtcgttatttttttcggcgttttagttcgtttttttggtttcgtttcgcgttacgcgtagggaggcggggtttcggggcgagacgtcggagcgtgttttcgttcggtagattatttttttttatggcggatttcgttgggtcgttttttgtcggtcgtaaggtcggggtttttcgttgttttcgaaaagtcgtaggtaggagtaaggatttttttttatttttggattttgaaagttgggtttcgatttcgagttatagatcgtagcgcgcgggcg

SEQ ID NO: 31088 - DNA, 660 bp, Artificial Sequence
  chemically treated genomic DNA (Homo sapiens) CpG-island No: 31088
cgcccgcgcgctacgatctataactcgaaatcgaaacccaactttcaaaatccaaaaataaaaaaaaatccttactcctacctacgacttttcgaaaacaacgaaaaaccccgaccttacgaccgacaaaaaacgacccaacgaaatccgccataaaaaaaaataatctaccgaacgaaaacacgctccgacgtctcgccccgaaaccccgcctccctacgcgtaacgcgaaacgaaaccaaaaaaacgaactaaaacgccgaaaaaaataacgacgactaaaaaaaacgaaaattctaaccgataaataaaattataaaaaaattcaaaataaccaaaactcgcgattaaccgtaaaccgcgacgaacttaatactacgaaccgactaaaccacgcgaaataataaaacctacccacctaaacgaacaaaaatcgaaaaacataacttcctctaatacaacccgcacgcgcgctaaaatattcactcgccttccaacgcgctaccctaaaaaccgaactaactcgcgcccctactaaaaacttaaaaccgaaccttaccgccaaaaaaaacgataatctcctcctaaaaaccgccgttatcttatctccgtataatacaataatttcactaactaaattaatcactttaaaaactacaa

SEQ ID NO: 31089 - DNA, 932 bp, Artificial Sequence
  chemically treated genomic DNA (Homo sapiens) CpG-island No: 31089
gttgtcgtttcgggtcgttgtttttcggtcgtttttagataattaattttttaaattttttttttcgggggtgggggttcgtttcgaacgcggttaatataacgttttttttgttcgtataaaggggattaaacgtgtttcgcgttttttgtaattgaatttttttttttttttttaagaaaaatttataatttttgtagttacgggagtcgggttgcgtgagtgtcgcgggggaaatttttttcgttttcgttcgggggtcgggttgtcgggttcgattgttaagcgtagcggagaggcggggattttaggaagattttcggcgtttcgtcgagttcgggttggggattatttattcgatttttgaacgtgcggtgggatcgtgttggcgatacgcgtttataggacgatgtgtagcggttataggtttttgagtagttttcgatttatggtagatttcgttgttcgttatagatcgagtttttagcgtagcggacggcgttttttcggatttttggttgcgttttcgcgtcgcgtttttttcggatttcgcgtcgggtcggtagcgtagatgtgcgggttagatgtggcgttcgttcgttagttaggagggggtttggaggtcggcgaggcgcggggaggttttcggcggtcgagggaagttgtataggagttcggtttttgtttcgagcgggtgtacgcgcgggggtgtcgtcgtttcgtgcgcgcgagtgatttatttaattttaatttagcgttgcgggggaaataggaaatttttcgttaatagttgggtaggattttttttcgttcgagagtttttttttttttttcgacgtttagtttttagttttttcgtagttgttaattatgttttttagattagttttttcgagagttttggtcgatttttagttgttttttatcgtttt

SEQ ID NO: 31090 - DNA, 932 bp, Artificial Sequence
  chemically treated genomic DNA (Homo sapiens) CpG-island No: 31090
aaaacgataaaaaacaactaaaaatcgaccaaaactctcgaaaaaactaatctaaaaaacataattaacaactacgaaaaaactaaaaactaaacgtcgaaaaaaaaaaaaaaactctcgaacgaaaaaaaatcctacccaactattaacgaaaaatttcctatttcccccgcaacgctaaattaaaattaaataaatcactcgcgcgcacgaaacgacgacacccccgcgcgtacacccgctcgaaacaaaaaccgaactcctatacaacttccctcgaccgccgaaaacctccccgcgcctcgccgacctccaaaccccctcctaactaacgaacgaacgccacatctaacccgcacatctacgctaccgacccgacgcgaaatccgaaaaaaacgcgacgcgaaaacgcaaccaaaaatccgaaaaaacgccgtccgctacgctaaaaactcgatctataacgaacaacgaaatctaccataaatcgaaaactactcaaaaacctataaccgctacacatcgtcctataaacgcgtatcgccaacacgatcccaccgcacgttcaaaaatcgaataaataatccccaacccgaactcgacgaaacgccgaaaatcttcctaaaatccccgcctctccgctacgcttaacaatcgaacccgacaacccgacccccgaacgaaaacgaaaaaaatttcccccgcgacactcacgcaacccgactcccgtaactacaaaaattataaatttttcttaaaaaaaaaaaaaaaaattcaattacaaaaaacgcgaaacacgtttaatcccctttatacgaacaaaaaaaacgttatattaaccgcgttcgaaacgaacccccacccccgaaaaaaaaaatttaaaaaattaattatctaaaaacgaccgaaaaacaacgacccgaaacgacaac

SEQ ID NO: 31091 - DNA, 932 bp, Artificial Sequence
  chemically treated genomic DNA (Homo sapiens) CpG-island No: 31091
agggcggtgaggggtagttgaaagtcggttaaagttttcggaggggttggtttaggaaatatgattggtagttacgagagagttaggggttggacgtcgaggagagggagaaggttttcgggcggagagaggttttgtttagttgttggcgaggagttttttgtttttttcgtagcgttgagttgaagttgagtgagttattcgcgcgtacggagcgacgatattttcgcgcgtgtattcgttcgggataggagtcggatttttgtgtagtttttttcggtcgtcgggggttttttcgcgtttcgtcggtttttaggtttttttttggttggcgagcgggcgttatatttggttcgtatatttgcgttgtcggttcggcgcggggttcggagagggcgcggcgcggaggcgtagttaggggttcgggaaggcgtcgttcgttgcgttgggggttcggtttatgacgagtagcggggtttgttatgggtcgggggttgtttaggggtttgtggtcgttgtatatcgttttgtggacgcgtatcgttagtacgattttatcgtacgtttagaagtcgggtgagtggtttttagttcgggttcggcggggcgtcgggggtttttttggggttttcgttttttcgttgcgtttgatagtcgggttcggtaattcggttttcgggcggaaacgaggaaagtttttttcgcgatatttacgtagttcgattttcgtagttgtagggattgtgagttttttttgaaaaagagaaggaaagtttagttgtaaggggcgcggggtacgtttggttttttttgtgcgagtaggaaaggcgttgtgttggtcgcgttcgaggcgagtttttattttcggaaagggaagtttgagaagttggttatttgaaggcggtcggggagtagcggttcggagcggtagt

SEQ ID NO: 31092 - DNA, 932 bp, Artificial Sequence
  chemically treated genomic DNA (Homo sapiens) CpG-island No: 31092
actaccgctccgaaccgctactccccgaccgccttcaaataaccaacttctcaaacttccctttccgaaaataaaaactcgcctcgaacgcgaccaacacaacgcctttcctactcgcacaaaaaaaaccaaacgtaccccgcgccccttacaactaaactttccttctctttttcaaaaaaaactcacaatccctacaactacgaaaatcgaactacgtaaatatcgcgaaaaaaactttcctcgtttccgcccgaaaaccgaattaccgaacccgactatcaaacgcaacgaaaaaacgaaaaccccaaaaaaacccccgacgccccgccgaacccgaactaaaaaccactcacccgacttctaaacgtacgataaaatcgtactaacgatacgcgtccacaaaacgatatacaacgaccacaaacccctaaacaacccccgacccataacaaaccccgctactcgtcataaaccgaacccccaacgcaacgaacgacgccttcccgaacccctaactacgcctccgcgccgcgccctctccgaaccccgcgccgaaccgacaacgcaaatatacgaaccaaatataacgcccgctcgccaaccaaaaaaaaacctaaaaaccgacgaaacgcgaaaaaacccccgacgaccgaaaaaaactacacaaaaatccgactcctatcccgaacgaatacacgcgcgaaaatatcgtcgctccgtacgcgcgaataactcactcaacttcaactcaacgctacgaaaaaaacaaaaaactcctcgccaacaactaaacaaaacctctctccgcccgaaaaccttctccctctcctcgacgtccaacccctaactctctcgtaactaccaatcatatttcctaaaccaacccctccgaaaactttaaccgactttcaactacccctcaccgccct

SEQ ID NO: 31093 - DNA, 805 bp, Artificial Sequence
  chemically treated genomic DNA (Homo sapiens) CpG-island No: 31093
gtatattcgattttgtagtatttttttttacgtagtttgcgatcgggacgtttgtaggaggcgttagagttttcgcgggggttgtaatttcgcgtaagggttttcggtttttaaggtattcgtaatttttcgatttttcgggaaggttttgtacgtttcggtcgttttttgttagtagttcgtttcgttattatatttcgtcgcggtcgcgttgacgttattatttcgttttttcgttttgtttcgtcgttttcgtttcgttttttttttcggcgtgcgtcgcggttgaggtttttcgtttttagtttttgtttgtcgttttaaaatggcggatataatgagtcggcgacgcgtcggttgttcgtgaggtggttgtgaggacgaacggtcggcgaggttttatagtttaggtagaagattttcgattaagtaggaagaagaggaggaggcggtttaattgttggtcgatttttcgttagtcgtcggcgcggcgttcgtttcgtttgggttggtttttcggtagttcgttcgttcgtcgtcgggtttcgtttcggttttgcgtcgtcgttgttttttttagtcgtcgttatgaagttgatcgatagcgtgttgcggagttttcgcgtcgttaaggtgtttcgcgaaaattcggataagattaattgtttcgattttagttttaacggcgagacggttatttcgagtagcgacgacgattttatcgtgttttatgattgttaggagggtaagtgagtgcggcggaggttttgggttcgagttttagtgttttttttcggtggtttag

SEQ ID NO: 31094 - DNA, 805 bp, Artificial Sequence
  chemically treated genomic DNA (Homo sapiens) CpG-island No: 31094
ctaaaccaccgaaaaaaaacactaaaactcgaacccaaaacctccgccgcactcacttaccctcctaacaatcataaaacacgataaaatcgtcgtcgctactcgaaataaccgtctcgccgttaaaactaaaatcgaaacaattaatcttatccgaattttcgcgaaacaccttaacgacgcgaaaactccgcaacacgctatcgatcaacttcataacgacgactaaaaaaaacaacgacgacgcaaaaccgaaacgaaacccgacgacgaacgaacgaactaccgaaaaaccaacccaaacgaaacgaacgccgcgccgacgactaacgaaaaatcgaccaacaattaaaccgcctcctcctcttcttcctacttaatcgaaaatcttctacctaaactataaaacctcgccgaccgttcgtcctcacaaccacctcacgaacaaccgacgcgtcgccgactcattatatccgccattttaaaacgacaaacaaaaactaaaaacgaaaaacctcaaccgcgacgcacgccgaaaaaaaaaacgaaacgaaaacgacgaaacaaaacgaaaaaacgaaataataacgtcaacgcgaccgcgacgaaatataataacgaaacgaactactaacaaaaaacgaccgaaacgtacaaaaccttcccgaaaaatcgaaaaattacgaataccttaaaaaccgaaaacccttacgcgaaattacaacccccgcgaaaactctaacgcctcctacaaacgtcccgatcgcaaactacgtaaaaaaaaatactacaaaatcgaatatac

SEQ ID NO: 31095 - DNA, 805 bp, Artificial Sequence
  chemically treated genomic DNA (Homo sapiens) CpG-island No: 31095
ttgggttatcggagggaggtattgagattcgggtttagggttttcgtcgtatttatttgtttttttggtagttatagagtacgatggagtcgtcgtcgttattcgagatgatcgtttcgtcgttggggttgaaatcgaagtagttaattttgttcgagttttcgcggaatattttagcgacgcggaagtttcgtaatacgttgtcggttagttttatggcggcggttggggaaggtagcggcggcgtagggtcggggcggggttcggcggcgagcgggcgggttgtcgaggggttaatttaggcggggcgggcgtcgcgtcggcggttagcgggaagtcggttaatagttgggtcgttttttttttttttttttgtttggtcgagggttttttgtttggattgtggagtttcgtcgatcgttcgtttttatagttattttacggataatcggcgcgtcgtcggtttattgtgttcgttattttggggcgataggtagaagttgagggcgaggagttttagtcgcggcgtacgtcgggaaagggggcggggcgggaacggcggagtaaggcggggaggcggggtggtgacgttagcgcggtcgcggcggagtgtagtggcggggcgggttgttggtagggagcggtcgagacgtgtagggttttttcgggggatcggaaggttgcggatgttttgggagtcgggggtttttgcgcgggattgtaattttcgcgaagattttggcgttttttgtaggcgtttcgatcgtaggttgcgtgggagggggtattgtagggtcgggtatgt

SEQ ID NO: 31096 - DNA, 805 bp, Artificial Sequence
  chemically treated genomic DNA (Homo sapiens) CpG-island No: 31096
acatacccgaccctacaataccccctcccacgcaacctacgatcgaaacgcctacaaaaaacgccaaaatcttcgcgaaaattacaatcccgcgcaaaaacccccgactcccaaaacatccgcaaccttccgatcccccgaaaaaaccctacacgtctcgaccgctccctaccaacaacccgccccgccactacactccgccgcgaccgcgctaacgtcaccaccccgcctccccgccttactccgccgttcccgccccgccccctttcccgacgtacgccgcgactaaaactcctcgccctcaacttctacctatcgccccaaaataacgaacacaataaaccgacgacgcgccgattatccgtaaaataactataaaaacgaacgatcgacgaaactccacaatccaaacaaaaaaccctcgaccaaacaaaaaaaaaaaaaaaaaacgacccaactattaaccgacttcccgctaaccgccgacgcgacgcccgccccgcctaaattaacccctcgacaacccgcccgctcgccgccgaaccccgccccgaccctacgccgccgctaccttccccaaccgccgccataaaactaaccgacaacgtattacgaaacttccgcgtcgctaaaatattccgcgaaaactcgaacaaaattaactacttcgatttcaaccccaacgacgaaacgatcatctcgaataacgacgacgactccatcgtactctataactaccaaaaaaacaaataaatacgacgaaaaccctaaacccgaatctcaatacctccctccgataacccaa

SEQ ID NO: 31097 - DNA, 548 bp, Artificial Sequence
  chemically treated genomic DNA (Homo sapiens) CpG-island No: 31097
ttcgttattttttttcgtttttttgtacggtttttatttgttttcgtttcggttcggtatttgggttggttcgtcgttcggattttttttcgggttattgtcgtcgtttcgggttttcgtttttcgtttgttttttcgtattttcgtcgttttttgcgattatttatttcgcggtcgagttttttcgatgtcggttttggtttttttcgtttttattatagtattttcgacgttgttgtcgtttttcgtcgttttaatatggttttcggtcgtttcgatggttcgttttatttttgtttcggcgtcgaaatacggtggtataatttatcgcgtatggtagttttgaggatcgaagatgttgtcgttatttttattgaggacgtgagcgttgtttttggtgttgaatagagcgcgaaggttcgtcgtcgttgggttcgttttttttattttcggtcgtcgtttttatttatttttttttttttagggcgtgtttagtttcgttttttagtttttttttgtttttttagattttttgttttttttttttg

SEQ ID NO: 31098 - DNA, 548 bp, Artificial Sequence
  chemically treated genomic DNA (Homo sapiens) CpG-island No: 31098
caaaaaaaaaaaacaaaaaatctaaaaaaacaaaaaaaaactaaaaaacgaaactaaacacgccctaaaaaaaaaaaaataaataaaaacgacgaccgaaaataaaaaaaacgaacccaacgacgacgaaccttcgcgctctattcaacaccaaaaacaacgctcacgtcctcaataaaaataacgacaacatcttcgatcctcaaaactaccatacgcgataaattataccaccgtatttcgacgccgaaacaaaaataaaacgaaccatcgaaacgaccgaaaaccatattaaaacgacgaaaaacgacaacaacgtcgaaaatactataataaaaacgaaaaaaaccaaaaccgacatcgaaaaaactcgaccgcgaaataaataatcgcaaaaaacgacgaaaatacgaaaaaacaaacgaaaaacgaaaacccgaaacgacgacaataacccgaaaaaaaatccgaacgacgaaccaacccaaataccgaaccgaaacgaaaacaaataaaaaccgtacaaaaaaacgaaaaaaaataacgaa

SEQ ID NO: 31099 - DNA, 548 bp, Artificial Sequence
  chemically treated genomic DNA (Homo sapiens) CpG-island No: 31099
taggaagggggaataagagatttggaaggatagaaaaaggttgggagacggagttggatacgttttagaaggagggaggtgggtgaaggcggcgatcgaaagtggggagggcggatttaacgacggcgaattttcgcgttttgtttagtattaggagtaacgtttacgtttttaataaagatggcggtaatattttcggtttttagagttgttatgcgcgatgggttgtattatcgtgtttcggcgtcggggtagaggtggagcgaattatcggggcggtcgggagttatgttggagcggcgggaggcggtagtagcgtcggggatgttgtggtgggggcggaaaaagttagggtcggtatcggaggggttcggtcgcggagtagatggtcgtagagggcggcgggggtgcggagagataggcggagggcgggggttcggggcggcggtagtggttcgggagggggttcgagcggcgggttagtttaagtgtcggatcggggcggggataagtggaggtcgtgtagggaggcggggaaagatggcgag

SEQ ID NO: 31100 - DNA, 548 bp, Artificial Sequence
  chemically treated genomic DNA (Homo sapiens) CpG-island No: 31100
ctcgccatctttccccgcctccctacacgacctccacttatccccgccccgatccgacacttaaactaacccgccgctcgaaccccctcccgaaccactaccgccgccccgaacccccgccctccgcctatctctccgcacccccgccgccctctacgaccatctactccgcgaccgaacccctccgataccgaccctaactttttccgcccccaccacaacatccccgacgctactaccgcctcccgccgctccaacataactcccgaccgccccgataattcgctccacctctaccccgacgccgaaacacgataatacaacccatcgcgcataacaactctaaaaaccgaaaatattaccgccatctttattaaaaacgtaaacgttactcctaatactaaacaaaacgcgaaaattcgccgtcgttaaatccgccctccccactttcgatcgccgccttcacccacctccctccttctaaaacgtatccaactccgtctcccaacctttttctatccttccaaatctcttattcccccttccta

SEQ ID NO: 31101 - DNA, 540 bp, Artificial Sequence
  chemically treated genomic DNA (Homo sapiens) CpG-island No: 31101
ggggagggtagatgtttgaaaggacgtgtgtattacgcggacggggatgacggggttaggggagttgttacggttgatagttcgggggcggagtgcggagcgggtcggcgggtatttcggggcggggcgggagggcggggagtggggcggacggaattatcggggcgggaaaggaggtaacgggacgggtcgattatggcgcggtgagggagcgggaatggggaacggttcgcgggaggtttgaggtcgttggtttgtgcgttgttttcgtcgtaatttttattttcgtcgtcgtcgtcgtcgtttcgggtatgtcgtttaattgtattagtattacggcggtggcggtgcgcgttagcgttagtaagattaagattaagaagaagtatttcgtgtgttagaaagtgaagttatttcgggttagcgagtcgatttttagcgttttgatgtggggggtgaattatacggtaattagtttttgcgcgtttttttgggtttcgcgcgtttttacgttttttgtagttttggtttttgtttcgt

SEQ ID NO: 31102 - DNA, 540 bp, Artificial Sequence
  chemically treated genomic DNA (Homo sapiens) CpG-island No: 31102
acgaaacaaaaaccaaaactacaaaaaacgtaaaaacgcgcgaaacccaaaaaaacgcgcaaaaactaattaccgtataattcaccccccacatcaaaacgctaaaaatcgactcgctaacccgaaataacttcactttctaacacacgaaatacttcttcttaatcttaatcttactaacgctaacgcgcaccgccaccgccgtaatactaatacaattaaacgacatacccgaaacgacgacgacgacgacgaaaataaaaattacgacgaaaacaacgcacaaaccaacgacctcaaacctcccgcgaaccgttccccattcccgctccctcaccgcgccataatcgacccgtcccgttacctcctttcccgccccgataattccgtccgccccactccccgccctcccgccccgccccgaaatacccgccgacccgctccgcactccgcccccgaactatcaaccgtaacaactcccctaaccccgtcatccccgtccgcgtaatacacacgtcctttcaaacatctaccctcccc

SEQ ID NO: 31103 - DNA, 540 bp, Artificial Sequence
  chemically treated genomic DNA (Homo sapiens) CpG-island No: 31103
gcggggtaagggttagggttgtagggggcgtgggagcgcgcggggtttagaggggcgcgtaggagttggttatcgtgtggtttattttttatattaggacgttgaggatcggttcgttggttcggaatagttttattttttggtatacgaaatgtttttttttggttttggttttgttggcgttgacgcgtatcgttatcgtcgtggtgttggtgtagttggacgatatgttcggggcggcggcggcggcggcgaaagtaggggttgcggcggagatagcgtataagttagcggttttaggtttttcgcggatcgttttttattttcgtttttttatcgcgttatggtcggttcgtttcgttattttttttttcgtttcggtggtttcgttcgttttatttttcgttttttcgtttcgtttcgggatgttcgtcggttcgtttcgtatttcgttttcgggttgttagtcgtgatagtttttttggtttcgttattttcgttcgcgtggtatatacgtttttttaggtatttgtttttttt

SEQ ID NO: 31104 - DNA, 540 bp, Artificial Sequence
  chemically treated genomic DNA (Homo sapiens) CpG-island No: 31104
aaaaaaaacaaatacctaaaaaaacgtatataccacgcgaacgaaaataacgaaaccaaaaaaactatcacgactaacaacccgaaaacgaaatacgaaacgaaccgacgaacatcccgaaacgaaacgaaaaaacgaaaaataaaacgaacgaaaccaccgaaacgaaaaaaaaaataacgaaacgaaccgaccataacgcgataaaaaaacgaaaataaaaaacgatccgcgaaaaacctaaaaccgctaacttatacgctatctccgccgcaacccctactttcgccgccgccgccgccgccccgaacatatcgtccaactacaccaacaccacgacgataacgatacgcgtcaacgccaacaaaaccaaaaccaaaaaaaaacatttcgtataccaaaaaataaaactattccgaaccaacgaaccgatcctcaacgtcctaatataaaaaataaaccacacgataaccaactcctacgcgcccctctaaaccccgcgcgctcccacgccccctacaaccctaacccttaccccgc

SEQ ID NO: 31105 - DNA, 1146 bp, Artificial Sequence
  chemically treated genomic DNA (Homo sapiens) CpG-island No: 31105
gttcgtcgcgagttttttgttggtttttcgttttgtagggattttttttagttagttcggtcgcgttttatattcgtcgatacgtttttttcggtttaattttcgttttttaagtatcggtttcgttttataggtttcgttcgtggtttcgttcgtcgcgagttggcgtcgggtttttttagcgttcgtcggcggtcgcgtttattttcgacgttttgaggttatcgattgggtcggttcgcggggggcggagggacggagggaagatggcggtaggggtcggatattggcgtcgttttttttaatttcggagtcggcgtagatgaggtagttcggttggggttagcggcgttttggaattcgaggtggggggatttggcggtggggtttggttttgttatatgtcggcgtttcggttagagtgagcggcggcgacgtttttttttttcgtttttttttttgtcgttgcgagagcgagcgggcggcggaggcggcggcggcggcggggtcgggatggaggacgttaattttaacgtgaacgcggattaggaggtgcggaagttgtaggagttggtgaagaagttggagaagtagaacgaatagttgaggagtcgttcgggggtcgtgtagggcgtcggtttttttgggttcggtagttcggttcggtcggcgcgtttattttttttttcggcgcggcgttttttcggggttttttttggttttagcgttaagtcgggcggcgggtcgggttcgcgtgcgcggacgagtagcgaagagttgcgggacgtatttttttgttagcggcgggcgagggcggtttgttggacgaggtggagtcgttgcgttcgacgagttggagcgtttgttaggttgggaggaggaggaggagagttggtgagcgcgaggcgcgcggtaggagttgggcggggacgggttcgggggcggagagcgttttttgagggtttttttggtcgggcgtttcgttttgtgtagtcgggttcgtttttttgtggcgatttgtggtttttttgttttggtagagggaacgttagttggagttgggggttcgaggcgtgcgtaagtaatagggttgtagttcgttgttttttggattgtggattttttgagtgttggattttattgggg

SEQ ID NO: 31106 - DNA, 1146 bp, Artificial Sequence
  chemically treated genomic DNA (Homo sapiens) CpG-island No: 31106
ccccaataaaatccaacactcaaaaaatccacaatccaaaaaacaacgaactacaaccctattacttacgcacgcctcgaacccccaactccaactaacgttccctctaccaaaacaaaaaaaccacaaatcgccacaaaaaaacgaacccgactacacaaaacgaaacgcccgaccaaaaaaaccctcaaaaaacgctctccgcccccgaacccgtccccgcccaactcctaccgcgcgcctcgcgctcaccaactctcctcctcctcctcccaacctaacaaacgctccaactcgtcgaacgcaacgactccacctcgtccaacaaaccgccctcgcccgccgctaacaaaaaaatacgtcccgcaactcttcgctactcgtccgcgcacgcgaacccgacccgccgcccgacttaacgctaaaaccaaaaaaaaccccgaaaaaacgccgcgccgaaaaaaaaaataaacgcgccgaccgaaccgaactaccgaacccaaaaaaaccgacgccctacacgacccccgaacgactcctcaactattcgttctacttctccaacttcttcaccaactcctacaacttccgcacctcctaatccgcgttcacgttaaaattaacgtcctccatcccgaccccgccgccgccgccgcctccgccgcccgctcgctctcgcaacgacaaaaaaaaaaacgaaaaaaaaaaacgtcgccgccgctcactctaaccgaaacgccgacatataacaaaaccaaaccccaccgccaaatccccccacctcgaattccaaaacgccgctaaccccaaccgaactacctcatctacgccgactccgaaattaaaaaaaacgacgccaatatccgacccctaccgccatcttccctccgtccctccgccccccgcgaaccgacccaatcgataacctcaaaacgtcgaaaataaacgcgaccgccgacgaacgctaaaaaaacccgacgccaactcgcgacgaacgaaaccacgaacgaaacctataaaacgaaaccgatacttaaaaaacgaaaattaaaccgaaaaaaacgtatcgacgaatataaaacgcgaccgaactaactaaaaaaaatccctacaaaacgaaaaaccaacaaaaaactcgcgacgaac

SEQ ID NO: 31107 - DNA, 1146 bp, Artificial Sequence
  chemically treated genomic DNA (Homo sapiens) CpG-island No: 31107
ttttaatagggtttagtatttagaaggtttataatttaaaggataacgagttataattttgttatttgcgtacgtttcgaatttttaattttagttgacgttttttttgttaaagtaagaaaattataagtcgttataggagagcggattcggttatataaagcgaggcgttcgattagagggatttttagaggacgtttttcgttttcgggttcgttttcgtttagtttttgtcgcgcgtttcgcgtttattagtttttttttttttttttttagtttgataggcgttttagttcgtcgggcgtagcggttttatttcgtttagtaagtcgttttcgttcgtcgttagtaaggaggtgcgtttcgtagtttttcgttattcgttcgcgtacgcgagttcggttcgtcgttcgatttggcgttgaggttaagggaagtttcgaggagacgtcgcgtcggaggagggaatggacgcgtcgatcgaatcgggttgtcgggtttaagggagtcggcgttttgtacggttttcgagcggttttttagttgttcgttttgtttttttagtttttttattagtttttgtagttttcgtattttttggttcgcgtttacgttggagttaacgttttttatttcggtttcgtcgtcgtcgtcgttttcgtcgttcgttcgttttcgtagcgatagggaaagagacggaggaaagaggcgtcgtcgtcgtttattttagtcgaggcgtcggtatatagtaggattaggttttatcgttaggtttttttatttcgggttttaaagcgtcgttggttttagtcgaattgttttatttgcgtcggtttcgagattgggggaggcggcgttaatattcggtttttgtcgttatttttttttcgttttttcgtttttcgcgggtcggtttagtcggtgattttagagcgtcgggggtggacgcggtcgtcggcgggcgttgagaggattcggcgttagttcgcggcgggcggggttacggacggggtttatggggcggggtcggtgtttgaggggcggggattaggtcggaaggggcgtgtcggcggatgtgggacgcggtcgggttggttagggagggtttttgtagaacgggaggttagtagaaggttcgcggcgggt

SEQ ID NO: 31108 - DNA, 1146 bp, Artificial Sequence
  chemically treated genomic DNA (Homo sapiens) CpG-island No: 31108
acccgccgcgaaccttctactaacctcccgttctacaaaaaccctccctaaccaacccgaccgcgtcccacatccgccgacacgccccttccgacctaatccccgcccctcaaacaccgaccccgccccataaaccccgtccgtaaccccgcccgccgcgaactaacgccgaatcctctcaacgcccgccgacgaccgcgtccacccccgacgctctaaaatcaccgactaaaccgacccgcgaaaaacgaaaaaacgaaaaaaaaataacgacaaaaaccgaatattaacgccgcctcccccaatctcgaaaccgacgcaaataaaacaattcgactaaaaccaacgacgctttaaaacccgaaataaaaaaacctaacgataaaacctaatcctactatataccgacgcctcgactaaaataaacgacgacgacgcctctttcctccgtctctttccctatcgctacgaaaacgaacgaacgacgaaaacgacgacgacgacgaaaccgaaataaaaaacgttaactccaacgtaaacgcgaaccaaaaaatacgaaaactacaaaaactaataaaaaaactaaaaaaacaaaacgaacaactaaaaaaccgctcgaaaaccgtacaaaacgccgactcccttaaacccgacaacccgattcgatcgacgcgtccattccctcctccgacgcgacgtctcctcgaaacttcccttaacctcaacgccaaatcgaacgacgaaccgaactcgcgtacgcgaacgaataacgaaaaactacgaaacgcacctccttactaacgacgaacgaaaacgacttactaaacgaaataaaaccgctacgcccgacgaactaaaacgcctatcaaactaaaaaaaaaaaaaaaaaaactaataaacgcgaaacgcgcgacaaaaactaaacgaaaacgaacccgaaaacgaaaaacgtcctctaaaaatccctctaatcgaacgcctcgctttatataaccgaatccgctctcctataacgacttataattttcttactttaacaaaaaaaacgtcaactaaaattaaaaattcgaaacgtacgcaaataacaaaattataactcgttatcctttaaattataaaccttctaaatactaaaccctattaaaa

SEQ ID NO: 31109 - DNA, 1198 bp, Artificial Sequence
  chemically treated genomic DNA (Homo sapiens) CpG-island No: 31109
tcgggcgatggaagattttgttcgtgggatcgttacgagttatcggttattttttcgcgttcggttttcgggtttttaggtttcggtgcgtcgcgggttaggcgatagcgggggggcgtcgcgggtcgggcgagcgtggttcggtgggttcgagggtcgcgtcgagtttttcgtcgttttaaaagtttttataatgtagcgttggcgttttagtttcgttacgaggtttttttcggcgtcggcgagcgggttaggcgcgggcggggcgcggaggagcggcggttgaaattcgagcgttcggtcgaggggggcgttttcgcgtcgtttttttcgcgcgtttagtcgttgttcggcgaaggggcggagtcgtttggtcgttcggtttcgttcggttcggttcggtttttagttcggtttttagtttagaggtatcggtcgcgggagcgagcgggtcgtcgatttttacgttcgcgttttttttacgttcgcgttcgttcggcgtttcgcgtcgcgtttcgtttagcgtttgtcgtttagtttttcgtttagtttcgtcgagtttcgtttttttcgttcgcggcggcgttggagttgggggcggttttcgcggcgtttttgtcgttggtcgagcgttcgcgtatcgcggtattttcgttagtggcgtttatatttatttagcgcgggtcgggaggtgcgcggagagggaacgtcggggggtcggggtttttagtcggtgcggggcgcgcggcgcggggagcgtcggggagtgtcggggagtgcggcgcggggacgggcgttgggcggtcgcggagtttcgggtgtcgtcgcgtttttagcgtttcggtcggtttttttgggcggtttgcgggggcggcgtagttgcgaaattgagtaagtattaattttatttagcggcggcgattcgggttgcgtcggggatttcgttcgtttcgtttgtagtttcggagttgtttttcgttcggttgttttttttttcgtattttgggtatttcgttcgtttcgtttttattttgtttcgtcgcgggttttcgttttttttgcgtttattttttttggtgtgttattttttgcgttttttttcgcggtatataagtcgcggattgaaaagtacgagtttggtttttgtttttttgtttttttttagtgtttttggtaagggagtttagaggttattttt

SEQ ID NO: 31110 - DNA, 1198 bp, Artificial Sequence
  chemically treated genomic DNA (Homo sapiens) CpG-island No: 31110
aaaaataacctctaaactcccttaccaaaaacactaaaaaaaaacaaaaaaacaaaaaccaaactcgtacttttcaatccgcgacttatataccgcgaaaaaaaacgcaaaaaataacacaccaaaaaaaataaacgcaaaaaaaacgaaaacccgcgacgaaacaaaataaaaacgaaacgaacgaaatacccaaaatacgaaaaaaaaaacaaccgaacgaaaaacaactccgaaactacaaacgaaacgaacgaaatccccgacgcaacccgaatcgccgccgctaaataaaattaatacttactcaatttcgcaactacgccgcccccgcaaaccgcccaaaaaaaccgaccgaaacgctaaaaacgcgacgacacccgaaactccgcgaccgcccaacgcccgtccccgcgccgcactccccgacactccccgacgctccccgcgccgcgcgccccgcaccgactaaaaaccccgaccccccgacgttccctctccgcgcacctcccgacccgcgctaaataaatataaacgccactaacgaaaataccgcgatacgcgaacgctcgaccaacgacaaaaacgccgcgaaaaccgcccccaactccaacgccgccgcgaacgaaaaaaacgaaactcgacgaaactaaacgaaaaactaaacgacaaacgctaaacgaaacgcgacgcgaaacgccgaacgaacgcgaacgtaaaaaaaacgcgaacgtaaaaatcgacgacccgctcgctcccgcgaccgatacctctaaactaaaaaccgaactaaaaaccgaaccgaaccgaacgaaaccgaacgaccaaacgactccgccccttcgccgaacaacgactaaacgcgcgaaaaaaacgacgcgaaaacgcccccctcgaccgaacgctcgaatttcaaccgccgctcctccgcgccccgcccgcgcctaacccgctcgccgacgccgaaaaaaacctcgtaacgaaactaaaacgccaacgctacattataaaaacttttaaaacgacgaaaaactcgacgcgaccctcgaacccaccgaaccacgctcgcccgacccgcgacgcccccccgctatcgcctaacccgcgacgcaccgaaacctaaaaacccgaaaaccgaacgcgaaaaaataaccgataactcgtaacgatcccacgaacaaaatcttccatcgcccga

SEQ ID NO: 31111 - DNA, 1198 bp, Artificial Sequence
  chemically treated genomic DNA (Homo sapiens) CpG-island No: 31111
aaaagtggtttttaaatttttttgttaaggatattgggaggaagtagaaaagtaaagattaagttcgtattttttagttcgcggtttgtgtgtcgcgaggagaggcgtaaagggtgatatattaggaaaggtgaacgtagagggagcgggagttcgcggcggggtagggtgggggcggaacggacgaggtatttaaggtgcggagagaggggtaatcgggcggagggtagtttcgaggttgtaggcgggacgggcggggttttcggcgtagttcggatcgtcgtcgttaagtaaagttaatatttatttagtttcgtaattgcgtcgttttcgtaggtcgtttagaggggtcggtcggggcgttggggacgcggcggtattcggagtttcgcggtcgtttagcgttcgttttcgcgtcgtatttttcggtatttttcggcgtttttcgcgtcgcgcgtttcgtatcggttggaggtttcggtttttcggcgtttttttttcgcgtatttttcggttcgcgttaggtgagtgtggacgttattggcgggggtgtcgcggtgcgcgagcgttcggttagcggtagagacgtcgcgggagtcgtttttagttttaacgtcgtcgcgggcgggaagggcgaggttcggcgaggttgggcgaggagttgggcggtagacgttgagcggggcgcggcgcggggcgtcggacgagcgcgggcgtaggaggagcgcgggcgtaggagtcggcgattcgttcgttttcgcggtcggtgtttttgggttgggggtcgggttgggggtcgggtcgggtcgggcggggtcgggcggttaggcggtttcgttttttcgtcgggtagcggttgagcgcgcgagaggagcggcgcgggggcgtttttttcggtcgggcgttcgggttttagtcgtcgttttttcgcgtttcgttcgcgtttggttcgttcgtcggcgtcgggagagatttcgtaacggaattgggacgttagcgttgtattgtgggagtttttaaagcggcggggagttcggcgcgattttcgggtttatcgggttacgttcgttcggttcgcgacgttttttcgttgtcgtttggttcgcgacgtatcgaggtttgaggattcgaaagtcgggcgcggggagatgatcggtggttcgtgacggttttacgggtaaaattttttatcgttcgg

SEQ ID NO: 31112 - DNA, 1198 bp, Artificial Sequence
  chemically treated genomic DNA (Homo sapiens) CpG-island No: 31112
ccgaacgataaaaaattttacccgtaaaaccgtcacgaaccaccgatcatctccccgcgcccgactttcgaatcctcaaacctcgatacgtcgcgaaccaaacgacaacgaaaaaacgtcgcgaaccgaacgaacgtaacccgataaacccgaaaatcgcgccgaactccccgccgctttaaaaactcccacaatacaacgctaacgtcccaattccgttacgaaatctctcccgacgccgacgaacgaaccaaacgcgaacgaaacgcgaaaaaacgacgactaaaacccgaacgcccgaccgaaaaaaacgcccccgcgccgctcctctcgcgcgctcaaccgctacccgacgaaaaaacgaaaccgcctaaccgcccgaccccgcccgacccgacccgacccccaacccgacccccaacccaaaaacaccgaccgcgaaaacgaacgaatcgccgactcctacgcccgcgctcctcctacgcccgcgctcgtccgacgccccgcgccgcgccccgctcaacgtctaccgcccaactcctcgcccaacctcgccgaacctcgcccttcccgcccgcgacgacgttaaaactaaaaacgactcccgcgacgtctctaccgctaaccgaacgctcgcgcaccgcgacacccccgccaataacgtccacactcacctaacgcgaaccgaaaaatacgcgaaaaaaaaacgccgaaaaaccgaaacctccaaccgatacgaaacgcgcgacgcgaaaaacgccgaaaaataccgaaaaatacgacgcgaaaacgaacgctaaacgaccgcgaaactccgaataccgccgcgtccccaacgccccgaccgacccctctaaacgacctacgaaaacgacgcaattacgaaactaaataaatattaactttacttaacgacgacgatccgaactacgccgaaaaccccgcccgtcccgcctacaacctcgaaactaccctccgcccgattacccctctctccgcaccttaaatacctcgtccgttccgcccccaccctaccccgccgcgaactcccgctccctctacgttcacctttcctaatatatcaccctttacgcctctcctcgcgacacacaaaccgcgaactaaaaaatacgaacttaatctttacttttctacttcctcccaatatccttaacaaaaaaatttaaaaaccactttt

SEQ ID NO: 31113 - DNA, 515 bp, Artificial Sequence
  chemically treated genomic DNA (Homo sapiens) CpG-island No: 31113
  unsure (117)
tcgttcgggtttagcgcggcggttgaggagaaagtagggagcgatcggcggcggcgtagcggcggcgttgttttttcgttcgttcggcgtcgttgtaggtcgggttgaagcgcgatngcgagtcgcgagggtcgcggtggagttcgaggcgttcggacgtggcgaggacgtagaggtgttttgttttttttatatttcgcgaaggttagttattcgagtcgttagagtagtcgtttcggtcgtcgtcgttgttttaaaggtagttttagtttcgttgtagtttcgatttttttatatatatatatcgagagggataataaatagagtcgtcgtcgtcgtcgttacggttattttttttttgttcggtataatatcgtatatatatatttgtatatcggggagagagggagggcgcggcggtcgttttcgttgttagttagcgttatgttgtttaattcgggttttgtcgttatagtttttcggttaattttaaaattttaagttttttggagggg

SEQ ID NO: 31114 - DNA, 515 bp, Artificial Sequence
  chemically treated genomic DNA (Homo sapiens) CpG-island No: 31114
  unsure (399)
cccctccaaaaaacttaaaattttaaaattaaccgaaaaactataacgacaaaacccgaattaaacaacataacgctaactaacaacgaaaacgaccgccgcgccctccctctctccccgatatacaaatatatatatacgatattataccgaacaaaaaaaaaataaccgtaacgacgacgacgacgactctatttattatccctctcgatatatatatataaaaaaatcgaaactacaacgaaactaaaactacctttaaaacaacgacgacgaccgaaacgactactctaacgactcgaataactaaccttcgcgaaatataaaaaaaacaaaacacctctacgtcctcgccacgtccgaacgcctcgaactccaccgcgaccctcgcgactcgcnatcgcgcttcaacccgacctacaacgacgccgaacgaacgaaaaaacaacgccgccgctacgccgccgccgatcgctccctactttctcctcaaccgccgcgctaaacccgaacga

SEQ ID NO: 31115 - DNA, 515 bp, Artificial Sequence
  chemically treated genomic DNA (Homo sapiens) CpG-island No: 31115
  unsure (399)
tttttttagggggtttggaattttgggattggtcgagaggttgtggcgataaggttcggattggatagtatggcgttgattgatagcgggggcggtcgtcgcgtttttttttttttttcggtgtgtaaatgtgtgtgtgcggtgttatgtcggataagagggaggtgatcgtggcggcggcggcggcggttttgtttattgtttttttcggtgtgtgtgtgtgaggaaatcggggttgtagcgaggttaaggttgtttttgaagtagcggcggcgatcgggacgattattttggcgattcgagtggttggttttcgcggagtgtgagaaggataaggtatttttgcgttttcgttacgttcgagcgtttcgggttttatcgcggttttcgcggttcgtnatcgcgttttagttcggtttgtagcggcgtcgggcgggcgagaaggtaacgtcgtcgttgcgtcgtcgtcggtcgttttttgttttttttttagtcgtcgcgttaggttcgggcgg

SEQ ID NO: 31116 - DNA, 515 bp, Artificial Sequence
  chemically treated genomic DNA (Homo sapiens) CpG-island No: 31116
  unsure (117)
ccgcccgaacctaacgcgacgactaaaaaaaaaacaaaaaacgaccgacgacgacgcaacgacgacgttaccttctcgcccgcccgacgccgctacaaaccgaactaaaacgcgatnacgaaccgcgaaaaccgcgataaaacccgaaacgctcgaacgtaacgaaaacgcaaaaataccttatccttctcacactccgcgaaaaccaaccactcgaatcgccaaaataatcgtcccgatcgccgccgctacttcaaaaacaaccttaacctcgctacaaccccgatttcctcacacacacacaccgaaaaaaacaataaacaaaaccgccgccgccgccgccacgatcacctccctcttatccgacataacaccgcacacacacatttacacaccgaaaaaaaaaaaaaaacgcgacgaccgcccccgctatcaatcaacgccatactatccaatccgaaccttatcgccacaacctctcgaccaatcccaaaattccaaaccccctaaaaaaa

SEQ ID NO: 31117 - DNA, 539 bp, Artificial Sequence
  chemically treated genomic DNA (Homo sapiens) CpG-island No: 31117
atagtcggttcggtcgggaaggttggcgggcgttgttatttcggggttgggggtatcggagggggggtgagaggttacgtgaggttgtggtacgtgaggtgattggggggagggtgatggggggtggttttcgggtttcgtttttcgtcgtcgtcgtcgtttgcgtttcggttgtcgcgtatttggcgtaaatttatcgcgagcgttcgtaaagttattcgcgtaggcgtttcgggatcggcgttcgtcgcgcgtaatcgtagtgatagtcggcggtttggttttcgcgtagtcgcggtgagggagtattttttagcgcgtagtcgcgttggtattcgtttggaggatcgaagttttatttttttgttttgcgttagcgtattgagataaaagggcgggatttgaggtttcgcgtaggcgtttgagaaagtttgtaggggttaaggcgtagtcgtaggaagttagggattgtttatttattggtgtttgtgtgtaaattaagacgattttgttttgcgtaggcgtgttgggggtgtttt

SEQ ID NO: 31118 - DNA, 539 bp, Artificial Sequence
  chemically treated genomic DNA (Homo sapiens) CpG-island No: 31118
aaaacacccccaacacgcctacgcaaaacaaaatcgtcttaatttacacacaaacaccaataaataaacaatccctaacttcctacgactacgccttaacccctacaaactttctcaaacgcctacgcgaaacctcaaatcccgcccttttatctcaatacgctaacgcaaaacaaaaaaataaaacttcgatcctccaaacgaataccaacgcgactacgcgctaaaaaatactccctcaccgcgactacgcgaaaaccaaaccgccgactatcactacgattacgcgcgacgaacgccgatcccgaaacgcctacgcgaataactttacgaacgctcgcgataaatttacgccaaatacgcgacaaccgaaacgcaaacgacgacgacgacgaaaaacgaaacccgaaaaccaccccccatcaccctccccccaatcacctcacgtaccacaacctcacgtaacctctcaccccccctccgatacccccaaccccgaaataacaacgcccgccaaccttcccgaccgaaccgactat

SEQ ID NO: 31119 - DNA, 539 bp, Artificial Sequence
  chemically treated genomic DNA (Homo sapiens) CpG-island No: 31119
ggagtatttttaatacgtttgcgtagaatagagtcgttttagtttgtatataaatattaatggatgaatagtttttagttttttgcggttgcgttttgatttttataagtttttttaagcgtttgcgcgagattttaggtttcgtttttttgttttagtgcgttggcgtagggtagaaaggtggggtttcggttttttagacgaatgttagcgcggttgcgcgttggggggtatttttttatcgcggttgcgcgggagttaggtcgtcggttgttattgcggttgcgcgcggcgagcgtcgatttcggggcgtttgcgcgggtggttttgcgggcgttcgcggtaagtttgcgttaagtgcgcggtagtcgggacgtagacggcggcggcggcgagaggcggagttcggggattattttttattattttttttttagttattttacgtattataattttacgtaattttttatttttttttcgatatttttagtttcgggatggtagcgttcgttagttttttcggtcggatcggttgt

SEQ ID NO: 31120 - DNA, 539 bp, Artificial Sequence
  chemically treated genomic DNA (Homo sapiens) CpG-island No: 31120
acaaccgatccgaccgaaaaaactaacgaacgctaccatcccgaaactaaaaatatcgaaaaaaaaataaaaaattacgtaaaattataatacgtaaaataactaaaaaaaaaataataaaaaataatccccgaactccgcctctcgccgccgccgccgtctacgtcccgactaccgcgcacttaacgcaaacttaccgcgaacgcccgcaaaaccacccgcgcaaacgccccgaaatcgacgctcgccgcgcgcaaccgcaataacaaccgacgacctaactcccgcgcaaccgcgataaaaaaataccccccaacgcgcaaccgcgctaacattcgtctaaaaaaccgaaaccccacctttctaccctacgccaacgcactaaaacaaaaaaacgaaacctaaaatctcgcgcaaacgcttaaaaaaacttataaaaatcaaaacgcaaccgcaaaaaactaaaaactattcatccattaatatttatatacaaactaaaacgactctattctacgcaaacgtattaaaaatactcc

SEQ ID NO: 31121 - DNA, 721 bp, Artificial Sequence
  chemically treated genomic DNA (Homo sapiens) CpG-island No: 31121
gtacgtttagggggcgttcgtagggtcggcgcgtattcgtacgcgtatacgtttttgtttagttttttgttcgttttcgttttcggaggttgacgcgttcgggcgtcgttttaggtttgtgtagggcggatcggtagtcgtttggcggcgatttagggcggtgcggggtttgggcgggagtcgggaggcgcggtcggtatggaggcgttgttgttgggcgcggggttgttgttgggcgtttacgtgtttgtttattataatttggtgaaggtttcgtcgtgcggcggtatgggtaatttgcggggtcgtacggtcgtggttacgggtgagtgcggaggcgggtgagtgcgagttggcggggcgcgcggagaggaggtcgggtcggcggtagtagcggttcgtcgggtttagtttagttcggttttcgttcgcggttcgtaggcgttaatagcggtatcggaaagatgacggcgttggagttggcgcgtcggggagcgcgcgtggtgttggtttgtcgtagttaggagcgcggggaggcggttgttttcgattttcgttaggtgagaggtagcgggggcgcgtgggacggtgagtcgagaattcgtcgggatatagagaagttagtaaaggggttgcggaggattcgggtttagggaggagagcgcggcgcgggcggttgagcgcgaagagggagtgtacggagcgttggggttattcgagg

SEQ ID NO: 31122 - DNA, 721 bp, Artificial Sequence
  chemically treated genomic DNA (Homo sapiens) CpG-island No: 31122
cctcgaataaccccaacgctccgtacactccctcttcgcgctcaaccgcccgcgccgcgctctcctccctaaacccgaatcctccgcaacccctttactaacttctctatatcccgacgaattctcgactcaccgtcccacgcgcccccgctacctctcacctaacgaaaatcgaaaacaaccgcctccccgcgctcctaactacgacaaaccaacaccacgcgcgctccccgacgcgccaactccaacgccgtcatctttccgataccgctattaacgcctacgaaccgcgaacgaaaaccgaactaaactaaacccgacgaaccgctactaccgccgacccgacctcctctccgcgcgccccgccaactcgcactcacccgcctccgcactcacccgtaaccacgaccgtacgaccccgcaaattacccataccgccgcacgacgaaaccttcaccaaattataataaacaaacacgtaaacgcccaacaacaaccccgcgcccaacaacaacgcctccataccgaccgcgcctcccgactcccgcccaaaccccgcaccgccctaaatcgccgccaaacgactaccgatccgccctacacaaacctaaaacgacgcccgaacgcgtcaacctccgaaaacgaaaacgaacaaaaaactaaacaaaaacgtatacgcgtacgaatacgcgccgaccctacgaacgccccctaaacgtac

SEQ ID NO: 31123 - DNA, 721 bp, Artificial Sequence
  chemically treated genomic DNA (Homo sapiens) CpG-island No: 31123
tttcgggtgattttagcgtttcgtgtatttttttttcgcgtttagtcgttcgcgtcgcgtttttttttttggattcggatttttcgtagtttttttgttggtttttttgtgtttcggcgggttttcggtttatcgttttacgcgttttcgttgttttttatttggcggaggtcgaaggtagtcgttttttcgcgtttttggttgcggtaggttagtattacgcgcgtttttcggcgcgttagttttagcgtcgttattttttcgatgtcgttgttggcgtttgcggatcgcgggcgggagtcgagttgagttgagttcggcgggtcgttgttatcgtcggttcggtttttttttcgcgcgtttcgttagttcgtatttattcgttttcgtatttattcgtgattacggtcgtgcggtttcgtaggttgtttatgtcgtcgtacggcggggtttttattaggttgtagtagataagtacgtaagcgtttagtagtaatttcgcgtttagtagtagcgtttttatgtcggtcgcgtttttcggttttcgtttaggtttcgtatcgttttggatcgtcgttaggcggttgtcgattcgttttgtataggtttggaacggcgttcgggcgcgttagttttcgaaggcggaggcgggtaggaggttgggtaggggcgtgtgcgcgtgcgggtgcgcgtcggttttgcgagcgttttttaggcgtgt

SEQ ID NO: 31124 - DNA, 721 bp, Artificial Sequence
  chemically treated genomic DNA (Homo sapiens) CpG-island No: 31124
acacgcctaaaaaacgctcgcaaaaccgacgcgcacccgcacgcgcacacgcccctacccaacctcctacccgcctccgccttcgaaaactaacgcgcccgaacgccgttccaaacctatacaaaacgaatcgacaaccgcctaacgacgatccaaaacgatacgaaacctaaacgaaaaccgaaaaacgcgaccgacataaaaacgctactactaaacgcgaaattactactaaacgcttacgtacttatctactacaacctaataaaaaccccgccgtacgacgacataaacaacctacgaaaccgcacgaccgtaatcacgaataaatacgaaaacgaataaatacgaactaacgaaacgcgcgaaaaaaaaaccgaaccgacgataacaacgacccgccgaactcaactcaactcgactcccgcccgcgatccgcaaacgccaacaacgacatcgaaaaaataacgacgctaaaactaacgcgccgaaaaacgcgcgtaatactaacctaccgcaaccaaaaacgcgaaaaaacgactaccttcgacctccgccaaataaaaaacaacgaaaacgcgtaaaacgataaaccgaaaacccgccgaaacacaaaaaaaccaacaaaaaaactacgaaaaatccgaatccaaaaaaaaaaacgcgacgcgaacgactaaacgcgaaaaaaaaatacacgaaacgctaaaatcacccgaaa

SEQ ID NO: 31125 - DNA, 544 bp, Artificial Sequence
  chemically treated genomic DNA (Homo sapiens) CpG-island No: 31125
tttcgttcgagaacgtttacgttttttttagggttaggattttttttttttttttcgtattggtttttcgtggtttttagtatcgttgagtattcggcgttttagcgagatttttttgtttcgatagatttcgagggggcggggttcggcgggacggggcggggataagtttttttcgggttcgttcgttggtattgttgcgcggtgattggacgtttcggaaggtcgttttttaggtcgattcggggagtgacgggcggttagcggttgtttttcggcgtgtggggtgcggagtgcggggtttaaggttttagaggggtggggatttcgggtcgtagcgtcgtcgagcgcgattgttcgttgagattcggcgtttcggggtgcggtaagtttgcggttttaggtgttggttaggcgttttggtgcgttcgttggagtgtcgagagtatttgggaaatttaatttttcgtttttattttttgttttcgattttcgggtagaaaagtagttgtcgagttgttttatttttttttttatcggattt

SEQ ID NO: 31126 - DNA, 544 bp, Artificial Sequence
  chemically treated genomic DNA (Homo sapiens) CpG-island No: 31126
aaatccgataaaaaaaaaaataaaacaactcgacaactacttttctacccgaaaatcgaaaacaaaaaataaaaacgaaaaattaaatttcccaaatactctcgacactccaacgaacgcaccaaaacgcctaaccaacacctaaaaccgcaaacttaccgcaccccgaaacgccgaatctcaacgaacaatcgcgctcgacgacgctacgacccgaaatccccacccctctaaaaccttaaaccccgcactccgcaccccacacgccgaaaaacaaccgctaaccgcccgtcactccccgaatcgacctaaaaaacgaccttccgaaacgtccaatcaccgcgcaacaataccaacgaacgaacccgaaaaaaacttatccccgccccgtcccgccgaaccccgccccctcgaaatctatcgaaacaaaaaaatctcgctaaaacgccgaatactcaacgatactaaaaaccacgaaaaaccaatacgaaaaaaaaaaaaaaaatcctaaccctaaaaaaaacgtaaacgttctcgaacgaaa

SEQ ID NO: 31127 - DNA, 544 bp, Artificial Sequence
  chemically treated genomic DNA (Homo sapiens) CpG-island No: 31127
gagttcgatgggggaggaaataaaataattcggtaattgtttttttattcgaaagtcgggagtaaggagtgggggcgagaagttaagttttttaaatgttttcggtattttagcgagcgtattaagacgtttagttagtatttgaaatcgtaagtttgtcgtatttcggggcgtcgaattttagcgggtaatcgcgttcggcggcgttgcggttcggagtttttatttttttggagttttgggtttcgtatttcgtattttatacgtcggggagtagtcgttggtcgttcgttatttttcgggtcggtttggaaggcggtttttcgaagcgtttaattatcgcgtaataatgttaacgggcgggttcggggagggtttgttttcgtttcgtttcgtcgggtttcgttttttcggagtttgtcggggtaggagaatttcgttgggacgtcgagtgtttagcggtgttggaagttacgaagggttagtgcgaggggaggaggaagggttttggttttggagagggcgtgagcgttttcgggcgagg

SEQ ID NO: 31128 - DNA, 544 bp, Artificial Sequence
  chemically treated genomic DNA (Homo sapiens) CpG-island No: 31128
cctcgcccgaaaacgctcacgccctctccaaaaccaaaacccttcctcctcccctcgcactaacccttcgtaacttccaacaccgctaaacactcgacgtcccaacgaaattctcctaccccgacaaactccgaaaaaacgaaacccgacgaaacgaaacgaaaacaaaccctccccgaacccgcccgttaacattattacgcgataattaaacgcttcgaaaaaccgccttccaaaccgacccgaaaaataacgaacgaccaacgactactccccgacgtataaaatacgaaatacgaaacccaaaactccaaaaaaataaaaactccgaaccgcaacgccgccgaacgcgattacccgctaaaattcgacgccccgaaatacgacaaacttacgatttcaaatactaactaaacgtcttaatacgctcgctaaaataccgaaaacatttaaaaaacttaacttctcgcccccactccttactcccgactttcgaataaaaaaacaattaccgaattattttatttcctcccccatcgaactc

SEQ ID NO: 31129 - DNA, 1439 bp, Artificial Sequence
  chemically treated genomic DNA (Homo sapiens) CpG-island No: 31129
gtcgtgcgtcggggcggtagagtttatttttgtcgtatcgttgtttcgggtcggtagagtttatttttgtcgtatcgttgtttcgggtcgggtgtggatttaaaaatattcggcggttttaagtttgcgttgggggtgcgggcgggttcggtcgggtcgtagagggcgttaggagatcggagaaacggcggtcgtttggttttttcgtttttgtcggggttgtttttttaaattttggaggaggtagagagaaaaaaggaaagaaagagaaaagacgcggagtttcgagcggttggtggcggtgttcggtttttttatttcgttttcgcgtcgggttttgattttcgttcgtagttttcgttagtttcgggcgtttttcgtcgcgtcgtttattcgttatagttattgttaaaatagaaattagcggagtcgggcgggggttgcggcgtagtaagtgtatgtgtcgcgcggcggggagggggcgggcgcgagcgataggcgatcgtatatattcgggttttttagttttgtgcgtttttcgagtcggcggcgcgggcgcggggcgcggggcgcggggttgatagtttcggcgcgggaggcggggcgcggggaggggcggaggcgcggcgcggggagggaggagttgttcgttcgttcgttgtcgtcgtttagttttatattcgtcggcgtagtttcgttttttttttttgatagcggcgcggtcggcgaggttcgggcgcgtagggatcggcggatatcggcggcgaaggaggacgttaggattgcgtttcggagttaagtgcgggaggcgcgtagggtcggcggcgcgcggaggtgagcgggttcgcgcgtcgggttcgggcgtcggttgtcggggtcgcgatttttatagtatttcggtagtcgaggtagttcgggaggtttcggggcggcgggcgggtggttttgtttgggttgcgtcggaaagcgattgcgggggtcgttgttaggaggtcggcggttcgcgcgttttggggcgtcggttggagtaggggcgtttttcgcgcggtgggtaggaggcggggggttgcggtggttatttaggggtttcgtgcggtagttatgtaacggaggaggcgggaggagggagggagggaaggagggaggggagagttagcggagagcgagttagcgagcgggcgtcgcgttttttggttggtatcgcggttcggagcgaagtggcgcgcggggttggaaaggaatttttgcgggcgcgtgcggttcggggttcggcggcgtttgcgggttcgagcggggcgggttcgtcggtagttataggtggtttttgttaaaagttttatcgtatttttgtttggaaggcgcgggagcgttttggtgagtgacgtttttttgggatttttgtagttttatttcgcgttgtttttttttgaaaattggaa

SEQ ID NO: 31130 - DNA, 1439 bp, Artificial Sequence
  chemically treated genomic DNA (Homo sapiens) CpG-island No: 31130
ttccaattttcaaaaaaaaacaacgcgaaataaaactacaaaaatcccaaaaaaacgtcactcaccaaaacgctcccgcgccttccaaacaaaaatacgataaaacttttaacaaaaaccacctataactaccgacgaacccgccccgctcgaacccgcaaacgccgccgaaccccgaaccgcacgcgcccgcaaaaattcctttccaaccccgcgcgccacttcgctccgaaccgcgataccaaccaaaaaacgcgacgcccgctcgctaactcgctctccgctaactctcccctccctccttccctccctccctcctcccgcctcctccgttacataactaccgcacgaaacccctaaataaccaccgcaaccccccgcctcctacccaccgcgcgaaaaacgcccctactccaaccgacgccccaaaacgcgcgaaccgccgacctcctaacaacgacccccgcaatcgctttccgacgcaacccaaacaaaaccacccgcccgccgccccgaaacctcccgaactacctcgactaccgaaatactataaaaatcgcgaccccgacaaccgacgcccgaacccgacgcgcgaacccgctcacctccgcgcgccgccgaccctacgcgcctcccgcacttaactccgaaacgcaatcctaacgtcctccttcgccgccgatatccgccgatccctacgcgcccgaacctcgccgaccgcgccgctatcaaaaaaaaaaaacgaaactacgccgacgaatataaaactaaacgacgacaacgaacgaacgaacaactcctccctccccgcgccgcgcctccgcccctccccgcgccccgcctcccgcgccgaaactatcaaccccgcgccccgcgccccgcgcccgcgccgccgactcgaaaaacgcacaaaactaaaaaacccgaatatatacgatcgcctatcgctcgcgcccgccccctccccgccgcgcgacacatacacttactacgccgcaacccccgcccgactccgctaatttctattttaacaataactataacgaataaacgacgcgacgaaaaacgcccgaaactaacgaaaactacgaacgaaaatcaaaacccgacgcgaaaacgaaataaaaaaaccgaacaccgccaccaaccgctcgaaactccgcgtcttttctctttctttccttttttctctctacctcctccaaaatttaaaaaaacaaccccgacaaaaacgaaaaaaccaaacgaccgccgtttctccgatctcctaacgccctctacgacccgaccgaacccgcccgcacccccaacgcaaacttaaaaccgccgaatatttttaaatccacacccgacccgaaacaacgatacgacaaaaataaactctaccgacccgaaacaacgatacgacaaaaataaactctaccgccccgacgcacgac

SEQ ID NO: 31131 - DNA, 1439 bp, Artificial Sequence
  chemically treated genomic DNA (Homo sapiens) CpG-island No: 31131
ttttaatttttaagaaaagatagcgcgaagtgagattgtaaaagttttaggaaaacgttatttattaaaacgttttcgcgttttttaggtagaagtgcggtaaaatttttggtagaaattatttgtggttgtcgacgggttcgtttcgttcgggttcgtaggcgtcgtcgagtttcgggtcgtacgcgttcgtagaagtttttttttagtttcgcgcgttatttcgtttcgggtcgcggtgttagttaggaggcgcggcgttcgttcgttggttcgtttttcgttggttttttttttttttttttttttttttttttttttcgtttttttcgttgtatggttgtcgtacggagtttttgaatagttatcgtagtttttcgttttttgtttatcgcgcggagggcgtttttgttttagtcggcgttttaaggcgcgcggatcgtcggttttttagtaacggttttcgtaatcgtttttcggcgtagtttaagtaaagttattcgttcgtcgtttcgagatttttcgaattgtttcggttgtcgaggtgttgtggagatcgcgatttcggtagtcggcgttcgagttcggcgcgcgaattcgtttattttcgcgcgtcgtcggttttgcgcgtttttcgtatttggtttcgggacgtagttttggcgttttttttcgtcgtcggtgttcgtcggtttttgcgcgttcgagtttcgtcggtcgcgtcgttgttagagggggggggcggggttgcgtcggcgggtatggagttgagcggcggtagcgggcgagcgggtagttttttttttttcgcgtcgcgttttcgttttttttcgcgtttcgtttttcgcgtcggggttgttagtttcgcgtttcgcgtttcgcgttcgcgtcgtcggttcggggggcgtatagggttaaagggttcggatgtgtgcggtcgtttgtcgttcgcgttcgtttttttttcgtcgcgcggtatatgtatttgttgcgtcgtagttttcgttcggtttcgttaatttttattttgatagtaattgtggcgagtgggcggcgcggcggggggcgttcgggattggcggaggttgcgggcgggagttaggattcgacgcggaggcggagtgggggggtcgggtatcgttattaatcgttcggggtttcgcgttttttttttttttttttttttttttttttgttttttttaggatttaaagggatagtttcggtagaggcgagggggttaggcggtcgtcgttttttcggttttttgacgttttttgcggttcggtcggattcgttcgtatttttagcgtaggtttgggatcgtcgggtatttttaggtttatattcgattcggggtagcggtgcggtagagatgggttttgtcgattcggggtagcggtgcggtagagatgggttttgtcgtttcggcgtacggt

SEQ ID NO: 31132 - DNA, 1439 bp, Artificial Sequence
  chemically treated genomic DNA (Homo sapiens) CpG-island No: 31132
accgtacgccgaaacgacaaaacccatctctaccgcaccgctaccccgaatcgacaaaacccatctctaccgcaccgctaccccgaatcgaatataaacctaaaaatacccgacgatcccaaacctacgctaaaaatacgaacgaatccgaccgaaccgcaaaaaacgtcaaaaaaccgaaaaaacgacgaccgcctaaccccctcgcctctaccgaaactatccctttaaatcctaaaaaaaacaaaaaaaaaaaaaaaaaaaaaaaaaaaaaacgcgaaaccccgaacgattaataacgatacccgacccccccactccgcctccgcgtcgaatcctaactcccgcccgcaacctccgccaatcccgaacgccccccgccgcgccgcccactcgccacaattactatcaaaataaaaattaacgaaaccgaacgaaaactacgacgcaacaaatacatataccgcgcgacgaaaaaaaaacgaacgcgaacgacaaacgaccgcacacatccgaaccctttaaccctatacgccccccgaaccgacgacgcgaacgcgaaacgcgaaacgcgaaactaacaaccccgacgcgaaaaacgaaacgcgaaaaaaaacgaaaacgcgacgcgaaaaaaaaaaaactacccgctcgcccgctaccgccgctcaactccatacccgccgacgcaaccccgccccccccctctaacaacgacgcgaccgacgaaactcgaacgcgcaaaaaccgacgaacaccgacgacgaaaaaaaacgccaaaactacgtcccgaaaccaaatacgaaaaacgcgcaaaaccgacgacgcgcgaaaataaacgaattcgcgcgccgaactcgaacgccgactaccgaaatcgcgatctccacaacacctcgacaaccgaaacaattcgaaaaatctcgaaacgacgaacgaataactttacttaaactacgccgaaaaacgattacgaaaaccgttactaaaaaaccgacgatccgcgcgccttaaaacgccgactaaaacaaaaacgccctccgcgcgataaacaaaaaacgaaaaactacgataactattcaaaaactccgtacgacaaccatacaacgaaaaaaacgaaaaaaaaaaaaaaaaaaaaaaaaaaaaaaaaaaccaacgaaaaacgaaccaacgaacgaacgccgcgcctcctaactaacaccgcgacccgaaacgaaataacgcgcgaaactaaaaaaaaacttctacgaacgcgtacgacccgaaactcgacgacgcctacgaacccgaacgaaacgaacccgtcgacaaccacaaataatttctaccaaaaattttaccgcacttctacctaaaaaacgcgaaaacgttttaataaataacgttttcctaaaacttttacaatctcacttcgcgctatcttttcttaaaaattaaaa

SEQ ID NO: 31133 - DNA, 714 bp, Artificial Sequence
  chemically treated genomic DNA (Homo sapiens) CpG-island No: 31133
gtcggcgcggataggaatcgtagtaaaggattttttagattttcgagttgtgagcggcgatatagtcggggattttagatttcggatttttaggcgcggagttgatcggattcgggaagggagcggcgcgggtagcgcggggtagcgagacgtaagcgttcgtaggggtcggcggtttagtagaagtcgcgttcgttaagttgttcgaagcgttcgcgaggtgcgagggtgcggatagtatcggaaggcggcggacgtagcgttttcgggtttatttttttattttttttttttagttttgttcggagttttagttcggcgttcgtagaagtttttcggcggagcgcgtttgattcgggtggttcgcgcggaagtttttagcgttcgtttcgtgagtgtttcgtcgtttattttgcggcgtcgggcgtagcgtgatcgtagcgggtttcggagcggcgcggcggcgcgggcgggggtcgggtacgggcgcgcgtttcggggcgtagtcgggtgggcgggcgcggcggttgcgtttgggtcggggtcggcggttcggttatcggggtgcggggttgcggagaattttagcggtcgttacggatcgaagtttttaaagatgcggtttttcgagtgtatatcgttttcggttgtaatatatatttagtatttatagttatattaggtaggagcgatgggttggttgttgaattaagg

SEQ ID NO: 31134 - DNA, 714 bp, Artificial Sequence
  chemically treated genomic DNA (Homo sapiens) CpG-island No: 31134
ccttaattcaacaaccaacccatcgctcctacctaatataactataaatactaaatatatattacaaccgaaaacgatatacactcgaaaaaccgcatctttaaaaacttcgatccgtaacgaccgctaaaattctccgcaaccccgcaccccgataaccgaaccgccgaccccgacccaaacgcaaccgccgcgcccgcccacccgactacgccccgaaacgcgcgcccgtacccgacccccgcccgcgccgccgcgccgctccgaaacccgctacgatcacgctacgcccgacgccgcaaaataaacgacgaaacactcacgaaacgaacgctaaaaacttccgcgcgaaccacccgaatcaaacgcgctccgccgaaaaacttctacgaacgccgaactaaaactccgaacaaaactaaaaaaaaaaaataaaaaaataaacccgaaaacgctacgtccgccgccttccgatactatccgcaccctcgcacctcgcgaacgcttcgaacaacttaacgaacgcgacttctactaaaccgccgacccctacgaacgcttacgtctcgctaccccgcgctacccgcgccgctcccttcccgaatccgatcaactccgcgcctaaaaatccgaaatctaaaatccccgactatatcgccgctcacaactcgaaaatctaaaaaatcctttactacgattcctatccgcgccgac

SEQ ID NO: 31135 - DNA, 714 bp, Artificial Sequence
  chemically treated genomic DNA (Homo sapiens) CpG-island No: 31135
ttttggtttagtagttagtttatcgtttttgtttagtgtgattgtgaatattaggtgtatgttataatcgggagcggtgtatattcggggaatcgtatttttggaaatttcggttcgtagcggtcgttaggatttttcgtagtttcgtatttcggtggtcgaatcgtcggtttcggtttagacgtagtcgtcgcgttcgtttattcggttgcgtttcggggcgcgcgttcgtgttcggttttcgttcgcgtcgtcgcgtcgtttcggagttcgttgcggttacgttgcgttcggcgtcgtagggtgggcggcgaggtatttacgaggcggacgttgagggttttcgcgcgggttattcgggttaagcgcgtttcgtcgggaaatttttgcgggcgtcgggttgaagtttcgggtagggttgggaaggaaaggtaagaaggtgagttcgggggcgttgcgttcgtcgtttttcggtgttgttcgtattttcgtatttcgcgggcgtttcgggtaatttagcgggcgcggtttttgttgggtcgtcgatttttgcgagcgtttgcgtttcgttgtttcgcgttgttcgcgtcgtttttttttcgggttcggttaatttcgcgtttgggggttcggggtttggggttttcggttgtgtcgtcgtttatagttcggaggtttaggggattttttgttgcggtttttattcgcgtcgat

SEQ ID NO: 31136 - DNA, 714 bp, Artificial Sequence
  chemically treated genomic DNA (Homo sapiens) CpG-island No: 31136
atcgacgcgaataaaaaccgcaacaaaaaatcccctaaacctccgaactataaacgacgacacaaccgaaaaccccaaaccccgaacccccaaacgcgaaattaaccgaacccgaaaaaaaaacgacgcgaacaacgcgaaacaacgaaacgcaaacgctcgcaaaaatcgacgacccaacaaaaaccgcgcccgctaaattacccgaaacgcccgcgaaatacgaaaatacgaacaacaccgaaaaacgacgaacgcaacgcccccgaactcaccttcttacctttccttcccaaccctacccgaaacttcaacccgacgcccgcaaaaatttcccgacgaaacgcgcttaacccgaataacccgcgcgaaaaccctcaacgtccgcctcgtaaatacctcgccgcccaccctacgacgccgaacgcaacgtaaccgcaacgaactccgaaacgacgcgacgacgcgaacgaaaaccgaacacgaacgcgcgccccgaaacgcaaccgaataaacgaacgcgacgactacgtctaaaccgaaaccgacgattcgaccaccgaaatacgaaactacgaaaaatcctaacgaccgctacgaaccgaaatttccaaaaatacgattccccgaatatacaccgctcccgattataacatacacctaatattcacaatcacactaaacaaaaacgataaactaactactaaaccaaaa

SEQ ID NO: 31137 - DNA, 724 bp, Artificial Sequence
  chemically treated genomic DNA (Homo sapiens) CpG-island No: 31137
ttttttcgtttttgttttgggtttgttcgtgttgtttttagttcgcgtttttttcgttaggttcggagtttttcgtttagtttcgcgtcggggtttttttatatattttttcggtttttatgtttaggattttttttatttcgaatatatttttttcgttttttttattgtcgttaaaggttttcgtttttttcgcggttgcgttattattttcgtttattattttaatttttttttcgatttcggttaattttttagtgttgtcggtagttgatatagggattgcggttatttttgtttttttcgtaatttgttttattttagtagtttcgtaaatcgtcgaggaaaattcgttgcgataaatattttagtagtttttcgcgtttcgcgttcggttttattttatattagcggcgtaacggaagtcgattaatggcgggtttggattttagagtgataggaataaaaattaattatattaaggcgggcgcggcgtaatatcgttgagttcgcgggacgtaggtgggcggggtagggagggtattttaggcggaagagcgtttgggcgttttgtagttgtggcggaaaaggttaagggtgggaggggagtcggcgaggtcgtcgagtggcgcgacgttggggaggaggagggtcgttggggcggagggcgttttagggttgagggcggtttcgaggagttgatagtgtttgattttttagtagg

SEQ ID NO: 31138 - DNA, 724 bp, Artificial Sequence
  chemically treated genomic DNA (Homo sapiens) CpG-island No: 31138
cctactaaaaaatcaaacactatcaactcctcgaaaccgccctcaaccctaaaacgccctccgccccaacgaccctcctcctccccaacgtcgcgccactcgacgacctcgccgactcccctcccacccttaaccttttccgccacaactacaaaacgcccaaacgctcttccgcctaaaataccctccctaccccgcccacctacgtcccgcgaactcaacgatattacgccgcgcccgccttaatataattaatttttattcctatcactctaaaatccaaacccgccattaatcgacttccgttacgccgctaatataaaataaaaccgaacgcgaaacgcgaaaaactactaaaatatttatcgcaacgaattttcctcgacgatttacgaaactactaaaataaaacaaattacgaaaaaaacaaaaataaccgcaatccctatatcaactaccgacaacactaaaaaattaaccgaaatcgaaaaaaaaattaaaataataaacgaaaataataacgcaaccgcgaaaaaaacgaaaacctttaacgacaataaaaaaaacgaaaaaaatatattcgaaataaaaaaaatcctaaacataaaaaccgaaaaaatatataaaaaaaccccgacgcgaaactaaacgaaaaactccgaacctaacgaaaaaaacgcgaactaaaaacaacacgaacaaacccaaaacaaaaacgaaaaaa

SEQ ID NO: 31139 - DNA, 724 bp, Artificial Sequence
  chemically treated genomic DNA (Homo sapiens) CpG-island No: 31139
tttgttgggggattaggtattgttagtttttcggggtcgtttttagttttgggacgtttttcgttttaacgattttttttttttttagcgtcgcgttattcggcggtttcgtcggttttttttttatttttgatttttttcgttatagttatagaacgtttaagcgttttttcgtttagggtgttttttttgtttcgtttatttgcgtttcgcgggtttagcggtgttacgtcgcgttcgttttaatatgattggtttttgtttttgttattttaggatttaagttcgttattggtcggttttcgttacgtcgttgatgtggagtagggtcgagcgcggaacgcgaggggttgttggggtgtttgtcgtagcgggtttttttcggcggtttgcggagttgttaggatggagtaggttgcggagggagtaagggtgatcgtagtttttgtgttagttgtcgatagtattgaggagttggtcgaagtcgaagaaggagttggagtagtgggcgaagataatgacgtagtcgcgagaggagcggaggtttttggcgatagtgaggaggacggagaggatgtgttcgaggtggagaagattttggatatgaagatcgagggggtatgtggaggggtttcggcgcggggttgggcggggagtttcgggtttggcggggaggacgcgagttggaaatagtacgggtagatttaaaataggagcgggggag

SEQ ID NO: 31140 - DNA, 724 bp, Artificial Sequence
  chemically treated genomic DNA (Homo sapiens) CpG-island No: 31140
ctcccccgctcctattttaaatctacccgtactatttccaactcgcgtcctccccgccaaacccgaaactccccgcccaaccccgcgccgaaacccctccacataccccctcgatcttcatatccaaaatcttctccacctcgaacacatcctctccgtcctcctcactatcgccaaaaacctccgctcctctcgcgactacgtcattatcttcgcccactactccaactccttcttcgacttcgaccaactcctcaatactatcgacaactaacacaaaaactacgatcacccttactccctccgcaacctactccatcctaacaactccgcaaaccgccgaaaaaaacccgctacgacaaacaccccaacaacccctcgcgttccgcgctcgaccctactccacatcaacgacgtaacgaaaaccgaccaataacgaacttaaatcctaaaataacaaaaacaaaaaccaatcatattaaaacgaacgcgacgtaacaccgctaaacccgcgaaacgcaaataaacgaaacaaaaaaaacaccctaaacgaaaaaacgcttaaacgttctataactataacgaaaaaaatcaaaaataaaaaaaaaaccgacgaaaccgccgaataacgcgacgctaaaaaaaaaaaaaatcgttaaaacgaaaaacgtcccaaaactaaaaacgaccccgaaaaactaacaatacctaatcccccaacaaa

SEQ ID NO: 31141 - DNA, 654 bp, Artificial Sequence
  chemically treated genomic DNA (Homo sapiens) CpG-island No: 31141
aggtgaatttgtcggtggtggggtcgtagtggttttcgaggttggtgattacgtcgtcgaatttgagtatttcgtagtttttatgttgtcgtttgaggtcggcgtagaaggcgattttgggtttcgtgttgtaggtggcggcgttgatggtttcggtcgcgtttaggtcgggcgtttcgggcgggttcggtaggttttggcggttcggttcgtttttttcgttcgggggttttatggggtcgggtggttcgggtttttcggggggttcgcgcggattcgttttttcgggtttgtcggtttcgtttttggggttttggatgaaggtgggtagggattgtatgaggtcgcggtcgggcgtggtagcggtgttgggcgttttggtgttttcgtaggggtcgtagattatgcggtaggtgtttagtatttagtagtgcgtcgacgtgtcggtcgagtttattagtatcgggatgaggattattagtagtagtattattattatttttagcgtttcggcggcgattaggcgttttttgttgtttattagtcggtttagcgcggggcgatttttttgtttgtttttggatagaattttgaaggttgggcggggatttttttagagtcgaaaataattttttgcgaattttaatttttttg

SEQ ID NO: 31142 - DNA, 654 bp, Artificial Sequence
  chemically treated genomic DNA (Homo sapiens) CpG-island No: 31142
caaaaaaattaaaattcgcaaaaaattattttcgactctaaaaaaatccccgcccaaccttcaaaattctatccaaaaacaaacaaaaaaatcgccccgcgctaaaccgactaataaacaacaaaaaacgcctaatcgccgccgaaacgctaaaaataataataatactactactaataatcctcatcccgatactaataaactcgaccgacacgtcgacgcactactaaatactaaacacctaccgcataatctacgacccctacgaaaacaccaaaacgcccaacaccgctaccacgcccgaccgcgacctcatacaatccctacccaccttcatccaaaaccccaaaaacgaaaccgacaaacccgaaaaaacgaatccgcgcgaaccccccgaaaaacccgaaccacccgaccccataaaacccccgaacgaaaaaaacgaaccgaaccgccaaaacctaccgaacccgcccgaaacgcccgacctaaacgcgaccgaaaccatcaacgccgccacctacaacacgaaacccaaaatcgccttctacgccgacctcaaacgacaacataaaaactacgaaatactcaaattcgacgacgtaatcaccaacctcgaaaaccactacgaccccaccaccgacaaattcacct

SEQ ID NO: 31143 - DNA, 654 bp, Artificial Sequence
  chemically treated genomic DNA (Homo sapiens) CpG-island No: 31143
taggggagttggggttcgtagggggttgttttcggttttgaagaggttttcgtttaatttttaaaattttgtttaaaagtagataagaggatcgtttcgcgttgagtcggttggtgggtagtaggaggcgtttgatcgtcgtcggggcgttgggggtggtgatggtgttgttgttggtgatttttatttcggtgttggtgagttcggtcggtacgtcggcgtattattagatgttgggtatttgtcgtatggtttgcgatttttacgggggtattaaggcgtttagtatcgttgttacgttcgatcgcggttttatgtagtttttgtttatttttatttagggttttaaaggcgaggtcggtaggttcgggaaggcgggttcgcgcgggtttttcggagagttcgggttattcggttttatggggttttcgggcgagaagggcgagtcgggtcgttaaggtttgtcgggttcgttcggggcgttcggtttgaacgcggtcggggttattagcgtcgttatttatagtacggggtttaagatcgttttttacgtcggttttaagcggtagtatgaaggttacgaggtgtttaagttcgacgacgtggttattaatttcggaaattattacgattttattatcggtaagtttattt

SEQ ID NO: 31144 - DNA, 654 bp, Artificial Sequence
  chemically treated genomic DNA (Homo sapiens) CpG-island No: 31144
aaataaacttaccgataataaaatcgtaataatttccgaaattaataaccacgtcgtcgaacttaaacacctcgtaaccttcatactaccgcttaaaaccgacgtaaaaaacgatcttaaaccccgtactataaataacgacgctaataaccccgaccgcgttcaaaccgaacgccccgaacgaacccgacaaaccttaacgacccgactcgcccttctcgcccgaaaaccccataaaaccgaataacccgaactctccgaaaaacccgcgcgaacccgccttcccgaacctaccgacctcgcctttaaaaccctaaataaaaataaacaaaaactacataaaaccgcgatcgaacgtaacaacgatactaaacgccttaatacccccgtaaaaatcgcaaaccatacgacaaatacccaacatctaataatacgccgacgtaccgaccgaactcaccaacaccgaaataaaaatcaccaacaacaacaccatcaccacccccaacgccccgacgacgatcaaacgcctcctactacccaccaaccgactcaacgcgaaacgatcctcttatctacttttaaacaaaattttaaaaattaaacgaaaacctcttcaaaaccgaaaacaaccccctacgaaccccaactccccta

SEQ ID NO: 31145 - DNA, 900 bp, Artificial Sequence
  chemically treated genomic DNA (Homo sapiens) CpG-island No: 31145
ttgttgcgcgtcgagttttattttacgtcgcgttacggtagttagtgtatgtagtttaataatattatgggtatcgagaatatttgcgagttggtcgcgcgtttgttttttagcgtcgtcgagtgggttcgtaatattttttttttttcggatttgtagattatcgattaggtgtttttgttacgttttatttggagcgagttgttcgtgtttaacgcggtttagtgttttatgtcgttgtacgtggcgtcgttgttggtcgtcgtcggtttgtatgtttcgtttatgtttgtcgatcgcgtcgtggtttttatggattatattcgtattttttaggagtaggtggagaagtttaaggcgttatacgtcgatttagtcgagtatagttgttttaaagttatcgtgttgtttacgttaggtgaggttgcggtcgcggggagggtaggtcgcgtcggtagcgagcgtaggtttcgcgtcgttcgggtttggttttcggagtttttcgcgcggtcggtgcggggcgggtcgggttttcgttggatattgagtttggttcgggtttgtgattttcgcgcggtgatcggttggtcgcgtcgttgttattttgggagcgcggcggtgcgggaatcgaggcggcgcgggtgcggtcggcgggcggtcgggtttattcgttcggatttttacgtggggtcgcggttgtcgagggtgtgtgtttgaggcgggggggcggtgttgtggattcgtttggttgcgcgcgcgcgcgcgcgtgtgtgtgtgtgtgtgtgtttttgtgtgtgtgtttgtgtgtggtgcgtgttatgtgtgagttagagtttagcgtttttgggggaggcgagggaaggaagagaacgtgggaatgtggttttttattttgtgtgg

SEQ ID NO: 31146 - DNA, 900 bp, Artificial Sequence
  chemically treated genomic DNA (Homo sapiens) CpG-island No: 31146
ccacacaaaataaaaaaccacattcccacgttctcttccttccctcgcctcccccaaaaacgctaaactctaactcacacataacacgcaccacacacaaacacacacacaaaaacacacacacacacacacacgcgcgcgcgcgcgcgcaaccaaacgaatccacaacaccgcccccccgcctcaaacacacaccctcgacaaccgcgaccccacgtaaaaatccgaacgaataaacccgaccgcccgccgaccgcacccgcgccgcctcgattcccgcaccgccgcgctcccaaaataacaacgacgcgaccaaccgatcaccgcgcgaaaatcacaaacccgaaccaaactcaatatccaacgaaaacccgacccgccccgcaccgaccgcgcgaaaaactccgaaaaccaaacccgaacgacgcgaaacctacgctcgctaccgacgcgacctaccctccccgcgaccgcaacctcacctaacgtaaacaacacgataactttaaaacaactatactcgactaaatcgacgtataacgccttaaacttctccacctactcctaaaaaatacgaatataatccataaaaaccacgacgcgatcgacaaacataaacgaaacatacaaaccgacgacgaccaacaacgacgccacgtacaacgacataaaacactaaaccgcgttaaacacgaacaactcgctccaaataaaacgtaacaaaaacacctaatcgataatctacaaatccgaaaaaaaaaaaatattacgaacccactcgacgacgctaaaaaacaaacgcgcgaccaactcgcaaatattctcgatacccataatattattaaactacatacactaactaccgtaacgcgacgtaaaataaaactcgacgcgcaacaa

SEQ ID NO: 31147 - DNA, 900 bp, Artificial Sequence
  chemically treated genomic DNA (Homo sapiens) CpG-island No: 31147
ttatatagggtaagaagttatatttttacgtttttttttttttttcgttttttttagaaacgttgagttttggtttatatataatacgtattatatatagatatatatatagagatatatatatatatatatacgcgcgcgcgcgcgcgtagttagacggatttatagtatcgttttttcgttttagatatatattttcggtagtcgcggttttacgtaggggttcgggcgaataggttcggtcgttcgtcggtcgtattcgcgtcgtttcggttttcgtatcgtcgcgtttttaagatggtagcggcgcggttagtcggttatcgcgcgggggttatagattcgggttaggtttagtgtttagcgagggttcggttcgtttcgtatcggtcgcgcgggaggtttcgaaggttaggttcgggcggcgcggggtttgcgttcgttgtcggcgcggtttgtttttttcgcgatcgtagttttatttgacgtgaatagtacgatggttttgaggtagttgtattcggttgagtcgacgtgtagcgttttgagtttttttatttgtttttggaagatgcggatgtggtttatgaaggttacgacgcggtcggtagatatgggcgaggtatgtaggtcggcggcggttagtaacggcgttacgtgtagcggtatagagtattgggtcgcgttgagtacgaatagttcgttttaggtgaggcgtagtagggatatttggtcggtgatttgtagattcgggaagaaggggatgttgcgggtttattcgacggcgttgaagagtaggcgcgcggttagttcgtagatgttttcgatgtttataatgttgttgggttgtatgtattggttgtcgtagcgcgacgtggggtagggttcggcgcgtagtag

SEQ ID NO: 31148 - DNA, 900 bp, Artificial Sequence
  chemically treated genomic DNA (Homo sapiens) CpG-island No: 31148
ctactacgcgccgaaccctaccccacgtcgcgctacgacaaccaatacatacaacccaacaacattataaacatcgaaaacatctacgaactaaccgcgcgcctactcttcaacgccgtcgaataaacccgcaacatccccttcttcccgaatctacaaatcaccgaccaaatatccctactacgcctcacctaaaacgaactattcgtactcaacgcgacccaatactctataccgctacacgtaacgccgttactaaccgccgccgacctacatacctcgcccatatctaccgaccgcgtcgtaaccttcataaaccacatccgcatcttccaaaaacaaataaaaaaactcaaaacgctacacgtcgactcaaccgaatacaactacctcaaaaccatcgtactattcacgtcaaataaaactacgatcgcgaaaaaaacaaaccgcgccgacaacgaacgcaaaccccgcgccgcccgaacctaaccttcgaaacctcccgcgcgaccgatacgaaacgaaccgaaccctcgctaaacactaaacctaacccgaatctataacccccgcgcgataaccgactaaccgcgccgctaccatcttaaaaacgcgacgatacgaaaaccgaaacgacgcgaatacgaccgacgaacgaccgaacctattcgcccgaacccctacgtaaaaccgcgactaccgaaaatatatatctaaaacgaaaaaacgatactataaatccgtctaactacgcgcgcgcgcgcgcgtatatatatatatatatatctctatatatatatctatatataatacgtattatatataaaccaaaactcaacgtttctaaaaaaaacgaaaaaaaaaaaaaaacgtaaaaatataacttcttaccctatataa

SEQ ID NO: 31149 - DNA, 666 bp, Artificial Sequence
  chemically treated genomic DNA (Homo sapiens) CpG-island No: 31149
agcggggcggtcgaggtagtagcggcggtagcggcggcggcggcggaggtagcggtcggtgttcggttcgggttcggtttttgcgatttcggggcgttcggcgggtttttcgttttttttttttttttttttttttttttttttttttttttagcgcgttcgcgcgtttcgcggttttcggcgagtagttcggttttttttagcgtttttcgggtttaaagatatggtaatggtagttagtagttggcgagattcgtaggacgacgtggtcgggggtaatttcggcggttttaatttcgtagcgtaggcggttcgcggcggcggcggcggcgtcggcgagtagtagtagtaggcgggttcgggcgcgtcgtatacgtcgtagatttcgggttagttcggagcgttcgttattttcggtacggcgggggataagggttagggttcgttcggttcgggttagagttagtagtatatcgagtgcgtggtgtgcggggataagtcgagcggtaagtattacggttaatttatttgcgagggttgtaaaagtttttttaagaggagcgttcgtaggaatttaatttatatatgtcgtgttaataggaattgttttatcgattagtattatcgtaattagtgttaatattgtcgttttaagaagtgttttaa

SEQ ID NO: 31150 - DNA, 666 bp, Artificial Sequence
  chemically treated genomic DNA (Homo sapiens) CpG-island No: 31150
ttaaaacacttcttaaaacgacaatattaacactaattacgataatactaatcgataaaacaattcctattaacacgacatatataaattaaattcctacgaacgctcctcttaaaaaaacttttacaaccctcgcaaataaattaaccgtaatacttaccgctcgacttatccccgcacaccacgcactcgatatactactaactctaacccgaaccgaacgaaccctaacccttatcccccgccgtaccgaaaataacgaacgctccgaactaacccgaaatctacgacgtatacgacgcgcccgaacccgcctactactactactcgccgacgccgccgccgccgccgcgaaccgcctacgctacgaaattaaaaccgccgaaattacccccgaccacgtcgtcctacgaatctcgccaactactaactaccattaccatatctttaaacccgaaaaacgctaaaaaaaaccgaactactcgccgaaaaccgcgaaacgcgcgaacgcgctaaaaaaaaaaaaaaaaaaaaaaaaaaaaaaaaaaaaaaaacgaaaaacccgccgaacgccccgaaatcgcaaaaaccgaacccgaaccgaacaccgaccgctacctccgccgccgccgccgctaccgccgctactacctcgaccgccccgct

SEQ ID NO: 31151 - DNA, 666 bp, Artificial Sequence
  chemically treated genomic DNA (Homo sapiens) CpG-island No: 31151
ttgaggtattttttgaggcggtagtattggtattggttgcggtggtgttggtcgatgggatagtttttgttggtacggtatgtgtaagttaagtttttgcggacgttttttttgaagaaatttttgtagttttcgtaggtgaattggtcgtagtgtttgtcgttcgatttgttttcgtatattacgtattcgatgtgttgttggttttggttcgaatcgggcgggttttggtttttgtttttcgtcgtgtcgggggtggcgggcgtttcgggttggttcggggtttgcggcgtgtgcggcgcgttcgagttcgtttgttgttgttgttcgtcggcgtcgtcgtcgtcgtcgcgggtcgtttgcgttgcggggttggggtcgtcggggttgttttcggttacgtcgttttgcggatttcgttagttgttaattattattgttatatttttgggttcggggagcgttggggggagtcgagttgttcgtcgagggtcgcggggcgcgcgggcgcgttgggaggggaaggggaaggggaaggggggagggggagggggcggggggttcgtcgggcgtttcggggtcgtaggagtcgagttcgagtcggatatcggtcgttgttttcgtcgtcgtcgtcgttgtcgtcgttattgtttcggtcgtttcgtt

SEQ ID NO: 31152 - DNA, 666 bp, Artificial Sequence
  chemically treated genomic DNA (Homo sapiens) CpG-island No: 31152
aacgaaacgaccgaaacaataacgacgacaacgacgacgacgacgaaaacaacgaccgatatccgactcgaactcgactcctacgaccccgaaacgcccgacgaaccccccgccccctccccctccccccttccccttccccttcccctcccaacgcgcccgcgcgccccgcgaccctcgacgaacaactcgactccccccaacgctccccgaacccaaaaatataacaataataattaacaactaacgaaatccgcaaaacgacgtaaccgaaaacaaccccgacgaccccaaccccgcaacgcaaacgacccgcgacgacgacgacgacgccgacgaacaacaacaacaaacgaactcgaacgcgccgcacacgccgcaaaccccgaaccaacccgaaacgcccgccacccccgacacgacgaaaaacaaaaaccaaaacccgcccgattcgaaccaaaaccaacaacacatcgaatacgtaatatacgaaaacaaatcgaacgacaaacactacgaccaattcacctacgaaaactacaaaaatttcttcaaaaaaaacgtccgcaaaaacttaacttacacataccgtaccaacaaaaactatcccatcgaccaacaccaccgcaaccaataccaatactaccgcctcaaaaaatacctcaa

SEQ ID NO: 31153 - DNA, 574 bp, Artificial Sequence
  chemically treated genomic DNA (Homo sapiens) CpG-island No: 31153
gttcggcgttatcggtataataaaaagagtaaagtgtgtgatttttttcgtcggttgtttttcgttttttagcgttgtttttttgaatggttggttgcgttcggttttggatttggtttttcgatattcgcgcgttttgatcgtcggcggtagtttcgtttagcgttttgttcggtttatcgcgtttttcgtattttcgagttcggcgagggttttcgtcgggatagcggcggcgtcgcgggcggtttcggttttcgttcgcgtttcggttgcggtttcgatttttgttcggatttcggttcgggtttcggtttttttagcggcgttcgtcgtagtagtttcggcggtagttttagcggcgtttgtagtcgcgatttttttttttttcgtcgtcgtcgtcgttttcgttttcgtcggttttttttatgtcggtttagttcgcgcgttgcgcgtagttcgagcggtcggcgggcgggcgttcggcgcgggtgagcgattgtgtgtgcgagtgtgtgtgtgcgcgggggtgcgggcgaggcggagggcgagagtgtgcgcgcgttttgggttatat

SEQ ID NO: 31154 - DNA, 574 bp, Artificial Sequence
  chemically treated genomic DNA (Homo sapiens) CpG-island No: 31154
atataacccaaaacgcgcgcacactctcgccctccgcctcgcccgcacccccgcgcacacacacactcgcacacacaatcgctcacccgcgccgaacgcccgcccgccgaccgctcgaactacgcgcaacgcgcgaactaaaccgacataaaaaaaaccgacgaaaacgaaaacgacgacgacgacgaaaaaaaaaaaaatcgcgactacaaacgccgctaaaactaccgccgaaactactacgacgaacgccgctaaaaaaaccgaaacccgaaccgaaatccgaacaaaaatcgaaaccgcaaccgaaacgcgaacgaaaaccgaaaccgcccgcgacgccgccgctatcccgacgaaaaccctcgccgaactcgaaaatacgaaaaacgcgataaaccgaacaaaacgctaaacgaaactaccgccgacgatcaaaacgcgcgaatatcgaaaaaccaaatccaaaaccgaacgcaaccaaccattcaaaaaaacaacgctaaaaaacgaaaaacaaccgacgaaaaaaatcacacactttactctttttattataccgataacgccgaac

SEQ ID NO: 31155 - DNA, 574 bp, Artificial Sequence
  chemically treated genomic DNA (Homo sapiens) CpG-island No: 31155
gtatggtttagggcgcgcgtatattttcgtttttcgtttcgttcgtattttcgcgtatatatatattcgtatatatagtcgtttattcgcgtcgggcgttcgttcgtcggtcgttcgggttacgcgtagcgcgcgggttgagtcgatatagaggaagtcggcgagggcggaggcggcggcggcggcggaggaggaggaggtcgcggttgtaggcgtcgttggagttgtcgtcggagttgttgcggcgagcgtcgttggaggagtcgggattcgggtcggagttcgagtaggagtcggggtcgtagtcggagcgcgagcggaggtcggggtcgttcgcggcgtcgtcgttgtttcggcgggagttttcgtcgggttcgggagtgcggggagcgcggtgagtcgagtagggcgttgggcgaggttgtcgtcggcgattagggcgcgcgggtgtcggggggttaggtttagggtcggacgtagttagttatttaggaaggtagcgttggagagcgggaggtagtcggcgaggaagattatatattttgttttttttgttgtgtcggtggcgtcgggt

SEQ ID NO: 31156 - DNA, 574 bp, Artificial Sequence
  chemically treated genomic DNA (Homo sapiens) CpG-island No: 31156
acccgacgccaccgacacaacaaaaaaaacaaaatatataatcttcctcgccgactacctcccgctctccaacgctaccttcctaaataactaactacgtccgaccctaaacctaaccccccgacacccgcgcgccctaatcgccgacgacaacctcgcccaacgccctactcgactcaccgcgctccccgcactcccgaacccgacgaaaactcccgccgaaacaacgacgacgccgcgaacgaccccgacctccgctcgcgctccgactacgaccccgactcctactcgaactccgacccgaatcccgactcctccaacgacgctcgccgcaacaactccgacgacaactccaacgacgcctacaaccgcgacctcctcctcctccgccgccgccgccgcctccgccctcgccgacttcctctatatcgactcaacccgcgcgctacgcgtaacccgaacgaccgacgaacgaacgcccgacgcgaataaacgactatatatacgaatatatatatacgcgaaaatacgaacgaaacgaaaaacgaaaatatacgcgcgccctaaaccatac

SEQ ID NO: 31157 - DNA, 1223 bp, Artificial Sequence
  chemically treated genomic DNA (Homo sapiens) CpG-island No: 31157
ggcgttttcggtcggcggatttcgtagtaacggcggtaacggcgacggcggcggcggtggcggtggcggtttttcgtcgaaagggttttcgggtttacgcgttttgtgcgttaggtgtagcgttaggggttttacggggatagtcgtttggggtacgttgcgttttagtattagcgtcggcgacggtttttttcgcgttttagcgttagtggcggtcgcggtttttttttttttcgtcgtttttttgtttttatattcgggcgggggcggttgttcggtcggtcggttcgtcgcggttaatagcgatttttttttagtagttatcgcgggcggattttttcgagaatgggcggcgggtatcggggcgcgagtagatatcgtttttttgttttagtcgttttagtcggggtggtttcgaggttagggaattcgattgttcgttttttcgtcgggatatcggtcggttttaattggggatagataattcgagagttcggcggtcgtggtcgtcgttgtcgtcgttcgtcgaggtcgcgtagcgttcggcgtgacgttttttttcgtatcgaacggagcgttaatcgttcgtcggtttcgtttttttcgcgacgtacgtttcgagttcgttattacgcgtcgggagtcgtagtcgggagtcgcgagtttttatttggcgtagggtagtcgcggaggcgtagtacgtcgaggtcgaggagttttattcgagttggggaggcgcgagtagttaaagttggtaattgttcgcggaggcgtggagacggcgaagaggggcggttcgagagtacggggcggggtttttttgaggagcgtgacgtggttatttatcgggtttttttttcgtcgggtttttcgcgggagttgacggattcgttcgttcgggtgtcgttcggttcgagggtttgtttcgttttagttgtttttcgagtgcgagggaggacgaaggggacgattttcggtttattggttgaggtcgtttcgattgtaggtttaggggcggagcgcgtattaggtttttgtggttcgcggttggttcgcggtttgttttcgcggcgacggcggttaagggtttgggcgggtcgcgtatatggcgttgggaggatcgagcgttcgatttgtttttaggttttaaagttgggtcgtagttaggttaagggaggggacgcggtgtcgattttcggtttggggtagtttttaagtgaagt

SEQ ID NO: 31158 - DNA, 1223 bp, Artificial Sequence
  chemically treated genomic DNA (Homo sapiens) CpG-island No: 31158
acttcacttaaaaactaccccaaaccgaaaatcgacaccgcgtcccctcccttaacctaactacgacccaactttaaaacctaaaaacaaatcgaacgctcgatcctcccaacgccatatacgcgacccgcccaaacccttaaccgccgtcgccgcgaaaacaaaccgcgaaccaaccgcgaaccacaaaaacctaatacgcgctccgcccctaaacctacaatcgaaacgacctcaaccaataaaccgaaaatcgtccccttcgtcctccctcgcactcgaaaaacaactaaaacgaaacaaaccctcgaaccgaacgacacccgaacgaacgaatccgtcaactcccgcgaaaaacccgacgaaaaaaaaacccgataaataaccacgtcacgctcctcaaaaaaaccccgccccgtactctcgaaccgcccctcttcgccgtctccacgcctccgcgaacaattaccaactttaactactcgcgcctccccaactcgaataaaactcctcgacctcgacgtactacgcctccgcgactaccctacgccaaataaaaactcgcgactcccgactacgactcccgacgcgtaataacgaactcgaaacgtacgtcgcgaaaaaaacgaaaccgacgaacgattaacgctccgttcgatacgaaaaaaaacgtcacgccgaacgctacgcgacctcgacgaacgacgacaacgacgaccacgaccgccgaactctcgaattatctatccccaattaaaaccgaccgatatcccgacgaaaaaacgaacaatcgaattccctaacctcgaaaccaccccgactaaaacgactaaaacaaaaaaacgatatctactcgcgccccgatacccgccgcccattctcgaaaaaatccgcccgcgataactactaaaaaaaaatcgctattaaccgcgacgaaccgaccgaccgaacaaccgcccccgcccgaatataaaaacaaaaaaacgacgaaaaaaaaaaaaaccgcgaccgccactaacgctaaaacgcgaaaaaaaccgtcgccgacgctaatactaaaacgcaacgtaccccaaacgactatccccgtaaaacccctaacgctacacctaacgcacaaaacgcgtaaacccgaaaaccctttcgacgaaaaaccgccaccgccaccgccgccgccgtcgccgttaccgccgttactacgaaatccgccgaccgaaaacgcc

SEQ ID NO: 31159 - DNA, 1223 bp, Artificial Sequence
  chemically treated genomic DNA (Homo sapiens) CpG-island No: 31159
attttatttgggagttgttttaggtcgggggtcgatatcgcgtttttttttttagtttagttgcgatttagttttagggtttaagggtaaatcgagcgttcggtttttttagcgttatgtgcgcggttcgtttaggtttttggtcgtcgtcgtcgcgggggtaggtcgcgagttagtcgcgagttatagaggtttggtgcgcgtttcgtttttgagtttgtagtcggggcggttttagttagtgagtcgggagtcgtttttttcgttttttttcgtattcggagggtagttggggcggggtagattttcgggtcgggcggtattcgggcgggcgaattcgttagttttcgcgggaggttcggcgagagaaggattcggtgagtagttacgttacgttttttagggaggtttcgtttcgtgttttcgggtcgttttttttcgtcgtttttacgttttcgcgggtagttattagttttggttgttcgcgtttttttaattcgggtaaagtttttcggtttcggcgtgttgcgttttcgcggttgttttgcgttaggtgagggttcgcggttttcggttgcggttttcggcgcgtggtggcgggttcggggcgtgcgtcgcggagaggacggggtcggcgggcggttggcgtttcgttcggtgcggggaggggcgttacgtcgggcgttgcgcggtttcggcgggcggcggtagcggcggttacggtcgtcgggttttcgggttgtttgtttttagttggagtcggtcggtgtttcggcggagagacgggtagtcgggttttttggtttcggggttatttcggttggggcggttggggtagagggacgatgtttattcgcgtttcgatgttcgtcgtttattttcgggaggattcgttcgcggtgattgttgagagggagtcgttgttggtcgcggcgaatcggtcggtcgagtagtcgttttcgttcgaatgtgagggtaaagaggcggcgagggaggagagggtcgcggtcgttattagcgttggggcgcggggagagtcgtcgtcggcgttggtgttgggacgtagcgtgttttaggcggttgttttcgtgaggtttttggcgttgtatttggcgtataaggcgcgtgggttcgggggttttttcggcggggagtcgttatcgttatcgtcgtcgtcgtcgtcgttgtcgtcgttgttgcgggattcgtcggtcgaggacgtt

SEQ ID NO: 31160 - DNA, 1223 bp, Artificial Sequence
  chemically treated genomic DNA (Homo sapiens) CpG-island No: 31160
aacgtcctcgaccgacgaatcccgcaacaacgacgacaacgacgacgacgacgacgataacgataacgactccccgccgaaaaaacccccgaacccacgcgccttatacgccaaatacaacgccaaaaacctcacgaaaacaaccgcctaaaacacgctacgtcccaacaccaacgccgacgacgactctccccgcgccccaacgctaataacgaccgcgaccctctcctccctcgccgcctctttaccctcacattcgaacgaaaacgactactcgaccgaccgattcgccgcgaccaacaacgactccctctcaacaatcaccgcgaacgaatcctcccgaaaataaacgacgaacatcgaaacgcgaataaacatcgtccctctaccccaaccgccccaaccgaaataaccccgaaaccaaaaaacccgactacccgtctctccgccgaaacaccgaccgactccaactaaaaacaaacaacccgaaaacccgacgaccgtaaccgccgctaccgccgcccgccgaaaccgcgcaacgcccgacgtaacgcccctccccgcaccgaacgaaacgccaaccgcccgccgaccccgtcctctccgcgacgcacgccccgaacccgccaccacgcgccgaaaaccgcaaccgaaaaccgcgaaccctcacctaacgcaaaacaaccgcgaaaacgcaacacgccgaaaccgaaaaactttacccgaattaaaaaaacgcgaacaaccaaaactaataactacccgcgaaaacgtaaaaacgacgaaaaaaaacgacccgaaaacacgaaacgaaacctccctaaaaaacgtaacgtaactactcaccgaatccttctctcgccgaacctcccgcgaaaactaacgaattcgcccgcccgaataccgcccgacccgaaaatctaccccgccccaactaccctccgaatacgaaaaaaaacgaaaaaaacgactcccgactcactaactaaaaccgccccgactacaaactcaaaaacgaaacgcgcaccaaacctctataactcgcgactaactcgcgacctacccccgcgacgacgacgaccaaaaacctaaacgaaccgcgcacataacgctaaaaaaaccgaacgctcgatttacccttaaaccctaaaactaaatcgcaactaaactaaaaaaaaaaacgcgatatcgacccccgacctaaaacaactcccaaataaaat

SEQ ID NO: 31161 - DNA, 655 bp, Artificial Sequence
  chemically treated genomic DNA (Homo sapiens) CpG-island No: 31161
gagcgtttttgcgggagatgggtaggttcgagtcggtagtgatagttcggggaggcgggggatagcgttaggggttttttagaagcggtcgggttattttacgttgaggttaggaagcgtttgttttgcgtttcgtattttgagtagagcgtttataggagacgcggaggggtagtggtattggaacgggggggtagtggcgtcggaaggggataagggggggtagtggcgtcggaaggggacgcgggggggtagtggcgttggaacgggggtagtggcgtcggaaggagacgtggaggggtagtggcgttggaaggagacgtgggggggtagtggcgtcggaacggggggtagtggcgttggaaggagacgcggaggggtagtggcgttggaaggagacgcggaggggtagtggcgtcggaaggagatacggaggggtagtggtgttggaatggagggtagtggcgtcggaacggggggtagtggcgttggaaggagacgcggaggggtagtggcgttggaaggagaaacggaggggtagtggcgttggaacgggggtagtggcgtcggaaggggacgcggaggggtagtggcgttggaaggagagattagggtcgcggggttgttttttgtaaagggttaagttgtgaggatt

SEQ ID NO: 31162 - DNA, 655 bp, Artificial Sequence
  chemically treated genomic DNA (Homo sapiens) CpG-island No: 31162
aatcctcacaacttaaccctttacaaaaaacaaccccgcgaccctaatctctccttccaacgccactacccctccgcgtccccttccgacgccactacccccgttccaacgccactacccctccgtttctccttccaacgccactacccctccgcgtctccttccaacgccactaccccccgttccgacgccactaccctccattccaacaccactacccctccgtatctccttccgacgccactacccctccgcgtctccttccaacgccactacccctccgcgtctccttccaacgccactaccccccgttccgacgccactacccccccacgtctccttccaacgccactacccctccacgtctccttccgacgccactacccccgttccaacgccactacccccccgcgtccccttccgacgccactacccccccttatccccttccgacgccactacccccccgttccaataccactacccctccgcgtctcctataaacgctctactcaaaatacgaaacgcaaaacaaacgcttcctaacctcaacgtaaaataacccgaccgcttctaaaaaacccctaacgctatcccccgcctccccgaactatcactaccgactcgaacctacccatctcccgcaaaaacgctc

SEQ ID NO: 31163 - DNA, 655 bp, Artificial Sequence
  chemically treated genomic DNA (Homo sapiens) CpG-island No: 31163
agtttttatagtttggttttttataagaagtagtttcgcggttttggtttttttttttaacgttattgttttttcgcgttttttttcgacgttattgttttcgttttaacgttattgttttttcgtttttttttttaacgttattgttttttcgcgtttttttttaacgttattgtttttcgtttcgacgttattgttttttattttaatattattgttttttcgtgttttttttcgacgttattgttttttcgcgtttttttttaacgttattgttttttcgcgtttttttttaacgttattgtttttcgtttcgacgttattgtttttttacgtttttttttaacgttattgtttttttacgttttttttcgacgttattgttttcgttttaacgttattgttttttcgcgttttttttcgacgttattgtttttttttgttttttttcgacgttattgttttttcgttttaatgttattgttttttcgcgttttttgtagacgttttgtttaggatgcggggcgtaggataggcgttttttggttttagcgtggggtggttcggtcgtttttggaagatttttggcgttgtttttcgttttttcgggttgttattgtcgattcgggtttgtttatttttcgtaggggcgttt

SEQ ID NO: 31164 - DNA, 655 bp, Artificial Sequence
  chemically treated genomic DNA (Homo sapiens) CpG-island No: 31164
aaacgcccctacgaaaaataaacaaacccgaatcgacaataacaacccgaaaaaacgaaaaacaacgccaaaaatcttccaaaaacgaccgaaccaccccacgctaaaaccaaaaaacgcctatcctacgccccgcatcctaaacaaaacgtctacaaaaaacgcgaaaaaacaataacattaaaacgaaaaaacaataacgtcgaaaaaaaacaaaaaaaaacaataacgtcgaaaaaaaacgcgaaaaaacaataacgttaaaacgaaaacaataacgtcgaaaaaaaacgtaaaaaaacaataacgttaaaaaaaaacgtaaaaaaacaataacgtcgaaacgaaaaacaataacgttaaaaaaaaacgcgaaaaaacaataacgttaaaaaaaaacgcgaaaaaacaataacgtcgaaaaaaaacacgaaaaaacaataatattaaaataaaaaacaataacgtcgaaacgaaaaacaataacgttaaaaaaaaacgcgaaaaaacaataacgttaaaaaaaaaaacgaaaaaacaataacgttaaaacgaaaacaataacgtcgaaaaaaaacgcgaaaaaacaataacgttaaaaaaaaaaaccaaaaccgcgaaactacttcttataaaaaaccaaactataaaaact

SEQ ID NO: 31165 - DNA, 1190 bp, Artificial Sequence
  chemically treated genomic DNA (Homo sapiens) CpG-island No: 31165
atttggttcggtatagcgatcgttttaagtttagaatcgttaagttagttcggggcgtttcggttttttcgtttcgcgtttcgttcgtttttagttcgggtttcgtcgttttcgtcgtttttgtcgttcgggtcgttttcgtcggttttggtttcggtttcgtacgtcggtagggggcgttcgagcgtagttaaaaggttcggcgggaggtcggcggttttagtggcggagcgcggttgtcggtgtgcggtcgggagcgatcgtcgcggggtaggggcgcggcgggtatcgcgtagagcgcgtagaatagacggacggcggcggggattcgacggcggcgtttcggtattttttagatttcggttagcgtttttttgttagtcgtaagtatttagtttcggtttatttcgggttttcgatggttttcgaggtcggggcgattttgcgcgcgtcgcgtcggttgttttgggcggcgttgttgtttttggtcgcgttgtttttcgtcgttttttcggcggcggttttaggtacgcgtcgcgttcgggttttcggcgttttttagtttttcgcgtatttttttgcgttcgggtttcgtcgtttcgtttagtgttggttacgggtcgtgttattagtttgtgcgttttcgttattcgcgggtcggggtatttggcgttttgtgtgggtggcgggagcggggacgtttcggtgttcggggatcgtagcgcgttggcgtttaattttgtcgtcgttcgttttggagtcgggaggttttagtcgtttaagtgtttcgggagatttaggtatagcggggaaaaaaggaaaagaaaggcgatttttagcgtgcggattggggtaatgtttttttttgtttagaatttttcgggagcgtaggtggttattttatttttttcgcgtttatttttcgcgaggtaggatgacgggcgtattcgggagatcggagggaggtagagtagggttgttttagaaggtcgtgggggaaaggttgcgagttgtcgtagggcgtcgggtgtttttgcgttttagaggagacgcgttttagtgttagttcggttttaggcggtaggaggttcgcgcgttcggggggaacgtttaagttgggagaaaatgtttgttttgagaggagggagagggaaatgagaaagttgattttagagaaattcgtttttttt

SEQ ID NO: 31166 - DNA, 1190 bp, Artificial Sequence
  chemically treated genomic DNA (Homo sapiens) CpG-island No: 31166
aaaaaaaacgaatttctctaaaatcaactttctcatttccctctccctcctctcaaaacaaacattttctcccaacttaaacgttccccccgaacgcgcgaacctcctaccgcctaaaaccgaactaacactaaaacgcgtctcctctaaaacgcaaaaacacccgacgccctacgacaactcgcaacctttcccccacgaccttctaaaacaaccctactctacctccctccgatctcccgaatacgcccgtcatcctacctcgcgaaaaataaacgcgaaaaaaataaaataaccacctacgctcccgaaaaattctaaacaaaaaaaaacattaccccaatccgcacgctaaaaatcgcctttcttttccttttttccccgctatacctaaatctcccgaaacacttaaacgactaaaacctcccgactccaaaacgaacgacgacaaaattaaacgccaacgcgctacgatccccgaacaccgaaacgtccccgctcccgccacccacacaaaacgccaaataccccgacccgcgaataacgaaaacgcacaaactaataacacgacccgtaaccaacactaaacgaaacgacgaaacccgaacgcaaaaaaatacgcgaaaaactaaaaaacgccgaaaacccgaacgcgacgcgtacctaaaaccgccgccgaaaaaacgacgaaaaacaacgcgaccaaaaacaacaacgccgcccaaaacaaccgacgcgacgcgcgcaaaatcgccccgacctcgaaaaccatcgaaaacccgaaataaaccgaaactaaatacttacgactaacaaaaaaacgctaaccgaaatctaaaaaataccgaaacgccgccgtcgaatccccgccgccgtccgtctattctacgcgctctacgcgatacccgccgcgcccctaccccgcgacgatcgctcccgaccgcacaccgacaaccgcgctccgccactaaaaccgccgacctcccgccgaaccttttaactacgctcgaacgccccctaccgacgtacgaaaccgaaaccaaaaccgacgaaaacgacccgaacgacaaaaacgacgaaaacgacgaaacccgaactaaaaacgaacgaaacgcgaaacgaaaaaaccgaaacgccccgaactaacttaacgattctaaacttaaaacgatcgctataccgaaccaaat

SEQ ID NO: 31167 - DNA, 1190 bp, Artificial Sequence
  chemically treated genomic DNA (Homo sapiens) CpG-island No: 31167
gggaagggcgagtttttttggaattagtttttttatttttttttttttttttttaagataaatatttttttttagtttgaacgtttttttcgggcgcgcgggttttttgtcgtttggagtcgagttggtattggagcgcgttttttttggagcgtagaggtattcgacgttttgcggtagttcgtagttttttttttacgattttttagaatagttttgttttgttttttttcggtttttcgagtgcgttcgttattttgtttcgcgagaggtgaacgcggagaaagtaggatgattatttacgttttcgagaaattttgggtaaagaaaggtattattttagttcgtacgttgaaagtcgtttttttttttttttttttttcgttgtgtttgaatttttcgggatatttagacggttggagtttttcgattttaaggcgggcgacggtaaagttaaacgttagcgcgttgcggttttcgggtatcgaggcgttttcgttttcgttatttatatagggcgttaagtgtttcgattcgcgagtgacgaggacgtataggttagtgatacgattcgtagttagtattgagcgggacgacggggttcgagcgtaggagggtgcgcggggagttgaggagcgtcgggggttcgggcgcggcgcgtatttggggtcgtcgtcgaggaggcgacggggagtagcgcggttaagagtagtagcgtcgtttaggatagtcggcgcggcgcgcgtagggtcgtttcggtttcgggggttatcgagagttcggggtgggtcggggttgggtgtttgcggttggtaggggggcgttggtcggagtttggggagtgtcgaggcgtcgtcgtcgggttttcgtcgtcgttcgtttgttttgcgcgttttgcgcggtgttcgtcgcgtttttgtttcgcggcgatcgttttcggtcgtatatcggtagtcgcgtttcgttattgaggtcgtcgatttttcgtcgagttttttagttgcgttcgggcgttttttgtcggcgtgcggggtcggggttagggtcggcgggggcgattcgggcgataggggcgacgggggcggcggggttcgggttggaggcgggcggggcgcgggacgaaggggtcggagcgtttcggattgatttagcggttttgaatttggggcggtcgttgtgtcgggttaagt

SEQ ID NO: 31168 - DNA, 1190 bp, Artificial Sequence
  chemically treated genomic DNA (Homo sapiens) CpG-island No: 31168
acttaacccgacacaacgaccgccccaaattcaaaaccgctaaatcaatccgaaacgctccgaccccttcgtcccgcgccccgcccgcctccaacccgaaccccgccgcccccgtcgcccctatcgcccgaatcgcccccgccgaccctaaccccgaccccgcacgccgacaaaaaacgcccgaacgcaactaaaaaactcgacgaaaaatcgacgacctcaataacgaaacgcgactaccgatatacgaccgaaaacgatcgccgcgaaacaaaaacgcgacgaacaccgcgcaaaacgcgcaaaacaaacgaacgacgacgaaaacccgacgacgacgcctcgacactccccaaactccgaccaacgcccccctaccaaccgcaaacacccaaccccgacccaccccgaactctcgataacccccgaaaccgaaacgaccctacgcgcgccgcgccgactatcctaaacgacgctactactcttaaccgcgctactccccgtcgcctcctcgacgacgaccccaaatacgcgccgcgcccgaacccccgacgctcctcaactccccgcgcaccctcctacgctcgaaccccgtcgtcccgctcaatactaactacgaatcgtatcactaacctatacgtcctcgtcactcgcgaatcgaaacacttaacgccctatataaataacgaaaacgaaaacgcctcgatacccgaaaaccgcaacgcgctaacgtttaactttaccgtcgcccgccttaaaatcgaaaaactccaaccgtctaaatatcccgaaaaattcaaacacaacgaaaaaaaaaaaaaaaaaaaaacgactttcaacgtacgaactaaaataatacctttctttacccaaaatttctcgaaaacgtaaataatcatcctactttctccgcgttcacctctcgcgaaacaaaataacgaacgcactcgaaaaaccgaaaaaaaacaaaacaaaactattctaaaaaatcgtaaaaaaaaaactacgaactaccgcaaaacgtcgaatacctctacgctccaaaaaaaacgcgctccaataccaactcgactccaaacgacaaaaaacccgcgcgcccgaaaaaaacgttcaaactaaaaaaaaatatttatcttaaaaaaaaaaaaaaaaaaataaaaaaactaattccaaaaaaactcgcccttccc

SEQ ID NO: 31169 - DNA, 1029 bp, Artificial Sequence
  chemically treated genomic DNA (Homo sapiens) CpG-island No: 31169
tgcgtttcgcgaattcggagttgcgaagtttcgtatcgaacggagatcggcggtagtaaaatgtacgtgggtatcgaatattcggggagggcgtttcgtcgtgttcggggtaattatatcgaaggtcgagcggcggttttacggtatcggtcgggtatcgtcggaggggtttaagtcggagttgggagagtcgcggtattttggagttcggcgggcgggagagtttcgttttatcgtttcgggattttttttagagggaagaaagcgttcgagggttacggcggtcggttcgtttagttttagcgtttcggggagtcgggttttggttcggttttcggcgttgggggcgcgcggtcgtttttagggagtcgcggatttaagttcgttttttcgtcggtttgttcgtcggggcgtttggcgcgtagtagcgcgaggggttacggggttcggaattcgaaggaggcggaacgatgggattgggggtcggggtttaggtgggatgggagtagggttgcggggtttttatcgttcggtttcgcgggttattatcgtcgtttcgtgcggttcgggtttttttattattgttttcggtcgtagtagaggcggtcgtcgcgcgtttggtttcgttttttttcgtcggttttatttcgtaaaggttgcggggagggtggcgcggtcgcgggtatatttgcgcgttcgtcgggttgttgtgggttcgttttttcgtttttgtatcgacgtcgtattttcgtttcgagtttttttgtgatttcgtgttttttggtcggagttttttatcgttttttggaacgtagttttttatatattttttttcgaggtgcgtagatagacgaattcgttttatttttttttttagtttagtgtaaattattgtttcggggcgggggtcgtaggcggcgggggtaggaaagtcgcgggtggatggtagaacgggagaggtgcgtgggtggtattttgattttaggagaaagaagtagaatattgttattgaatttatagttaagtgtt

SEQ ID NO: 31170 - DNA, 1029 bp, Artificial Sequence
  chemically treated genomic DNA (Homo sapiens) CpG-island No: 31170
aacacttaactataaattcaataacaatattctacttctttctcctaaaatcaaaataccacccacgcacctctcccgttctaccatccacccgcgactttcctacccccgccgcctacgacccccgccccgaaacaataatttacactaaactaaaaaaaaaaataaaacgaattcgtctatctacgcacctcgaaaaaaaatatataaaaaactacgttccaaaaaacgataaaaaactccgaccaaaaaacacgaaatcacaaaaaaactcgaaacgaaaatacgacgtcgatacaaaaacgaaaaaacgaacccacaacaacccgacgaacgcgcaaatatacccgcgaccgcgccaccctccccgcaacctttacgaaataaaaccgacgaaaaaaaacgaaaccaaacgcgcgacgaccgcctctactacgaccgaaaacaataataaaaaaacccgaaccgcacgaaacgacgataataacccgcgaaaccgaacgataaaaaccccgcaaccctactcccatcccacctaaaccccgacccccaatcccatcgttccgcctccttcgaattccgaaccccgtaacccctcgcgctactacgcgccaaacgccccgacgaacaaaccgacgaaaaaacgaacttaaatccgcgactccctaaaaacgaccgcgcgcccccaacgccgaaaaccgaaccaaaacccgactccccgaaacgctaaaactaaacgaaccgaccgccgtaaccctcgaacgctttcttccctctaaaaaaaatcccgaaacgataaaacgaaactctcccgcccgccgaactccaaaataccgcgactctcccaactccgacttaaacccctccgacgatacccgaccgataccgtaaaaccgccgctcgaccttcgatataattaccccgaacacgacgaaacgccctccccgaatattcgatacccacgtacattttactaccgccgatctccgttcgatacgaaacttcgcaactccgaattcgcgaaacgca

SEQ ID NO: 31171 - DNA, 1029 bp, Artificial Sequence
  chemically treated genomic DNA (Homo sapiens) CpG-island No: 31171
ggtatttaattataagtttagtgatagtattttgttttttttttttgaagttaaagtgttatttacgtatttttttcgttttgttatttattcgcggtttttttattttcgtcgtttgcggttttcgtttcggggtagtagtttgtattaggttgaagggagaggtggaacggattcgtttatttacgtatttcgaggaggggtgtgtgaggagttacgttttagagaacggtaagaaatttcggttaggaaatacgggattataggagaattcgaggcgaaggtgcggcgtcggtgtaggagcggaggggcggatttatagtagttcggcgagcgcgtaggtgtgttcgcggtcgcgttatttttttcgtagtttttacgggatggagtcggcgggagagggcggggttaggcgcgcggcggtcgtttttgttgcggtcggaaataatagtggaggaattcgagtcgtacggaacggcggtggtggttcgcggagtcggacggtaaagatttcgtagttttgtttttattttatttgagtttcgatttttagttttatcgtttcgtttttttcgagtttcgagtttcgtggtttttcgcgttgttgcgcgttaggcgtttcgacggatagatcgacggaaagacggatttgggttcgcgattttttgggggcggtcgcgcgtttttaacgtcgaaggtcgggttaggattcggtttttcgagacgttgaggttgggcggatcggtcgtcgtggttttcggacgtttttttttttttgggaggaatttcggagcgatgggacgaggttttttcgttcgtcgggttttaggatgtcgcggtttttttagtttcggtttgggttttttcggcggtgttcggtcggtatcgtgaagtcgtcgttcggttttcggtgtagttgtttcggatacggcgggacgtttttttcgggtattcggtatttacgtgtattttgttgtcgtcgattttcgttcgatgcgaagtttcgtaatttcgagttcgcgaggcgta

SEQ ID NO: 31172 - DNA, 1029 bp, Artificial Sequence
  chemically treated genomic DNA (Homo sapiens) CpG-island No: 31172
tacgcctcgcgaactcgaaattacgaaacttcgcatcgaacgaaaatcgacgacaacaaaatacacgtaaataccgaatacccgaaaaaaacgtcccgccgtatccgaaacaactacaccgaaaaccgaacgacgacttcacgataccgaccgaacaccgccgaaaaaacccaaaccgaaactaaaaaaaccgcgacatcctaaaacccgacgaacgaaaaaacctcgtcccatcgctccgaaattcctcccaaaaaaaaaaaaacgtccgaaaaccacgacgaccgatccgcccaacctcaacgtctcgaaaaaccgaatcctaacccgaccttcgacgttaaaaacgcgcgaccgcccccaaaaaatcgcgaacccaaatccgtctttccgtcgatctatccgtcgaaacgcctaacgcgcaacaacgcgaaaaaccacgaaactcgaaactcgaaaaaaacgaaacgataaaactaaaaatcgaaactcaaataaaataaaaacaaaactacgaaatctttaccgtccgactccgcgaaccaccaccgccgttccgtacgactcgaattcctccactattatttccgaccgcaacaaaaacgaccgccgcgcgcctaaccccgccctctcccgccgactccatcccgtaaaaactacgaaaaaaataacgcgaccgcgaacacacctacgcgctcgccgaactactataaatccgcccctccgctcctacaccgacgccgcaccttcgcctcgaattctcctataatcccgtatttcctaaccgaaatttcttaccgttctctaaaacgtaactcctcacacacccctcctcgaaatacgtaaataaacgaatccgttccacctctcccttcaacctaatacaaactactaccccgaaacgaaaaccgcaaacgacgaaaataaaaaaaccgcgaataaataacaaaacgaaaaaaatacgtaaataacactttaacttcaaaaaaaaaaaacaaaatactatcactaaacttataattaaatacc

SEQ ID NO: 31173 - DNA, 659 bp, Artificial Sequence
  chemically treated genomic DNA (Homo sapiens) CpG-island No: 31173
cgtaaatttgtcggattggtttcgtgttttttcgggtgtagtagcggttgtgggcgtcggggtaagcggttgcggttttttcgtttttttgcgtttttcggttttttcgttttttttcgtagtttttttttttagcgtttttttcgttttttcgtttttcgttttttttttcgttcgttttttagcgcgttttttagttcgtttttatttttttttttgttgttgttgtcgttgttgcggcgtcgttaggcgttcgtatttcggtcggttgcgttcgttggtcgttttcgtttcgttttttttttagttcggagttttcggttagatttagttttttttgtcgtttttttcgtttttttcggttcggacgtcgggtttcgtcgtagtaggagtaggggttgtcgtcgatttttttttcgtttgttcgtttgtcggagtagtagtcgaacgtcgcgcgtttggcggcggtttcggtcgggcggtcgttagtttatttttgttgcgtttcggatttcgggcggtttcgcggcgcgttgggttcgtagcgttagcgttgttcgtcgcggttcgggttttgggtatcgcgagaatcgtgttttcggtcgtcgattgtttgcgttttcggggtaggtcggtacgtagtcgatttttcgtcgcgg

SEQ ID NO: 31174 - DNA, 659 bp, Artificial Sequence
  chemically treated genomic DNA (Homo sapiens) CpG-island No: 31174
ccgcgacgaaaaatcgactacgtaccgacctaccccgaaaacgcaaacaatcgacgaccgaaaacacgattctcgcgatacccaaaacccgaaccgcgacgaacaacgctaacgctacgaacccaacgcgccgcgaaaccgcccgaaatccgaaacgcaacaaaaataaactaacgaccgcccgaccgaaaccgccgccaaacgcgcgacgttcgactactactccgacaaacgaacaaacgaaaaaaaaatcgacgacaacccctactcctactacgacgaaacccgacgtccgaaccgaaaaaaacgaaaaaaacgacaaaaaaaactaaatctaaccgaaaactccgaactaaaaaaaaaacgaaacgaaaacgaccaacgaacgcaaccgaccgaaatacgaacgcctaacgacgccgcaacaacgacaacaacaacaaaaaaaaaaataaaaacgaactaaaaaacgcgctaaaaaacgaacgaaaaaaaaaacgaaaaacgaaaaaacgaaaaaaacgctaaaaaaaaaaactacgaaaaaaaacgaaaaaaccgaaaaacgcaaaaaaacgaaaaaaccgcaaccgcttaccccgacgcccacaaccgctactacacccgaaaaaacacgaaaccaatccgacaaatttacg

SEQ ID NO: 31175 - DNA, 659 bp, Artificial Sequence
  chemically treated genomic DNA (Homo sapiens) CpG-island No: 31175
tcgcggcgaggggtcggttgcgtgtcggtttgtttcgggggcgtaggtagtcgacggtcggaggtacggttttcgcggtgtttagagttcgggtcgcggcgggtagcgttgacgttgcggatttagcgcgtcgcggagtcgttcggagttcgggacgtagtagggatgagttggcggtcgttcggtcggagtcgtcgttaagcgcgcggcgttcggttgttgtttcggtaagcgagtaagcgagagggagatcggcggtaatttttgtttttgttgcggcggagttcggcgttcgagtcggaaggagcgggagaggcggtaagaggagttgggtttggtcgagagtttcgggttgggaagggagcggagcgggagcgattagcgagcgtagtcggtcgaggtacgggcgtttggcggcgtcgtaatagcggtaatagtagtaggaaaaaaaatgagagcgagttagagagcgcgttggagagcgagcgagagagggagcgagagacgagagagcgaggaaggcgttgagaggggaggttgcgggagagggcgggagagtcgggaagcgtaagggggcgagggggtcgtagtcgtttgtttcggcgtttatagtcgttgttgtattcgaggaggtacgagattaattcggtaagtttgcg

SEQ ID NO: 31176 - DNA, 659 bp, Artificial Sequence
  chemically treated genomic DNA (Homo sapiens) CpG-island No: 31176
cgcaaacttaccgaattaatctcgtacctcctcgaatacaacaacgactataaacgccgaaacaaacgactacgaccccctcgcccccttacgcttcccgactctcccgccctctcccgcaacctcccctctcaacgccttcctcgctctctcgtctctcgctccctctctcgctcgctctccaacgcgctctctaactcgctctcattttttttcctactactattaccgctattacgacgccgccaaacgcccgtacctcgaccgactacgctcgctaatcgctcccgctccgctcccttcccaacccgaaactctcgaccaaacccaactcctcttaccgcctctcccgctccttccgactcgaacgccgaactccgccgcaacaaaaacaaaaattaccgccgatctccctctcgcttactcgcttaccgaaacaacaaccgaacgccgcgcgcttaacgacgactccgaccgaacgaccgccaactcatccctactacgtcccgaactccgaacgactccgcgacgcgctaaatccgcaacgtcaacgctacccgccgcgacccgaactctaaacaccgcgaaaaccgtacctccgaccgtcgactacctacgcccccgaaacaaaccgacacgcaaccgacccctcgccgcga

SEQ ID NO: 31177 - DNA, 913 bp, Artificial Sequence
  chemically treated genomic DNA (Homo sapiens) CpG-island No: 31177
  unsure (788)
agcgcgggcggggagtttttcgcgttttttacgttttcggcgattagcgtattgtagtagggtttgcgcggtttgtattttttttcggatcgtttgtaggatattaatcgttttaagcgttttttttttttggatattaagtttgtttacgtttttagtatgcggttcgacggtttcgggtttttcgatttcggcgaggtttcgaagttttgtaagttggatagttcgtcgggggtcgcgttgggtttgttttcgtttatttcggatagttcggacgtcgcgtttgatgcgcgtttacggtttcgtcggcggtttcggtttttcgtcggttttttcgcgcgttttttcgcgtatagtttcggtttgaatttcggcgatgcggttcggtagatttcgcggtacggtttttcggttttgtcggcgttcgggttgttcggttttggttagtcggtcggtttcggggtttgggtatcgtcgttcgattttttaggtacgtcgtcgttcgacgggttttggtgttttagtttcgagggcgtatagggggcgggcggggtgttgtttgcgtttttcggtcgggcgggcgtttcgggattaggcggcggtagcgatttgcggcggcgggaggtagcgagggttgagtttcgggacgcgcggatcggttggttcgaggagtcggtttcggagacgtagtttaagcgtcgtagttgttagatggagttcgaggagggtatggtggaggggcgcgcgcgcggcgaggagttggtcgttttgggtaagtaggtattttnttcgggtagcgtgggaggttatcgaggtgttttgattttttcgttgttttcggtttcgtcgttcgtagttaggttcgttataaatgtatattatatataatgtaaagaaaggtaaatggttttat

SEQ ID NO: 31178 - DNA, 913 bp, Artificial Sequence
  chemically treated genomic DNA (Homo sapiens) CpG-island No: 31178
  unsure (126)
ataaaaccatttacctttctttacattatatataatatacatttataacgaacctaactacgaacgacgaaaccgaaaacaacgaaaaaatcaaaacacctcgataacctcccacgctacccgaanaaaatacctacttacccaaaacgaccaactcctcgccgcgcgcgcgcccctccaccataccctcctcgaactccatctaacaactacgacgcttaaactacgtctccgaaaccgactcctcgaaccaaccgatccgcgcgtcccgaaactcaaccctcgctacctcccgccgccgcaaatcgctaccgccgcctaatcccgaaacgcccgcccgaccgaaaaacgcaaacaacaccccgcccgccccctatacgccctcgaaactaaaacaccaaaacccgtcgaacgacgacgtacctaaaaaatcgaacgacgatacccaaaccccgaaaccgaccgactaaccaaaaccgaacaacccgaacgccgacaaaaccgaaaaaccgtaccgcgaaatctaccgaaccgcatcgccgaaattcaaaccgaaactatacgcgaaaaaacgcgcgaaaaaaccgacgaaaaaccgaaaccgccgacgaaaccgtaaacgcgcatcaaacgcgacgtccgaactatccgaaataaacgaaaacaaacccaacgcgacccccgacgaactatccaacttacaaaacttcgaaacctcgccgaaatcgaaaaacccgaaaccgtcgaaccgcatactaaaaacgtaaacaaacttaatatccaaaaaaaaaaaacgcttaaaacgattaatatcctacaaacgatccgaaaaaaaatacaaaccgcgcaaaccctactacaatacgctaatcgccgaaaacgtaaaaaacgcgaaaaactccccgcccgcgct

SEQ ID NO: 31179 - DNA, 913 bp, Artificial Sequence
  chemically treated genomic DNA (Homo sapiens) CpG-island No: 31179
  unsure (126)
gtaaaattatttatttttttttgtattatatataatatatatttataacgggtttggttgcgggcggcggggtcgaggatagcggaggggttaggatatttcgatgattttttacgttgttcgagnaaagtgtttgtttgtttagggcggttagtttttcgtcgcgcgcgcgtttttttattatgtttttttcgaattttatttggtagttgcggcgtttgaattgcgttttcggggtcggtttttcgggttagtcggttcgcgcgtttcggggtttagttttcgttgtttttcgtcgtcgtaggtcgttgtcgtcgtttggtttcggggcgttcgttcggtcgaagggcgtaaatagtatttcgttcgttttttgtgcgttttcggggttgaagtattagggttcgtcgggcgacggcgtgtttggggagtcgagcggcggtgtttaggtttcggggtcggtcggttggttagggtcgggtagttcgggcgtcgatagggtcgagaggtcgtgtcgcggagtttgtcgggtcgtatcgtcgaagtttaggtcgaggttgtgcgcgggggagcgcgcgggggagtcggcggggggtcggggtcgtcggcggggtcgtgggcgcgtattaggcgcggcgttcgggttgttcgggatgggcgaggataggtttagcgcggttttcgacgggttgtttagtttgtagagtttcggggtttcgtcggggtcggggggttcggggtcgtcgggtcgtatgttaggggcgtaggtagatttgatgtttagggagaaggagcgtttgaggcggttagtgttttgtaggcggttcgaggagaggtgtaggtcgcgtaggttttgttgtagtgcgttggtcgtcgggggcgtggggggcgcggggggtttttcgttcgcgtt

SEQ ID NO: 31180 - DNA, 913 bp, Artificial Sequence
  chemically treated genomic DNA (Homo sapiens) CpG-island No: 31180
  unsure (788)
aacgcgaacgaaaaaccccccgcgccccccacgcccccgacgaccaacgcactacaacaaaacctacgcgacctacacctctcctcgaaccgcctacaaaacactaaccgcctcaaacgctccttctccctaaacatcaaatctacctacgcccctaacatacgacccgacgaccccgaaccccccgaccccgacgaaaccccgaaactctacaaactaaacaacccgtcgaaaaccgcgctaaacctatcctcgcccatcccgaacaacccgaacgccgcgcctaatacgcgcccacgaccccgccgacgaccccgaccccccgccgactcccccgcgcgctcccccgcgcacaacctcgacctaaacttcgacgatacgacccgacaaactccgcgacacgacctctcgaccctatcgacgcccgaactacccgaccctaaccaaccgaccgaccccgaaacctaaacaccgccgctcgactccccaaacacgccgtcgcccgacgaaccctaatacttcaaccccgaaaacgcacaaaaaacgaacgaaatactatttacgcccttcgaccgaacgaacgccccgaaaccaaacgacgacaacgacctacgacgacgaaaaacaacgaaaactaaaccccgaaacgcgcgaaccgactaacccgaaaaaccgaccccgaaaacgcaattcaaacgccgcaactaccaaataaaattcgaaaaaaacataataaaaaaacgcgcgcgcgacgaaaaactaaccgccctaaacaaacaaacactttnctcgaacaacgtaaaaaatcatcgaaatatcctaacccctccgctatcctcgaccccgccgcccgcaaccaaacccgttataaatatatattatatataatacaaaaaaaaataaataattttac

SEQ ID NO: 31181 - DNA, 548 bp, Artificial Sequence
  chemically treated genomic DNA (Homo sapiens) CpG-island No: 31181
taattattcgtgcgttttttttgtttcggattcgtcgcgttttcgtcgtacgcgcggaggtgtttttatagcggtcggcggggtgcggttttttaatagttcgtataggggtcgtcggggcggttttttacggaagcgggagggttgggggtcgtggggggtcggcggcgttttggggagttcgttttcggagttcgcggatgtgtgattcgaggtagtcggttcgtttttgagggttttaggttcgttcgagtgtagggggattcggtttcgttttgcgggggtcgcggcggggcgagtatagtcgttgtaggtaaaacgtcgcgtttgggtttggggagggtttttcggcggcggtttagcgttaataaaggttaggagaagggggggagcggcgtcggcgtttgttcgggtcggggggaggatttcgcgttcggagtcgtttagttggatcgttcggggtttgtgcgacgcggtcgggggttcgggtgacggggggtttgggtgacgcggggttcggggtcgggagggttttttggaggcggggt

SEQ ID NO: 31182 - DNA, 548 bp, Artificial Sequence
  chemically treated genomic DNA (Homo sapiens) CpG-island No: 31182
accccgcctccaaaaaaccctcccgaccccgaaccccgcgtcacccaaaccccccgtcacccgaacccccgaccgcgtcgcacaaaccccgaacgatccaactaaacgactccgaacgcgaaatcctccccccgacccgaacaaacgccgacgccgctcccccccttctcctaacctttattaacgctaaaccgccgccgaaaaaccctccccaaacccaaacgcgacgttttacctacaacgactatactcgccccgccgcgacccccgcaaaacgaaaccgaatccccctacactcgaacgaacctaaaaccctcaaaaacgaaccgactacctcgaatcacacatccgcgaactccgaaaacgaactccccaaaacgccgccgaccccccacgacccccaaccctcccgcttccgtaaaaaaccgccccgacgacccctatacgaactattaaaaaaccgcaccccgccgaccgctataaaaacacctccgcgcgtacgacgaaaacgcgacgaatccgaaacaaaaaaaacgcacgaataatta

SEQ ID NO: 31183 - DNA, 548 bp, Artificial Sequence
  chemically treated genomic DNA (Homo sapiens) CpG-island No: 31183
atttcgtttttaggaagttttttcggtttcgggtttcgcgttatttaggtttttcgttattcgggttttcggtcgcgtcgtatagatttcggacggtttagttgagcggtttcgggcgcgaagtttttttttcgattcggataggcgtcggcgtcgttttttttttttttttggtttttgttggcgttgggtcgtcgtcggggagttttttttagatttaggcgcggcgttttatttgtagcggttgtgttcgtttcgtcgcgattttcgtaggacggagtcggatttttttgtattcgggcggatttgggatttttagaggcgagtcggttgtttcgggttatatattcgcgaatttcgggggcgggttttttaggacgtcgtcgattttttacgatttttagttttttcgttttcgtggaaagtcgtttcgacgatttttgtgcgggttgttgaggggtcgtatttcgtcgatcgttgtgggaatattttcgcgcgtgcggcggggacgcggcgagttcggggtaggaagaacgtacgggtaattg

SEQ ID NO: 31184 - DNA, 548 bp, Artificial Sequence
  chemically treated genomic DNA (Homo sapiens) CpG-island No: 31184
caattacccgtacgttcttcctaccccgaactcgccgcgtccccgccgcacgcgcgaaaatattcccacaacgatcgacgaaatacgacccctcaacaacccgcacaaaaatcgtcgaaacgactttccacgaaaacgaaaaaactaaaaatcgtaaaaaatcgacgacgtcctaaaaaacccgcccccgaaattcgcgaatatataacccgaaacaaccgactcgcctctaaaaatcccaaatccgcccgaatacaaaaaaatccgactccgtcctacgaaaatcgcgacgaaacgaacacaaccgctacaaataaaacgccgcgcctaaatctaaaaaaaactccccgacgacgacccaacgccaacaaaaaccaaaaaaaaaaaaaaaacgacgccgacgcctatccgaatcgaaaaaaaaacttcgcgcccgaaaccgctcaactaaaccgtccgaaatctatacgacgcgaccgaaaacccgaataacgaaaaacctaaataacgcgaaacccgaaaccgaaaaaacttcctaaaaacgaaat

SEQ ID NO: 31185 - DNA, 783 bp, Artificial Sequence
  chemically treated genomic DNA (Homo sapiens) CpG-island No: 31185
  unsure (751)
tcggatcgatttcgggttagggttcgtttgtttcggttttggttttcgcgggggtgacgttcgggacgtcgggggttcgcgtatattcgcgttggattttatgcggttttggtgggttttggatttttgttttttttttattttatatttaaagaaggagttgcggggagaagggcggtaacgcggcgggcgggcgtgggttgggttcgggttcgtcgggcgttgcggggggcggggaaggggtttttttgtttttggcgttttggacggtcgtggtcgtttatttcggggtcgtttttttttttcgggcgtttatcgggtgtcgttgttttagcgttttagacgcggcgtttttcgtttttcggttcgggtcggtgaattttattttcggcgttttcgtttatttcgttcgcgttcgtttcgggggcgtttcggggattcgcgtcgcgtttagggcgttcgttcggtcgcgtcgtttatgggttcggcgggggttcgcgtagtcggggtaggggtcgggggagcgcgcgggtcgcgtcgtcgtcgtcgtcgtcgtcgtcgttaacgtcgcggggagcgttcgttcgggtcggggcgcgcgtattgcgggcgggtacgcgcgttcgcggcgcgtattttagtttcgcggttcggcgggcgcggtcgggaggtttcggcgcggttcgggttcgggttcgggttcgggttcgggcgttcggcgttcggcggggattttgtgagtattggttanagaggataggttattttattggtgtggttaag

SEQ ID NO: 31186 - DNA, 783 bp, Artificial Sequence
  chemically treated genomic DNA (Homo sapiens) CpG-island No: 31186
  unsure (33)
cttaaccacaccaataaaataacctatcctctntaaccaatactcacaaaatccccgccgaacgccgaacgcccgaacccgaacccgaacccgaacccgaaccgcgccgaaacctcccgaccgcgcccgccgaaccgcgaaactaaaatacgcgccgcgaacgcgcgtacccgcccgcaatacgcgcgccccgacccgaacgaacgctccccgcgacgttaacgacgacgacgacgacgacgacgacgcgacccgcgcgctcccccgacccctaccccgactacgcgaacccccgccgaacccataaacgacgcgaccgaacgaacgccctaaacgcgacgcgaatccccgaaacgcccccgaaacgaacgcgaacgaaataaacgaaaacgccgaaaataaaattcaccgacccgaaccgaaaaacgaaaaacgccgcgtctaaaacgctaaaacaacgacacccgataaacgcccgaaaaaaaaaaacgaccccgaaataaacgaccacgaccgtccaaaacgccaaaaacaaaaaaaccccttccccgccccccgcaacgcccgacgaacccgaacccaacccacgcccgcccgccgcgttaccgcccttctccccgcaactccttctttaaatataaaataaaaaaaaaacaaaaatccaaaacccaccaaaaccgcataaaatccaacgcgaatatacgcgaacccccgacgtcccgaacgtcacccccgcgaaaaccaaaaccgaaacaaacgaaccctaacccgaaatcgatccga

SEQ ID NO: 31187 - DNA, 783 bp, Artificial Sequence
  chemically treated genomic DNA (Homo sapiens) CpG-island No: 31187
  unsure (33)
tttggttatattagtaaggtagtttgttttttntgattagtgtttataaaattttcgtcggacgtcggacgttcgagttcgagttcgagttcgagttcgagtcgcgtcggaatttttcggtcgcgttcgtcgagtcgcggggttgggatgcgcgtcgcgagcgcgcgtgttcgttcgtagtgcgcgcgtttcggttcgagcgagcgtttttcgcggcgttggcggcggcgacggcggcgacggcgacgcggttcgcgcgttttttcggtttttgtttcggttgcgcgggttttcgtcgggtttatggacggcgcggtcgagcgggcgttttgagcgcggcgcgggttttcggagcgttttcgaggcgagcgcgagcgaggtgagcgggggcgtcggggatggggtttatcggttcgggtcggggggcggagggcgtcgcgtttggggcgttggggtagcggtattcggtgggcgttcgggaggaggaggcggtttcggaatgagcggttacggtcgtttaggacgttagggatagggaggtttttttttcgtttttcgtaacgttcggcggattcgggtttagtttacgttcgttcgtcgcgttgtcgttttttttttcgtagttttttttttgggtgtggaatgggggggggataaaaatttaggatttattagggtcgtatgagatttagcgcggatatgcgcgagttttcgacgtttcgaacgttattttcgcgggggttagaatcggagtaggcggattttggttcggagtcggttcgg

SEQ ID NO: 31188 - DNA, 783 bp, Artificial Sequence
  chemically treated genomic DNA (Homo sapiens) CpG-island No: 31188
  unsure (751)
ccgaaccgactccgaaccaaaatccgcctactccgattctaacccccgcgaaaataacgttcgaaacgtcgaaaactcgcgcatatccgcgctaaatctcatacgaccctaataaatcctaaatttttatcccccccccattccacacccaaaaaaaaaactacgaaaaaaaaaacgacaacgcgacgaacgaacgtaaactaaacccgaatccgccgaacgttacgaaaaacgaaaaaaaaacctccctatccctaacgtcctaaacgaccgtaaccgctcattccgaaaccgcctcctcctcccgaacgcccaccgaataccgctaccccaacgccccaaacgcgacgccctccgccccccgacccgaaccgataaaccccatccccgacgcccccgctcacctcgctcgcgctcgcctcgaaaacgctccgaaaacccgcgccgcgctcaaaacgcccgctcgaccgcgccgtccataaacccgacgaaaacccgcgcaaccgaaacaaaaaccgaaaaaacgcgcgaaccgcgtcgccgtcgccgccgtcgccgccgccaacgccgcgaaaaacgctcgctcgaaccgaaacgcgcgcactacgaacgaacacgcgcgctcgcgacgcgcatcccaaccccgcgactcgacgaacgcgaccgaaaaattccgacgcgactcgaactcgaactcgaactcgaactcgaacgtccgacgtccgacgaaaattttataaacactaatcanaaaaaacaaactaccttactaatataaccaaa

SEQ ID NO: 31189 - DNA, 519 bp, Artificial Sequence
  chemically treated genomic DNA (Homo sapiens) CpG-island No: 31189
tttagtcggggtagtagtcgagttttgggtcgtagtagggtcgcgggaggggcgcggggggtcgttgttttcgttatttttagttatggcggtcgcggtgacgtaggcgggtagggaaggcgcgggcgggcgaaagagagagcgcgagggaaggaggaaggaaggaggtatcgtcgtagcgggttgggtcgggttaggcggggagcgcggagtacggtatttttgtgatgaagattgcggttttttggtttttcggtggagaaaggtttgggcgtaggtcgttggttgaggttttcgcgtttcggtttttgggtttttttcgtcgtcgttttgtgattcgatcgcgcgtatttttagtaattttggtagtcgtttcgtttgttgattttcgttttttttttttttttagtttcgcgttcgttttttcgttttttttgttgacgcggcgttaggtttagattgatagatttggttcggttaaaattaaaaatttttgtattgaaaagaaaaaagggagag

SEQ ID NO: 31190 - DNA, 519 bp, Artificial Sequence
  chemically treated genomic DNA (Homo sapiens) CpG-island No: 31190
ctctcccttttttcttttcaatacaaaaatttttaattttaaccgaaccaaatctatcaatctaaacctaacgccgcgtcaacaaaaaaaacgaaaaaacgaacgcgaaactaaaaaaaaaaaaaaaacgaaaatcaacaaacgaaacgactaccaaaattactaaaaatacgcgcgatcgaatcacaaaacgacgacgaaaaaaacccaaaaaccgaaacgcgaaaacctcaaccaacgacctacgcccaaacctttctccaccgaaaaaccaaaaaaccgcaatcttcatcacaaaaataccgtactccgcgctccccgcctaacccgacccaacccgctacgacgatacctccttccttcctccttccctcgcgctctctctttcgcccgcccgcgccttccctacccgcctacgtcaccgcgaccgccataactaaaaataacgaaaacaacgaccccccgcgcccctcccgcgaccctactacgacccaaaactcgactactaccccgactaaa

SEQ ID NO: 31191 - DNA, 519 bp, Artificial Sequence
  chemically treated genomic DNA (Homo sapiens) CpG-island No: 31191
tttttttttttttttttttagtgtagaagtttttaattttgatcgagttaaatttattaatttaggtttggcgtcgcgttagtagagggggcggggaggcgagcgcggaattgggggaggggaaggggcggggattagtaggcggagcggttgttagagttgttgggagtgcgcgcggtcggattataaggcggcggcggaggaggtttagagatcggagcgcggagattttagttagcggtttacgtttaggtttttttttatcggaggattagggaatcgtagtttttattatagaggtatcgtgtttcgcgtttttcgtttgattcggtttagttcgttgcggcggtgttttttttttttttttttttttcgcgttttttttttcgttcgttcgcgttttttttgttcgtttgcgttatcgcggtcgttatggttgagaatggcgagagtagcggtttttcgcgtttttttcgcggttttgttgcggtttaaggttcggttgttgtttcggttgag

SEQ ID NO: 31192 - DNA, 519 bp, Artificial Sequence
  chemically treated genomic DNA (Homo sapiens) CpG-island No: 31192
ctcaaccgaaacaacaaccgaaccttaaaccgcaacaaaaccgcgaaaaaaacgcgaaaaaccgctactctcgccattctcaaccataacgaccgcgataacgcaaacgaacaaaaaaaacgcgaacgaacgaaaaaaaaaacgcgaaaaaaaaaaaaaaaaaaaaaacaccgccgcaacgaactaaaccgaatcaaacgaaaaacgcgaaacacgatacctctataataaaaactacgattccctaatcctccgataaaaaaaaacctaaacgtaaaccgctaactaaaatctccgcgctccgatctctaaacctcctccgccgccgccttataatccgaccgcgcgcactcccaacaactctaacaaccgctccgcctactaatccccgccccttcccctcccccaattccgcgctcgcctccccgccccctctactaacgcgacgccaaacctaaattaataaatttaactcgatcaaaattaaaaacttctacactaaaaaaaaaaaaaaaaaaa

SEQ ID NO: 31193 - DNA, 689 bp, Artificial Sequence
  chemically treated genomic DNA (Homo sapiens) CpG-island No: 31193
gatatcgtaaatttttagtcgttggtcgtttgggatttttttatcggaagtgaaatcgaagaaaacgttacgtcgaaggcgtgggttgtcgtaagtgcgtcgtcgttacgcgtttagttttcggcgatgggtggttttgggattcggaggggaggcggggtggaggcggggtttggggttgtggagaggttgtggtaggtaggtgggtatagatcgaggggattacgggtcggcgttgggtttagtgggttcgaaataaagggttgttcggtggggattcgtcgcggcgttttttgagtggtcgggtcgaggtttttcggtttagtagtgttttcgttgcgcgattttaggcgggtttttttcggtttcgcgtagttcgcgtcgcggtgggggattcggcgtagcggtatttgttgtagagggatttcgcggttcgtttcggtgttcgtgatggggttgattttcgttaaattgtggagttttttttgtaattaaggtgagaagaatggagttgcgcggcggttcgaattcgaggtagagggtttcgtcgtcgatggggatatcggagataggggatagagcgttcggagacgcggaggaggaagggatttaggttagggggcgggtagaaatttagtgttttagatttggaggacgtataggagagatttgacgtgtgggagaaatag

SEQ ID NO: 31194 - DNA, 689 bp, Artificial Sequence
  chemically treated genomic DNA (Homo sapiens) CpG-island No: 31194
ctatttctcccacacgtcaaatctctcctatacgtcctccaaatctaaaacactaaatttctacccgccccctaacctaaatcccttcctcctccgcgtctccgaacgctctatcccctatctccgatatccccatcgacgacgaaaccctctacctcgaattcgaaccgccgcgcaactccattcttctcaccttaattacaaaaaaaactccacaatttaacgaaaatcaaccccatcacgaacaccgaaacgaaccgcgaaatccctctacaacaaataccgctacgccgaatcccccaccgcgacgcgaactacgcgaaaccgaaaaaaacccgcctaaaatcgcgcaacgaaaacactactaaaccgaaaaacctcgacccgaccactcaaaaaacgccgcgacgaatccccaccgaacaaccctttatttcgaacccactaaacccaacgccgacccgtaatcccctcgatctatacccacctacctaccacaacctctccacaaccccaaaccccgcctccaccccgcctcccctccgaatcccaaaaccacccatcgccgaaaactaaacgcgtaacgacgacgcacttacgacaacccacgccttcgacgtaacgttttcttcgatttcacttccgataaaaaaatcccaaacgaccaacgactaaaaatttacgatatc

SEQ ID NO: 31195 - DNA, 689 bp, Artificial Sequence
  chemically treated genomic DNA (Homo sapiens) CpG-island No: 31195
ttattttttttatacgttaggttttttttgtacgttttttaggtttaaaatattgagtttttgttcgttttttggtttaagtttttttttttttcgcgttttcgaacgttttgttttttgttttcggtgtttttatcggcggcgggattttttgtttcggattcgagtcgtcgcgtagttttattttttttattttggttatagaagaggttttatagtttggcgaagattagttttattacgagtatcggggcgggtcgcggggtttttttgtagtaggtgtcgttgcgtcgggttttttatcgcggcgcgggttgcgcggagtcgaggagaattcgtttgagatcgcgtagcgagggtattgttaggtcgagaagtttcgattcgattatttagaaggcgtcgcgacgaatttttatcggatagttttttgtttcgagtttattgagtttaacgtcgattcgtagttttttcggtttgtatttatttatttattatagtttttttatagttttaagtttcgtttttatttcgtttttttttcggattttaggattatttatcgtcggaagttaggcgcgtgacgacggcgtatttacggtaatttacgttttcgacgtggcgtttttttcggttttattttcggtaggagagttttaaacggttagcggttgggaatttgcggtatt

SEQ ID NO: 31196 - DNA, 689 bp, Artificial Sequence
  chemically treated genomic DNA (Homo sapiens) CpG-island No: 31196
aataccgcaaattcccaaccgctaaccgtttaaaactctcctaccgaaaataaaaccgaaaaaaacgccacgtcgaaaacgtaaattaccgtaaatacgccgtcgtcacgcgcctaacttccgacgataaataatcctaaaatccgaaaaaaaaacgaaataaaaacgaaacttaaaactataaaaaaactataataaataaataaatacaaaccgaaaaaactacgaatcgacgttaaactcaataaactcgaaacaaaaaactatccgataaaaattcgtcgcgacgccttctaaataatcgaatcgaaacttctcgacctaacaataccctcgctacgcgatctcaaacgaattctcctcgactccgcgcaacccgcgccgcgataaaaaacccgacgcaacgacacctactacaaaaaaaccccgcgacccgccccgatactcgtaataaaactaatcttcgccaaactataaaacctcttctataaccaaaataaaaaaaataaaactacgcgacgactcgaatccgaaacaaaaaatcccgccgccgataaaaacaccgaaaacaaaaaacaaaacgttcgaaaacgcgaaaaaaaaaaaaacttaaaccaaaaaacgaacaaaaactcaatattttaaacctaaaaaacgtacaaaaaaaacctaacgtataaaaaaaataa

SEQ ID NO: 31197 - DNA, 660 bp, Artificial Sequence
  chemically treated genomic DNA (Homo sapiens) CpG-island No: 31197
  unsure (261, 309)
tcgacgcggtcgcggttgggataattttaggtcgggcgtagttgatcgtcgcgttttgcgcgcgagcgagtagtcgttttaatttgtcgcggtcgtcgatttcgtttttcgggagcgcgggttaggttaatgggttgggttttaaggggcggggtaggcggtcggcgtagtcgtggcggtagttgtaaaggcggcggtcgttgtggtggtggtggtggtggtgtttgtggttgcggttgttattggtcgggtgtttgcggntcgtgggggatgggggcggcgagttttagttttcggcggtggcggcgnttgtaggtgtggggcggtcgttcgcgttcgggacgcgggatggagcgtcgtggtgagtgtgaggaggtggcgttcgtttcggtcgcggcggtggtggtttcgggttggggtcgttcgcgcgggcgtcggttagttgtcgtttagggttcggtaggggttaggggcgcgttcggcgaggtaggcgcggacgagcgagaggacgcgggcgggcgttgtcggtacgtcgcggatttcgggtgcgcgttttgagttgtgtgacgtcggcgggtagtaggggagaagttggtcgggtggatttttttttttttataggatttttcgagcgtgttttagtttcgttttttttgttag

SEQ ID NO: 31198 - DNA, 660 bp, Artificial Sequence
  chemically treated genomic DNA (Homo sapiens) CpG-island No: 31198
  unsure (352, 400)
ctaacaaaaaaaacgaaactaaaacacgctcgaaaaatcctataaaaaaaaaaaaatccacccgaccaacttctcccctactacccgccgacgtcacacaactcaaaacgcgcacccgaaatccgcgacgtaccgacaacgcccgcccgcgtcctctcgctcgtccgcgcctacctcgccgaacgcgcccctaacccctaccgaaccctaaacgacaactaaccgacgcccgcgcgaacgaccccaacccgaaaccaccaccgccgcgaccgaaacgaacgccacctcctcacactcaccacgacgctccatcccgcgtcccgaacgcgaacgaccgccccacacctacaancgccgccaccgccgaaaactaaaactcgccgcccccatcccccacganccgcaaacacccgaccaataacaaccgcaaccacaaacaccaccaccaccaccaccacaacgaccgccgcctttacaactaccgccacgactacgccgaccgcctaccccgccccttaaaacccaacccattaacctaacccgcgctcccgaaaaacgaaatcgacgaccgcgacaaattaaaacgactactcgctcgcgcgcaaaacgcgacgatcaactacgcccgacctaaaattatcccaaccgcgaccgcgtcga

SEQ ID NO: 31199 - DNA, 660 bp, Artificial Sequence
  chemically treated genomic DNA (Homo sapiens) CpG-island No: 31199
  unsure (352, 400)
ttagtaaagggagcggggttgagatacgttcggggagttttgtaaggggaggaaagtttattcggttagttttttttttgttgttcgtcggcgttatataatttagagcgcgtattcggggttcgcggcgtatcggtagcgttcgttcgcgttttttcgttcgttcgcgtttgtttcgtcgggcgcgtttttagtttttgtcggattttggacggtaattagtcggcgttcgcgcgggcgattttagttcggagttattatcgtcgcggtcgaagcgagcgttatttttttatatttattacggcgttttatttcgcgtttcggacgcggacggtcgttttatatttatagncgtcgttatcgtcgagggttggagttcgtcgtttttattttttacggntcgtagatattcggttagtggtagtcgtagttatagatattattattattattattatagcggtcgtcgtttttgtagttatcgttacggttgcgtcggtcgtttgtttcgttttttggagtttagtttattggtttggttcgcgttttcggggggcggggtcggcgatcgcggtaggttggggcggttgttcgttcgcgcgtagaacgcggcggttagttgcgttcggtttgaagttgttttaatcgcggtcgcgtcgg

SEQ ID NO: 31200 - DNA, 660 bp, Artificial Sequence
  chemically treated genomic DNA (Homo sapiens) CpG-island No: 31200
  unsure (261, 309)
ccgacgcgaccgcgattaaaacaacttcaaaccgaacgcaactaaccgccgcgttctacgcgcgaacgaacaaccgccccaacctaccgcgatcgccgaccccgccccccgaaaacgcgaaccaaaccaataaactaaactccaaaaaacgaaacaaacgaccgacgcaaccgtaacgataactacaaaaacgacgaccgctataataataataataataatatctataactacgactaccactaaccgaatatctacganccgtaaaaaataaaaacgacgaactccaaccctcgacgataacgacgnctataaatataaaacgaccgtccgcgtccgaaacgcgaaataaaacgccgtaataaatataaaaaaataacgctcgcttcgaccgcgacgataataactccgaactaaaatcgcccgcgcgaacgccgactaattaccgtccaaaatccgacaaaaactaaaaacgcgcccgacgaaacaaacgcgaacgaacgaaaaaacgcgaacgaacgctaccgatacgccgcgaaccccgaatacgcgctctaaattatataacgccgacgaacaacaaaaaaaaaactaaccgaataaactttcctccccttacaaaactccccgaacgtatctcaaccccgctccctttactaa

SEQ ID NO: 31201 - DNA, 548 bp, Artificial Sequence
  chemically treated genomic DNA (Homo sapiens) CpG-island No: 31201
ggtttcgtattcggtttttttacggtagtcgtcgcgttgtttttaggcgatttatagattttgtttttttttttttttgtcgcggtttcgcgtttttaacgtcgtcgtcgtcgtcgtcgtcgtcgttatcgtcgtcgttatttttaaattatcgagcgttgggaaagcgtgggatagagcgtttttcgtttttcgtttttcgtttttcgttcggtagttattttcgtcgcggggaaggagggtttttcggttgtcgtttcgttttgtcgcgtcgcgtttttcgttttcgttttcgttttttcgtagggtgggttttttagtgtttattttatttgtcggttatcgttgtttgaggtttttcgtttttcgcgttttgtcgtcgtatttcggcgtttttttttttaattcgtttcggtcgattttttttcgcgttcggttttatacgttatcgtttttggggttggtcggttttcggttttttttattttatttttatttgttaaatgagtgagtcgagggtttagtgttatcgcgtgcgtagtttaggt

SEQ ID NO: 31202 - DNA, 548 bp, Artificial Sequence
  chemically treated genomic DNA (Homo sapiens) CpG-island No: 31202
acctaaactacgcacgcgataacactaaaccctcgactcactcatttaacaaataaaaataaaataaaaaaaaccgaaaaccgaccaaccccaaaaacgataacgtataaaaccgaacgcgaaaaaaaatcgaccgaaacgaattaaaaaaaaaaacgccgaaatacgacgacaaaacgcgaaaaacgaaaaacctcaaacaacgataaccgacaaataaaataaacactaaaaaacccaccctacgaaaaaacgaaaacgaaaacgaaaaacgcgacgcgacaaaacgaaacgacaaccgaaaaaccctccttccccgcgacgaaaataactaccgaacgaaaaacgaaaaacgaaaaacgaaaaacgctctatcccacgctttcccaacgctcgataatttaaaaataacgacgacgataacgacgacgacgacgacgacgacgacgttaaaaacgcgaaaccgcgacaaaaaaaaaaaaaaacaaaatctataaatcgcctaaaaacaacgcgacgactaccgtaaaaaaaccgaatacgaaacc

SEQ ID NO: 31203 - DNA, 548 bp, Artificial Sequence
  chemically treated genomic DNA (Homo sapiens) CpG-island No: 31203
atttgagttgcgtacgcggtggtattgagttttcgatttatttatttgataggtggaggtgggatggggaaggtcggagatcgattaattttaaaggcggtagcgtgtggagtcgaacgcgggagggggtcggtcgaggcggattgaggggggggacgtcgaggtgcggcgataggacgcggaggacgaaagattttaagtagcggtggtcggtaaatgaggtgggtattgggggatttattttgcgaggaggcgggggcggggacggggggcgcggcgcggtagggcggggcggtagtcgggaagtttttttttttcgcggcggaggtgattgtcgggcggggggcggggggcggggggcgggagacgttttgttttacgtttttttagcgttcggtggtttaaagatggcggcggcggtggcggcggcggcggcggcggcggcggcgttgggggcgcggagtcgcgataggaggagggaaaagtagaatttgtgagtcgtttggaggtagcgcggcggttgtcgtgaggaggtcgggtgcggagtt

SEQ ID NO: 31204 - DNA, 548 bp, Artificial Sequence
  chemically treated genomic DNA (Homo sapiens) CpG-island No: 31204
aactccgcacccgacctcctcacgacaaccgccgcgctacctccaaacgactcacaaattctacttttccctcctcctatcgcgactccgcgcccccaacgccgccgccgccgccgccgccgccgccaccgccgccgccatctttaaaccaccgaacgctaaaaaaacgtaaaacaaaacgtctcccgccccccgccccccgccccccgcccgacaatcacctccgccgcgaaaaaaaaaaacttcccgactaccgccccgccctaccgcgccgcgccccccgtccccgcccccgcctcctcgcaaaataaatcccccaatacccacctcatttaccgaccaccgctacttaaaatctttcgtcctccgcgtcctatcgccgcacctcgacgtcccccccctcaatccgcctcgaccgaccccctcccgcgttcgactccacacgctaccgcctttaaaattaatcgatctccgaccttccccatcccacctccacctatcaaataaataaatcgaaaactcaataccaccgcgtacgcaactcaaat

SEQ ID NO: 31205 - DNA, 527 bp, Artificial Sequence
  chemically treated genomic DNA (Homo sapiens) CpG-island No: 31205
gtagcgcgggatacggaaggtggaagcggggcggtatttttcggagaaagttggcgattatttgttcgaaggggtatttgtatatttggtgtatatttatcgagatttttattttcgcgcgtcgcgggtttcgcgtatcggttacgttttcgcgagtttagagttgtttagggtttcgtagaggttcggaggcgtttatattcggatagttatatgggcgtggtttttttttttcgttttttaaattttcgaaattttattggttattcggagaaacgcgtagtcggttacgtttacgtttttattgttagagttcggggtttggggttatagagcgcgggaggcgttggagcgtttttagagtattcggggtttcgcggtttttacgttggcggcgttagagcggttttggtgttttttcgcggtcgcgtttgtcgagaaaagtttttttgtttgggagttattacgtttcgttttaggaaatttggattttgggtttatgcgtttatggtattatcgtttggagt

SEQ ID NO: 31206 - DNA, 527 bp, Artificial Sequence
  chemically treated genomic DNA (Homo sapiens) CpG-island No: 31206
actccaaacgataataccataaacgcataaacccaaaatccaaatttcctaaaacgaaacgtaataactcccaaacaaaaaaacttttctcgacaaacgcgaccgcgaaaaaacaccaaaaccgctctaacgccgccaacgtaaaaaccgcgaaaccccgaatactctaaaaacgctccaacgcctcccgcgctctataaccccaaaccccgaactctaacaataaaaacgtaaacgtaaccgactacgcgtttctccgaataaccaataaaatttcgaaaatttaaaaaacgaaaaaaaaaaaccacgcccatataactatccgaatataaacgcctccgaacctctacgaaaccctaaacaactctaaactcgcgaaaacgtaaccgatacgcgaaacccgcgacgcgcgaaaataaaaatctcgataaatatacaccaaatatacaaataccccttcgaacaaataatcgccaactttctccgaaaaataccgccccgcttccaccttccgtatcccgcgctac

SEQ ID NO: 31207 - DNA, 527 bp, Artificial Sequence
  chemically treated genomic DNA (Homo sapiens) CpG-island No: 31207
attttaggcggtgatattataaacgtataagtttaaggtttaggttttttggggcggggcgtgatggtttttaggtagagaagtttttttcggtaggcgcggtcgcgggagggtattagggtcgttttggcgtcgttagcgtggagatcgcggggtttcgggtgttttgggagcgttttagcgtttttcgcgttttgtaattttaggtttcggattttggtagtaggggcgtgggcgtggtcgattgcgcgttttttcgagtggttaataaagtttcgaaagtttgaaaagcggaggaaaaaggttacgtttatgtggttgttcgagtgtgggcgttttcgggtttttgcggagttttgggtagttttgagttcgcggaggcgtggtcggtgcgcggggttcgcggcgcgcggggatgggggtttcggtggatgtgtattaggtgtataagtattttttcgagtaggtggtcgttagtttttttcgaaaggtatcgtttcgtttttatttttcgtatttcgcgttgt

SEQ ID NO: 31208 - DNA, 527 bp, Artificial Sequence
  chemically treated genomic DNA (Homo sapiens) CpG-island No: 31208
acaacgcgaaatacgaaaaataaaaacgaaacgatacctttcgaaaaaaactaacgaccacctactcgaaaaaatacttatacacctaatacacatccaccgaaacccccatccccgcgcgccgcgaaccccgcgcaccgaccacgcctccgcgaactcaaaactacccaaaactccgcaaaaacccgaaaacgcccacactcgaacaaccacataaacgtaacctttttcctccgcttttcaaactttcgaaactttattaaccactcgaaaaaacgcgcaatcgaccacgcccacgcccctactaccaaaatccgaaacctaaaattacaaaacgcgaaaaacgctaaaacgctcccaaaacacccgaaaccccgcgatctccacgctaacgacgccaaaacgaccctaataccctcccgcgaccgcgcctaccgaaaaaaacttctctacctaaaaaccatcacgccccgccccaaaaaacctaaaccttaaacttatacgtttataatatcaccgcctaaaat

SEQ ID NO: 31209 - DNA, 1478 bp, Artificial Sequence
  chemically treated genomic DNA (Homo sapiens) CpG-island No: 31209
tgatttttcgttcggttagggttcggtatcgttcgcggatgcgcgttttttttttgtagttagtttatttcgagggttttcgcgcgggcggtcgtatttatttatgttgacgaagtttatgattaggtcggcgcggtttaggcgttgtttcgcgggcgcgtcgttttcgtcgtcgtcgttagttatggcgtggtataggtttagtatgaagagcggcgcggacgcgggtagtcgggaggcggcgggtggcgcgcggggtcggggtcgttcgggtagttcgagtatcgttaggatttcgcgttgtacgtttcggcgttcgcgcgcgtttagacgtcgttggggatagtcgggcgggggtcgtaggtcggggtcgttttcgtttagcgcgtataacgttaggtttagaagttagagcggttcggggcgcgcggttatggcgggtcgggggcgtttagcgggcgtatattagtttcgtcgtcgtttttgggttcggggacgtttcgacggcgaacggggagttgagttcggcgagtagggggcggggttcggcgggcggcgtttgcggttttagcgcggtttttggagcgtttttcgcgcgtatttgtttcggtttcgggataagcggacgttgacgcggacgtagacgttaacgtttcgaggtcggggttgttttgagggttgggattgttagttaattcgtttgtcgtcgtcgtttttattagttcggttgtggttgcggttcgcgtagcgtaggggcgatcggcgagtttcggtagcgattcgggcggcgcgattttcgcgagtttttgtttcggtttagtcgtttgtgtcgttcgtttattttcgggattgattaatgggggcgcgggggcggggtttgggcgcggaggtcgcgttcgttaggagtttcgggcggcggtaggtgttgcgggtggggcgatttcgaggtgcgatttcggcgtggttggcggttggttcgggcgaggagttcgtagtttgggcgttagcgtggttagggtcgtcgtggttttcgtcgcgggtttcggcgtagagattttaaggtcgcggcgtcgtttcggtttcgttagtggtgttattcggttgtttcgtcgtggtgtgtcgtggtcgttatcgggttcgatacgcggtcgtagtttcgtttggagagtcgggcggtgttagttaagtttcgcgggtggggtttgtttttttgttcgtagtagtcggttcgggtttcggttatcgcggttttttatcgttttttggcgtttttttcgtggtttttgtatgcgtttttgcgggcgtttttttttcggtatttgttcggttgtttttttttgcgttttttatttggttttcgcgtgagtttaggtagcgttttagtcgggtcgttttcgttagttttagttgtgcgttttgcgttttcggtattgatttagttttgcggaggaggtttcgttttttgtttttagttgggt

SEQ ID NO: 31210 - DNA, 1478 bp, Artificial Sequence
  chemically treated genomic DNA (Homo sapiens) CpG-island No: 31210
acccaactaaaaacaaaaaacgaaacctcctccgcaaaactaaatcaataccgaaaacgcaaaacgcacaactaaaactaacgaaaacgacccgactaaaacgctacctaaactcacgcgaaaaccaaataaaaaacgcaaaaaaaaacaaccgaacaaataccgaaaaaaaaacgcccgcaaaaacgcatacaaaaaccacgaaaaaaacgccaaaaaacgataaaaaaccgcgataaccgaaacccgaaccgactactacgaacaaaaaaacaaaccccacccgcgaaacttaactaacaccgcccgactctccaaacgaaactacgaccgcgtatcgaacccgataacgaccacgacacaccacgacgaaacaaccgaataacaccactaacgaaaccgaaacgacgccgcgaccttaaaatctctacgccgaaacccgcgacgaaaaccacgacgaccctaaccacgctaacgcccaaactacgaactcctcgcccgaaccaaccgccaaccacgccgaaatcgcacctcgaaatcgccccacccgcaacacctaccgccgcccgaaactcctaacgaacgcgacctccgcgcccaaaccccgcccccgcgcccccattaatcaatcccgaaaataaacgaacgacacaaacgactaaaccgaaacaaaaactcgcgaaaatcgcgccgcccgaatcgctaccgaaactcgccgatcgcccctacgctacgcgaaccgcaaccacaaccgaactaataaaaacgacgacgacaaacgaattaactaacaatcccaaccctcaaaacaaccccgacctcgaaacgttaacgtctacgtccgcgtcaacgtccgcttatcccgaaaccgaaacaaatacgcgcgaaaaacgctccaaaaaccgcgctaaaaccgcaaacgccgcccgccgaaccccgccccctactcgccgaactcaactccccgttcgccgtcgaaacgtccccgaacccaaaaacgacgacgaaactaatatacgcccgctaaacgcccccgacccgccataaccgcgcgccccgaaccgctctaacttctaaacctaacgttatacgcgctaaacgaaaacgaccccgacctacgacccccgcccgactatccccaacgacgtctaaacgcgcgcgaacgccgaaacgtacaacgcgaaatcctaacgatactcgaactacccgaacgaccccgaccccgcgcgccacccgccgcctcccgactacccgcgtccgcgccgctcttcatactaaacctataccacgccataactaacgacgacgacgaaaacgacgcgcccgcgaaacaacgcctaaaccgcgccgacctaatcataaacttcgtcaacataaataaatacgaccgcccgcgcgaaaaccctcgaaataaactaactacaaaaaaaaaacgcgcatccgcgaacgataccgaaccctaaccgaacgaaaaatca

SEQ ID NO: 31211 - DNA, 1478 bp, Artificial Sequence
  chemically treated genomic DNA (Homo sapiens) CpG-island No: 31211
gtttagttggaggtaggaggcggagtttttttcgtaaagttggattagtatcggggacgtagggcgtatagttagggttggcgggggcggttcgattggggcgttgtttgggtttacgcgggagttaggtgggggacgtagggagaagtagtcgagtaggtgtcgagaaggaggcgttcgtagaagcgtatgtaggggttacggggaaggcgttaggaggcggtgaggggtcgcggtggtcggaattcgggtcggttgttgcgggtagaggaataggttttattcgcggggtttggttggtatcgttcggttttttagacggggttacggtcgcgtgtcgggttcggtggcgattacggtatattacggcgaggtagtcgggtggtattattggcgggatcgggacggcgtcgcggttttaggatttttgcgtcgaggttcgcggcgggagttacgacggttttgattacgttgacgtttaggttgcgggtttttcgttcggattaatcgttagttacgtcgaggtcgtatttcggggtcgttttattcgtaatatttgtcgtcgttcggggtttttagcgggcgcggttttcgcgtttaggtttcgttttcgcgtttttattggttagtttcgggggtgggcgggcggtatagacggttgagtcggggtaaggattcgcgggaatcgcgtcgttcgggtcgttgtcggagttcgtcggtcgtttttgcgttgcgcggatcgtagttatagtcggattggtgggaacggcggcgatagacggattggttgatagttttagtttttagaatagtttcggtttcgaagcgttggcgtttgcgttcgcgttagcgttcgtttgtttcggagtcggggtaggtgcgcgcggggggcgttttagggatcgcgttgaggtcgtagacgtcgttcgtcgagtttcgttttttgttcgtcgaatttagtttttcgttcgtcgtcggggcgttttcgggtttaggggcggcggcggagttgatgtgcgttcgttgagcgttttcggttcgttatggtcgcgcgtttcggatcgttttggtttttgggtttgacgttgtgcgcgttgggcgggggcggtttcggtttgcgattttcgttcggttgtttttagcgacgtttgggcgcgcgcgagcgtcgggacgtgtagcgcgagattttggcggtgttcgggttattcgggcggtttcggtttcgcgcgttattcgtcgtttttcggttgttcgcgttcgcgtcgttttttatgttggatttgtattacgttatggttggcgacgacgacgaggacggcgcgttcgcggagtagcgtttgggtcgcgtcgatttggttatgagtttcgttaatatgggtgagtgcggtcgttcgcgcggggattttcggagtaagttggttgtaggggaggggcgcgtattcgcgggcggtgtcgggttttggtcgaacggggaatta

SEQ ID NO: 31212 - DNA, 1478 bp, Artificial Sequence
  chemically treated genomic DNA (Homo sapiens) CpG-island No: 31212
taattccccgttcgaccaaaacccgacaccgcccgcgaatacgcgcccctcccctacaaccaacttactccgaaaatccccgcgcgaacgaccgcactcacccatattaacgaaactcataaccaaatcgacgcgacccaaacgctactccgcgaacgcgccgtcctcgtcgtcgtcgccaaccataacgtaatacaaatccaacataaaaaacgacgcgaacgcgaacaaccgaaaaacgacgaataacgcgcgaaaccgaaaccgcccgaataacccgaacaccgccaaaatctcgcgctacacgtcccgacgctcgcgcgcgcccaaacgtcgctaaaaacaaccgaacgaaaatcgcaaaccgaaaccgcccccgcccaacgcgcacaacgtcaaacccaaaaaccaaaacgatccgaaacgcgcgaccataacgaaccgaaaacgctcaacgaacgcacatcaactccgccgccgcccctaaacccgaaaacgccccgacgacgaacgaaaaactaaattcgacgaacaaaaaacgaaactcgacgaacgacgtctacgacctcaacgcgatccctaaaacgccccccgcgcgcacctaccccgactccgaaacaaacgaacgctaacgcgaacgcaaacgccaacgcttcgaaaccgaaactattctaaaaactaaaactatcaaccaatccgtctatcgccgccgttcccaccaatccgactataactacgatccgcgcaacgcaaaaacgaccgacgaactccgacaacgacccgaacgacgcgattcccgcgaatccttaccccgactcaaccgtctataccgcccgcccacccccgaaactaaccaataaaaacgcgaaaacgaaacctaaacgcgaaaaccgcgcccgctaaaaaccccgaacgacgacaaatattacgaataaaacgaccccgaaatacgacctcgacgtaactaacgattaatccgaacgaaaaacccgcaacctaaacgtcaacgtaatcaaaaccgtcgtaactcccgccgcgaacctcgacgcaaaaatcctaaaaccgcgacgccgtcccgatcccgccaataataccacccgactacctcgccgtaatataccgtaatcgccaccgaacccgacacgcgaccgtaaccccgtctaaaaaaccgaacgataccaaccaaaccccgcgaataaaacctattcctctacccgcaacaaccgacccgaattccgaccaccgcgacccctcaccgcctcctaacgccttccccgtaacccctacatacgcttctacgaacgcctccttctcgacacctactcgactacttctccctacgtcccccacctaactcccgcgtaaacccaaacaacgccccaatcgaaccgcccccgccaaccctaactatacgccctacgtccccgatactaatccaactttacgaaaaaaactccgcctcctacctccaactaaac

SEQ ID NO: 31213 - DNA, 515 bp, Artificial Sequence
  chemically treated genomic DNA (Homo sapiens) CpG-island No: 31213
gggcgcgggcgttcgttttgttttgtgacgcgcggttcgaggcgttcgtagggtttatattatttgttttggttttcgattcgggtcgattatggcggcgttgcggtttttggcgttagtgttcgggcgcggggttttcgtcggcggtttagggttcgcgttgttttagggttgcgttcgttgttttgttattagttttcggtttcgtgttaagttttacgcggattcggtggagatggtgaaggatatttttgacggggcgatcgttatgatcgggggtttcgggttttgcgggattttcgagaatttgatcgtcgcgttgtttaggattcgcgtgaaagatttgtaggtggttagtagtaacgtgggcgtggaggatttcggtttgggttttttgttggtcgttaggtaggttcgtcgtatcgtttgtttttacgtgggcgagaatattttgtgcgagagttagtatttggtaggagagttggagttggagtttacgttttagggtattttgg

SEQ ID NO: 31214 - DNA, 515 bp, Artificial Sequence
  chemically treated genomic DNA (Homo sapiens) CpG-island No: 31214
ccaaaataccctaaaacgtaaactccaactccaactctcctaccaaatactaactctcgcacaaaatattctcgcccacgtaaaaacaaacgatacgacgaacctacctaacgaccaacaaaaaacccaaaccgaaatcctccacgcccacgttactactaaccacctacaaatctttcacgcgaatcctaaacaacgcgacgatcaaattctcgaaaatcccgcaaaacccgaaacccccgatcataacgatcgccccgtcaaaaatatccttcaccatctccaccgaatccgcgtaaaacttaacacgaaaccgaaaactaataacaaaacaacgaacgcaaccctaaaacaacgcgaaccctaaaccgccgacgaaaaccccgcgcccgaacactaacgccaaaaaccgcaacgccgccataatcgacccgaatcgaaaaccaaaacaaataatataaaccctacgaacgcctcgaaccgcgcgtcacaaaacaaaacgaacgcccgcgccc

SEQ ID NO: 31215 - DNA, 515 bp, Artificial Sequence
  chemically treated genomic DNA (Homo sapiens) CpG-island No: 31215
ttagggtgttttggggcgtgagttttagttttagtttttttgttaggtattggttttcgtatagggtgttttcgtttacgtaggaatagacgatgcgacggatttgtttggcggttagtaggaggtttaggtcgaagttttttacgtttacgttgttgttgattatttgtaggttttttacgcgggttttgagtagcgcggcgattaggttttcggggatttcgtagagttcgaagttttcgattatgacggtcgtttcgttagagatgttttttattatttttatcgggttcgcgtagaatttggtacggggtcggggattggtggtaaagtagcgggcgtagttttgggatagcgcgagttttgagtcgtcggcggggatttcgcgttcgagtattgacgttaggagtcgtagcgtcgttatagtcggttcgggtcggaggttaggataggtggtgtgagttttgcgagcgtttcgggtcgcgcgttatagagtagggcgggcgttcgcgttt

SEQ ID NO: 31216 - DNA, 515 bp, Artificial Sequence
  chemically treated genomic DNA (Homo sapiens) CpG-island No: 31216
aaacgcgaacgcccgccctactctataacgcgcgacccgaaacgctcgcaaaactcacaccacctatcctaacctccgacccgaaccgactataacgacgctacgactcctaacgtcaatactcgaacgcgaaatccccgccgacgactcaaaactcgcgctatcccaaaactacgcccgctactttaccaccaatccccgaccccgtaccaaattctacgcgaacccgataaaaataataaaaaacatctctaacgaaacgaccgtcataatcgaaaacttcgaactctacgaaatccccgaaaacctaatcgccgcgctactcaaaacccgcgtaaaaaacctacaaataatcaacaacaacgtaaacgtaaaaaacttcgacctaaacctcctactaaccgccaaacaaatccgtcgcatcgtctattcctacgtaaacgaaaacaccctatacgaaaaccaatacctaacaaaaaaactaaaactaaaactcacgccccaaaacaccctaa

SEQ ID NO: 31217 - DNA, 726 bp, Artificial Sequence
  chemically treated genomic DNA (Homo sapiens) CpG-island No: 31217
tgcgcggcgtttattcgaggttggtttttggagatggggaagaagcggcgatcgaagttatcggttattagaattgtttgtaggggcggcggcggtttttttttcgtttttttggttttttcgttatcgttgtttttcggtttcgcgtcgttgcgtttgttagttcgattaattattatattaggcggcgttattataggggtcgttattttttttttttacggttattattttcgtaaggaagttgttatcgtacgtagtaggggataaaaaggatttagtatttgaaatgcgatggattaattaacgaagggaaggagacgaggagggagtagtgcgtatgcgtttttttcgggagtttataggggtttgaggttgatttcggaggcgcgaggagtcggtacgggttacggttgtttcggtttttgaggcgtagggtaggagtggggttttatagatgttagattcggtttgtaagtatcgtcggtttttatttgtaggtgaataagtcgagatttttgtggcgtgataggatttgtggtcgttacgaaggggttagttttatcgggaatttgtaatcgtttagtagttttttcgtttcgcgtatgtgaaatatgtagtttttcgtatttattttagaaatttttgggaatttagcgttttggggagatagaatcgagttagatgttttttcgttgcgaggaatttagaatttgtataaataga

SEQ ID NO: 31218 - DNA, 726 bp, Artificial Sequence
  chemically treated genomic DNA (Homo sapiens) CpG-island No: 31218
tctatttatacaaattctaaattcctcgcaacgaaaaaacatctaactcgattctatctccccaaaacgctaaattcccaaaaatttctaaaataaatacgaaaaactacatatttcacatacgcgaaacgaaaaaactactaaacgattacaaattcccgataaaactaaccccttcgtaacgaccacaaatcctatcacgccacaaaaatctcgacttattcacctacaaataaaaaccgacgatacttacaaaccgaatctaacatctataaaaccccactcctaccctacgcctcaaaaaccgaaacaaccgtaacccgtaccgactcctcgcgcctccgaaatcaacctcaaacccctataaactcccgaaaaaaacgcatacgcactactccctcctcgtctccttcccttcgttaattaatccatcgcatttcaaatactaaatcctttttatcccctactacgtacgataacaacttccttacgaaaataataaccgtaaaaaaaaaaaataacgacccctataataacgccgcctaatataataattaatcgaactaacaaacgcaacgacgcgaaaccgaaaaacaacgataacgaaaaaaccaaaaaaacgaaaaaaaaaccgccgccgcccctacaaacaattctaataaccgataacttcgatcgccgcttcttccccatctccaaaaaccaacctcgaataaacgccgcgca

SEQ ID NO: 31219 - DNA, 726 bp, Artificial Sequence
  chemically treated genomic DNA (Homo sapiens) CpG-island No: 31219
tttatttatgtaggttttgagtttttcgtagcgggggaatatttggttcggttttatttttttaaggcgttgggtttttagaagtttttagaatgaatacggagggttatatattttatatgcgcggggcggggaaattgttgggcgattatagattttcgatggagttggttttttcgtggcgattataagttttattacgttataagaatttcggtttgtttatttataaatgaaggtcgacgatatttgtagatcgagtttgatatttatgggattttatttttattttgcgttttaggggtcgggataatcgtgattcgtatcgatttttcgcgttttcgggattaattttagatttttgtgggttttcggggaagacgtatgcgtattgtttttttttcgttttttttttttcgttaattagtttatcgtattttaagtgttggattttttttgttttttattgcgtgcggtggtagtttttttgcggaagtggtgatcgtgagagaagaagatggcggtttttgtagtggcgtcgtttggtgtggtggttagtcgggttaataagcgtagcggcgcggggtcgggaggtagcggtggcgggggagttagaggggcggaggaggaatcgtcgtcgtttttataagtagttttggtggtcgatagtttcgatcgtcgttttttttttatttttaaggattagtttcgggtgagcgtcgcgta

SEQ ID NO: 31220 - DNA, 726 bp, Artificial Sequence
  chemically treated genomic DNA (Homo sapiens) CpG-island No: 31220
tacgcgacgctcacccgaaactaatccttaaaaataaaaaaaaaacgacgatcgaaactatcgaccaccaaaactacttataaaaacgacgacgattcctcctccgcccctctaactcccccgccaccgctacctcccgaccccgcgccgctacgcttattaacccgactaaccaccacaccaaacgacgccactacaaaaaccgccatcttcttctctcacgatcaccacttccgcaaaaaaactaccaccgcacgcaataaaaaacaaaaaaaatccaacacttaaaatacgataaactaattaacgaaaaaaaaaaaacgaaaaaaaaacaatacgcatacgtcttccccgaaaacccacaaaaatctaaaattaatcccgaaaacgcgaaaaatcgatacgaatcacgattatcccgacccctaaaacgcaaaataaaaataaaatcccataaatatcaaactcgatctacaaatatcgtcgaccttcatttataaataaacaaaccgaaattcttataacgtaataaaacttataatcgccacgaaaaaaccaactccatcgaaaatctataatcgcccaacaatttccccgccccgcgcatataaaatatataaccctccgtattcattctaaaaacttctaaaaacccaacgccttaaaaaaataaaaccgaaccaaatattcccccgctacgaaaaactcaaaacctacataaataaa

SEQ ID NO: 31221 - DNA, 786 bp, Artificial Sequence
  chemically treated genomic DNA (Homo sapiens) CpG-island No: 31221
tgtagcgaggtaagtcgaaacggatcgcgttattttttagaagttagagcggtcggggttttcggaggcggggcgggggttatttttattcgaaatcgtcgtttatagatttgaagaagaatttatagttgggtcgttgtaaaacgtttttaaagttcgttaaggtgacgcgttcggcgggtaggggtagttttataaggtacggcgttttttgtttatttaagtggtagatgattttggtttcgtttatggttttggtttcgggttcggcggttcgcgcgcggtttgttcgggcggtcgggtcgagtttttagacggcggcggcgcgcggcgcggtttagcggtttaatttagttcggggggtgttggcggcgttagtttttttgtttttcggtcgttatcgggttttagcgtcgttcgtcgtcgtcgcggtcgtcgttttcgttttttattttttcgattggattggcgatcgcgattttttcggtggtcgcggttttttcggtttagggtttcgttcgggttcgtttttttttttcggttcggcgcggtttcgtttcggcgcgtttcgttttcggtcgtcgcggagaggcgtcggcgtcgcggtagatggtagggtttttcgtttattggtcgggtcgcggcgtttcggtttcgggtttttagaaacggaaggggagatttatcgggatggcggcgttttcggatttttgaaggttttgatttcggatttaagtgggatcggcgatttttttgtagtttaggaagagtggaatgtagggattg

SEQ ID NO: 31222 - DNA, 786 bp, Artificial Sequence
  chemically treated genomic DNA (Homo sapiens) CpG-island No: 31222
caatccctacattccactcttcctaaactacaaaaaaatcgccgatcccacttaaatccgaaatcaaaaccttcaaaaatccgaaaacgccgccatcccgataaatctccccttccgtttctaaaaacccgaaaccgaaacgccgcgacccgaccaataaacgaaaaaccctaccatctaccgcgacgccgacgcctctccgcgacgaccgaaaacgaaacgcgccgaaacgaaaccgcgccgaaccgaaaaaaaaaaacgaacccgaacgaaaccctaaaccgaaaaaaccgcgaccaccgaaaaaatcgcgatcgccaatccaatcgaaaaaataaaaaacgaaaacgacgaccgcgacgacgacgaacgacgctaaaacccgataacgaccgaaaaacaaaaaaactaacgccgccaacaccccccgaactaaattaaaccgctaaaccgcgccgcgcgccgccgccgtctaaaaactcgacccgaccgcccgaacaaaccgcgcgcgaaccgccgaacccgaaaccaaaaccataaacgaaaccaaaatcatctaccacttaaataaacaaaaaacgccgtaccttataaaactacccctacccgccgaacgcgtcaccttaacgaactttaaaaacgttttacaacgacccaactataaattcttcttcaaatctataaacgacgatttcgaataaaaataacccccgccccgcctccgaaaaccccgaccgctctaacttctaaaaaataacgcgatccgtttcgacttacctcgctaca

SEQ ID NO: 31223 - DNA, 786 bp, Artificial Sequence
  chemically treated genomic DNA (Homo sapiens) CpG-island No: 31223
taatttttgtattttattttttttggattgtagaggagtcgtcgattttatttgggttcggagttagggtttttaggggttcgggaacgtcgttatttcggtgaattttttttttcgtttttagggattcgggatcggagcgtcgcggttcggttagtgggcgggaaattttgttatttgtcgcgacgtcggcgttttttcgcggcggtcgggggcggggcgcgtcggggcggggtcgcgtcgggtcggaggaggggagcgggttcggacgaagttttgggtcgggagggtcgcggttatcggaagagtcgcggtcgttagtttagtcgggagagtggggagcggaagcggcggtcgcggcggcggcgggcggcgttgggattcggtagcggtcggagaataagggagttggcgtcgttagtatttttcgagttgggttgagtcgttgggtcgcgtcgcgcgtcgtcgtcgtttggaggttcggttcggtcgttcgagtaggtcgcgcgcgggtcgtcgggttcgaggttagagttatgggcgagattaagattatttattatttggatgggtaggagacgtcgtattttgtgaagttgtttttgttcgtcgagcgcgttattttggcggattttaagggcgttttgtagcgatttagttataagtttttttttaagtttatggacgacgatttcgggtgaggatggttttcgtttcgttttcgggagtttcggtcgttttggtttttaagggatgacgcggttcgtttcgatttgtttcgttata

SEQ ID NO: 31224 - DNA, 786 bp, Artificial Sequence
  chemically treated genomic DNA (Homo sapiens) CpG-island No: 31224
tataacgaaacaaatcgaaacgaaccgcgtcatcccttaaaaaccaaaacgaccgaaactcccgaaaacgaaacgaaaaccatcctcacccgaaatcgtcgtccataaacttaaaaaaaaacttataactaaatcgctacaaaacgcccttaaaatccgccaaaataacgcgctcgacgaacaaaaacaacttcacaaaatacgacgtctcctacccatccaaataataaataatcttaatctcgcccataactctaacctcgaacccgacgacccgcgcgcgacctactcgaacgaccgaaccgaacctccaaacgacgacgacgcgcgacgcgacccaacgactcaacccaactcgaaaaatactaacgacgccaactcccttattctccgaccgctaccgaatcccaacgccgcccgccgccgccgcgaccgccgcttccgctccccactctcccgactaaactaacgaccgcgactcttccgataaccgcgaccctcccgacccaaaacttcgtccgaacccgctcccctcctccgacccgacgcgaccccgccccgacgcgccccgcccccgaccgccgcgaaaaaacgccgacgtcgcgacaaataacaaaatttcccgcccactaaccgaaccgcgacgctccgatcccgaatccctaaaaacgaaaaaaaaaattcaccgaaataacgacgttcccgaacccctaaaaaccctaactccgaacccaaataaaatcgacgactcctctacaatccaaaaaaaataaaatacaaaaatta

SEQ ID NO: 31225 - DNA, 527 bp, Artificial Sequence
  chemically treated genomic DNA (Homo sapiens) CpG-island No: 31225
ggtagtgtcggtggtatttgtaggacgtttgatttttgaagaatggaaagggtggggtttttgaggtttcggttttgtagtgacggggattcgtgcggcggcggggacgcggtttttgtattgcggtgtttagtttggttcgggttgtcgcggttggcgcggaggcggtatcgcgttcgaaggaggggggagcgttagtttcgtcgtagtagtagtaggcgtggttagggtaggttggaggggcggtttttcggaacgggggcgggattatcgtcggtagggttcgcgtttttgtcgggatttagagtcgttgtagttatagtcgcgaattggcggtcggtaggtgtcgggatcgagggttattcggagcgtagaggcggtattatttatacggatttcgtgggtatttagaatttcgcggagggcgcgacggtgaggttgagattgttatagggagcggggcgatttttagagttagttcgcggtattttttgcgcgggtcgcggttattgtaggtgttttttttt

SEQ ID NO: 31226 - DNA, 527 bp, Artificial Sequence
  chemically treated genomic DNA (Homo sapiens) CpG-island No: 31226
aaaaaaaaacacctacaataaccgcgacccgcgcaaaaaataccgcgaactaactctaaaaatcgccccgctccctataacaatctcaacctcaccgtcgcgccctccgcgaaattctaaatacccacgaaatccgtataaataataccgcctctacgctccgaataaccctcgatcccgacacctaccgaccgccaattcgcgactataactacaacgactctaaatcccgacaaaaacgcgaaccctaccgacgataatcccgcccccgttccgaaaaaccgcccctccaacctaccctaaccacgcctactactactacgacgaaactaacgctcccccctccttcgaacgcgataccgcctccgcgccaaccgcgacaacccgaaccaaactaaacaccgcaatacaaaaaccgcgtccccgccgccgcacgaatccccgtcactacaaaaccgaaacctcaaaaaccccaccctttccattcttcaaaaatcaaacgtcctacaaataccaccgacactacc

SEQ ID NO: 31227 - DNA, 527 bp, Artificial Sequence
  chemically treated genomic DNA (Homo sapiens) CpG-island No: 31227
aggagggggtatttgtagtggtcgcggttcgcgtaggggatgtcgcgggttggttttggggatcgtttcgttttttgtggtagttttagttttatcgtcgcgtttttcgcggagttttaggtgtttacgggattcgtgtgggtggtgtcgtttttgcgtttcgggtggttttcggtttcggtatttgtcggtcgttagttcgcgattgtggttgtagcggttttgagtttcggtaggggcgcgggttttgtcggcggtggtttcgttttcgtttcgagaggtcgtttttttagtttgttttggttacgtttgttgttgttgcggcggggttggcgtttttttttttttcgggcgcggtatcgttttcgcgttagtcgcggtagttcgagttagattgggtatcgtagtgtagggatcgcgttttcgtcgtcgtacggattttcgttattgtaggatcgaggttttagagattttattttttttattttttaggaattaggcgttttgtaagtgttatcgatattgtt

SEQ ID NO: 31228 - DNA, 527 bp, Artificial Sequence
  chemically treated genomic DNA (Homo sapiens) CpG-island No: 31228
aacaatatcgataacacttacaaaacgcctaattcctaaaaaataaaaaaaataaaatctctaaaacctcgatcctacaataacgaaaatccgtacgacgacgaaaacgcgatccctacactacgatacccaatctaactcgaactaccgcgactaacgcgaaaacgataccgcgcccgaaaaaaaaaaaaacgccaaccccgccgcaacaacaacaaacgtaaccaaaacaaactaaaaaaacgacctctcgaaacgaaaacgaaaccaccgccgacaaaacccgcgcccctaccgaaactcaaaaccgctacaaccacaatcgcgaactaacgaccgacaaataccgaaaccgaaaaccacccgaaacgcaaaaacgacaccacccacacgaatcccgtaaacacctaaaactccgcgaaaaacgcgacgataaaactaaaactaccacaaaaaacgaaacgatccccaaaaccaacccgcgacatcccctacgcgaaccgcgaccactacaaataccccctcct

SEQ ID NO: 31229 - DNA, 507 bp, Artificial Sequence
  chemically treated genomic DNA (Homo sapiens) CpG-island No: 31229
tattgtcgtcgtatgtgagatatttttttttttttaaggttagtgattgcgttagagtttttgcgcgttggtaagtaggtgacgtcgcgggtgacggttagttagggcgggggttgtgggggcgggaggtaaggggagaagagggtatgttttcgtcggtgaggcgagaatttattcgtggtttaaagtaacgagggcggggggtattttttatttttatcgtattttttcggggtatatattggcgcgtttcgcgtttttaggtgtttcgagttttttcgcgttattcgtagtttagggcgtttttcgcgacgtcgttatttattttttttatattgcgagcgtattattttagagtcgcggggggttatagttatcggattagggttgggggtgtttgttttggtgcgcgcgcgtcggtttagtttttatagattttttttaggagagattgaaatatttagatttaggagacggagatattgtggtatagagatataggagtta

SEQ ID NO: 31230 - DNA, 507 bp, Artificial Sequence
  chemically treated genomic DNA (Homo sapiens) CpG-island No: 31230
taactcctatatctctataccacaatatctccgtctcctaaatctaaatatttcaatctctcctaaaaaaaatctataaaaactaaaccgacgcgcgcgcaccaaaacaaacacccccaaccctaatccgataactataaccccccgcgactctaaaataatacgctcgcaatataaaaaaaataaataacgacgtcgcgaaaaacgccctaaactacgaataacgcgaaaaaactcgaaacacctaaaaacgcgaaacgcgccaatatataccccgaaaaaatacgataaaaataaaaaataccccccgccctcgttactttaaaccacgaataaattctcgcctcaccgacgaaaacataccctcttctccccttacctcccgcccccacaacccccgccctaactaaccgtcacccgcgacgtcacctacttaccaacgcgcaaaaactctaacgcaatcactaaccttaaaaaaaaaaaaatatctcacatacgacgacaata

SEQ ID NO: 31231 - DNA, 507 bp, Artificial Sequence
  chemically treated genomic DNA (Homo sapiens) CpG-island No: 31231
tgatttttgtatttttgtgttatagtgttttcgttttttgaatttgggtattttagttttttttaggaggggtttatagaaattgggtcgacgcgcgcgtattagggtagatatttttagttttagttcggtggttgtagtttttcgcggttttggagtggtgcgttcgtagtgtaggaggaatgaatggcggcgtcgcggggggcgttttgggttgcgggtgacgcggggaagttcggagtatttgaggacgcggagcgcgttagtgtgtgtttcgagggagtgcggtagagatggagggtgtttttcgttttcgttgttttggattacgggtgagttttcgttttatcgacgggaatatgtttttttttttttttgtttttcgtttttataattttcgttttggttggtcgttattcgcggcgttatttgtttgttagcgcgtaggagttttggcgtaattattggttttggggaggagggggtgttttatatgcggcgatagtg

SEQ ID NO: 31232 - DNA, 507 bp, Artificial Sequence
  chemically treated genomic DNA (Homo sapiens) CpG-island No: 31232
cactatcgccgcatataaaacaccccctcctccccaaaaccaataattacgccaaaactcctacgcgctaacaaacaaataacgccgcgaataacgaccaaccaaaacgaaaattataaaaacgaaaaacaaaaaaaaaaaaaaacatattcccgtcgataaaacgaaaactcacccgtaatccaaaacaacgaaaacgaaaaacaccctccatctctaccgcactccctcgaaacacacactaacgcgctccgcgtcctcaaatactccgaacttccccgcgtcacccgcaacccaaaacgccccccgcgacgccgccattcattcctcctacactacgaacgcaccactccaaaaccgcgaaaaactacaaccaccgaactaaaactaaaaatatctaccctaatacgcgcgcgtcgacccaatttctataaacccctcctaaaaaaaactaaaatacccaaattcaaaaaacgaaaacactataacacaaaaatacaaaaatca

SEQ ID NO: 31233 - DNA, 743 bp, Artificial Sequence
  chemically treated genomic DNA (Homo sapiens) CpG-island No: 31233
tgtcgtttttttatttttttcgttatttgtcgtttttaggagttttcgttcggtttcgcgtttcgataggtttcgttcgggtgttggagtgagattttcgcgttggtttttggagcgcggggtgggcgtttcgttattttgcgtttagttttttcggttcgtttttagtagggtcggtttttcggcgttatgttcggtttgtattgtttttttagttggacgtcgttgtcgtttacggatttttgggttcgggtttgcgttaacggtttttgttttagcgtgcgggttcggtttatttatcgtaattcgtagtcgtagtcggtggacggtgaggttcgggtggggcgcgggcgcggcggggggtgcgtcgggtagggttcgacgtcgtttttcgtcgttttttttaggcgtgttcgtgtattcgttggtcgaggtcgaggtggtgttcggtttcgaggtcgaggtcgtcggacggcgcgtttttttttagttgtagagtcggcgtcgttcgtaggtcgtttgttgtcgcgttttgagttcggggttggggatttcgacgtttcgtcgttgcgcgtagggtgagtttcgcgcgttcgtattcgcgtttttgaaagtcgggcgtagtttaggttttcgtattcgttcgggtttcgttcgtttttcgttttttttcgggtattgttttgtgtatttattggtttattttggtatttagtagtcgtgggttgggtatttgatttgcg

SEQ ID NO: 31234 - DNA, 743 bp, Artificial Sequence
  chemically treated genomic DNA (Homo sapiens) CpG-island No: 31234
cgcaaatcaaatacccaacccacgactactaaataccaaaataaaccaataaatacacaaaacaatacccgaaaaaaaacgaaaaacgaacgaaacccgaacgaatacgaaaacctaaactacgcccgactttcaaaaacgcgaatacgaacgcgcgaaactcaccctacgcgcaacgacgaaacgtcgaaatccccaaccccgaactcaaaacgcgacaacaaacgacctacgaacgacgccgactctacaactaaaaaaaaacgcgccgtccgacgacctcgacctcgaaaccgaacaccacctcgacctcgaccaacgaatacacgaacacgcctaaaaaaaacgacgaaaaacgacgtcgaaccctacccgacgcaccccccgccgcgcccgcgccccacccgaacctcaccgtccaccgactacgactacgaattacgataaataaaccgaacccgcacgctaaaacaaaaaccgttaacgcaaacccgaacccaaaaatccgtaaacgacaacgacgtccaactaaaaaaacaatacaaaccgaacataacgccgaaaaaccgaccctactaaaaacgaaccgaaaaaactaaacgcaaaataacgaaacgcccaccccgcgctccaaaaaccaacgcgaaaatctcactccaacacccgaacgaaacctatcgaaacgcgaaaccgaacgaaaactcctaaaaacgacaaataacgaaaaaaataaaaaaacgaca

SEQ ID NO: 31235 - DNA, 743 bp, Artificial Sequence
  chemically treated genomic DNA (Homo sapiens) CpG-island No: 31235
cgtaggttaggtgtttagtttacgattgttaaatattaggatgagttaatgaatgtataaggtagtgttcggaggaaggcgggggacgggcggagttcgagcgggtgcgggagtttgagttgcgttcggtttttaggagcgcgggtgcgggcgcgcggaatttattttgcgcgtagcggcggggcgtcggggtttttagtttcgggtttagagcgcggtagtaggcggtttgcgagcggcgtcggttttgtagttggaaggagacgcgtcgttcggcggtttcggtttcgaagtcggatattatttcggtttcggttagcgggtatacgaatacgtttggggagggcggcgggaggcggcgtcggattttgttcggcgtatttttcgtcgcgttcgcgttttattcgggttttatcgtttatcggttgcggttgcgggttgcggtaggtgagtcgggttcgtacgttgaggtaggggtcgttggcgtaggttcggatttaggagttcgtgagcggtagcggcgtttagttggaggggtagtataggtcgggtatggcgtcgggaggtcggttttgttgggaacgggtcggggaagttgggcgtagggtgacgggacgtttatttcgcgttttagaggttagcgcgagagttttattttagtattcggacggggtttgtcggggcgcgaggtcgagcgggagtttttgagggcgataggtggcgggggagataagggggcggta

SEQ ID NO: 31236 - DNA, 743 bp, Artificial Sequence
  chemically treated genomic DNA (Homo sapiens) CpG-island No: 31236
taccgcccccttatctcccccgccacctatcgccctcaaaaactcccgctcgacctcgcgccccgacaaaccccgtccgaatactaaaataaaactctcgcgctaacctctaaaacgcgaaataaacgtcccgtcaccctacgcccaacttccccgacccgttcccaacaaaaccgacctcccgacgccatacccgacctatactacccctccaactaaacgccgctaccgctcacgaactcctaaatccgaacctacgccaacgacccctacctcaacgtacgaacccgactcacctaccgcaacccgcaaccgcaaccgataaacgataaaacccgaataaaacgcgaacgcgacgaaaaatacgccgaacaaaatccgacgccgcctcccgccgccctccccaaacgtattcgtatacccgctaaccgaaaccgaaataatatccgacttcgaaaccgaaaccgccgaacgacgcgtctccttccaactacaaaaccgacgccgctcgcaaaccgcctactaccgcgctctaaacccgaaactaaaaaccccgacgccccgccgctacgcgcaaaataaattccgcgcgcccgcacccgcgctcctaaaaaccgaacgcaactcaaactcccgcacccgctcgaactccgcccgtcccccgccttcctccgaacactaccttatacattcattaactcatcctaatatttaacaatcgtaaactaaacacctaacctacg

SEQ ID NO: 31237 - DNA, 662 bp, Artificial Sequence
  chemically treated genomic DNA (Homo sapiens) CpG-island No: 31237
ggaggcgcgcgaagggcgggagttttcgggttttcgttttcggggaggttttgggcgcggggcgggatttcgggacgttgggcgggcgtgttagggtttcgtcgttttggttcggttttgttttgcgttgcgcgtttattatggtgggtttcgcgtcgcggcggcggttgcggtcgttggtagcgttggttttggttttggcgttggtttcggggttgtttatagttcgggtcgggtagatatcgcgttttgtcgagcgggggtttttagtgcggttttttatcgaggaggagttggttcgttatggcggggaggaggtaggcgggggtgtcgcgggtcgagggattcggggtggcgttcgatttgcggcgagtcgagcggggatttaggaggcgtcggcggtttaggaagttttgggggacgcgcggttcgcggcgggcgttatgggtcggcggggggttttttttttataggtttcgaaggatggtcgaggggtgaggacgagtttttaatagtcggagcgtttcgttttgttcgtatattttattttgaatttttttttcggttttcgggagattttttttttagtcgttttttcgttgatgatttgcgtatagattttagaattttttggtttttatgttagtattagtcgaggcgtt

SEQ ID NO: 31238 - DNA, 662 bp, Artificial Sequence
  chemically treated genomic DNA (Homo sapiens) CpG-island No: 31238
aacgcctcgactaatactaacataaaaaccaaaaaattctaaaatctatacgcaaatcatcaacgaaaaaacgactaaaaaaaaaatctcccgaaaaccgaaaaaaaaattcaaaataaaatatacgaacaaaacgaaacgctccgactattaaaaactcgtcctcacccctcgaccatccttcgaaacctataaaaaaaaaaccccccgccgacccataacgcccgccgcgaaccgcgcgtcccccaaaacttcctaaaccgccgacgcctcctaaatccccgctcgactcgccgcaaatcgaacgccaccccgaatccctcgacccgcgacacccccgcctacctcctccccgccataacgaaccaactcctcctcgataaaaaaccgcactaaaaacccccgctcgacaaaacgcgatatctacccgacccgaactataaacaaccccgaaaccaacgccaaaaccaaaaccaacgctaccaacgaccgcaaccgccgccgcgacgcgaaacccaccataataaacgcgcaacgcaaaacaaaaccgaaccaaaacgacgaaaccctaacacgcccgcccaacgtcccgaaatcccgccccgcgcccaaaacctccccgaaaacgaaaacccgaaaactcccgcccttcgcgcgcctcc

SEQ ID NO: 31239 - DNA, 662 bp, Artificial Sequence
  chemically treated genomic DNA (Homo sapiens) CpG-island No: 31239
aacgtttcggttgatgttaatatgaaaattaaaaagttttgaggtttgtacgtagattattaacgaaaaggcggttagaggggaaatttttcggggatcgagggagaagtttagggtggggtgtgcgggtaaagcggagcgtttcgattgttgaggattcgtttttatttttcggttatttttcggggtttatagagaggaggtttttcgtcggtttatggcgttcgtcgcgggtcgcgcgttttttagagttttttgggtcgtcggcgttttttgggttttcgttcggttcgtcgtagatcggacgttatttcgggtttttcggttcgcgatattttcgtttatttttttttcgttatagcgggttagttttttttcggtgaaaagtcgtattgggggttttcgttcggtagggcgcggtgtttgttcggttcgggttgtgggtagtttcggggttagcgttaggattagggttagcgttgttagcggtcgtagtcgtcgtcgcggcgcggggtttattatggtgagcgcgtagcgtaaggtaaggtcgggttagggcggcggggttttagtacgttcgtttagcgtttcggagtttcgtttcgcgtttagagttttttcgagggcggggattcgagaattttcgtttttcgcgcgttttt

SEQ ID NO: 31240 - DNA, 662 bp, Artificial Sequence
  chemically treated genomic DNA (Homo sapiens) CpG-island No: 31240
aaaaacgcgcgaaaaacgaaaattctcgaatccccgccctcgaaaaaactctaaacgcgaaacgaaactccgaaacgctaaacgaacgtactaaaaccccgccgccctaacccgaccttaccttacgctacgcgctcaccataataaaccccgcgccgcgacgacgactacgaccgctaacaacgctaaccctaatcctaacgctaaccccgaaactacccacaacccgaaccgaacaaacaccgcgccctaccgaacgaaaacccccaatacgacttttcaccgaaaaaaaactaacccgctataacgaaaaaaaaataaacgaaaatatcgcgaaccgaaaaacccgaaataacgtccgatctacgacgaaccgaacgaaaacccaaaaaacgccgacgacccaaaaaactctaaaaaacgcgcgacccgcgacgaacgccataaaccgacgaaaaacctcctctctataaaccccgaaaaataaccgaaaaataaaaacgaatcctcaacaatcgaaacgctccgctttacccgcacaccccaccctaaacttctccctcgatccccgaaaaatttcccctctaaccgccttttcgttaataatctacgtacaaacctcaaaactttttaattttcatattaacatcaaccgaaacgtt

SEQ ID NO: 31241 - DNA, 818 bp, Artificial Sequence
  chemically treated genomic DNA (Homo sapiens) CpG-island No: 31241
gaaggtttttcgagtggttttttcggatgttgaggttttgttaacgtttttttgttttttcgtgcggcgtcgagcgtagtgtaggatatataggaagtgtttcgaaatagggttagggtgggggcggtaatcgtgttcggagggggcgtttagagcgtagggattcggtcgggtcgagtgatgttttttttaaaaaataagagttatcgggatgagggttagggatttcgaatttagcgtcgggtagttttcggagtcggagttaggttggtcgggttcggtttaggtatttttttttttcggagtttttcgacgcgcgttcggttatttattttagcgtttttattttgtaaattttgtcgaaggcgtcgtcgtttagttcgtttacgattttttatatttcgttggggtttaggtcgcggcggacgtgtttatattcgcgggatttttttttttcgaaggtagataggcgtaggatgcggcggaaattggtaaaagttatggtcgggggcgcggtggcgtcggttcgggttcgggttcgggttcgggttgtggtttcggcggtcgcgaggagaaggaggaggagttggaggacgtcgcgtttttcggggttttttttagattcgttttttttcgtagttcgatttcggttaagtgtgttttgggtagcgtcgcgtcgggagtattcggaatcgcgtaggcggcggcgtgttcgttttcgttttcgttttgttaggtttttagggtcgttttttttgtgtcggtttcgtagtttttgttcggtttagttttgtttgcgagagtttcggattcgtttt

SEQ ID NO: 31242 - DNA, 818 bp, Artificial Sequence
  chemically treated genomic DNA (Homo sapiens) CpG-island No: 31242
aaaacgaatccgaaactctcgcaaacaaaactaaaccgaacaaaaactacgaaaccgacacaaaaaaaacgaccctaaaaacctaacaaaacgaaaacgaaaacgaacacgccgccgcctacgcgattccgaatactcccgacgcgacgctacccaaaacacacttaaccgaaatcgaactacgaaaaaaaacgaatctaaaaaaaaccccgaaaaacgcgacgtcctccaactcctcctccttctcctcgcgaccgccgaaaccacaacccgaacccgaacccgaacccgaaccgacgccaccgcgcccccgaccataacttttaccaatttccgccgcatcctacgcctatctaccttcgaaaaaaaaaaatcccgcgaatataaacacgtccgccgcgacctaaaccccaacgaaatataaaaaatcgtaaacgaactaaacgacgacgccttcgacaaaatttacaaaataaaaacgctaaaataaataaccgaacgcgcgtcgaaaaactccgaaaaaaaaaaatacctaaaccgaacccgaccaacctaactccgactccgaaaactacccgacgctaaattcgaaatccctaaccctcatcccgataactcttattttttaaaaaaaacatcactcgacccgaccgaatccctacgctctaaacgccccctccgaacacgattaccgcccccaccctaaccctatttcgaaacacttcctatatatcctacactacgctcgacgccgcacgaaaaaacaaaaaaacgttaacaaaacctcaacatccgaaaaaaccactcgaaaaaccttc

SEQ ID NO: 31243 - DNA, 818 bp, Artificial Sequence
  chemically treated genomic DNA (Homo sapiens) CpG-island No: 31243
ggaacgggttcgaggttttcgtaggtagggttgggtcgggtaggagttgcgaggtcggtataagggaggcggttttggggatttgatagggcgggggcgggggcgggtacgtcgtcgtttgcgcggtttcgggtgttttcggcgcggcgttgtttagggtatatttgatcgaggtcgggttgcggggaaaggcgggtttggggagaatttcgagagacgcggcgttttttaatttttttttttttttttcgcggtcgtcgaagttatagttcgagttcgagttcgagttcgagtcggcgttatcgcgttttcggttatggtttttgttaattttcgtcgtattttgcgtttgtttattttcgagaagagaaagtttcgcgaatatgagtacgttcgtcgcgatttggattttaacgaggtgtgggagatcgtgggcgagttgggcgacggcgttttcggtaaggtttataaggtgagggcgttgaggtgggtggtcggacgcgcgtcgaggggtttcggaaggaagggatgtttgagtcggattcggttagtttggtttcggtttcgagggttgttcggcgttgaattcggggtttttggtttttatttcgatgatttttgttttttggggggaatattattcggttcggtcgagtttttgcgttttgggcgtttttttcgggtacggttgtcgtttttattttagttttgtttcggagtattttttgtgtgttttgtattgcgttcggcgtcgtacggggagataaaggggcgttgataggattttagtattcgagagggttattcgagggattttt

SEQ ID NO: 31244 - DNA, 818 bp, Artificial Sequence
  chemically treated genomic DNA (Homo sapiens) CpG-island No: 31244
aaaaatccctcgaataaccctctcgaatactaaaatcctatcaacgcccctttatctccccgtacgacgccgaacgcaatacaaaacacacaaaaaatactccgaaacaaaactaaaataaaaacgacaaccgtacccgaaaaaaacgcccaaaacgcaaaaactcgaccgaaccgaataatattccccccaaaaaacaaaaatcatcgaaataaaaaccaaaaaccccgaattcaacgccgaacaaccctcgaaaccgaaaccaaactaaccgaatccgactcaaacatcccttccttccgaaacccctcgacgcgcgtccgaccacccacctcaacgccctcaccttataaaccttaccgaaaacgccgtcgcccaactcgcccacgatctcccacacctcgttaaaatccaaatcgcgacgaacgtactcatattcgcgaaactttctcttctcgaaaataaacaaacgcaaaatacgacgaaaattaacaaaaaccataaccgaaaacgcgataacgccgactcgaactcgaactcgaactcgaactataacttcgacgaccgcgaaaaaaaaaaaaaaaaattaaaaaacgccgcgtctctcgaaattctccccaaacccgcctttccccgcaacccgacctcgatcaaatataccctaaacaacgccgcgccgaaaacacccgaaaccgcgcaaacgacgacgtacccgcccccgcccccgccctatcaaatccccaaaaccgcctcccttataccgacctcgcaactcctacccgacccaaccctacctacgaaaacctcgaacccgttcc

SEQ ID NO: 31245 - DNA, 604 bp, Artificial Sequence
  chemically treated genomic DNA (Homo sapiens) CpG-island No: 31245
cgttttcgcgttcgtttatcggttcggttttattcgtcgtttttcggtagagtttcgggattttttaattggttgcgggcgtttttcggtttcgttcgtcgtcgtagggtattttggaaattgtagtttttttatattacgtttcgcgagtcgcgggttgggttttggggaagtttcggggatcgttcggtgggatcgtttatggatttaggagttcgttcgtcgcgtcgcgtggtttttaaaatttttatgggagtaagcgggacggcgatttggtatttcgcgagagtttacggatcgttgttagcgtttagaaggtgaatttgtattcgtttatttaattttttcgtagttatttcgttaggttgttttcgtttttattttttcgatggggacgtcggtaggcgagggtattcgttttaggtatatacgttggttgttcgtttgttgcgggtttttcggcgcggtgttgttttttagtgtgcgacgggtaacgtcggtgtagtcgcggttagtttttgtagggttcggtttttcggcgcggttttttttaggggtttttcgtttacgatttataaatttgttaggattagagggttgggag

SEQ ID NO: 31246 - DNA, 604 bp, Artificial Sequence
  chemically treated genomic DNA (Homo sapiens) CpG-island No: 31246
ctcccaaccctctaatcctaacaaatttataaatcgtaaacgaaaaacccctaaaaaaaaccgcgccgaaaaaccgaaccctacaaaaactaaccgcgactacaccgacgttacccgtcgcacactaaaaaacaacaccgcgccgaaaaacccgcaacaaacgaacaaccaacgtatatacctaaaacgaataccctcgcctaccgacgtccccatcgaaaaaataaaaacgaaaacaacctaacgaaataactacgaaaaaattaaataaacgaatacaaattcaccttctaaacgctaacaacgatccgtaaactctcgcgaaataccaaatcgccgtcccgcttactcccataaaaattttaaaaaccacgcgacgcgacgaacgaactcctaaatccataaacgatcccaccgaacgatccccgaaacttccccaaaacccaacccgcgactcgcgaaacgtaatataaaaaaactacaatttccaaaataccctacgacgacgaacgaaaccgaaaaacgcccgcaaccaattaaaaaatcccgaaactctaccgaaaaacgacgaataaaaccgaaccgataaacgaacgcgaaaacg

SEQ ID NO: 31247 - DNA, 604 bp, Artificial Sequence
  chemically treated genomic DNA (Homo sapiens) CpG-island No: 31247
tttttagttttttaattttggtaggtttgtggatcgtggacggggagtttttggaaaggatcgcgtcgggaagtcgggttttgtagggattggtcgcggttgtatcggcgttgttcgtcgtatattaggaggtagtatcgcgtcgaggaattcgtagtagacgggtagttagcgtgtgtgtttggggcgagtgttttcgtttgtcggcgtttttatcggaaaagtgggggcgagggtagtttagcggaatagttgcgggaggattaaatgaacgagtgtaggtttattttttgggcgttgataacgattcgtgggttttcgcgaaatgttaagtcgtcgtttcgtttgtttttataaaagttttgggagttacgcggcgcggcgggcgggtttttgagtttatgagcggttttatcgagcggttttcgaagtttttttaaagtttagttcgcggttcgcggagcgtggtgtggggggattatagtttttagagtgttttgcggcgacgggcggagtcggggagcgttcgtagttaattagggggtttcggggttttgtcggggagcggcgggtggagtcgggtcggtgggcgggcgcggggacg

SEQ ID NO: 31248 - DNA, 604 bp, Artificial Sequence
  chemically treated genomic DNA (Homo sapiens) CpG-island No: 31248
cgtccccgcgcccgcccaccgacccgactccacccgccgctccccgacaaaaccccgaaaccccctaattaactacgaacgctccccgactccgcccgtcgccgcaaaacactctaaaaactataatccccccacaccacgctccgcgaaccgcgaactaaactttaaaaaaacttcgaaaaccgctcgataaaaccgctcataaactcaaaaacccgcccgccgcgccgcgtaactcccaaaacttttataaaaacaaacgaaacgacgacttaacatttcgcgaaaacccacgaatcgttatcaacgcccaaaaaataaacctacactcgttcatttaatcctcccgcaactattccgctaaactaccctcgcccccacttttccgataaaaacgccgacaaacgaaaacactcgccccaaacacacacgctaactacccgtctactacgaattcctcgacgcgatactacctcctaatatacgacgaacaacgccgatacaaccgcgaccaatccctacaaaacccgacttcccgacgcgatcctttccaaaaactccccgtccacgatccacaaacctaccaaaattaaaaaactaaaaa

SEQ ID NO: 31249 - DNA, 637 bp, Artificial Sequence
  chemically treated genomic DNA (Homo sapiens) CpG-island No: 31249
acgcgtcggattaggtatggcgcgaatcggcgattcgttttgtgttcgaatttatgggcgaagtgaatcgtttgtagggaattattcgcggcgggtagttttatgttggcgcgtatcgttggtcgttgggttatatatttgcgtattaggggtcgggggatttttttttgcgtttttgggaagtggatattagtcgtcgtattagtttttattcgtcgttgtcggtataggtattggaagggttatcgtttaacggataaaaggtatttcggggataataggttgatatcgtttaagagtttatatcgacggcggtgtttggtatttcgatgtcggtttattatattttggggttgaagtaggttttaagggtatggttgttcgttatttaaagtggtacgcgagttgggtttagaacgtcgtgagatagttcggtttttatttgtcgtgggcgttggagaattgaggggggttgtttttagtacgagaggatcggagtggacgtattattggtgttcgggttgttatgttaatggtattgttcggtagttaaatgcggaagagataagtgttgaaagtatttaagtacgaaatttgtttcgagatgagttttttttgattttttaagggttttgaa

SEQ ID NO: 31250 - DNA, 637 bp, Artificial Sequence
  chemically treated genomic DNA (Homo sapiens) CpG-island No: 31250
ttcaaaacccttaaaaaatcaaaaaaaactcatctcgaaacaaatttcgtacttaaatactttcaacacttatctcttccgcatttaactaccgaacaataccattaacataacaacccgaacaccaataatacgtccactccgatcctctcgtactaaaaacaacccccctcaattctccaacgcccacgacaaataaaaaccgaactatctcacgacgttctaaacccaactcgcgtaccactttaaataacgaacaaccatacccttaaaacctacttcaaccccaaaatataataaaccgacatcgaaataccaaacaccgccgtcgatataaactcttaaacgatatcaacctattatccccgaaataccttttatccgttaaacgataacccttccaatacctataccgacaacgacgaataaaaactaatacgacgactaatatccacttcccaaaaacgcaaaaaaaaatcccccgacccctaatacgcaaatatataacccaacgaccaacgatacgcgccaacataaaactacccgccgcgaataattccctacaaacgattcacttcgcccataaattcgaacacaaaacgaatcgccgattcgcgccatacctaatccgacgcgt

SEQ ID NO: 31251 - DNA, 637 bp, Artificial Sequence
  chemically treated genomic DNA (Homo sapiens) CpG-island No: 31251
tttaggatttttaaagggttagggagaatttatttcggggtaagtttcgtgtttagatgtttttagtatttatttttttcgtatttagttatcgggtagtgttattggtatgataattcgaatattagtgatgcgtttatttcggttttttcgtattaggagtagttttttttagttttttagcgtttacggtagatagggatcgaattgttttacgacgttttaaatttagttcgcgtattattttaaatggcgaatagttatatttttgggatttattttagttttaggatgtgatgagtcgatatcgaggtgttaaatatcgtcgtcgatatgaatttttgggcggtattagtttgttattttcggagtattttttattcgttgagcgatggtttttttagtatttgtatcggtagcggcgaatagaggttggtacggcggttgatatttattttttaagggcgtaggaagagatttttcggtttttgatacgtaggtgtgtagtttagcggttagcgatgcgcgttaatatggaattgttcgtcgcgaatggttttttgtaggcggtttatttcgtttataaattcgagtataaaacgggtcgtcggttcgcgttatatttgattcggcgcgt

SEQ ID NO: 31252 - DNA, 637 bp, Artificial Sequence
  chemically treated genomic DNA (Homo sapiens) CpG-island No: 31252
acgcgccgaatcaaatataacgcgaaccgacgacccgttttatactcgaatttataaacgaaataaaccgcctacaaaaaaccattcgcgacgaacaattccatattaacgcgcatcgctaaccgctaaactacacacctacgtatcaaaaaccgaaaaatctcttcctacgcccttaaaaaataaatatcaaccgccgtaccaacctctattcgccgctaccgatacaaatactaaaaaaaccatcgctcaacgaataaaaaatactccgaaaataacaaactaataccgcccaaaaattcatatcgacgacgatatttaacacctcgatatcgactcatcacatcctaaaactaaaataaatcccaaaaatataactattcgccatttaaaataatacgcgaactaaatttaaaacgtcgtaaaacaattcgatccctatctaccgtaaacgctaaaaaactaaaaaaaactactcctaatacgaaaaaaccgaaataaacgcatcactaatattcgaattatcataccaataacactacccgataactaaatacgaaaaaaataaatactaaaaacatctaaacacgaaacttaccccgaaataaattctccctaaccctttaaaaatcctaaa

SEQ ID NO: 31253 - DNA, 508 bp, Artificial Sequence
  chemically treated genomic DNA (Homo sapiens) CpG-island No: 31253
ttggcgggatcgtttcgcgtcgcgcgttaggtgggcggtgtgttaaagcgtttttttgaaggtagtattttattttggtatcgggtggttaatcgttacggtataatttcgttaatcggatcggatttatagcgttagcgataggtattattggtagaaggtgtgatggtatcgggaagcgggtaaatcgatttgtagcgttatcgttggaattattaatttttttcgggcggagagggttaacgtcgtttaatattgcgtaggagttggaattgtcgaagacggatttatttgagttggtgaagtcgaaggtacggtagtcgttgcgttatcgttggtttgaatcggtacggcggtttgttgtatcggtattaatgttaggtcggttttagtttcgttttggttgattatcggttgaacggtatcggtgataaatattagtttgttatttacggtaatcgtcgtatttaatagaatacgcgcgttcggttgaatatttgtcgggtta

SEQ ID NO: 31254 - DNA, 508 bp, Artificial Sequence
  chemically treated genomic DNA (Homo sapiens) CpG-island No: 31254
taacccgacaaatattcaaccgaacgcgcgtattctattaaatacgacgattaccgtaaataacaaactaatatttatcaccgataccgttcaaccgataatcaaccaaaacgaaactaaaaccgacctaacattaataccgatacaacaaaccgccgtaccgattcaaaccaacgataacgcaacgactaccgtaccttcgacttcaccaactcaaataaatccgtcttcgacaattccaactcctacgcaatattaaacgacgttaaccctctccgcccgaaaaaaattaataattccaacgataacgctacaaatcgatttacccgcttcccgataccatcacaccttctaccaataatacctatcgctaacgctataaatccgatccgattaacgaaattataccgtaacgattaaccacccgataccaaaataaaatactaccttcaaaaaaacgctttaacacaccgcccacctaacgcgcgacgcgaaacgatcccgccaa

SEQ ID NO: 31255 - DNA, 508 bp, Artificial Sequence
  chemically treated genomic DNA (Homo sapiens) CpG-island No: 31255
taattcggtagatgtttagtcgaacgcgcgtattttgttgagtgcggcgattatcgtgaatgataaattggtatttattatcgatatcgtttagtcggtgattaattagggcggaattaaagtcgatttgatattggtgtcggtatagtaaatcgtcgtgtcggtttaggttagcggtggcgtaacgattatcgtattttcgattttattaatttaggtgaattcgttttcggtagttttagtttttacgtaatattaagcgacgttaatttttttcgttcggagagggttagtagttttagcgataacgttgtaagtcgatttgttcgtttttcgatattattatattttttgttagtaatgtttgtcgttgacgttgtaaattcggttcggttagcgaaattgtgtcgtggcgattaattattcggtgttagggtaaggtgttgtttttagggagacgttttaatatatcgtttatttggcgcgcggcgcggggcgatttcgttag

SEQ ID NO: 31256 - DNA, 508 bp, Artificial Sequence
  chemically treated genomic DNA (Homo sapiens) CpG-island No: 31256
ctaacgaaatcgccccgcgccgcgcgccaaataaacgatatattaaaacgtctccctaaaaacaacaccttaccctaacaccgaataattaatcgccacgacacaatttcgctaaccgaaccgaatttacaacgtcaacgacaaacattactaacaaaaaatataataatatcgaaaaacgaacaaatcgacttacaacgttatcgctaaaactactaaccctctccgaacgaaaaaaattaacgtcgcttaatattacgtaaaaactaaaactaccgaaaacgaattcacctaaattaataaaatcgaaaatacgataatcgttacgccaccgctaacctaaaccgacacgacgatttactataccgacaccaatatcaaatcgactttaattccgccctaattaatcaccgactaaacgatatcgataataaataccaatttatcattcacgataatcgccgcactcaacaaaatacgcgcgttcgactaaacatctaccgaatta

SEQ ID NO: 31257 - DNA, 509 bp, Artificial Sequence
  chemically treated genomic DNA (Homo sapiens) CpG-island No: 31257
aagcggtagaagcgttgcgtgtttagggttttcgttagttgtcggtagtgattgttggcgattttagttggtttggttttcgttcggatatgattaatcgtttgtatttagcgttatacgcggttagtgtatgagttagttcgtttatttttttagtagtttcgaaaatacgtagcgttttatcgaacgtttaggtttgttcgcggtgcgtatttcgtttaatgagcgggaacggatttaggtagacgagttttatattttgatcgtgtttttttacggcggcggcggtacggttggcgcggtgttacgataggtaattcgttttttaaacgacgagtataatcgggcgttgtttcgcggcgttattgtttttggtaatcgtaattttggtgaggcgtatggtcgcgtcggagatgtgattgttcggaaatgcggcgtgtcgtggttgtatcgttttgaatttatgggtacgtaaagcgatatcgaaaacgttcgtaaaggagtaatcg

SEQ ID NO: 31258 - DNA, 509 bp, Artificial Sequence
  chemically treated genomic DNA (Homo sapiens) CpG-island No: 31258
cgattactcctttacgaacgttttcgatatcgctttacgtacccataaattcaaaacgatacaaccacgacacgccgcatttccgaacaatcacatctccgacgcgaccatacgcctcaccaaaattacgattaccaaaaacaataacgccgcgaaacaacgcccgattatactcgtcgtttaaaaaacgaattacctatcgtaacaccgcgccaaccgtaccgccgccgccgtaaaaaaacacgatcaaaatataaaactcgtctacctaaatccgttcccgctcattaaacgaaatacgcaccgcgaacaaacctaaacgttcgataaaacgctacgtattttcgaaactactaaaaaaataaacgaactaactcatacactaaccgcgtataacgctaaatacaaacgattaatcatatccgaacgaaaaccaaaccaactaaaatcgccaacaatcactaccgacaactaacgaaaaccctaaacacgcaacgcttctaccgctt

SEQ ID NO: 31259 - DNA, 509 bp, Artificial Sequence
  chemically treated genomic DNA (Homo sapiens) CpG-island No: 31259
cggttatttttttacgaacgttttcgatatcgttttgcgtatttatgagtttaaaacggtatagttacggtacgtcgtattttcgggtaattatattttcggcgcggttatacgttttattaaagttgcgattattagaagtaataacgtcgcgaagtaacgttcggttgtgttcgtcgtttaaaaagcgaattatttgtcgtggtatcgcgttagtcgtatcgtcgtcgtcgtaagagggtacgattaggatgtaaggttcgtttatttgaattcgttttcgtttattgagcgggatgcgtatcgcgggtagatttaaacgttcgataaaacgttgcgtgttttcggagttgttggagaagtagacgagttggtttatgtattggtcgcgtgtggcgttggatgtagacggttaattatgttcggacggaaattagattagttaagatcgttagtaattattatcggtaattgacgaaagttttgagtacgtaacgtttttgtcgttt

SEQ ID NO: 31260 - DNA, 509 bp, Artificial Sequence
  chemically treated genomic DNA (Homo sapiens) CpG-island No: 31260
aaacgacaaaaacgttacgtactcaaaactttcgtcaattaccgataataattactaacgatcttaactaatctaatttccgtccgaacataattaaccgtctacatccaacgccacacgcgaccaatacataaaccaactcgtctacttctccaacaactccgaaaacacgcaacgttttatcgaacgtttaaatctacccgcgatacgcatcccgctcaataaacgaaaacgaattcaaataaacgaaccttacatcctaatcgtaccctcttacgacgacgacgatacgactaacgcgataccacgacaaataattcgctttttaaacgacgaacacaaccgaacgttacttcgcgacgttattacttctaataatcgcaactttaataaaacgtataaccgcgccgaaaatataattacccgaaaatacgacgtaccgtaactataccgttttaaactcataaatacgcaaaacgatatcgaaaacgttcgtaaaaaaataaccg

SEQ ID NO: 31261 - DNA, 903 bp, Artificial Sequence
  chemically treated genomic DNA (Homo sapiens) CpG-island No: 31261
  unsure (838)
tgtttcgtaggtgtcggtgaattttttgaaagtttggcgcgacggggacgtggcgaaagcggtcgggtattattagattttgttgtaaatttcgtagatgtattagttggatacgtcgtttgtgaacgtgattaaagaggcgatcgtgttttgcggtcgttttgtttttacgtacgtgttgtcgttcgtttcgtcgttggacgagtcgcgtaaggcgtagttgaaaattttgttgtaatagtttaagttttgttgagtcggacgataacgatgattattgagaaaatttttatttcgtaggacgacgcgttttatgcggtgattatttacgcggcggggtcgtagggcgttttgtcgttgatttcgtagatgttgatggaattttttagcggtaatttgttcggtatgacgtagaacgtcgggatgggttgggacgttaataagtttatcggtaaagaggtgttgattatcggtatttagggcggtattcgcgtcggagacggacgtttaatcgcgttgggttattatatcgggtattgggagatcggtatgtagatgtaggcggcggcgaaggagattattcgtaatggcgggatttcgttcgcggttttcgttagcgattcgtgcgacgggcgttcgtagggtacgtacggtatgttcgattttttgtcgtatcgtaacgacgcggcgatcgtgtttcgtcgtttgattcgttttttgtcgacgcggcgggcggtgatcggcgtacgatttgcgataaagggttgttcgttattatgattgcgttggtcgcgatgtacgatttgtcgattattttggtgtcggcggggcgacgttngcgtcggacgtcgggaagacgcgggtagtgtaaatttcggcgcgcgtttgtaatacgaatttttt

SEQ ID NO: 31262 - DNA, 903 bp, Artificial Sequence
  chemically treated genomic DNA (Homo sapiens) CpG-island No: 31262
  unsure (66)
aaaaaattcgtattacaaacgcgcgccgaaatttacactacccgcgtcttcccgacgtccgacgcnaacgtcgccccgccgacaccaaaataatcgacaaatcgtacatcgcgaccaacgcaatcataataacgaacaaccctttatcgcaaatcgtacgccgatcaccgcccgccgcgtcgacaaaaaacgaatcaaacgacgaaacacgatcgccgcgtcgttacgatacgacaaaaaatcgaacataccgtacgtaccctacgaacgcccgtcgcacgaatcgctaacgaaaaccgcgaacgaaatcccgccattacgaataatctccttcgccgccgcctacatctacataccgatctcccaatacccgatataataacccaacgcgattaaacgtccgtctccgacgcgaataccgccctaaataccgataatcaacacctctttaccgataaacttattaacgtcccaacccatcccgacgttctacgtcataccgaacaaattaccgctaaaaaattccatcaacatctacgaaatcaacgacaaaacgccctacgaccccgccgcgtaaataatcaccgcataaaacgcgtcgtcctacgaaataaaaattttctcaataatcatcgttatcgtccgactcaacaaaacttaaactattacaacaaaattttcaactacgccttacgcgactcgtccaacgacgaaacgaacgacaacacgtacgtaaaaacaaaacgaccgcaaaacacgatcgcctctttaatcacgttcacaaacgacgtatccaactaatacatctacgaaatttacaacaaaatctaataatacccgaccgctttcgccacgtccccgtcgcgccaaactttcaaaaaattcaccgacacctacgaaaca

SEQ ID NO: 31263 - DNA, 903 bp, Artificial Sequence
  chemically treated genomic DNA (Homo sapiens) CpG-island No: 31263
  unsure (66)
aggagattcgtgttgtaaacgcgcgtcgaggtttgtattgttcgcgttttttcgacgttcggcgtnagcgtcgtttcgtcggtattagaatagtcggtaggtcgtgtatcgcggttagcgtaattatggtggcgggtagttttttatcgtaggtcgtacgtcgattatcgttcgtcgcgtcggtagggagcggattaggcggcgaaatacgatcgtcgcgtcgttgcggtacggtagggaatcgaatatatcgtgcgtgttttgcgagcgttcgtcgtacggatcgttgacgaaggtcgcgaacgggatttcgttattgcgggtgatttttttcgtcgtcgtttgtatttgtatgtcgattttttaatgttcggtgtggtagtttagcgcgattgggcgttcgttttcggcgcggatgtcgttttgagtgtcgataattagtatttttttgtcggtgagtttgttggcgttttagtttatttcggcgttttgcgttatgtcgaataggttgtcgttgggagattttattagtatttgcggggttagcggtagagcgttttgcggtttcgtcgcgtgggtgattatcgtataaaacgcgtcgttttgcggggtgaaaatttttttaatggttatcgttatcgttcggtttagtaaagtttgagttgttgtagtagggtttttagttgcgttttgcgcggttcgtttagcggcgaggcgggcggtagtacgtgcgtggagataggacgatcgtagagtacgatcgtttttttaattacgtttataaacggcgtatttagttgatatatttgcggaatttgtagtaaggtttgatgatattcggtcgttttcgttacgttttcgtcgcgttaggtttttagaagatttatcgatatttgcggggta

SEQ ID NO: 31264 - DNA, 903 bp, Artificial Sequence
  chemically treated genomic DNA (Homo sapiens) CpG-island No: 31264
  unsure (838)
taccccgcaaatatcgataaatcttctaaaaacctaacgcgacgaaaacgtaacgaaaacgaccgaatatcatcaaaccttactacaaattccgcaaatatatcaactaaatacgccgtttataaacgtaattaaaaaaacgatcgtactctacgatcgtcctatctccacgcacgtactaccgcccgcctcgccgctaaacgaaccgcgcaaaacgcaactaaaaaccctactacaacaactcaaactttactaaaccgaacgataacgataaccattaaaaaaattttcaccccgcaaaacgacgcgttttatacgataatcacccacgcgacgaaaccgcaaaacgctctaccgctaaccccgcaaatactaataaaatctcccaacgacaacctattcgacataacgcaaaacgccgaaataaactaaaacgccaacaaactcaccgacaaaaaaatactaattatcgacactcaaaacgacatccgcgccgaaaacgaacgcccaatcgcgctaaactaccacaccgaacattaaaaaatcgacatacaaatacaaacgacgacgaaaaaaatcacccgcaataacgaaatcccgttcgcgaccttcgtcaacgatccgtacgacgaacgctcgcaaaacacgcacgatatattcgattccctaccgtaccgcaacgacgcgacgatcgtatttcgccgcctaatccgctccctaccgacgcgacgaacgataatcgacgtacgacctacgataaaaaactacccgccaccataattacgctaaccgcgatacacgacctaccgactattctaataccgacgaaacgacgctnacgccgaacgtcgaaaaaacgcgaacaatacaaacctcgacgcgcgtttacaacacgaatctcct

SEQ ID NO: 31265 - DNA, 769 bp, Artificial Sequence
  chemically treated genomic DNA (Homo sapiens) CpG-island No: 31265
gtaatatggttggcgaggttagaggcgaggaataaaatcgtgttggcgattttttgtggacgggcgattttttttagcggaatgtcgagtttaaattgttcgttaaagtcgcgaatacgttgtttttcggcgttatcgtttatttatagcgtgcgttgtatatcggtgtcggtggagttaggcgaaattatattatagcgtacgtcgttattcgttagttttagttcgacgtttaacgttaggttttttagcgtcgttttcgatgcgttataagtatttatgttaatacgcggcgtgtgcgcggcgtcggacgttatagtgataatcgtttcgtttcgttgacggcgaaattggtttatggtttgttggaataggttaaacgtatcgtcgacgtttatcgtaaaagtttgttgttagttttttttattgagttgatcggtcgcgtttatgcgtaaaattttcgtcgtattgattagcgcgtttagtcgtttcgttttagttaatagtcgttgatatatttgcgcgatttgcgtagcgtcggtaatatttattatttcggtcgtaaagggatattgtttttgagtgaacgtttgattaaaatttgtaattttcgttttcgttttaataaacgttagcgtcgtggcgtagtcgatattttatttgcgtcggttatttagatatttttatcgttgaaatttattattttatttcgcgggagagtagtttttattaggcgtcgatggtcgggtttttcgttagtatgataaag

SEQ ID NO: 31266 - DNA, 769 bp, Artificial Sequence
  chemically treated genomic DNA (Homo sapiens) CpG-island No: 31266
ctttatcatactaacgaaaaacccgaccatcgacgcctaataaaaactactctcccgcgaaataaaataataaatttcaacgataaaaatatctaaataaccgacgcaaataaaatatcgactacgccacgacgctaacgtttattaaaacgaaaacgaaaattacaaattttaatcaaacgttcactcaaaaacaatatccctttacgaccgaaataataaatattaccgacgctacgcaaatcgcgcaaatatatcaacgactattaactaaaacgaaacgactaaacgcgctaatcaatacgacgaaaattttacgcataaacgcgaccgatcaactcaataaaaaaaactaacaacaaacttttacgataaacgtcgacgatacgtttaacctattccaacaaaccataaaccaatttcgccgtcaacgaaacgaaacgattatcactataacgtccgacgccgcgcacacgccgcgtattaacataaatacttataacgcatcgaaaacgacgctaaaaaacctaacgttaaacgtcgaactaaaactaacgaataacgacgtacgctataatataatttcgcctaactccaccgacaccgatatacaacgcacgctataaataaacgataacgccgaaaaacaacgtattcgcgactttaacgaacaatttaaactcgacattccgctaaaaaaaatcgcccgtccacaaaaaatcgccaacacgattttattcctcgcctctaacctcgccaaccatattac

SEQ ID NO: 31267 - DNA, 769 bp, Artificial Sequence
  chemically treated genomic DNA (Homo sapiens) CpG-island No: 31267
ttttgttatgttggcgaaaaattcgattatcgacgtttggtggaagttattttttcgcgaggtgaaataatggattttagcggtaaaaatgtttgggtaatcggcgtaggtaaggtatcggttacgttacggcgttggcgtttgttgaggcgggagcgaaagttataggttttgattaagcgtttatttaggagtaatatttttttgcgatcgaagtgatggatgttgtcgacgttgcgtaggtcgcgtaagtgtgttagcgattgttagttgaaacggagcgattggacgcgttggttaatgcggcgggaattttacgtatgggcgcgatcgattagtttagtaaagaggattggtagtagatttttgcggtaaacgtcggcggtgcgtttaatttgttttagtaaattatgaattagtttcgtcgttagcggggcggggcgattgttattgtggcgttcgacgtcgcgtatacgtcgcgtattggtatgagtgtttatggcgtatcgaaagcggcgttgaaaagtttggcgttgagcgtcgggttggaattggcgggtagcggcgtgcgttgtaatgtggtttcgtttggttttatcgatatcgatatgtaacgtacgttgtgggtgagcgatgacgtcgaagaatagcgtattcgcggttttggcgagtagtttaaattcggtatttcgttggggaaaatcgttcgtttataagagatcgttaatacgattttgtttttcgtttttgatttcgttagttatattat

SEQ ID NO: 31268 - DNA, 769 bp, Artificial Sequence
  chemically treated genomic DNA (Homo sapiens) CpG-island No: 31268
ataatataactaacgaaatcaaaaacgaaaaacaaaatcgtattaacgatctcttataaacgaacgattttccccaacgaaataccgaatttaaactactcgccaaaaccgcgaatacgctattcttcgacgtcatcgctcacccacaacgtacgttacatatcgatatcgataaaaccaaacgaaaccacattacaacgcacgccgctacccgccaattccaacccgacgctcaacgccaaacttttcaacgccgctttcgatacgccataaacactcataccaatacgcgacgtatacgcgacgtcgaacgccacaataacaatcgccccgccccgctaacgacgaaactaattcataatttactaaaacaaattaaacgcaccgccgacgtttaccgcaaaaatctactaccaatcctctttactaaactaatcgatcgcgcccatacgtaaaattcccgccgcattaaccaacgcgtccaatcgctccgtttcaactaacaatcgctaacacacttacgcgacctacgcaacgtcgacaacatccatcacttcgatcgcaaaaaaatattactcctaaataaacgcttaatcaaaacctataactttcgctcccgcctcaacaaacgccaacgccgtaacgtaaccgataccttacctacgccgattacccaaacatttttaccgctaaaatccattatttcacctcgcgaaaaaataacttccaccaaacgtcgataatcgaatttttcgccaacataacaaaa

SEQ ID NO: 31269 - DNA, 506 bp, Artificial Sequence
  chemically treated genomic DNA (Homo sapiens) CpG-island No: 31269
cgttaattttcgtcgttttcgttattttatttattagcgtggtgatcgtgtttttgtcgttagaatcggtaatcgttataatcggtgtttgtgtttcgcgatagaatagttcgatatcgttaacgatttcgatttcggtattagcggtagcgtttaaggatggatgcgttagtgtaattatcgggattggcgataattagatttgtcgttattagttatttattatttagattgttcgtgtggcgtttacggtttcgggtaattatttaggttaggcggtgttatacgcgtatttataacgcgcggcgttatatcgcgagcgaggaaaaagtttacgtaggaaagttcggtgaggtttaggtcgataatgacgcgtttcgttagtgatgatgtagaaacgggttattttagaggtcgtattcgtcgtggtattgatggcgattatcggtagttgcggttttgtagagcggttaacgttttcgtaatcgcgaatatcgtcgttattg

SEQ ID NO: 31270 - DNA, 506 bp, Artificial Sequence
  chemically treated genomic DNA (Homo sapiens) CpG-island No: 31270
caataacgacgatattcgcgattacgaaaacgttaaccgctctacaaaaccgcaactaccgataatcgccatcaataccacgacgaatacgacctctaaaataacccgtttctacatcatcactaacgaaacgcgtcattatcgacctaaacctcaccgaactttcctacgtaaactttttcctcgctcgcgatataacgccgcgcgttataaatacgcgtataacaccgcctaacctaaataattacccgaaaccgtaaacgccacacgaacaatctaaataataaataactaataacgacaaatctaattatcgccaatcccgataattacactaacgcatccatccttaaacgctaccgctaataccgaaatcgaaatcgttaacgatatcgaactattctatcgcgaaacacaaacaccgattataacgattaccgattctaacgacaaaaacacgatcaccacgctaataaataaaataacgaaaacgacgaaaattaacg

SEQ ID NO: 31271 - DNA, 506 bp, Artificial Sequence
  chemically treated genomic DNA (Homo sapiens) CpG-island No: 31271
taatggcggcgatattcgcgattacgaaggcgttgatcgttttgtaaaatcgtagttgtcgatgatcgttattaatattacggcgggtacggtttttgaaatgattcgtttttgtattattattgacgaagcgcgttattatcggtttgggttttatcgggtttttttgcgtggatttttttttcgttcgcggtgtgacgtcgcgcgttatggatacgcgtatgatatcgtttggtttggataattattcgaagtcgtaaacgttatacgggtagtttgaatgatgaatggttgatggcggtagatttgattgtcgttagtttcggtaattgtattggcgtatttatttttaagcgttgtcgttgatgtcggaatcgaaatcgttggcgatatcgagttgttttgtcgcgaagtataagtatcgattgtggcgattatcggttttaacggtaaaagtacggttattacgttagtgggtgaaatggcgaaagcggcgggggttaacg

SEQ ID NO: 31272 - DNA, 506 bp, Artificial Sequence
  chemically treated genomic DNA (Homo sapiens) CpG-island No: 31272
cgttaacccccgccgctttcgccatttcacccactaacgtaataaccgtacttttaccgttaaaaccgataatcgccacaatcgatacttatacttcgcgacaaaacaactcgatatcgccaacgatttcgattccgacatcaacgacaacgcttaaaaataaatacgccaatacaattaccgaaactaacgacaatcaaatctaccgccatcaaccattcatcattcaaactacccgtataacgtttacgacttcgaataattatccaaaccaaacgatatcatacgcgtatccataacgcgcgacgtcacaccgcgaacgaaaaaaaaatccacgcaaaaaaacccgataaaacccaaaccgataataacgcgcttcgtcaataataatacaaaaacgaatcatttcaaaaaccgtacccgccgtaatattaataacgatcatcgacaactacgattttacaaaacgatcaacgccttcgtaatcgcgaatatcgccgccatta

SEQ ID NO: 31273 - DNA, 590 bp, Artificial Sequence
  chemically treated genomic DNA (Homo sapiens) CpG-island No: 31273
agggtcgcgtttcgagcggttagagcggttagagggcgagttgcgcggcgtagcgcggcggggaggtaagatggcgtcgtgtttggcgtttttttttggtcgttgttagtttcgttgtttttttttttcgttaggttagcgcggtatttcgttttttgcggcgttcggggttatttttgatggtttagtttggggaattgggtttttcggcggtcgggagtcgtaggataagatggcgttcgtagtacgtttaggttttgcgggtcggggtcgggagtttcgaggcggtcgggataaaggcggtagcgtgcgggcgcgtgggggcggggcggggcggggcggggcggggcgtcgcgcgtcgttcgttgtaggggtttcgcgagagattggcgtcgcgttttcggtttgttgttttggggattcgattaacgtggtgggggttagagcggcgagcggttttggagaaggggaggttgggcgggttagttatcggtcgtttcgcggaagaacgtagataaggattttgggtaaggttaaagtttttttggttttttgtgtgatatgttttttttttttatttttcgtttttt

SEQ ID NO: 31274 - DNA, 590 bp, Artificial Sequence
  chemically treated genomic DNA (Homo sapiens) CpG-island No: 31274
aaaaaacgaaaaataaaaaaaaaaaacatatcacacaaaaaaccaaaaaaactttaaccttacccaaaatccttatctacgttcttccgcgaaacgaccgataactaacccgcccaacctccccttctccaaaaccgctcgccgctctaacccccaccacgttaatcgaatccccaaaacaacaaaccgaaaacgcgacgccaatctctcgcgaaacccctacaacgaacgacgcgcgacgccccgccccgccccgccccgccccgcccccacgcgcccgcacgctaccgcctttatcccgaccgcctcgaaactcccgaccccgacccgcaaaacctaaacgtactacgaacgccatcttatcctacgactcccgaccgccgaaaaacccaattccccaaactaaaccatcaaaaataaccccgaacgccgcaaaaaacgaaataccgcgctaacctaacgaaaaaaaaaaacaacgaaactaacaacgaccaaaaaaaaacgccaaacacgacgccatcttacctccccgccgcgctacgccgcgcaactcgccctctaaccgctctaaccgctcgaaacgcgaccct

SEQ ID NO: 31275 - DNA, 590 bp, Artificial Sequence
  chemically treated genomic DNA (Homo sapiens) CpG-island No: 31275
agagggcgagaggtgaagggggaaggtatgttatataaaagattaaaagggttttaattttgtttaaagtttttgtttgcgttttttcgcggggcgatcggtggttaattcgtttagtttttttttttttagaatcgttcgtcgttttggtttttattacgttggtcgaatttttagagtagtagatcggaagcgcggcgttagtttttcgcgggatttttgtaacgaacggcgcgcggcgtttcgtttcgtttcgtttcgtttcgtttttacgcgttcgtacgttgtcgtttttgtttcggtcgtttcggagttttcggtttcggttcgtaaagtttaggcgtgttgcgagcgttattttgttttacggttttcggtcgtcggagaatttagttttttaagttgagttattaagagtgatttcggacgtcgtaggagacgaagtgtcgcgttgatttgacggaaagggggagtagcgaagttaatagcggttaaggggaagcgttaggtacggcgttattttattttttcgtcgcgttgcgtcgcgtagttcgttttttggtcgttttggtcgttcggagcgcggtttt

SEQ ID NO: 31276 - DNA, 590 bp, Artificial Sequence
  chemically treated genomic DNA (Homo sapiens) CpG-island No: 31276
aaaaccgcgctccgaacgaccaaaacgaccaaaaaacgaactacgcgacgcaacgcgacgaaaaaataaaataacgccgtacctaacgcttccccttaaccgctattaacttcgctactccccctttccgtcaaatcaacgcgacacttcgtctcctacgacgtccgaaatcactcttaataactcaacttaaaaaactaaattctccgacgaccgaaaaccgtaaaacaaaataacgctcgcaacacgcctaaactttacgaaccgaaaccgaaaactccgaaacgaccgaaacaaaaacgacaacgtacgaacgcgtaaaaacgaaacgaaacgaaacgaaacgaaacgccgcgcgccgttcgttacaaaaatcccgcgaaaaactaacgccgcgcttccgatctactactctaaaaattcgaccaacgtaataaaaaccaaaacgacgaacgattctaaaaaaaaaaaaactaaacgaattaaccaccgatcgccccgcgaaaaaacgcaaacaaaaactttaaacaaaattaaaacccttttaatcttttatataacataccttcccccttcacctctcgccctct

SEQ ID NO: 31277 - DNA, 685 bp, Artificial Sequence
  chemically treated genomic DNA (Homo sapiens) CpG-island No: 31277
agtgagttgtggtagtatttgtcgaatgttgtcggcggtggagataatgttagtatcgggttggcgttgaatatttattataatggtttgttttttgttcgtttacgcgtcgagttagttgttttttgtattttgttttatagttgcgatatcgtttagacgaattggcgcgtcgttttggtaggcgatgattagttggcgatatttttcgtcggattgtatttggtcgttcgcggaaagtcgtgatcgtacgggaagggtcgtcgaggttattttttgtcgagttaacgttagcgtcggtaatggtcggtgcgtacggtttcgttggttaggtcgaggtcggtaatcgtttgagcgttaagtttgacgcgaatagtcggacgttgatcgtcggaaagcgttattaggtcgacgtcggaaatattgcgagatttttttgcgcgatagcgggtttttattatattttttatttgcgttatcggtatggcggttgaggtgacggcgagtcgttatgatcggcggatttgatcgggtttattgtgttgtaaatcggcgggttacggtagatcgttcggttaatatagttggtcgtagcgttaatcgcggtttgtattttttgttcggtagatatcgagcggtaatgttagttggaattgtaaagtgataattgacgtatcgttaggaa

SEQ ID NO: 31278 - DNA, 685 bp, Artificial Sequence
  chemically treated genomic DNA (Homo sapiens) CpG-island No: 31278
ttcctaacgatacgtcaattatcactttacaattccaactaacattaccgctcgatatctaccgaacaaaaaatacaaaccgcgattaacgctacgaccaactatattaaccgaacgatctaccgtaacccgccgatttacaacacaataaacccgatcaaatccgccgatcataacgactcgccgtcacctcaaccgccataccgataacgcaaataaaaaatataataaaaacccgctatcgcgcaaaaaaatctcgcaatatttccgacgtcgacctaataacgctttccgacgatcaacgtccgactattcgcgtcaaacttaacgctcaaacgattaccgacctcgacctaaccaacgaaaccgtacgcaccgaccattaccgacgctaacgttaactcgacaaaaaataacctcgacgacccttcccgtacgatcacgactttccgcgaacgaccaaatacaatccgacgaaaaatatcgccaactaatcatcgcctaccaaaacgacgcgccaattcgtctaaacgatatcgcaactataaaacaaaatacaaaaaacaactaactcgacgcgtaaacgaacaaaaaacaaaccattataataaatattcaacgccaacccgatactaacattatctccaccgccgacaacattcgacaaatactaccacaactcact

SEQ ID NO: 31279 - DNA, 685 bp, Artificial Sequence
  chemically treated genomic DNA (Homo sapiens) CpG-island No: 31279
tttttggcggtgcgttagttattattttgtagttttagttaatattatcgttcgatgtttgtcgagtaggaagtgtaggtcgcgattaacgttgcgattaattatgttgatcgagcgatttgtcgtaattcgtcggtttatagtatagtgaattcggttagattcgtcgattatgacgattcgtcgttattttaatcgttatgtcgatgacgtaagtggaagatatggtggaaattcgttgtcgcgtagaagaatttcgtagtattttcggcgtcggtttggtgacgtttttcggcggttagcgttcggttgttcgcgttaaatttaacgtttaggcgattgtcgatttcggtttgattagcgaaatcgtgcgtatcgattattatcggcgttaacgttaattcggtaaaaggtagtttcgacggtttttttcgtgcggttacgatttttcgcgaacgattagatgtaattcgacgaagagtatcgttagttaattatcgtttattagaacggcgcgttaattcgtttgggcgatgtcgtaattgtagagtaaggtgtagaaaatagttggttcggcgcgtgggcgaataaagaataggttattgtgatgaatgtttagcgttagttcggtgttaatattatttttatcgtcgatagtattcggtagatgttgttatagtttatt

SEQ ID NO: 31280 - DNA, 685 bp, Artificial Sequence
  chemically treated genomic DNA (Homo sapiens) CpG-island No: 31280
aataaactataacaacatctaccgaatactatcgacgataaaaataatattaacaccgaactaacgctaaacattcatcacaataacctattctttattcgcccacgcgccgaaccaactattttctacaccttactctacaattacgacatcgcccaaacgaattaacgcgccgttctaataaacgataattaactaacgatactcttcgtcgaattacatctaatcgttcgcgaaaaatcgtaaccgcacgaaaaaaaccgtcgaaactaccttttaccgaattaacgttaacgccgataataatcgatacgcacgatttcgctaatcaaaccgaaatcgacaatcgcctaaacgttaaatttaacgcgaacaaccgaacgctaaccgccgaaaaacgtcaccaaaccgacgccgaaaatactacgaaattcttctacgcgacaacgaatttccaccatatcttccacttacgtcatcgacataacgattaaaataacgacgaatcgtcataatcgacgaatctaaccgaattcactatactataaaccgacgaattacgacaaatcgctcgatcaacataattaatcgcaacgttaatcgcgacctacacttcctactcgacaaacatcgaacgataatattaactaaaactacaaaataataactaacgcaccgccaaaaa

SEQ ID NO: 31281 - DNA, 622 bp, Artificial Sequence
  chemically treated genomic DNA (Homo sapiens) CpG-island No: 31281
atgcgtagtgattgttgaattatcgtagtttttgttagtaaagaatttaatttgtttttttttttagatagtatttagcgtttgcggcgtattatcgcgcgtttcgtcggtaatttttttcgttattttgtcgttgtcgatagcggtattcgttagttttagtagtagattaaatagtacggtataacggtttttacgttgttgtagacgcgcgtttagtaatgttagaatcggtagcgatattttttaaattttttacggtttcgttatgcggtagttgcgttaggtattttagatatagcggtagatggttcggtaattcgcggttgtttaattgtaagtcgtgttgttttgtattgcgttagtaggtttattatcgtttggtcgcggtcgcgggattcgtcgtgtatatgtttaaatagtaatagtgacgtggcgcggttacggtcgaatagttcgttgtatatgcgtttgggtatcgagcggatttatcgtcgttaaatcgcgtaggaaaatgtttagcgtatgggtattttttttttggtagatttttcgacgcggtaatcgttttaaatattttttgttgatgttgttataaggtagtattcgatatttaaggaga

SEQ ID NO: 31282 - DNA, 622 bp, Artificial Sequence
  chemically treated genomic DNA (Homo sapiens) CpG-island No: 31282
tctccttaaatatcgaatactaccttataacaacatcaacaaaaaatatttaaaacgattaccgcgtcgaaaaatctaccaaaaaaaaaatacccatacgctaaacattttcctacgcgatttaacgacgataaatccgctcgatacccaaacgcatatacaacgaactattcgaccgtaaccgcgccacgtcactattactatttaaacatatacacgacgaatcccgcgaccgcgaccaaacgataataaacctactaacgcaatacaaaacaacacgacttacaattaaacaaccgcgaattaccgaaccatctaccgctatatctaaaatacctaacgcaactaccgcataacgaaaccgtaaaaaatttaaaaaatatcgctaccgattctaacattactaaacgcgcgtctacaacaacgtaaaaaccgttataccgtactatttaatctactactaaaactaacgaataccgctatcgacaacgacaaaataacgaaaaaaattaccgacgaaacgcgcgataatacgccgcaaacgctaaatactatctaaaaaaaaaaacaaattaaattctttactaacaaaaactacgataattcaacaatcactacgcat

SEQ ID NO: 31283 - DNA, 622 bp, Artificial Sequence
  chemically treated genomic DNA (Homo sapiens) CpG-island No: 31283
tttttttgaatatcggatgttgttttatggtagtattaataagagatgtttgaggcgattgtcgcgtcgaaaaatttgttaagaagaggatgtttatgcgttgggtatttttttgcgcgatttaacgacgatggattcgttcgatgtttaggcgtatgtatagcgaattgttcgatcgtggtcgcgttacgttattgttgttgtttgaatatgtgtacggcgaatttcgcgatcgcggttaggcgatggtggatttgttggcgtagtatagagtagtacggtttgtagttaaatagtcgcgaattgtcggattatttgtcgttgtatttggagtatttggcgtagttgtcgtatagcgaagtcgtggaaggtttgaaagatatcgttgtcgattttggtattgttgagcgcgcgtttgtaatagcgtgaaagtcgttatgtcgtgttgtttgatttgttgttgaaattggcgaatatcgttatcgatagcgataaagtggcggaaaaaattgtcgacgaagcgcgcgatgatacgtcgtaggcgttggatgttgtttgggaagaagagtaggttaaattttttgttgataaaggttgcggtgatttagtaattattgcgtat

SEQ ID NO: 31284 - DNA, 622 bp, Artificial Sequence
  chemically treated genomic DNA (Homo sapiens) CpG-island No: 31284
atacgcaataattactaaatcaccgcaacctttatcaacaaaaaatttaacctactcttcttcccaaacaacatccaacgcctacgacgtatcatcgcgcgcttcgtcgacaattttttccgccactttatcgctatcgataacgatattcgccaatttcaacaacaaatcaaacaacacgacataacgactttcacgctattacaaacgcgcgctcaacaataccaaaatcgacaacgatatctttcaaaccttccacgacttcgctatacgacaactacgccaaatactccaaatacaacgacaaataatccgacaattcgcgactatttaactacaaaccgtactactctatactacgccaacaaatccaccatcgcctaaccgcgatcgcgaaattcgccgtacacatattcaaacaacaacaataacgtaacgcgaccacgatcgaacaattcgctatacatacgcctaaacatcgaacgaatccatcgtcgttaaatcgcgcaaaaaaatacccaacgcataaacatcctcttcttaacaaatttttcgacgcgacaatcgcctcaaacatctcttattaatactaccataaaacaacatccgatattcaaaaaaa

SEQ ID NO: 31285 - DNA, 516 bp, Artificial Sequence
  chemically treated genomic DNA (Homo sapiens) CpG-island No: 31285
ttaggcgattaaggcgattaacgggaagagattgtgtagggcgatattatgtggtgatcggcggcggtcgttcggtatcggtatggaagagatttattagttattttcgcgttaaagtatatttcgtggggtaagacggtgtcgtttattatcgatgcgcgtttttcgggcgtgtcgacgggcgtttgtttcggttacgtgtcgtcggaggcgttggcgggcgggtcgattggtaagttgcgcgataacgatattatcgagattgtcgtggatcgtttgacgttaattggtagcgtgaattttatcggtatcgcggataattcgttgacgtcggaagagggcgcgcgcgagttggcgcggcggtagacgtattcggatttgtacgtttacgattttttgtcggacgatattcggttgtgggcggtattgtagtcggtgagcggcggtatttggaaaggttgtatttatgatatcgataaaattatcgaggtaattaacgtcggtaaaaaagcgttt

SEQ ID NO: 31286 - DNA, 516 bp, Artificial Sequence
  chemically treated genomic DNA (Homo sapiens) CpG-island No: 31286
aaacgcttttttaccgacgttaattacctcgataattttatcgatatcataaatacaacctttccaaataccgccgctcaccgactacaataccgcccacaaccgaatatcgtccgacaaaaaatcgtaaacgtacaaatccgaatacgtctaccgccgcgccaactcgcgcgcgccctcttccgacgtcaacgaattatccgcgataccgataaaattcacgctaccaattaacgtcaaacgatccacgacaatctcgataatatcgttatcgcgcaacttaccaatcgacccgcccgccaacgcctccgacgacacgtaaccgaaacaaacgcccgtcgacacgcccgaaaaacgcgcatcgataataaacgacaccgtcttaccccacgaaatatactttaacgcgaaaataactaataaatctcttccataccgataccgaacgaccgccgccgatcaccacataatatcgccctacacaatctcttcccgttaatcgccttaatcgcctaa

SEQ ID NO: 31287 - DNA, 516 bp, Artificial Sequence
  chemically treated genomic DNA (Homo sapiens) CpG-island No: 31287
gagcgtttttttatcggcgttaattatttcgataattttatcggtgttataaatatagtttttttaggtgtcgtcgtttatcgattgtagtgtcgtttatagtcgggtgtcgttcggtaaaaagtcgtgggcgtgtaggttcgggtgcgtttgtcgtcgcgttagttcgcgcgcgttttttttcggcgttagcgggttgttcgcggtgtcgatgaagtttacgttgttagttaacgttagacgatttacggtaatttcgatgatgtcgttatcgcgtagtttgttaatcggttcgttcgttagcgttttcggcgatacgtggtcgaagtaggcgttcgtcgatacgttcgagaagcgcgtatcggtgatgagcgatatcgttttgttttacgagatatgttttagcgcggaggtagttggtaggttttttttatgtcggtgtcggacggtcgtcgtcgattattatatgatatcgttttgtataattttttttcgttgatcgttttgatcgtttgg

SEQ ID NO: 31288 - DNA, 516 bp, Artificial Sequence
  chemically treated genomic DNA (Homo sapiens) CpG-island No: 31288
ccaaacgatcaaaacgatcaacgaaaaaaaattatacaaaacgatatcatataataatcgacgacgaccgtccgacaccgacataaaaaaaacctaccaactacctccgcgctaaaacatatctcgtaaaacaaaacgatatcgctcatcaccgatacgcgcttctcgaacgtatcgacgaacgcctacttcgaccacgtatcgccgaaaacgctaacgaacgaaccgattaacaaactacgcgataacgacatcatcgaaattaccgtaaatcgtctaacgttaactaacaacgtaaacttcatcgacaccgcgaacaacccgctaacgccgaaaaaaaacgcgcgcgaactaacgcgacgacaaacgcacccgaacctacacgcccacgactttttaccgaacgacacccgactataaacgacactacaatcgataaacgacgacacctaaaaaaactatatttataacaccgataaaattatcgaaataattaacgccgataaaaaaacgctc

SEQ ID NO: 31289 - DNA, 800 bp, Artificial Sequence
  chemically treated genomic DNA (Homo sapiens) CpG-island No: 31289
gacgtttcgtttcgtttcgttttttttttttttttcgcgtcgggcgggttgttgtatcgtcgttattcgggcgcgcgcggggtcgcgcggacgcggttcgggtcgcgggtgtcgagaggtcgtcgggttattcgtattttcgtttttcgtttgacgtacggaggggtcgggacgcgatttgtcgcgagtgattggagtcgtagtcgtcgtcgttgttgtcgtcgtcgttcgggttcgtttcgtttttagttcgtttttttttcgtcgcgtttttcgttttcgttcgtatttcgatagcgtttttttgttttttttaacgtttcggagtcgtcggtcgttagcgttagcgttagttaggtgagtgtggtcgtcgttcggttcgggcgggagaagcgcgtaggtttcgcggtcgggtggtcggtttgggtcggtgtagtcggcggcggcggcggtagcgggttcggttttttttttttgcgcgggtcgcggggcggaggggttacgtagtgaaggaggggcgttttcgtttcgttatcgtttttgtttttaacgtttcgatcgtttttatcgttttgtcgttatagataaagcgtcggaggtgggagttttgcgggtcgtttttgttttcgcgtcgtttgtcgggtgcggtcgcggttcgtagagatcgggtcgcgcgttttttcgtttttgagcgtttttgtttatttttgggtgaaagggattcgaattgtgtaataggtttgggcgttagtttttattttttagcgggttttttttgttagcgtgtaggaattagatgt

SEQ ID NO: 31290 - DNA, 800 bp, Artificial Sequence
  chemically treated genomic DNA (Homo sapiens) CpG-island No: 31290
acatctaattcctacacgctaacaaaaaaaacccgctaaaaaataaaaactaacgcccaaacctattacacaattcgaatccctttcacccaaaaataaacaaaaacgctcaaaaacgaaaaaacgcgcgacccgatctctacgaaccgcgaccgcacccgacaaacgacgcgaaaacaaaaacgacccgcaaaactcccacctccgacgctttatctataacgacaaaacgataaaaacgatcgaaacgttaaaaacaaaaacgataacgaaacgaaaacgcccctccttcactacgtaacccctccgccccgcgacccgcgcaaaaaaaaaaaaccgaacccgctaccgccgccgccgccgactacaccgacccaaaccgaccacccgaccgcgaaacctacgcgcttctcccgcccgaaccgaacgacgaccacactcacctaactaacgctaacgctaacgaccgacgactccgaaacgttaaaaaaaacaaaaaaacgctatcgaaatacgaacgaaaacgaaaaacgcgacgaaaaaaaaacgaactaaaaacgaaacgaacccgaacgacgacgacaacaacgacgacgactacgactccaatcactcgcgacaaatcgcgtcccgacccctccgtacgtcaaacgaaaaacgaaaatacgaataacccgacgacctctcgacacccgcgacccgaaccgcgtccgcgcgaccccgcgcgcgcccgaataacgacgatacaacaacccgcccgacgcgaaaaaaaaaaaaaaaacgaaacgaaacgaaacgtc

SEQ ID NO: 31291 - DNA, 800 bp, Artificial Sequence
  chemically treated genomic DNA (Homo sapiens) CpG-island No: 31291
atatttggtttttgtacgttggtaaaagagattcgttggaaaataaggattaacgtttaaatttgttgtataattcgggttttttttatttagaaatgaataagggcgtttaggaacggaaaagcgcgcggttcggtttttgcgggtcgcggtcgtattcggtagacggcgcggaggtaaaggcggttcgtagggtttttattttcggcgttttgtttgtggcggtaaggcggtgggggcggtcggggcgttgggagtagaggcggtggcggggcgggggcgttttttttttattgcgtagttttttcgtttcgcggttcgcgtaggggaagaaagtcgggttcgttatcgtcgtcgtcgtcgattgtatcggtttaagtcggttattcggtcgcggggtttgcgcgtttttttcgttcgggtcgagcggcggttatatttatttggttggcgttgacgttagcggtcggcggtttcggggcgttggggaagataggggaacgttatcgaggtgcgggcggaggcggagggcgcggcgggaggaaggcgggttgggggcggagcgggttcgggcggcggcggtagtagcggcgacggttgcggttttagttattcgcggtaaatcgcgtttcggttttttcgtgcgttaggcggggagcgggggtgcgggtggttcggcgatttttcggtattcgcggttcgagtcgcgttcgcgcgatttcgcgcgcgttcgggtgacggcggtatagtaattcgttcggcgcgggaaggaggaaggaggcggggcggggcggggcgtt

SEQ ID NO: 31292 - DNA, 800 bp, Artificial Sequence
  chemically treated genomic DNA (Homo sapiens) CpG-island No: 31292
aacgccccgccccgccccgcctccttcctccttcccgcgccgaacgaattactataccgccgtcacccgaacgcgcgcgaaatcgcgcgaacgcgactcgaaccgcgaataccgaaaaatcgccgaaccacccgcacccccgctccccgcctaacgcacgaaaaaaccgaaacgcgatttaccgcgaataactaaaaccgcaaccgtcgccgctactaccgccgccgcccgaacccgctccgcccccaacccgccttcctcccgccgcgccctccgcctccgcccgcacctcgataacgttcccctatcttccccaacgccccgaaaccgccgaccgctaacgtcaacgccaaccaaataaatataaccgccgctcgacccgaacgaaaaaaacgcgcaaaccccgcgaccgaataaccgacttaaaccgatacaatcgacgacgacgacgataacgaacccgactttcttcccctacgcgaaccgcgaaacgaaaaaactacgcaataaaaaaaaaacgcccccgccccgccaccgcctctactcccaacgccccgaccgcccccaccgccttaccgccacaaacaaaacgccgaaaataaaaaccctacgaaccgcctttacctccgcgccgtctaccgaatacgaccgcgacccgcaaaaaccgaaccgcgcgcttttccgttcctaaacgcccttattcatttctaaataaaaaaaacccgaattatacaacaaatttaaacgttaatccttattttccaacgaatctcttttaccaacgtacaaaaaccaaatat

SEQ ID NO: 31293 - DNA, 569 bp, Artificial Sequence
  chemically treated genomic DNA (Homo sapiens) CpG-island No: 31293
ttcgtcgttttagggtataaagaaagagcgcgtttatagggtgttttttgatttcggcgattcggggttagggaggttcggcgcgttttagcggtcgttttttttttttcgaattcgttcggtttattcgtttttgtatcgcggtcgtttcggttcggttttttttttgtagtgagttgagtgcgtttagtcgaggaggggtcgcgtcgcgtcgcgtcggtcgcggggtttagtttttttcgtcgcgttcggggtcgtttttttcgttggagtcggttgatcgatggttttggtagttcgcgtttttcgtttcggttcgttcgcgagttcggttgtgtgttttggaagtagcgtagcgggtcgtagtcgtgtgacgttcggagcgggtagcgtcgttttttttttttttcgggttcgggacggaggtttatattttttatattttaaagatgaagtttatgggatagtacgacgttttatgagtcggcgtcggttttgggtattttttacgtggttttttttggatttgcgttatttaaaatatgcgattttattatttgaggttatcg

SEQ ID NO: 31294 - DNA, 569 bp, Artificial Sequence
  chemically treated genomic DNA (Homo sapiens) CpG-island No: 31294
cgataacctcaaataataaaatcgcatattttaaataacgcaaatccaaaaaaaaccacgtaaaaaatacccaaaaccgacgccgactcataaaacgtcgtactatcccataaacttcatctttaaaatataaaaaatataaacctccgtcccgaacccgaaaaaaaaaaaaaacgacgctacccgctccgaacgtcacacgactacgacccgctacgctacttccaaaacacacaaccgaactcgcgaacgaaccgaaacgaaaaacgcgaactaccaaaaccatcgatcaaccgactccaacgaaaaaaacgaccccgaacgcgacgaaaaaaactaaaccccgcgaccgacgcgacgcgacgcgacccctcctcgactaaacgcactcaactcactacaaaaaaaaaaccgaaccgaaacgaccgcgatacaaaaacgaataaaccgaacgaattcgaaaaaaaaaaaacgaccgctaaaacgcgccgaacctccctaaccccgaatcgccgaaatcaaaaaacaccctataaacgcgctctttctttataccctaaaacgacgaa

SEQ ID NO: 31295 - DNA, 569 bp, Artificial Sequence
  chemically treated genomic DNA (Homo sapiens) CpG-island No: 31295
cggtaattttaagtagtgaaatcgtatattttaaataacgtaagtttaggaaaggttacgtggaggatatttagaatcgacgtcggtttatgggacgtcgtgttgttttataagttttatttttaaaatgtaaagggtgtgagttttcgtttcgagttcgggggaaagaaagggcggcgttgttcgtttcgggcgttatacggttgcggttcgttgcgttgtttttaaaatatatagtcgggttcgcgggcgagtcgaggcggggggcgcgggttgttagggttatcgattagtcggttttagcgggaagggcggtttcgggcgcggcgggaagggttgggtttcgcggtcggcgcggcgcggcgcggttttttttcggttgagcgtatttagtttattgtaagagaaaagtcgagtcgaggcggtcgcggtgtaggagcgagtgggtcgggcgggttcgggaggggaagagcggtcgttggggcgcgtcgagtttttttggtttcgagtcgtcggggttaggggatattttgtaggcgcgttttttttttgtgttttggggcgacggg

SEQ ID NO: 31296 - DNA, 569 bp, Artificial Sequence
  chemically treated genomic DNA (Homo sapiens) CpG-island No: 31296
cccgtcgccccaaaacacaaaaaaaaaacgcgcctacaaaatatcccctaaccccgacgactcgaaaccaaaaaaactcgacgcgccccaacgaccgctcttcccctcccgaacccgcccgacccactcgctcctacaccgcgaccgcctcgactcgacttttctcttacaataaactaaatacgctcaaccgaaaaaaaaccgcgccgcgccgcgccgaccgcgaaacccaacccttcccgccgcgcccgaaaccgcccttcccgctaaaaccgactaatcgataaccctaacaacccgcgccccccgcctcgactcgcccgcgaacccgactatatattttaaaaacaacgcaacgaaccgcaaccgtataacgcccgaaacgaacaacgccgccctttctttcccccgaactcgaaacgaaaactcacaccctttacattttaaaaataaaacttataaaacaacacgacgtcccataaaccgacgtcgattctaaatatcctccacgtaacctttcctaaacttacgttatttaaaatatacgatttcactacttaaaattaccg

SEQ ID NO: 31297 - DNA, 583 bp, Artificial Sequence
  chemically treated genomic DNA (Homo sapiens) CpG-island No: 31297
gtgaaaagcgaggaggttgaggttgtatcgtcgtggagattagggatcgattgtcgttttgggaacgaggttttaggaatgcgtatgcgtaaaagttacgcgggcgaatacggtttcgtttcgttaagtatgcgcgtcgtttttttcgtttatcgtttttagaagaatggtgttttttcgtagcgttttttttaggagcgatcgggaattggcgtatgcgtattacggtggtggtggcgacgaaggcgggggttgtacgttgtttgtttcgagttttaggtggcgttatttttcgggttgagtcgaagtacgtacgcgcggaggttcgtacgcggagaagggcgggtgcgcgtcgcggtatgcgcggtgcggggcgagacggcggttcgacggggttattcgggcgtaggcgtagtgcggtgtttgtttgtcggattgacgggcggtcgggcggtgcgcggcggcggtggcggcggggaagatggcggcgttttttttggaatagaagttgtttcgtttggaagtaaagttgaagtaggagaatcgggaggttcggcggaggatcgattttaatttggatatt

SEQ ID NO: 31298 - DNA, 583 bp, Artificial Sequence
  chemically treated genomic DNA (Homo sapiens) CpG-island No: 31298
aatatccaaattaaaatcgatcctccgccgaacctcccgattctcctacttcaactttacttccaaacgaaacaacttctattccaaaaaaaacgccgccatcttccccgccgccaccgccgccgcgcaccgcccgaccgcccgtcaatccgacaaacaaacaccgcactacgcctacgcccgaataaccccgtcgaaccgccgtctcgccccgcaccgcgcataccgcgacgcgcacccgcccttctccgcgtacgaacctccgcgcgtacgtacttcgactcaacccgaaaaataacgccacctaaaactcgaaacaaacaacgtacaacccccgccttcgtcgccaccaccaccgtaatacgcatacgccaattcccgatcgctcctaaaaaaaacgctacgaaaaaacaccattcttctaaaaacgataaacgaaaaaaacgacgcgcatacttaacgaaacgaaaccgtattcgcccgcgtaacttttacgcatacgcattcctaaaacctcgttcccaaaacgacaatcgatccctaatctccacgacgatacaacctcaacctcctcgcttttcac

SEQ ID NO: 31299 - DNA, 583 bp, Artificial Sequence
  chemically treated genomic DNA (Homo sapiens) CpG-island No: 31299
gatatttaggttgaggtcgatttttcgtcgggtttttcggtttttttgttttagttttgtttttaggcgggatagtttttgttttagggaggacgtcgttatttttttcgtcgttatcgtcgtcgcgtatcgttcggtcgttcgttagttcggtagataaatatcgtattgcgtttgcgttcggatgatttcgtcgagtcgtcgtttcgtttcgtatcgcgtatgtcgcggcgcgtattcgttttttttcgcgtgcgaattttcgcgcgtgcgtgtttcggtttagttcgaaggatgacgttatttagagttcgaggtaggtaacgtgtaattttcgttttcgtcgttattattatcgtagtgcgtatgcgttaattttcgatcgtttttgagagaggcgttgcgaggaaatattatttttttgaggacggtgggcggggaaaacggcgcgtatgtttagcgaggcgaagtcgtgttcgttcgcgtggtttttgcgtatgcgtatttttggaatttcgtttttaaagcggtagtcgatttttggtttttacggcggtgtagttttagttttttcgttttttat

SEQ ID NO: 31300 - DNA, 583 bp, Artificial Sequence
  chemically treated genomic DNA (Homo sapiens) CpG-island No: 31300
ataaaaaacgaaaaaactaaaactacaccgccgtaaaaaccaaaaatcgactaccgctttaaaaacgaaattccaaaaatacgcatacgcaaaaaccacgcgaacgaacacgacttcgcctcgctaaacatacgcgccgttttccccgcccaccgtcctcaaaaaaataatatttcctcgcaacgcctctctcaaaaacgatcgaaaattaacgcatacgcactacgataataataacgacgaaaacgaaaattacacgttacctacctcgaactctaaataacgtcatccttcgaactaaaccgaaacacgcacgcgcgaaaattcgcacgcgaaaaaaaacgaatacgcgccgcgacatacgcgatacgaaacgaaacgacgactcgacgaaatcatccgaacgcaaacgcaatacgatatttatctaccgaactaacgaacgaccgaacgatacgcgacgacgataacgacgaaaaaaataacgacgtcctccctaaaacaaaaactatcccgcctaaaaacaaaactaaaacaaaaaaaccgaaaaacccgacgaaaaatcgacctcaacctaaatatc

SEQ ID NO: 31301 - DNA, 508 bp, Artificial Sequence
  chemically treated genomic DNA (Homo sapiens) CpG-island No: 31301
attcggagcgtacgtcggttttttcgttagtttttatcggttttttttggttttttcgagggatgtttgtatttgtcgggacgaagcggtttcgttgttcgcgaacgcgttcgggagataaagagtcgcgtttcgggttcgattttttttttagtcgggtttggttcgttttagtttttttatttgttcgcgtcggtttattttcgttttcgttttcggtttttttatagagtcgtttggggtggggttcgggtcggagcgacgcgttggcgttagtcgagagaggcgaggggagggggttgcgggttgcggcgtcgggggagtcgagtcggtttcgtttttcggtcgcgggcgggagagtcgggggcgcgcgttcgattcggattcgggagcgcggtcggcggaagcgcgtcgagggggatgggggagaagcgcgttttggagagaagggtggtttttttgcggttcgggggaagtttgtttttttagttgcgtttgaggaatttag

SEQ ID NO: 31302 - DNA, 508 bp, Artificial Sequence
  chemically treated genomic DNA (Homo sapiens) CpG-island No: 31302
ctaaattcctcaaacgcaactaaaaaaacaaacttcccccgaaccgcaaaaaaaccacccttctctccaaaacgcgcttctcccccatccccctcgacgcgcttccgccgaccgcgctcccgaatccgaatcgaacgcgcgcccccgactctcccgcccgcgaccgaaaaacgaaaccgactcgactcccccgacgccgcaacccgcaaccccctcccctcgcctctctcgactaacgccaacgcgtcgctccgacccgaaccccaccccaaacgactctataaaaaaaccgaaaacgaaaacgaaaataaaccgacgcgaacaaataaaaaaactaaaacgaaccaaacccgactaaaaaaaaaatcgaacccgaaacgcgactctttatctcccgaacgcgttcgcgaacaacgaaaccgcttcgtcccgacaaatacaaacatccctcgaaaaaaccaaaaaaaaccgataaaaactaacgaaaaaaccgacgtacgctccgaat

SEQ ID NO: 31303 - DNA, 508 bp, Artificial Sequence
  chemically treated genomic DNA (Homo sapiens) CpG-island No: 31303
ttgggttttttaggcgtagttggggaaataggtttttttcggatcgtagagaagttatttttttttttaaagcgcgttttttttttatttttttcggcgcgttttcgtcggtcgcgttttcgggttcggatcgagcgcgcgttttcggttttttcgttcgcggtcgaggggcgggatcggttcggttttttcggcgtcgtagttcgtagtttttttttttcgtttttttcggttggcgttaacgcgtcgtttcggttcgggttttattttaggcgattttgtgaggaggtcggaggcggaggcggaggtgagtcgacgcgagtaggtggagaggttgggacgggttaggttcggttgggggaggggtcgggttcgggacgcggttttttgtttttcggacgcgttcgcgggtagcggggtcgtttcgtttcggtaggtgtaggtatttttcggggaggttaggggaggtcgatgggggttggcggggagatcggcgtgcgtttcgggt

SEQ ID NO: 31304 - DNA, 508 bp, Artificial Sequence
  chemically treated genomic DNA (Homo sapiens) CpG-island No: 31304
acccgaaacgcacgccgatctccccgccaacccccatcgacctcccctaacctccccgaaaaatacctacacctaccgaaacgaaacgaccccgctacccgcgaacgcgtccgaaaaacaaaaaaccgcgtcccgaacccgacccctcccccaaccgaacctaacccgtcccaacctctccacctactcgcgtcgactcacctccgcctccgcctccgacctcctcacaaaatcgcctaaaataaaacccgaaccgaaacgacgcgttaacgccaaccgaaaaaaacgaaaaaaaaaaactacgaactacgacgccgaaaaaaccgaaccgatcccgcccctcgaccgcgaacgaaaaaaccgaaaacgcgcgctcgatccgaacccgaaaacgcgaccgacgaaaacgcgccgaaaaaaataaaaaaaaaacgcgctttaaaaaaaaaaataacttctctacgatccgaaaaaaacctatttccccaactacgcctaaaaaacccaa

SEQ ID NO: 31305 - DNA, 508 bp, Artificial Sequence
  chemically treated genomic DNA (Homo sapiens) CpG-island No: 31305
gtgatcgaggtgatgttggtacgggattcgtttaggggagatagtagttcggtttagcggtcgagttcggcgtcgttgagtgtagttcggcgttttttgtgacgttattatttttcgtattttttgggttttcgtcgttgtagttcgcggtattttcggtagtcgttagtagtagcgttcggtttagtaggtgttgtacgacgttcgtttgtagcgtttttagtggtagttcgtttaggcgcgtttgtttcgggtttcgcgaggacgtttcggtttcggttttagtcgtcgtttttttatcgttcgtgtcgggattgggtttcggatttagtgcgttaggggcgggggtcgtcgattcgggttttttagtttcgtagatggtgtatagatcgttagtagagttcggttcggtagcgggaggttacggtaggggcgtatttgcggggagagacgttaggtgggtcgtgggggtgataagttcgtttttgttttaaggtttcgttttttt

SEQ ID NO: 31306 - DNA, 508 bp, Artificial Sequence
  chemically treated genomic DNA (Homo sapiens) CpG-island No: 31306
aaaaaaacgaaaccttaaaacaaaaacgaacttatcacccccacgacccacctaacgtctctccccgcaaatacgcccctaccgtaacctcccgctaccgaaccgaactctactaacgatctatacaccatctacgaaactaaaaaacccgaatcgacgacccccgcccctaacgcactaaatccgaaacccaatcccgacacgaacgataaaaaaacgacgactaaaaccgaaaccgaaacgtcctcgcgaaacccgaaacaaacgcgcctaaacgaactaccactaaaaacgctacaaacgaacgtcgtacaacacctactaaaccgaacgctactactaacgactaccgaaaataccgcgaactacaacgacgaaaacccaaaaaatacgaaaaataataacgtcacaaaaaacgccgaactacactcaacgacgccgaactcgaccgctaaaccgaactactatctcccctaaacgaatcccgtaccaacatcacctcgatcac

SEQ ID NO: 31307 - DNA, 508 bp, Artificial Sequence
  chemically treated genomic DNA (Homo sapiens) CpG-island No: 31307
aaggaggcgggattttgaggtaggggcgggtttattatttttacggtttatttggcgttttttttcgtaggtgcgtttttgtcgtggtttttcgttatcggatcgggttttgttgacggtttgtgtattatttacgagattgaagggttcgagtcggcgattttcgtttttggcgtattggattcggggtttagtttcggtacgagcggtgggaaggcggcggttggggtcggggtcggggcgttttcgcggagttcgaagtaggcgcgtttgggcgagttgttattgggggcgttgtaggcgagcgtcgtgtagtatttgttgagtcggacgttgttgttggcggttgtcgagggtgtcgcgggttgtagcggcgggggtttaggaggtgcggagggtggtggcgttatagggggcgtcgggttgtatttagcgacgtcgaattcggtcgttgggtcgaattattgttttttttggacgagtttcgtgttagtattatttcggttat

SEQ ID NO: 31308 - DNA, 508 bp, Artificial Sequence
  chemically treated genomic DNA (Homo sapiens) CpG-island No: 31308
ataaccgaaataatactaacacgaaactcgtccaaaaaaaacaataattcgacccaacgaccgaattcgacgtcgctaaatacaacccgacgccccctataacgccaccaccctccgcacctcctaaacccccgccgctacaacccgcgacaccctcgacaaccgccaacaacaacgtccgactcaacaaatactacacgacgctcgcctacaacgcccccaataacaactcgcccaaacgcgcctacttcgaactccgcgaaaacgccccgaccccgaccccaaccgccgccttcccaccgctcgtaccgaaactaaaccccgaatccaatacgccaaaaacgaaaatcgccgactcgaacccttcaatctcgtaaataatacacaaaccgtcaacaaaacccgatccgataacgaaaaaccacgacaaaaacgcacctacgaaaaaaaacgccaaataaaccgtaaaaataataaacccgcccctacctcaaaatcccgcctcctt

SEQ ID NO: 31309 - DNA, 650 bp, Artificial Sequence
  chemically treated genomic DNA (Homo sapiens) CpG-island No: 31309
  unsure (504, 548)
ttatttttattggggcggtttttcgggtttttaaacgcgaagttacgtttttatcgcgcgttcgttttcgcgcggttttttttgatttcggcggttttcgtagtttcgtttatcggagaagcgattttatagcgtttgtttttttttgagcggtatgaagttattttttaggcggcgagcggtttcggcgcgttatttgggcgaggtgatcggtttcgcgatttggagcgttcgcgagaagcggtagttagtgcgatttttgtaggcgcggtagggttagtcggagtcggacgttatcgagttggttcgggagttgcggggtcggagcgaggttgaggtgagatgcggttttcgggatcggagttaggttggaggcggggttggggtggggcggagagtgggcggggttgcggtaggagttagcggggcggggttaggaatgtaagcgagcgggggcgtggcgtggggttgagtggcggggcgttagtgggtgagtttgggcgnggtgaggggcggggcgtggacgggaagagaagatttaggggcgnggcgagtttgggagttagacgtacgcggggtataagtgaagcggaggggtcgggcgatgtcggggtagggtttttttttttattgtacgttttggagaattg

SEQ ID NO: 31310 - DNA, 650 bp, Artificial Sequence
  chemically treated genomic DNA (Homo sapiens) CpG-island No: 31310
  unsure (103, 147)
caattctccaaaacgtacaataaaaaaaaaaaccctaccccgacatcgcccgacccctccgcttcacttataccccgcgtacgtctaactcccaaactcgccncgcccctaaatcttctcttcccgtccacgccccgcccctcaccncgcccaaactcacccactaacgccccgccactcaaccccacgccacgcccccgctcgcttacattcctaaccccgccccgctaactcctaccgcaaccccgcccactctccgccccaccccaaccccgcctccaacctaactccgatcccgaaaaccgcatctcacctcaacctcgctccgaccccgcaactcccgaaccaactcgataacgtccgactccgactaaccctaccgcgcctacaaaaatcgcactaactaccgcttctcgcgaacgctccaaatcgcgaaaccgatcacctcgcccaaataacgcgccgaaaccgctcgccgcctaaaaaataacttcataccgctcaaaaaaaaacaaacgctataaaatcgcttctccgataaacgaaactacgaaaaccgccgaaatcaaaaaaaaccgcgcgaaaacgaacgcgcgataaaaacgtaacttcgcgtttaaaaacccgaaaaaccgccccaataaaaataa

SEQ ID NO: 31311 - DNA, 650 bp, Artificial Sequence
  chemically treated genomic DNA (Homo sapiens) CpG-island No: 31311
  unsure (103, 147)
taattttttaaaacgtgtagtggaagggaggattttgtttcggtatcgttcggttttttcgttttatttatgtttcgcgtacgtttagtttttaagttcgttncgtttttaggtttttttttttcgtttacgtttcgttttttattncgtttaggtttatttattaacgtttcgttatttagttttacgttacgttttcgttcgtttatatttttggtttcgtttcgttggtttttgtcgtagtttcgtttatttttcgttttattttagtttcgtttttagtttggtttcggtttcgagaatcgtattttattttagtttcgtttcggtttcgtagttttcgggttagttcggtggcgttcggtttcggttggttttgtcgcgtttgtaggagtcgtattagttgtcgtttttcgcgagcgttttaggtcgcgggatcggttatttcgtttagatagcgcgtcggggtcgttcgtcgtttgggaggtggttttatgtcgtttagaaagaggtaggcgttgtaaggtcgttttttcgatgggcggagttacgggggtcgtcgaggttagaaagaatcgcgcggaggcggacgcgcgatgggggcgtggtttcgcgtttggaggttcggggaatcgttttaatggaagtga

SEQ ID NO: 31312 - DNA, 650 bp, Artificial Sequence
  chemically treated genomic DNA (Homo sapiens) CpG-island No: 31312
  unsure (504, 548)
tcacttccattaaaacgattccccgaacctccaaacgcgaaaccacgcccccatcgcgcgtccgcctccgcgcgattctttctaacctcgacgacccccgtaactccgcccatcgaaaaaacgaccttacaacgcctacctctttctaaacgacataaaaccacctcccaaacgacgaacgaccccgacgcgctatctaaacgaaataaccgatcccgcgacctaaaacgctcgcgaaaaacgacaactaatacgactcctacaaacgcgacaaaaccaaccgaaaccgaacgccaccgaactaacccgaaaactacgaaaccgaaacgaaactaaaataaaatacgattctcgaaaccgaaaccaaactaaaaacgaaactaaaataaaacgaaaaataaacgaaactacgacaaaaaccaacgaaacgaaaccaaaaatataaacgaacgaaaacgtaacgtaaaactaaataacgaaacgttaataaataaacctaaacgnaataaaaaacgaaacgtaaacgaaaaaaaaaaacctaaaaacgnaacgaacttaaaaactaaacgtacgcgaaacataaataaaacgaaaaaaccgaacgataccgaaacaaaatcctcccttccactacacgttttaaaaaatta

SEQ ID NO: 31313 - DNA, 615 bp, Artificial Sequence
  chemically treated genomic DNA (Homo sapiens) CpG-island No: 31313
  unsure (36..)
gagggtggtgaggattgaggtcggaggaggaggagnnaggcgtagagagagttttagttggagcgggacgtagggaatattcgcggtggtagtagcggttcgcgcgttttcgcgtcgattcgggttcgtttcggttttttcggcggttacgcgggggcggcgtttttgcggggaggagcgcggcgcggcggcggcggttcgtgcgttgtggttcgcgtcgaggtagggcggtggggggtagtcgtagcgggcgcgtgtcgagggcggcggcggcggcgaggtttggcgcgcggggggcgtgtgtcgcgggtaggtgcggtttttggtgcggttcgagttgggtggcggattggtaaggaggagtcgggtcggttgaggcggggtttcggttttgagatttttttcgttttcgtgggcgggatttttttttttttattttttttggaagagcgttaatcgtgtgaggattggagtttttcgggtcgcgtcggttttttttcggttcggcgggtttcggtaatacgtttcgggtttgttacgacgtttgaggaaaatttttcgtgataggaatggggaggttggtgatattggggagggttttttggttatcgtttt

SEQ ID NO: 31314 - DNA, 615 bp, Artificial Sequence
  chemically treated genomic DNA (Homo sapiens) CpG-island No: 31314
  unsure (579..)
aaaacgataaccaaaaaaccctccccaatatcaccaacctccccattcctatcacgaaaaattttcctcaaacgtcgtaacaaacccgaaacgtattaccgaaacccgccgaaccgaaaaaaaaccgacgcgacccgaaaaactccaatcctcacacgattaacgctcttccaaaaaaaataaaaaaaaaaaaatcccgcccacgaaaacgaaaaaaatctcaaaaccgaaaccccgcctcaaccgacccgactcctccttaccaatccgccacccaactcgaaccgcaccaaaaaccgcacctacccgcgacacacgccccccgcgcgccaaacctcgccgccgccgccgccctcgacacgcgcccgctacgactaccccccaccgccctacctcgacgcgaaccacaacgcacgaaccgccgccgccgcgccgcgctcctccccgcaaaaacgccgcccccgcgtaaccgccgaaaaaaccgaaacgaacccgaatcgacgcgaaaacgcgcgaaccgctactaccaccgcgaatattccctacgtcccgctccaactaaaactctctctacgcctnnctcctcctcctccgacctcaatcctcaccaccctc

SEQ ID NO: 31315 - DNA, 615 bp, Artificial Sequence
  chemically treated genomic DNA (Homo sapiens) CpG-island No: 31315
  unsure (579..)
gaagcggtggttaaagggttttttttagtgttattagtttttttatttttgttacggaggattttttttaggcgtcgtgatagattcgaggcgtgttgtcggggttcgtcgggtcgaggaggagtcgacgcggttcggggaattttagtttttatacggttaacgtttttttaaggagagtggaggagggagggtttcgtttacgagaacgaagagaattttagggtcgaagtttcgttttagtcggttcggtttttttttgttagttcgttatttaattcgggtcgtattaggggtcgtatttgttcgcggtatacgtttttcgcgcgttaggtttcgtcgtcgtcgtcgttttcggtacgcgttcgttgcggttgttttttatcgttttgtttcggcgcgggttatagcgtacgagtcgtcgtcgtcgcgtcgcgttttttttcgtagggacgtcgttttcgcgtaatcgtcgaggaagtcgaggcgagttcgggtcggcgcgagggcgcgcgggtcgttgttgttatcgcgggtgttttttgcgtttcgttttagttaggattttttttgcgtttnnttttttttttttcgattttagtttttattattttt

SEQ ID NO: 31316 - DNA, 615 bp, Artificial Sequence
  chemically treated genomic DNA (Homo sapiens) CpG-island No: 31316
  unsure (36..)
aaaaataataaaaactaaaatcgaaaaaaaaaaaannaaacgcaaaaaaaatcctaactaaaacgaaacgcaaaaaacacccgcgataacaacaacgacccgcgcgccctcgcgccgacccgaactcgcctcgacttcctcgacgattacgcgaaaacgacgtccctacgaaaaaaaacgcgacgcgacgacgacgactcgtacgctataacccgcgccgaaacaaaacgataaaaaacaaccgcaacgaacgcgtaccgaaaacgacgacgacgacgaaacctaacgcgcgaaaaacgtataccgcgaacaaatacgacccctaatacgacccgaattaaataacgaactaacaaaaaaaaaccgaaccgactaaaacgaaacttcgaccctaaaattctcttcgttctcgtaaacgaaaccctccctcctccactctccttaaaaaaacgttaaccgtataaaaactaaaattccccgaaccgcgtcgactcctcctcgacccgacgaaccccgacaacacgcctcgaatctatcacgacgcctaaaaaaaatcctccgtaacaaaaataaaaaaactaataacactaaaaaaaaccctttaaccaccgcttc

SEQ ID NO: 31317 - DNA, 617 bp, Artificial Sequence
  chemically treated genomic DNA (Homo sapiens) CpG-island No: 31317
ttcgcgacgggatggaaagtgtagtcgtgttaggggttagggagttagaaaatgttttcgttgttatcgattcgtattagtattcggttggtagtattcgaggggacgggacgcgacgcgacgggacgggcgggacgagggggcggggcggtaggtatagcgcgcgaagacggggtgcggattttcgtattttaggtagttcgcgacggatcggatttagttgttatttagtcgcgagggagggtagcggggtcgaagggagatttgaggtgagaagcggacgtatacgtatttttcgttttttgcgagttgtttgttttcgttttgttttattcgcgtttttttcggtttttttttttttttatttttttgtcgtagttgcgtcgttatcggggttttacgtgatattagattttttcggtacgtgacgtgagaaaggggtcgggttggggcgggataagtcgtttttttttttttttcggaagcgtaatattgaacgtgtttgcgtaatgggtgtcgggttcgtttttttttaattcggacgtaatcgtggtttttgttttgtaataggcggtttagagggaggggttttttcgtttatatttattgtagttttt

SEQ ID NO: 31318 - DNA, 617 bp, Artificial Sequence
  chemically treated genomic DNA (Homo sapiens) CpG-island No: 31318
aaaaactacaataaatataaacgaaaaaacccctccctctaaaccgcctattacaaaacaaaaaccacgattacgtccgaattaaaaaaaaacgaacccgacacccattacgcaaacacgttcaatattacgcttccgaaaaaaaaaaaaaaacgacttatcccgccccaacccgacccctttctcacgtcacgtaccgaaaaaatctaatatcacgtaaaaccccgataacgacgcaactacgacaaaaaaataaaaaaaaaaaaaaaccgaaaaaaacgcgaataaaacaaaacgaaaacaaacaactcgcaaaaaacgaaaaatacgtatacgtccgcttctcacctcaaatctcccttcgaccccgctaccctccctcgcgactaaataacaactaaatccgatccgtcgcgaactacctaaaatacgaaaatccgcaccccgtcttcgcgcgctatacctaccgccccgccccctcgtcccgcccgtcccgtcgcgtcgcgtcccgtcccctcgaatactaccaaccgaatactaatacgaatcgataacaacgaaaacattttctaactccctaacccctaacacgactacactttccatcccgtcgcgaa

SEQ ID NO: 31319 - DNA, 617 bp, Artificial Sequence
  chemically treated genomic DNA (Homo sapiens) CpG-island No: 31319
agaagttatagtaggtataggcgaaaaagtttttttttttaagtcgtttattgtagaataaaaattacgattacgttcggattgggaaaaagcggattcgatatttattgcgtaggtacgtttagtgttacgttttcggaaggaggggagaagcggtttatttcgttttagttcggttttttttttacgttacgtgtcgggagagtttagtgttacgtgaggtttcggtggcggcgtagttacggtaagagagtgagaaggaagggaagtcggaaggggcgcgagtgaagtaaagcgagggtagatagttcgtagagggcgaggggtgcgtgtgcgttcgttttttattttaggttttttttcggtttcgttgttttttttcgcggttgggtgatagttgggttcggttcgtcgcgggttgtttggggtgcgaggattcgtatttcgttttcgcgcgttgtgtttgtcgtttcgttttttcgtttcgttcgtttcgtcgcgtcgcgtttcgttttttcgggtgttgttagtcgggtgttgatgcgagtcggtggtagcgaggatattttttgattttttggtttttgatacggttgtattttttatttcgtcgcggg

SEQ ID NO: 31320 - DNA, 617 bp, Artificial Sequence
  chemically treated genomic DNA (Homo sapiens) CpG-island No: 31320
cccgcgacgaaataaaaaatacaaccgtatcaaaaaccaaaaaatcaaaaaatatcctcgctaccaccgactcgcatcaacacccgactaacaacacccgaaaaaacgaaacgcgacgcgacgaaacgaacgaaacgaaaaaacgaaacgacaaacacaacgcgcgaaaacgaaatacgaatcctcgcaccccaaacaacccgcgacgaaccgaacccaactatcacccaaccgcgaaaaaaaacaacgaaaccgaaaaaaaacctaaaataaaaaacgaacgcacacgcacccctcgccctctacgaactatctaccctcgctttacttcactcgcgccccttccgacttcccttccttctcactctcttaccgtaactacgccgccaccgaaacctcacgtaacactaaactctcccgacacgtaacgtaaaaaaaaaaccgaactaaaacgaaataaaccgcttctcccctccttccgaaaacgtaacactaaacgtacctacgcaataaatatcgaatccgctttttcccaatccgaacgtaatcgtaatttttattctacaataaacgacttaaaaaaaaaaactttttcgcctatacctactataacttct

SEQ ID NO: 31321 - DNA, 717 bp, Artificial Sequence
  chemically treated genomic DNA (Homo sapiens) CpG-island No: 31321
  unsure (246)
tggtttaagttattttttacgttcgttttattttgatcgttagtttttttttttgtaaaatttattaaggcggttttcggtaagttatcgcggcgggaattagattcgaaagagtgtttatataaattcgtttggttattttgtgtttcgggttagcgcgaggtgggggtgcgggtagggttttcgggtttgcggttgttacgttttttttagttcgtcgcgttatatttacggtttacgggtatntattgcgagtttttagggggcgaattcgatcgttttttttgttcgcgtagtttcggtcgtttagtttgtgattttattagcgttttcgggttagcgggaatattcgagagttcggggcgtcgttcgtttttttagtcggtaggtgtcgggagttagtttcgtttagtcgcgtgggtatcgtaggttcgaaggtataaggtcgcggattcgggcgttcgttcggatttcgggagtagcggtgttcggcggtcggcgatcgagcgggaggttcggggtacggtcgttggcgggattgcgtttttttttttttttttttacgtttttttttttgtagcgagttcgcggattttttttttcgtttcgttttatagatcgggttttttttttttttattttattttttgtttcgtttttttgcggcgaaggaggtttatttattataaatgtatattcggggttgatattagcgat

SEQ ID NO: 31322 - DNA, 717 bp, Artificial Sequence
  chemically treated genomic DNA (Homo sapiens) CpG-island No: 31322
  unsure (472)
atcgctaatatcaaccccgaatatacatttataataaataaacctccttcgccgcaaaaaaacgaaacaaaaaataaaataaaaaaaaaaaaaacccgatctataaaacgaaacgaaaaaaaaaatccgcgaactcgctacaaaaaaaaaaacgtaaaaaaaaaaaaaaaaaaacgcaatcccgccaacgaccgtaccccgaacctcccgctcgatcgccgaccgccgaacaccgctactcccgaaatccgaacgaacgcccgaatccgcgaccttataccttcgaacctacgatacccacgcgactaaacgaaactaactcccgacacctaccgactaaaaaaacgaacgacgccccgaactctcgaatattcccgctaacccgaaaacgctaataaaatcacaaactaaacgaccgaaactacgcgaacaaaaaaaacgatcgaattcgccccctaaaaactcgcaatanatacccgtaaaccgtaaatataacgcgacgaactaaaaaaaacgtaacaaccgcaaacccgaaaaccctacccgcacccccacctcgcgctaacccgaaacacaaaataaccaaacgaatttatataaacactctttcgaatctaattcccgccgcgataacttaccgaaaaccgccttaataaattttacaaaaaaaaaaactaacgatcaaaataaaacgaacgtaaaaaataacttaaacca

SEQ ID NO: 31323 - DNA, 717 bp, Artificial Sequence
  chemically treated genomic DNA (Homo sapiens) CpG-island No: 31323
  unsure (472)
gtcgttgatgttagtttcgaatgtgtatttataatagatgagtttttttcgtcgtaggaaggcgaggtagaagatgaggtagagagggagagggttcggtttgtggggcggggcgaggaagagggttcgcgaattcgttataaaggaggaggcgtagggaggaggaggaggaagcgtagtttcgttagcggtcgtgtttcgagtttttcgttcgatcgtcggtcgtcgggtatcgttgttttcggagttcggacgggcgttcgggttcgcggttttatattttcgggtttgcggtatttacgcggttgggcgaggttggttttcggtatttgtcggttgggagaacgggcggcgtttcgggttttcgggtgttttcgttggttcggggacgttggtgaagttataggttggacggtcgaggttgcgcgggtaaagaaggcggtcgggttcgttttttggaggttcgtaatangtgttcgtgggtcgtgagtgtggcgcggcgggttgggaggggcgtggtagtcgtaagttcgggagttttgttcgtatttttatttcgcgttggttcggggtatagggtggttagacggatttgtgtaagtattttttcgaatttaattttcgtcgcgatgatttgtcgaaggtcgttttagtgagttttgtagaggaggaaattgacgattagagtgggacggacgtgggaagtgatttagatta

SEQ ID NO: 31324 - DNA, 717 bp, Artificial Sequence
  chemically treated genomic DNA (Homo sapiens) CpG-island No: 31324
  unsure (246)
taatctaaatcacttcccacgtccgtcccactctaatcgtcaatttcctcctctacaaaactcactaaaacgaccttcgacaaatcatcgcgacgaaaattaaattcgaaaaaatacttacacaaatccgtctaaccaccctataccccgaaccaacgcgaaataaaaatacgaacaaaactcccgaacttacgactaccacgcccctcccaacccgccgcgccacactcacgacccacgaacacntattacgaacctccaaaaaacgaacccgaccgccttctttacccgcgcaacctcgaccgtccaacctataacttcaccaacgtccccgaaccaacgaaaacacccgaaaacccgaaacgccgcccgttctcccaaccgacaaataccgaaaaccaacctcgcccaaccgcgtaaataccgcaaacccgaaaatataaaaccgcgaacccgaacgcccgtccgaactccgaaaacaacgatacccgacgaccgacgatcgaacgaaaaactcgaaacacgaccgctaacgaaactacgcttcctcctcctcctccctacgcctcctcctttataacgaattcgcgaaccctcttcctcgccccgccccacaaaccgaaccctctccctctctacctcatcttctacctcgccttcctacgacgaaaaaaactcatctattataaatacacattcgaaactaacatcaacgac

SEQ ID NO: 31325 - DNA, 671 bp, Artificial Sequence
  chemically treated genomic DNA (Homo sapiens) CpG-island No: 31325
  unsure (142, 195)
ttcgcgtcggggtcgcgtttgtttcgtcgtagttgtttttcgatttcggcgttgattcgtttggatttttttattttatcgtttaggtaatacgttattatggattttagagttatcgtttcggtttcggttttgcgttttntgtttcgtcgtcgtttttcggttttcgtcgtgttttcggttcggttttcgttntatgtttgtttcgtttttcgatggcgtttttttattttttttttgtcgtatttcgatttgtttgtcggttttattttagttcgcgtcgttgtcgtatttatcgttaattttattcgttttaagcgttcgatatatttattaatttagtattttgttattttatttttatggtagtatatttttggttaatgcgacgcgcgtttagattttcgtttattattgacggtatataatggtcgtttttcgtttttcgttttcgtttggtttttttcgcgtttgttttattgtcggtattttttttatcgcgttaggttttttatttttcgtgttttttaggttttttcgatgttttttgttatttcgttcgttacgcgttttgtttcgttatttaggtttttttttttattttttttcgtgtgtttcgtttttggttgcggttgtgttttatatttttttttttttgtatttttttgttt

SEQ ID NO: 31326 - DNA, 671 bp, Artificial Sequence
  chemically treated genomic DNA (Homo sapiens) CpG-island No: 31326
  unsure (477, 530)
aaacaaaaaaatacaaaaaaaaaaaaatataaaacacaaccgcaaccaaaaacgaaacacacgaaaaaaaataaaaaaaaaaacctaaataacgaaacaaaacgcgtaacgaacgaaataacaaaaaacatcgaaaaaacctaaaaaacacgaaaaataaaaaacctaacgcgataaaaaaaataccgacaataaaacaaacgcgaaaaaaaccaaacgaaaacgaaaaacgaaaaacgaccattatataccgtcaataataaacgaaaatctaaacgcgcgtcgcattaaccaaaaatatactaccataaaaataaaataacaaaatactaaattaataaatatatcgaacgcttaaaacgaataaaattaacgataaatacgacaacgacgcgaactaaaataaaaccgacaaacaaatcgaaatacgacaaaaaaaaaataaaaaaacgccatcgaaaaacgaaacaaacatanaacgaaaaccgaaccgaaaacacgacgaaaaccgaaaaacgacgacgaaacanaaaacgcaaaaccgaaaccgaaacgataactctaaaatccataataacgtattacctaaacgataaaataaaaaaatccaaacgaatcaacgccgaaatcgaaaaacaactacgacgaaacaaacgcgaccccgacgcgaa

SEQ ID NO: 31327 - DNA, 671 bp, Artificial Sequence
  chemically treated genomic DNA (Homo sapiens) CpG-island No: 31327
  unsure (477, 530)
gggtagagaaatataagagaggaggaatgtgaggtatagtcgtaattaaaggcgaaatatacgggagaggataaaagaggggatttgagtggcggagtaaaacgcgtgacgaacgaaatggtagaaagtatcgagggggtttagggagtacggaggatgaggaatttaacgcggtaagaagagtgtcgatagtgagataagcgcgaaggggattagacgagagcggaaaacgggaagcggttattatatgtcgttaatggtagacgaggatttgggcgcgcgtcgtattagttaaaagtatattgttataaaggtggagtagtagggtgttgggttaatgggtgtgtcgagcgtttgaggcgggtgagattggcggtgggtgcggtagcggcgcgggttgaggtgaggtcgataggtagatcggagtgcgatagggggagaatagagaaacgttatcgggggacgaagtagatatgnaacgagagtcgggtcgagggtacggcgggggtcggggggcggcggcgggatangagacgtagagtcggggtcgggacgatgattttggagtttatgatggcgtgttgtttgagcgatgaggtgaaggagtttaagcggattaacgtcgagatcgagaagtagttgcggcgggataagcgcgatttcggcgcgag

SEQ ID NO: 31328 - DNA, 671 bp, Artificial Sequence
  chemically treated genomic DNA (Homo sapiens) CpG-island No: 31328
  unsure (142, 195)
ctcgcgccgaaatcgcgcttatcccgccgcaactacttctcgatctcgacgttaatccgcttaaactccttcacctcatcgctcaaacaacacgccatcataaactccaaaatcatcgtcccgaccccgactctacgtctcntatcccgccgccgccccccgacccccgccgtaccctcgacccgactctcgttncatatctacttcgtcccccgataacgtttctctattctccccctatcgcactccgatctacctatcgacctcacctcaacccgcgccgctaccgcacccaccgccaatctcacccgcctcaaacgctcgacacacccattaacccaacaccctactactccacctttataacaatatacttttaactaatacgacgcgcgcccaaatcctcgtctaccattaacgacatataataaccgcttcccgttttccgctctcgtctaatccccttcgcgcttatctcactatcgacactcttcttaccgcgttaaattcctcatcctccgtactccctaaaccccctcgatactttctaccatttcgttcgtcacgcgttttactccgccactcaaatcccctcttttatcctctcccgtatatttcgcctttaattacgactatacctcacattcctcctctcttatatttctctaccc

SEQ ID NO: 31329 - DNA, 560 bp, Artificial Sequence
  chemically treated genomic DNA (Homo sapiens) CpG-island No: 31329
tgttttttagagggttatcgttttcgacggggaggtggcgttttttttcgggtttcgggtttcgatcgttcgtgttgttttttttcgggttttttttcgcgatgacggcgtcgttagtaggttaggcggattgggcggggtttcgagcggggattgggatttagatcgattaggggattgggagcgggcggcgcggttatggcgggttgttgcgtcgcgttggcggtttttttgttcgagtacgatacgtcgcgtatcgtgtttattcgtagtcgtaaagtggggtttatgatcggcgtcgtgtaattgtttattttggtttacgttatcgggtgagcgtggggtcgcgcggggggcgcggcgggtgttgttttcgcgttcgcgtcgtgcggcggtttattttggtttcggttatttgggcgagttcgggagcggcgagtcgaggcggtgatattttttttgggttttagtcgtcgcgtcggggtttcgggggcgggaggttgtttgttgttgttttaaagttatagtttgggttaggcgcggtggcgtaagtttgtaat

SEQ ID NO: 31330 - DNA, 560 bp, Artificial Sequence
  chemically treated genomic DNA (Homo sapiens) CpG-island No: 31330
attacaaacttacgccaccgcgcctaacccaaactataactttaaaacaacaacaaacaacctcccgcccccgaaaccccgacgcgacgactaaaacccaaaaaaaatatcaccgcctcgactcgccgctcccgaactcgcccaaataaccgaaaccaaaataaaccgccgcacgacgcgaacgcgaaaacaacacccgccgcgccccccgcgcgaccccacgctcacccgataacgtaaaccaaaataaacaattacacgacgccgatcataaaccccactttacgactacgaataaacacgatacgcgacgtatcgtactcgaacaaaaaaaccgccaacgcgacgcaacaacccgccataaccgcgccgcccgctcccaatcccctaatcgatctaaatcccaatccccgctcgaaaccccgcccaatccgcctaacctactaacgacgccgtcatcgcgaaaaaaaacccgaaaaaaaacaacacgaacgatcgaaacccgaaacccgaaaaaaaacgccacctccccgtcgaaaacgataaccctctaaaaaaca

SEQ ID NO: 31331 - DNA, 560 bp, Artificial Sequence
  chemically treated genomic DNA (Homo sapiens) CpG-island No: 31331
attataggtttgcgttatcgcgtttggtttaggttgtggttttaaaatagtagtaagtagtttttcgttttcggggtttcggcgcggcggttggggtttagggaaggtgttatcgtttcggttcgtcgttttcggattcgtttaggtgatcgaggttaggatgagtcgtcgtacggcgcggacgcgagggtagtattcgtcgcgtttttcgcgcggttttacgtttattcgatgacgtaggttaggatgagtagttgtacggcgtcggttatgagttttattttgcggttgcggatgagtacgatgcgcggcgtgtcgtattcgaataggaaggtcgttagcgcggcgtagtagttcgttatggtcgcgtcgttcgtttttagttttttagtcggtttgggttttagttttcgttcggagtttcgtttagttcgtttggtttgttggcggcgtcgttatcgcggaggagggttcggaaggaggtagtacgggcggtcggggttcggggttcgggggagggcgttattttttcgtcgggaacgatgattttttagggggta

SEQ ID NO: 31332 - DNA, 560 bp, Artificial Sequence
  chemically treated genomic DNA (Homo sapiens) CpG-island No: 31332
taccccctaaaaaatcatcgttcccgacgaaaaaataacgccctcccccgaaccccgaaccccgaccgcccgtactacctccttccgaaccctcctccgcgataacgacgccgccaacaaaccaaacgaactaaacgaaactccgaacgaaaactaaaacccaaaccgactaaaaaactaaaaacgaacgacgcgaccataacgaactactacgccgcgctaacgaccttcctattcgaatacgacacgccgcgcatcgtactcatccgcaaccgcaaaataaaactcataaccgacgccgtacaactactcatcctaacctacgtcatcgaataaacgtaaaaccgcgcgaaaaacgcgacgaatactaccctcgcgtccgcgccgtacgacgactcatcctaacctcgatcacctaaacgaatccgaaaacgacgaaccgaaacgataacaccttccctaaaccccaaccgccgcgccgaaaccccgaaaacgaaaaactacttactactattttaaaaccacaacctaaaccaaacgcgataacgcaaacctataat

SEQ ID NO: 31333 - DNA, 677 bp, Artificial Sequence
  chemically treated genomic DNA (Homo sapiens) CpG-island No: 31333
tacggtcgcgggggttcgttcggggttatttgtttggaatttagcgcgaggtttagagtttttttcggttgcgtagcggcgtacgtgtttcgtggaaggggcggttttcgtattttagaaggagggggcgttcggtcgcgcggatttttttttttgtttattttttagtttcgggtaggtcggttcggaggtagcgagaaagcgtagttaggcggttgttcggcgtttttttaggtgattgttcggagtttttttaggtacgtcgtgcgttttttattcgtgtggtttttttgtatttttttttggggtcgggtcgggtaggggcggaggggagtcgtagttcggttacgggttttggggaattcgggttttcgttcggttgtatttgggtttttagtttttgttcgggcggggatagcgggaagcgtattaggttttcgggacgtcggtgtttttttgtacggtttagcgcgggaatgtggatattagcgaagtcggtttaggtcggttttcgggagaagtaggggttatacggaaagggagttcgagggttttgtagagttcgaggtcgggatttcgcgcgtgtagtgttaatgggttgcggttgggttgagcgtttttttaattttgtaggtttcgggggggttgtcgcggagagttttcgttggggtttcggg

SEQ ID NO: 31334 - DNA, 677 bp, Artificial Sequence
  chemically treated genomic DNA (Homo sapiens) CpG-island No: 31334
cccgaaaccccaacgaaaactctccgcgacaacccccccgaaacctacaaaattaaaaaaacgctcaacccaaccgcaacccattaacactacacgcgcgaaatcccgacctcgaactctacaaaaccctcgaactccctttccgtataacccctacttctcccgaaaaccgacctaaaccgacttcgctaatatccacattcccgcgctaaaccgtacaaaaaaacaccgacgtcccgaaaacctaatacgcttcccgctatccccgcccgaacaaaaactaaaaacccaaatacaaccgaacgaaaacccgaattccccaaaacccgtaaccgaactacgactcccctccgcccctacccgacccgaccccaaaaaaaaatacaaaaaaaccacacgaataaaaaacgcacgacgtacctaaaaaaactccgaacaatcacctaaaaaaacgccgaacaaccgcctaactacgctttctcgctacctccgaaccgacctacccgaaactaaaaaataaacaaaaaaaaaaatccgcgcgaccgaacgccccctccttctaaaatacgaaaaccgccccttccacgaaacacgtacgccgctacgcaaccgaaaaaaactctaaacctcgcgctaaattccaaacaaataaccccgaacgaacccccgcgaccgta

SEQ ID NO: 31335 - DNA, 677 bp, Artificial Sequence
  chemically treated genomic DNA (Homo sapiens) CpG-island No: 31335
ttcggagttttagcggaagtttttcgcggtaattttttcggggtttgtaaggttggaagggcgtttagtttagtcgtagtttattggtattgtacgcgcggggtttcgatttcgggttttgtaggattttcgggtttttttttcgtgtagtttttgtttttttcgagggtcgatttgagtcggtttcgttggtgtttatattttcgcgttgggtcgtgtaaagaagtatcggcgtttcgggggtttggtgcgtttttcgttattttcgttcggataggagttaggggtttaggtgtagtcgaacgggagttcgggttttttagagttcgtgatcgggttgcggttttttttcgtttttgttcgattcgattttaggaaggggtgtagagagattatacgagtggggagcgtacgacgtatttgggagaatttcgagtagttatttgagagaacgtcgagtagtcgtttggttgcgttttttcgttgttttcgagtcggtttgttcgggattaggaagtaagtaaaagggaaagttcgcgcggtcgggcgttttttttttttggggtgcgggaatcgttttttttacggggtacgtgcgtcgttgcgtagtcggagggaattttggatttcgcgttgagttttaggtaggtggtttcgagcgagttttcgcggtcgtg

SEQ ID NO: 31336 - DNA, 677 bp, Artificial Sequence
  chemically treated genomic DNA (Homo sapiens) CpG-island No: 31336
cacgaccgcgaaaactcgctcgaaaccacctacctaaaactcaacgcgaaatccaaaattccctccgactacgcaacgacgcacgtaccccgtaaaaaaaacgattcccgcaccccaaaaaaaaaaaacgcccgaccgcgcgaactttcccttttacttacttcctaatcccgaacaaaccgactcgaaaacaacgaaaaaacgcaaccaaacgactactcgacgttctctcaaataactactcgaaattctcccaaatacgtcgtacgctccccactcgtataatctctctacaccccttcctaaaatcgaatcgaacaaaaacgaaaaaaaaccgcaacccgatcacgaactctaaaaaacccgaactcccgttcgactacacctaaacccctaactcctatccgaacgaaaataacgaaaaacgcaccaaacccccgaaacgccgatacttctttacacgacccaacgcgaaaatataaacaccaacgaaaccgactcaaatcgaccctcgaaaaaaacaaaaactacacgaaaaaaaaacccgaaaatcctacaaaacccgaaatcgaaaccccgcgcgtacaataccaataaactacgactaaactaaacgcccttccaaccttacaaaccccgaaaaaattaccgcgaaaaacttccgctaaaactccgaa

SEQ ID NO: 31337 - DNA, 841 bp, Artificial Sequence
  chemically treated genomic DNA (Homo sapiens) CpG-island No: 31337
cggcgtttttacgcgggttagatttcgtttttgtagttttttttcggttcgcgtttatttttcgtttttaggagtcgggttcggacgttttcgggaagtagtcgtcgttttcggggttcgggcgtggtcgggtttttttcgtcgggttttcgttcgtcgtcgttttagtttttagtcgcgttagggcggggggttaggcgagtttagcgttagtaacggcgggggaggagggttcgggagttttttcgggttgcgcggcgtcggtcggcggtgtagtcgcgcgttcgtcgttagcgaagttattggttcggcgtagttattttacgcggggttgtcgcggcggttttcgcggattggcgcgtaggcgggtagggatcggggcgcgcgtaggcgagtgcgtgcggtttcgaagtttcgtcgtttcggggtttcgttttttttttcggtcgcgacgattatttttttattgttttcgcgtggtttaggtcgcgtttggggtcgtcgttaaattcggtttttatcgtttcggttcgaagaaagcgcgcgaaaggcgcgtttttagcgcgggcgttcgcgtcgtttgttgttttcggtcgtttattgtcgtatttcgcgttttcgcgtcgcgtttcgttttatcggtttaaatttgtatattttaggatcgcggttaatcgttgttcgtttttttcgaagcggatggtttttgtttgagaggaaagggagtggttggcggcgtatgcgttacggtggtcgatttgaatcgaggtttttattgttgtagtttatttttattttttttttttttgtttttttttttttttttttttttttttttttt

SEQ ID NO: 31338 - DNA, 841 bp, Artificial Sequence
  chemically treated genomic DNA (Homo sapiens) CpG-island No: 31338
aaaaaaaaaaaaaaaaaaaaaaaaaaaaaaaacaaaaaaaaaaaaaataaaaataaactacaacaataaaaacctcgattcaaatcgaccaccgtaacgcatacgccgccaaccactccctttcctctcaaacaaaaaccatccgcttcgaaaaaaacgaacaacgattaaccgcgatcctaaaatatacaaatttaaaccgataaaacgaaacgcgacgcgaaaacgcgaaatacgacaataaacgaccgaaaacaacaaacgacgcgaacgcccgcgctaaaaacgcgcctttcgcgcgctttcttcgaaccgaaacgataaaaaccgaatttaacgacgaccccaaacgcgacctaaaccacgcgaaaacaataaaaaaataatcgtcgcgaccgaaaaaaaaaacgaaaccccgaaacgacgaaacttcgaaaccgcacgcactcgcctacgcgcgccccgatccctacccgcctacgcgccaatccgcgaaaaccgccgcgacaaccccgcgtaaaataactacgccgaaccaataacttcgctaacgacgaacgcgcgactacaccgccgaccgacgccgcgcaacccgaaaaaactcccgaaccctcctcccccgccgttactaacgctaaactcgcctaaccccccgccctaacgcgactaaaaactaaaacgacgacgaacgaaaacccgacgaaaaaaacccgaccacgcccgaaccccgaaaacgacgactacttcccgaaaacgtccgaacccgactcctaaaaacgaaaaataaacgcgaaccgaaaaaaaactacaaaaacgaaatctaacccgcgtaaaaacgccg

SEQ ID NO: 31339 - DNA, 841 bp, Artificial Sequence
  chemically treated genomic DNA (Homo sapiens) CpG-island No: 31339
gagagagagagagagagaaggagagagagaaataggagggaagggggtggaaataaattatagtaataaaagtttcggtttaagtcggttatcgtggcgtatgcgtcgttagttattttttttttttttaggtaaaagttattcgtttcgagagagacgagtagcgattggtcgcgattttgggatatgtaaatttaggtcggtggggcggggcgcggcgcgagagcgcgaaatgcggtagtgaacggtcgggggtagtaggcggcgcgagcgttcgcgttgggagcgcgtttttcgcgcgtttttttcgggtcggggcggtggggatcgggtttggcggcggttttaggcgcggtttgggttacgcggggataatggaggggtggtcgtcgcggtcggggggaagggcgggatttcgagacggcggggtttcggggtcgtacgtattcgtttgcgcgcgtttcggtttttgttcgtttgcgcgttaattcgcggaggtcgtcgcggtagtttcgcgtggggtgattgcgtcgagttaatggtttcgttggcggcgagcgcgcgattgtatcgtcggtcggcgtcgcgtagttcgggagggttttcgggtttttttttttcgtcgttgttggcgttgaattcgtttggtttttcgttttggcgcggttgaggattggaacggcggcgggcgggaattcggcggggagggttcggttacgttcgggtttcggagacggcggttgtttttcgggagcgttcgggttcggtttttgggggcggggaatgggcgcgggtcggggggaggttgtagagacgggatttggttcgcgtggaggcgtcg

SEQ ID NO: 31340 - DNA, 841 bp, Artificial Sequence
  chemically treated genomic DNA (Homo sapiens) CpG-island No: 31340
cgacgcctccacgcgaaccaaatcccgtctctacaacctccccccgacccgcgcccattccccgcccccaaaaaccgaacccgaacgctcccgaaaaacaaccgccgtctccgaaacccgaacgtaaccgaaccctccccgccgaattcccgcccgccgccgttccaatcctcaaccgcgccaaaacgaaaaaccaaacgaattcaacgccaacaacgacgaaaaaaaaaaacccgaaaaccctcccgaactacgcgacgccgaccgacgatacaatcgcgcgctcgccgccaacgaaaccattaactcgacgcaatcaccccacgcgaaactaccgcgacgacctccgcgaattaacgcgcaaacgaacaaaaaccgaaacgcgcgcaaacgaatacgtacgaccccgaaaccccgccgtctcgaaatcccgcccttccccccgaccgcgacgaccacccctccattatccccgcgtaacccaaaccgcgcctaaaaccgccgccaaacccgatccccaccgccccgacccgaaaaaaacgcgcgaaaaacgcgctcccaacgcgaacgctcgcgccgcctactacccccgaccgttcactaccgcatttcgcgctctcgcgccgcgccccgccccaccgacctaaatttacatatcccaaaatcgcgaccaatcgctactcgtctctctcgaaacgaataacttttacctaaaaaaaaaaaaaataactaacgacgcatacgccacgataaccgacttaaaccgaaacttttattactataatttatttccacccccttccctcctatttctctctctccttctctctctctctctctc

SEQ ID NO: 31341 - DNA, 810 bp, Artificial Sequence
  chemically treated genomic DNA (Homo sapiens) CpG-island No: 31341
ggcgcgcggtggttgacgcggggtaggggttttggcgagcgcgggaggggcggttagtagtcgttcgcggggttggattgggagtttcgtgcgatttcgggtttggcgtttgggtcgggggtggttttcgggtttttttcgggggtcgtcgaggttcggtttcgatagttttgcggttgttgcgagcgtttttcgagttttcgtttcgcggtgttcgttttaggagcgggcgcggcgttgtgtttttttatttgcgcgtagagggtcgttcggtgaagttatggcggcgggttaggggtaaacgagcgttcgagcggggttggtaggttttcggggcgcgggaggatcgtgggattacggggatgaaaagttttgcggtttcgacgcgtttggagtaaatcgtggttttgcgcgtttttgttttttttcgtttttttttttttttttttttttttttttcgttttttttacgagtttattttttgttttggtaattagtaaagttttttcgttgcgcgtttttcggtatttttttttagaggcgcggggcgggagtcggggtgtcgcgattcggggttgggacgtaaggcggggtttcgagtgtttcgggcgtttttagcgtttagagcgcgcgttttgttcggtatttacgtttttttgggcgggttttagcggggggttgatacgattgtcgttcgggatagattgcgagcgaaggattggttttaagaaacggttgtagtcgcgggtcgtttttttggttttttatttacgtttttagttgagatattagaattttttttatatagg

SEQ ID NO: 31342 - DNA, 810 bp, Artificial Sequence
  chemically treated genomic DNA (Homo sapiens) CpG-island No: 31342
cctatataaaaaaaattctaatatctcaactaaaaacgtaaataaaaaaccaaaaaaacgacccgcgactacaaccgtttcttaaaaccaatccttcgctcgcaatctatcccgaacgacaatcgtatcaaccccccgctaaaacccgcccaaaaaaacgtaaataccgaacaaaacgcgcgctctaaacgctaaaaacgcccgaaacactcgaaaccccgccttacgtcccaaccccgaatcgcgacaccccgactcccgccccgcgcctctaaaaaaaaataccgaaaaacgcgcaacgaaaaaactttactaattaccaaaacaaaaaataaactcgtaaaaaaaacgaaaaaaaaaaaaaaaaaaaaaaaaaaaaacgaaaaaaaacaaaaacgcgcaaaaccacgatttactccaaacgcgtcgaaaccgcaaaacttttcatccccgtaatcccacgatcctcccgcgccccgaaaacctaccaaccccgctcgaacgctcgtttacccctaacccgccgccataacttcaccgaacgaccctctacgcgcaaataaaaaaacacaacgccgcgcccgctcctaaaacgaacaccgcgaaacgaaaactcgaaaaacgctcgcaacaaccgcaaaactatcgaaaccgaacctcgacgacccccgaaaaaaacccgaaaaccacccccgacccaaacgccaaacccgaaatcgcacgaaactcccaatccaaccccgcgaacgactactaaccgcccctcccgcgctcgccaaaacccctaccccgcgtcaaccaccgcgcgcc

SEQ ID NO: 31343 - DNA, 810 bp, Artificial Sequence
  chemically treated genomic DNA (Homo sapiens) CpG-island No: 31343
tttgtgtaaggggagttttggtgttttagttgagggcgtgagtagggagttaggaaagcgattcgcgattgtagtcgttttttaaggttagtttttcgttcgtagtttgtttcgggcggtagtcgtgttagtttttcgttaggattcgtttagggggacgtgggtatcgggtaggacgcgcgttttgggcgttggggacgttcgggatattcggggtttcgttttgcgttttagtttcgggtcgcggtatttcggttttcgtttcgcgtttttggagggaggtatcgagggacgcgtagcgaaggggttttgttaattgttaaagtaggaagtgagttcgtggaagaagcgaaggaggagaagaagaagggaggggaaggcggaggagggtaggggcgcgtagagttacggtttgttttaggcgcgtcggaatcgtaggattttttattttcgtggttttacggttttttcgcgtttcggaggtttgttagtttcgttcggacgttcgtttgtttttaattcgtcgttatggttttatcggacgattttttgcgcgtaggtaaagggatatagcgtcgcgttcgtttttggagcgagtatcgcggggcgggagttcgggaggcgttcgtagtagtcgtagggttatcgaggtcgggtttcggcgattttcgagggaggttcgggaattattttcgatttaggcgttagattcggagtcgtacggggtttttagtttagtttcgcgagcggttgttgatcgtttttttcgcgttcgttagggtttttgtttcgcgttagttatcgcgcgtt

SEQ ID NO: 31344 - DNA, 810 bp, Artificial Sequence
  chemically treated genomic DNA (Homo sapiens) CpG-island No: 31344
aacgcgcgataactaacgcgaaacaaaaaccctaacgaacgcgaaaaaaacgatcaacaaccgctcgcgaaactaaactaaaaaccccgtacgactccgaatctaacgcctaaatcgaaaataattcccgaacctccctcgaaaatcgccgaaacccgacctcgataaccctacgactactacgaacgcctcccgaactcccgccccgcgatactcgctccaaaaacgaacgcgacgctatatccctttacctacgcgcaaaaaatcgtccgataaaaccataacgacgaattaaaaacaaacgaacgtccgaacgaaactaacaaacctccgaaacgcgaaaaaaccgtaaaaccacgaaaataaaaaatcctacgattccgacgcgcctaaaacaaaccgtaactctacgcgcccctaccctcctccgccttcccctcccttcttcttctcctccttcgcttcttccacgaactcacttcctactttaacaattaacaaaaccccttcgctacgcgtccctcgatacctccctccaaaaacgcgaaacgaaaaccgaaataccgcgacccgaaactaaaacgcaaaacgaaaccccgaatatcccgaacgtccccaacgcccaaaacgcgcgtcctacccgatacccacgtccccctaaacgaatcctaacgaaaaactaacacgactaccgcccgaaacaaactacgaacgaaaaactaaccttaaaaaacgactacaatcgcgaatcgctttcctaactccctactcacgccctcaactaaaacaccaaaactccccttacacaaa

SEQ ID NO: 31345 - DNA, 547 bp, Artificial Sequence
  chemically treated genomic DNA (Homo sapiens) CpG-island No: 31345
ggtttcgttattagtttcgtttaattaacgaggttaattagcggttcgtaacgggggagggatacgtagtcgttagtcgaataattcgatgacgaggtttaggaagtacgttgaaattttgggcggcggtaagttgtgcgattttttttgcggtcggtttgggtaggtgtttttttcgagaggtaggtaggggatttcggacgtgagttcgtgtagttgggtgtgttgtgcggcgggtggggcgggttattcgtcgttacgttttggcgggtttagcggattcgcggcgtagacgttggggaggtcgtaggcgcgattcggggcggggatcgtgttagttgcgtgcgttcgttgcggtttgtgggtgtttcgggtttttattttagttttcgcgtcggcggttgtttgttcgtcgcggttgcgcgcgtttcggggaggtgtttggtttagagagcggtttacggagaaggtatagcgagggtaaagcgagatttgggcgtacgttgaattttgttggttttggttatttttgaaaattttaagtata

SEQ ID NO: 31346 - DNA, 547 bp, Artificial Sequence
  chemically treated genomic DNA (Homo sapiens) CpG-island No: 31346
tatacttaaaattttcaaaaataaccaaaaccaacaaaattcaacgtacgcccaaatctcgctttaccctcgctataccttctccgtaaaccgctctctaaaccaaacacctccccgaaacgcgcgcaaccgcgacgaacaaacaaccgccgacgcgaaaactaaaataaaaacccgaaacacccacaaaccgcaacgaacgcacgcaactaacacgatccccgccccgaatcgcgcctacgacctccccaacgtctacgccgcgaatccgctaaacccgccaaaacgtaacgacgaataacccgccccacccgccgcacaacacacccaactacacgaactcacgtccgaaatcccctacctacctctcgaaaaaaacacctacccaaaccgaccgcaaaaaaaatcgcacaacttaccgccgcccaaaatttcaacgtacttcctaaacctcgtcatcgaattattcgactaacgactacgtatccctcccccgttacgaaccgctaattaacctcgttaattaaacgaaactaataacgaaacc

SEQ ID NO: 31347 - DNA, 547 bp, Artificial Sequence
  chemically treated genomic DNA (Homo sapiens) CpG-island No: 31347
tatgtttaaagtttttagagataattaaagttaatagaatttaacgtgcgtttaggtttcgttttgttttcgttgtgtttttttcgtaggtcgttttttgggttaagtattttttcggaacgcgcgtaatcgcggcggataggtagtcgtcggcgcgggagttgaggtaggagttcggggtatttataggtcgtagcggacgtacgtagttagtacggttttcgtttcgggtcgcgtttgcggtttttttagcgtttgcgtcgcgagttcgttggattcgttagggcgtaacggcgggtaattcgttttattcgtcgtataatatatttaattgtacggatttacgttcgggattttttgtttgtttttcgaggaagatatttgtttaggtcggtcgtagaagaggtcgtatagtttgtcgtcgtttagggttttagcgtgttttttgggtttcgttatcgaattgttcggttgacggttgcgtgtttttttttcgttgcgggtcgttgattggtttcgttgattgggcggggttagtagcgggatt

SEQ ID NO: 31348 - DNA, 547 bp, Artificial Sequence
  chemically treated genomic DNA (Homo sapiens) CpG-island No: 31348
aatcccgctactaaccccgcccaatcaacgaaaccaatcaacgacccgcaacgaaaaaaaaacacgcaaccgtcaaccgaacaattcgataacgaaacccaaaaaacacgctaaaaccctaaacgacgacaaactatacgacctcttctacgaccgacctaaacaaatatcttcctcgaaaaacaaacaaaaaatcccgaacgtaaatccgtacaattaaatatattatacgacgaataaaacgaattacccgccgttacgccctaacgaatccaacgaactcgcgacgcaaacgctaaaaaaaccgcaaacgcgacccgaaacgaaaaccgtactaactacgtacgtccgctacgacctataaataccccgaactcctacctcaactcccgcgccgacgactacctatccgccgcgattacgcgcgttccgaaaaaatacttaacccaaaaaacgacctacgaaaaaaacacaacgaaaacaaaacgaaacctaaacgcacgttaaattctattaactttaattatctctaaaaactttaaacata

SEQ ID NO: 31349 - DNA, 848 bp, Artificial Sequence
  chemically treated genomic DNA (Homo sapiens) CpG-island No: 31349
ttacgtagacgttgataggagttttagttacggcgtttagggttatcggagtgttttttattcgtatcggtagcgtttcggtcggggttatggttacggttttcgaggcgtttatagtagtcgggggagcggcgtcggcgggttcggtgaggtcggcgggtattttttaggggtttagcggtagttttggcgttgcggtttcgggagtagaggtgaggggaggtttggcgcgcggtagtcgatttcggtgcggttcgggttttatagtatcgttggggagaggcgcgggggtcgtagtagcgaagttagtgacgggcgttcgttgtacggtaggatacgcgcgtttcggatttttttttcgttcgcgcgagtttgggttgttttcggagcgatattcgttcgatttttcgtagtttttttagcggcgtttatacgtgcgttgttttagttttgcgttttaggttcgggtttcgttgcgggggagtttggatttgcggttttcggaaggtcgtcgtttatatttcgagtttaattgcgtagttgttttttcgttagaaattttaaaattacgaatttcgagtgtttatagttttttacgcgcgattggtacggtttcgtcgcgcggttacgttagttatgtttatatagttacgcggagatttcgcgtacgcgtttaggtcgtcgttatcgtttcgggttttttcgggattcggtcgcgtgattggttaaggagcggagtcgcgttcgtgacgttattggggacggttttagggagcgttaaaattttttttagaatcgttagtaaggaggggcgatgttagaaatttattacgtgggaggggtaagtt

SEQ ID NO: 31350 - DNA, 848 bp, Artificial Sequence
  chemically treated genomic DNA (Homo sapiens) CpG-island No: 31350
aacttacccctcccacgtaataaatttctaacatcgcccctccttactaacgattctaaaaaaaattttaacgctccctaaaaccgtccccaataacgtcacgaacgcgactccgctccttaaccaatcacgcgaccgaatcccgaaaaaacccgaaacgataacgacgacctaaacgcgtacgcgaaatctccgcgtaactatataaacataactaacgtaaccgcgcgacgaaaccgtaccaatcgcgcgtaaaaaactataaacactcgaaattcgtaattttaaaatttctaacgaaaaaacaactacgcaattaaactcgaaatataaacgacgaccttccgaaaaccgcaaatccaaactcccccgcaacgaaacccgaacctaaaacgcaaaactaaaacaacgcacgtataaacgccgctaaaaaaactacgaaaaatcgaacgaatatcgctccgaaaacaacccaaactcgcgcgaacgaaaaaaaaatccgaaacgcgcgtatcctaccgtacaacgaacgcccgtcactaacttcgctactacgacccccgcgcctctccccaacgatactataaaacccgaaccgcaccgaaatcgactaccgcgcgccaaacctcccctcacctctactcccgaaaccgcaacgccaaaactaccgctaaacccctaaaaaatacccgccgacctcaccgaacccgccgacgccgctcccccgactactataaacgcctcgaaaaccgtaaccataaccccgaccgaaacgctaccgatacgaataaaaaacactccgataaccctaaacgccgtaactaaaactcctatcaacgtctacgtaa

SEQ ID NO: 31351 - DNA, 848 bp, Artificial Sequence
  chemically treated genomic DNA (Homo sapiens) CpG-island No: 31351
agtttgttttttttacgtgataggtttttggtatcgtttttttttgttggcgattttggggaagattttaacgttttttggagtcgtttttagtgacgttacgggcgcggtttcgttttttggttaattacgcggtcggatttcggggaaattcggggcggtggcggcggtttgggcgcgtgcgcgaggttttcgcgtggttatataaatatggttggcgtggtcgcgcggcggggtcgtgttaatcgcgcgtagggggttgtgggtattcggggttcgtagttttgaaatttttggcgggggagtagttgcgtagttaggttcgaggtgtgagcgacgatttttcgggagtcgtaagtttaggttttttcgtagcgggattcgagtttgaggcgtagggttgaggtagcgtacgtgtgagcgtcgttgaggaagttgcgagaggtcgggcgggtgtcgtttcgggggtagtttaggttcgcgcggacgagaggaaggttcgggacgcgcgtgttttgtcgtgtagcgggcgttcgttattgatttcgttgttgcggttttcgcgtttttttttagcgatgttgtggaattcgaatcgtatcggagtcggttgtcgcgcgttaagtttttttttatttttgttttcggaatcgtagcgttaaagttgtcgttgagtttttgggggatgttcgtcggttttatcgaattcgtcggcgtcgttttttcggttgttgtgagcgtttcggggatcgtgattatggtttcggtcggggcgttgtcggtgcgggtggagagtatttcggtggttttgggcgtcgtgattaaggtttttgttagcgtttgcgtgg

SEQ ID NO: 31352 - DNA, 848 bp, Artificial Sequence
  chemically treated genomic DNA (Homo sapiens) CpG-island No: 31352
ccacgcaaacgctaacaaaaaccttaatcacgacgcccaaaaccaccgaaatactctccacccgcaccgacaacgccccgaccgaaaccataatcacgatccccgaaacgctcacaacaaccgaaaaaacgacgccgacgaattcgataaaaccgacgaacatcccccaaaaactcaacgacaactttaacgctacgattccgaaaacaaaaataaaaaaaaacttaacgcgcgacaaccgactccgatacgattcgaattccacaacatcgctaaaaaaaaacgcgaaaaccgcaacaacgaaatcaataacgaacgcccgctacacgacaaaacacgcgcgtcccgaaccttcctctcgtccgcgcgaacctaaactacccccgaaacgacacccgcccgacctctcgcaacttcctcaacgacgctcacacgtacgctacctcaaccctacgcctcaaactcgaatcccgctacgaaaaaacctaaacttacgactcccgaaaaatcgtcgctcacacctcgaacctaactacgcaactactcccccgccaaaaatttcaaaactacgaaccccgaatacccacaaccccctacgcgcgattaacacgaccccgccgcgcgaccacgccaaccatatttatataaccacgcgaaaacctcgcgcacgcgcccaaaccgccgccaccgccccgaatttccccgaaatccgaccgcgtaattaaccaaaaaacgaaaccgcgcccgtaacgtcactaaaaacgactccaaaaaacgttaaaatcttccccaaaatcgccaacaaaaaaaaacgataccaaaaacctatcacgtaaaaaaaacaaact

SEQ ID NO: 31353 - DNA, 684 bp, Artificial Sequence
  chemically treated genomic DNA (Homo sapiens) CpG-island No: 31353
gcgtgaatttagattcgatagttagtatcgtaattggagattatgcgggtatcggtgtgaatttagattttacggttagtatcgtaattggagattatgcgggtatcggtgtgaatttagattcgacggttagtatcgtaattggagattacgcgggtatcggtgtgaatttagattttacggttagtatcgtaattggagattacgcgggtatcggtgtgaatttagattttacggttagtatcgtaattggagattacgcgggtatcggtgtgaatttagattcgacggttagtatcgtaattggagattacgcgggtatcggtgtgaatttagattttacggttagtatcgtaattggagattacgcgggtatcggtgtgaatttagattttacggttagtatcgtaattggagattacgcgggtatcggtgtgaatttagattcgacggttagtatcgtaattggagattacgcgggtatcggtgtgaatttagattttacggttagtatcgtaattggagattacgcgggtatcggtgtgaatttagattttacggttagtatcgtaattggagattatgcgggtatcggtgtgaatttagattttacggttagtatcgtaattggagattatataggtatcggtgtgaatttagacgtaacggtatttttttgggttg

SEQ ID NO: 31354 - DNA, 684 bp, Artificial Sequence
  chemically treated genomic DNA (Homo sapiens) CpG-island No: 31354
caacccaaaaaaataccgttacgtctaaattcacaccgatacctatataatctccaattacgatactaaccgtaaaatctaaattcacaccgatacccgcataatctccaattacgatactaaccgtaaaatctaaattcacaccgatacccgcgtaatctccaattacgatactaaccgtaaaatctaaattcacaccgatacccgcgtaatctccaattacgatactaaccgtcgaatctaaattcacaccgatacccgcgtaatctccaattacgatactaaccgtaaaatctaaattcacaccgatacccgcgtaatctccaattacgatactaaccgtaaaatctaaattcacaccgatacccgcgtaatctccaattacgatactaaccgtcgaatctaaattcacaccgatacccgcgtaatctccaattacgatactaaccgtaaaatctaaattcacaccgatacccgcgtaatctccaattacgatactaaccgtaaaatctaaattcacaccgatacccgcgtaatctccaattacgatactaaccgtcgaatctaaattcacaccgatacccgcataatctccaattacgatactaaccgtaaaatctaaattcacaccgatacccgcataatctccaattacgatactaactatcgaatctaaattcacgc

SEQ ID NO: 31355 - DNA, 684 bp, Artificial Sequence
  chemically treated genomic DNA (Homo sapiens) CpG-island No: 31355
tagtttaggagggtgtcgttgcgtttgagtttatatcggtgtttgtgtggtttttagttacggtgttggtcgtggagtttgggtttatatcggtgttcgtatggtttttagttacggtgttggtcgtggagtttgggtttatatcggtgttcgcgtggtttttagttacggtgttggtcgtggagtttgggtttatatcggtgttcgcgtggtttttagttacggtgttggtcgtcgggtttgggtttatatcggtgttcgcgtggtttttagttacggtgttggtcgtggagtttgggtttatatcggtgttcgcgtggtttttagttacggtgttggtcgtggagtttgggtttatatcggtgttcgcgtggtttttagttacggtgttggtcgtcgggtttgagtttatatcggtgttcgcgtggtttttagttacggtgttggtcgtggagtttgggtttatatcggtgttcgcgtggtttttagttacggtgttggtcgtggagtttgggtttatatcggtgttcgcgtggtttttagttacggtgttggtcgtcgggtttgagtttatatcggtgttcgtatggtttttagttacggtgttggtcgtggagtttgggtttatatcggtgttcgtatggtttttagttacggtgttggttgtcgggtttgagtttacgt

SEQ ID NO: 31356 - DNA, 684 bp, Artificial Sequence
  chemically treated genomic DNA (Homo sapiens) CpG-island No: 31356
acgtaaactcaaacccgacaaccaacaccgtaactaaaaaccatacgaacaccgatataaacccaaactccacgaccaacaccgtaactaaaaaccatacgaacaccgatataaactcaaacccgacgaccaacaccgtaactaaaaaccacgcgaacaccgatataaacccaaactccacgaccaacaccgtaactaaaaaccacgcgaacaccgatataaacccaaactccacgaccaacaccgtaactaaaaaccacgcgaacaccgatataaactcaaacccgacgaccaacaccgtaactaaaaaccacgcgaacaccgatataaacccaaactccacgaccaacaccgtaactaaaaaccacgcgaacaccgatataaacccaaactccacgaccaacaccgtaactaaaaaccacgcgaacaccgatataaacccaaacccgacgaccaacaccgtaactaaaaaccacgcgaacaccgatataaacccaaactccacgaccaacaccgtaactaaaaaccacgcgaacaccgatataaacccaaactccacgaccaacaccgtaactaaaaaccatacgaacaccgatataaacccaaactccacgaccaacaccgtaactaaaaaccacacaaacaccgatataaactcaaacgcaacgacaccctcctaaacta

SEQ ID NO: 31357 - DNA, 668 bp, Artificial Sequence
  chemically treated genomic DNA (Homo sapiens) CpG-island No: 31357
cggggtttataatttgatttttatttacgcgtattattttttaatttcggggttcgtaatttggtttttatttacgcgtattattttttagataatttcggggttcgcgatttggtttttatttacgggtattatttttttagtttcggggttcgcgatttgatttttatttacgcgtattattttttaatttcggggttcgcgatttgatttttatttacgcgtattattttttaatttcggggttcgtaatttgatttttatttacgcgtattattttttaatttcggggttcgcgatttgatttttatttacgcgtattattttttagataatttcggggtttataatttggtttttatttacgcgtattattttttagataatttcggggttcgcgatttgatttttatttacgcgtattattttttagataatttcggggtttataatttgatttttatttatgcgtattattttttaattttagggttcgcgatttgatttttatttacgcgtattattttttaatttcggggttcgcgatttgatttttatttacgcgtattattttttagataatttcggggttcgtaatttggtttttatttacgtatattattttttaattttagggtttacgatttggtttttatttacgggtatta

SEQ ID NO: 31358 - DNA, 668 bp, Artificial Sequence
  chemically treated genomic DNA (Homo sapiens) CpG-island No: 31358
taatacccgtaaataaaaaccaaatcgtaaaccctaaaattaaaaaataatatacgtaaataaaaaccaaattacgaaccccgaaattatctaaaaaataatacgcgtaaataaaaatcaaatcgcgaaccccgaaattaaaaaataatacgcgtaaataaaaatcaaatcgcgaaccctaaaattaaaaaataatacgcataaataaaaatcaaattataaaccccgaaattatctaaaaaataatacgcgtaaataaaaatcaaatcgcgaaccccgaaattatctaaaaaataatacgcgtaaataaaaaccaaattataaaccccgaaattatctaaaaaataatacgcgtaaataaaaatcaaatcgcgaaccccgaaattaaaaaataatacgcgtaaataaaaatcaaattacgaaccccgaaattaaaaaataatacgcgtaaataaaaatcaaatcgcgaaccccgaaattaaaaaataatacgcgtaaataaaaatcaaatcgcgaaccccgaaactaaaaaaataatacccgtaaataaaaaccaaatcgcgaaccccgaaattatctaaaaaataatacgcgtaaataaaaaccaaattacgaaccccgaaattaaaaaataatacgcgtaaataaaaatcaaattataaaccccg

SEQ ID NO: 31359 - DNA, 668 bp, Artificial Sequence
  chemically treated genomic DNA (Homo sapiens) CpG-island No: 31359
tgatgttcgtgagtgggggttaggtcgtgggttttgagattgagaggtgatgtgcgtgagtgggggttaggttgcgggtttcgagattatttgagaggtgatgcgcgtgagtgggggttaggtcgcgggtttcgagattgagaggtgatgcgcgtgagtgggggttaggtcgcgggttttgagattgagaggtgatgcgtatgagtgggggttaggttgtgggtttcgagattatttgagaggtgatgcgcgtgagtgggggttaggtcgcgggtttcgagattatttgagaggtgatacgcgtgagtgggggttaggttgtgggtttcgagattatttgagaggtgatgcgcgtgagtgggggttaggtcgcgggtttcgagattgagaggtgatgcgcgtgagtgggggttaggttgcgggtttcgagattgagaggtgatgcgcgtgagtgggggttaggtcgcgggtttcgagattgagaggtgatgcgcgtgagtgggggttaggtcgcgggtttcgagattagagaggtggtgttcgtgagtgggggttaggtcgcgggtttcgagattatttgagaggtgatgcgcgtgagtgggggttaggttgcgggtttcgagattgagaggtgatgcgcgtgagtgggggttaggttgtgggtttcg

SEQ ID NO: 31360 - DNA, 668 bp, Artificial Sequence
  chemically treated genomic DNA (Homo sapiens) CpG-island No: 31360
cgaaacccacaacctaacccccactcacgcgcatcacctctcaatctcgaaacccgcaacctaacccccactcacgcgcatcacctctcaaataatctcgaaacccgcgacctaacccccactcacgaacaccacctctctaatctcgaaacccgcgacctaacccccactcacgcgcatcacctctcaatctcgaaacccgcgacctaacccccactcacgcgcatcacctctcaatctcgaaacccgcaacctaacccccactcacgcgcatcacctctcaatctcgaaacccgcgacctaacccccactcacgcgcatcacctctcaaataatctcgaaacccacaacctaacccccactcacgcgtatcacctctcaaataatctcgaaacccgcgacctaacccccactcacgcgcatcacctctcaaataatctcgaaacccacaacctaacccccactcatacgcatcacctctcaatctcaaaacccgcgacctaacccccactcacgcgcatcacctctcaatctcgaaacccgcgacctaacccccactcacgcgcatcacctctcaaataatctcgaaacccgcaacctaacccccactcacgcacatcacctctcaatctcaaaacccacgacctaacccccactcacgaacatca

SEQ ID NO: 31361 - DNA, 736 bp, Artificial Sequence
  chemically treated genomic DNA (Homo sapiens) CpG-island No: 31361
cggggtcgcgcggagttcgcgtggggaaaggtcgggtttgtattcgtttgtcgggttgggcgttttcgtttcgggttcgggatataggggtttttaggtaggcgtcggttttttcgggtgggcggggacgtcggtttacggtttacggttggcggttttcggggtcggggcgcggggtacggggcgtgggcgcgggcgcgggtcgtcgggcgtgtaggttttggcggatagttcgttttcgcggttcgagcggaaggcggcggttacggttattaggtaggcggtgttcggcgttaggttttgtagcgtggtgtagttgcggtcgcgggtatttttattcgtgcgttttttcgtttcgtagcggttcgaattgtacgtggtagtcgagcgtcgcggttgagtttagcgttggggtttaatttacgcggagcgtgcgcggtcgtgcgtgggagatgacgatgcgtttcgttcggttttttttggggcggggagggcggcgagttgcgtggggtcgtttagtttacgatttttggttcgaagttttcgttttgttttatcgggtcgcgtcgtattcgtaggatttggggttttaggaggcgtacgttggatttaggtattagcgttacgtcgtagttcgtgttcgggtcgaggtcggtttagatttagttcgtggcgttttttggtagttgttggcgttttgtagttttcggttgggcgttgggtattagttttagta

SEQ ID NO: 31362 - DNA, 736 bp, Artificial Sequence
  chemically treated genomic DNA (Homo sapiens) CpG-island No: 31362
tactaaaactaatacccaacgcccaaccgaaaactacaaaacgccaacaactaccaaaaaacgccacgaactaaatctaaaccgacctcgacccgaacacgaactacgacgtaacgctaatacctaaatccaacgtacgcctcctaaaaccccaaatcctacgaatacgacgcgacccgataaaacaaaacgaaaacttcgaaccaaaaatcgtaaactaaacgaccccacgcaactcgccgccctccccgccccaaaaaaaaccgaacgaaacgcatcgtcatctcccacgcacgaccgcgcacgctccgcgtaaattaaaccccaacgctaaactcaaccgcgacgctcgactaccacgtacaattcgaaccgctacgaaacgaaaaaacgcacgaataaaaatacccgcgaccgcaactacaccacgctacaaaacctaacgccgaacaccgcctacctaataaccgtaaccgccgccttccgctcgaaccgcgaaaacgaactatccgccaaaacctacacgcccgacgacccgcgcccgcgcccacgccccgtaccccgcgccccgaccccgaaaaccgccaaccgtaaaccgtaaaccgacgtccccgcccacccgaaaaaaccgacgcctacctaaaaacccctatatcccgaacccgaaacgaaaacgcccaacccgacaaacgaatacaaacccgacctttccccacgcgaactccgcgcgaccccg

SEQ ID NO: 31363 - DNA, 736 bp, Artificial Sequence
  chemically treated genomic DNA (Homo sapiens) CpG-island No: 31363
tgttggagttggtgtttagcgtttagtcgggggttgtaagacgttagtagttgttagggaacgttacggattggatttgggtcggtttcgattcggatacggattacgacgtggcgttagtgtttgagtttaacgtgcgttttttgaggttttagattttgcgggtgcgacgcggttcggtgaggtagggcgggggtttcgggttaggagtcgtgggttgggcggttttacgtagttcgtcgtttttttcgttttagaggaggtcgggcggagcgtatcgttattttttacgtacggtcgcgtacgtttcgcgtgagttgggttttagcgttgggtttagtcgcggcgttcggttattacgtgtagttcgggtcgttgcggggcggggaggcgtacgggtggaggtgttcgcggtcgtaattgtattacgttgtagggtttggcgtcgggtatcgtttatttggtgatcgtgatcgtcgtttttcgttcgggtcgcgagagcgagttgttcgttaaggtttgtacgttcgacggttcgcgttcgcgtttacgtttcgtgtttcgcgtttcgatttcggggatcgttagtcgtgagtcgtaagtcggcgttttcgtttattcgagagggtcggcgtttatttgagggtttttgtgtttcgaattcggagcggaggcgtttaattcggtagacgggtgtaggttcggtttttttttacgcggatttcgcgcgatttcg

SEQ ID NO: 31364 - DNA, 736 bp, Artificial Sequence
  chemically treated genomic DNA (Homo sapiens) CpG-island No: 31364
cgaaatcgcgcgaaatccgcgtaaaaaaaaaccgaacctacacccgtctaccgaattaaacgcctccgctccgaattcgaaacacaaaaaccctcaaataaacgccgaccctctcgaataaacgaaaacgccgacttacgactcacgactaacgatccccgaaatcgaaacgcgaaacacgaaacgtaaacgcgaacgcgaaccgtcgaacgtacaaaccttaacgaacaactcgctctcgcgacccgaacgaaaaacgacgatcacgatcaccaaataaacgatacccgacgccaaaccctacaacgtaatacaattacgaccgcgaacacctccacccgtacgcctccccgccccgcaacgacccgaactacacgtaataaccgaacgccgcgactaaacccaacgctaaaacccaactcacgcgaaacgtacgcgaccgtacgtaaaaaataacgatacgctccgcccgacctcctctaaaacgaaaaaaacgacgaactacgtaaaaccgcccaacccacgactcctaacccgaaacccccgccctacctcaccgaaccgcgtcgcacccgcaaaatctaaaacctcaaaaaacgcacgttaaactcaaacactaacgccacgtcgtaatccgtatccgaatcgaaaccgacccaaatccaatccgtaacgttccctaacaactactaacgtcttacaacccccgactaaacgctaaacaccaactccaaca

SEQ ID NO: 31365 - DNA, 943 bp, Artificial Sequence
  chemically treated genomic DNA (Homo sapiens) CpG-island No: 31365
cgatatatttatgattatattacggagttcgttttcgtatttttcgcgatgtcgcggtcgcgtcgtagtcgcgcgttttagattcggtcgtagtttcggaacgcggcgtattcgtcgtttcgttgttttttttcggtattatcgttttcgtttcgacgtttcgagtttttcgcgcgttcgttcgtcggtcgaggtcgcgttcgcgttttcgtttacgcgcgcgtttcgattcgttgtttcgcgttcggtcgtttattcgtttcggttcgggagcggcgcgagggacgtagtacggaggcgcgtttagtttcgtcgttttttcgtcgtcgttttcggtcgcgtcgttaaagggatcgtcggttcggggttttgaggtggtcgcgggggggcgttcgagtcgcggtgttgacgttacgggggcgcgcggcgggggcgggcgtcggttgtagtagcgtaggcgtttttcgttcgtttcgtttcgtttcggtttcgttttcgcgcgcgcgtcgttttatttgtttgtttcggcgtttgcgacgcgcgtcgttggttggtgggttcgtggggttcggggcgtcgtggtcgggcggagggatttcggggacgtcgagtgcgcggcgttgaagtggcgttcggtcgttttggttatcgcgaaggttttcgattcgcgtgttttttgtcgggttttacggggtttaggtagtaggcgagcggatgcgggcgcgcgggggggtttgtgtacggaggcgtcggagcgtcggcgggggagggatttagttttggggtttttcgtaggtaggggagattttcgaggcgttttttgaggtcgcgggggttcgcgtttattgtttcggggttcgcggggttggaggttttttcgattcgattttagtaggaagcgcggaggttattagagggcggtttaggatggggggagtgagga

SEQ ID NO: 31366 - DNA, 943 bp, Artificial Sequence
  chemically treated genomic DNA (Homo sapiens) CpG-island No: 31366
tcctcactccccccatcctaaaccgccctctaataacctccgcgcttcctactaaaatcgaatcgaaaaaacctccaaccccgcgaaccccgaaacaataaacgcgaacccccgcgacctcaaaaaacgcctcgaaaatctcccctacctacgaaaaaccccaaaactaaatccctcccccgccgacgctccgacgcctccgtacacaaacccccccgcgcgcccgcatccgctcgcctactacctaaaccccgtaaaacccgacaaaaaacacgcgaatcgaaaaccttcgcgataaccaaaacgaccgaacgccacttcaacgccgcgcactcgacgtccccgaaatccctccgcccgaccacgacgccccgaaccccacgaacccaccaaccaacgacgcgcgtcgcaaacgccgaaacaaacaaataaaacgacgcgcgcgcgaaaacgaaaccgaaacgaaacgaaacgaacgaaaaacgcctacgctactacaaccgacgcccgcccccgccgcgcgcccccgtaacgtcaacaccgcgactcgaacgcccccccgcgaccacctcaaaaccccgaaccgacgatccctttaacgacgcgaccgaaaacgacgacgaaaaaacgacgaaactaaacgcgcctccgtactacgtccctcgcgccgctcccgaaccgaaacgaataaacgaccgaacgcgaaacaacgaatcgaaacgcgcgcgtaaacgaaaacgcgaacgcgacctcgaccgacgaacgaacgcgcgaaaaactcgaaacgtcgaaacgaaaacgataataccgaaaaaaaacaacgaaacgacgaatacgccgcgttccgaaactacgaccgaatctaaaacgcgcgactacgacgcgaccgcgacatcgcgaaaaatacgaaaacgaactccgtaatataatcataaatatatcg

SEQ ID NO: 31367 - DNA, 943 bp, Artificial Sequence
  chemically treated genomic DNA (Homo sapiens) CpG-island No: 31367
tttttattttttttattttgggtcgttttttagtggttttcgcgttttttgttggggtcgggtcgggaaggtttttagtttcgcgagtttcggaatagtaagcgcggattttcgcggttttaagggacgtttcggaagttttttttgtttgcggagaattttaggattaaatttttttttcgtcggcgtttcgacgttttcgtgtatagattttttcgcgcgttcgtattcgttcgtttgttgtttggatttcgtgggattcggtagagggtacgcgagtcgggagttttcgcggtggttagagcgatcgggcgttattttagcgtcgcgtattcggcgttttcggggttttttcgttcgattacgacgtttcggattttacgggtttattagttagcggcgcgcgtcgtaggcgtcggagtagataggtgaagcggcgcgcgcgcgggggcggggtcggggcggggcggggcgagcgaggagcgtttgcgttgttgtagtcggcgttcgttttcgtcgcgcgttttcgtgacgttaatatcgcggttcgggcgttttttcgcggttattttaggatttcgggtcggcggtttttttaacggcgcggtcgagggcgacggcgggagggcggcggggttgagcgcgttttcgtgttgcgtttttcgcgtcgttttcgggtcggggcggatgggcggtcgggcgcggggtagcgagtcgggacgcgcgcgtgagcgggggcgcgggcgcggtttcggtcggcgggcgagcgcgcggggggttcggagcgtcggggcgagagcggtggtgtcgggggggggtagcggggcggcgggtacgtcgcgtttcgaggttgcggtcgggtttggagcgcgcggttgcggcgcggtcgcggtatcgcgaggggtacgagggcgaatttcgtgatatggttataggtgtgtcg

SEQ ID NO: 31368 - DNA, 943 bp, Artificial Sequence
  chemically treated genomic DNA (Homo sapiens) CpG-island No: 31368
cgacacacctataaccatatcacgaaattcgccctcgtacccctcgcgataccgcgaccgcgccgcaaccgcgcgctccaaacccgaccgcaacctcgaaacgcgacgtacccgccgccccgctacccccccccgacaccaccgctctcgccccgacgctccgaaccccccgcgcgctcgcccgccgaccgaaaccgcgcccgcgcccccgctcacgcgcgcgtcccgactcgctaccccgcgcccgaccgcccatccgccccgacccgaaaacgacgcgaaaaacgcaacacgaaaacgcgctcaaccccgccgccctcccgccgtcgccctcgaccgcgccgttaaaaaaaccgccgacccgaaatcctaaaataaccgcgaaaaaacgcccgaaccgcgatattaacgtcacgaaaacgcgcgacgaaaacgaacgccgactacaacaacgcaaacgctcctcgctcgccccgccccgccccgaccccgcccccgcgcgcgcgccgcttcacctatctactccgacgcctacgacgcgcgccgctaactaataaacccgtaaaatccgaaacgtcgtaatcgaacgaaaaaaccccgaaaacgccgaatacgcgacgctaaaataacgcccgatcgctctaaccaccgcgaaaactcccgactcgcgtaccctctaccgaatcccacgaaatccaaacaacaaacgaacgaatacgaacgcgcgaaaaaatctatacacgaaaacgtcgaaacgccgacgaaaaaaaaatttaatcctaaaattctccgcaaacaaaaaaaacttccgaaacgtcccttaaaaccgcgaaaatccgcgcttactattccgaaactcgcgaaactaaaaaccttcccgacccgaccccaacaaaaaacgcgaaaaccactaaaaaacgacccaaaataaaaaaaataaaaa

SEQ ID NO: 31369 - DNA, 701 bp, Artificial Sequence
  chemically treated genomic DNA (Homo sapiens) CpG-island No: 31369
gaagcggtttcgtgttgtttagcgttggcgtttcggcggcgcggagttcggttaaatgataggatttgagggtaaaggaggataaaagtttttacgaggtgggtattgcgggaaggaggtcgacgatttcgagatttttcggcgatttcggcgggttatttcggggcggtgagggttttcgcggtacgtgtgcggcggcgtcggtcgtttttttcgtcgttcgggaaggttacgtcgttcggacgtcgaggtttttttcgtgtttcgtttttttcgtttcgtatatttttcgtagttggaggcgtcgggtcggtttgcgtttatcgtttcgttagcgtggttacgtttcgtttaggttgcgtcgtttgtttttggtttcgggtagtcggtcggggcggttatttaatatcgacgtcggtcgcggtcggtttttcgcgtaggtagttttagaggcggtttcgcgaagtttaggagcgtttttgcgattcgggggtagattgcgtagtgttacgtttaggtaggtatttggagtcgtcgtagtttatcggttttgtcgttatttttcgtacgggaagcggaagtgggcgcgggatcgcggcgcgtttagttcggttagttttcgcgtttagtttagttcgcgagttggcgtgtcgttgttgtttgttttaggaaagttgtggggtagggtttgcgtttttggg

SEQ ID NO: 31370 - DNA, 701 bp, Artificial Sequence
  chemically treated genomic DNA (Homo sapiens) CpG-island No: 31370
cccaaaaacgcaaaccctaccccacaactttcctaaaacaaacaacaacgacacgccaactcgcgaactaaactaaacgcgaaaactaaccgaactaaacgcgccgcgatcccgcgcccacttccgcttcccgtacgaaaaataacgacaaaaccgataaactacgacgactccaaatacctacctaaacgtaacactacgcaatctacccccgaatcgcaaaaacgctcctaaacttcgcgaaaccgcctctaaaactacctacgcgaaaaaccgaccgcgaccgacgtcgatattaaataaccgccccgaccgactacccgaaaccaaaaacaaacgacgcaacctaaacgaaacgtaaccacgctaacgaaacgataaacgcaaaccgacccgacgcctccaactacgaaaaatatacgaaacgaaaaaaacgaaacacgaaaaaaacctcgacgtccgaacgacgtaaccttcccgaacgacgaaaaaaacgaccgacgccgccgcacacgtaccgcgaaaaccctcaccgccccgaaataacccgccgaaatcgccgaaaaatctcgaaatcgtcgacctccttcccgcaatacccacctcgtaaaaacttttatcctcctttaccctcaaatcctatcatttaaccgaactccgcgccgccgaaacgccaacgctaaacaacacgaaaccgcttc

SEQ ID NO: 31371 - DNA, 701 bp, Artificial Sequence
  chemically treated genomic DNA (Homo sapiens) CpG-island No: 31371
tttagaggcgtaggttttgttttatagtttttttagggtaggtagtagcgatacgttagttcgcgggttaggttgggcgcgggaattggtcgggttgggcgcgtcgcggtttcgcgtttattttcgtttttcgtgcgggggatggcggtagagtcggtgggttgcggcggttttaggtatttgtttgagcgtggtattgcgtagtttgttttcgggtcgtaggggcgtttttgagtttcgcggggtcgtttttagggttgtttgcgcggagagtcgatcgcggtcgacgtcggtgttaagtggtcgtttcggtcggttattcggagttaagagtaggcggcgtagtttgagcgggacgtggttacgttggcgaggcggtaagcgtagatcgattcggcgtttttagttgcggggagtgtgcggggcggagggagcggggtacggggagagtttcggcgttcgggcggcgtgattttttcgggcggcgggggaagcggtcggcgtcgtcgtatacgtgtcgcgggaatttttatcgtttcggggtggttcgtcggggtcgtcggagaatttcggggtcgtcggtttttttttcgtagtgtttatttcgtgggaatttttgtttttttttgtttttaagttttattatttggtcgggtttcgcgtcgtcggggcgttagcgttgggtagtacggagtcgtttt

SEQ ID NO: 31372 - DNA, 701 bp, Artificial Sequence
  chemically treated genomic DNA (Homo sapiens) CpG-island No: 31372
aaaacgactccgtactacccaacgctaacgccccgacgacgcgaaacccgaccaaataataaaacttaaaaacaaaaaaaaacaaaaattcccacgaaataaacactacgaaaaaaaaaccgacgaccccgaaattctccgacgaccccgacgaaccaccccgaaacgataaaaattcccgcgacacgtatacgacgacgccgaccgcttcccccgccgcccgaaaaaatcacgccgcccgaacgccgaaactctccccgtaccccgctccctccgccccgcacactccccgcaactaaaaacgccgaatcgatctacgcttaccgcctcgccaacgtaaccacgtcccgctcaaactacgccgcctactcttaactccgaataaccgaccgaaacgaccacttaacaccgacgtcgaccgcgatcgactctccgcgcaaacaaccctaaaaacgaccccgcgaaactcaaaaacgcccctacgacccgaaaacaaactacgcaataccacgctcaaacaaatacctaaaaccgccgcaacccaccgactctaccgccatcccccgcacgaaaaacgaaaataaacgcgaaaccgcgacgcgcccaacccgaccaattcccgcgcccaacctaacccgcgaactaacgtatcgctactacctaccctaaaaaaactataaaacaaaacctacgcctctaaa

SEQ ID NO: 31373 - DNA, 725 bp, Artificial Sequence
  chemically treated genomic DNA (Homo sapiens) CpG-island No: 31373
cgcgttattcggcggtttcgtcggttttttttttatttttgatttttttcgttatagttatagaacgtttaagcgttttttcgtttagggtgttttttttgtttcgtttatttgcgtttcgcgggtttagcggtgttacgtcgcgttcgttttaatatgattggtttttgtttttgttattttaggatttaagttcgttattggtcggttttcgttacgtcgttgatgtggagtagggtcgagcgcggaacgcgaggggttgttggggtgtttgtcgtagcgggtttttttcggcggtttgcggagttgttaggatggagtaggttgcggagggagtaagggtgatcgtagtttttgtgttagttgtcgatagtattgaggagttggtcgaagtcgaagaaggagttggagtagtgggcgaagataatgacgtagtcgcgagaggagcggaggtttttggcgatagtgaggaggacggagaggatgtgttcgaggtggagaagattttggatatgaagatcgagggggtatgtggaggggtttcggcgcggggttgggcggggagtttcgggtttggcggggaggacgcgagttggaaatagtacgggtagatttaaaataggagcgggggaggaatgtgagagtttaatgtaagtacgcgaaatcgtgggaaaagcgaagtgatatttttaattgtatttttagggttgagtgtgtgagggaag

SEQ ID NO: 31374 - DNA, 725 bp, Artificial Sequence
  chemically treated genomic DNA (Homo sapiens) CpG-island No: 31374
cttccctcacacactcaaccctaaaaatacaattaaaaatatcacttcgcttttcccacgatttcgcgtacttacattaaactctcacattcctcccccgctcctattttaaatctacccgtactatttccaactcgcgtcctccccgccaaacccgaaactccccgcccaaccccgcgccgaaacccctccacataccccctcgatcttcatatccaaaatcttctccacctcgaacacatcctctccgtcctcctcactatcgccaaaaacctccgctcctctcgcgactacgtcattatcttcgcccactactccaactccttcttcgacttcgaccaactcctcaatactatcgacaactaacacaaaaactacgatcacccttactccctccgcaacctactccatcctaacaactccgcaaaccgccgaaaaaaacccgctacgacaaacaccccaacaacccctcgcgttccgcgctcgaccctactccacatcaacgacgtaacgaaaaccgaccaataacgaacttaaatcctaaaataacaaaaacaaaaaccaatcatattaaaacgaacgcgacgtaacaccgctaaacccgcgaaacgcaaataaacgaaacaaaaaaaacaccctaaacgaaaaaacgcttaaacgttctataactataacgaaaaaaatcaaaaataaaaaaaaaaccgacgaaaccgccgaataacgcg

SEQ ID NO: 31375 - DNA, 725 bp, Artificial Sequence
  chemically treated genomic DNA (Homo sapiens) CpG-island No: 31375
ttttttttatatatttagttttaagagtgtagttggaaatgttatttcgttttttttacgatttcgcgtgtttgtattgaatttttatatttttttttcgtttttgttttgggtttgttcgtgttgtttttagttcgcgtttttttcgttaggttcggagtttttcgtttagtttcgcgtcggggtttttttatatattttttcggtttttatgtttaggattttttttatttcgaatatatttttttcgttttttttattgtcgttaaaggttttcgtttttttcgcggttgcgttattattttcgtttattattttaatttttttttcgatttcggttaattttttagtgttgtcggtagttgatatagggattgcggttatttttgtttttttcgtaatttgttttattttagtagtttcgtaaatcgtcgaggaaaattcgttgcgataaatattttagtagtttttcgcgtttcgcgttcggttttattttatattagcggcgtaacggaagtcgattaatggcgggtttggattttagagtgataggaataaaaattaattatattaaggcgggcgcggcgtaatatcgttgagttcgcgggacgtaggtgggcggggtagggagggtattttaggcggaagagcgtttgggcgttttgtagttgtggcggaaaaggttaagggtgggaggggagtcggcgaggtcgtcgagtggcgcg

SEQ ID NO: 31376 - DNA, 725 bp, Artificial Sequence
  chemically treated genomic DNA (Homo sapiens) CpG-island No: 31376
cgcgccactcgacgacctcgccgactcccctcccacccttaaccttttccgccacaactacaaaacgcccaaacgctcttccgcctaaaataccctccctaccccgcccacctacgtcccgcgaactcaacgatattacgccgcgcccgccttaatataattaatttttattcctatcactctaaaatccaaacccgccattaatcgacttccgttacgccgctaatataaaataaaaccgaacgcgaaacgcgaaaaactactaaaatatttatcgcaacgaattttcctcgacgatttacgaaactactaaaataaaacaaattacgaaaaaaacaaaaataaccgcaatccctatatcaactaccgacaacactaaaaaattaaccgaaatcgaaaaaaaaattaaaataataaacgaaaataataacgcaaccgcgaaaaaaacgaaaacctttaacgacaataaaaaaaacgaaaaaaatatattcgaaataaaaaaaatcctaaacataaaaaccgaaaaaatatataaaaaaaccccgacgcgaaactaaacgaaaaactccgaacctaacgaaaaaaacgcgaactaaaaacaacacgaacaaacccaaaacaaaaacgaaaaaaaaatataaaaattcaatacaaacacgcgaaatcgtaaaaaaaacgaaataacatttccaactacactcttaaaactaaatatataaaaaaaa

SEQ ID NO: 31377 - DNA, 977 bp, Artificial Sequence
  chemically treated genomic DNA (Homo sapiens) CpG-island No: 31377
cgacgtcgtcgagtgaattcggtatacgtatggagagtagttattgttttttttcgtcgatttatagtttatacgcgtgtatttcgttaaatatgcggtagatagcgagcgcgtttcgtagttattggcgttttagcgtcgttatttcggttattttagcgaataattgttttgtttttattacgcgtatttgtagcgttattattagtggttttgcgttattggtattttcgagtgtcgttagttggcgtcgtaggtcgtttacgggttcgcgatgtgtttttattttttcggtgagcgcgcggtgttggcgcgttaggcggcggttggaagtttcgtcgtggtcgaagttatcggcggttgttaggcggtaagcgtcgcgaagttagtttagtagttcgtcgaggttagcgtcgaattggtgtagcgttcgcgttttttgtagtcgtcgttttcgtcgcgtcgtcgttttttttagtttttgttagcggcgtcgggcgttcgtcgcgcgtttcgttaggtttattaggtgtacggtgtttgttttcgggtcgacggtatcgtcggtcgtaattagtttttcgttatatcgtagggtttgttgtagtaacgttcgtcgttcgtttagttcgttttgtaggattttgtgttgggttaggaggcgcgttgtgttggataggttatgcgcgtcgttcgttgttttcgttgcgttcgttgcgttcgtcgtatcgtcgtcgttcgtagtttttaggagacgttttttgtcgcgcgtttagttttcggttttttttagtttttgtagtagcgtttataggtttcgcgaagtttttagtttcgcgcgtcgtcgcgttgtttgtttttgtagtttcgttaggtagtcgtgtacgtggtttacgcggttgtagatgatttgcgggtcgtagggttggtagtttgagttaggagaaggggagtatttaggattggttataagttaa

SEQ ID NO: 31378 - DNA, 977 bp, Artificial Sequence
  chemically treated genomic DNA (Homo sapiens) CpG-island No: 31378
ttaacttataaccaatcctaaatactccccttctcctaactcaaactaccaaccctacgacccgcaaatcatctacaaccgcgtaaaccacgtacacgactacctaacgaaactacaaaaacaaacaacgcgacgacgcgcgaaactaaaaacttcgcgaaacctataaacgctactacaaaaactaaaaaaaaccgaaaactaaacgcgcgacaaaaaacgtctcctaaaaactacgaacgacgacgatacgacgaacgcaacgaacgcaacgaaaacaacgaacgacgcgcataacctatccaacacaacgcgcctcctaacccaacacaaaatcctacaaaacgaactaaacgaacgacgaacgttactacaacaaaccctacgatataacgaaaaactaattacgaccgacgataccgtcgacccgaaaacaaacaccgtacacctaataaacctaacgaaacgcgcgacgaacgcccgacgccgctaacaaaaactaaaaaaaacgacgacgcgacgaaaacgacgactacaaaaaacgcgaacgctacaccaattcgacgctaacctcgacgaactactaaactaacttcgcgacgcttaccgcctaacaaccgccgataacttcgaccacgacgaaacttccaaccgccgcctaacgcgccaacaccgcgcgctcaccgaaaaaataaaaacacatcgcgaacccgtaaacgacctacgacgccaactaacgacactcgaaaataccaataacgcaaaaccactaataataacgctacaaatacgcgtaataaaaacaaaacaattattcgctaaaataaccgaaataacgacgctaaaacgccaataactacgaaacgcgctcgctatctaccgcatatttaacgaaatacacgcgtataaactataaatcgacgaaaaaaaacaataactactctccatacgtataccgaattcactcgacgacgtcg

SEQ ID NO: 31379 - DNA, 977 bp, Artificial Sequence
  chemically treated genomic DNA (Homo sapiens) CpG-island No: 31379
ttggtttgtgattaattttggatgtttttttttttttggtttaggttattagttttgcgattcgtaggttatttgtaatcgcgtgaattacgtgtacggttgtttggcggagttgtaggagtaggtagcgcggcgacgcgcggagttggaggtttcgcggagtttgtgggcgttgttgtaggagttggaggaggtcgagagttgggcgcgcgataaggagcgttttttggaggttgcgggcggcggcggtgcggcgggcgtagcgggcgtagcgggaatagcgggcggcgcgtatgatttgtttagtatagcgcgttttttggtttagtataagattttgtagggcgagttgggcgggcggcgggcgttgttgtagtaggttttgcggtgtggcgaggagttggttgcggtcggcggtgtcgtcggttcgggagtagatatcgtgtatttggtaggtttggcggagcgcgcggcgagcgttcggcgtcgttggtagaggttggaagaggcggcggcgcggcgagagcggcggttgtaggaggcgcgggcgttgtattagttcggcgttgatttcgacgggttgttggattggtttcgcgacgtttatcgtttggtagtcgtcggtgatttcggttacgacgaagtttttagtcgtcgtttggcgcgttagtatcgcgcgtttatcggggaggtggaggtatatcgcgggttcgtgagcggtttgcggcgttagttggcgatattcgggggtgttagtggcgtagggttattggtggtggcgttgtaggtgcgcgtggtggaagtagagtagttgttcgttgaggtgatcgaagtggcggcgttgaggcgttagtggttgcgggacgcgttcgttgtttatcgtatgtttggcgaggtgtacgcgtgtgagttgtggatcggcgagaaggagtaatggttgttttttatgcgtgtgtcggatttattcgacgacgtcg

SEQ ID NO: 31380 - DNA, 977 bp, Artificial Sequence
  chemically treated genomic DNA (Homo sapiens) CpG-island No: 31380
cgacgtcgtcgaataaatccgacacacgcataaaaaacaaccattactccttctcgccgatccacaactcacacgcgtacacctcgccaaacatacgataaacaacgaacgcgtcccgcaaccactaacgcctcaacgccgccacttcgatcacctcaacgaacaactactctacttccaccacgcgcacctacaacgccaccaccaataaccctacgccactaacacccccgaatatcgccaactaacgccgcaaaccgctcacgaacccgcgatatacctccacctccccgataaacgcgcgatactaacgcgccaaacgacgactaaaaacttcgtcgtaaccgaaatcaccgacgactaccaaacgataaacgtcgcgaaaccaatccaacaacccgtcgaaatcaacgccgaactaatacaacgcccgcgcctcctacaaccgccgctctcgccgcgccgccgcctcttccaacctctaccaacgacgccgaacgctcgccgcgcgctccgccaaacctaccaaatacacgatatctactcccgaaccgacgacaccgccgaccgcaaccaactcctcgccacaccgcaaaacctactacaacaacgcccgccgcccgcccaactcgccctacaaaatcttatactaaaccaaaaaacgcgctatactaaacaaatcatacgcgccgcccgctattcccgctacgcccgctacgcccgccgcaccgccgccgcccgcaacctccaaaaaacgctccttatcgcgcgcccaactctcgacctcctccaactcctacaacaacgcccacaaactccgcgaaacctccaactccgcgcgtcgccgcgctacctactcctacaactccgccaaacaaccgtacacgtaattcacgcgattacaaataacctacgaatcgcaaaactaataacctaaaccaaaaaaaaaaaaacatccaaaattaatcacaaaccaa

SEQ ID NO: 31381 - DNA, 803 bp, Artificial Sequence
  chemically treated genomic DNA (Homo sapiens) CpG-island No: 31381
cgaaatgtatatttcgagtgggtatttggttacgtagtattacgagcgtttggcgtagatttcgtaggaagagttggtagatgtgcgtttggattagcgtttttttgcgcgttttttataagtcgagtagtttatgttagttaagttcgaggtgtggtagttattcgtttagtgttaggttcgggtttagttttgcgtcgtcggcggttagtagcgtttcgttggtcgttacgatgcgagtatagtttttttcgcgttggtttattttttttttgagcgtagcgtggcgcgttagtagcgcgttcgttttttttaggttgttgggtaggggtttttcgttgtcgttcgtcgttttttgggcgcgtacgagttagtttaggaaagcgtcgaggttatgtaggaagcgttgtaggcgttttgttgtcgttatcgtttcgtcgtaggtttgagtcgcgttagttagcgcgttttattcggcgtttagttttttcgcgttttggtgtagtcgcgtcgtttgcgtcgggaagcgtttagttagtagggttgttttttttagaagggtcgtttggcgcggttttagcgtttgtagagcggtttttaggtcgttaagacgttattgtagggcgtcgtcggttcggggcgcgttttttatagtttttcgttttttacgtatttgggcgcgtatttcggttatttttagtacgtggttttttattagtagtatcgcgtttattttttttttgcgttgttttattagttttacgatgcggttttatttgtttaggggaaagagagtgatttga

SEQ ID NO: 31382 - DNA, 803 bp, Artificial Sequence
  chemically treated genomic DNA (Homo sapiens) CpG-island No: 31382
tcaaatcactctctttcccctaaacaaataaaaccgcatcgtaaaactaataaaacaacgcaaaaaaaaaataaacgcgatactactaataaaaaaccacgtactaaaaataaccgaaatacgcgcccaaatacgtaaaaaacgaaaaactataaaaaacgcgccccgaaccgacgacgccctacaataacgtcttaacgacctaaaaaccgctctacaaacgctaaaaccgcgccaaacgacccttctaaaaaaaacaaccctactaactaaacgcttcccgacgcaaacgacgcgactacaccaaaacgcgaaaaaactaaacgccgaataaaacgcgctaactaacgcgactcaaacctacgacgaaacgataacgacaacaaaacgcctacaacgcttcctacataacctcgacgctttcctaaactaactcgtacgcgcccaaaaaacgacgaacgacaacgaaaaacccctacccaacaacctaaaaaaaacgaacgcgctactaacgcgccacgctacgctcaaaaaaaaaataaaccaacgcgaaaaaaactatactcgcatcgtaacgaccaacgaaacgctactaaccgccgacgacgcaaaactaaacccgaacctaacactaaacgaataactaccacacctcgaacttaactaacataaactactcgacttataaaaaacgcgcaaaaaaacgctaatccaaacgcacatctaccaactcttcctacgaaatctacgccaaacgctcgtaatactacgtaaccaaatacccactcgaaatatacatttcg

SEQ ID NO: 31383 - DNA, 803 bp, Artificial Sequence
  chemically treated genomic DNA (Homo sapiens) CpG-island No: 31383
ttaagttatttttttttttttgggtaggtggaatcgtatcgtggagttagtggaatagcgtaaagaggaaatgagcgcggtgttgttggtggagaattacgtgttggaggtggtcgaggtgcgcgtttaggtgcgtgagaagcggagagttgtggagagcgcgtttcgggtcggcggcgttttgtagtggcgttttagcggtttagaggtcgttttgtaggcgttggagtcgcgttaggcggtttttttggaggaggtagttttgttggttgagcgtttttcggcgtaggcggcgcggttgtattagggcgcggaggagttgggcgtcgagtggggcgcgttagttagcgcggtttaggtttgcggcgaggcggtggcggtagtagggcgtttgtagcgttttttatatgatttcgacgtttttttggattggttcgtgcgcgtttaggaggcggcgggcggtagcgaggggtttttgtttaatagtttagaagaggcggacgcgttgttggcgcgttacgttgcgtttaaggaggaggtggattagcgcgaggaagattatgttcgtatcgtggcggttagcgaggcgttgttggtcgtcgacggcgtagagttgggttcgggtttggtattagacgagtggttgttatatttcgaatttggttggtataaattgttcggtttgtgggaggcgcgtagggaggcgttggtttaggcgtatatttattagttttttttgcgggatttacgttaggcgttcgtggtgttgcgtaattaggtgtttattcggggtgtatatttcg

SEQ ID NO: 31384 - DNA, 803 bp, Artificial Sequence
  chemically treated genomic DNA (Homo sapiens) CpG-island No: 31384
cgaaatatacaccccgaataaacacctaattacgcaacaccacgaacgcctaacgtaaatcccgcaaaaaaaactaataaatatacgcctaaaccaacgcctccctacgcgcctcccacaaaccgaacaatttataccaaccaaattcgaaatataacaaccactcgtctaataccaaacccgaacccaactctacgccgtcgacgaccaacaacgcctcgctaaccgccacgatacgaacataatcttcctcgcgctaatccacctcctccttaaacgcaacgtaacgcgccaacaacgcgtccgcctcttctaaactattaaacaaaaacccctcgctaccgcccgccgcctcctaaacgcgcacgaaccaatccaaaaaaacgtcgaaatcatataaaaaacgctacaaacgccctactaccgccaccgcctcgccgcaaacctaaaccgcgctaactaacgcgccccactcgacgcccaactcctccgcgccctaatacaaccgcgccgcctacgccgaaaaacgctcaaccaacaaaactacctcctccaaaaaaaccgcctaacgcgactccaacgcctacaaaacgacctctaaaccgctaaaacgccactacaaaacgccgccgacccgaaacgcgctctccacaactctccgcttctcacgcacctaaacgcgcacctcgaccacctccaacacgtaattctccaccaacaacaccgcgctcatttcctctttacgctattccactaactccacgatacgattccacctacccaaaaaaaaaaaaataacttaa

SEQ ID NO: 31385 - DNA, 618 bp, Artificial Sequence
  chemically treated genomic DNA (Homo sapiens) CpG-island No: 31385
gcggtcgttagcgtcgttgttttcgttgttcgtcgcgatcgatcgttttttttgtcggcgttcgttgttcggttcggttcggttcggtttagttcggtttagttcggtttcgtcggttcgcggtttagttagattcgtatgcgtcgtcgcgtttttttttttcgcgtcgtcgtcgcgtttagcgcgttttcgggattttttttcgttcgcggttttcgcgtttcgtcgttcgaggtttacgcgtagttatattcggtcgcggcgtggggtgtacggttgtattcgcgagggtacggcggcgttacgcgttgtatatttttacggggttacgttcgttacgttgttatattcgcgggggtttcggcgtataaatttattttcgtatttacgcgtttgcgcgtcgttatttttttttgtggggttttacggggttatatttttacgtcgttatacgcggcgtttatattggaacggtgttatttattattatataaatttaatagggtaattatcgtttacgcggcgttatatataaatgtatttgttatatatagtcgtatatttttcggtagttataaatagtgttataggtttatatattacgtatagttttatagt

SEQ ID NO: 31386 - DNA, 618 bp, Artificial Sequence
  chemically treated genomic DNA (Homo sapiens) CpG-island No: 31386
actataaaactatacgtaatatataaacctataacactatttataactaccgaaaaatatacgactatatataacaaatacatttatatataacgccgcgtaaacgataattaccctattaaatttatataataataaataacaccgttccaatataaacgccgcgtataacgacgtaaaaatataaccccgtaaaaccccacaaaaaaaaataacgacgcgcaaacgcgtaaatacgaaaataaatttatacgccgaaacccccgcgaatataacaacgtaacgaacgtaaccccgtaaaaatatacaacgcgtaacgccgccgtaccctcgcgaatacaaccgtacaccccacgccgcgaccgaatataactacgcgtaaacctcgaacgacgaaacgcgaaaaccgcgaacgaaaaaaaatcccgaaaacgcgctaaacgcgacgacgacgcgaaaaaaaaaaacgcgacgacgcatacgaatctaactaaaccgcgaaccgacgaaaccgaactaaaccgaactaaaccgaaccgaaccgaaccgaacaacgaacgccgacaaaaaaaacgatcgatcgcgacgaacaacgaaaacaacgacgctaacgaccgc

SEQ ID NO: 31387 - DNA, 618 bp, Artificial Sequence
  chemically treated genomic DNA (Homo sapiens) CpG-island No: 31387
gttgtgaagttgtgcgtgatgtgtgggtttatgatattgtttgtgattgtcggggagtgtgcggttgtgtgtgataggtgtatttgtgtgtgacgtcgcgtgggcggtggttattttattggatttgtgtggtggtgggtgatatcgttttagtgtggacgtcgcgtgtgacggcgtgagggtgtgatttcgtgagattttataggagggagtgacggcgcgtaagcgcgtggatgcgggggtgagtttgtgcgtcgaggttttcgcgagtatggtagcgtggcgagcgtgatttcgtgggagtgtgtagcgcgtgacgtcgtcgtgttttcgcgagtgtagtcgtgtattttacgtcgcggtcgggtgtgattgcgcgtgggtttcgggcggcggggcgcggggatcgcgggcgggagggggtttcgggggcgcgttgagcgcggcggcggcgcgagagagggaggcgcggcggcgtatgcggatttggttgagtcgcgggtcggcggggtcgagttgagtcgggttgggtcgggtcgggtcgggtcgggtagcggacgtcgatagggagggcggtcggtcgcggcgagtagcggagatagcgacgttggcggtcgt

SEQ ID NO: 31388 - DNA, 618 bp, Artificial Sequence
  chemically treated genomic DNA (Homo sapiens) CpG-island No: 31388
acgaccgccaacgtcgctatctccgctactcgccgcgaccgaccgccctccctatcgacgtccgctacccgacccgacccgacccgacccaacccgactcaactcgaccccgccgacccgcgactcaaccaaatccgcatacgccgccgcgcctccctctctcgcgccgccgccgcgctcaacgcgcccccgaaaccccctcccgcccgcgatccccgcgccccgccgcccgaaacccacgcgcaatcacacccgaccgcgacgtaaaatacacgactacactcgcgaaaacacgacgacgtcacgcgctacacactcccacgaaatcacgctcgccacgctaccatactcgcgaaaacctcgacgcacaaactcacccccgcatccacgcgcttacgcgccgtcactccctcctataaaatctcacgaaatcacaccctcacgccgtcacacgcgacgtccacactaaaacgatatcacccaccaccacacaaatccaataaaataaccaccgcccacgcgacgtcacacacaaatacacctatcacacacaaccgcacactccccgacaatcacaaacaatatcataaacccacacatcacgcacaacttcacaac

SEQ ID NO: 31389 - DNA, 551 bp, Artificial Sequence
  chemically treated genomic DNA (Homo sapiens) CpG-island No: 31389
ttttttttcgggaggtggagcgcggaggtagggcgttgagtgataagttatttcggtttcgtttattttatttgttgttatgtggaggcgtggttttttgtggtttcgttttttagtttaagtggcgcgtagagagggcggtgttggacggtgagcgaatgtaagttgacgtttgtttcgtttattcgcgttaggtttcgttttttgatttgagtcgcgggcggagagtttgaggcgtggtttttcgagttagtttcgtttcgttgtttttggtttgagtagggtagagagtatcgtttagtagttagtgggttttcgcgcgtgtcgagattttgaggttttgtatttttacgatttcgtacgatggtcgttaagaagatcgcgattttcggcgttattggttagatcgggtttattattttggcgtaggcggtgtaagtaggtatgagtcggggcgggcggggtatgttacgggatagacgggtagaattttaggaaggggtattatggggtcgggtcgaggttgattggggttatgagcgttttagtta

SEQ ID NO: 31390 - DNA, 551 bp, Artificial Sequence
  chemically treated genomic DNA (Homo sapiens) CpG-island No: 31390
taactaaaacgctcataaccccaatcaacctcgacccgaccccataataccccttcctaaaattctacccgtctatcccgtaacataccccgcccgccccgactcatacctacttacaccgcctacgccaaaataataaacccgatctaaccaataacgccgaaaatcgcgatcttcttaacgaccatcgtacgaaatcgtaaaaatacaaaacctcaaaatctcgacacgcgcgaaaacccactaactactaaacgatactctctaccctactcaaaccaaaaacaacgaaacgaaactaactcgaaaaaccacgcctcaaactctccgcccgcgactcaaatcaaaaaacgaaacctaacgcgaataaacgaaacaaacgtcaacttacattcgctcaccgtccaacaccgccctctctacgcgccacttaaactaaaaaacgaaaccacaaaaaaccacgcctccacataacaacaaataaaataaacgaaaccgaaataacttatcactcaacgccctacctccgcgctccacctcccgaaaaaaaa

SEQ ID NO: 31391 - DNA, 551 bp, Artificial Sequence
  chemically treated genomic DNA (Homo sapiens) CpG-island No: 31391
tggttggggcgtttatggttttaattagtttcggttcgattttatggtgtttttttttaaagttttgttcgtttgtttcgtgatatgtttcgttcgtttcggtttatgtttgtttgtatcgtttgcgttagggtggtgagttcggtttggttagtggcgtcgaagatcgcgatttttttgacggttatcgtacgggatcgtgggggtgtaaggttttagagtttcggtacgcgcgggaatttattggttgttgggcggtgttttttgttttatttaagttaggaataacggggcggagttggttcgaagggttacgttttagatttttcgttcgcggtttaggttaaggggcggggtttaacgcggatgggcggggtaggcgttagtttgtattcgtttatcgtttagtatcgttttttttgcgcgttatttagattggaaggcggggttatagaaggttacgtttttatatagtaataaatagagtggacggagtcgagataatttgttatttagcgttttgttttcgcgttttatttttcggagagggg

SEQ ID NO: 31392 - DNA, 551 bp, Artificial Sequence
  chemically treated genomic DNA (Homo sapiens) CpG-island No: 31392
cccctctccgaaaaataaaacgcgaaaacaaaacgctaaataacaaattatctcgactccgtccactctatttattactatataaaaacgtaaccttctataaccccgccttccaatctaaataacgcgcaaaaaaaacgatactaaacgataaacgaatacaaactaacgcctaccccgcccatccgcgttaaaccccgccccttaacctaaaccgcgaacgaaaaatctaaaacgtaacccttcgaaccaactccgccccgttattcctaacttaaataaaacaaaaaacaccgcccaacaaccaataaattcccgcgcgtaccgaaactctaaaaccttacacccccacgatcccgtacgataaccgtcaaaaaaatcgcgatcttcgacgccactaaccaaaccgaactcaccaccctaacgcaaacgatacaaacaaacataaaccgaaacgaacgaaacatatcacgaaacaaacgaacaaaactttaaaaaaaaacaccataaaatcgaaccgaaactaattaaaaccataaacgccccaacca

SEQ ID NO: 31393 - DNA, 584 bp, Artificial Sequence
  chemically treated genomic DNA (Homo sapiens) CpG-island No: 31393
  unsure (552..553, 566..567, 579)
ttgtgtggtgtcgttgtcgacgttgatatgttgtgaattaaaaagttttagtaatagttcggcgatagtgacgtcgatatttatcgataattgtataattatcgatagtaggttgttgtcgttgttcgttagattgttcgggagattttttagcgttagggtgtttatggaggagaaacgcgtcgagttgattattttttgtaaaaataggacgaacggtaaaacgtagtattagtttagtagggcggtagttataaataatagggtgattagcgatagatttagcgtggtcgttattagtattcgacgataattaaagcgatttattatttgtattataattcgttttatttttatgttgttaagtattatcgggatatattagttcggtatgaaacggcgagaaatcgaggttaatttgtaggaaaatcggtgttataaagggtaatatgttattgttaatacgttcggtaaagtttttcgttaggtttagcgaaaaggtacgagtacggaatagttttagattgaatagggtacggttgttatttttgnngcgtgtagtaganntaaagtattagntgtta

SEQ ID NO: 31394 - DNA, 584 bp, Artificial Sequence
  chemically treated genomic DNA (Homo sapiens) CpG-island No: 31394
  unsure (6, 18..19, 32..)
taacanctaatactttanntctactacacgcnncaaaaataacaaccgtaccctattcaatctaaaactattccgtactcgtaccttttcgctaaacctaacgaaaaactttaccgaacgtattaacaataacatattaccctttataacaccgattttcctacaaattaacctcgatttctcgccgtttcataccgaactaatatatcccgataatacttaacaacataaaaataaaacgaattataatacaaataataaatcgctttaattatcgtcgaatactaataacgaccacgctaaatctatcgctaatcaccctattatttataactaccgccctactaaactaatactacgttttaccgttcgtcctatttttacaaaaaataatcaactcgacgcgtttctcctccataaacaccctaacgctaaaaaatctcccgaacaatctaacgaacaacgacaacaacctactatcgataattatacaattatcgataaatatcgacgtcactatcgccgaactattactaaaactttttaattcacaacatatcaacgtcgacaacgacaccacacaa

SEQ ID NO: 31395 - DNA, 584 bp, Artificial Sequence
  chemically treated genomic DNA (Homo sapiens) CpG-island No: 31395
  unsure (6, 18..19, 32..)
tggtanttggtgttttanntttgttgtacgtnntagaaataataatcgtgttttgtttagtttgaaattgtttcgtattcgtattttttcgttgggtttggcggggagttttgtcggacgtattggtagtggtatgttgttttttatgatatcggtttttttgtaaattggtttcggtttttcgtcgttttatgtcggattgatatatttcgatggtgtttggtagtatgggaatgaagcgaattgtggtataggtggtgaatcgttttggttatcgtcgggtattggtagcgattacgttgggtttgtcgttggttattttgttgtttatgattatcgttttgttgggttggtattacgttttgtcgttcgttttgtttttataagggatggttaattcgacgcgttttttttttatgaatattttgacgttgaaagatttttcggataatttggcgagtagcggtaatagtttgttgtcgatgattatgtaattgtcgatgagtatcggcgttattatcgtcgggttgttgttgggattttttggtttatagtatgttagcgtcgatagcggtattatataa

SEQ ID NO: 31396 - DNA, 584 bp, Artificial Sequence
  chemically treated genomic DNA (Homo sapiens) CpG-island No: 31396
  unsure (552..553, 566..567, 579)
ttatataataccgctatcgacgctaacatactataaaccaaaaaatcccaacaacaacccgacgataataacgccgatactcatcgacaattacataatcatcgacaacaaactattaccgctactcgccaaattatccgaaaaatctttcaacgtcaaaatattcataaaaaaaaaacgcgtcgaattaaccatcccttataaaaacaaaacgaacgacaaaacgtaataccaacccaacaaaacgataatcataaacaacaaaataaccaacgacaaacccaacgtaatcgctaccaatacccgacgataaccaaaacgattcaccacctataccacaattcgcttcattcccatactaccaaacaccatcgaaatatatcaatccgacataaaacgacgaaaaaccgaaaccaatttacaaaaaaaccgatatcataaaaaacaacataccactaccaatacgtccgacaaaactccccgccaaacccaacgaaaaaatacgaatacgaaacaatttcaaactaaacaaaacacgattattatttctannacgtacaacaaanntaaaacaccaantacca

SEQ ID NO: 31397 - DNA, 523 bp, Artificial Sequence
  chemically treated genomic DNA (Homo sapiens) CpG-island No: 31397
attcgtagtcggtacgtcggataggtcgaggatttttatcggaatggacggattcgtttttagtattttttgatttagttcgttacgtatcgtacgaatacgatcgtattcgaagttatatagaacgatatcgtttttgtgtagagtatttttacgtattagaacggtagtaatcggattacgatttttatcgaggaaggattcgataatcgtatcgttcgttatatttttacgtatcgtttttagttttagaattttcgtttgtagtaggatagcgtttagtagtttatcgatatcggtattcgttttcgtagattcgtgtacgaattggtttttatcgatttattttttcggtaggatgtcgtattgggagagtacgtatttaacgcgattcggattagtttttggtttatcgattttgtttattgaaagtaatatcggtatttgcgtcgtattcgggtgttggattgtttcgatggtttgcggtatatatcggcgataagagtataattagaatacgagt

SEQ ID NO: 31398 - DNA, 523 bp, Artificial Sequence
  chemically treated genomic DNA (Homo sapiens) CpG-island No: 31398
actcgtattctaattatactcttatcgccgatatataccgcaaaccatcgaaacaatccaacacccgaatacgacgcaaataccgatattactttcaataaacaaaatcgataaaccaaaaactaatccgaatcgcgttaaatacgtactctcccaatacgacatcctaccgaaaaaataaatcgataaaaaccaattcgtacacgaatctacgaaaacgaataccgatatcgataaactactaaacgctatcctactacaaacgaaaattctaaaactaaaaacgatacgtaaaaatataacgaacgatacgattatcgaatccttcctcgataaaaatcgtaatccgattactaccgttctaatacgtaaaaatactctacacaaaaacgatatcgttctatataacttcgaatacgatcgtattcgtacgatacgtaacgaactaaatcaaaaaatactaaaaacgaatccgtccattccgataaaaatcctcgacctatccgacgtaccgactacgaat

SEQ ID NO: 31399 - DNA, 523 bp, Artificial Sequence
  chemically treated genomic DNA (Homo sapiens) CpG-island No: 31399
attcgtattttggttgtgtttttgtcgtcggtgtatgtcgtagattatcgaagtaatttagtattcgaatgcggcgtaggtatcggtgttgtttttagtgaataagatcgatagattagaagttgattcggatcgcgttaagtacgtatttttttagtacggtattttgtcggaagagtgggtcggtgaaagttagttcgtatacggatttgcgaaagcgggtatcggtatcgatgaattgttggacgttattttgttgtaggcggaagttttggagttgaaagcggtacgtaaaggtatggcgagcggtgcggttatcgaattttttttcgataaaggtcgtggttcggttgttatcgttttggtacgtgaaggtattttgtataagggcgatatcgttttgtgtggtttcgaatacggtcgtgttcgtgcgatgcgtaacgaattgggttaggaagtgttggaagcgggttcgtttatttcggtggaaattttcggtttgttcggcgtatcggttgcgggt

SEQ ID NO: 31400 - DNA, 523 bp, Artificial Sequence
  chemically treated genomic DNA (Homo sapiens) CpG-island No: 31400
acccgcaaccgatacgccgaacaaaccgaaaatttccaccgaaataaacgaacccgcttccaacacttcctaacccaattcgttacgcatcgcacgaacacgaccgtattcgaaaccacacaaaacgatatcgcccttatacaaaataccttcacgtaccaaaacgataacaaccgaaccacgacctttatcgaaaaaaaattcgataaccgcaccgctcgccatacctttacgtaccgctttcaactccaaaacttccgcctacaacaaaataacgtccaacaattcatcgataccgatacccgctttcgcaaatccgtatacgaactaactttcaccgacccactcttccgacaaaataccgtactaaaaaaatacgtacttaacgcgatccgaatcaacttctaatctatcgatcttattcactaaaaacaacaccgatacctacgccgcattcgaatactaaattacttcgataatctacgacatacaccgacgacaaaaacacaaccaaaatacgaat

SEQ ID NO: 31401 - DNA, 508 bp, Artificial Sequence
  chemically treated genomic DNA (Homo sapiens) CpG-island No: 31401
atttatatcggtagttggatagagtagggtaattagatgttaatcgcgataatttcgattcgttcggtttggggaatacgttgggatgggtttgggcgtggtcgtttaatcgtcgcgtggtgtataatcgtgtttcggcggatattaacggtaaatcgtgggattcgaaacggatgttgatttagtggaacggtagtaagtggacgggtaacgatatttttgatttcggtaatgtcgtatcgggtacgttaatcgggtcgtttattatgtagtcggaagggatgggacgtttgtttgttattaataaaatggcggaaggttcgtgttagacgcgcgtttggttgtttatcgttagtatttcgagggagcgggtaaatttttgggttagtatttcggtttcgttgttggtatcggaggtatatagtatatcggtagaaagttaacggtttatcgttacgttttgttcgttttttttaataaagttagcgttacggttagtttttattag

SEQ ID NO: 31402 - DNA, 508 bp, Artificial Sequence
  chemically treated genomic DNA (Homo sapiens) CpG-island No: 31402
ctaataaaaactaaccgtaacgctaactttattaaaaaaaacgaacaaaacgtaacgataaaccgttaactttctaccgatatactatatacctccgataccaacaacgaaaccgaaatactaacccaaaaatttacccgctccctcgaaatactaacgataaacaaccaaacgcgcgtctaacacgaaccttccgccattttattaataacaaacaaacgtcccatcccttccgactacataataaacgacccgattaacgtacccgatacgacattaccgaaatcaaaaatatcgttacccgtccacttactaccgttccactaaatcaacatccgtttcgaatcccacgatttaccgttaatatccgccgaaacacgattatacaccacgcgacgattaaacgaccacgcccaaacccatcccaacgtattccccaaaccgaacgaatcgaaattatcgcgattaacatctaattaccctactctatccaactaccgatataaat

SEQ ID NO: 31403 - DNA, 508 bp, Artificial Sequence
  chemically treated genomic DNA (Homo sapiens) CpG-island No: 31403
ttgatgaaagttgatcgtgacgttaattttattgaaaagaacgagtagggcgtaacggtaaatcgttggttttttatcggtatgttgtgtgttttcggtgttagtaacgaaatcgggatgttgatttagaaatttgttcgttttttcgggatgttggcggtagataattaggcgcgcgtttgatacggatttttcgttattttgttgatggtaaataggcgttttatttttttcggttgtatgataaacggttcggttggcgtattcggtgcggtattgtcgaagttaggaatatcgttattcgtttatttgttgtcgttttattggattagtattcgtttcggattttacggtttatcgttgatattcgtcgaagtacggttgtatattacgcgacggttgagcggttacgtttaggtttattttagcgtattttttagatcggacgggtcggagttatcgcggttagtatttggttgttttgttttgtttagttatcggtgtagat

SEQ ID NO: 31404 - DNA, 508 bp, Artificial Sequence
  chemically treated genomic DNA (Homo sapiens) CpG-island No: 31404
atctacaccgataactaaacaaaacaaaacaaccaaatactaaccgcgataactccgacccgtccgatctaaaaaatacgctaaaataaacctaaacgtaaccgctcaaccgtcgcgtaatatacaaccgtacttcgacgaatatcaacgataaaccgtaaaatccgaaacgaatactaatccaataaaacgacaacaaataaacgaataacgatattcctaacttcgacaataccgcaccgaatacgccaaccgaaccgtttatcatacaaccgaaaaaaataaaacgcctatttaccatcaacaaaataacgaaaaatccgtatcaaacgcgcgcctaattatctaccgccaacatcccgaaaaaacgaacaaatttctaaatcaacatcccgatttcgttactaacaccgaaaacacacaacataccgataaaaaaccaacgatttaccgttacgccctactcgttcttttcaataaaattaacgtcacgatcaactttcatcaa

SEQ ID NO: 31405 - DNA, 985 bp, Artificial Sequence
  chemically treated genomic DNA (Homo sapiens) CpG-island No: 31405
gcgtcggtatcggtatttgtatttgcgtttgtatttgcgttagcgtcggtatcggtattagtatttgcgtcggtatttgcgtcggtttcggtatttgcgtcggtatcggtatttgtatttgcgtcggtatcggtatttgcgttagcgtcggcgtcggtatcggcgtcggtatcggcgtcggtttcggcgtcggtatcggcgttagcgtttgtatcggcgtcggtatcggtatttgtatcggtatttgcgattagcgtcggcgtttgtatcggcgttagcgttagtatttgtatcggtattagtatttgcgtcggtatttgcgtcggtatcggcgtcggtatcggtattcgcgtttgtatttgcgttagcgtttgtatttgcgtttgtatcggcgtcggtatttgcgttagcgttagcgtcggtatcggcgtcggtatttgcgtcggcgtttgtatttgcgtcggcgtcggcgtttgtatttgcgtttgtattagtattagtatttgtatttgtatttgcgtcggcgtttgtatttgcgtcggtatttgcgtttgtatttgcgtttgtatttgcgtttgtatttgcgttagcgtcggcgtcggcgtcggtatttgcgtcggtatttgcgtcggtatcggtatcggtatcggtatcggcgtttgtatttgcgttagcgtttgtatttgcgtttgtatttgcgtcggtatttgcgttagcgttagcgtcggtatttgcgttagcgtcggtatcggtattagcgtcggtatcggtattagtatttgcgtcggtatttgcgtcggtatttgcgtttgtattagtattagtatttgcgtcggcgtttgtatttgcgtcggcgtcggcgtttgtattagtattagcgtcggcgtttgtattagtatttgtattagcgtcggcgtcggcgtttgtattagcgtcggcgtttgtatttgtattatttttatagaaattattatttaaagttatg

SEQ ID NO: 31406 - DNA, 985 bp, Artificial Sequence
  chemically treated genomic DNA (Homo sapiens) CpG-island No: 31406
cataactttaaataataatttctataaaaataatacaaatacaaacgccgacgctaatacaaacgccgacgccgacgctaatacaaatactaatacaaacgccgacgctaatactaatacaaacgccgacgccgacgcaaatacaaacgccgacgcaaatactaatactaatacaaacgcaaataccgacgcaaataccgacgcaaatactaataccgataccgacgctaataccgataccgacgctaacgcaaataccgacgctaacgctaacgcaaataccgacgcaaatacaaacgcaaatacaaacgctaacgcaaatacaaacgccgataccgataccgataccgataccgacgcaaataccgacgcaaataccgacgccgacgccgacgctaacgcaaatacaaacgcaaatacaaacgcaaatacaaacgcaaataccgacgcaaatacaaacgccgacgcaaatacaaatacaaatactaatactaatacaaacgcaaatacaaacgccgacgccgacgcaaatacaaacgccgacgcaaataccgacgccgataccgacgctaacgctaacgcaaataccgacgccgatacaaacgcaaatacaaacgctaacgcaaatacaaacgcgaataccgataccgacgccgataccgacgcaaataccgacgcaaatactaataccgatacaaatactaacgctaacgccgatacaaacgccgacgctaatcgcaaataccgatacaaataccgataccgacgccgatacaaacgctaacgccgataccgacgccgaaaccgacgccgataccgacgccgataccgacgccgacgctaacgcaaataccgataccgacgcaaatacaaataccgataccgacgcaaataccgaaaccgacgcaaataccgacgcaaatactaataccgataccgacgctaacgcaaatacaaacgcaaatacaaataccgataccgacgc

SEQ ID NO: 31407 - DNA, 985 bp, Artificial Sequence
  chemically treated genomic DNA (Homo sapiens) CpG-island No: 31407
tatgattttagatagtggtttttataaagatgatatagatgtagacgtcgacgttgatgtagacgtcgacgtcgacgttgatgtagatgttgatgtagacgtcgacgttgatgttgatgtagacgtcgacgtcgacgtagatgtagacgtcgacgtagatgttgatgttgatgtagacgtagatgtcgacgtagatgtcgacgtagatgttgatgtcgatgtcgacgttgatgtcgatgtcgacgttgacgtagatgtcgacgttgacgttgacgtagatgtcgacgtagatgtagacgtagatgtagacgttgacgtagatgtagacgtcgatgtcgatgtcgatgtcgatgtcgacgtagatgtcgacgtagatgtcgacgtcgacgtcgacgttgacgtagatgtagacgtagatgtagacgtagatgtagacgtagatgtcgacgtagatgtagacgtcgacgtagatgtagatgtagatgttgatgttgatgtagacgtagatgtagacgtcgacgtcgacgtagatgtagacgtcgacgtagatgtcgacgtcgatgtcgacgttgacgttgacgtagatgtcgacgtcgatgtagacgtagatgtagacgttgacgtagatgtagacgcggatgtcgatgtcgacgtcgatgtcgacgtagatgtcgacgtagatgttgatgtcgatgtagatgttgacgttgacgtcgatgtagacgtcgacgttgatcgtagatgtcgatgtagatgtcgatgtcgacgtcgatgtagacgttgacgtcgatgtcgacgtcgaggtcgacgtcgatgtcgacgtcgatgtcgacgtcgacgttgacgtagatgtcgatgtcgacgtagatgtagatgtcgatgtcgacgtagatgtcgaggtcgacgtagatgtcgacgtagatgttgatgtcgatgtcgacgttgacgtagatgtagacgtagatgtagatgtcgatgtcgacgt

SEQ ID NO: 31408 - DNA, 985 bp, Artificial Sequence
  chemically treated genomic DNA (Homo sapiens) CpG-island No: 31408
acgtcgacatcgacatctacatctacgtctacatctacgtcaacgtcgacatcgacatcaacatctacgtcgacatctacgtcgacctcgacatctacgtcgacatcgacatctacatctacgtcgacatcgacatctacgtcaacgtcgacgtcgacatcgacgtcgacatcgacgtcgacctcgacgtcgacatcgacgtcaacgtctacatcgacgtcgacatcgacatctacatcgacatctacgatcaacgtcgacgtctacatcgacgtcaacgtcaacatctacatcgacatcaacatctacgtcgacatctacgtcgacatcgacgtcgacatcgacatccgcgtctacatctacgtcaacgtctacatctacgtctacatcgacgtcgacatctacgtcaacgtcaacgtcgacatcgacgtcgacatctacgtcgacgtctacatctacgtcgacgtcgacgtctacatctacgtctacatcaacatcaacatctacatctacatctacgtcgacgtctacatctacgtcgacatctacgtctacatctacgtctacatctacgtctacatctacgtcaacgtcgacgtcgacgtcgacatctacgtcgacatctacgtcgacatcgacatcgacatcgacatcgacgtctacatctacgtcaacgtctacatctacgtctacatctacgtcgacatctacgtcaacgtcaacgtcgacatctacgtcaacgtcgacatcgacatcaacgtcgacatcgacatcaacatctacgtcgacatctacgtcgacatctacgtctacatcaacatcaacatctacgtcgacgtctacatctacgtcgacgtcgacgtctacatcaacatcaacgtcgacgtctacatcaacatctacatcaacgtcgacgtcgacgtctacatcaacgtcgacgtctacatctatatcatctttataaaaaccactatctaaaatcata

SEQ ID NO: 31409 - DNA, 515 bp, Artificial Sequence
  chemically treated genomic DNA (Homo sapiens) CpG-island No: 31409
tttcgtggaatttaattttattaggggtgcggcgtattttagattcgatcggagtgggttttgtatatcgtcgttttatttcgcgggggttttgtttgtgttgggggtggtggcgggcgcgggttgcgcgttggtgttttgggtagggcggggaggtcgggcgaggattcgttaggtagcgtcgttttttgttttgggcgcggtgaggaaggacgttttttaacgggttatattttgttgtgtagatttaaaattcgtttttgaggtttcgcgtttaggagcggggttaggtggttttagggcggcggcggtttgtcggagattcgcgagtttcgtattcgacgtttttttttaacgcggttttttgttcgcgtcgcggaattttttcgtcgggtgttttatttatcggaggggtcgtgtcggttgaggttgttatcgggtgcgtggtatagttcgtgatagtttatgggtgaggttttgtgtaaatttggatgtagggaaagttgtttgttaga

SEQ ID NO: 31410 - DNA, 515 bp, Artificial Sequence
  chemically treated genomic DNA (Homo sapiens) CpG-island No: 31410
tctaacaaacaactttccctacatccaaatttacacaaaacctcacccataaactatcacgaactataccacgcacccgataacaacctcaaccgacacgacccctccgataaataaaacacccgacgaaaaaattccgcgacgcgaacaaaaaaccgcgttaaaaaaaaacgtcgaatacgaaactcgcgaatctccgacaaaccgccgccgccctaaaaccacctaaccccgctcctaaacgcgaaacctcaaaaacgaattttaaatctacacaacaaaatataacccgttaaaaaacgtccttcctcaccgcgcccaaaacaaaaaacgacgctacctaacgaatcctcgcccgacctccccgccctacccaaaacaccaacgcgcaacccgcgcccgccaccacccccaacacaaacaaaacccccgcgaaataaaacgacgatatacaaaacccactccgatcgaatctaaaatacgccgcacccctaataaaattaaattccacgaaa

SEQ ID NO: 31411 - DNA, 515 bp, Artificial Sequence
  chemically treated genomic DNA (Homo sapiens) CpG-island No: 31411
tttaataggtaattttttttgtatttaagtttgtataaaattttatttatgagttattacgagttatgttacgtattcggtgataattttaatcggtacgattttttcggtgggtaaaatattcgacgaaggggtttcgcggcgcgagtaggaggtcgcgttgggagagggcgtcgggtgcggagttcgcgagttttcggtaagtcgtcgtcgttttggggttatttgatttcgtttttgaacgcggggttttagaggcgagttttgggtttatatagtaaaatgtggttcgttagaaagcgtttttttttatcgcgtttagaataagaagcggcgttgtttggcgagttttcgttcggttttttcgttttgtttagagtattagcgcgtagttcgcgttcgttattatttttaatatagataaagttttcgcgagatggagcggcggtgtataaaatttatttcgatcggatttgggatgcgtcgtatttttagtagggttaagttttacgaga

SEQ ID NO: 31412 - DNA, 515 bp, Artificial Sequence
  chemically treated genomic DNA (Homo sapiens) CpG-island No: 31412
tctcgtaaaacttaaccctactaaaaatacgacgcatcccaaatccgatcgaaataaattttatacaccgccgctccatctcgcgaaaactttatctatattaaaaataataacgaacgcgaactacgcgctaatactctaaacaaaacgaaaaaaccgaacgaaaactcgccaaacaacgccgcttcttattctaaacgcgataaaaaaaaacgctttctaacgaaccacattttactatataaacccaaaactcgcctctaaaaccccgcgttcaaaaacgaaatcaaataaccccaaaacgacgacgacttaccgaaaactcgcgaactccgcacccgacgccctctcccaacgcgacctcctactcgcgccgcgaaaccccttcgtcgaatattttacccaccgaaaaaatcgtaccgattaaaattatcaccgaatacgtaacataactcgtaataactcataaataaaattttatacaaacttaaatacaaaaaaaattacctattaaa

SEQ ID NO: 31413 - DNA, 689 bp, Artificial Sequence
  chemically treated genomic DNA (Homo sapiens) CpG-island No: 31413
cgaaatggaatatcgggtagagtgaagaagtttggtaaggggcgaaagagttgtggttaatcggtaagagttagtttaacgtttgtgataagttatttagcgtttggcgtgcgttaggtaaataagattcgttggcgtatttagagcgtattcgtttggcgatgaaagcgggtaatataggtttggtaatagtgttggtagggtagatgtttgtcgattattagattatcgtttcggtaattattttattggcgaataattttaatacggtattgattttcgcgcgtataattggcgcgatcgattttattcgttaaatggcggcggtggcgtttgttagtgtggcgcggtaggatgttgagaatgtacggttgatgattttatcgtttgtttaggcgtagtagtttaatgaagattagatttaggagttgcgcgatatcgtcgtttggcgtttgatgggtaacgatgttatcgacgagtaggcgaaatggcgcgatgacgttattatgcgttcgtaatttatttcgtttattgaacgtcgtgtacgaatggcgtttggtatcggcgatcgtcgcggtttgaatatttggttggcgcgtttgtttatggaagcgaaagagaaagatgaatggcgttattggtaggcggatttattgttggaacgcggacgtgaagttgaagtaaaagag

SEQ ID NO: 31414 - DNA, 689 bp, Artificial Sequence
  chemically treated genomic DNA (Homo sapiens) CpG-island No: 31414
ctcttttacttcaacttcacgtccgcgttccaacaataaatccgcctaccaataacgccattcatctttctctttcgcttccataaacaaacgcgccaaccaaatattcaaaccgcgacgatcgccgataccaaacgccattcgtacacgacgttcaataaacgaaataaattacgaacgcataataacgtcatcgcgccatttcgcctactcgtcgataacatcgttacccatcaaacgccaaacgacgatatcgcgcaactcctaaatctaatcttcattaaactactacgcctaaacaaacgataaaatcatcaaccgtacattctcaacatcctaccgcgccacactaacaaacgccaccgccgccatttaacgaataaaatcgatcgcgccaattatacgcgcgaaaatcaataccgtattaaaattattcgccaataaaataattaccgaaacgataatctaataatcgacaaacatctaccctaccaacactattaccaaacctatattacccgctttcatcgccaaacgaatacgctctaaatacgccaacgaatcttatttacctaacgcacgccaaacgctaaataacttatcacaaacgttaaactaactcttaccgattaaccacaactctttcgccccttaccaaacttcttcactctacccgatattccatttcg

SEQ ID NO: 31415 - DNA, 689 bp, Artificial Sequence
  chemically treated genomic DNA (Homo sapiens) CpG-island No: 31415
tttttttgttttagttttacgttcgcgttttagtaataaattcgtttgttagtaacgttatttatttttttttttcgtttttataggtagacgcgttagttaggtatttaggtcgcgacgatcgtcggtgttaagcgttattcgtatacggcgtttaataagcgaagtagattgcgagcgtataatggcgttatcgcgttatttcgtttgttcgtcggtgatatcgttgtttattaaacgttaggcgacgatatcgcgtagtttttgaatttgatttttattaagttgttgcgtttgggtaagcgatgggattattagtcgtgtatttttagtattttgtcgcgttatattggtaaacgttatcgtcgttatttgacgggtaaaatcggtcgcgttagttgtacgcgcgaaggttagtatcgtattagggttgttcgttagtgaaatgattgtcgaggcgatagtttggtaatcggtaggtatttgttttgttagtattgttattaggtttgtgttattcgtttttatcgttagacggatacgttttaaatacgttagcggattttgtttatttgacgtacgttagacgttaaataatttgttataggcgttaggttggtttttgtcggttagttatagttttttcgttttttgttaggtttttttattttgttcggtgttttatttcg

SEQ ID NO: 31416 - DNA, 689 bp, Artificial Sequence
  chemically treated genomic DNA (Homo sapiens) CpG-island No: 31416
cgaaataaaacaccgaacaaaataaaaaaacctaacaaaaaacgaaaaaactataactaaccgacaaaaaccaacctaacgcctataacaaattatttaacgtctaacgtacgtcaaataaacaaaatccgctaacgtatttaaaacgtatccgtctaacgataaaaacgaataacacaaacctaataacaatactaacaaaacaaatacctaccgattaccaaactatcgcctcgacaatcatttcactaacgaacaaccctaatacgatactaaccttcgcgcgtacaactaacgcgaccgattttacccgtcaaataacgacgataacgtttaccaatataacgcgacaaaatactaaaaatacacgactaataatcccatcgcttacccaaacgcaacaacttaataaaaatcaaattcaaaaactacgcgatatcgtcgcctaacgtttaataaacaacgatatcaccgacgaacaaacgaaataacgcgataacgccattatacgctcgcaatctacttcgcttattaaacgccgtatacgaataacgcttaacaccgacgatcgtcgcgacctaaatacctaactaacgcgtctacctataaaaacgaaaaaaaaaaataaataacgttactaacaaacgaatttattactaaaacgcgaacgtaaaactaaaacaaaaaaa

SEQ ID NO: 31417 - DNA, 553 bp, Artificial Sequence
  chemically treated genomic DNA (Homo sapiens) CpG-island No: 31417
cgcgtcgtcgttatatagtaatcgttcgcgaatttgaaaatagcggcgcgtatgggcgtttattcgtagttagtcgttaacgttgattagtatagttatcgacgcgggataatttagcgttagttgtatttttattagcgtatcgagcgtatggtcgattattgcgtaatgtttaatttttgcggttattagcgtttgatgtagtttcgttgttatttgggcgatattgtaattttttgttagcgtgtcgggattattgtcggtgtcgcgttggtcgtaatagattatttgatatttttgttttagtatcgttagttgcggtaattagtaattgtcgttatttttaagattcgaaattaatattattacgggcgtattagtataagggggaggtgagagtgaaagttttatcgcggttttatttggcgatatgcgtaattgtggcgatttttattagcgcgttaggttttattagttcgtattgaatgtagaatcgcgtcggtttattattcggaaaaaattcggcgtagatttcgttaatcgcggcgtaatt

SEQ ID NO: 31418 - DNA, 553 bp, Artificial Sequence
  chemically treated genomic DNA (Homo sapiens) CpG-island No: 31418
aattacgccgcgattaacgaaatctacgccgaattttttccgaataataaaccgacgcgattctacattcaatacgaactaataaaacctaacgcgctaataaaaatcgccacaattacgcatatcgccaaataaaaccgcgataaaactttcactctcacctcccccttatactaatacgcccgtaataatattaatttcgaatcttaaaaataacgacaattactaattaccgcaactaacgatactaaaacaaaaatatcaaataatctattacgaccaacgcgacaccgacaataatcccgacacgctaacaaaaaattacaatatcgcccaaataacaacgaaactacatcaaacgctaataaccgcaaaaattaaacattacgcaataatcgaccatacgctcgatacgctaataaaaatacaactaacgctaaattatcccgcgtcgataactatactaatcaacgttaacgactaactacgaataaacgcccatacgcgccgctattttcaaattcgcgaacgattactatataacgacgacgcg

SEQ ID NO: 31419 - DNA, 553 bp, Artificial Sequence
  chemically treated genomic DNA (Homo sapiens) CpG-island No: 31419
aattacgtcgcgattaacgaaatttacgtcgagtttttttcgggtgataaatcggcgcgattttgtatttagtgcggattggtaaaatttgacgcgttggtggaaatcgttataattgcgtatatcgttaagtgaggtcgcgatgaaatttttatttttattttttttttatgttgatgcgttcgtagtggtgttgatttcgggttttgggggtagcggtagttattggttatcgtaattggcggtgttggagtaggagtattaggtagtttgttacgattagcgcggtatcggtaataatttcgatacgttggtagaagattatagtatcgtttagatggtagcggaattgtattaggcgttggtagtcgtagggattgagtattacgtagtggtcggttatgcgttcggtgcgttggtgggaatgtagttggcgttggattatttcgcgtcggtaattgtgttgattagcgttaacggttggttacgaataaacgtttatacgcgtcgttgtttttaggttcgcgaacgattattgtatagcggcggcgcg

SEQ ID NO: 31420 - DNA, 553 bp, Artificial Sequence
  chemically treated genomic DNA (Homo sapiens) CpG-island No: 31420
cgcgccgccgctatacaataatcgttcgcgaacctaaaaacaacgacgcgtataaacgtttattcgtaaccaaccgttaacgctaatcaacacaattaccgacgcgaaataatccaacgccaactacattcccaccaacgcaccgaacgcataaccgaccactacgtaatactcaatccctacgactaccaacgcctaatacaattccgctaccatctaaacgatactataatcttctaccaacgtatcgaaattattaccgataccgcgctaatcgtaacaaactacctaatactcctactccaacaccgccaattacgataaccaataactaccgctacccccaaaacccgaaatcaacaccactacgaacgcatcaacataaaaaaaaaataaaaataaaaatttcatcgcgacctcacttaacgatatacgcaattataacgatttccaccaacgcgtcaaattttaccaatccgcactaaatacaaaatcgcgccgatttatcacccgaaaaaaactcgacgtaaatttcgttaatcgcgacgtaatt

SEQ ID NO: 31421 - DNA, 783 bp, Artificial Sequence
  chemically treated genomic DNA (Homo sapiens) CpG-island No: 31421
tttcgagaggtttaagggggttgaggattcggttttcgggagatcgtttattaggcggtggatacggggtagtttcgagaggaaggagatagtggattgttggaggaatgttcgcgagaatatcgaggttgatggaaatagaagatatttacgggtataggattaagagttaaagggaagaagagagggacggggtcgagtagtttggggggttcggcgtgggaggtcggagtagaggtcgttaagcgtcgttcgtagttagtcgtttttttcggagacgtattttcggatttcgtatatttagtttttcgtcgtttttgtttcggtaataatcgcgggcgtagttgttttcgtcgggttagggatagcgggggtaaaggtaattttggggttggcgggtagtagattggtagcgttcgtgtgtgtgtgcggggagtcgattttgagatcgttaacgttagattttgtttttttttttttaatttttttttattatttaatttttcggtcggttggtgttcgtttcgatcgacggatatcgtattttttataacgtttttcgtcgttttttatttttttttcgacgttttgagttgagggaaaataggttattcggatcgatttcgaattcgttcgggtgttttcgaatcgcggacgttattttcgttcgaacgttggtattttttcggcggttttttggttcgtttagatgtagtaaattttttttatttgtattgacgttatgatggaattatttttttaagatcggcgaggttagagacg

SEQ ID NO: 31422 - DNA, 783 bp, Artificial Sequence
  chemically treated genomic DNA (Homo sapiens) CpG-island No: 31422
cgtctctaacctcgccgatcttaaaaaaataattccatcataacgtcaatacaaataaaaaaaatttactacatctaaacgaaccaaaaaaccgccgaaaaaataccaacgttcgaacgaaaataacgtccgcgattcgaaaacacccgaacgaattcgaaatcgatccgaataacctattttccctcaactcaaaacgtcgaaaaaaaaataaaaaacgacgaaaaacgttataaaaaatacgatatccgtcgatcgaaacgaacaccaaccgaccgaaaaattaaataataaaaaaaaattaaaaaaaaaaaaacaaaatctaacgttaacgatctcaaaatcgactccccgcacacacacacgaacgctaccaatctactacccgccaaccccaaaattacctttacccccgctatccctaacccgacgaaaacaactacgcccgcgattattaccgaaacaaaaacgacgaaaaactaaatatacgaaatccgaaaatacgtctccgaaaaaaacgactaactacgaacgacgcttaacgacctctactccgacctcccacgccgaaccccccaaactactcgaccccgtccctctcttcttccctttaactcttaatcctatacccgtaaatatcttctatttccatcaacctcgatattctcgcgaacattcctccaacaatccactatctccttcctctcgaaactaccccgtatccaccgcctaataaacgatctcccgaaaaccgaatcctcaacccccttaaacctctcgaaa

SEQ ID NO: 31423 - DNA, 783 bp, Artificial Sequence
  chemically treated genomic DNA (Homo sapiens) CpG-island No: 31423
cgtttttggtttcgtcggttttggggggatggttttattatggcgttaatgtaggtgagaggagtttgttgtatttgggcgggttagggagtcgtcgagagagtgttagcgttcgggcgggggtggcgttcgcgattcggggatattcgggcgggttcgggatcggttcgggtggtttgtttttttttagtttagggcgtcgggggaggggtaagaggcggcgagaggcgttgtggggggtgcggtattcgtcggtcgaagcggatattagtcggtcgggaagttgggtgataaaggagggttggggaagaaagggtaaagtttggcgttggcggttttagaatcggtttttcgtatatatatacgggcgttgttagtttgttgttcgttagttttagggttgtttttattttcgttgtttttggttcgacggaaatagttgcgttcgcggttgttgtcggggtaggggcggcggggggttgagtgtgcgggattcgagaatgcgttttcggagaaggcggttggttgcggacggcgtttagcggtttttgtttcggttttttacgtcgggttttttagattgttcggtttcgtttttttttttttttttttgatttttaattttgtgttcgtgggtattttttatttttattagtttcggtattttcgcggatatttttttagtagtttattgttttttttttttcgaagttgtttcgtgtttatcgtttgatgggcgatttttcgagagtcgagtttttagtttttttaaatttttcggga

SEQ ID NO: 31424 - DNA, 783 bp, Artificial Sequence
  chemically treated genomic DNA (Homo sapiens) CpG-island No: 31424
tcccgaaaaatttaaaaaaactaaaaactcgactctcgaaaaatcgcccatcaaacgataaacacgaaacaacttcgaaaaaaaaaaaacaataaactactaaaaaaatatccgcgaaaataccgaaactaataaaaataaaaaatacccacgaacacaaaattaaaaatcaaaaaaaaaaaaaaaaaaacgaaaccgaacaatctaaaaaacccgacgtaaaaaaccgaaacaaaaaccgctaaacgccgtccgcaaccaaccgccttctccgaaaacgcattctcgaatcccgcacactcaaccccccgccgcccctaccccgacaacaaccgcgaacgcaactatttccgtcgaaccaaaaacaacgaaaataaaaacaaccctaaaactaacgaacaacaaactaacaacgcccgtatatatatacgaaaaaccgattctaaaaccgccaacgccaaactttaccctttcttccccaaccctcctttatcacccaacttcccgaccgactaatatccgcttcgaccgacgaataccgcaccccccacaacgcctctcgccgcctcttacccctcccccgacgccctaaactaaaaaaaaacaaaccacccgaaccgatcccgaacccgcccgaatatccccgaatcgcgaacgccacccccgcccgaacgctaacactctctcgacgactccctaacccgcccaaatacaacaaactcctctcacctacattaacgccataataaaaccatccccccaaaaccgacgaaaccaaaaacg

SEQ ID NO: 31425 - DNA, 646 bp, Artificial Sequence
  chemically treated genomic DNA (Homo sapiens) CpG-island No: 31425
ggagaggtcgcgaagagtcgttggggttttttaggttcgatacgacgttcgtttttttcgttttatttgggatattagatttcggacgttttatttgcgttcgattcggacgtcggagaaggcgcgcggttttcgaaggtttcgtattttagtcggttatcggtttcgaaggttcgttgttggaggacgttcgggagatagaggttcggggatttcggagcgcggcggtcgtatataatgtagtttttttttcgtagagaggtagttcgatcgtttacgggttgtttaacgttagaaatagtattacgcgggtgacgagcggttgcggacgttttagttgtacgagtttacgattgcgagatacggttttttattcgattgtcgtataagtggcgtatgtttagttcgggacgtttgattggtagttgggttgtttgcgcgtgcgtagaatttgtcgttcgtttgtcgttcgtttgtcgttcgtttgtcgttcgtttgtcgttcgtttgtcgttcgtttgtcgttcgtttgtcgttttttcggtcgcgcgcgttattcgttagttgagttgggagttcgtcgttttgtttttggtttagcggttttttttttttagaattttattttttttataatagtgtggagg

SEQ ID NO: 31426 - DNA, 646 bp, Artificial Sequence
  chemically treated genomic DNA (Homo sapiens) CpG-island No: 31426
cctccacactattataaaaaaaataaaattctaaaaaaaaaaaaccgctaaaccaaaaacaaaacgacgaactcccaactcaactaacgaataacgcgcgcgaccgaaaaaacgacaaacgaacgacaaacgaacgacaaacgaacgacaaacgaacgacaaacgaacgacaaacgaacgacaaacgaacgacaaattctacgcacgcgcaaacaacccaactaccaatcaaacgtcccgaactaaacatacgccacttatacgacaatcgaataaaaaaccgtatctcgcaatcgtaaactcgtacaactaaaacgtccgcaaccgctcgtcacccgcgtaatactatttctaacgttaaacaacccgtaaacgatcgaactacctctctacgaaaaaaaaactacattatatacgaccgccgcgctccgaaatccccgaacctctatctcccgaacgtcctccaacaacgaaccttcgaaaccgataaccgactaaaatacgaaaccttcgaaaaccgcgcgccttctccgacgtccgaatcgaacgcaaataaaacgtccgaaatctaatatcccaaataaaacgaaaaaaacgaacgtcgtatcgaacctaaaaaaccccaacgactcttcgcgacctctcc

SEQ ID NO: 31427 - DNA, 646 bp, Artificial Sequence
  chemically treated genomic DNA (Homo sapiens) CpG-island No: 31427
tttttatattgttataaagaaggtaaaattttaggaaggaggagtcgttgagttaaggatagagcggcgggtttttagtttagttggcggataacgcgcgcggtcgggaaggcggtaggcgggcggtaggcgggcggtaggcgggcggtaggcgggcggtaggcgggcggtaggcgggcggtaggcgggcggtagattttgcgtacgcgtaggtagtttagttgttagttaggcgtttcgggttgggtatgcgttatttgtgcggtagtcgggtgggaagtcgtgtttcgtagtcgtggattcgtgtagttggggcgttcgtagtcgttcgttattcgcgtgatgttgtttttggcgttgggtagttcgtgggcggtcgaattgtttttttgcggaaggaggattgtattgtgtgcggtcgtcgcgtttcgaggttttcgggtttttgtttttcgggcgttttttagtagcgggttttcggggtcggtagtcggttggagtacggggttttcgggagtcgcgcgtttttttcggcgttcgggtcgagcgtaggtagggcgttcgaggtttggtgttttaagtgaggcggggagggcgggcgtcgtgtcgggtttggggagttttagcggtttttcgcgattttttt

SEQ ID NO: 31428 - DNA, 646 bp, Artificial Sequence
  chemically treated genomic DNA (Homo sapiens) CpG-island No: 31428
aaaaaaatcgcgaaaaaccgctaaaactccccaaacccgacacgacgcccgccctccccgcctcacttaaaacaccaaacctcgaacgccctacctacgctcgacccgaacgccgaaaaaaacgcgcgactcccgaaaaccccgtactccaaccgactaccgaccccgaaaacccgctactaaaaaacgcccgaaaaacaaaaacccgaaaacctcgaaacgcgacgaccgcacacaatacaatcctccttccgcaaaaaaacaattcgaccgcccacgaactacccaacgccaaaaacaacatcacgcgaataacgaacgactacgaacgccccaactacacgaatccacgactacgaaacacgacttcccacccgactaccgcacaaataacgcatacccaacccgaaacgcctaactaacaactaaactacctacgcgtacgcaaaatctaccgcccgcctaccgcccgcctaccgcccgcctaccgcccgcctaccgcccgcctaccgcccgcctaccgcccgcctaccgccttcccgaccgcgcgcgttatccgccaactaaactaaaaacccgccgctctatccttaactcaacgactcctccttcctaaaattttaccttctttataacaatataaaaa

SEQ ID NO: 31429 - DNA, 937 bp, Artificial Sequence
  chemically treated genomic DNA (Homo sapiens) CpG-island No: 31429
cgcgcgcgcgtttagtttttatttttttttagcgggatttcggggatttttttttttattggtttgaaacgttttttcggcgatttgggatcgtttttttttggtttgcggttgtcggcggatttcgattttcgagggcggcggcgttcggtatttattagtcggcgtgcggttcgtcgattattagtagtattttggtttttttggcggttgcgggcgcgggagcgggcgcgtttattaggttagtcgaggcggtcgtttgttttacggtttgggatagcgagttgaagaagttgttgtttatcgacggcgtcggcgcgggttgcggcgcgggttgcggcgcgggcgtcgaggcgggcggcggttttcgtttcgggttcggcgaggcggtcgggggcgtcgtcgaggtcgaggcggcgttcggatcggggggcggcggcggcggcggttgttggggttcgggtcgttgtaggtcggttatgtagtcgttgggtaggttggcgatgaagttgttgttcgatagtcggcgtcgtaggaagtttattatttggtttaaagggttgggggcgcgcggggttacggggtttggtggcgcggagggagagcgagggcggaaggcgagattgaggcgattgaggcggttgaggcggcggtttagttagtagagatttagatttcggcgttagatttcgtagatagtagcggcggattgggttaggtaagtcgcgcggcgcgaggttcgcggagagggagcgggcggggtaggggcggggttagagatagttttcgtttcgcgtcgtagaggcggtttcgttttcgtttacggagggtatttagtcgcgcgtttggcgattttcggggtttgtaggagggggcgatttaggtttttagtaatttgagcgtgattatgcggggagggcgtgggagttaggttttt

SEQ ID NO: 31430 - DNA, 937 bp, Artificial Sequence
  chemically treated genomic DNA (Homo sapiens) CpG-island No: 31430
aaaaacctaactcccacgccctccccgcataatcacgctcaaattactaaaaacctaaatcgccccctcctacaaaccccgaaaatcgccaaacgcgcgactaaataccctccgtaaacgaaaacgaaaccgcctctacgacgcgaaacgaaaactatctctaaccccgcccctaccccgcccgctccctctccgcgaacctcgcgccgcgcgacttacctaacccaatccgccgctactatctacgaaatctaacgccgaaatctaaatctctactaactaaaccgccgcctcaaccgcctcaatcgcctcaatctcgccttccgccctcgctctccctccgcgccaccaaaccccgtaaccccgcgcgcccccaaccctttaaaccaaataataaacttcctacgacgccgactatcgaacaacaacttcatcgccaacctacccaacgactacataaccgacctacaacgacccgaaccccaacaaccgccgccgccgccgccccccgatccgaacgccgcctcgacctcgacgacgcccccgaccgcctcgccgaacccgaaacgaaaaccgccgcccgcctcgacgcccgcgccgcaacccgcgccgcaacccgcgccgacgccgtcgataaacaacaacttcttcaactcgctatcccaaaccgtaaaacaaacgaccgcctcgactaacctaataaacgcgcccgctcccgcgcccgcaaccgccaaaaaaaccaaaatactactaataatcgacgaaccgcacgccgactaataaataccgaacgccgccgccctcgaaaatcgaaatccgccgacaaccgcaaaccaaaaaaaaacgatcccaaatcgccgaaaaaacgtttcaaaccaataaaaaaaaaaatccccgaaatcccgctaaaaaaaaataaaaactaaacgcgcgcgcg

SEQ ID NO: 31431 - DNA, 937 bp, Artificial Sequence
  chemically treated genomic DNA (Homo sapiens) CpG-island No: 31431
gaaggtttggtttttacgtttttttcgtatagttacgtttaggttgttggaggtttgggtcgtttttttttgtaagtttcgagagtcgttagacgcgcggttaggtgtttttcgtgagcgggggcggggtcgtttttgcggcgcggggcgggggttatttttggtttcgtttttgtttcgttcgtttttttttcgcgagtttcgcgtcgcgcggtttgtttggtttagttcgtcgttgttgtttgcggggtttggcgtcggggtttgagtttttgttggttaagtcgtcgttttagtcgttttagtcgttttaatttcgtttttcgttttcgtttttttttcgcgttattagatttcgtagtttcgcgcgtttttagttttttaagttagatgatgaattttttgcggcgtcggttgtcggatagtagttttatcgttaatttgtttaacggttatatgatcgatttgtagcggttcgagttttagtagtcgtcgtcgtcgtcgtttttcggttcgggcgtcgtttcggtttcggcggcgttttcgatcgtttcgtcgggttcggagcggaggtcgtcgttcgtttcggcgttcgcgtcgtagttcgcgtcgtagttcgcgtcgacgtcgtcggtgggtagtagtttttttagttcgttgttttaagtcgtgaagtagacggtcgtttcggttggtttggtggacgcgttcgttttcgcgttcgtagtcgttaggaaggttaaggtgttgttggtggtcgacgagtcgtacgtcgattggtaggtgtcgggcgtcgtcgttttcgggggtcggggttcgtcggtagtcgtaggttaggagaggacggttttaggtcgtcgaggaaacgttttagattaatgaaaaggagggttttcgaggtttcgttgggaggaggtgggggttgagcgcgcgcgcg

SEQ ID NO: 31432 - DNA, 937 bp, Artificial Sequence
  chemically treated genomic DNA (Homo sapiens) CpG-island No: 31432
cgcgcgcgcgctcaacccccacctcctcccaacgaaacctcgaaaaccctccttttcattaatctaaaacgtttcctcgacgacctaaaaccgtcctctcctaacctacgactaccgacgaaccccgacccccgaaaacgacgacgcccgacacctaccaatcgacgtacgactcgtcgaccaccaacaacaccttaaccttcctaacgactacgaacgcgaaaacgaacgcgtccaccaaaccaaccgaaacgaccgtctacttcacgacttaaaacaacgaactaaaaaaactactacccaccgacgacgtcgacgcgaactacgacgcgaactacgacgcgaacgccgaaacgaacgacgacctccgctccgaacccgacgaaacgatcgaaaacgccgccgaaaccgaaacgacgcccgaaccgaaaaacgacgacgacgacgactactaaaactcgaaccgctacaaatcgatcatataaccgttaaacaaattaacgataaaactactatccgacaaccgacgccgcaaaaaattcatcatctaacttaaaaaactaaaaacgcgcgaaactacgaaatctaataacgcgaaaaaaaaacgaaaacgaaaaacgaaattaaaacgactaaaacgactaaaacgacgacttaaccaacaaaaactcaaaccccgacgccaaaccccgcaaacaacaacgacgaactaaaccaaacaaaccgcgcgacgcgaaactcgcgaaaaaaaaacgaacgaaacaaaaacgaaaccaaaaataacccccgccccgcgccgcaaaaacgaccccgcccccgctcacgaaaaacacctaaccgcgcgtctaacgactctcgaaacttacaaaaaaaaacgacccaaacctccaacaacctaaacgtaactatacgaaaaaaacgtaaaaaccaaaccttc

SEQ ID NO: 31433 - DNA, 513 bp, Artificial Sequence
  chemically treated genomic DNA (Homo sapiens) CpG-island No: 31433
aggcgggtgcggcggggttcgcgttggcgcggggtttttttttttttaggcgcgttgggttcgttttcggtttcgcgacgtttcgggttcgttttttttgtggtttcgcggtttcggtttgttttcggcgtttatttattcgggtttttttttttttcgtttttttttttttattggtatttttacgcgcgttttcgtcgtttttttttattttagattttgcgttcgttagtgatttttggttcgttggttcgttttttttcgtgtcggcgttgttttttttttttaattttggtttttattattttttttttttcgcggtcgttttttttttttattttttgttttcgtttttagttttatatttttttatttttcgggtttcgtttcgtttcgtttcgatatttagtttttttggtttttggttttgaagttggtgtttttatcgttttttattatttcgttttttatttgcgcggttagattttttaatttagatattgcgttgttttt

SEQ ID NO: 31434 - DNA, 513 bp, Artificial Sequence
  chemically treated genomic DNA (Homo sapiens) CpG-island No: 31434
aaaaacaacgcaatatctaaattaaaaaatctaaccgcgcaaataaaaaacgaaataataaaaaacgataaaaacaccaacttcaaaaccaaaaaccaaaaaaactaaatatcgaaacgaaacgaaacgaaacccgaaaaataaaaaaatataaaactaaaaacgaaaacaaaaaataaaaaaaaaaaacgaccgcgaaaaaaaaaaaataataaaaaccaaaattaaaaaaaaaaaacaacgccgacacgaaaaaaaacgaaccaacgaaccaaaaatcactaacgaacgcaaaatctaaaataaaaaaaaacgacgaaaacgcgcgtaaaaataccaataaaaaaaaaaaaacgaaaaaaaaaaaaacccgaataaataaacgccgaaaacaaaccgaaaccgcgaaaccacaaaaaaaacgaacccgaaacgtcgcgaaaccgaaaacgaacccaacgcgcctaaaaaaaaaaaaaccccgcgccaacgcgaaccccgccgcacccgcct

SEQ ID NO: 31435 - DNA, 513 bp, Artificial Sequence
  chemically treated genomic DNA (Homo sapiens) CpG-island No: 31435
aaggataacgtagtatttaagttggaagatttggtcgcgtaggtggaaggcgaagtgatggggagcgataaagatattaattttaaaattagggattaggagggttgggtgtcgaggcgaggcgaggcgaagttcgggggataagggggtgtggagttggggacgggaataggggatgaggagaaaaagcggtcgcgaagaggaaggagtggtgggagttaggattggggaggggggataacgtcgatacgggaagggacgagttaacgagttaggagttattggcgggcgtaggatttggggtgggagggggcggcgagagcgcgcgtggaggtgttaatggaaggaagggggcggaagaaaggaagattcgaatgaatgagcgtcgggggtaggtcggggtcgcggggttatagaggaagcgggttcggggcgtcgcggggtcgggggcgggtttagcgcgtttggaaaggaggaagtttcgcgttagcgcgggtttcgtcgtattcgttt

SEQ ID NO: 31436 - DNA, 513 bp, Artificial Sequence
  chemically treated genomic DNA (Homo sapiens) CpG-island No: 31436
aaacgaatacgacgaaacccgcgctaacgcgaaacttcctcctttccaaacgcgctaaacccgcccccgaccccgcgacgccccgaacccgcttcctctataaccccgcgaccccgacctacccccgacgctcattcattcgaatcttcctttcttccgcccccttccttccattaacacctccacgcgcgctctcgccgccccctcccaccccaaatcctacgcccgccaataactcctaactcgttaactcgtcccttcccgtatcgacgttatcccccctccccaatcctaactcccaccactccttcctcttcgcgaccgctttttctcctcatcccctattcccgtccccaactccacacccccttatcccccgaacttcgcctcgcctcgcctcgacacccaaccctcctaatccctaattttaaaattaatatctttatcgctccccatcacttcgccttccacctacgcgaccaaatcttccaacttaaatactacgttatcctt

SEQ ID NO: 31437 - DNA, 984 bp, Artificial Sequence
  chemically treated genomic DNA (Homo sapiens) CpG-island No: 31437
ttcgcgggtgttgcggatagggttttatattttcggttcgtttttcgagaacgaggaaatttgttaagtcgtcgggatttatatttcgtagttttttcgcgtttttgtttagtttagttttagcgcgttcgatcgttttttatttgttttagtttttgggttgtattcggttattttattttttttcggcgatttcgcggtttcgttatttttttttcgcgatttgggttcgggtcgttttcgggtaggagcgttcgatcgtcgtttttcgtttagtttcgatttagttagttttttcgcggttcggtttttttcgtttttaggttcgagtttttatcgcgcgttttttagttttagtttttgttttcgtttcgtttggtagtttttggtttatatttttacgtcggttatttggagttaagcgtagcggagcgttttatttacggttttaggtcgtagagggttcggtgttcggcgtttcgtttttttttagttttacgtggtaggcgtagatggagagtaggatttcggcggtagcgtatattgcgtattaggttatttttttttatcgcggtatcgatatttagtaggacgtgcgtcgtcgtttgttttttttcgttttcgttttagtcgtcgtcgttgtcgttttattggtttcgtcgtttgtttcgggtttcgtttcgataggcgcgcggttttatcgtttcgataggagtgaggcgggcggggcggggaaggcgcgcgtaggcgtcgaaggagtggatagagagcgtaattattttggaggttcgatcggtcggcggaaattgaggtagcgcgttacggcgttcgcgaggtttggggttcggggagagaggggcggggtcgggagggacggggttaggcgggttagcgcggggagggatttcggggagcggagtaaggatgttattgtgggtgattgggcgaggtttcggtttttttttttggacgtggtattttatt

SEQ ID NO: 31438 - DNA, 984 bp, Artificial Sequence
  chemically treated genomic DNA (Homo sapiens) CpG-island No: 31438
aataaaataccacgtccaaaaaaaaaaaccgaaacctcgcccaatcacccacaataacatccttactccgctccccgaaatccctccccgcgctaacccgcctaaccccgtccctcccgaccccgcccctctctccccgaaccccaaacctcgcgaacgccgtaacgcgctacctcaatttccgccgaccgatcgaacctccaaaataattacgctctctatccactccttcgacgcctacgcgcgccttccccgccccgcccgcctcactcctatcgaaacgataaaaccgcgcgcctatcgaaacgaaacccgaaacaaacgacgaaaccaataaaacgacaacgacgacgactaaaacgaaaacgaaaaaaaacaaacgacgacgcacgtcctactaaatatcgataccgcgataaaaaaaaataacctaatacgcaatatacgctaccgccgaaatcctactctccatctacgcctaccacgtaaaactaaaaaaaaacgaaacgccgaacaccgaaccctctacgacctaaaaccgtaaataaaacgctccgctacgcttaactccaaataaccgacgtaaaaatataaaccaaaaactaccaaacgaaacgaaaacaaaaactaaaactaaaaaacgcgcgataaaaactcgaacctaaaaacgaaaaaaaccgaaccgcgaaaaaactaactaaatcgaaactaaacgaaaaacgacgatcgaacgctcctacccgaaaacgacccgaacccaaatcgcgaaaaaaaaataacgaaaccgcgaaatcgccgaaaaaaaataaaataaccgaatacaacccaaaaactaaaacaaataaaaaacgatcgaacgcgctaaaactaaactaaacaaaaacgcgaaaaaactacgaaatataaatcccgacgacttaacaaatttcctcgttctcgaaaaacgaaccgaaaatataaaaccctatccgcaacacccgcgaa

SEQ ID NO: 31439 - DNA, 984 bp, Artificial Sequence
  chemically treated genomic DNA (Homo sapiens) CpG-island No: 31439
aatagagtgttacgtttagagggaggggtcgaggtttcgtttagttatttatagtggtatttttgtttcgtttttcggagttttttttcgcgttggttcgtttggtttcgtttttttcggtttcgttttttttttttcgggttttaagtttcgcgggcgtcgtggcgcgttgttttagttttcgtcggtcgatcgggtttttagggtagttgcgttttttgtttattttttcggcgtttgcgcgcgtttttttcgtttcgttcgttttatttttgtcggggcggtggggtcgcgcgtttgtcggggcggggttcggagtaggcgacggagttaatggggcggtagcggcggcggttgaggcggaggcggagggaggtagacggcggcgtacgttttgttgagtgtcggtgtcgcggtgggagaaggtgatttgatacgtagtgtgcgttgtcgtcgggattttgttttttatttacgtttattacgtggagttggagaagggcgggacgtcgagtatcgggttttttgcgatttgggatcgtgggtgaagcgtttcgttgcgtttggttttagatagtcggcgtgggggtgtgggttaggagttgttaagcggggcgagggtagaggttggggttggggagcgcgcggtgggagttcgggtttggaggcggaggggatcgggtcgcgggggaattgattgggtcggggttgggcgggaggcggcggtcgggcgtttttgttcgggggcgattcgagtttaggtcgcggggaggaggtggcggggtcgcgaggtcgtcggggaagaatgaggtggtcgagtgtagtttagaggttggggtagatggggagcggtcgggcgcgttggggttgggttgggtaggagcgcgagggggttgcggagtgtgggtttcggcggtttgataggttttttcgttttcgggaggcgggtcgggggtgtgggattttgttcgtagtattcgcgag

SEQ ID NO: 31440 - DNA, 984 bp, Artificial Sequence
  chemically treated genomic DNA (Homo sapiens) CpG-island No: 31440
ctcgcgaatactacgaacaaaatcccacacccccgacccgcctcccgaaaacgaaaaaacctatcaaaccgccgaaacccacactccgcaaccccctcgcgctcctacccaacccaaccccaacgcgcccgaccgctccccatctaccccaacctctaaactacactcgaccacctcattcttccccgacgacctcgcgaccccgccacctcctccccgcgacctaaactcgaatcgcccccgaacaaaaacgcccgaccgccgcctcccgcccaaccccgacccaatcaattcccccgcgacccgatcccctccgcctccaaacccgaactcccaccgcgcgctccccaaccccaacctctaccctcgccccgcttaacaactcctaacccacacccccacgccgactatctaaaaccaaacgcaacgaaacgcttcacccacgatcccaaatcgcaaaaaacccgatactcgacgtcccgcccttctccaactccacgtaataaacgtaaataaaaaacaaaatcccgacgacaacgcacactacgtatcaaatcaccttctcccaccgcgacaccgacactcaacaaaacgtacgccgccgtctacctccctccgcctccgcctcaaccgccgccgctaccgccccattaactccgtcgcctactccgaaccccgccccgacaaacgcgcgaccccaccgccccgacaaaaataaaacgaacgaaacgaaaaaaacgcgcgcaaacgccgaaaaaataaacaaaaaacgcaactaccctaaaaacccgatcgaccgacgaaaactaaaacaacgcgccacgacgcccgcgaaacttaaaacccgaaaaaaaaaaaacgaaaccgaaaaaaacgaaaccaaacgaaccaacgcgaaaaaaaactccgaaaaacgaaacaaaaataccactataaataactaaacgaaacctcgacccctccctctaaacgtaacactctatt

SEQ ID NO: 31441 - DNA, 822 bp, Artificial Sequence
  chemically treated genomic DNA (Homo sapiens) CpG-island No: 31441
gagcgtttttaggtgaaaggtagttggagagcgcgagaagggggtgggtaagaagacgatcgggggcgaagacggtggggagtggaagaggggagaagagggtgcggggagagaaaaacgcggtaggaagtcgttgttgcgagaaggtggggaggggaagaagatggcggagaataagaggttggggaaaaaagacgatgggagggggagagaagaaagtgggaagaagattgcgattgatagacgttgttgcgagacggtgggaggatatgggaagaaaacggtgtgaggggaagaaaacgggggagaaaacggttgtggggaaggcgcggggagaagatagtgaggagaagagggcgtggggagaggacggtggggaagaggaagagaagatggtgaggggagagaaaagcgcggtaggaagacgttgttgcgagaagaaggtggggatatggaggcggtaagaaaatggagaagaggttgggaaagaagacgattgggagaggagaagagggtgggaagaaggcgatggggagaggagaagagggtgggaagaaggcgatggggagaggagaagagggtgggaagaagattaaggtagatatgggaagaaaagggtgcgggatgaggaagaaaacggttggcggtaataggtcgggagaagacggtgaggagggggaggggagaagagggagcggcgggaagacgttgttgggggaataggcgggaaggtggagattggaagttagcgggtggagagaaggagatggaaggaaaagttgtcgttataggaattcgtgttgcgaggaatgggagagattg

SEQ ID NO: 31442 - DNA, 822 bp, Artificial Sequence
  chemically treated genomic DNA (Homo sapiens) CpG-island No: 31442
caatctctcccattcctcgcaacacgaattcctataacgacaacttttccttccatctccttctctccacccgctaacttccaatctccaccttcccgcctattcccccaacaacgtcttcccgccgctccctcttctcccctccccctcctcaccgtcttctcccgacctattaccgccaaccgttttcttcctcatcccgcacccttttcttcccatatctaccttaatcttcttcccaccctcttctcctctccccatcgccttcttcccaccctcttctcctctccccatcgccttcttcccaccctcttctcctctcccaatcgtcttctttcccaacctcttctccattttcttaccgcctccatatccccaccttcttctcgcaacaacgtcttcctaccgcgcttttctctcccctcaccatcttctcttcctcttccccaccgtcctctccccacgccctcttctcctcactatcttctccccgcgccttccccacaaccgttttctcccccgttttcttcccctcacaccgttttcttcccatatcctcccaccgtctcgcaacaacgtctatcaatcgcaatcttcttcccactttcttctctccccctcccatcgtcttttttccccaacctcttattctccgccatcttcttcccctccccaccttctcgcaacaacgacttcctaccgcgtttttctctccccgcaccctcttctcccctcttccactccccaccgtcttcgcccccgatcgtcttcttacccacccccttctcgcgctctccaactacctttcacctaaaaacgctc

SEQ ID NO: 31443 - DNA, 822 bp, Artificial Sequence
  chemically treated genomic DNA (Homo sapiens) CpG-island No: 31443
tagttttttttatttttcgtagtacgggtttttgtggcggtagtttttttttttatttttttttttttattcgttggtttttagtttttattttttcgtttatttttttagtagcgttttttcgtcgttttttttttttttttttttttttttatcgttttttttcggtttattatcgttaatcgtttttttttttatttcgtatttttttttttttatgtttgttttagttttttttttattttttttttttttttttatcgttttttttttattttttttttttttttttatcgttttttttttatttttttttttttttttaatcgtttttttttttagttttttttttatttttttgtcgtttttatatttttatttttttttcgtagtagcgtttttttgtcgcgtttttttttttttttattatttttttttttttttttttatcgttttttttttacgtttttttttttttattgtttttttttcgcgttttttttataatcgttttttttttcgtttttttttttttatatcgttttttttttatgtttttttatcgtttcgtagtagcgtttgttagtcgtaattttttttttattttttttttttttttttttatcgttttttttttttagttttttatttttcgttattttttttttttttttattttttcgtagtagcgattttttgtcgcgttttttttttttcgtatttttttttttttttttttattttttatcgttttcgttttcgatcgtttttttgtttatttttttttcgcgttttttaattgttttttatttagaagcgttt

SEQ ID NO: 31444 - DNA, 822 bp, Artificial Sequence
  chemically treated genomic DNA (Homo sapiens) CpG-island No: 31444
aaacgcttctaaataaaaaacaattaaaaaacgcgaaaaaaaaataaacaaaaaaacgatcgaaaacgaaaacgataaaaaataaaaaaaaaaaaaaaaaaatacgaaaaaaaaaaaacgcgacaaaaaatcgctactacgaaaaaataaaaaaaaaaaaaaaataacgaaaaataaaaaactaaaaaaaaaaaacgataaaaaaaaaaaaaaaaaaaataaaaaaaaaattacgactaacaaacgctactacgaaacgataaaaaaacataaaaaaaaaacgatataaaaaaaaaaaaacgaaaaaaaaaacgattataaaaaaaacgcgaaaaaaaaacaataaaaaaaaaaaaacgtaaaaaaaaaacgataaaaaaaaaaaaaaaaaaataataaaaaaaaaaaaaaacgcgacaaaaaaacgctactacgaaaaaaaaataaaaatataaaaacgacaaaaaaataaaaaaaaaactaaaaaaaaaaacgattaaaaaaaaaaaaaaaaataaaaaaaaaacgataaaaaaaaaaaaaaaaaataaaaaaaaaacgataaaaaaaaaaaaaaaaaataaaaaaaaaactaaaacaaacataaaaaaaaaaaaatacgaaataaaaaaaaaaacgattaacgataataaaccgaaaaaaaacgataaaaaaaaaaaaaaaaaaaaaaaaaacgacgaaaaaacgctactaaaaaaataaacgaaaaaataaaaactaaaaaccaacgaataaaaaaaaaaaaataaaaaaaaaaactaccgccacaaaaacccgtactacgaaaaataaaaaaaacta

SEQ ID NO: 31445 - DNA, 666 bp, Artificial Sequence
  chemically treated genomic DNA (Homo sapiens) CpG-island No: 31445
acgcggagataaagatatttcgatagttacggatatagatagataaagatcgacggacgcgcggacgtacggacggttcggttcggcgaggggaaagcggtttttcgtagttagggtagtagattttttaggggcgaggagattttcggttatcgtattttatttgttttttgcgtttcgggcgtatttgagatttttttttttttttagtgtttttcggtgtgttttcgtttttttttttttagagttgttgagcgggtcgggtcggttttattgcgcgggatgtagttttcggtttttatttattggtcgaggcgggtagagaaattttcggttttttcgttcggtcgttgttaattcgttagttttaggcgcgtcggtttttgcgcgggtttcggagtcggggcggggcggggcggggcggggcggggcggggtcggttcggggcggggttagagtcggcgtcgttgattggtagcgagttgtcggtagtttggtttgtgtcgttcggcggtttttgtttcgggttgatagttggggttgttcgcgatttcgcggttttttcgcgttcgcggtttgcgcggggtttcgggtttcgtttttttgtttttatttttattagttttattgggcgattttgtttttttagttttttttttttgtttg

SEQ ID NO: 31446 - DNA, 666 bp, Artificial Sequence
  chemically treated genomic DNA (Homo sapiens) CpG-island No: 31446
caaacaaaaaaaaaaaactaaaaaaacaaaatcgcccaataaaactaataaaaataaaaacaaaaaaacgaaacccgaaaccccgcgcaaaccgcgaacgcgaaaaaaccgcgaaatcgcgaacaaccccaactatcaacccgaaacaaaaaccgccgaacgacacaaaccaaactaccgacaactcgctaccaatcaacgacgccgactctaaccccgccccgaaccgaccccgccccgccccgccccgccccgccccgccccgactccgaaacccgcgcaaaaaccgacgcgcctaaaactaacgaattaacaacgaccgaacgaaaaaaccgaaaatttctctacccgcctcgaccaataaataaaaaccgaaaactacatcccgcgcaataaaaccgacccgacccgctcaacaactctaaaaaaaaaaaaacgaaaacacaccgaaaaacactaaaaaaaaaaaaaaatctcaaatacgcccgaaacgcaaaaaacaaataaaatacgataaccgaaaatctcctcgcccctaaaaaatctactaccctaactacgaaaaaccgctttcccctcgccgaaccgaaccgtccgtacgtccgcgcgtccgtcgatctttatctatctatatccgtaactatcgaaatatctttatctccgcgt

SEQ ID NO: 31447 - DNA, 666 bp, Artificial Sequence
  chemically treated genomic DNA (Homo sapiens) CpG-island No: 31447
taggtaagaaaggaagattgagggggtagggtcgtttaatggggttgatggaagtgagagtagagagacgggattcgggatttcgcgtaggtcgcgggcgcgaaggagtcgcgaggtcgcgagtagttttagttgttagttcggaataaaggtcgtcgagcggtatagattaggttgtcggtagttcgttgttaattagcggcgtcggttttggtttcgtttcgggtcggtttcgtttcgtttcgtttcgtttcgtttcgtttcggtttcgggattcgcgtagaggtcggcgcgtttggagttggcgggttggtagcggtcgggcggggaggtcgaaagtttttttgttcgtttcggttagtgagtgggagtcgggagttgtatttcgcgtagtgggatcggttcggttcgtttagtagttttggaaaaagagagacgggaatatatcgggaaatattgggaaaaaaaaaaagttttaagtgcgttcgaggcgtagggggtaggtaaggtgcggtggtcggggattttttcgtttttggagggtttgttgttttggttgcgggaaatcgtttttttttcgtcgggtcggatcgttcgtgcgttcgcgcgttcgtcggtttttgtttgtttgtgttcgtggttgtcgaggtgtttttgttttcgcgt

SEQ ID NO: 31448 - DNA, 666 bp, Artificial Sequence
  chemically treated genomic DNA (Homo sapiens) CpG-island No: 31448
acgcgaaaacaaaaacacctcgacaaccacgaacacaaacaaacaaaaaccgacgaacgcgcgaacgcacgaacgatccgacccgacgaaaaaaaaacgatttcccgcaaccaaaacaacaaaccctccaaaaacgaaaaaatccccgaccaccgcaccttacctaccccctacgcctcgaacgcacttaaaactttttttttttcccaatatttcccgatatattcccgtctctctttttccaaaactactaaacgaaccgaaccgatcccactacgcgaaatacaactcccgactcccactcactaaccgaaacgaacaaaaaaactttcgacctccccgcccgaccgctaccaacccgccaactccaaacgcgccgacctctacgcgaatcccgaaaccgaaacgaaacgaaacgaaacgaaacgaaacgaaaccgacccgaaacgaaaccaaaaccgacgccgctaattaacaacgaactaccgacaacctaatctataccgctcgacgacctttattccgaactaacaactaaaactactcgcgacctcgcgactccttcgcgcccgcgacctacgcgaaatcccgaatcccgtctctctactctcacttccatcaaccccattaaacgaccctaccccctcaatcttcctttcttaccta

SEQ ID NO: 31449 - DNA, 749 bp, Artificial Sequence
  chemically treated genomic DNA (Homo sapiens) CpG-island No: 31449
cggcgtagcggttagtagggggtagtgcgttttagcgtaattttcgtcgttcggtttagtttcggttttttatcggttgaggaatgaagttttatcgtgaatcgattttttattaaagaaataaaaattggtggtatcgagacgtacgggaggattttaagtttttcggggatattcgtagtttttggggatgcgttcgagggagtttaggttgtattcgcggggttttattttgttttcgagttaaaaagtcgtcgatttttttttttagggttttgttttttgtaggttcggttttagcgcgtagtagaaacgttaggggcggcgtttttagaagtacgcgggtttttttcggcgatgtgcggggttgggtggcgtcgtcgattttcgtacggagttttttttaggcgttttcggtttcgttttcgtttttttttttgcgtttttgcgttttgtgttttgttttgcgttttgttttcgttttcgtttcggttttttgttttgcgttttgttttcgttttcgttttttttttcgttttcgtttggaggtttcgtttaaggttttttcgggttgcgttacgaatttgtttcgcgttttcggtttcggtttcggtttcggtttcggtttcggtttcgcgcgttttttttcgtttttcgttcgtttttttttacgggtttcggttattgtatttttttgtgtgttgagatttttagaatattttgagggatgggaaacggggagggtagga

SEQ ID NO: 31450 - DNA, 749 bp, Artificial Sequence
  chemically treated genomic DNA (Homo sapiens) CpG-island No: 31450
tcctaccctccccgtttcccatccctcaaaatattctaaaaatctcaacacacaaaaaaatacaataaccgaaacccgtaaaaaaaaacgaacgaaaaacgaaaaaaaacgcgcgaaaccgaaaccgaaaccgaaaccgaaaccgaaaccgaaaacgcgaaacaaattcgtaacgcaacccgaaaaaaccttaaacgaaacctccaaacgaaaacgaaaaaaaaaacgaaaacgaaaacaaaacgcaaaacaaaaaaccgaaacgaaaacgaaaacaaaacgcaaaacaaaacacaaaacgcaaaaacgcaaaaaaaaaaacgaaaacgaaaccgaaaacgcctaaaaaaaactccgtacgaaaatcgacgacgccacccaaccccgcacatcgccgaaaaaaacccgcgtacttctaaaaacgccgcccctaacgtttctactacgcgctaaaaccgaacctacaaaaaacaaaaccctaaaaaaaaaaatcgacgactttttaactcgaaaacaaaataaaaccccgcgaatacaacctaaactccctcgaacgcatccccaaaaactacgaatatccccgaaaaacttaaaatcctcccgtacgtctcgataccaccaatttttatttctttaataaaaaatcgattcacgataaaacttcattcctcaaccgataaaaaaccgaaactaaaccgaacgacgaaaattacgctaaaacgcactaccccctactaaccgctacgccg

SEQ ID NO: 31451 - DNA, 749 bp, Artificial Sequence
  chemically treated genomic DNA (Homo sapiens) CpG-island No: 31451
ttttatttttttcgttttttattttttagaatgttttagaaattttagtatataggaagatgtagtggtcgaggttcgtagaaggaagcgggcgaagggcggaggaggacgcgcggggtcggggtcggggtcggggtcggggtcggggtcggggacgcggggtaggttcgtggcgtagttcggggagattttgggcgaggtttttaggcggggacgggaaagggaacgggaacggggatagggcgtagggtagagggtcgggacggaaacggggatagggcgtagggtagagtatagagcgtaggggcgtagagaaggggacgaagacggggtcggaggcgtttgaggggggtttcgtgcgggaatcggcggcgttatttagtttcgtatatcgtcgagagaggttcgcgtgtttttgagagcgtcgtttttgacgtttttgttgcgcgttgggatcgaatttataggaagtaaaattttagaggaagaagtcggcggttttttggttcggagataaaatggagtttcgcggatgtagtttgggttttttcgggcgtatttttagaagttgcgggtgttttcggaggatttgaagttttttcgtgcgtttcgatgttattagtttttgtttttttggtgaggaatcggtttacggtgaaattttattttttagtcggtggggagtcgaggttgggtcgggcggcgagggttgcgttgggacgtattgttttttattggtcgttgcgtcg

SEQ ID NO: 31452 - DNA, 749 bp, Artificial Sequence
  chemically treated genomic DNA (Homo sapiens) CpG-island No: 31452
cgacgcaacgaccaataaaaaacaatacgtcccaacgcaaccctcgccgcccgacccaacctcgactccccaccgactaaaaaataaaatttcaccgtaaaccgattcctcaccaaaaaaacaaaaactaataacatcgaaacgcacgaaaaaacttcaaatcctccgaaaacacccgcaacttctaaaaatacgcccgaaaaaacccaaactacatccgcgaaactccattttatctccgaaccaaaaaaccgccgacttcttcctctaaaattttacttcctataaattcgatcccaacgcgcaacaaaaacgtcaaaaacgacgctctcaaaaacacgcgaacctctctcgacgatatacgaaactaaataacgccgccgattcccgcacgaaacccccctcaaacgcctccgaccccgtcttcgtccccttctctacgcccctacgctctatactctaccctacgccctatccccgtttccgtcccgaccctctaccctacgccctatccccgttcccgttccctttcccgtccccgcctaaaaacctcgcccaaaatctccccgaactacgccacgaacctaccccgcgtccccgaccccgaccccgaccccgaccccgaccccgaccccgcgcgtcctcctccgcccttcgcccgcttccttctacgaacctcgaccactacatcttcctatatactaaaatttctaaaacattctaaaaaataaaaaacgaaaaaaataaaa

SEQ ID NO: 31453 - DNA, 531 bp, Artificial Sequence
  chemically treated genomic DNA (Homo sapiens) CpG-island No: 31453
tttcgtcgggagatttttaatttattttcgttttcgttattttttgggattagttttcgtattttttatcgttttttttttttttatttttataatttcgttcgagttttattgcgtttgtgcggttaacgaggtcgcgcgtaggcgatcggggtagaagagttttcggtttttgttgttaataagacgtggatttgcgagtcggggtaaaagggttttcggtttgcgggaaattggaggttagcggtgggcgtggatcgtcgaggtgattggcggttgtcggatttgttgttgtttgttgattaggtagtcgtaggtaatgacggatgtttagattttgtgggcggagtaaaggaattatgtattgatatacgtatatttatcgaggggcgcgttcgtttgcgtgttttttatttcgtagtcgaaaggagcgcgtttcggggtaggttttcgggtatttttcgtagaggatcgggttttatattttttgttttttttttttttttagtaagttataatttattttgggag

SEQ ID NO: 31454 - DNA, 531 bp, Artificial Sequence
  chemically treated genomic DNA (Homo sapiens) CpG-island No: 31454
ctcccaaaataaattataacttactaaaaaaaaaaaaaaaacaaaaaatataaaacccgatcctctacgaaaaatacccgaaaacctaccccgaaacgcgctcctttcgactacgaaataaaaaacacgcaaacgaacgcgcccctcgataaatatacgtatatcaatacataattcctttactccgcccacaaaatctaaacatccgtcattacctacgactacctaatcaacaaacaacaacaaatccgacaaccgccaatcacctcgacgatccacgcccaccgctaacctccaatttcccgcaaaccgaaaacccttttaccccgactcgcaaatccacgtcttattaacaacaaaaaccgaaaactcttctaccccgatcgcctacgcgcgacctcgttaaccgcacaaacgcaataaaactcgaacgaaattataaaaataaaaaaaaaaaaaacgataaaaaatacgaaaactaatcccaaaaaataacgaaaacgaaaataaattaaaaatctcccgacgaaa

SEQ ID NO: 31455 - DNA, 531 bp, Artificial Sequence
  chemically treated genomic DNA (Homo sapiens) CpG-island No: 31455
tttttaaaataagttatgatttattaggggaggaaaaggagtaaagagtataaagttcggttttttgcgggaagtattcggaggtttgtttcggaacgcgtttttttcggttacgagatgaggggtacgtagacggacgcgtttttcggtgagtgtgcgtgtattagtgtatgatttttttatttcgtttatagggtttgggtattcgttattatttacggttgtttggttagtaaataatagtagattcgataatcgttagttatttcgacggtttacgtttatcgttagtttttagtttttcgtagatcggaagtttttttgtttcggttcgtaggtttacgttttattgatagtaggaatcggaagtttttttgtttcgatcgtttgcgcgcggtttcgttggtcgtataggcgtagtggagttcgggcggagttgtgggagtggaggagaaagaggcggtagggggtacgggggttggttttagaagatggcggaggcgggggtgagttgggggtttttcggcgaag

SEQ ID NO: 31456 - DNA, 531 bp, Artificial Sequence
  chemically treated genomic DNA (Homo sapiens) CpG-island No: 31456
cttcgccgaaaaacccccaactcacccccgcctccgccatcttctaaaaccaacccccgtaccccctaccgcctctttctcctccactcccacaactccgcccgaactccactacgcctatacgaccaacgaaaccgcgcgcaaacgatcgaaacaaaaaaacttccgattcctactatcaataaaacgtaaacctacgaaccgaaacaaaaaaacttccgatctacgaaaaactaaaaactaacgataaacgtaaaccgtcgaaataactaacgattatcgaatctactattatttactaaccaaacaaccgtaaataataacgaatacccaaaccctataaacgaaataaaaaaatcatacactaatacacgcacactcaccgaaaaacgcgtccgtctacgtacccctcatctcgtaaccgaaaaaaacgcgttccgaaacaaacctccgaatacttcccgcaaaaaaccgaactttatactctttactccttttcctcccctaataaatcataacttattttaaaaa

SEQ ID NO: 31457 - DNA, 739 bp, Artificial Sequence
  chemically treated genomic DNA (Homo sapiens) CpG-island No: 31457
gttcgttgtgcgcgtacgtttggaaaggcgggatttaaggtagcgatgttgcgggaggttttgtagtgttaacgagttttcgaacggtttcgttttattttttttttgtgtgtttcgtaagtttttgtttagtaaatcgttatagtttcggcgcgcgagagtggcgttggtacgtttaaatttcggggttttcggttaggttaggggggcgggcgtgcggcggggtcgggtcgggtcgggcgcgtttagcgggtttcgggtatacgttttttatttgggcgaggttcggtgcgtaggcgtttagcgcgggggtagcggtcgggcgtttaagttcggcgcgggtaagagttggatagtttaggggtcgcgtcgggtcgagttgtcgttcgcgttatttttatcgtcgtcgttgttatcgttatcgttatcgtttgggttgtagtagatcgcgggagaacgtttgcgcgaagtttcggtgtagttttggcgggatcgtagtaattatcggagcgtgagtaatagtttttcggttggaggagttattgttttacgcgttcgcggttcgcgcgtcgaggtaagttttgggcgtttagtttagatcggcgttttcggattgggcgttttttgtttgttcggttttcgttttttttcgtagagcgagtttgtatttgggcgcgtcgttcgagggaatggttaggagtttttttttcggtagagtttgtattttgttttaaggttt

SEQ ID NO: 31458 - DNA, 739 bp, Artificial Sequence
  chemically treated genomic DNA (Homo sapiens) CpG-island No: 31458
aaaccttaaaacaaaatacaaactctaccgaaaaaaaaactcctaaccattccctcgaacgacgcgcccaaatacaaactcgctctacgaaaaaaaacgaaaaccgaacaaacaaaaaacgcccaatccgaaaacgccgatctaaactaaacgcccaaaacttacctcgacgcgcgaaccgcgaacgcgtaaaacaataactcctccaaccgaaaaactattactcacgctccgataattactacgatcccgccaaaactacaccgaaacttcgcgcaaacgttctcccgcgatctactacaacccaaacgataacgataacgataacaacgacgacgataaaaataacgcgaacgacaactcgacccgacgcgacccctaaactatccaactcttacccgcgccgaacttaaacgcccgaccgctacccccgcgctaaacgcctacgcaccgaacctcgcccaaataaaaaacgtatacccgaaacccgctaaacgcgcccgacccgacccgaccccgccgcacgcccgcccccctaacctaaccgaaaaccccgaaatttaaacgtaccaacgccactctcgcgcgccgaaactataacgatttactaaacaaaaacttacgaaacacacaaaaaaaaaataaaacgaaaccgttcgaaaactcgttaacactacaaaacctcccgcaacatcgctaccttaaatcccgcctttccaaacgtacgcgcacaacgaac

SEQ ID NO: 31459 - DNA, 739 bp, Artificial Sequence
  chemically treated genomic DNA (Homo sapiens) CpG-island No: 31459
ggattttgagataaagtgtaaattttatcgggaggggggtttttggttattttttcgggcggcgcgtttaggtgtaggttcgttttgcggaggagggcgggggtcgggtaagtagagggcgtttagttcgggggcgtcggtttgggttgggcgtttagagtttatttcggcgcgcgggtcgcgggcgcgtggggtagtggtttttttagtcgggaagttgttgtttacgtttcggtggttgttgcggtttcgttagggttgtatcggggtttcgcgtagacgttttttcgcgatttgttgtagtttaggcggtggcggtggcggtagtagcggcggcggtggaggtggcgcgggcgatagttcggttcggcgcggtttttgaattgtttaatttttgttcgcgtcgggtttaagcgttcggtcgttgttttcgcgttgagcgtttgcgtatcgggtttcgtttaggtgaggggcgtgtgttcggagttcgttgggcgcgttcggttcggttcggtttcgtcgtacgttcgtttttttggtttggtcgaggatttcggggtttggacgtgttaacgttattttcgcgcgtcgaagttgtgacggtttattaagtagagatttgcgaggtatatagagagggaatgaggcggaatcgttcgggggttcgttgatattgtagagtttttcgtagtatcgttgttttaaatttcgtttttttaggcgtgcgcgtatagcgagt

SEQ ID NO: 31460 - DNA, 739 bp, Artificial Sequence
  chemically treated genomic DNA (Homo sapiens) CpG-island No: 31460
actcgctatacgcgcacgcctaaaaaaacgaaatttaaaacaacgatactacgaaaaactctacaatatcaacgaacccccgaacgattccgcctcattccctctctatatacctcgcaaatctctacttaataaaccgtcacaacttcgacgcgcgaaaataacgttaacacgtccaaaccccgaaatcctcgaccaaaccaaaaaaacgaacgtacgacgaaaccgaaccgaaccgaacgcgcccaacgaactccgaacacacgcccctcacctaaacgaaacccgatacgcaaacgctcaacgcgaaaacaacgaccgaacgcttaaacccgacgcgaacaaaaattaaacaattcaaaaaccgcgccgaaccgaactatcgcccgcgccacctccaccgccgccgctactaccgccaccgccaccgcctaaactacaacaaatcgcgaaaaaacgtctacgcgaaaccccgatacaaccctaacgaaaccgcaacaaccaccgaaacgtaaacaacaacttcccgactaaaaaaaccactaccccacgcgcccgcgacccgcgcgccgaaataaactctaaacgcccaacccaaaccgacgcccccgaactaaacgccctctacttacccgacccccgccctcctccgcaaaacgaacctacacctaaacgcgccgcccgaaaaaataaccaaaaacccccctcccgataaaatttacactttatctcaaaatcc

SEQ ID NO: 31461 - DNA, 633 bp, Artificial Sequence
  chemically treated genomic DNA (Homo sapiens) CpG-island No: 31461
ttgcgttatggtcgttttttcgcgataattcgtagagtttggattatatttcgatatataatttttattaaattttagacgtcggtattcgttttgtttaggtcgggtttaagtatttgagatcgtcgtcgttgaagttgtcgttatttcgcgtcgtttttgttgcgtcgagtcgttcgcggttattttattttttttttgggttcgttttttttattcgaatttttcggtgtttcgtttttttttttaggttttattaattaagattacgcgtcgtcggaagttgttgcgtgtgggtcgttattatttcgttttttagcgttcgttttcgggtttttaagaaaaggtttttttggttaggacgtatgcgcgcgcgtgggtcgcgtagtcgttgatgtttggaagcgcgttgcgatataaatttttacgtagggatgttggcgacggtggtcgttgggggagttgtttagcgtcgttcggtattgggttttttttttttttattttttgtagttttttgttttcgtgggtggttggcgcgtttgcggagttagggtcgttgtgtggatcgtgggattgtagttttagttaaagggttattacgtttggtcggttttgtagatttgggttttag

SEQ ID NO: 31462 - DNA, 633 bp, Artificial Sequence
  chemically treated genomic DNA (Homo sapiens) CpG-island No: 31462
ctaaaacccaaatctacaaaaccgaccaaacgtaataaccctttaactaaaactacaatcccacgatccacacaacgaccctaactccgcaaacgcgccaaccacccacgaaaacaaaaaactacaaaaaataaaaaaaaaaaaaacccaataccgaacgacgctaaacaactcccccaacgaccaccgtcgccaacatccctacgtaaaaatttatatcgcaacgcgcttccaaacatcaacgactacgcgacccacgcgcgcgcatacgtcctaaccaaaaaaaccttttcttaaaaacccgaaaacgaacgctaaaaaacgaaataataacgacccacacgcaacaacttccgacgacgcgtaatcttaattaataaaacctaaaaaaaaaaacgaaacaccgaaaaattcgaataaaaaaaacgaacccaaaaaaaaaataaaataaccgcgaacgactcgacgcaacaaaaacgacgcgaaataacgacaacttcaacgacgacgatctcaaatacttaaacccgacctaaacaaaacgaataccgacgtctaaaatttaataaaaattatatatcgaaatataatccaaactctacgaattatcgcgaaaaaacgaccataacgcaa

SEQ ID NO: 31463 - DNA, 633 bp, Artificial Sequence
  chemically treated genomic DNA (Homo sapiens) CpG-island No: 31463
ttggggtttagatttatagaatcgattagacgtgatagttttttggttggggttgtagttttacgatttatataacgattttggtttcgtagacgcgttaattatttacggaggtaagaaattgtagaaagtaaagggaaagggagtttagtgtcgggcggcgttgagtagtttttttagcggttatcgtcgttaatatttttgcgtaggggtttgtatcgtagcgcgtttttagatattaacggttgcgcggtttacgcgcgcgtatgcgttttgattaggggaatttttttttggggattcggaggcgagcgttggaaggcgggatagtggcgatttatacgtagtagttttcggcggcgcgtagttttgattggtggaatttgggagagggggcggggtatcggggaattcgaatgggagaggcgggtttaaggagggagtggaatggtcgcgggcggttcgacgtagtagaggcgacgcgagatggcggtagttttagcggcggcgattttaggtatttgagttcggtttgggtaaggcgggtatcgacgtttggagtttagtgggagttatgtgtcggagtgtggtttaggttttgcgggttgtcgcggagaggcggttatggcgtag

SEQ ID NO: 31464 - DNA, 633 bp, Artificial Sequence
  chemically treated genomic DNA (Homo sapiens) CpG-island No: 31464
ctacgccataaccgcctctccgcgacaacccgcaaaacctaaaccacactccgacacataactcccactaaactccaaacgtcgatacccgccttacccaaaccgaactcaaatacctaaaatcgccgccgctaaaactaccgccatctcgcgtcgcctctactacgtcgaaccgcccgcgaccattccactccctccttaaacccgcctctcccattcgaattccccgataccccgccccctctcccaaattccaccaatcaaaactacgcgccgccgaaaactactacgtataaatcgccactatcccgccttccaacgctcgcctccgaatccccaaaaaaaaattcccctaatcaaaacgcatacgcgcgcgtaaaccgcgcaaccgttaatatctaaaaacgcgctacgatacaaacccctacgcaaaaatattaacgacgataaccgctaaaaaaactactcaacgccgcccgacactaaactccctttccctttactttctacaatttcttacctccgtaaataattaacgcgtctacgaaaccaaaatcgttatataaatcgtaaaactacaaccccaaccaaaaaactatcacgtctaatcgattctataaatctaaaccccaa

SEQ ID NO: 31465 - DNA, 503 bp, Artificial Sequence
  chemically treated genomic DNA (Homo sapiens) CpG-island No: 31465
gcggtaggaggtcgtgttcggtttgcgttatcgttttcgtcgtttttcggttcgtttatcgcggtagtgcgtttggaagtcgttaggtcgtagcgcggggaatagggcggttattcggtttagtagtcgttcgtagggtttcgggttcgtcgtagtttcggttttcgttttaggttcggggttgtagtagaagttgaagcggcgaatttcgcgcgtcgcgttttttttgtttagaaggtaggtttttacggtgagcgacgttatagcgagcggcgagttggcggaaaacgggtcgtttcggtcgtagtcgtcgcgcggtttttgtagcgaacgcggaggtttcgtttcgtttcgagaggggcggagtttttcgcgtttttttcgttttcgttatcgtcgtcgcggcgcgagagtcgttttgtagaggtttttttattatttttttttttttcgttatttttcgttttaggtttttcggtttttttattgttgatttttttttt

SEQ ID NO: 31466 - DNA, 503 bp, Artificial Sequence
  chemically treated genomic DNA (Homo sapiens) CpG-island No: 31466
aaaaaaaaaatcaacaataaaaaaaccgaaaaacctaaaacgaaaaataacgaaaaaaaaaaaaataataaaaaaacctctacaaaacgactctcgcgccgcgacgacgataacgaaaacgaaaaaaacgcgaaaaactccgcccctctcgaaacgaaacgaaacctccgcgttcgctacaaaaaccgcgcgacgactacgaccgaaacgacccgttttccgccaactcgccgctcgctataacgtcgctcaccgtaaaaacctaccttctaaacaaaaaaaacgcgacgcgcgaaattcgccgcttcaacttctactacaaccccgaacctaaaacgaaaaccgaaactacgacgaacccgaaaccctacgaacgactactaaaccgaataaccgccctattccccgcgctacgacctaacgacttccaaacgcactaccgcgataaacgaaccgaaaaacgacgaaaacgataacgcaaaccgaacacgacctcctaccgc

SEQ ID NO: 31467 - DNA, 503 bp, Artificial Sequence
  chemically treated genomic DNA (Homo sapiens) CpG-island No: 31467
aagagaggggttagtaatgagggggtcgggagatttggagcgaggggtaacggggaaggggagagtagtgaaggggtttttgtagggcggttttcgcgtcgcgacgacggtggcgggggcggggagggcgcgagagatttcgtttttttcgaggcggggcggggttttcgcgttcgttataaaagtcgcgcggcggttgcgatcgggacggttcgtttttcgttagttcgtcgttcgttatggcgtcgtttatcgtgaaggtttattttttgggtaaggaggacgcggcgcgcgagattcgtcgttttagtttttgttgtagtttcgagtttgaggcggaagtcgaggttgcggcgggttcgggattttgcgagcggttgttgagtcgggtggtcgttttgtttttcgcgttgcggtttggcggtttttaggcgtattatcgcggtgagcgggtcggggagcggcgggggcggtgacgtaggtcggatacggttttttgtcgt

SEQ ID NO: 31468 - DNA, 503 bp, Artificial Sequence
  chemically treated genomic DNA (Homo sapiens) CpG-island No: 31468
acgacaaaaaaccgtatccgacctacgtcaccgcccccgccgctccccgacccgctcaccgcgataatacgcctaaaaaccgccaaaccgcaacgcgaaaaacaaaacgaccacccgactcaacaaccgctcgcaaaatcccgaacccgccgcaacctcgacttccgcctcaaactcgaaactacaacaaaaactaaaacgacgaatctcgcgcgccgcgtcctccttacccaaaaaataaaccttcacgataaacgacgccataacgaacgacgaactaacgaaaaacgaaccgtcccgatcgcaaccgccgcgcgacttttataacgaacgcgaaaaccccgccccgcctcgaaaaaaacgaaatctctcgcgccctccccgcccccgccaccgtcgtcgcgacgcgaaaaccgccctacaaaaaccccttcactactctccccttccccgttacccctcgctccaaatctcccgaccccctcattactaacccctctctt

SEQ ID NO: 31469 - DNA, 852 bp, Artificial Sequence
  chemically treated genomic DNA (Homo sapiens) CpG-island No: 31469
acgtgcgttggcgttatttggtttattagaggtacgtggggaaaatgaggtggaggatgagtatagggcggtttcgttaattttcggcggtgagatttcggaaagttgtacggttttcggggttcgcgggcgtagaattcggatagaattcgtcgtcggtttttatttggtcgttttaagtagatatgaggagagttcgtagagggcgtattcgtttttcgttagtttttcgttttttcgtttcggttttttcgcgttcggttttcgggttttggtttcgcgttttcgtttcgtcgcgcgttggcgtgcgtgttcgtcgcgacgcgtcgaggtcgggtcggaatcggattcgttcgtcgttcgtcgttagtttcgtcgttagtttagtcgcggcgtttataggttcggtcgttcgcgcgttttttattcgtaaggtcgtcgtttttgtcgtggtttcggcgtcgttgtagtacgaagaaggggttggttcgtttcgttatttatagcgtattggttattagtatttttttcgggtttagttatatcgcggagtcgttcgtatcgggtcgaggttcgcgaggcggaagcgttcgtcgtcgtcggcgtttcggagcggagcgtgcggagcggagcgtgcggagcgggtcggggcggggcggggtcgggcgggcggcgttttttggcgggcgtgtggcgttttcgtacgcggttcgagtttcgcgtcgtttttttagtttcggtttcgggcgcgcgttagtttggttttttggagcggtgtagttcgcggttttcggtttgggtttagaacggaacggtttagttcgtagataggggagtcgttgtgtagagtag

SEQ ID NO: 31470 - DNA, 852 bp, Artificial Sequence
  chemically treated genomic DNA (Homo sapiens) CpG-island No: 31470
ctactctacacaacgactcccctatctacgaactaaaccgttccgttctaaacccaaaccgaaaaccgcgaactacaccgctccaaaaaaccaaactaacgcgcgcccgaaaccgaaactaaaaaaacgacgcgaaactcgaaccgcgtacgaaaacgccacacgcccgccaaaaaacgccgcccgcccgaccccgccccgccccgacccgctccgcacgctccgctccgcacgctccgctccgaaacgccgacgacgacgaacgcttccgcctcgcgaacctcgacccgatacgaacgactccgcgatataactaaacccgaaaaaaatactaataaccaatacgctataaataacgaaacgaaccaaccccttcttcgtactacaacgacgccgaaaccacgacaaaaacgacgaccttacgaataaaaaacgcgcgaacgaccgaacctataaacgccgcgactaaactaacgacgaaactaacgacgaacgacgaacgaatccgattccgacccgacctcgacgcgtcgcgacgaacacgcacgccaacgcgcgacgaaacgaaaacgcgaaaccaaaacccgaaaaccgaacgcgaaaaaaccgaaacgaaaaaacgaaaaactaacgaaaaacgaatacgccctctacgaactctcctcatatctacttaaaacgaccaaataaaaaccgacgacgaattctatccgaattctacgcccgcgaaccccgaaaaccgtacaactttccgaaatctcaccgccgaaaattaacgaaaccgccctatactcatcctccacctcattttccccacgtacctctaataaaccaaataacgccaacgcacgt

SEQ ID NO: 31471 - DNA, 852 bp, Artificial Sequence
  chemically treated genomic DNA (Homo sapiens) CpG-island No: 31471
ttgttttgtatagcggtttttttgtttgcggattgggtcgtttcgttttggatttaggtcggaggtcgcgggttgtatcgttttaggaggttaggttggcgcgcgttcgaggtcggggttgagggggcggcgcggaattcgggtcgcgtgcgggagcgttatacgttcgttagggggcgtcgttcgttcggtttcgtttcgtttcggttcgtttcgtacgtttcgtttcgtacgtttcgtttcgggacgtcgacggcggcgggcgttttcgtttcgcgggtttcggttcggtgcgagcggtttcgcgatgtggttgagttcggaggaggtgttggtggttaatgcgttgtgggtgacggagcgggttaatttttttttcgtgttgtagcgacgtcggggttacggtaggggcggcggttttacgggtgagaggcgcgcgggcggtcgggtttgtgggcgtcgcggttgggttggcggcggggttggcggcgggcggcgggcgggttcggtttcggttcggtttcggcgcgtcgcggcggatacgtacgttagcgcgcggcggggcgggggcgcgaggttaggattcgggagtcgggcgcggaggggtcggggcggggaggcgaggggttggcgggaggcgaatgcgttttttgcgggttttttttatgtttgtttggggcggttaagtggagatcggcggcgggttttgttcggattttgcgttcgcgagtttcgggggtcgtgtagtttttcgggattttatcgtcgaaagttggcgagatcgttttgtgtttattttttattttattttttttacgtgtttttaatgggttaggtgacgttagcgtacgt

SEQ ID NO: 31472 - DNA, 852 bp, Artificial Sequence
  chemically treated genomic DNA (Homo sapiens) CpG-island No: 31472
acgtacgctaacgtcacctaacccattaaaaacacgtaaaaaaaataaaataaaaaataaacacaaaacgatctcgccaactttcgacgataaaatcccgaaaaactacacgacccccgaaactcgcgaacgcaaaatccgaacaaaacccgccgccgatctccacttaaccgccccaaacaaacataaaaaaaacccgcaaaaaacgcattcgcctcccgccaacccctcgcctccccgccccgacccctccgcgcccgactcccgaatcctaacctcgcgcccccgccccgccgcgcgctaacgtacgtatccgccgcgacgcgccgaaaccgaaccgaaaccgaacccgcccgccgcccgccgccaaccccgccgccaacccaaccgcgacgcccacaaacccgaccgcccgcgcgcctctcacccgtaaaaccgccgcccctaccgtaaccccgacgtcgctacaacacgaaaaaaaaattaacccgctccgtcacccacaacgcattaaccaccaacacctcctccgaactcaaccacatcgcgaaaccgctcgcaccgaaccgaaacccgcgaaacgaaaacgcccgccgccgtcgacgtcccgaaacgaaacgtacgaaacgaaacgtacgaaacgaaccgaaacgaaacgaaaccgaacgaacgacgccccctaacgaacgtataacgctcccgcacgcgacccgaattccgcgccgccccctcaaccccgacctcgaacgcgcgccaacctaacctcctaaaacgatacaacccgcgacctccgacctaaatccaaaacgaaacgacccaatccgcaaacaaaaaaaccgctatacaaaacaa

SEQ ID NO: 31473 - DNA, 1094 bp, Artificial Sequence
  chemically treated genomic DNA (Homo sapiens) CpG-island No: 31473
tcgcgtgtcgtcgtcgtttattatcggtttattcgagttcgagcgcgtttatcgagtttagtgaggcgcggcgggagggcgcggggcggggagcgagttttaggcgggttcgggtcgtaggattatttcggtcggcgcgtttattttattcgtttatcgtagggtgaattgtagcgagtatttttcgttgtttttcgttacgttttgggtcgtcggtatttttttttatgaaggtcggggtgtggggtaggggcgtacgcgttggattttcgggattcgcgtagggcgtttattaggttcgtgcgtatttttcgtaggggcggcggttttgtgcggtttggtttatttgttcgcgcgttttcgttatttttagggttacgcgcgtttcgcgtagtttaggtgagggtcgggcggggagcggggcggggtcggggaaagatcgcgggcgggcggggtttttggggagcgggatcgaagttgggggcgggcgacgggtcggagtttagcgtttttggggattcggtgggcgagttttggcggcggttagaggaagttttcgtggggttagggttgcggcggggaagaagcgggttttttcgcgttattttttcgttgatcgtcgttcgtaggttggtatcgttgtacgcgagcgcgcgcgttttttggttgttggtggcgttggttgcgttcggtttgttcgtttattttttttcggtcgcgttgcgcgtcgcgtttttcggacggtttcggacgttgttgtcgtgggtttgagattaaggttttcgggtcgacggagtcgggaaagaagagtcggagtttttagttgtttcggggaggggcgttcgttttcgtattttagtttttattattaaagttttagtgatcgagattcgggttgcgttttttgggttcgcgggggtggcgtatcgcgggttacggagtttggaggggtttagttcgagttcgggtagttcggggcgggtttttatagtggcggcgtgagagtgtttgcgaaggaacgagtttttttttggggcgggagtggatcgggtttttattttttattttattttttatttagtttcggggttata

SEQ ID NO: 31474 - DNA, 1094 bp, Artificial Sequence
  chemically treated genomic DNA (Homo sapiens) CpG-island No: 31474
tataaccccgaaactaaataaaaaataaaataaaaaataaaaacccgatccactcccgccccaaaaaaaaactcgttccttcgcaaacactctcacgccgccactataaaaacccgccccgaactacccgaactcgaactaaacccctccaaactccgtaacccgcgatacgccacccccgcgaacccaaaaaacgcaacccgaatctcgatcactaaaactttaataataaaaactaaaatacgaaaacgaacgcccctccccgaaacaactaaaaactccgactcttctttcccgactccgtcgacccgaaaaccttaatctcaaacccacgacaacaacgtccgaaaccgtccgaaaaacgcgacgcgcaacgcgaccgaaaaaaaataaacgaacaaaccgaacgcaaccaacgccaccaacaaccaaaaaacgcgcgcgctcgcgtacaacgataccaacctacgaacgacgatcaacgaaaaaataacgcgaaaaaacccgcttcttccccgccgcaaccctaaccccacgaaaacttcctctaaccgccgccaaaactcgcccaccgaatccccaaaaacgctaaactccgacccgtcgcccgcccccaacttcgatcccgctccccaaaaaccccgcccgcccgcgatctttccccgaccccgccccgctccccgcccgaccctcacctaaactacgcgaaacgcgcgtaaccctaaaaataacgaaaacgcgcgaacaaataaaccaaaccgcacaaaaccgccgcccctacgaaaaatacgcacgaacctaataaacgccctacgcgaatcccgaaaatccaacgcgtacgcccctaccccacaccccgaccttcataaaaaaaaataccgacgacccaaaacgtaacgaaaaacaacgaaaaatactcgctacaattcaccctacgataaacgaataaaataaacgcgccgaccgaaataatcctacgacccgaacccgcctaaaactcgctccccgccccgcgccctcccgccgcgcctcactaaactcgataaacgcgctcgaactcgaataaaccgataataaacgacgacgacacgcga

SEQ ID NO: 31475 - DNA, 1094 bp, Artificial Sequence
  chemically treated genomic DNA (Homo sapiens) CpG-island No: 31475
tgtgatttcgaggttgagtagagagtggggtaggaggtgaaaattcgatttattttcgttttaggggagggttcgttttttcgtagatatttttacgtcgttattatgaaagttcgtttcgggttgttcggattcgggttgggtttttttaggtttcgtagttcgcggtgcgttattttcgcggatttagagaacgtagttcgggtttcggttattagaattttaatgatagagattaggatgcggaagcgagcgttttttttcggggtagttggaggtttcggtttttttttttcggtttcgtcggttcgggggttttggttttaggtttacggtagtagcgttcggagtcgttcgaggagcgcggcgcgtagcgcggtcgggaggaagtgggcgagtaggtcgagcgtagttagcgttattagtagttagagggcgcgcgcgttcgcgtatagcggtgttagtttgcgggcggcggttagcggggaggtggcgcgaggaggttcgtttttttttcgtcgtaattttggttttacggggattttttttggtcgtcgttagggttcgtttatcgaatttttaaaggcgttgggtttcggttcgtcgttcgtttttagtttcggtttcgttttttaggagtttcgttcgttcgcgattttttttcggtttcgtttcgtttttcgttcggtttttatttgagttgcgcggagcgcgcgtagttttggaagtagcggaggcgcgcgaataggtagattaggtcgtatagggtcgtcgtttttgcgagaggtacgtacgggtttggtgagcgttttgcgcgggtttcgggggtttagcgcgtgcgtttttgttttatatttcgatttttatgaaagaagatgtcggcgatttagagcgtggcgaggaatagcgggaagtattcgttgtagtttattttgcggtgggcgggtgggatgagcgcgtcggtcgggatggttttgcgattcggattcgtttggggttcgtttttcgtttcgcgttttttcgtcgcgttttattgggttcggtagacgcgttcgaattcgggtgggtcggtggtgagcggcggcgatacgcgg

SEQ ID NO: 31476 - DNA, 1094 bp, Artificial Sequence
  chemically treated genomic DNA (Homo sapiens) CpG-island No: 31476
ccgcgtatcgccgccgctcaccaccgacccacccgaattcgaacgcgtctaccgaacccaataaaacgcgacgaaaaaacgcgaaacgaaaaacgaaccccaaacgaatccgaatcgcaaaaccatcccgaccgacgcgctcatcccacccgcccaccgcaaaataaactacaacgaatacttcccgctattcctcgccacgctctaaatcgccgacatcttctttcataaaaatcgaaatataaaacaaaaacgcacgcgctaaacccccgaaacccgcgcaaaacgctcaccaaacccgtacgtacctctcgcaaaaacgacgaccctatacgacctaatctacctattcgcgcgcctccgctacttccaaaactacgcgcgctccgcgcaactcaaataaaaaccgaacgaaaaacgaaacgaaaccgaaaaaaaatcgcgaacgaacgaaactcctaaaaaacgaaaccgaaactaaaaacgaacgacgaaccgaaacccaacgcctttaaaaattcgataaacgaaccctaacgacgaccaaaaaaaatccccgtaaaaccaaaattacgacgaaaaaaaaacgaacctcctcgcgccacctccccgctaaccgccgcccgcaaactaacaccgctatacgcgaacgcgcgcgccctctaactactaataacgctaactacgctcgacctactcgcccacttcctcccgaccgcgctacgcgccgcgctcctcgaacgactccgaacgctactaccgtaaacctaaaaccaaaacccccgaaccgacgaaaccgaaaaaaaaaaaccgaaacctccaactaccccgaaaaaaaacgctcgcttccgcatcctaatctctatcattaaaattctaataaccgaaacccgaactacgttctctaaatccgcgaaaataacgcaccgcgaactacgaaacctaaaaaaacccaacccgaatccgaacaacccgaaacgaactttcataataacgacgtaaaaatatctacgaaaaaacgaaccctcccctaaaacgaaaataaatcgaattttcacctcctaccccactctctactcaacctcgaaatcaca

SEQ ID NO: 31477 - DNA, 558 bp, Artificial Sequence
  chemically treated genomic DNA (Homo sapiens) CpG-island No: 31477
acgacgagtcggttattaggaatttcgtatttaggatttttttcgaggtcggaggggcgtagatgattagcgagaggcgcggtaggttagagggattttagtgcgtaggggcggggtcgcggcggtcggagcgaagagtataagcgtatgcgagacggcgtaggggattagagggttcggagcgcgtgcgtggggcggggtcgcggcgggataaatgtagagcgtacgcgtttggttgtttggcgattgtataagtagggatggcgtcgttttagcgttttcgggtgttacgttgttgtagttgtcgttttttttaggcgtattaggtttggcgggtgttagttttttttttttttttcggcgcggggatagcggacggggagtggcggggttgtgggtgttgtttcgaatggtttcgggatgtatcgggttcgaaggagtgtagggatcgttgagggcgggttttattggggtcgttttcgtataacgttttgagttttttgtttggtttttgtataaattagaggtaatggttttgcggaggtggttttttgtgaa

SEQ ID NO: 31478 - DNA, 558 bp, Artificial Sequence
  chemically treated genomic DNA (Homo sapiens) CpG-island No: 31478
ttcacaaaaaaccacctccgcaaaaccattacctctaatttatacaaaaaccaaacaaaaaactcaaaacgttatacgaaaacgaccccaataaaacccgccctcaacgatccctacactccttcgaacccgatacatcccgaaaccattcgaaacaacacccacaaccccgccactccccgtccgctatccccgcgccgaaaaaaaaaaaaaaaactaacacccgccaaacctaatacgcctaaaaaaaacgacaactacaacaacgtaacacccgaaaacgctaaaacgacgccatccctacttatacaatcgccaaacaaccaaacgcgtacgctctacatttatcccgccgcgaccccgccccacgcacgcgctccgaaccctctaatcccctacgccgtctcgcatacgcttatactcttcgctccgaccgccgcgaccccgcccctacgcactaaaatccctctaacctaccgcgcctctcgctaatcatctacgcccctccgacctcgaaaaaaatcctaaatacgaaattcctaataaccgactcgtcgt

SEQ ID NO: 31479 - DNA, 558 bp, Artificial Sequence
  chemically treated genomic DNA (Homo sapiens) CpG-island No: 31479
tttataagaggttattttcgtagaattattatttttggtttgtataagaattaaataaaaagtttagaacgttatgcgggggcgattttaatgagattcgtttttagcggtttttgtattttttcgggttcggtgtatttcggagttattcgagataatatttatagtttcgttatttttcgttcgttgttttcgcgtcggaggaggaggagggggttggtattcgttagatttggtgcgtttggaagaggcggtagttgtagtagcgtagtattcgagaacgttgaagcgacgttatttttgtttgtgtagtcgttaggtagttaagcgcgtgcgttttgtatttgtttcgtcgcggtttcgttttacgtacgcgtttcgaattttttagttttttacgtcgtttcgtatgcgtttatatttttcgtttcggtcgtcgcggtttcgtttttgcgtattgggatttttttagtttgtcgcgtttttcgttggttatttgcgttttttcgatttcggaaagagttttgggtgcgggatttttggtagtcgattcgtcgt

SEQ ID NO: 31480 - DNA, 558 bp, Artificial Sequence
  chemically treated genomic DNA (Homo sapiens) CpG-island No: 31480
acgacgaatcgactaccaaaaatcccgcacccaaaactctttccgaaatcgaaaaaacgcaaataaccaacgaaaaacgcgacaaactaaaaaaatcccaatacgcaaaaacgaaaccgcgacgaccgaaacgaaaaatataaacgcatacgaaacgacgtaaaaaactaaaaaattcgaaacgcgtacgtaaaacgaaaccgcgacgaaacaaatacaaaacgcacgcgcttaactacctaacgactacacaaacaaaaataacgtcgcttcaacgttctcgaatactacgctactacaactaccgcctcttccaaacgcaccaaatctaacgaataccaaccccctcctcctcctccgacgcgaaaacaacgaacgaaaaataacgaaactataaatattatctcgaataactccgaaatacaccgaacccgaaaaaatacaaaaaccgctaaaaacgaatctcattaaaatcgcccccgcataacgttctaaactttttatttaattcttatacaaaccaaaaataataattctacgaaaataacctcttataaa

SEQ ID NO: 31481 - DNA, 937 bp, Artificial Sequence
  chemically treated genomic DNA (Homo sapiens) CpG-island No: 31481
ttcgtcgtcgtcgcggttttttgttttttttcgtcgtcgcggtttattttttttatttcgtttaggttttttgttcgtcgtggttttttcgtttttcgtcgcggttttttgttcgtcgcgtttttttattttcgtcgtcgtggttttttgttttatcgtcgttgcggttttttttcgtcgtggattttttttttttgttttcgcgattttttattcgtcgcggttttttgtttttattttgtttcggttttttgtttttcgtcgttttttgtattttcgtcgtcgcggtttttttttcgtcgtggttttttttttttgttttcgcggttttttattcgttatagttttttgtttttcgtcgtcgcggttttttgtttttatttcgtttcggttttttgtttatcgcggttttttatttcgcgtcgtcgcggttttttgttcgtcgcggatttgtgtttttttcgtcgtcgcggttttttgttcgtcgcggttttttgttatatattcgtcgtcgcggttttttgtttttttgtcgtcgcggttttttgttttatcgtcgatatagttttttgtatattcgtcgttttggttttttgtcgtcgcggttttttgttttttcgttgtcgcggttttttgttttttcgttatcgtcgttgttttttgttttatcgtcgtcgtggttttttgttcgtcgcggttttttgttatcgcggttttttattcgttacggttttttattcgtcgcggttttttgcgtttcgttgttacggttttttgtttttttgtcgtagcgattttttcgtcgtcgcggcgttttgttttcgtcgtcgaggatttttgttttcgtcgttacggttttgagggcgggagcggtagattcggttgttagttttattggcgttttggtaagggtagcgttgaggggtgtttttggttt

SEQ ID NO: 31482 - DNA, 937 bp, Artificial Sequence
  chemically treated genomic DNA (Homo sapiens) CpG-island No: 31482
aaaccaaaaacacccctcaacgctacccttaccaaaacgccaataaaactaacaaccgaatctaccgctcccgccctcaaaaccgtaacgacgaaaacaaaaatcctcgacgacgaaaacaaaacgccgcgacgacgaaaaaatcgctacgacaaaaaaacaaaaaaccgtaacaacgaaacgcaaaaaaccgcgacgaataaaaaaccgtaacgaataaaaaaccgcgataacaaaaaaccgcgacgaacaaaaaaccacgacgacgataaaacaaaaaacaacgacgataacgaaaaaacaaaaaaccgcgacaacgaaaaaacaaaaaaccgcgacgacaaaaaaccaaaacgacgaatatacaaaaaactatatcgacgataaaacaaaaaaccgcgacgacaaaaaaacaaaaaaccgcgacgacgaatatataacaaaaaaccgcgacgaacaaaaaaccgcgacgacgaaaaaaacacaaatccgcgacgaacaaaaaaccgcgacgacgcgaaataaaaaaccgcgataaacaaaaaaccgaaacgaaataaaaacaaaaaaccgcgacgacgaaaaacaaaaaactataacgaataaaaaaccgcgaaaacaaaaaaaaaaaaccacgacgaaaaaaaaaccgcgacgacgaaaatacaaaaaacgacgaaaaacaaaaaaccgaaacaaaataaaaacaaaaaaccgcgacgaataaaaaatcgcgaaaacaaaaaaaaaaaatccacgacgaaaaaaaaccgcaacgacgataaaacaaaaaaccacgacgacgaaaataaaaaaacgcgacgaacaaaaaaccgcgacgaaaaacgaaaaaaccacgacgaacaaaaaacctaaacgaaataaaaaaaataaaccgcgacgacgaaaaaaaacaaaaaaccgcgacgacgacgaa

SEQ ID NO: 31483 - DNA, 937 bp, Artificial Sequence
  chemically treated genomic DNA (Homo sapiens) CpG-island No: 31483
ggattaggagtattttttagcgttgtttttgttaggacgttagtagagttggtagtcgagtttgtcgttttcgtttttagagtcgtggcggcggggataaaaattttcggcggcgggggtaaaacgtcgcggcggcgaaaaagtcgttgcggtagggggataaaaagtcgtgatagcggggcgtaaaaagtcgcggcgggtaaaaggtcgtggcgagtaaaaagtcgcgatggtaaaaagtcgcggcgggtaaaaagttacggcggcggtggggtaaaaagtagcggcggtggcggaggggtaaaaagtcgcggtagcgagggggtagaaagtcgcggcggtaaaaagttaaggcggcgagtgtgtaaaaagttgtgtcggcggtggggtaaaaagtcgcggcggtagaggggtaaaaagtcgcggcggcgggtgtgtggtagaaagtcgcggcgggtaaaaagtcgcggcggcgaggggggtataaattcgcggcgggtaaaaagtcgcggcggcgcggggtaaaaagtcgcggtgggtaagaagtcgaggcggggtgggggtaaaaagtcgcggcggcggggggtaaaaagttgtggcgggtaaaaggtcgcgggggtaggggggaaaagttacggcggggaaaaagtcgcggcggcgggggtgtaaaaagcggcggggggtaaaaagtcgaggtagggtgggggtaaaaagtcgcggcgggtgaaaagtcgcgggggtaggggggaaaaatttacggcgggaaaaagtcgtagcggcgatggggtaaaaagttacggcggcgggggtaaaaaggcgcggcgggtaaaaagtcgcggcggggggcggggaagttacggcgggtaaaaagtttaggcgggatggggggaataagtcgcggcggcgggggggggtaaaaagtcgcggcggcggcgga

SEQ ID NO: 31484 - DNA, 937 bp, Artificial Sequence
  chemically treated genomic DNA (Homo sapiens) CpG-island No: 31484
tccgccgccgccgcgactttttacccccccccgccgccgcgacttattccccccatcccgcctaaactttttacccgccgtaacttccccgccccccgccgcgactttttacccgccgcgcctttttacccccgccgccgtaactttttaccccatcgccgctacgactttttcccgccgtaaatttttcccccctacccccgcgacttttcacccgccgcgactttttacccccaccctacctcgactttttaccccccgccgctttttacacccccgccgccgcgactttttccccgccgtaacttttcccccctacccccgcgaccttttacccgccacaactttttaccccccgccgccgcgactttttacccccaccccgcctcgacttcttacccaccgcgactttttaccccgcgccgccgcgactttttacccgccgcgaatttatacccccctcgccgccgcgactttttacccgccgcgactttctaccacacacccgccgccgcgactttttacccctctaccgccgcgactttttaccccaccgccgacacaactttttacacactcgccgccttaactttttaccgccgcgactttctaccccctcgctaccgcgactttttacccctccgccaccgccgctactttttaccccaccgccgccgtaactttttacccgccgcgactttttaccatcgcgactttttactcgccacgaccttttacccgccgcgactttttacgccccgctatcacgactttttatccccctaccgcaacgactttttcgccgccgcgacgttttacccccgccgccgaaaatttttatccccgccgccacgactctaaaaacgaaaacgacaaactcgactaccaactctactaacgtcctaacaaaaacaacgctaaaaaatactcctaatcc

SEQ ID NO: 31485 - DNA, 901 bp, Artificial Sequence
  chemically treated genomic DNA (Homo sapiens) CpG-island No: 31485
taacgtcgaggttttttttattgtttaagttggtttttcggggtacgtttgcgtagtgggtaagttggaaaagcgtgtgggtgagattttcgtataatttttttttattgtttgtgtgtggcgtttgcgtagtaagggatcgttggaattgggtaggaggggatagggttcggtttttcgttttttttcgaggcgtttgcgtattaggtagtcggtttttgtcgttatcgttatgtgtggggcgtgtgtggaataacgttattgtttagcggagttgagggtttcggagttcgatcgtagcggtagcgacgataatagcggcgacgacgacgacgacgaggtggggggaggacggcgtgcgagagatttacgggacgcgacgcgtttcgtttttttcgttcggtttttttttttacggtaaggggtaagtgatgcgatcggttgttcggtgtaggcgtcgtagtcgtagttatcgtcgcggttgttttttatattttgtttttcgggtttgcggcgaggattcgggcgtcgttcgtcgcggggcggggggtgcggggttggatcgcgaagggggcgtttttcgggtgtttcgcgcggcgtcgttatttttattttttgttcgtttgggattcggggtttgacgggattatttttttttattttttattcgtcgtttttcggagttttagttttgcggtttttcggttttttcgagttttttgttgtcgttttcgtattttttaagtgtattgaattatttttagttttcgattggttttgtgtagttttttttttttcgtcgtagtagtttgcgaggggtgcgggcggagtattggagggaatggttgcgttgtcgttggggaagggattttttttttattggagtagtttttcgggttaa

SEQ ID NO: 31486 - DNA, 901 bp, Artificial Sequence
  chemically treated genomic DNA (Homo sapiens) CpG-island No: 31486
ttaacccgaaaaactactccaataaaaaaaaaatcccttccccaacgacaacgcaaccattccctccaatactccgcccgcacccctcgcaaactactacgacgaaaaaaaaaaaactacacaaaaccaatcgaaaactaaaaataattcaatacacttaaaaaatacgaaaacgacaacaaaaaactcgaaaaaaccgaaaaaccgcaaaactaaaactccgaaaaacgacgaataaaaaataaaaaaaaataatcccgtcaaaccccgaatcccaaacgaacaaaaaataaaaataacgacgccgcgcgaaacacccgaaaaacgcccccttcgcgatccaaccccgcaccccccgccccgcgacgaacgacgcccgaatcctcgccgcaaacccgaaaaacaaaatataaaaaacaaccgcgacgataactacgactacgacgcctacaccgaacaaccgatcgcatcacttaccccttaccgtaaaaaaaaaaaccgaacgaaaaaaacgaaacgcgtcgcgtcccgtaaatctctcgcacgccgtcctccccccacctcgtcgtcgtcgtcgtcgccgctattatcgtcgctaccgctacgatcgaactccgaaaccctcaactccgctaaacaataacgttattccacacacgccccacacataacgataacgacaaaaaccgactacctaatacgcaaacgcctcgaaaaaaaacgaaaaaccgaaccctatcccctcctacccaattccaacgatcccttactacgcaaacgccacacacaaacaataaaaaaaaattatacgaaaatctcacccacacgcttttccaacttacccactacgcaaacgtaccccgaaaaaccaacttaaacaataaaaaaaacctcgacgtta

SEQ ID NO: 31487 - DNA, 901 bp, Artificial Sequence
  chemically treated genomic DNA (Homo sapiens) CpG-island No: 31487
ttggttcggggagttgttttaatgggggaaaaattttttttttagcggtagcgtagttattttttttaatgtttcgttcgtatttttcgtaaattgttacggcggaggggggagggttgtataaagttagtcgaaagttgaaaatgatttaatgtatttaggggatgcggaggcggtagtaaggggttcgggaaagtcggggggtcgtaggattggagtttcggggggcggcgggtgggggatgggaaagggtggtttcgttaagtttcgggttttaggcgggtagagggtgggggtggcggcgtcgcgcggagtattcgggaagcgtttttttcgcggtttagtttcgtatttttcgtttcgcggcgggcggcgttcgagttttcgtcgtaaattcgaggagtaggatgtggaaagtagtcgcggcggtggttgcggttgcggcgtttatatcgagtagtcgatcgtattatttattttttatcgtggagagagggatcggacgggggaggcggggcgcgtcgcgtttcgtgagtttttcgtacgtcgttttttttttatttcgtcgtcgtcgtcgtcgtcgttgttgtcgtcgttgtcgttgcggtcgagtttcggggtttttagtttcgttgggtaataacgttattttatatacgttttatatatagcggtaacggtaaagatcgattgtttagtgcgtaggcgtttcgggaaagggcgaggagtcggattttatttttttttgtttagttttaacgattttttattgcgtaggcgttatatatagataatgaaaaggggttgtgcgagggttttatttatacgtttttttagtttgtttattgcgtaggcgtgtttcgaaagattagtttgaataatgaagaggatttcggcgtta

SEQ ID NO: 31488 - DNA, 901 bp, Artificial Sequence
  chemically treated genomic DNA (Homo sapiens) CpG-island No: 31488
taacgccgaaatcctcttcattattcaaactaatctttcgaaacacgcctacgcaataaacaaactaaaaaaacgtataaataaaaccctcgcacaaccccttttcattatctatatataacgcctacgcaataaaaaatcgttaaaactaaacaaaaaaaaataaaatccgactcctcgccctttcccgaaacgcctacgcactaaacaatcgatctttaccgttaccgctatatataaaacgtatataaaataacgttattacccaacgaaactaaaaaccccgaaactcgaccgcaacgacaacgacgacaacaacgacgacgacgacgacgacgaaataaaaaaaaaacgacgtacgaaaaactcacgaaacgcgacgcgccccgcctcccccgtccgatccctctctccacgataaaaaataaataatacgatcgactactcgatataaacgccgcaaccgcaaccaccgccgcgactactttccacatcctactcctcgaatttacgacgaaaactcgaacgccgcccgccgcgaaacgaaaaatacgaaactaaaccgcgaaaaaaacgcttcccgaatactccgcgcgacgccgccacccccaccctctacccgcctaaaacccgaaacttaacgaaaccaccctttcccatcccccacccgccgccccccgaaactccaatcctacgaccccccgactttcccgaaccccttactaccgcctccgcatcccctaaatacattaaatcattttcaactttcgactaactttatacaaccctcccccctccgccgtaacaatttacgaaaaatacgaacgaaacattaaaaaaaataactacgctaccgctaaaaaaaaaatttttcccccattaaaacaactccccgaaccaa

SEQ ID NO: 31489 - DNA, 1160 bp, Artificial Sequence
  chemically treated genomic DNA (Homo sapiens) CpG-island No: 31489
atcgagacgcgagttacgtagtcgttcgggcgggcgtttttagagatacgggcgatatttttttttgtgagaaagagtacgtgaattgttggtcggttgttatttacgtttagtacggcgatggatatacgtatcgcggtaattttatgttcggcgtttttatcgcgggtttttattattaattggtgttaggtttgtgtttttcggtttataggtgtttatatttttattacgtcgtttatgtttttttatcgcgaagtaggtcgcgtcgtttagtgtttcgtcgtcgttattcgttttaggtatttgtcgggcgcggacgttgtagcgtacgaagttattgggttttacgtcgcgggcggtggcgcgtacgcgatagatttcggcgttcggttgggcgtgttttcgtatcgcggcgcgggattcgttttgtttaaagatcggcgggttgtcgtttttatttagtacgcgtagttttacgtttaggaggtcggtgcgtcggggtcggtcgtcgttttatgtttcgatttgtagtcggtgcgtcgtcgttttttttcggtttaagcgtcgtagtagtattagatttagaggttttaggggtgacgaggagtttggtaaaagcggtgacggtagtggtttcggagttcggtagcgtaattggaagaacgggtttgcggggtttttgggtaggtcggacggttgtattagggtgtagttttgagtgttgaatagttcggcgttcggatcgtgggtaattggtaggcggaaggcggtttttggcgggttgagttcggagacgtcgagttgtagggagtcgaggggaaagcggggcgagtggttatttacgtcgttgacgcgaatttttatttgtattatagcgtttagtagcgtggcggcgacgaagttgtagtggtttcgtcgttcgcggtttaggcgtcgcgtagtgcggatgatgtcggtgttcgggtgtacgtggaagtcgtttagtagcggggagttatcggagtttttcgatagaaagaagtcgttttttttttgttgttgcgcggtcggtagttcggcgcggatgttatttattagcgtgttcgggggaagttttttatttacggaaagggtgaggttgaataattgggtagaggagttcgaggtcgtttatagtt

SEQ ID NO: 31490 - DNA, 1160 bp, Artificial Sequence
  chemically treated genomic DNA (Homo sapiens) CpG-island No: 31490
aactataaacgacctcgaactcctctacccaattattcaacctcaccctttccgtaaataaaaaacttcccccgaacacgctaataaataacatccgcgccgaactaccgaccgcgcaacaacaaaaaaaaaacgacttctttctatcgaaaaactccgataactccccgctactaaacgacttccacgtacacccgaacaccgacatcatccgcactacgcgacgcctaaaccgcgaacgacgaaaccactacaacttcgtcgccgccacgctactaaacgctataatacaaataaaaattcgcgtcaacgacgtaaataaccactcgccccgctttcccctcgactccctacaactcgacgtctccgaactcaacccgccaaaaaccgccttccgcctaccaattacccacgatccgaacgccgaactattcaacactcaaaactacaccctaatacaaccgtccgacctacccaaaaaccccgcaaacccgttcttccaattacgctaccgaactccgaaaccactaccgtcaccgcttttaccaaactcctcgtcacccctaaaacctctaaatctaatactactacgacgcttaaaccgaaaaaaaacgacgacgcaccgactacaaatcgaaacataaaacgacgaccgaccccgacgcaccgacctcctaaacgtaaaactacgcgtactaaataaaaacgacaacccgccgatctttaaacaaaacgaatcccgcgccgcgatacgaaaacacgcccaaccgaacgccgaaatctatcgcgtacgcgccaccgcccgcgacgtaaaacccaataacttcgtacgctacaacgtccgcgcccgacaaatacctaaaacgaataacgacgacgaaacactaaacgacgcgacctacttcgcgataaaaaaacataaacgacgtaataaaaatataaacacctataaaccgaaaaacacaaacctaacaccaattaataataaaaacccgcgataaaaacgccgaacataaaattaccgcgatacgtatatccatcgccgtactaaacgtaaataacaaccgaccaacaattcacgtactctttctcacaaaaaaaaatatcgcccgtatctctaaaaacgcccgcccgaacgactacgtaactcgcgtctcgat

SEQ ID NO: 31491 - DNA, 1160 bp, Artificial Sequence
  chemically treated genomic DNA (Homo sapiens) CpG-island No: 31491
ggttgtgggcggtttcgggtttttttgtttagttgtttaattttatttttttcgtagatgaggggtttttttcggatacgttggtaggtgatattcgcgtcgggttgtcggtcgcgtagtagtaggaggggagcggtttttttttgtcggaggatttcgatgatttttcgttgttggacgatttttacgtgtattcggatatcggtattattcgtattgcgcggcgtttggatcgcgagcggcgggattattatagtttcgtcgtcgttacgttgttgggcgttgtggtgtaggtggagattcgcgttaacgacgtgaatgattattcgtttcgtttttttttcgattttttgtaattcgacgttttcgagtttagttcgttagggatcgtttttcgtttgttagttgtttacgattcggacgtcggattgtttagtatttagggttatattttggtgtaatcgttcgatttgtttaaggatttcgtaggttcgtttttttagttgcgttatcggatttcggggttattatcgttatcgtttttgttaggtttttcgttatttttggagtttttagatttggtgttgttgcggcgtttggatcgagaggaggcggcggcgtatcggttgtagatcgaggtatgggacggcggtcgatttcggcgtatcggttttttgagcgtggagttgcgcgtgttggatgagaacgataattcgtcggtttttgagtaggacgagtttcgcgtcgcggtgcgagagtacgtttagtcgggcgtcgaggtttgtcgcgtgcgcgttatcgttcgcgacgtggggtttaatggtttcgtgcgttatagcgttcgcgttcggtaagtgtttggggcgggtagcggcggcggggtattgggcgacgcggtttatttcgcggtggaggagtatgagcggcgtggtgagagtgtggatatttgtggatcgagaggtataggtttggtattagttggtggtggaggttcgcgatggaggcgtcgagtatgaggttgtcgcggtgcgtgtgtttatcgtcgtgttggacgtgaatgataatcggttagtaatttacgtgtttttttttatagagggaggtgtcgttcgtgtttttgaaggcgttcgttcgggcgattacgtggttcgcgtttcggt

SEQ ID NO: 31492 - DNA, 1160 bp, Artificial Sequence
  chemically treated genomic DNA (Homo sapiens) CpG-island No: 31492
accgaaacgcgaaccacgtaatcgcccgaacgaacgccttcaaaaacacgaacgacacctccctctataaaaaaaaacacgtaaattactaaccgattatcattcacgtccaacacgacgataaacacacgcaccgcgacaacctcatactcgacgcctccatcgcgaacctccaccaccaactaataccaaacctatacctctcgatccacaaatatccacactctcaccacgccgctcatactcctccaccgcgaaataaaccgcgtcgcccaataccccgccgccgctacccgccccaaacacttaccgaacgcgaacgctataacgcacgaaaccattaaaccccacgtcgcgaacgataacgcgcacgcgacaaacctcgacgcccgactaaacgtactctcgcaccgcgacgcgaaactcgtcctactcaaaaaccgacgaattatcgttctcatccaacacgcgcaactccacgctcaaaaaaccgatacgccgaaatcgaccgccgtcccatacctcgatctacaaccgatacgccgccgcctcctctcgatccaaacgccgcaacaacaccaaatctaaaaactccaaaaataacgaaaaacctaacaaaaacgataacgataataaccccgaaatccgataacgcaactaaaaaaacgaacctacgaaatccttaaacaaatcgaacgattacaccaaaatataaccctaaatactaaacaatccgacgtccgaatcgtaaacaactaacaaacgaaaaacgatccctaacgaactaaactcgaaaacgtcgaattacaaaaaatcgaaaaaaaaacgaaacgaataatcattcacgtcgttaacgcgaatctccacctacaccacaacgcccaacaacgtaacgacgacgaaactataataatcccgccgctcgcgatccaaacgccgcgcaatacgaataataccgatatccgaatacacgtaaaaatcgtccaacaacgaaaaatcatcgaaatcctccgacaaaaaaaaaccgctcccctcctactactacgcgaccgacaacccgacgcgaatatcacctaccaacgtatccgaaaaaaacccctcatctacgaaaaaaataaaattaaacaactaaacaaaaaaacccgaaaccgcccacaacc

SEQ ID NO: 31493 - DNA, 784 bp, Artificial Sequence
  chemically treated genomic DNA (Homo sapiens) CpG-island No: 31493
cgcgttagatatcgagacgcgagttacgtagtcgttcggtcgggcgtttttagagatacgggcgacgtttttttttgtgagaaagagtacgtgaattgttggtcggttgttatttacgtttagtacggcgatggatacgcgtatcgtggtaattttaggttcggcgtttttatcgcgggtttttattattaattggtgttaggtttgtgtttcgcggtttagaggtttttatattcgtattacgtcgtttagtttttttatcgcgaagtaggtcgcgtcgtttagtgtttcgtcgtcgttattcgttttaggtatttgtcgggcgcggacgttgtagcgtacgaagttattgggttttaggtcgcggtcggtggcgcgtacgcgatagatttcggcgttcggttgggcgttttcgcgtatcgcggcgcggtattcgttttgtttaaagatcggcgggttgtcgtttttatttagtacgcgtagttttacgtttaggaggtcggtgcgtcggggtcggtcgtcgttttatgtttcgatttgtagtcggtgcgtcgtcgttttttttcggtttaagcgtcgtagtagtattagatttagaggttttaggggtgacgaggagtttggtaaaagcggtgacggtagtggtttcggagttcggtagcgtaattggaagaacgggtttgcggggtttttgggtaggtcggacggttgtattagggtgtagttttgagtgttgaatagttcggcgttcggatcgtgggtaattggtaggcggaaggcggtt

SEQ ID NO: 31494 - DNA, 784 bp, Artificial Sequence
  chemically treated genomic DNA (Homo sapiens) CpG-island No: 31494
aaccgccttccgcctaccaattacccacgatccgaacgccgaactattcaacactcaaaactacaccctaatacaaccgtccgacctacccaaaaaccccgcaaacccgttcttccaattacgctaccgaactccgaaaccactaccgtcaccgcttttaccaaactcctcgtcacccctaaaacctctaaatctaatactactacgacgcttaaaccgaaaaaaaacgacgacgcaccgactacaaatcgaaacataaaacgacgaccgaccccgacgcaccgacctcctaaacgtaaaactacgcgtactaaataaaaacgacaacccgccgatctttaaacaaaacgaataccgcgccgcgatacgcgaaaacgcccaaccgaacgccgaaatctatcgcgtacgcgccaccgaccgcgacctaaaacccaataacttcgtacgctacaacgtccgcgcccgacaaatacctaaaacgaataacgacgacgaaacactaaacgacgcgacctacttcgcgataaaaaaactaaacgacgtaatacgaatataaaaacctctaaaccgcgaaacacaaacctaacaccaattaataataaaaacccgcgataaaaacgccgaacctaaaattaccacgatacgcgtatccatcgccgtactaaacgtaaataacaaccgaccaacaattcacgtactctttctcacaaaaaaaaacgtcgcccgtatctctaaaaacgcccgaccgaacgactacgtaactcgcgtctcgatatctaacgcg

SEQ ID NO: 31495 - DNA, 784 bp, Artificial Sequence
  chemically treated genomic DNA (Homo sapiens) CpG-island No: 31495
gatcgtttttcgtttgttagttgtttacgattcggacgtcggattgtttagtatttagggttatattttggtgtaatcgttcgatttgtttaaggatttcgtaggttcgtttttttagttgcgttatcggatttcggggttattatcgttatcgtttttgttaggtttttcgttatttttggagtttttagatttggtgttgttgcggcgtttggatcgagaggaggcggcggcgtatcggttgtagatcgaggtatgggacggcggtcgatttcggcgtatcggttttttgagcgtggagttgcgcgtgttggatgagaacgataattcgtcggtttttgagtaggacgagtatcgcgtcgcggtgcgcgaggacgtttagtcgggcgtcgaggtttgtcgcgtgcgcgttatcgatcgcgatttggggtttaatggtttcgtgcgttatagcgttcgcgttcggtaagtgtttggggcgggtagcggcggcggggtattgggcgacgcggtttatttcgcggtggaggagttgagcggcgtggtgcgagtgtggagatttttggatcgcgaggtataggtttggtattagttggtggtggaggttcgcgatggaggcgtcgagtttgaggttgttacggtgcgcgtgtttatcgtcgtgttggacgtgaatgataatcggttagtaatttacgtgtttttttttatagagggaggcgtcgttcgtgtttttgaaggcgttcgatcgggcgattacgtggttcgcgtttcggtgtttgacgcg

SEQ ID NO: 31496 - DNA, 784 bp, Artificial Sequence
  chemically treated genomic DNA (Homo sapiens) CpG-island No: 31496
cgcgtcaaacaccgaaacgcgaaccacgtaatcgcccgatcgaacgccttcaaaaacacgaacgacgcctccctctataaaaaaaaacacgtaaattactaaccgattatcattcacgtccaacacgacgataaacacgcgcaccgtaacaacctcaaactcgacgcctccatcgcgaacctccaccaccaactaataccaaacctatacctcgcgatccaaaaatctccacactcgcaccacgccgctcaactcctccaccgcgaaataaaccgcgtcgcccaataccccgccgccgctacccgccccaaacacttaccgaacgcgaacgctataacgcacgaaaccattaaaccccaaatcgcgatcgataacgcgcacgcgacaaacctcgacgcccgactaaacgtcctcgcgcaccgcgacgcgatactcgtcctactcaaaaaccgacgaattatcgttctcatccaacacgcgcaactccacgctcaaaaaaccgatacgccgaaatcgaccgccgtcccatacctcgatctacaaccgatacgccgccgcctcctctcgatccaaacgccgcaacaacaccaaatctaaaaactccaaaaataacgaaaaacctaacaaaaacgataacgataataaccccgaaatccgataacgcaactaaaaaaacgaacctacgaaatccttaaacaaatcgaacgattacaccaaaatataaccctaaatactaaacaatccgacgtccgaatcgtaaacaactaacaaacgaaaaacgatc

SEQ ID NO: 31497 - DNA, 729 bp, Artificial Sequence
  chemically treated genomic DNA (Homo sapiens) CpG-island No: 31497
agattaggcgtttgtttttcgtcggagatttagagcgttattaggtttcgggagtttcgaagttcggggaaagtcggagtagtagcgttatttttgtttcgtagttcgttcgcggggggtcggcggtagttagaagtcgtagtttttcggtttaggcgcggtttttttagttttcgggtcggtcggtaggggcgttttggggtagcgttattcgttttttttttacgcgtcgttcgtaaattcggtttaagttttcgcgttcgtcgagcgggcgagtttttatttgtagagcgttaggattttcgtcgtcgttattttaggcggttttcgcgttcgtattttttagcgttttttaggtcgcgggttttagttcgatcgggttttgcgcgggaagtcgtagtgagtattaagttcggagtaatttttttagttgtcgttcgcgtcgtcgttgggcgtcgtttgcggtttcgggcggggcgggttgggggcggggcgggggcggggcgattcgtagggttggggaagagttcggtttcgtttttgggagtttgcgtttttgtgggtagcgggtgcggagggttcgcgtggggttagttcgttaggagcgggttgcgggcgttgtgtatcgttcgtaatcgttacgttttacgaattagtgttcggcgggttcgttacgcgtttttagtcgtttttttagatcgtttatttattgttatttgttgcgatgtg

SEQ ID NO: 31498 - DNA, 729 bp, Artificial Sequence
  chemically treated genomic DNA (Homo sapiens) CpG-island No: 31498
cacatcgcaacaaataacaataaataaacgatctaaaaaaacgactaaaaacgcgtaacgaacccgccgaacactaattcgtaaaacgtaacgattacgaacgatacacaacgcccgcaacccgctcctaacgaactaaccccacgcgaaccctccgcacccgctacccacaaaaacgcaaactcccaaaaacgaaaccgaactcttccccaaccctacgaatcgccccgcccccgccccgcccccaacccgccccgcccgaaaccgcaaacgacgcccaacgacgacgcgaacgacaactaaaaaaattactccgaacttaatactcactacgacttcccgcgcaaaacccgatcgaactaaaacccgcgacctaaaaaacgctaaaaaatacgaacgcgaaaaccgcctaaaataacgacgacgaaaatcctaacgctctacaaataaaaactcgcccgctcgacgaacgcgaaaacttaaaccgaatttacgaacgacgcgtaaaaaaaaaacgaataacgctaccccaaaacgcccctaccgaccgacccgaaaactaaaaaaaccgcgcctaaaccgaaaaactacgacttctaactaccgccgaccccccgcgaacgaactacgaaacaaaaataacgctactactccgactttccccgaacttcgaaactcccgaaacctaataacgctctaaatctccgacgaaaaacaaacgcctaatct

SEQ ID NO: 31499 - DNA, 729 bp, Artificial Sequence
  chemically treated genomic DNA (Homo sapiens) CpG-island No: 31499
tatatcgtagtaagtggtagtgaatgaacgatttaagggagcgattgagggcgcgtgacgggttcgtcgggtattggttcgtggagcgtggcggttacgggcggtgtatagcgttcgtagttcgtttttagcgagttggttttacgcgggtttttcgtattcgttgtttataggagcgtaggtttttagaggcggggtcgggtttttttttaattttgcgagtcgtttcgttttcgtttcgtttttagttcgtttcgttcgggatcgtagacggcgtttagcggcggcgcgaacggtagttaggagggttgtttcgggtttggtgtttattgcgatttttcgcgtagggttcggtcggattaggattcgcggtttgagagacgttggaggatgcggacgcggaggtcgtttggggtagcggcggcgggagttttggcgttttgtaggtaggagttcgttcgttcggcgggcgcggaaatttgggtcgagtttgcgggcggcgcgtggagaaggggcgggtggcgttgttttagggcgtttttatcggtcggttcggggattgagggagtcgcgtttgggtcgaggggttgcggtttttggttgtcgtcggtttttcgcgaacgggttgcggggtaggggtggcgttgttgtttcgatttttttcggatttcgaggttttcgggatttggtagcgttttgggttttcggcggagaataggcgtttaattt

SEQ ID NO: 31500 - DNA, 729 bp, Artificial Sequence
  chemically treated genomic DNA (Homo sapiens) CpG-island No: 31500
aaattaaacgcctattctccgccgaaaacccaaaacgctaccaaatcccgaaaacctcgaaatccgaaaaaaatcgaaacaacaacgccacccctaccccgcaacccgttcgcgaaaaaccgacgacaaccaaaaaccgcaacccctcgacccaaacgcgactccctcaatccccgaaccgaccgataaaaacgccctaaaacaacgccacccgccccttctccacgcgccgcccgcaaactcgacccaaatttccgcgcccgccgaacgaacgaactcctacctacaaaacgccaaaactcccgccgccgctaccccaaacgacctccgcgtccgcatcctccaacgtctctcaaaccgcgaatcctaatccgaccgaaccctacgcgaaaaatcgcaataaacaccaaacccgaaacaaccctcctaactaccgttcgcgccgccgctaaacgccgtctacgatcccgaacgaaacgaactaaaaacgaaacgaaaacgaaacgactcgcaaaattaaaaaaaaacccgaccccgcctctaaaaacctacgctcctataaacaacgaatacgaaaaacccgcgtaaaaccaactcgctaaaaacgaactacgaacgctatacaccgcccgtaaccgccacgctccacgaaccaatacccgacgaacccgtcacgcgccctcaatcgctcccttaaatcgttcattcactaccacttactacgatata

SEQ ID NO: 31501 - DNA, 560 bp, Artificial Sequence
  chemically treated genomic DNA (Homo sapiens) CpG-island No: 31501
tttgcgtttatcggtcgggggttttcgtaggttgaggcgtacgtttaggtattttattttcgagaagatagttagggtcgcggtgttggtcgaggcgcgggggtaggtgttcgggttttaggcggcggtggcgcgtttttgggtttttaggcgtagcgcgcgtagggttatcggttcggacgtttttagtagtacgtgttcggttattgtttcgtcgttggaatagtagtttttgcgttcgttttcgaatattagatttaggttttttacgcggttttcggtatttacggtcgtcgcgtatttagttttttcgtttatttcgtcgggcgatttttttttgtttttgaggtcggtagaggttcggagtcggggtcgcgagtatagcggcgtcgttgttataggcgttcgcggtagggtaaggtcgtcgcggtagtcgtgcggtattcgatggggtatcggttcgtcgagaggtttgtcgttttaataaatttagttgggtttggaaaagggtcgggatagtttattttcggcgggcggttattggttagttgcgagttttg

SEQ ID NO: 31502 - DNA, 560 bp, Artificial Sequence
  chemically treated genomic DNA (Homo sapiens) CpG-island No: 31502
caaaactcgcaactaaccaataaccgcccgccgaaaataaactatcccgacccttttccaaacccaactaaatttattaaaacgacaaacctctcgacgaaccgataccccatcgaataccgcacgactaccgcgacgaccttaccctaccgcgaacgcctataacaacgacgccgctatactcgcgaccccgactccgaacctctaccgacctcaaaaacaaaaaaaaatcgcccgacgaaataaacgaaaaaactaaatacgcgacgaccgtaaataccgaaaaccgcgtaaaaaacctaaatctaatattcgaaaacgaacgcaaaaactactattccaacgacgaaacaataaccgaacacgtactactaaaaacgtccgaaccgataaccctacgcgcgctacgcctaaaaacccaaaaacgcgccaccgccgcctaaaacccgaacacctacccccgcgcctcgaccaacaccgcgaccctaactatcttctcgaaaataaaatacctaaacgtacgcctcaacctacgaaaacccccgaccgataaacgcaaa

SEQ ID NO: 31503 - DNA, 560 bp, Artificial Sequence
  chemically treated genomic DNA (Homo sapiens) CpG-island No: 31503
tagggttcgtagttgattaatggtcgttcgtcgggggtgggttgtttcggtttttttttaggtttaattgggtttgttaaagcgataggtttttcggcgagtcggtgttttatcgggtatcgtacggttgtcgcggcggttttattttgtcgcgagcgtttgtgatagcggcgtcgttgtgttcgcgatttcggtttcgggtttttgtcgattttaggggtaggaaagagtcgttcggcgggatgggcggggaggttgggtgcgcggcggtcgtgggtgtcgagggtcgcgtgaagagtttgggtttggtgttcgaggacgagcgtaagggttgttattttagcggcgagatagtggtcgggtacgtgttgttggaggcgttcgagtcggtggttttgcgcgcgttgcgtttggaggtttaggggcgcgttatcgtcgtttggggttcgagtatttgttttcgcgtttcggttagtatcgcggttttggttgttttttcggaggtggagtatttgaacgtgcgttttagtttgcgggagttttcggtcggtaagcgtagg

SEQ ID NO: 31504 - DNA, 560 bp, Artificial Sequence
  chemically treated genomic DNA (Homo sapiens) CpG-island No: 31504
cctacgcttaccgaccgaaaactcccgcaaactaaaacgcacgttcaaatactccacctccgaaaaaacaaccaaaaccgcgatactaaccgaaacgcgaaaacaaatactcgaaccccaaacgacgataacgcgcccctaaacctccaaacgcaacgcgcgcaaaaccaccgactcgaacgcctccaacaacacgtacccgaccactatctcgccgctaaaataacaacccttacgctcgtcctcgaacaccaaacccaaactcttcacgcgaccctcgacacccacgaccgccgcgcacccaacctccccgcccatcccgccgaacgactctttcctacccctaaaatcgacaaaaacccgaaaccgaaatcgcgaacacaacgacgccgctatcacaaacgctcgcgacaaaataaaaccgccgcgacaaccgtacgatacccgataaaacaccgactcgccgaaaaacctatcgctttaacaaacccaattaaacctaaaaaaaaaccgaaacaacccacccccgacgaacgaccattaatcaactacgaacccta

SEQ ID NO: 31505 - DNA, 786 bp, Artificial Sequence
  chemically treated genomic DNA (Homo sapiens) CpG-island No: 31505
tcgcgacgaatttcggttgtagaagaggaagagtattatttgtagttcgcggcgtgggaaacgtcgtcggaggggtttcgcgagtcggggaagtgcgcgtagcggggttttaggcggttttaggcgttgagtgcgaggaacgttcgcgttcgtcggcgttcgggagacgtagtcgaaggaggagggcgggcgttttattcgcgttatagttgcggtcggttagagagatcgtagaggtcgggattttcgtagtttttacggtcgttgttgttattgtcggggtggcgcgtttagtcggagaatttcgttcgcgttcggggttgggggcgaggcggggcgttgacgttatttttttttttttatcgtttttaagggggagggagtggggaaagaggtagcgagtcgtcgtagtcgtcggtcgtaattttttaattcggcggttggttgtttgggtacgttttgataaatttggttgttttcgggttttcgtttcggtttcgcgtatttttttttcgtttgcgtttggtgtttaagtttgttttggtcggaagttttcggagatgcggtcgtttgggtttcggcggtacggacgttggtattttggttagggatatgttgaagatttcggggaggtaaagttggtattttaaattcggtttttaatatatatttatatcgcgaggggattacggagttgtcgaggattttagagtttagggtcgaggattcggttagattggtgagttttttgtttaaatcgtgtatgttttttggtatttaagttta

SEQ ID NO: 31506 - DNA, 786 bp, Artificial Sequence
  chemically treated genomic DNA (Homo sapiens) CpG-island No: 31506
taaacttaaataccaaaaaacatacacgatttaaacaaaaaactcaccaatctaaccgaatcctcgaccctaaactctaaaatcctcgacaactccgtaatcccctcgcgatataaatatatattaaaaaccgaatttaaaataccaactttacctccccgaaatcttcaacatatccctaaccaaaataccaacgtccgtaccgccgaaacccaaacgaccgcatctccgaaaacttccgaccaaaacaaacttaaacaccaaacgcaaacgaaaaaaaaatacgcgaaaccgaaacgaaaacccgaaaacaaccaaatttatcaaaacgtacccaaacaaccaaccgccgaattaaaaaattacgaccgacgactacgacgactcgctacctctttccccactccctcccccttaaaaacgataaaaaaaaaaaaataacgtcaacgccccgcctcgcccccaaccccgaacgcgaacgaaattctccgactaaacgcgccaccccgacaataacaacaacgaccgtaaaaactacgaaaatcccgacctctacgatctctctaaccgaccgcaactataacgcgaataaaacgcccgccctcctccttcgactacgtctcccgaacgccgacgaacgcgaacgttcctcgcactcaacgcctaaaaccgcctaaaaccccgctacgcgcacttccccgactcgcgaaacccctccgacgacgtttcccacgccgcgaactacaaataatactcttcctcttctacaaccgaaattcgtcgcga

SEQ ID NO: 31507 - DNA, 786 bp, Artificial Sequence
  chemically treated genomic DNA (Homo sapiens) CpG-island No: 31507
taaatttaaatgttaaaaggtatgtacgatttgaataaagaatttattagtttagtcgagttttcggttttgggttttaaagttttcggtagtttcgtgattttttcgcggtgtagatatgtgttaagagtcgggtttgaagtattaattttgttttttcgggatttttagtatgtttttaattagagtgttaacgttcgtgtcgtcgggatttaggcggtcgtattttcggaggttttcgattagggtaaatttaagtattaaacgtaggcgaaaagagagtgcgcggggtcggaacgagggttcgggagtagttaagtttgttaggacgtgtttaggtagttagtcgtcgagttgaggagttgcggtcggcggttgcggcgattcgttgtttttttttttatttttttttttttggaggcggtgggggaggggaggtgacgttagcgtttcgtttcgtttttagtttcgggcgcggacgggatttttcggttgggcgcgttatttcgatagtggtagtagcggtcgtggaggttgcgggggtttcggtttttgcggtttttttggtcggtcgtagttgtggcgcgggtgaaacgttcgtttttttttttcggttgcgtttttcgggcgtcggcgagcgcgggcgtttttcgtatttagcgtttggagtcgtttggagtttcgttgcgcgtattttttcggttcgcggagttttttcggcggcgttttttacgtcgcggattgtaggtgatgtttttttttttttgtagtcgaaattcgtcgcga

SEQ ID NO: 31508 - DNA, 786 bp, Artificial Sequence
  chemically treated genomic DNA (Homo sapiens) CpG-island No: 31508
tcgcgacgaatttcgactacaaaaaaaaaaaaacatcacctacaatccgcgacgtaaaaaacgccgccgaaaaaactccgcgaaccgaaaaaatacgcgcaacgaaactccaaacgactccaaacgctaaatacgaaaaacgcccgcgctcgccgacgcccgaaaaacgcaaccgaaaaaaaaaaacgaacgtttcacccgcgccacaactacgaccgaccaaaaaaaccgcaaaaaccgaaacccccgcaacctccacgaccgctactaccactatcgaaataacgcgcccaaccgaaaaatcccgtccgcgcccgaaactaaaaacgaaacgaaacgctaacgtcacctcccctcccccaccgcctccaaaaaaaaaaaaataaaaaaaaaaacaacgaatcgccgcaaccgccgaccgcaactcctcaactcgacgactaactacctaaacacgtcctaacaaacttaactactcccgaaccctcgttccgaccccgcgcactctcttttcgcctacgtttaatacttaaatttaccctaatcgaaaacctccgaaaatacgaccgcctaaatcccgacgacacgaacgttaacactctaattaaaaacatactaaaaatcccgaaaaaacaaaattaatacttcaaacccgactcttaacacatatctacaccgcgaaaaaatcacgaaactaccgaaaactttaaaacccaaaaccgaaaactcgactaaactaataaattctttattcaaatcgtacataccttttaacatttaaattta

SEQ ID NO: 31509 - DNA, 1005 bp, Artificial Sequence
  chemically treated genomic DNA (Homo sapiens) CpG-island No: 31509
tataagtttcgttttgtttttcggagtcgcgttagatttcgttgggcgttttttcgttttttagtacggatttggtgttcgtagggattggggttttttgggttcgggcgggattgcgtggtcgaattcgcgggtttagagtcggtagtcggggaaagtgggttcgagttttcgcgttcgagaaacgagcgtcggcgtcggcgggcggggtcggggcggagggattttttgcgttcggggagcgtgaggcgtcggcgtcgagttgggcggtcgggcgcggggagagggcgcggggagagggcgcgggagcggttcgcgcggtaggtattatgcggacgcgcgagttcggcgagggtttcggtaggttcggtttttgttcgggggcgcgttgagacggcgggtgagttttacgagagcgtcgtcgttatttcgggttaattttgcggttagttcgttggggcgcgggtcggcgggcgggggcgagagcgtgtagcgcgttgcggtgcggattttgtgggtgttcgttcggttttcggttcgggtttcggcgttgtcgaaaacggatgagcgcgcgatttttcggagggtggagtgattcggttttttttaattgggaaatttagtattggttaggggggtttcggcggcggagcgggaaaaggaggcgatcgcgcgggatcgattcggggttattgttggggttcgattttttttgatacgtcgtttttttttcgggagttcgtcgggttgcgtcggtttcgcggttttttggggtatttcgtcgtttgcgaaagattcgttcgttgagcggtgtacgcgggaggtttgcgcggggttgtcgggtttttgggtttttgggtgtttgcgttttgtaggagcgttgttcggaggtgtagatgtaatcggtggattgcggagtgaagggttgcgaggttgtatttcggggttgaatatttgtataatgtgcggtttgttagtgttttttgttttttttggaggaggaat

SEQ ID NO: 31510 - DNA, 1005 bp, Artificial Sequence
  chemically treated genomic DNA (Homo sapiens) CpG-island No: 31510
attcctcctccaaaaaaaacaaaaaacactaacaaaccgcacattatacaaatattcaaccccgaaatacaacctcgcaacccttcactccgcaatccaccgattacatctacacctccgaacaacgctcctacaaaacgcaaacacccaaaaacccaaaaacccgacaaccccgcgcaaacctcccgcgtacaccgctcaacgaacgaatctttcgcaaacgacgaaataccccaaaaaaccgcgaaaccgacgcaacccgacgaactcccgaaaaaaaaacgacgtatcaaaaaaaatcgaaccccaacaataaccccgaatcgatcccgcgcgatcgcctccttttcccgctccgccgccgaaacccccctaaccaatactaaatttcccaattaaaaaaaaccgaatcactccaccctccgaaaaatcgcgcgctcatccgttttcgacaacgccgaaacccgaaccgaaaaccgaacgaacacccacaaaatccgcaccgcaacgcgctacacgctctcgcccccgcccgccgacccgcgccccaacgaactaaccgcaaaattaacccgaaataacgacgacgctctcgtaaaactcacccgccgtctcaacgcgcccccgaacaaaaaccgaacctaccgaaaccctcgccgaactcgcgcgtccgcataatacctaccgcgcgaaccgctcccgcgccctctccccgcgccctctccccgcgcccgaccgcccaactcgacgccgacgcctcacgctccccgaacgcaaaaaatccctccgccccgaccccgcccgccgacgccgacgctcgtttctcgaacgcgaaaactcgaacccactttccccgactaccgactctaaacccgcgaattcgaccacgcaatcccgcccgaacccaaaaaaccccaatccctacgaacaccaaatccgtactaaaaaacgaaaaaacgcccaacgaaatctaacgcgactccgaaaaacaaaacgaaacttata

SEQ ID NO: 31511 - DNA, 1005 bp, Artificial Sequence
  chemically treated genomic DNA (Homo sapiens) CpG-island No: 31511
gttttttttttagagaagatagaaaatattgataaatcgtatattgtgtagatgtttagtttcgaaatgtagtttcgtagttttttatttcgtagtttatcggttgtatttgtattttcgggtagcgtttttgtagggcgtaaatatttagagatttagggattcggtagtttcgcgtaggtttttcgcgtgtatcgtttagcgagcgggtttttcgtagacggcgggatgttttaggagatcgcgaggtcggcgtagttcggcgagttttcggagggaaggcggcgtgttagaaaggatcggattttagtaatggtttcggatcggtttcgcgcggtcgtttttttttttcgtttcgtcgtcgggatttttttagttagtgttgaattttttaattgggaaggatcgagttattttatttttcgggaagtcgcgcgtttattcgttttcggtagcgtcggagttcgagtcggggatcgggcggatatttatagagttcgtatcgtagcgcgttgtacgttttcgttttcgttcgtcggttcgcgttttagcgaattaatcgtaaagttggttcgaagtggcgacggcgttttcgtggagtttattcgtcgttttagcgcgttttcgagtagggatcgggtttgtcggggttttcgtcgggttcgcgcgttcgtatggtatttgtcgcgcgagtcgttttcgcgtttttttttcgcgtttttttttcgcgttcggtcgtttagttcggcgtcggcgttttacgtttttcgagcgtaggagattttttcgtttcggtttcgttcgtcggcgtcggcgttcgtttttcgggcgcggaaattcgagtttatttttttcggttgtcggttttgggttcgcgggttcggttacgtagtttcgttcggatttaaagagttttagtttttgcgaatattaggttcgtgttgggagacgagaaggcgtttagcggggtttagcgcggtttcgaggggtagggcgaggtttgtg

SEQ ID NO: 31512 - DNA, 1005 bp, Artificial Sequence
  chemically treated genomic DNA (Homo sapiens) CpG-island No: 31512
cacaaacctcgccctacccctcgaaaccgcgctaaaccccgctaaacgccttctcgtctcccaacacgaacctaatattcgcaaaaactaaaactctttaaatccgaacgaaactacgtaaccgaacccgcgaacccaaaaccgacaaccgaaaaaaataaactcgaatttccgcgcccgaaaaacgaacgccgacgccgacgaacgaaaccgaaacgaaaaaatctcctacgctcgaaaaacgtaaaacgccgacgccgaactaaacgaccgaacgcgaaaaaaaaacgcgaaaaaaaaacgcgaaaacgactcgcgcgacaaataccatacgaacgcgcgaacccgacgaaaaccccgacaaacccgatccctactcgaaaacgcgctaaaacgacgaataaactccacgaaaacgccgtcgccacttcgaaccaactttacgattaattcgctaaaacgcgaaccgacgaacgaaaacgaaaacgtacaacgcgctacgatacgaactctataaatatccgcccgatccccgactcgaactccgacgctaccgaaaacgaataaacgcgcgacttcccgaaaaataaaataactcgatccttcccaattaaaaaattcaacactaactaaaaaaatcccgacgacgaaacgaaaaaaaaaaacgaccgcgcgaaaccgatccgaaaccattactaaaatccgatcctttctaacacgccgccttccctccgaaaactcgccgaactacgccgacctcgcgatctcctaaaacatcccgccgtctacgaaaaacccgctcgctaaacgatacacgcgaaaaacctacgcgaaactaccgaatccctaaatctctaaatatttacgccctacaaaaacgctacccgaaaatacaaatacaaccgataaactacgaaataaaaaactacgaaactacatttcgaaactaaacatctacacaatatacgatttatcaatattttctatcttctctaaaaaaaaaac

SEQ ID NO: 31513 - DNA, 520 bp, Artificial Sequence
  chemically treated genomic DNA (Homo sapiens) CpG-island No: 31513
tgattcggttttatttagagtattcgagcgcgttttattttcgttcggcgtcgtcgacgtttcgtttgattggaaattcgaaattcgcgggtgttaggttcgggttttattattgtttcgtcgtcggtaagttagggttagcgttaaggggattttatttcggtcggggggattttttcgtttaaagaagggaagattttgtcggtattattgagaggcgtgtttttttttggttgtcgttcgagtatcgagagttttagttcgtttattggttgtgagggttgggttaggtttatgtgtcggtagggaaagtttgagcggtttcgcgggaggttatagcgtcggcgagtcgagcgattttttcgttttatattttatttattgggcggggcgtcgcggatttcgggcggcgggagcggatcggagcggataggaggggtaattgtgagtggcggttattttttggatttcgcggggtagagtatttgaggtcgtgtcggagtgggttttagagtcgaag

SEQ ID NO: 31514 - DNA, 520 bp, Artificial Sequence
  chemically treated genomic DNA (Homo sapiens) CpG-island No: 31514
cttcgactctaaaacccactccgacacgacctcaaatactctaccccgcgaaatccaaaaaataaccgccactcacaattacccctcctatccgctccgatccgctcccgccgcccgaaatccgcgacgccccgcccaataaataaaatataaaacgaaaaaatcgctcgactcgccgacgctataacctcccgcgaaaccgctcaaactttccctaccgacacataaacctaacccaaccctcacaaccaataaacgaactaaaactctcgatactcgaacgacaaccaaaaaaaaacacgcctctcaataataccgacaaaatcttcccttctttaaacgaaaaaatccccccgaccgaaataaaatccccttaacgctaaccctaacttaccgacgacgaaacaataataaaacccgaacctaacacccgcgaatttcgaatttccaatcaaacgaaacgtcgacgacgccgaacgaaaataaaacgcgctcgaatactctaaataaaaccgaatca

SEQ ID NO: 31515 - DNA, 520 bp, Artificial Sequence
  chemically treated genomic DNA (Homo sapiens) CpG-island No: 31515
tttcggttttggagtttatttcggtacggttttaggtgttttatttcgcgggatttagggagtggtcgttatttatagttgttttttttgttcgtttcggttcgttttcgtcgttcgaggttcgcgacgtttcgtttagtgggtggagtgtgaggcggggaggtcgttcgattcgtcggcgttgtggtttttcgcggagtcgtttagattttttttgtcggtatatggatttggtttaatttttatagttagtagacgagttggagttttcggtgttcgagcggtagttagaagagaatacgttttttaatggtgtcgataaggtttttttttttttggacgaggaggttttttcggtcgaggtaaggtttttttggcgttggttttaatttgtcggcggcgggatagtagtaggattcgggtttggtattcgcgagtttcgggtttttagttaggcggggcgtcgacggcgtcgagcgagggtggggcgcgttcgagtgttttgaatggagtcgagtta

SEQ ID NO: 31516 - DNA, 520 bp, Artificial Sequence
  chemically treated genomic DNA (Homo sapiens) CpG-island No: 31516
taactcgactccattcaaaacactcgaacgcgccccaccctcgctcgacgccgtcgacgccccgcctaactaaaaacccgaaactcgcgaataccaaacccgaatcctactactatcccgccgccgacaaattaaaaccaacgccaaaaaaaccttacctcgaccgaaaaaacctcctcgtccaaaaaaaaaaaaaccttatcgacaccattaaaaaacgtattctcttctaactaccgctcgaacaccgaaaactccaactcgtctactaactataaaaattaaaccaaatccatataccgacaaaaaaaatctaaacgactccgcgaaaaaccacaacgccgacgaatcgaacgacctccccgcctcacactccacccactaaacgaaacgtcgcgaacctcgaacgacgaaaacgaaccgaaacgaacaaaaaaaacaactataaataacgaccactccctaaatcccgcgaaataaaacacctaaaaccgtaccgaaataaactccaaaaccgaaa

SEQ ID NO: 31517 - DNA, 952 bp, Artificial Sequence
  chemically treated genomic DNA (Homo sapiens) CpG-island No: 31517
gattcggtcgtcgggtttttcgttaaggtgttcgagggcgtggcgggcgcgtttaacgaggtagtattgttggcgttgatggagcgtacgggttatagtatggtgtaagagaacgggtagcgtaagtacggcggtttatcgttcggttgggagggttcgtattcgtagcgtggttgcgaggttttcgtgggtaagatttcgcgcgacgtgtacgaggacgagttggtgttcgtgttcgaggtcgtgggtcgtatttacgagttgcgttttatgatggattttgacggtaagaatcgcggttacgttttcgttatgtattgttataagtacgaggttaagcgcgtagtgcgtgagtttaataattacgagattcgttcgggtcgtttgttcggcgtgtgttgtagcgtggataattgtcgtttttttatcggcgggatttttaagatgaagaagcgcgaggaaattttggaggagattgttaaggttatcgagggcgtgttggacgtgatcgtttacgttagcgcggtcgataagatgaagaatcgcggtttcgttttcgtggagtacgagagttatcgcgcggttgttatggttcgtcgtaagtttatgtttggtcgtatttagttgtggggttattagatcgtcgtggattgggtcgaatttgagatcgacgtggacgaggacgtgatggagatcgtgaagattttttacgtgcgtaattttatgatcgagattatcgaggatattattaagaagagtttcggttagtttaatttcggttgcgtggagcgcgttaagaagattcgcgattacgttttcgtgtattttattagtcgcgaggatgtcgtgtatgttatgaataattttaacggtattgagttggagggttcgtgtttggaggttacgttggttaagttcgtggataaggagtagtattcgcgttattagaagg

SEQ ID NO: 31518 - DNA, 952 bp, Artificial Sequence
  chemically treated genomic DNA (Homo sapiens) CpG-island No: 31518
ccttctaataacgcgaatactactccttatccacgaacttaaccaacgtaacctccaaacacgaaccctccaactcaataccgttaaaattattcataacatacacgacatcctcgcgactaataaaatacacgaaaacgtaatcgcgaatcttcttaacgcgctccacgcaaccgaaattaaactaaccgaaactcttcttaataatatcctcgataatctcgatcataaaattacgcacgtaaaaaatcttcacgatctccatcacgtcctcgtccacgtcgatctcaaattcgacccaatccacgacgatctaataaccccacaactaaatacgaccaaacataaacttacgacgaaccataacaaccgcgcgataactctcgtactccacgaaaacgaaaccgcgattcttcatcttatcgaccgcgctaacgtaaacgatcacgtccaacacgccctcgataaccttaacaatctcctccaaaatttcctcgcgcttcttcatcttaaaaatcccgccgataaaaaaacgacaattatccacgctacaacacacgccgaacaaacgacccgaacgaatctcgtaattattaaactcacgcactacgcgcttaacctcgtacttataacaatacataacgaaaacgtaaccgcgattcttaccgtcaaaatccatcataaaacgcaactcgtaaatacgacccacgacctcgaacacgaacaccaactcgtcctcgtacacgtcgcgcgaaatcttacccacgaaaacctcgcaaccacgctacgaatacgaaccctcccaaccgaacgataaaccgccgtacttacgctacccgttctcttacaccatactataacccgtacgctccatcaacgccaacaatactacctcgttaaacgcgcccgccacgccctcgaacaccttaacgaaaaacccgacgaccgaatc

SEQ ID NO: 31519 - DNA, 952 bp, Artificial Sequence
  chemically treated genomic DNA (Homo sapiens) CpG-island No: 31519
ttttttggtagcgcgagtattgttttttgtttacgggtttggttagcgtgatttttaggtacgagttttttagtttagtgtcgttgaggttgtttatggtatgtacggtattttcgcggttggtgaagtgtacgaaggcgtagtcgcggatttttttgacgcgttttacgtagtcggggttgaattggtcgaagttttttttgatggtgttttcggtggtttcgattatgaggttgcgtacgtagaggatttttacggtttttattacgttttcgtttacgtcgattttaggttcggtttagtttacggcgatttggtggttttatagttggatgcggttaggtatgagtttgcggcgagttatggtagtcgcgcggtggttttcgtattttacgaaggcgaagtcgcggttttttattttgtcggtcgcgttggcgtagacgattacgtttagtacgttttcggtgattttggtaattttttttaggattttttcgcgtttttttattttggggatttcgtcgatgaagaggcggtagttgtttacgttgtagtatacgtcgagtaggcggttcgggcggatttcgtagttgttgagtttacgtattgcgcgtttggtttcgtgtttgtggtagtatatgacgaaggcgtagtcgcggtttttgtcgttaaagtttattatgaggcgtagttcgtagatgcggtttacggtttcgaatacgggtattagttcgttttcgtatacgtcgcgcgggattttgtttacgaagatttcgtagttacgttgcgggtgcgggtttttttagtcgggcggtgggtcgtcgtatttgcgttgttcgtttttttgtattatgttgtagttcgtgcgttttattagcgttagtagtgttgtttcgttgggcgcgttcgttacgttttcgggtattttggcggaggattcggcggtcgagtt

SEQ ID NO: 31520 - DNA, 952 bp, Artificial Sequence
  chemically treated genomic DNA (Homo sapiens) CpG-island No: 31520
aactcgaccgccgaatcctccgccaaaatacccgaaaacgtaacgaacgcgcccaacgaaacaacactactaacgctaataaaacgcacgaactacaacataatacaaaaaaacgaacaacgcaaatacgacgacccaccgcccgactaaaaaaacccgcacccgcaacgtaactacgaaatcttcgtaaacaaaatcccgcgcgacgtatacgaaaacgaactaatacccgtattcgaaaccgtaaaccgcatctacgaactacgcctcataataaactttaacgacaaaaaccgcgactacgccttcgtcatatactaccacaaacacgaaaccaaacgcgcaatacgtaaactcaacaactacgaaatccgcccgaaccgcctactcgacgtatactacaacgtaaacaactaccgcctcttcatcgacgaaatccccaaaataaaaaaacgcgaaaaaatcctaaaaaaaattaccaaaatcaccgaaaacgtactaaacgtaatcgtctacgccaacgcgaccgacaaaataaaaaaccgcgacttcgccttcgtaaaatacgaaaaccaccgcgcgactaccataactcgccgcaaactcatacctaaccgcatccaactataaaaccaccaaatcgccgtaaactaaaccgaacctaaaatcgacgtaaacgaaaacgtaataaaaaccgtaaaaatcctctacgtacgcaacctcataatcgaaaccaccgaaaacaccatcaaaaaaaacttcgaccaattcaaccccgactacgtaaaacgcgtcaaaaaaatccgcgactacgccttcgtacacttcaccaaccgcgaaaataccgtacataccataaacaacctcaacgacactaaactaaaaaactcgtacctaaaaatcacgctaaccaaacccgtaaacaaaaaacaatactcgcgctaccaaaaaa

SEQ ID NO: 31521 - DNA, 682 bp, Artificial Sequence
  chemically treated genomic DNA (Homo sapiens) CpG-island No: 31521
tcggtcgtcgaagttggcgtttgggcgcggggaggggcgggtcggggcgcggtcgagtagtggggtcgagttcgaggaagaggaagtcggagttcgagtttgagttcgagttcgagttcgacggcggttgtagggcgtttcggtagttcgagtcggcgtagcgtagttcgtatttttttcgttcgatttgcgagcgtcgttcgggtatgcgaagtcgttttttttcgggtaagcgtcggtcgggttcggacgttttggggatttttttagggatgggaggggggattcggggattttcggcgggagttttatattcgtaggtggggtcgggcggagcgtggtattcgggtttcgtcggttttttgcgcgttttttcgtagtggggacggagggttttggggggcgtcgagcggtggggatagagggcgtcgggggtatcgcgcggtggggacggagggcgttggggggcgtcgcgtttcgggggtcggagtcgggtcggggatgttgttcgtcgtcgtttcgtttggggtttcgcgtttttaagttttcggtgttttcgtttttcgttttagcggttgtaatattagcgcgtagaggagtttttgcgagtattcgggagttgtagttatcgtttttttattttcgatttagtaggatagttttagaacgggattttatagtt

SEQ ID NO: 31522 - DNA, 682 bp, Artificial Sequence
  chemically treated genomic DNA (Homo sapiens) CpG-island No: 31522
aactataaaatcccgttctaaaactatcctactaaatcgaaaataaaaaaacgataactacaactcccgaatactcgcaaaaactcctctacgcgctaatattacaaccgctaaaacgaaaaacgaaaacaccgaaaacttaaaaacgcgaaaccccaaacgaaacgacgacgaacaacatccccgacccgactccgacccccgaaacgcgacgccccccaacgccctccgtccccaccgcgcgatacccccgacgccctctatccccaccgctcgacgccccccaaaaccctccgtccccactacgaaaaaacgcgcaaaaaaccgacgaaacccgaataccacgctccgcccgaccccacctacgaatataaaactcccgccgaaaatccccgaatcccccctcccatccctaaaaaaatccccaaaacgtccgaacccgaccgacgcttacccgaaaaaaaacgacttcgcatacccgaacgacgctcgcaaatcgaacgaaaaaaatacgaactacgctacgccgactcgaactaccgaaacgccctacaaccgccgtcgaactcgaactcgaactcaaactcgaactccgacttcctcttcctcgaactcgaccccactactcgaccgcgccccgacccgcccctccccgcgcccaaacgccaacttcgacgaccga

SEQ ID NO: 31523 - DNA, 682 bp, Artificial Sequence
  chemically treated genomic DNA (Homo sapiens) CpG-island No: 31523
ggttgtggggtttcgttttggggttgttttgttgagtcgggggtggggaagcggtggttataattttcgggtgttcgtagaaatttttttgcgcgttgatgttgtagtcgttggggcgaggggcgggagtatcgggaatttgggggcgcggaattttaagcggggcggcggcgggtagtattttcgattcgatttcgattttcgagacgcggcgttttttagcgtttttcgtttttatcgcgcggtgttttcggcgttttttgtttttatcgttcggcgttttttaaggtttttcgtttttattgcggaggggcgcgtagggggtcggcggggttcgggtattacgtttcgttcggttttatttgcggatgtggggttttcgtcggaggttttcgggtttttttttttatttttggaaaagtttttagggcgttcgggttcgatcggcgtttattcggggagggacggtttcgtatgttcgggcggcgttcgtaggtcgggcggggagggtgcgggttgcgttgcgtcggttcgggttgtcggagcgttttgtagtcgtcgtcgggttcgggttcgggtttaggttcgggtttcgattttttttttttcgggttcggttttattgttcggtcgcgtttcggttcgttttttttcgcgtttagacgttagtttcggcggtcgg

SEQ ID NO: 31524 - DNA, 682 bp, Artificial Sequence
  chemically treated genomic DNA (Homo sapiens) CpG-island No: 31524
ccgaccgccgaaactaacgtctaaacgcgaaaaaaaacgaaccgaaacgcgaccgaacaataaaaccgaacccgaaaaaaaaaaaatcgaaacccgaacctaaacccgaacccgaacccgacgacgactacaaaacgctccgacaacccgaaccgacgcaacgcaacccgcaccctccccgcccgacctacgaacgccgcccgaacatacgaaaccgtccctccccgaataaacgccgatcgaacccgaacgccctaaaaacttttccaaaaataaaaaaaaaaacccgaaaacctccgacgaaaaccccacatccgcaaataaaaccgaacgaaacgtaatacccgaaccccgccgaccccctacgcgcccctccgcaataaaaacgaaaaaccttaaaaaacgccgaacgataaaaacaaaaaacgccgaaaacaccgcgcgataaaaacgaaaaacgctaaaaaacgccgcgtctcgaaaatcgaaatcgaatcgaaaatactacccgccgccgccccgcttaaaattccgcgcccccaaattcccgatactcccgcccctcgccccaacgactacaacatcaacgcgcaaaaaaatttctacgaacacccgaaaattataaccaccgcttccccacccccgactcaacaaaacaaccccaaaacgaaaccccacaacc

SEQ ID NO: 31525 - DNA, 524 bp, Artificial Sequence
  chemically treated genomic DNA (Homo sapiens) CpG-island No: 31525
cgcgcggtgggggcggcggtcgagttgttgcggcgtttagggtttgggggcgttttcgttttgtagatgcgttttttagggggtggggagttaagagtttgtggttttttcgttacggggtaaacggtaatatttgggcggtcgcgattttgcgagcgttttggtttcggcgggcggcggggaatcgtagtgatgttcgagttcgttttttttgtgttttcgcggtgagtttcgtttcgaagtcggaagtttgggaacgttttaattgggagaacggcgttcggttggttaatttatttcgtttttcggaaataatgagttggatttttgatttgaatgtgttggcggagcggggtttgtaagtcggcgttttatttagttttggtttttaaggcgttttttgtattattcgtaggtggtcgaggttattgtacgtattttcgaaattatcgagtgtgggtgtttggggtaggtattatttcgcgaggattattttagattgagagttggtttaggagttttga

SEQ ID NO: 31526 - DNA, 524 bp, Artificial Sequence
  chemically treated genomic DNA (Homo sapiens) CpG-island No: 31526
tcaaaactcctaaaccaactctcaatctaaaataatcctcgcgaaataatacctaccccaaacacccacactcgataatttcgaaaatacgtacaataacctcgaccacctacgaataatacaaaaaacgccttaaaaaccaaaactaaataaaacgccgacttacaaaccccgctccgccaacacattcaaatcaaaaatccaactcattatttccgaaaaacgaaataaattaaccaaccgaacgccgttctcccaattaaaacgttcccaaacttccgacttcgaaacgaaactcaccgcgaaaacacaaaaaaaacgaactcgaacatcactacgattccccgccgcccgccgaaaccaaaacgctcgcaaaatcgcgaccgcccaaatattaccgtttaccccgtaacgaaaaaaccacaaactcttaactccccaccccctaaaaaacgcatctacaaaacgaaaacgcccccaaaccctaaacgccgcaacaactcgaccgccgcccccaccgcgcg

SEQ ID NO: 31527 - DNA, 524 bp, Artificial Sequence
  chemically treated genomic DNA (Homo sapiens) CpG-island No: 31527
ttaaaatttttaaattaatttttagtttgagatggttttcgcggggtgatatttgttttaaatatttatattcggtgatttcgaaaatacgtgtagtagtttcggttatttgcgggtggtataaagggcgttttgaggattagagttggatgaaacgtcggtttataaatttcgtttcgttagtatatttaagttaaggatttagtttattgttttcgaggagcggaatgaattgattagtcgagcgtcgtttttttagttagagcgtttttaagttttcggtttcggaacggggtttatcgcgaggatataaaaggggcgagttcgggtattattgcggtttttcgtcgttcgtcgaggttagaacgttcgtagagtcgcggtcgtttaggtgttatcgtttatttcgtgacggaagagttataggtttttgattttttattttttgaaaagcgtatttgtagaacgggggcgtttttaagttttgagcgtcgtagtagttcggtcgtcgtttttatcgcgcg

SEQ ID NO: 31528 - DNA, 524 bp, Artificial Sequence
  chemically treated genomic DNA (Homo sapiens) CpG-island No: 31528
cgcgcgataaaaacgacgaccgaactactacgacgctcaaaacttaaaaacgcccccgttctacaaatacgcttttcaaaaaataaaaaatcaaaaacctataactcttccgtcacgaaataaacgataacacctaaacgaccgcgactctacgaacgttctaacctcgacgaacgacgaaaaaccgcaataatacccgaactcgccccttttatatcctcgcgataaaccccgttccgaaaccgaaaacttaaaaacgctctaactaaaaaaacgacgctcgactaatcaattcattccgctcctcgaaaacaataaactaaatccttaacttaaatatactaacgaaacgaaatttataaaccgacgtttcatccaactctaatcctcaaaacgccctttataccacccgcaaataaccgaaactactacacgtattttcgaaatcaccgaatataaatatttaaaacaaatatcaccccgcgaaaaccatctcaaactaaaaattaatttaaaaattttaa

SEQ ID NO: 31529 - DNA, 722 bp, Artificial Sequence
  chemically treated genomic DNA (Homo sapiens) CpG-island No: 31529
ttcgggttcgggatacggggagttttttttttaggggcgtaaacggggtttcggtttttcgggtttttttcgggttaatggcggcgttttgatttcgattcggtattaacgcgaggagttcgcgcggttcggggttgattttatgtcgtttagttgtcgcgcgttggtgggtcgcggtttcgattttcgtcgtttcgtttcggtcgggtttcggttgtagaagcgggcggggagttgggtttaggggtcgcgtcggagatatatgggtttatttgtttcgaaggttcgtaagacggcgacggcggttatagtattcgggatggttagacgtcgtaggatcgcgttgtttggtcggtcgtaggtgttgggcgtttcgagggcgttgttgtgagtagggtcgggacggaattcgacggaattcgacggtggtcgagattcggacggaatcgtttgataggtttaggtttcgcggggacgttttaggttaggtttagttcgtattacgtttcgtttcggtacgtttcgtttcgtttcggtacgttttttttcgtttcggtacgtttcgtttcgtttttacgaggttcgttttcggttcgtcgtttttcgtcgcgtttcgtacggtgaaaggcgcgtattgaaaatttgtaggtcggttttaggggttgtttgataaggtttgtgggaaagtttaagcgaggggaggagtaggatgattttttttt

SEQ ID NO: 31530 - DNA, 722 bp, Artificial Sequence
  chemically treated genomic DNA (Homo sapiens) CpG-island No: 31530
aaaaaaaaatcatcctactcctcccctcgcttaaactttcccacaaaccttatcaaacaacccctaaaaccgacctacaaattttcaatacgcgcctttcaccgtacgaaacgcgacgaaaaacgacgaaccgaaaacgaacctcgtaaaaacgaaacgaaacgtaccgaaacgaaaaaaaacgtaccgaaacgaaacgaaacgtaccgaaacgaaacgtaatacgaactaaacctaacctaaaacgtccccgcgaaacctaaacctatcaaacgattccgtccgaatctcgaccaccgtcgaattccgtcgaattccgtcccgaccctactcacaacaacgccctcgaaacgcccaacacctacgaccgaccaaacaacgcgatcctacgacgtctaaccatcccgaatactataaccgccgtcgccgtcttacgaaccttcgaaacaaataaacccatatatctccgacgcgacccctaaacccaactccccgcccgcttctacaaccgaaacccgaccgaaacgaaacgacgaaaatcgaaaccgcgacccaccaacgcgcgacaactaaacgacataaaatcaaccccgaaccgcgcgaactcctcgcgttaataccgaatcgaaatcaaaacgccgccattaacccgaaaaaaacccgaaaaaccgaaaccccgtttacgcccctaaaaaaaaaactccccgtatcccgaacccgaa

SEQ ID NO: 31531 - DNA, 722 bp, Artificial Sequence
  chemically treated genomic DNA (Homo sapiens) CpG-island No: 31531
aaaaagaaattattttattttttttttcgtttaaatttttttataggttttgttaaataatttttggagtcggtttgtaggtttttaatgcgcgttttttatcgtgcggggcgcggcggggagcggcgagtcgggggcgggtttcgtgggggcggggcggggcgtgtcggggcggggaggggcgtgtcggggcggggcggggcgtgtcggggcggggcgtagtacggattgggtttggtttggggcgttttcgcgaagtttgggtttgttaggcggtttcgttcgggtttcggttatcgtcgagtttcgtcgagtttcgtttcggttttgtttatagtagcgttttcggagcgtttagtatttgcggtcggttaggtagcgcgattttgcggcgtttggttatttcgaatgttatggtcgtcgtcgtcgttttgcgggttttcggggtaagtgggtttatgtgttttcggcgcggtttttgggtttagtttttcgttcgtttttgtagtcgggattcggtcggggcggggcggcgggagtcggagtcgcggtttattagcgcgcggtagttggacggtataaggttagtttcgggtcgcgcgggtttttcgcgttggtgtcgagtcggggttagggcgtcgttattgattcggggaggattcggggaatcggagtttcgtttacgtttttggggagggaatttttcgtgtttcggattcggg

SEQ ID NO: 31532 - DNA, 722 bp, Artificial Sequence
  chemically treated genomic DNA (Homo sapiens) CpG-island No: 31532
cccgaatccgaaacacgaaaaattccctccccaaaaacgtaaacgaaactccgattccccgaatcctccccgaatcaataacgacgccctaaccccgactcgacaccaacgcgaaaaacccgcgcgacccgaaactaaccttataccgtccaactaccgcgcgctaataaaccgcgactccgactcccgccgccccgccccgaccgaatcccgactacaaaaacgaacgaaaaactaaacccaaaaaccgcgccgaaaacacataaacccacttaccccgaaaacccgcaaaacgacgacgacgaccataacattcgaaataaccaaacgccgcaaaatcgcgctacctaaccgaccgcaaatactaaacgctccgaaaacgctactataaacaaaaccgaaacgaaactcgacgaaactcgacgataaccgaaacccgaacgaaaccgcctaacaaacccaaacttcgcgaaaacgccccaaaccaaacccaatccgtactacgccccgccccgacacgccccgccccgccccgacacgcccctccccgccccgacacgccccgccccgcccccacgaaacccgcccccgactcgccgctccccgccgcgccccgcacgataaaaaacgcgcattaaaaacctacaaaccgactccaaaaattatttaacaaaacctataaaaaaatttaaacgaaaaaaaaaataaaataatttcttttt

SEQ ID NO: 31533 - DNA, 1034 bp, Artificial Sequence
  chemically treated genomic DNA (Homo sapiens) CpG-island No: 31533
tcgaagtttcgttttgggttttgggtttttagcgttcgtttttcgtcgaggggtttcgggtatttgtagttttgggcgcgcgttttcgaggcgggcgggagcgcgtacggcgggagtgcgggagcggagcgtacgtgtcgtcgggaaggggtcgcgttaatatggcggcggttgcggtcgttgcggtgacggttggcggcggtcggtgaggcgggcggggtcggaggcgcggaggcggggtttcgggcgagtcgttttgggaggcgggggtcgtttttatagcggcggtaggaggtgtcgcgtcggggaattttttggttttcgggttcggtttcgtcgggatttttttggaagggaaataatggggcggagggtattgcggtagtcgtcgtcgtcgtcgcgtcgcgtcgcgtcggatttgttcggtcgttcgggatcgttagttttgttcgttgtttatagtttagtagtcgggatcgtattgaggtaatttttattttttagttttcgtcgtgaggggtcggcggcggcgggtttcgcgggcgtttttttcgggtcgggattcggagttggtttcggggagtcggacgtcgttattttcggtttttggaggaggggacgcggttgcggttcgcggttcggttttggggggcggttcgggtatagtgcgggggttgtttgtgtgttttcgcgttcggagcgtggggttcgcggggcgatgggcgggttgggggcgtcgcgcggggtgcggggaggttcgggggtggaattcggcgattgttttttcgagtgagtcgcgatttcggttaggcgcgtttttttcgtaagtttcggtcgcgtttttcgagttttagtgggtaggattcgggtaaatttcgtgtttttaaatgattgttttgatgtcgcggaattttgtttggattaggcgaggggaggatggggcgaatgagagatttgtaagttttggaaattcgtgcgtttttgtaaagtttgtaaaatagtttggcgtttataattttaggttggtgcggtat

SEQ ID NO: 31534 - DNA, 1034 bp, Artificial Sequence
  chemically treated genomic DNA (Homo sapiens) CpG-island No: 31534
ataccgcaccaacctaaaattataaacgccaaactattttacaaactttacaaaaacgcacgaatttccaaaacttacaaatctctcattcgccccatcctcccctcgcctaatccaaacaaaattccgcgacatcaaaacaatcatttaaaaacacgaaatttacccgaatcctacccactaaaactcgaaaaacgcgaccgaaacttacgaaaaaaacgcgcctaaccgaaatcgcgactcactcgaaaaaacaatcgccgaattccacccccgaacctccccgcaccccgcgcgacgcccccaacccgcccatcgccccgcgaaccccacgctccgaacgcgaaaacacacaaacaacccccgcactatacccgaaccgccccccaaaaccgaaccgcgaaccgcaaccgcgtcccctcctccaaaaaccgaaaataacgacgtccgactccccgaaaccaactccgaatcccgacccgaaaaaaacgcccgcgaaacccgccgccgccgacccctcacgacgaaaactaaaaaataaaaattacctcaatacgatcccgactactaaactataaacaacgaacaaaactaacgatcccgaacgaccgaacaaatccgacgcgacgcgacgcgacgacgacgacgactaccgcaataccctccgccccattatttcccttccaaaaaaatcccgacgaaaccgaacccgaaaaccaaaaaattccccgacgcgacacctcctaccgccgctataaaaacgacccccgcctcccaaaacgactcgcccgaaaccccgcctccgcgcctccgaccccgcccgcctcaccgaccgccgccaaccgtcaccgcaacgaccgcaaccgccgccatattaacgcgaccccttcccgacgacacgtacgctccgctcccgcactcccgccgtacgcgctcccgcccgcctcgaaaacgcgcgcccaaaactacaaatacccgaaacccctcgacgaaaaacgaacgctaaaaacccaaaacccaaaacgaaacttcga

SEQ ID NO: 31535 - DNA, 1034 bp, Artificial Sequence
  chemically treated genomic DNA (Homo sapiens) CpG-island No: 31535
atgtcgtattagtttagggttgtgagcgttaaattattttgtaaattttgtaaaggcgtacggatttttaagatttgtagattttttattcgttttatttttttttcgtttggtttaaataaagtttcgcggtattaaggtagttatttaaaggtacgaagtttgttcgggttttgtttattggggttcgggagacgcgatcgaaatttgcgagggagacgcgtttggtcgggatcgcggtttattcggggaggtagtcgtcgggttttattttcgggttttttcgtatttcgcgcggcgtttttagttcgtttatcgtttcgcggattttacgtttcgggcgcggggatatataggtagttttcgtattgtgttcgagtcgttttttagggtcgagtcgcgaatcgtagtcgcgtttttttttttaggggtcgggaatggcggcgttcggtttttcggggttaatttcgagtttcggttcggggaggacgttcgcggagttcgtcgtcgtcggttttttacggcgggagttgaggaatggaagttattttagtacggtttcgattgttaggttgtgggtagcggatagagttggcggtttcgggcggtcgagtagattcggcgcggcgcggcgcggcggcggcggcggttatcgtagtgtttttcgttttattgttttttttttaagaggatttcggcgaagtcgagttcgggaattaggaagtttttcggcgcgatattttttgtcgtcgttatggaaacggttttcgttttttagggcggttcgttcgggatttcgttttcgcgttttcggtttcgttcgttttatcggtcgtcgttaatcgttatcgtagcggtcgtagtcgtcgttatattggcgcggttttttttcggcggtacgtgcgtttcgttttcgtattttcgtcgtgcgcgttttcgttcgtttcggggacgcgcgtttagggttgtaggtgttcggagtttttcggcgggaagcgggcgttggaagtttaggatttaaagcggggtttcgg

SEQ ID NO: 31536 - DNA, 1034 bp, Artificial Sequence
  chemically treated genomic DNA (Homo sapiens) CpG-island No: 31536
ccgaaaccccgctttaaatcctaaacttccaacgcccgcttcccgccgaaaaactccgaacacctacaaccctaaacgcgcgtccccgaaacgaacgaaaacgcgcacgacgaaaatacgaaaacgaaacgcacgtaccgccgaaaaaaaaccgcgccaatataacgacgactacgaccgctacgataacgattaacgacgaccgataaaacgaacgaaaccgaaaacgcgaaaacgaaatcccgaacgaaccgccctaaaaaacgaaaaccgtttccataacgacgacaaaaaatatcgcgccgaaaaacttcctaattcccgaactcgacttcgccgaaatcctcttaaaaaaaaaacaataaaacgaaaaacactacgataaccgccgccgccgccgcgccgcgccgcgccgaatctactcgaccgcccgaaaccgccaactctatccgctacccacaacctaacaatcgaaaccgtactaaaataacttccattcctcaactcccgccgtaaaaaaccgacgacgacgaactccgcgaacgtcctccccgaaccgaaactcgaaattaaccccgaaaaaccgaacgccgccattcccgacccctaaaaaaaaaaacgcgactacgattcgcgactcgaccctaaaaaacgactcgaacacaatacgaaaactacctatatatccccgcgcccgaaacgtaaaatccgcgaaacgataaacgaactaaaaacgccgcgcgaaatacgaaaaaacccgaaaataaaacccgacgactacctccccgaataaaccgcgatcccgaccaaacgcgtctccctcgcaaatttcgatcgcgtctcccgaaccccaataaacaaaacccgaacaaacttcgtacctttaaataactaccttaataccgcgaaactttatttaaaccaaacgaaaaaaaaataaaacgaataaaaaatctacaaatcttaaaaatccgtacgcctttacaaaatttacaaaataatttaacgctcacaaccctaaactaatacgacat

SEQ ID NO: 31537 - DNA, 500 bp, Artificial Sequence
  chemically treated genomic DNA (Homo sapiens) CpG-island No: 31537
cgcggggtttggcggcggggtcgggggttgtacgcgattattcggtagggggcggcggcgatagcggcggtcgtaagggacgcgttcggggttcgcgtttagggggagcggtagcggtttggtagttgtttttcgcgttttcgcggtttagttaggggagggggcgtagcgtcggggttatggattcgcgttaggtcgttgtttttcgtcggcgggttcggggcggggcggattcgttttcgttttcgttttcgttttcgttttcgtttttatttttacgttttattttttacgtagttttcgttttttttgttttttttcgcgtcgtttttttttttcgcgtttttcgggagaaatatggtcgggagtagcgaggaggcgttagattacgggcgaggcgtcgtggtaaatgtaaattttttattttggggttcggttcgtttttttttttttttggtattttgtttgtagattaaatgtttgtcgtgcgtcgggggaga

SEQ ID NO: 31538 - DNA, 500 bp, Artificial Sequence
  chemically treated genomic DNA (Homo sapiens) CpG-island No: 31538
tctcccccgacgcacgacaaacatttaatctacaaacaaaataccaaaaaaaaaaaaaaacgaaccgaaccccaaaataaaaaatttacatttaccacgacgcctcgcccgtaatctaacgcctcctcgctactcccgaccatatttctcccgaaaaacgcgaaaaaaaaaaacgacgcgaaaaaaaacaaaaaaaacgaaaactacgtaaaaaataaaacgtaaaaataaaaacgaaaacgaaaacgaaaacgaaaacgaaaacgaatccgccccgccccgaacccgccgacgaaaaacaacgacctaacgcgaatccataaccccgacgctacgccccctcccctaactaaaccgcgaaaacgcgaaaaacaactaccaaaccgctaccgctccccctaaacgcgaaccccgaacgcgtcccttacgaccgccgctatcgccgccgccccctaccgaataatcgcgtacaacccccgaccccgccgccaaaccccgcg

SEQ ID NO: 31539 - DNA, 500 bp, Artificial Sequence
  chemically treated genomic DNA (Homo sapiens) CpG-island No: 31539
tttttttcgacgtacggtaagtatttaatttataagtagggtgttagggagggaggggagcgggtcgagttttaaaatagggagtttgtatttattacgacgtttcgttcgtagtttggcgttttttcgttgttttcggttatgtttttttcggggaacgcgggaagggaagacggcgcgggaaggagtagggagggcgaaggttgcgtgggggatgggacgtggggatggggacggggacggggacggggacggggacggggacgggttcgtttcgtttcgggttcgtcggcgggaagtagcggtttgacgcggatttatggtttcggcgttgcgtttttttttttggttaggtcgcgggggcgcggggagtagttgttaagtcgttatcgttttttttgagcgcgggtttcggacgcgttttttgcggtcgtcgttgtcgtcgtcgttttttgtcggatggtcgcgtgtagttttcggtttcgtcgttaagtttcgcg

SEQ ID NO: 31540 - DNA, 500 bp, Artificial Sequence
  chemically treated genomic DNA (Homo sapiens) CpG-island No: 31540
cgcgaaacttaacgacgaaaccgaaaactacacgcgaccatccgacaaaaaacgacgacgacaacgacgaccgcaaaaaacgcgtccgaaacccgcgctcaaaaaaaacgataacgacttaacaactactccccgcgcccccgcgacctaaccaaaaaaaaaaacgcaacgccgaaaccataaatccgcgtcaaaccgctacttcccgccgacgaacccgaaacgaaacgaacccgtccccgtccccgtccccgtccccgtccccgtccccatccccacgtcccatcccccacgcaaccttcgccctccctactccttcccgcgccgtcttcccttcccgcgttccccgaaaaaaacataaccgaaaacaacgaaaaaacgccaaactacgaacgaaacgtcgtaataaatacaaactccctattttaaaactcgacccgctcccctccctccctaacaccctacttataaattaaatacttaccgtacgtcgaaaaaaa

SEQ ID NO: 31541 - DNA, 570 bp, Artificial Sequence
  chemically treated genomic DNA (Homo sapiens) CpG-island No: 31541
acgcgcgcgtatattcgtacgtttagggttatatttatacgtcgttttttacgattatatagtattagatttcggttttttatgtttttggatggtgacggcggattggtattttggaagcgatgcgagagcgataaggttggcgtcggttcgtaaaagttgtaggagtatcgttaggtgttgtcgttatcgggaagcggggttgtaggtaggtgcgagtcgcgtttcgggtcgtcggttagcgttggggatcggagcggtaattgtaggatcgcggtttcggaagttttcgtgtgtatacgtttttttttttttttttcgggggttcgggattgtagagggatcgttcggggaaggcgagaggtgagggtagatgcgggtttatcggtcggcgtttttttcgcgggcggttagggtaggggcggagtagagggacgtcgagaggggatcggagtatgcgaaatgaggtttcgtgagcggtgttttttttttttgttttattttttttaataatagtaaacgattaggtcgaggattgaagtgggttgtaattcgattttttatttagat

SEQ ID NO: 31542 - DNA, 570 bp, Artificial Sequence
  chemically treated genomic DNA (Homo sapiens) CpG-island No: 31542
atctaaataaaaaatcgaattacaacccacttcaatcctcgacctaatcgtttactattattaaaaaaaataaaacaaaaaaaaaaaacaccgctcacgaaacctcatttcgcatactccgatcccctctcgacgtccctctactccgcccctaccctaaccgcccgcgaaaaaaacgccgaccgataaacccgcatctaccctcacctctcgccttccccgaacgatccctctacaatcccgaacccccgaaaaaaaaaaaaaaaaacgtatacacacgaaaacttccgaaaccgcgatcctacaattaccgctccgatccccaacgctaaccgacgacccgaaacgcgactcgcacctacctacaaccccgcttcccgataacgacaacacctaacgatactcctacaacttttacgaaccgacgccaaccttatcgctctcgcatcgcttccaaaataccaatccgccgtcaccatccaaaaacataaaaaaccgaaatctaatactatataatcgtaaaaaacgacgtataaatataaccctaaacgtacgaatatacgcgcgcgt

SEQ ID NO: 31543 - DNA, 570 bp, Artificial Sequence
  chemically treated genomic DNA (Homo sapiens) CpG-island No: 31543
gtttgggtgaggaatcgaattataatttattttaattttcgatttggtcgtttgttgttattaggagaaatggggtagagagggagggtatcgtttacggagttttatttcgtatgtttcgattttttttcggcgtttttttatttcgtttttattttgatcgttcgcgagggagacgtcggtcgatggattcgtatttgtttttatttttcgtttttttcgggcgatttttttatagtttcggattttcgagaaaggggaagggagacgtgtgtatacgggggttttcgggatcgcggttttgtagttgtcgtttcggtttttagcgttggtcggcgattcgaggcgcggttcgtatttatttgtagtttcgtttttcggtggcggtaatatttagcgatgtttttgtagtttttgcgggtcggcgttagttttatcgttttcgtatcgtttttaagatgttaattcgtcgttattatttaggggtatagggaatcgaagtttggtgttgtgtgatcgtggagggcggcgtgtgagtgtggttttgagcgtgcgagtgtgcgcgcgcgt

SEQ ID NO: 31544 - DNA, 570 bp, Artificial Sequence
  chemically treated genomic DNA (Homo sapiens) CpG-island No: 31544
acgcgcgcgcacactcgcacgctcaaaaccacactcacacgccgccctccacgatcacacaacaccaaacttcgattccctatacccctaaataataacgacgaattaacatcttaaaaacgatacgaaaacgataaaactaacgccgacccgcaaaaactacaaaaacatcgctaaatattaccgccaccgaaaaacgaaactacaaataaatacgaaccgcgcctcgaatcgccgaccaacgctaaaaaccgaaacgacaactacaaaaccgcgatcccgaaaacccccgtatacacacgtctcccttcccctttctcgaaaatccgaaactataaaaaaatcgcccgaaaaaaacgaaaaataaaaacaaatacgaatccatcgaccgacgtctccctcgcgaacgatcaaaataaaaacgaaataaaaaaacgccgaaaaaaaatcgaaacatacgaaataaaactccgtaaacgataccctccctctctaccccatttctcctaataacaacaaacgaccaaatcgaaaattaaaataaattataattcgattcctcacccaaac

SEQ ID NO: 31545 - DNA, 528 bp, Artificial Sequence
  chemically treated genomic DNA (Homo sapiens) CpG-island No: 31545
gaagtcgcgtaggtttttcgagttttattttgcgttaggagagttacggtagtaggaacgggtattgttgttatcgggtcgacgggtgagttattgtttggaaatggagtgggcgggcgagggtgtgagagaatgaatgatgttaagagcgcgttgggcgtagggcgtagggagcgggtcgcgcgcggcgggcggggagagcgggcgcggggtcgcggttaatattgagcgtcgcgtcgtgggtcgagtggggcggggagatttagttttcggcgcgtacggagtttggtcggtgttgtagcgtcgtcgagtgcggtttcgggggcggcggtcgcgggagggattcggagagttgttttttttagttaggtcgcggcgtgggagggcgagatttcgagtaaattttttagcggtttcggttcgagggtggtgacgttcggggttggtcgcggcggttgcggtagcgggttttattttttggtaaatttttttttcgggagtaagtgtttttagttgggagtgtttgga

SEQ ID NO: 31546 - DNA, 528 bp, Artificial Sequence
  chemically treated genomic DNA (Homo sapiens) CpG-island No: 31546
tccaaacactcccaactaaaaacacttactcccgaaaaaaaaatttaccaaaaaataaaacccgctaccgcaaccgccgcgaccaaccccgaacgtcaccaccctcgaaccgaaaccgctaaaaaatttactcgaaatctcgccctcccacgccgcgacctaactaaaaaaaacaactctccgaatccctcccgcgaccgccgcccccgaaaccgcactcgacgacgctacaacaccgaccaaactccgtacgcgccgaaaactaaatctccccgccccactcgacccacgacgcgacgctcaatattaaccgcgaccccgcgcccgctctccccgcccgccgcgcgcgacccgctccctacgccctacgcccaacgcgctcttaacatcattcattctctcacaccctcgcccgcccactccatttccaaacaataactcacccgtcgacccgataacaacaatacccgttcctactaccgtaactctcctaacgcaaaataaaactcgaaaaacctacgcgacttc

SEQ ID NO: 31547 - DNA, 528 bp, Artificial Sequence
  chemically treated genomic DNA (Homo sapiens) CpG-island No: 31547
tttagatatttttagttgaaggtatttgttttcgggaaggggatttgttaggggatggagttcgttgtcgtagtcgtcgcgattagtttcgggcgttattattttcgggtcgaagtcgttagaaagtttgttcggggtttcgtttttttacgtcgcggtttgattaggggaagtagtttttcgggtttttttcgcggtcgtcgttttcgaggtcgtattcggcggcgttgtagtatcggttaggtttcgtgcgcgtcgagggttgggttttttcgttttattcggtttacggcgcggcgtttagtgttgatcgcggtttcgcgttcgtttttttcgttcgtcgcgcgcggttcgttttttgcgttttgcgtttagcgcgtttttgatattatttatttttttatattttcgttcgtttattttatttttaaatagtgatttattcgtcggttcggtggtagtagtgttcgtttttgttgtcgtggtttttttggcgtagagtggagttcgaaaaatttgcgcgatttt

SEQ ID NO: 31548 - DNA, 528 bp, Artificial Sequence
  chemically treated genomic DNA (Homo sapiens) CpG-island No: 31548
aaaatcgcgcaaatttttcgaactccactctacgccaaaaaaaccacgacaacaaaaacgaacactactaccaccgaaccgacgaataaatcactatttaaaaataaaataaacgaacgaaaatataaaaaaataaataatatcaaaaacgcgctaaacgcaaaacgcaaaaaacgaaccgcgcgcgacgaacgaaaaaaacgaacgcgaaaccgcgatcaacactaaacgccgcgccgtaaaccgaataaaacgaaaaaacccaaccctcgacgcgcacgaaacctaaccgatactacaacgccgccgaatacgacctcgaaaacgacgaccgcgaaaaaaacccgaaaaactacttcccctaatcaaaccgcgacgtaaaaaaacgaaaccccgaacaaactttctaacgacttcgacccgaaaataataacgcccgaaactaatcgcgacgactacgacaacgaactccatcccctaacaaatccccttcccgaaaacaaataccttcaactaaaaatatctaaa

SEQ ID NO: 31549 - DNA, 542 bp, Artificial Sequence
  chemically treated genomic DNA (Homo sapiens) CpG-island No: 31549
ggatgtttcgcgttcggcgttttcgtagttagttttagtttagtagcgttacgaggtcgtatagtagtagcgcgttttcgttggggtttagtcgtagtagttttagaggcgtacgtaggaggcgcgcgggttagggcgggttttcggtcggcggttgcgacggtttcggagacgatatggttcgggcgtcggcggtttcgggttttttttgttgtttggaggagacgcgtacgtagttgtttgattcgcggcgttagtgttttgttttgttttggaaggtcgggggcgggtagggggtgtaggaacgttttcggattggttgcgtcgcgcgtatttttttcgtcgtcgttatttagcgacgtttgggcggaatttggaggcgcgtcggttgtttggcggagggggttggcgggttagtaggcgggggatttgaagtttgtttcgaagttcggttacgattttttgtagggtcgggtttggcggtgattgtttttgaaattgggatgttggtaatataattttgcgttttgattggttgttgg

SEQ ID NO: 31550 - DNA, 542 bp, Artificial Sequence
  chemically treated genomic DNA (Homo sapiens) CpG-island No: 31550
ccaacaaccaatcaaaacgcaaaattatattaccaacatcccaatttcaaaaacaatcaccgccaaacccgaccctacaaaaaatcgtaaccgaacttcgaaacaaacttcaaatcccccgcctactaacccgccaaccccctccgccaaacaaccgacgcgcctccaaattccgcccaaacgtcgctaaataacgacgacgaaaaaaatacgcgcgacgcaaccaatccgaaaacgttcctacaccccctacccgcccccgaccttccaaaacaaaacaaaacactaacgccgcgaatcaaacaactacgtacgcgtctcctccaaacaacaaaaaaaacccgaaaccgccgacgcccgaaccatatcgtctccgaaaccgtcgcaaccgccgaccgaaaacccgccctaacccgcgcgcctcctacgtacgcctctaaaactactacgactaaaccccaacgaaaacgcgctactactatacgacctcgtaacgctactaaactaaaactaactacgaaaacgccgaacgcgaaacatcc

SEQ ID NO: 31551 - DNA, 542 bp, Artificial Sequence
  chemically treated genomic DNA (Homo sapiens) CpG-island No: 31551
ttaatagttaattagagcgtaaggttgtgttgttagtattttagttttagggatagttatcgttaagttcgattttgtaaagggtcgtaatcggatttcggggtaaattttaggtttttcgtttgttagttcgttaatttttttcgttaggtagtcggcgcgtttttaggtttcgtttaggcgtcgttgagtggcggcggcggggagaatgcgcgcggcgtagttaattcgggggcgtttttatattttttgttcgttttcgattttttagagtagagtaggatattggcgtcgcgggttaggtagttgcgtgcgcgttttttttaggtagtaaggggaattcgaggtcgtcggcgttcggattatgtcgttttcggggtcgtcgtagtcgtcggtcgaggattcgttttggttcgcgcgttttttgcgtgcgtttttggggttgttgcggttggattttagcgggggcgcgttgttgttatgcggtttcgtagcgttgttgggttggagttggttgcggaggcgtcgggcgcggggtattt

SEQ ID NO: 31552 - DNA, 542 bp, Artificial Sequence
  chemically treated genomic DNA (Homo sapiens) CpG-island No: 31552
aaataccccgcgcccgacgcctccgcaaccaactccaacccaacaacgctacgaaaccgcataacaacaacgcgcccccgctaaaatccaaccgcaacaaccccaaaaacgcacgcaaaaaacgcgcgaaccaaaacgaatcctcgaccgacgactacgacgaccccgaaaacgacataatccgaacgccgacgacctcgaattccccttactacctaaaaaaaacgcgcacgcaactacctaacccgcgacgccaatatcctactctactctaaaaaatcgaaaacgaacaaaaaatataaaaacgcccccgaattaactacgccgcgcgcattctccccgccgccgccactcaacgacgcctaaacgaaacctaaaaacgcgccgactacctaacgaaaaaaattaacgaactaacaaacgaaaaacctaaaatttaccccgaaatccgattacgaccctttacaaaatcgaacttaacgataactatccctaaaactaaaatactaacaacacaaccttacgctctaattaactattaa

SEQ ID NO: 31553 - DNA, 856 bp, Artificial Sequence
  chemically treated genomic DNA (Homo sapiens) CpG-island No: 31553
gtggggaggaggtaggaggcggttgcgcggggttggcgcgggtaggggcggaggacgggcgtacgcgggtcggggttagttgttcgcgttcggttcgggggcggcggcgcgggaggagcgggttgcgttagttagaggggtcgtcgggggagcgttttcgtcgtcgggtttcgcgggtcgagtcggttttgtattcgattgatttcgttttttttggagagagcggtcgggtcgcgttcgggtcgttagtatttgttcgcgtttggcgggtttttttttttttttgcgcgtagttatcgtcgtagtttttatgtttttcgttttcgtcgtttttcggtggttttcgtttttgttgttgttgttgttgttgttgtcgttggttcgcggcgtttcggttcggttcgtagtcggggggtaggtttcggagttggtggtgtttacgcggttgttcggtagcgcgggcgagttcgcgttttatttgttcgttttcggtaagggtttcgtgttgcgtttggcgttcgacgatagttttttagcgttcgagtttaagatcgagcgtttcgggggtttcggtcgggcgatcgggggcgagcgggggttgcgcggttgtttttttttcggtatcgtgaatggggagttcgagtcgttggcggcggttagtttgtgtcgcgggttgagcggtttttttttgttggacggcgaggagtttattatttagtcgtagggcgcggggggttttttggtttagtcgtatcgtttgtagcgttggggtttcgtcggagttcgttttttttcgcgaggattcgagtgggaggtggagacgggagagggttagaggtaggagagaggagattat

SEQ ID NO: 31554 - DNA, 856 bp, Artificial Sequence
  chemically treated genomic DNA (Homo sapiens) CpG-island No: 31554
ataatctcctctctcctacctctaaccctctcccgtctccacctcccactcgaatcctcgcgaaaaaaaacgaactccgacgaaaccccaacgctacaaacgatacgactaaaccaaaaaaccccccgcgccctacgactaaataataaactcctcgccgtccaacaaaaaaaaaccgctcaacccgcgacacaaactaaccgccgccaacgactcgaactccccattcacgataccgaaaaaaaaacaaccgcgcaacccccgctcgcccccgatcgcccgaccgaaacccccgaaacgctcgatcttaaactcgaacgctaaaaaactatcgtcgaacgccaaacgcaacacgaaacccttaccgaaaacgaacaaataaaacgcgaactcgcccgcgctaccgaacaaccgcgtaaacaccaccaactccgaaacctaccccccgactacgaaccgaaccgaaacgccgcgaaccaacgacaacaacaacaacaacaacaacaaaaacgaaaaccaccgaaaaacgacgaaaacgaaaaacataaaaactacgacgataactacgcgcaaaaaaaaaaaaaaacccgccaaacgcgaacaaatactaacgacccgaacgcgacccgaccgctctctccaaaaaaaacgaaatcaatcgaatacaaaaccgactcgacccgcgaaacccgacgacgaaaacgctcccccgacgacccctctaactaacgcaacccgctcctcccgcgccgccgcccccgaaccgaacgcgaacaactaaccccgacccgcgtacgcccgtcctccgcccctacccgcgccaaccccgcgcaaccgcctcctacctcctccccac

SEQ ID NO: 31555 - DNA, 856 bp, Artificial Sequence
  chemically treated genomic DNA (Homo sapiens) CpG-island No: 31555
gtggtttttttttttttgtttttgattttttttcgtttttattttttattcgggttttcgcgggagggggcgggtttcggcgggattttagcgttgtaggcggtgcggttgagttagggagtttttcgcgttttgcggttggatggtgaatttttcgtcgtttagtaggaaggagtcgtttagttcgcggtataggttgatcgtcgttagcgattcgggttttttatttacggtgtcggagaagaagtagtcgcgtagttttcgttcgttttcggtcgttcggtcggagttttcgaggcgttcgattttgaattcgggcgttaggaagttgtcgtcgggcgttaggcgtagtacgaagtttttgtcgaaggcggataggtggagcgcgagttcgttcgcgttgtcgggtaatcgcgtgggtattattagtttcgaggtttgtttttcggttgcgggtcgggtcggggcgtcgcgggttagcggtagtagtagtagtagtagtagtaggagcggaggttatcggggggcggcgggggcggggagtatgggggttgcggcggtggttgcgcgtaggagagggaagaagttcgttaggcgcgggtaggtgttggcggttcgagcgcggttcggtcgttttttttaggaaaagcggaattaatcgggtgtaaggtcgattcggttcgcggggttcggcggcgggagcgttttttcggcggtttttttggttggcgtagttcgtttttttcgcgtcgtcgttttcgagtcgagcgcgagtagttggtttcggttcgcgtgcgttcgtttttcgtttttgttcgcgttagtttcgcgtagtcgttttttgttttttttttat

SEQ ID NO: 31556 - DNA, 856 bp, Artificial Sequence
  chemically treated genomic DNA (Homo sapiens) CpG-island No: 31556
ataaaaaaaaaacaaaaaacgactacgcgaaactaacgcgaacaaaaacgaaaaacgaacgcacgcgaaccgaaaccaactactcgcgctcgactcgaaaacgacgacgcgaaaaaaacgaactacgccaaccaaaaaaaccgccgaaaaaacgctcccgccgccgaaccccgcgaaccgaatcgaccttacacccgattaattccgcttttcctaaaaaaaacgaccgaaccgcgctcgaaccgccaacacctacccgcgcctaacgaacttcttccctctcctacgcgcaaccaccgccgcaacccccatactccccgcccccgccgccccccgataacctccgctcctactactactactactactactaccgctaacccgcgacgccccgacccgacccgcaaccgaaaaacaaacctcgaaactaataatacccacgcgattacccgacaacgcgaacgaactcgcgctccacctatccgccttcgacaaaaacttcgtactacgcctaacgcccgacgacaacttcctaacgcccgaattcaaaatcgaacgcctcgaaaactccgaccgaacgaccgaaaacgaacgaaaactacgcgactacttcttctccgacaccgtaaataaaaaacccgaatcgctaacgacgatcaacctataccgcgaactaaacgactccttcctactaaacgacgaaaaattcaccatccaaccgcaaaacgcgaaaaactccctaactcaaccgcaccgcctacaacgctaaaatcccgccgaaacccgccccctcccgcgaaaacccgaataaaaaataaaaacgaaaaaaaatcaaaaacaaaaaaaaaaaaaccac

SEQ ID NO: 31557 - DNA, 610 bp, Artificial Sequence
  chemically treated genomic DNA (Homo sapiens) CpG-island No: 31557
gggttcggagttacgatttttaagaagtagtattttgattataacgatgttgatggggttgaggatgttgggatggcggtagagtcgcgtcgtcgttgttagtagcgttagtagataatgttttaggttcgcgtcgtggaatttgattattgattcgttcgcgattattagcgtttttacgtatcgcgggatagatacgaaacgtttggcgcgtttagatttgcgtcggttacgatttttttcgaagttcgttcgtcgcggtttgtaagggtttagggttcgtaggatggcggggttttagttcgaggttatttcgtagcgagaggtggggttttcggaaggttcgttcggaatatttcggcgttggagaaggtgtgcgttttggttgttgcgttgcgtcgtcggcgcgttagtattgggtagcgggttaatgatatattcggcgtttcggtagttaaaggtttcgcggagtttttcgtataggtttatagtagcgaacgagttcggttcggcgtttacgtttttagaatagaagtagcgtcgtaggtttgaagagttttcggtgagtttttggagggggacgtttagatgtttagtggagaaggcggga

SEQ ID NO: 31558 - DNA, 610 bp, Artificial Sequence
  chemically treated genomic DNA (Homo sapiens) CpG-island No: 31558
tcccgccttctccactaaacatctaaacgtccccctccaaaaactcaccgaaaactcttcaaacctacgacgctacttctattctaaaaacgtaaacgccgaaccgaactcgttcgctactataaacctatacgaaaaactccgcgaaacctttaactaccgaaacgccgaatatatcattaacccgctacccaatactaacgcgccgacgacgcaacgcaacaaccaaaacgcacaccttctccaacgccgaaatattccgaacgaaccttccgaaaaccccacctctcgctacgaaataacctcgaactaaaaccccgccatcctacgaaccctaaacccttacaaaccgcgacgaacgaacttcgaaaaaaatcgtaaccgacgcaaatctaaacgcgccaaacgtttcgtatctatcccgcgatacgtaaaaacgctaataatcgcgaacgaatcaataatcaaattccacgacgcgaacctaaaacattatctactaacgctactaacaacgacgacgcgactctaccgccatcccaacatcctcaaccccatcaacatcgttataatcaaaatactacttcttaaaaatcgtaactccgaaccc

SEQ ID NO: 31559 - DNA, 610 bp, Artificial Sequence
  chemically treated genomic DNA (Homo sapiens) CpG-island No: 31559
tttcgttttttttattgagtatttgggcgtttttttttaggggtttatcgggggttttttagatttgcgacgttgtttttattttggggacgtgaacgtcgagtcggattcgttcgttgttgtgagtttgtgcggggggtttcgcggagtttttggttatcgaggcgtcgagtatgttattagttcgttgtttaatgttagcgcgtcggcggcgtagcgtaatagttagggcgtatattttttttagcgtcggggtgtttcgggcgggtttttcggagattttatttttcgttgcggggtggtttcgggttggaatttcgttattttacgggttttggatttttataagtcgcggcgggcgggtttcggggagagtcgtagtcggcgtaggtttgggcgcgttaagcgtttcgtgtttatttcgcggtacgtggagacgttggtggtcgcggacgagttaatggttaagttttacggcgcggatttggaatattatttgttgacgttgttggtaacggcggcgcgattttatcgttattttagtatttttaattttattaatatcgttgtggttaaggtgttgttttttagagatcgtgatttcgggttt

SEQ ID NO: 31560 - DNA, 610 bp, Artificial Sequence
  chemically treated genomic DNA (Homo sapiens) CpG-island No: 31560
aaacccgaaatcacgatctctaaaaaacaacaccttaaccacaacgatattaataaaattaaaaatactaaaataacgataaaatcgcgccgccgttaccaacaacgtcaacaaataatattccaaatccgcgccgtaaaacttaaccattaactcgtccgcgaccaccaacgtctccacgtaccgcgaaataaacacgaaacgcttaacgcgcccaaacctacgccgactacgactctccccgaaacccgcccgccgcgacttataaaaatccaaaacccgtaaaataacgaaattccaacccgaaaccaccccgcaacgaaaaataaaatctccgaaaaacccgcccgaaacaccccgacgctaaaaaaaatatacgccctaactattacgctacgccgccgacgcgctaacattaaacaacgaactaataacatactcgacgcctcgataaccaaaaactccgcgaaaccccccgcacaaactcacaacaacgaacgaatccgactcgacgttcacgtccccaaaataaaaacaacgtcgcaaatctaaaaaacccccgataaacccctaaaaaaaaacgcccaaatactcaataaaaaaaacgaaa

SEQ ID NO: 31561 - DNA, 1477 bp, Artificial Sequence
  chemically treated genomic DNA (Homo sapiens) CpG-island No: 31561
agggcgaggtttaagcgttggttagtggtcggcgcgaacgttggagttataggagtttcggttcgagatatcggagttagtagtagggtcgcgaacgcgatgtcggggaggttagttgtttgcggttggcgatcgtgaggaagcggtttcgttttagtacgtgtttcggttcggatttcgtttcgggcgtttttcggttattcggagttcgcggagtagtttcgtcggtggcgagggcgggggaggttattcggagtagggtttcgaaatttcgcgggaaggggtcgcggtttaggattttaggttttagggtgggatgtggaatacgcgtacgtatatatattcgatatatcgtttatatttcgacgagtatacggatatataaatataggtttcgtatatatatatttagttgcgcgtatatatatacgcgtacgtatattaaagatattagatttcgaaatatattcggagaacgcgattatatagtagataagcgcggagttatacgtttatatttacgtttatatttaagtatatatttggcggtttcggtcggtcgggaggtcgtataaagttgtaggttttattaagggagtgtttcgggaggttcgggcgtttttcgcgcgttttgcgcgttaagggagggggcgtcgtttttcggcggcgagttaggttttgttcgcgttcggacgtcgtagtttagttcggggatagttttcgttcggtcgttcggggcgtagtcgcggttcggttatcgtaggagcgttcgtcggttcggtttttttttgttcgttcgtcggtttttcgttggggttcgttggttcgggcgtttcgtagtttcggcgtcgtttcggattagtcgttcgttagcgtcgcgcggaatttgcgaaataataaatagttcgatatgttcgaggcggcggtcgcggggttcggtttttttttgagtttcgggttttgttcgattcgggtagtttagggggcgtcgtcgcgataatttgtttcggtttagcgcgttatatacgcgtatacgtatacgcgcgtatatacgttttgttatcgttttttcgggcggtttcgggattagggtatattcgtagtcgcggtttaggcgcgttttatattcgtaatatttttggacgcgtagttagtatatacggatatattcgtatatatttatattcgttttagattcgtttttatatacgtattttcggtatatttggtatttattcggatttacgcggttttcggtagtatatattatatattttagatattttttatacgtatatagcgtacggatatatacgtttcggattcgtttttacgtttttatatatgtatacggattttaaaagtatatacgttatatacgcgttttcggatttatatttaggcgggatttagagagtatttttggttataggtataatataaatatataatttattcgtagatataaaataaatag

SEQ ID NO: 31562 - DNA, 1477 bp, Artificial Sequence
  chemically treated genomic DNA (Homo sapiens) CpG-island No: 31562
ctatttattttatatctacgaataaattatatatttatattatacctataaccaaaaatactctctaaatcccgcctaaatataaatccgaaaacgcgtatataacgtatatacttttaaaatccgtatacatatataaaaacgtaaaaacgaatccgaaacgtatatatccgtacgctatatacgtataaaaaatatctaaaatatataatatatactaccgaaaaccgcgtaaatccgaataaataccaaatataccgaaaatacgtatataaaaacgaatctaaaacgaatataaatatatacgaatatatccgtatatactaactacgcgtccaaaaatattacgaatataaaacgcgcctaaaccgcgactacgaatataccctaatcccgaaaccgcccgaaaaaacgataacaaaacgtatatacgcgcgtatacgtatacgcgtatataacgcgctaaaccgaaacaaattatcgcgacgacgccccctaaactacccgaatcgaacaaaacccgaaactcaaaaaaaaaccgaaccccgcgaccgccgcctcgaacatatcgaactatttattatttcgcaaattccgcgcgacgctaacgaacgactaatccgaaacgacgccgaaactacgaaacgcccgaaccaacgaaccccaacgaaaaaccgacgaacgaacaaaaaaaaaccgaaccgacgaacgctcctacgataaccgaaccgcgactacgccccgaacgaccgaacgaaaactatccccgaactaaactacgacgtccgaacgcgaacaaaacctaactcgccgccgaaaaacgacgccccctcccttaacgcgcaaaacgcgcgaaaaacgcccgaacctcccgaaacactcccttaataaaacctacaactttatacgacctcccgaccgaccgaaaccgccaaatatatacttaaatataaacgtaaatataaacgtataactccgcgcttatctactatataatcgcgttctccgaatatatttcgaaatctaatatctttaatatacgtacgcgtatatatatacgcgcaactaaatatatatatacgaaacctatatttatatatccgtatactcgtcgaaatataaacgatatatcgaatatatatacgtacgcgtattccacatcccaccctaaaacctaaaatcctaaaccgcgaccccttcccgcgaaatttcgaaaccctactccgaataacctcccccgccctcgccaccgacgaaactactccgcgaactccgaataaccgaaaaacgcccgaaacgaaatccgaaccgaaacacgtactaaaacgaaaccgcttcctcacgatcgccaaccgcaaacaactaacctccccgacatcgcgttcgcgaccctactactaactccgatatctcgaaccgaaactcctataactccaacgttcgcgccgaccactaaccaacgcttaaacctcgccct

SEQ ID NO: 31563 - DNA, 1477 bp, Artificial Sequence
  chemically treated genomic DNA (Homo sapiens) CpG-island No: 31563
ttgtttgttttgtgtttgcgagtgggttgtgtgtttgtgttatgtttgtggttaagggtgttttttggatttcgtttgagtgtggattcgggaacgcgtgtgtggcgtgtgtgtttttgagattcgtgtatatgtgtgaaggcgtgggaacgggttcggaacgtgtgtgttcgtgcgttgtgtacgtgtggggagtgtttagggtatgtggtgtgtgttgtcgggggtcgcgtgggttcgagtgaatgttaagtgtgtcgggaatgcgtgtgtgggagcgagtttggaacggatgtgagtgtgtgcgaatgtgttcgtgtgtgttggttgcgcgtttaggaatgttgcgagtgtggagcgcgtttgggtcgcggttgcgagtgtgttttggtttcggggtcgttcgagggggcggtggtaggacgtgtgtgcgcgcgtgtgcgtgtgcgcgtgtgtggcgcgttgggtcggaataagttgtcgcggcggcgttttttgggttgttcgggtcgggtagggttcgaggtttaggggaggatcgggtttcgcggtcgtcgtttcgggtatgtcggattgtttgttgtttcgtaagtttcgcgcggcgttggcgggcggttgattcgaggcggcgtcggggttgcggggcgttcgggttagcgggttttagcgaggggtcggcgggcgggtaggggagggtcggatcggcgggcgtttttgcggtggtcgggtcgcggttgcgtttcgggcggtcgggcgggggttgttttcgggttgggttgcgacgttcgggcgcgggtagggtttggttcgtcgtcgggggacggcgtttttttttttggcgcgtaggacgcgcgggggacgttcgggtttttcgggatatttttttggtggagtttgtaattttgtgcggtttttcggtcggtcgggatcgttaggtgtgtgtttgagtgtgagcgtgagtgtgagcgtgtggtttcgcgtttgtttgttgtgtggtcgcgtttttcgggtgtgtttcggagtttggtgtttttggtgtgcgtgcgcgtgtgtgtgtgcgcgtagttgaatgtatgtatacggagtttgtgtttgtgtgttcgtgtgttcgtcggagtgtggacggtgtgtcggatgtgtgtgcgtgcgcgtgttttatattttattttgaggtttgggattttagatcgcggttttttttcgcggagtttcggggttttgtttcgggtgatttttttcgttttcgttatcggcggggttgtttcgcgggtttcgggtagtcgggagacgttcggggcgggattcgagtcgagatacgtgttggagcggagtcgtttttttacggtcgttagtcgtagataattgattttttcggtatcgcgttcgcggttttgttgttggtttcggtgtttcgggtcggaatttttgtggttttagcgttcgcgtcggttattggttagcgtttgggtttcgtttt

SEQ ID NO: 31564 - DNA, 1477 bp, Artificial Sequence
  chemically treated genomic DNA (Homo sapiens) CpG-island No: 31564
aaaacgaaacccaaacgctaaccaataaccgacgcgaacgctaaaaccacaaaaattccgacccgaaacaccgaaaccaacaacaaaaccgcgaacgcgataccgaaaaaatcaattatctacgactaacgaccgtaaaaaaacgactccgctccaacacgtatctcgactcgaatcccgccccgaacgtctcccgactacccgaaacccgcgaaacaaccccgccgataacgaaaacgaaaaaaatcacccgaaacaaaaccccgaaactccgcgaaaaaaaaccgcgatctaaaatcccaaacctcaaaataaaatataaaacacgcgcacgcacacacatccgacacaccgtccacactccgacgaacacacgaacacacaaacacaaactccgtatacatacattcaactacgcgcacacacacacgcgcacgcacaccaaaaacaccaaactccgaaacacacccgaaaaacgcgaccacacaacaaacaaacgcgaaaccacacgctcacactcacgctcacactcaaacacacacctaacgatcccgaccgaccgaaaaaccgcacaaaattacaaactccaccaaaaaaatatcccgaaaaacccgaacgtcccccgcgcgtcctacgcgccaaaaaaaaaaacgccgtcccccgacgacgaaccaaaccctacccgcgcccgaacgtcgcaacccaacccgaaaacaacccccgcccgaccgcccgaaacgcaaccgcgacccgaccaccgcaaaaacgcccgccgatccgaccctcccctacccgcccgccgacccctcgctaaaacccgctaacccgaacgccccgcaaccccgacgccgcctcgaatcaaccgcccgccaacgccgcgcgaaacttacgaaacaacaaacaatccgacatacccgaaacgacgaccgcgaaacccgatcctcccctaaacctcgaaccctacccgacccgaacaacccaaaaaacgccgccgcgacaacttattccgacccaacgcgccacacacgcgcacacgcacacgcgcgcacacacgtcctaccaccgccccctcgaacgaccccgaaaccaaaacacactcgcaaccgcgacccaaacgcgctccacactcgcaacattcctaaacgcgcaaccaacacacacgaacacattcgcacacactcacatccgttccaaactcgctcccacacacgcattcccgacacacttaacattcactcgaacccacgcgacccccgacaacacacaccacataccctaaacactccccacacgtacacaacgcacgaacacacacgttccgaacccgttcccacgccttcacacatatacacgaatctcaaaaacacacacgccacacacgcgttcccgaatccacactcaaacgaaatccaaaaaacacccttaaccacaaacataacacaaacacacaacccactcgcaaacacaaaacaaacaa

SEQ ID NO: 31565 - DNA, 833 bp, Artificial Sequence
  chemically treated genomic DNA (Homo sapiens) CpG-island No: 31565
ttcgtcgatatatattatttttttttgcgtatagaatttacggatatataatattcgtagttacgtaatatttcgggtatataatcgtttattttacgtttagatatatatagggagtacgttcgtaacgttcggttatttaatatttatattttttttcgagttacgttacgggtttcgaggttcggcggggtaggttcggttcggtcgtcgcgcgtttatttgtcggagtttcggttttcggcgcgtagagttggaaggtgagtgttagtacgagcgtttgggtacgggttatggttggagcgtcgtcgttcgtttcggggttcggcgcgggggacgtcgttttcggagttcgagtttagttcgaggcgagtcggagttcgagtcggagcggagcggcgcggcgcggagcgggattggcgtcgagtttagagcgggagtcggagtaagcggggcgttgacgttaggttcggtcgcgggttcggcggtttcgcggcgttttttgttggttacggcgggtgttgtagcgggttcggtcgttcgttagttttggcgcgtttttttttcgttttcgtatttttttcgttatgaggtttcgcggttgggtttggacgtttacggacgtttttacggatcgggtattaatattgttaggcgagtacgtttatggtttacgtttagttttcgtatagcgtttttagggacggtgatttagggatattcggtttttgttttattcgatgtttgaattttttgtattttggcgtttttaaatgcgtgttttatatatttttaggaatagggcgtttattatttggttaagagcggttgtt

SEQ ID NO: 31566 - DNA, 833 bp, Artificial Sequence
  chemically treated genomic DNA (Homo sapiens) CpG-island No: 31566
aacaaccgctcttaaccaaataataaacgccctattcctaaaaatatataaaacacgcatttaaaaacgccaaaatacaaaaaattcaaacatcgaataaaacaaaaaccgaatatccctaaatcaccgtccctaaaaacgctatacgaaaactaaacgtaaaccataaacgtactcgcctaacaatattaatacccgatccgtaaaaacgtccgtaaacgtccaaacccaaccgcgaaacctcataacgaaaaaaatacgaaaacgaaaaaaaaacgcgccaaaactaacgaacgaccgaacccgctacaacacccgccgtaaccaacaaaaaacgccgcgaaaccgccgaacccgcgaccgaacctaacgtcaacgccccgcttactccgactcccgctctaaactcgacgccaatcccgctccgcgccgcgccgctccgctccgactcgaactccgactcgcctcgaactaaactcgaactccgaaaacgacgtcccccgcgccgaaccccgaaacgaacgacgacgctccaaccataacccgtacccaaacgctcgtactaacactcaccttccaactctacgcgccgaaaaccgaaactccgacaaataaacgcgcgacgaccgaaccgaacctaccccgccgaacctcgaaacccgtaacgtaactcgaaaaaaaatataaatattaaataaccgaacgttacgaacgtactccctatatatatctaaacgtaaaataaacgattatatacccgaaatattacgtaactacgaatattatatatccgtaaattctatacgcaaaaaaaaataatatatatcgacgaa

SEQ ID NO: 31567 - DNA, 833 bp, Artificial Sequence
  chemically treated genomic DNA (Homo sapiens) CpG-island No: 31567
aataatcgtttttggttaggtgatgagcgttttgtttttggaggtatgtagaatacgtatttgaaggcgttaaggtataagggatttaggtatcggatgggatagaggtcgggtgtttttgggttatcgtttttgagagcgttgtacgggagttaggcgtgggttatgagcgtgttcgtttggtagtgttggtgttcggttcgtggagacgttcgtgggcgtttagatttagtcgcggggttttatggcggggaggatgcgggagcgggggaggggcgcgttagggttagcgggcggtcggattcgttgtagtattcgtcgtggttagtagggagcgtcgcgagatcgtcgaattcgcggtcgggtttgacgttagcgtttcgtttgtttcggttttcgttttggattcggcgttagtttcgtttcgcgtcgcgtcgtttcgtttcggttcgggtttcggttcgtttcgggttgggttcgggtttcgggggcggcgtttttcgcgtcgggtttcgggacgggcggcgacgttttaattatggttcgtgtttaggcgttcgtgttggtatttattttttagttttgcgcgtcggagatcgagatttcggtaggtaagcgcgcggcggtcggatcgagtttgtttcgtcgagtttcggggttcgtggcgtagttcggaagaaagtgtgagtgttgagtgatcgggcgttacgagcgtgttttttgtgtgtgtttgagcgtaggatgggcgattgtgtgttcggggtgttgcgtgattgcgaatgttgtgtgttcgtgagttttgtgcgtaagaaaaggtgatgtgtgtcggcgag

SEQ ID NO: 31568 - DNA, 833 bp, Artificial Sequence
  chemically treated genomic DNA (Homo sapiens) CpG-island No: 31568
ctcgccgacacacatcaccttttcttacgcacaaaactcacgaacacacaacattcgcaatcacgcaacaccccgaacacacaatcgcccatcctacgctcaaacacacacaaaaaacacgctcgtaacgcccgatcactcaacactcacactttcttccgaactacgccacgaaccccgaaactcgacgaaacaaactcgatccgaccgccgcgcgcttacctaccgaaatctcgatctccgacgcgcaaaactaaaaaataaataccaacacgaacgcctaaacacgaaccataattaaaacgtcgccgcccgtcccgaaacccgacgcgaaaaacgccgcccccgaaacccgaacccaacccgaaacgaaccgaaacccgaaccgaaacgaaacgacgcgacgcgaaacgaaactaacgccgaatccaaaacgaaaaccgaaacaaacgaaacgctaacgtcaaacccgaccgcgaattcgacgatctcgcgacgctccctactaaccacgacgaatactacaacgaatccgaccgcccgctaaccctaacgcgcccctcccccgctcccgcatcctccccgccataaaaccccgcgactaaatctaaacgcccacgaacgtctccacgaaccgaacaccaacactaccaaacgaacacgctcataacccacgcctaactcccgtacaacgctctcaaaaacgataacccaaaaacacccgacctctatcccatccgatacctaaatcccttataccttaacgccttcaaatacgtattctacatacctccaaaaacaaaacgctcatcacctaaccaaaaacgattatt

SEQ ID NO: 31569 - DNA, 711 bp, Artificial Sequence
  chemically treated genomic DNA (Homo sapiens) CpG-island No: 31569
tttcgcggattttatttgtgtaatgggtattaaggttttagtttcgtaagatgtcgagaggtaagagttagacgttaagggttagttcggggcgatttcgtaaagtttttagcgaaagtagcgttcggggaggggcgggttttgtagttgaaaggatcggacggggtgcggatgtgtcgtcgggtatttttaagaataggcgttttttcgttagtgggggagcgggtttgtttttaataacggggagggtgttgagagttgcgatttcgtcggcgagttcgaagggggcggttcggttttcgcgttttttcgtttttggaggtaggaatgtagagcgggggagttagggcggtcggcggtcggtttagtttttatgatgcggggggcgggttcgggggaggcggcgatcgatttttaggtttagcggttaggtcgggtttttcgggaggaattttcggtttaggattgattaaggttcgttttttttttcggtcgtggagattttcggcgcgtagtcggggggaggggcgttaatgagattcggttgcgcgtcgcggatagggaggggattcgaggaaggggcgggttaggggtcggggttatttttcgacgcggggcggagtcgggtttcggagtcgtacggttaggttaggttttgaatttgagttttcgttttttgggtcggcggaggagagtgggggtgtattagtg

SEQ ID NO: 31570 - DNA, 711 bp, Artificial Sequence
  chemically treated genomic DNA (Homo sapiens) CpG-island No: 31570
cactaatacacccccactctcctccgccgacccaaaaaacgaaaactcaaattcaaaacctaacctaaccgtacgactccgaaacccgactccgccccgcgtcgaaaaataaccccgacccctaacccgccccttcctcgaatcccctccctatccgcgacgcgcaaccgaatctcattaacgcccctccccccgactacgcgccgaaaatctccacgaccgaaaaaaaaaacgaaccttaatcaatcctaaaccgaaaattcctcccgaaaaacccgacctaaccgctaaacctaaaaatcgatcgccgcctcccccgaacccgccccccgcatcataaaaactaaaccgaccgccgaccgccctaactcccccgctctacattcctacctccaaaaacgaaaaaacgcgaaaaccgaaccgcccccttcgaactcgccgacgaaatcgcaactctcaacaccctccccgttattaaaaacaaacccgctcccccactaacgaaaaaacgcctattcttaaaaatacccgacgacacatccgcaccccgtccgatcctttcaactacaaaacccgcccctccccgaacgctactttcgctaaaaactttacgaaatcgccccgaactaacccttaacgtctaactcttacctctcgacatcttacgaaactaaaaccttaatacccattacacaaataaaatccgcgaaa

SEQ ID NO: 31571 - DNA, 711 bp, Artificial Sequence
  chemically treated genomic DNA (Homo sapiens) CpG-island No: 31571
tattgatgtatttttattttttttcgtcgatttagagggcgggagtttaggtttaaggtttggtttggtcgtgcggtttcgggattcggtttcgtttcgcgtcggggggtggtttcggtttttggttcgtttttttttcgggttttttttttgttcgcggcgcgtagtcgggttttattagcgttttttttttcggttgcgcgtcgggggtttttacggtcggggggaggggcgggttttaattaattttaggtcggaaatttttttcggggggttcggtttgatcgttgagtttggaaatcggtcgtcgtttttttcgaattcgtttttcgtattatggaaattgggtcgatcgtcggtcgttttggttttttcgttttgtatttttgtttttaggggcgggagggcgcgaaggtcgggtcgtttttttcgggttcgtcggcggggtcgtagtttttagtatttttttcgttattgggaataagttcgtttttttattggcgaaggggcgtttgtttttaggagtattcggcggtatattcgtatttcgttcggtttttttagttataaggttcgttttttttcgggcgttgttttcgttgagggttttgcggagtcgtttcgggttggtttttggcgtttggtttttgtttttcggtattttgcgaggttgaagttttggtgtttattgtatagatgaagttcgcgagg

SEQ ID NO: 31572 - DNA, 711 bp, Artificial Sequence
  chemically treated genomic DNA (Homo sapiens) CpG-island No: 31572
cctcgcgaacttcatctatacaataaacaccaaaacttcaacctcgcaaaataccgaaaaacaaaaaccaaacgccaaaaaccaacccgaaacgactccgcaaaaccctcaacgaaaacaacgcccgaaaaaaaacgaaccttataactaaaaaaaccgaacgaaatacgaatataccgccgaatactcctaaaaacaaacgccccttcgccaataaaaaaacgaacttattcccaataacgaaaaaaatactaaaaactacgaccccgccgacgaacccgaaaaaaacgacccgaccttcgcgccctcccgcccctaaaaacaaaaatacaaaacgaaaaaaccaaaacgaccgacgatcgacccaatttccataatacgaaaaacgaattcgaaaaaaacgacgaccgatttccaaactcaacgatcaaaccgaaccccccgaaaaaaatttccgacctaaaattaattaaaacccgcccctccccccgaccgtaaaaacccccgacgcgcaaccgaaaaaaaaaacgctaataaaacccgactacgcgccgcgaacaaaaaaaaaacccgaaaaaaaaacgaaccaaaaaccgaaaccaccccccgacgcgaaacgaaaccgaatcccgaaaccgcacgaccaaaccaaaccttaaacctaaactcccgccctctaaatcgacgaaaaaaaataaaaatacatcaata

SEQ ID NO: 31573 - DNA, 684 bp, Artificial Sequence
  chemically treated genomic DNA (Homo sapiens) CpG-island No: 31573
attacgagcgtttttagcgtcgcgaacgttttcgacggcgagcgtagtcgtagtcgcgttcgtattcgtagaggttcgggcggggagcgcgggcgtcggcggcggtttaggcggcggtttaagcgagagacgcggttttcggggttttttcgtattttttcgtatttttcggggttttcggtcgttatttcgtcgtcgtttgggcgttttgcggagagaagatgggaggtaaggattggatcgacgggtttttagttttagggcgttaggttcggggcgtaaattcgggagggaagtttcggtcgtttagtttaggtcgtttggagatttttggcggttattttcggattttttcgggcggcgaggcggggagtcgttcgcgttcgggtttttcgtagcggagtttcgagttaggtacgcgcggtagaagtcggagttggttcggttagcgggcggagaggagggaggggggcgtaggttgttttttggcgtatttcgggttgtaaatttgtcgtttgcgttcggttcgtaagttcgcgggttttgggtttcgggaaacgtgcggtttttagttgtcgcgtttttagggtaagtatttttcgggttcgattttattttcgtacgtggttgtatcgtagtaaatggggcgggggcgttcgggttttttaggttcgtaggggtcgt

SEQ ID NO: 31574 - DNA, 684 bp, Artificial Sequence
  chemically treated genomic DNA (Homo sapiens) CpG-island No: 31574
acgacccctacgaacctaaaaaacccgaacgcccccgccccatttactacgatacaaccacgtacgaaaataaaatcgaacccgaaaaatacttaccctaaaaacgcgacaactaaaaaccgcacgtttcccgaaacccaaaacccgcgaacttacgaaccgaacgcaaacgacaaatttacaacccgaaatacgccaaaaaacaacctacgcccccctccctcctctccgcccgctaaccgaaccaactccgacttctaccgcgcgtacctaactcgaaactccgctacgaaaaacccgaacgcgaacgactccccgcctcgccgcccgaaaaaatccgaaaataaccgccaaaaatctccaaacgacctaaactaaacgaccgaaacttccctcccgaatttacgccccgaacctaacgccctaaaactaaaaacccgtcgatccaatccttacctcccatcttctctccgcaaaacgcccaaacgacgacgaaataacgaccgaaaaccccgaaaaatacgaaaaaatacgaaaaaaccccgaaaaccgcgtctctcgcttaaaccgccgcctaaaccgccgccgacgcccgcgctccccgcccgaacctctacgaatacgaacgcgactacgactacgctcgccgtcgaaaacgttcgcgacgctaaaaacgctcgtaat

SEQ ID NO: 31575 - DNA, 684 bp, Artificial Sequence
  chemically treated genomic DNA (Homo sapiens) CpG-island No: 31575
gcgatttttgcggatttgggaggttcgagcgttttcgttttatttgttacggtgtagttacgtgcgggggtggggtcgagttcgggaggtatttattttggagacgcggtagttgggggtcgtacgtttttcgaggtttaagattcgcgggtttgcggatcggacgtaggcggtagatttgtagttcgggatgcgttagagaatagtttgcgtttttttttttttttttcgttcgttggtcgggttaatttcggtttttgtcgcgcgtgtttggttcggagtttcgttgcggaaaattcgagcgcgggcggtttttcgtttcgtcgttcgggaaaattcgggggtggtcgttagggatttttaagcggtttgggttgggcggtcggagtttttttttcggatttgcgtttcgaatttggcgttttgaagttagaggttcgtcggtttagtttttgttttttatttttttttcgtagagcgtttagacgacggcgagatgacggtcgggagtttcgaagaatgcggggaggtgcggaggagtttcgagggtcgcgtttttcgtttgggtcgtcgtttgggtcgtcgtcggcgttcgcgtttttcgttcgagtttttgcgggtgcgggcgcggttgcggttgcgttcgtcgtcgggggcgttcgcggcgttgggggcgttcgtggt

SEQ ID NO: 31576 - DNA, 684 bp, Artificial Sequence
  chemically treated genomic DNA (Homo sapiens) CpG-island No: 31576
accacgaacgcccccaacgccgcgaacgcccccgacgacgaacgcaaccgcaaccgcgcccgcacccgcaaaaactcgaacgaaaaacgcgaacgccgacgacgacccaaacgacgacccaaacgaaaaacgcgaccctcgaaactcctccgcacctccccgcattcttcgaaactcccgaccgtcatctcgccgtcgtctaaacgctctacgaaaaaaaaataaaaaacaaaaactaaaccgacgaacctctaacttcaaaacgccaaattcgaaacgcaaatccgaaaaaaaaactccgaccgcccaacccaaaccgcttaaaaatccctaacgaccacccccgaattttcccgaacgacgaaacgaaaaaccgcccgcgctcgaattttccgcaacgaaactccgaaccaaacacgcgcgacaaaaaccgaaattaacccgaccaacgaacgaaaaaaaaaaaaaaaaacgcaaactattctctaacgcatcccgaactacaaatctaccgcctacgtccgatccgcaaacccgcgaatcttaaacctcgaaaaacgtacgacccccaactaccgcgtctccaaaataaatacctcccgaactcgaccccacccccgcacgtaactacaccgtaacaaataaaacgaaaacgctcgaacctcccaaatccgcaaaaatcgc

SEQ ID NO: 31577 - DNA, 729 bp, Artificial Sequence
  chemically treated genomic DNA (Homo sapiens) CpG-island No: 31577
attcgcgttttcgaggcgtcgttattatggcggagtttggttaggtcggtagtcgtttcgcgcggattaggcgtttttttttcgttttcgcggtttttttattatttatggggtttgttttcgttcggtcggattttttttcgttttttttattcgttttttagatttatttttaggattttttcgtagtttttaaagaagcgttttatatcgcgttttcgggtttggtagtttaggcggtcgatgtatattcgcggtatttcggtaacggtagtgatggttggtttcggttttagttttttttaggcggcggcgggtaaagggagagtacggcggtagcggcggcggcggtaacgggcgggcggcgggacggacgtagtcgaatttcggcgacgtacgcgagtacgtagttcgcgagcgcgcgtttttatttttttcgttttttttcgaggcggaaggtaatcggagagagcgcgcgttcgtttttcgttcggttaggattgggggaggagtttgttcgggggcgcgtcgacgtgcggcggggtaaggtgatcgataggcggcgttgcggtacgttttcgcgcgagttcgttaaaggggtttttgtatcgtttttagtagttagttggtttcgtttttttttcggaagtgttcgtattttttagagtttagcgagcgagcgtttgtgtttttgttttttgaatcgggtgtggtttggatttcggagtt

SEQ ID NO: 31578 - DNA, 729 bp, Artificial Sequence
  chemically treated genomic DNA (Homo sapiens) CpG-island No: 31578
aactccgaaatccaaaccacacccgattcaaaaaacaaaaacacaaacgctcgctcgctaaactctaaaaaatacgaacacttccgaaaaaaaaacgaaaccaactaactactaaaaacgatacaaaaacccctttaacgaactcgcgcgaaaacgtaccgcaacgccgcctatcgatcaccttaccccgccgcacgtcgacgcgcccccgaacaaactcctcccccaatcctaaccgaacgaaaaacgaacgcgcgctctctccgattaccttccgcctcgaaaaaaaacgaaaaaaataaaaacgcgcgctcgcgaactacgtactcgcgtacgtcgccgaaattcgactacgtccgtcccgccgcccgcccgttaccgccgccgccgctaccgccgtactctccctttacccgccgccgcctaaaaaaaactaaaaccgaaaccaaccatcactaccgttaccgaaataccgcgaatatacatcgaccgcctaaactaccaaacccgaaaacgcgatataaaacgcttctttaaaaactacgaaaaaatcctaaaaataaatctaaaaaacgaataaaaaaaacgaaaaaaaatccgaccgaacgaaaacaaaccccataaataataaaaaaaccgcgaaaacgaaaaaaaaacgcctaatccgcgcgaaacgactaccgacctaaccaaactccgccataataacgacgcctcgaaaacgcgaat

SEQ ID NO: 31579 - DNA, 729 bp, Artificial Sequence
  chemically treated genomic DNA (Homo sapiens) CpG-island No: 31579
agtttcgaaatttaaattatattcggtttaaaggataaaagtataaacgttcgttcgttgggttttaggaggtgcggatattttcgggggaggggcgaagttagttggttgttgaaggcggtgtaggaatttttttggcgagttcgcgcgaggacgtgtcgtagcgtcgtttgtcgattattttgtttcgtcgtacgtcggcgcgttttcgggtaagttttttttttagttttggtcgagcgggaagcgaacgcgcgtttttttcggttatttttcgtttcggggaagggcgggggaagtggaagcgcgcgttcgcgagttgcgtgttcgcgtacgtcgtcggggttcggttgcgttcgtttcgtcgttcgttcgttgtcgtcgtcgtcgttgtcgtcgtgttttttttttgttcgtcgtcgtttaaggggggttggggtcggggttagttattattgtcgttgtcgggatgtcgcgggtgtatatcggtcgtttgagttattaggttcgggagcgcgatgtggagcgtttttttaagggttacgggaagattttggaggtggatttgaagaacgggtgaggagggcgaaagagggttcggtcgggcggggatagattttataggtggtggggaggtcgcggggacgggagagggacgtttggttcgcgcggagcggttatcggtttggttaggtttcgttatagtggcggcgtttcgggggcgcgggt

SEQ ID NO: 31580 - DNA, 729 bp, Artificial Sequence
  chemically treated genomic DNA (Homo sapiens) CpG-island No: 31580
acccgcgcccccgaaacgccgccactataacgaaacctaaccaaaccgataaccgctccgcgcgaaccaaacgtccctctcccgtccccgcgacctccccaccacctataaaatctatccccgcccgaccgaaccctctttcgccctcctcacccgttcttcaaatccacctccaaaatcttcccgtaacccttaaaaaaacgctccacatcgcgctcccgaacctaataactcaaacgaccgatatacacccgcgacatcccgacaacgacaataataactaaccccgaccccaaccccccttaaacgacgacgaacaaaaaaaaaacacgacgacaacgacgacgacgacaacgaacgaacgacgaaacgaacgcaaccgaaccccgacgacgtacgcgaacacgcaactcgcgaacgcgcgcttccacttcccccgcccttccccgaaacgaaaaataaccgaaaaaaacgcgcgttcgcttcccgctcgaccaaaactaaaaaaaaaacttacccgaaaacgcgccgacgtacgacgaaacaaaataatcgacaaacgacgctacgacacgtcctcgcgcgaactcgccaaaaaaattcctacaccgccttcaacaaccaactaacttcgcccctcccccgaaaatatccgcacctcctaaaacccaacgaacgaacgtttatacttttatcctttaaaccgaatataatttaaatttcgaaact

SEQ ID NO: 31581 - DNA, 682 bp, Artificial Sequence
  chemically treated genomic DNA (Homo sapiens) CpG-island No: 31581
ggatcgaagagggcgtacgggttcggtttttttacgcgttttttagggattcggtagttagatagacggataggcggatcgttagggagtttaagtattcggatatacgtacgagcgtagaataaagggtcggatatgttttagttcgtttcgtttgcgtttcggttttgcgcgcgggggttcgggttatttgcgtaggtgagttgggtggggtcgggttcgtcgaggtttcggttttagttttttgcgcggttcgggtcgcggttttcgattcggtgttcggagagttggggttcggtcgttttttttttttggtttttggtgaaattgagttagcgtcgtcggggggcgggggtcgatatttattttttgcgttgttcggtttcggttttaacgtcggtgcgttgcggtcgtttttagcgcggagttttaggttcggttcgtttcgcggtttcgtagtttcggcgttttttcggtagttagtttttcggaggggttttcgggttttatttagtttagtttcgcgagggagtttcgcgttcgaagcgtatttttagtcgggaggggacgcggtcgggacgcgagggttcggtttttggggcggcggtttttagttttttttttcggtcggggtttgtttttttagttttagatttgaggttcgatgtaaatgattttttcg

SEQ ID NO: 31582 - DNA, 682 bp, Artificial Sequence
  chemically treated genomic DNA (Homo sapiens) CpG-island No: 31582
cgaaaaaatcatttacatcgaacctcaaatctaaaactaaaaaaacaaaccccgaccgaaaaaaaaaactaaaaaccgccgccccaaaaaccgaaccctcgcgtcccgaccgcgtcccctcccgactaaaaatacgcttcgaacgcgaaactccctcgcgaaactaaactaaataaaacccgaaaacccctccgaaaaactaactaccgaaaaaacgccgaaactacgaaaccgcgaaacgaaccgaacctaaaactccgcgctaaaaacgaccgcaacgcaccgacgttaaaaccgaaaccgaacaacgcaaaaaataaatatcgacccccgccccccgacgacgctaactcaatttcaccaaaaaccaaaaaaaaaaaacgaccgaaccccaactctccgaacaccgaatcgaaaaccgcgacccgaaccgcgcaaaaaactaaaaccgaaacctcgacgaacccgaccccacccaactcacctacgcaaataacccgaacccccgcgcgcaaaaccgaaacgcaaacgaaacgaactaaaacatatccgaccctttattctacgctcgtacgtatatccgaatacttaaactccctaacgatccgcctatccgtctatctaactaccgaatccctaaaaaacgcgtaaaaaaaccgaacccgtacgccctcttcgatcc

SEQ ID NO: 31583 - DNA, 682 bp, Artificial Sequence
  chemically treated genomic DNA (Homo sapiens) CpG-island No: 31583
cggaaagattatttgtatcgggttttaggtttggggttgggaaagtaggtttcggtcggaaaggaagattggaggtcgtcgttttagaggtcggattttcgcgtttcggtcgcgttttttttcggttggggatgcgtttcgggcgcggggttttttcgcgaggttggattgggtggagttcgagagttttttcggggagttggttgtcggggaggcgtcggggttgcggggtcgcggggcgggtcgggtttggagtttcgcgttagaggcggtcgtagcgtatcggcgttggggtcggggtcgggtagcgtaaagggtgaatgtcggttttcgtttttcgacggcgttgatttagttttattagaaattagggggagaaggcggtcgagttttagtttttcgagtatcgggtcggaagtcgcgattcgagtcgcgtaggaagttgggatcggaatttcggcggattcggttttatttaatttatttgcgtaggtaattcgggttttcgcgcgtaaggtcgaggcgtaggcggagcgggttggagtatgttcggttttttgttttgcgttcgtgcgtgtgttcgggtatttgagttttttagcggttcgtttgttcgtttgtttggttgtcgggtttttggagggcgcgtgggagggtcgggttcgtgcgtttttttcgattt

SEQ ID NO: 31584 - DNA, 682 bp, Artificial Sequence
  chemically treated genomic DNA (Homo sapiens) CpG-island No: 31584
aaatcgaaaaaaacgcacgaacccgaccctcccacgcgccctccaaaaacccgacaaccaaacaaacgaacaaacgaaccgctaaaaaactcaaatacccgaacacacgcacgaacgcaaaacaaaaaaccgaacatactccaacccgctccgcctacgcctcgaccttacgcgcgaaaacccgaattacctacgcaaataaattaaataaaaccgaatccgccgaaattccgatcccaacttcctacgcgactcgaatcgcgacttccgacccgatactcgaaaaactaaaactcgaccgccttctccccctaatttctaataaaactaaatcaacgccgtcgaaaaacgaaaaccgacattcaccctttacgctacccgaccccgaccccaacgccgatacgctacgaccgcctctaacgcgaaactccaaacccgacccgccccgcgaccccgcaaccccgacgcctccccgacaaccaactccccgaaaaaactctcgaactccacccaatccaacctcgcgaaaaaaccccgcgcccgaaacgcatccccaaccgaaaaaaaacgcgaccgaaacgcgaaaatccgacctctaaaacgacgacctccaatcttcctttccgaccgaaacctactttcccaaccccaaacctaaaacccgatacaaataatctttccg

SEQ ID NO: 31585 - DNA, 546 bp, Artificial Sequence
  chemically treated genomic DNA (Homo sapiens) CpG-island No: 31585
gcgtaggcgtagaggaggttagcgttttttgttgtttcgtttcgcggtttttaggagataggggttacggggagagtatagttattcggcgcgaagagttttttgtatttcgtttttttttgaggttttcggatcgtttaggaaatgtttgggagttcgtttgcggagggtatagcgtcgattttcgtttttcgtttaggattcgaatgaatttggagagcggatgttagtagtggtcgaggcgttaggataggaaggatcgttagattttttaagattagtttttttcgttatcgtttttatttttttgttcgttgttttttttttaatgtttagtagcgcgtataggtttatttgtaagagttttttggttattgttatggtttcggtttgacggattcgtattataatttttaagagtttaagcgcgcgtgaggattgtaggtttcgagcggcgtttagttttttgggaattgtgttttgggttaggtttgattgattttgagggaggtcggtagtcgtgaatgaattacgatttttagtagt

SEQ ID NO: 31586 - DNA, 546 bp, Artificial Sequence
  chemically treated genomic DNA (Homo sapiens) CpG-island No: 31586
actactaaaaatcgtaattcattcacgactaccgacctccctcaaaatcaatcaaacctaacccaaaacacaattcccaaaaaactaaacgccgctcgaaacctacaatcctcacgcgcgcttaaactcttaaaaattataatacgaatccgtcaaaccgaaaccataacaataaccaaaaaactcttacaaataaacctatacgcgctactaaacattaaaaaaaaaacaacgaacaaaaaaataaaaacgataacgaaaaaaactaatcttaaaaaatctaacgatccttcctatcctaacgcctcgaccactactaacatccgctctccaaattcattcgaatcctaaacgaaaaacgaaaatcgacgctataccctccgcaaacgaactcccaaacatttcctaaacgatccgaaaacctcaaaaaaaaacgaaatacaaaaaactcttcgcgccgaataactatactctccccgtaacccctatctcctaaaaaccgcgaaacgaaacaacaaaaaacgctaacctcctctacgcctacgc

SEQ ID NO: 31587 - DNA, 546 bp, Artificial Sequence
  chemically treated genomic DNA (Homo sapiens) CpG-island No: 31587
gttgttgggagtcgtagtttatttacgattgtcggttttttttagagttagttaagtttgatttagaatataatttttagagggttaggcgtcgttcggagtttgtagtttttacgcgcgtttagatttttgggagttgtagtacgaattcgttaggtcggaattatggtagtgattaaggagtttttatagatggatttgtacgcgttgttaggtattgaggagaaggtagcggataaagaggtgagaacggtggcgaggaaggttgattttgagaggtttggcggttttttttgttttagcgtttcggttattgttggtattcgttttttaggtttattcgggttttgggcggggagcgagggtcggcgttatgtttttcgtaggcgggtttttagatattttttggacggttcgagggttttaagaggaagcggggtatagagggtttttcgcgtcgggtggttgtgtttttttcgtggtttttgttttttagaggtcgcggggcgaggtagtaaggaacgttagttttttttgcgtttgcgt

SEQ ID NO: 31588 - DNA, 546 bp, Artificial Sequence
  chemically treated genomic DNA (Homo sapiens) CpG-island No: 31588
acgcaaacgcaaaaaaaactaacgttccttactacctcgccccgcgacctctaaaaaacaaaaaccacgaaaaaaacacaaccacccgacgcgaaaaaccctctataccccgcttcctcttaaaaccctcgaaccgtccaaaaaatatctaaaaacccgcctacgaaaaacataacgccgaccctcgctccccgcccaaaacccgaataaacctaaaaaacgaataccaacaataaccgaaacgctaaaacaaaaaaaaccgccaaacctctcaaaatcaaccttcctcgccaccgttctcacctctttatccgctaccttctcctcaatacctaacaacgcgtacaaatccatctataaaaactccttaatcactaccataattccgacctaacgaattcgtactacaactcccaaaaatctaaacgcgcgtaaaaactacaaactccgaacgacgcctaaccctctaaaaattatattctaaatcaaacttaactaactctaaaaaaaaccgacaatcgtaaataaactacgactcccaacaac

SEQ ID NO: 31589 - DNA, 536 bp, Artificial Sequence
  chemically treated genomic DNA (Homo sapiens) CpG-island No: 31589
tcgcgttcgtgggaggttcgtacgtgtcgggttcggagaggcggggaggcggtcggcgtttagcggtcgaggcgcgggttttgtattttggtagcggtcgagttcggttgttttagtgttttttttatttcgcgttgggttaggtagggcgcgttttcgtcgacgaagatttgtttaaggtgttcgagtttttcgcgagaggggatagttacgaataataatagtatttagcgtagattaggcggggaggaaagttttcggttcgtagtagagcggagttcgttaaggttggaggaaaagggatgtagagcgggagggtgaaaatttgaaagaagagggtagcgggaatattgtgtgggtaggaacgggtttcgggggcgacgttcgtagggggagacgggtgcggggtgcgttgtttaaggtgtaggggaggtgattggcgcgcggcgggcgcggagttcggagttgatattggttggcgggcggaggggagagcggggaatagttgtttggggcgttgggtattttcgggcgcg

SEQ ID NO: 31590 - DNA, 536 bp, Artificial Sequence
  chemically treated genomic DNA (Homo sapiens) CpG-island No: 31590
cgcgcccgaaaatacccaacgccccaaacaactattccccgctctcccctccgcccgccaaccaatatcaactccgaactccgcgcccgccgcgcgccaatcacctcccctacaccttaaacaacgcaccccgcacccgtctccccctacgaacgtcgcccccgaaacccgttcctacccacacaatattcccgctaccctcttctttcaaattttcaccctcccgctctacatcccttttcctccaaccttaacgaactccgctctactacgaaccgaaaactttcctccccgcctaatctacgctaaatactattattattcgtaactatcccctctcgcgaaaaactcgaacaccttaaacaaatcttcgtcgacgaaaacgcgccctacctaacccaacgcgaaataaaaaaaacactaaaacaaccgaactcgaccgctaccaaaatacaaaacccgcgcctcgaccgctaaacgccgaccgcctccccgcctctccgaacccgacacgtacgaacctcccacgaacgcga

SEQ ID NO: 31591 - DNA, 536 bp, Artificial Sequence
  chemically treated genomic DNA (Homo sapiens) CpG-island No: 31591
cgcgttcgggggtgtttagcgttttagatagttgtttttcgttttttttttcgttcgttagttagtgttagtttcgggtttcgcgttcgtcgcgcgttagttattttttttgtattttggatagcgtatttcgtattcgtttttttttgcgggcgtcgttttcgggattcgtttttgtttatatagtgttttcgttgttttttttttttaggtttttattttttcgttttgtatttttttttttttagttttggcggatttcgttttgttgcgggtcggaaattttttttttcgtttagtttgcgttgggtattgttgttattcgtgattgttttttttcgcggggagttcggatattttggataggttttcgtcggcgggagcgcgttttgtttggtttaacgcgaggtaaaggaggtattggggtagtcggattcggtcgttgttagggtgtagagttcgcgtttcggtcgttggacgtcggtcgttttttcgttttttcggattcgatacgtgcgagttttttacggacgcgg

SEQ ID NO: 31592 - DNA, 536 bp, Artificial Sequence
  chemically treated genomic DNA (Homo sapiens) CpG-island No: 31592
ccgcgtccgtaaaaaactcgcacgtatcgaatccgaaaaaacgaaaaaacgaccgacgtccaacgaccgaaacgcgaactctacaccctaacaacgaccgaatccgactaccccaatacctcctttacctcgcgttaaaccaaacaaaacgcgctcccgccgacgaaaacctatccaaaatatccgaactccccgcgaaaaaaaacaatcacgaataacaacaatacccaacgcaaactaaacgaaaaaaaaaatttccgacccgcaacaaaacgaaatccgccaaaactaaaaaaaaaaaaatacaaaacgaaaaaataaaaacctaaaaaaaaaaaacaacgaaaacactatataaacaaaaacgaatcccgaaaacgacgcccgcaaaaaaaaacgaatacgaaatacgctatccaaaatacaaaaaaaataactaacgcgcgacgaacgcgaaacccgaaactaacactaactaacgaacgaaaaaaaaaacgaaaaacaactatctaaaacgctaaacacccccgaacgcg

SEQ ID NO: 31593 - DNA, 4293 bp, Artificial Sequence
  chemically treated genomic DNA (Homo sapiens) CpG-island No: 31593
ggatgatttttttcggacgtagatgagggacgggcggatgattttttttcggacgtagatgagggacgggtggatgattttttttcggacgtagatgagggacgggtggatgattttttttcggacgtagatgagggacgggcggatgattttttttcggacgtagatgagggacgggcggatgatttttttcgggacgtagatgagggacgggcggatgatttttttcgggacgtagatgagggacgggcggatgatttttttcggacgtagatgaggaacgggcggatgattttttttagacgtagatgagggacgggcggatgatttttttcgggacgtcgatgaggaacgggtggatgatttttttaggacgtagatgagggacgggtggatgatttttttaggacgtagatgagggacgggcggatgatttttttttagacgtagatgagggacgggtggatgatttttttaggacgtagatgagggacgggtggatgattttttttagacgtagatgagggacgggtggatgattttttttaggacgtagatgaggaacgggtggatgatttttttaggacgtagatgagggacgggcggatgatttttttttagacgtagatgaggaacgggcggatgattttttttaggacgtagatgagggacgggcggatgatttttttttagacgtagatgagggatgggtggatgatttttttaggacgtagatgagggacgggtggatgatttttttcggacgtagatgaggaacgggcggatgattttttttcggacgtagatgagggacgggtggatgatttttttaggacgtagatgagggacgggtggatgattttttttagacgtagatgagggacgggtagatgattttttttcggacgtagatgagggacgggtggatgattttttttagacgtagatgaggaacgggcggatgattttttttcggacgtagatgagggacgggcggatgatttttttaggacgtagatgagggacgggcggatgatttttttttagacgtagatgagggacgggcggatgatttttttcgggacgtcgatgaggaacgggtggatgatttttttaggacgtagatgagggacgggcggatgattttttttcggacgtagatgagggacgggcggatgatttttttttagacgtagatgagggacgggcggatgatttttttttagacgtagatgagggacgggtggatgatttttttaggacgtagatgagggacgggtggatgatttttttttagacgtagatgagggacgggtggatgattttttttagacgtagatgagggacgggcggatgattttttttaggacgtagatgagggacgggcggatgattttttttcggacgtagatgagggacgggcggatgatttttttttagacgtagatgagggacgggcggatgatttttttcgggacgtcgatgaggaacgggtggatgatttttttaggatgtcgatgagggacgggcggatgatttttttttagacgtagatgagggacgggcggatgatttttttcgggacgtcgatgaggaacgggtggatgatttttttaggacgtagatgagggacgggcggatgatttttttttagacgtagatgagggaggggtggatgatttttttaggacgtagatgagggacgggcggatgatttcgttttagacgtagatgagggacgggcggatgattttttcggacgtagatgagggacgggcggatgatttttttttagacgtagatgaggaacgggcggatgattttttttaggacgtagatgagggacgggtggatgattttttttcggacgtagatgagggacgggtggatgatttttttttggacgtagatgagggacgggtggatgattttttttggacgtagatgaggaacgggcggatgatttttttcggacgtagatgagggaggggtggatgatttttttcggacgtagatgagggacgggtggatgatttttttaggacgtagatgagggacgggcggatgatttttttttagacgtagatgaggaacgggcggatgattttttttaggacgtagatgagggacgggcggatgattttttttcggacgtagatgagggacgggtggatgatttttttcggacgtagatgaggaacgggcggatgatttttttttagacgtagatgaggaacgggcggatgattttttttaggacgtagatgaggaacgggcggatgattttttttcggacgtagatgagggacgggcggatgatttttttcggacgtagatgagggacgggtggatgattttttttagacgtagatgaggaacgggcggatgattttttttcggacgtagatgagggacgggtggatgattttttttcggacgtagatgagggacgggcggatgatttttttttagacgtagatgagggacgggtggatgatttttttttagacgtagatgagggacgggcggatgatttttttaggacgtagatgagggacgggtggatgatttttttttagacgtagatgaggaacgggcggatgatttttttcgggacgtcgatgaggaacgggtggatgatttttttaggacgtagatgaggaacgggcgaatgatttttttcgggacgtcgatgaggaacgggtggatgatttttttaggacgtagatgaggaacgggcggatgatttttttcgggacgtcgatgaggaacgggtggatgatttttttaggacgtagatgagggacgggtggatgatttttttttagacgtagatgagggacgggcggatgatttttttttagacgtagatgagggacgggcggatgatttttttttagacgtagatgagggacgggcggatgatttttttaggacgtagatgagggacgggcggatgatttttttttagacgtagatgagggacgggcggatgatttttttttagacgtagatgagggacgggcggatgatttttttaggacgtagatgagggacgggtggatgatttttttttagacgtagatgaggaacgggtggatgatttttttcgggacgtcgatgaggaacgggtggatgatttttttaggacgtagatgaggaacgggcggatgatttttttcgggacgtcgatgaggaacgggtggatgatttttttaggacgtagatgagggacgggtggatgatttttttttagacgtagatgagggacgggcggatgatttttttttagacgtagatgagggacgggcggatgatttttttttagacgtagatgagggacgggcggatgatttttttaggacgtagatgagggacgggcggatgatttttttttagacgtagatgagggacgggcggatgatttttttttagacgtagatgagggacgggcggatgatttttttcggacgtagatgagggacgggcggatgatttttttcgggacgtcgatgaggaacgggtggatgatttttttaggacgtagatgaggaacgggcggatgatttttttttagacgtagatgaggaaagggcggatgattttttttaggacgtagatgagggacgggcggatgatttttttttagacgtagatgagggacgggcggatgatttttttcggacgtagatgagggacgggcggatgattttttttcggacgtagatgagcgacgggtggatgatttttttttagacgtagatgagggatgggcggatgattttttttcggacgtagatgaggaacgagtagatgattttttttcggacgtagatgaggaacgagtagatgatttttttttagacgtagatgagggacgggcggatgattttttttcggacgtagatgagggacgggcggatgattttttttcggacgtagatgagggacgggttgatgattttttttcggatatagatgagggacgggcggatgattttttttcggacgtagatgagggacgggcggatgattttttcgggacgtagatgagggacgggcggatgattttttttcggacgtagatgagggacgggtggatgattttttttcggacgtagatgagggacgggtggatgattttttttcggacgtagatgagggacgggcggatgatttttttttagacgtagatgagggacgggtggatgatttttttaggatttaaatgaaggacgggtggatgaattttttttagacgtagatgagggacgggtggattattttttttag

SEQ ID NO: 31594 - DNA, 4293 bp, Artificial Sequence
  chemically treated genomic DNA (Homo sapiens) CpG-island No: 31594
ctaaaaaaaataatccacccgtccctcatctacgtctaaaaaaaattcatccacccgtccttcatttaaatcctaaaaaaatcatccacccgtccctcatctacgtctaaaaaaaaatcatccgcccgtccctcatctacgtccgaaaaaaaatcatccacccgtccctcatctacgtccgaaaaaaaatcatccacccgtccctcatctacgtccgaaaaaaaatcatccgcccgtccctcatctacgtcccgaaaaaatcatccgcccgtccctcatctacgtccgaaaaaaaatcatccgcccgtccctcatctatatccgaaaaaaaatcatcaacccgtccctcatctacgtccgaaaaaaaatcatccgcccgtccctcatctacgtccgaaaaaaaatcatccgcccgtccctcatctacgtctaaaaaaaaatcatctactcgttcctcatctacgtccgaaaaaaaatcatctactcgttcctcatctacgtccgaaaaaaaatcatccgcccatccctcatctacgtctaaaaaaaaatcatccacccgtcgctcatctacgtccgaaaaaaaatcatccgcccgtccctcatctacgtccgaaaaaaatcatccgcccgtccctcatctacgtctaaaaaaaaatcatccgcccgtccctcatctacgtcctaaaaaaaatcatccgccctttcctcatctacgtctaaaaaaaaatcatccgcccgttcctcatctacgtcctaaaaaaatcatccacccgttcctcatcgacgtcccgaaaaaaatcatccgcccgtccctcatctacgtccgaaaaaaatcatccgcccgtccctcatctacgtctaaaaaaaaatcatccgcccgtccctcatctacgtctaaaaaaaaatcatccgcccgtccctcatctacgtcctaaaaaaatcatccgcccgtccctcatctacgtctaaaaaaaaatcatccgcccgtccctcatctacgtctaaaaaaaaatcatccgcccgtccctcatctacgtctaaaaaaaaatcatccacccgtccctcatctacgtcctaaaaaaatcatccacccgttcctcatcgacgtcccgaaaaaaatcatccgcccgttcctcatctacgtcctaaaaaaatcatccacccgttcctcatcgacgtcccgaaaaaaatcatccacccgttcctcatctacgtctaaaaaaaaatcatccacccgtccctcatctacgtcctaaaaaaatcatccgcccgtccctcatctacgtctaaaaaaaaatcatccgcccgtccctcatctacgtctaaaaaaaaatcatccgcccgtccctcatctacgtcctaaaaaaatcatccgcccgtccctcatctacgtctaaaaaaaaatcatccgcccgtccctcatctacgtctaaaaaaaaatcatccgcccgtccctcatctacgtctaaaaaaaaatcatccacccgtccctcatctacgtcctaaaaaaatcatccacccgttcctcatcgacgtcccgaaaaaaatcatccgcccgttcctcatctacgtcctaaaaaaatcatccacccgttcctcatcgacgtcccgaaaaaaatcattcgcccgttcctcatctacgtcctaaaaaaatcatccacccgttcctcatcgacgtcccgaaaaaaatcatccgcccgttcctcatctacgtctaaaaaaaaatcatccacccgtccctcatctacgtcctaaaaaaatcatccgcccgtccctcatctacgtctaaaaaaaaatcatccacccgtccctcatctacgtctaaaaaaaaatcatccgcccgtccctcatctacgtccgaaaaaaaatcatccacccgtccctcatctacgtccgaaaaaaaatcatccgcccgttcctcatctacgtctaaaaaaaatcatccacccgtccctcatctacgtccgaaaaaaatcatccgcccgtccctcatctacgtccgaaaaaaaatcatccgcccgttcctcatctacgtcctaaaaaaaatcatccgcccgttcctcatctacgtctaaaaaaaaatcatccgcccgttcctcatctacgtccgaaaaaaatcatccacccgtccctcatctacgtccgaaaaaaaatcatccgcccgtccctcatctacgtcctaaaaaaaatcatccgcccgttcctcatctacgtctaaaaaaaaatcatccgcccgtccctcatctacgtcctaaaaaaatcatccacccgtccctcatctacgtccgaaaaaaatcatccacccctccctcatctacgtccgaaaaaaatcatccgcccgttcctcatctacgtccaaaaaaaatcatccacccgtccctcatctacgtccaaaaaaaaatcatccacccgtccctcatctacgtccgaaaaaaaatcatccacccgtccctcatctacgtcctaaaaaaaatcatccgcccgttcctcatctacgtctaaaaaaaaatcatccgcccgtccctcatctacgtccgaaaaaatcatccgcccgtccctcatctacgtctaaaacgaaatcatccgcccgtccctcatctacgtcctaaaaaaatcatccacccctccctcatctacgtctaaaaaaaaatcatccgcccgtccctcatctacgtcctaaaaaaatcatccacccgttcctcatcgacgtcccgaaaaaaatcatccgcccgtccctcatctacgtctaaaaaaaaatcatccgcccgtccctcatcgacatcctaaaaaaatcatccacccgttcctcatcgacgtcccgaaaaaaatcatccgcccgtccctcatctacgtctaaaaaaaaatcatccgcccgtccctcatctacgtccgaaaaaaaatcatccgcccgtccctcatctacgtcctaaaaaaaatcatccgcccgtccctcatctacgtctaaaaaaaatcatccacccgtccctcatctacgtctaaaaaaaaatcatccacccgtccctcatctacgtcctaaaaaaatcatccacccgtccctcatctacgtctaaaaaaaaatcatccgcccgtccctcatctacgtctaaaaaaaaatcatccgcccgtccctcatctacgtccgaaaaaaaatcatccgcccgtccctcatctacgtcctaaaaaaatcatccacccgttcctcatcgacgtcccgaaaaaaatcatccgcccgtccctcatctacgtctaaaaaaaaatcatccgcccgtccctcatctacgtcctaaaaaaatcatccgcccgtccctcatctacgtccgaaaaaaaatcatccgcccgttcctcatctacgtctaaaaaaaatcatccacccgtccctcatctacgtccgaaaaaaaatcatctacccgtccctcatctacgtctaaaaaaaatcatccacccgtccctcatctacgtcctaaaaaaatcatccacccgtccctcatctacgtccgaaaaaaaatcatccgcccgttcctcatctacgtccgaaaaaaatcatccacccgtccctcatctacgtcctaaaaaaatcatccacccatccctcatctacgtctaaaaaaaaatcatccgcccgtccctcatctacgtcctaaaaaaaatcatccgcccgttcctcatctacgtctaaaaaaaaatcatccgcccgtccctcatctacgtcctaaaaaaatcatccacccgttcctcatctacgtcctaaaaaaaatcatccacccgtccctcatctacgtctaaaaaaaatcatccacccgtccctcatctacgtcctaaaaaaatcatccacccgtccctcatctacgtctaaaaaaaaatcatccgcccgtccctcatctacgtcctaaaaaaatcatccacccgtccctcatctacgtcctaaaaaaatcatccacccgttcctcatcgacgtcccgaaaaaaatcatccgcccgtccctcatctacgtctaaaaaaaatcatccgcccgttcctcatctacgtccgaaaaaaatcatccgcccgtccctcatctacgtcccgaaaaaaatcatccgcccgtccctcatctacgtcccgaaaaaaatcatccgcccgtccctcatctacgtccgaaaaaaaatcatccgcccgtccctcatctacgtccgaaaaaaaatcatccacccgtccctcatctacgtccgaaaaaaaatcatccacccgtccctcatctacgtccgaaaaaaaatcatccgcccgtccctcatctacgtccgaaaaaaatcatcc

SEQ ID NO: 31595 - DNA, 4293 bp, Artificial Sequence
  chemically treated genomic DNA (Homo sapiens) CpG-island No: 31595
ttggagggaataatttattcgttttttatttgcgtttggaaggaatttatttattcgttttttatttgggttttgaaggaattatttattcgttttttatttgcgtttggaaggaagttattcgttcgttttttatttgcgttcggaaggaagttatttattcgttttttatttgcgttcggaaggaagttatttattcgttttttatttgcgttcggaaggaagttattcgttcgttttttatttgcgtttcgaaggaattattcgttcgttttttatttgcgttcggaaggaagttattcgttcgttttttatttgtgttcggaaggaagttattagttcgttttttatttgcgttcggaaggaagttattcgttcgttttttatttgcgttcggaaggaagttattcgttcgttttttatttgcgtttggaaggaagttatttgttcgttttttatttgcgttcggaaggaagttatttgttcgttttttatttgcgttcggaaggaagttattcgtttattttttatttgcgtttggaaggaagttatttattcgtcgtttatttgcgttcggaaggaagttattcgttcgttttttatttgcgttcggaaggaattattcgttcgttttttatttgcgtttggaaggaagttattcgttcgttttttatttgcgttttgaaggaagttattcgttttttttttatttgcgtttggaaggaagttattcgttcgttttttatttgcgttttgaaggaattatttattcgttttttatcggcgtttcgaaggaagttattcgttcgttttttatttgcgttcggaaggaattattcgttcgttttttatttgcgtttggaaggaagttattcgttcgttttttatttgcgtttggaaggaagttattcgttcgttttttatttgcgttttgaaggaattattcgttcgttttttatttgcgtttggaaggaagttattcgttcgttttttatttgcgtttggaaggaagttattcgttcgttttttatttgcgtttggaaggaagttatttattcgttttttatttgcgttttgaaggaattatttattcgttttttatcggcgtttcgaaggaagttattcgttcgttttttatttgcgttttgaaggaattatttattcgttttttatcggcgtttcgaaggaagttatttattcgttttttatttgcgtttggaaggaagttatttattcgttttttatttgcgttttgaaggaattattcgttcgttttttatttgcgtttggaaggaagttattcgttcgttttttatttgcgtttggaaggaagttattcgttcgttttttatttgcgttttgaaggaattattcgttcgttttttatttgcgtttggaaggaagttattcgttcgttttttatttgcgtttggaaggaagttattcgttcgttttttatttgcgtttggaaggaagttatttattcgttttttatttgcgttttgaaggaattatttattcgttttttatcggcgtttcgaaggaagttattcgttcgttttttatttgcgttttgaaggaattatttattcgttttttatcggcgtttcgaaggaagttattcgttcgttttttatttgcgttttgaaggaattatttattcgttttttatcggcgtttcgaaggaagttattcgttcgttttttatttgcgtttggaaggaagttatttattcgttttttatttgcgttttgaaggaattattcgttcgttttttatttgcgtttggaaggaagttatttattcgttttttatttgcgtttggaaggaagttattcgttcgttttttatttgcgttcggaaggaagttatttattcgttttttatttgcgttcggaaggaggttattcgttcgttttttatttgcgtttggaaggaattatttattcgttttttatttgcgttcgaaggaagttattcgttcgttttttatttgcgttcggaaggaggttattcgttcgttttttatttgcgttttgaaggaggttattcgttcgttttttatttgcgtttggaaggaaattattcgttcgttttttatttgcgttcgaaggaagttatttattcgttttttatttgcgttcggaaggaagttattcgttcgttttttatttgcgttttgaaggaagttattcgttcgttttttatttgcgtttggaaggaagttattcgttcgttttttatttgcgttttgaaggaattatttattcgttttttatttgcgttcggaaggaattatttattttttttttatttgcgttcggaagaggttattcgttcgttttttatttgcgtttagaaggaattatttattcgttttttatttgcgtttagaaggaagttatttattcgttttttatttgcgttcggaaggaagttatttattcgttttttatttgcgttttgaaggaagttattcgttcgttttttatttgcgtttggaaggaagttattcgttcgttttttatttgcgttcggaagaattattcgttcgttttttatttgcgtttggaacgaagttattcgttcgttttttatttgcgttttgaaggaattatttattttttttttatttgcgtttggaaggaagttattcgttcgttttttatttgcgttttgaaggaattatttattcgttttttatcggcgtttcgaaggaagttattcgttcgttttttatttgcgtttggaaggaagttattcgttcgttttttatcggtattttgaaggaattatttattcgttttttatcggcgtttcgaaggaagttattcgttcgttttttatttgcgtttggaaggaagttattcgttcgttttttatttgcgttcggaaggaagttattcgttcgttttttatttgcgttttgaaggaagttattcgttcgttttttatttgcgtttggaaggaattatttattcgttttttatttgcgtttggaaggaagttatttattcgttttttatttgcgttttgaaggaattatttattcgttttttatttgcgtttggaaggaagttattcgttcgttttttatttgcgtttggaaggaagttattcgttcgttttttatttgcgttcggaaggaggttattcgttcgttttttatttgcgttttgaaggaattatttattcgttttttatcggcgtttcgaaggaagttattcgttcgttttttatttgcgtttggaaggaagttattcgttcgttttttatttgcgttttgaaggaattattcgttcgttttttatttgcgttcggaaggaggttattcgttcgttttttatttgcgtttggaaggaattatttattcgttttttatttgcgttcggaaggaagttatttgttcgttttttatttgcgtttggaaggaattatttattcgttttttatttgcgttttgaaggaattatttattcgttttttatttgcgttcggaaggaggttattcgttcgttttttatttgcgttcggaaggaattatttattcgttttttatttgcgttttgaaggaattatttatttattttttatttgcgtttggaaggaagttattcgttcgttttttatttgcgttttgaaggaagttattcgttcgttttttatttgcgtttggaaggaagttattcgttcgttttttatttgcgttttgaaggaattatttattcgttttttatttgcgttttgaaggaagttatttattcgttttttatttgcgtttggaaggaattatttattcgttttttatttgcgttttgaaggaattatttattcgttttttatttgcgtttggaaggaagttattcgttcgttttttatttgcgttttgaaggaattatttattcgttttttatttgcgttttgaaggaattatttattcgttttttatcggcgtttcgaaggaagttattcgttcgttttttatttgcgtttggaaggaattattcgttcgttttttatttgcgttcggaaggaattattcgttcgttttttatttgcgtttcgaaggaagttattcgttcgttttttatttgcgtttcgaaggaagttattcgttcgttttttatttgcgttcggaaggaagttattcgttcgttttttatttgcgttcggaaggaagttatttattcgttttttatttgcgttcggaaggaagttatttattcgttttttatttgcgttcggaaggaagttattcgttcgttttttatttgcgttcggaaggaattattt

SEQ ID NO: 31596 - DNA, 4293 bp, Artificial Sequence
  chemically treated genomic DNA (Homo sapiens) CpG-island No: 31596
aaataattccttccgaacgcaaataaaaaacgaacgaataacttccttccgaacgcaaataaaaaacgaataaataacttccttccgaacgcaaataaaaaacgaataaataacttccttccgaacgcaaataaaaaacgaacgaataacttccttccgaacgcaaataaaaaacgaacgaataacttccttcgaaacgcaaataaaaaacgaacgaataacttccttcgaaacgcaaataaaaaacgaacgaataattccttccgaacgcaaataaaaaacgaacgaataattccttccaaacgcaaataaaaaacgaacgaataacttccttcgaaacgccgataaaaaacgaataaataattccttcaaaacgcaaataaaaaacgaataaataattccttcaaaacgcaaataaaaaacgaacgaataacttccttccaaacgcaaataaaaaacgaataaataattccttcaaaacgcaaataaaaaacgaataaataattccttccaaacgcaaataaaaaacgaataaataacttccttcaaaacgcaaataaaaaacgaataaataattccttcaaaacgcaaataaaaaacgaacgaataacttccttccaaacgcaaataaaaaacgaacgaataacttccttcaaaacgcaaataaaaaacgaacgaataacttccttccaaacgcaaataaaaaataaataaataattccttcaaaacgcaaataaaaaacgaataaataattccttccgaacgcaaataaaaaacgaacgaataacctccttccgaacgcaaataaaaaacgaataaataattccttcaaaacgcaaataaaaaacgaataaataattccttccaaacgcaaataaaaaacgaacaaataacttccttccgaacgcaaataaaaaacgaataaataattccttccaaacgcaaataaaaaacgaacgaataacctccttccgaacgcaaataaaaaacgaacgaataattccttcaaaacgcaaataaaaaacgaacgaataacttccttccaaacgcaaataaaaaacgaacgaataacttccttcgaaacgccgataaaaaacgaataaataattccttcaaaacgcaaataaaaaacgaacgaataacctccttccgaacgcaaataaaaaacgaacgaataacttccttccaaacgcaaataaaaaacgaacgaataacttccttccaaacgcaaataaaaaacgaataaataattccttcaaaacgcaaataaaaaacgaataaataacttccttccaaacgcaaataaaaaacgaataaataattccttccaaacgcaaataaaaaacgaacgaataacttccttcaaaacgcaaataaaaaacgaacgaataacttccttccgaacgcaaataaaaaacgaacgaataacttccttccaaacgcaaataaaaaacgaacgaataacttccttcgaaacgccgataaaaaacgaataaataattccttcaaaataccgataaaaaacgaacgaataacttccttccaaacgcaaataaaaaacgaacgaataacttccttcgaaacgccgataaaaaacgaataaataattccttcaaaacgcaaataaaaaacgaacgaataacttccttccaaacgcaaataaaaaaaaaataaataattccttcaaaacgcaaataaaaaacgaacgaataacttcgttccaaacgcaaataaaaaacgaacgaataattcttccgaacgcaaataaaaaacgaacgaataacttccttccaaacgcaaataaaaaacgaacgaataacttccttcaaaacgcaaataaaaaacgaataaataacttccttccgaacgcaaataaaaaacgaataaataacttccttctaaacgcaaataaaaaacgaataaataattccttctaaacgcaaataaaaaacgaacgaataacctcttccgaacgcaaataaaaaaaaaataaataattccttccgaacgcaaataaaaaacgaataaataattccttcaaaacgcaaataaaaaacgaacgaataacttccttccaaacgcaaataaaaaacgaacgaataacttccttcaaaacgcaaataaaaaacgaacgaataacttccttccgaacgcaaataaaaaacgaataaataacttccttcgaacgcaaataaaaaacgaacgaataatttccttccaaacgcaaataaaaaacgaacgaataacctccttcaaaacgcaaataaaaaacgaacgaataacctccttccgaacgcaaataaaaaacgaacgaataacttccttcgaacgcaaataaaaaacgaataaataattccttccaaacgcaaataaaaaacgaacgaataacctccttccgaacgcaaataaaaaacgaataaataacttccttccgaacgcaaataaaaaacgaacgaataacttccttccaaacgcaaataaaaaacgaataaataacttccttccaaacgcaaataaaaaacgaacgaataattccttcaaaacgcaaataaaaaacgaataaataacttccttccaaacgcaaataaaaaacgaacgaataacttccttcgaaacgccgataaaaaacgaataaataattccttcaaaacgcaaataaaaaacgaacgaataacttccttcgaaacgccgataaaaaacgaataaataattccttcaaaacgcaaataaaaaacgaacgaataacttccttcgaaacgccgataaaaaacgaataaataattccttcaaaacgcaaataaaaaacgaataaataacttccttccaaacgcaaataaaaaacgaacgaataacttccttccaaacgcaaataaaaaacgaacgaataacttccttccaaacgcaaataaaaaacgaacgaataattccttcaaaacgcaaataaaaaacgaacgaataacttccttccaaacgcaaataaaaaacgaacgaataacttccttccaaacgcaaataaaaaacgaacgaataattccttcaaaacgcaaataaaaaacgaataaataacttccttccaaacgcaaataaaaaacgaataaataacttccttcgaaacgccgataaaaaacgaataaataattccttcaaaacgcaaataaaaaacgaacgaataacttccttcgaaacgccgataaaaaacgaataaataattccttcaaaacgcaaataaaaaacgaataaataacttccttccaaacgcaaataaaaaacgaacgaataacttccttccaaacgcaaataaaaaacgaacgaataacttccttccaaacgcaaataaaaaacgaacgaataattccttcaaaacgcaaataaaaaacgaacgaataacttccttccaaacgcaaataaaaaacgaacgaataacttccttccaaacgcaaataaaaaacgaacgaataattccttccgaacgcaaataaaaaacgaacgaataacttccttcgaaacgccgataaaaaacgaataaataattccttcaaaacgcaaataaaaaacgaacgaataacttccttccaaacgcaaataaaaaaaaaacgaataacttccttcaaaacgcaaataaaaaacgaacgaataacttccttccaaacgcaaataaaaaacgaacgaataattccttccgaacgcaaataaaaaacgaacgaataacttccttccgaacgcaaataaacgacgaataaataacttccttccaaacgcaaataaaaaataaacgaataacttccttccgaacgcaaataaaaaacgaacaaataacttccttccgaacgcaaataaaaaacgaacaaataacttccttccaaacgcaaataaaaaacgaacgaataacttccttccgaacgcaaataaaaaacgaacgaataacttccttccgaacgcaaataaaaaacgaactaataacttccttccgaacacaaataaaaaacgaacgaataacttccttccgaacgcaaataaaaaacgaacgaataattccttcgaaacgcaaataaaaaacgaacgaataacttccttccgaacgcaaataaaaaacgaataaataacttccttccgaacgcaaataaaaaacgaataaataacttccttccgaacgcaaataaaaaacgaacgaataacttccttccaaacgcaaataaaaaacgaataaataattccttcaaaacccaaataaaaaacgaataaataaattccttccaaacgcaaataaaaaacgaataaattattccctccaa

SEQ ID NO: 31597 - DNA, 639 bp, Artificial Sequence
  chemically treated genomic DNA (Homo sapiens) CpG-island No: 31597
tattaaacgtagcggtattatcgtttttagcgcgcgtattacgggcgtacgtattatacgttggcgttgatcggtaaggtgaattcgtattttgcgggtatggggttgatgtcgggttatgtttatcgcgcgttttatttttgttcgttgtacggtataagcgaggatgacgttatcgttagtatttatcggatttttaaaaatgatgtcgcgtcggaagatatcgtcgttatcgtgattgagtcggtttagggcgaaggcggtttttacgtttcgtcgttagtttttatgtagcgtttatcgttttgtgtgacgagtacgggattatgttgattgtcgatgaagtgtagagcggcgcggggcgtatcggtacgttgtttgcgatggagtagatgggcgttgcgtcggattttattatttttgcgaaatcgatcgcgggcggtttttcgttggcggtagttatcgggcgcgcggaagtaatggatgcgtcgttttaggcggtttgggcggtatttatgcgggtaatcgattgtttgcgtggttgcgttggaagtgttgaaggtgtgtgagtaggaaaatttgttgtaaaaagttagcgatttggggtagaagttgaaagacggattgttggcgatataa

SEQ ID NO: 31598 - DNA, 639 bp, Artificial Sequence
  chemically treated genomic DNA (Homo sapiens) CpG-island No: 31598
ttatatcgccaacaatccgtctttcaacttctaccccaaatcgctaactttttacaacaaattttcctactcacacaccttcaacacttccaacgcaaccacgcaaacaatcgattacccgcataaataccgcccaaaccgcctaaaacgacgcatccattacttccgcgcgcccgataactaccgccaacgaaaaaccgcccgcgatcgatttcgcaaaaataataaaatccgacgcaacgcccatctactccatcgcaaacaacgtaccgatacgccccgcgccgctctacacttcatcgacaatcaacataatcccgtactcgtcacacaaaacgataaacgctacataaaaactaacgacgaaacgtaaaaaccgccttcgccctaaaccgactcaatcacgataacgacgatatcttccgacgcgacatcatttttaaaaatccgataaatactaacgataacgtcatcctcgcttataccgtacaacgaacaaaaataaaacgcgcgataaacataacccgacatcaaccccatacccgcaaaatacgaattcaccttaccgatcaacgccaacgtataatacgtacgcccgtaatacgcgcgctaaaaacgataataccgctacgtttaata

SEQ ID NO: 31599 - DNA, 639 bp, Artificial Sequence
  chemically treated genomic DNA (Homo sapiens) CpG-island No: 31599
ttgtatcgttagtaattcgttttttaatttttgttttagatcgttggttttttgtagtagatttttttgtttatatatttttaatatttttagcgtagttacgtaggtaatcggttattcgtataggtgtcgtttagatcgtttggagcgacgtatttattattttcgcgcgttcggtgattgtcgttagcgggaagtcgttcgcgatcgatttcgtaaaggtggtaagattcggcgtaacgtttatttgttttatcgtaaatagcgtgtcggtacgtttcgcgtcgttttgtattttatcggtaattagtatgatttcgtgttcgttatatagagcggtaaacgttgtataaaggttggcgacgaggcgtagaaatcgttttcgttttgaatcggtttaattacgatggcggcgatatttttcggcgcggtattatttttgaagattcggtggatgttggcgatagcgttattttcgtttatgtcgtgtagcgggtaaggataaagcgcgcgataaatatgattcggtattagttttatgttcgtagagtacggatttattttgtcggttagcgttagcgtgtaatgcgtgcgttcgtgatacgcgcgttaaaagcgatggtgtcgttacgtttggtg

SEQ ID NO: 31600 - DNA, 639 bp, Artificial Sequence
  chemically treated genomic DNA (Homo sapiens) CpG-island No: 31600
caccaaacgtaacgacaccatcgcttttaacgcgcgtatcacgaacgcacgcattacacgctaacgctaaccgacaaaataaatccgtactctacgaacataaaactaataccgaatcatatttatcgcgcgctttatccttacccgctacacgacataaacgaaaataacgctatcgccaacatccaccgaatcttcaaaaataataccgcgccgaaaaatatcgccgccatcgtaattaaaccgattcaaaacgaaaacgatttctacgcctcgtcgccaacctttatacaacgtttaccgctctatataacgaacacgaaatcatactaattaccgataaaatacaaaacgacgcgaaacgtaccgacacgctatttacgataaaacaaataaacgttacgccgaatcttaccacctttacgaaatcgatcgcgaacgacttcccgctaacgacaatcaccgaacgcgcgaaaataataaatacgtcgctccaaacgatctaaacgacacctatacgaataaccgattacctacgtaactacgctaaaaatattaaaaatatataaacaaaaaaatctactacaaaaaaccaacgatctaaaacaaaaattaaaaaacgaattactaacgatacaa

SEQ ID NO: 31601 - DNA, 500 bp, Artificial Sequence
  chemically treated genomic DNA (Homo sapiens) CpG-island No: 31601
agcgttggcggacgttataaattgttaacgttaattcgtttaaggtttttattaggttacgttcgtgtagtacggttcgtgttgattcgtaagagttattaagaatagttgtttttgaaagttttacgggattcgggtgaaggagatgaacggttaaggagtcgtggttgtcgcgagcgttattgcgtgttgtttaaagcggtatagaaaacgtaatattcggggattagttcgttttagggtttttatattttttttcgatttggaatcgcgggatttcggaaatttacgttgttcgcgtcgggttgggtcgttttagaggtcgtagcgtttacgtttttttttcgttttttcgttttttagtttcggtcgaagttatttcggagttggcggagggcgattcgaggttatttgtttttttggggtcgaggataaaggggttttgatcgttattttttttcgcgaagggtaatatttaattttacggagagtcgttttag

SEQ ID NO: 31602 - DNA, 500 bp, Artificial Sequence
  chemically treated genomic DNA (Homo sapiens) CpG-island No: 31602
ctaaaacgactctccgtaaaattaaatattacccttcgcgaaaaaaaataacgatcaaaacccctttatcctcgaccccaaaaaaacaaataacctcgaatcgccctccgccaactccgaaataacttcgaccgaaactaaaaaacgaaaaaacgaaaaaaaaacgtaaacgctacgacctctaaaacgacccaacccgacgcgaacaacgtaaatttccgaaatcccgcgattccaaatcgaaaaaaaatataaaaaccctaaaacgaactaatccccgaatattacgttttctataccgctttaaacaacacgcaataacgctcgcgacaaccacgactccttaaccgttcatctccttcacccgaatcccgtaaaactttcaaaaacaactattcttaataactcttacgaatcaacacgaaccgtactacacgaacgtaacctaataaaaaccttaaacgaattaacgttaacaatttataacgtccgccaacgct

SEQ ID NO: 31603 - DNA, 500 bp, Artificial Sequence
  chemically treated genomic DNA (Homo sapiens) CpG-island No: 31603
ttgaagcggtttttcgtggagttggatgttgtttttcgcgggagggagtggcggttaagatttttttattttcggttttagaggggtaggtggtttcgggtcgtttttcgttaatttcgaggtggtttcggtcggggttggagggcggggaggcgggggaggggcgtgggcgttgcggtttttggggcggtttaattcggcgcgggtagcgtgggttttcgaggtttcgcggttttaggtcgagggaaggtgtaggggttttgaagcgggttggttttcgaatgttgcgttttttgtgtcgttttgggtaatacgtagtggcgttcgcggtagttacggttttttgatcgtttattttttttattcgggtttcgtggaatttttagaggtaattgtttttggtggtttttgcgggttagtacgagtcgtgttgtacgagcgtgatttagtgaaggttttgggcgagttggcgttaataatttatggcgttcgttagcgtt

SEQ ID NO: 31604 - DNA, 500 bp, Artificial Sequence
  chemically treated genomic DNA (Homo sapiens) CpG-island No: 31604
aacgctaacgaacgccataaattattaacgccaactcgcccaaaaccttcactaaatcacgctcgtacaacacgactcgtactaacccgcaaaaaccaccaaaaacaattacctctaaaaattccacgaaacccgaataaaaaaaataaacgatcaaaaaaccgtaactaccgcgaacgccactacgtattacccaaaacgacacaaaaaacgcaacattcgaaaaccaacccgcttcaaaacccctacaccttccctcgacctaaaaccgcgaaacctcgaaaacccacgctacccgcgccgaattaaaccgccccaaaaaccgcaacgcccacgcccctcccccgcctccccgccctccaaccccgaccgaaaccacctcgaaattaacgaaaaacgacccgaaaccacctacccctctaaaaccgaaaataaaaaaatcttaaccgccactccctcccgcgaaaaacaacatccaactccacgaaaaaccgcttcaa

SEQ ID NO: 31605 - DNA, 747 bp, Artificial Sequence
  chemically treated genomic DNA (Homo sapiens) CpG-island No: 31605
tcggataacgaacgtattttaagttattcgagggaagagaagacgcgaaggtattttagggatcgtatttttgtaggtaaattcgggttgggcgttttcgtcgggaggttggttagtgttcgaatgcggaggtagaaaagttgcggcggtcgaataacgagtttatcgcggtttcgttcgggttagttttcggtttttatggttaacgtttatttcggcggtcgttattcggagttgaacggagcgcgtgcgcgttcggggatttcgtcggcgtttggttggtttcgttgtttcggtttgtgttcgttttcgaggcgggttttgtcgtaaagtaggtttggtttagaggaagtagggaaatagcgcgtttcgttcgcgttaggattaggttaatatttgtttggtcggggacgacgggagtcgttcgtgttttggtttcgtattgggtttagtagaagtagtagcggggaaagtcgagacgttttgaacgtttttttgggtcgggtttttacgtaagagcgtcgttgttttggtgacgtgacgtttttttttaggattgtgcgtcggggtggggaaatagacgtgtaatcgttattttgcgtattaatttattagaggtcgggttaggttgttttaacgtaggtagaggggtgtggtagatttttaatcgttcggggtttcgtgatttttattaatgaattcgtatattggcgttattatttaatatatcgacggtaatgaatgttt

SEQ ID NO: 31606 - DNA, 747 bp, Artificial Sequence
  chemically treated genomic DNA (Homo sapiens) CpG-island No: 31606
aaacattcattaccgtcgatatattaaataataacgccaatatacgaattcattaataaaaatcacgaaaccccgaacgattaaaaatctaccacacccctctacctacgttaaaacaacctaacccgacctctaataaattaatacgcaaaataacgattacacgtctatttccccaccccgacgcacaatcctaaaaaaaaacgtcacgtcaccaaaacaacgacgctcttacgtaaaaacccgacccaaaaaaacgttcaaaacgtctcgactttccccgctactacttctactaaacccaatacgaaaccaaaacacgaacgactcccgtcgtccccgaccaaacaaatattaacctaatcctaacgcgaacgaaacgcgctatttccctacttcctctaaaccaaacctactttacgacaaaacccgcctcgaaaacgaacacaaaccgaaacaacgaaaccaaccaaacgccgacgaaatccccgaacgcgcacgcgctccgttcaactccgaataacgaccgccgaaataaacgttaaccataaaaaccgaaaactaacccgaacgaaaccgcgataaactcgttattcgaccgccgcaacttttctacctccgcattcgaacactaaccaacctcccgacgaaaacgcccaacccgaatttacctacaaaaatacgatccctaaaataccttcgcgtcttctcttccctcgaataacttaaaatacgttcgttatccga

SEQ ID NO: 31607 - DNA, 747 bp, Artificial Sequence
  chemically treated genomic DNA (Homo sapiens) CpG-island No: 31607
aaatatttattatcgtcggtgtgttgagtggtaacgttagtgtgcgaatttattaatggaaattacgggatttcgagcggttggagatttgttatatttttttgtttgcgttaagatagtttgattcgatttttggtaaattaatgcgtaaaatggcggttgtacgtttgtttttttatttcggcgtataattttgaggaaggacgttacgttattagggtaacgacgtttttgcgtaaaggttcggtttaagggaacgtttagggcgtttcggtttttttcgttgttgtttttgttaggtttagtgcgagattagagtacgagcgattttcgtcgttttcggttaggtagatgttggtttagttttggcgcgaacgaagcgcgttatttttttgttttttttaggttaagtttgttttacggtagggttcgtttcgggagcgagtatagatcggggtagcgaggttagttaggcgtcgacgaggttttcgaacgcgtacgcgtttcgtttagtttcgggtggcggtcgtcggagtagacgttagttatggaaatcgagagttggttcgggcggggtcgcggtgagttcgttattcggtcgtcgtagtttttttgttttcgtattcgggtattaattaatttttcggcgggagcgtttagttcgagtttatttgtaaaaatgcggtttttgggatgttttcgcgtttttttttttttcgggtgatttgaggtacgttcgttgttcga

SEQ ID NO: 31608 - DNA, 747 bp, Artificial Sequence
  chemically treated genomic DNA (Homo sapiens) CpG-island No: 31608
tcgaacaacgaacgtacctcaaatcacccgaaaaaaaaaaaaacgcgaaaacatcccaaaaaccgcatttttacaaataaactcgaactaaacgctcccgccgaaaaattaattaatacccgaatacgaaaacaaaaaaactacgacgaccgaataacgaactcaccgcgaccccgcccgaaccaactctcgatttccataactaacgtctactccgacgaccgccacccgaaactaaacgaaacgcgtacgcgttcgaaaacctcgtcgacgcctaactaacctcgctaccccgatctatactcgctcccgaaacgaaccctaccgtaaaacaaacttaacctaaaaaaaacaaaaaaataacgcgcttcgttcgcgccaaaactaaaccaacatctacctaaccgaaaacgacgaaaatcgctcgtactctaatctcgcactaaacctaacaaaaacaacaacgaaaaaaaccgaaacgccctaaacgttcccttaaaccgaacctttacgcaaaaacgtcgttaccctaataacgtaacgtccttcctcaaaattatacgccgaaataaaaaaacaaacgtacaaccgccattttacgcattaatttaccaaaaatcgaatcaaactatcttaacgcaaacaaaaaaatataacaaatctccaaccgctcgaaatcccgtaatttccattaataaattcgcacactaacgttaccactcaacacaccgacgataataaatattt

SEQ ID NO: 31609 - DNA, 542 bp, Artificial Sequence
  chemically treated genomic DNA (Homo sapiens) CpG-island No: 31609
gatagcggcgcggacgggtttgggtgtcgtggaagtcgttgtggttggttagttttaagtagttaataggggcgttcggggtagggaggtttgttattgggcgaggtgaagtgaggaaggggagggacgttttttttgcgttttgtattcgtttgtcgttcgtcggttttacggtggtcgggcgtggggttattcgagtagtttggtcgtggttatcggcggttttgggtgtttgaggtttgcgggtagcgtcggtttttacgtcggtcggagtatgcgattaatcggttttattcgtatgcgttttgttttggttgttttttggttttgacggtcggagtgtcggattttagatggggattttaggtgggagtcgcggggttatatcggggttatttcgggttgagttcgtttgatcggttttcgcgttttttttttttcggttatcgttgtcgggtttatttcgtttttattggtttcggttaggttgttattgaggcggagatacgggtgatgattggttttttggggagagaggaagt

SEQ ID NO: 31610 - DNA, 542 bp, Artificial Sequence
  chemically treated genomic DNA (Homo sapiens) CpG-island No: 31610
acttcctctctccccaaaaaaccaatcatcacccgtatctccgcctcaataacaacctaaccgaaaccaataaaaacgaaataaacccgacaacgataaccgaaaaaaaaaaaacgcgaaaaccgatcaaacgaactcaacccgaaataaccccgatataaccccgcgactcccacctaaaatccccatctaaaatccgacactccgaccgtcaaaaccaaaaaacaaccaaaacaaaacgcatacgaataaaaccgattaatcgcatactccgaccgacgtaaaaaccgacgctacccgcaaacctcaaacacccaaaaccgccgataaccacgaccaaactactcgaataaccccacgcccgaccaccgtaaaaccgacgaacgacaaacgaatacaaaacgcaaaaaaaacgtccctccccttcctcacttcacctcgcccaataacaaacctccctaccccgaacgcccctattaactacttaaaactaaccaaccacaacgacttccacgacacccaaacccgtccgcgccgctatc

SEQ ID NO: 31611 - DNA, 542 bp, Artificial Sequence
  chemically treated genomic DNA (Homo sapiens) CpG-island No: 31611
attttttttttttttagaaagttaattattattcgtgttttcgttttagtaatagtttggtcggaattaatgggagcgaggtgagttcggtagcggtggtcgggggaggaggggcgcgggagtcggttagacgagtttagttcggggtgatttcgatgtgatttcgcggtttttatttagggtttttatttaggattcgatatttcggtcgttagggttagaaggtagttaggataagacgtatgcggatgaggtcggttagtcgtatgtttcggtcggcgtgggggtcggcgttattcgtaagttttaagtatttagagtcgtcggtggttacggttaggttgttcgagtagttttacgttcggttatcgtaagatcgacggacgatagacggatgtagaacgtaaaaaagacgtttttttttttttttattttatttcgtttagtgatagatttttttatttcgagcgtttttattaattgtttagggttggttagttatagcgatttttacggtatttaaattcgttcgcgtcgttatt

SEQ ID NO: 31612 - DNA, 542 bp, Artificial Sequence
  chemically treated genomic DNA (Homo sapiens) CpG-island No: 31612
aataacgacgcgaacgaatttaaataccgtaaaaatcgctataactaaccaaccctaaacaattaataaaaacgctcgaaataaaaaaatctatcactaaacgaaataaaataaaaaaaaaaaaaaacgtcttttttacgttctacatccgtctatcgtccgtcgatcttacgataaccgaacgtaaaactactcgaacaacctaaccgtaaccaccgacgactctaaatacttaaaacttacgaataacgccgacccccacgccgaccgaaacatacgactaaccgacctcatccgcatacgtcttatcctaactaccttctaaccctaacgaccgaaatatcgaatcctaaataaaaaccctaaataaaaaccgcgaaatcacatcgaaatcaccccgaactaaactcgtctaaccgactcccgcgcccctcctcccccgaccaccgctaccgaactcacctcgctcccattaattccgaccaaactattactaaaacgaaaacacgaataataattaactttctaaaaaaaaaaaaaat

SEQ ID NO: 31613 - DNA, 630 bp, Artificial Sequence
  chemically treated genomic DNA (Homo sapiens) CpG-island No: 31613
cgaggggcgttcgcgcggtcgttttttttttacgtgttttttttttacgtcgtcgttcggtcgttagggtttcggcggtttttcgttcggttagggagggggttttggtttcgttttggtcgttttttgtttatttttttttcgtcgagggtaaaaaaaaaatttttttttttttttttttcgaaagtcgcgatcgagtggttcggttcgcgcgcgtagttcgcgtttagcgttttttagtcggggtggcggcggcggcggcggcggcggcgggggaggggtgcggcgggggaggggaggaggtttggtttcgcggtcgtagtcgttatcgttcgtttcgatttttcggatcgtcgcggggttacgggttcgagtttcggattcgcgtttcggattcgtttcggttcggtcgcgcggtgggtgtttcgttttcgttcggtttcgcgcgttcgcggtttttattcgggtttggggggggagtcggggcggtcgtttatttggcggcgggggcggcggcggcgggggtagcggtggcggcggcggcggcggcggcgggaagaggtggtagtcgggggggttgtggcggtcgcggtttcggtcgtggttcggttcgcgttcgagtattttttt

SEQ ID NO: 31614 - DNA, 630 bp, Artificial Sequence
  chemically treated genomic DNA (Homo sapiens) CpG-island No: 31614
aaaaaaatactcgaacgcgaaccgaaccacgaccgaaaccgcgaccgccacaacccccccgactaccacctcttcccgccgccgccgccgccgccgccaccgctacccccgccgccgccgcccccgccgccaaataaacgaccgccccgactccccccccaaacccgaataaaaaccgcgaacgcgcgaaaccgaacgaaaacgaaacacccaccgcgcgaccgaaccgaaacgaatccgaaacgcgaatccgaaactcgaacccgtaaccccgcgacgatccgaaaaatcgaaacgaacgataacgactacgaccgcgaaaccaaacctcctcccctcccccgccgcacccctcccccgccgccgccgccgccgccgccgccaccccgactaaaaaacgctaaacgcgaactacgcgcgcgaaccgaaccactcgatcgcgactttcgaaaaaaaaaaaaaaaaaaattttttttttaccctcgacgaaaaaaaaataaacaaaaaacgaccaaaacgaaaccaaaaccccctccctaaccgaacgaaaaaccgccgaaaccctaacgaccgaacgacgacgtaaaaaaaaaacacgtaaaaaaaaaacgaccgcgcgaacgcccctcg

SEQ ID NO: 31615 - DNA, 630 bp, Artificial Sequence
  chemically treated genomic DNA (Homo sapiens) CpG-island No: 31615
gagggagtattcgggcgcgggtcgggttacgatcggggtcgcgatcgttatagttttttcggttgttattttttttcgtcgtcgtcgtcgtcgtcgttatcgttgttttcgtcgtcgtcgttttcgtcgttaggtaagcggtcgtttcgattttttttttaagttcgagtgggagtcgcgggcgcgcgaagtcgggcgggggcgaggtatttatcgcgcggtcgagtcgaggcgaattcggagcgcgaattcggggttcgggttcgtggtttcgcggcggttcgggaggtcggggcgggcggtggcggttgcgatcgcggggttaggtttttttttttttttcgtcgtatttttttttcgtcgtcgtcgtcgtcgtcgtcgttatttcggttggagagcgttgggcgcgagttgcgcgcgcggatcgggttattcggtcgcggttttcgggggaggaggaggaggaggttttttttttattttcggcggggagggggtaggtaggaaacggttaaggcgaagttagggttttttttttggtcgagcgagggatcgtcgagattttggcggtcggacggcggcgtgggggaggggtacgtgggggaggggcggtcgcgcgagcgtttttcg

SEQ ID NO: 31616 - DNA, 630 bp, Artificial Sequence
  chemically treated genomic DNA (Homo sapiens) CpG-island No: 31616
cgaaaaacgctcgcgcgaccgcccctcccccacgtacccctcccccacgccgccgtccgaccgccaaaatctcgacgatccctcgctcgaccaaaaaaaaaaccctaacttcgccttaaccgtttcctacctaccccctccccgccgaaaataaaaaaaaaacctcctcctcctcctcccccgaaaaccgcgaccgaataacccgatccgcgcgcgcaactcgcgcccaacgctctccaaccgaaataacgacgacgacgacgacgacgacgaaaaaaaaatacgacgaaaaaaaaaaaaaaacctaaccccgcgatcgcaaccgccaccgcccgccccgacctcccgaaccgccgcgaaaccacgaacccgaaccccgaattcgcgctccgaattcgcctcgactcgaccgcgcgataaatacctcgcccccgcccgacttcgcgcgcccgcgactcccactcgaacttaaaaaaaaaatcgaaacgaccgcttacctaacgacgaaaacgacgacgacgaaaacaacgataacgacgacgacgacgacgacgaaaaaaaataacaaccgaaaaaactataacgatcgcgaccccgatcgtaacccgacccgcgcccgaatactccctc

SEQ ID NO: 31617 - DNA, 657 bp, Artificial Sequence
  chemically treated genomic DNA (Homo sapiens) CpG-island No: 31617
ttcgttttcggttttcgagaatcgcgcgaagaggattttgtcgttgtttttcggtcgttttcgatttagtttggcgagttttattatggcgcggaagcgttcgcgttgttcgggagattttttttgcggatgtacgaagttggttcgagggcgtttagtcgttcgtcgtagaggcgtttttattttttcgtcgttcgcggcgtttcgtaggtcgttcgtttatcgcgtaggggttgaaggcgtttcgtttggcgcgtaggaagttggagaggttgtcgtatttgtagaattttacgattattatgagggggtttgcggcgggatcgggcggcggtcgtgcgttcggaattcggggcgcgttgcgggcgcgtttcgcgtttgtattcgcgttttttttcgttcgcggcgtttcgcgttcggggtttcgtcgttttagcgggtcgttcgtttcgtattttgcggtttggtgtacgtttcgaggaggttgattacgttgaggtggttgtcgatgtgaatgaggattttgagtttcgatattagcgcgcggtgttcgttggtcgtggcgttttttggaggggatacgggttttatatcggtttcgattttggtaggttttcgtttttcgttattcggcgtttttgggagggggagggttat

SEQ ID NO: 31618 - DNA, 657 bp, Artificial Sequence
  chemically treated genomic DNA (Homo sapiens) CpG-island No: 31618
ataaccctccccctcccaaaaacgccgaataacgaaaaacgaaaacctaccaaaatcgaaaccgatataaaacccgtatcccctccaaaaaacgccacgaccaacgaacaccgcgcgctaatatcgaaactcaaaatcctcattcacatcgacaaccacctcaacgtaatcaacctcctcgaaacgtacaccaaaccgcaaaatacgaaacgaacgacccgctaaaacgacgaaaccccgaacgcgaaacgccgcgaacgaaaaaaaacgcgaatacaaacgcgaaacgcgcccgcaacgcgccccgaattccgaacgcacgaccgccgcccgatcccgccgcaaaccccctcataataatcgtaaaattctacaaatacgacaacctctccaacttcctacgcgccaaacgaaacgccttcaacccctacgcgataaacgaacgacctacgaaacgccgcgaacgacgaaaaaataaaaacgcctctacgacgaacgactaaacgccctcgaaccaacttcgtacatccgcaaaaaaaatctcccgaacaacgcgaacgcttccgcgccataataaaactcgccaaactaaatcgaaaacgaccgaaaaacaacgacaaaatcctcttcgcgcgattctcgaaaaccgaaaacgaa

SEQ ID NO: 31619 - DNA, 657 bp, Artificial Sequence
  chemically treated genomic DNA (Homo sapiens) CpG-island No: 31619
gtaatttttttttttttaaaagcgtcgggtggcggggaacggggatttgttagggtcggggtcggtgtgaggttcgtgttttttttagagggcgttacggttagcgagtatcgcgcgttgatgtcggagtttaagatttttatttatatcggtaattattttaacgtggttaattttttcggggcgtgtattaagtcgtagggtacggagcgggcggttcgttgggacggcgagatttcgggcgcggggcgtcgcgggcgggagggggcgcgggtgtaaacgcggagcgcgttcgtagcgcgtttcgggtttcgaacgtacggtcgtcgttcggtttcgtcgtaggtttttttatggtgatcgtggagttttgtaagtacggtaatttttttaattttttgcgcgttaagcgggacgtttttagtttttgcgcggtgagcgggcggtttgcggggcgtcgcgggcggcgggggaatggaggcgtttttgcggcggacgattgggcgttttcgagttagtttcgtgtattcgtaggagaagtttttcgagtagcgcggacgttttcgcgttatggtggagttcgttaggttggatcggaggcggtcggggagtagcgatagggtttttttcgcgcggttttcgaagatcgagggcgga

SEQ ID NO: 31620 - DNA, 657 bp, Artificial Sequence
  chemically treated genomic DNA (Homo sapiens) CpG-island No: 31620
tccgccctcgatcttcgaaaaccgcgcgaaaaaaaccctatcgctactccccgaccgcctccgatccaacctaacgaactccaccataacgcgaaaacgtccgcgctactcgaaaaacttctcctacgaatacacgaaactaactcgaaaacgcccaatcgtccgccgcaaaaacgcctccattcccccgccgcccgcgacgccccgcaaaccgcccgctcaccgcgcaaaaactaaaaacgtcccgcttaacgcgcaaaaaattaaaaaaattaccgtacttacaaaactccacgatcaccataaaaaaacctacgacgaaaccgaacgacgaccgtacgttcgaaacccgaaacgcgctacgaacgcgctccgcgtttacacccgcgccccctcccgcccgcgacgccccgcgcccgaaatctcgccgtcccaacgaaccgcccgctccgtaccctacgacttaatacacgccccgaaaaaattaaccacgttaaaataattaccgatataaataaaaatcttaaactccgacatcaacgcgcgatactcgctaaccgtaacgccctctaaaaaaaacacgaacctcacaccgaccccgaccctaacaaatccccgttccccgccacccgacgcttttaaaaaaaaaaaaattac

SEQ ID NO: 31621 - DNA, 530 bp, Artificial Sequence
  chemically treated genomic DNA (Homo sapiens) CpG-island No: 31621
gagttttttcgttttacgagcgcggttttagcggaggttggtttttgtcggtttttcgttattttgatggttttcgttttgggaatttttcgatttgggagtatttaggaaagatttcgcgttcgtattcgcgcgggtttaggcgcgtttcgtcgtttttttttcgcgttcgggaataggagttagaggggcgcggggttgcggcgtagcggagtcgcggttaggcggtttaggcggggttagaatagtggtcgcggtgtttcgggttcgtcgttcgttttttattcgtagttatatcgcgtatacgcgggttttgcggttgttttttttgataaaggagttcgttcggcgttcggattgcgcgtatcggaggttttgaaggagcggtttttggagcgcgttttgcgtcggagttttggaggatgttatagattcggagggggtgtcggggttttgttttagattcgttttaacgttgcgaggataacgattttttagttcgttttaggtaggaggcgtagtggtttttt

SEQ ID NO: 31622 - DNA, 530 bp, Artificial Sequence
  chemically treated genomic DNA (Homo sapiens) CpG-island No: 31622
aaaaaaccactacgcctcctacctaaaacgaactaaaaaatcgttatcctcgcaacgttaaaacgaatctaaaacaaaaccccgacaccccctccgaatctataacatcctccaaaactccgacgcaaaacgcgctccaaaaaccgctccttcaaaacctccgatacgcgcaatccgaacgccgaacgaactcctttatcaaaaaaaacaaccgcaaaacccgcgtatacgcgatataactacgaataaaaaacgaacgacgaacccgaaacaccgcgaccactattctaaccccgcctaaaccgcctaaccgcgactccgctacgccgcaaccccgcgcccctctaactcctattcccgaacgcgaaaaaaaaacgacgaaacgcgcctaaacccgcgcgaatacgaacgcgaaatctttcctaaatactcccaaatcgaaaaattcccaaaacgaaaaccatcaaaataacgaaaaaccgacaaaaaccaacctccgctaaaaccgcgctcgtaaaacgaaaaaactc

SEQ ID NO: 31623 - DNA, 530 bp, Artificial Sequence
  chemically treated genomic DNA (Homo sapiens) CpG-island No: 31623
aggggattattgcgttttttgtttgaggcgggttggggggtcgttgttttcgtagcgttaaggcgagtttgggataggatttcggtatttttttcggatttgtggtattttttaggatttcggcgtaggacgcgttttaggagtcgtttttttagggttttcggtgcgcgtagttcgggcgtcggacgagtttttttattagaaagggtagtcgtagagttcgcgtgtgcgcgatgtggttgcgggtggggagcgggcggcgggttcgggatatcgcggttattgttttagtttcgtttgggtcgtttgatcgcggtttcgttgcgtcgtagtttcgcgtttttttggtttttgttttcgggcgcggggagaaggcggcggggcgcgtttgggttcgcgcgggtgcgaacgcgaggttttttttgggtgtttttaggtcggaggatttttagggcgggggttattagggtggcgaggaatcggtagggattagttttcgttaggatcgcgttcgtggagcggggaggttt

SEQ ID NO: 31624 - DNA, 530 bp, Artificial Sequence
  chemically treated genomic DNA (Homo sapiens) CpG-island No: 31624
aaacctccccgctccacgaacgcgatcctaacgaaaactaatccctaccgattcctcgccaccctaataacccccgccctaaaaatcctccgacctaaaaacacccaaaaaaaacctcgcgttcgcacccgcgcgaacccaaacgcgccccgccgccttctccccgcgcccgaaaacaaaaaccaaaaaaacgcgaaactacgacgcaacgaaaccgcgatcaaacgacccaaacgaaactaaaacaataaccgcgatatcccgaacccgccgcccgctccccacccgcaaccacatcgcgcacacgcgaactctacgactaccctttctaataaaaaaactcgtccgacgcccgaactacgcgcaccgaaaaccctaaaaaaacgactcctaaaacgcgtcctacgccgaaatcctaaaaaataccacaaatccgaaaaaaataccgaaatcctatcccaaactcgccttaacgctacgaaaacaacgaccccccaacccgcctcaaacaaaaaacgcaataatcccct

SEQ ID NO: 31625 - DNA, 1062 bp, Artificial Sequence
  chemically treated genomic DNA (Homo sapiens) CpG-island No: 31625
tagttcgcgattcgtttttttaagattcgttttaagtgttagcgtgtatttgtattcgttcgtttcgggcgcgcggtggttttcggtttttgttttcgtcgtcgtcggttacggggagggggaagttcgtttcgagcgttttttgggggatcgatcgcgagcggaggcgttgggcgtcgggaagtgcgtatttaagttcggggttcggtcgggatggattttcggcgcgcgtgggtcgggacggcgcggcgcggggatttcgcggggaagcgagtaagggcgcgaaggattcgggtttagcgcgtagttcggtagggttcggtttcgaggacgcggagttatcgacggagacgcggatttaggggtcgggagagttatttttgcgtcgaggcgcggttcggtcgttttggttttgattcggttgcggttttcgttcgttttttttttatttcgaggtttcgcgttttaagcgtcgtgttttttttaggcgttcgcgtattagggttatcgtgtttttcgttcgtattcggcggagcggttttagcgttcgttttaggtgcgcggtatttttttttcggttagttttacgttcgggcgggtggttcgttcgtcgcgtttatcgtttaggagttttaggtagagttatagtcgtaggtatagcgcggcgtttcgttgtattttcggtcgttgcgcgtgggttcgattcgagcggtcgcggttcggggttgaaagtgttcgcgcgggcgtcggttggtttggggcggggcggggcggggcgggggtcggaggcgggttcgggatttaggtcgtttttcgcgttttttttttttcgttttttttagttcgtcgcggggcgttcggtgtattcgagtagtgcgcgtttcgtattatagggttcgggtttttttttgggcggtttcgggcgcggggacgcgggtaacgtagacggtttcgcgatgcgtttcggaggtgatggagtttggtgggtaaaggggagtaaaatgcggtacgcgttttttttcgttttttttttttatcggtaaaatttagattaaataagaa

SEQ ID NO: 31626 - DNA, 1062 bp, Artificial Sequence
  chemically treated genomic DNA (Homo sapiens) CpG-island No: 31626
ttcttatttaatctaaattttaccgataaaaaaaaaaaacgaaaaaaaacgcgtaccgcattttactcccctttacccaccaaactccatcacctccgaaacgcatcgcgaaaccgtctacgttacccgcgtccccgcgcccgaaaccgcccaaaaaaaaacccgaaccctataatacgaaacgcgcactactcgaatacaccgaacgccccgcgacgaactaaaaaaaacgaaaaaaaaaaaacgcgaaaaacgacctaaatcccgaacccgcctccgacccccgccccgccccgccccgccccaaaccaaccgacgcccgcgcgaacactttcaaccccgaaccgcgaccgctcgaatcgaacccacgcgcaacgaccgaaaatacaacgaaacgccgcgctatacctacgactataactctacctaaaactcctaaacgataaacgcgacgaacgaaccacccgcccgaacgtaaaactaaccgaaaaaaaaataccgcgcacctaaaacgaacgctaaaaccgctccgccgaatacgaacgaaaaacacgataaccctaatacgcgaacgcctaaaaaaaacacgacgcttaaaacgcgaaacctcgaaataaaaaaaaaacgaacgaaaaccgcaaccgaatcaaaaccaaaacgaccgaaccgcgcctcgacgcaaaaataactctcccgacccctaaatccgcgtctccgtcgataactccgcgtcctcgaaaccgaaccctaccgaactacgcgctaaacccgaatccttcgcgcccttactcgcttccccgcgaaatccccgcgccgcgccgtcccgacccacgcgcgccgaaaatccatcccgaccgaaccccgaacttaaatacgcacttcccgacgcccaacgcctccgctcgcgatcgatcccccaaaaaacgctcgaaacgaacttccccctccccgtaaccgacgacgacgaaaacaaaaaccgaaaaccaccgcgcgcccgaaacgaacgaatacaaatacacgctaacacttaaaacgaatcttaaaaaaacgaatcgcgaacta

SEQ ID NO: 31627 - DNA, 1062 bp, Artificial Sequence
  chemically treated genomic DNA (Homo sapiens) CpG-island No: 31627
tttttgtttagtttagattttatcgatggaaagaaaggacggaaaagagcgcgtgtcgtattttgtttttttttgtttattaggttttattattttcggagcgtatcgcgagatcgtttgcgttattcgcgttttcgcgttcggagtcgtttaggagggggttcggattttgtggtgcggagcgcgtattgttcgggtgtatcggacgtttcgcggcgggttgggagggacggggggaggggggcgcggggagcggtttgaatttcgggttcgttttcggttttcgtttcgtttcgtttcgttttaggttagtcggcgttcgcgcggatatttttagtttcgagtcgcggtcgttcgggtcggatttacgcgtagcggtcggagatgtagcggggcgtcgcgttgtgtttgcgattgtggttttgtttgggatttttggacggtgagcgcggcgaacgggttattcgttcgagcgtggggttggtcggggagggggtatcgcgtatttggggcgggcgttgagatcgtttcgtcgggtacgggcgggggatacggtggttttggtgcgcggacgtttgaggggagtacggcgtttggggcgcgggatttcgggatgaggaaggggcgggcggggatcgtagtcgggttagggttagggcggtcgggtcgcgtttcggcgtaggggtagttttttcggtttttgaattcgcgttttcgtcggtggtttcgcgttttcggagtcgggttttgtcgggttgcgcgttgagttcggatttttcgcgtttttattcgttttttcgcggggttttcgcgtcgcgtcgtttcgatttacgcgcgtcggagatttatttcggtcgggtttcggatttgggtgcgtatttttcgacgtttagcgttttcgttcgcggtcggttttttagagggcgttcgaggcgggttttttttttttcgtggtcggcgacggcggggataggggtcggggattatcgcgcgttcgaggcggacgggtgtaggtgtacgttggtatttgagacgaattttgaggaggcgaatcgcgggttg

SEQ ID NO: 31628 - DNA, 1062 bp, Artificial Sequence
  chemically treated genomic DNA (Homo sapiens) CpG-island No: 31628
caacccgcgattcgcctcctcaaaattcgtctcaaataccaacgtacacctacacccgtccgcctcgaacgcgcgataatccccgacccctatccccgccgtcgccgaccacgaaaaaaaaaaaacccgcctcgaacgccctctaaaaaaccgaccgcgaacgaaaacgctaaacgtcgaaaaatacgcacccaaatccgaaacccgaccgaaataaatctccgacgcgcgtaaatcgaaacgacgcgacgcgaaaaccccgcgaaaaaacgaataaaaacgcgaaaaatccgaactcaacgcgcaacccgacaaaacccgactccgaaaacgcgaaaccaccgacgaaaacgcgaattcaaaaaccgaaaaaactacccctacgccgaaacgcgacccgaccgccctaaccctaacccgactacgatccccgcccgccccttcctcatcccgaaatcccgcgccccaaacgccgtactcccctcaaacgtccgcgcaccaaaaccaccgtatcccccgcccgtacccgacgaaacgatctcaacgcccgccccaaatacgcgataccccctccccgaccaaccccacgctcgaacgaataacccgttcgccgcgctcaccgtccaaaaatcccaaacaaaaccacaatcgcaaacacaacgcgacgccccgctacatctccgaccgctacgcgtaaatccgacccgaacgaccgcgactcgaaactaaaaatatccgcgcgaacgccgactaacctaaaacgaaacgaaacgaaacgaaaaccgaaaacgaacccgaaattcaaaccgctccccgcgcccccctccccccgtccctcccaacccgccgcgaaacgtccgatacacccgaacaatacgcgctccgcaccacaaaatccgaaccccctcctaaacgactccgaacgcgaaaacgcgaataacgcaaacgatctcgcgatacgctccgaaaataataaaacctaataaacaaaaaaaaacaaaatacgacacgcgctcttttccgtcctttctttccatcgataaaatctaaactaaacaaaaa

SEQ ID NO: 31629 - DNA, 876 bp, Artificial Sequence
  chemically treated genomic DNA (Homo sapiens) CpG-island No: 31629
ttacgatatgcgtatacgacgaattttcgtatttagcggggtaggtttcgttttttatttttttagtcggtaggatttgtttttttttgaggatgagtgaggatagtcgtagttcggcggggacggttcgttagtttagagcgtcggtattcgagtttcgtcgtcggagtcgcgtttggagtcgcggtgggggaggggtagcggcggttcgcgttgcgtcgagttttttagaatttttagcggtcgcggggaaagtttacgggatgtaggcggcggcggcggtagtggtagcggttattcggcggttcgcggcggattatggttttggttcggcgtcgttgggttttttttacggcgttttcgagtagcgtcgtagagcgggtcgattttcgggaaggaattgattagcgattgagcggcggtcggcgcgtttagcgttttgaatatgcggtagtttttgcgggcgatttcgggtttcggataggcggcggcggaggcggcggttcgggagggaaggaggcggcggcgtcggcggaggtggcggcggagacggtcggcgttcggcgcggagttttagggaggtagtttagcgcggtttcgggtttcgtcgagaaggatgttgtttcgaaagaaatttaaaaacgaagtgtttaagtcggtcgaggtgtaggggaagtacgtgaagaaggagacgtcgtttttgtttcggagtgagtgttaggcggggcgtgtttatatttggtttaggcggttaggtgtttcggggattttggcgggggcgtcggcgggtttttagggtttttttttcgtttttggtcgcgtgaaatattggttttgagatttttttgtgtttgaagtggtattcgttgattgaaa

SEQ ID NO: 31630 - DNA, 876 bp, Artificial Sequence
  chemically treated genomic DNA (Homo sapiens) CpG-island No: 31630
tttcaatcaacgaataccacttcaaacacaaaaaaatctcaaaaccaatatttcacgcgaccaaaaacgaaaaaaaaaccctaaaaacccgccgacgcccccgccaaaatccccgaaacacctaaccgcctaaaccaaatataaacacgccccgcctaacactcactccgaaacaaaaacgacgtctccttcttcacgtacttcccctacacctcgaccgacttaaacacttcgtttttaaatttctttcgaaacaacatccttctcgacgaaacccgaaaccgcgctaaactacctccctaaaactccgcgccgaacgccgaccgtctccgccgccacctccgccgacgccgccgcctccttccctcccgaaccgccgcctccgccgccgcctatccgaaacccgaaatcgcccgcaaaaactaccgcatattcaaaacgctaaacgcgccgaccgccgctcaatcgctaatcaattccttcccgaaaatcgacccgctctacgacgctactcgaaaacgccgtaaaaaaaacccaacgacgccgaaccaaaaccataatccgccgcgaaccgccgaataaccgctaccactaccgccgccgccgcctacatcccgtaaactttccccgcgaccgctaaaaattctaaaaaactcgacgcaacgcgaaccgccgctacccctcccccaccgcgactccaaacgcgactccgacgacgaaactcgaataccgacgctctaaactaacgaaccgtccccgccgaactacgactatcctcactcatcctcaaaaaaaaacaaatcctaccgactaaaaaaataaaaaacgaaacctaccccgctaaatacgaaaattcgtcgtatacgcatatcgtaa

SEQ ID NO: 31631 - DNA, 876 bp, Artificial Sequence
  chemically treated genomic DNA (Homo sapiens) CpG-island No: 31631
ttttaattaacgaatattattttagatataagaaaattttaaaattagtattttacgcgattaaggacgaaggagaagttttggagattcgtcggcgttttcgttagggttttcggagtatttggtcgtttgggttaggtgtgggtacgtttcgtttgatatttatttcgaagtagaggcgacgtttttttttttacgtattttttttgtatttcggtcggtttggatatttcgtttttgggtttttttcgggatagtatttttttcgacgaggttcgaggtcgcgttgaattgtttttttagggtttcgcgtcgggcgtcggtcgttttcgtcgttattttcgtcggcgtcgtcgtttttttttttttcgagtcgtcgttttcgtcgtcgtttgttcggagttcggggtcgttcgtagggattgtcgtatgtttagggcgttaagcgcgtcggtcgtcgtttagtcgttggttagttttttttcggaagtcggttcgttttgcgacgttgttcggggacgtcgtgaggaaagtttagcgacgtcgggttagggttatggttcgtcgcgggtcgtcgaataatcgttattattatcgtcgtcgtcgtttatatttcgtaaatttttttcgcggtcgttgggaattttgggaagttcgacgtagcgcgggtcgtcgttgttttttttttatcgcggttttaggcgcggtttcggcggcgggattcgggtgtcggcgttttaggttaacgggtcgttttcgtcgagttgcggttgtttttatttatttttagagagaagtaggttttgtcgattgagaagatgaaggacgaaatttgtttcgttgagtgcgggagttcgtcgtatgcgtatgtcgtgg

SEQ ID NO: 31632 - DNA, 876 bp, Artificial Sequence
  chemically treated genomic DNA (Homo sapiens) CpG-island No: 31632
ccacgacatacgcatacgacgaactcccgcactcaacgaaacaaatttcgtccttcatcttctcaatcgacaaaacctacttctctctaaaaataaataaaaacaaccgcaactcgacgaaaacgacccgttaacctaaaacgccgacacccgaatcccgccgccgaaaccgcgcctaaaaccgcgataaaaaaaaaacaacgacgacccgcgctacgtcgaacttcccaaaattcccaacgaccgcgaaaaaaatttacgaaatataaacgacgacgacgataataataacgattattcgacgacccgcgacgaaccataaccctaacccgacgtcgctaaactttcctcacgacgtccccgaacaacgtcgcaaaacgaaccgacttccgaaaaaaaactaaccaacgactaaacgacgaccgacgcgcttaacgccctaaacatacgacaatccctacgaacgaccccgaactccgaacaaacgacgacgaaaacgacgactcgaaaaaaaaaaaaacgacgacgccgacgaaaataacgacgaaaacgaccgacgcccgacgcgaaaccctaaaaaaacaattcaacgcgacctcgaacctcgtcgaaaaaaatactatcccgaaaaaaacccaaaaacgaaatatccaaaccgaccgaaatacaaaaaaaatacgtaaaaaaaaaaacgtcgcctctacttcgaaataaatatcaaacgaaacgtacccacacctaacccaaacgaccaaatactccgaaaaccctaacgaaaacgccgacgaatctccaaaacttctccttcgtccttaatcgcgtaaaatactaattttaaaattttcttatatctaaaataatattcgttaattaaaa

SEQ ID NO: 31633 - DNA, 1036 bp, Artificial Sequence
  chemically treated genomic DNA (Homo sapiens) CpG-island No: 31633
gggcgcggtggcgcggtcgggagggtgttgtgtttttagtaggttttagggcggtattttggttttgcggtcggagtgttcgggcgggtcgttgggcgtcgatttatgttggttgggaacgtgtttttcggtgacgtagtttcgggtggggaacgtggtgcggcggcggcggcggcggcgattgtacgcgttttcgtcgttttcgagaggacgcgtcgtgtagcggttgagtggcggcggcggcgacggtaaattcggagttgtcggtcggcgcgcgggaggaggacgcgggtgcggtttaggaagtaggtttcgggtttcgcgtttaataaagacggggtcgtttttattaggtacggagtcggttttgggtttcggttggcggggaggtttcgtcgggtagttcgcgggcggtcggggagggggaagggtcgtagatcgaacggggatacggggcgtcgggggtttttttaggttttttttttttttacggtttttggcgggacggaagggaaggggtcgggtcgcgagggcgcgggtcgttgggggtcgtagtttgcgacgttaattagtttttgttcgtttttcgtgtagacggagttgcgggcggaggttttatgttgggaagcggcgtcgttcgtgtttgttagcgggaattcgggagtcgcggggtgagttggcgggggtcgggttttaagtgaagatggaggtttcgttgcggtttgtcgcggatattttgaggcggaattcgtagtaggattacgaattcgtttagagggtcggtagcggtatttacggggacgtttataaggtaagtgaggttggtcgtgttttttttttgcggtcgattgggtttcgggaatggggttatttttttgcgaagtattggggcgagaggaggatgtttttattgttgttttttggggagaaagcggtcggggttttttttattcggttttgagtattttcgatttatggtttgttttaatcgttattaataggtagaattaattatatagttgtaaatcgttgttgt

SEQ ID NO: 31634 - DNA, 1036 bp, Artificial Sequence
  chemically treated genomic DNA (Homo sapiens) CpG-island No: 31634
acaacaacgatttacaactatataattaattctacctattaataacgattaaaacaaaccataaatcgaaaatactcaaaaccgaataaaaaaaaccccgaccgctttctccccaaaaaacaacaataaaaacatcctcctctcgccccaatacttcgcaaaaaaataaccccattcccgaaacccaatcgaccgcaaaaaaaaaacacgaccaacctcacttaccttataaacgtccccgtaaataccgctaccgaccctctaaacgaattcgtaatcctactacgaattccgcctcaaaatatccgcgacaaaccgcaacgaaacctccatcttcacttaaaacccgacccccgccaactcaccccgcgactcccgaattcccgctaacaaacacgaacgacgccgcttcccaacataaaacctccgcccgcaactccgtctacacgaaaaacgaacaaaaactaattaacgtcgcaaactacgacccccaacgacccgcgccctcgcgacccgaccccttcccttccgtcccgccaaaaaccgtaaaaaaaaaaaaaacctaaaaaaacccccgacgccccgtatccccgttcgatctacgacccttccccctccccgaccgcccgcgaactacccgacgaaacctccccgccaaccgaaacccaaaaccgactccgtacctaataaaaacgaccccgtctttattaaacgcgaaacccgaaacctacttcctaaaccgcacccgcgtcctcctcccgcgcgccgaccgacaactccgaatttaccgtcgccgccgccgccactcaaccgctacacgacgcgtcctctcgaaaacgacgaaaacgcgtacaatcgccgccgccgccgccgccgcaccacgttccccacccgaaactacgtcaccgaaaaacacgttcccaaccaacataaatcgacgcccaacgacccgcccgaacactccgaccgcaaaaccaaaataccgccctaaaacctactaaaaacacaacaccctcccgaccgcgccaccgcgccc

SEQ ID NO: 31635 - DNA, 1036 bp, Artificial Sequence
  chemically treated genomic DNA (Homo sapiens) CpG-island No: 31635
gtaatagcggtttgtaattgtgtggttagttttgtttgttggtagcgattagaataagttatgagtcgagggtgtttagaatcgagtaaaagggatttcggtcgttttttttttaagaggtaataataaaagtatttttttttcgttttaatatttcgtaggaaagtggttttattttcgggatttagtcgatcgtaggaaaaaagtacggttagttttatttattttatagacgttttcgtaggtgtcgttgtcgattttttggacgagttcgtagttttgttgcgggtttcgttttaggatgttcgcggtaggtcgtagcggggtttttatttttatttagggttcggttttcgttagtttatttcgcggttttcggattttcgttaataagtacgaacggcgtcgttttttaatatggagttttcgttcgtagtttcgtttgtacgagggacgagtaaaggttggttggcgtcgtaggttacgatttttagcggttcgcgttttcgcggttcggttttttttttttcgtttcgttaggggtcgtggaagagaaaggggtttggaagggttttcggcgtttcgtattttcgttcggtttgcggttttttttttttttcggtcgttcgcgaattgttcgacgaggttttttcgttagtcggggtttagggtcggtttcgtatttaatgggggcggtttcgtttttgttgagcgcggagttcgggatttattttttagatcgtattcgcgtttttttttcgcgcgtcggtcggtagtttcgggtttgtcgtcgtcgtcgtcgttatttagtcgttgtacggcgcgttttttcgggggcggcggaggcgcgtatagtcgtcgtcgtcgtcgtcgtcgtattacgttttttattcggggttgcgttatcgggagatacgtttttagttagtatgggtcggcgtttagcggttcgttcgagtatttcggtcgtagaattagagtgtcgttttgaggtttgttgagaatataatattttttcgatcgcgttatcgcgttt

SEQ ID NO: 31636 - DNA, 1036 bp, Artificial Sequence
  chemically treated genomic DNA (Homo sapiens) CpG-island No: 31636
aaacgcgataacgcgatcgaaaaaatattatattctcaacaaacctcaaaacgacactctaattctacgaccgaaatactcgaacgaaccgctaaacgccgacccatactaactaaaaacgtatctcccgataacgcaaccccgaataaaaaacgtaatacgacgacgacgacgacgacgactatacgcgcctccgccgcccccgaaaaaacgcgccgtacaacgactaaataacgacgacgacgacgacaaacccgaaactaccgaccgacgcgcgaaaaaaaaacgcgaatacgatctaaaaaataaatcccgaactccgcgctcaacaaaaacgaaaccgcccccattaaatacgaaaccgaccctaaaccccgactaacgaaaaaacctcgtcgaacaattcgcgaacgaccgaaaaaaaaaaaaaaccgcaaaccgaacgaaaatacgaaacgccgaaaacccttccaaacccctttctcttccacgacccctaacgaaacgaaaaaaaaaaaaccgaaccgcgaaaacgcgaaccgctaaaaatcgtaacctacgacgccaaccaacctttactcgtccctcgtacaaacgaaactacgaacgaaaactccatattaaaaaacgacgccgttcgtacttattaacgaaaatccgaaaaccgcgaaataaactaacgaaaaccgaaccctaaataaaaataaaaaccccgctacgacctaccgcgaacatcctaaaacgaaacccgcaacaaaactacgaactcgtccaaaaaatcgacaacgacacctacgaaaacgtctataaaataaataaaactaaccgtacttttttcctacgatcgactaaatcccgaaaataaaaccactttcctacgaaatattaaaacgaaaaaaaaatacttttattattacctcttaaaaaaaaaacgaccgaaatcccttttactcgattctaaacaccctcgactcataacttattctaatcgctaccaacaaacaaaactaaccacacaattacaaaccgctattac

SEQ ID NO: 31637 - DNA, 646 bp, Artificial Sequence
  chemically treated genomic DNA (Homo sapiens) CpG-island No: 31637
tttcggtatttttaggtcgcgggttttttttttcgcgcgggttcgtatttttttttagtttggtgtatttgggttgacgtcggttcgggattcgtgcggagcgtcgcgagcgcggcggaggtagaggcgcgttgattgttatttttagttcgtgtcggagggatagtacgcgttgcgtaacggagatcgttttttttggtcgtcgtttacggttcgcggcgattatcgtcgttgaagttgtaggcgggtagtcgtgcgtttttcgggatagttagtttcggcggttgtttttttcggatgttagggttagggcgtcgggcggtcgttagtaggagaatgaagagttcggtgggaggaaggagagaaaagtttttgggggcgtcgaaagtttagtttagtcgcggtaagttgagtgtaaaaaaaggtgtttcggtttaggtggcggagttcgttggggcgtcgggtaaggagttagggttgcgtttttgcgggatattaggcgcgaggggttggggttcgtatggggggcgcggaatgggcgttcgtatcgtttagattttggattattttttcggtatttcgtattatcggtttatatattttagttttttttcggtgttaaggagaagagatgtgaggttgcggg

SEQ ID NO: 31638 - DNA, 646 bp, Artificial Sequence
  chemically treated genomic DNA (Homo sapiens) CpG-island No: 31638
cccgcaacctcacatctcttctccttaacaccgaaaaaaaactaaaatatataaaccgataatacgaaataccgaaaaaataatccaaaatctaaacgatacgaacgcccattccgcgccccccatacgaaccccaacccctcgcgcctaatatcccgcaaaaacgcaaccctaactccttacccgacgccccaacgaactccgccacctaaaccgaaacacctttttttacactcaacttaccgcgactaaactaaactttcgacgcccccaaaaacttttctctccttcctcccaccgaactcttcattctcctactaacgaccgcccgacgccctaaccctaacatccgaaaaaaacaaccgccgaaactaactatcccgaaaaacgcacgactacccgcctacaacttcaacgacgataatcgccgcgaaccgtaaacgacgaccaaaaaaaacgatctccgttacgcaacgcgtactatccctccgacacgaactaaaaataacaatcaacgcgcctctacctccgccgcgctcgcgacgctccgcacgaatcccgaaccgacgtcaacccaaatacaccaaactaaaaaaaaatacgaacccgcgcgaaaaaaaaaacccgcgacctaaaaataccgaaa

SEQ ID NO: 31639 - DNA, 646 bp, Artificial Sequence
  chemically treated genomic DNA (Homo sapiens) CpG-island No: 31639
ttcgtaattttatattttttttttttggtatcgagaagaggttggggtgtgtggatcgatagtgcgggatatcgaaaaggtggtttaaggtttgggcggtgcgaacgtttatttcgcgttttttatgcgagttttagtttttcgcgtttggtatttcgtaggggcgtaattttagttttttgttcggcgttttaacgaatttcgttatttgaatcgagatatttttttttgtatttaatttatcgcggttgggttgagttttcggcgtttttaggagtttttttttttttttttttatcgagttttttatttttttgttggcggtcgttcggcgttttggttttggtattcgggaggagtagtcgtcggggttggttgtttcgggagacgtacggttgttcgtttgtagttttaacggcggtggtcgtcgcgagtcgtgagcggcggttaaggagaacggttttcgttgcgtagcgcgtgttgttttttcggtacgggttggaggtggtagttagcgcgtttttgttttcgtcgcgttcgcggcgtttcgtacgagtttcgagtcggcgttagtttaggtgtattaggttggggagaggtgcgagttcgcgcgaagggaggggttcgcggtttgagggtgtcggga

SEQ ID NO: 31640 - DNA, 646 bp, Artificial Sequence
  chemically treated genomic DNA (Homo sapiens) CpG-island No: 31640
tcccgacaccctcaaaccgcgaacccctcccttcgcgcgaactcgcacctctccccaacctaatacacctaaactaacgccgactcgaaactcgtacgaaacgccgcgaacgcgacgaaaacaaaaacgcgctaactaccacctccaacccgtaccgaaaaaacaacacgcgctacgcaacgaaaaccgttctccttaaccgccgctcacgactcgcgacgaccaccgccgttaaaactacaaacgaacaaccgtacgtctcccgaaacaaccaaccccgacgactactcctcccgaataccaaaaccaaaacgccgaacgaccgccaacaaaaaaataaaaaactcgataaaaaaaaaaaaaaaaaaactcctaaaaacgccgaaaactcaacccaaccgcgataaattaaatacaaaaaaaaatatctcgattcaaataacgaaattcgttaaaacgccgaacaaaaaactaaaattacgcccctacgaaataccaaacgcgaaaaactaaaactcgcataaaaaacgcgaaataaacgttcgcaccgcccaaaccttaaaccaccttttcgatatcccgcactatcgatccacacaccccaacctcttctcgataccaaaaaaaaaaaatataaaattacgaa

SEQ ID NO: 31641 - DNA, 650 bp, Artificial Sequence
  chemically treated genomic DNA (Homo sapiens) CpG-island No: 31641
cgcgttcgcgttgtgttgtatttgtttcgtaggttgtcgttgcgtagttttatggtcgtgtatttagtttcgtttatcggtatttttttgtaggattttatcgggtagatttagagtttcgttacggtgtttatttgttgtagtcgtcggcgtcgtttgggttatgcgcggcgttaggcgatagtttttagggttacggcggttagttttagcgcggcgacgtcgagttatttgggttagggtcgggttgggaggtcgaggcgggttagcgcggaggagttggaagcgtttatggtagagcgagggcgggcgcggatcggcgtatagattcggtagcgatcggagatcgggaggacgaggaggtttttaaggattcgggtaggcgagaggagttaaagttgatttaattacggatttttttatatttttatcgtcgagacggtagagtagtttcgcggagagcgggaatgttttaatgcggtgattaagtttgcgcggtaatggaggaagataggtagatagcggcgggggtattttgggcgtcgtgggagcgacgtcgtttaaagtaagcgagttaatggggcggtttttggggtggttagtgttttttttttttttttcgtttttataatacgatagttatttatgta

SEQ ID NO: 31642 - DNA, 650 bp, Artificial Sequence
  chemically treated genomic DNA (Homo sapiens) CpG-island No: 31642
tacataaataactatcgtattataaaaacgaaaaaaaaaaaaaaaacactaaccaccccaaaaaccgccccattaactcgcttactttaaacgacgtcgctcccacgacgcccaaaatacccccgccgctatctacctatcttcctccattaccgcgcaaacttaatcaccgcattaaaacattcccgctctccgcgaaactactctaccgtctcgacgataaaaatataaaaaaatccgtaattaaatcaactttaactcctctcgcctacccgaatccttaaaaacctcctcgtcctcccgatctccgatcgctaccgaatctatacgccgatccgcgcccgccctcgctctaccataaacgcttccaactcctccgcgctaacccgcctcgacctcccaacccgaccctaacccaaataactcgacgtcgccgcgctaaaactaaccgccgtaaccctaaaaactatcgcctaacgccgcgcataacccaaacgacgccgacgactacaacaaataaacaccgtaacgaaactctaaatctacccgataaaatcctacaaaaaaataccgataaacgaaactaaatacacgaccataaaactacgcaacgacaacctacgaaacaaatacaacacaacgcgaacgcg

SEQ ID NO: 31643 - DNA, 650 bp, Artificial Sequence
  chemically treated genomic DNA (Homo sapiens) CpG-island No: 31643
tgtatgggtaattgtcgtgttgtaggggcggggaagagggaggagatattgattattttagaggtcgttttattagttcgtttgttttgggcggcgtcgtttttacggcgtttagggtattttcgtcgttgtttgtttgtttttttttattatcgcgtaggtttggttatcgtattaaggtattttcgtttttcgcggaattgttttgtcgtttcggcggtgaaagtgtgagagggttcgtagttgggttaattttgatttttttcgtttgttcggatttttaagggttttttcgttttttcggttttcggtcgttgtcgggtttgtgcgtcggttcgcgttcgttttcgttttgttatgggcgtttttagttttttcgcgttggttcgtttcggttttttagttcggttttggtttaggtggttcggcgtcgtcgcgttaggattggtcgtcgtggttttggggattgtcgtttggcgtcgcgtatggtttaggcggcgtcggcggttgtagtaggtgggtatcgtggcgaagttttggatttattcggtgaaattttgtaaaggggtgtcggtgagcgaggttgagtgtacggttatggggttgcgtagcggtaatttgcgggataggtatagtatagcgcgggcgcg

SEQ ID NO: 31644 - DNA, 650 bp, Artificial Sequence
  chemically treated genomic DNA (Homo sapiens) CpG-island No: 31644
cgcgcccgcgctatactatacctatcccgcaaattaccgctacgcaaccccataaccgtacactcaacctcgctcaccgacacccctttacaaaatttcaccgaataaatccaaaacttcgccacgatacccacctactacaaccgccgacgccgcctaaaccatacgcgacgccaaacgacaatccccaaaaccacgacgaccaatcctaacgcgacgacgccgaaccacctaaaccaaaaccgaactaaaaaaccgaaacgaaccaacgcgaaaaaactaaaaacgcccataacaaaacgaaaacgaacgcgaaccgacgcacaaacccgacaacgaccgaaaaccgaaaaaacgaaaaaacccttaaaaatccgaacaaacgaaaaaaatcaaaattaacccaactacgaaccctctcacactttcaccgccgaaacgacaaaacaattccgcgaaaaacgaaaataccttaatacgataaccaaacctacgcgataataaaaaaaaacaaacaaacaacgacgaaaataccctaaacgccgtaaaaacgacgccgcccaaaacaaacgaactaataaaacgacctctaaaataatcaatatctcctccctcttccccgcccctacaacacgacaattacccataca

SEQ ID NO: 31645 - DNA, 793 bp, Artificial Sequence
  chemically treated genomic DNA (Homo sapiens) CpG-island No: 31645
tttcgatttaagtttttattacgattcgtaattcgcggttttttttcggcgagggaatgggagcgggggcggaggggtcgtaggtgtagttcggagaaattgggtgagtcgatggtaaggattcggttttcgttttttcgcgggatattatattcgcgtttttcgggtagtggtggcgtagtgtttttattttgtcgtatttttttagtttttttcggtatttttttttgggttgttcgttcggcgtcggtttttttagtggttcgtagcgttcgggtaggagggcgaagtgtatttttcgcgcgtttcgggttttcgggtttcgttcgttcgtcgcgttcgtttcgttttcggtcgtcgttttcgtttcgttcgcgtattttaggtgttttaggatggcggtcgttttttcgtttttttcggttcgttttcgttttcggggttcgcggcgtaggaggttgtttttcgttttgtttcggagtttggtttttatcgttatgatgtttcggtttttttggcgaaggttcgagcgtaaagatattaatttttggttttcgttcgttttttcgttttagttcggacggggcgggggattgggggggtcgtagcgttttttggtcgtggggttcgggatagcgttggtttcgtttcgaattggtttattaggcggcgggcgcgtttcgttagtttcgttttttattttatttatcggttaaattgtgtagattacggcgcgtattgtataatgaatatgtaaaatatttttaattgtatttgttacgaaattaatgat

SEQ ID NO: 31646 - DNA, 793 bp, Artificial Sequence
  chemically treated genomic DNA (Homo sapiens) CpG-island No: 31646
atcattaatttcgtaacaaatacaattaaaaatattttacatattcattatacaatacgcgccgtaatctacacaatttaaccgataaataaaataaaaaacgaaactaacgaaacgcgcccgccgcctaataaaccaattcgaaacgaaaccaacgctatcccgaaccccacgaccaaaaaacgctacgacccccccaatcccccgccccgtccgaactaaaacgaaaaaacgaacgaaaaccaaaaattaatatctttacgctcgaaccttcgccaaaaaaaccgaaacatcataacgataaaaaccaaactccgaaacaaaacgaaaaacaacctcctacgccgcgaaccccgaaaacgaaaacgaaccgaaaaaaacgaaaaaacgaccgccatcctaaaacacctaaaatacgcgaacgaaacgaaaacgacgaccgaaaacgaaacgaacgcgacgaacgaacgaaacccgaaaacccgaaacgcgcgaaaaatacacttcgccctcctacccgaacgctacgaaccactaaaaaaaccgacgccgaacgaacaacccaaaaaaaaataccgaaaaaaactaaaaaaatacgacaaaataaaaacactacgccaccactacccgaaaaacgcgaatataatatcccgcgaaaaaacgaaaaccgaatccttaccatcgactcacccaatttctccgaactacacctacgacccctccgcccccgctcccattccctcgccgaaaaaaaaccgcgaattacgaatcgtaataaaaacttaaatcgaaa

SEQ ID NO: 31647 - DNA, 793 bp, Artificial Sequence
  chemically treated genomic DNA (Homo sapiens) CpG-island No: 31647
gttattaatttcgtagtaagtgtagttgaaggtgttttgtatgtttattgtgtagtgcgcgtcgtagtttgtatagtttggtcggtaggtgggatgaagggcggggttggcggagcgcgttcgtcgtttggtaggttagttcggagcggagttaacgttatttcgggttttacggttagggggcgttgcggtttttttaatttttcgtttcgttcgggttggggcggaggagcgggcggggattaaaggttggtgtttttgcgttcggattttcgttagaggggtcgggatattatgacggtgggagttaggtttcgaagtaaggcggagagtagttttttgcgtcgcgggtttcgagggcgagggcgaatcgagggggacgaggaggcggtcgttattttggagtatttggagtacgcggacgaggcggaggcggcggtcgagagcgggacgagcgcggcggacgagcggggttcggggattcggggcgcgcggagggtgtatttcgtttttttgttcgagcgttacgagttattggaggagtcggcgtcgagcgagtagtttaggaagaggtatcggaggaagttgaagaagtacggtaaggtaggggtattgcgttattattgttcggggggcgcgggtgtggtgtttcgcgggggagcgggagtcgggtttttattatcgatttatttagttttttcgggttgtatttgcgattttttcgttttcgtttttattttttcgtcggagggaagtcgcgagttgcgagtcgtgatagaaatttaaatcgggg

SEQ ID NO: 31648 - DNA, 793 bp, Artificial Sequence
  chemically treated genomic DNA (Homo sapiens) CpG-island No: 31648
ccccgatttaaatttctatcacgactcgcaactcgcgacttccctccgacgaaaaaataaaaacgaaaacgaaaaaatcgcaaatacaacccgaaaaaactaaataaatcgataataaaaacccgactcccgctcccccgcgaaacaccacacccgcgccccccgaacaataataacgcaatacccctaccttaccgtacttcttcaacttcctccgatacctcttcctaaactactcgctcgacgccgactcctccaataactcgtaacgctcgaacaaaaaaacgaaatacaccctccgcgcgccccgaatccccgaaccccgctcgtccgccgcgctcgtcccgctctcgaccgccgcctccgcctcgtccgcgtactccaaatactccaaaataacgaccgcctcctcgtccccctcgattcgccctcgccctcgaaacccgcgacgcaaaaaactactctccgccttacttcgaaacctaactcccaccgtcataatatcccgacccctctaacgaaaatccgaacgcaaaaacaccaacctttaatccccgcccgctcctccgccccaacccgaacgaaacgaaaaattaaaaaaaccgcaacgccccctaaccgtaaaacccgaaataacgttaactccgctccgaactaacctaccaaacgacgaacgcgctccgccaaccccgcccttcatcccacctaccgaccaaactatacaaactacgacgcgcactacacaataaacatacaaaacaccttcaactacacttactacgaaattaataac

SEQ ID NO: 31649 - DNA, 943 bp, Artificial Sequence
  chemically treated genomic DNA (Homo sapiens) CpG-island No: 31649
acggtttcgtttttttttatttgttttttttttttttttgttcgttcgagggtggtaaaggcgatgggtgggcggggtttataaatcgtttcgttttttttcgtttttttttcgttttttgacgtcgttcgcgttttttcgtttttcgcgcggggatgaagttattacgtgattttatattcggcgcgggagttttgagttcgcgcgcgttttttcgtttgtttgtcggtttttttcgtagcgtgatcgggcgtcgtcgcggaggggaggggggttttttacgtcgttggcggcgggggggtcgtttcggagtgtagatcgttttttttttttgtttatttttcgtcgtttttttttgttttcgttttgtcggttgtacgtcgtcgtcgcgggcgcggaggaggaggagagcgcggacgttttagggtcggttcggtttcgtcgcggcgttttttttttttattttgagtcgtagcgcgcggcgtcggtcgagggcgatggggttgggttgaggcgaggcggcggcggcgatagcggcggtcgggtttttcgcggtttttggggttggttcggtcgcgagggaggtcgcggaggaggcggcgcggcggcggttagtgagcggtttcggtgagcggggcgaggggcgggtgggtagcggcgtcgggggaggtcgaggaggcgaatggtggtgtcggggcggcgggtatcgggcgaggtcgcggttagttttttcgggtcggagttgggtatcgcggggacggggagtgtcgggggtaggtgaggttagggtaggagtttacgcggtgggtgcgaaggtttgggggggacgcgtcgtttgtcgggggcgagcgtgggggtcgggcgtttggtggttggtagttagagttttcggaaagttttgtgggaggtggaggttttgtgggtagaggcgtaggggtgttgg

SEQ ID NO: 31650 - DNA, 943 bp, Artificial Sequence
  chemically treated genomic DNA (Homo sapiens) CpG-island No: 31650
ccaacacccctacgcctctacccacaaaacctccacctcccacaaaactttccgaaaactctaactaccaaccaccaaacgcccgacccccacgctcgcccccgacaaacgacgcgtcccccccaaaccttcgcacccaccgcgtaaactcctaccctaacctcacctacccccgacactccccgtccccgcgatacccaactccgacccgaaaaaactaaccgcgacctcgcccgatacccgccgccccgacaccaccattcgcctcctcgacctcccccgacgccgctacccacccgcccctcgccccgctcaccgaaaccgctcactaaccgccgccgcgccgcctcctccgcgacctccctcgcgaccgaaccaaccccaaaaaccgcgaaaaacccgaccgccgctatcgccgccgccgcctcgcctcaacccaaccccatcgccctcgaccgacgccgcgcgctacgactcaaaataaaaaaaaaaaacgccgcgacgaaaccgaaccgaccctaaaacgtccgcgctctcctcctcctccgcgcccgcgacgacgacgtacaaccgacaaaacgaaaacaaaaaaaaacgacgaaaaataaacaaaaaaaaaaaacgatctacactccgaaacgacccccccgccgccaacgacgtaaaaaacccccctcccctccgcgacgacgcccgatcacgctacgaaaaaaaccgacaaacaaacgaaaaaacgcgcgcgaactcaaaactcccgcgccgaatataaaatcacgtaataacttcatccccgcgcgaaaaacgaaaaaacgcgaacgacgtcaaaaaacgaaaaaaaaacgaaaaaaaacgaaacgatttataaaccccgcccacccatcgcctttaccaccctcgaacgaacaaaaaaaaaaaaaaaacaaataaaaaaaaacgaaaccgt

SEQ ID NO: 31651 - DNA, 943 bp, Artificial Sequence
  chemically treated genomic DNA (Homo sapiens) CpG-island No: 31651
ttagtatttttacgtttttgtttataggatttttattttttataggatttttcgaaagttttgattattaattattaagcgttcggtttttacgttcgttttcggtaggcggcgcgttttttttaggttttcgtatttatcgcgtgggtttttgttttggttttatttgttttcgatatttttcgttttcgcgatgtttaatttcggttcgagaaggttggtcgcgatttcgttcggtattcgtcgtttcgatattattattcgttttttcgatttttttcggcgtcgttgtttattcgtttttcgtttcgtttatcggggtcgtttattggtcgtcgtcgcgtcgtttttttcgcggtttttttcgcggtcggattagttttaggggtcgcgggggattcggtcgtcgttgtcgtcgtcgtcgtttcgttttagtttagttttatcgttttcggtcggcgtcgcgcgttgcggtttagggtgagggaaggaggcgtcgcggcggggtcgggtcggttttgggacgttcgcgttttttttttttttcgcgttcgcggcggcggcgtgtagtcggtagggcgagaataagggagggcggcgggaggtgggtaggggaggggggcggtttgtatttcgaaacggttttttcgtcgttagcgacgtagagaatttttttttttttcgcggcggcgttcgattacgttgcggggagagtcggtaggtaggcgggggagcgcgcgcgggtttaggattttcgcgtcggatgtgaggttacgtggtggttttattttcgcgcggagggcggaggggcgcgggcgacgttaggaggcggggaaggggcggggaggggcggggcgatttataggtttcgtttatttatcgtttttgttattttcgaacgggtaaaagaaagaaagaggtaggtaaggggaggcgaggtcgt

SEQ ID NO: 31652 - DNA, 943 bp, Artificial Sequence
  chemically treated genomic DNA (Homo sapiens) CpG-island No: 31652
acgacctcgcctccccttacctacctctttctttcttttacccgttcgaaaataacaaaaacgataaataaacgaaacctataaatcgccccgcccctccccgccccttccccgcctcctaacgtcgcccgcgcccctccgccctccgcgcgaaaataaaaccaccacgtaacctcacatccgacgcgaaaatcctaaacccgcgcgcgctcccccgcctacctaccgactctccccgcaacgtaatcgaacgccgccgcgaaaaaaaaaaaaattctctacgtcgctaacgacgaaaaaaccgtttcgaaatacaaaccgcccccctcccctacccacctcccgccgccctcccttattctcgccctaccgactacacgccgccgccgcgaacgcgaaaaaaaaaaaaaacgcgaacgtcccaaaaccgacccgaccccgccgcgacgcctccttccctcaccctaaaccgcaacgcgcgacgccgaccgaaaacgataaaactaaactaaaacgaaacgacgacgacgacaacgacgaccgaatcccccgcgacccctaaaactaatccgaccgcgaaaaaaaccgcgaaaaaaacgacgcgacgacgaccaataaacgaccccgataaacgaaacgaaaaacgaataaacaacgacgccgaaaaaaatcgaaaaaacgaataataatatcgaaacgacgaataccgaacgaaatcgcgaccaaccttctcgaaccgaaattaaacatcgcgaaaacgaaaaatatcgaaaacaaataaaaccaaaacaaaaacccacgcgataaatacgaaaacctaaaaaaaacgcgccgcctaccgaaaacgaacgtaaaaaccgaacgcttaataattaataatcaaaactttcgaaaaatcctataaaaaataaaaatcctataaacaaaaacgtaaaaatactaa

SEQ ID NO: 31653 - DNA, 1110 bp, Artificial Sequence
  chemically treated genomic DNA (Homo sapiens) CpG-island No: 31653
aatcggaatcgggatttcgtttggggagcgcgttaagaaataggggaggcgagcgttgagggaagggatggatggtcggggttataggcggtttttgcggggatgtcggggtttcgtttgagtcgcgtagaggatgttcgcggcgcgtcgtcggtcgtttcgattcgggtttttcgagcgtagtcgttggtttttttttattcgcgttttaggtcgttatataaaggggatggcgaggcgcgtcggtcgtcgggaggtggaggggcgacgggtttgggacgaggtggtcgagtcgcgacgttcgtcgcgtttttcgtttttgtttgtttcgtttcgcgttttttttttgcggaggagttttatcgtcgcggcgtttttattttgttcgttattcgggtgagtagcggttttatttgttcgtcggttttattagtttttatggtcggtcggttagttcgtgacggtcgttacggtattgtttcgcgcggtttgtttgtttttgtcgttgtttttgtcgtcgtcgtcgagttttcggcgcgcgaggataaacgtgggtgcgttcgtgcgcgaggtgtgcgcgcgtggggagagtcgggcgtcgggcgcgggagacgcggggcgtgcgtgtgcgcgttgcgattgttgggttggttttagtaggagagcgaggtcgcggcgtggaatttgaagttagaattgagcgaatcggcggatcgagcgggaaggaggagagtcgcgtaggaggaggggttcgggggcggagtcgtaaatcgtgacgagttcggcgtcggggttaggtaagatacgttttttcgtttcgttttttcgggttacgttttttgttagtttggtatcgttagtttttttagcgcgttcgcgggtcgcgtcgttaggttatcgggagatggggcgggagggaggcgggacggatatttgttttagttaatcggcggttggcggattttcgttcgtttttttcgtgttatttttttaggacgtatcgtttttttttgtataagtttaattgatcgaagttgagcgtttaattagttttttaagtcggaagtttttttgacgtttttaatggggtggggggttattatttttttg

SEQ ID NO: 31654 - DNA, 1110 bp, Artificial Sequence
  chemically treated genomic DNA (Homo sapiens) CpG-island No: 31654
caaaaaaataataaccccccaccccattaaaaacgtcaaaaaaacttccgacttaaaaaactaattaaacgctcaacttcgatcaattaaacttatacaaaaaaaaacgatacgtcctaaaaaaataacacgaaaaaaacgaacgaaaatccgccaaccgccgattaactaaaacaaatatccgtcccgcctccctcccgccccatctcccgataacctaacgacgcgacccgcgaacgcgctaaaaaaactaacgataccaaactaacaaaaaacgtaacccgaaaaaacgaaacgaaaaaacgtatcttacctaaccccgacgccgaactcgtcacgatttacgactccgcccccgaacccctcctcctacgcgactctcctccttcccgctcgatccgccgattcgctcaattctaacttcaaattccacgccgcgacctcgctctcctactaaaaccaacccaacaatcgcaacgcgcacacgcacgccccgcgtctcccgcgcccgacgcccgactctccccacgcgcgcacacctcgcgcacgaacgcacccacgtttatcctcgcgcgccgaaaactcgacgacgacgacaaaaacaacgacaaaaacaaacaaaccgcgcgaaacaataccgtaacgaccgtcacgaactaaccgaccgaccataaaaactaataaaaccgacgaacaaataaaaccgctactcacccgaataacgaacaaaataaaaacgccgcgacgataaaactcctccgcaaaaaaaaaacgcgaaacgaaacaaacaaaaacgaaaaacgcgacgaacgtcgcgactcgaccacctcgtcccaaacccgtcgcccctccacctcccgacgaccgacgcgcctcgccatcccctttatataacgacctaaaacgcgaataaaaaaaaaccaacgactacgctcgaaaaacccgaatcgaaacgaccgacgacgcgccgcgaacatcctctacgcgactcaaacgaaaccccgacatccccgcaaaaaccgcctataaccccgaccatccatcccttccctcaacgctcgcctcccctatttcttaacgcgctccccaaacgaaatcccgattccgatt

SEQ ID NO: 31655 - DNA, 1110 bp, Artificial Sequence
  chemically treated genomic DNA (Homo sapiens) CpG-island No: 31655
taaggaggtggtgattttttattttattgagaacgttaggggagttttcgatttgaaaaattagttagacgtttagtttcggttaattaagtttatataaagaggggcggtgcgttttgaggaggtggtacgggggaggcgagcggaagttcgttagtcgtcgattggttgggataaatgttcgtttcgtttttttttcgttttatttttcggtggtttagcggcgcggttcgcgggcgcgttgaggaggttggcggtgttagattggtagggggcgtgattcgaggaggcggggcgggggggcgtgttttgtttggtttcggcgtcgggttcgttacggtttgcggtttcgttttcgaatttttttttttacgcggtttttttttttttcgttcggttcgtcggttcgtttagttttagttttaggttttacgtcgcggtttcgtttttttattaaagttagtttagtagtcgtagcgcgtatacgtacgtttcgcgtttttcgcgttcggcgttcggttttttttacgcgcgtatatttcgcgtacggacgtatttacgtttgttttcgcgcgtcgggggttcggcggcggcggtaggggtagcggtagaagtaggtagatcgcgcggggtagtatcgtagcggtcgttacgggttggtcggtcggttatggaggttgatggggtcggcgagtagatgagatcgttatttattcgggtaacgagtagggtgagggcgtcgcggcggtggggttttttcgtagggggagggcgcggggcgaggtagataaaggcggggggcgcggcgggcgtcgcggttcggttatttcgttttaggttcgtcgtttttttatttttcggcggtcggcgcgtttcgttattttttttgtgtggcggtttggggcgcgggtgggagggggttagcggttgcgttcgggaggttcgagtcggggcggtcggcggcgcgtcgcgggtattttttgcgcggtttaggcgggatttcgatattttcgtagaggtcgtttgtgatttcgattatttatttttttttttagcgttcgttttttttgttttttagcgcgttttttaggcggggtttcggtttcggtt

SEQ ID NO: 31656 - DNA, 1110 bp, Artificial Sequence
  chemically treated genomic DNA (Homo sapiens) CpG-island No: 31656
aaccgaaaccgaaaccccgcctaaaaaacgcgctaaaaaacaaaaaaaacgaacgctaaaaaaaaaaataaataatcgaaatcacaaacgacctctacgaaaatatcgaaatcccgcctaaaccgcgcaaaaaatacccgcgacgcgccgccgaccgccccgactcgaacctcccgaacgcaaccgctaaccccctcccacccgcgccccaaaccgccacacaaaaaaaataacgaaacgcgccgaccgccgaaaaataaaaaaacgacgaacctaaaacgaaataaccgaaccgcgacgcccgccgcgccccccgcctttatctacctcgccccgcgccctccccctacgaaaaaaccccaccgccgcgacgccctcaccctactcgttacccgaataaataacgatctcatctactcgccgaccccatcaacctccataaccgaccgaccaacccgtaacgaccgctacgatactaccccgcgcgatctacctacttctaccgctacccctaccgccgccgccgaacccccgacgcgcgaaaacaaacgtaaatacgtccgtacgcgaaatatacgcgcgtaaaaaaaaccgaacgccgaacgcgaaaaacgcgaaacgtacgtatacgcgctacgactactaaactaactttaataaaaaaacgaaaccgcgacgtaaaacctaaaactaaaactaaacgaaccgacgaaccgaacgaaaaaaaaaaaaaccgcgtaaaaaaaaaaattcgaaaacgaaaccgcaaaccgtaacgaacccgacgccgaaaccaaacaaaacacgcccccccgccccgcctcctcgaatcacgccccctaccaatctaacaccgccaacctcctcaacgcgcccgcgaaccgcgccgctaaaccaccgaaaaataaaacgaaaaaaaaacgaaacgaacatttatcccaaccaatcgacgactaacgaacttccgctcgcctcccccgtaccacctcctcaaaacgcaccgcccctctttatataaacttaattaaccgaaactaaacgtctaactaatttttcaaatcgaaaactcccctaacgttctcaataaaataaaaaatcaccacctcctta

SEQ ID NO: 31657 - DNA, 1215 bp, Artificial Sequence
  chemically treated genomic DNA (Homo sapiens) CpG-island No: 31657
gcgcggttttggggattgtttattatggattggtgaatttgggttttttttcgaggtggtggtttatttcgtttgttttttgtttcgtttttcgattcgtacgttttttttttaattcgcgcgtacgaatggttaaaaaaagggtgtgaggttcgagttcgttagttaggtcgttagtatttcgcgcgcgtttttagcgaggattcgtacgagttgttcggttttgtgtttgcgttgtttgaaattgtggaattcgttaggtttttggggaattatagttttagttggtttcggagttcgtgcgtgttaggggcgagtggtcgtcgcgagacggtttttgtttttcgtgtttttgtagcgtggagattggaatcggtaattttaaaggacgttacgtttaatcgtagcgttggcgcgggcggaggttaaaatacgggggttttgagattgaggaaaacgcgttaagtttttttcggtggcggagtgttaaagattttagcggtttaggcgttcggcgagcggggtcgttgtttgttgcgtttttggttttttcggggcgggcgtagatgggcgtcgttttcgggatgtagttggtgttggtgtaaggcgggagcgagcggcggtcggggttttcgtttttgggagcggatggttattttttcgcggggagggcgagtcgattagatttttttggggtcggggattcggcgggttcggggtagggatttatttgtcgtatttatatttattcgggttggatttgtcggcgttatcgtcgcggatttcgttttgggttatgattaggtaaggagggtttgggaggaggggtcggttttcgggcgcgggggtaagttcggtcggcgcgggagaggagttgtcggggagatttcgggatcgtgttggtttcgtattttggtcgatttgttagggggagtcgtgtgtgtttcgggcgtggcgtttgttttgtcgtcgtcgggacgcgagaaggtaggtgcgggttgggcgtaaataggttaatttcgcggcgagggcgttcggcgcgggggtgtgggtcgaggacgtcgtcgttagtttttttcgatcgggtagttcggtggttgttcgtttttttagtttttttttcgttttcgagagcggtgaaggatggggagaaagaaacgtttttacgtaggttgttttgtgtcggtaattgcgaaattttatcgcgtatttttt

SEQ ID NO: 31658 - DNA, 1215 bp, Artificial Sequence
  chemically treated genomic DNA (Homo sapiens) CpG-island No: 31658
aaaaaatacgcgataaaatttcgcaattaccgacacaaaacaacctacgtaaaaacgtttctttctccccatccttcaccgctctcgaaaacgaaaaaaaaactaaaaaaacgaacaaccaccgaactacccgatcgaaaaaaactaacgacgacgtcctcgacccacacccccgcgccgaacgccctcgccgcgaaattaacctatttacgcccaacccgcacctaccttctcgcgtcccgacgacgacaaaacaaacgccacgcccgaaacacacacgactccccctaacaaatcgaccaaaatacgaaaccaacacgatcccgaaatctccccgacaactcctctcccgcgccgaccgaacttacccccgcgcccgaaaaccgacccctcctcccaaaccctccttacctaatcataacccaaaacgaaatccgcgacgataacgccgacaaatccaacccgaataaatataaatacgacaaataaatccctaccccgaacccgccgaatccccgaccccaaaaaaatctaatcgactcgccctccccgcgaaaaaataaccatccgctcccaaaaacgaaaaccccgaccgccgctcgctcccgccttacaccaacaccaactacatcccgaaaacgacgcccatctacgcccgccccgaaaaaaccaaaaacgcaacaaacaacgaccccgctcgccgaacgcctaaaccgctaaaatctttaacactccgccaccgaaaaaaacttaacgcgttttcctcaatctcaaaacccccgtattttaacctccgcccgcgccaacgctacgattaaacgtaacgtcctttaaaattaccgattccaatctccacgctacaaaaacacgaaaaacaaaaaccgtctcgcgacgaccactcgcccctaacacgcacgaactccgaaaccaactaaaactataattccccaaaaacctaacgaattccacaatttcaaacaacgcaaacacaaaaccgaacaactcgtacgaatcctcgctaaaaacgcgcgcgaaatactaacgacctaactaacgaactcgaacctcacaccctttttttaaccattcgtacgcgcgaattaaaaaaaaaacgtacgaatcgaaaaacgaaacaaaaaacaaacgaaataaaccaccacctcgaaaaaaaacccaaattcaccaatccataataaacaatccccaaaaccgcgc

SEQ ID NO: 31659 - DNA, 1215 bp, Artificial Sequence
  chemically treated genomic DNA (Homo sapiens) CpG-island No: 31659
agaaaatgcgcggtaaaatttcgtaattatcgatatagggtaatttgcgtggaaacgtttttttttttttattttttatcgttttcgggaacggaaagaaagttggaaggacgagtagttatcgggttgttcggtcgggggaggttggcggcggcgttttcggtttatattttcgcgtcgggcgttttcgtcgcggagttggtttatttacgtttagttcgtatttgttttttcgcgtttcggcggcggtaagataggcgttacgttcgaggtatatacggttttttttggtaggtcgattagggtgcgaggttaatacggtttcggggttttttcggtagtttttttttcgcgtcggtcgaatttgttttcgcgttcgggagtcggtttttttttttaggttttttttatttggttatggtttaaagcgaagttcgcggcggtgacgtcggtaagtttaattcgaatgagtgtgggtgcgataggtgagtttttgtttcgagttcgtcgggttttcggttttaggaaaatttggtcggttcgtttttttcgcgggggagtgattattcgtttttaagagcgggaatttcgatcgtcgttcgttttcgttttgtattaatattaattatatttcgggagcggcgtttatttgcgttcgtttcgggagagttaggagcgtaataagtagcggtttcgttcgtcgaacgtttgaatcgttagggtttttagtatttcgttatcgaggggaatttggcgcgttttttttagttttaggattttcgtgttttagttttcgttcgcgttagcgttgcgattgaacgtggcgttttttgaaattgtcggttttagtttttacgttgtagagatacgaaaggtaggagtcgtttcgcgacggttattcgtttttggtacgtacgggtttcggagttagttgggattgtagttttttaaaagtttaacgggttttatagttttaaataacgtaggtatagagtcgggtagttcgtgcgggttttcgttgagggcgcgcgcgaggtgttagcggtttggttggcgggttcgagttttatattttttttttaattattcgtgcgcgcgagttgagggaaaagcgtacgggtcgggagacgggatagagagtagacgggatgggttattatttcgagaaggagtttaaatttattaatttatgatgaataatttttaaaatcgcgt

SEQ ID NO: 31660 - DNA, 1215 bp, Artificial Sequence
  chemically treated genomic DNA (Homo sapiens) CpG-island No: 31660
acgcgattttaaaaattattcatcataaattaataaatttaaactccttctcgaaataataacccatcccgtctactctctatcccgtctcccgacccgtacgcttttccctcaactcgcgcgcacgaataattaaaaaaaaaatataaaactcgaacccgccaaccaaaccgctaacacctcgcgcgcgccctcaacgaaaacccgcacgaactacccgactctatacctacgttatttaaaactataaaacccgttaaacttttaaaaaactacaatcccaactaactccgaaacccgtacgtaccaaaaacgaataaccgtcgcgaaacgactcctacctttcgtatctctacaacgtaaaaactaaaaccgacaatttcaaaaaacgccacgttcaatcgcaacgctaacgcgaacgaaaactaaaacacgaaaatcctaaaactaaaaaaaacgcgccaaattcccctcgataacgaaatactaaaaaccctaacgattcaaacgttcgacgaacgaaaccgctacttattacgctcctaactctcccgaaacgaacgcaaataaacgccgctcccgaaatataattaatattaatacaaaacgaaaacgaacgacgatcgaaattcccgctcttaaaaacgaataatcactcccccgcgaaaaaaacgaaccgaccaaattttcctaaaaccgaaaacccgacgaactcgaaacaaaaactcacctatcgcacccacactcattcgaattaaacttaccgacgtcaccgccgcgaacttcgctttaaaccataaccaaataaaaaaaacctaaaaaaaaaaaccgactcccgaacgcgaaaacaaattcgaccgacgcgaaaaaaaaactaccgaaaaaaccccgaaaccgtattaacctcgcaccctaatcgacctaccaaaaaaaaccgtatatacctcgaacgtaacgcctatcttaccgccgccgaaacgcgaaaaaacaaatacgaactaaacgtaaataaaccaactccgcgacgaaaacgcccgacgcgaaaatataaaccgaaaacgccgccgccaacctcccccgaccgaacaacccgataactactcgtccttccaactttctttccgttcccgaaaacgataaaaaataaaaaaaaaaaaacgtttccacgcaaattaccctatatcgataattacgaaattttaccgcgcattttct

SEQ ID NO: 31661 - DNA, 677 bp, Artificial Sequence
  chemically treated genomic DNA (Homo sapiens) CpG-island No: 31661
tttagattttacgatcgtcggattcgagttggcgtaattcgttacggttattgtaatatagtattaatttttaaggaagaggttttttttcgttagcgtttttttcgttaatatttttttttcgttgtaggttttcggatcgagtcgttttttagtcgcgggtacgcgagcgtttatttcggtacggtttagtttttttttagtcgttagtttttaaaatgttttagcgtttttgtttttttcgtttatttcggtcggagtaggcgtcgtgggttcggaatttgagtcgttttttttttttgggtatggcgatcgtatcggggcgaggtttgtttagcgggtcgggttttcgggttatgttttcggtcggagagtcggtttcgggagtcgtaagttagtttcgttcggtttcgcggttattttatatcggaggtcgttaattttcgcgagaatataggttcgggtttcgagtcgcgttgtcggacgacgtttttttacgcgaattaattatcgttaggtgtaaggatacgttattattcggtattcgcgaattaagttgggttcgggttttaggtggagagagagttgttgtattgggtggtgtcgcgtatcgtcgtatttcgtgtgagatgaatggtgttttagaattatagtttatatttgtgttgattagaatt

SEQ ID NO: 31662 - DNA, 677 bp, Artificial Sequence
  chemically treated genomic DNA (Homo sapiens) CpG-island No: 31662
aattctaatcaacacaaatataaactataattctaaaacaccattcatctcacacgaaatacgacgatacgcgacaccacccaatacaacaactctctctccacctaaaacccgaacccaacttaattcgcgaataccgaataataacgtatccttacacctaacgataattaattcgcgtaaaaaaacgtcgtccgacaacgcgactcgaaacccgaacctatattctcgcgaaaattaacgacctccgatataaaataaccgcgaaaccgaacgaaactaacttacgactcccgaaaccgactctccgaccgaaaacataacccgaaaacccgacccgctaaacaaacctcgccccgatacgatcgccatacccaaaaaaaaaaaacgactcaaattccgaacccacgacgcctactccgaccgaaataaacgaaaaaaacaaaaacgctaaaacattttaaaaactaacgactaaaaaaaaactaaaccgtaccgaaataaacgctcgcgtacccgcgactaaaaaacgactcgatccgaaaacctacaacgaaaaaaaaatattaacgaaaaaaacgctaacgaaaaaaaacctcttccttaaaaattaatactatattacaataaccgtaacgaattacgccaactcgaatccgacgatcgtaaaatctaaa

SEQ ID NO: 31663 - DNA, 677 bp, Artificial Sequence
  chemically treated genomic DNA (Homo sapiens) CpG-island No: 31663
aattttaattaatataggtgtgggttatggttttgagatattatttattttatacgaggtacggcgatacgcgatattatttagtataatagttttttttttatttggaattcggatttagtttgattcgcgggtgtcggatgatgacgtatttttgtatttggcgatgattggttcgcgtggagaggcgtcgttcgataacgcgattcggaattcggatttatgttttcgcgagagttagcggttttcggtgtgggatggtcgcggagtcgggcggagttggtttgcggttttcggggtcggtttttcggtcggagatatggttcgggggttcggttcgttaggtaggtttcgtttcgatacggtcgttatgtttaagagaggaaagcgatttaagtttcgggtttacgacgtttgtttcggtcgaggtgggcgaggggggtaggggcgttgaaatattttgggggttggcggttgggagggggttggatcgtgtcgaggtgagcgttcgcgtgttcgcggttggagggcggttcggttcgggggtttgtagcgaggaggaggtgttggcggggaagacgttgacgagagaaggttttttttttgagggttggtgttgtgttgtagtgatcgtggcggattacgttaattcggattcggcggtcgtgaggtttgga

SEQ ID NO: 31664 - DNA, 677 bp, Artificial Sequence
  chemically treated genomic DNA (Homo sapiens) CpG-island No: 31664
tccaaacctcacgaccgccgaatccgaattaacgtaatccgccacgatcactacaacacaacaccaaccctcaaaaaaaaaaccttctctcgtcaacgtcttccccgccaacacctcctcctcgctacaaacccccgaaccgaaccgccctccaaccgcgaacacgcgaacgctcacctcgacacgatccaaccccctcccaaccgccaacccccaaaatatttcaacgcccctacccccctcgcccacctcgaccgaaacaaacgtcgtaaacccgaaacttaaatcgctttcctctcttaaacataacgaccgtatcgaaacgaaacctacctaacgaaccgaacccccgaaccatatctccgaccgaaaaaccgaccccgaaaaccgcaaaccaactccgcccgactccgcgaccatcccacaccgaaaaccgctaactctcgcgaaaacataaatccgaattccgaatcgcgttatcgaacgacgcctctccacgcgaaccaatcatcgccaaatacaaaaatacgtcatcatccgacacccgcgaatcaaactaaatccgaattccaaataaaaaaaaaactattatactaaataatatcgcgtatcgccgtacctcgtataaaataaataatatctcaaaaccataacccacacctatattaattaaaatt

SEQ ID NO: 31665 - DNA, 1020 bp, Artificial Sequence
  chemically treated genomic DNA (Homo sapiens) CpG-island No: 31665
ggcgatcgtttattgtttttaggtcgggtttaagttttcgtttttttttatgtcgtataataaagcggggcgttcgtttttattcggttagttcgggttatttcgcgcgttggcggcgttcggtttttttttcgagggcgtagcggtcgacggtggtcggggtgggggagggcgcgtagcgtcgcgggttgggttcggggttggagaacgggtgcggggttcgtaggtttcggagatcggggtcggggcgtagcgtttggggattagcgtttcggcgcgcgtttgttcggtttattcgtttggagtcggacgcgtagtggtatagacgtatagcgggatagacggacgtcggagagattttgatagtcgttcggttttcgcgttcgttcggcgtttttcggttgttttttcggagcgtttatttttcgcgcgatttggttgagcgcgtcgtttttcgtcgtgagtcgttttcggttggggagtcgtttgcgtttcgatttttgggtgtttatgtttatcgatcgcgtcgttcgtagttgtcgcggggttcgttgttttagtcgttcgcgtcgtttcggttcggtttcggtttcggttttttttttcgtcgcggcgttatggcgttagcgggcgttgggtcggggacgcggggacgcggggggacgggggtcgcggggattcgggggaagttagagtcggaggttcgtagcgcgggttagggattgtaggggttagggacggcggggcgggggacgggggcggggggcggagacgttaggtgttagggacgatgggggttcgatattacggggacgttgcggatgtttagggtcgggtacgcgggatttgagggatcgggagtttcggagggtggattttgcggggattgtttggcgggtcggtaatcgcggagcgacgcgcgttagggcggtgggtatcggttgagtggggatttgagcggagagcgggggggtaggaaggtttttagaggtttgagttgttttgaggggtttgtacgga

SEQ ID NO: 31666 - DNA, 1020 bp, Artificial Sequence
  chemically treated genomic DNA (Homo sapiens) CpG-island No: 31666
tccgtacaaacccctcaaaacaactcaaacctctaaaaaccttcctacccccccgctctccgctcaaatccccactcaaccgatacccaccgccctaacgcgcgtcgctccgcgattaccgacccgccaaacaatccccgcaaaatccaccctccgaaactcccgatccctcaaatcccgcgtacccgaccctaaacatccgcaacgtccccgtaatatcgaacccccatcgtccctaacacctaacgtctccgccccccgcccccgtcccccgccccgccgtccctaacccctacaatccctaacccgcgctacgaacctccgactctaacttcccccgaatccccgcgacccccgtccccccgcgtccccgcgtccccgacccaacgcccgctaacgccataacgccgcgacgaaaaaaaaaaccgaaaccgaaaccgaaccgaaacgacgcgaacgactaaaacaacgaaccccgcgacaactacgaacgacgcgatcgataaacataaacacccaaaaatcgaaacgcaaacgactccccaaccgaaaacgactcacgacgaaaaacgacgcgctcaaccaaatcgcgcgaaaaataaacgctccgaaaaaacaaccgaaaaacgccgaacgaacgcgaaaaccgaacgactatcaaaatctctccgacgtccgtctatcccgctatacgtctataccactacgcgtccgactccaaacgaataaaccgaacaaacgcgcgccgaaacgctaatccccaaacgctacgccccgaccccgatctccgaaacctacgaaccccgcacccgttctccaaccccgaacccaacccgcgacgctacgcgccctcccccaccccgaccaccgtcgaccgctacgccctcgaaaaaaaaaccgaacgccgccaacgcgcgaaataacccgaactaaccgaataaaaacgaacgccccgctttattatacgacataaaaaaaaacgaaaacttaaacccgacctaaaaacaataaacgatcgcc

SEQ ID NO: 31667 - DNA, 1020 bp, Artificial Sequence
  chemically treated genomic DNA (Homo sapiens) CpG-island No: 31667
ttcgtgtaaattttttaaggtaatttaggtttttgaaagtttttttattttttcgtttttcgtttaggtttttatttaatcggtgtttatcgttttggcgcgcgtcgtttcgcgattatcggttcgttaaatagttttcgtaaagtttatttttcggggttttcggttttttaggtttcgcgtgttcggttttgggtattcgtagcgttttcgtggtatcggatttttatcgtttttgatatttggcgttttcgtttttcgttttcgtttttcgtttcgtcgtttttggtttttgtagtttttggttcgcgttgcggattttcggttttggtttttttcgggttttcgcggttttcgttttttcgcgttttcgcgttttcggtttagcgttcgttgacgttatgacgtcgcggcggagggaggggtcggggtcggggtcgggtcggggcggcgcgagcggttggagtaacgggtttcgcggtagttgcgggcgacgcggtcgatggatatgggtatttagggatcggggcgtaagcggttttttaatcgggagcggtttacggcggaggacgacgcgtttaattagatcgcgcgggaggtgagcgtttcgggagggtagtcggggggcgtcgggcgggcgcgggggtcggacggttgttagggttttttcggcgttcgtttgtttcgttgtgcgtttgtgttattgcgcgttcggttttaggcgggtgggtcgggtaggcgcgcgtcggggcgttgatttttaggcgttgcgtttcggtttcgattttcgaggtttgcggatttcgtattcgttttttagtttcgggtttagttcgcgacgttgcgcgtttttttttatttcggttatcgtcggtcgttgcgttttcgggagaggagtcgggcgtcgttagcgcgcgaggtggttcgggttggtcgggtgggggcgagcgtttcgttttgttgtgcggtatgggaggaggcgggggtttaggttcgatttggaggtagtggacggtcgtt

SEQ ID NO: 31668 - DNA, 1020 bp, Artificial Sequence
  chemically treated genomic DNA (Homo sapiens) CpG-island No: 31668
aacgaccgtccactacctccaaatcgaacctaaacccccgcctcctcccataccgcacaacaaaacgaaacgctcgcccccacccgaccaacccgaaccacctcgcgcgctaacgacgcccgactcctctcccgaaaacgcaacgaccgacgataaccgaaataaaaaaaaacgcgcaacgtcgcgaactaaacccgaaactaaaaaacgaatacgaaatccgcaaacctcgaaaatcgaaaccgaaacgcaacgcctaaaaatcaacgccccgacgcgcgcctacccgacccacccgcctaaaaccgaacgcgcaataacacaaacgcacaacgaaacaaacgaacgccgaaaaaaccctaacaaccgtccgacccccgcgcccgcccgacgccccccgactaccctcccgaaacgctcacctcccgcgcgatctaattaaacgcgtcgtcctccgccgtaaaccgctcccgattaaaaaaccgcttacgccccgatccctaaatacccatatccatcgaccgcgtcgcccgcaactaccgcgaaacccgttactccaaccgctcgcgccgccccgacccgaccccgaccccgacccctccctccgccgcgacgtcataacgtcaacgaacgctaaaccgaaaacgcgaaaacgcgaaaaaacgaaaaccgcgaaaacccgaaaaaaaccaaaaccgaaaatccgcaacgcgaaccaaaaactacaaaaaccaaaaacgacgaaacgaaaaacgaaaacgaaaaacgaaaacgccaaatatcaaaaacgataaaaatccgataccacgaaaacgctacgaatacccaaaaccgaacacgcgaaacctaaaaaaccgaaaaccccgaaaaataaactttacgaaaactatttaacgaaccgataatcgcgaaacgacgcgcgccaaaacgataaacaccgattaaataaaaacctaaacgaaaaacgaaaaaataaaaaaactttcaaaaacctaaattaccttaaaaaatttacacgaa

SEQ ID NO: 31669 - DNA, 780 bp, Artificial Sequence
  chemically treated genomic DNA (Homo sapiens) CpG-island No: 31669
gcgtggtcgcgaaggggaagagtagaggtatcggttcggttgtaggtgggagggtgttcgggtgaggggtgagcgcggggtcggggagcggcggcgggggattgggcgacggtttcggggtcgggtcgcgggcggagattgataggcgtgggcggcgatagttgtagtttcgaagtttttagcgtggagttacgcgttagcgcgcggaggggagtggggcgtggggtaagtagaggggcgtacggaggggagtatggagggacgtggggagtatggagagacgtgggggcgtacggagggacggcggggtttggagcgagtataggggcgtacggaggggtatttgggcgtggggcgagtataggggcgtacggagaggagtatggagggatatggggcgtacggaggggtagcggggtttggggtcgagtagaggggcgtatggaggggagtatggagggacgtggggcgcgcggaggggcggcggggcgtgggacgcgcggttttttttcgcgaagttggagaggtttcgggtcgtagggtatttattgtgcgttttggacgaagtttattttggaggtagcggtttcgagggacgtcggaaggaacggtcgttttttttagggttttcgtttgtatttgcgggttggtagattcggggcgttattttttttttagggtttcggagggaggcggaagaaggcgtaggtgcgaaggatgaaaaattaaaattaaatttaaatgaaagttagtgatgtttgaaagtgggaaagtttttag

SEQ ID NO: 31670 - DNA, 780 bp, Artificial Sequence
  chemically treated genomic DNA (Homo sapiens) CpG-island No: 31670
ctaaaaactttcccactttcaaacatcactaactttcatttaaatttaattttaatttttcatccttcgcacctacgccttcttccgcctccctccgaaaccctaaaaaaaaaataacgccccgaatctaccaacccgcaaatacaaacgaaaaccctaaaaaaaacgaccgttccttccgacgtccctcgaaaccgctacctccaaaataaacttcgtccaaaacgcacaataaataccctacgacccgaaacctctccaacttcgcgaaaaaaaaccgcgcgtcccacgccccgccgcccctccgcgcgccccacgtccctccatactcccctccatacgcccctctactcgaccccaaaccccgctacccctccgtacgccccatatccctccatactcctctccgtacgcccctatactcgccccacgcccaaatacccctccgtacgcccctatactcgctccaaaccccgccgtccctccgtacgcccccacgtctctccatactccccacgtccctccatactcccctccgtacgcccctctacttaccccacgccccactcccctccgcgcgctaacgcgtaactccacgctaaaaacttcgaaactacaactatcgccgcccacgcctatcaatctccgcccgcgacccgaccccgaaaccgtcgcccaatcccccgccgccgctccccgaccccgcgctcacccctcacccgaacaccctcccacctacaaccgaaccgatacctctactcttccccttcgcgaccacgc

SEQ ID NO: 31671 - DNA, 780 bp, Artificial Sequence
  chemically treated genomic DNA (Homo sapiens) CpG-island No: 31671
ttgggggtttttttatttttaaatattattgatttttatttggatttggttttggttttttatttttcgtatttgcgttttttttcgttttttttcggggttttgggagagaagtgacgtttcggatttgttagttcgtaggtgtaggcggggattttgaggaaagcggtcgtttttttcggcgtttttcggagtcgttgtttttagggtaggtttcgtttagggcgtatagtgggtgttttgcgattcgaggtttttttaatttcgcgaggaagaatcgcgcgttttacgtttcgtcgttttttcgcgcgttttacgtttttttatgtttttttttatgcgtttttttgttcgattttaggtttcgttgttttttcgtacgttttatgtttttttatgttttttttcgtgcgtttttgtgttcgttttacgtttagatgttttttcgtgcgtttttatgttcgttttaggtttcgtcgttttttcgtgcgtttttacgtttttttatgttttttacgtttttttatgttttttttcgtgcgtttttttgtttgttttacgttttattttttttcgcgcgttggcgcgtgattttacgttgggagtttcggagttgtagttgtcgtcgtttacgtttgttagttttcgttcgcggttcggtttcggggtcgtcgtttagtttttcgtcgtcgtttttcgatttcgcgtttattttttattcggatatttttttatttgtagtcgagtcggtgtttttgtttttttttttcgcgattacgt

SEQ ID NO: 31672 - DNA, 780 bp, Artificial Sequence
  chemically treated genomic DNA (Homo sapiens) CpG-island No: 31672
acgtaatcgcgaaaaaaaaaaacaaaaacaccgactcgactacaaataaaaaaatatccgaataaaaaataaacgcgaaatcgaaaaacgacgacgaaaaactaaacgacgaccccgaaaccgaaccgcgaacgaaaactaacaaacgtaaacgacgacaactacaactccgaaactcccaacgtaaaatcacgcgccaacgcgcgaaaaaaaataaaacgtaaaacaaacaaaaaaacgcacgaaaaaaaacataaaaaaacgtaaaaaacataaaaaaacgtaaaaacgcacgaaaaaacgacgaaacctaaaacgaacataaaaacgcacgaaaaaacatctaaacgtaaaacgaacacaaaaacgcacgaaaaaaaacataaaaaaacataaaacgtacgaaaaaacaacgaaacctaaaatcgaacaaaaaaacgcataaaaaaaaacataaaaaaacgtaaaacgcgcgaaaaaacgacgaaacgtaaaacgcgcgattcttcctcgcgaaattaaaaaaacctcgaatcgcaaaacacccactatacgccctaaacgaaacctaccctaaaaacaacgactccgaaaaacgccgaaaaaaacgaccgctttcctcaaaatccccgcctacacctacgaactaacaaatccgaaacgtcacttctctcccaaaaccccgaaaaaaaacgaaaaaaaacgcaaatacgaaaaataaaaaaccaaaaccaaatccaaataaaaatcaataatatttaaaaataaaaaaacccccaa

SEQ ID NO: 31673 - DNA, 1525 bp, Artificial Sequence
  chemically treated genomic DNA (Homo sapiens) CpG-island No: 31673
tttcgttttcgattcgggagcgtttttattttaggtttttcgcgtttttcgcgggtcgttatttcgaggttttttaggcggtttttgagggtttgtagcgagcggttgagttgttttacgacgtggtcggggtttcgcggtaggtcgtttatagtgtttttgttcgtggttttcgcgtcgcgcgttttgtcgttcgttagtttttcgtagcgcgttagtttgttcgtgagttcgcggatggtttcgcgttgcgcgtttagcgtttttttttgttgtacgacggtttcgcgtagttgtagtatcgcggtttttagttttttttcgggattttgcgcgtcgttttgtatgggtatcgcgggtagcgggtagtcggcgtgtatcgtttttgggggtagtgtcgtgtatacgaagcggttatcgggcgtcgggttgttttgggttttagcggttacggcgagcgttacgttggcggttagtagcgttagtatttcgtcgtcgttgtcgcgtttagttcggtatgggcgagcgggcgtcgtcggggcgtttcgcgggaggcgttttcgttgttggtagtagtcgcgttgtcgtttcgagggtcgcgtgtatcgcggggtagaagttttttgtcgttttatagtcgtatttatcgcgttgttcggtattttggtttgtcgggttcgcgcgtttttttttaagttgaggggcggagggggtcggcgtgtggggcgcgcgttacgagttttgattggttcggtcgggtgcgcgttacgtagtgggcggagcggggcggggcgggggcgtttttcgttgcgcgtttggcggtcgggcgggagcgtgggtcggagtttgaggcgagagcgcgaggtttcgggttttgttttaggaaaggaggtttgaggtggaaaacgatattggggttttcgagagtttcggttggtcgtgtttaggcgtttttcgaatttattcgaggacgcgggcgttataggttgaggagaaagtgggaatttttcggtgtttcggtgttttttttttagggtggtttttggcgcggtacggggtttcgttgcgcgtttgtcgtcgtttttagggaggcgttttttttagtaggagtagttttttaggcgggattcgaatttcgattgttatcgcgagttattttcgcggtaggcgtgggttttttcgttaaggttcggttattttattttcgaggcgggaaggagtcgtacgacggtcgttttcggatgtaacggttttcgggacgcgttttatggtttcgtttttatttttcgcgttaattcggaaaacgttcgggaagaatttcgggggtttcggggatcgggattaggattaggcgtcggacgttgatgggaaggaggggatattcggagttagggataaagttacgaggttattcgtagagttttcgcgcgcgtgtttatcgattgttttttgggcggtgattttatttagtaagatttgagtttaggggcggggtgatatttaattggagttattatgatggagt

SEQ ID NO: 31674 - DNA, 1525 bp, Artificial Sequence
  chemically treated genomic DNA (Homo sapiens) CpG-island No: 31674
actccatcataataactccaattaaatatcaccccgcccctaaactcaaatcttactaaataaaatcaccgcccaaaaaacaatcgataaacacgcgcgcgaaaactctacgaataacctcgtaactttatccctaactccgaatatcccctccttcccatcaacgtccgacgcctaatcctaatcccgatccccgaaacccccgaaattcttcccgaacgttttccgaattaacgcgaaaaataaaaacgaaaccataaaacgcgtcccgaaaaccgttacatccgaaaacgaccgtcgtacgactccttcccgcctcgaaaataaaataaccgaaccttaacgaaaaaacccacgcctaccgcgaaaataactcgcgataacaatcgaaattcgaatcccgcctaaaaaactactcctactaaaaaaaacgcctccctaaaaacgacgacaaacgcgcaacgaaaccccgtaccgcgccaaaaaccaccctaaaaaaaaaacaccgaaacaccgaaaaattcccactttctcctcaacctataacgcccgcgtcctcgaataaattcgaaaaacgcctaaacacgaccaaccgaaactctcgaaaaccccaatatcgttttccacctcaaacctcctttcctaaaacaaaacccgaaacctcgcgctctcgcctcaaactccgacccacgctcccgcccgaccgccaaacgcgcaacgaaaaacgcccccgccccgccccgctccgcccactacgtaacgcgcacccgaccgaaccaatcaaaactcgtaacgcgcgccccacacgccgaccccctccgcccctcaacttaaaaaaaaacgcgcgaacccgacaaaccaaaataccgaacaacgcgataaatacgactataaaacgacaaaaaacttctaccccgcgatacacgcgaccctcgaaacgacaacgcgactactaccaacaacgaaaacgcctcccgcgaaacgccccgacgacgcccgctcgcccataccgaactaaacgcgacaacgacgacgaaatactaacgctactaaccgccaacgtaacgctcgccgtaaccgctaaaacccaaaacaacccgacgcccgataaccgcttcgtatacacgacactacccccaaaaacgatacacgccgactacccgctacccgcgatacccatacaaaacgacgcgcaaaatcccgaaaaaaaactaaaaaccgcgatactacaactacgcgaaaccgtcgtacaacaaaaaaaaacgctaaacgcgcaacgcgaaaccatccgcgaactcacgaacaaactaacgcgctacgaaaaactaacgaacgacaaaacgcgcgacgcgaaaaccacgaacaaaaacactataaacgacctaccgcgaaaccccgaccacgtcgtaaaacaactcaaccgctcgctacaaaccctcaaaaaccgcctaaaaaacctcgaaataacgacccgcgaaaaacgcgaaaaacctaaaataaaaacgctcccgaatcgaaaacgaaa

SEQ ID NO: 31675 - DNA, 1525 bp, Artificial Sequence
  chemically treated genomic DNA (Homo sapiens) CpG-island No: 31675
gttttattatgatgattttagttagatgttatttcgtttttgagtttaggttttgttgaataaggttatcgtttagggggtagtcgatgaatacgcgcgcgagggttttgcgagtggtttcgtgattttgtttttaatttcgggtgtttttttttttttattagcgttcggcgtttggttttggtttcggttttcgaggttttcgggatttttttcgagcgtttttcgagttggcgcggggggtggaggcggggttatggagcgcgtttcggggatcgttgtattcggaggcggtcgtcgtgcggttttttttcgtttcgagagtgaggtggtcgggttttgacgagaaggtttacgtttgtcgcgggggtggttcgcgatggtagtcggggttcgagtttcgtttggggggttgtttttgttggagaaaacgtttttttgagggcggcggtaaacgcgtagcgaggtttcgtgtcgcgttagaagttattttgagaaaggggtatcgggatatcgaggggtttttattttttttttagtttgtgacgttcgcgttttcgggtgggttcgaggggcgtttgggtacggttagtcgaggttttcgagagttttagtgtcgttttttattttaggtttttttttttgaggtagagttcgggatttcgcgttttcgttttaggtttcggtttacgttttcgttcggtcgttaggcgcgtaacggaaagcgttttcgtttcgtttcgtttcgtttattgcgtgacgcgtattcggtcgagttaattagagttcgtggcgcgcgttttatacgtcggtttttttcgttttttagtttaagaaagggcgcgcggattcggtaggttagagtgtcgagtagcgcggtgggtgcggttgtgagacggtaggagatttttgtttcgcggtgtacgcgattttcgagacgatagcgcggttattgttagtagcgaaggcgtttttcgcggagcgtttcgacggcgttcgttcgtttatgtcgagttgagcgcggtagcggcggcgggatgttggcgttgttggtcgttagcgtggcgttcgtcgtggtcgttggggtttaggatagttcggcgttcggtagtcgtttcgtgtgtacggtattgtttttagaggcggtgtacgtcggttgttcgttgttcgcgatgtttatgtagggcggcgcgtagagtttcgaggaggagttgagggtcgcggtgttgtagttgcgcgagatcgtcgtgtagtagaaggagacgttgggcgcgtagcgcgaggttattcgcgagtttacgggtaagttagcgcgttgcgaggggttggcgggcggtaaggcgcgcggcgcgggggttacgggtaaggatattatgggcgatttgtcgcgggatttcggttacgtcgtggagtagtttagtcgttcgttgtagatttttaaggatcgtttggagagtttcgaggtagcggttcgcggggagcgcgggggatttggaatggggacgttttcgagtcgggggcggaa

SEQ ID NO: 31676 - DNA, 1525 bp, Artificial Sequence
  chemically treated genomic DNA (Homo sapiens) CpG-island No: 31676
ttccgcccccgactcgaaaacgtccccattccaaatcccccgcgctccccgcgaaccgctacctcgaaactctccaaacgatccttaaaaatctacaacgaacgactaaactactccacgacgtaaccgaaatcccgcgacaaatcgcccataatatccttacccgtaacccccgcgccgcgcgccttaccgcccgccaacccctcgcaacgcgctaacttacccgtaaactcgcgaataacctcgcgctacgcgcccaacgtctccttctactacacgacgatctcgcgcaactacaacaccgcgaccctcaactcctcctcgaaactctacgcgccgccctacataaacatcgcgaacaacgaacaaccgacgtacaccgcctctaaaaacaataccgtacacacgaaacgactaccgaacgccgaactatcctaaaccccaacgaccacgacgaacgccacgctaacgaccaacaacgccaacatcccgccgccgctaccgcgctcaactcgacataaacgaacgaacgccgtcgaaacgctccgcgaaaaacgccttcgctactaacaataaccgcgctatcgtctcgaaaatcgcgtacaccgcgaaacaaaaatctcctaccgtctcacaaccgcacccaccgcgctactcgacactctaacctaccgaatccgcgcgccctttcttaaactaaaaaacgaaaaaaaccgacgtataaaacgcgcgccacgaactctaattaactcgaccgaatacgcgtcacgcaataaacgaaacgaaacgaaacgaaaacgctttccgttacgcgcctaacgaccgaacgaaaacgtaaaccgaaacctaaaacgaaaacgcgaaatcccgaactctacctcaaaaaaaaaaacctaaaataaaaaacgacactaaaactctcgaaaacctcgactaaccgtacccaaacgcccctcgaacccacccgaaaacgcgaacgtcacaaactaaaaaaaaaataaaaacccctcgatatcccgatacccctttctcaaaataacttctaacgcgacacgaaacctcgctacgcgtttaccgccgccctcaaaaaaacgttttctccaacaaaaacaaccccccaaacgaaactcgaaccccgactaccatcgcgaaccacccccgcgacaaacgtaaaccttctcgtcaaaacccgaccacctcactctcgaaacgaaaaaaaaccgcacgacgaccgcctccgaatacaacgatccccgaaacgcgctccataaccccgcctccaccccccgcgccaactcgaaaaacgctcgaaaaaaatcccgaaaacctcgaaaaccgaaaccaaaaccaaacgccgaacgctaataaaaaaaaaaaaacacccgaaattaaaaacaaaatcacgaaaccactcgcaaaaccctcgcgcgcgtattcatcgactaccccctaaacgataaccttattcaacaaaacctaaactcaaaaacgaaataacatctaactaaaatcatcataataaaac

SEQ ID NO: 31677 - DNA, 979 bp, Artificial Sequence
  chemically treated genomic DNA (Homo sapiens) CpG-island No: 31677
tcgcggagtcggcgttagagcgcggaattatcgcgagaattttggtttttgtagtcgcgatttttcgtcggttttttttttttttttcgtttttttttttgttttttttttttcggggcgtgtggaattcggttttgtcggcgtagggtaatgcgtagagcggggtcggcgttgttcgaggcgagtaggtagcgttgtaaggggaaggatttagaagcgcggcgggagtagcgattgcgttttagtcgttgagcggtttgtaggtttatagttcgcgaaggtattttcgggggcgtgtggttttgaggtggtcggggaggtcgtaggcggcggtcggagcgtagaggagcggttttagtcgggcggaggggtgtgagttcggttcgtggcggttacgtttttcgggagatgttgtgacggattcgtacgggaggagttcgcgtttggtttggcgattcggtggattcggttcgcggcggcgcgtttattcgtttcgtttaggtagggggaagggagggagggggttgggttcgcgcggcggagggcgggtcgcgcggtttggattcgcggcggcggcggcggcggcggcggcggggtttttgtttcgcgagcgtcgggtttaggtcgggcgtgcgcggggttaacggatggggttcgagggggcgagcggtggcggtggcgggtacggtaggttcgcgggcgtcgggtttcgttatataatttcggatcggaggagcggcggtatatggcggcggagcggcgttggtggttcgcgttttgcgtcggtagtcgggtttttttacggacggtcggggtcgcgatttttttttattgtttttttacgcgatggattcgttggcgggttttttttcgagggaagcggtcggcgtgttgagtttgttttgtgttggcgtgtgttttatatgcgtttgggtttggttatagtgagtagttttggcggggaagaagttggattcgg

SEQ ID NO: 31678 - DNA, 979 bp, Artificial Sequence
  chemically treated genomic DNA (Homo sapiens) CpG-island No: 31678
ccgaatccaacttcttccccgccaaaactactcactataaccaaacccaaacgcatataaaacacacgccaacacaaaacaaactcaacacgccgaccgcttccctcgaaaaaaaacccgccaacgaatccatcgcgtaaaaaaacaataaaaaaaaatcgcgaccccgaccgtccgtaaaaaaacccgactaccgacgcaaaacgcgaaccaccaacgccgctccgccgccatataccgccgctcctccgatccgaaattatataacgaaacccgacgcccgcgaacctaccgtacccgccaccgccaccgctcgccccctcgaaccccatccgttaaccccgcgcacgcccgacctaaacccgacgctcgcgaaacaaaaaccccgccgccgccgccgccgccgccgccgcgaatccaaaccgcgcgacccgccctccgccgcgcgaacccaaccccctccctcccttccccctacctaaacgaaacgaataaacgcgccgccgcgaaccgaatccaccgaatcgccaaaccaaacgcgaactcctcccgtacgaatccgtcacaacatctcccgaaaaacgtaaccgccacgaaccgaactcacacccctccgcccgactaaaaccgctcctctacgctccgaccgccgcctacgacctccccgaccacctcaaaaccacacgcccccgaaaataccttcgcgaactataaacctacaaaccgctcaacgactaaaacgcaatcgctactcccgccgcgcttctaaatccttccccttacaacgctacctactcgcctcgaacaacgccgaccccgctctacgcattaccctacgccgacaaaaccgaattccacacgccccgaaaaaaaaaaaacaaaaaaaaaaacgaaaaaaaaaaaaaaaaccgacgaaaaatcgcgactacaaaaaccaaaattctcgcgataattccgcgctctaacgccgactccgcga

SEQ ID NO: 31679 - DNA, 979 bp, Artificial Sequence
  chemically treated genomic DNA (Homo sapiens) CpG-island No: 31679
tcgagtttaatttttttttcgttaggattatttattgtggttaggtttaagcgtatgtggaatatacgttaatataggataggtttagtacgtcggtcgtttttttcggggaaaggttcgttaacgagtttatcgcgtgggagaatagtgggaaagggtcgcggtttcggtcgttcgtaaagggattcgattgtcggcgtaggacgcgaattattagcgtcgtttcgtcgttatgtgtcgtcgttttttcggttcgagattatgtaacgaagttcggcgttcgcgagtttgtcgtattcgttatcgttatcgttcgttttttcgagttttattcgttggtttcgcgtacgttcggtttaggttcggcgttcgcggggtagaagtttcgtcgtcgtcgtcgtcgtcgtcgtcgcgggtttaggtcgcgcgattcgtttttcgtcgcgcgggtttaatttttttttttttttttttttatttgaacggggcgggtgagcgcgtcgtcgcgggtcgagtttatcgggtcgttaggttaagcgcgagtttttttcgtgcgggttcgttatagtatttttcgggagacgtggtcgttacgggtcgggtttatattttttcgttcggttgaagtcgtttttttgcgtttcggtcgtcgtttgcgattttttcggttattttagagttatacgttttcgagagtgttttcgcgggttgtaggtttgtagatcgtttagcggttaaaacgtagtcgttgttttcgtcgcgtttttgggtttttttttttgtaacgttgtttgttcgtttcggatagcgtcggtttcgttttgcgtattattttgcgtcgataaaatcgagttttatacgtttcggaagggagggagtagaggaaagggcggagagggaggggagaatcggcgggagatcgcggttgtagggattagagttttcgcgatggtttcgcgttttagcgtcggtttcgcgg

SEQ ID NO: 31680 - DNA, 979 bp, Artificial Sequence
  chemically treated genomic DNA (Homo sapiens) CpG-island No: 31680
ccgcgaaaccgacgctaaaacgcgaaaccatcgcgaaaactctaatccctacaaccgcgatctcccgccgattctcccctccctctccgccctttcctctactccctcccttccgaaacgtataaaactcgattttatcgacgcaaaataatacgcaaaacgaaaccgacgctatccgaaacgaacaaacaacgttacaaaaaaaaaaacccaaaaacgcgacgaaaacaacgactacgttttaaccgctaaacgatctacaaacctacaacccgcgaaaacactctcgaaaacgtataactctaaaataaccgaaaaaatcgcaaacgacgaccgaaacgcaaaaaaacgacttcaaccgaacgaaaaaatataaacccgacccgtaacgaccacgtctcccgaaaaatactataacgaacccgcacgaaaaaaactcgcgcttaacctaacgacccgataaactcgacccgcgacgacgcgctcacccgccccgttcaaataaaaaaaaaaaaaaaaaaaaattaaacccgcgcgacgaaaaacgaatcgcgcgacctaaacccgcgacgacgacgacgacgacgacgacgaaacttctaccccgcgaacgccgaacctaaaccgaacgtacgcgaaaccaacgaataaaactcgaaaaaacgaacgataacgataacgaatacgacaaactcgcgaacgccgaacttcgttacataatctcgaaccgaaaaaacgacgacacataacgacgaaacgacgctaataattcgcgtcctacgccgacaatcgaatccctttacgaacgaccgaaaccgcgaccctttcccactattctcccacgcgataaactcgttaacgaacctttccccgaaaaaaacgaccgacgtactaaacctatcctatattaacgtatattccacatacgcttaaacctaaccacaataaataatcctaacgaaaaaaaaattaaactcga

SEQ ID NO: 31681 - DNA, 1099 bp, Artificial Sequence
  chemically treated genomic DNA (Homo sapiens) CpG-island No: 31681
tagtcgaaaggattaagttcgcgcgattttcgaaggcgttgacgtacgtagggcggtcgggcgggggttttataggtttttagcgtcgttttttgtcggggagggaagttcgcggttttgcggatcgcgtcgtcgcggtcgagggtttgcgttaggtttagggtagggcgagggtgtgtcgtttttcgtgcggttaggttcggggttcgggggtggtttcgcggcgaagtttcgttttcggtatcgttttttaggcgcgcgagtcgatttcgcgcgcgttaattttttttcgggttatcgttttttttttttttcgggtcgcgagttttttgcgcgtcgttttggggttgcgtttattcgtgtgcgcgttcgttcgttcgttagtttttttaacgcgcgtttggtcgttcgacgacgcgggagtcgtacgcgtcggacgaggttcgttgcgttttttgttgtttagcgcgggttcgttgaggcggagtttttagttttcggttaggatacggtttgggtcgtcgaattttcggtcgaagagcggcggcggtagcggcggtgaggagatcgggtcggggaaaggtagatatggcggggttgtgggtatcgggggagggtggtttcgtcgtttttgcggttacgtcgaaggttcgttggcgggcggcgtatcggggataggggaggggtaggggatggaattaggttgtatgggtttcggttcggcgttagagcggggttgcgggtcgcgagggcggttcgcgaggtttttcgcgggattttcggcgggcgtttgaggaaaaagacgtcgttttagggtttttgttacgttttttatagcgcgttatatttcgttttcgggtgggcgataatttcgcggttttttattttttgtttatttttttcgcgtcggtgttttttttggagtttcgtttgtttgttggagagtcgcgttttcgggaagtcgggttttcgaatttagggtcgttcgtcggggatagcggattcgcggggtaggcgtattttggcgaggatgttgtcggggaggttgggtattgggcgttagggtttttttttttgaatttggggaaaatcgggattg

SEQ ID NO: 31682 - DNA, 1099 bp, Artificial Sequence
  chemically treated genomic DNA (Homo sapiens) CpG-island No: 31682
caatcccgattttccccaaattcaaaaaaaaaaaccctaacgcccaatacccaacctccccgacaacatcctcgccaaaatacgcctaccccgcgaatccgctatccccgacgaacgaccctaaattcgaaaacccgacttcccgaaaacgcgactctccaacaaacaaacgaaactccaaaaaaaacaccgacgcgaaaaaaataaacaaaaaataaaaaaccgcgaaattatcgcccacccgaaaacgaaatataacgcgctataaaaaacgtaacaaaaaccctaaaacgacgtctttttcctcaaacgcccgccgaaaatcccgcgaaaaacctcgcgaaccgccctcgcgacccgcaaccccgctctaacgccgaaccgaaacccatacaacctaattccatcccctacccctcccctatccccgatacgccgcccgccaacgaaccttcgacgtaaccgcaaaaacgacgaaaccaccctcccccgatacccacaaccccgccatatctacctttccccgacccgatctcctcaccgccgctaccgccgccgctcttcgaccgaaaattcgacgacccaaaccgtatcctaaccgaaaactaaaaactccgcctcaacgaacccgcgctaaacaacaaaaaacgcaacgaacctcgtccgacgcgtacgactcccgcgtcgtcgaacgaccaaacgcgcgttaaaaaaactaacgaacgaacgaacgcgcacacgaataaacgcaaccccaaaacgacgcgcaaaaaactcgcgacccgaaaaaaaaaaaaaacgataacccgaaaaaaaattaacgcgcgcgaaatcgactcgcgcgcctaaaaaacgataccgaaaacgaaacttcgccgcgaaaccacccccgaaccccgaacctaaccgcacgaaaaacgacacaccctcgccctaccctaaacctaacgcaaaccctcgaccgcgacgacgcgatccgcaaaaccgcgaacttccctccccgacaaaaaacgacgctaaaaacctataaaacccccgcccgaccgccctacgtacgtcaacgccttcgaaaatcgcgcgaacttaatcctttcgacta

SEQ ID NO: 31683 - DNA, 1099 bp, Artificial Sequence
  chemically treated genomic DNA (Homo sapiens) CpG-island No: 31683
taatttcggttttttttaagtttaaggggaagggttttggcgtttaatgtttagttttttcgataatattttcgttagggtgcgtttgtttcgcgggttcgttgttttcggcgggcggttttgggttcgaggattcggtttttcggaggcgcgattttttagtaaataagcggagttttagaaaaaatatcgacgcgaagggggtggatagagggtgggaagtcgcggggttgtcgtttattcggaggcggaatgtaacgcgttgtgggaaacgtggtaggagttttgaggcggcgtttttttttttaggcgttcgtcgagggtttcgcggaaagtttcgcgggtcgttttcgcggttcgtagtttcgttttggcgtcgagtcggagtttatgtaatttggttttattttttgttttttttttgttttcggtgcgtcgttcgttagcgagttttcgacgtggtcgtaggggcgacgggattattttttttcgatatttatagtttcgttatgtttgttttttttcggttcggtttttttatcgtcgttgtcgtcgtcgtttttcggtcggagattcggcggtttagatcgtgttttggtcgggaattgagggtttcgttttaacgggttcgcgttgggtaatagggagcgtagcgagtttcgttcggcgcgtgcggttttcgcgtcgtcgggcggttaagcgcgcgttgagaggattggcgggcggacgagcgcgtatacgagtgagcgtagttttaaagcggcgcgtagggggttcgcggttcggaagaggggaggggcgatgattcgggaaagggttggcgcgcgcgggatcggttcgcgcgtttgaggggcggtgtcgggggcggggtttcgtcgcgaggttattttcgagtttcgggtttagtcgtacgggaggcgatatattttcgttttattttgagtttggcgtagattttcgatcgcgacggcgcggttcgtagaatcgcgggttttttttttcggtaaaaagcggcgttgaaggtttgtgggattttcgttcggtcgttttacgtgcgttagcgttttcgggggtcgcgcgggtttggttttttcggttg

SEQ ID NO: 31684 - DNA, 1099 bp, Artificial Sequence
  chemically treated genomic DNA (Homo sapiens) CpG-island No: 31684
caaccgaaaaaaccaaacccgcgcgacccccgaaaacgctaacgcacgtaaaacgaccgaacgaaaatcccacaaaccttcaacgccgctttttaccgaaaaaaaaaacccgcgattctacgaaccgcgccgtcgcgatcgaaaatctacgccaaactcaaaataaaacgaaaatatatcgcctcccgtacgactaaacccgaaactcgaaaataacctcgcgacgaaaccccgcccccgacaccgcccctcaaacgcgcgaaccgatcccgcgcgcgccaaccctttcccgaatcatcgcccctcccctcttccgaaccgcgaaccccctacgcgccgctttaaaactacgctcactcgtatacgcgctcgtccgcccgccaatcctctcaacgcgcgcttaaccgcccgacgacgcgaaaaccgcacgcgccgaacgaaactcgctacgctccctattacccaacgcgaacccgttaaaacgaaaccctcaattcccgaccaaaacacgatctaaaccgccgaatctccgaccgaaaaacgacgacgacaacgacgataaaaaaaccgaaccgaaaaaaaacaaacataacgaaactataaatatcgaaaaaaaataatcccgtcgcccctacgaccacgtcgaaaactcgctaacgaacgacgcaccgaaaacaaaaaaaaaacaaaaaataaaaccaaattacataaactccgactcgacgccaaaacgaaactacgaaccgcgaaaacgacccgcgaaactttccgcgaaaccctcgacgaacgcctaaaaaaaaaaacgccgcctcaaaactcctaccacgtttcccacaacgcgttacattccgcctccgaataaacgacaaccccgcgacttcccaccctctatccacccccttcgcgtcgatattttttctaaaactccgcttatttactaaaaaatcgcgcctccgaaaaaccgaatcctcgaacccaaaaccgcccgccgaaaacaacgaacccgcgaaacaaacgcaccctaacgaaaatattatcgaaaaaactaaacattaaacgccaaaacccttccccttaaacttaaaaaaaaccgaaatta

SEQ ID NO: 31685 - DNA, 599 bp, Artificial Sequence
  chemically treated genomic DNA (Homo sapiens) CpG-island No: 31685
cgttgcgcgcggttatttaggaataatggggcgtgggggagggggcgggcgcgatttgggggcgttgttgtaggggcggcggggcgggtagaattgtataggggcgtttttgttgggtcgggcgtttttggagtcgtttcgtagggagtcgcgtagggcgcgcggagtgttcggggacggagttttcggcggggggtggaggcggaggggttcgggcgcggcgtgtcgggtgcgtttcgtagtttttttatagtattttttgtttcggtgcgggtttgtttttttttgttttcgtcgttttttttgttagttttcgtgtcggttttttttagcgttattcgattttaaaaattttgggcggcgagtttttaggtgtcgagtcgtttaggcggggaggttgaattgtaaacgttattatttaatggatatggagttgttcggtgtttcggatcggttaggttatttttaggaaagaggcgttgagcgaacgttagtttggacggtgttagttttttggaagtagttcgtttaggtaggagttgttaattagacgcgtattgtgaaggagatcgtggaaaattaaaagtgggtttttgtaa

SEQ ID NO: 31686 - DNA, 599 bp, Artificial Sequence
  chemically treated genomic DNA (Homo sapiens) CpG-island No: 31686
ttacaaaaacccacttttaattttccacgatctccttcacaatacgcgtctaattaacaactcctacctaaacgaactacttccaaaaaactaacaccgtccaaactaacgttcgctcaacgcctctttcctaaaaataacctaaccgatccgaaacaccgaacaactccatatccattaaataataacgtttacaattcaacctccccgcctaaacgactcgacacctaaaaactcgccgcccaaaatttttaaaatcgaataacgctaaaaaaaaccgacacgaaaactaacaaaaaaaacgacgaaaacaaaaaaaaacaaacccgcaccgaaacaaaaaatactataaaaaaactacgaaacgcacccgacacgccgcgcccgaacccctccgcctccaccccccgccgaaaactccgtccccgaacactccgcgcgccctacgcgactccctacgaaacgactccaaaaacgcccgacccaacaaaaacgcccctatacaattctacccgccccgccgcccctacaacaacgcccccaaatcgcgcccgccccctcccccacgccccattattcctaaataaccgcgcgcaacg

SEQ ID NO: 31687 - DNA, 599 bp, Artificial Sequence
  chemically treated genomic DNA (Homo sapiens) CpG-island No: 31687
ttgtaggaatttatttttgattttttacggttttttttataatgcgcgtttggttagtagtttttgtttgggcgagttgtttttaggagattaatatcgtttaggttggcgttcgtttagcgttttttttttagaggtagtttggtcgattcgaggtatcgggtagttttatgtttattgaataatggcgtttgtaatttagttttttcgtttgggcgattcgatatttgaaaattcgtcgtttaaggtttttgaaatcgggtaacgttggagagaatcgatacgaaggttgataagggagacggcgagagtaaagaaaggtaagttcgtatcggggtagagaatgttatgggagagttgcgaggcgtattcgatacgtcgcgttcgagttttttcgtttttatttttcgtcgagggtttcgttttcgggtatttcgcgcgttttgcgcggttttttacgggacggttttaggagcgttcggtttagtaaaagcgtttttgtgtaattttgttcgtttcgtcgtttttgtagtagcgtttttaaatcgcgttcgtttttttttttacgttttattgtttttgggtggtcgcgcgtagcg

SEQ ID NO: 31688 - DNA, 599 bp, Artificial Sequence
  chemically treated genomic DNA (Homo sapiens) CpG-island No: 31688
cgctacgcgcgaccacccaaaaacaataaaacgtaaaaaaaaaaacgaacgcgatttaaaaacgctactacaaaaacgacgaaacgaacaaaattacacaaaaacgcttttactaaaccgaacgctcctaaaaccgtcccgtaaaaaaccgcgcaaaacgcgcgaaatacccgaaaacgaaaccctcgacgaaaaataaaaacgaaaaaactcgaacgcgacgtatcgaatacgcctcgcaactctcccataacattctctaccccgatacgaacttacctttctttactctcgccgtctcccttatcaaccttcgtatcgattctctccaacgttacccgatttcaaaaaccttaaacgacgaattttcaaatatcgaatcgcccaaacgaaaaaactaaattacaaacgccattattcaataaacataaaactacccgatacctcgaatcgaccaaactacctctaaaaaaaaaacgctaaacgaacgccaacctaaacgatattaatctcctaaaaacaactcgcccaaacaaaaactactaaccaaacgcgcattataaaaaaaaccgtaaaaaatcaaaaataaattcctacaa

SEQ ID NO: 31689 - DNA, 996 bp, Artificial Sequence
  chemically treated genomic DNA (Homo sapiens) CpG-island No: 31689
tcgttcgggaaaggattaataattgtcgataattcggagggcgaaaacgttcgcggcgtaggggaagtaaattaggagatgcgcgggtttagcgttagcggcgggaggagggagcgcggtcgtcgtaggcgggagcgaaggcggggacggagggcgggttcgttttattcgatttcggattggtcgagtttagagagtcgagtgacgttagcgggggagaacgtttgatttgtgtggtgggcgcgggcggtggggggaagcgtagtgcgtaggcgtaattgtttggttttgttcgtttcggcgtttcggtttagttttcgcggataagtttagatatcgcgcgttttttttttttcgggttcgtttttttttttttttcggcgtcgtcgaagataaataatagttggtcggcgagcgtttagtgtgtttttcgtcgtcggattcggcgggttgcgtgggatcggcgggatttcggttagtcggttatggcggggttgtattcgttgggagtgagcgtttttttcgattagggcgggaggaagtatatggaggacgttatttaaatcgttgtggagttcgaatcgacggttgaagaaaagttttcgtcgcggcggtcgttgttttagtcgttgttttcgcggtcgtcgtcggtcgtttttttcggcggcgaagtttcggggaaaggtttagcggtggtagttcgagaggttcgcgattttttttcggacgtcggggtttcgtcggtatttagtcgttgttgtcgtcgtcgttttttcgtggtttttttcgtcgtgtgcgacgggtacggcgggcgggaggcggtatagtttgttcgggagtatttgtggggttttattaagaagtagaagggttttatttcgttcgagtcggttaaggtttgcgttgttattcgtaaaggttttttcgtttgttattttgttatgtggaagaaattgggtaagttttttggtttgtttggcgttcgtttttttttta

SEQ ID NO: 31690 - DNA, 996 bp, Artificial Sequence
  chemically treated genomic DNA (Homo sapiens) CpG-island No: 31690
taaaaaaaaaacgaacgccaaacaaaccaaaaaacttacccaatttcttccacataacaaaataacaaacgaaaaaacctttacgaataacaacgcaaaccttaaccgactcgaacgaaataaaacccttctacttcttaataaaaccccacaaatactcccgaacaaactataccgcctcccgcccgccgtacccgtcgcacacgacgaaaaaaaccacgaaaaaacgacgacgacaacaacgactaaataccgacgaaaccccgacgtccgaaaaaaaatcgcgaacctctcgaactaccaccgctaaacctttccccgaaacttcgccgccgaaaaaaacgaccgacgacgaccgcgaaaacaacgactaaaacaacgaccgccgcgacgaaaacttttcttcaaccgtcgattcgaactccacaacgatttaaataacgtcctccatatacttcctcccgccctaatcgaaaaaaacgctcactcccaacgaatacaaccccgccataaccgactaaccgaaatcccgccgatcccacgcaacccgccgaatccgacgacgaaaaacacactaaacgctcgccgaccaactattatttatcttcgacgacgccgaaaaaaaaaaaaaaacgaacccgaaaaaaaaaaaacgcgcgatatctaaacttatccgcgaaaactaaaccgaaacgccgaaacgaacaaaaccaaacaattacgcctacgcactacgcttccccccaccgcccgcgcccaccacacaaatcaaacgttctcccccgctaacgtcactcgactctctaaactcgaccaatccgaaatcgaataaaacgaacccgccctccgtccccgccttcgctcccgcctacgacgaccgcgctccctcctcccgccgctaacgctaaacccgcgcatctcctaatttacttcccctacgccgcgaacgttttcgccctccgaattatcgacaattattaatcctttcccgaacga

SEQ ID NO: 31691 - DNA, 996 bp, Artificial Sequence
  chemically treated genomic DNA (Homo sapiens) CpG-island No: 31691
tgaaaaaggggcgggcgttaaataagttagggaatttatttagttttttttatatggtaaggtgataagcgagaaagtttttgcggatggtagcgtaaattttagtcggttcggacgaggtgaaatttttttgttttttgatgaaattttataagtgttttcgggtaaattgtgtcgtttttcgttcgtcgtgttcgtcgtatacggcgaaaaaggttacggaggaacggcggcggtagtagcggttaggtgtcggcgaggtttcggcgttcgggagagggtcgcgagtttttcgggttgttatcgttgggttttttttcgagatttcgtcgtcgggaagggcggtcggcgacggtcgcggaggtaacggttgagatagcgatcgtcgcggcgagggtttttttttagtcgtcggttcgggttttataacgatttgagtaacgttttttatgtattttttttcgttttggtcggagaagacgtttatttttagcgagtatagtttcgttatggtcggttggtcgggatttcgtcggttttacgtagttcgtcgaattcggcggcgggagatatattaggcgttcgtcggttaattattgtttattttcgacgacgtcgagaagggggagggggcggattcggagaagggggggcgcgcgatgtttggatttgttcgcgagagttgggtcggagcgtcggagcgagtagagttaggtagttgcgtttgcgtattgcgtttttttttatcgttcgcgtttattatataaattaggcgttttttttcgttgacgttattcggttttttaagttcgattaattcggagtcgagtggagcgagttcgtttttcgttttcgttttcgttttcgtttgcgacggtcgcgtttttttttttcgtcgttggcgttgggttcgcgtattttttagtttgttttttttacgtcgcgggcgttttcgtttttcgggttgtcggtagttgttgattttttttcgagcgg

SEQ ID NO: 31692 - DNA, 996 bp, Artificial Sequence
  chemically treated genomic DNA (Homo sapiens) CpG-island No: 31692
ccgctcgaaaaaaaatcaacaactaccgacaacccgaaaaacgaaaacgcccgcgacgtaaaaaaaacaaactaaaaaatacgcgaacccaacgccaacgacgaaaaaaaaaaacgcgaccgtcgcaaacgaaaacgaaaacgaaaacgaaaaacgaactcgctccactcgactccgaattaatcgaacttaaaaaaccgaataacgtcaacgaaaaaaaacgcctaatttatataataaacgcgaacgataaaaaaaaacgcaatacgcaaacgcaactacctaactctactcgctccgacgctccgacccaactctcgcgaacaaatccaaacatcgcgcgcccccccttctccgaatccgccccctcccccttctcgacgtcgtcgaaaataaacaataattaaccgacgaacgcctaatatatctcccgccgccgaattcgacgaactacgtaaaaccgacgaaatcccgaccaaccgaccataacgaaactatactcgctaaaaataaacgtcttctccgaccaaaacgaaaaaaaatacataaaaaacgttactcaaatcgttataaaacccgaaccgacgactaaaaaaaaaccctcgccgcgacgatcgctatctcaaccgttacctccgcgaccgtcgccgaccgcccttcccgacgacgaaatctcgaaaaaaaacccaacgataacaacccgaaaaactcgcgaccctctcccgaacgccgaaacctcgccgacacctaaccgctactaccgccgccgttcctccgtaacctttttcgccgtatacgacgaacacgacgaacgaaaaacgacacaatttacccgaaaacacttataaaatttcatcaaaaaacaaaaaaatttcacctcgtccgaaccgactaaaatttacgctaccatccgcaaaaactttctcgcttatcaccttaccatataaaaaaaactaaataaattccctaacttatttaacgcccgcccctttttca

SEQ ID NO: 31693 - DNA, 804 bp, Artificial Sequence
  chemically treated genomic DNA (Homo sapiens) CpG-island No: 31693
gtggtatcgatatgtagcggtttttcgggagaggtcggtagtagaagcgaaggaggagtcgagcgcgcggttggggattcgttcgcgttcgtttttagttttttcgtttcgtttttttgcggagcgcgtagtagttcgtgcgtcggcgtaggtttcgttttttcgttgggtttcgtttcgttgttattatagggttttgttttcgcgcgtttcgttttcgtttttttgtgtagtttgaggcggcggtagtatggagggggagagtacgtcggcggtgttttcgggttttgtgttcggcgtattcgttttttagtattttaatacggattcggatacggtgagtcgagggacggggcggggttcggcgtcgtttgggaagagttttgcgcgcggtttgttttttcgttgttgtttcggttttcgttcgttttttcgacgtcgtcgcgttttttttttgcggtcgcggttttgtttttttttttttttagcggtttttgaggtgtttcgtgtttacgaagttttttttagtattagttttttttttgttatttttcgttatttttttttttcgatttaagtgttttatacgtttttattttttttcggcgtttttgtagttgtggaaatttgggcgtgaaaagatggaaagtttacggagcgttttttcgttgttttgcggagtttgcggtaaatttttcgtttttcgcgacgttcgataggcgtttgtaaaattaggcggatttttttatgtagagtagcgtttgtgcgtgtttgttgcgatggtaggatggtaagggaataaaa

SEQ ID NO: 31694 - DNA, 804 bp, Artificial Sequence
  chemically treated genomic DNA (Homo sapiens) CpG-island No: 31694
ttttattcccttaccatcctaccatcgcaacaaacacgcacaaacgctactctacataaaaaaatccgcctaattttacaaacgcctatcgaacgtcgcgaaaaacgaaaaatttaccgcaaactccgcaaaacaacgaaaaaacgctccgtaaactttccatcttttcacgcccaaatttccacaactacaaaaacgccgaaaaaaaataaaaacgtataaaacacttaaatcgaaaaaaaaaaataacgaaaaataacaaaaaaaaaactaatactaaaaaaaacttcgtaaacacgaaacacctcaaaaaccgctaaaaaaaaaaaaaaacaaaaccgcgaccgcaaaaaaaaaacgcgacgacgtcgaaaaaacgaacgaaaaccgaaacaacaacgaaaaaacaaaccgcgcgcaaaactcttcccaaacgacgccgaaccccgccccgtccctcgactcaccgtatccgaatccgtattaaaatactaaaaaacgaatacgccgaacacaaaacccgaaaacaccgccgacgtactctccccctccatactaccgccgcctcaaactacacaaaaaaacgaaaacgaaacgcgcgaaaacaaaaccctataataacaacgaaacgaaacccaacgaaaaaacgaaacctacgccgacgcacgaactactacgcgctccgcaaaaaaacgaaacgaaaaaactaaaaacgaacgcgaacgaatccccaaccgcgcgctcgactcctccttcgcttctactaccgacctctcccgaaaaaccgctacatatcgataccac

SEQ ID NO: 31695 - DNA, 804 bp, Artificial Sequence
  chemically treated genomic DNA (Homo sapiens) CpG-island No: 31695
ttttatttttttattattttattatcgtaataaatacgtatagacgttgttttgtatgaaaaagttcgtttggttttgtaaacgtttgtcgggcgtcgcgagaaacggaaagtttatcgtaggtttcgtagagtagcggaaagacgtttcgtgaattttttatttttttacgtttaagtttttatagttataggggcgtcgaggaaagatgggagcgtgtgggatatttgggtcggaaaagggaaataacggaggatagtagagggagggttaatgttggagaagatttcgtgggtacgaggtattttagggatcgttgagggggagagaaggtagagtcgcgatcgtagggaggaggcgcggcggcgtcgggggagcgggcggggatcggagtaatagcggggaggtaggtcgcgcgtagggttttttttaggcgacgtcggatttcgtttcgtttttcggtttatcgtgttcgagttcgtgttgaggtgttggaaagcgagtgcgtcgagtataaagttcgagagtatcgtcgacgtattttttttttttatgttatcgtcgttttaggttatataagaggacgagggcggggcgcgcggaggtaagattttgtggtggtagcgaggcggggtttagcgaggaggcggggtttgcgtcggcgtacgggttgttgcgcgtttcgtagaggggcggggcgagggggttgagggcgggcgcgggcgggtttttagtcgcgcgttcggtttttttttcgtttttgttgtcggtttttttcggaaggtcgttgtatgtcggtattat

SEQ ID NO: 31696 - DNA, 804 bp, Artificial Sequence
  chemically treated genomic DNA (Homo sapiens) CpG-island No: 31696
ataataccgacatacaacgaccttccgaaaaaaaccgacaacaaaaacgaaaaaaaaaccgaacgcgcgactaaaaacccgcccgcgcccgccctcaaccccctcgccccgcccctctacgaaacgcgcaacaacccgtacgccgacgcaaaccccgcctcctcgctaaaccccgcctcgctaccaccacaaaatcttacctccgcgcgccccgccctcgtcctcttatataacctaaaacgacgataacataaaaaaaaaaaatacgtcgacgatactctcgaactttatactcgacgcactcgctttccaacacctcaacacgaactcgaacacgataaaccgaaaaacgaaacgaaatccgacgtcgcctaaaaaaaaccctacgcgcgacctacctccccgctattactccgatccccgcccgctcccccgacgccgccgcgcctcctccctacgatcgcgactctaccttctctccccctcaacgatccctaaaatacctcgtacccacgaaatcttctccaacattaaccctccctctactatcctccgttatttcccttttccgacccaaatatcccacacgctcccatctttcctcgacgcccctataactataaaaacttaaacgtaaaaaaataaaaaattcacgaaacgtctttccgctactctacgaaacctacgataaactttccgtttctcgcgacgcccgacaaacgtttacaaaaccaaacgaactttttcatacaaaacaacgtctatacgtatttattacgataataaaataataaaaaaataaaa

SEQ ID NO: 31697 - DNA, 544 bp, Artificial Sequence
  chemically treated genomic DNA (Homo sapiens) CpG-island No: 31697
cgtttgcgtaagaggacgtttgcgtaagaggacgtcgttagtttggcgttagcgcgtcgggttttggttcgttttttgtgatattagtttcgttttatttcgtttcgtatattcgtgcgttgtcgcgtatgtttcgagtttcgttttcgtgcgttatagaatggtttcggatatttaggtagtttttgacgtgtcggggaggagtcgggcgcggaggtacgttgagtggagttcggggttgcgtaggggagttgagtcgagcggttgggcgggtttggtcgggtcggcggaggggagacgtcggttgagcggcggcgaatatgcgtttttgatatattggaggtgagtttgtagcgcggggtcgttttttaaggggttgcgttgggtcggcggcgtcgaggtttgtttttggggagttttttcggttcggggtcgtgtttgaggtttcgtcggggcgggtcgggtcgggtttcggggcggttagtttgggggtaattgttttaatcgttttaattgtttttttttttttttggttcgatgtgtg

SEQ ID NO: 31698 - DNA, 544 bp, Artificial Sequence
  chemically treated genomic DNA (Homo sapiens) CpG-island No: 31698
cacacatcgaaccaaaaaaaaaaaaaaacaattaaaacgattaaaacaattacccccaaactaaccgccccgaaacccgacccgacccgccccgacgaaacctcaaacacgaccccgaaccgaaaaaactccccaaaaacaaacctcgacgccgccgacccaacgcaaccccttaaaaaacgaccccgcgctacaaactcacctccaatatatcaaaaacgcatattcgccgccgctcaaccgacgtctcccctccgccgacccgaccaaacccgcccaaccgctcgactcaactcccctacgcaaccccgaactccactcaacgtacctccgcgcccgactcctccccgacacgtcaaaaactacctaaatatccgaaaccattctataacgcacgaaaacgaaactcgaaacatacgcgacaacgcacgaatatacgaaacgaaataaaacgaaactaatatcacaaaaaacgaaccaaaacccgacgcgctaacgccaaactaacgacgtcctcttacgcaaacgtcctcttacgcaaacg

SEQ ID NO: 31699 - DNA, 544 bp, Artificial Sequence
  chemically treated genomic DNA (Homo sapiens) CpG-island No: 31699
tatatatcggattagggaagggaggggatagttagagcggttggaatagttgtttttaggttggtcgtttcggaattcggttcggttcgtttcggcggagttttagatacggtttcgggtcgggaaggttttttaagggtaggtttcggcgtcgtcggtttagcgtagttttttagggagcggtttcgcgttgtaggtttatttttaatgtgttaaaagcgtatgttcgtcgtcgtttaatcgacgtttttttttcgtcggttcggttaggttcgtttagtcgttcggtttagtttttttacgtagtttcgagttttatttagcgtattttcgcgttcggttttttttcgatacgttagggattgtttgggtgttcgaggttattttgtgacgtacgggggcggggttcggagtatgcgcggtagcgtacgggtatgcggggcggggtggggcggggttggtgttatagggggcgggttagagttcggcgcgttgacgttaagttgacggcgtttttttgcgtaggcgtttttttgcgtaggcg

SEQ ID NO: 31700 - DNA, 544 bp, Artificial Sequence
  chemically treated genomic DNA (Homo sapiens) CpG-island No: 31700
cgcctacgcaaaaaaacgcctacgcaaaaaaacgccgtcaacttaacgtcaacgcgccgaactctaacccgccccctataacaccaaccccgccccaccccgccccgcatacccgtacgctaccgcgcatactccgaaccccgcccccgtacgtcacaaaataacctcgaacacccaaacaatccctaacgtatcgaaaaaaaaccgaacgcgaaaatacgctaaataaaactcgaaactacgtaaaaaaactaaaccgaacgactaaacgaacctaaccgaaccgacgaaaaaaaaacgtcgattaaacgacgacgaacatacgcttttaacacattaaaaataaacctacaacgcgaaaccgctccctaaaaaactacgctaaaccgacgacgccgaaacctacccttaaaaaaccttcccgacccgaaaccgtatctaaaactccgccgaaacgaaccgaaccgaattccgaaacgaccaacctaaaaacaactattccaaccgctctaactatcccctcccttccctaatccgatatata

SEQ ID NO: 31701 - DNA, 754 bp, Artificial Sequence
  chemically treated genomic DNA (Homo sapiens) CpG-island No: 31701
gagtacgtagattgtcgatgttagagaagttcggtgcgggtttcgtgtttttttttcgttttaggaagattttagttcgtggttaaatttttttgtcgtttttcggtttgcgcgtttacgttgtcggtttttcgataaaagcgacggcgttttggtgaaaagtagacgttttttatcggtttgcgttttgtagtttaattatgttttagttttttataagttatttgttcgcgtttttcgttaggcgtttagttcggatttgttttcgcggtcgttaaggcgtacgtgaagttttcgggcggggggagcgtaaggaggcgggagtttgcggacgcgaacgtaggtttaggaagggaagcgattttagggcgtacgcgtagagtttggagattgggcggggcgtgtttttcgtaggggttacgaacgaaaggcgagcgcgtggcgtttaggagttcgcgtacgcgttgtggtttcgtttcgtttatgagcgttcgcgcggtcgtcgtagtattttttttttagattcgttcggttcgtttatttaatttagcggaggtttggagtgagagtagggaagtgtggggcgaggtgggcggggcgttgtacgcgtgcgcggttagcgaaagaagggagggggcgggagattcgagataacgttatttcgttaatatttaattaggagtcggtttgatttcgttttttttttttacgttattggttgagaggtttttagatgggcggggtcggtcgtggg

SEQ ID NO: 31702 - DNA, 754 bp, Artificial Sequence
  chemically treated genomic DNA (Homo sapiens) CpG-island No: 31702
cccacgaccgaccccgcccatctaaaaacctctcaaccaataacgtaaaaaaaaaaaacgaaatcaaaccgactcctaattaaatattaacgaaataacgttatctcgaatctcccgccccctcccttctttcgctaaccgcgcacgcgtacaacgccccgcccacctcgccccacacttccctactctcactccaaacctccgctaaattaaataaacgaaccgaacgaatctaaaaaaaaaatactacgacgaccgcgcgaacgctcataaacgaaacgaaaccacaacgcgtacgcgaactcctaaacgccacgcgctcgcctttcgttcgtaacccctacgaaaaacacgccccgcccaatctccaaactctacgcgtacgccctaaaatcgcttcccttcctaaacctacgttcgcgtccgcaaactcccgcctccttacgctccccccgcccgaaaacttcacgtacgccttaacgaccgcgaaaacaaatccgaactaaacgcctaacgaaaaacgcgaacaaataacttataaaaaactaaaacataattaaactacaaaacgcaaaccgataaaaaacgtctacttttcaccaaaacgccgtcgcttttatcgaaaaaccgacaacgtaaacgcgcaaaccgaaaaacgacaaaaaaatttaaccacgaactaaaatcttcctaaaacgaaaaaaaaacacgaaacccgcaccgaacttctctaacatcgacaatctacgtactc

SEQ ID NO: 31703 - DNA, 754 bp, Artificial Sequence
  chemically treated genomic DNA (Homo sapiens) CpG-island No: 31703
tttacggtcggtttcgtttatttgggggttttttagttaataacgtgagaagagggggcggggttaggtcggtttttgattgggtgttgacggggtaacgttgtttcggatttttcgtttttttttttttttcgttggtcgcgtacgcgtgtaacgtttcgtttatttcgttttatatttttttgtttttattttaagttttcgttaggttaagtagacgagtcgggcgggtttgaagaaaagatgttacgacggtcgcgcggacgtttatgggcggggcgagattatagcgcgtgcgcgggtttttgagcgttacgcgttcgtttttcgttcgtaatttttgcgggaggtacgtttcgtttagtttttaggttttgcgcgtgcgttttggaatcgtttttttttttaggtttgcgttcgcgttcgtaaattttcgtttttttgcgtttttttcgttcgggagttttacgtgcgttttggcggtcgcgggggtaggttcgggttggacgtttggcggaggacgcgggtaggtggtttgtgggaggttggggtatagttgagttgtaaggcgtaaatcgatgaggggcgtttgttttttattagggcgtcgtcgtttttgtcgggaaatcggtagcgtaggcgcgtagatcgggaagcggtaagaagatttggttacgagttggggtttttttggaacggagagaaagtacggaattcgtatcgggtttttttggtatcggtagtttacgtgttt

SEQ ID NO: 31704 - DNA, 754 bp, Artificial Sequence
  chemically treated genomic DNA (Homo sapiens) CpG-island No: 31704
aaacacgtaaactaccgataccaaaaaaacccgatacgaattccgtactttctctccgttccaaaaaaaccccaactcgtaaccaaatcttcttaccgcttcccgatctacgcgcctacgctaccgatttcccgacaaaaacgacgacgccctaataaaaaacaaacgcccctcatcgatttacgccttacaactcaactataccccaacctcccacaaaccacctacccgcgtcctccgccaaacgtccaacccgaacctacccccgcgaccgccaaaacgcacgtaaaactcccgaacgaaaaaaacgcaaaaaaacgaaaatttacgaacgcgaacgcaaacctaaaaaaaaaaacgattccaaaacgcacgcgcaaaacctaaaaactaaacgaaacgtacctcccgcaaaaattacgaacgaaaaacgaacgcgtaacgctcaaaaacccgcgcacgcgctataatctcgccccgcccataaacgtccgcgcgaccgtcgtaacatcttttcttcaaacccgcccgactcgtctacttaacctaacgaaaacttaaaataaaaacaaaaaaatataaaacgaaataaacgaaacgttacacgcgtacgcgaccaacgaaaaaaaaaaaaaaacgaaaaatccgaaacaacgttaccccgtcaacacccaatcaaaaaccgacctaaccccgccccctcttctcacgttattaactaaaaaacccccaaataaacgaaaccgaccgtaaa

SEQ ID NO: 31705 - DNA, 729 bp, Artificial Sequence
  chemically treated genomic DNA (Homo sapiens) CpG-island No: 31705
tcgagggacgtgcgtaacgaggagttggttaaattggagatcgtcgtgttggcggtgattttcgcggtggtcgtgttgggtaatagtagcgtattgttggttttgtatcggacgtcgcgtaagacgtttcgtatgtatttttttattcgatattttagtttggtcgatttggtcgtggtatttttttaggtgttgtcgtaaatgtgttgggatattatttatcgttttcgcggtttcgattggttgtgtcgcgtggtgaagtatttgtaggtgttcggtatgtttgcgtcggtttatatgttggtagttatgatagtcgatcgttatatcgcggtgtgttattcgtttaagattttgtaatagttcgcgcgtcgttcgcgttttatgatcgcggtcgtttgggtgttgagtttcgtgttgagtacgtcgtagtatttcgttttttttatgatcgaggtgaataatgttattaaggttcgcgattgttgggttatttttatttagttttggggttttcgtgtttacgtgatttggatgacgggcggtatttttgtggcgttcgtggttattttgggtatttgttacggttttatttgttataatatttggtgtaacgttcgcgggaagacggcgtcgcgttagagtaagggtgtagagtaagcgggtgtggttttttaaaaggggtttttgttcgtattttgtgttagtagcgtgaagtttatttttcgg

SEQ ID NO: 31706 - DNA, 729 bp, Artificial Sequence
  chemically treated genomic DNA (Homo sapiens) CpG-island No: 31706
ccgaaaaataaacttcacgctactaacacaaaatacgaacaaaaaccccttttaaaaaaccacacccgcttactctacacccttactctaacgcgacgccgtcttcccgcgaacgttacaccaaatattataacaaataaaaccgtaacaaatacccaaaataaccacgaacgccacaaaaataccgcccgtcatccaaatcacgtaaacacgaaaaccccaaaactaaataaaaataacccaacaatcgcgaaccttaataacattattcacctcgatcataaaaaaaacgaaatactacgacgtactcaacacgaaactcaacacccaaacgaccgcgatcataaaacgcgaacgacgcgcgaactattacaaaatcttaaacgaataacacaccgcgatataacgatcgactatcataactaccaacatataaaccgacgcaaacataccgaacacctacaaatacttcaccacgcgacacaaccaatcgaaaccgcgaaaacgataaataatatcccaacacatttacgacaacacctaaaaaaataccacgaccaaatcgaccaaactaaaatatcgaataaaaaaatacatacgaaacgtcttacgcgacgtccgatacaaaaccaacaatacgctactattacccaacacgaccaccgcgaaaatcaccgccaacacgacgatctccaatttaaccaactcctcgttacgcacgtccctcga

SEQ ID NO: 31707 - DNA, 729 bp, Artificial Sequence
  chemically treated genomic DNA (Homo sapiens) CpG-island No: 31707
tcgggaaatggattttacgttgttgatatagggtgcgagtaggaattttttttggaaggttatattcgtttgttttgtatttttgttttggcgcgacgtcgttttttcgcggacgttgtattagatgttgtagtagatgaagtcgtagtaggtatttaagatgattacgggcgttataaagatgtcgttcgttatttaggttacgtaggtacgagaattttagggttggatgaaggtggtttagtagtcgcgggttttggtgatattgtttatttcgattatggagaagacgaagtattgcggcgtgtttagtacgaagtttagtatttaggcggtcgcgattatgaggcgcgagcggcgcgcgggttgttgtagagttttgagcgggtggtatatcgcgatgtagcggtcggttgttatgattattagtatgtaggtcgacgtaaatatgtcgaatatttgtaggtgttttattacgcggtatagttagtcggggtcgcggaagcggtaggtgatgttttagtatatttgcggtagtatttggaagaatgttacggttaggtcggttaggttgaggtgtcggatgaagaggtgtatgcgggacgttttgcgcggcgttcggtgtagagttagtagtacgttgttgttgtttagtacggttatcgcgaaagttatcgttagtacggcgatttttagtttggttagtttttcgttgcgtacgtttttcgg

SEQ ID NO: 31708 - DNA, 729 bp, Artificial Sequence
  chemically treated genomic DNA (Homo sapiens) CpG-island No: 31708
ccgaaaaacgtacgcaacgaaaaactaaccaaactaaaaatcgccgtactaacgataactttcgcgataaccgtactaaacaacaacaacgtactactaactctacaccgaacgccgcgcaaaacgtcccgcatacacctcttcatccgacacctcaacctaaccgacctaaccgtaacattcttccaaatactaccgcaaatatactaaaacatcacctaccgcttccgcgaccccgactaactataccgcgtaataaaacacctacaaatattcgacatatttacgtcgacctacatactaataatcataacaaccgaccgctacatcgcgatataccacccgctcaaaactctacaacaacccgcgcgccgctcgcgcctcataatcgcgaccgcctaaatactaaacttcgtactaaacacgccgcaatacttcgtcttctccataatcgaaataaacaatatcaccaaaacccgcgactactaaaccaccttcatccaaccctaaaattctcgtacctacgtaacctaaataacgaacgacatctttataacgcccgtaatcatcttaaatacctactacgacttcatctactacaacatctaatacaacgtccgcgaaaaaacgacgtcgcgccaaaacaaaaatacaaaacaaacgaatataaccttccaaaaaaaattcctactcgcaccctatatcaacaacgtaaaatccatttcccga

SEQ ID NO: 31709 - DNA, 688 bp, Artificial Sequence
  chemically treated genomic DNA (Homo sapiens) CpG-island No: 31709
gcggcggttttagcgtttaagttaggttttaatttaagtacgaggcgaaggggttttttaagcgtaaggtttcgaatttttttatttatttttaattcgaagttcgggattaagaattacgtattgtagttaggggcgtggaagtaatttaaggtacgtaagggttataattcgtaaagaggttaggttcgcgggaattatatacggtatttatttgtgttttggcggtaaattcgttgcgaaaaagaacgtttacggcgattattgtatttatatacggtttttttttattttcgggaaaaaggcggagttagtatacgatattatttttttagtttatttcgcgttattttttttaggtatcggtttaattgtcgatttttttttttaatttttcggggattgtgggcgatgtgcgttttgtttattgacgggtatcggagttttacgtatgtttttttttattttagtgatgacgagagcgggcgggtgagggggcgggaacgtagcgatttttgggttttacgttagtgggagtttaacgacggtttttgggattttttaaggtaggggcgagtttttttgtatgaattatttttagtttcggtcggggcgggttggggggggtggtgacggggaggtcgtttggaagggacgtgtagaattttttttttattattgttggttt

SEQ ID NO: 31710 - DNA, 688 bp, Artificial Sequence
  chemically treated genomic DNA (Homo sapiens) CpG-island No: 31710
aaaccaacaataataaaaaaaaaattctacacgtcccttccaaacgacctccccgtcaccaccccccccaacccgccccgaccgaaactaaaaataattcatacaaaaaaactcgcccctaccttaaaaaatcccaaaaaccgtcgttaaactcccactaacgtaaaacccaaaaatcgctacgttcccgccccctcacccgcccgctctcgtcatcactaaaataaaaaaaaacatacgtaaaactccgatacccgtcaataaacaaaacgcacatcgcccacaatccccgaaaaattaaaaaaaaaaatcgacaattaaaccgatacctaaaaaaaataacgcgaaataaactaaaaaaataatatcgtatactaactccgcctttttcccgaaaataaaaaaaaaccgtatataaatacaataatcgccgtaaacgttctttttcgcaacgaatttaccgccaaaacacaaataaataccgtatataattcccgcgaacctaacctctttacgaattataacccttacgtaccttaaattacttccacgcccctaactacaatacgtaattcttaatcccgaacttcgaattaaaaataaataaaaaaattcgaaaccttacgcttaaaaaaccccttcgcctcgtacttaaattaaaacctaacttaaacgctaaaaccgccgc

SEQ ID NO: 31711 - DNA, 688 bp, Artificial Sequence
  chemically treated genomic DNA (Homo sapiens) CpG-island No: 31711
aagttagtaatggtagagggaagattttgtacgttttttttaggcggttttttcgttattattttttttaattcgtttcgatcggagttgagagtaatttatataaaaggattcgtttttgttttggggaattttagggatcgtcgttaaatttttattaacgtagaatttagagatcgttgcgttttcgtttttttattcgttcgttttcgttattattgaggtggagaagagtatgcgtgaggtttcggtgttcgttagtgggtagagcgtatatcgtttatagttttcgagaagttggggggaggggtcggtaattgaatcggtgtttagagaaggtggcgcggggtaaattgggaaagtgatgtcgtgtattggtttcgtttttttttcgagggtgggggagaatcgtatataagtgtagtagtcgtcgtgaacgttttttttcgtaacgggtttgtcgttagaatataggtaagtgtcgtgtgtggttttcgcgggtttggtttttttacgggttatggtttttgcgtgttttgaattatttttacgtttttggttgtagtacgtgatttttgatttcgagtttcgggttggaagtgggtgggagagttcgaggttttgcgtttaaggagttttttcgtttcgtgtttgagttgaggtttggtttgggcgttggggtcgtcgt

SEQ ID NO: 31712 - DNA, 688 bp, Artificial Sequence
  chemically treated genomic DNA (Homo sapiens) CpG-island No: 31712
acgacgaccccaacgcccaaaccaaacctcaactcaaacacgaaacgaaaaaactccttaaacgcaaaacctcgaactctcccacccacttccaacccgaaactcgaaatcaaaaatcacgtactacaaccaaaaacgtaaaaataattcaaaacacgcaaaaaccataacccgtaaaaaaaccaaacccgcgaaaaccacacacgacacttacctatattctaacgacaaacccgttacgaaaaaaaacgttcacgacgactactacacttatatacgattctcccccaccctcgaaaaaaaaacgaaaccaatacacgacatcactttcccaatttaccccgcgccaccttctctaaacaccgattcaattaccgacccctccccccaacttctcgaaaactataaacgatatacgctctacccactaacgaacaccgaaacctcacgcatactcttctccacctcaataataacgaaaacgaacgaataaaaaaacgaaaacgcaacgatctctaaattctacgttaataaaaatttaacgacgatccctaaaattccccaaaacaaaaacgaatccttttatataaattactctcaactccgatcgaaacgaattaaaaaaaataataacgaaaaaaccgcctaaaaaaaacgtacaaaatcttccctctaccattactaactt

SEQ ID NO: 31713 - DNA, 1000 bp, Artificial Sequence
  chemically treated genomic DNA (Homo sapiens) CpG-island No: 31713
  unsure (437, 451, 469..)
gaagggatggtggtgcgttattgatgcgttaaagggtcgggtttttattcggagttgggagtgtgtggtgggagggtggtcggaatggagacggagggtttacgggaggttttcgaggggcggggtcggatttgggtatacgaggcgggggttggtgtttgcgggtttgagggtggggggagaagggagttggatttcgacgttcggagttggtaagatttgggtcgtggaggtgggtcgtcgcgagggtagcgtagtgggtggggggtgagttgtagtgggagagggtggggggcgggaaaggtcgattttcggagttcgggcgtgggggaggaaaaatttcggtttatcgtttgattcggagtagatattgcggcgcggtgcgtcgtcgttttagtcggagttgagcgtggggttttagtggttaaatagcggtntttcgtgcgagcgntttgaagggcgggataanntagcggattagggtcgtttttcgggttttcggtcgttttagttgtcgtcgtcgtcgtttatatattcggtagaaaggcggttcgaattcgtcgtcgttgtcgttaacgttaataatattagtaattttgttcgtttcggggttcgtcgtttcgcgttcgtcgttggcgtttttttagttggagttttcgttatagttgtttcgttttcgggaataatcggtaatacgttcgtcgaatagaacggtcgttgttttcgttcgttttcgtattaacgagaaacggggtaaaatttttttaattttttcgtttttataagttaaaaggttgttggtttcgttaatttcgttttaattagcgagaggcgttttgtaagagttttatttacggttttttaggacgggaggggtgggaattagtaggtcgtgatggttttgggttcgtgtgggttttgcgttgtgcggaagtagcggagagtttaatttaagtgttgaaaggggagaagagaggagggagtgggggaggaagggtta

SEQ ID NO: 31714 - DNA, 1000 bp, Artificial Sequence
  chemically treated genomic DNA (Homo sapiens) CpG-island No: 31714
  unsure (531..532, 550, 564)
taacccttcctcccccactccctcctctcttctcccctttcaacacttaaattaaactctccgctacttccgcacaacgcaaaacccacacgaacccaaaaccatcacgacctactaattcccacccctcccgtcctaaaaaaccgtaaataaaactcttacaaaacgcctctcgctaattaaaacgaaattaacgaaaccaacaaccttttaacttataaaaacgaaaaaattaaaaaaattttaccccgtttctcgttaatacgaaaacgaacgaaaacaacgaccgttctattcgacgaacgtattaccgattattcccgaaaacgaaacaactataacgaaaactccaactaaaaaaacgccaacgacgaacgcgaaacgacgaaccccgaaacgaacaaaattactaatattattaacgttaacgacaacgacgacgaattcgaaccgcctttctaccgaatatataaacgacgacgacgacaactaaaacgaccgaaaacccgaaaaacgaccctaatccgctannttatcccgcccttcaaancgctcgcacgaaanaccgctatttaaccactaaaaccccacgctcaactccgactaaaacgacgacgcaccgcgccgcaatatctactccgaatcaaacgataaaccgaaatttttcctcccccacgcccgaactccgaaaatcgacctttcccgccccccaccctctcccactacaactcaccccccacccactacgctaccctcgcgacgacccacctccacgacccaaatcttaccaactccgaacgtcgaaatccaactcccttctccccccaccctcaaacccgcaaacaccaacccccgcctcgtatacccaaatccgaccccgcccctcgaaaacctcccgtaaaccctccgtctccattccgaccaccctcccaccacacactcccaactccgaataaaaacccgaccctttaacgcatcaataacgcaccaccatcccttc

SEQ ID NO: 31715 - DNA, 1000 bp, Artificial Sequence
  chemically treated genomic DNA (Homo sapiens) CpG-island No: 31715
  unsure (531..532, 550, 564)
tggtttttttttttttattttttttttttttttttttttttaatatttgaattgggtttttcgttattttcgtatagcgtaggatttatacgagtttagaattattacggtttgttagtttttatttttttcgttttggaggatcgtaggtggaatttttgtagagcgtttttcgttggttggggcggggttggcgaagttaataattttttggtttgtgaaagcgaaggggttgggaaaattttgtttcgtttttcgttggtgcggaagcgggcggaagtagcggtcgttttgttcggcgaacgtgttgtcgattattttcgaaagcgaagtagttatggcggagattttaattgaggaggcgttaacggcgggcgcggggcggcgggtttcggggcgagtagagttgttggtgttgttggcgttagcggtagcggcggcgggttcgggtcgtttttttgtcggatgtgtgggcggcggcggcggtagttgggacggtcgggggttcggggagcggttttggttcgttgnnttgtttcgttttttaagncgttcgtacggggngtcgttgtttagttattgggattttacgtttagtttcgattgggacggcgacgtatcgcgtcgtagtgtttatttcggattaagcggtgagtcggggtttttttttttttacgttcgagtttcgggggtcgatttttttcgttttttatttttttttattataatttattttttatttattgcgttgttttcgcggcggtttatttttacggtttaaattttgttagtttcgggcgtcgggatttaatttttttttttttttatttttagattcgtaagtattaattttcgtttcgtgtgtttagattcgatttcgtttttcgaaaatttttcgtgagtttttcgtttttatttcggttatttttttattatatatttttaatttcgggtggaaattcgattttttagcgtattagtaacgtattattattttttt

SEQ ID NO: 31716 - DNA, 1000 bp, Artificial Sequence
  chemically treated genomic DNA (Homo sapiens) CpG-island No: 31716
  unsure (437, 451, 469..)
aaaaaaataataatacgttactaatacgctaaaaaatcgaatttccacccgaaattaaaaatatataataaaaaaataaccgaaataaaaacgaaaaactcacgaaaaattttcgaaaaacgaaatcgaatctaaacacacgaaacgaaaattaatacttacgaatctaaaaataaaaaaaaaaaaaaattaaatcccgacgcccgaaactaacaaaatttaaaccgtaaaaataaaccgccgcgaaaacaacgcaataaataaaaaataaattataataaaaaaaaataaaaaacgaaaaaaatcgacccccgaaactcgaacgtaaaaaaaaaaaaaccccgactcaccgcttaatccgaaataaacactacgacgcgatacgtcgccgtcccaatcgaaactaaacgtaaaatcccaataactaaacaacgacnccccgtacgaacgncttaaaaaacgaaacaanncaacgaaccaaaaccgctccccgaacccccgaccgtcccaactaccgccgccgccgcccacacatccgacaaaaaaacgacccgaacccgccgccgctaccgctaacgccaacaacaccaacaactctactcgccccgaaacccgccgccccgcgcccgccgttaacgcctcctcaattaaaatctccgccataactacttcgctttcgaaaataatcgacaacacgttcgccgaacaaaacgaccgctacttccgcccgcttccgcaccaacgaaaaacgaaacaaaattttcccaaccccttcgctttcacaaaccaaaaaattattaacttcgccaaccccgccccaaccaacgaaaaacgctctacaaaaattccacctacgatcctccaaaacgaaaaaaataaaaactaacaaaccgtaataattctaaactcgtataaatcctacgctatacgaaaataacgaaaaacccaattcaaatattaaaaaaaaaaaaaaaaaaaaaaaataaaaaaaaaaaaacca

SEQ ID NO: 31717 - DNA, 724 bp, Artificial Sequence
  chemically treated genomic DNA (Homo sapiens) CpG-island No: 31717
  unsure (126, 251)
tgcgcgggggtgggaggcgtagagcgagggagggggtatcgaagggggtaggtcgagggtgggtacggaggttaaatttcgtaggttcgggaagagaggagttggcgggagaggaatcggaagtgncgggttttcgttgttcggggttttcgttgtggttttttcgggaagtggttgtgtttttatcggagaaagtttcgatggtttttatcgtttagtgttcgttcgggtagtttacgaaggcgtaggantttgattaagaattggtcgttgtaggagattttgtgtttcgtaaatattttttttaagttcgcgggggttacgttttcgttgaggttgtcgatgtaaagtttgtttatggtggcggtttcggggtaggacgcggtttcgggtaaggtcgaacgagcgggcgcgcgcggcgagttttttaggttaagaggcggagaggtcggcggtaggagcgaaatttttttttgtattttattttagaagttgtttcgagtttagggcgtgagaaggcggtttgagggcgcgtagaggtcgcgggagagttcggggagagtttaggagaagtgttcgcggcgcgtagggagacggacgatacggcgtatttttttttttcggttcgaaattttttcgagaggttggtgtgttacgttttttcgcggtcgttttgggtcgttttaaataaaatcgatttgaaaaaaaatggagcggaaaaaaa

SEQ ID NO: 31718 - DNA, 724 bp, Artificial Sequence
  chemically treated genomic DNA (Homo sapiens) CpG-island No: 31718
  unsure (474, 599)
tttttttccgctccattttttttcaaatcgattttatttaaaacgacccaaaacgaccgcgaaaaaacgtaacacaccaacctctcgaaaaaatttcgaaccgaaaaaaaaaaatacgccgtatcgtccgtctccctacgcgccgcgaacacttctcctaaactctccccgaactctcccgcgacctctacgcgccctcaaaccgccttctcacgccctaaactcgaaacaacttctaaaataaaatacaaaaaaaaatttcgctcctaccgccgacctctccgcctcttaacctaaaaaactcgccgcgcgcgcccgctcgttcgaccttacccgaaaccgcgtcctaccccgaaaccgccaccataaacaaactttacatcgacaacctcaacgaaaacgtaacccccgcgaacttaaaaaaaatatttacgaaacacaaaatctcctacaacgaccaattcttaatcaaantcctacgccttcgtaaactacccgaacgaacactaaacgataaaaaccatcgaaactttctccgataaaaacacaaccacttcccgaaaaaaccacaacgaaaaccccgaacaacgaaaacccgncacttccgattcctctcccgccaactcctctcttcccgaacctacgaaatttaacctccgtacccaccctcgacctacccccttcgataccccctccctcgctctacgcctcccacccccgcgca

SEQ ID NO: 31719 - DNA, 724 bp, Artificial Sequence
  chemically treated genomic DNA (Homo sapiens) CpG-island No: 31719
  unsure (474, 599)
ttttttttcgttttatttttttttaagtcgattttatttagagcggtttagggcggtcgcggagaaacgtgatatattagtttttcggaggggtttcggatcgaagggaagaagtgcgtcgtgtcgttcgtttttttgcgcgtcgcgggtattttttttgggtttttttcgaattttttcgcgatttttgcgcgtttttaggtcgtttttttacgttttgggttcgggataatttttggggtggggtgtaaagaaaggtttcgtttttgtcgtcggttttttcgttttttggtttaggaggttcgtcgcgcgcgttcgttcgttcggttttgttcgggatcgcgttttgtttcgagatcgttattatgaataagttttatatcggtaattttaacgagagcgtgattttcgcggatttggagaaagtgtttgcggagtataagattttttatagcggttagtttttggttaaanttttacgttttcgtggattgttcggacgagtattgggcgatgaaggttatcgaaatttttttcggtaagaatatagttatttttcggaaaagttataacgagagtttcgaataacggagattcgntattttcggtttttttttcgttaattttttttttttcgggtttgcggggtttggttttcgtatttattttcgatttatttttttcgatgttttttttttcgttttgcgttttttattttcgcgta

SEQ ID NO: 31720 - DNA, 724 bp, Artificial Sequence
  chemically treated genomic DNA (Homo sapiens) CpG-island No: 31720
  unsure (126, 251)
tacgcgaaaataaaaaacgcaaaacgaaaaaaaaaacatcgaaaaaaataaatcgaaaataaatacgaaaaccaaaccccgcaaacccgaaaaaaaaaaaattaacgaaaaaaaaaccgaaaatancgaatctccgttattcgaaactctcgttataacttttccgaaaaataactatattcttaccgaaaaaaatttcgataaccttcatcgcccaatactcgtccgaacaatccacgaaaacgtaaaantttaaccaaaaactaaccgctataaaaaatcttatactccgcaaacactttctccaaatccgcgaaaatcacgctctcgttaaaattaccgatataaaacttattcataataacgatctcgaaacaaaacgcgatcccgaacaaaaccgaacgaacgaacgcgcgcgacgaacctcctaaaccaaaaaacgaaaaaaccgacgacaaaaacgaaacctttctttacaccccaccccaaaaattatcccgaacccaaaacgtaaaaaaacgacctaaaaacgcgcaaaaatcgcgaaaaaattcgaaaaaaacccaaaaaaaatacccgcgacgcgcaaaaaaacgaacgacacgacgcacttcttcccttcgatccgaaacccctccgaaaaactaatatatcacgtttctccgcgaccgccctaaaccgctctaaataaaatcgacttaaaaaaaaataaaacgaaaaaaaa

SEQ ID NO: 31721 - DNA, 559 bp, Artificial Sequence
  chemically treated genomic DNA (Homo sapiens) CpG-island No: 31721
agcggtttttttataaatttttacggtgggaattattgtaaaggtatcggttttttcggtttagaatatttcgcgggattttagttgtttttgggtttttttttttagcgtaattattaattttaatatgtaacgcgtttcgtggtttaagcgttcgaatgaaggttcggggttaaagttatgtgtttgattgcgttatacgtttcgttattttttttacgtttttttttttagcgtatattttggtcgttattttgtgcgcgaggttatggaatttttgagtttcgttaattttatggtcgagcgttttagggatcggttaatcgtaatttagatttcgtaggaaagtttcgtttttattcgtatggaggcgggaattgttacgaagtttttgtggagggagaggaagtagttgcggaaagttaataagagtggggaatcgatgacgttaattaatggggacgcggggatattacggttaatgagaatggagaaggtttaggatacgtgggtgggggaagttgagcgttgagattaagggttaaagttgggaggtgag

SEQ ID NO: 31722 - DNA, 559 bp, Artificial Sequence
  chemically treated genomic DNA (Homo sapiens) CpG-island No: 31722
ctcacctcccaactttaacccttaatctcaacgctcaacttcccccacccacgtatcctaaaccttctccattctcattaaccgtaatatccccgcgtccccattaattaacgtcatcgattccccactcttattaactttccgcaactacttcctctccctccacaaaaacttcgtaacaattcccgcctccatacgaataaaaacgaaactttcctacgaaatctaaattacgattaaccgatccctaaaacgctcgaccataaaattaacgaaactcaaaaattccataacctcgcgcacaaaataacgaccaaaatatacgctaaaaaaaaaaacgtaaaaaaaataacgaaacgtataacgcaatcaaacacataactttaaccccgaaccttcattcgaacgcttaaaccacgaaacgcgttacatattaaaattaataattacgctaaaaaaaaaaacccaaaaacaactaaaatcccgcgaaatattctaaaccgaaaaaaccgatacctttacaataattcccaccgtaaaaatttataaaaaaaccgct

SEQ ID NO: 31723 - DNA, 559 bp, Artificial Sequence
  chemically treated genomic DNA (Homo sapiens) CpG-island No: 31723
tttattttttagttttagtttttggttttagcgtttagttttttttatttacgtgttttggattttttttatttttattggtcgtaatattttcgcgtttttattggttgacgttatcgattttttatttttattggtttttcgtagttgttttttttttttttataggagtttcgtggtaattttcgtttttatgcggatagaggcggggtttttttacgagatttggattacgattggtcgatttttgaaacgttcgattatagagttggcgggatttagaggttttataatttcgcgtataagatggcgattaaggtgtacgttgaagaaaaaggcgtgggagagatgacgggacgtgtgacgtagttagatatatgattttggtttcgagtttttattcgggcgtttgggttacggggcgcgttgtatgttgggattggtagttgcgttgagggggggggtttaaggatagttgagatttcgcgagatattttaggtcgggagagtcgatgtttttgtagtaatttttatcgtggaggtttgtggaaagatcgtt

SEQ ID NO: 31724 - DNA, 559 bp, Artificial Sequence
  chemically treated genomic DNA (Homo sapiens) CpG-island No: 31724
aacgatctttccacaaacctccacgataaaaattactacaaaaacatcgactctcccgacctaaaatatctcgcgaaatctcaactatccttaaaccccccccctcaacgcaactaccaatcccaacatacaacgcgccccgtaacccaaacgcccgaataaaaactcgaaaccaaaatcatatatctaactacgtcacacgtcccgtcatctctcccacgcctttttcttcaacgtacaccttaatcgccatcttatacgcgaaattataaaacctctaaatcccgccaactctataatcgaacgtttcaaaaatcgaccaatcgtaatccaaatctcgtaaaaaaaccccgcctctatccgcataaaaacgaaaattaccacgaaactcctataaaaaaaaaaaaaacaactacgaaaaaccaataaaaataaaaaatcgataacgtcaaccaataaaaacgcgaaaatattacgaccaataaaaataaaaaaaatccaaaacacgtaaataaaaaaaactaaacgctaaaaccaaaaactaaaactaaaaaataaa

SEQ ID NO: 31725 - DNA, 1006 bp, Artificial Sequence
  chemically treated genomic DNA (Homo sapiens) CpG-island No: 31725
tcgcgtttaagtgtgtgcgtgcgtgtttgtgtgtgtggcggcgtgcgcgcgcgagtggggacgcgtagggtttggagagaaggcgcgggttttttaaggagttagagggggtcgggtcggggcgcgtcgttgcgggcggggagtcgggagtagggaggtcgagttatcgtttttcgggttcgcgtttcgtttttttttttttttttcgtcgtcgtcgtcgtcgtcgtcgtcgttatcgtcgtcgcggtcgtcggggagcgcggagtcgcgggtaggtcgggtcgtatcggagtttcgcgttcgtcggcgtttcgttcgagttttgcgttcgcgttttgcgtttcgcgatgcgcgttaatttgcgggtcggggatttagggtcggcgttttaggaggcggcggcgggaggatcgcgtttcgattcgaggtcgggtttgttgcgcgtttttagttcgatcggtatcggtatttgtttgagcgtttcggcggttcgagcgcgttttaagttcgggcgttatcgttgttattttcgcgaggtgagttggggtcgagggttttcgcgaagggcggggggaggcgcggagcgcgttttcgggggattcggggaggatcgggcggcgtacgcggcggagttggcggggtttttgtattttcgagttggcgttttcggggggtggtttgttggggagtaaggcgtttcgtcgatattgcggttcgcgtgttcgggggcgtcggggaatttaggggaattttagttttttagcgagggggcgggaaggagggaagtggcgttggggtgggcggggggcgcgttggaaatgtatagagcggttttttatagtgtgcgtcggttttggggatttggtcgttaggcgttttttgtattcggtgtagtttcggatttggcggggcgatattgcgttttattttttatcgggtagcgcgggtttgaaagtttttggagatggtatttttagttttttggtttggttgttgtggaggggcg

SEQ ID NO: 31726 - DNA, 1006 bp, Artificial Sequence
  chemically treated genomic DNA (Homo sapiens) CpG-island No: 31726
cgcccctccacaacaaccaaaccaaaaaactaaaaataccatctccaaaaactttcaaacccgcgctacccgataaaaaataaaacgcaatatcgccccgccaaatccgaaactacaccgaatacaaaaaacgcctaacgaccaaatccccaaaaccgacgcacactataaaaaaccgctctatacatttccaacgcgccccccgcccaccccaacgccacttccctccttcccgccccctcgctaaaaaactaaaattcccctaaattccccgacgcccccgaacacgcgaaccgcaatatcgacgaaacgccttactccccaacaaaccaccccccgaaaacgccaactcgaaaatacaaaaaccccgccaactccgccgcgtacgccgcccgatcctccccgaatcccccgaaaacgcgctccgcgcctccccccgcccttcgcgaaaaccctcgaccccaactcacctcgcgaaaataacaacgataacgcccgaacttaaaacgcgctcgaaccgccgaaacgctcaaacaaataccgataccgatcgaactaaaaacgcgcaacaaacccgacctcgaatcgaaacgcgatcctcccgccgccgcctcctaaaacgccgaccctaaatccccgacccgcaaattaacgcgcatcgcgaaacgcaaaacgcgaacgcaaaactcgaacgaaacgccgacgaacgcgaaactccgatacgacccgacctacccgcgactccgcgctccccgacgaccgcgacgacgataacgacgacgacgacgacgacgacgacgaaaaaaaaaaaaaaaaacgaaacgcgaacccgaaaaacgataactcgacctccctactcccgactccccgcccgcaacgacgcgccccgacccgaccccctctaactccttaaaaaacccgcgccttctctccaaaccctacgcgtccccactcgcgcgcgcacgccgccacacacacaaacacgcacgcacacacttaaacgcga

SEQ ID NO: 31727 - DNA, 1006 bp, Artificial Sequence
  chemically treated genomic DNA (Homo sapiens) CpG-island No: 31727
cgtttttttataatagttaggttagggagttaggggtattatttttaagggtttttaaattcgcgttgttcgatggaaaataaggcgtagtgtcgtttcgttaggttcggggttatatcgggtataagggacgtttggcggttaagtttttagagtcggcgtatattgtggggggtcgttttgtgtatttttagcgcgtttttcgtttattttaacgttatttttttttttttcgttttttcgttagggagttggagtttttttaagtttttcggcgttttcgagtacgcgggtcgtagtgtcggcggggcgttttgttttttagtaggttatttttcgagagcgttaattcgggagtgtaggggtttcgttaatttcgtcgcgtgcgtcgttcgatttttttcggatttttcggaagcgcgtttcgcgttttttttcgtttttcgcggggattttcggttttaatttatttcgcggaggtggtagcggtggcgttcgggtttggggcgcgttcgggtcgtcggggcgtttaggtaagtgtcggtgtcgatcgggttgggggcgcgtagtaggttcggtttcgggtcgggacgcgattttttcgtcgtcgttttttagggcgtcggttttgggttttcggttcgtaagttggcgcgtatcgcggagcgtagggcgcgggcgtagggttcgggcggggcgtcggcggacgcggggtttcggtgcggttcggtttgttcgcggtttcgcgtttttcggcggtcgcggcggcggtggcggcggcggcggcggcggcggcggcgggagggggaggagggggcggggcgcgagttcgggaggcggtggttcggtttttttgttttcggtttttcgttcgtagcgacgcgtttcggttcggttttttttggttttttaaagggttcgcgttttttttttaggttttgcgcgtttttattcgcgcgcgtacgtcgttatatatatagatacgtacgtatatatttgggcgcga

SEQ ID NO: 31728 - DNA, 1006 bp, Artificial Sequence
  chemically treated genomic DNA (Homo sapiens) CpG-island No: 31728
tcgcgcccaaatatatacgtacgtatctatatatataacgacgtacgcgcgcgaataaaaacgcgcaaaacctaaaaaaaaaacgcgaaccctttaaaaaaccaaaaaaaaccgaaccgaaacgcgtcgctacgaacgaaaaaccgaaaacaaaaaaaccgaaccaccgcctcccgaactcgcgccccgccccctcctccccctcccgccgccgccgccgccgccgccgccgccaccgccgccgcgaccgccgaaaaacgcgaaaccgcgaacaaaccgaaccgcaccgaaaccccgcgtccgccgacgccccgcccgaaccctacgcccgcgccctacgctccgcgatacgcgccaacttacgaaccgaaaacccaaaaccgacgccctaaaaaacgacgacgaaaaaatcgcgtcccgacccgaaaccgaacctactacgcgcccccaacccgatcgacaccgacacttacctaaacgccccgacgacccgaacgcgccccaaacccgaacgccaccgctaccacctccgcgaaataaattaaaaccgaaaatccccgcgaaaaacgaaaaaaaacgcgaaacgcgcttccgaaaaatccgaaaaaaatcgaacgacgcacgcgacgaaattaacgaaacccctacactcccgaattaacgctctcgaaaaataacctactaaaaaacaaaacgccccgccgacactacgacccgcgtactcgaaaacgccgaaaaacttaaaaaaactccaactccctaacgaaaaaacgaaaaaaaaaaaaataacgttaaaataaacgaaaaacgcgctaaaaatacacaaaacgaccccccacaatatacgccgactctaaaaacttaaccgccaaacgtcccttatacccgatataaccccgaacctaacgaaacgacactacgccttattttccatcgaacaacgcgaatttaaaaacccttaaaaataatacccctaactccctaacctaactattataaaaaaacg

SEQ ID NO: 31729 - DNA, 657 bp, Artificial Sequence
  chemically treated genomic DNA (Homo sapiens) CpG-island No: 31729
gggttggtcgttttcgggtttcggtatatggttttttcgtcgtcggtttttttcgggttttttagagcgtttcgcgtcgcgcgtatgtttcgtcgtcgtcgtttggtatggggtcgggcgattttcgggggcgggttcgagggcgggggtcgagcgggttgtatttagtcgcggatcggggtagttggggtcgtcgatagttttttcgttcgttcgcgagtattttgtcgttcgtcgtcgaatagtgtcgagtttttttttttcggtttgttttcgcgtatggcgcgtgagcgtgtgtttgtgtacgaggtcgtgtgtatgtgtgtgtgtgagcgcgtgtgtgagtcgtcggggtatcgtcggtgtcgttcgttagtcgtcgaacgtcgcggttatagttatcgtttgcgttcgttgtcggtcgcgcgtttaggtgtacgcgttttcgtcgtcgttcgtattcgtttcgaggttcggtcgtcgttttggtttttgttttttcgtagttttttcgttagtggttttcgatcgttacggtcgagttcgttcgtagtgtgattcggattcgttgtttattttatttttagtatgtgttgtttcgatgttttcggttgtatagacgattagggttattagtttgtatttttttgagatatt

SEQ ID NO: 31730 - DNA, 657 bp, Artificial Sequence
  chemically treated genomic DNA (Homo sapiens) CpG-island No: 31730
aatatctcaaaaaaatacaaactaataaccctaatcgtctatacaaccgaaaacatcgaaacaacacatactaaaaataaaataaacaacgaatccgaatcacactacgaacgaactcgaccgtaacgatcgaaaaccactaacgaaaaaactacgaaaaaacaaaaaccaaaacgacgaccgaacctcgaaacgaatacgaacgacgacgaaaacgcgtacacctaaacgcgcgaccgacaacgaacgcaaacgataactataaccgcgacgttcgacgactaacgaacgacaccgacgataccccgacgactcacacacgcgctcacacacacacatacacacgacctcgtacacaaacacacgctcacgcgccatacgcgaaaacaaaccgaaaaaaaaaaactcgacactattcgacgacgaacgacaaaatactcgcgaacgaacgaaaaaactatcgacgaccccaactaccccgatccgcgactaaatacaacccgctcgacccccgccctcgaacccgcccccgaaaatcgcccgaccccataccaaacgacgacgacgaaacatacgcgcgacgcgaaacgctctaaaaaacccgaaaaaaaccgacgacgaaaaaaccatataccgaaacccgaaaacgaccaaccc

SEQ ID NO: 31731 - DNA, 657 bp, Artificial Sequence
  chemically treated genomic DNA (Homo sapiens) CpG-island No: 31731
aatattttaagagggtgtaagttaatagttttaatcgtttgtatagtcgagggtatcgaggtagtatatgttgagggtggggtgagtagcggattcgaattatattgcggacgaattcggtcgtggcgatcgaaggttattagcgagaggattgcgaggaggtaagggttaggacggcggtcgagtttcgaggcggatacggacggcggcgggagcgcgtgtatttgggcgcgcggtcggtagcgggcgtaggcggtggttgtggtcgcggcgttcggcggttggcgggcggtatcggcggtgtttcggcggtttatatacgcgtttatatatatatatatatacggtttcgtatataaatatacgtttacgcgttatacgcgggagtaggtcggagggaggaggttcggtattgttcggcggcgagcgatagagtgttcgcggacgagcgggagggttgtcggcggttttagttatttcggttcgcgattaggtgtagttcgttcggttttcgttttcggattcgttttcgggggtcgttcggttttatgttaagcggcggcggcggagtatgcgcgcgacgcgggacgttttgaggagttcggagggaatcggcgacgaggggattatgtatcgggattcggaggcggttagttt

SEQ ID NO: 31732 - DNA, 657 bp, Artificial Sequence
  chemically treated genomic DNA (Homo sapiens) CpG-island No: 31732
aaactaaccgcctccgaatcccgatacataatcccctcgtcgccgattccctccgaactcctcaaaacgtcccgcgtcgcgcgcatactccgccgccgccgcttaacataaaaccgaacgacccccgaaaacgaatccgaaaacgaaaaccgaacgaactacacctaatcgcgaaccgaaataactaaaaccgccgacaaccctcccgctcgtccgcgaacactctatcgctcgccgccgaacaataccgaacctcctccctccgacctactcccgcgtataacgcgtaaacgtatatttatatacgaaaccgtatatatatatatatataaacgcgtatataaaccgccgaaacaccgccgataccgcccgccaaccgccgaacgccgcgaccacaaccaccgcctacgcccgctaccgaccgcgcgcccaaatacacgcgctcccgccgccgtccgtatccgcctcgaaactcgaccgccgtcctaacccttacctcctcgcaatcctctcgctaataaccttcgatcgccacgaccgaattcgtccgcaatataattcgaatccgctactcaccccaccctcaacatatactacctcgataccctcgactatacaaacgattaaaactattaacttacaccctcttaaaatatt

SEQ ID NO: 31733 - DNA, 818 bp, Artificial Sequence
  chemically treated genomic DNA (Homo sapiens) CpG-island No: 31733
cgtcgttaggagcgtcgggtaatagcggcgttaggatcgtgatagaaaatttcgcgaggaggaatagttgcgttaggagagggaggaatagtagttgagtcgttaagagcgtgatagaaaatttcgtttagaggaatagaaagtgcgtcgttaggaataagagagaaaatttatggaggacgaatagtagttgcgtcgttaggagggttaataatagttgcgttaggagtcggatagaaaatttcgcgaagacgaatagttgttttaggaaagggaagaatagtagttgtatcgttaagagcgtgatagaaaatttttcgaggaggaatcgtagttgttcgttaggagcgcgaataatagttgcgttacgatcgcgatagaaaatttcgtgaagaggaatagttgttttaggaaggggaggaatagtagttgcgtcgttaagagcgtgatagaaaatttcgcgaagaggaatagtagtttcgtcgttagatacgagagagaaaatttttttaggaggaatagtagttgcgtcgttaggaattggagagaaaatttcgtgaggaggaatagttgcgttaagaaacggagtaagagtagttgcgtcgttaagaacgttatagaaaaattttagaggaagagtagtttcgttcggaaagggaagaatagtagttgcgtcgttagagcgtcgatagaaaatttcgcgaggaggaatagtttcgttagagagaggaggaatagtagttgcgtagtagagagtttgatagaaaatttcgcgagaggaatagttacgttaggagagggaagaatagtagttgcgt

SEQ ID NO: 31734 - DNA, 818 bp, Artificial Sequence
  chemically treated genomic DNA (Homo sapiens) CpG-island No: 31734
acgcaactactattcttccctctcctaacgtaactattcctctcgcgaaattttctatcaaactctctactacgcaactactattcctcctctctctaacgaaactattcctcctcgcgaaattttctatcgacgctctaacgacgcaactactattcttccctttccgaacgaaactactcttcctctaaaatttttctataacgttcttaacgacgcaactactcttactccgtttcttaacgcaactattcctcctcacgaaattttctctccaattcctaacgacgcaactactattcctcctaaaaaaattttctctctcgtatctaacgacgaaactactattcctcttcgcgaaattttctatcacgctcttaacgacgcaactactattcctccccttcctaaaacaactattcctcttcacgaaattttctatcgcgatcgtaacgcaactattattcgcgctcctaacgaacaactacgattcctcctcgaaaaattttctatcacgctcttaacgatacaactactattcttccctttcctaaaacaactattcgtcttcgcgaaattttctatccgactcctaacgcaactattattaaccctcctaacgacgcaactactattcgtcctccataaattttctctcttattcctaacgacgcactttctattcctctaaacgaaattttctatcacgctcttaacgactcaactactattcctccctctcctaacgcaactattcctcctcgcgaaattttctatcacgatcctaacgccgctattacccgacgctcctaacgacg

SEQ ID NO: 31735 - DNA, 818 bp, Artificial Sequence
  chemically treated genomic DNA (Homo sapiens) CpG-island No: 31735
gcgtagttgttgttttttttttttttggcgtagttgtttttttcgcggaattttttgttagattttttgttgcgtagttgttgttttttttttttttggcggagttgttttttttcgcggaattttttgtcggcgttttggcggcgtagttgttgttttttttttttcggacggagttgttttttttttaggatttttttgtagcgtttttggcggcgtagttgtttttgtttcgttttttggcgtagttgtttttttttacggaattttttttttagtttttggcggcgtagttgttgttttttttggaggaattttttttttcgtatttgacggcggagttgttgttttttttcgcggaattttttgttacgtttttggcggcgtagttgttgttttttttttttttggagtagttgtttttttttacggaattttttgtcgcggtcgtgacgtagttgttgttcgcgtttttggcgggtagttgcggttttttttcgaggaattttttgttacgtttttggcggtgtagttgttgttttttttttttttggagtagttgttcgttttcgcggaattttttgttcggtttttggcgtagttgttgttggtttttttggcggcgtagttgttgttcgttttttatgaatttttttttttgtttttggcggcgtattttttgtttttttaaacggaattttttgttacgtttttggcggtttagttgttgttttttttttttttggcgtagttgttttttttcgcggaattttttgttacggttttgacgtcgttgttgttcgacgtttttggcggcg

SEQ ID NO: 31736 - DNA, 818 bp, Artificial Sequence
  chemically treated genomic DNA (Homo sapiens) CpG-island No: 31736
cgccgccaaaaacgtcgaacaacaacgacgtcaaaaccgtaacaaaaaattccgcgaaaaaaaacaactacgccaaaaaaaaaaaaaacaacaactaaaccgccaaaaacgtaacaaaaaattccgtttaaaaaaacaaaaaatacgccgccaaaaacaaaaaaaaaaattcataaaaaacgaacaacaactacgccgccaaaaaaaccaacaacaactacgccaaaaaccgaacaaaaaattccgcgaaaacgaacaactactccaaaaaaaaaaaaaacaacaactacaccgccaaaaacgtaacaaaaaattcctcgaaaaaaaaccgcaactacccgccaaaaacgcgaacaacaactacgtcacgaccgcgacaaaaaattccgtaaaaaaaaacaactactccaaaaaaaaaaaaaacaacaactacgccgccaaaaacgtaacaaaaaattccgcgaaaaaaaacaacaactccgccgtcaaatacgaaaaaaaaaattcctccaaaaaaaacaacaactacgccgccaaaaactaaaaaaaaaattccgtaaaaaaaaacaactacgccaaaaaacgaaacaaaaacaactacgccgccaaaaacgctacaaaaaaatcctaaaaaaaaaacaactccgtccgaaaaaaaaaaaacaacaactacgccgccaaaacgccgacaaaaaattccgcgaaaaaaaacaactccgccaaaaaaaaaaaaaacaacaactacgcaacaaaaaatctaacaaaaaattccgcgaaaaaaacaactacgccaaaaaaaaaaaaaacaacaactacgc

SEQ ID NO: 31737 - DNA, 541 bp, Artificial Sequence
  chemically treated genomic DNA (Homo sapiens) CpG-island No: 31737
gacgaggaagagaggttcgagtagcgattgaagcgcgaggaggtggagagattcgagtaggaggagaggcgcgacgagcggttgaagcgcgaggagtcggatgaagagaggcgttatagttgttgaagagcgaggagtaggaggagaggcgttagtagtaattaaggcgcgagtagtaggaaaggcgcgagtagcggttgaagcgcgaggaggaggaagagaggttcgagtagcggttgaagcgcgagtatgaggaagagaggcgcgagtaggagttagttgaggaggagtaggaataggttcgggagcggattaagagtcgtatttcgaagtggtagtggtagttagaaagcgaggtcgacgtacggtaaagtaaagtttattcgaggtttcgtaagtaggaagggtagaggcgtcgttaagagtaggaggaaaagaggcggcgtcgggagagtgagttgtaatggtaggaggaggaacgggtttatcggtagtagtaggaagaggagtagcgtcgggattttatatggtagtggtaggt

SEQ ID NO: 31738 - DNA, 541 bp, Artificial Sequence
  chemically treated genomic DNA (Homo sapiens) CpG-island No: 31738
acctaccactaccatataaaatcccgacgctactcctcttcctactactaccgataaacccgttcctcctcctaccattacaactcactctcccgacgccgcctcttttcctcctactcttaacgacgcctctacccttcctacttacgaaacctcgaataaactttactttaccgtacgtcgacctcgctttctaactaccactaccacttcgaaatacgactcttaatccgctcccgaacctattcctactcctcctcaactaactcctactcgcgcctctcttcctcatactcgcgcttcaaccgctactcgaacctctcttcctcctcctcgcgcttcaaccgctactcgcgcctttcctactactcgcgccttaattactactaacgcctctcctcctactcctcgctcttcaacaactataacgcctctcttcatccgactcctcgcgcttcaaccgctcgtcgcgcctctcctcctactcgaatctctccacctcctcgcgcttcaatcgctactcgaacctctcttcctcgtc

SEQ ID NO: 31739 - DNA, 541 bp, Artificial Sequence
  chemically treated genomic DNA (Homo sapiens) CpG-island No: 31739
gtttgttattgttatgtgaagtttcggcgttgtttttttttttgttgttgtcggtgagttcgtttttttttttgttattgtagtttattttttcggcgtcgttttttttttttttgtttttggcggcgtttttgttttttttgtttgcggggtttcgagtagattttgttttgtcgtgcgtcggtttcgttttttagttgttattgttatttcgggatgcggtttttaattcgttttcgggtttgtttttgtttttttttagttagtttttgttcgcgttttttttttttatgttcgcgttttagtcgttgttcgagtttttttttttttttttcgcgttttagtcgttgttcgcgttttttttgttgttcgcgttttagttgttgttggcgtttttttttttgtttttcgttttttagtagttgtggcgtttttttttattcggtttttcgcgttttagtcgttcgtcgcgtttttttttttgttcgagtttttttattttttcgcgttttagtcgttgttcgagtttttttttttcgtt

SEQ ID NO: 31740 - DNA, 541 bp, Artificial Sequence
  chemically treated genomic DNA (Homo sapiens) CpG-island No: 31740
aacgaaaaaaaaaaactcgaacaacgactaaaacgcgaaaaaataaaaaaactcgaacaaaaaaaaaaacgcgacgaacgactaaaacgcgaaaaaccgaataaaaaaaaacgccacaactactaaaaaacgaaaaacaaaaaaaaaaacgccaacaacaactaaaacgcgaacaacaaaaaaaacgcgaacaacgactaaaacgcgaaaaaaaaaaaaaaaaactcgaacaacgactaaaacgcgaacataaaaaaaaaaaacgcgaacaaaaactaactaaaaaaaaacaaaaacaaacccgaaaacgaattaaaaaccgcatcccgaaataacaataacaactaaaaaacgaaaccgacgcacgacaaaacaaaatctactcgaaaccccgcaaacaaaaaaaacaaaaacgccgccaaaaacaaaaaaaaaaaaaacgacgccgaaaaaataaactacaataacaaaaaaaaaaacgaactcaccgacaacaacaaaaaaaaaaacaacgccgaaacttcacataacaataacaaac

SEQ ID NO: 31741 - DNA, 553 bp, Artificial Sequence
  chemically treated genomic DNA (Homo sapiens) CpG-island No: 31741
agcgggttagttatcggcgcggtagcggttgttattttttttttagaggtttttattagtgttttaatttgttttatatcgatgcggttatatagcgttttgaacggatttattttgtggtttagtagtcggttgttggatattattttaggttagtttcgtattgaggaatgtttttgtacgttcggttagtttcggtagtatcggttttaggtaagttattagtacgcggaataggttgatgtttattgagtaaattgtttgtaggtcggtatcgcggtttttttgtttcgttattatttacggagtttgtttatcgatatagcggttagttagattagttagcgttatgatttcgcgtacggttttattaaatttacggtttttttacgttttattaattattttagcggtattagtgaaggttttgtataattgcgggttagttagttcgtttgttagtacgtcgttaaaacgtttgttgataaagttcgtattacgggaggttaggttaattattttgttaacgatatcggtatttatacgttgaacg

SEQ ID NO: 31742 - DNA, 553 bp, Artificial Sequence
  chemically treated genomic DNA (Homo sapiens) CpG-island No: 31742
cgttcaacgtataaataccgatatcgttaacaaaataattaacctaacctcccgtaatacgaactttatcaacaaacgttttaacgacgtactaacaaacgaactaactaacccgcaattatacaaaaccttcactaataccgctaaaataattaataaaacgtaaaaaaaccgtaaatttaataaaaccgtacgcgaaatcataacgctaactaatctaactaaccgctatatcgataaacaaactccgtaaataataacgaaacaaaaaaaccgcgataccgacctacaaacaatttactcaataaacatcaacctattccgcgtactaataacttacctaaaaccgatactaccgaaactaaccgaacgtacaaaaacattcctcaatacgaaactaacctaaaataatatccaacaaccgactactaaaccacaaaataaatccgttcaaaacgctatataaccgcatcgatataaaacaaattaaaacactaataaaaacctctaaaaaaaaaataacaaccgctaccgcgccgataactaacccgct

SEQ ID NO: 31743 - DNA, 553 bp, Artificial Sequence
  chemically treated genomic DNA (Homo sapiens) CpG-island No: 31743
cgtttagcgtgtgaatgtcgatatcgttaataaagtggttaatttggtttttcgtaatgcgggttttattaataagcgttttgacggcgtgttggtaagcgaattggttgattcgtagttgtataaaatttttattgatgtcgttgaagtgattggtgaagcgtgggaaagtcgtgaatttggtaaagtcgtgcgcgaaattatggcgttggttgatttggttaatcgttatgtcgatgaataggtttcgtgggtggtggcgaaataggaaggtcgcgatgtcgatttgtaggtaatttgtttaatgggtattaatttgtttcgcgtgttgatgatttatttgaagtcggtattgtcgaaattgatcgagcgtgtagaagtattttttaatacggaattgatttgggatggtatttagtaatcgattgttgggttataaagtgaattcgtttaaggcgttgtataatcgtatcgatatgaggtaggttgaagtattggtggaagtttttaaagaagaagtaatagtcgttgtcgcgtcggtaattggttcgtt

SEQ ID NO: 31744 - DNA, 553 bp, Artificial Sequence
  chemically treated genomic DNA (Homo sapiens) CpG-island No: 31744
aacgaaccaattaccgacgcgacaacgactattacttcttctttaaaaacttccaccaatacttcaacctacctcatatcgatacgattatacaacgccttaaacgaattcactttataacccaacaatcgattactaaataccatcccaaatcaattccgtattaaaaaatacttctacacgctcgatcaatttcgacaataccgacttcaaataaatcatcaacacgcgaaacaaattaatacccattaaacaaattacctacaaatcgacatcgcgaccttcctatttcgccaccacccacgaaacctattcatcgacataacgattaaccaaatcaaccaacgccataatttcgcgcacgactttaccaaattcacgactttcccacgcttcaccaatcacttcaacgacatcaataaaaattttatacaactacgaatcaaccaattcgcttaccaacacgccgtcaaaacgcttattaataaaacccgcattacgaaaaaccaaattaaccactttattaacgatatcgacattcacacgctaaacg

SEQ ID NO: 31745 - DNA, 1007 bp, Artificial Sequence
  chemically treated genomic DNA (Homo sapiens) CpG-island No: 31745
cgggcgtgcgtacgaggagtaggtgttcgggcgagtttcgagttgtacgttttcgagttcggtttcggttgtttagggcgaagtacgggttttcgtagtcgtgtttgcgtcgattcgttttttttttaatttttatttttgggcgcgtcgtttcggggcgtgttttgggttatttcggtttttatatagcggtcggcgcgttcgggtcgtttagatgcgagtattgcggttgggcgttgaggattagtcgttttttgtttggattttatagtttcgcgtcgtgtattgtcgttttatttttgcgcgtttagtttgttaagtagcgtgtttcggttgtaggcgttatgtagcgggcgcgatttacgttttgggtcgttgcgttgattttgttggtgttgtttcgcgggtcgtcggtggcgcgggttggcgcgagttcggcgggtttgggtttcgtggtgcgttgcgagtcgtgcgacgcgcgtgtattggtttagtgcgcgttttcgttcgtcgtgtgcgcggagttggtgcgcgagtcgggttgcggttgttgtttgacgtgcgtattgagcgagggttagtcgtgcggtatttatatcgagcgttgtggtttcggttttcgttgttagtcgtcgttcgacgaggcgcgatcgttgtaggcgttgttggacggtcgcgggttttgcgttaacgttagtgtcgttagtcgtttgcgcgtttatttgttgttagcgtcgttagttttaggtgagtcgttcgcgttaggtgcgttgcgtgtagtattcggcgtattggcgtcgaagggtttgggggttgttgggtgtcgttgcgggagatttcgtttttttttttattggagataatatgtggggaaattgaaggcgtttcgggaaaggtgaaggcggtcgtcggagggattttttttagtcggttttttatttgttcgattttttaagtgtagagtatttgtaaattgtaaagcgtttttagtgaaaatgggttaaagg

SEQ ID NO: 31746 - DNA, 1007 bp, Artificial Sequence
  chemically treated genomic DNA (Homo sapiens) CpG-island No: 31746
cctttaacccattttcactaaaaacgctttacaatttacaaatactctacacttaaaaaatcgaacaaataaaaaaccgactaaaaaaaatccctccgacgaccgccttcacctttcccgaaacgccttcaatttccccacatattatctccaataaaaaaaaaaacgaaatctcccgcaacgacacccaacaacccccaaacccttcgacgccaatacgccgaatactacacgcaacgcacctaacgcgaacgactcacctaaaactaacgacgctaacaacaaataaacgcgcaaacgactaacgacactaacgttaacgcaaaacccgcgaccgtccaacaacgcctacaacgatcgcgcctcgtcgaacgacgactaacaacgaaaaccgaaaccacaacgctcgatataaataccgcacgactaaccctcgctcaatacgcacgtcaaacaacaaccgcaacccgactcgcgcaccaactccgcgcacacgacgaacgaaaacgcgcactaaaccaatacacgcgcgtcgcacgactcgcaacgcaccacgaaacccaaacccgccgaactcgcgccaacccgcgccaccgacgacccgcgaaacaacaccaacaaaatcaacgcaacgacccaaaacgtaaatcgcgcccgctacataacgcctacaaccgaaacacgctacttaacaaactaaacgcgcaaaaataaaacgacaatacacgacgcgaaactataaaatccaaacaaaaaacgactaatcctcaacgcccaaccgcaatactcgcatctaaacgacccgaacgcgccgaccgctatataaaaaccgaaataacccaaaacacgccccgaaacgacgcgcccaaaaataaaaattaaaaaaaaaacgaatcgacgcaaacacgactacgaaaacccgtacttcgccctaaacaaccgaaaccgaactcgaaaacgtacaactcgaaactcgcccgaacacctactcctcgtacgcacgcccg

SEQ ID NO: 31747 - DNA, 1007 bp, Artificial Sequence
  chemically treated genomic DNA (Homo sapiens) CpG-island No: 31747
tttttaatttatttttattgaaagcgttttgtaatttataagtattttgtatttagagaatcgagtaagtagagggtcggttggggagggttttttcggcgatcgtttttatttttttcggagcgtttttagtttttttatatattatttttagtgagaagaaaagcggagtttttcgtagcggtatttagtaatttttaggtttttcggcgttagtgcgtcgggtgttgtacgtagcgtatttggcgcgggcggtttatttggagttggcggcgttggtagtaggtaggcgcgtaggcggttgacggtattagcgttgacgtagagttcgcggtcgtttagtagcgtttgtagcggtcgcgtttcgtcgggcgacggttggtagcgaaggtcggagttatagcgttcggtgtagatgtcgtacggttggttttcgtttagtgcgtacgttaggtagtagtcgtagttcggttcgcgtattagtttcgcgtatacggcgggcggaggcgcgtattgggttagtgtacgcgcgtcgtacggttcgtagcgtattacgggatttaagttcgtcgagttcgcgttagttcgcgttatcggcggttcgcggagtagtattagtagagttagcgtagcggtttagagcgtgggtcgcgttcgttgtatgacgtttgtaatcggggtacgttgtttggtaggttgggcgcgtagggatggggcgatagtatacggcgcgaagttgtggaatttaggtaggaagcggttgatttttagcgtttagtcgtagtgttcgtatttgggcggttcgggcgcgtcggtcgttatatagaagtcggggtggtttaggatacgtttcggaacggcgcgtttaggagtgggggttgggaggggggcgggtcggcgtaggtacggttgcgggggttcgtgtttcgttttgagtagtcggggtcgagttcgggggcgtgtagttcgagattcgttcgggtatttgtttttcgtgcgtacgttcg

SEQ ID NO: 31748 - DNA, 1007 bp, Artificial Sequence
  chemically treated genomic DNA (Homo sapiens) CpG-island No: 31748
cgaacgtacgcacgaaaaacaaatacccgaacgaatctcgaactacacgcccccgaactcgaccccgactactcaaaacgaaacacgaacccccgcaaccgtacctacgccgacccgcccccctcccaacccccactcctaaacgcgccgttccgaaacgtatcctaaaccaccccgacttctatataacgaccgacgcgcccgaaccgcccaaatacgaacactacgactaaacgctaaaaatcaaccgcttcctacctaaattccacaacttcgcgccgtatactatcgccccatccctacgcgcccaacctaccaaacaacgtaccccgattacaaacgtcatacaacgaacgcgacccacgctctaaaccgctacgctaactctactaatactactccgcgaaccgccgataacgcgaactaacgcgaactcgacgaacttaaatcccgtaatacgctacgaaccgtacgacgcgcgtacactaacccaatacgcgcctccgcccgccgtatacgcgaaactaatacgcgaaccgaactacgactactacctaacgtacgcactaaacgaaaaccaaccgtacgacatctacaccgaacgctataactccgaccttcgctaccaaccgtcgcccgacgaaacgcgaccgctacaaacgctactaaacgaccgcgaactctacgtcaacgctaataccgtcaaccgcctacgcgcctacctactaccaacgccgccaactccaaataaaccgcccgcgccaaatacgctacgtacaacacccgacgcactaacgccgaaaaacctaaaaattactaaataccgctacgaaaaactccgcttttcttctcactaaaaataatatataaaaaaactaaaaacgctccgaaaaaaataaaaacgatcgccgaaaaaaccctccccaaccgaccctctacttactcgattctctaaatacaaaatacttataaattacaaaacgctttcaataaaaataaattaaaaa

SEQ ID NO: 31749 - DNA, 1118 bp, Artificial Sequence
  chemically treated genomic DNA (Homo sapiens) CpG-island No: 31749
tgcgggaggagggttcggggaagggtgcgagtcgagttcgaggcgtacggcgagttttgtgggagtgggggacgcgggggcggttttggtttcgtcgcggtatttggatttttatttttcgaggtgagtatttgggggtcgagggcgtagagcgatcgtattttgaatggagtttagggtagttagcgatttgtttcgtggttcgtagtcgttatcgtttcggggcggtcgtttaggcgggtttcgacgcggttcgcgggagttcggggtgttttcgttcgtcgttgttattttgtcgtcgagggtttttttagcgattagtaacgttcgtttttattggtttttgtcgtaagggggggtgtggttacgggtttagtttttgagttcgcgtaatttttggagcgaagttagtcgggttcggagttagaggacgtagttgcgtttgtgcgcgttttcgtcgttgtcgtttttttcgtcgggaggttcgttcgttaacggtttgcgcgtttgcgtcggaagcggaaatggttggagtttttggtttcgttttcgcgttattttgggggttttggaggcggcgtcgcggaggacggagcggaagtgttcgttgtagtttttcggagtcggagcgtagcgtttgcggtcgttcgtgtttcgtcgttttttttttcgcggtcgtgagggagatcgcggttcggtcgtagcggagttgcgaggtgttaggaagggttgcgtggcgcgggaacggtcgggtagcgtcgttttcgtttttttcgggttgttaaggtcgcgggcgggcggggtcgcgttgagggtcgggcggggagggtcgtcggggttcgggtggtcgcggggatcgtgttttcgattcgcggttttgaggggtacgggtcgcgtttcggggtcgggttcgggacggggtgttggggggtgcggcggagttttggggtttgcgagggtcgggggagcgggagaggggtcgggcgggggttgtagttttcgagttattcgggtcgtatttcgttcgtattttttgtttggtatttgggggaagcgggtagtcgcggtttttatagcgttgcgagttgggttgtattttagagtaatgtgttttgttt

SEQ ID NO: 31750 - DNA, 1118 bp, Artificial Sequence
  chemically treated genomic DNA (Homo sapiens) CpG-island No: 31750
aaacaaaacacattactctaaaatacaacccaactcgcaacgctataaaaaccgcgactacccgcttcccccaaataccaaacaaaaaatacgaacgaaatacgacccgaataactcgaaaactacaacccccgcccgacccctctcccgctcccccgaccctcgcaaaccccaaaactccgccgcaccccccaacaccccgtcccgaacccgaccccgaaacgcgacccgtacccctcaaaaccgcgaatcgaaaacacgatccccgcgaccacccgaaccccgacgaccctccccgcccgaccctcaacgcgaccccgcccgcccgcgaccttaacaacccgaaaaaaacgaaaacgacgctacccgaccgttcccgcgccacgcaacccttcctaacacctcgcaactccgctacgaccgaaccgcgatctccctcacgaccgcgaaaaaaaaaacgacgaaacacgaacgaccgcaaacgctacgctccgactccgaaaaactacaacgaacacttccgctccgtcctccgcgacgccgcctccaaaacccccaaaataacgcgaaaacgaaaccaaaaactccaaccatttccgcttccgacgcaaacgcgcaaaccgttaacgaacgaacctcccgacgaaaaaaacgacaacgacgaaaacgcgcacaaacgcaactacgtcctctaactccgaacccgactaacttcgctccaaaaattacgcgaactcaaaaactaaacccgtaaccacacccccccttacgacaaaaaccaataaaaacgaacgttactaatcgctaaaaaaaccctcgacgacaaaataacaacgacgaacgaaaacaccccgaactcccgcgaaccgcgtcgaaacccgcctaaacgaccgccccgaaacgataacgactacgaaccacgaaacaaatcgctaactaccctaaactccattcaaaatacgatcgctctacgccctcgacccccaaatactcacctcgaaaaataaaaatccaaataccgcgacgaaaccaaaaccgcccccgcgtcccccactcccacaaaactcgccgtacgcctcgaactcgactcgcacccttccccgaaccctcctcccgca

SEQ ID NO: 31751 - DNA, 1118 bp, Artificial Sequence
  chemically treated genomic DNA (Homo sapiens) CpG-island No: 31751
ggatagggtatattattttggaatatagtttaattcgtagcgttgtgggggtcgcgattgttcgttttttttagatgttaagtaggggatgcggacgagatgcggttcgggtggttcgagggttgtagttttcgttcggtttttttttcgttttttcgattttcgtaggttttagggtttcgtcgtattttttagtatttcgtttcgggttcgatttcgaggcgcgattcgtgttttttagggtcgcgggtcgggaatacggttttcgcggttattcgggtttcgacggtttttttcgttcggtttttagcgcggtttcgttcgttcgcggttttgatagttcggaagaagcggaggcggcgttgttcggtcgttttcgcgttacgtagttttttttggtatttcgtagtttcgttacggtcgagtcgcggttttttttacggtcgcgggaaggaggacggcggggtacgggcggtcgtaggcgttgcgtttcggtttcgggaagttgtagcgagtattttcgtttcgtttttcgcggcgtcgtttttagggtttttaagatggcgcgagggcggggttaagggttttaattattttcgttttcggcgtagacgcgtaggtcgttggcgggcgggtttttcggcggaagagacgatagcggcggaaacgcgtataggcgtagttgcgttttttggtttcgggttcggttagtttcgttttagagattgcgcgggtttagggattaggttcgtggttatatttttttttgcgataaagattaatggaagcgggcgttgttggtcgttaagagaattttcggcggtaagatggtagcggcgggcgagggtatttcgagttttcgcgggtcgcgtcgggattcgtttaggcggtcgtttcggaacggtaacgattgcgggttacgggataggtcgttggttgttttgggttttatttagggtgcgatcgttttacgttttcgatttttaaatgtttatttcggaaagtagaggtttaggtgtcgcggcggagttagggtcgttttcgcgttttttatttttataggattcgtcgtgcgtttcgggttcggttcgtattttttttcgagtttttttttcgta

SEQ ID NO: 31752 - DNA, 1118 bp, Artificial Sequence
  chemically treated genomic DNA (Homo sapiens) CpG-island No: 31752
tacgaaaaaaaaactcgaaaaaaaatacgaaccgaacccgaaacgcacgacgaatcctataaaaataaaaaacgcgaaaacgaccctaactccgccgcgacacctaaacctctactttccgaaataaacatttaaaaatcgaaaacgtaaaacgatcgcaccctaaataaaacccaaaacaaccaacgacctatcccgtaacccgcaatcgttaccgttccgaaacgaccgcctaaacgaatcccgacgcgacccgcgaaaactcgaaataccctcgcccgccgctaccatcttaccgccgaaaattctcttaacgaccaacaacgcccgcttccattaatctttatcgcaaaaaaaaatataaccacgaacctaatccctaaacccgcgcaatctctaaaacgaaactaaccgaacccgaaaccaaaaaacgcaactacgcctatacgcgtttccgccgctatcgtctcttccgccgaaaaacccgcccgccaacgacctacgcgtctacgccgaaaacgaaaataattaaaacccttaaccccgccctcgcgccatcttaaaaaccctaaaaacgacgccgcgaaaaacgaaacgaaaatactcgctacaacttcccgaaaccgaaacgcaacgcctacgaccgcccgtaccccgccgtcctccttcccgcgaccgtaaaaaaaaccgcgactcgaccgtaacgaaactacgaaataccaaaaaaaactacgtaacgcgaaaacgaccgaacaacgccgcctccgcttcttccgaactatcaaaaccgcgaacgaacgaaaccgcgctaaaaaccgaacgaaaaaaaccgtcgaaacccgaataaccgcgaaaaccgtattcccgacccgcgaccctaaaaaacacgaatcgcgcctcgaaatcgaacccgaaacgaaatactaaaaaatacgacgaaaccctaaaacctacgaaaatcgaaaaaacgaaaaaaaaaccgaacgaaaactacaaccctcgaaccacccgaaccgcatctcgtccgcatcccctacttaacatctaaaaaaaacgaacaatcgcgacccccacaacgctacgaattaaactatattccaaaataatataccctatcc

SEQ ID NO: 31753 - DNA, 1442 bp, Artificial Sequence
  chemically treated genomic DNA (Homo sapiens) CpG-island No: 31753
ttgaagattttcgttatcgtttgttttttcgggtattttttttttgaagattttcgttatcgtttgttttttcgggcgttttttttttgaagattttcgttatcgtttgttttttcgggcgttttttttttgaagattttcgttatcgtttgttttttcgggcgttttttttttgaagattttcgttatcgtttgttttttcgggcgttttttttgtgaagattttcgttatcgtttgtttttttaggcgttttttttttgaagattttcgttatcgtttgttttttcgggtattttttttttgaagattttcgttatcgtttgttttttcgggcgttttttttttgaagattttcgttatcgtttgttttttcgggcgttttttttttgaagattttcgttatcgtttgttttttcgggcgttttttttttgaagatttttattatcgtttgttttttcgggcgttttttttttgaagattttcgttatcgtttgttttttcgggtattttttttttgaagattttcgtcgtcgtttgttttttcgggcgttttttttttgaagattttcgttatcgtttgttttttcgggtatttttttttttgaagattttcgttatcgtttgttttttcgggcgttttttttttgaagattttcgttatcgtttgttttttcgggtatttttttttttgaagattttcgttatcgtttgttttttcgggcgttttttttatgaagattttcgttatcgtttgttttttcgggcgttttttttttgaagattttcgttatcgtttgttttttcgggtattttttttttgaagattttcgtcgtcgtttgttttttcgggcgttcgttttttgaagatcgtcgtcgtcgtttgttttttcgggcgttttttttttgaagatcgtcgtcgtcgtttgttttttcgggcgttttttttttgaagatcgtcgtcgtcgtttgttttttcgggcgttttttttttgaagatcgtcgtcgtcgtttgttttttcgggcgttttttttttgaagatcgtcgtcgtcgtttgttttttcgggcgttttttttttgaagatcgtcgtcgtcgtttgttttttcgggcgttttttttttgaagattttcgttatcgtttgttttttcgggcgttttttttttgaagattttcgttatcgtttgttttttcgggtatttttttttttgaagatcgtcgtcgtcgtttgttttttcgggcgttttttttttgaagatcgtcgtcgtcgtttgttttttcgggtgttttttttttgaagatcgtcgtcgtcgtttgttttttcgggtattttttttttgaagatcgtcgtcgtcgtttgtttttttaggtgtttttaggtttttttttaaaaggtgtgtggcgggtaagggaagatttttagaagtggttttttttaagatt

SEQ ID NO: 31754 - DNA, 1442 bp, Artificial Sequence
  chemically treated genomic DNA (Homo sapiens) CpG-island No: 31754
aatcttaaaaaaaaccacttctaaaaatcttcccttacccgccacacaccttttaaaaaaaaacctaaaaacacctaaaaaaacaaacgacgacgacgatcttcaaaaaaaaaatacccgaaaaaacaaacgacgacgacgatcttcaaaaaaaaaacacccgaaaaaacaaacgacgacgacgatcttcaaaaaaaaaacgcccgaaaaaacaaacgacgacgacgatcttcaaaaaaaaaaatacccgaaaaaacaaacgataacgaaaatcttcaaaaaaaaaacgcccgaaaaaacaaacgataacgaaaatcttcaaaaaaaaaacgcccgaaaaaacaaacgacgacgacgatcttcaaaaaaaaaacgcccgaaaaaacaaacgacgacgacgatcttcaaaaaaaaaacgcccgaaaaaacaaacgacgacgacgatcttcaaaaaaaaaacgcccgaaaaaacaaacgacgacgacgatcttcaaaaaaaaaacgcccgaaaaaacaaacgacgacgacgatcttcaaaaaaaaaacgcccgaaaaaacaaacgacgacgacgatcttcaaaaaacgaacgcccgaaaaaacaaacgacgacgaaaatcttcaaaaaaaaaatacccgaaaaaacaaacgataacgaaaatcttcaaaaaaaaaacgcccgaaaaaacaaacgataacgaaaatcttcataaaaaaaacgcccgaaaaaacaaacgataacgaaaatcttcaaaaaaaaaaatacccgaaaaaacaaacgataacgaaaatcttcaaaaaaaaaacgcccgaaaaaacaaacgataacgaaaatcttcaaaaaaaaaaatacccgaaaaaacaaacgataacgaaaatcttcaaaaaaaaaacgcccgaaaaaacaaacgacgacgaaaatcttcaaaaaaaaaatacccgaaaaaacaaacgataacgaaaatcttcaaaaaaaaaacgcccgaaaaaacaaacgataataaaaatcttcaaaaaaaaaacgcccgaaaaaacaaacgataacgaaaatcttcaaaaaaaaaacgcccgaaaaaacaaacgataacgaaaatcttcaaaaaaaaaacgcccgaaaaaacaaacgataacgaaaatcttcaaaaaaaaaatacccgaaaaaacaaacgataacgaaaatcttcaaaaaaaaaacgcctaaaaaaacaaacgataacgaaaatcttcacaaaaaaaacgcccgaaaaaacaaacgataacgaaaatcttcaaaaaaaaaacgcccgaaaaaacaaacgataacgaaaatcttcaaaaaaaaaacgcccgaaaaaacaaacgataacgaaaatcttcaaaaaaaaaacgcccgaaaaaacaaacgataacgaaaatcttcaaaaaaaaaatacccgaaaaaacaaacgataacgaaaatcttcaa

SEQ ID NO: 31755 - DNA, 1442 bp, Artificial Sequence
  chemically treated genomic DNA (Homo sapiens) CpG-island No: 31755
ggttttggaaagagttatttttgggagtttttttttattcgttatatattttttaaagagaaatttgaagatatttgagaagataggcggcggcggcgatttttagagagaagatgttcgagaagataggcggcggcggcgatttttagagagaggatattcgagaagataggcggcggcggcgatttttagagagaggacgttcgagaagataggcggcggcggcgatttttagagagagagatgttcgagaagataggcggtggcggagatttttagagagaggacgttcgagaagataggcggtggcggagatttttagagagaggacgttcgagaagataggcggcggcggcgatttttagagagaggacgttcgagaagataggcggcggcggcgatttttagagagaggacgttcgagaagataggcggcggcggcgatttttagagagaggacgttcgagaagataggcggcggcggcgatttttagagagaggacgttcgagaagataggcggcggcggcgatttttagagagaggacgttcgagaagataggcggcggcggcgatttttagagagcggacgttcgagaagataggcggcggcggagatttttagagagaggatgttcgagaagataggcggtggcggagatttttagagagaggacgttcgagaggataggcggtggcggagatttttatagagaggacgttcgagaagataggcggtggcggagatttttagagagagagatgttcgagaagataggcggtggcggagatttttagagagaggacgttcgagaagataggcggtggcggagatttttagagagagagatgttcgagaagataggcggtggcggagatttttagagagaggacgttcgagaagataggcggcggcggagatttttaaagagaggatgttcgagaagataggcggtggcggagatttttaaagagaggacgttcgaaaggataggcggtggtggagatttttagagagaggacgttcgagaagataggcggtggcggagatttttagagagaggacgttcgagaagataggcggtggcggagatttttagagagaggacgttcgagaagataggcggtggcggagatttttagagagaggatgttcgaaaagataggcggtggcggagatttttaaagagaggacgtttgagaagataggcggtggcggagatttttatagagaggacgttcgagaagataggcggtggcggagatttttagagagaggacgttcgagaagataggcggtggcggagatttttagagagaggacgttcgagaagataggcggtggcggagatttttagagagaggacgttcgagaagataggcggtggcggagatttttagagagaggatgttcgagaagataggcggtggcggagatttttag

SEQ ID NO: 31756 - DNA, 1442 bp, Artificial Sequence
  chemically treated genomic DNA (Homo sapiens) CpG-island No: 31756
ctaaaaatctccgccaccgcctatcttctcgaacatcctctctctaaaaatctccgccaccgcctatcttctcgaacgtcctctctctaaaaatctccgccaccgcctatcttctcgaacgtcctctctctaaaaatctccgccaccgcctatcttctcgaacgtcctctctctaaaaatctccgccaccgcctatcttctcgaacgtcctctctataaaaatctccgccaccgcctatcttctcaaacgtcctctctttaaaaatctccgccaccgcctatcttttcgaacatcctctctctaaaaatctccgccaccgcctatcttctcgaacgtcctctctctaaaaatctccgccaccgcctatcttctcgaacgtcctctctctaaaaatctccgccaccgcctatcttctcgaacgtcctctctctaaaaatctccaccaccgcctatcctttcgaacgtcctctctttaaaaatctccgccaccgcctatcttctcgaacatcctctctttaaaaatctccgccgccgcctatcttctcgaacgtcctctctctaaaaatctccgccaccgcctatcttctcgaacatctctctctctaaaaatctccgccaccgcctatcttctcgaacgtcctctctctaaaaatctccgccaccgcctatcttctcgaacatctctctctctaaaaatctccgccaccgcctatcttctcgaacgtcctctctataaaaatctccgccaccgcctatcctctcgaacgtcctctctctaaaaatctccgccaccgcctatcttctcgaacatcctctctctaaaaatctccgccgccgcctatcttctcgaacgtccgctctctaaaaatcgccgccgccgcctatcttctcgaacgtcctctctctaaaaatcgccgccgccgcctatcttctcgaacgtcctctctctaaaaatcgccgccgccgcctatcttctcgaacgtcctctctctaaaaatcgccgccgccgcctatcttctcgaacgtcctctctctaaaaatcgccgccgccgcctatcttctcgaacgtcctctctctaaaaatcgccgccgccgcctatcttctcgaacgtcctctctctaaaaatctccgccaccgcctatcttctcgaacgtcctctctctaaaaatctccgccaccgcctatcttctcgaacatctctctctctaaaaatcgccgccgccgcctatcttctcgaacgtcctctctctaaaaatcgccgccgccgcctatcttctcgaatatcctctctctaaaaatcgccgccgccgcctatcttctcgaacatcttctctctaaaaatcgccgccgccgcctatcttctcaaatatcttcaaatttctctttaaaaaatatataacgaataaaaaaaaactcccaaaaataactctttccaaaacc

SEQ ID NO: 31757 - DNA, 927 bp, Artificial Sequence
  chemically treated genomic DNA (Homo sapiens) CpG-island No: 31757
tatttcggtcgggagttggcggttaagttcgcggtataaggagttagggacgttagttttttagttcgcgtttgtatttcggggtggtataaataggatgttagatagcgcgtttcgggtttgtttatgaaaatttgtcgtgcgcgttgggggagggggcggtttggtttaatcgtttttttttcggtcgggggttttcgttcggcgattttttcgtcgttcgtcggtttcgcggggttggaaattttcgtttttttcgttcgagtcgcggggttttgagttgcgtttaggagtagttcgggtcgcgtagtttaaggatcgattaagagcggtggtcgcgttttcggttagttcgggttgcgcgtttttcgtttgtcgatcgcggtcgtttcggtttttttatttttttcggtgatatttattattttcgtgtgcgtttgggttaggtagcgtttcgtcgttgcgttggttggggtcgatcggtaggttcgttaggcggttagtttcgcggggttttagcgtgcgcgcgtttagggttgaggaggggtcgcggcgaggatagtcgggattgggcgtaggttcgtattgtttgtagttttaggatatttcgcggtcgtcgcggtttgcgtttagcgacgtatcgtttttcgtttcgtttcgtttcgtttcgcggtcggttttattttcgtggtcgtcgggtttattttttcgcgacgttattagcggtagtttcggaaagcggggcggggtcgcggtttcggcggagattttgcgttttcggtttattcgtttcgtttttattcggtttcgttcgcgaagttgtttttattcgtttttgtttatcgcgttttttagattttagaatttagaaatttatttaggacgcgaggttatttatcgcggggagtaaaattgttaggattcgtt

SEQ ID NO: 31758 - DNA, 927 bp, Artificial Sequence
  chemically treated genomic DNA (Homo sapiens) CpG-island No: 31758
aacgaatcctaacaattttactccccgcgataaataacctcgcgtcctaaataaatttctaaattctaaaatctaaaaaacgcgataaacaaaaacgaataaaaacaacttcgcgaacgaaaccgaataaaaacgaaacgaataaaccgaaaacgcaaaatctccgccgaaaccgcgaccccgccccgctttccgaaactaccgctaataacgtcgcgaaaaaataaacccgacgaccacgaaaataaaaccgaccgcgaaacgaaacgaaacgaaacgaaaaacgatacgtcgctaaacgcaaaccgcgacgaccgcgaaatatcctaaaactacaaacaatacgaacctacgcccaatcccgactatcctcgccgcgacccctcctcaaccctaaacgcgcgcacgctaaaaccccgcgaaactaaccgcctaacgaacctaccgatcgaccccaaccaacgcaacgacgaaacgctacctaacccaaacgcacacgaaaataataaatatcaccgaaaaaaataaaaaaaccgaaacgaccgcgatcgacaaacgaaaaacgcgcaacccgaactaaccgaaaacgcgaccaccgctcttaatcgatccttaaactacgcgacccgaactactcctaaacgcaactcaaaaccccgcgactcgaacgaaaaaaacgaaaatttccaaccccgcgaaaccgacgaacgacgaaaaaatcgccgaacgaaaacccccgaccgaaaaaaaaacgattaaaccaaaccgccccctcccccaacgcgcacgacaaattttcataaacaaacccgaaacgcgctatctaacatcctatttataccaccccgaaatacaaacgcgaactaaaaaactaacgtccctaactccttataccgcgaacttaaccgccaactcccgaccgaaata

SEQ ID NO: 31759 - DNA, 927 bp, Artificial Sequence
  chemically treated genomic DNA (Homo sapiens) CpG-island No: 31759
ggcgaattttggtaattttatttttcgcgatagatgatttcgcgttttagatgagtttttagattttagaatttagaggacgcggtgaatagagacgagtgggggtagtttcgcgagcgaagtcggatgggggcggggcgggtaggtcggaggcgtaaagttttcgtcgggatcgcgatttcgtttcgtttttcggggttgtcgttggtgacgtcgcgagggggtgggttcggcggttacgggggtggggtcggtcgcggggcggggcggggcgggacgggaggcggtgcgtcgttgagcgtaggtcgcggcggtcgcggagtattttggagttgtagatagtgcgggtttgcgtttagtttcggttgttttcgtcgcgatttttttttagttttgggcgcgcgtacgttggggtttcgcggggttggtcgtttagcgagtttgtcggtcgattttagttagcgtagcgacggggcgttgtttggtttaggcgtatacggaagtggtgagtgttatcgggggaggtggaggagtcggggcggtcgcggtcggtaggcgaggggcgcgtagttcggattggtcggaggcgcggttatcgtttttggtcggtttttaggttgcgcggttcgggttgtttttgagcgtagtttaggatttcgcggttcgggcggggaaggcggggatttttagtttcgcggagtcggcgggcggcgaggaggtcgtcgggcgggggttttcggtcgggagaagagcggttaagttaggtcgtttttttttttagcgcgtacggtaagtttttataaataagttcggagcgcgttgtttgatattttgtttatattatttcgagatataggcgcgggttggagggttgacgtttttagttttttgtatcgcgaatttgatcgttagttttcggtcggggtg

SEQ ID NO: 31760 - DNA, 927 bp, Artificial Sequence
  chemically treated genomic DNA (Homo sapiens) CpG-island No: 31760
caccccgaccgaaaactaacgatcaaattcgcgatacaaaaaactaaaaacgtcaaccctccaacccgcgcctatatctcgaaataatataaacaaaatatcaaacaacgcgctccgaacttatttataaaaacttaccgtacgcgctaaaaaaaaaaacgacctaacttaaccgctcttctcccgaccgaaaacccccgcccgacgacctcctcgccgcccgccgactccgcgaaactaaaaatccccgccttccccgcccgaaccgcgaaatcctaaactacgctcaaaaacaacccgaaccgcgcaacctaaaaaccgaccaaaaacgataaccgcgcctccgaccaatccgaactacgcgcccctcgcctaccgaccgcgaccgccccgactcctccacctcccccgataacactcaccacttccgtatacgcctaaaccaaacaacgccccgtcgctacgctaactaaaatcgaccgacaaactcgctaaacgaccaaccccgcgaaaccccaacgtacgcgcgcccaaaactaaaaaaaaatcgcgacgaaaacaaccgaaactaaacgcaaacccgcactatctacaactccaaaatactccgcgaccgccgcgacctacgctcaacgacgcaccgcctcccgtcccgccccgccccgccccgcgaccgaccccacccccgtaaccgccgaacccaccccctcgcgacgtcaccaacgacaaccccgaaaaacgaaacgaaatcgcgatcccgacgaaaactttacgcctccgacctacccgccccgcccccatccgacttcgctcgcgaaactacccccactcgtctctattcaccgcgtcctctaaattctaaaatctaaaaactcatctaaaacgcgaaatcatctatcgcgaaaaataaaattaccaaaattcgcc

SEQ ID NO: 31761 - DNA, 531 bp, Artificial Sequence
  chemically treated genomic DNA (Homo sapiens) CpG-island No: 31761
ggtttcgtttttttagtcggagtcgcgattggtgggtatttgtcggcggttatcgtttttaagttacgattggcgaaggtcgtcgttatttcggagcgatttagcgtttgttcgttttttcgtcgcgtcgtcggtgtttgcgtttttcgttttatttcgttttttttttttcggtcgaggttcgggggattagagcgagaagcggggattatgtttcgacgtaagttgacggttttcgattattataatttcgtcggttttaattgtaaaggtgaggcggcggttttagttcggtcgcgtgtttttgatttgggcggaggttttagttttagtgttcgtattttattttttcgtcgggattttcggcggtttggttttcgtcggtagttttcgggttttttttttttgggtcgttacgtatttcggtttttcgtcgttttttttcgtttttaaagtttttttatttatttttgtttcggtatgttattttttgtatttgtttaattttaagtattacgtaattattttttt

SEQ ID NO: 31762 - DNA, 531 bp, Artificial Sequence
  chemically treated genomic DNA (Homo sapiens) CpG-island No: 31762
aaaaaaataattacgtaatacttaaaattaaacaaatacaaaaaataacataccgaaacaaaaataaataaaaaaactttaaaaacgaaaaaaaacgacgaaaaaccgaaatacgtaacgacccaaaaaaaaaaaacccgaaaactaccgacgaaaaccaaaccgccgaaaatcccgacgaaaaaataaaatacgaacactaaaactaaaacctccgcccaaatcaaaaacacgcgaccgaactaaaaccgccgcctcacctttacaattaaaaccgacgaaattataataatcgaaaaccgtcaacttacgtcgaaacataatccccgcttctcgctctaatcccccgaacctcgaccgaaaaaaaaaaaacgaaataaaacgaaaaacgcaaacaccgacgacgcgacgaaaaaacgaacaaacgctaaatcgctccgaaataacgacgaccttcgccaatcgtaacttaaaaacgataaccgccgacaaatacccaccaatcgcgactccgactaaaaaaacgaaacc

SEQ ID NO: 31763 - DNA, 531 bp, Artificial Sequence
  chemically treated genomic DNA (Homo sapiens) CpG-island No: 31763
gagaaggtagttacgtgatgtttggagttaagtaagtgtagaaagtaatatgtcgagataggagtaggtgagagggttttaaaggcgggaaggggcggcgaagagtcgaggtacgtggcgatttagaggagaggggttcggaggttgtcggcggaaattaggtcgtcgagggtttcgacggggaggtggggtgcgggtattgaggttgggattttcgtttaggttagggatacgcggtcgggttgaggtcgtcgttttatttttgtagttgaagtcggcggggttgtggtagtcgagagtcgttaatttgcgtcggaatatggttttcgtttttcgttttggtttttcgggtttcggtcgggagagaagaagcgaggtggagcgggaggcgtaggtatcggcgacgcggcgagagggcgggtaggcgttgagtcgtttcgaaatgacggcggttttcgttaatcgtggtttaaaagcggtggtcgtcggtaaatgtttattaatcgcggtttcggttggggaggcggggtt

SEQ ID NO: 31764 - DNA, 531 bp, Artificial Sequence
  chemically treated genomic DNA (Homo sapiens) CpG-island No: 31764
aaccccgcctccccaaccgaaaccgcgattaataaacatttaccgacgaccaccgcttttaaaccacgattaacgaaaaccgccgtcatttcgaaacgactcaacgcctacccgccctctcgccgcgtcgccgatacctacgcctcccgctccacctcgcttcttctctcccgaccgaaacccgaaaaaccaaaacgaaaaacgaaaaccatattccgacgcaaattaacgactctcgactaccacaaccccgccgacttcaactacaaaaataaaacgacgacctcaacccgaccgcgtatccctaacctaaacgaaaatcccaacctcaatacccgcaccccacctccccgtcgaaaccctcgacgacctaatttccgccgacaacctccgaacccctctcctctaaatcgccacgtacctcgactcttcgccgccccttcccgcctttaaaaccctctcacctactcctatctcgacatattactttctacacttacttaactccaaacatcacgtaactaccttctc

SEQ ID NO: 31765 - DNA, 589 bp, Artificial Sequence
  chemically treated genomic DNA (Homo sapiens) CpG-island No: 31765
cgtttcgttggaggcggaatggagggtaaggcgaaggaggatggtgtaggaaacggcgataaggcgttcggttaggttcgcgagttatcgagattcgggttttaatttttttttttttcgtaaacgttcgggttcgaggtatttggcgggtaagggtcgtagcggagcgaagcgggttggttatggggaggttgcggggacgcggggttgtagagagcggtagtggtacggagcgcgcggttggaagcgaaagtaggcggtgtggttaagtttcggcgtacggtttatagggcgttgggtattacgatttggggtcgcgcgttagggttaggcgtagggtacgacgtaatttttttagtattttttggggaggagtttttaatcgtttcgttttagtttgtttgtagtcgttaaaatcgaagcggttgtttttgttatcggggtcgtttgcggaggttcgagaatgcgcgttacgaacgagcgtttttttaagcgtagatatttcgcgagtatttttgtttattaaataatttttaggtgaatggtcgggaagcgtttttcggttaaggttaaggaaatttcggagaaa

SEQ ID NO: 31766 - DNA, 589 bp, Artificial Sequence
  chemically treated genomic DNA (Homo sapiens) CpG-island No: 31766
tttctccgaaatttccttaaccttaaccgaaaaacgcttcccgaccattcacctaaaaattatttaataaacaaaaatactcgcgaaatatctacgcttaaaaaaacgctcgttcgtaacgcgcattctcgaacctccgcaaacgaccccgataacaaaaacaaccgcttcgattttaacgactacaaacaaactaaaacgaaacgattaaaaactcctccccaaaaaatactaaaaaaattacgtcgtaccctacgcctaaccctaacgcgcgaccccaaatcgtaatacccaacgccctataaaccgtacgccgaaacttaaccacaccgcctactttcgcttccaaccgcgcgctccgtaccactaccgctctctacaaccccgcgtccccgcaacctccccataaccaacccgcttcgctccgctacgacccttacccgccaaatacctcgaacccgaacgtttacgaaaaaaaaaaaaattaaaacccgaatctcgataactcgcgaacctaaccgaacgccttatcgccgtttcctacaccatcctccttcgccttaccctccattccgcctccaacgaaacg

SEQ ID NO: 31767 - DNA, 589 bp, Artificial Sequence
  chemically treated genomic DNA (Homo sapiens) CpG-island No: 31767
ttttttcgaggtttttttagttttgatcgaggggcgtttttcggttatttatttagaggttgtttaataaataaggatgttcgcgaaatatttgcgtttggaaaggcgttcgttcgtggcgcgtattttcgggttttcgtaagcgatttcggtgatagggataatcgtttcggttttagcgattgtagatagattgggacgagacggttggaggtttttttttaagggatgttggaggggttgcgtcgtattttgcgtttggttttggcgcgcggttttaggtcgtggtatttagcgttttatgggtcgtgcgtcggggtttggttatatcgtttgttttcgtttttagtcgcgcgtttcgtgttattgtcgttttttgtagtttcgcgttttcgtagtttttttatggttagttcgtttcgtttcgttgcggtttttgttcgttaggtatttcgaattcgggcgtttgcggaaggggggaggattggaattcgggtttcggtagttcgcgggtttggtcgggcgttttgtcgtcgttttttgtattattttttttcgttttgttttttatttcgtttttagcgaggcg

SEQ ID NO: 31768 - DNA, 589 bp, Artificial Sequence
  chemically treated genomic DNA (Homo sapiens) CpG-island No: 31768
cgcctcgctaaaaacgaaataaaaaacaaaacgaaaaaaaataatacaaaaaacgacgacaaaacgcccgaccaaacccgcgaactaccgaaacccgaattccaatcctccccccttccgcaaacgcccgaattcgaaatacctaacgaacaaaaaccgcaacgaaacgaaacgaactaaccataaaaaaactacgaaaacgcgaaactacaaaaaacgacaataacacgaaacgcgcgactaaaaacgaaaacaaacgatataaccaaaccccgacgcacgacccataaaacgctaaataccacgacctaaaaccgcgcgccaaaaccaaacgcaaaatacgacgcaacccctccaacatcccttaaaaaaaaacctccaaccgtctcgtcccaatctatctacaatcgctaaaaccgaaacgattatccctatcaccgaaatcgcttacgaaaacccgaaaatacgcgccacgaacgaacgcctttccaaacgcaaatatttcgcgaacatccttatttattaaacaacctctaaataaataaccgaaaaacgcccctcgatcaaaactaaaaaaacctcgaaaaaa

SEQ ID NO: 31769 - DNA, 525 bp, Artificial Sequence
  chemically treated genomic DNA (Homo sapiens) CpG-island No: 31769
ttagtcgtcgtgcgttcggtatatatgtgtcgtagttcgtgtagtttagcgcggtttagcgatggtcgttttttgcgggcgatttttggtttttgtagcgttcgttcgtcgtttttgtcgttttcggggttgttcggtagtcgttaacgtcgcgggcgtcggtttttcgcgggttatgcggaagcgtttcgggtcggtgagcgcggttgcgggtagttcggtttcgttaattcggtttatttatttagttcgcggttggcggtagcggcggcggtttcggtcgggcggagtcgttatgggagttcgtagtagtagtggaagtagtagtagcggtagtcgcgcgtagttcgcgttagggaagcgtgcgttcgaaaggagtttcggtggcgcggtatgttcgttcggcgtcgtcgttgtcgttttcgcgggcgttcgttcggggttgagcgtcgttttagttcgtagtttttggtagtggtttttttcgagcgttttttaggttttttcggtttttggtttttttgg

SEQ ID NO: 31770 - DNA, 525 bp, Artificial Sequence
  chemically treated genomic DNA (Homo sapiens) CpG-island No: 31770
ccaaaaaaaccaaaaaccgaaaaaacctaaaaaacgctcgaaaaaaaccactaccaaaaactacgaactaaaacgacgctcaaccccgaacgaacgcccgcgaaaacgacaacgacgacgccgaacgaacataccgcgccaccgaaactcctttcgaacgcacgcttccctaacgcgaactacgcgcgactaccgctactactacttccactactactacgaactcccataacgactccgcccgaccgaaaccgccgccgctaccgccaaccgcgaactaaataaataaaccgaattaacgaaaccgaactacccgcaaccgcgctcaccgacccgaaacgcttccgcataacccgcgaaaaaccgacgcccgcgacgttaacgactaccgaacaaccccgaaaacgacaaaaacgacgaacgaacgctacaaaaaccaaaaatcgcccgcaaaaaacgaccatcgctaaaccgcgctaaactacacgaactacgacacatatataccgaacgcacgacgactaa

SEQ ID NO: 31771 - DNA, 525 bp, Artificial Sequence
  chemically treated genomic DNA (Homo sapiens) CpG-island No: 31771
ttaggaagattaggggtcgggaaagtttgggaggcgttcgggagaggttattgttaggggttgcgggttgaggcggcgtttagtttcgggcgggcgttcgcggaggcggtagcggcggcgtcgggcgggtatgtcgcgttatcggagtttttttcgggcgtacgtttttttggcgcgggttgcgcgcggttgtcgttgttgttgtttttattgttgttgcggatttttatggcggtttcgttcggtcggggtcgtcgtcgttgtcgttagtcgcgggttgaatgaatgagtcggattggcggagtcgggttgttcgtagtcgcgtttatcggttcgggacgttttcgtatggttcgcgaggagtcggcgttcgcggcgttggcggttgtcgggtagtttcgggggcggtagaggcggcgagcgggcgttgtaggggttaggggtcgttcgtagggggcggttatcgttgagtcgcgttaaattgtacgggttgcggtatatgtgtgtcgggcgtacggcggttgg

SEQ ID NO: 31772 - DNA, 525 bp, Artificial Sequence
  chemically treated genomic DNA (Homo sapiens) CpG-island No: 31772
ccaaccgccgtacgcccgacacacatataccgcaacccgtacaatttaacgcgactcaacgataaccgccccctacgaacgacccctaacccctacaacgcccgctcgccgcctctaccgcccccgaaactacccgacaaccgccaacgccgcgaacgccgactcctcgcgaaccatacgaaaacgtcccgaaccgataaacgcgactacgaacaacccgactccgccaatccgactcattcattcaacccgcgactaacgacaacgacgacgaccccgaccgaacgaaaccgccataaaaatccgcaacaacaataaaaacaacaacaacgacaaccgcgcgcaacccgcgccaaaaaaacgtacgcccgaaaaaaactccgataacgcgacatacccgcccgacgccgccgctaccgcctccgcgaacgcccgcccgaaactaaacgccgcctcaacccgcaacccctaacaataacctctcccgaacgcctcccaaactttcccgacccctaatcttcctaa

SEQ ID NO: 31773 - DNA, 623 bp, Artificial Sequence
  chemically treated genomic DNA (Homo sapiens) CpG-island No: 31773
gttcgtcgtcggggttttttaaggatgttagtcgtagggaagtgtcgtttttcgtttcggtttttttaggtgtttcgcgtttttagaaaagtttagttttgttgtttttcgcgttttttttttgttttcgcggcgataagagttggggattgcggggattcgttaatatttttcgggggtgattcggattcgttgtttcgcgcgttttttttttttcgagatttcgagttcgcggtggtcgtgacgtcggttaagtttttttttcggttgttcgggagaattttttttgggttttaggcgaatttgggtagcggtcgcgcgacgttggcgcggttgggtttcgagtatttgttttttagttcgttggtttcgcggtttcgggcgggcggggcggcggcggtcgtgagcgtcgtgcgtttttggagacgcggtgttgacgcgttcggttttttttcgttgtattttaatttttggttattgtggtcgttgtatatcgagcgggaagttttttgttggagtcggtcgggtgcgggggtggggtgtggtggggagcgggatggggatgcgttgtatagatgtgtttaggtgtatgggtttgtgggagagataagtagtataattat

SEQ ID NO: 31774 - DNA, 623 bp, Artificial Sequence
  chemically treated genomic DNA (Homo sapiens) CpG-island No: 31774
ataattatactacttatctctcccacaaacccatacacctaaacacatctatacaacgcatccccatcccgctccccaccacaccccacccccgcacccgaccgactccaacaaaaaacttcccgctcgatatacaacgaccacaataaccaaaaattaaaatacaacgaaaaaaaaccgaacgcgtcaacaccgcgtctccaaaaacgcacgacgctcacgaccgccgccgccccgcccgcccgaaaccgcgaaaccaacgaactaaaaaacaaatactcgaaacccaaccgcgccaacgtcgcgcgaccgctacccaaattcgcctaaaacccaaaaaaaattctcccgaacaaccgaaaaaaaaacttaaccgacgtcacgaccaccgcgaactcgaaatctcgaaaaaaaaaaaacgcgcgaaacaacgaatccgaatcacccccgaaaaatattaacgaatccccgcaatccccaactcttatcgccgcgaaaacaaaaaaaaaacgcgaaaaacaacaaaactaaacttttctaaaaacgcgaaacacctaaaaaaaccgaaacgaaaaacgacacttccctacgactaacatccttaaaaaaccccgacgacgaac

SEQ ID NO: 31775 - DNA, 623 bp, Artificial Sequence
  chemically treated genomic DNA (Homo sapiens) CpG-island No: 31775
atggttatattatttattttttttataagtttatatatttgagtatatttgtatagcgtatttttatttcgttttttattatattttattttcgtattcggtcgattttagtaagaggtttttcgttcggtgtgtagcggttatagtggttaggaattaaaatgtagcgaggaggagtcgggcgcgttagtatcgcgtttttaggagcgtacggcgtttacggtcgtcgtcgtttcgttcgttcggagtcgcggggttagcgagttgaggagtaggtgttcggagtttagtcgcgttagcgtcgcgcggtcgttgtttaagttcgtttggggtttaaagagggttttttcgggtaatcggggaaggagtttagtcggcgttacggttatcgcgagttcggagtttcgagaggagaagggcgcgcggagtagcgagttcgggttattttcgggaggtgttggcgggttttcgtagtttttagtttttgtcgtcgcgggggtagagagaagacgcgagagatagtaaggttgggtttttttggagacgcgaggtatttgggagagtcgaggcgagaagcgatatttttttgcggttagtatttttgaaggatttcggcggcgaat

SEQ ID NO: 31776 - DNA, 623 bp, Artificial Sequence
  chemically treated genomic DNA (Homo sapiens) CpG-island No: 31776
attcgccgccgaaatccttcaaaaatactaaccgcaaaaaaatatcgcttctcgcctcgactctcccaaatacctcgcgtctccaaaaaaacccaaccttactatctctcgcgtcttctctctacccccgcgacgacaaaaactaaaaactacgaaaacccgccaacacctcccgaaaataacccgaactcgctactccgcgcgcccttctcctctcgaaactccgaactcgcgataaccgtaacgccgactaaactccttccccgattacccgaaaaaaccctctttaaaccccaaacgaacttaaacaacgaccgcgcgacgctaacgcgactaaactccgaacacctactcctcaactcgctaaccccgcgactccgaacgaacgaaacgacgacgaccgtaaacgccgtacgctcctaaaaacgcgatactaacgcgcccgactcctcctcgctacattttaattcctaaccactataaccgctacacaccgaacgaaaaacctcttactaaaatcgaccgaatacgaaaataaaatataataaaaaacgaaataaaaatacgctatacaaatatactcaaatatataaacttataaaaaaaataaataatataaccat

SEQ ID NO: 31777 - DNA, 783 bp, Artificial Sequence
  chemically treated genomic DNA (Homo sapiens) CpG-island No: 31777
attcgagggtttggcgattcgaaggagggcggggagtgggggcgttggggtggattcgttattttgcggaattcgggttagataatagttttcgagttggggaaatcggtttgcggatgtgatgcgggatcgcgaggatatttgcgtttttttgcgtgtcgtattcgtgtagttttcggtggcgacggggtgatgtgggggcgagggtgagaggaagtttaggcgttagagcgttagaaacgtttttttagtttttttggtattttggaggttgtttcgagggaatacggatagtgtacgacggatttttaagttgttttcggtataacgggaggtcgggagttcggagtttttacgggcggtttaagtgttcgcgagaagttcgtagcgtttaggatcgcgttgagcgttcggggcgcgttaagtcgtatttaagtaaaagagaaacgttgacgggtcggaggcgggttggttgggacgcggaatacgcgcggtttcggagcgtttttcgttttaaggagttttatttttggaaagggatagggaattgttaattagcgagggagggagcgtatcggcgttgggtgatgttagcggattagttgttcgataataaagagagggtattataggagaaagttgtagtagcggtagcggttaaggcggtatatcggagttttcgaggcgaggggtaagtgggcgaagggaggggggacgacggttgttgtcgtagtagttgaaggttaaggaattgaaagggttgtagggggaggtagtgcgagt

SEQ ID NO: 31778 - DNA, 783 bp, Artificial Sequence
  chemically treated genomic DNA (Homo sapiens) CpG-island No: 31778
actcgcactacctccccctacaaccctttcaattccttaaccttcaactactacgacaacaaccgtcgtcccccctcccttcgcccacttacccctcgcctcgaaaactccgatataccgccttaaccgctaccgctactacaactttctcctataataccctctctttattatcgaacaactaatccgctaacatcacccaacgccgatacgctccctccctcgctaattaacaattccctatccctttccaaaaataaaactccttaaaacgaaaaacgctccgaaaccgcgcgtattccgcgtcccaaccaacccgcctccgacccgtcaacgtttctcttttacttaaatacgacttaacgcgccccgaacgctcaacgcgatcctaaacgctacgaacttctcgcgaacacttaaaccgcccgtaaaaactccgaactcccgacctcccgttataccgaaaacaacttaaaaatccgtcgtacactatccgtattccctcgaaacaacctccaaaataccaaaaaaactaaaaaaacgtttctaacgctctaacgcctaaacttcctctcaccctcgcccccacatcaccccgtcgccaccgaaaactacacgaatacgacacgcaaaaaaacgcaaatatcctcgcgatcccgcatcacatccgcaaaccgatttccccaactcgaaaactattatctaacccgaattccgcaaaataacgaatccaccccaacgcccccactccccgccctccttcgaatcgccaaaccctcgaat

SEQ ID NO: 31779 - DNA, 783 bp, Artificial Sequence
  chemically treated genomic DNA (Homo sapiens) CpG-island No: 31779
gttcgtattgtttttttttatagtttttttaattttttggtttttagttgttgcggtagtagtcgtcgtttttttttttttcgtttatttgtttttcgtttcggaggtttcggtgtgtcgttttggtcgttgtcgttgttgtaatttttttttgtaatattttttttttgttatcgagtagttgattcgttgatattatttagcgtcggtgcgttttttttttcgttgattgatagttttttgtttttttttagaagtaaggttttttaaaacgaaaggcgtttcggggtcgcgcgtatttcgcgttttagttaattcgttttcggttcgttagcgttttttttttgtttaggtgcggtttggcgcgtttcgagcgtttaacgcggttttgggcgttgcgggtttttcgcggatatttggatcgttcgtaggggtttcgagttttcgatttttcgttgtgtcgggagtaatttgaaagttcgtcgtgtattgttcgtgttttttcgagataatttttaaagtgttagggaagttaaggaagcgtttttgacgttttggcgtttggatttttttttattttcgtttttatattatttcgtcgttatcgggagttgtacgagtgcgatacgtaagggagcgtaggtgttttcgcggtttcgtattatattcgtaagtcgatttttttagttcgggggttgttatttggttcggatttcgtaggatggcgggtttattttagcgtttttatttttcgttttttttcgggtcgttaggttttcgggt

SEQ ID NO: 31780 - DNA, 783 bp, Artificial Sequence
  chemically treated genomic DNA (Homo sapiens) CpG-island No: 31780
acccgaaaacctaacgacccgaaaaaaaacgaaaaataaaaacgctaaaataaacccgccatcctacgaaatccgaaccaaataacaacccccgaactaaaaaaatcgacttacgaatataatacgaaaccgcgaaaacacctacgctcccttacgtatcgcactcgtacaactcccgataacgacgaaataatataaaaacgaaaataaaaaaaaatccaaacgccaaaacgtcaaaaacgcttccttaacttccctaacactttaaaaattatctcgaaaaaacacgaacaatacacgacgaactttcaaattactcccgacacaacgaaaaatcgaaaactcgaaacccctacgaacgatccaaatatccgcgaaaaacccgcaacgcccaaaaccgcgttaaacgctcgaaacgcgccaaaccgcacctaaacaaaaaaaaaacgctaacgaaccgaaaacgaattaactaaaacgcgaaatacgcgcgaccccgaaacgcctttcgttttaaaaaaccttacttctaaaaaaaaacaaaaaactatcaatcaacgaaaaaaaaaacgcaccgacgctaaataatatcaacgaatcaactactcgataacaaaaaaaaaatattacaaaaaaaaattacaacaacgacaacgaccaaaacgacacaccgaaacctccgaaacgaaaaacaaataaacgaaaaaaaaaaaaacgacgactactaccgcaacaactaaaaaccaaaaaattaaaaaaactataaaaaaaaacaatacgaac

SEQ ID NO: 31781 - DNA, 891 bp, Artificial Sequence
  chemically treated genomic DNA (Homo sapiens) CpG-island No: 31781
tttggcgtcgggcgggttcggcgatttacgtttcgtcgcgggaaattgtgtaagttttttttgttttcgatttcgttttttttttaagtttcgtttcgacgcgttttttttagagtttcgtttatttttttaggtttcgttttttattttggtttcgttttgtttcgcgtttattaggcgtttgtttttttaatggtttcgttttttattcggttttgttttattttaggtttcgtttcgttggtttcgttttttattcgtatttaagttcggtttttttcgtttttcgtttagcggtttgttgttttcgtttttagacggtttcgtgtagttaggttttagagttaatttttcgcgcggatagtcgcgttagtaattttttttgtgtgtttttttttttttatggttcggttttcgttaagttttcggatcgcgtatttttcggttcgttttcgtttcgtcgggttttcgcgcgcgtttattttttgtagtttgtagtttcgtaggtttagcgtggttaggacgtcgttgtcgcgtacgtcggggatattttgttatagcgagaaggtggagtttcgcgtcgagcgttgcgttcggaaggagttgttgggggagaggttggttcgcggcggtttcggttttttttttgcgttttcggtttcgtttttcgggttttttttttcgcgttgttgtcgtcgtagttcgcgggcgttggttacgtcgttgtatttttgatagaggacggttgggggaaagacgggcgggggagagcgtggggcgttcgttagtttttgttcggttttttttcggtttttttaagagttcgcgttatttaatttttgtcgcggttcggatatttggatatagtgaatttatttatttatttatttt

SEQ ID NO: 31782 - DNA, 891 bp, Artificial Sequence
  chemically treated genomic DNA (Homo sapiens) CpG-island No: 31782
aaaataaataaataaataaattcactatatccaaatatccgaaccgcgacaaaaattaaataacgcgaactcttaaaaaaaccgaaaaaaaaccgaacaaaaactaacgaacgccccacgctctcccccgcccgtctttcccccaaccgtcctctatcaaaaatacaacgacgtaaccaacgcccgcgaactacgacgacaacaacgcgaaaaaaaaaacccgaaaaacgaaaccgaaaacgcaaaaaaaaaaccgaaaccgccgcgaaccaacctctcccccaacaactccttccgaacgcaacgctcgacgcgaaactccaccttctcgctataacaaaatatccccgacgtacgcgacaacgacgtcctaaccacgctaaacctacgaaactacaaactacaaaaaataaacgcgcgcgaaaacccgacgaaacgaaaacgaaccgaaaaatacgcgatccgaaaacttaacgaaaaccgaaccataaaaaaaaaaaaacacacaaaaaaaattactaacgcgactatccgcgcgaaaaattaactctaaaacctaactacacgaaaccgtctaaaaacgaaaacaacaaaccgctaaacgaaaaacgaaaaaaaccgaacttaaatacgaataaaaaacgaaaccaacgaaacgaaacctaaaataaaacaaaaccgaataaaaaacgaaaccattaaaaaaacaaacgcctaataaacgcgaaacaaaacgaaaccaaaataaaaaacgaaacctaaaaaaataaacgaaactctaaaaaaaacgcgtcgaaacgaaacttaaaaaaaaaacgaaatcgaaaacaaaaaaaacttacacaatttcccgcgacgaaacgtaaatcgccgaacccgcccgacgccaaa

SEQ ID NO: 31783 - DNA, 891 bp, Artificial Sequence
  chemically treated genomic DNA (Homo sapiens) CpG-island No: 31783
ggaatgaatgaatgaatgaatttattgtgtttaggtattcgaatcgcggtaaaggttaagtgacgcgggtttttgagggaatcgaggaaaagtcgggtaggggttggcgggcgttttacgttttttttcgttcgttttttttttagtcgttttttattaggaatatagcgacgtggttagcgttcgcgaattgcggcggtagtagcgcgaggaggagggttcgggggacgaggtcgagggcgtagaggaggggtcggggtcgtcgcgggttaattttttttttagtagtttttttcgggcgtagcgttcggcgcgaggttttattttttcgttgtggtaggatattttcgacgtacgcggtagcggcgttttggttacgttgagtttgcgggattgtaagttgtaggaggtgggcgcgcgcggggattcggcggggcgggggcgggtcggggagtacgcggttcggggatttagcgggaatcgggttatagagggagggggatatataaagggggttgttggcgcgattgttcgcgcggaaggttggttttaggatttgattatacgaggtcgtttggaagcgaggatagtaaatcgttgagcgagaggcgaggggagtcgggtttgggtgcgggtagggggcggagttagcgggacgaaatttaggataggatagggtcggatgaggagcggaattattggaagagtaaacgtttggtgggcgcggaataaggcggggttaggatgaggggcggaatttgggggggtgggcggggttttgggaagaacgcgtcggggcggggtttaggagaggggcgggatcgaggataagaaaggtttgtataatttttcgcggcgggacgtgggtcgtcgggttcgttcggcgttaga

SEQ ID NO: 31784 - DNA, 891 bp, Artificial Sequence
  chemically treated genomic DNA (Homo sapiens) CpG-island No: 31784
tctaacgccgaacgaacccgacgacccacgtcccgccgcgaaaaattatacaaacctttcttatcctcgatcccgcccctctcctaaaccccgccccgacgcgttcttcccaaaaccccgcccacccccccaaattccgcccctcatcctaaccccgccttattccgcgcccaccaaacgtttactcttccaataattccgctcctcatccgaccctatcctatcctaaatttcgtcccgctaactccgccccctacccgcacccaaacccgactcccctcgcctctcgctcaacgatttactatcctcgcttccaaacgacctcgtataatcaaatcctaaaaccaaccttccgcgcgaacaatcgcgccaacaaccccctttatatatccccctccctctataacccgattcccgctaaatccccgaaccgcgtactccccgacccgcccccgccccgccgaatccccgcgcgcgcccacctcctacaacttacaatcccgcaaactcaacgtaaccaaaacgccgctaccgcgtacgtcgaaaatatcctaccacaacgaaaaaataaaacctcgcgccgaacgctacgcccgaaaaaaactactaaaaaaaaaattaacccgcgacgaccccgacccctcctctacgccctcgacctcgtcccccgaaccctcctcctcgcgctactaccgccgcaattcgcgaacgctaaccacgtcgctatattcctaataaaaaacgactaaaaaaaaaacgaacgaaaaaaaacgtaaaacgcccgccaacccctacccgacttttcctcgattccctcaaaaacccgcgtcacttaacctttaccgcgattcgaatacctaaacacaataaattcattcattcattcattcc

SEQ ID NO: 31785 - DNA, 770 bp, Artificial Sequence
  chemically treated genomic DNA (Homo sapiens) CpG-island No: 31785
acgttacgtagggtatgaatgaataggagtcggtttttatttaatttttattaaggattcggggtaggaggggtagaagttgcgcgtaggtcggcgggcgggagcggatatcgaggtcggcgtgtaggcgtgcgggtgtgcgggagtcgggttcggggggatcggatcgagagcgagaagcgcggtatggagttttaggtagttcgcgtttgtttcgttttgttgtggggttgtgcgttggtcgcggtcgcggcggcgtagggtaaggaaggtgagtgcgcgcggcgtttggatttttggttttcgggttttagtgttttttagagttcggcgttttttgacgcgcgtaattttggaatttatttggtgtcgtttagtttcggcgaattggagttcggagggcgtacgggttgcgatcgaggcgagttttggtttttattcggggttataggggtttcggagaataagcggttttagtttggtcgtacgggtttcggaggttgcggagaagaggacgcggcgtaggttacgcggttgtagtttaggcggcgatttcgggaacgcgtttcggcggggggcgtggggagttttttagagaagggggtgtttgggtagtttttcgcgggtttagttttttagtgatttgaatttattaattcgtttgtcgaggttttgcggagaaggtatattgtgtaggtttcgtattttggggagggggttcgggcgggcgggagttttttgtcgaagtttttgttttttgagattttttt

SEQ ID NO: 31786 - DNA, 770 bp, Artificial Sequence
  chemically treated genomic DNA (Homo sapiens) CpG-island No: 31786
aaaaaaatctcaaaaaacaaaaacttcgacaaaaaactcccgcccgcccgaaccccctccccaaaatacgaaacctacacaatataccttctccgcaaaacctcgacaaacgaattaataaattcaaatcactaaaaaactaaacccgcgaaaaactacccaaacacccccttctctaaaaaactccccacgccccccgccgaaacgcgttcccgaaatcgccgcctaaactacaaccgcgtaacctacgccgcgtcctcttctccgcaacctccgaaacccgtacgaccaaactaaaaccgcttattctccgaaacccctataaccccgaataaaaaccaaaactcgcctcgatcgcaacccgtacgccctccgaactccaattcgccgaaactaaacgacaccaaataaattccaaaattacgcgcgtcaaaaaacgccgaactctaaaaaacactaaaacccgaaaaccaaaaatccaaacgccgcgcgcactcaccttccttaccctacgccgccgcgaccgcgaccaacgcacaaccccacaacaaaacgaaacaaacgcgaactacctaaaactccataccgcgcttctcgctctcgatccgatccccccgaacccgactcccgcacacccgcacgcctacacgccgacctcgatatccgctcccgcccgccgacctacgcgcaacttctacccctcctaccccgaatccttaataaaaattaaataaaaaccgactcctattcattcataccctacgtaacgt

SEQ ID NO: 31787 - DNA, 770 bp, Artificial Sequence
  chemically treated genomic DNA (Homo sapiens) CpG-island No: 31787
gagaaaattttagggaataggggtttcgatagggggttttcgttcgttcgagttttttttttaaaatgcgaggtttgtatagtatgtttttttcgtaaaatttcggtaagcgggttagtgaatttaggttattaagaagttgagttcgcggaaagttgtttaaatatttttttttttaggggattttttacgtttttcgtcgggacgcgttttcgaagtcgtcgtttggattgtaatcgcgtggtttgcgtcgcgttttttttttcgtagttttcgaggttcgtgcgattaagttgaaatcgtttatttttcggagtttttatgatttcgggtgggggttagggttcgtttcgatcgtagttcgtgcgtttttcggattttagttcgtcgggattgggcgatattaggtaggttttaaagttgcgcgcgttaaggagcgtcgggttttagggggtattggggttcgggggttaggggtttagacgtcgcgcgtatttattttttttgttttgcgtcgtcgcggtcgcggttagcgtatagttttatagtagggcgaagtaggcgcgggttgtttggagttttatgtcgcgtttttcgttttcggttcgattttttcgagttcggttttcgtatattcgtacgtttgtacgtcggtttcggtgttcgttttcgttcgtcggtttgcgcgtaatttttgttttttttgtttcgagtttttaatggaagttgggtgagaatcgatttttgtttatttatgttttgcgtgacgt

SEQ ID NO: 31788 - DNA, 770 bp, Artificial Sequence
  chemically treated genomic DNA (Homo sapiens) CpG-island No: 31788
acgtcacgcaaaacataaataaacaaaaatcgattctcacccaacttccattaaaaactcgaaacaaaaaaaacaaaaattacgcgcaaaccgacgaacgaaaacgaacaccgaaaccgacgtacaaacgtacgaatatacgaaaaccgaactcgaaaaaatcgaaccgaaaacgaaaaacgcgacataaaactccaaacaacccgcgcctacttcgccctactataaaactatacgctaaccgcgaccgcgacgacgcaaaacaaaaaaaataaatacgcgcgacgtctaaacccctaacccccgaaccccaataccccctaaaacccgacgctccttaacgcgcgcaactttaaaacctacctaatatcgcccaatcccgacgaactaaaatccgaaaaacgcacgaactacgatcgaaacgaaccctaacccccacccgaaatcataaaaactccgaaaaataaacgatttcaacttaatcgcacgaacctcgaaaactacgaaaaaaaaaacgcgacgcaaaccacgcgattacaatccaaacgacgacttcgaaaacgcgtcccgacgaaaaacgtaaaaaatcccctaaaaaaaaaaatatttaaacaactttccgcgaactcaacttcttaataacctaaattcactaacccgcttaccgaaattttacgaaaaaaacatactatacaaacctcgcattttaaaaaaaaaactcgaacgaacgaaaaccccctatcgaaacccctattccctaaaattttctc

SEQ ID NO: 31789 - DNA, 569 bp, Artificial Sequence
  chemically treated genomic DNA (Homo sapiens) CpG-island No: 31789
ttcgaaagacgtcgagaaaacgtagagttgggtttttttagttcggtttggaatttattatttacggttttttttttgaagagggacgttatggttaaagattgcgttcgggcggttcggttcggttcggttcggtttaacgttggtaaaggataggaggaaaaggataggattttggcgggttcggggtggcggagcggagagatagtaggaggaggtcggggtcgttaggtaggattcgcggaaggtttgtattcgtagttatcgtagtcgcgttattcggagtttaggtgatcgggaattaatatattttttggagaagttatttttaggcggcgtttgcgcgttgtgtggcgtttgcgtattacggagtttgaagtcgcggtcgttttttttacgtttgcggttgttagttttttttgtatcgggagttggtagcggggcgagtttggagttggcggggataggagagcgtggggttacggtttttgtgcgcgggttgggtgatgattgaggatagtgattagttttgtttagcgttttattttttgtttcggggaaagttggat

SEQ ID NO: 31790 - DNA, 569 bp, Artificial Sequence
  chemically treated genomic DNA (Homo sapiens) CpG-island No: 31790
atccaactttccccgaaacaaaaaataaaacgctaaacaaaactaatcactatcctcaatcatcacccaacccgcgcacaaaaaccgtaaccccacgctctcctatccccgccaactccaaactcgccccgctaccaactcccgatacaaaaaaaactaacaaccgcaaacgtaaaaaaaacgaccgcgacttcaaactccgtaatacgcaaacgccacacaacgcgcaaacgccgcctaaaaataacttctccaaaaaatatattaattcccgatcacctaaactccgaataacgcgactacgataactacgaatacaaaccttccgcgaatcctacctaacgaccccgacctcctcctactatctctccgctccgccaccccgaacccgccaaaatcctatccttttcctcctatcctttaccaacgttaaaccgaaccgaaccgaaccgaaccgcccgaacgcaatctttaaccataacgtccctcttcaaaaaaaaaaccgtaaataataaattccaaaccgaactaaaaaaacccaactctacgttttctcgacgtctttcgaa

SEQ ID NO: 31791 - DNA, 569 bp, Artificial Sequence
  chemically treated genomic DNA (Homo sapiens) CpG-island No: 31791
atttagtttttttcggggtaaggggtgaagcgttaagtaaggttgattattgtttttaattattatttaattcgcgtatagaagtcgtggttttacgtttttttattttcgttagttttagattcgtttcgttgttaattttcggtgtaggaggaattggtagtcgtagacgtgaggaaagcggtcgcggttttaaatttcgtagtgcgtaggcgttatataacgcgtaggcgtcgtttagaagtgatttttttaaaaagtgtgttagttttcggttatttgagtttcgggtgacgcggttgcggtagttgcggatataagtttttcgcgggttttgtttggcgatttcgatttttttttgttgttttttcgtttcgttatttcgaattcgttaaggttttgtttttttttttttgttttttgttagcgttgggtcggatcgggtcgagtcgggtcgttcgggcgtagtttttaattatggcgtttttttttaagaagaaaatcgtggatggtgagttttaggtcgggttgaaggggtttagttttgcgttttttcggcgtttttcgag

SEQ ID NO: 31792 - DNA, 569 bp, Artificial Sequence
  chemically treated genomic DNA (Homo sapiens) CpG-island No: 31792
ctcgaaaaacgccgaaaaaacgcaaaactaaaccccttcaacccgacctaaaactcaccatccacgattttcttcttaaaaaaaaacgccataattaaaaactacgcccgaacgacccgactcgacccgatccgacccaacgctaacaaaaaacaaaaaaaaaaaaacaaaaccttaacgaattcgaaataacgaaacgaaaaaacaacaaaaaaaaatcgaaatcgccaaacaaaacccgcgaaaaacttatatccgcaactaccgcaaccgcgtcacccgaaactcaaataaccgaaaactaacacactttttaaaaaaatcacttctaaacgacgcctacgcgttatataacgcctacgcactacgaaatttaaaaccgcgaccgctttcctcacgtctacgactaccaattcctcctacaccgaaaattaacaacgaaacgaatctaaaactaacgaaaataaaaaaacgtaaaaccacgacttctatacgcgaattaaataataattaaaaacaataatcaaccttacttaacgcttcaccccttaccccgaaaaaaactaaat

SEQ ID NO: 31793 - DNA, 1778 bp, Artificial Sequence
  chemically treated genomic DNA (Homo sapiens) CpG-island No: 31793
cgggggtcgggtaggggcgaagacggtggtcggggacggtgggagtcggtcggagtcgggtaggggacgtggtttcgagtggatgggagtgggaggggtgcgcgtcggggtacgtagcgcggtcgggttgggttgtaggttcgcgagtcgcgggttggggtcggagttgttagagaggcggttgcgttataaaagtttgtcggtttttttcgtcgttcgttttcgtcgttttcgttttttttcgtttttttttcgtttttttgtttttttttcggtcgcggttcggaggttgtagcgggcggagtaggggaggggcgggttttcgaatatgtagatgagcgcgtgatggatagttgcgcgttttaatgtttttcggaaattcgagcgttttttttttaattttttattttcgattttagatttttttaaatttcgatcgtcggtttggcgcgcggttgcgtttatcggtttcgcgttgttgtcgtcgttatcgttatttcgtcgtcgtttcggttcgcgggtcgtttaggttagtattcgggtcggtttgttttcgtcggtcgttcgggtgttcgtcgtcgcgtcgcgtttcggtcgggcgtggatggagggcgtcgcgcgttttgttcgttgttcggcgtgacgcgggtttcgcgtttcgcgtttattatgttttattcgtagggttatttgtattaggcgttcggttcgttggcgttttattcgtgttcggtttacggcgcgtcggttttggcggtttcgcgtagcgaggagttggcgcgttcggcgtcgggttcggcgtttagtttttattcgggttcggcggtttttacggcgtaggcggttatcggtttcgggagttcgttgtagtattcggtcgacgtcgtcgtcgtcgtcgtcggtttttcgttttatatggtaatcgggcgcgggcgggacgcgggatttttgggcgtcgggatttagacggggtttaggcggagcggggttcgggttcggcgggcgggggtcgtcgggaatgtggcgcggttggcgatttaggagtcgtcggttcggttggtcgtttcgtaggttgagtcgggtttcgggtggggagggtagcgcggtaggcggggacgtttttgagttcggtcgggattcgcgcgtttttcgcgcgttttttcggttcgtcggttgattttttttgagagtttgggaagtgcgttttcgtcggggtcggggtttggcgtcgtttgtttttggttttcgtatcgtagtttggggaggcgttcggagcgggttgtgtgttcgtttgtattggcgtggggcgcgagggttcgcgttattgcggtttttgagtcgacggtcgggcggttcgtatttattcgcggggtttagggcggtgggggttatcgagttaggtttaggagtcgagtatttagttgcggtttcggagttcggttcgaggcgtttaggtttcggttttattttgtttagcggattatgtttttaaatatcgtgtttgcgggcgcgtgattcgttaagggtcgtttgagtttttcgtggttcgagcgtagtttttgtttcggcgatttgggggcggttcgcgagtttcgaggttattgagttgggttaggttcgggtcgcggcgaagtacgttacgggcgattgaggttattacggggttgtcgcgattgtcggttttcggcggaatttttgggtagcgatcgagtcgttggggttttggcgaaggttgtaaatgtttcgaatttaaacgttaaaggatgaattaaaatgtt

SEQ ID NO: 31794 - DNA, 1778 bp, Artificial Sequence
  chemically treated genomic DNA (Homo sapiens) CpG-island No: 31794
aacattttaattcatcctttaacgtttaaattcgaaacatttacaaccttcgccaaaaccccaacgactcgatcgctacccaaaaattccgccgaaaaccgacaatcgcgacaaccccgtaataacctcaatcgcccgtaacgtacttcgccgcgacccgaacctaacccaactcaataacctcgaaactcgcgaaccgcccccaaatcgccgaaacaaaaactacgctcgaaccacgaaaaactcaaacgacccttaacgaatcacgcgcccgcaaacacgatatttaaaaacataatccgctaaacaaaataaaaccgaaacctaaacgcctcgaaccgaactccgaaaccgcaactaaatactcgactcctaaacctaactcgataacccccaccgccctaaaccccgcgaataaatacgaaccgcccgaccgtcgactcaaaaaccgcaataacgcgaaccctcgcgccccacgccaatacaaacgaacacacaacccgctccgaacgcctccccaaactacgatacgaaaaccaaaaacaaacgacgccaaaccccgaccccgacgaaaacgcacttcccaaactctcaaaaaaaatcaaccgacgaaccgaaaaaacgcgcgaaaaacgcgcgaatcccgaccgaactcaaaaacgtccccgcctaccgcgctaccctccccacccgaaacccgactcaacctacgaaacgaccaaccgaaccgacgactcctaaatcgccaaccgcgccacattcccgacgacccccgcccgccgaacccgaaccccgctccgcctaaaccccgtctaaatcccgacgcccaaaaatcccgcgtcccgcccgcgcccgattaccatataaaacgaaaaaccgacgacgacgacgacgacgtcgaccgaatactacaacgaactcccgaaaccgataaccgcctacgccgtaaaaaccgccgaacccgaataaaaactaaacgccgaacccgacgccgaacgcgccaactcctcgctacgcgaaaccgccaaaaccgacgcgccgtaaaccgaacacgaataaaacgccaacgaaccgaacgcctaatacaaataaccctacgaataaaacataataaacgcgaaacgcgaaacccgcgtcacgccgaacaacgaacaaaacgcgcgacgccctccatccacgcccgaccgaaacgcgacgcgacgacgaacacccgaacgaccgacgaaaacaaaccgacccgaatactaacctaaacgacccgcgaaccgaaacgacgacgaaataacgataacgacgacaacaacgcgaaaccgataaacgcaaccgcgcgccaaaccgacgatcgaaatttaaaaaaatctaaaatcgaaaataaaaaattaaaaaaaaaacgctcgaatttccgaaaaacattaaaacgcgcaactatccatcacgcgctcatctacatattcgaaaacccgcccctcccctactccgcccgctacaacctccgaaccgcgaccgaaaaaaaaacaaaaaaacgaaaaaaaaacgaaaaaaaacgaaaacgacgaaaacgaacgacgaaaaaaaccgacaaacttttataacgcaaccgcctctctaacaactccgaccccaacccgcgactcgcgaacctacaacccaacccgaccgcgctacgtaccccgacgcgcacccctcccactcccatccactcgaaaccacgtcccctacccgactccgaccgactcccaccgtccccgaccaccgtcttcgcccctacccgacccccg

SEQ ID NO: 31795 - DNA, 1778 bp, Artificial Sequence
  chemically treated genomic DNA (Homo sapiens) CpG-island No: 31795
agtattttaatttattttttaacgtttaaattcgaggtatttgtagttttcgttaaggttttagcgattcggtcgttgtttagaaatttcgtcgagggtcggtagtcgcgataatttcgtaatggttttaatcgttcgtaacgtgtttcgtcgcggttcgggtttggtttagtttagtaatttcgagattcgcgagtcgtttttaggtcgtcggagtaggagttgcgttcgggttacggaggatttaggcggtttttagcgggttacgcgttcgtaagtacgatatttgaaagtatggttcgttggatagagtaaggtcgaaatttgggcgtttcgggtcggatttcggagtcgtagttgaatgttcggtttttgggtttaattcggtgatttttatcgttttgagtttcgcgagtgaatgcgaatcgttcggtcgtcggtttagaggtcgtagtgacgcggattttcgcgttttacgttaatgtaggcgagtatatagttcgtttcgaacgtttttttaggttgcggtgcggaaattagggataaacggcgttagatttcggtttcggcggagacgtattttttaggtttttagagaaaattagtcggcgagtcgaggggacgcgcggggggcgcgcgggtttcggtcgggtttagggacgttttcgtttgtcgcgttgttttttttattcggggttcggtttagtttgcggggcggttaatcgagtcggcgatttttgagtcgttagtcgcgttatattttcggcggttttcgttcgtcgaattcgagtttcgtttcgtttgagtttcgtttgggtttcggcgtttaggagtttcgcgtttcgttcgcgttcggttattatgtaggacgggaagtcggcggcggcggcggcggcgtcggtcgagtattgtagcgggttttcgaagtcggtggtcgtttgcgtcgtgaaggtcgtcgagttcgggtaggggttgaacgtcgagttcgacgtcgagcgcgttagtttttcgttgcgcggagtcgttaaagtcgacgcgtcgtaggtcgggtacgagtagagcgttagcgagtcgggcgtttggtataggtagttttgcgggtaggatatggtgggcgcggggcgcggggttcgcgttacgtcgagtagcgggtagggcgcgcggcgttttttatttacgttcggtcggggcgcggcgcggcggcgggtattcggacggtcggcggaggtaggtcggttcgggtattagtttgggcggttcgcgggtcggggcggcggcggggtggcggtggcggcggtagtagcgcggagtcggtgggcgtagtcgcgcgttaggtcggcggtcggggtttgggggagtttggagtcgggagtgaggagttgaggaaggagcgttcgagttttcgagggatattggaacgcgtagttgtttattacgcgtttatttgtatattcgggggttcgttttttttttgtttcgttcgttgtagttttcgggtcgcggtcgggggaggggtagagagacgggagggaggcgggggagggcggaggcgacggaggcgggcggcgggagggatcggtaggtttttgtggcgtagtcgtttttttagtagtttcggttttagttcgcggttcgcggatttgtagtttagttcggtcgcgttgcgtgtttcggcgcgtattttttttatttttatttattcggagttacgttttttgttcggtttcggtcggtttttatcgttttcggttatcgttttcgtttttgttcggttttcg

SEQ ID NO: 31796 - DNA, 1778 bp, Artificial Sequence
  chemically treated genomic DNA (Homo sapiens) CpG-island No: 31796
cgaaaaccgaacaaaaacgaaaacgataaccgaaaacgataaaaaccgaccgaaaccgaacaaaaaacgtaactccgaataaataaaaataaaaaaaatacgcgccgaaacacgcaacgcgaccgaactaaactacaaatccgcgaaccgcgaactaaaaccgaaactactaaaaaaacgactacgccacaaaaacctaccgatccctcccgccgcccgcctccgtcgcctccgccctcccccgcctccctcccgtctctctacccctcccccgaccgcgacccgaaaactacaacgaacgaaacaaaaaaaaaacgaacccccgaatatacaaataaacgcgtaataaacaactacgcgttccaatatccctcgaaaactcgaacgctccttcctcaactcctcactcccgactccaaactcccccaaaccccgaccgccgacctaacgcgcgactacgcccaccgactccgcgctactaccgccgccaccgccaccccgccgccgccccgacccgcgaaccgcccaaactaatacccgaaccgacctacctccgccgaccgtccgaatacccgccgccgcgccgcgccccgaccgaacgtaaataaaaaacgccgcgcgccctacccgctactcgacgtaacgcgaaccccgcgccccgcgcccaccatatcctacccgcaaaactacctataccaaacgcccgactcgctaacgctctactcgtacccgacctacgacgcgtcgactttaacgactccgcgcaacgaaaaactaacgcgctcgacgtcgaactcgacgttcaacccctacccgaactcgacgaccttcacgacgcaaacgaccaccgacttcgaaaacccgctacaatactcgaccgacgccgccgccgccgccgccgacttcccgtcctacataataaccgaacgcgaacgaaacgcgaaactcctaaacgccgaaacccaaacgaaactcaaacgaaacgaaactcgaattcgacgaacgaaaaccgccgaaaatataacgcgactaacgactcaaaaatcgccgactcgattaaccgccccgcaaactaaaccgaaccccgaataaaaaaaacaacgcgacaaacgaaaacgtccctaaacccgaccgaaacccgcgcgccccccgcgcgtcccctcgactcgccgactaattttctctaaaaacctaaaaaatacgtctccgccgaaaccgaaatctaacgccgtttatccctaatttccgcaccgcaacctaaaaaaacgttcgaaacgaactatatactcgcctacattaacgtaaaacgcgaaaatccgcgtcactacgacctctaaaccgacgaccgaacgattcgcattcactcgcgaaactcaaaacgataaaaatcaccgaattaaacccaaaaaccgaacattcaactacgactccgaaatccgacccgaaacgcccaaatttcgaccttactctatccaacgaaccatactttcaaatatcgtacttacgaacgcgtaacccgctaaaaaccgcctaaatcctccgtaacccgaacgcaactcctactccgacgacctaaaaacgactcgcgaatctcgaaattactaaactaaaccaaacccgaaccgcgacgaaacacgttacgaacgattaaaaccattacgaaattatcgcgactaccgaccctcgacgaaatttctaaacaacgaccgaatcgctaaaaccttaacgaaaactacaaatacctcgaatttaaacgttaaaaaataaattaaaatact

SEQ ID NO: 31797 - DNA, 803 bp, Artificial Sequence
  chemically treated genomic DNA (Homo sapiens) CpG-island No: 31797
cgtttacggattattcgtgttcggtcgagtcggacggggagaagttttcgtgtcgcgtcggggattttttgtgcgaatcgggttcggagtgtaaggataagtatgacgatttggaggacgacgaggacgacgacgaggagggcgagcggggtttggcgtcgtttaagttcgtgatttcgtcgtcgtttatcggtttggaggcgtcgttgttgagtttttcgttcgaggtcgcgtttcgcggtggtcgtaagacgttttagggtagtcggacgttttcgggcgcgtcgtttttcgttagtaagtttaagttgtggtcgttggtcgagatcgttacgtcggattttaagtagtcgagtttgggttcgggttgcgggttatcggggttgttcgcggtcgtcgcgtcggttttaatcggggtatcgttaggaggttcgttttattttgtttcgtcgttgttgggtcgttttttttattatacgtcgtttttttacggtaattatataaattacgggaatttgaacgcggcgttgtagggttagggttttttgcggtataattttgcggtcgcggttttcggcgaggttttgtatatcgcgttaaaggcggttagcgacgcgggtaaggcgggcgcgtattcgttcgagttttattatcggttttcgggcggcggttacgagtttaagaaaggtaggcggttcgcggtcggcggcgttcgggaggggagggagagttagtttcggggaggcggagcgttcgggagattcgagggagggttcgggaagaagatttagggggttattttt

SEQ ID NO: 31798 - DNA, 803 bp, Artificial Sequence
  chemically treated genomic DNA (Homo sapiens) CpG-island No: 31798
aaaaataaccccctaaatcttcttcccgaaccctccctcgaatctcccgaacgctccgcctccccgaaactaactctccctcccctcccgaacgccgccgaccgcgaaccgcctacctttcttaaactcgtaaccgccgcccgaaaaccgataataaaactcgaacgaatacgcgcccgccttacccgcgtcgctaaccgcctttaacgcgatatacaaaacctcgccgaaaaccgcgaccgcaaaattataccgcaaaaaaccctaaccctacaacgccgcgttcaaattcccgtaatttatataattaccgtaaaaaaacgacgtataataaaaaaaacgacccaacaacgacgaaacaaaataaaacgaacctcctaacgataccccgattaaaaccgacgcgacgaccgcgaacaaccccgataacccgcaacccgaacccaaactcgactacttaaaatccgacgtaacgatctcgaccaacgaccacaacttaaacttactaacgaaaaacgacgcgcccgaaaacgtccgactaccctaaaacgtcttacgaccaccgcgaaacgcgacctcgaacgaaaaactcaacaacgacgcctccaaaccgataaacgacgacgaaatcacgaacttaaacgacgccaaaccccgctcgccctcctcgtcgtcgtcctcgtcgtcctccaaatcgtcatacttatccttacactccgaacccgattcgcacaaaaaatccccgacgcgacacgaaaacttctccccgtccgactcgaccgaacacgaataatccgtaaacg

SEQ ID NO: 31799 - DNA, 803 bp, Artificial Sequence
  chemically treated genomic DNA (Homo sapiens) CpG-island No: 31799
aggagtggttttttggatttttttttcggattttttttcgggtttttcgggcgtttcgttttttcggggttggtttttttttttttttcgggcgtcgtcggtcgcgggtcgtttattttttttgggttcgtagtcgtcgttcggggatcggtagtgggattcgagcgggtgcgcgttcgttttgttcgcgtcgttggtcgtttttggcgcggtgtgtagggtttcgtcgggggtcgcggtcgtagagttgtatcgtaggagattttggttttgtagcgtcgcgtttaagttttcgtagtttgtgtagttgtcgtagaagggcgacgtgtagtagagggggcggtttagtagcggcgaggtagggtagggcgagttttttggcggtgtttcggttgaggtcggcgcggcggtcgcgggtagtttcggtggttcgtagttcgggtttaggttcggttgtttgaggttcgacgtggcgatttcggttagcgattatagtttgggtttgttggcggggggcggcgcgttcggagacgttcggttgttttggggcgttttgcggttatcgcggggcgcggtttcgggcggggggtttagtagcggcgtttttaagtcggtaagcggcgacgaggttacgggtttgggcggcgttaggtttcgttcgtttttttcgtcgtcgttttcgtcgttttttaggtcgttatatttgtttttgtatttcgagttcgattcgtatagggggttttcggcgcggtacggaagttttttttcgttcgattcggtcgagtacgagtgattcgtgagcg

SEQ ID NO: 31800 - DNA, 803 bp, Artificial Sequence
  chemically treated genomic DNA (Homo sapiens) CpG-island No: 31800
cgctcacgaatcactcgtactcgaccgaatcgaacgaaaaaaaacttccgtaccgcgccgaaaaccccctatacgaatcgaactcgaaatacaaaaacaaatataacgacctaaaaaacgacgaaaacgacgacgaaaaaaacgaacgaaacctaacgccgcccaaacccgtaacctcgtcgccgcttaccgacttaaaaacgccgctactaaaccccccgcccgaaaccgcgccccgcgataaccgcaaaacgccccaaaacaaccgaacgtctccgaacgcgccgccccccgccaacaaacccaaactataatcgctaaccgaaatcgccacgtcgaacctcaaacaaccgaacctaaacccgaactacgaaccaccgaaactacccgcgaccgccgcgccgacctcaaccgaaacaccgccaaaaaactcgccctaccctacctcgccgctactaaaccgccccctctactacacgtcgcccttctacgacaactacacaaactacgaaaacttaaacgcgacgctacaaaaccaaaatctcctacgatacaactctacgaccgcgacccccgacgaaaccctacacaccgcgccaaaaacgaccaacgacgcgaacaaaacgaacgcgcacccgctcgaatcccactaccgatccccgaacgacgactacgaacccaaaaaaaataaacgacccgcgaccgacgacgcccgaaaaaaaaaaaaaaaccaaccccgaaaaaacgaaacgcccgaaaaacccgaaaaaaaatccgaaaaaaaaatccaaaaaaccactcct

SEQ ID NO: 31801 - DNA, 840 bp, Artificial Sequence
  chemically treated genomic DNA (Homo sapiens) CpG-island No: 31801
tcgggtcgtttcggtttcgttttatttcggagtgtttttaggatatttttcggacggttttttattcgtttttcgggatcgttcgcggttttttttcgttttttcgtcggtcgtttcggcggttattgttttaagatggcggcggcggcggtagcgggtgaggtcgggtcgggtcgggtcgggtcgggttgggggtcggggggtttcgggatagcgtttatttgtaattcggcgcgttcggttttttagcgggttttttcggtttcgaagcgcgtttattcgtgttggataaagtgtaggattttcggtaggtttaggggtttcgggttcgtcgtgggttcggggttgttttcgtcgtcgttttttttatttgtcgggttcggttcgggggtaggggcggagatcggggtcgttttagtggggttagggttcgcgtttgagtcgagcggacggtaggaggaggcggcggcggcgatcgcggtggtcgttcgtttttttattatggaggtttcggggtcggttcgcgcgttcgttgtgtttcgcgcgtttgcgcggtcgcgttaatattttttttttttttcgtcgtaattatcgcgcgcgcgttcggcgggggatagtaggaaggggggtcggcggcgagcgcgagtttcgtttattcgggtttatatcgaagggtagcgtgttcgcgcgggggtcggcgggtgggagatcgcgtttcgaggagggcgagggagatttaggtttcgcgcgacggtttttttcgttggagtgagattgaggaaggggtcgttttttgtttttttttttttatttcgttttagagaaagagttttatttttt

SEQ ID NO: 31802 - DNA, 840 bp, Artificial Sequence
  chemically treated genomic DNA (Homo sapiens) CpG-island No: 31802
aaaaaataaaactctttctctaaaacgaaataaaaaaaaaaaaacaaaaaacgaccccttcctcaatctcactccaacgaaaaaaaccgtcgcgcgaaacctaaatctccctcgccctcctcgaaacgcgatctcccacccgccgacccccgcgcgaacacgctacccttcgatataaacccgaataaacgaaactcgcgctcgccgccgaccccccttcctactatcccccgccgaacgcgcgcgcgataattacgacgaaaaaaaaaaaaaatattaacgcgaccgcgcaaacgcgcgaaacacaacgaacgcgcgaaccgaccccgaaacctccataataaaaaaacgaacgaccaccgcgatcgccgccgccgcctcctcctaccgtccgctcgactcaaacgcgaaccctaaccccactaaaacgaccccgatctccgcccctacccccgaaccgaacccgacaaataaaaaaaacgacgacgaaaacaaccccgaacccacgacgaacccgaaacccctaaacctaccgaaaatcctacactttatccaacacgaataaacgcgcttcgaaaccgaaaaaacccgctaaaaaaccgaacgcgccgaattacaaataaacgctatcccgaaaccccccgacccccaacccgacccgacccgacccgacccgacctcacccgctaccgccgccgccgccatcttaaaacaataaccgccgaaacgaccgacgaaaaaacgaaaaaaaaccgcgaacgatcccgaaaaacgaataaaaaaccgtccgaaaaatatcctaaaaacactccgaaataaaacgaaaccgaaacgacccga

SEQ ID NO: 31803 - DNA, 840 bp, Artificial Sequence
  chemically treated genomic DNA (Homo sapiens) CpG-island No: 31803
aaggggtaaggttttttttttggggcgaagtgggaggaggggggtagaaagcggttttttttttagttttattttagcgagggggatcgtcgcgcggggtttgggtttttttcgtttttttcggggcgcgattttttattcgtcggttttcgcgcgggtacgttatttttcggtgtagattcgggtgggcgaggttcgcgttcgtcgtcggtttttttttttattgtttttcgtcgggcgcgcgcgcggtggttgcggcgggggagggggggggtgttggcgcggtcgcgtaggcgcgcgaggtatagcgggcgcgcgggtcggtttcggggtttttatgatggaggagcgagcggttatcgcggtcgtcgtcgtcgtttttttttgtcgttcgttcggtttaggcgcgggttttggttttattggggcggtttcggttttcgtttttgttttcgggtcgggttcggtaggtaagggaggcggcggcggaggtagtttcgggtttacggcgggttcggagtttttgagtttgtcggggattttgtattttatttagtacgagtgggcgcgtttcgaagtcgagaaagttcgttgggaggtcgagcgcgtcgagttataggtgagcgttgtttcgggatttttcgatttttaattcggttcggttcggttcggttcggttttattcgttgtcgtcgtcgtcgttattttggagtaatggtcgtcgggacggtcggcgggggggcgggaggggatcgcgaacggtttcggagggcgagtgaggggtcgttcgaggggtgttttgagggtatttcggggtgggacgggatcgggacggttcga

SEQ ID NO: 31804 - DNA, 840 bp, Artificial Sequence
  chemically treated genomic DNA (Homo sapiens) CpG-island No: 31804
tcgaaccgtcccgatcccgtcccaccccgaaataccctcaaaacacccctcgaacgacccctcactcgccctccgaaaccgttcgcgatcccctcccgcccccccgccgaccgtcccgacgaccattactccaaaataacgacgacgacgacaacgaataaaaccgaaccgaaccgaaccgaaccgaattaaaaatcgaaaaatcccgaaacaacgctcacctataactcgacgcgctcgacctcccaacgaactttctcgacttcgaaacgcgcccactcgtactaaataaaatacaaaatccccgacaaactcaaaaactccgaacccgccgtaaacccgaaactacctccgccgccgcctcccttacctaccgaacccgacccgaaaacaaaaacgaaaaccgaaaccgccccaataaaaccaaaacccgcgcctaaaccgaacgaacgacaaaaaaaaacgacgacgacgaccgcgataaccgctcgctcctccatcataaaaaccccgaaaccgacccgcgcgcccgctatacctcgcgcgcctacgcgaccgcgccaacaccccccccctcccccgccgcaaccaccgcgcgcgcgcccgacgaaaaacaataaaaaaaaaaaccgacgacgaacgcgaacctcgcccacccgaatctacaccgaaaaataacgtacccgcgcgaaaaccgacgaataaaaaatcgcgccccgaaaaaaacgaaaaaaacccaaaccccgcgcgacgatccccctcgctaaaataaaactaaaaaaaaaaccgctttctacccccctcctcccacttcgccccaaaaaaaaaaccttacccctt

SEQ ID NO: 31805 - DNA, 625 bp, Artificial Sequence
  chemically treated genomic DNA (Homo sapiens) CpG-island No: 31805
gatttcgtaagatttaggaacgaatcgagtatttttttgttgggggtattttcggtattgttcgcggtttttacggaggcgttgatggcggcggaggcggcgttcggttgtagagttagcgttaagtttatttcgagcgtcgacgttagtagcgtggtgattaggaaaaagagtagcgtttaggcgtttagacggtcgagcgcgtcggggtttaggttggcggcgtcgtcgattaagttgtatattattagcggtaagatgattattcgtagtagacgtagtagtagttcgttcgggaagacgaaggcgtttaagcgtttcgggtttaacgttagcgtattttcggttttcgatatttttagttttagcgttacgtcggttattacggttattattgttagtagtataagtaggttggttcgaaggtagcggcgtatttggtttcgggaatcgtagtagtcgtttgttgtcgcgttttggttttcgatggaggttagcgttaggttttcgttggcggtgggtttcgtcgttgcgagttttttggagtttcgaggaggatcggttattatgatgggaagtatcggggttttttagcgtttggaagttggttgggagcgtttgggtt

SEQ ID NO: 31806 - DNA, 625 bp, Artificial Sequence
  chemically treated genomic DNA (Homo sapiens) CpG-island No: 31806
aacccaaacgctcccaaccaacttccaaacgctaaaaaaccccgatacttcccatcataataaccgatcctcctcgaaactccaaaaaactcgcaacgacgaaacccaccgccaacgaaaacctaacgctaacctccatcgaaaaccaaaacgcgacaacaaacgactactacgattcccgaaaccaaatacgccgctaccttcgaaccaacctacttatactactaacaataataaccgtaataaccgacgtaacgctaaaactaaaaatatcgaaaaccgaaaatacgctaacgttaaacccgaaacgcttaaacgccttcgtcttcccgaacgaactactactacgtctactacgaataatcatcttaccgctaataatatacaacttaatcgacgacgccgccaacctaaaccccgacgcgctcgaccgtctaaacgcctaaacgctactctttttcctaatcaccacgctactaacgtcgacgctcgaaataaacttaacgctaactctacaaccgaacgccgcctccgccgccatcaacgcctccgtaaaaaccgcgaacaataccgaaaatacccccaacaaaaaaatactcgattcgttcctaaatcttacgaaatc

SEQ ID NO: 31807 - DNA, 625 bp, Artificial Sequence
  chemically treated genomic DNA (Homo sapiens) CpG-island No: 31807
agtttaagcgtttttagttagtttttaggcgttaagaaatttcggtgttttttattatggtggtcgatttttttcgagattttaaggggttcgtagcggcggagtttatcgttaacgggggtttggcgttggtttttatcgaggattaaggcgcggtagtaggcggttattgcggttttcgggattaggtgcgtcgttgttttcgagttaatttgtttgtgttgttgatagtggtggtcgtggtggtcggcgtggcgttgggattgggggtgtcgggggtcgggggtgcgttggcgttgggttcggagcgtttgagcgttttcgttttttcgggcgagttgttgttgcgtttgttgcggatgattattttgtcgttggtggtgtgtagtttgatcggcggcgtcgttagtttggatttcggcgcgttcggtcgtttgggcgtttgggcgttgtttttttttttggttattacgttgttggcgtcggcgttcggagtgggtttggcgttggttttgtagtcgggcgtcgttttcgtcgttattaacgttttcgtgggagtcgcgggtagtgtcgaaaatgtttttagtaaggaggtgttcgattcgtttttggattttgcgaggtt

SEQ ID NO: 31808 - DNA, 625 bp, Artificial Sequence
  chemically treated genomic DNA (Homo sapiens) CpG-island No: 31808
aacctcgcaaaatccaaaaacgaatcgaacacctccttactaaaaacattttcgacactacccgcgactcccacgaaaacgttaataacgacgaaaacgacgcccgactacaaaaccaacgccaaacccactccgaacgccgacgccaacaacgtaataaccaaaaaaaaaaacaacgcccaaacgcccaaacgaccgaacgcgccgaaatccaaactaacgacgccgccgatcaaactacacaccaccaacgacaaaataatcatccgcaacaaacgcaacaacaactcgcccgaaaaaacgaaaacgctcaaacgctccgaacccaacgccaacgcacccccgacccccgacacccccaatcccaacgccacgccgaccaccacgaccaccactatcaacaacacaaacaaattaactcgaaaacaacgacgcacctaatcccgaaaaccgcaataaccgcctactaccgcgccttaatcctcgataaaaaccaacgccaaacccccgttaacgataaactccgccgctacgaaccccttaaaatctcgaaaaaaatcgaccaccataataaaaaacaccgaaatttcttaacgcctaaaaactaactaaaaacgcttaaact

SEQ ID NO: 31809 - DNA, 627 bp, Artificial Sequence
  chemically treated genomic DNA (Homo sapiens) CpG-island No: 31809
gttcggcgcgtcgtcgtcgtatttttatttttatcggcgtttttttcgttttcggtttcggcgttttttatttcgggttgggttagtcgtagcgtttgttgtacgcggtatttttgtttttttcggagttaatgtaattcgtagagttcggttaggttattttttagttagtttcgtagtcggtttcgtttagggtttatcgggaacgagaaggttcggattatggttgcggtttttcgttttagttcggtcgggtttcgcggttatttttttttcggttttattttttcgttttagtagtttgttcgttcgttcgttggtcgggttgttatcgttttatttgtataggcgttcgtttattgggtcgtttattcgcgttttatttgtatggttacgttttcggcgatcgagtaatagtcgtttattggcgaataagttttttgacgaagattttcgggcgtgtaatcgtatcgtttaatacgacgtatgttcgtaattgtttatttatttcgttcgttacgtttttttcgtgtaattgtttcggggttttggttacgtttttttacgcgttataatgaaataagttcgtttttgttttaatgttattggtttgtgtttggtcggttt

SEQ ID NO: 31810 - DNA, 627 bp, Artificial Sequence
  chemically treated genomic DNA (Homo sapiens) CpG-island No: 31810
aaaccgaccaaacacaaaccaataacattaaaacaaaaacgaacttatttcattataacgcgtaaaaaaacgtaaccaaaaccccgaaacaattacacgaaaaaaacgtaacgaacgaaataaataaacaattacgaacatacgtcgtattaaacgatacgattacacgcccgaaaatcttcgtcaaaaaacttattcgccaataaacgactattactcgatcgccgaaaacgtaaccatacaaataaaacgcgaataaacgacccaataaacgaacgcctatacaaataaaacgataacaacccgaccaacgaacgaacgaacaaactactaaaacgaaaaaataaaaccgaaaaaaaaataaccgcgaaacccgaccgaactaaaacgaaaaaccgcaaccataatccgaaccttctcgttcccgataaaccctaaacgaaaccgactacgaaactaactaaaaaataacctaaccgaactctacgaattacattaactccgaaaaaaacaaaaataccgcgtacaacaaacgctacgactaacccaacccgaaataaaaaacgccgaaaccgaaaacgaaaaaaacgccgataaaaataaaaatacgacgacgacgcgccgaac

SEQ ID NO: 31811 - DNA, 627 bp, Artificial Sequence
  chemically treated genomic DNA (Homo sapiens) CpG-island No: 31811
ggatcggttaggtatagattaatggtattgaagtaagggcgggtttgttttattgtgacgcgtgggggggcgtggttagggtttcgaggtagttgtacggagggggcgtggcgagcggagtgagtaggtagttgcgagtatgcgtcgtgttgggcggtgcggttgtacgttcgagagttttcgttaggaagtttattcgttaataggcggttgttgttcggtcgtcgggggcgtggttatgtagataaggcgcgggtgggcggtttaatgggcgggcgtttatgtagatgagacggtgatagttcggttagcgggcgggcgggtaggttgttggggcggggaggtgggatcgggagaggggtggtcgcggggttcggtcgggttggggcggggggtcgtagttatgattcgggttttttcgttttcggtgagttttgagcggggtcggttgcggggttggttggagggtagtttggtcgggttttgcgagttatattggtttcgggagaggtaggagtatcgcgtgtagtaggcgttgcggttggtttagttcggaatggggggcgtcgaggtcgaggacgaggaggacgtcgatgaggatgaagatgcggcggcggcgcgtcgggt

SEQ ID NO: 31812 - DNA, 627 bp, Artificial Sequence
  chemically treated genomic DNA (Homo sapiens) CpG-island No: 31812
acccgacgcgccgccgccgcatcttcatcctcatcgacgtcctcctcgtcctcgacctcgacgccccccattccgaactaaaccaaccgcaacgcctactacacgcgatactcctacctctcccgaaaccaatataactcgcaaaacccgaccaaactaccctccaaccaaccccgcaaccgaccccgctcaaaactcaccgaaaacgaaaaaacccgaatcataactacgaccccccgccccaacccgaccgaaccccgcgaccacccctctcccgatcccacctccccgccccaacaacctacccgcccgcccgctaaccgaactatcaccgtctcatctacataaacgcccgcccattaaaccgcccacccgcgccttatctacataaccacgcccccgacgaccgaacaacaaccgcctattaacgaataaacttcctaacgaaaactctcgaacgtacaaccgcaccgcccaacacgacgcatactcgcaactacctactcactccgctcgccacgccccctccgtacaactacctcgaaaccctaaccacgcccccccacgcgtcacaataaaacaaacccgcccttacttcaataccattaatctatacctaaccgatcc

SEQ ID NO: 31813 - DNA, 535 bp, Artificial Sequence
  chemically treated genomic DNA (Homo sapiens) CpG-island No: 31813
gtgacgcggtttatagagggacgcgttacgtatcgtcgagttgtgttttttcgtcgaagaaagtgaagtgggttcgggaggcggggcgcgcggcgagggaaagtagttcggcgacgggagcgagcgcgcgcgcgttcggcggtaaatttaatttttgtgtagggtggggacgagagattcgcgggttcgtaggtgtggagcggggcgcggagggattcgtgggagtcgtagtgcggcggcgcgcgggtcgggtggggcggggtcgagcgaggcggggcgcgcgcggcggtcgttgagggatcgttggggcgggaggcggcggcggcggcggcgcgcgttgcgggtagtgagtgtggaggcgcggacgcgcggcggatttggaattgttgtagttgttgtcgtcgtcggaggaattttgattttcgtgtttcggatatttcgggtttcgttatggtgagtgaggttggggggtcgtcgaggttgcgggttttgaggcgggtttaacggggtaggatttttgagggggcgatagagt

SEQ ID NO: 31814 - DNA, 535 bp, Artificial Sequence
  chemically treated genomic DNA (Homo sapiens) CpG-island No: 31814
actctatcgccccctcaaaaatcctaccccgttaaacccgcctcaaaacccgcaacctcgacgaccccccaacctcactcaccataacgaaacccgaaatatccgaaacacgaaaatcaaaattcctccgacgacgacaacaactacaacaattccaaatccgccgcgcgtccgcgcctccacactcactacccgcaacgcgcgccgccgccgccgccgcctcccgccccaacgatccctcaacgaccgccgcgcgcgccccgcctcgctcgaccccgccccacccgacccgcgcgccgccgcactacgactcccacgaatccctccgcgccccgctccacacctacgaacccgcgaatctctcgtccccaccctacacaaaaattaaatttaccgccgaacgcgcgcgcgctcgctcccgtcgccgaactactttccctcgccgcgcgccccgcctcccgaacccacttcactttcttcgacgaaaaaacacaactcgacgatacgtaacgcgtccctctataaaccgcgtcac

SEQ ID NO: 31815 - DNA, 535 bp, Artificial Sequence
  chemically treated genomic DNA (Homo sapiens) CpG-island No: 31815
gttttgtcgtttttttaggggttttgtttcgttaagttcgttttagagttcgtagtttcggcgattttttagttttatttattatggcgaggttcggggtgttcggagtacggggattaaggttttttcggcggcgatagtagttgtagtagttttagattcgtcgcgcgttcgcgtttttatatttattgttcgtagcgcgcgtcgtcgtcgtcgtcgtttttcgttttaacggttttttaacggtcgtcgcgcgcgtttcgtttcgttcggtttcgttttattcggttcgcgcgtcgtcgtattgcggtttttacggattttttcgcgtttcgttttatatttacgggttcgcgaatttttcgtttttattttgtataggaattgggtttgtcgtcgggcgcgcgcgcgttcgttttcgtcgtcggattattttttttcgtcgcgcgtttcgtttttcgggtttattttatttttttcggcggaggggtatagttcggcggtgcgtgacgcgtttttttgtgagtcgcgttat

SEQ ID NO: 31816 - DNA, 535 bp, Artificial Sequence
  chemically treated genomic DNA (Homo sapiens) CpG-island No: 31816
ataacgcgactcacaaaaaaacgcgtcacgcaccgccgaactatacccctccgccgaaaaaaataaaataaacccgaaaaacgaaacgcgcgacgaaaaaaaataatccgacgacgaaaacgaacgcgcgcgcgcccgacgacaaacccaattcctatacaaaataaaaacgaaaaattcgcgaacccgtaaatataaaacgaaacgcgaaaaaatccgtaaaaaccgcaatacgacgacgcgcgaaccgaataaaacgaaaccgaacgaaacgaaacgcgcgcgacgaccgttaaaaaaccgttaaaacgaaaaacgacgacgacgacgacgcgcgctacgaacaataaatataaaaacgcgaacgcgcgacgaatctaaaactactacaactactatcgccgccgaaaaaaccttaatccccgtactccgaacaccccgaacctcgccataataaataaaactaaaaaatcgccgaaactacgaactctaaaacgaacttaacgaaacaaaacccctaaaaaaacgacaaaac

SEQ ID NO: 31817 - DNA, 645 bp, Artificial Sequence
  chemically treated genomic DNA (Homo sapiens) CpG-island No: 31817
ttggcggggtttgcgggcgtttttgtatttgttttatttttagaggtcgcggtggtcgttattagttgttgcggttatacgaggttatcgttgtcgtttgagtcgttggaggtagagttgaaggtaggcgattttttttcgttggcgttcgattcgtttttttcgtaattttcgtcgacgtttttcgtaggttttcggcgttttaggggttttaggcgtttagtcgagtattcggagtcgttgttcgcgtagtcgtaaagtagacgacgttggggagttgacggggacgggtcggggtcgggaatacgcgtcgtaggggttcggggtcgtacgcggcgtttatcggtagcgtcgattttcgtagtggagcgttagcgacggtaggattttgcggtttgggtcgttagcgtgggcgttgggtcgcggcgtggtcggggaggtcgaggtttttttcgtttcgtcgtggggtatttagggggtttcgaagggatcgcggaggcgcggtttagtaggttggttttagattgggagcgcgaggttttgcgggttttgggcgagtcgcggcggttcgaagtttcggttatgcgtttacggcggtcggcggttcggggacgttttcgggggtggtgattgttttacgttgcg

SEQ ID NO: 31818 - DNA, 645 bp, Artificial Sequence
  chemically treated genomic DNA (Homo sapiens) CpG-island No: 31818
cgcaacgtaaaacaatcaccacccccgaaaacgtccccgaaccgccgaccgccgtaaacgcataaccgaaacttcgaaccgccgcgactcgcccaaaacccgcaaaacctcgcgctcccaatctaaaaccaacctactaaaccgcgcctccgcgatcccttcgaaaccccctaaataccccacgacgaaacgaaaaaaacctcgacctccccgaccacgccgcgacccaacgcccacgctaacgacccaaaccgcaaaatcctaccgtcgctaacgctccactacgaaaatcgacgctaccgataaacgccgcgtacgaccccgaacccctacgacgcgtattcccgaccccgacccgtccccgtcaactccccaacgtcgtctactttacgactacgcgaacaacgactccgaatactcgactaaacgcctaaaacccctaaaacgccgaaaacctacgaaaaacgtcgacgaaaattacgaaaaaaacgaatcgaacgccaacgaaaaaaaatcgcctaccttcaactctacctccaacgactcaaacgacaacgataacctcgtataaccgcaacaactaataacgaccaccgcgacctctaaaaataaaacaaatacaaaaacgcccgcaaaccccgccaa

SEQ ID NO: 31819 - DNA, 645 bp, Artificial Sequence
  chemically treated genomic DNA (Homo sapiens) CpG-island No: 31819
cgtagcgtggagtagttattattttcgggagcgttttcgggtcgtcggtcgtcgtggacgtatggtcgaggtttcgggtcgtcgcggttcgtttagggttcgtaaggtttcgcgtttttagtttgagattagtttgttgggtcgcgttttcgcggttttttcggggttttttaagtattttacggcggagcgggaagagtttcggttttttcggttacgtcgcggtttagcgtttacgttggcggtttaggtcgtagggttttgtcgtcgttggcgttttattgcggagatcgacgttgtcgatgggcgtcgcgtgcggtttcgagtttttgcggcgcgtgttttcggtttcggttcgttttcgttagttttttagcgtcgtttgttttacggttgcgcgggtagcgatttcgagtgttcggttgggcgtttggggtttttgggacgtcgggggtttgcgggaggcgtcggcgggggttacggggagagcgaatcgagcgttagcgagggagaatcgtttgtttttagttttgtttttagcgatttagacggtagcggtggtttcgtgtggtcgtagtagttggtggcggttatcgcggtttttgggggtggagtaggtgtaggggcgttcgtaggtttcgttaa

SEQ ID NO: 31820 - DNA, 645 bp, Artificial Sequence
  chemically treated genomic DNA (Homo sapiens) CpG-island No: 31820
ttaacgaaacctacgaacgcccctacacctactccacccccaaaaaccgcgataaccgccaccaactactacgaccacacgaaaccaccgctaccgtctaaatcgctaaaaacaaaactaaaaacaaacgattctccctcgctaacgctcgattcgctctccccgtaacccccgccgacgcctcccgcaaacccccgacgtcccaaaaaccccaaacgcccaaccgaacactcgaaatcgctacccgcgcaaccgtaaaacaaacgacgctaaaaaactaacgaaaacgaaccgaaaccgaaaacacgcgccgcaaaaactcgaaaccgcacgcgacgcccatcgacaacgtcgatctccgcaataaaacgccaacgacgacaaaaccctacgacctaaaccgccaacgtaaacgctaaaccgcgacgtaaccgaaaaaaccgaaactcttcccgctccgccgtaaaatacttaaaaaaccccgaaaaaaccgcgaaaacgcgacccaacaaactaatctcaaactaaaaacgcgaaaccttacgaaccctaaacgaaccgcgacgacccgaaacctcgaccatacgtccacgacgaccgacgacccgaaaacgctcccgaaaataataactactccacgctacg

SEQ ID NO: 31821 - DNA, 552 bp, Artificial Sequence
  chemically treated genomic DNA (Homo sapiens) CpG-island No: 31821
cggttcgtagtgtattttatagggagtttcgtcgggtttatttttgtttcgatttttatttcgcgcgttttttcggttttattttttagatttttaggcgacgaatggaaagggggtttttttttttttatttgggacggaggcgttcgtttatggtagttggcggatggaagttacgcggcgtcgtttcgcgaagagagggaatagagggggttgtgtttcggcggtcgttacgtttattttttcgggttttggttttcgtagtcgttcgggtggacgtagtcggtggcgagtattttttagtcggattcgtattattattattttcggcgtttgtttcgcgtttttttatgtcgttgtcgtcgtggtatcgttttttcgcggttggtagtggtattattttaatcgtatcgattggtaatttcgtttacgggaagaggcgggttcggagcgggaggagcgattaggagtttttgggagaaaggattttttttggggtggtagaagcgttcgtttgtttatagttaacggagggtacggtataaaagttaa

SEQ ID NO: 31822 - DNA, 552 bp, Artificial Sequence
  chemically treated genomic DNA (Homo sapiens) CpG-island No: 31822
ttaacttttataccgtaccctccgttaactataaacaaacgaacgcttctaccaccccaaaaaaaatcctttctcccaaaaactcctaatcgctcctcccgctccgaacccgcctcttcccgtaaacgaaattaccaatcgatacgattaaaataataccactaccaaccgcgaaaaaacgataccacgacgacaacgacataaaaaaacgcgaaacaaacgccgaaaataataataatacgaatccgactaaaaaatactcgccaccgactacgtccacccgaacgactacgaaaaccaaaacccgaaaaaataaacgtaacgaccgccgaaacacaaccccctctattccctctcttcgcgaaacgacgccgcgtaacttccatccgccaactaccataaacgaacgcctccgtcccaaataaaaaaaaaaaaaccccctttccattcgtcgcctaaaaatctaaaaaataaaaccgaaaaaacgcgcgaaataaaaatcgaaacaaaaataaacccgacgaaactccctataaaatacactacgaaccg

SEQ ID NO: 31823 - DNA, 552 bp, Artificial Sequence
  chemically treated genomic DNA (Homo sapiens) CpG-island No: 31823
ttgatttttatatcgtatttttcgttggttgtgaataggcgagcgtttttgttattttaggggaggtttttttttttagaagtttttagtcgtttttttcgtttcgagttcgttttttttcgtgggcggggttattagtcggtgcggttgggatggtgttattgttagtcgcgagagggcggtattacggcggtagcgatatgggggggcgcggagtagacgtcggaagtagtggtggtacgggttcgattgaggggtattcgttatcggttgcgtttattcgagcggttgcgagagttaaggttcgagggggtgggcgtggcggtcgtcgaaatataattttttttgtttttttttttcgcggagcggcgtcgcgtagtttttattcgttagttgttatgagcgagcgttttcgttttaggtgagagggaagggattttttttttattcgtcgtttgaggatttgggagatagagtcgagggggcgcgcgaaatgggggtcggagtaagagtggattcggcggggttttttgtggggtgtattgcgggtcg

SEQ ID NO: 31824 - DNA, 552 bp, Artificial Sequence
  chemically treated genomic DNA (Homo sapiens) CpG-island No: 31824
cgacccgcaatacaccccacaaaaaaccccgccgaatccactcttactccgacccccatttcgcgcgccccctcgactctatctcccaaatcctcaaacgacgaataaaaaaaaaatcccttccctctcacctaaaacgaaaacgctcgctcataacaactaacgaataaaaactacgcgacgccgctccgcgaaaaaaaaaaacaaaaaaaattatatttcgacgaccgccacgcccaccccctcgaaccttaactctcgcaaccgctcgaataaacgcaaccgataacgaatacccctcaatcgaacccgtaccaccactacttccgacgtctactccgcgcccccccatatcgctaccgccgtaataccgccctctcgcgactaacaataacaccatcccaaccgcaccgactaataaccccgcccacgaaaaaaaacgaactcgaaacgaaaaaaacgactaaaaacttctaaaaaaaaaaacctcccctaaaataacaaaaacgctcgcctattcacaaccaacgaaaaatacgatataaaaatcaa

SEQ ID NO: 31825 - DNA, 808 bp, Artificial Sequence
  chemically treated genomic DNA (Homo sapiens) CpG-island No: 31825
  unsure (468)
tttacgggtatagttcgtagtttgggttttgcgttttttttgattaaagttcgtagagaaggaagtgcgagaataaaggaagggttttttgtcggtcgcgtttacggttttcgcgtacgtatacggtcgacggatatagtttagagcgcgatttttttacgtcggggttttcgttttagcggtttttcggatttcggttttatagtacgttcgcgcggttgggaaggttcgagggtacgggggattcgtttttggagttttcgtagtcgaggtttagcggtggtagttgcggggatcgggagtagggggtggggtagggggttcgttcgtttcgggttcgtatttcgttcggtgttcgcgcgacgttttcggttttggtttaacggggtgtgaatcggtgtgttttaaaaatatttgggattttcgcggaacgacggcggtggaacggttacgggggacgttgaagtntcgcgggtttcggtttcgtattattttcggtttgggcgacggaaatttaattgtagtttcgcggcgttatttacggatcggatttcgtagttagattttcggtttcggggcgtttcgtgagtttcgcggtgtattcggttttttttggttttcggttcgtttttttttttttcgggggtttttattttaagtttcgacgtcgttttgtagtagatagttcggttcggtttaggtttcggattcggttttcgtggaaggggaaggggtgtttaagttgttcgggtttaggcggtattttttgagttcggggagttgaggtttcgtttttcgcgttattata

SEQ ID NO: 31826 - DNA, 808 bp, Artificial Sequence
  chemically treated genomic DNA (Homo sapiens) CpG-island No: 31826
  unsure (341)
tataataacgcgaaaaacgaaacctcaactccccgaactcaaaaaataccgcctaaacccgaacaacttaaacaccccttccccttccacgaaaaccgaatccgaaacctaaaccgaaccgaactatctactacaaaacgacgtcgaaacttaaaataaaaacccccgaaaaaaaaaaaaacgaaccgaaaaccaaaaaaaaccgaatacaccgcgaaactcacgaaacgccccgaaaccgaaaatctaactacgaaatccgatccgtaaataacgccgcgaaactacaattaaatttccgtcgcccaaaccgaaaataatacgaaaccgaaacccgcganacttcaacgtcccccgtaaccgttccaccgccgtcgttccgcgaaaatcccaaatatttttaaaacacaccgattcacaccccgttaaaccaaaaccgaaaacgtcgcgcgaacaccgaacgaaatacgaacccgaaacgaacgaaccccctaccccaccccctactcccgatccccgcaactaccaccgctaaacctcgactacgaaaactccaaaaacgaatcccccgtaccctcgaaccttcccaaccgcgcgaacgtactataaaaccgaaatccgaaaaaccgctaaaacgaaaaccccgacgtaaaaaaatcgcgctctaaactatatccgtcgaccgtatacgtacgcgaaaaccgtaaacgcgaccgacaaaaaacccttcctttattctcgcacttccttctctacgaactttaatcaaaaaaaacgcaaaacccaaactacgaactatacccgtaaa

SEQ ID NO: 31827 - DNA, 808 bp, Artificial Sequence
  chemically treated genomic DNA (Homo sapiens) CpG-island No: 31827
  unsure (341)
tgtggtggcgcgggggacggggttttagtttttcgggtttaggagatatcgtttggattcgggtagtttaaatattttttttttttttacgaggatcgagttcgaggtttgagtcgggtcgggttgtttgttgtagggcggcgtcgagatttggggtgggagttttcggaggaggaagagacgaatcgggagttagagggagtcgggtatatcgcgggatttacggggcgtttcggggtcgggaatttagttacggaattcggttcgtaggtggcgtcgcgaggttgtagttgggttttcgtcgtttaggtcgagggtggtgcggagtcgggattcgcggngttttagcgtttttcgtggtcgttttatcgtcgtcgtttcgcggagattttaggtgtttttagggtatatcggtttatatttcgttgggttaagatcgagagcgtcgcgcgggtatcggacggggtgcgaattcggggcggacgggttttttgttttattttttattttcgattttcgtagttgttatcgttgggtttcggttgcgaaggttttagaaacgggtttttcgtattttcgggtttttttagtcgcgcgggcgtgttatggagtcgaggttcgggaggtcgttagggcgggggtttcggcgtggaaggatcgcgttttgggttgtgttcgtcggtcgtgtgcgtgcgcggaggtcgtgggcgcggtcggtaggggattttttttttgttttcgtatttttttttttgcgggttttggttagggaggacgtaaggtttaggttgcgagttgtgttcgtggg

SEQ ID NO: 31828 - DNA, 808 bp, Artificial Sequence
  chemically treated genomic DNA (Homo sapiens) CpG-island No: 31828
  unsure (468)
cccacgaacacaactcgcaacctaaaccttacgtcctccctaaccaaaacccgcaaaaaaaaaaatacgaaaacaaaaaaaaaatcccctaccgaccgcgcccacgacctccgcgcacgcacacgaccgacgaacacaacccaaaacgcgatccttccacgccgaaacccccgccctaacgacctcccgaacctcgactccataacacgcccgcgcgactaaaaaaacccgaaaatacgaaaaacccgtttctaaaaccttcgcaaccgaaacccaacgataacaactacgaaaatcgaaaataaaaaataaaacaaaaaacccgtccgccccgaattcgcaccccgtccgatacccgcgcgacgctctcgatcttaacccaacgaaatataaaccgatataccctaaaaacacctaaaatctccgcgaaacgacgacgataaaacgaccacgaaaaacgctaaaacnccgcgaatcccgactccgcaccaccctcgacctaaacgacgaaaacccaactacaacctcgcgacgccacctacgaaccgaattccgtaactaaattcccgaccccgaaacgccccgtaaatcccgcgatatacccgactccctctaactcccgattcgtctcttcctcctccgaaaactcccaccccaaatctcgacgccgccctacaacaaacaacccgacccgactcaaacctcgaactcgatcctcgtaaaaaaaaaaaaaatatttaaactacccgaatccaaacgatatctcctaaacccgaaaaactaaaaccccgtcccccgcgccaccaca

SEQ ID NO: 31829 - DNA, 526 bp, Artificial Sequence
  chemically treated genomic DNA (Homo sapiens) CpG-island No: 31829
ttcgggagttcgtcggcggcgttggggagcggttcgaggtttaatagttttttttgtggtcgggttattaatttttttttttcgattttatttttgtttcggtagagttatgagattcgtatttcggtcgattagggtatcgcgggatacgtggcgattacgggttagattttgaatatttttgacgtatatgtttattcgtttttttatcgcggcgtggacgatagtatcggttttcgtacgcgtaatattttttgtttttttattaagaacgagaattagggtgcgcgtggcggttcgggcggaggggcggggtttgcgtcgggcggggcgggttcgagcgagcgggggtggtaatatttttttatcgtttttagcgtttcggagtataagggagtcgggttttatgtttgggacgtacgtaatttgcggaaattgcgagggtaggtttcggtcggatttttttttttaatcgatttttttttttatcggtggttttttgttttttttttttttttagaggtta

SEQ ID NO: 31830 - DNA, 526 bp, Artificial Sequence
  chemically treated genomic DNA (Homo sapiens) CpG-island No: 31830
taacctctaaaaaaaaaaaaaaaacaaaaaaccaccgataaaaaaaaaaatcgattaaaaaaaaaaatccgaccgaaacctaccctcgcaatttccgcaaattacgtacgtcccaaacataaaacccgactcccttatactccgaaacgctaaaaacgataaaaaaatattaccacccccgctcgctcgaacccgccccgcccgacgcaaaccccgcccctccgcccgaaccgccacgcgcaccctaattctcgttcttaataaaaaaacaaaaaatattacgcgtacgaaaaccgatactatcgtccacgccgcgataaaaaaacgaataaacatatacgtcaaaaatattcaaaatctaacccgtaatcgccacgtatcccgcgataccctaatcgaccgaaatacgaatctcataactctaccgaaacaaaaataaaatcgaaaaaaaaaaattaataacccgaccacaaaaaaaactattaaacctcgaaccgctccccaacgccgccgacgaactcccgaa

SEQ ID NO: 31831 - DNA, 526 bp, Artificial Sequence
  chemically treated genomic DNA (Homo sapiens) CpG-island No: 31831
tgatttttggggaagggagaggggtaaggaattatcggtggagggagggatcggttggagggagggattcggtcgggatttgttttcgtagttttcgtaggttacgtacgttttaggtatggaattcgatttttttatgtttcgggacgttggaggcggtggggaagtgttgttattttcgttcgttcggattcgtttcgttcggcgtaggtttcgttttttcgttcgggtcgttacgcgtattttggttttcgtttttgatggggaagtagaggatgttgcgcgtgcggaagtcggtgttgtcgtttacgtcgcggtagaaaagcggatgggtatatgcgttagggatgtttaggatttggttcgtggtcgttacgtgtttcgcgatgttttgatcggtcgggatgcggattttatagttttgtcggagtagagatggagtcgagaggaagaagttagtgattcggttatagaggggattgttaaatttcgggtcgttttttagcgtcgtcggcggattttcgga

SEQ ID NO: 31832 - DNA, 526 bp, Artificial Sequence
  chemically treated genomic DNA (Homo sapiens) CpG-island No: 31832
tccgaaaatccgccgacgacgctaaaaaacgacccgaaatttaacaatcccctctataaccgaatcactaacttcttcctctcgactccatctctactccgacaaaactataaaatccgcatcccgaccgatcaaaacatcgcgaaacacgtaacgaccacgaaccaaatcctaaacatccctaacgcatatacccatccgcttttctaccgcgacgtaaacgacaacaccgacttccgcacgcgcaacatcctctacttccccatcaaaaacgaaaaccaaaatacgcgtaacgacccgaacgaaaaaacgaaacctacgccgaacgaaacgaatccgaacgaacgaaaataacaacacttccccaccgcctccaacgtcccgaaacataaaaaaatcgaattccatacctaaaacgtacgtaacctacgaaaactacgaaaacaaatcccgaccgaatccctccctccaaccgatccctccctccaccgataattccttacccctctcccttccccaaaaatca

SEQ ID NO: 31833 - DNA, 600 bp, Artificial Sequence
  chemically treated genomic DNA (Homo sapiens) CpG-island No: 31833
atttatcggcggtcggcgggcgtgagtgggattcggcggattcgggcgttcggtgtgtttcgtcgattgatttcgagttgttcgaattcggtttcggttatcgggggcggggcgtgaaaagggggcgttttttttcgggtgtaggttgaggggttcggattatttttattgcggacgagggattttgatcgcgtttcgttttttttttataacgagtggatttttttcggagtatttttagttttttttttacgggagatttttttagcgtcggtacgagagatgttagcggatttttatttttgatatatttgcgtcgttttcgaaacgcgatttgttcggcgttttttttcgggcgttttttttttcgagtcggtcgggagtcgggacgggggcgcgtagggttcggtaagttttgggcggatttagggagggtttcgtcggtcgttgttcgttggttcgtattcggggttgttcgcggaggtttcgttcgttttttttcgtcgttggttttttggtcgcgggaaggttggagtcgttttggttggtatcggggtttacgtttttttgtcggaggttggttttcgtttttgttttttt

SEQ ID NO: 31834 - DNA, 600 bp, Artificial Sequence
  chemically treated genomic DNA (Homo sapiens) CpG-island No: 31834
aaaaaaacaaaaacgaaaaccaacctccgacaaaaaaacgtaaaccccgataccaaccaaaacgactccaaccttcccgcgaccaaaaaaccaacgacgaaaaaaaacgaacgaaacctccgcgaacaaccccgaatacgaaccaacgaacaacgaccgacgaaaccctccctaaatccgcccaaaacttaccgaaccctacgcgcccccgtcccgactcccgaccgactcgaaaaaaaaaacgcccgaaaaaaaacgccgaacaaatcgcgtttcgaaaacgacgcaaatatatcaaaaataaaaatccgctaacatctctcgtaccgacgctaaaaaaatctcccgtaaaaaaaaaactaaaaatactccgaaaaaaatccactcgttataaaaaaaaaacgaaacgcgatcaaaatccctcgtccgcaataaaaataatccgaacccctcaacctacacccgaaaaaaaacgcccccttttcacgccccgcccccgataaccgaaaccgaattcgaacaactcgaaatcaatcgacgaaacacaccgaacgcccgaatccgccgaatcccactcacgcccgccgaccgccgataaat

SEQ ID NO: 31835 - DNA, 600 bp, Artificial Sequence
  chemically treated genomic DNA (Homo sapiens) CpG-island No: 31835
aagggagtagaggcgagagttagttttcggtaggagggcgtagatttcggtgttagttagaacggttttagttttttcgcggttagagagttagcggcgggaggggacgggcgggattttcgcggatagtttcgggtgcggattagcgggtagcggtcggcgagattttttttggattcgtttagagtttatcggattttgcgcgttttcgtttcggttttcggtcggttcgggggagaaggcgttcgaggggaggcgtcggatagatcgcgtttcggaggcggcgtaggtgtgttaggggtgggggttcgttggtatttttcgtgtcggcgttgggggggtttttcgtggaggaagggttgaaggtgtttcgggaggggtttattcgttatggaaaggaagcggggcgcggttagggtttttcgttcgtagtgggggtggttcgggttttttagtttgtattcgggaggagacgttttttttttacgtttcgttttcggtggtcgaggtcggattcggatagttcggggttagtcgacggagtatatcgggcgttcgaattcgtcgggttttatttacgttcgtcggtcgtcggtaggt

SEQ ID NO: 31836 - DNA, 600 bp, Artificial Sequence
  chemically treated genomic DNA (Homo sapiens) CpG-island No: 31836
acctaccgacgaccgacgaacgtaaataaaacccgacgaattcgaacgcccgatatactccgtcgactaaccccgaactatccgaatccgacctcgaccaccgaaaacgaaacgtaaaaaaaaaacgtctcctcccgaatacaaactaaaaaacccgaaccacccccactacgaacgaaaaaccctaaccgcgccccgcttcctttccataacgaataaacccctcccgaaacaccttcaacccttcctccacgaaaaacccccccaacgccgacacgaaaaataccaacgaacccccacccctaacacacctacgccgcctccgaaacgcgatctatccgacgcctcccctcgaacgccttctcccccgaaccgaccgaaaaccgaaacgaaaacgcgcaaaatccgataaactctaaacgaatccaaaaaaaatctcgccgaccgctacccgctaatccgcacccgaaactatccgcgaaaatcccgcccgtcccctcccgccgctaactctctaaccgcgaaaaaactaaaaccgttctaactaacaccgaaatctacgccctcctaccgaaaactaactctcgcctctactccctt

SEQ ID NO: 31837 - DNA, 534 bp, Artificial Sequence
  chemically treated genomic DNA (Homo sapiens) CpG-island No: 31837
gtcggcgggtaaggcgggttaggtttttttggagtgtttttttatcggcgtttcggacgttcgggtcgggaaagagttgttgtattaggtggtaacgagttgtattttcgagggttcggttttttagtaggcgtagagagagtaggacgttatagtgatcgagggtttggaagttcgttaatttcggaattggatttcgtttaaagtcgtttttttgtttttattggttgtgtagtcgtcgttttagagtcgtgcgaatggggttatgtcgattaaagcgtcgatggatgtggcgtaggtagcgcgtttattgtaaggttcggcgtacggtggcggggttttaggtgttgacgtaggtagtgtttgagatcgttagaagttcggaaaagcgatttaggtgttgtagaagggattttatgaggtgcgcgaaggttttattttcgtttttattttggagacggcgattttttgcgtattgattggaatattcgcgaaatgatacgtttttttgtaatgttattggtcgaaatgtat

SEQ ID NO: 31838 - DNA, 534 bp, Artificial Sequence
  chemically treated genomic DNA (Homo sapiens) CpG-island No: 31838
atacatttcgaccaataacattacaaaaaaacgtatcatttcgcgaatattccaatcaatacgcaaaaaatcgccgtctccaaaataaaaacgaaaataaaaccttcgcgcacctcataaaatcccttctacaacacctaaatcgcttttccgaacttctaacgatctcaaacactacctacgtcaacacctaaaaccccgccaccgtacgccgaaccttacaataaacgcgctacctacgccacatccatcgacgctttaatcgacataaccccattcgcacgactctaaaacgacgactacacaaccaataaaaacaaaaaaacgactttaaacgaaatccaattccgaaattaacgaacttccaaaccctcgatcactataacgtcctactctctctacgcctactaaaaaaccgaaccctcgaaaatacaactcgttaccacctaatacaacaactctttcccgacccgaacgtccgaaacgccgataaaaaaacactccaaaaaaacctaacccgccttacccgccgac

SEQ ID NO: 31839 - DNA, 534 bp, Artificial Sequence
  chemically treated genomic DNA (Homo sapiens) CpG-island No: 31839
atgtatttcgattaatagtattgtagagaggcgtattatttcgcggatgttttaattagtacgtagagagtcgtcgtttttaaggtgaaagcggaagtagggttttcgcgtattttatggaattttttttgtagtatttggatcgttttttcgagtttttggcggttttaagtattatttacgttagtatttgggatttcgttatcgtgcgtcgggttttgtagtgggcgcgttatttgcgttatatttatcggcgttttggtcggtatggttttattcgtacggttttggagcggcggttgtataattagtggaggtaagagggcggttttgggcggggtttagtttcgggattagcgaatttttaggttttcggttattgtgacgttttgttttttttgcgtttgttggagaatcgggttttcggggatgtagttcgttattatttggtgtagtaattttttttcggttcgggcgttcgggacgtcgatgaggagatattttaagagagtttggttcgttttgttcgtcggt

SEQ ID NO: 31840 - DNA, 534 bp, Artificial Sequence
  chemically treated genomic DNA (Homo sapiens) CpG-island No: 31840
accgacgaacaaaacgaaccaaactctcttaaaatatctcctcatcgacgtcccgaacgcccgaaccgaaaaaaaattactacaccaaataataacgaactacatccccgaaaacccgattctccaacaaacgcaaaaaaaacaaaacgtcacaataaccgaaaacctaaaaattcgctaatcccgaaactaaaccccgcccaaaaccgccctcttacctccactaattatacaaccgccgctccaaaaccgtacgaataaaaccataccgaccaaaacgccgataaatataacgcaaataacgcgcccactacaaaacccgacgcacgataacgaaatcccaaatactaacgtaaataatacttaaaaccgccaaaaactcgaaaaaacgatccaaatactacaaaaaaaattccataaaatacgcgaaaaccctacttccgctttcaccttaaaaacgacgactctctacgtactaattaaaacatccgcgaaataatacgcctctctacaatactattaatcgaaatacat

SEQ ID NO: 31841 - DNA, 776 bp, Artificial Sequence
  chemically treated genomic DNA (Homo sapiens) CpG-island No: 31841
atcggcggttttgggtttcgtcggcgagcggttaataggcgcgcgcgtttcgatatttcgtattcgcgtttcgggcgtttcgttcgtcgcgtcgtttttattgtatcgcgcggcgtttcggggagataaagcggattcgtagttttgcgtttcggtttcgtttcgggagtacggcgcgcgtaaattttcggttttttttttcgttttcggttagttttttcgtttcgacgtgcggttgttttttagataaataaggaggtggaggaggcggtttgggggcgcgttaagtagtgaaggcggttagggtgttgtatagttcggcggttcgttagggtcgtggggagaggcggcgcggttcgtattgtaataataaatttgtagtagagggtatttgaggaaaagaggacggcgacgggcggtagtcgttttttttttatgtgtttgttttgagcgaagtagaaaatggtgtttgcggcggcgcggagtcgcgtttagatatataaagagttcgcgaaggatgtatttgtatacggtttcgggtcggattttgttttttagttgggtacgcgcgttttattttttttcgcggggaagttcggggcggggagcgtttttgaaggtcgggtttagaggttttgtggttgcgcgtgtatatatatacgtgtatatagttatacgcgtataattagttagagttgcggtttggcgtgatcggtttaagatatatttttttggtgtttttttttttttttttatacgtttttttattgtttgtt

SEQ ID NO: 31842 - DNA, 776 bp, Artificial Sequence
  chemically treated genomic DNA (Homo sapiens) CpG-island No: 31842
aacaaacaataaaaaaacgtataaaaaaaaaaaaaaaaacaccaaaaaaatatatcttaaaccgatcacgccaaaccgcaactctaactaattatacgcgtataactatatacacgtatatatatacacgcgcaaccacaaaacctctaaacccgaccttcaaaaacgctccccgccccgaacttccccgcgaaaaaaaataaaacgcgcgtacccaactaaaaaacaaaatccgacccgaaaccgtatacaaatacatccttcgcgaactctttatatatctaaacgcgactccgcgccgccgcaaacaccattttctacttcgctcaaaacaaacacataaaaaaaaaacgactaccgcccgtcgccgtcctcttttcctcaaataccctctactacaaatttattattacaatacgaaccgcgccgcctctccccacgaccctaacgaaccgccgaactatacaacaccctaaccgccttcactacttaacgcgcccccaaaccgcctcctccacctccttatttatctaaaaaacaaccgcacgtcgaaacgaaaaaactaaccgaaaacgaaaaaaaaaaccgaaaatttacgcgcgccgtactcccgaaacgaaaccgaaacgcaaaactacgaatccgctttatctccccgaaacgccgcgcgatacaataaaaacgacgcgacgaacgaaacgcccgaaacgcgaatacgaaatatcgaaacgcgcgcgcctattaaccgctcgccgacgaaacccaaaaccgccgat

SEQ ID NO: 31843 - DNA, 776 bp, Artificial Sequence
  chemically treated genomic DNA (Homo sapiens) CpG-island No: 31843
ggtaggtagtgggggagcgtatagggaaggagaaggaagtattaggggagtatgttttgggtcgattacgttaggtcgtagttttggttggttgtgcgcgtgtgattgtgtgtacgtgtgtgtgtgtacgcgtagttataggatttttgggttcggtttttaggggcgtttttcgtttcgggttttttcgcggaagggagtggggcgcgcgtatttagttgaggggtagggttcgattcgaggtcgtgtgtaaatgtatttttcgcggattttttgtgtgtttgagcgcggtttcgcgtcgtcgtaggtattattttttgtttcgtttaggataggtatataaaaggaaggcggttgtcgttcgtcgtcgtttttttttttttagatgttttttgttgtaggtttattattatagtacgggtcgcgtcgtttttttttacggttttggcgggtcgtcgggttgtgtagtattttggtcgtttttattgtttggcgcgtttttaaatcgttttttttatttttttatttgtttgaaaagtaatcgtacgtcgaggcggagaggttggtcgggggcggggaggaaggtcggggatttgcgcgcgtcgtgttttcggggcggggtcggggcgtagagttgcgggttcgttttgttttttcggggcgtcgcgcggtgtagtggggacggcgcggcgagcggggcgttcggggcgcgggtgcggggtgtcggggcgcgcgcgtttgttggtcgttcgtcgacggggtttagagtcgtcgat

SEQ ID NO: 31844 - DNA, 776 bp, Artificial Sequence
  chemically treated genomic DNA (Homo sapiens) CpG-island No: 31844
atcgacgactctaaaccccgtcgacgaacgaccaacaaacgcgcgcgccccgacaccccgcacccgcgccccgaacgccccgctcgccgcgccgtccccactacaccgcgcgacgccccgaaaaaacaaaacgaacccgcaactctacgccccgaccccgccccgaaaacacgacgcgcgcaaatccccgaccttcctccccgcccccgaccaacctctccgcctcgacgtacgattacttttcaaacaaataaaaaaataaaaaaaacgatttaaaaacgcgccaaacaataaaaacgaccaaaatactacacaacccgacgacccgccaaaaccgtaaaaaaaaacgacgcgacccgtactataataataaacctacaacaaaaaacatctaaaaaaaaaaaaacgacgacgaacgacaaccgccttccttttatatacctatcctaaacgaaacaaaaaataatacctacgacgacgcgaaaccgcgctcaaacacacaaaaaatccgcgaaaaatacatttacacacgacctcgaatcgaaccctacccctcaactaaatacgcgcgccccactcccttccgcgaaaaaacccgaaacgaaaaacgcccctaaaaaccgaacccaaaaatcctataactacgcgtacacacacacacgtacacacaatcacacgcgcacaaccaaccaaaactacgacctaacgtaatcgacccaaaacatactcccctaatacttccttctccttccctatacgctcccccactacctacc

SEQ ID NO: 31845 - DNA, 540 bp, Artificial Sequence
  chemically treated genomic DNA (Homo sapiens) CpG-island No: 31845
ttttacgtattatttttattgttatgtcgataaatttcgggagtaaagggtggtacgatttttttcgcgtttttgcgggttgaaggcgggtattaaagtagtgtagttttaagttttttttgtagaagtcgcgttttttattcggttcgggggtagagggggcgcgagagagtaagtgggcgggcgttttatttttcgtatttttttttaggttttggcgtatagggtgggagcgttgcgttgcgtcgcgttgcgtatcgcggttcgtttgtcgtttgttttttgttttagttgggttattttttcgggttgtcggtggagggttaagaggcgttaacgttacgttgttttcggttttttagcgggttttgtttttttttttaaggcggcggcggttgagcggcggagttttttaaatggtttggttagatgcggtaggtttgttgtttagcgttgtcgtcgtcgttattggagaagggtcggtgtagtagttatagcgatagtagtagtagtagtagcgagaggagtagtagtagtagt

SEQ ID NO: 31846 - DNA, 540 bp, Artificial Sequence
  chemically treated genomic DNA (Homo sapiens) CpG-island No: 31846
actactactactactcctctcgctactactactactactatcgctataactactacaccgacccttctccaataacgacgacgacaacgctaaacaacaaacctaccgcatctaaccaaaccatttaaaaaactccgccgctcaaccgccgccgccttaaaaaaaaaaacaaaacccgctaaaaaaccgaaaacaacgtaacgttaacgcctcttaaccctccaccgacaacccgaaaaaataacccaactaaaacaaaaaacaaacgacaaacgaaccgcgatacgcaacgcgacgcaacgcaacgctcccaccctatacgccaaaacctaaaaaaaaatacgaaaaataaaacgcccgcccacttactctctcgcgccccctctacccccgaaccgaataaaaaacgcgacttctacaaaaaaaacttaaaactacactactttaatacccgccttcaacccgcaaaaacgcgaaaaaaatcgtaccaccctttactcccgaaatttatcgacataacaataaaaataatacgtaaaa

SEQ ID NO: 31847 - DNA, 540 bp, Artificial Sequence
  chemically treated genomic DNA (Homo sapiens) CpG-island No: 31847
gttgttgttgttgtttttttcgttgttgttgttgttgttgtcgttgtagttgttgtatcgatttttttttagtggcggcggcggtagcgttgagtagtaaatttgtcgtatttggttaggttatttggggggtttcgtcgtttagtcgtcgtcgttttgggaggggaaatagagttcgttggaaaatcggaaatagcgtaacgttagcgttttttagttttttatcggtagttcggggaggtggtttagttagggtagggggtaggcggtaagcgggtcgcgatgcgtagcgcggcgtagcgtagcgtttttattttgtgcgttaggatttggaggaggatgcggaggatgggacgttcgtttatttgttttttcgcgttttttttgttttcggatcgagtagggagcgcggtttttgtaggggaagtttgggattgtattgttttagtgttcgtttttagttcgtaggggcgcgggaggaatcgtgttattttttgttttcgggatttatcggtatgatagtgggggtggtgcgtgagg

SEQ ID NO: 31848 - DNA, 540 bp, Artificial Sequence
  chemically treated genomic DNA (Homo sapiens) CpG-island No: 31848
cctcacgcaccacccccactatcataccgataaatcccgaaaacaaaaaataacacgattcctcccgcgcccctacgaactaaaaacgaacactaaaacaatacaatcccaaacttcccctacaaaaaccgcgctccctactcgatccgaaaacaaaaaaaacgcgaaaaaacaaataaacgaacgtcccatcctccgcatcctcctccaaatcctaacgcacaaaataaaaacgctacgctacgccgcgctacgcatcgcgacccgcttaccgcctaccccctaccctaactaaaccacctccccgaactaccgataaaaaactaaaaaacgctaacgttacgctatttccgattttccaacgaactctatttcccctcccaaaacgacgacgactaaacgacgaaaccccccaaataacctaaccaaatacgacaaatttactactcaacgctaccgccgccgccactaaaaaaaaatcgatacaacaactacaacgacaacaacaacaacaacaacgaaaaaaacaacaacaacaac

SEQ ID NO: 31849 - DNA, 1087 bp, Artificial Sequence
  chemically treated genomic DNA (Homo sapiens) CpG-island No: 31849
tttcgtttattcgtataaatacgtcgtatttgttggagtttatatcgaagaagaagcgtttgttgtttatagttaaggaggtgttttcgggtagttcggtcggttttttttttatttcgtagtcgtcgatgagtttggttagagcgttacggaattcgatgagtttttgcgcgggtagcgtaatggtttggttttgcgtggagtttaggttaggttttcggttgatcgtttggcggatgcgtaggaagcggtcgcgttggttttttttgagatttatgtagtatttgcggttttcgcgtattaggaattcgtttttgagcgttcggcgcggttcgttttgcgtttgggttaggttcggcggttggttggggtttagttgcgcgtagtgttcgatgaagtcgtttaggtagtcgcggaattttacggttattgatatggagagagtaaggcggtttttgttgtcgttcgcgtttatttcggcgatttttaggaagcggtttttggcgttttgttttacgtttaggtagaagcgtttgttttggatgtttattcgtttggaggttagtttttgcgtttcgtgttgtagtttttttggggtttcgtcgtcgtcgtcgttattgtcgtcgtcgttttcgtcgttattatcgttttcgtcggagtttgagttcgagtcggggtgttttagggagtcgttcgaatttagcgtcgtattattttgttcgttgtcgttgtttcggttcgttatgatgttgcgtttcgttgtcgcgtcgtcgtcgtttgtcgtttcgttcgtcgttttagtcgttttagtcgtcgttgtttttttttttcggtttcgtttgttgtcgtcgtaatttttatagttagttagttattttcgcgagatttgcgggagagacgagatagacgagattcggtaatagggtattgattttttagtatagtagtagggcgttttattgtacgcgtttattcgttcgtcggtacgtgatttgcgtttttttttcgttgttagtttttcgttcgttcgttcgttaggcggcgtttatttatcggtttttattttataattttggttgggtggggg

SEQ ID NO: 31850 - DNA, 1087 bp, Artificial Sequence
  chemically treated genomic DNA (Homo sapiens) CpG-island No: 31850
cccccacccaaccaaaattataaaataaaaaccgataaataaacgccgcctaacgaacgaacgaacgaaaaactaacaacgaaaaaaaaacgcaaatcacgtaccgacgaacgaataaacgcgtacaataaaacgccctactactatactaaaaaatcaataccctattaccgaatctcgtctatctcgtctctcccgcaaatctcgcgaaaataactaactaactataaaaattacgacgacaacaaacgaaaccgaaaaaaaaaaacaacgacgactaaaacgactaaaacgacgaacgaaacgacaaacgacgacgacgcgacaacgaaacgcaacatcataacgaaccgaaacaacgacaacgaacaaaataatacgacgctaaattcgaacgactccctaaaacaccccgactcgaactcaaactccgacgaaaacgataataacgacgaaaacgacgacgacaataacgacgacgacgacgaaaccccaaaaaaactacaacacgaaacgcaaaaactaacctccaaacgaataaacatccaaaacaaacgcttctacctaaacgtaaaacaaaacgccaaaaaccgcttcctaaaaatcgccgaaataaacgcgaacgacaacaaaaaccgccttactctctccatatcaataaccgtaaaattccgcgactacctaaacgacttcatcgaacactacgcgcaactaaaccccaaccaaccgccgaacctaacccaaacgcaaaacgaaccgcgccgaacgctcaaaaacgaattcctaatacgcgaaaaccgcaaatactacataaatctcaaaaaaaaccaacgcgaccgcttcctacgcatccgccaaacgatcaaccgaaaacctaacctaaactccacgcaaaaccaaaccattacgctacccgcgcaaaaactcatcgaattccgtaacgctctaaccaaactcatcgacgactacgaaataaaaaaaaaaccgaccgaactacccgaaaacacctccttaactataaacaacaaacgcttcttcttcgatataaactccaacaaatacgacgtatttatacgaataaacgaaa

SEQ ID NO: 31851 - DNA, 1087 bp, Artificial Sequence
  chemically treated genomic DNA (Homo sapiens) CpG-island No: 31851
tttttatttagttagggttgtagggtgagggtcggtgggtgggcgtcgtttggcgggcgggcggacggggggttggtagcggggagggggcgtaggttacgtgtcggcgggcgggtgggcgcgtatagtagggcgttttgttattgtattggggagttagtgttttgttatcgggtttcgtttgtttcgtttttttcgtagatttcgcgagagtggttgattggttgtgggggttgcggcggtagtaggcggagtcggggagggaaagtagcggcggttgaggcgattgaggcggcgggcggagcggtaggcggcggcggcgcggtagcggagcgtagtattatggcggatcgagatagcggtagcgagtagggtggtgcggcgttgggttcgggcggttttttggggtatttcggttcgggtttaggtttcggcgggggcggtggtggcggcgggggcggcggcggtagtggcggcggcggcggcggggttttaggggggttgtagtacgagacgtaggagttggtttttaagcgggtggatatttagaataagcgtttttatttggacgtgaagtagaacgttaagggtcgttttttgaagatcgtcgaggtgggcgcgggcggtaataagagtcgttttattttttttatgttagtggtcgtggagtttcgcgattatttgggcgattttatcgagtattacgcgtagttgggttttagttagtcgtcggatttggtttaggcgtaggacgagtcgcgtcgggcgtttaaaagcgagtttttggtgcgcgagaatcgtaagtattatatggattttaaggagaattagcgcggtcgttttttgcgtattcgttagacggttaatcgggggtttggtttgggttttacgtagggttagattattgcgttgttcgcgtaggggtttatcgagtttcgtgacgttttggttaagtttatcgacgattacggagtggaggaggagtcggtcgagttgttcgagggtatttttttgattgtggataataagcgtttttttttcgatgtgggttttaataagtacggcgtgtttatgcgagtgagcgagg

SEQ ID NO: 31852 - DNA, 1087 bp, Artificial Sequence
  chemically treated genomic DNA (Homo sapiens) CpG-island No: 31852
cctcgctcactcgcataaacacgccgtacttattaaaacccacatcgaaaaaaaaacgcttattatccacaatcaaaaaaataccctcgaacaactcgaccgactcctcctccactccgtaatcgtcgataaacttaaccaaaacgtcacgaaactcgataaacccctacgcgaacaacgcaataatctaaccctacgtaaaacccaaaccaaacccccgattaaccgtctaacgaatacgcaaaaaacgaccgcgctaattctccttaaaatccatataatacttacgattctcgcgcaccaaaaactcgcttttaaacgcccgacgcgactcgtcctacgcctaaaccaaatccgacgactaactaaaacccaactacgcgtaatactcgataaaatcgcccaaataatcgcgaaactccacgaccactaacataaaaaaaataaaacgactcttattaccgcccgcgcccacctcgacgatcttcaaaaaacgacccttaacgttctacttcacgtccaaataaaaacgcttattctaaatatccacccgcttaaaaaccaactcctacgtctcgtactacaacccccctaaaaccccgccgccgccgccgccactaccgccgccgcccccgccgccaccaccgcccccgccgaaacctaaacccgaaccgaaataccccaaaaaaccgcccgaacccaacgccgcaccaccctactcgctaccgctatctcgatccgccataatactacgctccgctaccgcgccgccgccgcctaccgctccgcccgccgcctcaatcgcctcaaccgccgctactttccctccccgactccgcctactaccgccgcaacccccacaaccaatcaaccactctcgcgaaatctacgaaaaaaacgaaacaaacgaaacccgataacaaaacactaactccccaatacaataacaaaacgccctactatacgcgcccacccgcccgccgacacgtaacctacgccccctccccgctaccaaccccccgtccgcccgcccgccaaacgacgcccacccaccgaccctcaccctacaaccctaactaaataaaaa

SEQ ID NO: 31853 - DNA, 1029 bp, Artificial Sequence
  chemically treated genomic DNA (Homo sapiens) CpG-island No: 31853
ttgtgttacgtggaggcggtaagcgtagaaggatttcgtacgttcggcggtaattgaagattacggttagttttagattttgatttttgtaatttatgagcgttattttcgtatcgtttttcgtatttgattcgtttttgatagttgtagaggtgtaaacgggtgacggaaagagttcgattttttcggtacgcgagacggtttcggcggggggtgtttcgggggcgtagtttcgttcgggaagtggttgtcgatagtagcgaggagcgttaaggttagggttttcgttttttcggttcgtttcgttcgttcgttcgtttcgtttcgtcgtatttacgcgagtgttttagttcgcgcgtcgttttggttttattttttgtgtggtggtcgaagttgttttatttgtttttgggcgtcggcggttttttaagtcgcggttttttcgttttcggttcgggttgcgcgggcggtaaaggcggcggcggtttcgcgtttttatttttggggtttttgttaacgtcgaagagttacgatatgttcgtatcgtcgtcgtcgttatcgtcgtcgggatttttattcgagtttgattcggtcgcggttgggagtagttttacgcgtcgtagtcggtggttaggattattgcgtaggcgaaatatatatttttttttttcggcgacggaaatgcgtaagggatacgcgcgtagtttttggattggtcgcgaggtagtgacgttatagcgacggcgtcgtaattgaggagcgtgtttcggggcggcgggaatcggggtgagcgggcggagggcggggggcgtggtgaagcgtttgggtatcggagtcgtatcgggataaaatttcggagggagtattcgaattcggcgtaacgttagtttcggttcgtagtcgcgtcggtattatttcggagtttacggtttacgcgttcgcggcggtttcgattttttttttgataggaatggttgattttatagaattatatggagtgattcgttttattggattggaaattatttt

SEQ ID NO: 31854 - DNA, 1029 bp, Artificial Sequence
  chemically treated genomic DNA (Homo sapiens) CpG-island No: 31854
aaaataatttccaatccaataaaacgaatcactccatataattctataaaatcaaccattcctatcaaaaaaaaaatcgaaaccgccgcgaacgcgtaaaccgtaaactccgaaataataccgacgcgactacgaaccgaaactaacgttacgccgaattcgaatactccctccgaaattttatcccgatacgactccgatacccaaacgcttcaccacgccccccgccctccgcccgctcaccccgattcccgccgccccgaaacacgctcctcaattacgacgccgtcgctataacgtcactacctcgcgaccaatccaaaaactacgcgcgtatcccttacgcatttccgtcgccgaaaaaaaaaaatatatatttcgcctacgcaataatcctaaccaccgactacgacgcgtaaaactactcccaaccgcgaccgaatcaaactcgaataaaaatcccgacgacgataacgacgacgacgatacgaacatatcgtaactcttcgacgttaacaaaaaccccaaaaataaaaacgcgaaaccgccgccgcctttaccgcccgcgcaacccgaaccgaaaacgaaaaaaccgcgacttaaaaaaccgccgacgcccaaaaacaaataaaacaacttcgaccaccacacaaaaaataaaaccaaaacgacgcgcgaactaaaacactcgcgtaaatacgacgaaacgaaacgaacgaacgaacgaaacgaaccgaaaaaacgaaaaccctaaccttaacgctcctcgctactatcgacaaccacttcccgaacgaaactacgcccccgaaacaccccccgccgaaaccgtctcgcgtaccgaaaaaatcgaactctttccgtcacccgtttacacctctacaactatcaaaaacgaatcaaatacgaaaaacgatacgaaaataacgctcataaattacaaaaatcaaaatctaaaactaaccgtaatcttcaattaccgccgaacgtacgaaatccttctacgcttaccgcctccacgtaacacaa

SEQ ID NO: 31855 - DNA, 1029 bp, Artificial Sequence
  chemically treated genomic DNA (Homo sapiens) CpG-island No: 31855
aaaatagtttttaatttagtgggacgagttattttatataattttgtgaagttaattatttttattaaggagagagtcggggtcgtcgcgagcgcgtgaatcgtgggtttcggggtggtgtcgacgcggttgcgggtcgggattgacgttgcgtcgggttcgagtatttttttcggagttttgtttcggtgcggtttcggtatttagacgttttattacgtttttcgtttttcgttcgtttatttcggttttcgtcgtttcggagtacgttttttaattgcggcgtcgtcgttatggcgttattgtttcgcggttaatttaagggttgcgcgcgtgttttttacgtattttcgtcgtcgggaggaaggggtgtgtgtttcgtttgcgtagtggttttggttatcggttgcggcgcgtggagttgtttttagtcgcgatcgagttagattcgggtgggggtttcggcggcggtagcggcggcggcggtgcgagtatgtcgtggtttttcggcgttaataagggttttaagggtgaaggcgcggggtcgtcgtcgtttttgtcgttcgcgtagttcgggtcgagggcggggggatcgcggtttgggagatcgtcggcgtttaaggataaatggagtaatttcgattattatataaaaaataggattaaggcggcgcgcgagttggagtattcgcgtgagtgcggcggggcggggcgggcgggcgggcgggacgggtcggggaagcgggagttttggttttggcgtttttcgttgttgtcggtagttatttttcgggcgagattgcgttttcggagtatttttcgtcggagtcgtttcgcgtgtcgggaggatcggatttttttcgttattcgtttgtatttttgtagttgttaggagcgggttaggtgcgaaaagcggtgcggaggtggcgtttataggttataggggttagggtttggggttggtcgtggtttttagttatcgtcgagcgtgcgggatttttttgcgtttgtcgtttttacgtggtatag

SEQ ID NO: 31856 - DNA, 1029 bp, Artificial Sequence
  chemically treated genomic DNA (Homo sapiens) CpG-island No: 31856
ctataccacgtaaaaacgacaaacgcaaaaaaatcccgcacgctcgacgataactaaaaaccacgaccaaccccaaaccctaacccctataacctataaacgccacctccgcaccgcttttcgcacctaacccgctcctaacaactacaaaaatacaaacgaataacgaaaaaaatccgatcctcccgacacgcgaaacgactccgacgaaaaatactccgaaaacgcaatctcgcccgaaaaataactaccgacaacaacgaaaaacgccaaaaccaaaactcccgcttccccgacccgtcccgcccgcccgcccgccccgccccgccgcactcacgcgaatactccaactcgcgcgccgccttaatcctattttttatataataatcgaaattactccatttatccttaaacgccgacgatctcccaaaccgcgatccccccgccctcgacccgaactacgcgaacgacaaaaacgacgacgaccccgcgccttcacccttaaaacccttattaacgccgaaaaaccacgacatactcgcaccgccgccgccgctaccgccgccgaaacccccacccgaatctaactcgatcgcgactaaaaacaactccacgcgccgcaaccgataaccaaaaccactacgcaaacgaaacacacaccccttcctcccgacgacgaaaatacgtaaaaaacacgcgcgcaacccttaaattaaccgcgaaacaataacgccataacgacgacgccgcaattaaaaaacgtactccgaaacgacgaaaaccgaaataaacgaacgaaaaacgaaaaacgtaataaaacgtctaaataccgaaaccgcaccgaaacaaaactccgaaaaaaatactcgaacccgacgcaacgtcaatcccgacccgcaaccgcgtcgacaccaccccgaaacccacgattcacgcgctcgcgacgaccccgactctctccttaataaaaataattaacttcacaaaattatataaaataactcgtcccactaaattaaaaactatttt

SEQ ID NO: 31857 - DNA, 511 bp, Artificial Sequence
  chemically treated genomic DNA (Homo sapiens) CpG-island No: 31857
tcgcgggagttgtcgattttgtagtattagtcgtcgtcgtcgtcgtcgttattttgtgtcgtcgattttttttcggtttttttttttagggcggtttttcgcgaagtttacggtcgttatcgtttcgtttcgtcgcgtgttattggttcggttcgcgattaggcgacgtcgtttagtcgtaattggttatataatttgttcgttagtaacgcgtttaacgtcgacgtcggaatttggcgcgggtggggcgggttcgttatttaggggatttcgcggtgtcggtcgattcggaagtatgtttgtttttagcggagcgcgggtgtcgtgttgagagcgtttgtttgtgcgtttcgagcggcgtgggatttttttaagatgtttacgttcgtatagagatttcggatcgcggaattcgcgtttcgaaaggtttgtgggttaaggggggttatttcggtgggatttggggcgggacgatttttattgttgaattttgggcgcggggtagggttag

SEQ ID NO: 31858 - DNA, 511 bp, Artificial Sequence
  chemically treated genomic DNA (Homo sapiens) CpG-island No: 31858
ctaaccctaccccgcgcccaaaattcaacaataaaaatcgtcccgccccaaatcccaccgaaataaccccccttaacccacaaacctttcgaaacgcgaattccgcgatccgaaatctctatacgaacgtaaacatcttaaaaaaatcccacgccgctcgaaacgcacaaacaaacgctctcaacacgacacccgcgctccgctaaaaacaaacatacttccgaatcgaccgacaccgcgaaatcccctaaataacgaacccgccccacccgcgccaaattccgacgtcgacgttaaacgcgttactaacgaacaaattatataaccaattacgactaaacgacgtcgcctaatcgcgaaccgaaccaataacacgcgacgaaacgaaacgataacgaccgtaaacttcgcgaaaaaccgccctaaaaaaaaaaaccgaaaaaaaatcgacgacacaaaataacgacgacgacgacgacgactaatactacaaaatcgacaactcccgcga

SEQ ID NO: 31859 - DNA, 511 bp, Artificial Sequence
  chemically treated genomic DNA (Homo sapiens) CpG-island No: 31859
ttgattttgtttcgcgtttagggtttagtagtgggggtcgtttcgttttagattttatcgagatggttttttttgatttataggtttttcgagacgcgagtttcgcgattcggggtttttgtgcgaacgtgggtattttggaagagttttacgtcgttcggggcgtataggtaggcgtttttagtacggtattcgcgtttcgttagggatagatatgttttcgggtcggtcggtatcgcggagttttttgggtaacgagttcgttttattcgcgttaggtttcggcgtcggcgttaggcgcgttgttgacgggtaggttatgtagttaattgcggttaggcggcgtcgtttggtcgcgggtcgaattaatggtacgcgacggggcggggcggtggcggtcgtggatttcgcgaggagtcgttttgagggaagaagtcgaaggggagtcggcggtataaaatggcggcggcggcggcggcggttggtgttgtagggtcggtagttttcgcgg

SEQ ID NO: 31860 - DNA, 511 bp, Artificial Sequence
  chemically treated genomic DNA (Homo sapiens) CpG-island No: 31860
ccgcgaaaactaccgaccctacaacaccaaccgccgccgccgccgccgccattttataccgccgactccccttcgacttcttccctcaaaacgactcctcgcgaaatccacgaccgccaccgccccgccccgtcgcgtaccattaattcgacccgcgaccaaacgacgccgcctaaccgcaattaactacataacctacccgtcaacaacgcgcctaacgccgacgccgaaacctaacgcgaataaaacgaactcgttacccaaaaaactccgcgataccgaccgacccgaaaacatatctatccctaacgaaacgcgaataccgtactaaaaacgcctacctatacgccccgaacgacgtaaaactcttccaaaatacccacgttcgcacaaaaaccccgaatcgcgaaactcgcgtctcgaaaaacctataaatcaaaaaaaaccatctcgataaaatctaaaacgaaacgacccccactactaaaccctaaacgcgaaacaaaatcaa

SEQ ID NO: 31861 - DNA, 714 bp, Artificial Sequence
  chemically treated genomic DNA (Homo sapiens) CpG-island No: 31861
  unsure (189..)
aagtgttgggatagaaaacgagaaattagggttgttagcggggttcgcgtcggtcgttttttggttcgcgggatatttcgggcgtttagtgtttaggtcgggtaggcggtatttattttggcgtgttttagtattttttggattcgaaagtagcggtcggtgacgcgatttcgtagttagagttgcggnntgaggaagattatggcgtttgtaggtcggcgtttcgaatatttaataacgtacgcgtagcgtcgttgttattttgttcgggtcggaaatggtggttacgagcgttttcgggttagtttttgcgatattttcggggcgaaggtcgtttttcgttagttcgcgggtgtttagttgtgtttttgaattcgcggtggtggtgcgtgttggggagcggatgtggggtcgcggcggggattgaaaggagaacggggtcgtagcgttcgtggttattcgcggacgatggataaatagtagcgtacgcggatcgtttcggagtacggtttcggtcgtagttgtggtttcgagggtatcgtgagggtagcggattcgggtcggggtttcgcggtcggggagttcgggtgcggcgcgggcggggaggggtaggtcgtttttggggttacgaggatgtttaggaatcgaggtggagatggtcgtatcggtgtgaaagtgttcgttgtttttgaattttgtattttgtttatttat

SEQ ID NO: 31862 - DNA, 714 bp, Artificial Sequence
  chemically treated genomic DNA (Homo sapiens) CpG-island No: 31862
  unsure (525..)
ataaataaacaaaatacaaaattcaaaaacaacgaacactttcacaccgatacgaccatctccacctcgattcctaaacatcctcgtaaccccaaaaacgacctacccctccccgcccgcgccgcacccgaactccccgaccgcgaaaccccgacccgaatccgctaccctcacgataccctcgaaaccacaactacgaccgaaaccgtactccgaaacgatccgcgtacgctactatttatccatcgtccgcgaataaccacgaacgctacgaccccgttctcctttcaatccccgccgcgaccccacatccgctccccaacacgcaccaccaccgcgaattcaaaaacacaactaaacacccgcgaactaacgaaaaacgaccttcgccccgaaaatatcgcaaaaactaacccgaaaacgctcgtaaccaccatttccgacccgaacaaaataacaacgacgctacgcgtacgttattaaatattcgaaacgccgacctacaaacgccataatcttcctcannccgcaactctaactacgaaatcgcgtcaccgaccgctactttcgaatccaaaaaatactaaaacacgccaaaataaataccgcctacccgacctaaacactaaacgcccgaaatatcccgcgaaccaaaaaacgaccgacgcgaaccccgctaacaaccctaatttctcgttttctatcccaacactt

SEQ ID NO: 31863 - DNA, 714 bp, Artificial Sequence
  chemically treated genomic DNA (Homo sapiens) CpG-island No: 31863
  unsure (525..)
gtaagtaaataaagtgtaaggtttagaggtaacgggtatttttatatcgatgcgattatttttatttcggtttttgaatattttcgtggttttaggggcggtttgttttttttcgttcgcgtcgtattcgagtttttcggtcgcggggtttcgattcgggttcgttgtttttacggtgttttcggagttatagttgcggtcggggtcgtgtttcgggacggttcgcgtgcgttgttgtttatttatcgttcgcgaatagttacgggcgttgcggtttcgttttttttttagttttcgtcgcggttttatattcgttttttaatacgtattattatcgcgagtttaggagtataattgggtattcgcgggttgacgggagacgattttcgtttcggaagtatcgtaggggttgattcggaagcgttcgtgattattattttcgattcgggtaagatggtagcggcgttgcgcgtgcgttgttgagtgttcgggacgtcggtttgtaggcgttatggttttttttanntcgtagttttggttgcggaatcgcgttatcgatcgttattttcggatttaggaggtgttgaagtacgttagggtgagtgtcgtttgttcggtttgggtattgggcgttcggggtatttcgcgggttaaggggcggtcggcgcgggtttcgttgataattttggtttttcgttttttgttttagtattt

SEQ ID NO: 31864 - DNA, 714 bp, Artificial Sequence
  chemically treated genomic DNA (Homo sapiens) CpG-island No: 31864
  unsure (189..)
aaatactaaaacaaaaaacgaaaaaccaaaattatcaacgaaacccgcgccgaccgccccttaacccgcgaaataccccgaacgcccaatacccaaaccgaacaaacgacactcaccctaacgtacttcaacacctcctaaatccgaaaataacgatcgataacgcgattccgcaaccaaaactacganntaaaaaaaaccataacgcctacaaaccgacgtcccgaacactcaacaacgcacgcgcaacgccgctaccatcttacccgaatcgaaaataataatcacgaacgcttccgaatcaacccctacgatacttccgaaacgaaaatcgtctcccgtcaacccgcgaatacccaattatactcctaaactcgcgataataatacgtattaaaaaacgaatataaaaccgcgacgaaaactaaaaaaaaaacgaaaccgcaacgcccgtaactattcgcgaacgataaataaacaacaacgcacgcgaaccgtcccgaaacacgaccccgaccgcaactataactccgaaaacaccgtaaaaacaacgaacccgaatcgaaaccccgcgaccgaaaaactcgaatacgacgcgaacgaaaaaaaacaaaccgcccctaaaaccacgaaaatattcaaaaaccgaaataaaaataatcgcatcgatataaaaatacccgttacctctaaaccttacactttatttacttac

SEQ ID NO: 31865 - DNA, 651 bp, Artificial Sequence
  chemically treated genomic DNA (Homo sapiens) CpG-island No: 31865
acgagtataggaatgcggtatatatataaacggtatatgcgtatggtatacgcgaatggtatatgtacggtatacgtgtatgggatacgtacggtatacgtaaggaatatatgtatggtatgtaaacggtatatatgtatgttatacgtgtatagtatatatgtaaatggtatacgtgtacggtgtatacgaatggtatatgcgtatggtatatataaatggtatacgtacggtaagtgtatggtatacgcgtatggtatatataaaacggtatatgtaaatggtatatatacggtatatataatatatacggaaacggtatatatataaatgttatatatgtatggtacgtaagtaaacgacgtgtggtatacgcgtatcgtacgtaaatggtacgtgtatgatataaatggtatatgtaaatagtatatatatggtatacgtaaagcgtatggtacgtatatgcgtatagtatacgtttatagtatatacggtatatataaatggtatatatgtacgtggtatacgtgtacggttaatacgtagtatatacgtgtatggtatatatacgaaaatagtatacgtttacggttaatacgtatggtatatgtaattggtatttgtatattgtatagatggtatatatgtata

SEQ ID NO: 31866 - DNA, 651 bp, Artificial Sequence
  chemically treated genomic DNA (Homo sapiens) CpG-island No: 31866
tatacatatataccatctatacaatatacaaataccaattacatataccatacgtattaaccgtaaacgtatactattttcgtatatataccatacacgtatatactacgtattaaccgtacacgtataccacgtacatatataccatttatatataccgtatatactataaacgtatactatacgcatatacgtaccatacgctttacgtataccatatatatactatttacatataccatttatatcatacacgtaccatttacgtacgatacgcgtataccacacgtcgtttacttacgtaccatacatatataacatttatatatataccgtttccgtatatattatatataccgtatatataccatttacatataccgttttatatataccatacgcgtataccatacacttaccgtacgtataccatttatatataccatacgcatataccattcgtatacaccgtacacgtataccatttacatatatactatacacgtataacatacatatataccgtttacataccatacatatattccttacgtataccgtacgtatcccatacacgtataccgtacatataccattcgcgtataccatacgcatataccgtttatatatataccgcattcctatactcgt

SEQ ID NO: 31867 - DNA, 651 bp, Artificial Sequence
  chemically treated genomic DNA (Homo sapiens) CpG-island No: 31867
tgtgtatgtgtgttatttgtgtaatgtgtaggtgttagttgtatgtgttatgcgtgttggtcgtgagcgtgtgttgttttcgtgtatgtgttatgtacgtatgtgttgcgtgttggtcgtgtacgtgtgttacgtgtatgtgtgttatttgtgtatgtcgtgtgtgttgtgagcgtatgttgtgcgtatgtgcgtgttatgcgttttgcgtgtattatgtgtgtgttgtttgtatgtgttatttgtgttatgtacgtgttatttgcgtgcgatgcgcgtgtgttatacgtcgtttgtttgcgtgttatgtatgtgtggtatttgtgtatgtgtcgttttcgtgtgtattgtgtgtgtcgtgtgtgtgttatttgtatgtgtcgttttgtgtgtgttatgcgcgtgtgttatgtatttgtcgtgcgtgtgttatttgtgtgtattatgcgtatgtgttattcgtgtgtatcgtatacgtgtgttatttgtatgtatgttgtgtacgtgtggtatgtatgtgtgtcgtttgtatgttatgtatgtgttttttgcgtgtgtcgtgcgtgttttatgtacgtgtgtcgtgtatgtgttattcgcgtgtattatgcgtatgtgtcgtttgtgtgtgtgtcgtatttttgtgttcgt

SEQ ID NO: 31868 - DNA, 651 bp, Artificial Sequence
  chemically treated genomic DNA (Homo sapiens) CpG-island No: 31868
acgaacacaaaaatacgacacacacacaaacgacacatacgcataatacacgcgaataacacatacacgacacacgtacataaaacacgcacgacacacgcaaaaaacacatacataacatacaaacgacacacatacataccacacgtacacaacatacatacaaataacacacgtatacgatacacacgaataacacatacgcataatacacacaaataacacacgcacgacaaatacataacacacgcgcataacacacacaaaacgacacatacaaataacacacacacgacacacacaatacacacgaaaacgacacatacacaaataccacacatacataacacgcaaacaaacgacgtataacacacgcgcatcgcacgcaaataacacgtacataacacaaataacacatacaaacaacacacacataatacacgcaaaacgcataacacgcacatacgcacaacatacgctcacaacacacacgacatacacaaataacacacatacacgtaacacacgtacacgaccaacacgcaacacatacgtacataacacatacacgaaaacaacacacgctcacgaccaacacgcataacacatacaactaacacctacacattacacaaataacacacatacaca

SEQ ID NO: 31869 - DNA, 660 bp, Artificial Sequence
  chemically treated genomic DNA (Homo sapiens) CpG-island No: 31869
  unsure (647)
tcgttttgcgcgggagtcgggttttcggtcgttcgttcgtttcggttttttaggacgacgttttttttcgttttcggtttttcggcgattttcggatcgtgcgggttgggttgggtaggtgcggtcgtcgagttcgagtcgtttatttaggtcgtagcgtcgtgcgggtttcgttttcgtttatcgtttcgttttcgtttcgttttcgttcgtcgttttgattggttggatgttgtttaattaggaggttcggcgtttcgattcgcgttttcggttagcgtatcggaagttgtagcgaggtggttgcgtttgcgtagtgtattatcgtaggcgggtttcgcgggttcgggagcgcggcggagacgatgtttgagattagagttacgtttttgggtgagtgggagtcgtcgggagggttgtggggtgggtttcgtatgcggtttcgggcgggttgggcgttcgttttttttcgtttttcgtggagttaggtgcgtcgcgggcgttttcggtttttttttcgcgcgggttttggtgggagtcgagaggcggtttagtttttgtattttgggtcggtagtgacgcgagaacgcgagtttcgaggtttaggcggtcgtgaggggacgtcgtagatggggtcgcggggtttntcgcgtagtttgt

SEQ ID NO: 31870 - DNA, 660 bp, Artificial Sequence
  chemically treated genomic DNA (Homo sapiens) CpG-island No: 31870
  unsure (14)
acaaactacgcganaaaccccgcgaccccatctacgacgtcccctcacgaccgcctaaacctcgaaactcgcgttctcgcgtcactaccgacccaaaatacaaaaactaaaccgcctctcgactcccaccaaaacccgcgcgaaaaaaaaaccgaaaacgcccgcgacgcacctaactccacgaaaaacgaaaaaaaacgaacgcccaacccgcccgaaaccgcatacgaaacccaccccacaaccctcccgacgactcccactcacccaaaaacgtaactctaatctcaaacatcgtctccgccgcgctcccgaacccgcgaaacccgcctacgataatacactacgcaaacgcaaccacctcgctacaacttccgatacgctaaccgaaaacgcgaatcgaaacgccgaacctcctaattaaacaacatccaaccaatcaaaacgacgaacgaaaacgaaacgaaaacgaaacgataaacgaaaacgaaacccgcacgacgctacgacctaaataaacgactcgaactcgacgaccgcacctacccaacccaacccgcacgatccgaaaatcgccgaaaaaccgaaaacgaaaaaaaacgtcgtcctaaaaaaccgaaacgaacgaacgaccgaaaacccgactcccgcgcaaaacga

SEQ ID NO: 31871 - DNA, 660 bp, Artificial Sequence
  chemically treated genomic DNA (Homo sapiens) CpG-island No: 31871
  unsure (14)
ataggttgcgcganaggtttcgcggttttatttgcgacgtttttttacggtcgtttgaatttcggggttcgcgttttcgcgttattgtcggtttagggtgtagggattaggtcgtttttcggtttttattagggttcgcgcggggaggagatcggagacgttcgcggcgtatttggttttacgagaaacgggagggagcgggcgtttagttcgttcggagtcgtatacggagtttattttatagttttttcggcggtttttatttatttaagggcgtgattttgattttaggtatcgttttcgtcgcgttttcggattcgcgaggttcgtttgcggtgatgtattgcgtaggcgtaattatttcgttgtaattttcggtgcgttagtcggaaacgcgggtcggggcgtcgggttttttgattgggtagtatttaattaattagggcggcgggcgagggcggggcgagggcggggcggtgggcggggacggggttcgtacggcgttacggtttaggtgagcggttcggattcggcggtcgtatttgtttaatttaattcgtacggttcggaagtcgtcgaggggtcgggagcgggaggggacgtcgttttagagggtcggagcgggcgggcggtcgaggattcggttttcgcgtaggacgg

SEQ ID NO: 31872 - DNA, 660 bp, Artificial Sequence
  chemically treated genomic DNA (Homo sapiens) CpG-island No: 31872
  unsure (647)
ccgtcctacgcgaaaaccgaatcctcgaccgcccgcccgctccgaccctctaaaacgacgtcccctcccgctcccgacccctcgacgacttccgaaccgtacgaattaaattaaacaaatacgaccgccgaatccgaaccgctcacctaaaccgtaacgccgtacgaaccccgtccccgcccaccgccccgccctcgccccgccctcgcccgccgccctaattaattaaatactacccaatcaaaaaacccgacgccccgacccgcgtttccgactaacgcaccgaaaattacaacgaaataattacgcctacgcaatacatcaccgcaaacgaacctcgcgaatccgaaaacgcgacgaaaacgatacctaaaatcaaaatcacgcccttaaataaataaaaaccgccgaaaaaactataaaataaactccgtatacgactccgaacgaactaaacgcccgctccctcccgtttctcgtaaaaccaaatacgccgcgaacgtctccgatctcctccccgcgcgaaccctaataaaaaccgaaaaacgacctaatccctacaccctaaaccgacaataacgcgaaaacgcgaaccccgaaattcaaacgaccgtaaaaaaacgtcgcaaataaaaccgcgaaacctntcgcgcaacctat

SEQ ID NO: 31873 - DNA, 682 bp, Artificial Sequence
  chemically treated genomic DNA (Homo sapiens) CpG-island No: 31873
gagggagattggagtgtgtgtgtgtgcgtgtttgcgcgtgcgtgtttcggtcgtatttcggttggtgttgcgtgtttttgcgtgtcggggttcgttcgtgcgcgttttttcggggtttgtgcgcgtggtttttcgttcgcgtcggagggcgtgtgcgtggtttcggcgtgggtgtggtcgttcggggaggggtttttcgggggcggggtcggtttggttcgcgcggtgacgcgttttgtagtttcgagcgagcgagcgagcgagcgagttgtcgagcgcgtttcgtttttcgcgcgcgatgtttttttggacggcgttcggtttggttttgagtttgcggttggcgttggcggagcgcgcggagcgcggtgagtgcggcgggcggtcgggtcggggttggggtttttggtgatcgttttgcgcgttgttcgcgtaaggtcgtcgttgttttttgtttcggacgggcgggcgtgttgggaggttgcgggagtcgggcgggggcgcgggcggagcgttttgtttatttgaggttggcggtttaggtgttttaggcgatatcgttcgtgagcgtcggggaataggcgttttcggtcggtatttttgcgggatcgcgggtttggacgggaagagggagatgtttgttaagggggtatttttgttttagtttttttatttttgcgag

SEQ ID NO: 31874 - DNA, 682 bp, Artificial Sequence
  chemically treated genomic DNA (Homo sapiens) CpG-island No: 31874
ctcgcaaaaataaaaaaactaaaacaaaaatacccccttaacaaacatctccctcttcccgtccaaacccgcgatcccgcaaaaataccgaccgaaaacgcctattccccgacgctcacgaacgatatcgcctaaaacacctaaaccgccaacctcaaataaacaaaacgctccgcccgcgcccccgcccgactcccgcaacctcccaacacgcccgcccgtccgaaacaaaaaacaacgacgaccttacgcgaacaacgcgcaaaacgatcaccaaaaaccccaaccccgacccgaccgcccgccgcactcaccgcgctccgcgcgctccgccaacgccaaccgcaaactcaaaaccaaaccgaacgccgtccaaaaaaacatcgcgcgcgaaaaacgaaacgcgctcgacaactcgctcgctcgctcgctcgctcgaaactacaaaacgcgtcaccgcgcgaaccaaaccgaccccgcccccgaaaaacccctccccgaacgaccacacccacgccgaaaccacgcacacgccctccgacgcgaacgaaaaaccacgcgcacaaaccccgaaaaaacgcgcacgaacgaaccccgacacgcaaaaacacgcaacaccaaccgaaatacgaccgaaacacgcacgcgcaaacacgcacacacacacactccaatctccctc

SEQ ID NO: 31875 - DNA, 682 bp, Artificial Sequence
  chemically treated genomic DNA (Homo sapiens) CpG-island No: 31875
ttcgtaagggtagggaaattgaggtaggggtgtttttttgatagatattttttttttttcgtttaggttcgcgatttcgtagagatgtcggtcggggacgtttatttttcggcgtttacggacggtgtcgtttggagtatttgggtcgttagttttaggtgagtaggacgtttcgttcgcgttttcgttcggttttcgtagttttttagtacgttcgttcgttcggagtaggggatagcgacggttttgcgcgggtagcgcgtagagcggttattagaagttttagtttcggttcggtcgttcgtcgtatttatcgcgtttcgcgcgtttcgttagcgttagtcgtaagtttagggttaggtcgagcgtcgtttaggggagtatcgcgcgcgagggacggggcgcgttcggtaattcgttcgttcgttcgttcgttcggggttgtagggcgcgttatcgcgcggattaggtcggtttcgttttcgggaggttttttttcgagcggttatatttacgtcgaggttacgtatacgtttttcggcgcgagcggagggttacgcgtatagatttcggagaggcgcgtacgagcggatttcgatacgtagggatacgtagtattagtcgagatacgatcgaggtacgtacgcgtaggtacgtatatatatatattttagtttttttt

SEQ ID NO: 31876 - DNA, 682 bp, Artificial Sequence
  chemically treated genomic DNA (Homo sapiens) CpG-island No: 31876
aaaaaaaactaaaatatatatatatacgtacctacgcgtacgtacctcgatcgtatctcgactaatactacgtatccctacgtatcgaaatccgctcgtacgcgcctctccgaaatctatacgcgtaaccctccgctcgcgccgaaaaacgtatacgtaacctcgacgtaaatataaccgctcgaaaaaaaacctcccgaaaacgaaaccgacctaatccgcgcgataacgcgccctacaaccccgaacgaacgaacgaacgaacgaattaccgaacgcgccccgtccctcgcgcgcgatactcccctaaacgacgctcgacctaaccctaaacttacgactaacgctaacgaaacgcgcgaaacgcgataaatacgacgaacgaccgaaccgaaactaaaacttctaataaccgctctacgcgctacccgcgcaaaaccgtcgctatcccctactccgaacgaacgaacgtactaaaaaactacgaaaaccgaacgaaaacgcgaacgaaacgtcctactcacctaaaactaacgacccaaatactccaaacgacaccgtccgtaaacgccgaaaaataaacgtccccgaccgacatctctacgaaatcgcgaacctaaacgaaaaaaaaaaaatatctatcaaaaaaacacccctacctcaatttccctacccttacgaa

SEQ ID NO: 31877 - DNA, 610 bp, Artificial Sequence
  chemically treated genomic DNA (Homo sapiens) CpG-island No: 31877
cgtaggtcggatttcgttttatttggtcgtgttgcggggttacgcgtttttggtgcgttttttgttgtagcgaggggtttcggtggcgacggtggatcgggcggggcgtatcgcgttgtacgaggtcgtttggtacggatattcgcgggtggtcgagttgttgttgtagcgcggggtttcggcggcggttcgtttcgggacggttttacgtcgttgtattgggtcgttgttttgggttatacgttgttggtcgcgcgtttgttggaggtttcgggttcgggattcgcggtagcggaggcggaggacgcgcgcggttggacggcggcgtattgggcggcgcgggcgggcggttggcggtgttggagttgttggcggtcggcgtcgcgggtttggacggcgttttgttcgtggttgtcgttgcggggcgcggggcgcgttgcgtttttttttggcgcgcggggcgcgggtggacgttcgggatggcgcgggggttatagcgttgggtttggcggtcgttttaggtcgtttttaggtacgtttcgtttttcgttcggtagtgatgggagggggcgtagggttaggatttttagagacgtgttatcggggtagt

SEQ ID NO: 31878 - DNA, 610 bp, Artificial Sequence
  chemically treated genomic DNA (Homo sapiens) CpG-island No: 31878
actaccccgataacacgtctctaaaaatcctaaccctacgccccctcccatcactaccgaacgaaaaacgaaacgtacctaaaaacgacctaaaacgaccgccaaacccaacgctataacccccgcgccatcccgaacgtccacccgcgccccgcgcgccaaaaaaaaacgcaacgcgccccgcgccccgcaacgacaaccacgaacaaaacgccgtccaaacccgcgacgccgaccgccaacaactccaacaccgccaaccgcccgcccgcgccgcccaatacgccgccgtccaaccgcgcgcgtcctccgcctccgctaccgcgaatcccgaacccgaaacctccaacaaacgcgcgaccaacaacgtataacccaaaacaacgacccaatacaacgacgtaaaaccgtcccgaaacgaaccgccgccgaaaccccgcgctacaacaacaactcgaccacccgcgaatatccgtaccaaacgacctcgtacaacgcgatacgccccgcccgatccaccgtcgccaccgaaacccctcgctacaacaaaaaacgcaccaaaaacgcgtaaccccgcaacacgaccaaataaaacgaaatccgacctacg

SEQ ID NO: 31879 - DNA, 610 bp, Artificial Sequence
  chemically treated genomic DNA (Homo sapiens) CpG-island No: 31879
gttgtttcggtggtacgtttttggggattttggttttgcgtttttttttattattgtcgggcggagggcgggacgtatttgggagcggtttagggcggtcgttagatttagcgttgtggttttcgcgttatttcgggcgtttattcgcgtttcgcgcgttaggaggaagcgtagcgcgtttcgcgtttcgtagcggtagttacgagtagggcgtcgtttaggttcgcgacgtcggtcgttagtagttttagtatcgttagtcgttcgttcgcgtcgtttagtgcgtcgtcgtttagtcgcgcgcgtttttcgttttcgttgtcgcgggtttcgggttcggagtttttagtaggcgcgcggttagtagcgtgtggtttagggtagcggtttagtgtagcggcgtgaggtcgtttcggagcgagtcgtcgtcgaggtttcgcgttgtagtagtagttcggttattcgcgagtgttcgtgttaggcggtttcgtgtagcgcggtgcgtttcgttcggtttatcgtcgttatcggggtttttcgttgtagtaggagacgtattaggggcgcgtggtttcgtagtacggttaggtggagcggggttcggtttgcg

SEQ ID NO: 31880 - DNA, 610 bp, Artificial Sequence
  chemically treated genomic DNA (Homo sapiens) CpG-island No: 31880
cgcaaaccgaaccccgctccacctaaccgtactacgaaaccacgcgcccctaatacgtctcctactacaacgaaaaaccccgataacgacgataaaccgaacgaaacgcaccgcgctacacgaaaccgcctaacacgaacactcgcgaataaccgaactactactacaacgcgaaacctcgacgacgactcgctccgaaacgacctcacgccgctacactaaaccgctaccctaaaccacacgctactaaccgcgcgcctactaaaaactccgaacccgaaacccgcgacaacgaaaacgaaaaacgcgcgcgactaaacgacgacgcactaaacgacgcgaacgaacgactaacgatactaaaactactaacgaccgacgtcgcgaacctaaacgacgccctactcgtaactaccgctacgaaacgcgaaacgcgctacgcttcctcctaacgcgcgaaacgcgaataaacgcccgaaataacgcgaaaaccacaacgctaaatctaacgaccgccctaaaccgctcccaaatacgtcccgccctccgcccgacaataataaaaaaaaacgcaaaaccaaaatccccaaaaacgtaccaccgaaacaac

SEQ ID NO: 31881 - DNA, 561 bp, Artificial Sequence
  chemically treated genomic DNA (Homo sapiens) CpG-island No: 31881
gacggggcgcgtaagggagttgagtttgggtggatcgcgttagggcgcggggagttcgaggcgtagcggttgtagtttcggttttagagttcgcggcgtttaagtggttcgatgcgttgggagggaggcggcgggaggagggaggggagtcgaggtggaggggggaggggggaggagggagcggcgagttcggttcgggttttgtcggtagtttcgggtagcgtttatagtttttgtcgggcggggcgcggcggcggcggtagaggcgttgagtttgagcggggatgtagaggcggcggtagtagaggcggtattggcggtaagagtagacgttcgagtcgagcgagaagagcgtagagttttattttttgaagtcgggtttcgcgttttagttttgtttagttcggtttagtttatgcgcgtcgtttgttgagttcgggcgtcgtacgttgagttattcgttcgcgagtcgcgtttagttcgggggtgattagttgttttttgttgttttttaatttgggttgcggggaggtggaggaggggtaggtgttgtaggttttt

SEQ ID NO: 31882 - DNA, 561 bp, Artificial Sequence
  chemically treated genomic DNA (Homo sapiens) CpG-island No: 31882
aaaaacctacaacacctacccctcctccacctccccgcaacccaaattaaaaaacaacaaaaaacaactaatcacccccgaactaaacgcgactcgcgaacgaataactcaacgtacgacgcccgaactcaacaaacgacgcgcataaactaaaccgaactaaacaaaactaaaacgcgaaacccgacttcaaaaaataaaactctacgctcttctcgctcgactcgaacgtctactcttaccgccaataccgcctctactaccgccgcctctacatccccgctcaaactcaacgcctctaccgccgccgccgcgccccgcccgacaaaaactataaacgctacccgaaactaccgacaaaacccgaaccgaactcgccgctccctcctcccccctcccccctccacctcgactcccctccctcctcccgccgcctccctcccaacgcatcgaaccacttaaacgccgcgaactctaaaaccgaaactacaaccgctacgcctcgaactccccgcgccctaacgcgatccacccaaactcaactcccttacgcgccccgtc

SEQ ID NO: 31883 - DNA, 561 bp, Artificial Sequence
  chemically treated genomic DNA (Homo sapiens) CpG-island No: 31883
gggagtttgtagtatttgttttttttttattttttcgtaatttaaattaaaaaataataaaaagtaattaattattttcgagttgagcgcggttcgcgggcggatggtttagcgtgcggcgttcggatttagtaggcggcgcgtatggattgggtcgggttgggtagggttgggacgcggggttcggttttagaagataaggttttgcgtttttttcgttcggttcgggcgtttgtttttgtcgttagtgtcgtttttgttgtcgtcgtttttatattttcgtttaggtttagcgtttttgtcgtcgtcgtcgcgtttcgttcggtaggagttatgaacgttgttcggggttgtcggtaaaattcggatcggattcgtcgtttttttttttttttttttttttttatttcggttttttttttttttttcgtcgttttttttttagcgtatcgggttatttggacgtcgcgggttttgaggtcggagttgtagtcgttgcgtttcgagtttttcgcgttttgacgcggtttatttaggtttagtttttttgcgcgtttcgtt

SEQ ID NO: 31884 - DNA, 561 bp, Artificial Sequence
  chemically treated genomic DNA (Homo sapiens) CpG-island No: 31884
aacgaaacgcgcaaaaaaactaaacctaaataaaccgcgtcaaaacgcgaaaaactcgaaacgcaacgactacaactccgacctcaaaacccgcgacgtccaaataacccgatacgctaaaaaaaaaacgacgaaaaaaaaaaaaaaaaccgaaataaaaaaaaaaaaaaaaaaaaaaaaacgacgaatccgatccgaattttaccgacaaccccgaacaacgttcataactcctaccgaacgaaacgcgacgacgacgacaaaaacgctaaacctaaacgaaaatataaaaacgacgacaacaaaaacgacactaacgacaaaaacaaacgcccgaaccgaacgaaaaaaacgcaaaaccttatcttctaaaaccgaaccccgcgtcccaaccctacccaacccgacccaatccatacgcgccgcctactaaatccgaacgccgcacgctaaaccatccgcccgcgaaccgcgctcaactcgaaaataattaattactttttattattttttaatttaaattacgaaaaaataaaaaaaaaacaaatactacaaactccc

SEQ ID NO: 31885 - DNA, 766 bp, Artificial Sequence
  chemically treated genomic DNA (Homo sapiens) CpG-island No: 31885
  unsure (134)
ttttcgattttcgtaggtgatttgtatttattttcgattttagatagggtttttttgttcggcgtttttagtttttttaggttcggcggttgcgtgggggttaataaggtttagttatcgacgttttttggttntaaggaatttcgaggtaggatttgaatttatttcgtggaaataaagattataaatttttcgggagtcgggggttgggcggaggtacggtttttttcgaggataggtagcggtcgaggtcgggtagttttcgtttcgtttcgttttttttcgtttcgggtcgtcgtcggagtttcgggcgcgcggattttttcgtcggtttcgtatttatttggtttcgcggtgttgttttcggcgcggcgggcgcggagtcgaacgtattgcgtttttttttttcggtagggcgtcgggcgtcggcgttttttttttgacgcgttacggcgttggcggttatttttcggagcgcgcgggaggtcgaggatagtcggggaaggcgtcggattttagtagagcggcgcgagcggcgggtcgggggtagttcgtgcggggaggggttgtaggttcgtttcgtttaggttttcgaggaaattcgcgtttttttttttttttcgaggattttcgcgaaaggtcgggttacggtgtatcgtttgttttcgttacgcgttgtgtaaagtttaagaggatatagtgggttttgtttggagttatagattttggtgtttttttttcgttcgttcgtagtggtcgttatttt

SEQ ID NO: 31886 - DNA, 766 bp, Artificial Sequence
  chemically treated genomic DNA (Homo sapiens) CpG-island No: 31886
  unsure (633)
aaaataacgaccactacgaacgaacgaaaaaaaaacaccaaaatctataactccaaacaaaacccactatatcctcttaaactttacacaacgcgtaacgaaaacaaacgatacaccgtaacccgacctttcgcgaaaatcctcgaaaaaaaaaaaaaaacgcgaatttcctcgaaaacctaaacgaaacgaacctacaacccctccccgcacgaactacccccgacccgccgctcgcgccgctctactaaaatccgacgccttccccgactatcctcgacctcccgcgcgctccgaaaaataaccgccaacgccgtaacgcgtcaaaaaaaaaacgccgacgcccgacgccctaccgaaaaaaaaaaacgcaatacgttcgactccgcgcccgccgcgccgaaaacaacaccgcgaaaccaaataaatacgaaaccgacgaaaaaatccgcgcgcccgaaactccgacgacgacccgaaacgaaaaaaaacgaaacgaaacgaaaactacccgacctcgaccgctacctatcctcgaaaaaaaccgtacctccgcccaacccccgactcccgaaaaatttataatctttatttccacgaaataaattcaaatcctacctcgaaattccttanaaccaaaaaacgtcgataactaaaccttattaacccccacgcaaccgccgaacctaaaaaaactaaaaacgccgaacaaaaaaaccctatctaaaatcgaaaataaatacaaatcacctacgaaaatcgaaaa

SEQ ID NO: 31887 - DNA, 766 bp, Artificial Sequence
  chemically treated genomic DNA (Homo sapiens) CpG-island No: 31887
  unsure (633)
agggtagcggttattgcgggcggacgagagggaaatattagagtttgtgattttagataggatttattgtgtttttttgaattttgtatagcgcgtgacgggggtagacggtgtatcgtggttcggtttttcgcgggggttttcggggaagagagaggagcgcgggttttttcggaggtttgagcgggacgagtttgtagttttttttcgtacgggttgttttcggttcgtcgttcgcgtcgttttgttgggattcggcgtttttttcggttgttttcggtttttcgcgcgtttcgggaggtagtcgttagcgtcgtgacgcgttaaggaggaaacgtcggcgttcggcgttttgtcggaaggaggaagcgtagtgcgttcggtttcgcgttcgtcgcgtcgggagtagtatcgcggggttaggtaggtgcggggtcggcgggagggttcgcgcgttcgggatttcgacggcggttcggggcgggaggagacggggcggggcgagggttgttcggtttcggtcgttgtttgttttcggaaaaagtcgtattttcgtttagttttcggttttcggagagtttgtggtttttgtttttacgaggtgaatttagattttgtttcgagattttttanaattaaggggcgtcggtggttggattttgttaatttttacgtagtcgtcgagtttggaggaattgggaacgtcgagtagggagattttatttgaggtcgaaagtgggtgtaggttatttgcgagggtcgggga

SEQ ID NO: 31888 - DNA, 766 bp, Artificial Sequence
  chemically treated genomic DNA (Homo sapiens) CpG-island No: 31888
  unsure (134)
tccccgaccctcgcaaataacctacacccactttcgacctcaaataaaatctccctactcgacgttcccaattcctccaaactcgacgactacgtaaaaattaacaaaatccaaccaccgacgccccttaattntaaaaaatctcgaaacaaaatctaaattcacctcgtaaaaacaaaaaccacaaactctccgaaaaccgaaaactaaacgaaaatacgactttttccgaaaacaaacaacgaccgaaaccgaacaaccctcgccccgccccgtctcctcccgccccgaaccgccgtcgaaatcccgaacgcgcgaaccctcccgccgaccccgcacctacctaaccccgcgatactactcccgacgcgacgaacgcgaaaccgaacgcactacgcttcctccttccgacaaaacgccgaacgccgacgtttcctccttaacgcgtcacgacgctaacgactacctcccgaaacgcgcgaaaaaccgaaaacaaccgaaaaaaacgccgaatcccaacaaaacgacgcgaacgacgaaccgaaaacaacccgtacgaaaaaaaactacaaactcgtcccgctcaaacctccgaaaaaacccgcgctcctctctcttccccgaaaacccccgcgaaaaaccgaaccacgatacaccgtctacccccgtcacgcgctatacaaaattcaaaaaaacacaataaatcctatctaaaatcacaaactctaatatttccctctcgtccgcccgcaataaccgctaccct

SEQ ID NO: 31889 - DNA, 576 bp, Artificial Sequence
  chemically treated genomic DNA (Homo sapiens) CpG-island No: 31889
ttgtcgtcgaggcgaggttgcggagacgtttttttggtgggtcgcgggattatttatttcgttagaaattcggttcgtttattttaagaattttggggtaattggatttttttatcgttcgttttcggattcgtttcggcgtcgttttcggatttatttttcggcgagcgtaggaattcgtttttttagtaggtttcgcgcggtgcgttttcggcgcgtttcgggttttatgatagttcggttcgtatgcgttatttacggttttattcgcggttttattttttggttttcggtttttttttcgattttcgcgagttttagttttagtttttagttttttagtttcgtttttagtcgcgcgcgttttttttttttcgttttcgttttttcgcgtgcggtttttatagttaatgaggtttagggtcgcgtgcgtagatttaaacggcggtttttgagggaggttgggcgcgagattcggcggtgcggataaaattttgtaggagattgcgagttttgtagaattgttagttgcgggggagagggtaggggtcgggcgtttgtgcggagtcgggttgg

SEQ ID NO: 31890 - DNA, 576 bp, Artificial Sequence
  chemically treated genomic DNA (Homo sapiens) CpG-island No: 31890
ccaacccgactccgcacaaacgcccgacccctaccctctcccccgcaactaacaattctacaaaactcgcaatctcctacaaaattttatccgcaccgccgaatctcgcgcccaacctccctcaaaaaccgccgtttaaatctacgcacgcgaccctaaacctcattaactataaaaaccgcacgcgaaaaaacgaaaacgaaaaaaaaaaaacgcgcgcgactaaaaacgaaactaaaaaactaaaaactaaaactaaaactcgcgaaaatcgaaaaaaaaaccgaaaaccaaaaaataaaaccgcgaataaaaccgtaaataacgcatacgaaccgaactatcataaaacccgaaacgcgccgaaaacgcaccgcgcgaaacctactaaaaaaacgaattcctacgctcgccgaaaaataaatccgaaaacgacgccgaaacgaatccgaaaacgaacgataaaaaaatccaattaccccaaaattcttaaaataaacgaaccgaatttctaacgaaataaataatcccgcgacccaccaaaaaaacgtctccgcaacctcgcctcgacgacaa

SEQ ID NO: 31891 - DNA, 576 bp, Artificial Sequence
  chemically treated genomic DNA (Homo sapiens) CpG-island No: 31891
ttagttcggtttcgtataggcgttcgatttttgttttttttttcgtagttagtagttttgtagggttcgtagttttttgtagggttttgttcgtatcgtcgaatttcgcgtttagttttttttaagagtcgtcgtttgaatttgcgtacgcggttttgaattttattggttgtgggggtcgtacgcgaagaagcgagggcggggaggggagagcgcgcgcggttgagggcggggttggggagttggaagttgggattggaattcgcgggagtcggggaaggagtcgggagttagggggtggggtcgcgggtggggtcgtaggtggcgtatgcgagtcgagttgttataggattcggaacgcgtcgagagcgtatcgcgcggggtttgttgggagagcgagtttttgcgttcgtcgaggagtgggttcggaagcggcgtcggagcgggttcggaagcgggcggtggagaagtttagttgttttaaaatttttagggtgagcgaatcgagtttttggcggggtgggtggtttcgcggtttattaagggaacgttttcgtagtttcgtttcggcgatag

SEQ ID NO: 31892 - DNA, 576 bp, Artificial Sequence
  chemically treated genomic DNA (Homo sapiens) CpG-island No: 31892
ctatcgccgaaacgaaactacgaaaacgttcccttaataaaccgcgaaaccacccaccccgccaaaaactcgattcgctcaccctaaaaattttaaaacaactaaacttctccaccgcccgcttccgaacccgctccgacgccgcttccgaacccactcctcgacgaacgcaaaaactcgctctcccaacaaaccccgcgcgatacgctctcgacgcgttccgaatcctataacaactcgactcgcatacgccacctacgaccccacccgcgaccccaccccctaactcccgactccttccccgactcccgcgaattccaatcccaacttccaactccccaaccccgccctcaaccgcgcgcgctctcccctccccgccctcgcttcttcgcgtacgacccccacaaccaataaaattcaaaaccgcgtacgcaaattcaaacgacgactcttaaaaaaaactaaacgcgaaattcgacgatacgaacaaaaccctacaaaaaactacgaaccctacaaaactactaactacgaaaaaaaaaacaaaaatcgaacgcctatacgaaaccgaactaa

SEQ ID NO: 31893 - DNA, 559 bp, Artificial Sequence
  chemically treated genomic DNA (Homo sapiens) CpG-island No: 31893
gggagaagtcggcggagggcgggatcgcgttttttgatatgttgggggtattttggtcgggcgggcggggttaagagcggtttgcgggcggcggttcggggtcgggtcgcggttcgtttcgttgttttttcgttttgttttgtcgaggacgtgcgtttcgtatcggttcgtttttagagggagcgagggaagcgtttagaggatcggggagaaggagtattcgtcggaggttggaggaggttgattcgcgttttcgcgttagtttgtttttatgcggtatttgaaggatggcgaagaggtcgcgtaggtgggggtatcgtttttcgtcgtacgtgtcggggtcgtttcggtttagatttttttttttatttcgttgttttttggtcgtatagaggtttttttggcgagggtagaggtttttgcgtgtcgttcgcgcggtcgtttggtttcgatgatcggagggtagttgcgacgtgtggagagttggggacgtagggtgtttgaggcgcgggacgtaagagatgcgttaggtttttcgcggggattttcgtagagtcga

SEQ ID NO: 31894 - DNA, 559 bp, Artificial Sequence
  chemically treated genomic DNA (Homo sapiens) CpG-island No: 31894
tcgactctacgaaaatccccgcgaaaaacctaacgcatctcttacgtcccgcgcctcaaacaccctacgtccccaactctccacacgtcgcaactaccctccgatcatcgaaaccaaacgaccgcgcgaacgacacgcaaaaacctctaccctcgccaaaaaaacctctatacgaccaaaaaacaacgaaataaaaaaaaaaatctaaaccgaaacgaccccgacacgtacgacgaaaaacgatacccccacctacgcgacctcttcgccatccttcaaataccgcataaaaacaaactaacgcgaaaacgcgaatcaacctcctccaacctccgacgaatactccttctccccgatcctctaaacgcttccctcgctccctctaaaaacgaaccgatacgaaacgcacgtcctcgacaaaacaaaacgaaaaaacaacgaaacgaaccgcgacccgaccccgaaccgccgcccgcaaaccgctcttaaccccgcccgcccgaccaaaatacccccaacatatcaaaaaacgcgatcccgccctccgccgacttctccc

SEQ ID NO: 31895 - DNA, 559 bp, Artificial Sequence
  chemically treated genomic DNA (Homo sapiens) CpG-island No: 31895
tcgattttacgaggattttcgcgagaaatttggcgtattttttacgtttcgcgttttaaatattttgcgtttttaattttttatacgtcgtagttgtttttcggttatcgaggttaagcggtcgcgcgagcgatacgtaaaaatttttgttttcgttagggaggtttttatgcggttagggggtagcgggataggaaagagaatttgagtcgagacggtttcgatacgtgcggcgaaaggcggtgtttttatttgcgcgattttttcgttattttttaagtatcgtataggagtaggttggcgcggggacgcgggttagttttttttagttttcggcgaatgtttttttttttcgattttttaggcgtttttttcgttttttttggaggcgggtcgatgcggaacgtacgttttcgatagggtaggacggagggatagcggggcggatcgcgattcgatttcgagtcgtcgttcgtaggtcgtttttagtttcgttcgttcggttaggatatttttaatatgttaggaggcgcgatttcgtttttcgtcggtttttttt

SEQ ID NO: 31896 - DNA, 559 bp, Artificial Sequence
  chemically treated genomic DNA (Homo sapiens) CpG-island No: 31896
aaaaaaaaccgacgaaaaacgaaatcgcgcctcctaacatattaaaaatatcctaaccgaacgaacgaaactaaaaacgacctacgaacgacgactcgaaatcgaatcgcgatccgccccgctatccctccgtcctaccctatcgaaaacgtacgttccgcatcgacccgcctccaaaaaaaacgaaaaaaacgcctaaaaaatcgaaaaaaaaaaacattcgccgaaaactaaaaaaaactaacccgcgtccccgcgccaacctactcctatacgatacttaaaaaataacgaaaaaatcgcgcaaataaaaacaccgcctttcgccgcacgtatcgaaaccgtctcgactcaaattctctttcctatcccgctaccccctaaccgcataaaaacctccctaacgaaaacaaaaatttttacgtatcgctcgcgcgaccgcttaacctcgataaccgaaaaacaactacgacgtataaaaaattaaaaacgcaaaatatttaaaacgcgaaacgtaaaaaatacgccaaatttctcgcgaaaatcctcgtaaaatcga

SEQ ID NO: 31897 - DNA, 871 bp, Artificial Sequence
  chemically treated genomic DNA (Homo sapiens) CpG-island No: 31897
tgcgggaggcgaggggagttaagagaaaggggttattttatacgcggttatttttattattcgtatgttcgttattatgtcgggatcgagtgtgtggtattcgtggtttttagtaggatcgagtttcgatcgcgatatagcgcgtttcgttcgtttcgggattttattttcggtagtttcgtttattttttttttagtcgtcgttgcgtgggttttttcgtattcgtttcggcgagttaggaggtcgtcgaaggacgattcgtcggataatcgttcgattttcgcgcggaaggttcggattcgggatttacggtttttgtgcggagacgggggcgggtttcggggcgtacggttttgttgatttttgtttttcgcggggtgcgtcgtgtatcggcggcgagcgtttaggggtttggggggcgtttatacgggttttagttttcgtttcgtcggcggtcgtatcgggagtttttcggtttttgttagttttttgtacgtcgttttaaatatatattcgttttgaataaataagggatgttcgttgtatagacgtagtttcgtgatagtttttagcggtttttattatcggattgtcgttttgagtttttgttttagtaagttgtcggagtcgtcgagtttgtcgttttttttttatgggtttagcgttttattttcgaaattgcgtgggggatggcgtagtttgtgtttttcgagtatcgttttcggtagtcggggattttttgtgttgttcggcgttcggcgcgggttgtaacgttttttttcgtggtttggggtagagtacgtaagatggcgttgttggattttttttttttgttttgggggttcggtttattattatttagttttttat

SEQ ID NO: 31898 - DNA, 871 bp, Artificial Sequence
  chemically treated genomic DNA (Homo sapiens) CpG-island No: 31898
ataaaaaactaaataataataaaccgaacccccaaaacaaaaaaaaaaaatccaacaacgccatcttacgtactctaccccaaaccacgaaaaaaaacgttacaacccgcgccgaacgccgaacaacacaaaaaatccccgactaccgaaaacgatactcgaaaaacacaaactacgccatcccccacgcaatttcgaaaataaaacgctaaacccataaaaaaaaaacgacaaactcgacgactccgacaacttactaaaacaaaaactcaaaacgacaatccgataataaaaaccgctaaaaactatcacgaaactacgtctatacaacgaacatcccttatttattcaaaacgaatatatatttaaaacgacgtacaaaaaactaacaaaaaccgaaaaactcccgatacgaccgccgacgaaacgaaaactaaaacccgtataaacgccccccaaacccctaaacgctcgccgccgatacacgacgcaccccgcgaaaaacaaaaatcaacaaaaccgtacgccccgaaacccgcccccgtctccgcacaaaaaccgtaaatcccgaatccgaaccttccgcgcgaaaatcgaacgattatccgacgaatcgtccttcgacgacctcctaactcgccgaaacgaatacgaaaaaacccacgcaacgacgactaaaaaaaaaataaacgaaactaccgaaaataaaatcccgaaacgaacgaaacgcgctatatcgcgatcgaaactcgatcctactaaaaaccacgaataccacacactcgatcccgacataataacgaacatacgaataataaaaataaccgcgtataaaataacccctttctcttaactcccctcgcctcccgca

SEQ ID NO: 31899 - DNA, 871 bp, Artificial Sequence
  chemically treated genomic DNA (Homo sapiens) CpG-island No: 31899
gtaaaggattgaatgatggtagatcgaatttttaaagtaaaagagaaaggtttaatagcgttattttgcgtgttttgttttaagttacggggagaaacgttgtagttcgcgtcgaacgtcgagtagtataaaggattttcgattgtcggggacggtgttcggagggtataggttacgttattttttacgtagtttcggagatggagcgttgggtttatggagggaaggcggtaggttcggcggtttcggtagtttgttggggtaggggtttaaggcggtagttcgatagtggaggtcgttgagaattgttacggagttgcgtttgtatagcgagtattttttatttatttagggcgagtgtgtatttggggcggcgtgtagggggttgataaagatcggagagttttcggtgcggtcgtcggcggagcgaagattggaattcgtatgagcgttttttaggtttttgagcgttcgtcgtcggtgtacggcgtatttcgcgggaggtagggattagtaaagtcgtgcgtttcgaggttcgttttcgttttcgtataaagatcgtgagtttcgggttcgagtttttcgcgcggggatcgggcggttgttcggcgggtcgtttttcgacggttttttggttcgtcggagcgggtgcggggaggtttacgtagcgacggttggaggaggggtgggcggggttgtcgggggtggggtttcggggcgggcggggcgcgttgtgtcgcggtcggagttcggttttgttggaggttacgggtgttatatattcggtttcgatatgatggcgagtatgcgagtggtgaaggtaatcgcgtataggatgattttttttttttggtttttttcgtttttcgta

SEQ ID NO: 31900 - DNA, 871 bp, Artificial Sequence
  chemically treated genomic DNA (Homo sapiens) CpG-island No: 31900
tacgaaaaacgaaaaaaaccaaaaaaaaaaaatcatcctatacgcgattaccttcaccactcgcatactcgccatcatatcgaaaccgaatatataacacccgtaacctccaacaaaaccgaactccgaccgcgacacaacgcgccccgcccgccccgaaaccccacccccgacaaccccgcccacccctcctccaaccgtcgctacgtaaacctccccgcacccgctccgacgaaccaaaaaaccgtcgaaaaacgacccgccgaacaaccgcccgatccccgcgcgaaaaactcgaacccgaaactcacgatctttatacgaaaacgaaaacgaacctcgaaacgcacgactttactaatccctacctcccgcgaaatacgccgtacaccgacgacgaacgctcaaaaacctaaaaaacgctcatacgaattccaatcttcgctccgccgacgaccgcaccgaaaactctccgatctttatcaaccccctacacgccgccccaaatacacactcgccctaaataaataaaaaatactcgctatacaaacgcaactccgtaacaattctcaacgacctccactatcgaactaccgccttaaacccctaccccaacaaactaccgaaaccgccgaacctaccgccttccctccataaacccaacgctccatctccgaaactacgtaaaaaataacgtaacctataccctccgaacaccgtccccgacaatcgaaaatcctttatactactcgacgttcgacgcgaactacaacgtttctccccgtaacttaaaacaaaacacgcaaaataacgctattaaacctttctcttttactttaaaaattcgatctaccatcattcaatcctttac

SEQ ID NO: 31901 - DNA, 1106 bp, Artificial Sequence
  chemically treated genomic DNA (Homo sapiens) CpG-island No: 31901
  unsure (6, 66, 97, 187, 337, 563, 730, 837, 910)
atttantcgcgttttaattatttttcgtttttttttatcgttcgttcgtataattttcgtttttantttttcgttatttagttatatttttttttanttagttacgtttaattagtcgtacgtttacgcgtatacgtttatttatatacgttcgtttatatacgttttatcgtcgcgcgtatcgttntattatatatcgtacgtatcgtacgttattatattattttattatattattatatttatcgttcgtatttcgtcgttatttttattatcgtttttacggttatttttttttacgttttcgcgcgtatatatttatcgtattcgttcgttntacgttatcgtttaattttatattcgtataatttcgcgtttttatatcgttcgttcgcgcgcgtacgtacgcgttcgcgtatttttcgtcgtttattttcgcgcgttcgttttagcgcgtatcgcgtattattttttttttttttttttatttacgttcgacgtatcgcgcgttatattacgtatcgtattttcgtttttatttttatttcgtttttcgcgttttntatcgtacgtacgtacgttttcgttacgtttaacgtcgcgtattttatcgtatcgcgtattatttcgttttttttacgttaagcgttcgtatatataattttatcgttttttttaatcgtttcgcgtttttacgttataattcgcgtttaaataattttttttttanttaataatttatatatattaaattacgtttttcgtacgtaattacgtcgttatcgtattatcgtttttatttttttagatttttcgcgtaataacgtattattttantttattttaatagtaacgttcggtatattttaatcgttttaatagcgcgcgtaaataattcgtttttaattancgcgtcgtatcgcgtattattatcgtttaaatttatttattttattatttaacgtatttttttttttatttatcgtcgtcgttaaagttttattatcgttaatttttaaagcgacgttttcgatttttatagtatttacggtcgaaattcggtttaattttttcgattaacgtaatttaataaattttaagtaatt

SEQ ID NO: 31902 - DNA, 1106 bp, Artificial Sequence
  chemically treated genomic DNA (Homo sapiens) CpG-island No: 31902
  unsure (197, 270, 377, 544, 770, 920, 1010, 1041, 1101)
aattacttaaaatttattaaattacgttaatcgaaaaaattaaaccgaatttcgaccgtaaatactataaaaatcgaaaacgtcgctttaaaaattaacgataataaaactttaacgacgacgataaataaaaaaaaaaatacgttaaataataaaataaataaatttaaacgataataatacgcgatacgacgcgntaattaaaaacgaattatttacgcgcgctattaaaacgattaaaatataccgaacgttactattaaaataaantaaaataatacgttattacgcgaaaaatctaaaaaaataaaaacgataatacgataacgacgtaattacgtacgaaaaacgtaatttaatatatataaattattaantaaaaaaaaaattatttaaacgcgaattataacgtaaaaacgcgaaacgattaaaaaaaacgataaaattatatatacgaacgcttaacgtaaaaaaaacgaaataatacgcgatacgataaaatacgcgacgttaaacgtaacgaaaacgtacgtacgtacgatanaaaacgcgaaaaacgaaataaaaataaaaacgaaaatacgatacgtaatataacgcgcgatacgtcgaacgtaaataaaaaaaaaaaaaaaaaataatacgcgatacgcgctaaaacgaacgcgcgaaaataaacgacgaaaaatacgcgaacgcgtacgtacgcgcgcgaacgaacgatataaaaacgcgaaattatacgaatataaaattaaacgataacgtanaacgaacgaatacgataaatatatacgcgcgaaaacgtaaaaaaaaataaccgtaaaaacgataataaaaataacgacgaaatacgaacgataaatataataatataataaaataatataataacgtacgatacgtacgatatataatanaacgatacgcgcgacgataaaacgtatataaacgaacgtatataaataaacgtatacgcgtaaacgtacgactaattaaacgtaactaantaaaaaaaaatataactaaataacgaaaaantaaaaacgaaaattatacgaacgaacgataaaaaaaaacgaaaaataattaaaacgcgantaaat

SEQ ID NO: 31903 - DNA, 1106 bp, Artificial Sequence
  chemically treated genomic DNA (Homo sapiens) CpG-island No: 31903
  unsure (197, 270, 377, 544, 770, 920, 1010, 1041, 1101)
ggttgtttggggtttgttgagttgcgttggtcggggaggttgggtcgggtttcggtcgtgaatgttgtgaaagtcgggggcgtcgttttgagggttggcgatggtagggttttgacggcgacggtggatggggggaaaaatacgttggatggtggggtggatgggtttgagcggtgatggtgcgcgatgcggcgcgntgattaggagcgggttgtttgcgcgcgttgttggagcggttgggatgtgtcgagcgttgttgttgagatgagntgggatggtgcgttgttgcgcgagagatttggggagatgagagcgatggtgcgatagcggcgtgattgcgtgcggggggcgtgatttggtgtgtgtggattgttgantgagagggggattgtttgggcgcggattgtggcgtgagagcgcgaggcgattggagagagcgatgggattgtgtgtgcgggcgtttggcgtggggggggcgagatgatgcgcgatgcggtgggatgcgcggcgttgggcgtggcgagagcgtgcgtgcgtgcgatgnggggcgcgagggacggggtggagatgggggcgagagtgcgatgcgtggtgtggcgcgcggtgcgtcgagcgtgggtgggagagagaggagagagtgatgcgcgatgcgcgttggggcgggcgcgcgagagtgagcggcgagagatgcgcgggcgcgtgcgtgcgcgcgcggacggacggtgtgggggcgcgggattgtgcgagtgtgagattgggcgatggcgtgnggcgagcggatgcgatgggtgtgtgcgcgcgggagcgtggggagagatggtcgtgggggcgatggtggggatggcggcgagatgcgggcgatgagtgtgatgatgtggtgggatggtgtgatggcgtgcgatgcgtgcgatgtgtgatgnggcgatgcgcgcgacgatggggcgtgtgtgagcgagcgtgtgtgagtgggcgtgtgcgcgtgggcgtgcggttgattgggcgtggttggntgggggagagtgtggttggatggcgggggantgagagcgagagttgtgcgagcgagcgatgggagagagcgaggggtgattggagcgcgantggat

SEQ ID NO: 31904 - DNA, 1106 bp, Artificial Sequence
  chemically treated genomic DNA (Homo sapiens) CpG-island No: 31904
  unsure (6, 66, 97, 187, 337, 563, 730, 837, 910)
atccantcgcgctccaatcacccctcgctctctcccatcgctcgctcgcacaactctcgctctcantcccccgccatccaaccacactctcccccanccaaccacgcccaatcaaccgcacgcccacgcgcacacgcccactcacacacgctcgctcacacacgccccatcgtcgcgcgcatcgccncatcacacatcgcacgcatcgcacgccatcacaccatcccaccacatcatcacactcatcgcccgcatctcgccgccatccccaccatcgcccccacgaccatctctccccacgctcccgcgcgcacacacccatcgcatccgctcgccncacgccatcgcccaatctcacactcgcacaatcccgcgcccccacaccgtccgtccgcgcgcgcacgcacgcgcccgcgcatctctcgccgctcactctcgcgcgcccgccccaacgcgcatcgcgcatcactctctcctctctctcccacccacgctcgacgcaccgcgcgccacaccacgcatcgcactctcgcccccatctccaccccgtccctcgcgccccncatcgcacgcacgcacgctctcgccacgcccaacgccgcgcatcccaccgcatcgcgcatcatctcgccccccccacgccaaacgcccgcacacacaatcccatcgctctctccaatcgcctcgcgctctcacgccacaatccgcgcccaaacaatccccctctcantcaacaatccacacacaccaaatcacgccccccgcacgcaatcacgccgctatcgcaccatcgctctcatctccccaaatctctcgcgcaacaacgcaccatcccanctcatctcaacaacaacgctcgacacatcccaaccgctccaacaacgcgcgcaaacaacccgctcctaatcancgcgccgcatcgcgcaccatcaccgctcaaacccatccaccccaccatccaacgtatttttccccccatccaccgtcgccgtcaaaaccctaccatcgccaaccctcaaaacgacgcccccgactttcacaacattcacgaccgaaacccgacccaacctccccgaccaacgcaactcaacaaaccccaaacaacc

SEQ ID NO: 31905 - DNA, 528 bp, Artificial Sequence
  chemically treated genomic DNA (Homo sapiens) CpG-island No: 31905
  unsure (163, 171, 182, 271, 340..341, 462, 507)
cgcgtagtcgatagtggttttaagtagcgaagcgagtaggattgggcggcggttaaagcggtcggatagtgtttcgagaacgggtgcgtatagaaattgtattaacgtatatagcgttagtagtacgttatagtgattggcgatgttgtcgggatggacgatntttcgtangaggttcggtngtttcggtttaattaagtttatgtttatagtatttagggtgacggggttcgagggtgacgatgatcgtattgtatgatttatattcggngtttgtttgggttattagtttaattgcgcgtaattatcgtataagaggttatcgtcgatagggtggggnnttggggacggggtcgggggttttagcgttttttcgttttaggttcgttcgtttcggtggtgtcgttcggttgtgtcgtcgtcggtacgtcgtttacgtcggcgggaagcgtgtgcgtcgtngtcgcggtcggttgtaggtgtcggggataggttcgcgcgcgtttnggtgagcggaagtagcgcgtt

SEQ ID NO: 31906 - DNA, 528 bp, Artificial Sequence
  chemically treated genomic DNA (Homo sapiens) CpG-island No: 31906
  unsure (22, 67, 188..189, 258, 347, 358, 366)
aacgcgctacttccgctcaccnaaacgcgcgcgaacctatccccgacacctacaaccgaccgcgacnacgacgcacacgcttcccgccgacgtaaacgacgtaccgacgacgacacaaccgaacgacaccaccgaaacgaacgaacctaaaacgaaaaaacgctaaaacccccgaccccgtccccaannccccaccctatcgacgataacctcttatacgataattacgcgcaattaaactaataacccaaacaaacnccgaatataaatcatacaatacgatcatcgtcaccctcgaaccccgtcaccctaaatactataaacataaacttaattaaaccgaaacnaccgaacctcntacgaaanatcgtccatcccgacaacatcgccaatcactataacgtactactaacgctatatacgttaatacaatttctatacgcacccgttctcgaaacactatccgaccgctttaaccgccgcccaatcctactcgcttcgctacttaaaaccactatcgactacgcg

SEQ ID NO: 31907 - DNA, 528 bp, Artificial Sequence
  chemically treated genomic DNA (Homo sapiens) CpG-island No: 31907
  unsure (22, 67, 188..189, 258, 347, 358, 366)
ggcgcgttgttttcgtttattnaggcgcgcgcgagtttattttcggtatttgtagtcggtcgcgatnacgacgtatacgtttttcgtcggcgtggacggcgtatcggcgacggtatagtcgggcggtattatcggggcgagcggatttggggcgaagggacgttgaggttttcggtttcgtttttagnnttttattttatcggcgataattttttatgcggtagttacgcgtagttaaattggtaatttaggtaggtntcgggtataaattatataatgcggttatcgttattttcgggtttcgttattttggatgttgtaggtataggtttggttaagtcggaatngtcgggttttntgcggganatcgtttatttcgatagtatcgttagttattatggcgtgttgttagcgttatatgcgttgatgtaatttttatgcgtattcgttttcggagtattgttcgatcgttttggtcgtcgtttagttttgttcgtttcgttatttggagttattatcgattacgcg

SEQ ID NO: 31908 - DNA, 528 bp, Artificial Sequence
  chemically treated genomic DNA (Homo sapiens) CpG-island No: 31908
  unsure (163, 171, 182, 271, 340..341, 462, 507)
cgcgtaatcgataataactccaaataacgaaacgaacaaaactaaacgacgaccaaaacgatcgaacaatactccgaaaacgaatacgcataaaaattacatcaacgcatataacgctaacaacacgccataataactaacgatactatcgaaataaacgatntcccgcanaaaacccgacnattccgacttaaccaaacctatacctacaacatccaaaataacgaaacccgaaaataacgataaccgcattatataatttatacccganacctacctaaattaccaatttaactacgcgtaactaccgcataaaaaattatcgccgataaaataaaannctaaaaacgaaaccgaaaacctcaacgtcccttcgccccaaatccgctcgccccgataataccgcccgactataccgtcgccgatacgccgtccacgccgacgaaaaacgtatacgtcgtnatcgcgaccgactacaaataccgaaaataaactcgcgcgcgcctnaataaacgaaaacaacgcgcc

SEQ ID NO: 31909 - DNA, 557 bp, Artificial Sequence
  chemically treated genomic DNA (Homo sapiens) CpG-island No: 31909
tgcggttgttgatcgtataatgattcgacgtcggtagcgagggaagagtaaggtttaaaaatcggcgtttattagggtagaatgtagtttacggaggatggcggaagaggcggttgaggtcgtaggacgtgttattttaaggtacggtcgtacgagtgttacgtatgcgcgtgcgttggttcgcgttagatatagtgttagtttttagatggggcggggtcgggcgttcgcgtcggaagagggttggttgggcggggtcgggaagcggtagtggcggttacgcgcgcgggggtgcgcgcgggaacgatcgggaaatatcgcgagggtcggggtgggttaggttgtggggacgacgggttgcgacgatggtcgtagcggcgggcggcggcgggtcggggatagcggtaggcgttacgggttcggggattgcggcggtagtcgtaggtttagttgtttatcgacggaaggatgggggttcggttattaagttttgggagagttcggagacggtgttttagttggattcggtgcgggtttggttgggtaagtattataag

SEQ ID NO: 31910 - DNA, 557 bp, Artificial Sequence
  chemically treated genomic DNA (Homo sapiens) CpG-island No: 31910
cttataatacttacccaaccaaacccgcaccgaatccaactaaaacaccgtctccgaactctcccaaaacttaataaccgaacccccatccttccgtcgataaacaactaaacctacgactaccgccgcaatccccgaacccgtaacgcctaccgctatccccgacccgccgccgcccgccgctacgaccatcgtcgcaacccgtcgtccccacaacctaacccaccccgaccctcgcgatatttcccgatcgttcccgcgcgcacccccgcgcgcgtaaccgccactaccgcttcccgaccccgcccaaccaaccctcttccgacgcgaacgcccgaccccgccccatctaaaaactaacactatatctaacgcgaaccaacgcacgcgcatacgtaacactcgtacgaccgtaccttaaaataacacgtcctacgacctcaaccgcctcttccgccatcctccgtaaactacattctaccctaataaacgccgatttttaaaccttactcttccctcgctaccgacgtcgaatcattatacgatcaacaaccgca

SEQ ID NO: 31911 - DNA, 557 bp, Artificial Sequence
  chemically treated genomic DNA (Homo sapiens) CpG-island No: 31911
tttgtagtgtttgtttagttagattcgtatcgaatttagttgggatatcgttttcgggtttttttaaaatttggtggtcgggtttttattttttcgtcgataaatagttaggtttgcggttgtcgtcgtaattttcgagttcgtggcgtttatcgttgttttcggttcgtcgtcgttcgtcgttgcggttatcgtcgtagttcgtcgtttttatagtttggtttatttcggttttcgcggtgtttttcggtcgttttcgcgcgtattttcgcgcgcgtagtcgttattgtcgtttttcggtttcgtttagttaattttttttcggcgcggacgttcggtttcgttttatttgggaattggtattgtatttgacgcgagttagcgtacgcgtatgcgtagtattcgtgcggtcgtgttttggaatagtacgttttgcggttttagtcgtttttttcgttatttttcgtaggttgtattttgttttagtgagcgtcggtttttgagttttgtttttttttcgttatcgacgtcgaattattatgcggttaataatcgta

SEQ ID NO: 31912 - DNA, 557 bp, Artificial Sequence
  chemically treated genomic DNA (Homo sapiens) CpG-island No: 31912
tacgattattaaccgcataataattcgacgtcgataacgaaaaaaaaacaaaactcaaaaaccgacgctcactaaaacaaaatacaacctacgaaaaataacgaaaaaaacgactaaaaccgcaaaacgtactattccaaaacacgaccgcacgaatactacgcatacgcgtacgctaactcgcgtcaaatacaataccaattcccaaataaaacgaaaccgaacgtccgcgccgaaaaaaaattaactaaacgaaaccgaaaaacgacaataacgactacgcgcgcgaaaatacgcgcgaaaacgaccgaaaaacaccgcgaaaaccgaaataaaccaaactataaaaacgacgaactacgacgataaccgcaacgacgaacgacgacgaaccgaaaacaacgataaacgccacgaactcgaaaattacgacgacaaccgcaaacctaactatttatcgacgaaaaaataaaaacccgaccaccaaattttaaaaaaacccgaaaacgatatcccaactaaattcgatacgaatctaactaaacaaacactacaaa

SEQ ID NO: 31913 - DNA, 992 bp, Artificial Sequence
  chemically treated genomic DNA (Homo sapiens) CpG-island No: 31913
acggcgtatttcgaggcgaaggcgtcgttgcgttaatgaagcggttttttttacggttttcgcggagtttttggttgcgaggttcgtttcggcggatcggtttggttttcgttttcgttcgggttttatggtaacggtaggtcgaggtttggttgtttacggatcggtcgggtcggtttttcgggtaggtttaggatgttcggtttgtttttcgggttcgtcggcgttttcgttttatttttcgttaggttggcggtcggatcgggttttttttttacgacgattattttcggtcgcggtaggttttttaagagggtacgaaaggggagaataaaaagtttaatttatttgttgttatagatgtgaaataagtttttgtgtatcgcgtatgagtcgcggtttttttaattacggtcggattataatttttagtagcggcggcgcggtttttttcgagtttcgtggcggaagtttcgttatcggttcggcgttttttattcggcgttacggagttcgtttgcggcgtacggtttcgttttttcgcgggtttggagttcggttttatttgggattcgtcgtagtcgttcggggtatttagcgttcgggatgttttagtattcggtttaatggggcgcggcggcggtgtaggcgggattttcggcggagtcgcgaaggggacgggttggcgtcggttgttttggggtcgtagagcgagcgggtttgggtggcggggtcgggcgttaagttgttgtttttttcggcgatttagttgtttgtagtgtgaaagcgggaagggttttttcgttttttgcgagttattcgcgttttttgatgcgaataaatagttcgggttatggttgagcggggaacggtttttagttcgggtttcgggattttattcgtttttttcgttatagttcgtagttacgtttttttttttttttattttttttataatttgtttttttagggaggtgagtatttttaattta

SEQ ID NO: 31914 - DNA, 992 bp, Artificial Sequence
  chemically treated genomic DNA (Homo sapiens) CpG-island No: 31914
taaattaaaaatactcacctccctaaaaaaacaaattataaaaaaaataaaaaaaaaaaaaaacgtaactacgaactataacgaaaaaaacgaataaaatcccgaaacccgaactaaaaaccgttccccgctcaaccataacccgaactatttattcgcatcaaaaaacgcgaataactcgcaaaaaacgaaaaaacccttcccgctttcacactacaaacaactaaatcgccgaaaaaaacaacaacttaacgcccgaccccgccacccaaacccgctcgctctacgaccccaaaacaaccgacgccaacccgtccccttcgcgactccgccgaaaatcccgcctacaccgccgccgcgccccattaaaccgaatactaaaacatcccgaacgctaaataccccgaacgactacgacgaatcccaaataaaaccgaactccaaacccgcgaaaaaacgaaaccgtacgccgcaaacgaactccgtaacgccgaataaaaaacgccgaaccgataacgaaacttccgccacgaaactcgaaaaaaaccgcgccgccgctactaaaaattataatccgaccgtaattaaaaaaaccgcgactcatacgcgatacacaaaaacttatttcacatctataacaacaaataaattaaactttttattctcccctttcgtaccctcttaaaaaacctaccgcgaccgaaaataatcgtcgtaaaaaaaaaacccgatccgaccgccaacctaacgaaaaataaaacgaaaacgccgacgaacccgaaaaacaaaccgaacatcctaaacctacccgaaaaaccgacccgaccgatccgtaaacaaccaaacctcgacctaccgttaccataaaacccgaacgaaaacgaaaaccaaaccgatccgccgaaacgaacctcgcaaccaaaaactccgcgaaaaccgtaaaaaaaaccgcttcattaacgcaacgacgccttcgcctcgaaatacgccgt

SEQ ID NO: 31915 - DNA, 992 bp, Artificial Sequence
  chemically treated genomic DNA (Homo sapiens) CpG-island No: 31915
taagttaaaaatgtttatttttttaaaaaaatagattataggggagatggggaagagaagaggcgtggttacgagttgtggcggggaaggcgggtggaatttcggagttcgagttggaaatcgtttttcgtttagttatgattcgggttgtttattcgtattaggaggcgcgggtggttcgtagagggcgagaagatttttttcgtttttatattgtaggtagttaagtcgtcgagaaaggtagtaatttgacgttcgatttcgttatttaaattcgttcgttttgcgattttagagtagtcggcgttaattcgtttttttcgcgatttcgtcggaagtttcgtttgtatcgtcgtcgcgttttattgggtcgggtgttggggtatttcgggcgttgggtgtttcgagcggttacgacgagttttaggtggggtcgggttttaggttcgcgggggagcggagtcgtgcgtcgtaggcgggtttcgtgacgtcgggtggggaacgtcgggtcggtggcgggattttcgttacgggattcggaaggggtcgcgtcgtcgttgttgggagttgtagttcggtcgtggttgggggagtcgcggtttatgcgcggtgtatagaggtttgttttatatttgtaataataggtgaattgggttttttatttttttttttcgtgtttttttgaggagtttgtcgcggtcgggggtggtcgtcgtgaggagggggttcggttcgatcgttagtttggcggagagtggggcggagacgtcggcgggttcgaggagtaggtcgggtattttaggtttgttcgggaagtcggttcggtcgattcgtgggtagttaggtttcggtttgtcgttgttatggagttcgggcgggggcgggggttagatcggttcgtcggggcgggtttcgtagttaggggtttcgcggaggtcgtgggagaggtcgttttattggcgtaacgacgttttcgtttcgggatgcgtcgt

SEQ ID NO: 31916 - DNA, 992 bp, Artificial Sequence
  chemically treated genomic DNA (Homo sapiens) CpG-island No: 31916
acgacgcatcccgaaacgaaaacgtcgttacgccaataaaacgacctctcccacgacctccgcgaaacccctaactacgaaacccgccccgacgaaccgatctaacccccgcccccgcccgaactccataacaacgacaaaccgaaacctaactacccacgaatcgaccgaaccgacttcccgaacaaacctaaaatacccgacctactcctcgaacccgccgacgtctccgccccactctccgccaaactaacgatcgaaccgaaccccctcctcacgacgaccacccccgaccgcgacaaactcctcaaaaaaacacgaaaaaaaaaaataaaaaacccaattcacctattattacaaatataaaacaaacctctatacaccgcgcataaaccgcgactcccccaaccacgaccgaactacaactcccaacaacgacgacgcgaccccttccgaatcccgtaacgaaaatcccgccaccgacccgacgttccccacccgacgtcacgaaacccgcctacgacgcacgactccgctcccccgcgaacctaaaacccgaccccacctaaaactcgtcgtaaccgctcgaaacacccaacgcccgaaataccccaacacccgacccaataaaacgcgacgacgatacaaacgaaacttccgacgaaatcgcgaaaaaaacgaattaacgccgactactctaaaatcgcaaaacgaacgaatttaaataacgaaatcgaacgtcaaattactacctttctcgacgacttaactacctacaatataaaaacgaaaaaaatcttctcgccctctacgaaccacccgcgcctcctaatacgaataaacaacccgaatcataactaaacgaaaaacgatttccaactcgaactccgaaattccacccgccttccccgccacaactcgtaaccacgcctcttctcttccccatctcccctataatctatttttttaaaaaaataaacatttttaactta

SEQ ID NO: 31917 - DNA, 533 bp, Artificial Sequence
  chemically treated genomic DNA (Homo sapiens) CpG-island No: 31917
cgaagaaggcggggggggggagggaacggcgcgagcgacggagattaaggatagacggagaaagcgaacgggaaaacggggagcgggggcggggggcgaggcgaaaaggggaggggcggtatttcgcgtaattcgataaataaaaggggcggaggggaagggggggggggaaataagaggagggggggggaggataacgggtaacggggggcggggacggggggaatattaataacggaaggggggaagaaaggggggggtcggaagcgatagaagggtcgaaacgggggataaagggggggggaaaaggggaaaaaaaagaaatcggaaaaaacggggaaagcgggggcggcgggggcgcggtcgaaaatcgtattataaacggggaaaggagaaaagggtatcgggcgagtttaaaacggaaggaaagacggagggggggaacgacgaaagacggcgggtaatagtaaaatttttttttttttttttcgaggatacgtgtagattagatttagggtggtatttcgtcgttt

SEQ ID NO: 31918 - DNA, 533 bp, Artificial Sequence
  chemically treated genomic DNA (Homo sapiens) CpG-island No: 31918
aaacgacgaaataccaccctaaatctaatctacacgtatcctcgaaaaaaaaaaaaaaaaattttactattacccgccgtctttcgtcgttccccccctccgtctttccttccgttttaaactcgcccgatacccttttctcctttccccgtttataatacgattttcgaccgcgcccccgccgcccccgctttccccgttttttccgatttcttttttttccccttttccccccccctttatcccccgtttcgacccttctatcgcttccgacccccccctttcttccccccttccgttattaatattccccccgtccccgccccccgttacccgttatcctccccccccctcctcttatttcccccccccccttcccctccgccccttttatttatcgaattacgcgaaataccgcccctccccttttcgcctcgccccccgcccccgctccccgttttcccgttcgctttctccgtctatccttaatctccgtcgctcgcgccgttccctccccccccccgccttcttcg

SEQ ID NO: 31919 - DNA, 533 bp, Artificial Sequence
  chemically treated genomic DNA (Homo sapiens) CpG-island No: 31919
gggcggcggagtgttattttgggtttggtttgtacgtgttttcgggggggggggggaaggattttgttgttgttcgtcgtttttcgtcgtttttttttttcgttttttttttcgttttgggttcgttcggtgtttttttttttttttttcgtttgtggtgcggttttcggtcgcgttttcgtcgttttcgtttttttcgtttttttcggttttttttttttttttttttttttttttttttgtttttcgtttcggtttttttgtcgttttcggtttttttttttttttttttttttcgttgttggtgtttttttcgttttcgtttttcgttgttcgttgttttttttttttttttttttgttttttttttttttttttttttcgttttttttgtttgtcgggttgcgcggggtgtcgtttttttttttttcgtttcgtttttcgttttcgtttttcgttttttcgttcgtttttttcgtttgtttttggttttcgtcgttcgcgtcgtttttttttttttttcgtttttttcg

SEQ ID NO: 31920 - DNA, 533 bp, Artificial Sequence
  chemically treated genomic DNA (Homo sapiens) CpG-island No: 31920
cgaaaaaaacgaaaaaaaaaaaaaaacgacgcgaacgacgaaaaccaaaaacaaacgaaaaaaacgaacgaaaaaacgaaaaacgaaaacgaaaaacgaaacgaaaaaaaaaaaaacgacaccccgcgcaacccgacaaacaaaaaaaacgaaaaaaaaaaaaaaaaaaaaaacaaaaaaaaaaaaaaaaaaaacaacgaacaacgaaaaacgaaaacgaaaaaaacaccaacaacgaaaaaaaaaaaaaaaaaaaaaaaccgaaaacgacaaaaaaaccgaaacgaaaaacaaaaaaaaaaaaaaaaaaaaaaaaaaaaaaaaccgaaaaaaacgaaaaaaacgaaaacgacgaaaacgcgaccgaaaaccgcaccacaaacgaaaaaaaaaaaaaaaaacaccgaacgaacccaaaacgaaaaaaaaaacgaaaaaaaaaaacgacgaaaaacgacgaacaacaacaaaatccttcccccccccccccgaaaacacgtacaaaccaaacccaaaataacactccgccgccc

SEQ ID NO: 31921 - DNA, 545 bp, Artificial Sequence
  chemically treated genomic DNA (Homo sapiens) CpG-island No: 31921
tattcgggtttgtgttacgttaagttttataaatagtaaggtcgttgttcgtcgacggatggcgaatttggttattatggaagagaggattttcggtcgttaggttcgatttcggttcgcgtttttagttttgttattttaggagttaagggcgttgcggatcgttcgttttcgtcgatgtttttatcgtttattaagttttcgtcgttttttttaggttcgtcgggggttatttttgattcggtttcggcggtttttttggtgtggtcggggtgggcgtagtttgaagagaagtcgcgcgagcgattttgtcgtttagtagcgcggggatttagcggttgtaggcgcggagagatgtcggcggttagcgttatgagttttttagcggtcgttatcgtgttttcgtcgatttcgaggtttgtgcgcggtagggatcgggcgaagagatacgggagcggtcggttcgagcgtcgcgcgttttttgcgggtcgggcggattcgaagtttaagtttaggcgagggtattagtagattcgttttcgttt

SEQ ID NO: 31922 - DNA, 545 bp, Artificial Sequence
  chemically treated genomic DNA (Homo sapiens) CpG-island No: 31922
aaacgaaaacgaatctactaataccctcgcctaaacttaaacttcgaatccgcccgacccgcaaaaaacgcgcgacgctcgaaccgaccgctcccgtatctcttcgcccgatccctaccgcgcacaaacctcgaaatcgacgaaaacacgataacgaccgctaaaaaactcataacgctaaccgccgacatctctccgcgcctacaaccgctaaatccccgcgctactaaacgacaaaatcgctcgcgcgacttctcttcaaactacgcccaccccgaccacaccaaaaaaaccgccgaaaccgaatcaaaaataacccccgacgaacctaaaaaaaacgacgaaaacttaataaacgataaaaacatcgacgaaaacgaacgatccgcaacgcccttaactcctaaaataacaaaactaaaaacgcgaaccgaaatcgaacctaacgaccgaaaatcctctcttccataataaccaaattcgccatccgtcgacgaacaacgaccttactatttataaaacttaacgtaacacaaacccgaata

SEQ ID NO: 31923 - DNA, 545 bp, Artificial Sequence
  chemically treated genomic DNA (Homo sapiens) CpG-island No: 31923
gagcgaggacgggtttgttgatgttttcgtttaggtttgggtttcgggttcgttcggttcgtagggggcgcgcggcgttcgggtcggtcgttttcgtgttttttcgttcggtttttgtcgcgtataggtttcggggtcggcgggagtacgatggcggtcgttaggagatttatggcgttggtcgtcggtattttttcgcgtttgtagtcgttgggttttcgcgttgttgggcgatagggtcgttcgcgcggtttttttttaagttgcgtttatttcgattatattaaggaagtcgtcgaggtcgagttagggatggttttcggcgggtttggggaaggcgacggaagtttggtgaacggtgagggtatcggcgggggcgggcggttcgtagcgtttttgatttttgggatggtagagttaggggcgcgggtcgaaatcgggtttggcggtcgggggtttttttttttatagtggttaagttcgttattcgtcggcgggtagcggttttgttgtttgtaaagtttagcgtggtataggttcgaatg

SEQ ID NO: 31924 - DNA, 545 bp, Artificial Sequence
  chemically treated genomic DNA (Homo sapiens) CpG-island No: 31924
cattcgaacctataccacgctaaactttacaaacaacaaaaccgctacccgccgacgaataacgaacttaaccactataaaaaaaaaaacccccgaccgccaaacccgatttcgacccgcgcccctaactctaccatcccaaaaatcaaaaacgctacgaaccgcccgcccccgccgataccctcaccgttcaccaaacttccgtcgccttccccaaacccgccgaaaaccatccctaactcgacctcgacgacttccttaatataatcgaaataaacgcaacttaaaaaaaaaccgcgcgaacgaccctatcgcccaacaacgcgaaaacccaacgactacaaacgcgaaaaaataccgacgaccaacgccataaatctcctaacgaccgccatcgtactcccgccgaccccgaaacctatacgcgacaaaaaccgaacgaaaaaacacgaaaacgaccgacccgaacgccgcgcgccccctacgaaccgaacgaacccgaaacccaaacctaaacgaaaacatcaacaaacccgtcctcgctc

SEQ ID NO: 31925 - DNA, 517 bp, Artificial Sequence
  chemically treated genomic DNA (Homo sapiens) CpG-island No: 31925
  unsure (67, 181, 229, 354)
ttttttttttttttttttgtttgtttcgtttcgttcggtcggtttttttttttttttttttttgttntttcgtgttttttgttttcgttttttcgtttttcgttttcgtgtgttttttttttttcgttttttttttcgtcgtttggttttcgtttttcggtgtcggtggttgtgtcgcggncggttgtcgttttggtttttcgtcgtcgttttgttgttcgttgtcggnttttttttttttttggttttttttcgttttcgcgttcgttcgttcgcgtttgttgttcgcgtttttcgtttcgtttcgttgtttttttttcgttcgttttttttggtttttgttttttttttttncgttttttttgcgtttttgtcgttttttttcgtttttgttttttcgttttgtttttcgtcgttttcgtttttcgttttcgtttttttttcgtagtttttgtttttttgtgttttgtttcgttttttttttgttttttttgtttttttttgtttttttttcgtt

SEQ ID NO: 31926 - DNA, 517 bp, Artificial Sequence
  chemically treated genomic DNA (Homo sapiens) CpG-island No: 31926
  unsure (164, 289, 337, 451)
aacgaaaaaaaaacaaaaaaaaacaaaaaaaacaaaaaaaaaacgaaacaaaacacaaaaaaacaaaaactacgaaaaaaaaacgaaaacgaaaaacgaaaacgacgaaaaacaaaacgaaaaaacaaaaacgaaaaaaaacgacaaaaacgcaaaaaaaacgnaaaaaaaaaaaacaaaaaccaaaaaaaacgaacgaaaaaaaaacaacgaaacgaaacgaaaaacgcgaacaacaaacgcgaacgaacgaacgcgaaaacgaaaaaaaaccaaaaaaaaaaaaaanccgacaacgaacaacaaaacgacgacgaaaaaccaaaacgacaaccgnccgcgacacaaccaccgacaccgaaaaacgaaaaccaaacgacgaaaaaaaaaacgaaaaaaaaaaaacacacgaaaacgaaaaacgaaaaaacgaaaacaaaaaacacgaaanaacaaaaaaaaaaaaaaaaaaaaaccgaccgaacgaaacgaaacaaacaaaaaaaaaaaaaaaaaa

SEQ ID NO: 31927 - DNA, 517 bp, Artificial Sequence
  chemically treated genomic DNA (Homo sapiens) CpG-island No: 31927
  unsure (164, 289, 337, 451)
gacgagagagaggtaaaaagaggtaaagaaaataaagggaaaacgagataaaatatagaaagatagggattacggagaagggacgagagcgaggggcgaggacgacgggagataggacggggaaataggagcgaaagaaaacggtaagggcgtagagggaacgnaagagggggaggtagaaattagaggagacggacggaagaggaatagcgaggcggagcgagggacgcgggtagtaagcgcgagcgaacgggcgcgaaagcgaaggaaaattaaagaaagaggagantcggtagcgaatagtaaagcggcggcggggggttaggacgatagtcgntcgcgatataattatcgatatcgaggagcgggaattaggcgacggaggagagaacggagagagaggagtatacgagagcgaaggacgagaaaacgagaataggagatacggggngataggggaaggaaggaagggaggtcgatcgaacgggacgagataggtaaagggggggagagggaa

SEQ ID NO: 31928 - DNA, 517 bp, Artificial Sequence
  chemically treated genomic DNA (Homo sapiens) CpG-island No: 31928
  unsure (67, 181, 229, 354)
ttccctctccccccctttacctatctcgtcccgttcgatcgacctcccttccttccttcccctatcnccccgtatctcctattctcgttttctcgtccttcgctctcgtatactcctctctctccgttctctcctccgtcgcctaattcccgctcctcgatatcgataattatatcgcgancgactatcgtcctaaccccccgccgccgctttactattcgctaccgantctcctctttctttaattttccttcgctttcgcgcccgttcgctcgcgcttactacccgcgtccctcgctccgcctcgctattcctcttccgtccgtctcctctaatttctacctccccctcttncgttccctctacgcccttaccgttttctttcgctcctatttccccgtcctatctcccgtcgtcctcgcccctcgctctcgtcccttctccgtaatccctatctttctatattttatctcgttttccctttattttctttacctctttttacctctctctcgtc

SEQ ID NO: 31929 - DNA, 621 bp, Artificial Sequence
  chemically treated genomic DNA (Homo sapiens) CpG-island No: 31929
  unsure (466, 469, 472, 475, 485, 494)
gagttttagcgtttcgaattagggattgtatttttcggtaggcgtcgcggttcgcggttaatgaggggttgaggatttggcggcggcggcgtttcgagagtcggggtgggggggttttgtgcgcggcggcggcgggagaggcggcggcggcggttagtacggaggcggaggtcgagggggttgtgtataggtcgtcgcggagaggcgtgcgaatttcgagtcgagcgtcgaggatcgtgttatttaggtcgggttgttagtcgtaggtttttttttggtagtagcggcggcgcggcgattttcgtttttcggttttttttttttattttatttttcgagttttttttttttcgtagtacgttcggttcggttcggtcgtggttttttttagtgtcggtcgttatggtagaggcgttcggcgcggggaaaatttagttcggggattttatgcggtttagttcggttncgnttnttnttcgcgcggntttagcggntgttcgtattttagttttatttcgggttttcgagtattttttgtgatcgtattgatacgggcgtggggttagaatggaataaattgaaggtaaagtgcgtgtgcgtttgtgtatgtgtgtgtgtgtg

SEQ ID NO: 31930 - DNA, 621 bp, Artificial Sequence
  chemically treated genomic DNA (Homo sapiens) CpG-island No: 31930
  unsure (128, 137, 147, 150, 153, 156)
cacacacacacacatacacaaacgcacacgcactttaccttcaatttattccattctaaccccacgcccgtatcaatacgatcacaaaaaatactcgaaaacccgaaataaaactaaaatacgaacanccgctaaanccgcgcgaanaanaancgnaaccgaactaaaccgcataaaatccccgaactaaattttccccgcgccgaacgcctctaccataacgaccgacactaaaaaaaaccacgaccgaaccgaaccgaacgtactacgaaaaaaaaaaaactcgaaaaataaaataaaaaaaaaaaaccgaaaaacgaaaatcgccgcgccgccgctactaccaaaaaaaaacctacgactaacaacccgacctaaataacacgatcctcgacgctcgactcgaaattcgcacgcctctccgcgacgacctatacacaaccccctcgacctccgcctccgtactaaccgccgccgccgcctctcccgccgccgccgcgcacaaaacccccccaccccgactctcgaaacgccgccgccgccaaatcctcaacccctcattaaccgcgaaccgcgacgcctaccgaaaaatacaatccctaattcgaaacgctaaaactc

SEQ ID NO: 31931 - DNA, 621 bp, Artificial Sequence
  chemically treated genomic DNA (Homo sapiens) CpG-island No: 31931
  unsure (128, 137, 147, 150, 153, 156)
tatatatatatatatatataaacgtatacgtattttatttttagtttgttttattttaattttacgttcgtgttagtgcgattataggagatattcggaggttcggagtggggttggggtgcgggtantcgttgggntcgcgcgagnagnagncgnaatcgagttaggtcgtatgaaattttcgggttagatttttttcgcgtcggacgtttttgttatggcggtcggtattgaggagggttacggtcgggtcgggtcgggcgtgttgcgggaagaggaaggttcgggaggtgggatgggaaggggaggtcgagggacgggggtcgtcgcgtcgtcgttgttgttagagaggagtttgcggttggtagttcggtttgggtagtacggttttcggcgttcggttcggaattcgtacgttttttcgcggcgatttgtgtatagttttttcggttttcgttttcgtgttggtcgtcgtcgtcgtttttttcgtcgtcgtcgcgtataaagtttttttatttcgattttcggggcgtcgtcgtcgttaaatttttagttttttattggtcgcgggtcgcggcgtttgtcgggaaatgtagtttttggttcgggacgttggggttt

SEQ ID NO: 31932 - DNA, 621 bp, Artificial Sequence
  chemically treated genomic DNA (Homo sapiens) CpG-island No: 31932
  unsure (466, 469, 472, 475, 485, 494)
aaaccccaacgtcccgaaccaaaaactacatttcccgacaaacgccgcgacccgcgaccaataaaaaactaaaaatttaacgacgacgacgccccgaaaatcgaaataaaaaaactttatacgcgacgacgacgaaaaaaacgacgacgacgaccaacacgaaaacgaaaaccgaaaaaactatacacaaatcgccgcgaaaaaacgtacgaattccgaaccgaacgccgaaaaccgtactacccaaaccgaactaccaaccgcaaactcctctctaacaacaacgacgacgcgacgacccccgtccctcgacctccccttcccatcccacctcccgaaccttcctcttcccgcaacacgcccgacccgacccgaccgtaaccctcctcaataccgaccgccataacaaaaacgtccgacgcgaaaaaaatctaacccgaaaatttcatacgacctaactcgattncgnctnctnctcgcgcgancccaacgantacccgcaccccaaccccactccgaacctccgaatatctcctataatcgcactaacacgaacgtaaaattaaaataaaacaaactaaaaataaaatacgtatacgtttatatatatatatatatata

SEQ ID NO: 31933 - DNA, 525 bp, Artificial Sequence
  chemically treated genomic DNA (Homo sapiens) CpG-island No: 31933
taggaaatcgcgggtttcgtcgttttcgtttcgggtttgtttttttcgggatttattgaggagtcgtcgtcgtttcgttagttttcgagcgcgagttggaggaaaagttgggcggcgggaagagcggcgggacgagcgtagggagggggcgtaggagacgcggacggagggaagggaggggagatttaaggggcgcggatcgttcgggagggagttaagaggtgaaaagggcgggcggcgagcggagggaagcgtcggttttcgttgggttgcggcgggtaaagcgcgtagttcgggaggttttcggcgttcggggggtcggtttgggaacgtttaaagtttcggttttaagattttcgggggtcgttcgcgggtttttttaatttttcgtttttcgggcgtgggaaaggttttttttttttttcggggaagaaggttttcgtttcgtggggttttttggtggtttaaaattcgggtcggttgtttgtttttcgtcggttttttttttcggggtttttttggggt

SEQ ID NO: 31934 - DNA, 525 bp, Artificial Sequence
  chemically treated genomic DNA (Homo sapiens) CpG-island No: 31934
accccaaaaaaaccccgaaaaaaaaaaccgacgaaaaacaaacaaccgacccgaattttaaaccaccaaaaaaccccacgaaacgaaaaccttcttccccgaaaaaaaaaaaaaacctttcccacgcccgaaaaacgaaaaattaaaaaaacccgcgaacgacccccgaaaatcttaaaaccgaaactttaaacgttcccaaaccgaccccccgaacgccgaaaacctcccgaactacgcgctttacccgccgcaacccaacgaaaaccgacgcttccctccgctcgccgcccgcccttttcacctcttaactccctcccgaacgatccgcgccccttaaatctcccctcccttccctccgtccgcgtctcctacgccccctccctacgctcgtcccgccgctcttcccgccgcccaacttttcctccaactcgcgctcgaaaactaacgaaacgacgacgactcctcaataaatcccgaaaaaaacaaacccgaaacgaaaacgacgaaacccgcgatttccta

SEQ ID NO: 31935 - DNA, 525 bp, Artificial Sequence
  chemically treated genomic DNA (Homo sapiens) CpG-island No: 31935
gttttagaaaaatttcggggggggaaatcggcggggggtaaataatcggttcgggttttgggttattaaaaggttttacggggcgggaattttttttttcggaaggggggggaaattttttttacgttcgaaaggcgaagggttaaagaagttcgcgggcggttttcggggattttggggtcggggttttgggcgtttttaagtcggtttttcgggcgtcggaagtttttcgggttgcgcgttttgttcgtcgtagtttagcgggggtcggcgttttttttcgttcgtcgttcgttttttttattttttggttttttttcgggcgattcgcgttttttgggttttttttttttttttttcgttcgcgttttttgcgttttttttttgcgttcgtttcgtcgtttttttcgtcgtttaattttttttttaattcgcgttcgggagttggcgaggcggcggcggttttttagtgagtttcgggagggataggttcggggcgaaggcggcgaggttcgcggttttttg

SEQ ID NO: 31936 - DNA, 525 bp, Artificial Sequence
  chemically treated genomic DNA (Homo sapiens) CpG-island No: 31936
caaaaaaccgcgaacctcgccgccttcgccccgaacctatccctcccgaaactcactaaaaaaccgccgccgcctcgccaactcccgaacgcgaattaaaaaaaaaattaaacgacgaaaaaaacgacgaaacgaacgcaaaaaaaaaacgcaaaaaacgcgaacgaaaaaaaaaaaaaaaaaacccaaaaaacgcgaatcgcccgaaaaaaaaccaaaaaataaaaaaaacgaacgacgaacgaaaaaaaacgccgacccccgctaaactacgacgaacaaaacgcgcaacccgaaaaacttccgacgcccgaaaaaccgacttaaaaacgcccaaaaccccgaccccaaaatccccgaaaaccgcccgcgaacttctttaacccttcgcctttcgaacgtaaaaaaaatttccccccccttccgaaaaaaaaaattcccgccccgtaaaaccttttaataacccaaaacccgaaccgattatttaccccccgccgatttccccccccgaaatttttctaaaac

SEQ ID NO: 31937 - DNA, 558 bp, Artificial Sequence
  chemically treated genomic DNA (Homo sapiens) CpG-island No: 31937
tgcggggcggcggggcgtggcgtggttgcgtggggtggtggtcggttgggcggcggtggtggcgggtcgtcggggggcgggggggttgtgggttggcgcgggggggggtgggcggttggtgcgggggggggggggcggcgcggtggggtgggggtcgtcgtggcggtgcggggcgggggcgggggggtgtgtgggggggtcgtgttcgggcgtggggcgggggtcggggtggcgttggcgggggcgtcgttttgcgggagcgttcgttcgcgggttcgttttgttcggggtgggggtggcggtgtggttgggcggcgggggggttcgggttttgcggtgttcgttgcggttttggcggggtggggcgtcgtgcggggggtcggcgcgttcgtcgtgttcggggggcgtcggttcggtcgtcgttcggcgggtcgcgcggtcgttcgggtagtttcgcggcgtttttttcgaggtcgggcggttcggggtcggggcgggtcgtcggcgttcggtcgtcggttcgcgcgcgggagtcgttcgcgggcggcggtgcgggcg

SEQ ID NO: 31938 - DNA, 558 bp, Artificial Sequence
  chemically treated genomic DNA (Homo sapiens) CpG-island No: 31938
cgcccgcaccgccgcccgcgaacgactcccgcgcgcgaaccgacgaccgaacgccgacgacccgccccgaccccgaaccgcccgacctcgaaaaaaacgccgcgaaactacccgaacgaccgcgcgacccgccgaacgacgaccgaaccgacgccccccgaacacgacgaacgcgccgaccccccgcacgacgccccaccccgccaaaaccgcaacgaacaccgcaaaacccgaacccccccgccgcccaaccacaccgccacccccaccccgaacaaaacgaacccgcgaacgaacgctcccgcaaaacgacgcccccgccaacgccaccccgacccccgccccacgcccgaacacgacccccccacacacccccccgcccccgccccgcaccgccacgacgacccccaccccaccgcgccgcccccccccccccgcaccaaccgcccacccccccccgcgccaacccacaacccccccgccccccgacgacccgccaccaccgccgcccaaccgaccaccaccccacgcaaccacgccacgccccgccgccccgca

SEQ ID NO: 31939 - DNA, 558 bp, Artificial Sequence
  chemically treated genomic DNA (Homo sapiens) CpG-island No: 31939
cgttcgtatcgtcgttcgcgggcgattttcgcgcgcgggtcggcgatcgggcgtcgacggttcgtttcggtttcgggtcgttcggtttcgagaggggcgtcgcgaaattgttcgaacgatcgcgcggttcgtcgggcggcgatcgagtcggcgtttttcggatacggcgggcgcgtcggtttttcgtacggcgttttatttcgttagagtcgtagcggatatcgtagggttcggattttttcgtcgtttaattatatcgttatttttatttcgagtagggcgggttcgcgggcgggcgttttcgtaaggcggcgttttcgttagcgttatttcgattttcgttttacgttcggatacgatttttttatatattttttcgttttcgtttcgtatcgttacgacgatttttattttatcgcgtcgttttttttttttcgtattagtcgtttattttttttcgcgttaatttataattttttcgtttttcgacgattcgttattatcgtcgtttaatcgattattattttacgtaattacgttacgtttcgtcgtttcgta

SEQ ID NO: 31940 - DNA, 558 bp, Artificial Sequence
  chemically treated genomic DNA (Homo sapiens) CpG-island No: 31940
tacgaaacgacgaaacgtaacgtaattacgtaaaataataatcgattaaacgacgataataacgaatcgtcgaaaaacgaaaaaattataaattaacgcgaaaaaaaataaacgactaatacgaaaaaaaaaaaacgacgcgataaaataaaaatcgtcgtaacgatacgaaacgaaaacgaaaaaatatataaaaaaatcgtatccgaacgtaaaacgaaaatcgaaataacgctaacgaaaacgccgccttacgaaaacgcccgcccgcgaacccgccctactcgaaataaaaataacgatataattaaacgacgaaaaaatccgaaccctacgatatccgctacgactctaacgaaataaaacgccgtacgaaaaaccgacgcgcccgccgtatccgaaaaacgccgactcgatcgccgcccgacgaaccgcgcgatcgttcgaacaatttcgcgacgcccctctcgaaaccgaacgacccgaaaccgaaacgaaccgtcgacgcccgatcgccgacccgcgcgcgaaaatcgcccgcgaacgacgatacgaacg

SEQ ID NO: 31941 - DNA, 698 bp, Artificial Sequence
  chemically treated genomic DNA (Homo sapiens) CpG-island No: 31941
cgcgcgttatttcgagagttagcggcgaggaagttttttcgttattttttcggagttcggaaaatttaaatacgtatttgcgtatttttagttagatacgtatttttacgcgcgttcggttttcgttttttcgagacgagttcgtaatagtcgtggttagatttacgggtgggtgcgggagtcggatgcgttgcgaggagtcgtcgcgttcggattttttttttattattatatatattttttgattttatttttttttgaagtttgggggacggggagattttttaagtttcgatttgttttgcgtcgcgcgcgtgtcgtttcgttttttcggttttgttttggcggtcgatggtttttcgtttttcgtttgcgcgtagtttttttttcgagttttttgcgttttatttttgtttcgtcgagacgattttttggagttagcgagtcgaggcggcgtgcgtttcgagtggggattacggcggtggcggcggcgtcgggagtcgaggagtttgttagttgtcgcggggtcgcggttatttgttgttttcgttttttttcgttttcgtttttcgttttttttttttttagataacgtcgcgttcggaaatttagatttttttttttttttggttttcgacgagtttttttttttatttgttgtgagtttcgttttggtttcgggagattggtagtgatat

SEQ ID NO: 31942 - DNA, 698 bp, Artificial Sequence
  chemically treated genomic DNA (Homo sapiens) CpG-island No: 31942
atatcactaccaatctcccgaaaccaaaacgaaactcacaacaaataaaaaaaaaaactcgtcgaaaaccaaaaaaaaaaaaaaatctaaatttccgaacgcgacgttatctaaaaaaaaaaaaaacgaaaaacgaaaacgaaaaaaaacgaaaacaacaaataaccgcgaccccgcgacaactaacaaactcctcgactcccgacgccgccgccaccgccgtaatccccactcgaaacgcacgccgcctcgactcgctaactccaaaaaatcgtctcgacgaaacaaaaataaaacgcaaaaaactcgaaaaaaaaactacgcgcaaacgaaaaacgaaaaaccatcgaccgccaaaacaaaaccgaaaaaacgaaacgacacgcgcgcgacgcaaaacaaatcgaaacttaaaaaatctccccgtcccccaaacttcaaaaaaaaataaaatcaaaaaatatatataataataaaaaaaaaatccgaacgcgacgactcctcgcaacgcatccgactcccgcacccacccgtaaatctaaccacgactattacgaactcgtctcgaaaaaacgaaaaccgaacgcgcgtaaaaatacgtatctaactaaaaatacgcaaatacgtatttaaattttccgaactccgaaaaaataacgaaaaaacttcctcgccgctaactctcgaaataacgcgcg

SEQ ID NO: 31943 - DNA, 698 bp, Artificial Sequence
  chemically treated genomic DNA (Homo sapiens) CpG-island No: 31943
gtgttattgttagtttttcgggattaaggcggagtttataataggtggggaggggggttcgtcgagggttaaaaagaagaaggaatttaagttttcgagcgcgacgttgtttgaaaaggagggaggcgggaggcgggggcgagggaaggcggaggtagtaaatgatcgcgatttcgcggtaattggtaaatttttcggttttcggcgtcgtcgttatcgtcgtggtttttattcgaagcgtacgtcgtttcggttcgttggttttagggagtcgtttcggcgggataggaatagagcgtagggagttcgggaggaaggttgcgcgtaagcgagggacggagagttatcggtcgttaggatagggtcggagggacgaggcgatacgcgcgcgacgtaggataaatcggagtttgggaaattttttcgttttttaagttttagaggggggtaaaattagaaaatgtgtgtgatggtgggagagagattcgggcgcggcgatttttcgtagcgtattcggttttcgtatttattcgtggatttggttacggttgttgcggattcgtttcgggaaagcggaggtcgagcgcgcgtaggggtgcgtgtttggttgggggtgcgtaggtgcgtgtttgaatttttcgggtttcgagggggtggcgggagagttttttcgtcgttgattttcggggtaacgcgcg

SEQ ID NO: 31944 - DNA, 698 bp, Artificial Sequence
  chemically treated genomic DNA (Homo sapiens) CpG-island No: 31944
cgcgcgttaccccgaaaatcaacgacgaaaaaactctcccgccaccccctcgaaacccgaaaaattcaaacacgcacctacgcacccccaaccaaacacgcacccctacgcgcgctcgacctccgctttcccgaaacgaatccgcaacaaccgtaaccaaatccacgaataaatacgaaaaccgaatacgctacgaaaaatcgccgcgcccgaatctctctcccaccatcacacacattttctaattttacccccctctaaaacttaaaaaacgaaaaaatttcccaaactccgatttatcctacgtcgcgcgcgtatcgcctcgtccctccgaccctatcctaacgaccgataactctccgtccctcgcttacgcgcaaccttcctcccgaactccctacgctctattcctatcccgccgaaacgactccctaaaaccaacgaaccgaaacgacgtacgcttcgaataaaaaccacgacgataacgacgacgccgaaaaccgaaaaatttaccaattaccgcgaaatcgcgatcatttactacctccgccttccctcgcccccgcctcccgcctccctccttttcaaacaacgtcgcgctcgaaaacttaaattccttcttctttttaaccctcgacgaacccccctccccacctattataaactccgccttaatcccgaaaaactaacaataacac

SEQ ID NO: 31945 - DNA, 540 bp, Artificial Sequence
  chemically treated genomic DNA (Homo sapiens) CpG-island No: 31945
ggacgggttcgatatttatgtggttttgtttttttacgggaggtttagatatatttacgattgcgttgattggtcgggttgttgtcgtttttttttattttatacgtcgtcgttttggagacgtttcgattacgatattagaatgtgttgaggggttaattcgaaatagaggtgttcgattatcgttgttcgtcgtatatttttttcgcgtttattatgtttttacgatttattaattcgtcgcgttcggagtttatgacggtacggttcgcgaattgttaatttggggcgtatatcgttgcgcgtatttttttacgttagtatcgcgcgattgttatcggcgtttagcgaagatcggatcgagggggagtagtgcgttaggtgacgttatattgtagtttattcgttaacgtgtatattacgtagattattatagtttattatacgtatttttatttttagtcgttatgcgttattatgcgagattaacgcgattttcgtagattgttttattgtttacgttacgttagtttatattta

SEQ ID NO: 31946 - DNA, 540 bp, Artificial Sequence
  chemically treated genomic DNA (Homo sapiens) CpG-island No: 31946
taaatataaactaacgtaacgtaaacaataaaacaatctacgaaaatcgcgttaatctcgcataataacgcataacgactaaaaataaaaatacgtataataaactataataatctacgtaatatacacgttaacgaataaactacaatataacgtcacctaacgcactactccccctcgatccgatcttcgctaaacgccgataacaatcgcgcgatactaacgtaaaaaaatacgcgcaacgatatacgccccaaattaacaattcgcgaaccgtaccgtcataaactccgaacgcgacgaattaataaatcgtaaaaacataataaacgcgaaaaaaatatacgacgaacaacgataatcgaacacctctatttcgaattaacccctcaacacattctaatatcgtaatcgaaacgtctccaaaacgacgacgtataaaataaaaaaaaacgacaacaacccgaccaatcaacgcaatcgtaaatatatctaaacctcccgtaaaaaaacaaaaccacataaatatcgaacccgtcc

SEQ ID NO: 31947 - DNA, 540 bp, Artificial Sequence
  chemically treated genomic DNA (Homo sapiens) CpG-island No: 31947
tgaatgtagattagcgtggcgtgaatagtaagatagtttacggagatcgcgttggtttcgtatgatagcgtatagcgattggagataagggtgcgtgtagtagattgtagtagtttgcgtagtgtgtacgttagcgggtgagttatagtgtagcgttatttagcgtattgttttttttcggttcggttttcgttaggcgtcgatgataatcgcgcgatgttggcgtggggagatacgcgtagcgatgtgcgttttaagttggtagttcgcgggtcgtgtcgttatgggtttcgagcgcgacgagttgataggtcgtaagggtatgatgaacgcggagggagtgtgcggcgggtagcggtagtcggatatttttgtttcgagttggttttttagtatattttagtgtcgtggtcgaggcgtttttaaggcggcggcgtatagggtgggggggagcgatagtagttcgattaattagcgtagtcgtaagtgtatttgggtttttcgtaaaaaaataaagttatatgggtgtcgagttcgttt

SEQ ID NO: 31948 - DNA, 540 bp, Artificial Sequence
  chemically treated genomic DNA (Homo sapiens) CpG-island No: 31948
aaacgaactcgacacccatataactttatttttttacgaaaaacccaaatacacttacgactacgctaattaatcgaactactatcgctcccccccaccctatacgccgccgccttaaaaacgcctcgaccacgacactaaaatatactaaaaaaccaactcgaaacaaaaatatccgactaccgctacccgccgcacactccctccgcgttcatcatacccttacgacctatcaactcgtcgcgctcgaaacccataacgacacgacccgcgaactaccaacttaaaacgcacatcgctacgcgtatctccccacgccaacatcgcgcgattatcatcgacgcctaacgaaaaccgaaccgaaaaaaaacaatacgctaaataacgctacactataactcacccgctaacgtacacactacgcaaactactacaatctactacacgcacccttatctccaatcgctatacgctatcatacgaaaccaacgcgatctccgtaaactatcttactattcacgccacgctaatctacattca

SEQ ID NO: 31949 - DNA, 677 bp, Artificial Sequence
  chemically treated genomic DNA (Homo sapiens) CpG-island No: 31949
  unsure (421)
gcgaaattattatcgttcggttagatcgttgcggtagggaacgagatgcggcgtttttgggtttcgtagcggttgtagttttcgggattttcgttgttcgtttcgttttaattttttcgttcggcgttcggcgcgtttagtttcggtcgtagtttttagtttcgggcgttcggtcgagcgttgggattcggttttcgtcgtcggtacgtttttcggtagttattcgttggcgttgtttcggtttgcggtcgtttttcgttttttttttttttcgaattaatagtaaatataattttttatgaaaagaaaataaattttagcgacgtgatttatttttgttgtagtcggcgtttgggaagggcgagtcggggttcgggggttagcgtggtgggcgcgagggagttatatagcgtcgcgtcgnacggatatataatacgttcggtgatatcggggatattaatacgggcgagcggtcgcggttggagtaataaaggagtcgaggatcgagaagttgcggttcgcgaaagggaggtttcggtcggtcgtgttgtggttgtggcggtcgtgaaggtgtgtcgcgtcgggggtttcggggggttttttttgggggggttgggggtttttgggggcgggttgggcgcgtttcgcggggttgatttcgtgggcggggtttaggt

SEQ ID NO: 31950 - DNA, 677 bp, Artificial Sequence
  chemically treated genomic DNA (Homo sapiens) CpG-island No: 31950
  unsure (257)
acctaaaccccgcccacgaaatcaaccccgcgaaacgcgcccaacccgcccccaaaaacccccaacccccccaaaaaaaaccccccgaaacccccgacgcgacacaccttcacgaccgccacaaccacaacacgaccgaccgaaacctccctttcgcgaaccgcaacttctcgatcctcgactcctttattactccaaccgcgaccgctcgcccgtattaatatccccgatatcaccgaacgtattatatatccgtncgacgcgacgctatataactccctcgcgcccaccacgctaacccccgaaccccgactcgcccttcccaaacgccgactacaacaaaaataaatcacgtcgctaaaatttattttcttttcataaaaaattatatttactattaattcgaaaaaaaaaaaaaacgaaaaacgaccgcaaaccgaaacaacgccaacgaataactaccgaaaaacgtaccgacgacgaaaaccgaatcccaacgctcgaccgaacgcccgaaactaaaaactacgaccgaaactaaacgcgccgaacgccgaacgaaaaaattaaaacgaaacgaacaacgaaaatcccgaaaactacaaccgctacgaaacccaaaaacgccgcatctcgttccctaccgcaacgatctaaccgaacgataataatttcgc

SEQ ID NO: 31951 - DNA, 677 bp, Artificial Sequence
  chemically treated genomic DNA (Homo sapiens) CpG-island No: 31951
  unsure (257)
atttgagtttcgtttacggggttaatttcgcggggcgcgtttaattcgtttttaggggtttttaatttttttagaaaagatttttcggggttttcggcgcggtatatttttacggtcgttatagttataatacggtcggtcggggtttttttttcgcgggtcgtaatttttcggttttcggtttttttgttgttttagtcgcggtcgttcgttcgtgttggtgttttcggtgttatcgagcgtgttgtgtgttcgtncggcgcggcgttgtgtggttttttcgcgtttattacgttggttttcgggtttcggttcgttttttttaggcgtcggttgtagtagaggtgagttacgtcgttgaagtttgttttttttttataaaaagttgtgtttattgttggttcggggagaggagggggcgggaggcggtcgtaggtcgaggtagcgttagcgagtggttgtcgggggacgtgtcggcggcgggagtcgggttttagcgttcggtcgggcgttcggggttgggagttgcggtcgaggttgggcgcgtcgggcgtcgggcgaagaagttggggcgaggcgggtagcgggggtttcgggggttgtagtcgttacggggtttaggggcgtcgtatttcgttttttgtcgtagcggtttggtcgggcgatggtggtttcgt

SEQ ID NO: 31952 - DNA, 677 bp, Artificial Sequence
  chemically treated genomic DNA (Homo sapiens) CpG-island No: 31952
  unsure (421)
acgaaaccaccatcgcccgaccaaaccgctacgacaaaaaacgaaatacgacgcccctaaaccccgtaacgactacaacccccgaaacccccgctacccgcctcgccccaacttcttcgcccgacgcccgacgcgcccaacctcgaccgcaactcccaaccccgaacgcccgaccgaacgctaaaacccgactcccgccgccgacacgtcccccgacaaccactcgctaacgctacctcgacctacgaccgcctcccgccccctcctctccccgaaccaacaataaacacaactttttataaaaaaaaaacaaacttcaacgacgtaactcacctctactacaaccgacgcctaaaaaaaacgaaccgaaacccgaaaaccaacgtaataaacgcgaaaaaaccacacaacgccgcgccgnacgaacacacaacacgctcgataacaccgaaaacaccaacacgaacgaacgaccgcgactaaaacaacaaaaaaaccgaaaaccgaaaaattacgacccgcgaaaaaaaaaccccgaccgaccgtattataactataacgaccgtaaaaatataccgcgccgaaaaccccgaaaaatcttttctaaaaaaattaaaaacccctaaaaacgaattaaacgcgccccgcgaaattaaccccgtaaacgaaactcaaat

SEQ ID NO: 31953 - DNA, 531 bp, Artificial Sequence
  chemically treated genomic DNA (Homo sapiens) CpG-island No: 31953
tcgttatttaggcggtcgtataggtttcgtcggtttcgttttcgtcgttatcgttagttgaattaatatatgtaattcgttttttcggttagggtcgttcgagcgttcgatcgttagtagcgttttcgcgagataatgagtttttatcgcgagatttcggtcgtcgttgggcggatgtcgcgagaagtcggaagacgggggcggagaaaaattgcggagcgtgcgttttgtttttcggtggggggcgtggttaagaggtcgagaggcgggtcgtcggtaggcggtgttcgttattcgttggagaggatgaattttcgagatgggcgtgtcgaagggaacgtgatttgtagacgtagagagcgtatttgagttataaatgattttttattaatgagttcgaggattatcgtttcggtgtttgcggtgtattttggagttttgattaatttttagttattgtataaattattttcgtgcggggagattgtagtcggatagagcgtttggtcgtattttaatattatgtattga

SEQ ID NO: 31954 - DNA, 531 bp, Artificial Sequence
  chemically treated genomic DNA (Homo sapiens) CpG-island No: 31954
tcaatacataatattaaaatacgaccaaacgctctatccgactacaatctccccgcacgaaaataatttatacaataactaaaaattaatcaaaactccaaaatacaccgcaaacaccgaaacgataatcctcgaactcattaataaaaaatcatttataactcaaatacgctctctacgtctacaaatcacgttcccttcgacacgcccatctcgaaaattcatcctctccaacgaataacgaacaccgcctaccgacgacccgcctctcgacctcttaaccacgccccccaccgaaaaacaaaacgcacgctccgcaatttttctccgcccccgtcttccgacttctcgcgacatccgcccaacgacgaccgaaatctcgcgataaaaactcattatctcgcgaaaacgctactaacgatcgaacgctcgaacgaccctaaccgaaaaaacgaattacatatattaattcaactaacgataacgacgaaaacgaaaccgacgaaacctatacgaccgcctaaataacga

SEQ ID NO: 31955 - DNA, 531 bp, Artificial Sequence
  chemically treated genomic DNA (Homo sapiens) CpG-island No: 31955
ttagtgtatggtgttaaaatgcgattaaacgttttattcggttgtaattttttcgtacgggagtgatttatgtagtagttggaggttagttaggattttaggatgtatcgtagatatcgaggcgatgattttcggatttattaatagggagttatttgtgatttaggtgcgttttttgcgtttgtaagttacgtttttttcggtacgtttatttcgaggatttattttttttaacgggtgacgagtatcgtttgtcggcggttcgtttttcggttttttggttacgttttttatcggagggtaaggcgtacgtttcgtaattttttttcgttttcgtttttcggtttttcgcgatattcgtttagcggcggtcggaatttcgcgataaaggtttattgtttcgcgggagcgttgttggcggtcgggcgttcgggcggttttggtcggggagacgagttgtatgtgttggtttagttggcgatagcggcgggagcggagtcggcggggtttgtgcgatcgtttgggtaacga

SEQ ID NO: 31956 - DNA, 531 bp, Artificial Sequence
  chemically treated genomic DNA (Homo sapiens) CpG-island No: 31956
tcgttacccaaacgatcgcacaaaccccgccgactccgctcccgccgctatcgccaactaaaccaacacatacaactcgtctccccgaccaaaaccgcccgaacgcccgaccgccaacaacgctcccgcgaaacaataaacctttatcgcgaaattccgaccgccgctaaacgaatatcgcgaaaaaccgaaaaacgaaaacgaaaaaaaattacgaaacgtacgccttaccctccgataaaaaacgtaaccaaaaaaccgaaaaacgaaccgccgacaaacgatactcgtcacccgttaaaaaaaataaatcctcgaaataaacgtaccgaaaaaaacgtaacttacaaacgcaaaaaacgcacctaaatcacaaataactccctattaataaatccgaaaatcatcgcctcgatatctacgatacatcctaaaatcctaactaacctccaactactacataaatcactcccgtacgaaaaaattacaaccgaataaaacgtttaatcgcattttaacaccatacactaa

SEQ ID NO: 31957 - DNA, 545 bp, Artificial Sequence
  chemically treated genomic DNA (Homo sapiens) CpG-island No: 31957
  unsure (78, 269, 311, 346, 394, 400, 480, 519)
gggcgtcgtttcggttttttttttcgtttttcgcgcgcgcgcggggcgttcgcgttttcggcgcgttcgttcgtcgtngtttttgtttttttttgtcgcgttcggcgttgtttttttcgttcggttttttcggcgtttcgcgtttttcgcgtcgtgcgtttttttgttttttttgtttcgttttttttttttttttcgtttttttcgttcgcgtttcgttgttcggcggtggtttcgttgggcgtgtgcgcgggttcgcgtttcgtttntcgttcggtttcggtcgttgtcgttagcggttcgtttgtgtncgcgttttttttttttttcgtcgcgttcgcgtcgngtttttttgtgtgttttcggaattcgcgtcgttttcgcggtgtttcgncgtcgntgttttcgtcgggtgcggcgtggtttttttttttcgtttcgtttcgcgttttcgtcgcgtcgcgcgcggtattcgcgcgntcgcgttttcgggttcgcgcggttgtgttgcgtatgttntcgtatatttttcgtcggtagtatgt

SEQ ID NO: 31958 - DNA, 545 bp, Artificial Sequence
  chemically treated genomic DNA (Homo sapiens) CpG-island No: 31958
  unsure (27, 66, 146, 152, 200, 235, 277, 468)
acatactaccgacgaaaaatatacganaacatacgcaacacaaccgcgcgaacccgaaaacgcgancgcgcgaataccgcgcgcgacgcgacgaaaacgcgaaacgaaacgaaaaaaaaaaaccacgccgcacccgacgaaaacancgacgncgaaacaccgcgaaaacgacgcgaattccgaaaacacacaaaaaaacncgacgcgaacgcgacgaaaaaaaaaaaaaacgcgnacacaaacgaaccgctaacgacaacgaccgaaaccgaacganaaacgaaacgcgaacccgcgcacacgcccaacgaaaccaccgccgaacaacgaaacgcgaacgaaaaaaacgaaaaaaaaaaaaaaaacgaaacaaaaaaaacaaaaaaacgcacgacgcgaaaaacgcgaaacgccgaaaaaaccgaacgaaaaaaacaacgccgaacgcgacaaaaaaaaacaaaaacnacgacgaacgaacgcgccgaaaacgcgaacgccccgcgcgcgcgcgaaaaacgaaaaaaaaaaccgaaacgacgccc

SEQ ID NO: 31959 - DNA, 545 bp, Artificial Sequence
  chemically treated genomic DNA (Homo sapiens) CpG-island No: 31959
  unsure (27, 66, 146, 152, 200, 235, 277, 468)
atatattgtcgacggagaatgtgcgangatatacgtaatatagtcgcgcgaattcgggggcgcggncgcgcgggtatcgcgcgcggcgcggcgggagcgcggaacgaggcggggaaggagggttacgtcgtattcggcggaggtancggcgncggagtatcgcggggacggcgcgggtttcgggagtatataaagagatncgacgcgagcgcggcgggggggagaggagacgcgnatatagacgggtcgttggcggtagcggtcggaatcgggcggngagcggggcgcgggttcgcgtatacgtttagcgaggttatcgtcggataacggggcgcgggcgggaaaggcggaagggagaggagaggcggggtagagagggtagagagacgtacggcgcggggagcgcggagcgtcgggaaaatcgggcggagggggtaacgtcgaacgcggtaggggaaaatagagatnacggcgggcgggcgcgtcgggggcgcgggcgtttcgcgcgcgcgcgggaggcggagggaggagtcggggcggcgttt

SEQ ID NO: 31960 - DNA, 545 bp, Artificial Sequence
  chemically treated genomic DNA (Homo sapiens) CpG-island No: 31960
  unsure (78, 269, 311, 346, 394, 400, 480, 519)
aaacgccgccccgactcctccctccgcctcccgcgcgcgcgcgaaacgcccgcgcccccgacgcgcccgcccgccgtnatctctattttcccctaccgcgttcgacgttaccccctccgcccgattttcccgacgctccgcgctccccgcgccgtacgtctctctaccctctctaccccgcctctcctctcccttccgcctttcccgcccgcgccccgttatccgacgataacctcgctaaacgtatacgcgaacccgcgccccgctcnccgcccgattccgaccgctaccgccaacgacccgtctatatncgcgtctcctctcccccccgccgcgctcgcgtcgnatctctttatatactcccgaaacccgcgccgtccccgcgatactccgncgccgntacctccgccgaatacgacgtaaccctccttccccgcctcgttccgcgctcccgccgcgccgcgcgcgatacccgcgcgnccgcgcccccgaattcgcgcgactatattacgtatatcntcgcacattctccgtcgacaatatat

SEQ ID NO: 31961 - DNA, 507 bp, Artificial Sequence
  chemically treated genomic DNA (Homo sapiens) CpG-island No: 31961
tcgtaggcgatgttttcggcgtcggcgaagaggcggatgaggtagtttacggagtagacgtagtagtatatggagaggaagatgatggggcgttcggggtagcggaagcgggtcgggtcgatgaggaaggtgagtacggtgaaggcgttggagaagaagtatagtatcgtttagatggttagttagattattgcgaagcgtttgttttcgcggttttagtatacgtttacgtcgggcgtgtagagcggcgcgtacgacgcgtttttttttacgtggtggaatttgttcgggttgtcgtagtcgtcgcgttcggggttttcgttttttagcgggtgtttttgcgcgttgtggggtcgttgcggtcggaatagcggcgggaataggttcgagtttcgggtgggttcgttcgagtcgttgttgggcgtttttatgtataggtagttggggtcgtttttgttggggagttttcggtagtttagggagtcgggttatttgaagttgaattgt

SEQ ID NO: 31962 - DNA, 507 bp, Artificial Sequence
  chemically treated genomic DNA (Homo sapiens) CpG-island No: 31962
acaattcaacttcaaataacccgactccctaaactaccgaaaactccccaacaaaaacgaccccaactacctatacataaaaacgcccaacaacgactcgaacgaacccacccgaaactcgaacctattcccgccgctattccgaccgcaacgaccccacaacgcgcaaaaacacccgctaaaaaacgaaaaccccgaacgcgacgactacgacaacccgaacaaattccaccacgtaaaaaaaaacgcgtcgtacgcgccgctctacacgcccgacgtaaacgtatactaaaaccgcgaaaacaaacgcttcgcaataatctaactaaccatctaaacgatactatacttcttctccaacgccttcaccgtactcaccttcctcatcgacccgacccgcttccgctaccccgaacgccccatcatcttcctctccatatactactacgtctactccgtaaactacctcatccgcctcttcgccgacgccgaaaacatcgcctacga

SEQ ID NO: 31963 - DNA, 507 bp, Artificial Sequence
  chemically treated genomic DNA (Homo sapiens) CpG-island No: 31963
gtagtttaattttaagtggttcgattttttggattgtcggaaattttttaataagaacgattttaattatttgtgtatggaggcgtttaataacggttcggacgagtttattcggggttcgggtttgttttcgtcgttgtttcggtcgtagcggttttatagcgcgtaggagtattcgttgaaggacgggggtttcgggcgcggcggttgcgataattcgggtaagttttattacgtggagaagagcgcgtcgtgcgcgtcgttttgtacgttcggcgtggacgtgtattggagtcgcgaggataagcgtttcgtagtggtttggttggttatttgggcggtgttgtgttttttttttagcgtttttatcgtgtttattttttttatcgattcggttcgttttcgttatttcgagcgttttattatttttttttttatgtgttattgcgtttatttcgtgggttattttattcgttttttcgtcggcgtcgagagtatcgtttgcga

SEQ ID NO: 31964 - DNA, 507 bp, Artificial Sequence
  chemically treated genomic DNA (Homo sapiens) CpG-island No: 31964
tcgcaaacgatactctcgacgccgacgaaaaaacgaataaaataacccacgaaataaacgcaataacacataaaaaaaaaaataataaaacgctcgaaataacgaaaacgaaccgaatcgataaaaaaaataaacacgataaaaacgctaaaaaaaaaacacaacaccgcccaaataaccaaccaaaccactacgaaacgcttatcctcgcgactccaatacacgtccacgccgaacgtacaaaacgacgcgcacgacgcgctcttctccacgtaataaaacttacccgaattatcgcaaccgccgcgcccgaaacccccgtccttcaacgaatactcctacgcgctataaaaccgctacgaccgaaacaacgacgaaaacaaacccgaaccccgaataaactcgtccgaaccgttattaaacgcctccatacacaaataattaaaatcgttcttattaaaaaatttccgacaatccaaaaaatcgaaccacttaaaattaaactac

SEQ ID NO: 31965 - DNA, 836 bp, Artificial Sequence
  chemically treated genomic DNA (Homo sapiens) CpG-island No: 31965
agtcgggtttgttcgtatatgattcggtaggcggggatgggggtagagatttgttcggtgtatatcggcgcgtatagcgagtataggaagaagcggaggtggtcgtggtagtcgtattttattagcggcgcgaattcgtgtaattggatggttgtttcgcgttggttttcgtggtttattaggttgggtatacgagttatgttgtagtcgatgtttttgtatatcgggatttcgatgggttggtatttgtcgtcgttcgggcgttttatgtttatggagttgatggcggcgtacgagtttattatttgtaggattagttataggcgggggttcgggcgttgtatgttggcgttggacgtgttttcgcggggagtttcgcgttttttagcgtcgtcgttttcgggtacgggttgttgttggtttcggttttttatttttgttcgggttttcgtttatgttcgttcggtttggttcgagcgttgcgtatagcgttttcggttcggtttttcgcgttcggcgttcgtcgagttgggggtcgcggcggagagtagtaaagtttgtaaataatatcgggaagcgagggaagttttcggagttttcggcgtagcggttcggcgcgagttttaatttacggtcgcggtaaatttcggtttttttttggagcgtttaggtggcgcgtttggagcgggttggcggcgcgggtatatcgaggtcggtttagttcgcggcgtttttatagttcgggcggtttttttttttttgcgtcggtttcggtcgggattagtcggtagttgtttcgaggtttgcgtttcgggatgagaagattcgtaaaaagg

SEQ ID NO: 31966 - DNA, 836 bp, Artificial Sequence
  chemically treated genomic DNA (Homo sapiens) CpG-island No: 31966
cctttttacgaatcttctcatcccgaaacgcaaacctcgaaacaactaccgactaatcccgaccgaaaccgacgcaaaaaaaaaaaaaccgcccgaactataaaaacgccgcgaactaaaccgacctcgatatacccgcgccgccaacccgctccaaacgcgccacctaaacgctccaaaaaaaaaccgaaatttaccgcgaccgtaaattaaaactcgcgccgaaccgctacgccgaaaactccgaaaacttccctcgcttcccgatattatttacaaactttactactctccgccgcgacccccaactcgacgaacgccgaacgcgaaaaaccgaaccgaaaacgctatacgcaacgctcgaaccaaaccgaacgaacataaacgaaaacccgaacaaaaataaaaaaccgaaaccaacaacaacccgtacccgaaaacgacgacgctaaaaaacgcgaaactccccgcgaaaacacgtccaacgccaacatacaacgcccgaacccccgcctataactaatcctacaaataataaactcgtacgccgccatcaactccataaacataaaacgcccgaacgacgacaaataccaacccatcgaaatcccgatatacaaaaacatcgactacaacataactcgtatacccaacctaataaaccacgaaaaccaacgcgaaacaaccatccaattacacgaattcgcgccgctaataaaatacgactaccacgaccacctccgcttcttcctatactcgctatacgcgccgatatacaccgaacaaatctctacccccatccccgcctaccgaatcatatacgaacaaacccgact

SEQ ID NO: 31967 - DNA, 836 bp, Artificial Sequence
  chemically treated genomic DNA (Homo sapiens) CpG-island No: 31967
tttttttgcgagtttttttatttcgggacgtaaatttcgaaatagttgtcggttggtttcggtcgaggtcggcgtagggagggaggagtcgttcgggttgtgggggcgtcgcgagttgggtcggtttcggtgtgttcgcgtcgttagttcgttttagacgcgttatttgggcgttttaagaagaggtcgaagtttgtcgcggtcgtgagttggagttcgcgtcgggtcgttgcgtcgggagtttcgggggtttttttcgtttttcggtattgtttgtaaattttgttgtttttcgtcgcggtttttaattcggcggacgtcgggcgcggagagtcgagtcgggggcgttgtgcgtagcgttcgggttaggtcgggcgggtatgggcgggggttcgagtaggggtggagagtcggggttagtagtagttcgtgttcgggagcggcggcgttgaggggcgcggagtttttcgcgaggatacgtttaacgttagtatgtagcgttcgggttttcgtttgtggttggttttgtaggtgatgggttcgtgcgtcgttattagttttatggatatggagcgttcgggcgacggtaaatgttagtttatcgagatttcgatgtgtaaggatatcggttataatatgattcgtatgtttaatttgatgggttacgagaattagcgcgaggtagttatttagttgtacgagttcgcgtcgttggtggagtacggttgttacggttattttcgtttttttttgtgttcgttgtacgcgtcgatgtgtatcgagtaggtttttatttttattttcgtttgtcgggttatgtgcgagtaggttcggtt

SEQ ID NO: 31968 - DNA, 836 bp, Artificial Sequence
  chemically treated genomic DNA (Homo sapiens) CpG-island No: 31968
aaccgaacctactcgcacataacccgacaaacgaaaataaaaataaaaacctactcgatacacatcgacgcgtacaacgaacacaaaaaaaaacgaaaataaccgtaacaaccgtactccaccaacgacgcgaactcgtacaactaaataactacctcgcgctaattctcgtaacccatcaaattaaacatacgaatcatattataaccgatatccttacacatcgaaatctcgataaactaacatttaccgtcgcccgaacgctccatatccataaaactaataacgacgcacgaacccatcacctacaaaaccaaccacaaacgaaaacccgaacgctacatactaacgttaaacgtatcctcgcgaaaaactccgcgcccctcaacgccgccgctcccgaacacgaactactactaaccccgactctccacccctactcgaacccccgcccatacccgcccgacctaacccgaacgctacgcacaacgcccccgactcgactctccgcgcccgacgtccgccgaattaaaaaccgcgacgaaaaacaacaaaatttacaaacaataccgaaaaacgaaaaaaacccccgaaactcccgacgcaacgacccgacgcgaactccaactcacgaccgcgacaaacttcgacctcttcttaaaacgcccaaataacgcgtctaaaacgaactaacgacgcgaacacaccgaaaccgacccaactcgcgacgcccccacaacccgaacgactcctccctccctacgccgacctcgaccgaaaccaaccgacaactatttcgaaatttacgtcccgaaataaaaaaactcgcaaaaaaa

SEQ ID NO: 31969 - DNA, 560 bp, Artificial Sequence
  chemically treated genomic DNA (Homo sapiens) CpG-island No: 31969
  unsure (273, 347, 463)
cgggacgcgcggtagggattttgtaaattttgtaaaagtttcgagtagatcgtagaggttcgcggtcgcgggtaggtttttttagatttttcgtagattttagtagattcggcgtgtattttttattcgcggagtatttcggtgtgtagcgatttttcgagagttggcgtagggttatttggttgtagagaacgtgtgtatttttagttcgggaaattcgttttagtcgagtagtcgcgtattttgggaagtttggcgagttacggcgtcggnggcggttaaggggaggcgggatgagtttgcgagtcggttgagcgcgtcgaggagtcggtcggggtatcgtcggngatatggtaggattcgcgggaaggacgcgcgagcggagggtggggcgattattaggataggtggttgtagttaaacgcgtagcggttagggcgcgcgtagtttgcgcggttttttngaggtcggagtgtttttcgaagttgtatggggcggcgtcggtttttatttttgattagagttggggcgatcggttttttgtcgtttttagtggggcg

SEQ ID NO: 31970 - DNA, 560 bp, Artificial Sequence
  chemically treated genomic DNA (Homo sapiens) CpG-island No: 31970
  unsure (98, 214, 288)
cgccccactaaaaacgacaaaaaaccgatcgccccaactctaatcaaaaataaaaaccgacgccgccccatacaacttcgaaaaacactccgacctcnaaaaaaccgcgcaaactacgcgcgccctaaccgctacgcgtttaactacaaccacctatcctaataatcgccccaccctccgctcgcgcgtccttcccgcgaatcctaccatatcnccgacgataccccgaccgactcctcgacgcgctcaaccgactcgcaaactcatcccgcctccccttaaccgccnccgacgccgtaactcgccaaacttcccaaaatacgcgactactcgactaaaacgaatttcccgaactaaaaatacacacgttctctacaaccaaataaccctacgccaactctcgaaaaatcgctacacaccgaaatactccgcgaataaaaaatacacgccgaatctactaaaatctacgaaaaatctaaaaaaacctacccgcgaccgcgaacctctacgatctactcgaaacttttacaaaatttacaaaatccctaccgcgcgtcccg

SEQ ID NO: 31971 - DNA, 560 bp, Artificial Sequence
  chemically treated genomic DNA (Homo sapiens) CpG-island No: 31971
  unsure (98, 214, 288)
cgttttattaagagcggtagaaaatcgatcgttttagttttggttagaaatgaaagtcggcgtcgttttatgtaatttcggggaatatttcggttttngggaggtcgcgtaggttgcgcgcgttttggtcgttgcgcgtttgattgtagttatttgttttggtgatcgttttatttttcgttcgcgcgtttttttcgcgagttttattatgttntcggcggtgtttcggtcggtttttcggcgcgtttagtcggttcgtagatttatttcgtttttttttggtcgttntcggcgtcgtggttcgttaggttttttaggatgcgcggttattcggttggggcgggtttttcggattgaaggtgtatacgttttttgtagttaagtggttttgcgttaattttcgggagatcgttgtatatcgggatatttcgcgggtggggaatatacgtcggatttattgagatttacgggggatttgagggagtttattcgcggtcgcgagtttttgcggtttattcgggatttttgtagagtttgtaaagtttttgtcgcgcgtttcg

SEQ ID NO: 31972 - DNA, 560 bp, Artificial Sequence
  chemically treated genomic DNA (Homo sapiens) CpG-island No: 31972
  unsure (273, 347, 463)
cgaaacgcgcgacaaaaactttacaaactctacaaaaatcccgaataaaccgcaaaaactcgcgaccgcgaataaactccctcaaatcccccgtaaatctcaataaatccgacgtatattccccacccgcgaaatatcccgatatacaacgatctcccgaaaattaacgcaaaaccacttaactacaaaaaacgtatacaccttcaatccgaaaaacccgccccaaccgaataaccgcgcatcctaaaaaacctaacgaaccacgacgccganaacgaccaaaaaaaaacgaaataaatctacgaaccgactaaacgcgccgaaaaaccgaccgaaacaccgccganaacataataaaactcgcgaaaaaaacgcgcgaacgaaaaataaaacgatcaccaaaacaaataactacaatcaaacgcgcaacgaccaaaacgcgcgcaacctacgcgacctcccnaaaaccgaaatattccccgaaattacataaaacgacgccgactttcatttctaaccaaaactaaaacgatcgattttctaccgctcttaataaaacg

SEQ ID NO: 31973 - DNA, 537 bp, Artificial Sequence
  chemically treated genomic DNA (Homo sapiens) CpG-island No: 31973
tcgcggtggttataaagggggttaagagtgtcggatttagtcgcgcggagtttattattgcggttcgagggggattcgacgggggttcgacggtgtggcgtggcgtaaggagcgcgtttgttttttttcgtcgtcgggaacgggttgtattaatggttaggtgaggaggcggcggtggtcgttcgggaggagggggtggtgtcgatttcgtgtgttaggagtgcgtttcggggacgttgtttttttcgcggtcgagttggttgtcgtcggttgcgttgcggagggttgggggcggagaggaggtagtggttgttcgggtcgaggaggggcgcgttgattgtttatcgcgagttaggaggggtcggcgggtttacggagggagatagggtgggcgggggtaaaggttaggcgttagggcggcggcgttagcgtagagcggcggtttggaggaaagatgagacggtgagtgggtttcggggatatagagtttttttgtttttttataggttgtagggataaaagttcgggttggggtcg

SEQ ID NO: 31974 - DNA, 537 bp, Artificial Sequence
  chemically treated genomic DNA (Homo sapiens) CpG-island No: 31974
cgaccccaacccgaacttttatccctacaacctataaaaaaacaaaaaaactctatatccccgaaacccactcaccgtctcatctttcctccaaaccgccgctctacgctaacgccgccgccctaacgcctaacctttacccccgcccaccctatctccctccgtaaacccgccgacccctcctaactcgcgataaacaatcaacgcgcccctcctcgacccgaacaaccactacctcctctccgcccccaaccctccgcaacgcaaccgacgacaaccaactcgaccgcgaaaaaaacaacgtccccgaaacgcactcctaacacacgaaatcgacaccaccccctcctcccgaacgaccaccgccgcctcctcacctaaccattaatacaacccgttcccgacgacgaaaaaaaacaaacgcgctccttacgccacgccacaccgtcgaacccccgtcgaatccccctcgaaccgcaataataaactccgcgcgactaaatccgacactcttaaccccctttataaccaccgcga

SEQ ID NO: 31975 - DNA, 537 bp, Artificial Sequence
  chemically treated genomic DNA (Homo sapiens) CpG-island No: 31975
cgattttagttcgggtttttgtttttatagtttgtaaagaagtaaagaaattttgtgttttcggagtttatttatcgttttattttttttttaaatcgtcgttttacgttggcgtcgtcgttttagcgtttagtttttgttttcgtttattttgttttttttcgtgagttcgtcggttttttttgattcgcggtgagtagttagcgcgttttttttcggttcgggtagttattgtttttttttcgtttttaatttttcgtagcgtaatcggcggtaattaattcggtcgcgggggaggtagcgttttcgggacgtatttttggtatacggagtcggtattatttttttttttcgggcgattatcgtcgtttttttatttggttattggtgtagttcgttttcggcggcgagagaaggtaggcgcgttttttgcgttacgttatatcgtcgggttttcgtcgggtttttttcgggtcgtaatggtgggtttcgcgcggttgggttcggtatttttgattttttttgtaattatcgcgg

SEQ ID NO: 31976 - DNA, 537 bp, Artificial Sequence
  chemically treated genomic DNA (Homo sapiens) CpG-island No: 31976
ccgcgataattacaaaaaaaatcaaaaataccgaacccaaccgcgcgaaacccaccattacgacccgaaaaaaacccgacgaaaacccgacgatataacgtaacgcaaaaaacgcgcctaccttctctcgccgccgaaaacgaactacaccaataaccaaataaaaaaacgacgataatcgcccgaaaaaaaaaaataataccgactccgtataccaaaaatacgtcccgaaaacgctacctcccccgcgaccgaattaattaccgccgattacgctacgaaaaattaaaaacgaaaaaaaaacaataactacccgaaccgaaaaaaaacgcgctaactactcaccgcgaatcaaaaaaaaccgacgaactcacgaaaaaaaacaaaataaacgaaaacaaaaactaaacgctaaaacgacgacgccaacgtaaaacgacgatttaaaaaaaaaataaaacgataaataaactccgaaaacacaaaatttctttacttctttacaaactataaaaacaaaaacccgaactaaaatcg

SEQ ID NO: 31977 - DNA, 992 bp, Artificial Sequence
  chemically treated genomic DNA (Homo sapiens) CpG-island No: 31977
tttcgattttcgttttcgggatcggttgcgatttttcgagcgtttgcgggagtcgacgtgagttatggcgtcgcgggttggcgacgaagaagacgcgtttgagtcgaagtttttaaggtcggtcgcgggcgggttttaagggtggttttagcggggtcggggtttggcgacgtttagtattcgttatcgtttcgggaaaatgagcgatttttatttatttttagcgttggggatttcggtttttttcgtcgattttagttttcgtagcggtgtttgttaagggttcgtttcgtgttcggaggttttacgtttgcgtattcggttttaaatttttgggaattggtcgtcgttcgtcgcgagtggcgtttggggcgttttttcgcgtttttttattttttagtttcgcgtttttcgcggtttcgtcgttttaagggggttttcggggttgtttcgtttttatttcgatcgttttgcgggtcggatagttcgtttcgcgttttttcgagaggaagcggcggcgaggaggttttcggtcggggcgttgcgcgggaggttggtcggttgggaagcgcggcgtcgttgtttttcgttttgacgttttaggtttcgtttcgggcgcgtttatttttcgtagaggtaagtaggggcgtcggttttcgagtttcgtagttttttacgtttgtgtttgtcgaagttgcgtttatttttaaggttgttttttcggcgtacgttcgtagtatttacgttttcggtgttttgggaagaaggcgattttcgcgcgcgtcgttttttttttcggttggttttgttttttttatacgattgcgagttttagattgaggcgttttggttttttcgacgcgtttatttagtgatttagaggtcgtaaattcgtgttcgtaggggttagaaagattttggtagtgagcgcgggtatggattttaggtttattcggaaggaagttaggattttgttttagttgatacgtgta

SEQ ID NO: 31978 - DNA, 992 bp, Artificial Sequence
  chemically treated genomic DNA (Homo sapiens) CpG-island No: 31978
tacacgtatcaactaaaacaaaatcctaacttccttccgaataaacctaaaatccatacccgcgctcactaccaaaatctttctaacccctacgaacacgaatttacgacctctaaatcactaaataaacgcgtcgaaaaaaccaaaacgcctcaatctaaaactcgcaatcgtataaaaaaaacaaaaccaaccgaaaaaaaaaacgacgcgcgcgaaaatcgccttcttcccaaaacaccgaaaacgtaaatactacgaacgtacgccgaaaaaacaaccttaaaaataaacgcaacttcgacaaacacaaacgtaaaaaactacgaaactcgaaaaccgacgcccctacttacctctacgaaaaataaacgcgcccgaaacgaaacctaaaacgtcaaaacgaaaaacaacgacgccgcgcttcccaaccgaccaacctcccgcgcaacgccccgaccgaaaacctcctcgccgccgcttcctctcgaaaaaacgcgaaacgaactatccgacccgcaaaacgatcgaaataaaaacgaaacaaccccgaaaacccccttaaaacgacgaaaccgcgaaaaacgcgaaactaaaaaataaaaaaacgcgaaaaaacgccccaaacgccactcgcgacgaacgacgaccaattcccaaaaatttaaaaccgaatacgcaaacgtaaaacctccgaacacgaaacgaacccttaacaaacaccgctacgaaaactaaaatcgacgaaaaaaaccgaaatccccaacgctaaaaataaataaaaatcgctcattttcccgaaacgataacgaatactaaacgtcgccaaaccccgaccccgctaaaaccacccttaaaacccgcccgcgaccgaccttaaaaacttcgactcaaacgcgtcttcttcgtcgccaacccgcgacgccataactcacgtcgactcccgcaaacgctcgaaaaatcgcaaccgatcccgaaaacgaaaatcgaaa

SEQ ID NO: 31979 - DNA, 992 bp, Artificial Sequence
  chemically treated genomic DNA (Homo sapiens) CpG-island No: 31979
tgtacgtattagttggagtagaattttggttttttttcggatgggtttggggtttatgttcgcgtttattgttaagatttttttggtttttacggatacgagtttgcgatttttgagttattgggtgggcgcgtcggaaagattagggcgttttagtttggagttcgtagtcgtatggagagggtaggattagtcggggaggagggcggcgcgcgcgagggtcgttttttttttagggtatcgggggcgtgggtgttgcgggcgtgcgtcgagagggtagttttggaagtgggcgtagtttcggtagatataggcgtgaggggttgcggagttcgagggtcggcgtttttgtttgtttttgcgggaggtgggcgcgttcgggacggaatttggggcgttagaacgaaaggtagcggcgtcgcgttttttagtcggttagtttttcgcgtagcgtttcggtcggaagttttttcgtcgtcgttttttttcgagaaggcgcggggcgggttgttcggttcgtagggcggtcgaggtgggaacggagtagtttcgggggtttttttgaggcggcgaggtcgcgaagggcgcggggttggagggtaggagagcgcgggaaagcgttttagacgttattcgcggcggacggcggttagtttttaggggtttggagtcgggtgcgtaggcgtggggttttcgggtacggggcgggtttttaataggtatcgttgcggggattggagtcggcggagaaaatcggggtttttagcgttgggggtgggtgagggtcgtttattttttcgggacggtgacgggtattgggcgtcgttaggtttcggtttcgttagagttatttttggagttcgttcgcggtcggttttgggggtttcggtttaagcgcgtttttttcgtcgttagttcgcggcgttatggtttacgtcggttttcgtaagcgttcgaggagtcgtagtcggtttcggggacgggggtcggaa

SEQ ID NO: 31980 - DNA, 992 bp, Artificial Sequence
  chemically treated genomic DNA (Homo sapiens) CpG-island No: 31980
ttccgacccccgtccccgaaaccgactacgactcctcgaacgcttacgaaaaccgacgtaaaccataacgccgcgaactaacgacgaaaaaaacgcgcttaaaccgaaacccccaaaaccgaccgcgaacgaactccaaaaataactctaacgaaaccgaaacctaacgacgcccaatacccgtcaccgtcccgaaaaaataaacgaccctcacccacccccaacgctaaaaaccccgattttctccgccgactccaatccccgcaacgatacctattaaaaacccgccccgtacccgaaaaccccacgcctacgcacccgactccaaacccctaaaaactaaccgccgtccgccgcgaataacgtctaaaacgctttcccgcgctctcctaccctccaaccccgcgcccttcgcgacctcgccgcctcaaaaaaacccccgaaactactccgttcccacctcgaccgccctacgaaccgaacaacccgccccgcgccttctcgaaaaaaaacgacgacgaaaaaacttccgaccgaaacgctacgcgaaaaactaaccgactaaaaaacgcgacgccgctacctttcgttctaacgccccaaattccgtcccgaacgcgcccacctcccgcaaaaacaaacaaaaacgccgaccctcgaactccgcaacccctcacgcctatatctaccgaaactacgcccacttccaaaactaccctctcgacgcacgcccgcaacacccacgcccccgataccctaaaaaaaaaacgaccctcgcgcgcgccgccctcctccccgactaatcctaccctctccatacgactacgaactccaaactaaaacgccctaatctttccgacgcgcccacccaataactcaaaaatcgcaaactcgtatccgtaaaaaccaaaaaaatcttaacaataaacgcgaacataaaccccaaacccatccgaaaaaaaaccaaaattctactccaactaatacgtaca

SEQ ID NO: 31981 - DNA, 755 bp, Artificial Sequence
  chemically treated genomic DNA (Homo sapiens) CpG-island No: 31981
attatacgtttagcgaaggcgtagagatttatttttttgcggatagtcgtttgacgttttttgttcgggagttgttggaaagtcgttatttgcgtattaagtttattgacgagtagggtcgtttgtttgttgacgatgaatagtagtagtcgtagttcgtttatgggttgattagtagcgatgaatattcgtaggcgtgttgcgaattgtgtcgttagtcggtggtaaaaaagtcggatacgttgatttatttgtcggcggaaaaaatggtcgttaaaagcgattcgcgtttgggttttcgcgcggttttcgatagtattattgcgttggtagtgtggttgtaaattgaattggcggaatcgtggtagtcgtggttggcggatattcgttcgcgttttggtaatattatgcgcgttcgatgtcgtttgggggaattcgttgggttgttaggcgattgtcgggttttttgacgaagatttgtatcggtttttttattagtcgttgcgttatttcgatacgattatttggtgtcggaagttagttacgggcgcgatgttgcgttgtttaatttgttacgtattaaagtgcgggaaatcgaaatcgtagcggcgtaggtttttattattcgtagttttgaagtattacgttcggatattttgtaggcgttgaatcgtttttcgagtacggtttacgtgatgatgattttgagcgtaacgaagtagtcgttaacggtgaagtagatttaataacgattg

SEQ ID NO: 31982 - DNA, 755 bp, Artificial Sequence
  chemically treated genomic DNA (Homo sapiens) CpG-island No: 31982
caatcgttattaaatctacttcaccgttaacgactacttcgttacgctcaaaatcatcatcacgtaaaccgtactcgaaaaacgattcaacgcctacaaaatatccgaacgtaatacttcaaaactacgaataataaaaacctacgccgctacgatttcgatttcccgcactttaatacgtaacaaattaaacaacgcaacatcgcgcccgtaactaacttccgacaccaaataatcgtatcgaaataacgcaacgactaataaaaaaaccgatacaaatcttcgtcaaaaaacccgacaatcgcctaacaacccaacgaattcccccaaacgacatcgaacgcgcataatattaccaaaacgcgaacgaatatccgccaaccacgactaccacgattccgccaattcaatttacaaccacactaccaacgcaataatactatcgaaaaccgcgcgaaaacccaaacgcgaatcgcttttaacgaccattttttccgccgacaaataaatcaacgtatccgacttttttaccaccgactaacgacacaattcgcaacacgcctacgaatattcatcgctactaatcaacccataaacgaactacgactactactattcatcgtcaacaaacaaacgaccctactcgtcaataaacttaatacgcaaataacgactttccaacaactcccgaacaaaaaacgtcaaacgactatccgcaaaaaaataaatctctacgccttcgctaaacgtataat

SEQ ID NO: 31983 - DNA, 755 bp, Artificial Sequence
  chemically treated genomic DNA (Homo sapiens) CpG-island No: 31983
tagtcgttgttggatttgttttatcgttagcggttgtttcgttacgtttaggattattattacgtagatcgtgttcgaaaggcggtttagcgtttgtaaaatgttcgggcgtaatattttaaagttgcgggtgataaagatttgcgtcgttacggtttcggtttttcgtattttggtgcgtagtagattgagtaacgtagtatcgcgttcgtggttggttttcggtattagatgatcgtgtcgagatagcgtagcggttgatgagaaagtcgatgtagattttcgttagaaagttcgataatcgtttggtagtttagcgggtttttttaggcggtatcgggcgcgtataatgttgttaagacgcgaacggatattcgttagttacggttgttacggtttcgttagtttaatttgtagttatattgttagcgtaatggtgttgtcgagaatcgcgcgaaaatttagacgcggatcgtttttggcgattatttttttcgtcgataggtgagttagcgtattcggtttttttgttatcggttggcgatatagttcgtagtacgtttgcggatgtttatcgttattggttagtttatgaacgggttgcggttgttgttgtttatcgttaataaataggcggttttgttcgttaataaatttgatgcgtagatggcggttttttagtaattttcgggtagagggcgttaggcgattgttcgtagggagatggatttttgcgttttcgttgagcgtatggt

SEQ ID NO: 31984 - DNA, 755 bp, Artificial Sequence
  chemically treated genomic DNA (Homo sapiens) CpG-island No: 31984
accatacgctcaacgaaaacgcaaaaatccatctccctacgaacaatcgcctaacgccctctacccgaaaattactaaaaaaccgccatctacgcatcaaatttattaacgaacaaaaccgcctatttattaacgataaacaacaacaaccgcaacccgttcataaactaaccaataacgataaacatccgcaaacgtactacgaactatatcgccaaccgataacaaaaaaaccgaatacgctaactcacctatcgacgaaaaaaataatcgccaaaaacgatccgcgtctaaattttcgcgcgattctcgacaacaccattacgctaacaatataactacaaattaaactaacgaaaccgtaacaaccgtaactaacgaatatccgttcgcgtcttaacaacattatacgcgcccgataccgcctaaaaaaacccgctaaactaccaaacgattatcgaactttctaacgaaaatctacatcgactttctcatcaaccgctacgctatctcgacacgatcatctaataccgaaaaccaaccacgaacgcgatactacgttactcaatctactacgcaccaaaatacgaaaaaccgaaaccgtaacgacgcaaatctttatcacccgcaactttaaaatattacgcccgaacattttacaaacgctaaaccgcctttcgaacacgatctacgtaataataatcctaaacgtaacgaaacaaccgctaacgataaaacaaatccaacaacgacta

SEQ ID NO: 31985 - DNA, 649 bp, Artificial Sequence
  chemically treated genomic DNA (Homo sapiens) CpG-island No: 31985
gggcgggaagcgggcggcgggtttagtcgagggtcgcgaagacgcgcgtttttaaacgaggcgacgtttatttattacggttcggcggggtagcgcgtcggaggttcgcgatagggttcggcgcggttttcgcgatcggttcgggcgggcgttttcggagtttttagagtcgttgtcgttcgagattacgatgtaattttttattggttgcgggtttcgatcgaagatttaggtagtggcggcggcggcgacgatttcggtttttgtttttgaggtggcgcggcgggggcggcggtagcggcggcggttataattcgggttatcgttacgtcggtttcgtttcgagtttcgtttcgtcgggttcgtaagttttagttatcggcggcgggcggttggggttagggtcgggtcgttgtgtttcgtggcggcgcgggtttttcgttttttaggaggaaaaaaaaaaagaaaaatggagtcgtagtcggtttcggtaggtgttggggttaggcgtgcgagacgtcgaggtcgcggggatttttttatttgtttttaatcgacgaaagcgtgaagtgaggcgcgtttagttttattttgtttaggtgtgaagcgtttttcggattgagagggttttgattgaggggtagggaga

SEQ ID NO: 31986 - DNA, 649 bp, Artificial Sequence
  chemically treated genomic DNA (Homo sapiens) CpG-island No: 31986
tctccctacccctcaatcaaaaccctctcaatccgaaaaacgcttcacacctaaacaaaataaaactaaacgcgcctcacttcacgctttcgtcgattaaaaacaaataaaaaaatccccgcgacctcgacgtctcgcacgcctaaccccaacacctaccgaaaccgactacgactccatttttctttttttttttcctcctaaaaaacgaaaaacccgcgccgccacgaaacacaacgacccgaccctaaccccaaccgcccgccgccgataactaaaacttacgaacccgacgaaacgaaactcgaaacgaaaccgacgtaacgataacccgaattataaccgccgccgctaccgccgcccccgccgcgccacctcaaaaacaaaaaccgaaatcgtcgccgccgccgccactacctaaatcttcgatcgaaacccgcaaccaataaaaaattacatcgtaatctcgaacgacaacgactctaaaaactccgaaaacgcccgcccgaaccgatcgcgaaaaccgcgccgaaccctatcgcgaacctccgacgcgctaccccgccgaaccgtaataaataaacgtcgcctcgtttaaaaacgcgcgtcttcgcgaccctcgactaaacccgccgcccgcttcccgccc

SEQ ID NO: 31987 - DNA, 649 bp, Artificial Sequence
  chemically treated genomic DNA (Homo sapiens) CpG-island No: 31987
tttttttgttttttagttaaggtttttttagttcgggaggcgttttatatttgggtagggtgggattgggcgcgttttattttacgttttcgtcggttggaagtaggtggggaagttttcgcggtttcggcgtttcgtacgtttggttttaatatttgtcgaagtcggttgcgattttatttttttttttttttttttttttgggaaacggaggattcgcgtcgttacgaagtatagcgattcggttttgattttagtcgttcgtcgtcggtggttggggtttgcgggttcggcggggcggggttcggggcggggtcggcgtggcggtggttcgggttgtagtcgtcgtcgttgtcgtcgttttcgtcgcgttattttagaagtaggaatcgaagtcgtcgtcgtcgtcgttattgtttgggttttcggtcggggttcgtagttaatggaggattatatcgtgatttcggacgatagcggttttgagagtttcgggggcgttcgttcgggtcggtcgcggaggtcgcgtcgggttttgtcgcgaattttcggcgcgttgtttcgtcggatcgtggtgagtgagcgtcgtttcgtttgggggcgcgcgttttcgcgattttcggttgggttcgtcgttcgtttttcgttt

SEQ ID NO: 31988 - DNA, 649 bp, Artificial Sequence
  chemically treated genomic DNA (Homo sapiens) CpG-island No: 31988
aaacgaaaaacgaacgacgaacccaaccgaaaatcgcgaaaacgcgcgcccccaaacgaaacgacgctcactcaccacgatccgacgaaacaacgcgccgaaaattcgcgacaaaacccgacgcgacctccgcgaccgacccgaacgaacgcccccgaaactctcaaaaccgctatcgtccgaaatcacgatataatcctccattaactacgaaccccgaccgaaaacccaaacaataacgacgacgacgacgacttcgattcctacttctaaaataacgcgacgaaaacgacgacaacgacgacgactacaacccgaaccaccgccacgccgaccccgccccgaaccccgccccgccgaacccgcaaaccccaaccaccgacgacgaacgactaaaatcaaaaccgaatcgctatacttcgtaacgacgcgaatcctccgtttcccaaaaaaaaaaaaaaaaaaaaaaataaaatcgcaaccgacttcgacaaatattaaaaccaaacgtacgaaacgccgaaaccgcgaaaacttccccacctacttccaaccgacgaaaacgtaaaataaaacgcgcccaatcccaccctacccaaatataaaacgcctcccgaactaaaaaaaccttaactaaaaaacaaaaaaa

SEQ ID NO: 31989 - DNA, 688 bp, Artificial Sequence
  chemically treated genomic DNA (Homo sapiens) CpG-island No: 31989
cgttttttcggttcgcgcgtaggcggtttgtgtatttcggataacgcgtattttttgcgttttcggaagtggcggtaacgttcggttttgtttttagtagaggcggaagcggtgtcgttttgaggggtcgttagtcgtcgtaggcgttttagtttagcggcgggttttggtttttggttgtttatttttatcgttttagtttcgggcggttttgggtttgttgcgggcgcggcgttgttcgatatagagttttttgtggaacgttttttagaggtgcgggttggtatcgtttcggtatttttcgtttttcgcgtagtcgtttcggatttttgtttcgattttcgcggttaatttcgttttttgtcggttgtttcgcggtttttttcgttatttgtcgtgtttttagcggtttttttcgttttttgtttcgatcgtcgtcgtttttttcgatttttgttttagtcgacgcggtcgttttcgttttttggcgggtttttcgcggtttttttcgttcgttgttcggttttttggggtcgttttttgttttttgttcggtttttgttttgtgcgtcggttttttttaagatgtagagtgcgttattgtagattcgaggtcgcggttatcggtttttgggttaggttttttttttcgttttaagagtcgttaggtggagggtttttagggtgt

SEQ ID NO: 31990 - DNA, 688 bp, Artificial Sequence
  chemically treated genomic DNA (Homo sapiens) CpG-island No: 31990
acaccctaaaaaccctccacctaacgactcttaaaacgaaaaaaaaaacctaacccaaaaaccgataaccgcgacctcgaatctacaataacgcactctacatcttaaaaaaaaccgacgcacaaaacaaaaaccgaacaaaaaacaaaaaacgaccccaaaaaaccgaacaacgaacgaaaaaaaccgcgaaaaacccgccaaaaaacgaaaacgaccgcgtcgactaaaacaaaaatcgaaaaaaacgacgacgatcgaaacaaaaaacgaaaaaaaccgctaaaaacacgacaaataacgaaaaaaaccgcgaaacaaccgacaaaaaacgaaattaaccgcgaaaatcgaaacaaaaatccgaaacgactacgcgaaaaacgaaaaataccgaaacgataccaacccgcacctctaaaaaacgttccacaaaaaactctatatcgaacaacgccgcgcccgcaacaaacccaaaaccgcccgaaactaaaacgataaaaataaacaaccaaaaaccaaaacccgccgctaaactaaaacgcctacgacgactaacgacccctcaaaacgacaccgcttccgcctctactaaaaacaaaaccgaacgttaccgccacttccgaaaacgcaaaaaatacgcgttatccgaaatacacaaaccgcctacgcgcgaaccgaaaaaacg

SEQ ID NO: 31991 - DNA, 688 bp, Artificial Sequence
  chemically treated genomic DNA (Homo sapiens) CpG-island No: 31991
gtattttggagattttttatttggcggtttttgaggcgagaaaaagggtttagtttaggagtcggtggtcgcgatttcgggtttgtagtggcgtattttgtattttgggaagggtcgacgtataggatagggatcgggtaggaggtagggggcggttttaggagatcgggtagcggacgggggagatcgcgggggattcgttaggggacgggggcggtcgcgtcggttggggtaggggtcgggggaggcggcggcggtcggggtaggggacgggggaggtcgttggggatacggtaggtgacgggggaggtcgcggggtaatcggtagggaacggggttggtcgcgggggtcgggataggggttcggggcggttgcgcgggaggcgggagatgtcggggcggtgttagttcgtatttttggaagacgttttataggaagttttgtgtcgggtagcgtcgcgttcgtagtaggtttagggtcgttcggggttggggcggtaggagtaggtagttaagggttaaggttcgtcgttgggttgaagcgtttgcggcgattggcgattttttagagcgatatcgttttcgtttttgttgggggtagggtcgggcgttatcgttattttcgggggcgtaggaaatgcgcgttgttcgggatgtataggtcgtttgcgcgcgggtcgggaaggcg

SEQ ID NO: 31992 - DNA, 688 bp, Artificial Sequence
  chemically treated genomic DNA (Homo sapiens) CpG-island No: 31992
cgccttcccgacccgcgcgcaaacgacctatacatcccgaacaacgcgcatttcctacgcccccgaaaataacgataacgcccgaccctacccccaacaaaaacgaaaacgatatcgctctaaaaaatcgccaatcgccgcaaacgcttcaacccaacgacgaaccttaacccttaactacctactcctaccgccccaaccccgaacgaccctaaacctactacgaacgcgacgctacccgacacaaaacttcctataaaacgtcttccaaaaatacgaactaacaccgccccgacatctcccgcctcccgcgcaaccgccccgaacccctatcccgacccccgcgaccaaccccgttccctaccgattaccccgcgacctcccccgtcacctaccgtatccccaacgacctcccccgtcccctaccccgaccgccgccgcctcccccgacccctaccccaaccgacgcgaccgcccccgtcccctaacgaatcccccgcgatctcccccgtccgctacccgatctcctaaaaccgccccctacctcctacccgatccctatcctatacgtcgacccttcccaaaatacaaaatacgccactacaaacccgaaatcgcgaccaccgactcctaaactaaaccctttttctcgcctcaaaaaccgccaaataaaaaatctccaaaatac

SEQ ID NO: 31993 - DNA, 636 bp, Artificial Sequence
  chemically treated genomic DNA (Homo sapiens) CpG-island No: 31993
atcgacgttaatttaggttaacgttaaagcgacggcgggtaaagtgtattttgattttcggttacgattttaaagatttttataatttgttggaatagatcgaaggtacgggcgttaatgtttatatttacggcgaaatgttgtttgcgtatgttattcggagttgcgtaaatttaagtatttggtcggtaattacggtagcggttggtagaattagtaagtggagttcgttcgtttttttggttttatcgtgatgatttcgaattgtattatcgatttaatcgtaggcgtttatgacgatcgtatttggattcgtagtattgttggttggtttggcgtgcgttatttggacggtgatgatttttttgcggttattatttaggcgtaatagatggtaggtttttcgtatagcgaaatttcgtattttattatcgtgggttttggtcgttagacgttgtttggcgttgttgatacgttgattgatttggtgagtcgtgaaaaattgcgtttatatttttttggtttggtggttgtgacggcgtacgcggcgagcgttattattttatcgatttcgttattagcgtgtttcgaatgaattgttttattttgtaatttcgattgttgtaaatatttttt

SEQ ID NO: 31994 - DNA, 636 bp, Artificial Sequence
  chemically treated genomic DNA (Homo sapiens) CpG-island No: 31994
aaaaaatatttacaacaatcgaaattacaaaataaaacaattcattcgaaacacgctaataacgaaatcgataaaataataacgctcgccgcgtacgccgtcacaaccaccaaaccaaaaaaatataaacgcaatttttcacgactcaccaaatcaatcaacgtatcaacaacgccaaacaacgtctaacgaccaaaacccacgataataaaatacgaaatttcgctatacgaaaaacctaccatctattacgcctaaataataaccgcaaaaaaatcatcaccgtccaaataacgcacgccaaaccaaccaacaatactacgaatccaaatacgatcgtcataaacgcctacgattaaatcgataatacaattcgaaatcatcacgataaaaccaaaaaaacgaacgaactccacttactaattctaccaaccgctaccgtaattaccgaccaaatacttaaatttacgcaactccgaataacatacgcaaacaacatttcgccgtaaatataaacattaacgcccgtaccttcgatctattccaacaaattataaaaatctttaaaatcgtaaccgaaaatcaaaatacactttacccgccgtcgctttaacgttaacctaaattaacgtcgat

SEQ ID NO: 31995 - DNA, 636 bp, Artificial Sequence
  chemically treated genomic DNA (Homo sapiens) CpG-island No: 31995
aaggaatatttataatagtcgaggttatagaataaggtaatttattcgggatacgttggtggcgaaatcggtgaagtagtggcgttcgtcgcgtgcgtcgttatagttattaagttaggaagatatggacgtagttttttacggtttattagattaattagcgtattagtagcgttaagtagcgtttggcgattaaaatttacggtgataaggtgcggaatttcgttgtacgggaagtttgttatttgttgcgtttgggtgataatcgtagagaaattattatcgtttagatgacgtacgttaggttagttaataatgttgcgggtttagatacgatcgttataagcgtttacggttgggtcgatgatgtagttcgaggttattacgatggggttagggaaacgagcgaattttatttgttgattttgttagtcgttgtcgtagttatcgattagatgtttgaatttacgtagtttcgggtagtatgcgtaggtagtatttcgtcgtgggtgtagatattaacgttcgtgttttcggtttgttttagtaggttgtagagatttttgagatcgtgatcggaaattagaatgtattttattcgtcgtcgttttgacgttgatttgggttggcgtcggt

SEQ ID NO: 31996 - DNA, 636 bp, Artificial Sequence
  chemically treated genomic DNA (Homo sapiens) CpG-island No: 31996
accgacgccaacccaaatcaacgtcaaaacgacgacgaataaaatacattctaatttccgatcacgatctcaaaaatctctacaacctactaaaacaaaccgaaaacacgaacgttaatatctacacccacgacgaaatactacctacgcatactacccgaaactacgtaaattcaaacatctaatcgataactacgacaacgactaacaaaatcaacaaataaaattcgctcgtttccctaaccccatcgtaataacctcgaactacatcatcgacccaaccgtaaacgcttataacgatcgtatctaaacccgcaacattattaactaacctaacgtacgtcatctaaacgataataatttctctacgattatcacccaaacgcaacaaataacaaacttcccgtacaacgaaattccgcaccttatcaccgtaaattttaatcgccaaacgctacttaacgctactaatacgctaattaatctaataaaccgtaaaaaactacgtccatatcttcctaacttaataactataacgacgcacgcgacgaacgccactacttcaccgatttcgccaccaacgtatcccgaataaattaccttattctataacctcgactattataaatattcctt

SEQ ID NO: 31997 - DNA, 576 bp, Artificial Sequence
  chemically treated genomic DNA (Homo sapiens) CpG-island No: 31997
atttcgcgtttaatttgcgtatcgtgtatttggtgcgcgattcgcgggtcgtgttgcgttttcgggaggcggcgggttcgatattggtacgcgataacggtatcgtgttgggtattaacggtaagtgggtggaggtcgatttttatttgcgtttgattcgcgaggtgtgtcgtagttacgtgcgtatcgtcgaggtcgttatatttaagtcgttattttttttgcgcggtcgttatcgtttggtgcgtttcgaggatttggcgcgggagtcgttggtagagattcgcgtattttacgtttttatcggtttgatttttacgttatagttcgaggtttggatttataatattatttacgggtcggggatcggtaagttaatcgaggttttttatatttcgtttaggaatgcgcgtaacgttttttaggtttggcgttacgcgttgttttttattaagattttgcgcgtgtaggaggtgtgcgtcggcgcgttgtagttgttgggttatcggtttgtgtattttgcggattagtagcgtgattttattttggatttggtgttgttacgaggtttagatt

SEQ ID NO: 31998 - DNA, 576 bp, Artificial Sequence
  chemically treated genomic DNA (Homo sapiens) CpG-island No: 31998
aatctaaacctcgtaacaacaccaaatccaaaataaaatcacgctactaatccgcaaaatacacaaaccgataacccaacaactacaacgcgccgacgcacacctcctacacgcgcaaaatcttaataaaaaacaacgcgtaacgccaaacctaaaaaacgttacgcgcattcctaaacgaaatataaaaaacctcgattaacttaccgatccccgacccgtaaataatattataaatccaaacctcgaactataacgtaaaaatcaaaccgataaaaacgtaaaatacgcgaatctctaccaacgactcccgcgccaaatcctcgaaacgcaccaaacgataacgaccgcgcaaaaaaaataacgacttaaatataacgacctcgacgatacgcacgtaactacgacacacctcgcgaatcaaacgcaaataaaaatcgacctccacccacttaccgttaatacccaacacgataccgttatcgcgtaccaatatcgaacccgccgcctcccgaaaacgcaacacgacccgcgaatcgcgcaccaaatacacgatacgcaaattaaacgcgaaat

SEQ ID NO: 31999 - DNA, 576 bp, Artificial Sequence
  chemically treated genomic DNA (Homo sapiens) CpG-island No: 31999
ggtttgggtttcgtggtagtattagatttagggtgaggttacgttgttggttcgtagagtatataggtcggtagtttagtagttgtagcgcgtcggcgtatattttttgtacgcgtaggattttagtgaagggtaacgcgtggcgttaggtttgggagacgttgcgcgtatttttagacgaagtatggaaggtttcgattggtttgtcgattttcgattcgtgggtgatgttgtggatttaggtttcgagttgtggcgtgagggttaggtcggtgaaggcgtagagtgcgcggatttttgttagcggttttcgcgttaggttttcgaagcgtattaggcggtagcggtcgcgtaggaagggtggcggtttgagtgtggcggtttcggcgatgcgtacgtggttgcggtatatttcgcgaattaggcgtaggtgagggtcggtttttatttatttgtcgttggtgtttagtacgatgtcgttgtcgcgtgttagtatcgggttcgtcgtttttcgggagcgtagtacggttcgcgggtcgcgtattaggtgtacgatgcgtaggttgagcgcggggt

SEQ ID NO: 32000 - DNA, 576 bp, Artificial Sequence
  chemically treated genomic DNA (Homo sapiens) CpG-island No: 32000
accccgcgctcaacctacgcatcgtacacctaatacgcgacccgcgaaccgtactacgctcccgaaaaacgacgaacccgatactaacacgcgacaacgacatcgtactaaacaccaacgacaaataaataaaaaccgaccctcacctacgcctaattcgcgaaatataccgcaaccacgtacgcatcgccgaaaccgccacactcaaaccgccacccttcctacgcgaccgctaccgcctaatacgcttcgaaaacctaacgcgaaaaccgctaacaaaaatccgcgcactctacgccttcaccgacctaaccctcacgccacaactcgaaacctaaatccacaacatcacccacgaatcgaaaatcgacaaaccaatcgaaaccttccatacttcgtctaaaaatacgcgcaacgtctcccaaacctaacgccacgcgttacccttcactaaaatcctacgcgtacaaaaaatatacgccgacgcgctacaactactaaactaccgacctatatactctacgaaccaacaacgtaacctcaccctaaatctaatactaccacgaaacccaaacc

SEQ ID NO: 32001 - DNA, 685 bp, Artificial Sequence
  chemically treated genomic DNA (Homo sapiens) CpG-island No: 32001
gggtttttagcgagggttttagggacgttagttcggaggtatcggtcggaagtgtcgtagggtaattacgtagtattttttgcgtatgtgtaaagcgttgtcgggggtcgttttagttgtcgtcgtcgtcgtcggggttttatggtttttttttagagttttgtcgttggaggcggttgttgcggttttgtgagtttgattagcgtcgagcggtagtaatatggaggaattcgatttcgaagatttttttacgtcggaggaggacgaggattacgtgtcgtcgggtgagcgatttcgtttgaggcgagaagcgaattgtttcgttttacgttttacgtgaggcgcgttttgttttcgcgggcgtttgttttgtggtttaggtggtttaggggggtttttgttttcgagcgttcgtttttttaggttttttattttcggtcgtttcggttcgaggcgtgtgcgcgtggcggttttgtgtttttttttcgttgggtagtttcggtcgtcgtttttttttgtagcgcgggaatcggtatatggatacggttttttgtcgttagggacgttcgtcggttagtttcgaacgatatcgttgttttagaagtcggggcggtagttcgagttttggaggttttttttagttttggttcgagagagttgttggttattatttcgtttaagatag

SEQ ID NO: 32002 - DNA, 685 bp, Artificial Sequence
  chemically treated genomic DNA (Homo sapiens) CpG-island No: 32002
ctatcttaaacgaaataataaccaacaactctctcgaaccaaaactaaaaaaaacctccaaaactcgaactaccgccccgacttctaaaacaacgatatcgttcgaaactaaccgacgaacgtccctaacgacaaaaaaccgtatccatataccgattcccgcgctacaaaaaaaaacgacgaccgaaactacccaacgaaaaaaaaacacaaaaccgccacgcgcacacgcctcgaaccgaaacgaccgaaaataaaaaacctaaaaaaacgaacgctcgaaaacaaaaacccccctaaaccacctaaaccacaaaacaaacgcccgcgaaaacaaaacgcgcctcacgtaaaacgtaaaacgaaacaattcgcttctcgcctcaaacgaaatcgctcacccgacgacacgtaatcctcgtcctcctccgacgtaaaaaaatcttcgaaatcgaattcctccatattactaccgctcgacgctaatcaaactcacaaaaccgcaacaaccgcctccaacgacaaaactctaaaaaaaaaccataaaaccccgacgacgacgacgacaactaaaacgacccccgacaacgctttacacatacgcaaaaaatactacgtaattaccctacgacacttccgaccgatacctccgaactaacgtccctaaaaccctcgctaaaaaccc

SEQ ID NO: 32003 - DNA, 685 bp, Artificial Sequence
  chemically treated genomic DNA (Homo sapiens) CpG-island No: 32003
ttattttggacggggtggtggttagtagttttttcgggttagggttgaaaaaaatttttaaggttcggattgtcgtttcgatttttgaagtagcggtgtcgttcggggttgatcgacgagcgtttttagcgataaggggtcgtgtttatgtgtcggttttcgcgttgtaagagggggcggcggtcggagttgtttaacgggaggggagtatagaatcgttacgcgtatacgtttcgggtcggagcggtcgaggatgaggggtttgagggagcggacgttcgagaataggagtttttttggattatttgggttatagggtagacgttcgcgggggtagagcgcgttttacgtgaggcgtggggcggggtaattcgtttttcgttttaggcggaatcgtttattcgacggtacgtagttttcgttttttttcgacgtagagaagttttcggagtcgaatttttttatgttgttgtcgttcgacgttggttaaatttataagatcgtagtagtcgtttttaacggtaaagttttagggagagattatagagtttcggcggcggcgacggtagttagggcggttttcgatagcgttttgtatatgcgtagagagtattacgtggttgttttacgatattttcggtcgatgttttcgggttggcgtttttgaagttttcgttgggagttt

SEQ ID NO: 32004 - DNA, 685 bp, Artificial Sequence
  chemically treated genomic DNA (Homo sapiens) CpG-island No: 32004
aaactcccaacgaaaacttcaaaaacgccaacccgaaaacatcgaccgaaaatatcgtaaaacaaccacgtaatactctctacgcatatacaaaacgctatcgaaaaccgccctaactaccgtcgccgccgccgaaactctataatctctccctaaaactttaccgttaaaaacgactactacgatcttataaatttaaccaacgtcgaacgacaacaacataaaaaaattcgactccgaaaacttctctacgtcgaaaaaaaacgaaaactacgtaccgtcgaataaacgattccgcctaaaacgaaaaacgaattaccccgccccacgcctcacgtaaaacgcgctctacccccgcgaacgtctaccctataacccaaataatccaaaaaaactcctattctcgaacgtccgctccctcaaacccctcatcctcgaccgctccgacccgaaacgtatacgcgtaacgattctatactcccctcccgttaaacaactccgaccgccgccccctcttacaacgcgaaaaccgacacataaacacgaccccttatcgctaaaaacgctcgtcgatcaaccccgaacgacaccgctacttcaaaaatcgaaacgacaatccgaaccttaaaaatttttttcaaccctaacccgaaaaaactactaaccaccaccccgtccaaaataa

SEQ ID NO: 32005 - DNA, 785 bp, Artificial Sequence
  chemically treated genomic DNA (Homo sapiens) CpG-island No: 32005
ttggaaagttatcgatttgtttttgaaagatatttaggtgttggtttttgaattgtcgatggttgaagcgatttttgaattgttggcgttggttggcgaagaaggtgtcgtagaatcgtatcgttatttgatgaaaaatttgcgttttcgtttgatggcgatataggtatggttggaagcgcgtttgaaaggcgaagaattgttaaaattagaaggtttgttgatataaaacgaagaattgtgggaatcgttttacgtttgttattagttattttaggcgtgtggtatgggtattatcgttaacggcgatttgttcgatattttgcgtcgcgtgaaatgtttcggcgtatcgttggttcgtattgatattcgttaggagagtacgcgttatatcgaagcgttgggcgagttgattcgttatttcggtatcggcgattacgaaagttggttagaggtcgataaataggcgtttttgattcgcgaattgaattttaaacgttcgtttttgtcgcgtaattggtaattaagcgtcgaaacgcgcgaagtgttcgatatttgttaggtgattgtcgaagtatcgtaaggttttattgtcgtttacgtgatttcgatggcgaaaacgtcgttcgacgtattggttgtttatttgttgttgaaagaagcgggtatcgggtttgcgatgtcggttgtttcgttgtttgaaattttcgatgatttgaataacgttacgatgttatgatttagttgtttaatattgattggtatcgtggtttgatttagggtaa

SEQ ID NO: 32006 - DNA, 785 bp, Artificial Sequence
  chemically treated genomic DNA (Homo sapiens) CpG-island No: 32006
ttaccctaaatcaaaccacgataccaatcaatattaaacaactaaatcataacatcgtaacgttattcaaatcatcgaaaatttcaaacaacgaaacaaccgacatcgcaaacccgatacccgcttctttcaacaacaaataaacaaccaatacgtcgaacgacgttttcgccatcgaaatcacgtaaacgacaataaaaccttacgatacttcgacaatcacctaacaaatatcgaacacttcgcgcgtttcgacgcttaattaccaattacgcgacaaaaacgaacgtttaaaattcaattcgcgaatcaaaaacgcctatttatcgacctctaaccaactttcgtaatcgccgataccgaaataacgaatcaactcgcccaacgcttcgatataacgcgtactctcctaacgaatatcaatacgaaccaacgatacgccgaaacatttcacgcgacgcaaaatatcgaacaaatcgccgttaacgataatacccataccacacgcctaaaataactaataacaaacgtaaaacgattcccacaattcttcgttttatatcaacaaaccttctaattttaacaattcttcgcctttcaaacgcgcttccaaccatacctatatcgccatcaaacgaaaacgcaaatttttcatcaaataacgatacgattctacgacaccttcttcgccaaccaacgccaacaattcaaaaatcgcttcaaccatcgacaattcaaaaaccaacacctaaatatctttcaaaaacaaatcgataactttccaa

SEQ ID NO: 32007 - DNA, 785 bp, Artificial Sequence
  chemically treated genomic DNA (Homo sapiens) CpG-island No: 32007
ttgttttgaattaggttacgatattagttaatattgagtagttgggttatgatatcgtggcgttgtttagattatcgagggttttaaatagcggagtaatcggtatcgtaaattcgatattcgttttttttagtagtaggtggatagttagtacgtcggacggcgttttcgttatcgagattacgtaggcggtaatggagttttgcggtgtttcggtaattatttggtaggtatcgagtatttcgcgcgtttcggcgtttggttgttagttgcgcggtagaagcggacgtttggagtttagttcgcggattaggaacgtttgtttgtcggtttttgattagttttcgtagtcgtcgatatcgaggtagcgggttagttcgtttagcgtttcggtatgacgcgtgtttttttgacggatattaatacggattagcggtacgtcgaaatattttacgcggcgtagggtgtcgagtagatcgtcgttggcgataatatttatgttatacgtttgaagtgattggtagtaagcgtagagcggtttttatagtttttcgttttgtgttagtaggttttttggttttggtagtttttcgttttttaggcgcgtttttagttatgtttgtgtcgttattaggcgagaacgtaggttttttattagatagcgatacggttttgcggtatttttttcgttaattagcgttagtagtttaggggtcgttttaattatcgatagtttagaaattagtatttgaatattttttaggaataaatcggtggttttttag

SEQ ID NO: 32008 - DNA, 785 bp, Artificial Sequence
  chemically treated genomic DNA (Homo sapiens) CpG-island No: 32008
ctaaaaaaccaccgatttattcctaaaaaatattcaaatactaatttctaaactatcgataattaaaacgacccctaaactactaacgctaattaacgaaaaaaataccgcaaaaccgtatcgctatctaataaaaaacctacgttctcgcctaataacgacacaaacataactaaaaacgcgcctaaaaaacgaaaaactaccaaaaccaaaaaacctactaacacaaaacgaaaaactataaaaaccgctctacgcttactaccaatcacttcaaacgtataacataaatattatcgccaacgacgatctactcgacaccctacgccgcgtaaaatatttcgacgtaccgctaatccgtattaatatccgtcaaaaaaacacgcgtcataccgaaacgctaaacgaactaacccgctacctcgatatcgacgactacgaaaactaatcaaaaaccgacaaacaaacgttcctaatccgcgaactaaactccaaacgtccgcttctaccgcgcaactaacaaccaaacgccgaaacgcgcgaaatactcgatacctaccaaataattaccgaaacaccgcaaaactccattaccgcctacgtaatctcgataacgaaaacgccgtccgacgtactaactatccacctactactaaaaaaaacgaatatcgaatttacgataccgattactccgctatttaaaaccctcgataatctaaacaacgccacgatatcataacccaactactcaatattaactaatatcgtaacctaattcaaaacaa

SEQ ID NO: 32009 - DNA, 657 bp, Artificial Sequence
  chemically treated genomic DNA (Homo sapiens) CpG-island No: 32009
ggagttgcgttatttatatcgattttcgagatcgatttcgtttcgaacgggtcgatttatcgtcgttcggtattagtatagcgcggaaattacgcggaatgttattaattttcggtgcgtcgtaattgcgtaaattacgcgttaacgggtgattttcggcgttataaatgattttttcgtttatattgtggtcgatagtacgtagggtggtatcgtagatttgttttaacgttaattttggattgatcggtgtatcgtagtttagtaaggcgtagaatttatttaggcggattttattcgtacgcgtgttgacggtaattttagcgaagtttgcgttatacgggaaggcgaaattaggcgtgatataattgttagtttttattagtgaattaaagtcggtgtcggtttcgtttttatgggtaatattttcgaaattaatttcgttttttttgtcgcgtacgacgttcggcgttgttagttgaatatttgttattggtttatttaatatttgcgcgtcgtggaatagaattttttttcgtagatttttcgttgttaaacgcgtcgcgttattcgagaagtaagtatcggacgaggtatatgcgtttttattaaataacgtatgatcggtatttatcgggaaggaattttattagtttg

SEQ ID NO: 32010 - DNA, 657 bp, Artificial Sequence
  chemically treated genomic DNA (Homo sapiens) CpG-island No: 32010
caaactaataaaattccttcccgataaataccgatcatacgttatttaataaaaacgcatatacctcgtccgatacttacttctcgaataacgcgacgcgtttaacaacgaaaaatctacgaaaaaaaattctattccacgacgcgcaaatattaaataaaccaataacaaatattcaactaacaacgccgaacgtcgtacgcgacaaaaaaaacgaaattaatttcgaaaatattacccataaaaacgaaaccgacaccgactttaattcactaataaaaactaacaattatatcacgcctaatttcgccttcccgtataacgcaaacttcgctaaaattaccgtcaacacgcgtacgaataaaatccgcctaaataaattctacgccttactaaactacgatacaccgatcaatccaaaattaacgttaaaacaaatctacgataccaccctacgtactatcgaccacaatataaacgaaaaaatcatttataacgccgaaaatcacccgttaacgcgtaatttacgcaattacgacgcaccgaaaattaataacattccgcgtaatttccgcgctatactaataccgaacgacgataaatcgacccgttcgaaacgaaatcgatctcgaaaatcgatataaataacgcaactcc

SEQ ID NO: 32011 - DNA, 657 bp, Artificial Sequence
  chemically treated genomic DNA (Homo sapiens) CpG-island No: 32011
taaattggtaaaattttttttcggtagatatcgattatgcgttgtttgataaaggcgtatatgtttcgttcggtatttgtttttcgggtaacgcggcgcgtttggtagcggaaaatttacgggagaaaattttgttttacggcgcgtaaatgttgggtgagttagtggtagatgtttaattggtaacgtcgggcgtcgtgcgcggtaagaaaggcgaagttagtttcggggatattgtttataaaggcgaaatcggtatcggttttggtttattggtgggaattggtagttatattacgtttgatttcgttttttcgtatggcgtaaatttcgttgaagttgtcgttaatacgcgtacgggtgaaattcgtttggataaattttacgttttgttggattgcggtatatcggttaatttagagttagcgttgggataaatttacggtgttattttgcgtgttatcggttatagtatgagcgaagagattatttatgacgtcgaaggttattcgttaacgcgtgatttacgtagttacggcgtatcgaaaattggtgatatttcgcgtgattttcgcgttgtgttggtgtcgagcgacgataagtcggttcgttcggggcgaaatcgatttcggaaatcggtgtaaatggcgtagtttt

SEQ ID NO: 32012 - DNA, 657 bp, Artificial Sequence
  chemically treated genomic DNA (Homo sapiens) CpG-island No: 32012
aaaactacgccatttacaccgatttccgaaatcgatttcgccccgaacgaaccgacttatcgtcgctcgacaccaacacaacgcgaaaatcacgcgaaatatcaccaattttcgatacgccgtaactacgtaaatcacgcgttaacgaataaccttcgacgtcataaataatctcttcgctcatactataaccgataacacgcaaaataacaccgtaaatttatcccaacgctaactctaaattaaccgatataccgcaatccaacaaaacgtaaaatttatccaaacgaatttcacccgtacgcgtattaacgacaacttcaacgaaatttacgccatacgaaaaaacgaaatcaaacgtaatataactaccaattcccaccaataaaccaaaaccgataccgatttcgcctttataaacaatatccccgaaactaacttcgcctttcttaccgcgcacgacgcccgacgttaccaattaaacatctaccactaactcacccaacatttacgcgccgtaaaacaaaattttctcccgtaaattttccgctaccaaacgcgccgcgttacccgaaaaacaaataccgaacgaaacatatacgcctttatcaaacaacgcataatcgatatctaccgaaaaaaaattttaccaattta

SEQ ID NO: 32013 - DNA, 650 bp, Artificial Sequence
  chemically treated genomic DNA (Homo sapiens) CpG-island No: 32013
atacgttcgttatattgtcgtagttttttgaagttcgcgtttcgtatgtgttgggaatattttttcgcgaataggttagcgaatttttttttggtttgttgattggcgtagaggtcgttagtatgcgcgattatgtggtttattaatacgttattatttttgtcgtcggaatatcgttgatcgcgcgttattagtaagttttttaggcgatgggttgcgacgtgacggcggtggcgggcgatacggtattttaggttggtataaggagtatcgtttatgtagtggtaaattaaattttcgttgatcgttattttgcgcggtattacgttcgacgaggcgttggcgtatgttggcgcggtgattgacgtcgggttcgacgcggttgaaatttcgttgaattttttataatgggagtaaagtattttcgttatcgttgatgcgtacggcgataaggcgttgattggcgtaggtacggtattgaaatttgaataggtcgatgcgttcgttaggatgggttgttagtttatcgttacgtttaatatttatagtgaagtgattcgtcgtgcggtgggttacggtatgatcgtttgtttcggttgcgcgacggcgatcgaagtttttatcgcgttcgaagcgggcgcgtaggcgtt

SEQ ID NO: 32014 - DNA, 650 bp, Artificial Sequence
  chemically treated genomic DNA (Homo sapiens) CpG-island No: 32014
aacgcctacgcgcccgcttcgaacgcgataaaaacttcgatcgccgtcgcgcaaccgaaacaaacgatcataccgtaacccaccgcacgacgaatcacttcactataaatattaaacgtaacgataaactaacaacccatcctaacgaacgcatcgacctattcaaatttcaataccgtacctacgccaatcaacgccttatcgccgtacgcatcaacgataacgaaaatactttactcccattataaaaaattcaacgaaatttcaaccgcgtcgaacccgacgtcaatcaccgcgccaacatacgccaacgcctcgtcgaacgtaataccgcgcaaaataacgatcaacgaaaatttaatttaccactacataaacgatactccttataccaacctaaaataccgtatcgcccgccaccgccgtcacgtcgcaacccatcgcctaaaaaacttactaataacgcgcgatcaacgatattccgacgacaaaaataataacgtattaataaaccacataatcgcgcatactaacgacctctacgccaatcaacaaaccaaaaaaaaattcgctaacctattcgcgaaaaaatattcccaacacatacgaaacgcgaacttcaaaaaactacgacaatataacgaacgtat

SEQ ID NO: 32015 - DNA, 650 bp, Artificial Sequence
  chemically treated genomic DNA (Homo sapiens) CpG-island No: 32015
agcgtttgcgcgttcgtttcgagcgcggtaaaggtttcggtcgtcgtcgcgtagtcggggtagacggttatgtcgtagtttatcgtacggcggattattttattatggatattgggcgtaacgatgagttgatagtttattttggcgagcgtatcgatttgtttaggttttagtatcgtatttgcgttaattaacgttttgtcgtcgtacgtattaacgatggcgggaatgttttgtttttattgtggggaatttagcgggattttaatcgcgtcgaattcggcgttaattatcgcgttaatatgcgttagcgtttcgtcgggcgtaatatcgcgtaaaatggcgattagcgggagtttagtttgttattgtatgagcgatgttttttatattagtttgaaatgtcgtgtcgttcgttatcgtcgttacgtcgtaatttatcgtttgaaaggtttgttggtagcgcgcggttagcgatgtttcggcgataagggtgatggcgtgttgatgggttatatagtcgcgtatattggcgatttttgcgttaattaataaattagagagaaattcgttgatttgttcgcggggaagtgtttttagtatatgcgaggcgcgaattttaaaaagttgcggtaatatggcgggcgtat

SEQ ID NO: 32016 - DNA, 650 bp, Artificial Sequence
  chemically treated genomic DNA (Homo sapiens) CpG-island No: 32016
atacgcccgccatattaccgcaactttttaaaattcgcgcctcgcatatactaaaaacacttccccgcgaacaaatcaacgaatttctctctaatttattaattaacgcaaaaatcgccaatatacgcgactatataacccatcaacacgccatcacccttatcgccgaaacatcgctaaccgcgcgctaccaacaaacctttcaaacgataaattacgacgtaacgacgataacgaacgacacgacatttcaaactaatataaaaaacatcgctcatacaataacaaactaaactcccgctaatcgccattttacgcgatattacgcccgacgaaacgctaacgcatattaacgcgataattaacgccgaattcgacgcgattaaaatcccgctaaattccccacaataaaaacaaaacattcccgccatcgttaatacgtacgacgacaaaacgttaattaacgcaaatacgatactaaaacctaaacaaatcgatacgctcgccaaaataaactatcaactcatcgttacgcccaatatccataataaaataatccgccgtacgataaactacgacataaccgtctaccccgactacgcgacgacgaccgaaacctttaccgcgctcgaaacgaacgcgcaaacgct

SEQ ID NO: 32017 - DNA, 555 bp, Artificial Sequence
  chemically treated genomic DNA (Homo sapiens) CpG-island No: 32017
tagttttcgttggttaggcgtaggttaagtagttttagtaatttcggatcgttatcgattaataataaatgcgtaggtttatggtttattaggagtgattttatgggtggatggcgcgggttttttattttcgtgcggcgtattcggcgagaaatttttagtcggtttgcgggtcgagagttggcgtttaatatcggttaggttttttagttttgcgggtggtgagttttagttgttgttgtagaacgtgatgttgttggcgtaatgtatttagttcgttgtcgttggattgttggagtttattgtaacgttggcgttttttcgttagttgtagttgtagcgtttgattatcgcgttagagttgatatagtgggcgaatttgtgtcgggatttcggtatttaacgttttaatacgcgcgattagttggcggcgtttatacggcgtaattttggcgtcggcgagtaaaattttttgtttaaaggtattttgttagttgtcgtcgttatattggcgagtttgttgacgcgattgcgtaggtattaaacgattagtat

SEQ ID NO: 32018 - DNA, 555 bp, Artificial Sequence
  chemically treated genomic DNA (Homo sapiens) CpG-island No: 32018
atactaatcgtttaatacctacgcaatcgcgtcaacaaactcgccaatataacgacgacaactaacaaaatacctttaaacaaaaaattttactcgccgacgccaaaattacgccgtataaacgccgccaactaatcgcgcgtattaaaacgttaaataccgaaatcccgacacaaattcgcccactatatcaactctaacgcgataatcaaacgctacaactacaactaacgaaaaaacgccaacgttacaataaactccaacaatccaacgacaacgaactaaatacattacgccaacaacatcacgttctacaacaacaactaaaactcaccacccgcaaaactaaaaaacctaaccgatattaaacgccaactctcgacccgcaaaccgactaaaaatttctcgccgaatacgccgcacgaaaataaaaaacccgcgccatccacccataaaatcactcctaataaaccataaacctacgcatttattattaatcgataacgatccgaaattactaaaactacttaacctacgcctaaccaacgaaaacta

SEQ ID NO: 32019 - DNA, 555 bp, Artificial Sequence
  chemically treated genomic DNA (Homo sapiens) CpG-island No: 32019
gtgttgatcgtttaatgtttgcgtagtcgcgttagtaagttcgttaatatgacgacggtagttggtaaaatatttttaaataagggattttgttcgtcgacgttaaaattacgtcgtatgagcgtcgttagttggtcgcgcgtattgaagcgttaagtatcgagatttcggtataggttcgtttattgtattaattttggcgcgatggttaggcgttgtaattgtaattggcggaagagcgttaacgttatagtaaattttagtagtttagcgatagcgagttggatatattgcgttagtaatattacgttttatagtagtaattggaatttattattcgtaaggttggaaaatttgatcgatattgaacgttagttttcgattcgtaaatcggttggaaatttttcgtcggatacgtcgtacgagagtgaaaagttcgcgttatttatttatgaggttatttttgatgagttataaatttgcgtatttattattggtcgatgacgattcgggattgttgaaattgtttggtttgcgtttgattagcgaaggtta

SEQ ID NO: 32020 - DNA, 555 bp, Artificial Sequence
  chemically treated genomic DNA (Homo sapiens) CpG-island No: 32020
taaccttcgctaatcaaacgcaaaccaaacaatttcaacaatcccgaatcgtcatcgaccaataataaatacgcaaatttataactcatcaaaaataacctcataaataaataacgcgaacttttcactctcgtacgacgtatccgacgaaaaatttccaaccgatttacgaatcgaaaactaacgttcaatatcgatcaaattttccaaccttacgaataataaattccaattactactataaaacgtaatattactaacgcaatatatccaactcgctatcgctaaactactaaaatttactataacgttaacgctcttccgccaattacaattacaacgcctaaccatcgcgccaaaattaatacaataaacgaacctataccgaaatctcgatacttaacgcttcaatacgcgcgaccaactaacgacgctcatacgacgtaattttaacgtcgacgaacaaaatcccttatttaaaaatattttaccaactaccgtcgtcatattaacgaacttactaacgcgactacgcaaacattaaacgatcaacac

SEQ ID NO: 32021 - DNA, 701 bp, Artificial Sequence
  chemically treated genomic DNA (Homo sapiens) CpG-island No: 32021
tacgcgttcggttattagatatatttttcggcggaaggggtagtaatagtgttatcgataaggaggaggagtcgttaagaaatatagttaaatttagaacgtacggtatcgttaggtcgcgatagtaggaaaagcgtacgtttcgagtttggggagttcgttgtagggattaggtttcggatacgtagggtaggtagtcgggggtataggttttagattcgggagtacgcgcggtttggagtaaagcggcggaagatagtatttattttgcgtggatatcggatttcgtagttttcggtttggtttttaggaggtttgtatttttagttgggttcggttttcgcggttttcgtttggagttttagtttagttttttgagtgcgacggggcggggcggtttcgggaaggcgacgtaggatgtttttcgtttttttgttcggcggtttcgtttcgggagttcgggatgcgtggggagggaggtttcgtttcgtggattcgttatgcgtttggtatttggagattggtttatttaataacgtagtttgtgatgcggattacgtgttgtgtgggttgcgtatcgtcggttgattataggttatcgttttttcggttgttattttgtgattattagaataaggtaacgacggtgggtgtatttcgtaaatatgttttttcgaagattttttttgaaattataaagt

SEQ ID NO: 32022 - DNA, 701 bp, Artificial Sequence
  chemically treated genomic DNA (Homo sapiens) CpG-island No: 32022
actttataatttcaaaaaaaatcttcgaaaaaacatatttacgaaatacacccaccgtcgttaccttattctaataatcacaaaataacaaccgaaaaaacgataacctataatcaaccgacgatacgcaacccacacaacacgtaatccgcatcacaaactacgttattaaataaaccaatctccaaataccaaacgcataacgaatccacgaaacgaaacctccctccccacgcatcccgaactcccgaaacgaaaccgccgaacaaaaaaacgaaaaacatcctacgtcgccttcccgaaaccgccccgccccgtcgcactcaaaaaactaaactaaaactccaaacgaaaaccgcgaaaaccgaacccaactaaaaatacaaacctcctaaaaaccaaaccgaaaactacgaaatccgatatccacgcaaaataaatactatcttccgccgctttactccaaaccgcgcgtactcccgaatctaaaacctatacccccgactacctaccctacgtatccgaaacctaatccctacaacgaactccccaaactcgaaacgtacgcttttcctactatcgcgacctaacgataccgtacgttctaaatttaactatatttcttaacgactcctcctccttatcgataacactattactaccccttccgccgaaaaatatatctaataaccgaacgcgta

SEQ ID NO: 32023 - DNA, 701 bp, Artificial Sequence
  chemically treated genomic DNA (Homo sapiens) CpG-island No: 32023
attttatagttttaaaagaggttttcgggggagtatatttgcgaagtgtatttatcgtcgttgttttattttggtagttatagggtgatagtcgagggagcggtaatttgtaattagtcggcggtgcgtagtttatatagtacgtggttcgtattataggttgcgttattgagtgagttagtttttagatgttaggcgtatgacgagtttacggagcgggatttttttttttacgtatttcgggttttcggggcggggtcgtcgggtaggggggcggggagtattttgcgtcgttttttcgggatcgtttcgtttcgtcgtatttagagagttgggttggagttttaagcggaaatcgcgggagtcgagtttagttaggaatgtagattttttgaaaattaagtcgaggattgcggggttcggtgtttacgtagagtgagtattgtttttcgtcgttttgttttaggtcgcgcgtgttttcgggtttagggtttgtgttttcggttatttgttttgcgtgttcggggtttggtttttgtagcggattttttaggttcgggacgtgcgttttttttattatcgcgatttggcgatatcgtgcgttttgagtttaattgtgttttttggcgattttttttttttgtcggtaatattgttattgtttttttcgtcgggaaatgtatttggtgatcggacgcgta

SEQ ID NO: 32024 - DNA, 701 bp, Artificial Sequence
  chemically treated genomic DNA (Homo sapiens) CpG-island No: 32024
tacgcgtccgatcaccaaatacatttcccgacgaaaaaaacaataacaatattaccgacaaaaaaaaaaaatcgccaaaaaacacaattaaactcaaaacgcacgatatcgccaaatcgcgataataaaaaaaacgcacgtcccgaacctaaaaaatccgctacaaaaaccaaaccccgaacacgcaaaacaaataaccgaaaacacaaaccctaaacccgaaaacacgcgcgacctaaaacaaaacgacgaaaaacaatactcactctacgtaaacaccgaaccccgcaatcctcgacttaattttcaaaaaatctacattcctaactaaactcgactcccgcgatttccgcttaaaactccaacccaactctctaaatacgacgaaacgaaacgatcccgaaaaaacgacgcaaaatactccccgcccccctacccgacgaccccgccccgaaaacccgaaatacgtaaaaaaaaaaatcccgctccgtaaactcgtcatacgcctaacatctaaaaactaactcactcaataacgcaacctataatacgaaccacgtactatataaactacgcaccgccgactaattacaaattaccgctccctcgactatcaccctataactaccaaaataaaacaacgacgataaatacacttcgcaaatatactcccccgaaaacctcttttaaaactataaaat

SEQ ID NO: 32025 - DNA, 545 bp, Artificial Sequence
  chemically treated genomic DNA (Homo sapiens) CpG-island No: 32025
gcgaacggtttagtttaggttttgcgttagagtatcgtattcgggggcggacggttttgtagttttttagttttttttcgtattaattagttgacgttcgggcgtattggtttttttcgttttcgttcgtacgaaagttttgttcgacgtttgtagttagtatcgttcgtattgtttagggagggtttgcgtcgagatttagtggtcgagtgagttatagagtcgttggttttggggacgttgttttttatcgttttttatcgttttttttttttttgtattttatttcggtatttcgtattttttttttcgttcggtttcgcgtattttgtttagattttataagtattttttcggggtatttaggattcgacgtttttttcgcgtcgttagcggcgttcgttatttttggtacgtcggagggatcgttttcggttttttgcgcggcgttttttaggggatttttagtttattttttatttagttgttcgggtttcgacgttttatttttgtcgaattgggggatatcgaggttgagttcgatt

SEQ ID NO: 32026 - DNA, 545 bp, Artificial Sequence
  chemically treated genomic DNA (Homo sapiens) CpG-island No: 32026
aatcgaactcaacctcgatatcccccaattcgacaaaaataaaacgtcgaaacccgaacaactaaataaaaaataaactaaaaatcccctaaaaaacgccgcgcaaaaaaccgaaaacgatccctccgacgtaccaaaaataacgaacgccgctaacgacgcgaaaaaaacgtcgaatcctaaataccccgaaaaaatacttataaaatctaaacaaaatacgcgaaaccgaacgaaaaaaaaaatacgaaataccgaaataaaatacaaaaaaaaaaaaaacgataaaaaacgataaaaaacaacgtccccaaaaccaacgactctataactcactcgaccactaaatctcgacgcaaaccctccctaaacaatacgaacgatactaactacaaacgtcgaacaaaactttcgtacgaacgaaaacgaaaaaaaccaatacgcccgaacgtcaactaattaatacgaaaaaaaactaaaaaactacaaaaccgtccgcccccgaatacgatactctaacgcaaaacctaaactaaaccgttcgc

SEQ ID NO: 32027 - DNA, 545 bp, Artificial Sequence
  chemically treated genomic DNA (Homo sapiens) CpG-island No: 32027
ggtcgggtttagtttcggtgttttttagttcggtaaaggtaaggcgtcgggattcggatagttgggtgagggatgggttgggagttttttgagaaacgtcgcgtagggggtcggaggcggttttttcggcgtgttaagggtggcgagcgtcgttggcggcgcggaggaggcgtcgagttttgggtgtttcgagaaagtgtttgtaaagtttgagtagagtgcgcggggtcgagcggggagaagggtgcggggtatcggggtgagatataggaaagaggaggacggtggggagcggtagaagatagcgtttttaggattagcgattttgtggtttattcggttattgggtttcggcgtaaattttttttaggtagtgcgggcgatgttgattgtagacgtcgggtagggttttcgtgcgggcgggagcgggggaagttagtgcgttcgggcgttagttagttgatgcgggaagaggttggggagttgtagggtcgttcgttttcgggtgcggtgttttggcgtagggtttgggttgagtcgttcgt

SEQ ID NO: 32028 - DNA, 545 bp, Artificial Sequence
  chemically treated genomic DNA (Homo sapiens) CpG-island No: 32028
acgaacgactcaacccaaaccctacgccaaaacaccgcacccgaaaacgaacgaccctacaactccccaacctcttcccgcatcaactaactaacgcccgaacgcactaacttcccccgctcccgcccgcacgaaaaccctacccgacgtctacaatcaacatcgcccgcactacctaaaaaaaatttacgccgaaacccaataaccgaataaaccacaaaatcgctaatcctaaaaacgctatcttctaccgctccccaccgtcctcctctttcctatatctcaccccgataccccgcacccttctccccgctcgaccccgcgcactctactcaaactttacaaacactttctcgaaacacccaaaactcgacgcctcctccgcgccgccaacgacgctcgccacccttaacacgccgaaaaaaccgcctccgaccccctacgcgacgtttctcaaaaaactcccaacccatccctcacccaactatccgaatcccgacgccttacctttaccgaactaaaaaacaccgaaactaaacccgacc

SEQ ID NO: 32029 - DNA, 872 bp, Artificial Sequence
  chemically treated genomic DNA (Homo sapiens) CpG-island No: 32029
gttattatcggggaatcggtatcggtgattcgtgaattcggcggcgattttgttttcgttatcggcggtacgcgtattttttttgattggttggtgattgagtgtagcgttaatttcggcgagatatttttggatcggatgatcgcgatggtggaaggcgtatagcgacgtataacgtcgaacgaaattgttttgattattttgttgattgttttgattatcgtttttttattggtaatcgttacgttgtggtcgtttttcgcgtggggcggtaatgtagttagcgtaacggtattggtggcgttgttggtttgtttgattttaattattattggcggtttgttgttagcgatcggcgtcgtcgggatgagtcggatgttaggcgcgaatgtgattgttattagcggacgtgtagttgaagcggtaggtgacgttgacgttttgttattggataaaatcggtattattatattcggtaatcgttaggcgtcggagtttattttcgcgtagggcgtggataaaaaacgttggttgacgtcgtataattggtttcgttggttgatgaaacgtcggaaggtcgtagtattgtgattttcgttaagtagcgttttaatttgcgcgagcgcgatgtgtagtcgttttatgttatttttgtatcgtttattgcgtaaagtcggatgagcgggattaatatcgataatcgtatgattcgtaaaggttttgtcgatgttattcgtcgttatgttgaggttaacggtggttatttttttatcgatgttggattataaagtcgattaggttgcgcgttaggagttacgtcgttagtggtggtggaagggtttcgtgttgttgagcgttattgcgtttaaaga

SEQ ID NO: 32030 - DNA, 872 bp, Artificial Sequence
  chemically treated genomic DNA (Homo sapiens) CpG-island No: 32030
tctttaaacgcaataacgctcaacaacacgaaacccttccaccaccactaacgacgtaactcctaacgcgcaacctaatcgactttataatccaacatcgataaaaaaataaccaccgttaacctcaacataacgacgaataacatcgacaaaacctttacgaatcatacgattatcgatattaatcccgctcatccgactttacgcaataaacgatacaaaaataacataaaacgactacacatcgcgctcgcgcaaattaaaacgctacttaacgaaaatcacaatactacgaccttccgacgtttcatcaaccaacgaaaccaattatacgacgtcaaccaacgttttttatccacgccctacgcgaaaataaactccgacgcctaacgattaccgaatataataataccgattttatccaataacaaaacgtcaacgtcacctaccgcttcaactacacgtccgctaataacaatcacattcgcgcctaacatccgactcatcccgacgacgccgatcgctaacaacaaaccgccaataataattaaaatcaaacaaaccaacaacgccaccaataccgttacgctaactacattaccgccccacgcgaaaaacgaccacaacgtaacgattaccaataaaaaaacgataatcaaaacaatcaacaaaataatcaaaacaatttcgttcgacgttatacgtcgctatacgccttccaccatcgcgatcatccgatccaaaaatatctcgccgaaattaacgctacactcaatcaccaaccaatcaaaaaaaatacgcgtaccgccgataacgaaaacaaaatcgccgccgaattcacgaatcaccgataccgattccccgataataac

SEQ ID NO: 32031 - DNA, 872 bp, Artificial Sequence
  chemically treated genomic DNA (Homo sapiens) CpG-island No: 32031
tttttaagcgtaataacgtttagtaatacgagatttttttattattattagcggcgtggtttttgacgcgtaatttgatcgattttgtgatttaatatcggtagggaagtgattatcgttagttttaatatggcgacgaatggtatcgatagaatttttacggattatgcggttgtcgatgttgatttcgtttattcggttttgcgtagtaaacggtataaaggtggtatggagcgattgtatatcgcgttcgcgtaggttaaaacgttgtttggcgaggattataatattgcggtttttcggcgttttattagttagcgaagttagttgtgcggcgttagttagcgttttttatttacgttttgcgcggggataaatttcgacgtttgacggttatcgagtgtgatggtgtcggttttatttagtagtagaacgttaacgttatttgtcgttttaattgtacgttcgttggtggtaattatattcgcgtttagtattcggtttatttcggcgacgtcgatcgttgataataggtcgttaatagtggttgggattagatagattagtagcgttattagtatcgttacgttgattgtattatcgttttacgcggaaaacggttatagcgtggcggttgttagtaaaaagacgatagttagggtaattagtagaatggttagggtaatttcgttcggcgttgtgcgtcgttgtgcgttttttattatcgcgattattcgatttagaaatgtttcgtcggggttaacgttatatttaattattagttagttagaaagaatacgcgtgtcgtcggtgacggaggtaaaatcgtcgtcggatttacggattatcggtgtcgatttttcggtgatggt

SEQ ID NO: 32032 - DNA, 872 bp, Artificial Sequence
  chemically treated genomic DNA (Homo sapiens) CpG-island No: 32032
accatcaccgaaaaatcgacaccgataatccgtaaatccgacgacgattttacctccgtcaccgacgacacgcgtattctttctaactaactaataattaaatataacgttaaccccgacgaaacatttctaaatcgaataatcgcgataataaaaaacgcacaacgacgcacaacgccgaacgaaattaccctaaccattctactaattaccctaactatcgtctttttactaacaaccgccacgctataaccgttttccgcgtaaaacgataatacaatcaacgtaacgatactaataacgctactaatctatctaatcccaaccactattaacgacctattatcaacgatcgacgtcgccgaaataaaccgaatactaaacgcgaatataattaccaccaacgaacgtacaattaaaacgacaaataacgttaacgttctactactaaataaaaccgacaccatcacactcgataaccgtcaaacgtcgaaatttatccccgcgcaaaacgtaaataaaaaacgctaactaacgccgcacaactaacttcgctaactaataaaacgccgaaaaaccgcaatattataatcctcgccaaacaacgttttaacctacgcgaacgcgatatacaatcgctccataccacctttataccgtttactacgcaaaaccgaataaacgaaatcaacatcgacaaccgcataatccgtaaaaattctatcgataccattcgtcgccatattaaaactaacgataatcacttccctaccgatattaaatcacaaaatcgatcaaattacgcgtcaaaaaccacgccgctaataataataaaaaaatctcgtattactaaacgttattacgcttaaaaa

SEQ ID NO: 32033 - DNA, 555 bp, Artificial Sequence
  chemically treated genomic DNA (Homo sapiens) CpG-island No: 32033
gggtttatcgggcgggaatttttttttagtcgtttggtggaggtatcgttgttgacggtaataattaagcggttatttagtttgcgggtatttgttagataagagacgtgttcggcgtgtaggatgttaaagatatcgttggttattattatttttttattacgtttacgcgttgtcgttacggttagttttagttttttttcggttattacgttaaagtttgtatttgtacgtttacgtatagtattttttagttcgatcggcgaaatcgtggaggtttttagtttgtcgattattacgttagtcgtcgtattggtaaagaagtaggttttttttagcgaattattcgttgttagcgttgtcgttaggacgttaattatcgtgtcgttcgtatcggtacgttatatattttttgcgtttgggttggtatatgtagcggcgttttattcggttgtagtagcgatatattttgttcggaacgggttattaatagagtcgagagttcgtaatcggtaattagttttatgtcgcgtttaataatttttttttcggttt

SEQ ID NO: 32034 - DNA, 555 bp, Artificial Sequence
  chemically treated genomic DNA (Homo sapiens) CpG-island No: 32034
aaaccgaaaaaaaaattattaaacgcgacataaaactaattaccgattacgaactctcgactctattaataacccgttccgaacaaaatatatcgctactacaaccgaataaaacgccgctacatataccaacccaaacgcaaaaaatatataacgtaccgatacgaacgacacgataattaacgtcctaacgacaacgctaacaacgaataattcgctaaaaaaaacctacttctttaccaatacgacgactaacgtaataatcgacaaactaaaaacctccacgatttcgccgatcgaactaaaaaatactatacgtaaacgtacaaatacaaactttaacgtaataaccgaaaaaaaactaaaactaaccgtaacgacaacgcgtaaacgtaataaaaaaataataataaccaacgatatctttaacatcctacacgccgaacacgtctcttatctaacaaatacccgcaaactaaataaccgcttaattattaccgtcaacaacgatacctccaccaaacgactaaaaaaaaattcccgcccgataaaccc

SEQ ID NO: 32035 - DNA, 555 bp, Artificial Sequence
  chemically treated genomic DNA (Homo sapiens) CpG-island No: 32035
agatcgaagaagagattgttgagcgcggtatgaaattgattgtcgattacgaattttcggttttgttagtgattcgtttcgaatagggtatgtcgttgttgtaatcgggtaaagcgtcgttgtatatgttaatttaagcgtaggaagtgtatgacgtatcggtgcgggcgatacggtgattggcgttttggcggtaacgttggtagcgggtaattcgttggaagaagtttgtttttttgttaatgcggcggttggcgtggtggtcggtaaattgggaatttttacggtttcgtcgatcgagttggaaaatgttgtacgtggacgtgtagatataggttttggcgtgatgatcgaagaggaattgaagttggtcgtagcggtagcgcgtaaacgtggtgaaaaagtggtgatgattaacggtgtttttgatattttgtacgtcgggtacgttttttatttggtaaatgttcgtaagttgggtgatcgtttgattgttgtcgttaatagcgatgtttttattaaacggttgaaaggggattttcgttcggtaaattt

SEQ ID NO: 32036 - DNA, 555 bp, Artificial Sequence
  chemically treated genomic DNA (Homo sapiens) CpG-island No: 32036
aaatttaccgaacgaaaatcccctttcaaccgtttaataaaaacatcgctattaacgacaacaatcaaacgatcacccaacttacgaacatttaccaaataaaaaacgtacccgacgtacaaaatatcaaaaacaccgttaatcatcaccactttttcaccacgtttacgcgctaccgctacgaccaacttcaattcctcttcgatcatcacgccaaaacctatatctacacgtccacgtacaacattttccaactcgatcgacgaaaccgtaaaaattcccaatttaccgaccaccacgccaaccgccgcattaacaaaaaaacaaacttcttccaacgaattacccgctaccaacgttaccgccaaaacgccaatcaccgtatcgcccgcaccgatacgtcatacacttcctacgcttaaattaacatatacaacgacgctttacccgattacaacaacgacataccctattcgaaacgaatcactaacaaaaccgaaaattcgtaatcgacaatcaatttcataccgcgctcaacaatctcttcttcgatct

SEQ ID NO: 32037 - DNA, 1283 bp, Artificial Sequence
  chemically treated genomic DNA (Homo sapiens) CpG-island No: 32037
gtttttatcgtaattcgagggcggggggcgtagtagcgcggtttcgggatcgtcgggcgggtttcgaggtttcggggttgagacgggcgtcgggggttcggggatttttttcggtcgttgaggtggttgcggtcgcgcgtttagttcgggggtcgggaatttttggcggcgcggatttcgtcgttttcgtcgttttagttatcgggcgtgtgtgtagttcgggtttttttttttttgtttcgtcgcgagtcgggcgcgatttcgaggcggttcggttatttattatattatagatggaggcgatgtttcggatagttattagtttaaaggttgtagcgattttttatcgttatttttataaggggaaatcgggattgtttatggtggcgcgttggcggggaggtcgggcggtagcgcggcggtttggggttcggtttttagtttggttgggagagggaggtcgggaggaggaggcggcggcgcggggagggcggggagggagcgcggaggggcggggagtggcggagcgagggagtttgggtcgcggtcggcggcgcggggaggaggggcggttcgggcgcgtcgcgtgagttcgagtcggtcgtttagagcgttttaggttgggttttcgggtttcgtcgcgtcgttttttttttagttcgttcgtttaggtttggttttttgtttttttatttgattttttgtttttttttattcggattggaatgtcgggttaggtttcggggcgcgtcgttgcggtagtcgtatttcgtaggtttttcggtcgatttcgacgcggaagcggcggtttttttcgtcgtcggggagttagggagtcggggacggtacggtgcgcggggtggggaagcgggcggtttaggtcggggcgaattcggggtcgtttttcgttttcgtttttttttcgtcgttttttttttggcgggtttcggtagttttcggtgtttattttttggcgaggggtaggggtggcgacgtttaatttttagtttttttcgagggttttaattagatggtatcggcggggatttaagaagtaaaatggggcgaggatatcggagcggttagagagttttcgttagttgcgggtcgggcgttcgagaaagggcgtcgggaagggggaggaattcgggtttgggcggaggttagtagcggcgcgttcgggcggtttgtgatattagcgggtttaaaggagacgtttcggtttcgcgtaagtattagggattgtttaaggagtggaaagaacgaaaataaaatttttttat

SEQ ID NO: 32038 - DNA, 1283 bp, Artificial Sequence
  chemically treated genomic DNA (Homo sapiens) CpG-island No: 32038
ataaaaaaattttattttcgttctttccactccttaaacaatccctaatacttacgcgaaaccgaaacgtctcctttaaacccgctaatatcacaaaccgcccgaacgcgccgctactaacctccgcccaaacccgaattcctcccccttcccgacgccctttctcgaacgcccgacccgcaactaacgaaaactctctaaccgctccgatatcctcgccccattttacttcttaaatccccgccgataccatctaattaaaaccctcgaaaaaaactaaaaattaaacgtcgccacccctacccctcgccaaaaaataaacaccgaaaactaccgaaacccgccaaaaaaaaaacgacgaaaaaaaaacgaaaacgaaaaacgaccccgaattcgccccgacctaaaccgcccgcttccccaccccgcgcaccgtaccgtccccgactccctaactccccgacgacgaaaaaaaccgccgcttccgcgtcgaaatcgaccgaaaaacctacgaaatacgactaccgcaacgacgcgccccgaaacctaacccgacattccaatccgaataaaaaaaaacaaaaaatcaaataaaaaaacaaaaaaccaaacctaaacgaacgaactaaaaaaaaaacgacgcgacgaaacccgaaaacccaacctaaaacgctctaaacgaccgactcgaactcacgcgacgcgcccgaaccgcccctcctccccgcgccgccgaccgcgacccaaactccctcgctccgccactccccgcccctccgcgctccctccccgccctccccgcgccgccgcctcctcctcccgacctccctctcccaaccaaactaaaaaccgaaccccaaaccgccgcgctaccgcccgacctccccgccaacgcgccaccataaacaatcccgatttccccttataaaaataacgataaaaaatcgctacaacctttaaactaataactatccgaaacatcgcctccatctataatataataaataaccgaaccgcctcgaaatcgcgcccgactcgcgacgaaacaaaaaaaaaaaaacccgaactacacacacgcccgataactaaaacgacgaaaacgacgaaatccgcgccgccaaaaattcccgacccccgaactaaacgcgcgaccgcaaccacctcaacgaccgaaaaaaatccccgaacccccgacgcccgtctcaaccccgaaacctcgaaacccgcccgacgatcccgaaaccgcgctactacgccccccgccctcgaattacgataaaaac

SEQ ID NO: 32039 - DNA, 1283 bp, Artificial Sequence
  chemically treated genomic DNA (Homo sapiens) CpG-island No: 32039
atggaaaagttttgttttcgttttttttattttttggatagtttttagtgtttgcgcggaatcgggacgttttttttggattcgttaatgttataagtcgttcgagcgcgtcgttgttggttttcgtttagattcggattttttttttttttcggcgttttttttcgggcgttcggttcgtagttggcgagggttttttgatcgtttcggtgttttcgttttattttattttttgggttttcgtcggtgttatttggttggaattttcgggaggaattaaaagttggacgtcgttatttttatttttcgttaaaaaataaatatcgggggttgtcgaggttcgttaggaggaaggcgacgaggaaaaagcgaggacggaaggcggtttcgggttcgtttcggtttgggtcgttcgtttttttatttcgcgtatcgtatcgttttcggttttttggtttttcgacggcgaggagggtcgtcgttttcgcgtcggggtcggtcgggggatttgcgaggtgcggttgtcgtagcggcgcgtttcggagtttggttcggtattttagttcgaatagaaagaggtagggaattaaatggaaaagtaggaggttaggtttgggcgggcgagttgggaaggaggcggcgcggcggggttcgggaatttagtttggagcgttttgagcggtcggttcggatttacgcggcgcgttcgggtcgtttttttttttcgcgtcgtcggtcgcggtttaggttttttcgtttcgttatttttcgttttttcgcgtttttttttcgtttttttcgcgtcgtcgtttttttttttcggttttttttttttagttaaattgaaagtcggattttaggtcgtcgcgttgtcgttcggttttttcgttagcgcgttattatgggtagtttcggtttttttttgtaaagatggcggtgagggatcgttgtaatttttagattaatgattgttcgaaatatcgtttttatttgtaatatggtgagtggtcgagtcgtttcggggtcgcgttcgattcgcggcgaggtaaagaaagggaagttcgagttgtatatacgttcggtggttggggcggcgggggcggcggggttcgcgtcgttagaagttttcggttttcgagttgggcgcgcggtcgtagttattttagcggtcggggagggttttcgagttttcggcgttcgttttagtttcgggatttcggaattcgttcggcgatttcggggtcgcgttgttgcgtttttcgttttcgggttgcggtggaagt

SEQ ID NO: 32040 - DNA, 1283 bp, Artificial Sequence
  chemically treated genomic DNA (Homo sapiens) CpG-island No: 32040
acttccaccgcaacccgaaaacgaaaaacgcaacaacgcgaccccgaaatcgccgaacgaattccgaaatcccgaaactaaaacgaacgccgaaaactcgaaaaccctccccgaccgctaaaataactacgaccgcgcgcccaactcgaaaaccgaaaacttctaacgacgcgaaccccgccgcccccgccgccccaaccaccgaacgtatatacaactcgaacttccctttctttacctcgccgcgaatcgaacgcgaccccgaaacgactcgaccactcaccatattacaaataaaaacgatatttcgaacaatcattaatctaaaaattacaacgatccctcaccgccatctttacaaaaaaaaaccgaaactacccataataacgcgctaacgaaaaaaccgaacgacaacgcgacgacctaaaatccgactttcaatttaactaaaaaaaaaaaaccgaaaaaaaaaaacgacgacgcgaaaaaaacgaaaaaaaaacgcgaaaaaacgaaaaataacgaaacgaaaaaacctaaaccgcgaccgacgacgcgaaaaaaaaaaacgacccgaacgcgccgcgtaaatccgaaccgaccgctcaaaacgctccaaactaaattcccgaaccccgccgcgccgcctccttcccaactcgcccgcccaaacctaacctcctacttttccatttaattccctacctctttctattcgaactaaaataccgaaccaaactccgaaacgcgccgctacgacaaccgcacctcgcaaatcccccgaccgaccccgacgcgaaaacgacgaccctcctcgccgtcgaaaaaccaaaaaaccgaaaacgatacgatacgcgaaataaaaaaacgaacgacccaaaccgaaacgaacccgaaaccgccttccgtcctcgctttttcctcgtcgccttcctcctaacgaacctcgacaacccccgatatttattttttaacgaaaaataaaaataacgacgtccaacttttaattcctcccgaaaattccaaccaaataacaccgacgaaaacccaaaaaataaaataaaacgaaaacaccgaaacgatcaaaaaaccctcgccaactacgaaccgaacgcccgaaaaaaaacgccgaaaaaaaaaaaaaatccgaatctaaacgaaaaccaacaacgacgcgctcgaacgacttataacattaacgaatccaaaaaaaacgtcccgattccgcgcaaacactaaaaactatccaaaaaataaaaaaaacgaaaacaaaacttttccat

SEQ ID NO: 32041 - DNA, 876 bp, Artificial Sequence
  chemically treated genomic DNA (Homo sapiens) CpG-island No: 32041
gagaagaacgagttttacgtcgttttttttttttcgggttaattgtagttcgcgggcggtaggaaggtagtcgcgcggggtgggtttttggggattgggcgtagggtttcgcggcgcggttgggttgcggttgttcgatcggcgagggtcgggtttcgggaagtttttagggtttcgttcgcgtagttaggaaagtatgtagtttatcgacgggcggaggaatcgttcgggtaaagttacgtcggtggttgatcgcgcggtagggaggtgggtattttgtttatatttattaggaggttgatagttggcgagcgttaggcggtcgggacgggataagggtcgtagcgcgtcggagggggtcgttttgagaaagtcgcgttgggcgttgttcgtcgttaacgattttttttcgttcggattagcggcggttggatatttacgtagggttggtagaatttggagagtcgcggtttttcgtggttgttgaagattaggatcgttttgattatggttgtgtcgggtcgatcgggtgggtattgggggttagggcgggggcgggcgcgcgagtttcgtttcgtaatttcgtttgcgatttttttttattcgttttttttcgtacgcgatcgcgcgcgttttcgagtcgtcgggcggggtttaaggggcggggtttgggcggggtaggtattaaggaaagcggaaatatttttaggttcgagttagcggtttaattggagtgtgcgtattcgatcgagtatagatacgtggtttatcgtttttttttcgaggtttgtagtcgcggagaaatatatgttgcgttattaacgtttagaggtttgcgatagtttcgatttgaatgattagtcgggaatattaagt

SEQ ID NO: 32042 - DNA, 876 bp, Artificial Sequence
  chemically treated genomic DNA (Homo sapiens) CpG-island No: 32042
acttaatattcccgactaatcattcaaatcgaaactatcgcaaacctctaaacgttaataacgcaacatatatttctccgcgactacaaacctcgaaaaaaaaacgataaaccacgtatctatactcgatcgaatacgcacactccaattaaaccgctaactcgaacctaaaaatatttccgctttccttaatacctaccccgcccaaaccccgccccttaaaccccgcccgacgactcgaaaacgcgcgcgatcgcgtacgaaaaaaaacgaataaaaaaaaatcgcaaacgaaattacgaaacgaaactcgcgcgcccgcccccgccctaacccccaatacccacccgatcgacccgacacaaccataatcaaaacgatcctaatcttcaacaaccacgaaaaaccgcgactctccaaattctaccaaccctacgtaaatatccaaccgccgctaatccgaacgaaaaaaaatcgttaacgacgaacaacgcccaacgcgactttctcaaaacgaccccctccgacgcgctacgacccttatcccgtcccgaccgcctaacgctcgccaactatcaacctcctaataaatataaacaaaatacccacctccctaccgcgcgatcaaccaccgacgtaactttacccgaacgattcctccgcccgtcgataaactacatactttcctaactacgcgaacgaaaccctaaaaacttcccgaaacccgaccctcgccgatcgaacaaccgcaacccaaccgcgccgcgaaaccctacgcccaatccccaaaaacccaccccgcgcgactaccttcctaccgcccgcgaactacaattaacccgaaaaaaaaaaaacgacgtaaaactcgttcttctc

SEQ ID NO: 32043 - DNA, 876 bp, Artificial Sequence
  chemically treated genomic DNA (Homo sapiens) CpG-island No: 32043
atttggtgttttcggttagttatttaaatcgaagttgtcgtagatttttgaacgttagtaacgtaatatgtgttttttcgcgattatagatttcgggagaggagcggtgggttacgtgtttgtgttcggtcgaatgcgtatattttagttaggtcgttggttcggatttagaaatgttttcgttttttttagtgtttgtttcgtttaggtttcgttttttgggtttcgttcgacggttcgggagcgcgcgcggtcgcgtgcgggagggggcgggtggggaaggatcgtaggcgagattacgaggcgaggttcgcgcgttcgttttcgttttggtttttagtgtttattcggtcggttcggtatagttatgattaaggcgattttaatttttaataattacgggaagtcgcggttttttaagttttattagttttacgtgagtatttagtcgtcgttgattcgggcgagggggagtcgttggcgacgggtagcgtttagcgcggtttttttagagcgatttttttcggcgcgttgcggtttttgtttcgtttcggtcgtttggcgttcgttagttgttagttttttggtgggtgtggatagggtgtttatttttttgtcgcgcggttagttatcgacgtggttttgttcgggcggttttttcgttcgtcggtgggttgtatgtttttttggttgcgcgggcgaggttttggagatttttcggggttcggttttcgtcgatcgggtagtcgtagtttagtcgcgtcgcggagttttgcgtttagtttttaagagtttatttcgcgcggttgtttttttgtcgttcgcgggttgtagttagttcgggaggaggaagacggcgtggaattcgtttttttt

SEQ ID NO: 32044 - DNA, 876 bp, Artificial Sequence
  chemically treated genomic DNA (Homo sapiens) CpG-island No: 32044
aaaaaaaacgaattccacgccgtcttcctcctcccgaactaactacaacccgcgaacgacaaaaaaacaaccgcgcgaaataaactcttaaaaactaaacgcaaaactccgcgacgcgactaaactacgactacccgatcgacgaaaaccgaaccccgaaaaatctccaaaacctcgcccgcgcaaccaaaaaaacatacaacccaccgacgaacgaaaaaaccgcccgaacaaaaccacgtcgataactaaccgcgcgacaaaaaaataaacaccctatccacacccaccaaaaaactaacaactaacgaacgccaaacgaccgaaacgaaacaaaaaccgcaacgcgccgaaaaaaatcgctctaaaaaaaccgcgctaaacgctacccgtcgccaacgactccccctcgcccgaatcaacgacgactaaatactcacgtaaaactaataaaacttaaaaaaccgcgacttcccgtaattattaaaaattaaaatcgccttaatcataactataccgaaccgaccgaataaacactaaaaaccaaaacgaaaacgaacgcgcgaacctcgcctcgtaatctcgcctacgatccttccccacccgccccctcccgcacgcgaccgcgcgcgctcccgaaccgtcgaacgaaacccaaaaaacgaaacctaaacgaaacaaacactaaaaaaaacgaaaacatttctaaatccgaaccaacgacctaactaaaatatacgcattcgaccgaacacaaacacgtaacccaccgctcctctcccgaaatctataatcgcgaaaaaacacatattacgttactaacgttcaaaaatctacgacaacttcgatttaaataactaaccgaaaacaccaaat

SEQ ID NO: 32045 - DNA, 890 bp, Artificial Sequence
  chemically treated genomic DNA (Homo sapiens) CpG-island No: 32045
  unsure (724)
ttgcgcgattatttggatttttatttggtgacggagtacgtatattaatgtcgtaatagattgaattacgtaatatcgcgttataggtcgcgtagtcgttggtatacggtgtatcgttaattttgtaacgcgggcgcgtgttggcgttagtcggcggtagcggtagcgggaaattattaatttgcgtcgtaacgttgggtattttgttcgttggcgttcgttagacggcgggcggaaattttagtcgatggtaaatcggtttcgttttgcgttttgcgcggtattaaaattgttattattatgtagaattcgcgtagcgtttttaatttattgtatattatgtatatttacgcgcgggaaatttgtttggcgttagggaaattcgtcgatgacgttacgtttatcgttgttatagaagcggtggggttggaaaacgtcgcgcgcgtgttgaagttgtattcgttcgagatgagcggcggtatgttgtagcgtatgatgattgcgatggcggtgttgtgtgaattatcgtttattatcgtcgataatcgattatcgattttgacgtggtagtataggcgcgtattttttgatttgttggaaagtattatgtaaataataagcgtcgggaatgttgttggtgatttatgatatgggcgttgtgtgcgcgtttggcggatgacgtggcggttatgtttgacggtaagattgtcgaatagggcggatntgaaacgttgtttaacgtttttaaatatatagtgacgcgtagtttggttttcgtttatttcgttttttatcggtatggagttggtattatgattttatttaatatttttcggttttttatttattatgcgtacggtggattaacggaaatattatattaggcggtg

SEQ ID NO: 32046 - DNA, 890 bp, Artificial Sequence
  chemically treated genomic DNA (Homo sapiens) CpG-island No: 32046
  unsure (167)
caccgcctaatataatatttccgttaatccaccgtacgcataataaataaaaaaccgaaaaatattaaataaaatcataataccaactccataccgataaaaaacgaaataaacgaaaaccaaactacgcgtcactatatatttaaaaacgttaaacaacgtttcanatccgccctattcgacaatcttaccgtcaaacataaccgccacgtcatccgccaaacgcgcacacaacgcccatatcataaatcaccaacaacattcccgacgcttattatttacataatactttccaacaaatcaaaaaatacgcgcctatactaccacgtcaaaatcgataatcgattatcgacgataataaacgataattcacacaacaccgccatcgcaatcatcatacgctacaacataccgccgctcatctcgaacgaatacaacttcaacacgcgcgcgacgttttccaaccccaccgcttctataacaacgataaacgtaacgtcatcgacgaatttccctaacgccaaacaaatttcccgcgcgtaaatatacataatatacaataaattaaaaacgctacgcgaattctacataataataacaattttaataccgcgcaaaacgcaaaacgaaaccgatttaccatcgactaaaatttccgcccgccgtctaacgaacgccaacgaacaaaatacccaacgttacgacgcaaattaataatttcccgctaccgctaccgccgactaacgccaacacgcgcccgcgttacaaaattaacgatacaccgtataccaacgactacgcgacctataacgcgatattacgtaattcaatctattacgacattaatatacgtactccgtcaccaaataaaaatccaaataatcgcgcaa

SEQ ID NO: 32047 - DNA, 890 bp, Artificial Sequence
  chemically treated genomic DNA (Homo sapiens) CpG-island No: 32047
  unsure (167)
tatcgtttgatgtgatgttttcgttaatttatcgtgcgtatagtggatgggaagtcggaagatgttaagtaaagttatgatgttagttttatatcggtagagggcgagatgagcggaaattaggttgcgcgttattgtatgtttgggggcgttaaatagcgttttanattcgttttgttcgataattttatcgttagatataatcgttacgttattcgttagacgcgtatataacgtttatattatgggttattagtagtattttcggcgtttgttatttgtataatgttttttagtagattagaggatgcgcgtttgtgttattacgttaaggtcggtggtcggttatcggcgatgataaacggtgatttatatagtatcgttatcgtaattattatgcgttgtaatatgtcgtcgtttatttcgaacgggtatagttttagtacgcgcgcggcgttttttagttttatcgtttttatggtagcggtaagcgtagcgttatcggcgggtttttttaacgttaggtaggtttttcgcgcgtgggtgtgtatggtgtgtagtggattaaaggcgttgcgcgggttttgtatgatggtggtaattttgatgtcgcgtagggcgtaaggcgaaatcggtttgttatcggttaaaattttcgttcgtcgtttggcgaacgttagcgggtaaaatgtttagcgttgcggcgtaggttaatgatttttcgttgtcgttatcgtcgattaacgttagtacgcgttcgcgttgtagggttaacgatatatcgtgtattagcggttgcgcggtttgtagcgcgatattacgtagtttaatttgttgcggtattagtgtgcgtgtttcgttattagatgagggtttagatgatcgcgtag

SEQ ID NO: 32048 - DNA, 890 bp, Artificial Sequence
  chemically treated genomic DNA (Homo sapiens) CpG-island No: 32048
  unsure (724)
ctacgcgatcatctaaaccctcatctaataacgaaacacgcacactaataccgcaacaaattaaactacgtaatatcgcgctacaaaccgcgcaaccgctaatacacgatatatcgttaaccctacaacgcgaacgcgtactaacgttaatcgacgataacgacaacgaaaaatcattaacctacgccgcaacgctaaacattttacccgctaacgttcgccaaacgacgaacgaaaattttaaccgataacaaaccgatttcgccttacgccctacgcgacatcaaaattaccaccatcatacaaaacccgcgcaacgcctttaatccactacacaccatacacacccacgcgcgaaaaacctacctaacgttaaaaaaacccgccgataacgctacgcttaccgctaccataaaaacgataaaactaaaaaacgccgcgcgcgtactaaaactatacccgttcgaaataaacgacgacatattacaacgcataataattacgataacgatactatataaatcaccgtttatcatcgccgataaccgaccaccgaccttaacgtaataacacaaacgcgcatcctctaatctactaaaaaacattatacaaataacaaacgccgaaaatactactaataacccataatataaacgttatatacgcgtctaacgaataacgtaacgattatatctaacgataaaattatcgaacaaaacgaatntaaaacgctatttaacgcccccaaacatacaataacgcgcaacctaatttccgctcatctcgccctctaccgatataaaactaacatcataactttacttaacatcttccgacttcccatccactatacgcacgataaattaacgaaaacatcacatcaaacgata

SEQ ID NO: 32049 - DNA, 532 bp, Artificial Sequence
  chemically treated genomic DNA (Homo sapiens) CpG-island No: 32049
tcgttacgcgggtcgcggtcggaatgcggttcggtggcgttcgggttattcggcgtcggtagttgtttaggtttagcggggttgcgggaggggcggagttggcgagtcgtcggaggggcggagtcggcgggtcgcggggggcggggttatcggttgttcgcgcgcgtcgtcgaggtttcgtacgtcgtcgcgcgggtcgggcgtttttgtgaattttgggtcgtcgatgggggaggtggagtcggggttcgcgggttcgttggagttttcggagtcgttcgaagcgttcgcgagtcgtcggtcgggagggattcgggttttgaaggtgaggaggcggatggattagcgagcgagcgagcgggcgagcgggtaagcggattagggagggaacgagggaggttagaggtcgttgtcgttttcgtttcgcgtagtggttgaggtagtcggcggttttcgttcggcgttagttagtcggtcgttttatattcggttggggacgtcgaggttttcgcgtcgcgttcgcgtttaggtt

SEQ ID NO: 32050 - DNA, 532 bp, Artificial Sequence
  chemically treated genomic DNA (Homo sapiens) CpG-island No: 32050
aacctaaacgcgaacgcgacgcgaaaacctcgacgtccccaaccgaatataaaacgaccgactaactaacgccgaacgaaaaccgccgactacctcaaccactacgcgaaacgaaaacgacaacgacctctaacctccctcgttccctccctaatccgcttacccgctcgcccgctcgctcgctcgctaatccatccgcctcctcaccttcaaaacccgaatccctcccgaccgacgactcgcgaacgcttcgaacgactccgaaaactccaacgaacccgcgaaccccgactccacctcccccatcgacgacccaaaattcacaaaaacgcccgacccgcgcgacgacgtacgaaacctcgacgacgcgcgcgaacaaccgataaccccgccccccgcgacccgccgactccgcccctccgacgactcgccaactccgcccctcccgcaaccccgctaaacctaaacaactaccgacgccgaataacccgaacgccaccgaaccgcattccgaccgcgacccgcgtaacga

SEQ ID NO: 32051 - DNA, 532 bp, Artificial Sequence
  chemically treated genomic DNA (Homo sapiens) CpG-island No: 32051
ggtttggacgcgggcgcggcgcggaggtttcggcgtttttagtcgggtgtggggcggtcgattgattgacgtcgggcgggggtcgtcgattgttttagttattgcgcggggcgggggcggtagcggtttttagtttttttcgttttttttttagttcgtttgttcgttcgttcgttcgttcgttcgttggtttattcgtttttttatttttaggattcggatttttttcggtcggcggttcgcgggcgtttcgggcggtttcgggggttttagcgggttcgcgggtttcggttttattttttttatcggcgatttaggatttatagagacgttcggttcgcgcgacggcgtgcggagtttcggcggcgcgcgcgagtaatcggtggtttcgtttttcgcggttcgtcggtttcgttttttcggcggttcgttagtttcgtttttttcgtagtttcgttggatttaagtagttgtcggcgtcgagtggttcgggcgttatcgagtcgtatttcggtcgcggttcgcgtggcgg

SEQ ID NO: 32052 - DNA, 532 bp, Artificial Sequence
  chemically treated genomic DNA (Homo sapiens) CpG-island No: 32052
ccgccacgcgaaccgcgaccgaaatacgactcgataacgcccgaaccactcgacgccgacaactacttaaatccaacgaaactacgaaaaaaacgaaactaacgaaccgccgaaaaaacgaaaccgacgaaccgcgaaaaacgaaaccaccgattactcgcgcgcgccgccgaaactccgcacgccgtcgcgcgaaccgaacgtctctataaatcctaaatcgccgataaaaaaaataaaaccgaaacccgcgaacccgctaaaacccccgaaaccgcccgaaacgcccgcgaaccgccgaccgaaaaaaatccgaatcctaaaaataaaaaaacgaataaaccaacgaacgaacgaacgaacgaacgaacaaacgaactaaaaaaaaaacgaaaaaaactaaaaaccgctaccgcccccgccccgcgcaataactaaaacaatcgacgacccccgcccgacgtcaatcaatcgaccgccccacacccgactaaaaacgccgaaacctccgcgccgcgcccgcgtccaaacc

SEQ ID NO: 32053 - DNA, 668 bp, Artificial Sequence
  chemically treated genomic DNA (Homo sapiens) CpG-island No: 32053
gtgatgatttttttatgattgtcgtgtaagggtcgaatgcgtaggtaaaagttgttatattgtttaatgacgtttagcgttaggcggtggaagggatgaaatcgttttttggcgtgtaggcgggcgatttgtttattgttattattggttatatcggtgaagcgggttatgaaattgcgttgtttaatgaaaaagcggtcgatttttggcgtgcgttggtggaagcgggtgttaagttatgtggtttgggcgcgcgtgatacgttgcgtttggaagcgggtatgaatttttatggttaggagatggacgaaattattttttttttagtcgttaatatgggttggattatcgtttgggaatcggtagatcgtgattttatcggtcgtgaagttttggaagtgtagcgtgagtatggtatagaaaaattggttggtttggtgatgatcgaaaaaggcgtgttgcgtaatgaattgtcggtacgttttatcgatgcgtaggggtaattagtatgaaggtattattattagcggtatttttttttcgaacgttggttatagtattgcgttggcgcgcgtgtcggaaggtattggcgaaacggcgattgtgtaaattcgtaatcgtgaaatgtcggttaaagtgataaaatttgtttttgtgcgtaacggtaa

SEQ ID NO: 32054 - DNA, 668 bp, Artificial Sequence
  chemically treated genomic DNA (Homo sapiens) CpG-island No: 32054
ttaccgttacgcacaaaaacaaattttatcactttaaccgacatttcacgattacgaatttacacaatcgccgtttcgccaataccttccgacacgcgcgccaacgcaatactataaccaacgttcgaaaaaaaaataccgctaataataataccttcatactaattacccctacgcatcgataaaacgtaccgacaattcattacgcaacacgcctttttcgatcatcaccaaaccaaccaatttttctataccatactcacgctacacttccaaaacttcacgaccgataaaatcacgatctaccgattcccaaacgataatccaacccatattaacgactaaaaaaaaaataatttcgtccatctcctaaccataaaaattcatacccgcttccaaacgcaacgtatcacgcgcgcccaaaccacataacttaacacccgcttccaccaacgcacgccaaaaatcgaccgctttttcattaaacaacgcaatttcataacccgcttcaccgatataaccaataataacaataaacaaatcgcccgcctacacgccaaaaaacgatttcatcccttccaccgcctaacgctaaacgtcattaaacaatataacaacttttacctacgcattcgacccttacacgacaatcataaaaaaatcatcac

SEQ ID NO: 32055 - DNA, 668 bp, Artificial Sequence
  chemically treated genomic DNA (Homo sapiens) CpG-island No: 32055
ttgtcgttacgtataaaaataggttttgttattttaatcggtattttacggttgcgaatttgtataatcgtcgtttcgttaatatttttcggtacgcgcgttagcgtaatgttgtaattagcgttcggggagaaagtatcgttggtgataatgtttttatgttggttgtttttgcgtatcggtaaagcgtatcggtagtttattacgtagtacgtttttttcggttattattagattaattagtttttttgtattatgtttacgttgtatttttagggttttacgatcgataaagttacgatttgtcggtttttaggcgatggtttagtttatgttggcggttaaaggagagatggtttcgtttattttttgattataaagatttatgttcgtttttagacgtagcgtgttacgcgcgtttaagttatatggtttaatattcgtttttattagcgtacgttagaaatcggtcgtttttttattgggtagcgtaattttatagttcgttttatcggtataattagtggtggtaataaatagatcgttcgtttgtacgttaaagaacggttttattttttttatcgtttgacgttgggcgttattaaatagtgtggtagtttttgtttgcgtattcggtttttgtacggtaattatggaaaggttattat

SEQ ID NO: 32056 - DNA, 668 bp, Artificial Sequence
  chemically treated genomic DNA (Homo sapiens) CpG-island No: 32056
ataataacctttccataattaccgtacaaaaaccgaatacgcaaacaaaaactaccacactatttaataacgcccaacgtcaaacgataaaaaaaataaaaccgttctttaacgtacaaacgaacgatctatttattaccaccactaattataccgataaaacgaactataaaattacgctacccaataaaaaaacgaccgatttctaacgtacgctaataaaaacgaatattaaaccatataacttaaacgcgcgtaacacgctacgtctaaaaacgaacataaatctttataatcaaaaaataaacgaaaccatctctcctttaaccgccaacataaactaaaccatcgcctaaaaaccgacaaatcgtaactttatcgatcgtaaaaccctaaaaatacaacgtaaacataatacaaaaaaactaattaatctaataataaccgaaaaaaacgtactacgtaataaactaccgatacgctttaccgatacgcaaaaacaaccaacataaaaacattatcaccaacgatactttctccccgaacgctaattacaacattacgctaacgcgcgtaccgaaaaatattaacgaaacgacgattatacaaattcgcaaccgtaaaataccgattaaaataacaaaacctatttttatacgtaacgacaa

SEQ ID NO: 32057 - DNA, 510 bp, Artificial Sequence
  chemically treated genomic DNA (Homo sapiens) CpG-island No: 32057
gcgtaagcgtattgcgtaagcgtatataattgatttggatatttcgcgttttttggtttaaagataaagtttttttttttttttttcgtcgttcgtttatcgttttttttttttgtcggtcgtatgcgcgttggttttttgtgacgtagttttcgcgcgttcgcgtcgtttggagttgcgacgttaaatatggcgtgtttttagaagtcgttttcggtattagtaggcggcggcgtggggtttggtagcgtggggagagggattaatcgacgttatttcgtgttgggaagtgggagcgggagggtcgggtaattttcgatcgaattaaacggtgaggtttcggttcgagagttatcgagcgcgcgggagtggaagggagtgggttgggtattcgagtttcgagaggcgagggaggaaagtggggttattaggagatgagggataacggtagcgaggtaagggcggtttgtagatttggttgtttgcgtaattttaggaattcggggaatt

SEQ ID NO: 32058 - DNA, 510 bp, Artificial Sequence
  chemically treated genomic DNA (Homo sapiens) CpG-island No: 32058
aattccccgaattcctaaaattacgcaaacaaccaaatctacaaaccgcccttacctcgctaccgttatccctcatctcctaataaccccactttcctccctcgcctctcgaaactcgaatacccaacccactcccttccactcccgcgcgctcgataactctcgaaccgaaacctcaccgtttaattcgatcgaaaattacccgaccctcccgctcccacttcccaacacgaaataacgtcgattaatccctctccccacgctaccaaaccccacgccgccgcctactaataccgaaaacgacttctaaaaacacgccatatttaacgtcgcaactccaaacgacgcgaacgcgcgaaaactacgtcacaaaaaaccaacgcgcatacgaccgacaaaaaaaaaaaacgataaacgaacgacgaaaaaaaaaaaaaaaaactttatctttaaaccaaaaaacgcgaaatatccaaatcaattatatacgcttacgcaatacgcttacgc

SEQ ID NO: 32059 - DNA, 510 bp, Artificial Sequence
  chemically treated genomic DNA (Homo sapiens) CpG-island No: 32059
agtttttcgggtttttaaggttgcgtaaatagttaagtttgtaggtcgtttttgtttcgttatcgttattttttattttttggtagttttatttttttttttcgtttttcgggattcgggtgtttaatttatttttttttattttcgcgcgttcggtggttttcgggtcggggttttatcgtttggttcggtcgggaattgttcggttttttcgtttttattttttaatacgaagtggcgtcggttggtttttttttttacgttgttagattttacgtcgtcgtttattgatgtcgaaagcggtttttaggaatacgttatgtttggcgtcgtagttttaaacgacgcggacgcgcgaaaattacgttataggagattagcgcgtatgcgatcggtagagagagaaggcgataggcgaacggcgggaaggggaaggaggggttttgtttttgaattaaaaggcgcggggtatttaaattagttgtgtgcgtttgcgtagtgcgtttgcgt

SEQ ID NO: 32060 - DNA, 510 bp, Artificial Sequence
  chemically treated genomic DNA (Homo sapiens) CpG-island No: 32060
acgcaaacgcactacgcaaacgcacacaactaatttaaataccccgcgccttttaattcaaaaacaaaacccctccttccccttcccgccgttcgcctatcgccttctctctctaccgatcgcatacgcgctaatctcctataacgtaattttcgcgcgtccgcgtcgtttaaaactacgacgccaaacataacgtattcctaaaaaccgctttcgacatcaataaacgacgacgtaaaatctaacaacgtaaaaaaaaaaaccaaccgacgccacttcgtattaaaaaataaaaacgaaaaaaccgaacaattcccgaccgaaccaaacgataaaaccccgacccgaaaaccaccgaacgcgcgaaaataaaaaaaaataaattaaacacccgaatcccgaaaaacgaaaaaaaaaaataaaactaccaaaaaataaaaaataacgataacgaaacaaaaacgacctacaaacttaactatttacgcaaccttaaaaacccgaaaaact

SEQ ID NO: 32061 - DNA, 866 bp, Artificial Sequence
  chemically treated genomic DNA (Homo sapiens) CpG-island No: 32061
tgcggaatcgaaagatattgtgggttatgtgcgtgaagttacgtcgcgtgaagtagaataggcgttggaaagtgcggttaatacgcgttaatttggtttgttacgttttcggttgaacgcgtagcgattttgtatcgcgttgtcgtgttgatggaaagttagatgtagtaattgattggtattttggtgcgtgaggtcggaaaaatttttagtaacgttattgtcgaagtgcgcgaagcggtcgattttttttattattacgtcggataggtgcgggatgatttcgttaacgaaatttatcgtttattagggtttgtggtgtgtattagttcgtggaatttttcgttggttatttttatcgggtagatcgtcgtcgtattggcggtaggtaatagcgtgttggtaaaatcggtagaataaacgtcgttgattgtcgcgtaagggatcgttattttgttggaagcgggtgtatcgttaggcgtggtgtaattgttgttaggtcggggtgaaatcgtgggcgcgtaattgacgggtgatgatcgcgtgcgcggggtgatgtttatcggtttaatcgaagtcgttacgttattgtagcgtaatatcgttagtcgtttggacgtttagggtcgttttatttcgtttatcgttgaaatcggcggtatgaacgcgatgattgtcgattttttagtattggatcgaataggtcgtcgtggatggtattggtttcggcgtttcgatagtgcgggtttagcgttgttcggcgttgcgcgtgttgtgtttgtaagatgagattggcggattataacgttgaaaattgttgggcggagtaattggcgaatgcggatgggaattcgggtcgttgaata

SEQ ID NO: 32062 - DNA, 866 bp, Artificial Sequence
  chemically treated genomic DNA (Homo sapiens) CpG-island No: 32062
tattcaacgacccgaattcccatccgcattcgccaattactccgcccaacaattttcaacgttataatccgccaatctcatcttacaaacacaacacgcgcaacgccgaacaacgctaaacccgcactatcgaaacgccgaaaccaataccatccacgacgacctattcgatccaatactaaaaaatcgacaatcatcgcgttcataccgccgatttcaacgataaacgaaataaaacgaccctaaacgtccaaacgactaacgatattacgctacaataacgtaacgacttcgattaaaccgataaacatcaccccgcgcacgcgatcatcacccgtcaattacgcgcccacgatttcaccccgacctaacaacaattacaccacgcctaacgatacacccgcttccaacaaaataacgatcccttacgcgacaatcaacgacgtttattctaccgattttaccaacacgctattacctaccgccaatacgacgacgatctacccgataaaaataaccaacgaaaaattccacgaactaatacacaccacaaaccctaataaacgataaatttcgttaacgaaatcatcccgcacctatccgacgtaataataaaaaaaatcgaccgcttcgcgcacttcgacaataacgttactaaaaatttttccgacctcacgcaccaaaataccaatcaattactacatctaactttccatcaacacgacaacgcgatacaaaatcgctacgcgttcaaccgaaaacgtaacaaaccaaattaacgcgtattaaccgcactttccaacgcctattctacttcacgcgacgtaacttcacgcacataacccacaatatctttcgattccgca

SEQ ID NO: 32063 - DNA, 866 bp, Artificial Sequence
  chemically treated genomic DNA (Homo sapiens) CpG-island No: 32063
tgtttagcgattcggatttttattcgtattcgttaattgtttcgtttagtaatttttaacgttgtggttcgttaattttattttgtaggtatagtacgcgtagcgtcgaataacgttggattcgtattgtcgaaacgtcgaggttagtattatttacgacgatttgttcggtttagtgttgaagaatcgataattatcgcgtttatgtcgtcggttttagcgatgagcggaatagggcgattttgagcgtttaggcggttggcgatattgcgttgtagtaacgtagcgatttcggttgaatcggtaaatattatttcgcgtacgcgattattattcgttagttgcgcgtttacggttttatttcgatttggtagtaattgtattacgtttggcggtatattcgtttttagtaaaatggcgattttttgcgcggtaattagcggcgtttgttttgtcggttttgttagtacgttgttatttgtcgttagtgcggcggcgatttgttcggtgaaaatagttagcgggaagttttacggattgatatatattataggttttaatggacggtgggtttcgttagcgaaattatttcgtatttgttcggcgtagtagtggagaaaatcgatcgtttcgcgtatttcggtaatggcgttattgaaggttttttcggttttacgtattagaatattaattagttgttgtatttggttttttattagtacggtagcgcggtgtaaaatcgttgcgcgtttagtcggaggcgtggtaaattagattggcgcgtattaatcgtattttttagcgtttgttttattttacgcggcgtggttttacgtatatagtttataatatttttcggtttcgta

SEQ ID NO: 32064 - DNA, 866 bp, Artificial Sequence
  chemically treated genomic DNA (Homo sapiens) CpG-island No: 32064
tacgaaaccgaaaaatattataaactatatacgtaaaaccacgccgcgtaaaataaaacaaacgctaaaaaatacgattaatacgcgccaatctaatttaccacgcctccgactaaacgcgcaacgattttacaccgcgctaccgtactaataaaaaaccaaatacaacaactaattaatattctaatacgtaaaaccgaaaaaaccttcaataacgccattaccgaaatacgcgaaacgatcgattttctccactactacgccgaacaaatacgaaataatttcgctaacgaaacccaccgtccattaaaacctataatatatatcaatccgtaaaacttcccgctaactattttcaccgaacaaatcgccgccgcactaacgacaaataacaacgtactaacaaaaccgacaaaacaaacgccgctaattaccgcgcaaaaaatcgccattttactaaaaacgaatataccgccaaacgtaatacaattactaccaaatcgaaataaaaccgtaaacgcgcaactaacgaataataatcgcgtacgcgaaataatatttaccgattcaaccgaaatcgctacgttactacaacgcaatatcgccaaccgcctaaacgctcaaaatcgccctattccgctcatcgctaaaaccgacgacataaacgcgataattatcgattcttcaacactaaaccgaacaaatcgtcgtaaataatactaacctcgacgtttcgacaatacgaatccaacgttattcgacgctacgcgtactatacctacaaaataaaattaacgaaccacaacgttaaaaattactaaacgaaacaattaacgaatacgaataaaaatccgaatcgctaaaca

SEQ ID NO: 32065 - DNA, 546 bp, Artificial Sequence
  chemically treated genomic DNA (Homo sapiens) CpG-island No: 32065
  unsure (419)
aaagagtggttggatcgggtattaagtcgtggttttgttagcgggtcgggaggaaattaattggcgggaaagtattggcgtagcgtgattattatcggcgagtcggaaagtgtttatcgttatgacgcgttgaatcgttattcgatgagcgatgtgttgcgtttttttgaattggcggcgggtatgtgtcggatgtattggttaagttttattattatttattgggcgagacggtaaagcgtataggagttggcgagttacgttagagtttacggtgattggttggtaaattcgttgtttttaggaggtcgttgatggaaggtttcgattttttattcgtaggagtgttgttttttttcgcggcggtggttgcggtgtcgttggtatcgcggttgggtatggcgttgtgttgggatatntgttggtagggattgtaattggttcgtgggggttggggtttattagcgacgtcgatgagattttttatttttcggaattcggcgtggtatttttggatgtttattatcggttttgagttgaattttt

SEQ ID NO: 32066 - DNA, 546 bp, Artificial Sequence
  chemically treated genomic DNA (Homo sapiens) CpG-island No: 32066
  unsure (128)
aaaaattcaactcaaaaccgataataaacatccaaaaataccacgccgaattccgaaaaataaaaaatctcatcgacgtcgctaataaaccccaacccccacgaaccaattacaatccctaccaacanatatcccaacacaacgccatacccaaccgcgataccaacgacaccgcaaccaccgccgcgaaaaaaaacaacactcctacgaataaaaaatcgaaaccttccatcaacgacctcctaaaaacaacgaatttaccaaccaatcaccgtaaactctaacgtaactcgccaactcctatacgctttaccgtctcgcccaataaataataataaaacttaaccaatacatccgacacatacccgccgccaattcaaaaaaacgcaacacatcgctcatcgaataacgattcaacgcgtcataacgataaacactttccgactcgccgataataatcacgctacgccaatactttcccgccaattaatttcctcccgacccgctaacaaaaccacgacttaatacccgatccaaccactcttt

SEQ ID NO: 32067 - DNA, 546 bp, Artificial Sequence
  chemically treated genomic DNA (Homo sapiens) CpG-island No: 32067
  unsure (128)
agggatttaatttaaggtcgatgataaatatttaggaatattacgtcgagtttcgaaaagtggaggattttatcgacgtcgttaataaattttagtttttacgggttaattgtaatttttgttagtanatattttaatatagcgttatatttagtcgcgatgttagcggtatcgtagttatcgtcgcgaagagaaatagtatttttgcgagtaaaaaatcggaattttttattagcggttttttggagatagcggatttgttagttagttatcgtaggttttggcgtggttcgttagtttttgtgcgttttgtcgtttcgtttagtaaataatgatgggatttaattaatgtattcggtatatgttcgtcgttagtttaaaggggcgtagtatatcgtttatcgggtagcgatttagcgcgttataacggtaagtatttttcggttcgtcggtggtaattacgttacgttagtattttttcgttagttggttttttttcggttcgttggtaaaattacgatttaatattcggtttagttatttttt

SEQ ID NO: 32068 - DNA, 546 bp, Artificial Sequence
  chemically treated genomic DNA (Homo sapiens) CpG-island No: 32068
  unsure (419)
aaaaaataactaaaccgaatattaaatcgtaattttaccaacgaaccgaaaaaaaaccaactaacgaaaaaatactaacgtaacgtaattaccaccgacgaaccgaaaaatacttaccgttataacgcgctaaatcgctacccgataaacgatatactacgcccctttaaactaacgacgaacatataccgaatacattaattaaatcccatcattatttactaaacgaaacgacaaaacgcacaaaaactaacgaaccacgccaaaacctacgataactaactaacaaatccgctatctccaaaaaaccgctaataaaaaattccgattttttactcgcaaaaatactatttctcttcgcgacgataactacgataccgctaacatcgcgactaaatataacgctatattaaaatatntactaacaaaaattacaattaacccgtaaaaactaaaatttattaacgacgtcgataaaatcctccacttttcgaaactcgacgtaatattcctaaatatttatcatcgaccttaaattaaatccct

SEQ ID NO: 32069 - DNA, 666 bp, Artificial Sequence
  chemically treated genomic DNA (Homo sapiens) CpG-island No: 32069
tcgcgatcgagtatttcggttattttgtgtttgcgggcgtggtaacgtattcgtgagggtacgatttttattacgaaatgatcgattttaacgttatcgataaagtatttttggtgtatggttagatgaacgagtcgtcgggaaatcgtttgcgcgttgttttgatcggtttgattatggttgagaaatttcgtgacgaaggtcgtgacgttttgttgttcgttgataatatttatcgttatattttggtcggtacggaagtattcgtattgttgggtcgtatgtttttagcggtaggttattagtcgattttggcggaagagatgggcgttttgtaggaacgtattatttttattaaaattggttttattattttcgtataggtagtatacgtatttgcggatgatttgattgattcgttttcggtaattatttttgcgtattttgacgtaatcgtggtattgagtcgttagatcgcgtttttgggtatttattcggtcgttgattcgttggattttattagtcgttagttggattcgttggtggttggttaggaatattacgatatcgcgcgtggcgtttagtttattttgtaacgttattaggaattgaaagatattatcgttattttgggtatggatgaattgtttgaagaagataaattgg

SEQ ID NO: 32070 - DNA, 666 bp, Artificial Sequence
  chemically treated genomic DNA (Homo sapiens) CpG-island No: 32070
ccaatttatcttcttcaaacaattcatccatacccaaaataacgataatatctttcaattcctaataacgttacaaaataaactaaacgccacgcgcgatatcgtaatattcctaaccaaccaccaacgaatccaactaacgactaataaaatccaacgaatcaacgaccgaataaatacccaaaaacgcgatctaacgactcaataccacgattacgtcaaaatacgcaaaaataattaccgaaaacgaatcaatcaaatcatccgcaaatacgtatactacctatacgaaaataataaaaccaattttaataaaaataatacgttcctacaaaacgcccatctcttccgccaaaatcgactaataacctaccgctaaaaacatacgacccaacaatacgaatacttccgtaccgaccaaaatataacgataaatattatcaacgaacaacaaaacgtcacgaccttcgtcacgaaatttctcaaccataatcaaaccgatcaaaacaacgcgcaaacgatttcccgacgactcgttcatctaaccatacaccaaaaatactttatcgataacgttaaaatcgatcatttcgtaataaaaatcgtaccctcacgaatacgttaccacgcccgcaaacacaaaataaccgaaatactcgatcgcga

SEQ ID NO: 32071 - DNA, 666 bp, Artificial Sequence
  chemically treated genomic DNA (Homo sapiens) CpG-island No: 32071
ttagtttgttttttttagatagtttatttatatttaggatggcgatgatgttttttagtttttgataacgttgtaggatggattgaacgttacgcgcggtgtcgtagtgtttttgattaattattagcgggtttagttgacggttggtggagtttagcgggttaacggtcgggtagatatttagagacgcgatttgacggtttagtattacggttgcgttaaggtgcgtaaaggtggttgtcggagacgggttagttaagttattcgtaggtacgtatattgtttgtacggaggtgatagaattagttttggtggaggtgatacgtttttgtagaacgtttatttttttcgttagggtcggttgataatttatcgttgaaggtatacggtttagtagtgcggatattttcgtatcggttagggtgtaacgatagatgttgttaacgaatagtagaacgttacgattttcgttacggaattttttagttatggttagatcggttagagtaacgcgtagacggtttttcggcggttcgtttatttggttatatattagggatattttgtcgataacgttggagtcggttatttcgtggtagaagtcgtatttttacgagtacgttattacgttcgtaaatatagagtaatcggagtgttcgatcgcga

SEQ ID NO: 32072 - DNA, 666 bp, Artificial Sequence
  chemically treated genomic DNA (Homo sapiens) CpG-island No: 32072
tcgcgatcgaacactccgattactctatatttacgaacgtaataacgtactcgtaaaaatacgacttctaccacgaaataaccgactccaacgttatcgacaaaatatccctaatatataaccaaataaacgaaccgccgaaaaaccgtctacgcgttactctaaccgatctaaccataactaaaaaattccgtaacgaaaatcgtaacgttctactattcgttaacaacatctatcgttacaccctaaccgatacgaaaatatccgcactactaaaccgtataccttcaacgataaattatcaaccgaccctaacgaaaaaaataaacgttctacaaaaacgtatcacctccaccaaaactaattctatcacctccgtacaaacaatatacgtacctacgaataacttaactaacccgtctccgacaaccacctttacgcaccttaacgcaaccgtaatactaaaccgtcaaatcgcgtctctaaatatctacccgaccgttaacccgctaaactccaccaaccgtcaactaaacccgctaataattaatcaaaaacactacgacaccgcgcgtaacgttcaatccatcctacaacgttatcaaaaactaaaaaacatcatcgccatcctaaatataaataaactatctaaaaaaaacaaactaa

SEQ ID NO: 32073 - DNA, 1039 bp, Artificial Sequence
  chemically treated genomic DNA (Homo sapiens) CpG-island No: 32073
gttgatgtttgttagttagtcgcgttcgttatattgttatcgttttgcggtttcgttatttacggtgcggtgcgtgaggcggtttgtttcgttatagtgttagtgggtgattagttttttattttcgttgcggataagtttgtcggttaggtcgtggtgatacgttgtgtgcggtcgttaaagtcggttttttgtattagtcggtcgagtatatcgtaacggaaggtggtgtggttgtcgtttttattggttaggcggatgattcgttcggtagtatcgtattttatattgcgcgttagttcgttttgcgtggtgttgatcgtttttttttacgtatcgtattgtgtttcgtttttgttgtcgttcggggtaatgacggtagttaggtcgtttgcggcgttgtatttatatcgcgttttacggttttgtgcgttttttatcgaggttaatcggttacggttgttatagcggcggtaaaggttgatgtttttttcgcggtggatcgtcgttatttggtcgaagcggtcgtatttataacgggtttggtagttcgagtagtcggtgaacgttagtaattgatcgtagcggttttacgttatggtttttcggttgtcggtggtatttttcgttgcgtagggtaagttattgtgtggattattataacggtagcgggtgatatcgtcgttaggggtagttttttgaattagacggtttaatttattatattttcggcgtaattttagttcgttaggttcggtggttgacgttaattggttgtggtggttatagtaaaacgtcgatgttttgttattcggcgtggttatgcgcgtgatgaggttcgttattatattcgggttgtattttgttgttttgtttgcggtattcgtttgtgttttgagtttgtttacggcgttaaattgattttgcgtgacgttgtcgttcgcgtgttttttttttattattcgttttagttcggtttcgttttgcgtgtgtagtattttacgggggttttaggttgtcggtgaatggtgattcgggt

SEQ ID NO: 32074 - DNA, 1039 bp, Artificial Sequence
  chemically treated genomic DNA (Homo sapiens) CpG-island No: 32074
acccgaatcaccattcaccgacaacctaaaacccccgtaaaatactacacacgcaaaacgaaaccgaactaaaacgaataataaaaaaaaaacacgcgaacgacaacgtcacgcaaaatcaatttaacgccgtaaacaaactcaaaacacaaacgaataccgcaaacaaaacaacaaaatacaacccgaatataataacgaacctcatcacgcgcataaccacgccgaataacaaaacatcgacgttttactataaccaccacaaccaattaacgtcaaccaccgaacctaacgaactaaaattacgccgaaaatataataaattaaaccgtctaattcaaaaaactacccctaacgacgatatcacccgctaccgttataataatccacacaataacttaccctacgcaacgaaaaataccaccgacaaccgaaaaaccataacgtaaaaccgctacgatcaattactaacgttcaccgactactcgaactaccaaacccgttataaatacgaccgcttcgaccaaataacgacgatccaccgcgaaaaaaacatcaacctttaccgccgctataacaaccgtaaccgattaacctcgataaaaaacgcacaaaaccgtaaaacgcgatataaatacaacgccgcaaacgacctaactaccgtcattaccccgaacgacaacaaaaacgaaacacaatacgatacgtaaaaaaaaacgatcaacaccacgcaaaacgaactaacgcgcaatataaaatacgatactaccgaacgaatcatccgcctaaccaataaaaacgacaaccacaccaccttccgttacgatatactcgaccgactaatacaaaaaaccgactttaacgaccgcacacaacgtatcaccacgacctaaccgacaaacttatccgcaacgaaaataaaaaactaatcacccactaacactataacgaaacaaaccgcctcacgcaccgcaccgtaaataacgaaaccgcaaaacgataacaatataacgaacgcgactaactaacaaacatcaac

SEQ ID NO: 32075 - DNA, 1039 bp, Artificial Sequence
  chemically treated genomic DNA (Homo sapiens) CpG-island No: 32075
gttcgaattattatttatcgatagtttgggattttcgtgaagtgttgtatacgtagggcgaagtcgggttgaagcgggtggtgaaaaaggaatacgcggacggtagcgttacgtagagttagtttgacgtcgtgggtaggtttagggtatagacggatgtcgtaggtaggataatagagtatagttcggatgtggtgacgggttttattacgcgtataattacgtcggatggtagggtatcggcgttttattataattattataattagttaacgttagttatcgggtttgacgggttggaattgcgtcgggaatatgatgaattgggtcgtttgatttaggaaattgtttttgacggcgatattattcgttatcgttatgataatttatatagtgatttattttgcgtaacggaagatgttatcggtagtcggaaaattatgacgtggagtcgttacggttagttgttggcgtttatcgattgttcgggttattagattcgttatgaatacgatcgtttcggttagatgacggcggtttatcgcgaggaaggtattagtttttatcgtcgttatgatagtcgtggtcggttaatttcggtgaaagacgtatagggtcgtgaaacgcggtatgaatataacgtcgtaggcgatttgattgtcgttattgtttcggacggtagtagaaacgggatatagtacgatgcgtggggaaaggcggttagtattacgtagggcgggttgacgcgtagtatggaatacgatgttgtcggacgggttattcgtttgattagtgaaaacggtagttatattatttttcgttacgatgtattcgatcggttgatataggaaatcggttttgacggtcgtatatagcgtattattacgatttgatcggtaaatttattcgtagcgaggatgaggggttggttatttattggtattatgacgaagtagatcgttttacgtatcgtatcgtgaatggcgaaatcgtagagcggtggtagtatgacgaacgcggttggttgatagatattagt

SEQ ID NO: 32076 - DNA, 1039 bp, Artificial Sequence
  chemically treated genomic DNA (Homo sapiens) CpG-island No: 32076
actaatatctatcaaccaaccgcgttcgtcatactaccaccgctctacgatttcgccattcacgatacgatacgtaaaacgatctacttcgtcataataccaataaataaccaacccctcatcctcgctacgaataaatttaccgatcaaatcgtaataatacgctatatacgaccgtcaaaaccgatttcctatatcaaccgatcgaatacatcgtaacgaaaaataatataactaccgttttcactaatcaaacgaataacccgtccgacaacatcgtattccatactacgcgtcaacccgccctacgtaatactaaccgcctttccccacgcatcgtactatatcccgtttctactaccgtccgaaacaataacgacaatcaaatcgcctacgacgttatattcataccgcgtttcacgaccctatacgtctttcaccgaaattaaccgaccacgactatcataacgacgataaaaactaataccttcctcgcgataaaccgccgtcatctaaccgaaacgatcgtattcataacgaatctaataacccgaacaatcgataaacgccaacaactaaccgtaacgactccacgtcataattttccgactaccgataacatcttccgttacgcaaaataaatcactatataaattatcataacgataacgaataatatcgccgtcaaaaacaatttcctaaatcaaacgacccaattcatcatattcccgacgcaattccaacccgtcaaacccgataactaacgttaactaattataataattataataaaacgccgataccctaccatccgacgtaattatacgcgtaataaaacccgtcaccacatccgaactatactctattatcctacctacgacatccgtctataccctaaacctacccacgacgtcaaactaactctacgtaacgctaccgtccgcgtattcctttttcaccacccgcttcaacccgacttcgccctacgtatacaacacttcacgaaaatcccaaactatcgataaataataattcgaac

SEQ ID NO: 32077 - DNA, 517 bp, Artificial Sequence
  chemically treated genomic DNA (Homo sapiens) CpG-island No: 32077
  unsure (271)
gtcgggaatgtttatcgacgcgttgaattaggaaattttttaggttagtagttagttgttggataaaagtcgttaggtttagtaagagtaggagcgcgttcgcgagattgtcgattcgttgaattaattgtcgtaatagtaaatcgacgttcgtcgttagttaaatgagatcgagcgtcgtttgggaacgtttatcggtaatatttcgtttaattaggtataaaatttcgcgttgtagtttgattttgtacgttttaaggcgttcgttgantaattggagttggcgtagttgtttgttaataatcgttaggaattagcgcgtttacgtttagagttggcggaaaaagagagttagtaattggatgcgtatttgtaggttttgcgtaattattaaatagttacgttagtttgaggcggagcgggcgttggaaagtatcgaattgttggtagaaaatagcgtcgatttgtcgaaagatatcgtcgcgtaatttaaaattaatcgcgaattatttggcgg

SEQ ID NO: 32078 - DNA, 517 bp, Artificial Sequence
  chemically treated genomic DNA (Homo sapiens) CpG-island No: 32078
  unsure (247)
ccgccaaataattcgcgattaattttaaattacgcgacgatatctttcgacaaatcgacgctattttctaccaacaattcgatactttccaacgcccgctccgcctcaaactaacgtaactatttaataattacgcaaaacctacaaatacgcatccaattactaactctctttttccgccaactctaaacgtaaacgcgctaattcctaacgattattaacaaacaactacgccaactccaattantcaacgaacgccttaaaacgtacaaaatcaaactacaacgcgaaattttatacctaattaaacgaaatattaccgataaacgttcccaaacgacgctcgatctcatttaactaacgacgaacgtcgatttactattacgacaattaattcaacgaatcgacaatctcgcgaacgcgctcctactcttactaaacctaacgacttttatccaacaactaactactaacctaaaaaatttcctaattcaacgcgtcgataaacattcccgac

SEQ ID NO: 32079 - DNA, 517 bp, Artificial Sequence
  chemically treated genomic DNA (Homo sapiens) CpG-island No: 32079
  unsure (247)
tcgttagatagttcgcggttaattttgaattgcgcgacgatatttttcggtaaatcggcgttgttttttgttagtaattcggtattttttagcgttcgtttcgttttaagttgacgtggttgtttaatgattacgtaaggtttgtaaatacgtatttagttgttggtttttttttttcgttagttttgagcgtaagcgcgttaatttttggcggttattggtagatagttgcgttagttttagttanttaacgagcgttttaagacgtgtagagttagattgtaacgcgaaattttgtgtttgattgagcggagtattgtcggtaagcgtttttaggcggcgttcgattttatttaattgacggcgggcgtcggtttgttgttgcggtagttgatttagcgaatcggtaatttcgcgggcgcgtttttgtttttgttgggtttgacggtttttatttagtaattggttgttgatttggagaattttttgatttagcgcgtcggtagatattttcggt

SEQ ID NO: 32080 - DNA, 517 bp, Artificial Sequence
  chemically treated genomic DNA (Homo sapiens) CpG-island No: 32080
  unsure (271)
accgaaaatatctaccgacgcgctaaatcaaaaaattctccaaatcaacaaccaattactaaataaaaaccgtcaaacccaacaaaaacaaaaacgcgcccgcgaaattaccgattcgctaaatcaactaccgcaacaacaaaccgacgcccgccgtcaattaaataaaatcgaacgccgcctaaaaacgcttaccgacaatactccgctcaatcaaacacaaaatttcgcgttacaatctaactctacacgtcttaaaacgctcgttaantaactaaaactaacgcaactatctaccaataaccgccaaaaattaacgcgcttacgctcaaaactaacgaaaaaaaaaaaccaacaactaaatacgtatttacaaaccttacgtaatcattaaacaaccacgtcaacttaaaacgaaacgaacgctaaaaaataccgaattactaacaaaaaacaacgccgatttaccgaaaaatatcgtcgcgcaattcaaaattaaccgcgaactatctaacga

SEQ ID NO: 32081 - DNA, 732 bp, Artificial Sequence
  chemically treated genomic DNA (Homo sapiens) CpG-island No: 32081
gcgcgttgttgttgtttttggcgtatcgcgcgtttttttgcggcgatgttagtttgaatagatttgagttggttacgtttattcgcgtgggcggaaaaggcgtataataatacgttagcgttaagaacgttggcgtagatgatgggtttgattgtaaatttgcgcggttttacggttcgtgttatggtattaatcgtttttttttttatggggagggattattttacgatgaatagcggtttattagttattttttgcgggatttttatatttattagcgataatatggtcggcgcgatgttagaaagtttgtcgtttttaatcgtttttacgtttttattattaacgtaaattagcggaattggtaggttggtgtgtgtcgtgtgtgtttgattcgttgtcggatcgcgtatttgtttagcgttatcgtggttagcggtgattagtagttgtttatttacggatttaatcgttttcgcgattttttttacgtagtgatttagcgttttaatcgtttaatcgtcgtttttattatttcggtgtgatttatatatgtcgtcgttcggatagttatagatgatggtgtcgtatttgtcgtttttgatggtcgtaattagtttttcggttagttttgcggagtttattttcggttgtagatcgtaggtagttattttcggtgagttgattagaatgcgattttcgtttttgaacgatttttttacgttatcgttg

SEQ ID NO: 32082 - DNA, 732 bp, Artificial Sequence
  chemically treated genomic DNA (Homo sapiens) CpG-island No: 32082
caacgataacgtaaaaaaatcgttcaaaaacgaaaatcgcattctaatcaactcaccgaaaataactacctacgatctacaaccgaaaataaactccgcaaaactaaccgaaaaactaattacgaccatcaaaaacgacaaatacgacaccatcatctataactatccgaacgacgacatatataaatcacaccgaaataataaaaacgacgattaaacgattaaaacgctaaatcactacgtaaaaaaaatcgcgaaaacgattaaatccgtaaataaacaactactaatcaccgctaaccacgataacgctaaacaaatacgcgatccgacaacgaatcaaacacacacgacacacaccaacctaccaattccgctaatttacgttaataataaaaacgtaaaaacgattaaaaacgacaaactttctaacatcgcgccgaccatattatcgctaataaatataaaaatcccgcaaaaaataactaataaaccgctattcatcgtaaaataatccctccccataaaaaaaaaaacgattaataccataacacgaaccgtaaaaccgcgcaaatttacaatcaaacccatcatctacgccaacgttcttaacgctaacgtattattatacgccttttccgcccacgcgaataaacgtaaccaactcaaatctattcaaactaacatcgccgcaaaaaaacgcgcgatacgccaaaaacaacaacaacgcgc

SEQ ID NO: 32083 - DNA, 732 bp, Artificial Sequence
  chemically treated genomic DNA (Homo sapiens) CpG-island No: 32083
taacggtggcgtagaagagtcgtttaaaggcgaagatcgtattttgattaatttatcgaaagtggttatttacgatttgtaatcggaaatgagtttcgtagagttgatcgaaaaattggttgcggttattaagagcggtaaatacgatattattatttgtaattattcgaacggcgatatgtgtaggttatatcggggtgatggaagcggcggttaagcggttgaagcgttggattattgcgtggaagaagtcgcgaaagcggttgagttcgtgggtggataattgttgattatcgttgattacggtaacgttgagtagatgcgcgattcggtaacgggttaggtatatacggtatatattaatttgttagtttcgttgatttacgttggtgataagaacgtgaaagcggttgaaggcggtaaattttttgatatcgcgtcgattatgttgtcgttgatgggtatggaaatttcgtaagagatgattggtaagtcgttgtttatcgtggaataatttttttttatgaggggaaaggcgattaatattatgatacgggtcgtgaaatcgcgtaggtttgtaattaggtttattatttacgttagcgtttttagcgttggcgtattgttgtgcgtttttttcgtttacgcggatgagcgtgattaatttaaatttatttaggttgatatcgtcgtaaaagagcgcgcggtacgttaaaagtaataataacgcgt

SEQ ID NO: 32084 - DNA, 732 bp, Artificial Sequence
  chemically treated genomic DNA (Homo sapiens) CpG-island No: 32084
acgcgttattattacttttaacgtaccgcgcgctcttttacgacgatatcaacctaaataaatttaaattaatcacgctcatccgcgtaaacgaaaaaaacgcacaacaatacgccaacgctaaaaacgctaacgtaaataataaacctaattacaaacctacgcgatttcacgacccgtatcataatattaatcgcctttcccctcataaaaaaaaattattccacgataaacaacgacttaccaatcatctcttacgaaatttccatacccatcaacgacaacataatcgacgcgatatcaaaaaatttaccgccttcaaccgctttcacgttcttatcaccaacgtaaatcaacgaaactaacaaattaatatataccgtatatacctaacccgttaccgaatcgcgcatctactcaacgttaccgtaatcaacgataatcaacaattatccacccacgaactcaaccgctttcgcgacttcttccacgcaataatccaacgcttcaaccgcttaaccgccgcttccatcaccccgatataacctacacatatcgccgttcgaataattacaaataataatatcgtatttaccgctcttaataaccgcaaccaatttttcgatcaactctacgaaactcatttccgattacaaatcgtaaataaccactttcgataaattaatcaaaatacgatcttcgcctttaaacgactcttctacgccaccgtta

SEQ ID NO: 32085 - DNA, 574 bp, Artificial Sequence
  chemically treated genomic DNA (Homo sapiens) CpG-island No: 32085
cgtggtttattttatattcgataaagtgtacggtagtttgaattggattggaatgaaaagacgtgtttgggacgggtttacggggacgcgttgcgggatttgttcggtttggtttttaagtcgttaattaatcgttggatgttttgtagttcgttggtggtcgttttttttttcgcgtagagtttgggcgataaggatatggagttggaggagagcgtggaggagcggttgttgagtttagagttcgagtttattgttatcgaggtcgggttggcggttagggcggcgattttgtcgtttaggggtttcgcggtcgtcgttatggagggtagggcggtggtgagtagattgttgtcgttcgggatcggtatcgggatggagtaggggttgtagcgtagtcgcgggcgtatggtgtttagattgaggaaggggtggcggtgtatcgagttggaggttgtcgtagaggaggcggtcgtcgttgcggttatgtacgtgtaggggtaagggaataggttttcgaaaggggatatggttaggttttggggtgagaaaagagatatatagcgagttagtt

SEQ ID NO: 32086 - DNA, 574 bp, Artificial Sequence
  chemically treated genomic DNA (Homo sapiens) CpG-island No: 32086
aactaactcgctatatatctcttttctcaccccaaaacctaaccatatcccctttcgaaaacctattcccttacccctacacgtacataaccgcaacgacgaccgcctcctctacgacaacctccaactcgatacaccgccaccccttcctcaatctaaacaccatacgcccgcgactacgctacaacccctactccatcccgataccgatcccgaacgacaacaatctactcaccaccgccctaccctccataacgacgaccgcgaaacccctaaacgacaaaatcgccgccctaaccgccaacccgacctcgataacaataaactcgaactctaaactcaacaaccgctcctccacgctctcctccaactccatatccttatcgcccaaactctacgcgaaaaaaaaaacgaccaccaacgaactacaaaacatccaacgattaattaacgacttaaaaaccaaaccgaacaaatcccgcaacgcgtccccgtaaacccgtcccaaacacgtcttttcattccaatccaattcaaactaccgtacactttatcgaatataaaataaaccacg

SEQ ID NO: 32087 - DNA, 574 bp, Artificial Sequence
  chemically treated genomic DNA (Homo sapiens) CpG-island No: 32087
ggttgattcgttgtgtgtttttttttttattttagggtttggttatgttttttttcggaagtttgtttttttatttttatacgtatatggtcgtagcggcggtcgttttttttgcggtagtttttagttcggtgtatcgttattttttttttaatttgaatattatgcgttcgcggttgcgttatagtttttattttatttcggtgtcggtttcggacggtagtagtttgtttattatcgttttgttttttatggcggcggtcgcggggtttttggacggtaaagtcgtcgttttggtcgttagttcggtttcggtggtagtggattcgggttttgaatttaatagtcgtttttttacgtttttttttagttttatgtttttgtcgtttaaattttgcgcggagaaagaggcggttattagcgaattgtagagtatttagcggttggttagcggtttggaagttaagtcggataggtttcgtagcgcgttttcgtagattcgttttagatacgtttttttattttagtttagtttaggttgtcgtgtattttgtcggatataaaataaattacg

SEQ ID NO: 32088 - DNA, 574 bp, Artificial Sequence
  chemically treated genomic DNA (Homo sapiens) CpG-island No: 32088
cgtaatttattttatatccgacaaaatacacgacaacctaaactaaactaaaataaaaaaacgtatctaaaacgaatctacgaaaacgcgctacgaaacctatccgacttaacttccaaaccgctaaccaaccgctaaatactctacaattcgctaataaccgcctctttctccgcgcaaaatttaaacgacaaaaacataaaactaaaaaaaaacgtaaaaaaacgactattaaattcaaaacccgaatccactaccaccgaaaccgaactaacgaccaaaacgacgactttaccgtccaaaaaccccgcgaccgccgccataaaaaacaaaacgataataaacaaactactaccgtccgaaaccgacaccgaaataaaataaaaactataacgcaaccgcgaacgcataatattcaaattaaaaaaaaaataacgatacaccgaactaaaaactaccgcaaaaaaaacgaccgccgctacgaccatatacgtataaaaataaaaaaacaaacttccgaaaaaaaacataaccaaaccctaaaataaaaaaaaaaacacacaacgaatcaacc

SEQ ID NO: 32089 - DNA, 687 bp, Artificial Sequence
  chemically treated genomic DNA (Homo sapiens) CpG-island No: 32089
  unsure (472, 587)
ggtgggcgcggggtatgattatcgtcgtcgtatttatgattgttttttttattatgtaattcgtaggataggtgtcggtagcgttttgggttattttcggcgaggatcgttttcgttggagcgcgacgatgatcggtttgtcgtttgcggtattcggaattttgtacgttttcgtttaagttttcgttattggtttcgttattaaacgtttcggcgagaagtaggttattatcgtcggtatggcggtcgacgcgttgggttacgttttgttggcgttcgcgacgcgaggttggatggttttttttattatgatttttttcgttttcggcggtatcgggatgttcgcgttgtaggttatgttgtttaggtaggtagatgacgattattagggatagttttaaggatcgttcgcggtttttattagtttaatttcgattattggatcgttgatcgttacggcgatttatgtcgnttcggcgagtatatggaaacggttggtatggattgtaggcgtcgatttatattttgtttgttttttcgcgttgcgtcgcggtgtatggagttcggtttattcgatttgaatggangtcggcgggttttcgttaacggatttttttatttttagaaattggaatttaattaattttttgcggagaattgtgaatgtcgtaaatttattttttggta

SEQ ID NO: 32090 - DNA, 687 bp, Artificial Sequence
  chemically treated genomic DNA (Homo sapiens) CpG-island No: 32090
  unsure (101, 216)
taccaaaaaataaatttacgacattcacaattctccgcaaaaaattaattaaattccaatttctaaaaataaaaaaatccgttaacgaaaacccgccgacntccattcaaatcgaataaaccgaactccatacaccgcgacgcaacgcgaaaaaacaaacaaaatataaatcgacgcctacaatccataccaaccgtttccatatactcgccgaancgacataaatcgccgtaacgatcaacgatccaataatcgaaattaaactaataaaaaccgcgaacgatccttaaaactatccctaataatcgtcatctacctacctaaacaacataacctacaacgcgaacatcccgataccgccgaaaacgaaaaaaatcataataaaaaaaaccatccaacctcgcgtcgcgaacgccaacaaaacgtaacccaacgcgtcgaccgccataccgacgataataacctacttctcgccgaaacgtttaataacgaaaccaataacgaaaacttaaacgaaaacgtacaaaattccgaataccgcaaacgacaaaccgatcatcgtcgcgctccaacgaaaacgatcctcgccgaaaataacccaaaacgctaccgacacctatcctacgaattacataataaaaaaaacaatcataaatacgacgacgataatcataccccgcgcccacc

SEQ ID NO: 32091 - DNA, 687 bp, Artificial Sequence
  chemically treated genomic DNA (Homo sapiens) CpG-island No: 32091
  unsure (101, 216)
tgttaaggggtgggtttgcggtatttatagtttttcgtaaagaattgattgggttttaatttttgggagtggggaaattcgttagcgagggttcgtcggtntttatttaggtcgagtgggtcgggttttatgtatcgcgacgtaacgcggggaggtagataaggtataggtcggcgtttataatttatgttaatcgtttttatgtgttcgtcgagncggtataaatcgtcgtgacgattagcggtttaatgatcgaagttaggttggtaagagtcgcgagcgatttttgaagttgtttttgatggtcgttatttatttgtttggatagtatggtttgtaacgcgggtatttcgatgtcgtcggaagcgagaagaattataatggggaaggttatttagtttcgcgtcgcgaacgttagtaagacgtagtttagcgcgtcggtcgttatgtcggcgataatggtttgtttttcgtcgaaacgtttggtggcgggattagtgacgaaggtttgagcgagggcgtgtaagatttcgaatatcgtaagcgataggtcgattatcgtcgcgttttagcgaaagcggttttcgtcgaaaatgatttagagcgttgtcggtatttgttttacgagttgtatgataaagaagatagttataagtgcggcgacgatagttatgtttcgcgtttatt

SEQ ID NO: 32092 - DNA, 687 bp, Artificial Sequence
  chemically treated genomic DNA (Homo sapiens) CpG-island No: 32092
  unsure (472, 587)
aataaacgcgaaacataactatcgtcgccgcacttataactatcttctttatcatacaactcgtaaaacaaataccgacaacgctctaaatcattttcgacgaaaaccgctttcgctaaaacgcgacgataatcgacctatcgcttacgatattcgaaatcttacacgccctcgctcaaaccttcgtcactaatcccgccaccaaacgtttcgacgaaaaacaaaccattatcgccgacataacgaccgacgcgctaaactacgtcttactaacgttcgcgacgcgaaactaaataaccttccccattataattcttctcgcttccgacgacatcgaaatacccgcgttacaaaccatactatccaaacaaataaataacgaccatcaaaaacaacttcaaaaatcgctcgcgactcttaccaacctaacttcgatcattaaaccgctaatcgtcacgacgatttataccgnctcgacgaacacataaaaacgattaacataaattataaacgccgacctataccttatctacctccccgcgttacgtcgcgatacataaaacccgacccactcgacctaaataaanaccgacgaaccctcgctaacgaatttccccactcccaaaaattaaaacccaatcaattctttacgaaaaactataaataccgcaaacccaccccttaaca

SEQ ID NO: 32093 - DNA, 543 bp, Artificial Sequence
  chemically treated genomic DNA (Homo sapiens) CpG-island No: 32093
taagcgcggggttcgtcgtttgttggggattcgagtcggtttgtggttttcggggaatcgaagacgcgtttttagcgattttgaagagttagttaagttttttgcgggttaaggagacggtgaaggaatcgggattaattggggtaggggttagaaggtagttcgcgagtgggttacgaggggagttgggttcggtagttggggatttcgagggggtaagcgggcggggagtaggagaggggcggagtttcggggtcggggtcggggtcgtagcggtcgtttagagggtttgcgggggttgttgtggtcggattcgaaggcgggcgtcgggagcgtagcgagttagacgcgtttttttaagatcgtgattttggtatagggagcggggttgcgcgtagttttgagattagattagagtttattttcgtggagatttacggtcgaggggtcggagttgtttttgtgcgagggagttttggtcgcggcgtaggtaggatcggggaatttaaggagggcgggaggaaagcgtttttggtgggggag

SEQ ID NO: 32094 - DNA, 543 bp, Artificial Sequence
  chemically treated genomic DNA (Homo sapiens) CpG-island No: 32094
ctcccccaccaaaaacgctttcctcccgccctccttaaattccccgatcctacctacgccgcgaccaaaactccctcgcacaaaaacaactccgacccctcgaccgtaaatctccacgaaaataaactctaatctaatctcaaaactacgcgcaaccccgctccctataccaaaatcacgatcttaaaaaaacgcgtctaactcgctacgctcccgacgcccgccttcgaatccgaccacaacaacccccgcaaaccctctaaacgaccgctacgaccccgaccccgaccccgaaactccgcccctctcctactccccgcccgcttaccccctcgaaatccccaactaccgaacccaactcccctcgtaacccactcgcgaactaccttctaacccctaccccaattaatcccgattccttcaccgtctccttaacccgcaaaaaacttaactaactcttcaaaatcgctaaaaacgcgtcttcgattccccgaaaaccacaaaccgactcgaatccccaacaaacgacgaaccccgcgctta

SEQ ID NO: 32095 - DNA, 543 bp, Artificial Sequence
  chemically treated genomic DNA (Homo sapiens) CpG-island No: 32095
tttttttattaggggcgtttttttttcgttttttttgggtttttcggttttatttgcgtcgcggttagggttttttcgtatagaggtagtttcggtttttcggtcgtgggtttttacgaggatgagttttggtttgattttaggattgcgcgtagtttcgttttttatgttaaggttacggttttggagaggcgcgtttggttcgttgcgttttcggcgttcgttttcgggttcggttatagtagttttcgtagattttttgggcggtcgttgcggtttcggtttcggtttcggagtttcgttttttttttgtttttcgttcgtttgttttttcggggtttttaattgtcgagtttagtttttttcgtagtttattcgcgggttgttttttaatttttattttagttagtttcggtttttttatcgtttttttagttcgtagagagtttagttgattttttagggtcgttgagggcgcgttttcggtttttcgagggttataggtcggttcgggtttttagtagacggcgagtttcgcgttta

SEQ ID NO: 32096 - DNA, 543 bp, Artificial Sequence
  chemically treated genomic DNA (Homo sapiens) CpG-island No: 32096
taaacgcgaaactcgccgtctactaaaaacccgaaccgacctataaccctcgaaaaaccgaaaacgcgccctcaacgaccctaaaaaatcaactaaactctctacgaactaaaaaaacgataaaaaaaccgaaactaactaaaataaaaattaaaaaacaacccgcgaataaactacgaaaaaaactaaactcgacaattaaaaaccccgaaaaaacaaacgaacgaaaaacaaaaaaaaaacgaaactccgaaaccgaaaccgaaaccgcaacgaccgcccaaaaaatctacgaaaactactataaccgaacccgaaaacgaacgccgaaaacgcaacgaaccaaacgcgcctctccaaaaccgtaaccttaacataaaaaacgaaactacgcgcaatcctaaaatcaaaccaaaactcatcctcgtaaaaacccacgaccgaaaaaccgaaactacctctatacgaaaaaaccctaaccgcgacgcaaataaaaccgaaaaacccaaaaaaaacgaaaaaaaaacgcccctaataaaaaaa

SEQ ID NO: 32097 - DNA, 893 bp, Artificial Sequence
  chemically treated genomic DNA (Homo sapiens) CpG-island No: 32097
  unsure (305..306, 309, 315, 352, 364, 728)
ttcggtttggattttaattttttttgtttttcgtattcgttaagcgtcgatggttttacgtttttttatgtcgacgatagtattcgttagttttggattgattattgtaaagttagtcgtcgcgtttcggtttattttggcgagtaattcggtatattatcggtgatgaatatttggatttcgggtggtttgaaagaattatcgttgatcgtttcgtttcgcgttagcgttcgtaggtagtattggatgaggggattagcgataagttaaattttgcgtattagacgatcgtcgtgagagtaaanngtngggtangggcgtagagagttatacggttggttttaatgagttntatatggggtangttattagtcgttagattgcgttgcgtttggacgtcgggtatttttattcgattgaagtgattttcgataagattttcgtcgttatgttgtatgggtcgtagttgttgttgtacgttagtcgttcggttcgttgggatagcgattacgtagtgttgttggatgatgaaatttaggtaattgttagtgagattgtgcgttacgatttgtttgatcgggtgtatatcggttttgattttttcgatgtttttattaatcgtattgtcgcgtgggttattggtatattttttacgaaaaaagttttgttgcgtgcgttgttggaatttatcgtttatttgcgtaagttggaagcggcgggaaattatntagcgcgtttggtattgttggaagagtagaaatcgttgtcgtggtagacggtttgggaaatgtattgttaacgttacgatacgttagtaggtagcgaatggttggagagcgtgcgggttattaggattttttttgagtcgtcgcgggtaaatattgtcggatgcg

SEQ ID NO: 32098 - DNA, 893 bp, Artificial Sequence
  chemically treated genomic DNA (Homo sapiens) CpG-island No: 32098
  unsure (166, 530, 542, 579, 585, 588..)
cgcatccgacaatatttacccgcgacgactcaaaaaaaatcctaataacccgcacgctctccaaccattcgctacctactaacgtatcgtaacgttaacaatacatttcccaaaccgtctaccacgacaacgatttctactcttccaacaataccaaacgcgctanataatttcccgccgcttccaacttacgcaaataaacgataaattccaacaacgcacgcaacaaaacttttttcgtaaaaaatataccaataacccacgcgacaatacgattaataaaaacatcgaaaaaatcaaaaccgatatacacccgatcaaacaaatcgtaacgcacaatctcactaacaattacctaaatttcatcatccaacaacactacgtaatcgctatcccaacgaaccgaacgactaacgtacaacaacaactacgacccatacaacataacgacgaaaatcttatcgaaaatcacttcaatcgaataaaaatacccgacgtccaaacgcaacgcaatctaacgactaataacntaccccatatanaactcattaaaaccaaccgtataactctctacgcccntacccnacnntttactctcacgacgatcgtctaatacgcaaaatttaacttatcgctaatcccctcatccaatactacctacgaacgctaacgcgaaacgaaacgatcaacgataattctttcaaaccacccgaaatccaaatattcatcaccgataatataccgaattactcgccaaaataaaccgaaacgcgacgactaactttacaataatcaatccaaaactaacgaatactatcgtcgacataaaaaaacgtaaaaccatcgacgcttaacgaatacgaaaaacaaaaaaaattaaaatccaaaccgaa

SEQ ID NO: 32099 - DNA, 893 bp, Artificial Sequence
  chemically treated genomic DNA (Homo sapiens) CpG-island No: 32099
  unsure (166, 530, 542, 579, 585, 588..)
cgtattcggtagtgtttattcgcggcgatttaaaaggggttttgatagttcgtacgttttttagttattcgttatttgttggcgtatcgtgacgttggtaatatattttttagatcgtttgttacggtaacgatttttgtttttttagtagtgttagacgcgttgngtaatttttcgtcgtttttagtttgcgtaggtgggcggtaggttttagtaacgtacgtagtagggtttttttcgtagggggtgtattaatgatttacgcggtagtgcggttgatagaggtatcgaagaagttaaggtcgatatgtattcggttaaatagatcgtgacgtataattttattggtaattgtttgggttttattatttagtagtattacgtgatcgttgttttagcgaatcggacggttgacgtgtagtagtaattgcggtttatatagtatggcggcggaaattttgtcggaaattattttagtcgggtggaagtgttcggcgtttaggcgtagcgtagtttggcggttggtggtntattttatgtgngatttattggagttaatcgtgtagttttttgcgtttntgtttnatnntttgtttttacggcggtcgtttggtgcgtagggtttagtttgtcgttggtttttttatttagtgttgtttgcggacgttggcgcggggcgagacggttaacggtgatttttttaaattattcgggatttagatgtttattatcgatggtgtgtcgagttgttcgttaaaataggtcgaaacgcgacggttggttttgtagtgattaatttagaattggcgaatgttgtcgtcggtatgggaaagcgtaaagttatcggcgtttagcggatgcgaaaagtaggaggggttaaaatttagatcgag

SEQ ID NO: 32100 - DNA, 893 bp, Artificial Sequence
  chemically treated genomic DNA (Homo sapiens) CpG-island No: 32100
  unsure (305..306, 309, 315, 352, 364, 728)
ctcgatctaaattttaacccctcctacttttcgcatccgctaaacgccgataactttacgctttcccataccgacgacaacattcgccaattctaaattaatcactacaaaaccaaccgtcgcgtttcgacctattttaacgaacaactcgacacaccatcgataataaacatctaaatcccgaataatttaaaaaaatcaccgttaaccgtctcgccccgcgccaacgtccgcaaacaacactaaataaaaaaaccaacgacaaactaaaccctacgcaccaaacgaccgccgtaaaaacaaannatnaaacanaaacgcaaaaaactacacgattaactccaataaatcncacataaaatanaccaccaaccgccaaactacgctacgcctaaacgccgaacacttccacccgactaaaataatttccgacaaaatttccgccgccatactatataaaccgcaattactactacacgtcaaccgtccgattcgctaaaacaacgatcacgtaatactactaaataataaaacccaaacaattaccaataaaattatacgtcacgatctatttaaccgaatacatatcgaccttaacttcttcgatacctctatcaaccgcactaccgcgtaaatcattaatacaccccctacgaaaaaaaccctactacgtacgttactaaaacctaccgcccacctacgcaaactaaaaacgacgaaaaattacncaacgcgtctaacactactaaaaaaacaaaaatcgttaccgtaacaaacgatctaaaaaatatattaccaacgtcacgatacgccaacaaataacgaataactaaaaaacgtacgaactatcaaaaccccttttaaatcgccgcgaataaacactaccgaatacg

SEQ ID NO: 32101 - DNA, 648 bp, Artificial Sequence
  chemically treated genomic DNA (Homo sapiens) CpG-island No: 32101
  unsure (15, 41..42, 78, 90, 218, 275, 279, 332, 339, 392, 473, 510)
  unsure (521, 541, 543..544, 546)
gggcgtgtgggggtncggcggcgttcgcggggcgcggcganntttttttttttcgtttttcgttttcgttttcgtttngggcgcgttttnttcggcgggggcgcgcgtttttttttttcgcgggggcgttcgcgtcgggggggggggggtttcgtcgggcggtcgtcggcggggtcgcgggggggggggggggtcgcgtcggtcggggttcgtcgcgnggggggcggtttcgcgtcgcgttttcgtttcgcgttttcgggcgtcgcgcggtcgtngggnggttcggggcggcgtcgtttcggcgttcgcgtttttcgtcgcgcgtttcgcgngcgtttngggcgtttcgtttcgtcgcggcggggcgggggggtcgtcgttcgttcgcgcgngcggcgttcgttcgcgcgtcgcgcgttcggttttttttttttcgggcgttcgttttttttcgtcgttttttcgcgcggcgngggttttttcgtcggtcgttcgtcggtcgttcgtttncgcgcgcggtngcgtcgcgggcgtttttttngnnnnggtcgtcgggggcggcgtttcgtcgtttttttcgcgggcgcggcgttttcggcgtttcgtcgtcgcggttcgcgttcgtcgtttttcgtcggggcgcggtcg

SEQ ID NO: 32102 - DNA, 648 bp, Artificial Sequence
  chemically treated genomic DNA (Homo sapiens) CpG-island No: 32102
  unsure (103..104, 106, 108, 128, 139, 176, 257, 310, 317, 370, 374)
  unsure (431, 559, 571, 607..608, 634)
cgaccgcgccccgacgaaaaacgacgaacgcgaaccgcgacgacgaaacgccgaaaacgccgcgcccgcgaaaaaaacgacgaaacgccgcccccgacgaccnnnncnaaaaaaacgcccgcgacgcnaccgcgcgcgnaaacgaacgaccgacgaacgaccgacgaaaaaacccncgccgcgcgaaaaaacgacgaaaaaaaacgaacgcccgaaaaaaaaaaaaccgaacgcgcgacgcgcgaacgaacgccgcncgcgcgaacgaacgacgacccccccgccccgccgcgacgaaacgaaacgcccnaaacgcncgcgaaacgcgcgacgaaaaacgcgaacgccgaaacgacgccgccccgaaccncccnacgaccgcgcgacgcccgaaaacgcgaaacgaaaacgcgacgcgaaaccgccccccncgcgacgaaccccgaccgacgcgacccccccccccccccgcgaccccgccgacgaccgcccgacgaaacccccccccccccgacgcgaacgcccccgcgaaaaaaaaaaacgcgcgcccccgccgaanaaaacgcgcccnaaacgaaaacgaaaacgaaaaacgaaaaaaaaaaanntcgccgcgccccgcgaacgccgccgnacccccacacgccc

SEQ ID NO: 32103 - DNA, 648 bp, Artificial Sequence
  chemically treated genomic DNA (Homo sapiens) CpG-island No: 32103
  unsure (103..104, 106, 108, 128, 139, 176, 257, 310, 317, 370, 374)
  unsure (431, 559, 571, 607..608, 634)
cggtcgcgtttcggcggggggcggcgggcgcgggtcgcggcggcggggcgtcgggggcgtcgcgttcgcggggggggcggcggggcgtcgttttcggcggttnnnntngggggggcgttcgcggcgtngtcgcgcgcgngggcgggcggtcggcgggcggtcggcgggggggtttncgtcgcgcgggggggcggcgggggggggcgggcgttcgggggggggggggtcgggcgcgcggcgcgcgggcgggcgtcgtncgcgcgggcgggcggcggttttttcgtttcgtcgcggcggggcggggcgtttngggcgtncgcggggcgcgcggcggggggcgcgggcgtcggggcggcgtcgtttcgggttntttngcggtcgcgcggcgttcgggggcgcggggcgggggcgcggcgcggggtcgttttttncgcggcgggtttcggtcggcgcggttttttttttttttcgcggtttcgtcggcggtcgttcggcggggttttttttttttcggcgcgggcgttttcgcggggggggggggcgcgcgttttcgtcgggnggggcgcgtttngggcgggggcgggggcggggggcggggggggggggnntcgtcgcgtttcgcgggcgtcgtcgngtttttatacgttt

SEQ ID NO: 32104 - DNA, 648 bp, Artificial Sequence
  chemically treated genomic DNA (Homo sapiens) CpG-island No: 32104
  unsure (15, 41..42, 78, 90, 218, 275, 279, 332, 339, 392, 473, 510)
  unsure (521, 541, 543..544, 546)
aaacgtataaaaacncgacgacgcccgcgaaacgcgacgannccccccccccccgccccccgcccccgcccccgcccnaaacgcgccccncccgacgaaaacgcgcgccccccccccccgcgaaaacgcccgcgccgaaaaaaaaaaaaccccgccgaacgaccgccgacgaaaccgcgaaaaaaaaaaaaaaccgcgccgaccgaaacccgccgcgnaaaaaacgaccccgcgccgcgcccccgccccgcgcccccgaacgccgcgcgaccgcnaaanaacccgaaacgacgccgccccgacgcccgcgccccccgccgcgcgccccgcgnacgcccnaaacgccccgccccgccgcgacgaaacgaaaaaaccgccgcccgcccgcgcgnacgacgcccgcccgcgcgccgcgcgcccgacccccccccccccgaacgcccgcccccccccgccgcccccccgcgcgacgnaaacccccccgccgaccgcccgccgaccgcccgcccncgcgcgcgacnacgccgcgaacgcccccccnannnnaaccgccgaaaacgacgccccgccgccccccccgcgaacgcgacgcccccgacgccccgccgccgcgacccgcgcccgccgccccccgccgaaacgcgaccg

SEQ ID NO: 32105 - DNA, 840 bp, Artificial Sequence
  chemically treated genomic DNA (Homo sapiens) CpG-island No: 32105
ttttttcgcgcggggtcgcggttgtttttgggaagtgtggtggtttgagttttacgtttttcgttttttcgttagttgtgcgtttggtcgcgagatattttggtagttataggaatataaaggtttgtgtattttttcgcggggggtcgcggtatttttgggaaatgtagttgtttaggattcgggttttttgtttttcggttttgggcgtgggagtatagtttttatgttttggcgtatcgggtcgcgatggttttgggaattgtagttgtcgtaggttttcgttttttgttttttggcgttttgggtacggtagcgaggcgttttgggagttttagtaggaacgaaaagtttttgcgcgtagggtcgtattggtttttgggaattgtagttttttgaggtcggcggtttggttggggtgacgtcggcgaggtttttgaagacgtaatttttgcgacgttcgcggaggggtttggggggcggcgtcgagcgtttggtttgtgttggttgtaggtaacgaaaggagttttttcggtttgcgtcggatggtttcgggcggtgattcggttcggagttttggaacgttacgtttatttggcggaaagtattacggaaacgtatttttttgtggttattgttaggtgagggggttttggggaggcgcgtcgtggtaggaagagaaagtcggcgttagtggtttaagcgcgattttttagggcgttttgttttttacgtgggaggcgcggagcgggggttacgggaatttttagtgcgggaatttagtgatttgggcgcggtttagttggtttgttcgtttagggtttttttttttttttgtta

SEQ ID NO: 32106 - DNA, 840 bp, Artificial Sequence
  chemically treated genomic DNA (Homo sapiens) CpG-island No: 32106
taacaaaaaaaaaaaaaaaccctaaacgaacaaaccaactaaaccgcgcccaaatcactaaattcccgcactaaaaattcccgtaacccccgctccgcgcctcccacgtaaaaaacaaaacgccctaaaaaatcgcgcttaaaccactaacgccgactttctcttcctaccacgacgcgcctccccaaaaccccctcacctaacaataaccacaaaaaaatacgtttccgtaatactttccgccaaataaacgtaacgttccaaaactccgaaccgaatcaccgcccgaaaccatccgacgcaaaccgaaaaaactcctttcgttacctacaaccaacacaaaccaaacgctcgacgccgccccccaaacccctccgcgaacgtcgcaaaaattacgtcttcaaaaacctcgccgacgtcaccccaaccaaaccgccgacctcaaaaaactacaattcccaaaaaccaatacgaccctacgcgcaaaaacttttcgttcctactaaaactcccaaaacgcctcgctaccgtacccaaaacgccaaaaaacaaaaaacgaaaacctacgacaactacaattcccaaaaccatcgcgacccgatacgccaaaacataaaaactatactcccacgcccaaaaccgaaaaacaaaaaacccgaatcctaaacaactacatttcccaaaaataccgcgaccccccgcgaaaaaatacacaaacctttatattcctataactaccaaaatatctcgcgaccaaacgcacaactaacgaaaaaacgaaaaacgtaaaactcaaaccaccacacttcccaaaaacaaccgcgaccccgcgcgaaaaaa

SEQ ID NO: 32107 - DNA, 840 bp, Artificial Sequence
  chemically treated genomic DNA (Homo sapiens) CpG-island No: 32107
tggtagagagagaaaggagttttgagcgaataggttagttaggtcgcgtttaagttattagattttcgtattggggattttcgtggttttcgtttcgcgttttttacgtagagagtagggcgttttgagagatcgcgtttggattattggcgtcggttttttttttttgttacggcgcgtttttttagaatttttttatttaatagtggttatagaaggatgcgttttcgtggtgtttttcgttaggtgggcgtagcgttttagggtttcggatcgagttatcgttcggggttattcggcgtagatcgggagggtttttttcgttgtttatagttaatataggttagacgttcggcgtcgttttttaggttttttcgcgggcgtcgtaggaattgcgtttttagaagtttcgtcgacgttattttaattaggtcgtcggttttaagaaattataatttttagaaattaatgcggttttgcgcgtaagggtttttcgtttttattggaatttttagagcgtttcgttgtcgtgtttagaacgttaggagataaagaacgagggtttgcgataattataatttttagagttatcgcggttcggtgcgttagagtataggggttatatttttacgtttagagtcgagaaataaagaattcgggttttaggtaattatattttttagaaatatcgcggtttttcgcggaagagtatatagatttttgtgtttttataattgttagagtgtttcgcggttaagcgtataattagcggagaaacgaagaacgtggaatttaggttattatattttttagaaataatcgcgatttcgcgcgagagag

SEQ ID NO: 32108 - DNA, 840 bp, Artificial Sequence
  chemically treated genomic DNA (Homo sapiens) CpG-island No: 32108
ctctctcgcgcgaaatcgcgattatttctaaaaaatataataacctaaattccacgttcttcgtttctccgctaattatacgcttaaccgcgaaacactctaacaattataaaaacacaaaaatctatatactcttccgcgaaaaaccgcgatatttctaaaaaatataattacctaaaacccgaattctttatttctcgactctaaacgtaaaaatataacccctatactctaacgcaccgaaccgcgataactctaaaaattataattatcgcaaaccctcgttctttatctcctaacgttctaaacacgacaacgaaacgctctaaaaattccaataaaaacgaaaaacccttacgcgcaaaaccgcattaatttctaaaaattataatttcttaaaaccgacgacctaattaaaataacgtcgacgaaacttctaaaaacgcaattcctacgacgcccgcgaaaaaacctaaaaaacgacgccgaacgtctaacctatattaactataaacaacgaaaaaaaccctcccgatctacgccgaataaccccgaacgataactcgatccgaaaccctaaaacgctacgcccacctaacgaaaaacaccacgaaaacgcatccttctataaccactattaaataaaaaaattctaaaaaaacgcgccgtaacaaaaaaaaaaaaccgacgccaataatccaaacgcgatctctcaaaacgccctactctctacgtaaaaaacgcgaaacgaaaaccacgaaaatccccaatacgaaaatctaataacttaaacgcgacctaactaacctattcgctcaaaactcctttctctctctacca

SEQ ID NO: 32109 - DNA, 507 bp, Artificial Sequence
  chemically treated genomic DNA (Homo sapiens) CpG-island No: 32109
tagcggagcgcgaagagcggcgttagaggtgagtttgaggtcggttcggtacggcggcgttattttttcgtggtttgacgttacgtacgcgtacgcgtttcgtttttattggttttacgttcgtttttgttgcgaacgtacgtatacgtatttataatatatatcgttacgtacgcgttttagtttggcgtttaggttacgtttcgtttttagttcgttagtcgcgcgtttcgggattttagagtcggcgattcgtcgtcggcgtcgtagtcgttattttgtgtcggattttgcgggttttcggtttagagcgcgttcgtgacgtatagattaggtttttttgcggggcggcgtaggagtttttgggaaacgtagttcggtttcgcgtttttttcgggcgggatcgcggacgtttggaggtaggtattgaggacgggtgagtatgcgggtttgtggttcgtttattcgggataagtttttcgtgggattagtttggttcgttgagtt

SEQ ID NO: 32110 - DNA, 507 bp, Artificial Sequence
  chemically treated genomic DNA (Homo sapiens) CpG-island No: 32110
aactcaacgaaccaaactaatcccacgaaaaacttatcccgaataaacgaaccacaaacccgcatactcacccgtcctcaatacctacctccaaacgtccgcgatcccgcccgaaaaaaacgcgaaaccgaactacgtttcccaaaaactcctacgccgccccgcaaaaaaacctaatctatacgtcacgaacgcgctctaaaccgaaaacccgcaaaatccgacacaaaataacgactacgacgccgacgacgaatcgccgactctaaaatcccgaaacgcgcgactaacgaactaaaaacgaaacgtaacctaaacgccaaactaaaacgcgtacgtaacgatatatattataaatacgtatacgtacgttcgcaacaaaaacgaacgtaaaaccaataaaaacgaaacgcgtacgcgtacgtaacgtcaaaccacgaaaaaataacgccgccgtaccgaaccgacctcaaactcacctctaacgccgctcttcgcgctccgcta

SEQ ID NO: 32111 - DNA, 507 bp, Artificial Sequence
  chemically treated genomic DNA (Homo sapiens) CpG-island No: 32111
aatttagcgggttaggttgattttacgagggatttgtttcgggtgaacgagttataggttcgtatgtttattcgtttttagtgtttgtttttaggcgttcgcggtttcgttcgagggggacgcgaggtcgaattacgttttttaggagtttttgcgtcgtttcgtagaggggtttggtttgtgcgttacggacgcgttttgggtcgaaggttcgtagggttcggtatagagtggcggttgcggcgtcggcgacgaatcgtcggttttagggtttcggggcgcgcggttgacgggttgggggcggagcgtggtttgaacgttaggttggggcgcgtgcgtaacggtgtgtgttgtgggtgcgtgtgcgtgcgttcgtagtaggggcgggcgtaggattaatgggggcggggcgcgtgcgcgtgcgtgacgttaggttacggggaggtggcgtcgtcgtgtcgagtcggttttagatttatttttgacgtcgtttttcgcgtttcgttg

SEQ ID NO: 32112 - DNA, 507 bp, Artificial Sequence
  chemically treated genomic DNA (Homo sapiens) CpG-island No: 32112
caacgaaacgcgaaaaacgacgtcaaaaataaatctaaaaccgactcgacacgacgacgccacctccccgtaacctaacgtcacgcacgcgcacgcgccccgcccccattaatcctacgcccgcccctactacgaacgcacgcacacgcacccacaacacacaccgttacgcacgcgccccaacctaacgttcaaaccacgctccgcccccaacccgtcaaccgcgcgccccgaaaccctaaaaccgacgattcgtcgccgacgccgcaaccgccactctataccgaaccctacgaaccttcgacccaaaacgcgtccgtaacgcacaaaccaaacccctctacgaaacgacgcaaaaactcctaaaaaacgtaattcgacctcgcgtccccctcgaacgaaaccgcgaacgcctaaaaacaaacactaaaaacgaataaacatacgaacctataactcgttcacccgaaacaaatccctcgtaaaatcaacctaacccgctaaatt

SEQ ID NO: 32113 - DNA, 582 bp, Artificial Sequence
  chemically treated genomic DNA (Homo sapiens) CpG-island No: 32113
  unsure (111)
tttggcgggtcgtgacgtggttgcgcgttttattatgatcgaaattcgtgaaggtcgcggttgtgatggttcgtgggggttatacgcgaaattgaaattcgattatttggngtaagaagttttcgaatttcgtttgtcgggtattttggagttttttcgtattttcgtttacgtcgattcggtgaaagagtcgatttcggttattttaatttgttattatatgatgggcggtatttcgattaaagttatcggttaggtattgattgtgaatgagaaaggcgaagatgtggttgtttcgggattgtttgtcgttggtgaaatcgtttgtgtatcggtatacggcgttaatcgtttgggcggtaattcgttgttggatttggtggtttttggtcgcgcggtaggtttgtatttgtaagagtttatcgtcgagtagggcgtattgcgcgatgttagcgagtttgatgttgaagcgttttggatcgtttgaatcgttggaataataatcgtaacggtgaagattcggtggcgattcgtaaagcgttgtaagaatgtatgtagtataatttttcggtttttcgtgaa

SEQ ID NO: 32114 - DNA, 582 bp, Artificial Sequence
  chemically treated genomic DNA (Homo sapiens) CpG-island No: 32114
  unsure (472)
ttcacgaaaaaccgaaaaattatactacatacattcttacaacgctttacgaatcgccaccgaatcttcaccgttacgattattattccaacgattcaaacgatccaaaacgcttcaacatcaaactcgctaacatcgcgcaatacgccctactcgacgataaactcttacaaatacaaacctaccgcgcgaccaaaaaccaccaaatccaacaacgaattaccgcccaaacgattaacgccgtataccgatacacaaacgatttcaccaacgacaaacaatcccgaaacaaccacatcttcgcctttctcattcacaatcaatacctaaccgataactttaatcgaaataccgcccatcatataataacaaattaaaataaccgaaatcgactctttcaccgaatcgacgtaaacgaaaatacgaaaaaactccaaaatacccgacaaacgaaattcgaaaacttcttacnccaaataatcgaatttcaatttcgcgtataacccccacgaaccatcacaaccgcgaccttcacgaatttcgatcataataaaacgcgcaaccacgtcacgacccgccaaa

SEQ ID NO: 32115 - DNA, 582 bp, Artificial Sequence
  chemically treated genomic DNA (Homo sapiens) CpG-island No: 32115
  unsure (472)
tttacggaagatcgagaagttatgttgtatatatttttgtagcgttttacggatcgttatcggatttttatcgttacgattattgttttagcggtttaggcgatttagaacgttttaatattagattcgttggtatcgcgtagtgcgttttgttcggcgatagatttttgtagatgtagatttgtcgcgcgattaaagattattaggtttagtagcgagttgtcgtttagacggttagcgtcgtgtatcgatatataagcgattttattaacggtaaatagtttcggaataattatattttcgttttttttatttatagttagtgtttgatcggtaattttggtcggaatatcgtttattatgtagtgataggttgggataatcggaatcggtttttttatcggatcgacgtgagcgaaggtacgggaaagttttaggatattcggtagacgggattcgagaattttttatnttaggtgatcgagttttagtttcgcgtgtggtttttacggattattatagtcgcgatttttacggatttcgattatgatggaacgcgtaattacgttacggttcgttagg

SEQ ID NO: 32116 - DNA, 582 bp, Artificial Sequence
  chemically treated genomic DNA (Homo sapiens) CpG-island No: 32116
  unsure (111)
cctaacgaaccgtaacgtaattacgcgttccatcataatcgaaatccgtaaaaatcgcgactataataatccgtaaaaaccacacgcgaaactaaaactcgatcacctaanataaaaaattctcgaatcccgtctaccgaatatcctaaaactttcccgtaccttcgctcacgtcgatccgataaaaaaaccgattccgattatcccaacctatcactacataataaacgatattccgaccaaaattaccgatcaaacactaactataaataaaaaaaacgaaaatataattattccgaaactatttaccgttaataaaatcgcttatatatcgatacacgacgctaaccgtctaaacgacaactcgctactaaacctaataatctttaatcgcgcgacaaatctacatctacaaaaatctatcgccgaacaaaacgcactacgcgataccaacgaatctaatattaaaacgttctaaatcgcctaaaccgctaaaacaataatcgtaacgataaaaatccgataacgatccgtaaaacgctacaaaaatatatacaacataacttctcgatcttccgtaaa

SEQ ID NO: 32117 - DNA, 535 bp, Artificial Sequence
  chemically treated genomic DNA (Homo sapiens) CpG-island No: 32117
attcggtaacggtgtcgattgtttgatgcgacgtttgcgcgttttattaggtttataaattttcgtatttttcgtaggtcggataaggcgtttacgtcgtattcggtaatagtgttaattgtttgatgcgacgtttgcgcgttttattaggtttataaattttcgtattattcgtaggtcggataaggcgtttacgtcgtattcggtaacggtgtcgattgtttgatgcgacgtttgcgcgttttattaggtttataaattttcgtatttttcgtaggtcggattaaggcgtttacgtcgtattcggtaatggtgtcgattgtttgatgcgacgtttgcgcgttttattaggtttttaaattttcgtattttttcgtatgtcggatataggcgtttacgtcgtattcggtaatcgtgtataatgtttgatgcgacgtttcgcgttttattaggtttacgaaagttaattattacgcgttggtatgtcgtaatttatttggcgtagtgcgtttaatgtggttttggttttattttt

SEQ ID NO: 32118 - DNA, 535 bp, Artificial Sequence
  chemically treated genomic DNA (Homo sapiens) CpG-island No: 32118
aaaaataaaaccaaaaccacattaaacgcactacgccaaataaattacgacataccaacgcgtaataattaactttcgtaaacctaataaaacgcgaaacgtcgcatcaaacattatacacgattaccgaatacgacgtaaacgcctatatccgacatacgaaaaaatacgaaaatttaaaaacctaataaaacgcgcaaacgtcgcatcaaacaatcgacaccattaccgaatacgacgtaaacgccttaatccgacctacgaaaaatacgaaaatttataaacctaataaaacgcgcaaacgtcgcatcaaacaatcgacaccgttaccgaatacgacgtaaacgccttatccgacctacgaataatacgaaaatttataaacctaataaaacgcgcaaacgtcgcatcaaacaattaacactattaccgaatacgacgtaaacgccttatccgacctacgaaaaatacgaaaatttataaacctaataaaacgcgcaaacgtcgcatcaaacaatcgacaccgttaccgaat

SEQ ID NO: 32119 - DNA, 535 bp, Artificial Sequence
  chemically treated genomic DNA (Homo sapiens) CpG-island No: 32119
gaagatgaagttaaagttatattagacgtattgcgttaaatggattacgatatattagcgcgtgatgattagttttcgtaggtttgataagacgcggagcgtcgtattaggtattgtgtacgattgtcggatgcggcgtaaacgtttatattcggtatacggaagggtgcgggaatttgaaggtttgataagacgcgtaagcgtcgtattaggtagtcggtattattgtcggatgcggcgtaaacgttttaattcggtttacggagggtgcgggaatttgtaggtttgataagacgcgtaagcgtcgtattaggtagtcggtatcgttgtcggatgcggcgtaaacgttttattcggtttacggatggtgcgggaatttgtaggtttgataagacgcgtaagcgtcgtattaggtagttggtattgttgtcggatgcggcgtaaacgttttattcggtttacggagggtgcgggaatttgtaggtttgataagacgcgtaagcgtcgtattaggtagtcggtatcgttgtcggat

SEQ ID NO: 32120 - DNA, 535 bp, Artificial Sequence
  chemically treated genomic DNA (Homo sapiens) CpG-island No: 32120
atccgacaacgataccgactacctaatacgacgcttacgcgtcttatcaaacctacaaattcccgcaccctccgtaaaccgaataaaacgtttacgccgcatccgacaacaataccaactacctaatacgacgcttacgcgtcttatcaaacctacaaattcccgcaccatccgtaaaccgaataaaacgtttacgccgcatccgacaacgataccgactacctaatacgacgcttacgcgtcttatcaaacctacaaattcccgcaccctccgtaaaccgaattaaaacgtttacgccgcatccgacaataataccgactacctaatacgacgcttacgcgtcttatcaaaccttcaaattcccgcacccttccgtataccgaatataaacgtttacgccgcatccgacaatcgtacacaatacctaatacgacgctccgcgtcttatcaaacctacgaaaactaatcatcacgcgctaatatatcgtaatccatttaacgcaatacgtctaatataactttaacttcatcttc

SEQ ID NO: 32121 - DNA, 615 bp, Artificial Sequence
  chemically treated genomic DNA (Homo sapiens) CpG-island No: 32121
ggcgtcgtcgggtttaggtattagtagtagtagtgcgagtagtttgtatttttaacggttcgcgacggtcgtttagcgttgcgcggatttcggtcgcggtatttcgagaaggcggcggcggttttaatcgagttgcgagacgtagggttaggtttgcgcggatttatcgcgcgcggtaggttttagcgtaggttatttcgtaaagatatatagtagagtaggtttacgtttgtgggagattcgggattagagcgatttttcggttttttgtgaggggcgtagacgggcggatttggggaggtaaaagagaagcggaaaaggtttgagagggtcggaagtggggattagtttttcggggggtgaaggggcggagtttgagatatcggttttcgtgattcggatgcgttttttttcgggaatacgcgttggagtgcgtacgtggaagttcgcgaggcgttggttttgttttcgttgtagtttgggacgaggggcggggttagagtcgtgggcggagaggggcgagattaggaaacggggcgtggcggtcgtcgtggttataggcggttggcgagggtaattacgttttaattattggttttttttgttgtttttttt

SEQ ID NO: 32122 - DNA, 615 bp, Artificial Sequence
  chemically treated genomic DNA (Homo sapiens) CpG-island No: 32122
aaaaaaaacaacaaaaaaaaccaataattaaaacgtaattaccctcgccaaccgcctataaccacgacgaccgccacgccccgtttcctaatctcgcccctctccgcccacgactctaaccccgcccctcgtcccaaactacaacgaaaacaaaaccaacgcctcgcgaacttccacgtacgcactccaacgcgtattcccgaaaaaaaacgcatccgaatcacgaaaaccgatatctcaaactccgccccttcaccccccgaaaaactaatccccacttccgaccctctcaaaccttttccgcttctcttttacctccccaaatccgcccgtctacgcccctcacaaaaaaccgaaaaatcgctctaatcccgaatctcccacaaacgtaaacctactctactatatatctttacgaaataacctacgctaaaacctaccgcgcgcgataaatccgcgcaaacctaaccctacgtctcgcaactcgattaaaaccgccgccgccttctcgaaataccgcgaccgaaatccgcgcaacgctaaacgaccgtcgcgaaccgttaaaaatacaaactactcgcactactactactaatacctaaacccgacgacgcc

SEQ ID NO: 32123 - DNA, 615 bp, Artificial Sequence
  chemically treated genomic DNA (Homo sapiens) CpG-island No: 32123
aaaaaaaataataaaaaaagttagtgattggagcgtaattattttcgttaatcgtttgtaattacggcggtcgttacgtttcgttttttggtttcgttttttttcgtttacgattttggtttcgtttttcgttttaggttgtaacggaggtagagttaacgtttcgcgggtttttacgtacgtattttaacgcgtgttttcggagaagaacgtattcgggttacgggagtcggtgttttaggtttcgtttttttatttttcgaaaggttaatttttattttcgatttttttaggtttttttcgttttttttttatttttttaggttcgttcgtttgcgttttttataggaagtcggagggtcgttttgatttcgaattttttataggcgtgaatttgttttgttgtgtatttttgcggggtggtttgcgttgaggtttgtcgcgcgcggtgagttcgcgtagatttgattttgcgtttcgtagttcggttgaggtcgtcgtcgttttttcgggatgtcgcggtcggggttcgcgtagcgttgggcggtcgtcgcgggtcgttgggggtgtaggttgttcgtattgttgttattggtgtttggattcggcggcgtt

SEQ ID NO: 32124 - DNA, 615 bp, Artificial Sequence
  chemically treated genomic DNA (Homo sapiens) CpG-island No: 32124
aacgccgccgaatccaaacaccaataacaacaatacgaacaacctacacccccaacgacccgcgacgaccgcccaacgctacgcgaaccccgaccgcgacatcccgaaaaaacgacgacgacctcaaccgaactacgaaacgcaaaatcaaatctacgcgaactcaccgcgcgcgacaaacctcaacgcaaaccaccccgcaaaaatacacaacaaaacaaattcacgcctataaaaaattcgaaatcaaaacgaccctccgacttcctataaaaaacgcaaacgaacgaacctaaaaaaataaaaaaaaaacgaaaaaaacctaaaaaaatcgaaaataaaaattaacctttcgaaaaataaaaaaacgaaacctaaaacaccgactcccgtaacccgaatacgttcttctccgaaaacacgcgttaaaatacgtacgtaaaaacccgcgaaacgttaactctacctccgttacaacctaaaacgaaaaacgaaaccaaaatcgtaaacgaaaaaaaacgaaaccaaaaaacgaaacgtaacgaccgccgtaattacaaacgattaacgaaaataattacgctccaatcactaactttttttattatttttttt

SEQ ID NO: 32125 - DNA, 542 bp, Artificial Sequence
  chemically treated genomic DNA (Homo sapiens) CpG-island No: 32125
ttttttttttttttttttttttttttttcgttttttttttttttttttttttttttttgttttttttttgttttttacgtttttttttttttattttttttcgtttttttttcggtcgttttttttcgtttgttgtattttcgttcgtttcgtcgtttcgttcgtcgattcgtttttttttttttttttttttcgtttttttttttttttttcgttttgttttcgtcgttacgtcgtttcgttttcgttcgttttcgtttttgtgttttcgtcgtgttgcgttttttttgcgtttttttatttttttgtttttgttttttttttattgtttttgcgttcgtttcgtttttgttttttttttttttttcgtttatcgtttttttgtttcgtttatcgtttttttttgttttattcgtttcgttgtcgattgtttttggtcgtcgtgtttcgtgtttcgttgtcgtgttgtgtgtttttatgtgtttgtattgtgtgtgttttttttgacgttttatgtgtttttatgttgtgtatgttttgtt

SEQ ID NO: 32126 - DNA, 542 bp, Artificial Sequence
  chemically treated genomic DNA (Homo sapiens) CpG-island No: 32126
aacaaaacatacacaacataaaaacacataaaacgtcaaaaaaaacacacacaatacaaacacataaaaacacacaacacgacaacgaaacacgaaacacgacgaccaaaaacaatcgacaacgaaacgaataaaacaaaaaaaaacgataaacgaaacaaaaaaacgataaacgaaaaaaaaaaaaaaaacaaaaacgaaacgaacgcaaaaacaataaaaaaaaaacaaaaacaaaaaaataaaaaaacgcaaaaaaaacgcaacacgacgaaaacacaaaaacgaaaacgaacgaaaacgaaacgacgtaacgacgaaaacaaaacgaaaaaaaaaaaaaaaaacgaaaaaaaaaaaaaaaaaaaaacgaatcgacgaacgaaacgacgaaacgaacgaaaatacaacaaacgaaaaaaaacgaccgaaaaaaaaacgaaaaaaaataaaaaaaaaaaaacgtaaaaaacaaaaaaaaaacaaaaaaaaaaaaaaaaaaaaaaaaaaaacgaaaaaaaaaaaaaaaaaaaaaaaaaaaa

SEQ ID NO: 32127 - DNA, 542 bp, Artificial Sequence
  chemically treated genomic DNA (Homo sapiens) CpG-island No: 32127
agtagagtatgtatagtatagagatatatggagcgttagaagaaatatatataatatagatatatagaagtatatagtacgatagcggagtacgagatacgacgattaggagtagtcgatagcgagacggatgaggtaggaaaagacgatagacgaagtagagagacgataagcgagaggaagagaagagataggagcgaggcggacgtagaagtaataagaggagagtagagatagagaaataagagggcgtagagagagcgtagtacggcggagatataaagacgaaagcgggcgaagacggaacgacgtggcggcgagagtagaacggaggagagagagagggacgggagagaagaaggaggaggagcgagtcgacgggcgagacgacgggacgagcgagagtataataggcggagggaagcgatcggaggaggagcgggagagaataagagaggaggagcgtaaaagataggagagggataagagaagaagaaaggaagagggaggagcgagaaagggagagaagggaggggaggggg

SEQ ID NO: 32128 - DNA, 542 bp, Artificial Sequence
  chemically treated genomic DNA (Homo sapiens) CpG-island No: 32128
ccccctcccctcccttctctccctttctcgctcctccctcttcctttcttcttctcttatccctctcctatcttttacgctcctcctctcttattctctcccgctcctcctccgatcgcttccctccgcctattatactctcgctcgtcccgtcgtctcgcccgtcgactcgctcctcctccttcttctctcccgtccctctctctctcctccgttctactctcgccgccacgtcgttccgtcttcgcccgctttcgtctttatatctccgccgtactacgctctctctacgccctcttatttctctatctctactctcctcttattacttctacgtccgcctcgctcctatctcttctcttcctctcgcttatcgtctctctacttcgtctatcgtcttttcctacctcatccgtctcgctatcgactactcctaatcgtcgtatctcgtactccgctatcgtactatatacttctatatatctatattatatatatttcttctaacgctccatatatctctatactatacatactctact

SEQ ID NO: 32129 - DNA, 838 bp, Artificial Sequence
  chemically treated genomic DNA (Homo sapiens) CpG-island No: 32129
agttggagcgttgcgtttttaattttggggcgggcggggggcggcgggaatttttgtttcggttttttttgtatcgcgggggtagttgttatttgtaaggcgagcgcggcgcgggggatggaagtaggcgtttattggatagaatataaaggtagaaatttatttcgaaggtcggggttcggcggggcgttgggggtgggcgtttttcgcggttttcggcgtttttcgtttcgagacgtttcggtttagcggtattggcgcgatcgaggtttagtttcggggatacgttcggttggtcgcggggaaggtattaggtgagcgcggtcgcgtttttcggaatttcgttttcgcgcgtttcgcggcgacgcggcgtttattcgtttcgggagttaggaatttagggttttattatggcgttggtcgtcgtcgtcgtcgttgcggttgtcggggtgagttaggcggcggtgttgggttttttgtaggagtacggcgggaaggtgcgtaatttcgagttgttgagtcgttttaagtcgttgttcgatgtcggcgattcgcggggtcgcgtcgttcgtagggatcgttttaagtagttcgttaataacgtggcggtggtgaaggagttcgacggcgttaagttcgtggtgttgaggaagaagtttcggttttcggagttcgagttcgtatttttcggtttttcgggggtagcggtttagtcgtcgaaatttatttcgacggttttgtcgcggagcgtttttgtttcgggagtttcgtttttggtttcggtgtcgcggttagtggagtcgttaggggatttgggtttgttaatagagttatagga

SEQ ID NO: 32130 - DNA, 838 bp, Artificial Sequence
  chemically treated genomic DNA (Homo sapiens) CpG-island No: 32130
tcctataactctattaacaaacccaaatcccctaacgactccactaaccgcgacaccgaaaccaaaaacgaaactcccgaaacaaaaacgctccgcgacaaaaccgtcgaaataaatttcgacgactaaaccgctacccccgaaaaaccgaaaaatacgaactcgaactccgaaaaccgaaacttcttcctcaacaccacgaacttaacgccgtcgaactccttcaccaccgccacgttattaacgaactacttaaaacgatccctacgaacgacgcgaccccgcgaatcgccgacatcgaacaacgacttaaaacgactcaacaactcgaaattacgcaccttcccgccgtactcctacaaaaaacccaacaccgccgcctaactcaccccgacaaccgcaacgacgacgacgacgaccaacgccataataaaaccctaaattcctaactcccgaaacgaataaacgccgcgtcgccgcgaaacgcgcgaaaacgaaattccgaaaaacgcgaccgcgctcacctaataccttccccgcgaccaaccgaacgtatccccgaaactaaacctcgatcgcgccaataccgctaaaccgaaacgtctcgaaacgaaaaacgccgaaaaccgcgaaaaacgcccacccccaacgccccgccgaaccccgaccttcgaaataaatttctacctttatattctatccaataaacgcctacttccatcccccgcgccgcgctcgccttacaaataacaactacccccgcgatacaaaaaaaaccgaaacaaaaattcccgccgccccccgcccgccccaaaattaaaaacgcaacgctccaact

SEQ ID NO: 32131 - DNA, 838 bp, Artificial Sequence
  chemically treated genomic DNA (Homo sapiens) CpG-island No: 32131
ttttgtggttttgttggtagatttaggttttttggcggttttattggtcgcggtatcgggattaagggcggagttttcggggtagaggcgtttcgcggtaagatcgtcgaagtgggtttcgacggttgggtcgttgttttcggggggtcgaagggtgcgggttcgggtttcgggggtcggggttttttttttagtattacgaatttgacgtcgtcgagtttttttattatcgttacgttgttgacgaattgtttgaagcggtttttgcgggcggcgcggtttcgcgggtcgtcggtatcgagtagcggtttgaagcggtttagtagttcggagttgcgtattttttcgtcgtgtttttgtaggaagtttagtatcgtcgtttggtttatttcggtagtcgtagcggcggcggcggcggttagcgttatggtggggttttgggtttttggttttcggggcgggtgggcgtcgcgtcgtcgcgggacgcgcgggagcggggtttcgggaggcgcggtcgcgtttatttggtgtttttttcgcggttagtcgggcgtgttttcgaagttggatttcggtcgcgttagtgtcgttgggtcggggcgtttcggggcgaagggcgtcgggggtcgcggggagcgtttatttttagcgtttcgtcgggtttcggttttcggggtaggtttttgtttttgtattttgtttaatgggcgtttgtttttatttttcgcgtcgcgttcgttttataggtgatagttgttttcgcgatgtagagggaatcggagtagaaattttcgtcgtttttcgttcgttttagaattaaaggcgtagcgttttagtt

SEQ ID NO: 32132 - DNA, 838 bp, Artificial Sequence
  chemically treated genomic DNA (Homo sapiens) CpG-island No: 32132
aactaaaacgctacgcctttaattctaaaacgaacgaaaaacgacgaaaatttctactccgattccctctacatcgcgaaaacaactatcacctataaaacgaacgcgacgcgaaaaataaaaacaaacgcccattaaacaaaatacaaaaacaaaaacctaccccgaaaaccgaaacccgacgaaacgctaaaaataaacgctccccgcgacccccgacgcccttcgccccgaaacgccccgacccaacgacactaacgcgaccgaaatccaacttcgaaaacacgcccgactaaccgcgaaaaaaacaccaaataaacgcgaccgcgcctcccgaaaccccgctcccgcgcgtcccgcgacgacgcgacgcccacccgccccgaaaaccaaaaacccaaaaccccaccataacgctaaccgccgccgccgccgctacgactaccgaaataaaccaaacgacgatactaaacttcctacaaaaacacgacgaaaaaatacgcaactccgaactactaaaccgcttcaaaccgctactcgataccgacgacccgcgaaaccgcgccgcccgcaaaaaccgcttcaaacaattcgtcaacaacgtaacgataataaaaaaactcgacgacgtcaaattcgtaatactaaaaaaaaaaccccgacccccgaaacccgaacccgcacccttcgaccccccgaaaacaacgacccaaccgtcgaaacccacttcgacgatcttaccgcgaaacgcctctaccccgaaaactccgcccttaatcccgataccgcgaccaataaaaccgccaaaaaacctaaatctaccaacaaaaccacaaaa

SEQ ID NO: 32133 - DNA, 947 bp, Artificial Sequence
  chemically treated genomic DNA (Homo sapiens) CpG-island No: 32133
ggttcgtcgatttatcgtttttagtttttgagttagtttaggttatcgagagatttttcgtagacgcggttttatcgtttagggttttttttgaggcggtatcgttttgttttgattcgttagacgcggagttcgggttcggggtagcgaaagggtcgtcgtagtagaagttttgtatgttgtcggtgcgttgcgtttcggttttcgttacgtttcgttttcgggcggaggagttcggtttgcgtcggtagttgtcggaggagtcgagttcgcggagtttttttttgttgttgaggcggttttcggtggaagagttcggtttgggtttcggtttgggttcgggtcgtttttcgtatttgaggcgtttgtcgcgcgtcggttcgcgtttgttgagttttgacgtcgaggagttgttcgtcgcgtcgtcgtcgttcgcggtgtttttggagtcgttcgagtacgagtggttcgtgcggattgtcgggggtcgttggatttattagttgtacgggttgttgttgcgcgatcgcggtttggcggttaagcgcgattttatgtttggttttacggttttgtattgggtcgttaagagcggcgacggcgagatggcgttgtagttggtggaggtcgcgcggcgtagtggcgtattagtcgacgtgaacgtacgtttttacggcggttatacgtcgttgtatttggttgtattgtacggttacgaggacgttgtcgtgttgttggtggtgcgtttgggtgtttaggtgtacgtgcgtgattatagcgggcgtcgcgtttattagtatttgcggttcggtttttcgtacgcgttgcgtcgtttttttggcgatttaggtttgcgaggtattacggagttagatgcgatcggtggtggaagtggtagttttgttgttaggcgtttcgtataggtggtcgttattatttttagtttt

SEQ ID NO: 32134 - DNA, 947 bp, Artificial Sequence
  chemically treated genomic DNA (Homo sapiens) CpG-island No: 32134
aaaactaaaaataataacgaccacctatacgaaacgcctaacaacaaaactaccacttccaccaccgatcgcatctaactccgtaatacctcgcaaacctaaatcgccaaaaaaacgacgcaacgcgtacgaaaaaccgaaccgcaaatactaataaacgcgacgcccgctataatcacgcacgtacacctaaacacccaaacgcaccaccaacaacacgacaacgtcctcgtaaccgtacaatacaaccaaatacaacgacgtataaccgccgtaaaaacgtacgttcacgtcgactaatacgccactacgccgcgcgacctccaccaactacaacgccatctcgccgtcgccgctcttaacgacccaatacaaaaccgtaaaaccaaacataaaatcgcgcttaaccgccaaaccgcgatcgcgcaacaacaacccgtacaactaataaatccaacgacccccgacaatccgcacgaaccactcgtactcgaacgactccaaaaacaccgcgaacgacgacgacgcgacgaacaactcctcgacgtcaaaactcaacaaacgcgaaccgacgcgcgacaaacgcctcaaatacgaaaaacgacccgaacccaaaccgaaacccaaaccgaactcttccaccgaaaaccgcctcaacaacaaaaaaaaactccgcgaactcgactcctccgacaactaccgacgcaaaccgaactcctccgcccgaaaacgaaacgtaacgaaaaccgaaacgcaacgcaccgacaacatacaaaacttctactacgacgaccctttcgctaccccgaacccgaactccgcgtctaacgaatcaaaacaaaacgataccgcctcaaaaaaaaccctaaacgataaaaccgcgtctacgaaaaatctctcgataacctaaactaactcaaaaactaaaaacgataaatcgacgaacc

SEQ ID NO: 32135 - DNA, 947 bp, Artificial Sequence
  chemically treated genomic DNA (Homo sapiens) CpG-island No: 32135
ggaattgaggatggtggcggttatttgtacggggcgtttggtagtaagattgttatttttattatcggtcgtatttggtttcgtggtgtttcgtaggtttggatcgttaagaaggcggcgtagcgcgtacgaggagtcgggtcgtaggtattggtaggcgcgacgttcgttgtgattacgtacgtgtatttgggtatttagacgtattattagtagtacggtagcgttttcgtggtcgtgtagtgtagttaggtgtagcggcgtgtagtcgtcgtgggagcgtgcgtttacgtcgattggtgcgttattgcgtcgcgcgatttttattagttgtagcgttatttcgtcgtcgtcgtttttggcggtttaatgtagggtcgtgaagttagatatgaagtcgcgtttggtcgttaagtcgcggtcgcgtagtagtagttcgtgtagttggtgggtttagcggttttcggtagttcgtacgagttattcgtgttcggacggttttaggggtatcgcggacggcggcggcgcggcgggtaatttttcggcgttagggtttagtagacgcgggtcggcgcgcgataggcgttttaggtgcggggagcggttcgggtttaggtcgaggtttagatcggatttttttatcgagagtcgttttagtagtagaggggagtttcgcgggttcggttttttcgatagttgtcggcgtaggtcgggttttttcgttcggaggcggagcgtggcgggggtcgggacgtagcgtatcggtagtatatagggtttttgttgcggcggttttttcgttgtttcgggttcgggtttcgcgtttggcggattagagtagggcgatgtcgttttagaaggggttttaggcggtggggtcgcgtttgcggagggtttttcggtggtttgggttagtttaagggttggaagcggtgggtcggcggatt

SEQ ID NO: 32136 - DNA, 947 bp, Artificial Sequence
  chemically treated genomic DNA (Homo sapiens) CpG-island No: 32136
aatccgccgacccaccgcttccaacccttaaactaacccaaaccaccgaaaaaccctccgcaaacgcgaccccaccgcctaaaaccccttctaaaacgacatcgccctactctaatccgccaaacgcgaaacccgaacccgaaacaacgaaaaaaccgccgcaacaaaaaccctatatactaccgatacgctacgtcccgacccccgccacgctccgcctccgaacgaaaaaacccgacctacgccgacaactatcgaaaaaaccgaacccgcgaaactcccctctactactaaaacgactctcgataaaaaaatccgatctaaacctcgacctaaacccgaaccgctccccgcacctaaaacgcctatcgcgcgccgacccgcgtctactaaaccctaacgccgaaaaattacccgccgcgccgccgccgtccgcgatacccctaaaaccgtccgaacacgaataactcgtacgaactaccgaaaaccgctaaacccaccaactacacgaactactactacgcgaccgcgacttaacgaccaaacgcgacttcatatctaacttcacgaccctacattaaaccgccaaaaacgacgacgacgaaataacgctacaactaataaaaatcgcgcgacgcaataacgcaccaatcgacgtaaacgcacgctcccacgacgactacacgccgctacacctaactacactacacgaccacgaaaacgctaccgtactactaataatacgtctaaatacccaaatacacgtacgtaatcacaacgaacgtcgcgcctaccaatacctacgacccgactcctcgtacgcgctacgccgccttcttaacgatccaaacctacgaaacaccacgaaaccaaatacgaccgataataaaaataacaatcttactaccaaacgccccgtacaaataaccgccaccatcctcaattcc

SEQ ID NO: 32137 - DNA, 740 bp, Artificial Sequence
  chemically treated genomic DNA (Homo sapiens) CpG-island No: 32137
tttcgggtcgggtaacgtttttgttatcgaagcgaaacgttaggtgagttagcgtttggacggtgcggcgatcgatatgttcgtagagttcgtcggaagtgttggatgattgttgatagcggcgttacgtcggatttcgtggtttttgattatgtttttttaggttgaatacggttcggatttataggtgattttattgatagttcgttgttgatatggtagcgtcgtagttgtcgaggtacgtcgaacgttaattggtagaattgtcgcgtgtcgaaatcgtatcgttaggtattgaatagttaggtcgtttgatcgtgatataaagatttagcgtagtgcgtggagatttttaattagtacggttcggagtatttgattatttagattcgtaacgttcgtgaattggtcgatagtattattagcgtcggttcggtattttttggtgattggttatcggaatcggtaggtgattacgttttcggtattaattacgattttatcgatttacggttatatcgttatttgttttagtttacgggttggaagatttttagaagcgtatgatcgtataggaaattgtcgatagatgggtttttcgcgttggttttaattatagaaatattgttcgtcgtcgagcgtttgatcgtttataaaaatgtcgttattttgcgtgttaacgtttttaaggagtaagtatgagtatcgtgattattatcgatttagcgttgtgaaaacgt

SEQ ID NO: 32138 - DNA, 740 bp, Artificial Sequence
  chemically treated genomic DNA (Homo sapiens) CpG-island No: 32138
acgttttcacaacgctaaatcgataataatcacgatactcatacttactccttaaaaacgttaacacgcaaaataacgacatttttataaacgatcaaacgctcgacgacgaacaatatttctataattaaaaccaacgcgaaaaacccatctatcgacaatttcctatacgatcatacgcttctaaaaatcttccaacccgtaaactaaaacaaataacgatataaccgtaaatcgataaaatcgtaattaataccgaaaacgtaatcacctaccgattccgataaccaatcaccaaaaaataccgaaccgacgctaataatactatcgaccaattcacgaacgttacgaatctaaataatcaaatactccgaaccgtactaattaaaaatctccacgcactacgctaaatctttatatcacgatcaaacgacctaactattcaatacctaacgatacgatttcgacacgcgacaattctaccaattaacgttcgacgtacctcgacaactacgacgctaccatatcaacaacgaactatcaataaaatcacctataaatccgaaccgtattcaacctaaaaaaacataatcaaaaaccacgaaatccgacgtaacgccgctatcaacaatcatccaacacttccgacgaactctacgaacatatcgatcgccgcaccgtccaaacgctaactcacctaacgtttcgcttcgataacaaaaacgttacccgacccgaaa

SEQ ID NO: 32139 - DNA, 740 bp, Artificial Sequence
  chemically treated genomic DNA (Homo sapiens) CpG-island No: 32139
acgtttttatagcgttaaatcggtaatagttacggtgtttatgtttgttttttaagggcgttaatacgtaaagtaacggtatttttgtgggcggttaggcgttcggcggcggatagtgtttttatggttgaagttagcgcggagaatttatttgtcgatagttttttgtacggttatgcgtttttggaaattttttagttcgtaggttggaataggtgacggtgtaatcgtaagtcggtagaatcgtggttggtgtcggaggcgtaattatttgtcgatttcggtgattagttattaagaaatatcgaatcggcgttggtgatgttatcgattagtttacgggcgttgcgggtttgaatgattaggtgtttcgggtcgtattggttggagatttttacgtattgcgttaaatttttatgttacgattaggcggtttggttgtttagtgtttggcggtgcggtttcggtacgcggtagttttgttagttggcgttcgacgtgtttcggtaattgcgacgttgttatattagtagcgggttgttagtaaaattatttgtgagttcgggtcgtgtttagtttgagagagtataattagaagttacgaaattcggcgtagcgtcgttgttagtaattatttagtattttcgacgggttttgcgggtatatcgatcgtcgtatcgtttagacgttggtttatttgacgtttcgtttcggtgataaaggcgttattcggttcgaag

SEQ ID NO: 32140 - DNA, 740 bp, Artificial Sequence
  chemically treated genomic DNA (Homo sapiens) CpG-island No: 32140
cttcgaaccgaataacgcctttatcaccgaaacgaaacgtcaaataaaccaacgtctaaacgatacgacgatcgatatacccgcaaaacccgtcgaaaatactaaataattactaacaacgacgctacgccgaatttcgtaacttctaattatactctctcaaactaaacacgacccgaactcacaaataattttactaacaacccgctactaatataacaacgtcgcaattaccgaaacacgtcgaacgccaactaacaaaactaccgcgtaccgaaaccgcaccgccaaacactaaacaaccaaaccgcctaatcgtaacataaaaatttaacgcaatacgtaaaaatctccaaccaatacgacccgaaacacctaatcattcaaacccgcaacgcccgtaaactaatcgataacatcaccaacgccgattcgatatttcttaataactaatcaccgaaatcgacaaataattacgcctccgacaccaaccacgattctaccgacttacgattacaccgtcacctattccaacctacgaactaaaaaatttccaaaaacgcataaccgtacaaaaaactatcgacaaataaattctccgcgctaacttcaaccataaaaacactatccgccgccgaacgcctaaccgcccacaaaaataccgttactttacgtattaacgcccttaaaaaacaaacataaacaccgtaactattaccgatttaacgctataaaaacgt

SEQ ID NO: 32141 - DNA, 650 bp, Artificial Sequence
  chemically treated genomic DNA (Homo sapiens) CpG-island No: 32141
  unsure (423)
gtcgtattagtcggcgcgtcgtttgggcggtaacggcgatgtttggttgaacgttaacgaatattttattgtcgtggagttttagtttatttagtaaacgtttaatcgttattcggaatgttagtcgaaagcggtgattgaaaattacgcgtaatatgtaggcgtaaaatcggagtaggtgttggttagtcgtggcgcggacgaaggtattgaattgttgattcgcgttttttgcgaatcgggtaaagacgttattttttattgttcgttaacgtacggtatgtatagcgttagcgtcgaaacgattggcgtcgagtgtcgtatagtgtcgacgttggataattggtaattggatttatagggtattttcgataagttggacggcgtaaaagtggtttatgttgtagttttatattcgatcgngtattgattatcgtaggatttcgtattttgttgggagttattcgcggtaggcgattgtggttgtcgatgaatttatatcgagtttttgttcgtaggtatcgttggttgggttgggttgggcggaatattcgtatttggttattttacgtatattgtcgaaagttttttgttttggcgggtttcgttgcggatttacgttggtaaacgaagaagttattaatttgttg

SEQ ID NO: 32142 - DNA, 650 bp, Artificial Sequence
  chemically treated genomic DNA (Homo sapiens) CpG-island No: 32142
  unsure (228)
caacaaattaataacttcttcgtttaccaacgtaaatccgcaacgaaacccgccaaaacaaaaaactttcgacaatatacgtaaaataaccaaatacgaatattccgcccaacccaacccaaccaacgatacctacgaacaaaaactcgatataaattcatcgacaaccacaatcgcctaccgcgaataactcccaacaaaatacgaaatcctacgataatcaatacncgatcgaatataaaactacaacataaaccacttttacgccgtccaacttatcgaaaataccctataaatccaattaccaattatccaacgtcgacactatacgacactcgacgccaatcgtttcgacgctaacgctatacataccgtacgttaacgaacaataaaaaataacgtctttacccgattcgcaaaaaacgcgaatcaacaattcaataccttcgtccgcgccacgactaaccaacacctactccgattttacgcctacatattacgcgtaattttcaatcaccgctttcgactaacattccgaataacgattaaacgtttactaaataaactaaaactccacgacaataaaatattcgttaacgttcaaccaaacatcgccgttaccgcccaaacgacgcgccgactaatacgac

SEQ ID NO: 32143 - DNA, 650 bp, Artificial Sequence
  chemically treated genomic DNA (Homo sapiens) CpG-island No: 32143
  unsure (228)
tagtaggttgatgattttttcgtttgttagcgtaaattcgtaacgaagttcgttagagtaaaaagttttcgatagtgtgcgtaaaatagttaggtgcggatatttcgtttagtttagtttagttagcgatgtttgcgggtaaaaattcgatataggtttatcggtaattataatcgtttatcgcgggtaatttttagtagggtgcgaaattttgcgatgattagtgtncggtcgggtatggggttgtaatataaattatttttacgtcgtttagtttgtcggaaatgttttgtaagtttagttgttagttgtttagcgtcggtattgtgcggtattcgacgttaatcgtttcggcgttgacgttgtatatgtcgtacgttggcgggtagtagaggatggcgtttttattcggttcgtaaaaagcgcgaattagtagtttaatattttcgttcgcgttacggttgattagtatttgtttcggttttacgtttgtatattgcgcgtaatttttaattatcgttttcggttggtatttcgggtagcggttgagcgtttgttgagtaagttgaaattttacggtagtggggtattcgttggcgtttagttagatatcgtcgttatcgtttagacgacgcgtcgattgatacggt

SEQ ID NO: 32144 - DNA, 650 bp, Artificial Sequence
  chemically treated genomic DNA (Homo sapiens) CpG-island No: 32144
  unsure (423)
accgtatcaatcgacgcgtcgtctaaacgataacgacgatatctaactaaacgccaacgaataccccactaccgtaaaatttcaacttactcaacaaacgctcaaccgctacccgaaataccaaccgaaaacgataattaaaaattacgcgcaatatacaaacgtaaaaccgaaacaaatactaatcaaccgtaacgcgaacgaaaatattaaactactaattcgcgctttttacgaaccgaataaaaacgccatcctctactacccgccaacgtacgacatatacaacgtcaacgccgaaacgattaacgtcgaataccgcacaataccgacgctaaacaactaacaactaaacttacaaaacatttccgacaaactaaacgacgtaaaaataatttatattacaaccccatacccgaccgnacactaatcatcgcaaaatttcgcaccctactaaaaattacccgcgataaacgattataattaccgataaacctatatcgaatttttacccgcaaacatcgctaactaaactaaactaaacgaaatatccgcacctaactattttacgcacactatcgaaaactttttactctaacgaacttcgttacgaatttacgctaacaaacgaaaaaatcatcaacctacta

SEQ ID NO: 32145 - DNA, 644 bp, Artificial Sequence
  chemically treated genomic DNA (Homo sapiens) CpG-island No: 32145
attacgtcgtttgttttggcgattatggtttggttttcgtggcgaatatgtagttttttttttagtattatgtcgatttcgtcgtagtttagggtttacgggaagaatgcgtttttttattgtataaaatcggcggttatgttgttgtcgtcgttttcggttataagattagttaagtttacgtaatgcggttttgcgtcgtcgaaacgattaaatttgacgttattgttattaattattttgatgtcgtttttgtcggttatcgatttgaagttcggttgtattgcgttttgttttagcgattgttttttttttattattttttttattagtatgtgcgattaggttttcggtaaattggtttttcggtagttgggtaatgatggtttcgcggatgcgttggttttcggttttgtcggattggtacgttggcgggatacggacgtcgttatcgggatcgatttattatattcggtgatggtaaaatttagtagattcgttattttacgggtatttcggggttataatgttggcgcgtagaattacggatattgtttgttacgtcgacgcgcgtgtgttttacgaatattattcgattgtgatgagtttatttatcgtgtttttttttgttttggtgagagatg

SEQ ID NO: 32146 - DNA, 644 bp, Artificial Sequence
  chemically treated genomic DNA (Homo sapiens) CpG-island No: 32146
catctctcaccaaaacaaaaaaaaacacgataaataaactcatcacaatcgaataatattcgtaaaacacacgcgcgtcgacgtaacaaacaatatccgtaattctacgcgccaacattataaccccgaaatacccgtaaaataacgaatctactaaattttaccatcaccgaatataataaatcgatcccgataacgacgtccgtatcccgccaacgtaccaatccgacaaaaccgaaaaccaacgcatccgcgaaaccatcattacccaactaccgaaaaaccaatttaccgaaaacctaatcgcacatactaataaaaaaaataataaaaaaaaaacaatcgctaaaacaaaacgcaatacaaccgaacttcaaatcgataaccgacaaaaacgacatcaaaataattaataacaataacgtcaaatttaatcgtttcgacgacgcaaaaccgcattacgtaaacttaactaatcttataaccgaaaacgacgacaacaacataaccgccgattttatacaataaaaaaacgcattcttcccgtaaaccctaaactacgacgaaatcgacataatactaaaaaaaaaactacatattcgccacgaaaaccaaaccataatcgccaaaacaaacgacgtaat

SEQ ID NO: 32147 - DNA, 644 bp, Artificial Sequence
  chemically treated genomic DNA (Homo sapiens) CpG-island No: 32147
tattttttattaagataggaggaagtacggtgaataaatttattatagtcgaatgatattcgtgaagtatacgcgcgtcggcgtaataggtaatgttcgtggttttgcgcgttagtattatgatttcggaatgttcgtgaagtggcggatttattgggttttattattatcgaatgtgatgaatcgatttcggtaacggcgttcgtgtttcgttagcgtgttagttcgataaaatcgaaagttagcgtattcgcgaaattattattgtttagttgtcggaaggttagtttatcgaaagtttggtcgtatatgttgatggaaaaagtgatgaaggaaaaatagtcgttggagtagggcgtaatgtagtcgagttttaaatcggtgatcggtaaaggcggtattaaagtgattgatggtagtagcgttaagtttggtcgtttcgacggcgtagagtcgtattgcgtgggtttgattgattttgtgatcggagacgacggtagtagtatggtcgtcggttttatgtagtgggagaacgtatttttttcgtggattttgaattacgacgaaatcgatatggtgttggaaggggagttgtatgttcgttacgaaggttaaattatgatcgttaaagtaggcgacgtgat

SEQ ID NO: 32148 - DNA, 644 bp, Artificial Sequence
  chemically treated genomic DNA (Homo sapiens) CpG-island No: 32148
atcacgtcgcctactttaacgatcataatttaaccttcgtaacgaacatacaactccccttccaacaccatatcgatttcgtcgtaattcaaaatccacgaaaaaaatacgttctcccactacataaaaccgacgaccatactactaccgtcgtctccgatcacaaaatcaatcaaacccacgcaatacgactctacgccgtcgaaacgaccaaacttaacgctactaccatcaatcactttaataccgcctttaccgatcaccgatttaaaactcgactacattacgccctactccaacgactatttttccttcatcactttttccatcaacatatacgaccaaactttcgataaactaaccttccgacaactaaacaataataatttcgcgaatacgctaactttcgattttatcgaactaacacgctaacgaaacacgaacgccgttaccgaaatcgattcatcacattcgataataataaaacccaataaatccgccacttcacgaacattccgaaatcataatactaacgcgcaaaaccacgaacattacctattacgccgacgcgcgtatacttcacgaatatcattcgactataataaatttattcaccgtacttcctcctatcttaataaaaaata

SEQ ID NO: 32149 - DNA, 526 bp, Artificial Sequence
  chemically treated genomic DNA (Homo sapiens) CpG-island No: 32149
cgcgagtggcgttcgtaggcgagttcgtagatcggatcggttttttttcgattatacgtagtttttttatcgttttattttcgtggacgagtttcgcggttgtagtattcgtattggcgtgtcgttttcgttgtggcgatttgttcgcgcgttttacgtcgtagtttttttggcgttgtggttttatgaggcgtggtcgacgacgattcgcgttgtgttcgtagtatagatattagtgtttcgtagtttgcgtgcgtagttcgcgcgtcggtgtcggtatcgttttcgtttcgatgttcgtcgacggacgttcggcgtgggtcggtcggcgttagatttgttagtcggttcggcgttcgtgttggaggtagtgatattgttgttagaataagtagttagatacgatagcgtatatatcgtttcggcgttaggcgtcgaggagaacgttagcgtaacgacgagcgagttttgtttagcgcggtagtagacgaggagtcgggacgattgtgagggtacgaggagagtt

SEQ ID NO: 32150 - DNA, 526 bp, Artificial Sequence
  chemically treated genomic DNA (Homo sapiens) CpG-island No: 32150
aactctcctcgtaccctcacaatcgtcccgactcctcgtctactaccgcgctaaacaaaactcgctcgtcgttacgctaacgttctcctcgacgcctaacgccgaaacgatatatacgctatcgtatctaactacttattctaacaacaatatcactacctccaacacgaacgccgaaccgactaacaaatctaacgccgaccgacccacgccgaacgtccgtcgacgaacatcgaaacgaaaacgataccgacaccgacgcgcgaactacgcacgcaaactacgaaacactaatatctatactacgaacacaacgcgaatcgtcgtcgaccacgcctcataaaaccacaacgccaaaaaaactacgacgtaaaacgcgcgaacaaatcgccacaacgaaaacgacacgccaatacgaatactacaaccgcgaaactcgtccacgaaaataaaacgataaaaaaactacgtataatcgaaaaaaaaccgatccgatctacgaactcgcctacgaacgccactcgcg

SEQ ID NO: 32151 - DNA, 526 bp, Artificial Sequence
  chemically treated genomic DNA (Homo sapiens) CpG-island No: 32151
agtttttttcgtgtttttataatcgtttcggtttttcgtttattgtcgcgttgggtagagttcgttcgtcgttgcgttgacgtttttttcgacgtttggcgtcgagacgatatatacgttgtcgtgtttgattgtttgttttggtagtaatattattgtttttagtacgagcgtcggatcgattggtagatttgacgtcgatcggtttacgtcgggcgttcgtcggcgagtatcggaacggaggcggtatcggtatcgacgcgcgggttacgtacgtagattgcgaggtattgatgtttgtattgcgagtatagcgcgaatcgtcgtcgattacgttttatggggttatagcgttaggagggttacggcgtgaggcgcgcggatagatcgttatagcggggacgatacgttagtgcgagtgttgtagtcgcgaggttcgtttacgagagtagaacggtagggggattacgtgtgatcgaagaggaatcgattcggtttacgggttcgtttgcgagcgttattcgcg

SEQ ID NO: 32152 - DNA, 526 bp, Artificial Sequence
  chemically treated genomic DNA (Homo sapiens) CpG-island No: 32152
cgcgaataacgctcgcaaacgaacccgtaaaccgaatcgattcctcttcgatcacacgtaatccccctaccgttctactctcgtaaacgaacctcgcgactacaacactcgcactaacgtatcgtccccgctataacgatctatccgcgcgcctcacgccgtaaccctcctaacgctataaccccataaaacgtaatcgacgacgattcgcgctatactcgcaatacaaacatcaatacctcgcaatctacgtacgtaacccgcgcgtcgataccgataccgcctccgttccgatactcgccgacgaacgcccgacgtaaaccgatcgacgtcaaatctaccaatcgatccgacgctcgtactaaaaacaataatattactaccaaaacaaacaatcaaacacgacaacgtatatatcgtctcgacgccaaacgtcgaaaaaaacgtcaacgcaacgacgaacgaactctacccaacgcgacaataaacgaaaaaccgaaacgattataaaaacacgaaaaaaact

SEQ ID NO: 32153 - DNA, 1011 bp, Artificial Sequence
  chemically treated genomic DNA (Homo sapiens) CpG-island No: 32153
agtcgcgtttggaaattttgttaagttcggtcgggattcgtcgggtcgtacgaggtggttagcgtcgtcgtcgcgttttcgtcgttttcgtttttttcgttgtcgtgtgttttcggtttcgttttagatacggcgggcgcgggatttagaggattttagtttcggcgtcgtttttcgcggagggattcgaggaagttacgcgcgaatttttggaaggtgatggcgtcgttacggtcggcgtttagtcgttggaatattgtttcggcgtcggtcggtcgtattcgtagtttcgtgtatagtgttcggaatttttcgcgttttaggcgtttcgagcggttcgcgtcgtaggcggcgaagattgagcgtagtcgggttagttttttttcgtttttattcgtttttatttcgtttggcgggggcggtcgagagggtttcggagcgtcgcggggcgtagggttttttttggaaggacggggttatttgttgtcgtcgggaggttcggcgagtttggttcgttcggttggttcggttatttgagggaacgtcgggcggggcgaggaacgtcgggggtggtcgagcggtttttttcgacgacggttcgggttagtttttaataggtttcgggagcggtggggtgcgttcgggttttaggtatcgttaaggagcgttttttgcgattgagcgtttaagcgtcgaggtggttttcgttattttttcggcgggtgtagtttcgtttagttagggaggaggagcgcgcgttatcgtttttttagtttttacgtttcggagtttatcgttgtttgtcgcgtaggtgggggagatttggttggtcggaattgggattcggggggagtattgtttttcggcgtaagcgttgtttaggtagagtttagcgtttcgtttttttatagaacgtgttggcgcgcgcgttagaagttaatcgtatagaggtaaggtaggtaggggtaggatttcgaatgggttaagtgtattttattattttattttcga

SEQ ID NO: 32154 - DNA, 1011 bp, Artificial Sequence
  chemically treated genomic DNA (Homo sapiens) CpG-island No: 32154
tcgaaaataaaataataaaatacacttaacccattcgaaatcctacccctacctaccttacctctatacgattaacttctaacgcgcgcgccaacacgttctataaaaaaacgaaacgctaaactctacctaaacaacgcttacgccgaaaaacaatactccccccgaatcccaattccgaccaaccaaatctcccccacctacgcgacaaacaacgataaactccgaaacgtaaaaactaaaaaaacgataacgcgcgctcctcctccctaactaaacgaaactacacccgccgaaaaaataacgaaaaccacctcgacgcttaaacgctcaatcgcaaaaaacgctccttaacgatacctaaaacccgaacgcaccccaccgctcccgaaacctattaaaaactaacccgaaccgtcgtcgaaaaaaaccgctcgaccacccccgacgttcctcgccccgcccgacgttccctcaaataaccgaaccaaccgaacgaaccaaactcgccgaacctcccgacgacaacaaataaccccgtccttccaaaaaaaaccctacgccccgcgacgctccgaaaccctctcgaccgcccccgccaaacgaaataaaaacgaataaaaacgaaaaaaaactaacccgactacgctcaatcttcgccgcctacgacgcgaaccgctcgaaacgcctaaaacgcgaaaaattccgaacactatacacgaaactacgaatacgaccgaccgacgccgaaacaatattccaacgactaaacgccgaccgtaacgacgccatcaccttccaaaaattcgcgcgtaacttcctcgaatccctccgcgaaaaacgacgccgaaactaaaatcctctaaatcccgcgcccgccgtatctaaaacgaaaccgaaaacacacgacaacgaaaaaaacgaaaacgacgaaaacgcgacgacgacgctaaccacctcgtacgacccgacgaatcccgaccgaacttaacaaaatttccaaacgcgact

SEQ ID NO: 32155 - DNA, 1011 bp, Artificial Sequence
  chemically treated genomic DNA (Homo sapiens) CpG-island No: 32155
tcgggagtaagataataaaatgtatttaatttattcggaattttatttttatttattttatttttgtgcggttagtttttgacgcgcgcgttagtacgttttgtggagaagcggagcgttgggttttatttgagtagcgtttacgtcgaagggtaatgtttttttcgaattttagtttcggttagttaggttttttttatttgcgcggtaagtagcggtggatttcggggcgtgggaattggagaagcggtggcgcgcgttttttttttttggttgggcggagttgtattcgtcgggaaagtggcgagagttatttcggcgtttgggcgtttagtcgtaggaggcgttttttggcggtgtttggagttcgggcgtattttatcgttttcgggatttgttgggggttggttcgaatcgtcgtcgaagggagtcgttcggttattttcgacgtttttcgtttcgttcgacgtttttttaagtggtcgaattagtcggacgagttaaattcgtcgggtttttcggcggtagtaggtggtttcgtttttttagggagggttttgcgtttcgcggcgtttcggagttttttcggtcgttttcgttaggcgggatggaggcggatggggacggagaggagttggttcggttgcgtttagttttcgtcgtttgcgacgcgaatcgttcggggcgtttggagcgcgaggagtttcgggtattgtgtacggagttgcgggtgcggtcggtcgacgtcgaggtagtattttagcggttggacgtcgatcgtgacggcgttattattttttaggagttcgcgcgtggttttttcgggttttttcgcggggggcggcgtcgggattggggttttttggatttcgcgttcgtcgtgtttgaggcggggtcggagatatacgatagcgaggaggacgaaggcgacgaggacgcggcggcggcgttggttatttcgtgcggttcggcgagtttcggtcgggtttggtaggatttttaggcgcgatt

SEQ ID NO: 32156 - DNA, 1011 bp, Artificial Sequence
  chemically treated genomic DNA (Homo sapiens) CpG-island No: 32156
aatcgcgcctaaaaatcctaccaaacccgaccgaaactcgccgaaccgcacgaaataaccaacgccgccgccgcgtcctcgtcgccttcgtcctcctcgctatcgtatatctccgaccccgcctcaaacacgacgaacgcgaaatccaaaaaaccccaatcccgacgccgccccccgcgaaaaaacccgaaaaaaccacgcgcgaactcctaaaaaataataacgccgtcacgatcgacgtccaaccgctaaaatactacctcgacgtcgaccgaccgcacccgcaactccgtacacaatacccgaaactcctcgcgctccaaacgccccgaacgattcgcgtcgcaaacgacgaaaactaaacgcaaccgaaccaactcctctccgtccccatccgcctccatcccgcctaacgaaaacgaccgaaaaaactccgaaacgccgcgaaacgcaaaaccctccctaaaaaaacgaaaccacctactaccgccgaaaaacccgacgaatttaactcgtccgactaattcgaccacttaaaaaaacgtcgaacgaaacgaaaaacgtcgaaaataaccgaacgactcccttcgacgacgattcgaaccaacccccaacaaatcccgaaaacgataaaatacgcccgaactccaaacaccgccaaaaaacgcctcctacgactaaacgcccaaacgccgaaataactctcgccactttcccgacgaatacaactccgcccaaccaaaaaaaaaaaacgcgcgccaccgcttctccaattcccacgccccgaaatccaccgctacttaccgcgcaaataaaaaaaacctaactaaccgaaactaaaattcgaaaaaaacattacccttcgacgtaaacgctactcaaataaaacccaacgctccgcttctccacaaaacgtactaacgcgcgcgtcaaaaactaaccgcacaaaaataaaataaataaaaataaaattccgaataaattaaatacattttattatcttactcccga

SEQ ID NO: 32157 - DNA, 528 bp, Artificial Sequence
  chemically treated genomic DNA (Homo sapiens) CpG-island No: 32157
ttttggcgcgcgaatggaggagtcgagaagagagcgtagttttgattggagaacgcgcgtgtttatatttttatttttttcgggaagtggacgaatttagatcgttttttttttttcgttgtttaaggtagttggttgtttttttgttcgttagaggtgtagtattagaggtggcgtgttgtcgatttcgcgtttgttttgttggatgatttcgtttgtttgtcggttgcgtgagtgtttagagtttttcggtggaagatgtcggatagtaatttcgtagagcgtagcgaggagtaggtgtttggtgttaaagttatcgtttaggttttgaaaacgtaagtacgatggatttttttggaatgaaaggtttttacggaagttggcggggatcgcgatgttgttttggagacgagtagaaatgggcgatgggggtcggggggttttttttttagcgttcgggagggagggaaggatgtggcgatatggtggggttttgggagtttatttttttgtttttcgttttttagg

SEQ ID NO: 32158 - DNA, 528 bp, Artificial Sequence
  chemically treated genomic DNA (Homo sapiens) CpG-island No: 32158
cctaaaaaacgaaaaacaaaaaaataaactcccaaaaccccaccatatcgccacatccttccctccctcccgaacgctaaaaaaaaaaccccccgacccccatcgcccatttctactcgtctccaaaacaacatcgcgatccccgccaacttccgtaaaaacctttcattccaaaaaaatccatcgtacttacgttttcaaaacctaaacgataactttaacaccaaacacctactcctcgctacgctctacgaaattactatccgacatcttccaccgaaaaactctaaacactcacgcaaccgacaaacaaacgaaatcatccaacaaaacaaacgcgaaatcgacaacacgccacctctaatactacacctctaacgaacaaaaaaacaaccaactaccttaaacaacgaaaaaaaaaaaacgatctaaattcgtccacttcccgaaaaaaataaaaatataaacacgcgcgttctccaatcaaaactacgctctcttctcgactcctccattcgcgcgccaaaa

SEQ ID NO: 32159 - DNA, 528 bp, Artificial Sequence
  chemically treated genomic DNA (Homo sapiens) CpG-island No: 32159
tttgaggaacgaagaataggggagtaaatttttaaggttttattatatcgttatatttttttttttttttcgggcgttaaaaggaaaatttttcgatttttatcgtttatttttattcgtttttaagataatatcgcggttttcgttagttttcgtaggagttttttattttaggaaggtttatcgtatttgcgtttttagggtttgagcgatgattttagtattagatatttgtttttcgttgcgttttgcgaagttattgttcggtattttttatcgaaaagttttaagtatttacgtagtcggtaaataagcggaattatttagtaaggtaaacgcgaaatcggtagtacgttatttttggtattgtatttttgacggataggagggtaattaattgttttaaataacgggaaggaagaggcggtttaaattcgtttatttttcgggagaggtgagaatgtaaatacgcgcgttttttaattagaattgcgtttttttttcggtttttttattcgcgcgttagaa

SEQ ID NO: 32160 - DNA, 528 bp, Artificial Sequence
  chemically treated genomic DNA (Homo sapiens) CpG-island No: 32160
ttctaacgcgcgaataaaaaaaccgaaaaaaaaacgcaattctaattaaaaaacgcgcgtatttacattctcacctctcccgaaaaataaacgaatttaaaccgcctcttccttcccgttatttaaaacaattaattaccctcctatccgtcaaaaatacaataccaaaaataacgtactaccgatttcgcgtttaccttactaaataattccgcttatttaccgactacgtaaatacttaaaacttttcgataaaaaataccgaacaataacttcgcaaaacgcaacgaaaaacaaatatctaatactaaaatcatcgctcaaaccctaaaaacgcaaatacgataaaccttcctaaaataaaaaactcctacgaaaactaacgaaaaccgcgatattatcttaaaaacgaataaaaataaacgataaaaatcgaaaaattttccttttaacgcccgaaaaaaaaaaaaaaatataacgatataataaaaccttaaaaatttactcccctattcttcgttcctcaaa

SEQ ID NO: 32161 - DNA, 711 bp, Artificial Sequence
  chemically treated genomic DNA (Homo sapiens) CpG-island No: 32161
gttttcgtttcggtcgcggtcgtcgttagggtattcggggttagcgtcgtttgtaggtcgcgttcgtttatcggtatgttgcggcggtgtagcggcggggcggggttttagggtgtgttgtttcgacggcgttcgcgtttttggtttttatcgcggttttcgttcgtttcgttgtcgtcgtcgtttagggttatcgcgttcgggatcgtttaggggattaggaattcgagtggtcgtgtaagtcgcgagggaggcgggattcggggcgtatttgtttaattcggagttaggcgggatgtttcggtcgaggtttcgtcgtagtttttttttagtttttaggtcgcggcgtttttattcgggattttttcggatttggcgtatttatttgtagtcgtttcgatttcgtttcgttaggatatttatttattcgtatatagatacgtttaggattaggattcggattaggaggttacgtattcgtagttcggattcggattttagggttttcgtcgtcgttgttgttgtagttatcgtttttttagttcgtattgggttttggttttagagtcgtttatttaagtttttattcgttttcgttttcgttttcggtttacgttgttgcgggggttgacgtgtttgtttatttttattaggggaattttttattttttttttcggattttatattttcgatatttcgttttattcgtt

SEQ ID NO: 32162 - DNA, 711 bp, Artificial Sequence
  chemically treated genomic DNA (Homo sapiens) CpG-island No: 32162
aacgaataaaacgaaatatcgaaaatataaaatccgaaaaaaaaaataaaaaattcccctaataaaaataaacaaacacgtcaacccccgcaacaacgtaaaccgaaaacgaaaacgaaaacgaataaaaacttaaataaacgactctaaaaccaaaacccaatacgaactaaaaaaacgataactacaacaacaacgacgacgaaaaccctaaaatccgaatccgaactacgaatacgtaacctcctaatccgaatcctaatcctaaacgtatctatatacgaataaataaatatcctaacgaaacgaaatcgaaacgactacaaataaatacgccaaatccgaaaaaatcccgaataaaaacgccgcgacctaaaaactaaaaaaaaactacgacgaaacctcgaccgaaacatcccgcctaactccgaattaaacaaatacgccccgaatcccgcctccctcgcgacttacacgaccactcgaattcctaatcccctaaacgatcccgaacgcgataaccctaaacgacgacgacaacgaaacgaacgaaaaccgcgataaaaaccaaaaacgcgaacgccgtcgaaacaacacaccctaaaaccccgccccgccgctacaccgccgcaacataccgataaacgaacgcgacctacaaacgacgctaaccccgaataccctaacgacgaccgcgaccgaaacgaaaac

SEQ ID NO: 32163 - DNA, 711 bp, Artificial Sequence
  chemically treated genomic DNA (Homo sapiens) CpG-island No: 32163
ggcgggtagggcggggtgtcggggatgtaaggttcgaggaagagggtgggggatttttttggtgggggtggatagatacgttagttttcgtagtagcgtggatcgggggcgggagcgggggcgggtggaggtttaaataggcggttttggagttagagtttagtgcgggttgagaaggcggtggttgtagtagtagcggcggcggaaattttaaagttcgagttcggattacgagtgcgtggttttttaattcggattttagttttgagcgtgtttgtgtgcgagtgggtgagtgttttggcggagcggggtcggggcggttgtagatggatgcgttaggttcggaggggtttcgggtgagggcgtcgcgatttgggggttgggggagggttgcggcgggatttcggtcggagtatttcgtttgatttcgggttgggtaggtgcgtttcgggtttcgtttttttcgcggtttatacggttattcgggtttttgattttttagacggtttcggacgcgatgattttgaacggcggcggtagcggagcgggcgggagtcgcggtgggggttaggagcgcgagcgtcgtcggggtagtatattttggggtttcgtttcgtcgttgtatcgtcgtagtatgtcggtggacgagcgcgatttgtaggcggcgttgatttcgggtgttttgacggcggtcgcggtcgggacggggat

SEQ ID NO: 32164 - DNA, 711 bp, Artificial Sequence
  chemically treated genomic DNA (Homo sapiens) CpG-island No: 32164
atccccgtcccgaccgcgaccgccgtcaaaacacccgaaatcaacgccgcctacaaatcgcgctcgtccaccgacatactacgacgatacaacgacgaaacgaaaccccaaaatatactaccccgacgacgctcgcgctcctaacccccaccgcgactcccgcccgctccgctaccgccgccgttcaaaatcatcgcgtccgaaaccgtctaaaaaatcaaaaacccgaataaccgtataaaccgcgaaaaaaacgaaacccgaaacgcacctacccaacccgaaatcaaacgaaatactccgaccgaaatcccgccgcaaccctcccccaacccccaaatcgcgacgccctcacccgaaacccctccgaacctaacgcatccatctacaaccgccccgaccccgctccgccaaaacactcacccactcgcacacaaacacgctcaaaactaaaatccgaattaaaaaaccacgcactcgtaatccgaactcgaactttaaaatttccgccgccgctactactacaaccaccgccttctcaacccgcactaaactctaactccaaaaccgcctatttaaacctccacccgcccccgctcccgcccccgatccacgctactacgaaaactaacgtatctatccacccccaccaaaaaaatcccccaccctcttcctcgaaccttacatccccgacaccccgccctacccgcc

SEQ ID NO: 32165 - DNA, 509 bp, Artificial Sequence
  chemically treated genomic DNA (Homo sapiens) CpG-island No: 32165
attcgttcgcgtttagtagcggcggatatcgaagatttcgcgtgcgtcgatgttgtcgggaatttgttcgtttttttcgtttgtcgttataggtcgttttttagagcgttggtagatgagggggttggtattttttaggaggtcgtcgtcgatttcgtcgtcgtttattatcgcggaattattatcgttgattttagtaggcgtgcgttttcgttttaattcgcgtattttcggagaacgggaagggggcgtggcgtggcgacggagtcgcgcgagggatacgtcgcgttgtgggttttcggtttgaggtgcgagagaagcggtgatcgcggttttggttgttcggattcgggaatatgatggtcgttggagtagaaggcgttgagaagggattacggcggcgttgggtcgtgcgagttagtagcgggttgaaacgtagaggttagaattaggttttagggggtattaaaggcggtcggaggtaatttttatatcgtttttttttggaa

SEQ ID NO: 32166 - DNA, 509 bp, Artificial Sequence
  chemically treated genomic DNA (Homo sapiens) CpG-island No: 32166
ttccaaaaaaaaacgatataaaaattacctccgaccgcctttaataccccctaaaacctaattctaacctctacgtttcaacccgctactaactcgcacgacccaacgccgccgtaatcccttctcaacgccttctactccaacgaccatcatattcccgaatccgaacaaccaaaaccgcgatcaccgcttctctcgcacctcaaaccgaaaacccacaacgcgacgtatccctcgcgcgactccgtcgccacgccacgcccccttcccgttctccgaaaatacgcgaattaaaacgaaaacgcacgcctactaaaatcaacgataataattccgcgataataaacgacgacgaaatcgacgacgacctcctaaaaaataccaaccccctcatctaccaacgctctaaaaaacgacctataacgacaaacgaaaaaaacgaacaaattcccgacaacatcgacgcacgcgaaatcttcgatatccgccgctactaaacgcgaacgaat

SEQ ID NO: 32167 - DNA, 509 bp, Artificial Sequence
  chemically treated genomic DNA (Homo sapiens) CpG-island No: 32167
ttttaggaggaagcggtgtggggattattttcgatcgtttttagtgttttttgagatttggttttggtttttacgttttagttcgttattggttcgtacgatttagcgtcgtcgtggtttttttttagcgttttttgttttagcgattattatgttttcgggttcgagtagttagggtcgcggttatcgtttttttcgtattttaggtcgagaatttataacgcggcgtgtttttcgcgcgatttcgtcgttacgttacgtttttttttcgtttttcggaagtgcgcgggttggagcggaagcgtacgtttgttaggattagcggtggtggtttcgcgatggtaggcggcggcggggtcggcggcggttttttggagaatgttaatttttttatttattagcgttttggggagcggtttgtgacggtaggcgaggaggacgagtaggttttcgatagtatcgacgtacgcgagattttcgatattcgtcgttgttgggcgcgggcgggt

SEQ ID NO: 32168 - DNA, 509 bp, Artificial Sequence
  chemically treated genomic DNA (Homo sapiens) CpG-island No: 32168
acccgcccgcgcccaacaacgacgaatatcgaaaatctcgcgtacgtcgatactatcgaaaacctactcgtcctcctcgcctaccgtcacaaaccgctccccaaaacgctaataaataaaaaaattaacattctccaaaaaaccgccgccgaccccgccgccgcctaccatcgcgaaaccaccaccgctaatcctaacaaacgtacgcttccgctccaacccgcgcacttccgaaaaacgaaaaaaaaacgtaacgtaacgacgaaatcgcgcgaaaaacacgccgcgttataaattctcgacctaaaatacgaaaaaaacgataaccgcgaccctaactactcgaacccgaaaacataataatcgctaaaacaaaaaacgctaaaaaaaaaccacgacgacgctaaatcgtacgaaccaataacgaactaaaacgtaaaaaccaaaaccaaatctcaaaaaacactaaaaacgatcgaaaataatccccacaccgcttcctcctaaaa

SEQ ID NO: 32169 - DNA, 503 bp, Artificial Sequence
  chemically treated genomic DNA (Homo sapiens) CpG-island No: 32169
acgtgcgtaaatattttgttcggtgtagatatttagatatatgtttgcgtttttaagtgttttttttttttacgtatcggtcgagaaggtagttcggttatttttgcggggaaatttttttcgggggatattgcgtttttgttacgcggagtttcgttttttcgaggttttcgtttatttgtcgtgcgcgtttttcgtagatattcgcgtatagcgtttcgcggcgttcgtttttcgttgttttgggttatttttacgcgttgcgtacgttcggggcgagtgagtgagagtttgggtttgggtttgagcgggttgggtaattaggggtttcgcggaggaggcggtaggatatagtcgttaggtcgtttgttggcggcggggttattcggggcgtagcgcggattttgcgtttggcgcgggggattaaggtttgggttaagttcgggggtcgggatgggaagaggggtttcgtttagtttggagtgtgggagtttttcggtttg

SEQ ID NO: 32170 - DNA, 503 bp, Artificial Sequence
  chemically treated genomic DNA (Homo sapiens) CpG-island No: 32170
caaaccgaaaaactcccacactccaaactaaacgaaacccctcttcccatcccgacccccgaacttaacccaaaccttaatcccccgcgccaaacgcaaaatccgcgctacgccccgaataaccccgccgccaacaaacgacctaacgactatatcctaccgcctcctccgcgaaacccctaattacccaacccgctcaaacccaaacccaaactctcactcactcgccccgaacgtacgcaacgcgtaaaaataacccaaaacaacgaaaaacgaacgccgcgaaacgctatacgcgaatatctacgaaaaacgcgcacgacaaataaacgaaaacctcgaaaaaacgaaactccgcgtaacaaaaacgcaatatcccccgaaaaaaatttccccgcaaaaataaccgaactaccttctcgaccgatacgtaaaaaaaaaaaacacttaaaaacgcaaacatatatctaaatatctacaccgaacaaaatatttacgcacgt

SEQ ID NO: 32171 - DNA, 503 bp, Artificial Sequence
  chemically treated genomic DNA (Homo sapiens) CpG-island No: 32171
tagatcggaaagtttttatattttaggttgggcgggatttttttttttatttcggttttcgaatttggtttaagttttggtttttcgcgttagacgtaaagttcgcgttgcgtttcgggtggtttcgtcgttagtaagcgatttggcggttgtgttttgtcgtttttttcgcgaagtttttgattgtttagttcgtttagatttaggtttagatttttatttattcgtttcgggcgtgcgtagcgcgtgggggtggtttagggtagcggggggcgggcgtcgcggagcgttgtgcgcgggtgtttgcggggagcgcgtacggtaagtgagcggggatttcgggggagcggggtttcgcgtggtaagggcgtagtgtttttcggagagaattttttcgtagaagtggtcgagttgttttttcggtcggtacgtgagggaagggggtatttgggggcgtaagtatgtgtttgggtgtttatatcgagtagggtgtttgcgtacgt

SEQ ID NO: 32172 - DNA, 503 bp, Artificial Sequence
  chemically treated genomic DNA (Homo sapiens) CpG-island No: 32172
acgtacgcaaacaccctactcgatataaacacccaaacacatacttacgcccccaaatacccccttccctcacgtaccgaccgaaaaaacaactcgaccacttctacgaaaaaattctctccgaaaaacactacgcccttaccacgcgaaaccccgctcccccgaaatccccgctcacttaccgtacgcgctccccgcaaacacccgcgcacaacgctccgcgacgcccgccccccgctaccctaaaccacccccacgcgctacgcacgcccgaaacgaataaataaaaatctaaacctaaatctaaacgaactaaacaatcaaaaacttcgcgaaaaaaacgacaaaacacaaccgccaaatcgcttactaacgacgaaaccacccgaaacgcaacgcgaactttacgtctaacgcgaaaaaccaaaacttaaaccaaattcgaaaaccgaaataaaaaaaaaaatcccgcccaacctaaaatataaaaactttccgatcta

SEQ ID NO: 32173 - DNA, 578 bp, Artificial Sequence
  chemically treated genomic DNA (Homo sapiens) CpG-island No: 32173
ttttacgattttttttattgtttgatagttagttaatagcgtgttaggattttaggacgcgcgatggcgtaagttttaacgttcgcgtgatgacgtaagaggcgttatcgtttttaaggagtggttcggggtatcggttttaaagtcgtagggcgggtcgagtggattttcgttgttggtttggggttttttagtcgttttggcgttgttttttttaattttcgtcgtttcgcgtagaacgtcgtttttaggttgtcgttaagttttcgcggtatttttttaggtggttcgacgagatttagagtgattcgcgggacgtttgtatcgatcgcgttttttttttattagcgtgggattcggttgaacgtggagtttttagtaatttttagttttttattagggttagggattcgtttggggcgcgggggaaagaagcgtggcggggttgtagatgtcgcgtgagtaggatgtagattgtatcgttggagcgtttgataattaatcgagcgttggtttagttttgttttttcgtatagtaagttttttgttttttagaggaaggtaaaggtggtgaaagt

SEQ ID NO: 32174 - DNA, 578 bp, Artificial Sequence
  chemically treated genomic DNA (Homo sapiens) CpG-island No: 32174
actttcaccacctttaccttcctctaaaaaacaaaaaacttactatacgaaaaaacaaaactaaaccaacgctcgattaattatcaaacgctccaacgatacaatctacatcctactcacgcgacatctacaaccccgccacgcttctttcccccgcgccccaaacgaatccctaaccctaataaaaaactaaaaattactaaaaactccacgttcaaccgaatcccacgctaataaaaaaaaaacgcgatcgatacaaacgtcccgcgaatcactctaaatctcgtcgaaccacctaaaaaaataccgcgaaaacttaacgacaacctaaaaacgacgttctacgcgaaacgacgaaaattaaaaaaaacaacgccaaaacgactaaaaaaccccaaaccaacaacgaaaatccactcgacccgccctacgactttaaaaccgataccccgaaccactccttaaaaacgataacgcctcttacgtcatcacgcgaacgttaaaacttacgccatcgcgcgtcctaaaatcctaacacgctattaactaactatcaaacaataaaaaaaatcgtaaaa

SEQ ID NO: 32175 - DNA, 578 bp, Artificial Sequence
  chemically treated genomic DNA (Homo sapiens) CpG-island No: 32175
gtttttattatttttatttttttttgaaagatagagagtttgttgtgcgggaaaataaaattaagttaacgttcggttggttgttaagcgttttagcggtgtaatttgtattttatttacgcggtatttatagtttcgttacgtttttttttttcgcgttttagacgagtttttggttttggtgagagattgaagattgttggggattttacgtttaatcgaattttacgttggtgggaagaggacgcggtcgatataggcgtttcgcgggttattttgggtttcgtcgggttatttaggagagtgtcgcgggagtttgacggtagtttgagagcggcgttttacgcggagcggcgggggttggagaggataacgttaagacggttgggaagttttaggttagtagcggaagtttattcggttcgttttgcgattttgaaatcggtgtttcggattattttttggagacggtggcgttttttgcgttattacgcgggcgttggagtttacgttatcgcgcgttttagagttttagtacgttattggttggttgttaagtaatgggaggagtcgtgaga

SEQ ID NO: 32176 - DNA, 578 bp, Artificial Sequence
  chemically treated genomic DNA (Homo sapiens) CpG-island No: 32176
tctcacgactcctcccattacttaacaaccaaccaataacgtactaaaactctaaaacgcgcgataacgtaaactccaacgcccgcgtaataacgcaaaaaacgccaccgtctccaaaaaataatccgaaacaccgatttcaaaatcgcaaaacgaaccgaataaacttccgctactaacctaaaacttcccaaccgtcttaacgttatcctctccaacccccgccgctccgcgtaaaacgccgctctcaaactaccgtcaaactcccgcgacactctcctaaataacccgacgaaacccaaaataacccgcgaaacgcctatatcgaccgcgtcctcttcccaccaacgtaaaattcgattaaacgtaaaatccccaacaatcttcaatctctcaccaaaaccaaaaactcgtctaaaacgcgaaaaaaaaaaacgtaacgaaactataaataccgcgtaaataaaatacaaattacaccgctaaaacgcttaacaaccaaccgaacgttaacttaattttattttcccgcacaacaaactctctatctttcaaaaaaaaataaaaataataaaaac

SEQ ID NO: 32177 - DNA, 591 bp, Artificial Sequence
  chemically treated genomic DNA (Homo sapiens) CpG-island No: 32177
cgtttacgttcgttagtgattttttgtaattttttcgggcgtagtttaattttgcgttttttaatatgaatggttagcgtgttttgcggcggtagaacgtataattgcgttagattattttttttacgcgcggtttttgtcgatggaatgttgataattttgttgtttttgtttttcgatagttgcggtagattatttatcgggaatattaatatacggtttgtttgagtgattgttagtagtatatcggaagtatttttaattattatcggcggtataatatgggtatttttcggtaaggtgattaaagttttatttgtacggttacgcgttattagatcgttaaaggtgtagacgaaatcgtaattcgtatcggaagttattagtagtttttgatcgtcgttttttattagtatatggttaacggtcgttttaggcggtaacgttaatttgtcggtgagcggttcgttttgattacgcgtcgacggtagcgtaatcgggttaatggtatagttacgatcggtggaatttataaatattatcggttggttgtttttattttttatcgtcgttttgaagttattattcgtt

SEQ ID NO: 32178 - DNA, 591 bp, Artificial Sequence
  chemically treated genomic DNA (Homo sapiens) CpG-island No: 32178
aacgaataataacttcaaaacgacgataaaaaataaaaacaaccaaccgataatatttataaattccaccgatcgtaactataccattaacccgattacgctaccgtcgacgcgtaatcaaaacgaaccgctcaccgacaaattaacgttaccgcctaaaacgaccgttaaccatatactaataaaaaacgacgatcaaaaactactaataacttccgatacgaattacgatttcgtctacacctttaacgatctaataacgcgtaaccgtacaaataaaactttaatcaccttaccgaaaaatacccatattataccgccgataataattaaaaatacttccgatatactactaacaatcactcaaacaaaccgtatattaatattcccgataaataatctaccgcaactatcgaaaaacaaaaacaacaaaattatcaacattccatcgacaaaaaccgcgcgtaaaaaaaataatctaacgcaattatacgttctaccgccgcaaaacacgctaaccattcatattaaaaaacgcaaaattaaactacgcccgaaaaaattacaaaaaatcactaacgaacgtaaacg

SEQ ID NO: 32179 - DNA, 591 bp, Artificial Sequence
  chemically treated genomic DNA (Homo sapiens) CpG-island No: 32179
agcgggtgatagttttaaagcggcggtgaaaggtaagagtaattaatcggtagtgtttgtagattttatcggtcgtagttatgttattgattcgattacgttgtcgtcggcgcgtggttagggcgagtcgtttatcggtaaattaacgttgtcgtttggggcgatcgttgattatatgttgatggaaagcgacgattagaaattgttgatggttttcgatgcgggttacggtttcgtttgtatttttaacgatttggtggcgcgtaatcgtgtaggtaaggttttgattattttatcggaaaatgtttatgttatgtcgtcggtggtgattgaagatgttttcgatatgttgttggtaattatttaggtaggtcgtatgttgatgttttcggtaagtgatttgtcgtagttgtcgaagggtaaaggtaataagattattaatattttatcggtagaagtcgcgcgtggagaagatggtttggcgtaattgtacgttttgtcgtcgtaaagtacgttgattatttatgttgggaaacgtaaaattaaattgcgttcggaagagttatagaaagttattggcgaacgtggacg

SEQ ID NO: 32180 - DNA, 591 bp, Artificial Sequence
  chemically treated genomic DNA (Homo sapiens) CpG-island No: 32180
cgtccacgttcgccaataactttctataactcttccgaacgcaatttaattttacgtttcccaacataaataatcaacgtactttacgacgacaaaacgtacaattacgccaaaccatcttctccacgcgcgacttctaccgataaaatattaataatcttattacctttacccttcgacaactacgacaaatcacttaccgaaaacatcaacatacgacctacctaaataattaccaacaacatatcgaaaacatcttcaatcaccaccgacgacataacataaacattttccgataaaataatcaaaaccttacctacacgattacgcgccaccaaatcgttaaaaatacaaacgaaaccgtaacccgcatcgaaaaccatcaacaatttctaatcgtcgctttccatcaacatataatcaacgatcgccccaaacgacaacgttaatttaccgataaacgactcgccctaaccacgcgccgacgacaacgtaatcgaatcaataacataactacgaccgataaaatctacaaacactaccgattaattactcttacctttcaccgccgctttaaaactatcacccgct

SEQ ID NO: 32181 - DNA, 602 bp, Artificial Sequence
  chemically treated genomic DNA (Homo sapiens) CpG-island No: 32181
gggcggggtcggttcgtagtggttagttgggagttacgagcgcggagtttgcgtagaagatttttattagggtgcggggtgtagttgcggttttagggttatggcggaggagtagggtcgggaacgggattcggtttttaagtcgtcggtgttgtttttttatttagatttgggcgtgggcggcgttgagcggttggtgttggacgcggcgttggcgttgtaggcgcgcgggtgtagcgtgaagatttggatagcgtattacgattcgggttattgtttcgtcgagagtcgcgagttatcggtgcgttgtgtcggggattggttgtcgcgaggtttgggttggggcggtcgcggcgtcgtcgtttgcgtttacgtgcgtatggtttttttggcgttttacgtgttgtttttcgtcgacgaggagttcgacgtggtagtgtgcgattaggtgaggcggtcgcggggtcggttgcgcgagtgcggatttcgtcgtggagggcggtcgcgggtatgatttttgagagaagattttttttgtttgcggttcgtaaagatcggaattgatatggagaagttagggttgtgagcgagtttgtggtttt

SEQ ID NO: 32182 - DNA, 602 bp, Artificial Sequence
  chemically treated genomic DNA (Homo sapiens) CpG-island No: 32182
aaaaccacaaactcgctcacaaccctaacttctccatatcaattccgatctttacgaaccgcaaacaaaaaaaatcttctctcaaaaatcatacccgcgaccgccctccacgacgaaatccgcactcgcgcaaccgaccccgcgaccgcctcacctaatcgcacactaccacgtcgaactcctcgtcgacgaaaaacaacacgtaaaacgccaaaaaaaccatacgcacgtaaacgcaaacgacgacgccgcgaccgccccaacccaaacctcgcgacaaccaatccccgacacaacgcaccgataactcgcgactctcgacgaaacaataacccgaatcgtaatacgctatccaaatcttcacgctacacccgcgcgcctacaacgccaacgccgcgtccaacaccaaccgctcaacgccgcccacgcccaaatctaaataaaaaaacaacaccgacgacttaaaaaccgaatcccgttcccgaccctactcctccgccataaccctaaaaccgcaactacaccccgcaccctaataaaaatcttctacgcaaactccgcgctcgtaactcccaactaaccactacgaaccgaccccgccc

SEQ ID NO: 32183 - DNA, 602 bp, Artificial Sequence
  chemically treated genomic DNA (Homo sapiens) CpG-island No: 32183
agaattataggttcgtttataattttgatttttttatgttagtttcgatttttgcgaatcgtagatagggaaggtttttttttaggggttatgttcgcggtcgttttttacggcgaggttcgtattcgcgtagtcggtttcgcggtcgttttatttggtcgtatattattacgtcgaatttttcgtcggcgaggaatagtacgtagagcgttaggaaaattatgcgtacgtaggcgtagacggcggcgtcgcggtcgttttagtttaggtttcgcggtagttagttttcggtatagcgtatcggtagttcgcggttttcggcgaaatagtggttcgggtcgtagtgcgttgtttagatttttacgttatattcgcgcgtttgtagcgttagcgtcgcgtttaatattagtcgtttagcgtcgtttacgtttaggtttgggtggaggaatagtatcgacggtttgggaatcgagtttcgttttcggttttgttttttcgttatggttttggagtcgtaattgtatttcgtattttgatgggggttttttgcgtaagtttcgcgttcgtagtttttagttggttattgcgggtcgatttcgttt

SEQ ID NO: 32184 - DNA, 602 bp, Artificial Sequence
  chemically treated genomic DNA (Homo sapiens) CpG-island No: 32184
aaacgaaatcgacccgcaataaccaactaaaaactacgaacgcgaaacttacgcaaaaaacccccatcaaaatacgaaatacaattacgactccaaaaccataacgaaaaaacaaaaccgaaaacgaaactcgattcccaaaccgtcgatactattcctccacccaaacctaaacgtaaacgacgctaaacgactaatattaaacgcgacgctaacgctacaaacgcgcgaatataacgtaaaaatctaaacaacgcactacgacccgaaccactatttcgccgaaaaccgcgaactaccgatacgctataccgaaaactaactaccgcgaaacctaaactaaaacgaccgcgacgccgccgtctacgcctacgtacgcataattttcctaacgctctacgtactattcctcgccgacgaaaaattcgacgtaataatatacgaccaaataaaacgaccgcgaaaccgactacgcgaatacgaacctcgccgtaaaaaacgaccgcgaacataacccctaaaaaaaaaccttccctatctacgattcgcaaaaatcgaaactaacataaaaaaatcaaaattataaacgaacctataattct

SEQ ID NO: 32185 - DNA, 553 bp, Artificial Sequence
  chemically treated genomic DNA (Homo sapiens) CpG-island No: 32185
ttgaaagtcgatttcgaagtcgggtttggggtcgtgggaattttttcggttttagttattttttcgcggtagttataatattcggggtcgtggttcgataagttataataatagtaattgcgtagatgcgcgattcggcgggggaggtggtttcgtattatagcgcgtttgcgcgtaggtttaagtaggcgtttatttagaggggagggaggacgtcgtatttcgtttttattgaggcgcggagtcggattcggaggcgtcgagtcgtattcggagtcgcgtacgcgtaatttgtatgaacgaaggttagtgtttaaagacgtgttatttattgttagaattcgatttttattggagcggaggaagttcgtgggtggagttggttgtttggcgtttgcgttttgcggcgagcgggttggcgtgcggcgtcgttgcgggcgggagcggttgtaacgtcggtgtttgaggagcgatgtcgagggaaattattattttatagttgggttagtgcggtaattagagtgagcgaaatttcggttttttagttagttag

SEQ ID NO: 32186 - DNA, 553 bp, Artificial Sequence
  chemically treated genomic DNA (Homo sapiens) CpG-island No: 32186
ctaactaactaaaaaaccgaaatttcgctcactctaattaccgcactaacccaactataaaataataatttccctcgacatcgctcctcaaacaccgacgttacaaccgctcccgcccgcaacgacgccgcacgccaacccgctcgccgcaaaacgcaaacgccaaacaaccaactccacccacgaacttcctccgctccaataaaaatcgaattctaacaataaataacacgtctttaaacactaaccttcgttcatacaaattacgcgtacgcgactccgaatacgactcgacgcctccgaatccgactccgcgcctcaataaaaacgaaatacgacgtcctccctcccctctaaataaacgcctacttaaacctacgcgcaaacgcgctataatacgaaaccacctcccccgccgaatcgcgcatctacgcaattactattattataacttatcgaaccacgaccccgaatattataactaccgcgaaaaaataactaaaaccgaaaaaattcccacgaccccaaacccgacttcgaaatcgactttcaa

SEQ ID NO: 32187 - DNA, 553 bp, Artificial Sequence
  chemically treated genomic DNA (Homo sapiens) CpG-island No: 32187
ttggttagttgaggggtcggagtttcgtttattttgattgtcgtattggtttaattgtagggtgatgatttttttcggtatcgttttttaggtatcggcgttgtagtcgttttcgttcgtaacggcgtcgtacgttagttcgttcgtcgtaagacgtaggcgttaaataattagttttatttacgaatttttttcgttttaatgagaatcgagttttggtaatgaatggtacgtttttaagtattggttttcgtttatgtagattgcgcgtgcgcggtttcggatgcggttcggcgttttcggattcggtttcgcgttttagtgagggcggggtacggcgtttttttttttttttgggtgggcgtttgtttgggtttgcgcgtaagcgcgttgtggtgcgaagttatttttttcgtcgaatcgcgtatttgcgtagttgttgttattgtgatttgtcgggttacggtttcggatgttgtggttgtcgcggggagatggttgaggtcgaaggggtttttacgattttaggttcggtttcggggtcgatttttag

SEQ ID NO: 32188 - DNA, 553 bp, Artificial Sequence
  chemically treated genomic DNA (Homo sapiens) CpG-island No: 32188
ctaaaaatcgaccccgaaaccgaacctaaaatcgtaaaaaccccttcgacctcaaccatctccccgcgacaaccacaacatccgaaaccgtaacccgacaaatcacaataacaacaactacgcaaatacgcgattcgacgaaaaaaataacttcgcaccacaacgcgcttacgcgcaaacccaaacaaacgcccacccaaaaaaaaaaaaaaacgccgtaccccgccctcactaaaacgcgaaaccgaatccgaaaacgccgaaccgcatccgaaaccgcgcacgcgcaatctacataaacgaaaaccaatacttaaaaacgtaccattcattaccaaaactcgattctcattaaaacgaaaaaaattcgtaaataaaactaattatttaacgcctacgtcttacgacgaacgaactaacgtacgacgccgttacgaacgaaaacgactacaacgccgatacctaaaaaacgataccgaaaaaaatcatcaccctacaattaaaccaatacgacaatcaaaataaacgaaactccgacccctcaactaaccaa

SEQ ID NO: 32189 - DNA, 577 bp, Artificial Sequence
  chemically treated genomic DNA (Homo sapiens) CpG-island No: 32189
aatttcggatattgcgtcgttagggttaggtaggcggttatggttttagttcggtttatgtttcgtagtcgtttttagtcgtttagtacggtagttgtcgtgtcggcgtcgttttttttttcgcgggtaatgtttttcgtagtgcggtcggtttcgtcgcgtcgggttcgtttcgttcgttttttggttaggttcgggttttagagcgtttcggttagtagggtagcggaagggggcggtttgggggtcgggcggggcgggttttcgcgcggcggggtcgggggcgggagtaggcggtttaggcggggtaggggtattcgcggagagaagtttcgttgtaggttttgtaggcgtagcgtcgttagggcgcgtagcgtgtcgtcgggtgggggcggtcggtttcgtagtagtagagcgtgagtttgtaggggaggtattcggcgttagtgtacgagcggcggcggaatcgtcgcgaaaacgtttcgcggaatttgagtaggtttaggttttagttaagtttttcgcggggttgttatagtgatgaaatgagacggtttagaaaattaggggtttaggt

SEQ ID NO: 32190 - DNA, 577 bp, Artificial Sequence
  chemically treated genomic DNA (Homo sapiens) CpG-island No: 32190
acctaaacccctaattttctaaaccgtctcatttcatcactataacaaccccgcgaaaaacttaactaaaacctaaacctactcaaattccgcgaaacgttttcgcgacgattccgccgccgctcgtacactaacgccgaatacctcccctacaaactcacgctctactactacgaaaccgaccgcccccacccgacgacacgctacgcgccctaacgacgctacgcctacaaaacctacaacgaaacttctctccgcgaatacccctaccccgcctaaaccgcctactcccgcccccgaccccgccgcgcgaaaacccgccccgcccgacccccaaaccgcccccttccgctaccctactaaccgaaacgctctaaaacccgaacctaaccaaaaaacgaacgaaacgaacccgacgcgacgaaaccgaccgcactacgaaaaacattacccgcgaaaaaaaaaacgacgccgacacgacaactaccgtactaaacgactaaaaacgactacgaaacataaaccgaactaaaaccataaccgcctacctaaccctaacgacgcaatatccgaaatt

SEQ ID NO: 32191 - DNA, 577 bp, Artificial Sequence
  chemically treated genomic DNA (Homo sapiens) CpG-island No: 32191
gtttgaatttttggttttttaggtcgttttattttattattatggtagtttcgcgggaggtttgattggaatttagatttgtttagatttcgcgaggcgttttcgcgacggtttcgtcgtcgttcgtatattgacgtcgggtgttttttttgtaggtttacgttttgttgttgcggggtcggtcgtttttattcgacgatacgttgcgcgttttggcggcgttgcgtttgtagagtttgtagcgggattttttttcgcgggtgtttttgtttcgtttggatcgtttgttttcgttttcggtttcgtcgcgcgaagattcgtttcgttcgatttttaggtcgttttttttcgttgttttgttggtcggggcgttttggagttcgggtttggttaagaggcgggcggagcgggttcggcgcggcggggtcggtcgtattgcgggaagtattgttcgcgagggaggaggcggcgtcggtacggtagttgtcgtgttgggcggttggaagcggttacggggtatgggtcgagttgaggttatggtcgtttatttggttttggcggcgtagtgttcggggtt

SEQ ID NO: 32192 - DNA, 577 bp, Artificial Sequence
  chemically treated genomic DNA (Homo sapiens) CpG-island No: 32192
aaccccgaacactacgccgccaaaaccaaataaacgaccataacctcaactcgacccataccccgtaaccgcttccaaccgcccaacacgacaactaccgtaccgacgccgcctcctccctcgcgaacaatacttcccgcaatacgaccgaccccgccgcgccgaacccgctccgcccgcctcttaaccaaacccgaactccaaaacgccccgaccaacaaaacaacgaaaaaaaacgacctaaaaatcgaacgaaacgaatcttcgcgcgacgaaaccgaaaacgaaaacaaacgatccaaacgaaacaaaaacacccgcgaaaaaaaatcccgctacaaactctacaaacgcaacgccgccaaaacgcgcaacgtatcgtcgaataaaaacgaccgaccccgcaacaacaaaacgtaaacctacaaaaaaaacacccgacgtcaatatacgaacgacgacgaaaccgtcgcgaaaacgcctcgcgaaatctaaacaaatctaaattccaatcaaacctcccgcgaaactaccataataataaaataaaacgacctaaaaaaccaaaaattcaaac

SEQ ID NO: 32193 - DNA, 590 bp, Artificial Sequence
  chemically treated genomic DNA (Homo sapiens) CpG-island No: 32193
cgggcgagggttaagtcgttggttattagtagtgcgatatttttgcgtttgttggtagggtagtttcgttcgcgcgtagttagtagatcggtagtatttagtagtagggcgaggttgtagggtagttgtagtattacgaaggtcgttattagagttattacgacgcgtagcgtacgtcggcgttcgggttttttggcggttagtagcgtgcggtttagaagcgcgtagtaggttattatgacgtttagcggtagcgcgaagtttagggttatttgcgttacggcgttcgttttttttatcgtttgcgtgaggttttcggggaagatgaggcgatagcgtcgttggttttttcgttgtttattttggttgaagagtagcgtaggtagcgttaggagtagtgatagtagttatacgatgacggagattaagtgtgcgcggtcgggagtggagggtcgcggttcggttgggagcgttcgcgcgatggttacgtagcggtcggcgttgatataggttaggaagaggaagtcggcgtggaaggaggtcgagtagaggttagagatggtgcggtaggtggtattttttagatttta

SEQ ID NO: 32194 - DNA, 590 bp, Artificial Sequence
  chemically treated genomic DNA (Homo sapiens) CpG-island No: 32194
taaaatctaaaaaataccacctaccgcaccatctctaacctctactcgacctccttccacgccgacttcctcttcctaacctatatcaacgccgaccgctacgtaaccatcgcgcgaacgctcccaaccgaaccgcgaccctccactcccgaccgcgcacacttaatctccgtcatcgtataactactatcactactcctaacgctacctacgctactcttcaaccaaaataaacaacgaaaaaaccaacgacgctatcgcctcatcttccccgaaaacctcacgcaaacgataaaaaaaacgaacgccgtaacgcaaataaccctaaacttcgcgctaccgctaaacgtcataataacctactacgcgcttctaaaccgcacgctactaaccgccaaaaaacccgaacgccgacgtacgctacgcgtcgtaataactctaataacgaccttcgtaatactacaactaccctacaacctcgccctactactaaatactaccgatctactaactacgcgcgaacgaaactaccctaccaacaaacgcaaaaatatcgcactactaataaccaacgacttaaccctcgcccg

SEQ ID NO: 32195 - DNA, 590 bp, Artificial Sequence
  chemically treated genomic DNA (Homo sapiens) CpG-island No: 32195
tggagtttgggaagtgttatttgtcgtattatttttggtttttattcggtttttttttacgtcggttttttttttttggtttgtattagcgtcgatcgttacgtggttatcgcgcgagcgtttttagtcgggtcgcggttttttattttcggtcgcgtatatttggttttcgttatcgtgtggttgttgttattgtttttggcgttgtttgcgttgttttttagttaggatgggtagcgggaaggttaacgacgttgtcgttttatttttttcgagggttttacgtagacggtgaagggggcgagcgtcgtggcgtaggtggttttgggtttcgcgttgtcgttgggcgttatggtagtttgttacgcgtttttgggtcgtacgttgttggtcgttagggggttcgagcgtcggcgtgcgttgcgcgtcgtggtggttttggtggcggttttcgtggtgttgtagttgttttatagtttcgttttgttgttggatattgtcgatttattggttgcgcgcgagcggagttgttttgttagtaaacgtaaggatgtcgtattgttggtgattagcggtttggttttcgttcg

SEQ ID NO: 32196 - DNA, 590 bp, Artificial Sequence
  chemically treated genomic DNA (Homo sapiens) CpG-island No: 32196
cgaacgaaaaccaaaccgctaatcaccaacaatacgacatccttacgtttactaacaaaacaactccgctcgcgcgcaaccaataaatcgacaatatccaacaacaaaacgaaactataaaacaactacaacaccacgaaaaccgccaccaaaaccaccacgacgcgcaacgcacgccgacgctcgaaccccctaacgaccaacaacgtacgacccaaaaacgcgtaacaaactaccataacgcccaacgacaacgcgaaacccaaaaccacctacgccacgacgctcgcccccttcaccgtctacgtaaaaccctcgaaaaaaataaaacgacaacgtcgttaaccttcccgctacccatcctaactaaaaaacaacgcaaacaacgccaaaaacaataacaacaaccacacgataacgaaaaccaaatatacgcgaccgaaaataaaaaaccgcgacccgactaaaaacgctcgcgcgataaccacgtaacgatcgacgctaatacaaaccaaaaaaaaaaaaccgacgtaaaaaaaaaccgaataaaaaccaaaaataatacgacaaataacacttcccaaactcca

SEQ ID NO: 32197 - DNA, 673 bp, Artificial Sequence
  chemically treated genomic DNA (Homo sapiens) CpG-island No: 32197
cgggcggcgtggggcgggggcgggcgtggggggaagggatcggttgcggggagggcggaggtgagggggtcgggtattggtttttttttagtgttgggggaagggagggttggacgtgcgatgaagggtcgagatcggagtgttcggggtgtatggaggtggaggtagcgttgggttgtagcgggtagggtcggggatgtgggggggtggtatcggcggggagagggagggagcgagcgagcgagcggggtataagggtgaggatttttaaagggttgagtggtgcgggcggtttcgtgagaaaggcgggtgagtgcgaggggggcgcgggggcggggataatgggaagaagggttggttggcgggcgggtgggggggggtcgtcgaataatggggtgggaaattggttaattatcgaagcgtttcggtcgttcggtaatttttaaacgcgttaatttcgcggaattttcgttttttttaacgtttgcggggtatttaatttcgatcgtatttttagttttaagttttttttcgttcgatttttaaatttatatttttcgttaatacgattatatcgcgcgtcgttaaaatttttttttttttttgaggaatagattttatatttttaggttattttttaatttttcgtttttttttagatttttattaagtt

SEQ ID NO: 32198 - DNA, 673 bp, Artificial Sequence
  chemically treated genomic DNA (Homo sapiens) CpG-island No: 32198
aacttaataaaaatctaaaaaaaaacgaaaaattaaaaaataacctaaaaatataaaatctattcctcaaaaaaaaaaaaaaattttaacgacgcgcgatataatcgtattaacgaaaaatataaatttaaaaatcgaacgaaaaaaaacttaaaactaaaaatacgatcgaaattaaataccccgcaaacgttaaaaaaaacgaaaattccgcgaaattaacgcgtttaaaaattaccgaacgaccgaaacgcttcgataattaaccaatttcccaccccattattcgacgacccccccccacccgcccgccaaccaacccttcttcccattatccccgcccccgcgcccccctcgcactcacccgcctttctcacgaaaccgcccgcaccactcaaccctttaaaaatcctcacccttataccccgctcgctcgctcgctccctccctctccccgccgataccacccccccacatccccgaccctacccgctacaacccaacgctacctccacctccatacaccccgaacactccgatctcgacccttcatcgcacgtccaaccctcccttcccccaacactaaaaaaaaaccaatacccgaccccctcacctccgccctccccgcaaccgatcccttccccccacgcccgcccccgccccacgccgcccg

SEQ ID NO: 32199 - DNA, 673 bp, Artificial Sequence
  chemically treated genomic DNA (Homo sapiens) CpG-island No: 32199
agtttgatgggggtttgagggggggcgggggattgaggagtggtttgggggtatagagtttgttttttaggggaagggggggattttggcggcgcgcggtatggtcgtgttagcggggggtgtagatttggggatcgggcgggggggggtttgggattagagatgcggtcgggattgggtgtttcgtagacgttggagaaaacggaggtttcgcggaattggcgcgtttgggagttgtcgaacggtcggggcgtttcgataattggttaattttttattttattgttcggcggtttttttttattcgttcgttaattagtttttttttttattgttttcgttttcgcgtttttttcgtatttattcgttttttttacggagtcgttcgtattatttagttttttggaaatttttatttttgtgtttcgttcgttcgttcgtttttttttttttttcgtcggtgttatttttttatattttcggttttgttcgttatagtttaacgttgtttttatttttatgtatttcggatatttcgatttcggttttttatcgtacgtttagttttttttttttttaatattgaaagagagttagtgttcggtttttttattttcgtttttttcgtagtcggttttttttttttacgttcgttttcgttttacgtcgttcg

SEQ ID NO: 32200 - DNA, 673 bp, Artificial Sequence
  chemically treated genomic DNA (Homo sapiens) CpG-island No: 32200
cgaacgacgtaaaacgaaaacgaacgtaaaaaaaaaaaaccgactacgaaaaaaacgaaaataaaaaaaccgaacactaactctctttcaatattaaaaaaaaaaaaaactaaacgtacgataaaaaaccgaaatcgaaatatccgaaatacataaaaataaaaacaacgttaaactataacgaacaaaaccgaaaatataaaaaaataacaccgacgaaaaaaaaaaaaaaacgaacgaacgaacgaaacacaaaaataaaaatttccaaaaaactaaataatacgaacgactccgtaaaaaaaacgaataaatacgaaaaaaacgcgaaaacgaaaacaataaaaaaaaaaactaattaacgaacgaataaaaaaaaaccgccgaacaataaaataaaaaattaaccaattatcgaaacgccccgaccgttcgacaactcccaaacgcgccaattccgcgaaacctccgttttctccaacgtctacgaaacacccaatcccgaccgcatctctaatcccaaacccccccccgcccgatccccaaatctacaccccccgctaacacgaccataccgcgcgccgccaaaatcccccccttcccctaaaaaacaaactctatacccccaaaccactcctcaatcccccgccccccctcaaacccccatcaaact

SEQ ID NO: 32201 - DNA, 513 bp, Artificial Sequence
  chemically treated genomic DNA (Homo sapiens) CpG-island No: 32201
tcgtaaattaataaaaaatagacgagtttattatttattagtaatcgcgacgtatcgtcgttcgtaatatatagttagatataatcgttttttatttaagttattattcgaatacgattaagcgattaatcgttttatattattcgagattacgcgtttagttatatcgatagggttagcgcgcgtattaatcgatataacggatacgagagacgcgacgatacgggggtatattacggacgtagcgacgattataacgttatatattcgttatcgatttaggtaaattaggggacgcgtaagcgggcgaatagacggcgcggggtatatatacgtatatacgtatacgcggtatacgtaggagagcgtttattatatatatatagtaatatcgagatatttatagataagttttattcggttatttaggcgcgaggttagagatataatcgcggtttaaagtaattttcgttttttaggtgagatagatttttttattatagtttttttaga

SEQ ID NO: 32202 - DNA, 513 bp, Artificial Sequence
  chemically treated genomic DNA (Homo sapiens) CpG-island No: 32202
tctaaaaaaactataataaaaaaatctatctcacctaaaaaacgaaaattactttaaaccgcgattatatctctaacctcgcgcctaaataaccgaataaaacttatctataaatatctcgatattactatatatatataataaacgctctcctacgtataccgcgtatacgtatatacgtatatataccccgcgccgtctattcgcccgcttacgcgtcccctaatttacctaaatcgataacgaatatataacgttataatcgtcgctacgtccgtaatatacccccgtatcgtcgcgtctctcgtatccgttatatcgattaatacgcgcgctaaccctatcgatataactaaacgcgtaatctcgaataatataaaacgattaatcgcttaatcgtattcgaataataacttaaataaaaaacgattatatctaactatatattacgaacgacgatacgtcgcgattactaataaataataaactcgtctattttttattaatttacga

SEQ ID NO: 32203 - DNA, 513 bp, Artificial Sequence
  chemically treated genomic DNA (Homo sapiens) CpG-island No: 32203
tttagggaggttgtggtgggagaatttgttttatttgggaggcgggggttgttttgagtcgcgattgtgtttttggtttcgcgtttgggtgatcgagtgagatttgtttgtgggtgtttcggtgttgttgtgtgtgtgtagtgggcgtttttttgcgtgtgtcgcgtgtgcgtgtgtgcgtgtgtgtgtttcgcgtcgtttgttcgttcgtttgcgcgttttttggtttgtttgggtcggtggcgggtgtgtggcgttgtggtcgtcgttgcgttcgtggtgtgttttcgtgtcgtcgcgtttttcgtgttcgttgtgtcggttgatgcgcgcgttggttttgtcggtgtggttgggcgcgtggtttcgggtggtgtagggcggttggtcgtttggtcgtgttcgggtggtggtttgggtggggggcggttgtgtttggttgtgtgttgcgggcggcggtgcgtcgcggttgttggtgggtggtgggttcgtttgttttttgttggtttgcgg

SEQ ID NO: 32204 - DNA, 513 bp, Artificial Sequence
  chemically treated genomic DNA (Homo sapiens) CpG-island No: 32204
ccgcaaaccaacaaaaaacaaacgaacccaccacccaccaacaaccgcgacgcaccgccgcccgcaacacacaaccaaacacaaccgccccccacccaaaccaccacccgaacacgaccaaacgaccaaccgccctacaccacccgaaaccacgcgcccaaccacaccgacaaaaccaacgcgcgcatcaaccgacacaacgaacacgaaaaacgcgacgacacgaaaacacaccacgaacgcaacgacgaccacaacgccacacacccgccaccgacccaaacaaaccaaaaaacgcgcaaacgaacgaacaaacgacgcgaaacacacacacgcacacacgcacacgcgacacacgcaaaaaaacgcccactacacacacacaacaacaccgaaacacccacaaacaaatctcactcgatcacccaaacgcgaaaccaaaaacacaatcgcgactcaaaacaacccccgcctcccaaataaaacaaattctcccaccacaacctccctaaa

SEQ ID NO: 32205 - DNA, 626 bp, Artificial Sequence
  chemically treated genomic DNA (Homo sapiens) CpG-island No: 32205
gggagtgttggggtttcgcgggagataagtagcgtcggcgcgttcgttttttttttttcgtcggcgcgggggtatatagagcgttcggtcgttttttttttgttcgcgtttcgtcgtcgcgcgtcgcgtttcgcgtttcgcgcgttagtttcggcgtcgcgttcgttcgtgttggtgcgttgggttcggcgtcgtgtggtttgcgttgttacgtttggtgtttcggttgtttgttttcgtgtttttggtcgtttttttttatgtttcgttcgggtcgttcgtcgtcgcgtggtttttcgtttttgcgcggtttttttgcgtttttttttttttgttttcgtttgcgtcgtgttttgcgtttttttcgcggcgtttcgcgtcgcgtttttttttttttttttgtttcgttttgtgtgcgttttggttgtgtcgtgcgcgtgtggtgggggttttgtgtttcgcgtttttgtcggttcggcggcgcgcggggtgtttgcgcggttgtcggtgggggcggtcggtcgcggcgtttgtggtgtttttttcgtgttatttttttgtgtgtagtttcgtcgggcgcgtgatgtgttgtgtgtgttcgttggtttttttgttttgttttgtgt

SEQ ID NO: 32206 - DNA, 626 bp, Artificial Sequence
  chemically treated genomic DNA (Homo sapiens) CpG-island No: 32206
acacaaaacaaaacaaaaaaaccaacgaacacacacaacacatcacgcgcccgacgaaactacacacaaaaaaataacacgaaaaaaacaccacaaacgccgcgaccgaccgcccccaccgacaaccgcgcaaacaccccgcgcgccgccgaaccgacaaaaacgcgaaacacaaaacccccaccacacgcgcacgacacaaccaaaacgcacacaaaacgaaacaaaaaaaaaaaaaaaaacgcgacgcgaaacgccgcgaaaaaaacgcaaaacacgacgcaaacgaaaacaaaaaaaaaaaaacgcaaaaaaaccgcgcaaaaacgaaaaaccacgcgacgacgaacgacccgaacgaaacataaaaaaaaacgaccaaaaacacgaaaacaaacaaccgaaacaccaaacgtaacaacgcaaaccacacgacgccgaacccaacgcaccaacacgaacgaacgcgacgccgaaactaacgcgcgaaacgcgaaacgcgacgcgcgacgacgaaacgcgaacaaaaaaaaaacgaccgaacgctctatatacccccgcgccgacgaaaaaaaaaaaacgaacgcgccgacgctacttatctcccgcgaaaccccaacactccc

SEQ ID NO: 32207 - DNA, 626 bp, Artificial Sequence
  chemically treated genomic DNA (Homo sapiens) CpG-island No: 32207
atataagataagataaaagaattaacgaatatatataatatattacgcgttcgacggagttgtatataagagaatagtacgagagaagtattataagcgtcgcgatcggtcgtttttatcggtagtcgcgtaggtatttcgcgcgtcgtcggatcgatagggacgcgaggtatagaatttttattatacgcgtacgatataattaagacgtatataggacggagtaaggagaggaagaagagcgcgacgcggggcgtcgcgggaaggacgtaagatacgacgtagacggaggtaaagaaggagagacgtagaggagtcgcgtaagagcggagagttacgcggcgacggacgattcgaacgaaatatagaaaaagacgattaagagtacgaagatagataatcgaaatattagacgtagtaacgtaagttatacgacgtcgagtttagcgtattagtacgagcgggcgcggcgtcggaattgacgcgcggggcgcgggacgcggcgcgcgacgacggagcgcgagtaggggagaggcggtcgggcgttttgtatgttttcgcgtcgacgagaggagaagagcgggcgcgtcgacgttgtttatttttcgcgggattttaatattttt

SEQ ID NO: 32208 - DNA, 626 bp, Artificial Sequence
  chemically treated genomic DNA (Homo sapiens) CpG-island No: 32208
aaaaatattaaaatcccgcgaaaaataaacaacgtcgacgcgcccgctcttctcctctcgtcgacgcgaaaacatacaaaacgcccgaccgcctctcccctactcgcgctccgtcgtcgcgcgccgcgtcccgcgccccgcgcgtcaattccgacgccgcgcccgctcgtactaatacgctaaactcgacgtcgtataacttacgttactacgtctaatatttcgattatctatcttcgtactcttaatcgtctttttctatatttcgttcgaatcgtccgtcgccgcgtaactctccgctcttacgcgactcctctacgtctctccttctttacctccgtctacgtcgtatcttacgtccttcccgcgacgccccgcgtcgcgctcttcttcctctccttactccgtcctatatacgtcttaattatatcgtacgcgtataataaaaattctatacctcgcgtccctatcgatccgacgacgcgcgaaatacctacgcgactaccgataaaaacgaccgatcgcgacgcttataatacttctctcgtactattctcttatatacaactccgtcgaacgcgtaatatattatatatattcgttaattcttttatcttatcttatat

SEQ ID NO: 32209 - DNA, 590 bp, Artificial Sequence
  chemically treated genomic DNA (Homo sapiens) CpG-island No: 32209
tttttatatattttttttttaattgcgtttcgtattaataaaatatattaatataattcggtgttttttttttatatattttttttgtttttttttttttaatatttttttataatcgagtttcgtttttttatataaaaattgggttttcgtcgttttattttttttattttattaggatttatttttttataaaaagtttataattttttcgttgttattttaaaataattttttttggcgtcgtcggtttagtttttatttttttatcgttttcgttttcgtggttttttttataaattttatttttataatttttttttcggttatatttttttatttttttattttttttacgtcgcggttttttttttttatttagcgcgtttattttttttcgtttcgttatttcgttatttttaattatcgttaatattttgtacgttcgtataatcgtatattttatatattatattatttattcggttttttggcgtttttttgtttttttgttataaatatcgttcgtttacgattttgtcgtgttattatcgcgcgttttatttcgtatattgaatatataatattta

SEQ ID NO: 32210 - DNA, 590 bp, Artificial Sequence
  chemically treated genomic DNA (Homo sapiens) CpG-island No: 32210
taaatattatatattcaatatacgaaataaaacgcgcgataataacacgacaaaatcgtaaacgaacgatatttataacaaaaaaacaaaaaaacgccaaaaaaccgaataaataatataatatataaaatatacgattatacgaacgtacaaaatattaacgataattaaaaataacgaaataacgaaacgaaaaaaaataaacgcgctaaataaaaaaaaaaaaccgcgacgtaaaaaaaataaaaaaataaaaaaatataaccgaaaaaaaaattataaaaataaaatttataaaaaaaaccacgaaaacgaaaacgataaaaaaataaaaactaaaccgacgacgccaaaaaaaattattttaaaataacaacgaaaaaattataaactttttataaaaaaataaatcctaataaaataaaaaaaataaaacgacgaaaacccaatttttatataaaaaaacgaaactcgattataaaaaaatattaaaaaaaaaaaaacaaaaaaaatatataaaaaaaaaacaccgaattatattaatatattttattaatacgaaacgcaattaaaaaaaaaatatataaaaa

SEQ ID NO: 32211 - DNA, 590 bp, Artificial Sequence
  chemically treated genomic DNA (Homo sapiens) CpG-island No: 32211
tgggtgttgtatatttagtgtacggagtggggcgcgcggtggtggtacggtagagtcgtaggcggacggtgtttgtgataggagagtagaaaggcgttagagggtcgaatggatgatgtaatgtgtagagtgtgcggttgtgcgagcgtatagggtattggcggtaattgagagtagcgaggtagcggggcgaagagggatgggcgcgttaggtaggggaaaggggtcgcggcgtgaggaaagtagaagggtggaggggtgtggtcgaggggggggttgtaaagatgaggtttgtaaaaggagttacgggggcgggggcggtagagagatggggattgagtcggcggcgttaggggaggttgttttaaggtgataacgggggggttgtagattttttgtggggaagtgggttttggtagaatgggaaaagtggaacggcgggggtttagtttttatgtggaggggcgggattcggttatgagaaggtgttgagggggggggaataggggggatatgtaagggggaggtatcgggttgtgttgatatgttttattaatacggggcgtagttagaggggaaatgtgtggggg

SEQ ID NO: 32212 - DNA, 590 bp, Artificial Sequence
  chemically treated genomic DNA (Homo sapiens) CpG-island No: 32212
cccccacacatttcccctctaactacgccccgtattaataaaacatatcaacacaacccgatacctcccccttacatatcccccctattccccccccctcaacaccttctcataaccgaatcccgcccctccacataaaaactaaacccccgccgttccacttttcccattctaccaaaacccacttccccacaaaaaatctacaacccccccgttatcaccttaaaacaacctcccctaacgccgccgactcaatccccatctctctaccgcccccgcccccgtaactccttttacaaacctcatctttacaacccccccctcgaccacacccctccacccttctactttcctcacgccgcgacccctttcccctacctaacgcgcccatccctcttcgccccgctacctcgctactctcaattaccgccaataccctatacgctcgcacaaccgcacactctacacattacatcatccattcgaccctctaacgcctttctactctcctatcacaaacaccgtccgcctacgactctaccgtaccaccaccgcgcgccccactccgtacactaaatatacaacaccca

SEQ ID NO: 32213 - DNA, 742 bp, Artificial Sequence
  chemically treated genomic DNA (Homo sapiens) CpG-island No: 32213
  unsure (303)
ttttttaacgtcggtttttttcgtttttttttttttttcggtattttttttttttttcgttttttcggcgcgttagggcgcgcggatagtcgagtttttttcggcgtcgcgaggagaggggcgcggcgagttttttttcggttttcgtttttcgcggtcggcgagcgttcgtgaggggataacgcggagatagagagcgaagcggtcgggtgcgcgtatcgcggatcgcgcggcgtcgcggttggttttattcgagagtagcgcgtgcgggggttcgttcgatatatatttcgcgttcggttncgcggtttcgtatcgttcgttttttcgcgtttttcggagttcgtcgtttcgtcgtttcgcggagaatttaacgagagtaggaggcgtcggtcgagtagagaatttagtcgattcggcgtacgtgtgatcgatcgatcggggcgacgcgcgttttcgttcggcgcggcggcggttttttgcgttgtatcgcgtttcggatcgttcgtcggttttttcgttgtcgttttcgcgcgcgttcgttcgattcgttcgcggtcgcgttcgtacgttacgcgggtttgtcgggggcgtacggcgcggcgcgttcgcgtcgagggacgcgagcgggcgttatggtataagtaggcgggacgaattcgatcggatttggcgttcgatcgagatttttcgttcgtcgcgtcgtgtttttgtgtcgttcgcgtcggtgggggaggttagt

SEQ ID NO: 32214 - DNA, 742 bp, Artificial Sequence
  chemically treated genomic DNA (Homo sapiens) CpG-island No: 32214
  unsure (440)
actaacctcccccaccgacgcgaacgacacaaaaacacgacgcgacgaacgaaaaatctcgatcgaacgccaaatccgatcgaattcgtcccgcctacttataccataacgcccgctcgcgtccctcgacgcgaacgcgccgcgccgtacgcccccgacaaacccgcgtaacgtacgaacgcgaccgcgaacgaatcgaacgaacgcgcgcgaaaacgacaacgaaaaaaccgacgaacgatccgaaacgcgatacaacgcaaaaaaccgccgccgcgccgaacgaaaacgcgcgtcgccccgatcgatcgatcacacgtacgccgaatcgactaaattctctactcgaccgacgcctcctactctcgttaaattctccgcgaaacgacgaaacgacgaactccgaaaaacgcgaaaaaacgaacgatacgaaaccgcgnaaccgaacgcgaaatatatatcgaacgaacccccgcacgcgctactctcgaataaaaccaaccgcgacgccgcgcgatccgcgatacgcgcacccgaccgcttcgctctctatctccgcgttatcccctcacgaacgctcgccgaccgcgaaaaacgaaaaccgaaaaaaaactcgccgcgcccctctcctcgcgacgccgaaaaaaactcgactatccgcgcgccctaacgcgccgaaaaaacgaaaaaaaaaaaaaataccgaaaaaaaaaaaaaaacgaaaaaaaccgacgttaaaaaa

SEQ ID NO: 32215 - DNA, 742 bp, Artificial Sequence
  chemically treated genomic DNA (Homo sapiens) CpG-island No: 32215
  unsure (440)
gttaattttttttatcggcgcgggcgatatagaggtacgacgcggcgggcggggggtttcgatcggacgttaggttcggtcgggttcgtttcgtttgtttatattatgacgttcgttcgcgtttttcggcgcgggcgcgtcgcgtcgtgcgttttcggtaggttcgcgtggcgtgcgggcgcgatcgcgggcggatcgggcgagcgcgcgcgggggcggtagcgggggggtcggcgggcggttcggagcgcggtgtagcgtaggggatcgtcgtcgcgtcgggcggaggcgcgcgtcgtttcggtcgatcggttatacgtgcgtcgggtcggttgggttttttgttcgatcggcgttttttgttttcgttgagtttttcgcggagcggcggggcggcgggtttcgggggacgcgggggggcgggcggtgcggggtcgcgnggtcgggcgcggggtgtgtgtcgggcgggttttcgtacgcgttgttttcgggtggggttagtcgcggcgtcgcgcggttcgcggtgcgcgtattcggtcgtttcgttttttgttttcgcgttgtttttttacgggcgttcgtcggtcgcggggggcgggggtcgggggggggttcgtcgcgttttttttttcgcggcgtcggggggggttcggttgttcgcgcgttttggcgcgtcgggggggcgggggggggggggggtgtcggggggggggggggggcggggggggtcggcgttgggggg

SEQ ID NO: 32216 - DNA, 742 bp, Artificial Sequence
  chemically treated genomic DNA (Homo sapiens) CpG-island No: 32216
  unsure (303)
ccccccaacgccgaccccccccgccccccccccccccccgacacccccccccccccccgcccccccgacgcgccaaaacgcgcgaacaaccgaaccccccccgacgccgcgaaaaaaaaaacgcgacgaacccccccccgacccccgccccccgcgaccgacgaacgcccgtaaaaaaacaacgcgaaaacaaaaaacgaaacgaccgaatacgcgcaccgcgaaccgcgcgacgccgcgactaaccccacccgaaaacaacgcgtacgaaaacccgcccgacacacaccccgcgcccgaccncgcgaccccgcaccgcccgcccccccgcgtcccccgaaacccgccgccccgccgctccgcgaaaaactcaacgaaaacaaaaaacgccgatcgaacaaaaaacccaaccgacccgacgcacgtataaccgatcgaccgaaacgacgcgcgcctccgcccgacgcgacgacgatcccctacgctacaccgcgctccgaaccgcccgccgacccccccgctaccgcccccgcgcgcgctcgcccgatccgcccgcgatcgcgcccgcacgccacgcgaacctaccgaaaacgcacgacgcgacgcgcccgcgccgaaaaacgcgaacgaacgtcataatataaacaaacgaaacgaacccgaccgaacctaacgtccgatcgaaaccccccgcccgccgcgtcgtacctctatatcgcccgcgccgataaaaaaaattaac

SEQ ID NO: 32217 - DNA, 579 bp, Artificial Sequence
  chemically treated genomic DNA (Homo sapiens) CpG-island No: 32217
  unsure (485, 506, 534)
gaagtttttcgttttgtgtggtcggaggtaacgtagtacgtagcgtgggagcgcggggtagttgttacgaggagatatttcgggtagtttagtgtgggtgtttgtgcgtcgggtgttgaaggcgcggagagcggtgattagttttgagcgagaggcgtggggtgatttcgtatatagtttgagattagagggtagagtcgttgtgtgtagtgttttaggcgcgtggtttcgcgttgagcgttacgtgggatcgggcgtgcgggcgggtaggcgtacgttgtcggttcggggggtattgtcgatcgtggtagtgatggtgaggagaggaggagtacgtgcgggatcgtggttaaggtttatgataagataggaagtcgtagtttcgacgggttagattaggcgcgagcgcgtacggtaatcggagtttcgttagttggtggttttcgcgcgcgagtattcgcggtttcgcgtcgtttagggcgcgncgtgcgagtatttagcgcgantatcgaagtgttacggattatgttttgntgacgcgttttatggtatagtgttggttgtgtttagtaggtagtt

SEQ ID NO: 32218 - DNA, 579 bp, Artificial Sequence
  chemically treated genomic DNA (Homo sapiens) CpG-island No: 32218
  unsure (46, 74, 95)
aactacctactaaacacaaccaacactataccataaaacgcgtcancaaaacataatccgtaacacttcgatantcgcgctaaatactcgcacgncgcgccctaaacgacgcgaaaccgcgaatactcgcgcgcgaaaaccaccaactaacgaaactccgattaccgtacgcgctcgcgcctaatctaacccgtcgaaactacgacttcctatcttatcataaaccttaaccacgatcccgcacgtactcctcctctcctcaccatcactaccacgatcgacaataccccccgaaccgacaacgtacgcctacccgcccgcacgcccgatcccacgtaacgctcaacgcgaaaccacgcgcctaaaacactacacacaacgactctaccctctaatctcaaactatatacgaaatcaccccacgcctctcgctcaaaactaatcaccgctctccgcgccttcaacacccgacgcacaaacacccacactaaactacccgaaatatctcctcgtaacaactaccccgcgctcccacgctacgtactacgttacctccgaccacacaaaacgaaaaacttc

SEQ ID NO: 32219 - DNA, 579 bp, Artificial Sequence
  chemically treated genomic DNA (Homo sapiens) CpG-island No: 32219
  unsure (46, 74, 95)
aattatttattaaatatagttagtattatattataagacgcgttantaggatatgattcgtgatatttcgatantcgcgttggatgttcgtacgncgcgttttgaacggcgcggagtcgcgagtgttcgcgcgcgagggttattagttggcgggatttcggttatcgtacgcgttcgcgtttagtttgattcgtcggagttgcggttttttgttttgttatgagttttagttacggtttcgtacgtattttttttttttttattattattgttacgatcggtaatgtttttcgaatcggtaacgtgcgtttgttcgttcgtacgttcggttttacgtgacgtttagcgcgagattacgcgtttggagtattgtatataacggttttattttttggttttagattgtatgcggggttattttacgtttttcgtttaagattagttatcgtttttcgcgtttttaatattcgacgtataagtatttatattgggttattcggaatgttttttcgtaatagttatttcgcgtttttacgttacgtgttgcgttgttttcggttatataagacgaagagtttt

SEQ ID NO: 32220 - DNA, 579 bp, Artificial Sequence
  chemically treated genomic DNA (Homo sapiens) CpG-island No: 32220
  unsure (485, 506, 534)
aaaactcttcgtcttatataaccgaaaacaacgcaacacgtaacgtaaaaacgcgaaataactattacgaaaaaacattccgaataacccaatataaatacttatacgtcgaatattaaaaacgcgaaaaacgataactaatcttaaacgaaaaacgtaaaataaccccgcatacaatctaaaaccaaaaaataaaaccgttatatacaatactccaaacgcgtaatctcgcgctaaacgtcacgtaaaaccgaacgtacgaacgaacaaacgcacgttaccgattcgaaaaacattaccgatcgtaacaataataataaaaaaaaaaaaaatacgtacgaaaccgtaactaaaactcataacaaaacaaaaaaccgcaactccgacgaatcaaactaaacgcgaacgcgtacgataaccgaaatcccgccaactaataaccctcgcgcgcgaacactcgcgactccgcgccgttcaaaacgcgncgtacgaacatccaacgcgantatcgaaatatcacgaatcatatcctantaacgcgtcttataatataatactaactatatttaataaataatt

SEQ ID NO: 32221 - DNA, 632 bp, Artificial Sequence
  chemically treated genomic DNA (Homo sapiens) CpG-island No: 32221
  unsure (230)
atgcgtttttgagagattcgttatattttcgatttggaagtttcgcggggatttagttttcgggttttcgttttttttttatttcggtcgttaagtttggttgcggagtagcgcggtcggtcgggggtggggtttcggtatcgtttcgggttcgggattcgcgaagttacgcgttttcgtaggtttgcggggtattttcgtttacggatacgttttttttgcggaggtangttttagcgattttttgtttagtttcggcgttttattcgcgacgtttttaaattgtttaaggttttttagtcgtttttattttagaaaatcgtttcgttcgcgtttttttttttaggcgtattttatcgtggagaggagaggagcggattgggaacgtcgaatcgtttcgtaggttcggggaaacggatttttttttcgtttttcgtttattttttttatttcgtttttcgttttttgcgcgaatttattttttagttttggttattagaggcgtagcgtatagttttttcggtggaattagtgcgaaaatattcgaggaaatgaaaagaataagaaagtgttattttggtaattacgggcgtttagtggttagttggtgggttggggagggcggtcgttgt

SEQ ID NO: 32222 - DNA, 632 bp, Artificial Sequence
  chemically treated genomic DNA (Homo sapiens) CpG-island No: 32222
  unsure (403)
acaacgaccgccctccccaacccaccaactaaccactaaacgcccgtaattaccaaaataacactttcttattcttttcatttcctcgaatattttcgcactaattccaccgaaaaaactatacgctacgcctctaataaccaaaactaaaaaataaattcgcgcaaaaaacgaaaaacgaaataaaaaaaataaacgaaaaacgaaaaaaaaatccgtttccccgaacctacgaaacgattcgacgttcccaatccgctcctctcctctccacgataaaatacgcctaaaaaaaaaaacgcgaacgaaacgattttctaaaataaaaacgactaaaaaaccttaaacaatttaaaaacgtcgcgaataaaacgccgaaactaaacaaaaaatcgctaaaacntacctccgcaaaaaaaacgtatccgtaaacgaaaataccccgcaaacctacgaaaacgcgtaacttcgcgaatcccgaacccgaaacgataccgaaaccccacccccgaccgaccgcgctactccgcaaccaaacttaacgaccgaaataaaaaaaaaacgaaaacccgaaaactaaatccccgcgaaacttccaaatcgaaaatataacgaatctctcaaaaacgcat

SEQ ID NO: 32223 - DNA, 632 bp, Artificial Sequence
  chemically treated genomic DNA (Homo sapiens) CpG-island No: 32223
  unsure (403)
gtagcggtcgttttttttagtttattagttggttattaaacgttcgtggttgttaaggtagtatttttttgttttttttattttttcgggtgttttcgtattggttttatcggaaaggttgtgcgttgcgtttttggtgattaggattggaaaatgggttcgcgtagggggcggggggcgaggtgaaggggatgggcggggagcggaaggggggttcgttttttcgagtttgcggggcggttcggcgtttttagttcgttttttttttttttacggtggggtgcgtttggagggagagacgcggacggggcgattttttaaagtgggaacgattgaaaggttttgagtagtttgggagcgtcgcgagtgaggcgtcgaagttgggtagagggtcgttggggtntgttttcgtagaaagggcgtgttcgtgggcgaaggtgtttcgtaagtttgcggaagcgcgtgatttcgcgaatttcgagttcggggcggtgtcggagttttattttcggtcggtcgcgttgtttcgtaattagatttggcggtcgagatggggagggggcgggggttcgggggttgggttttcgcggaatttttagatcggaagtgtggcgggttttttaggaacgtat

SEQ ID NO: 32224 - DNA, 632 bp, Artificial Sequence
  chemically treated genomic DNA (Homo sapiens) CpG-island No: 32224
  unsure (230)
atacgttcctaaaaaacccgccacacttccgatctaaaaattccgcgaaaacccaacccccgaacccccgccccctccccatctcgaccgccaaatctaattacgaaacaacgcgaccgaccgaaaataaaactccgacaccgccccgaactcgaaattcgcgaaatcacgcgcttccgcaaacttacgaaacaccttcgcccacgaacacgccctttctacgaaaacanaccccaacgaccctctacccaacttcgacgcctcactcgcgacgctcccaaactactcaaaacctttcaatcgttcccactttaaaaaatcgccccgtccgcgtctctccctccaaacgcaccccaccgtaaaaaaaaaaaaaacgaactaaaaacgccgaaccgccccgcaaactcgaaaaaacgaaccccccttccgctccccgcccatccccttcacctcgccccccgccccctacgcgaacccattttccaatcctaatcaccaaaaacgcaacgcacaacctttccgataaaaccaatacgaaaacacccgaaaaaataaaaaaaacaaaaaaatactaccttaacaaccacgaacgtttaataaccaactaataaactaaaaaaaacgaccgctac

SEQ ID NO: 32225 - DNA, 543 bp, Artificial Sequence
  chemically treated genomic DNA (Homo sapiens) CpG-island No: 32225
  unsure (459)
tattttcgtttatcgtttttacgtttattatttttttatgttttgtatttttattttcgttttgtttttttttttttatcgcgatatttttttttagttttttttttttcgttatttttcgtttttcgcgttttgttttgttttttattttttttaagttatattattttcggttttttttttttatttatttttttttttttatcgttcgttttttattttttttcgttattttttttttttttgcgtttatttttgtttgattttttttcgtttatttcggttttcgttcgtttttgtttatattattattttatttcgtttttttttttatttttttttttttgttttttttttttttatttttttttcgttttattataattcggagttttagtttttatatttttttgtatttttttttcgttgttatcgttttgtacgtgttcgttttattanttttcgttcgttttttgtttttttttatgtatattttttttagttttttttttttttttcgtttttcgttttttttatttatga

SEQ ID NO: 32226 - DNA, 543 bp, Artificial Sequence
  chemically treated genomic DNA (Homo sapiens) CpG-island No: 32226
  unsure (85)
tcataaataaaaaaaacgaaaaacgaaaaaaaaaaaaaaaactaaaaaaaatatacataaaaaaaaacaaaaaacgaacgaaaantaataaaacgaacacgtacaaaacgataacaacgaaaaaaaaatacaaaaaaatataaaaactaaaactccgaattataataaaacgaaaaaaaaataaaaaaaaaaaaaacaaaaaaaaaaaaataaaaaaaaaaacgaaataaaataataatataaacaaaaacgaacgaaaaccgaaataaacgaaaaaaaatcaaacaaaaataaacgcaaaaaaaaaaaaaataacgaaaaaaaataaaaaacgaacgataaaaaaaaaaaaataaataaaaaaaaaaaaccgaaaataatataacttaaaaaaaataaaaaacaaaacaaaacgcgaaaaacgaaaaataacgaaaaaaaaaaaactaaaaaaaaatatcgcgataaaaaaaaaaaaacaaaacgaaaataaaaatacaaaacataaaaaaataataaacgtaaaaacgataaacgaaaata

SEQ ID NO: 32227 - DNA, 543 bp, Artificial Sequence
  chemically treated genomic DNA (Homo sapiens) CpG-island No: 32227
  unsure (85)
ttataggtagaaagagcgaggagcggaagagaagaaggagattggaagagatatgtatagagagagatagagagcgagcggggantagtagggcgagtacgtgtaaagcggtgatagcggagaaggagtatagggaagtatggggattgaggtttcggattatgatggaacgggaaaaggatgagagaggaggagatagaagagagggggtgagagaaggaacgagatggagtaatgatgtgagtaggaacgagcgagaatcggagtgaacgggagagggttaggtagaggtgagcgtagggagagggagagtaacgggggggggtggggagcgaacggtggagagggggaggtgagtggaaaagggaggtcgaagataatgtagtttggggagagtgaagagtaaggtagagcgcgaagaacgaggagtagcgggggaggggagattggaggggagtgtcgcggtggagggggggggatagggcgggagtgggagtgtagggtatgaggaagtgatagacgtgggaacggtgggcgaaggta

SEQ ID NO: 32228 - DNA, 543 bp, Artificial Sequence
  chemically treated genomic DNA (Homo sapiens) CpG-island No: 32228
  unsure (459)
taccttcgcccaccgttcccacgtctatcacttcctcataccctacactcccactcccgccctatccccccccctccaccgcgacactcccctccaatctcccctcccccgctactcctcgttcttcgcgctctaccttactcttcactctccccaaactacattatcttcgacctcccttttccactcacctccccctctccaccgttcgctccccacccccccccgttactctccctctccctacgctcacctctacctaaccctctcccgttcactccgattctcgctcgttcctactcacatcattactccatctcgttccttctctcaccccctctcttctatctcctcctctctcatccttttcccgttccatcataatccgaaacctcaatccccatacttccctatactccttctccgctatcaccgctttacacgtactcgccctactantccccgctcgctctctatctctctctatacatatctcttccaatctccttcttctcttccgctcctcgctctttctacctataa

SEQ ID NO: 32229 - DNA, 792 bp, Artificial Sequence
  chemically treated genomic DNA (Homo sapiens) CpG-island No: 32229
cgatcgtttacgcgttttgttaagcggtgcgcggacgcgtaggtattatttttataagaagtagttttttttgttaaaggtagagcgatagttagtttttacgattcgtcgtcgtagcgtgcggtttttcggagatcgtagtagtagaggtttatacgtttttttcggttgtttcggttttagttggtttttgtttgcgattttacgttacgtagcgttagatcgtcgtagttatcgttagttttaggattttattgtggtgggagaagaggggcgggggtattgtagagggggtaacgcgcggcgggatatgcgtcgttttttcggtaacggcgtcgcgggggcgagaattcgttggcgggagtttaatgcgagttagattggagttatgtgattcgtcggagtttgtggtgtcgtttttggttttttaagtcgaaaagagattatattaacgaattcgtttttattcgtttaggaattatgtattttagaatgttaattagatttcgcgttttaaacgtttgtcggttataggtggaggattataaattttagtatgtcgtgcgttttcgggttgatcgcggagcgtagggttttaggtttatgcggaagtgtattgattttttagttcgtggagaaagagcggaggcgttgtgcggtttttcgtgggggtgttagtttcggttcgtgtcggaagaaggagttaagatcgggatcgtttttttgttttttttttattttatattcggttacgaagaggtggaaataaaaggatatttataatgtagttta

SEQ ID NO: 32230 - DNA, 792 bp, Artificial Sequence
  chemically treated genomic DNA (Homo sapiens) CpG-island No: 32230
taaactacattataaatatccttttatttccacctcttcgtaaccgaatataaaataaaaaaaaaacaaaaaaacgatcccgatcttaactccttcttccgacacgaaccgaaactaacacccccacgaaaaaccgcacaacgcctccgctctttctccacgaactaaaaaatcaatacacttccgcataaacctaaaaccctacgctccgcgatcaacccgaaaacgcacgacatactaaaatttataatcctccacctataaccgacaaacgtttaaaacgcgaaatctaattaacattctaaaatacataattcctaaacgaataaaaacgaattcgttaatataatctcttttcgacttaaaaaaccaaaaacgacaccacaaactccgacgaatcacataactccaatctaactcgcattaaactcccgccaacgaattctcgcccccgcgacgccgttaccgaaaaaacgacgcatatcccgccgcgcgttaccccctctacaatacccccgcccctcttctcccaccacaataaaatcctaaaactaacgataactacgacgatctaacgctacgtaacgtaaaatcgcaaacaaaaaccaactaaaaccgaaacaaccgaaaaaaacgtataaacctctactactacgatctccgaaaaaccgcacgctacgacgacgaatcgtaaaaactaactatcgctctacctttaacaaaaaaaactacttcttataaaaataatacctacgcgtccgcgcaccgcttaacaaaacgcgtaaacgatcg

SEQ ID NO: 32231 - DNA, 792 bp, Artificial Sequence
  chemically treated genomic DNA (Homo sapiens) CpG-island No: 32231
tggattatattgtaagtgtttttttgtttttattttttcgtgatcgaatgtggggtgaggaaggggtaaaaaagcgatttcggttttggttttttttttcggtacgggtcggagttgatatttttacggaaaatcgtatagcgttttcgttttttttttacgggttgagggattaatgtattttcgtataggtttagggttttacgtttcgcgattagttcggaagcgtacggtatgttgggatttgtagttttttatttgtggtcggtaggcgtttagaacgcgaggtttagttggtattttgggatatatagtttttgggcgggtgggggcggattcgttggtgtaattttttttcggtttaaagagttagaagcgatattatagatttcggcgggttatatgattttagtttagttcgtattgggttttcgttagcgagttttcgttttcgcggcgtcgttgtcgaggagacggcgtatgtttcgtcgcgcgttgttttttttgtagtattttcgtttttttttttttattataatgagattttaagattggcggtggttgcggcggtttggcgttgcgtagcgtgaggtcgtaaatagaggttagttggggtcgaggtagtcgaggaaaacgtgtgggtttttattgttgcggttttcgaagggtcgtacgttgcggcggcgggtcgtgggggttgattgtcgttttgtttttgataggagaggttgttttttgtagaggtaatgtttgcgcgttcgcgtatcgtttggtagagcgcgtaggcggtcg

SEQ ID NO: 32232 - DNA, 792 bp, Artificial Sequence
  chemically treated genomic DNA (Homo sapiens) CpG-island No: 32232
cgaccgcctacgcgctctaccaaacgatacgcgaacgcgcaaacattacctctacaaaaaacaacctctcctatcaaaaacaaaacgacaatcaacccccacgacccgccgccgcaacgtacgacccttcgaaaaccgcaacaataaaaacccacacgttttcctcgactacctcgaccccaactaacctctatttacgacctcacgctacgcaacgccaaaccgccgcaaccaccgccaatcttaaaatctcattataataaaaaaaaaaaaacgaaaatactacaaaaaaaacaacgcgcgacgaaacatacgccgtctcctcgacaacgacgccgcgaaaacgaaaactcgctaacgaaaacccaatacgaactaaactaaaatcatataacccgccgaaatctataatatcgcttctaactctttaaaccgaaaaaaaattacaccaacgaatccgcccccacccgcccaaaaactatatatcccaaaataccaactaaacctcgcgttctaaacgcctaccgaccacaaataaaaaactacaaatcccaacataccgtacgcttccgaactaatcgcgaaacgtaaaaccctaaacctatacgaaaatacattaatccctcaacccgtaaaaaaaaaacgaaaacgctatacgattttccgtaaaaatatcaactccgacccgtaccgaaaaaaaaaaccaaaaccgaaatcgcttttttaccccttcctcaccccacattcgatcacgaaaaaataaaaacaaaaaaacacttacaatataatcca

SEQ ID NO: 32233 - DNA, 860 bp, Artificial Sequence
  chemically treated genomic DNA (Homo sapiens) CpG-island No: 32233
gcgtcgtttaatttttttagtttcgaaatggcggttattagatcgttaggttacgtttcgggggcggggtttgagtttaggttagagcgatggatgttcgagttaagttagaagtcgattgttagtagggttcgcgtagaatcggagagtcggtggcgtcgtaggtcgggaggacgagtatcgagtcgagggttcgttcgtttgggtcgttcgagagttttaatcgcgggcgtttgggtcgttattttagatggcgggagtaagaggaaaacgattgtgaggcgggaacggttttttgttgttttttttgggtttcgaaaagggttagttggtcgggttttggggcgcgtgttttgaggcgcggagcgcgtttgttacgatgcgggggttgttcggggtttcgttttttgggttggggacgcgtcgaatgtgatcgtttttcgtttttttattcgtcgcggggaggaggagcgggcgagaagttgtcgtcgaacgataggacgttggggcggttttggtttttttaggtaggtggtaggatcgggtcgtggatgtcgggggagtcgggcggcggggttaagggatcggtttttagggcgatcgggtttgggtggcgttgatggagcgttttcgcggttgtcgggtagagggtttgggttagttcgttgttatttcgggtagcgttgggcgggggtttcggagttcggtgttatggtcggcgagtcgagtttttatattttatttaaatttttttgtgtttggcggaaacgtgttaacgttatttttatgttatgcgtattttttatatttggtagtgggaaaattcgtttagagttgttttatatttgttgttatttgga

SEQ ID NO: 32234 - DNA, 860 bp, Artificial Sequence
  chemically treated genomic DNA (Homo sapiens) CpG-island No: 32234
tccaaataacaacaaatataaaacaactctaaacgaattttcccactaccaaatataaaaaatacgcataacataaaaataacgttaacacgtttccgccaaacacaaaaaaatttaaataaaatataaaaactcgactcgccgaccataacaccgaactccgaaacccccgcccaacgctacccgaaataacaacgaactaacccaaaccctctacccgacaaccgcgaaaacgctccatcaacgccacccaaacccgatcgccctaaaaaccgatcccttaaccccgccgcccgactcccccgacatccacgacccgatcctaccacctacctaaaaaaaccaaaaccgccccaacgtcctatcgttcgacgacaacttctcgcccgctcctcctccccgcgacgaataaaaaaacgaaaaacgatcacattcgacgcgtccccaacccaaaaaacgaaaccccgaacaacccccgcatcgtaacaaacgcgctccgcgcctcaaaacacgcgccccaaaacccgaccaactaacccttttcgaaacccaaaaaaaacaacaaaaaaccgttcccgcctcacaatcgttttcctcttactcccgccatctaaaataacgacccaaacgcccgcgattaaaactctcgaacgacccaaacgaacgaaccctcgactcgatactcgtcctcccgacctacgacgccaccgactctccgattctacgcgaaccctactaacaatcgacttctaacttaactcgaacatccatcgctctaacctaaactcaaaccccgcccccgaaacgtaacctaacgatctaataaccgccatttcgaaactaaaaaaattaaacgacgc

SEQ ID NO: 32235 - DNA, 860 bp, Artificial Sequence
  chemically treated genomic DNA (Homo sapiens) CpG-island No: 32235
tttaagtgataatagatatggggtagttttgggcggatttttttattgttaaatatgaggaatgcgtatggtataagggtggcgttggtacgttttcgttaaatataaggaaatttgagtgggatgtgggaattcggttcgtcggttatgatatcggatttcggggttttcgtttaacgttattcggggtgatagcgggttggtttaagttttttgttcggtagtcgcgagggcgttttattagcgttatttaggttcggtcgttttggaagtcgattttttagtttcgtcgttcggttttttcggtatttacgattcggttttgttatttatttgagggagttagggtcgttttaacgttttgtcgttcggcggtagtttttcgttcgtttttttttttcgcggcgggtgagggagcgggaggcggttatattcggcgcgtttttagtttaggggacggagtttcgagtagttttcgtatcgtagtaaacgcgtttcgcgttttagggtacgcgttttaaagttcggttagttgatttttttcggggtttaaaaaaggtagtagaaagtcgttttcgttttataatcgttttttttttattttcgttatttaagatggcggtttaagcgttcgcgattaagattttcgggcggtttagacgagcgagttttcgattcggtgttcgttttttcgatttgcgacgttatcggtttttcgattttgcgcgagttttattggtagtcgatttttaatttggttcgggtatttatcgttttggtttgaatttaggtttcgttttcggggcgtggtttagcgatttggtggtcgttatttcgaagttgaagaggttaggcgacgt

SEQ ID NO: 32236 - DNA, 860 bp, Artificial Sequence
  chemically treated genomic DNA (Homo sapiens) CpG-island No: 32236
acgtcgcctaacctcttcaacttcgaaataacgaccaccaaatcgctaaaccacgccccgaaaacgaaacctaaattcaaaccaaaacgataaatacccgaaccaaattaaaaatcgactaccaataaaactcgcgcaaaatcgaaaaaccgataacgtcgcaaatcgaaaaaacgaacaccgaatcgaaaactcgctcgtctaaaccgcccgaaaatcttaatcgcgaacgcttaaaccgccatcttaaataacgaaaataaaaaaaaaacgattataaaacgaaaacgactttctactaccttttttaaaccccgaaaaaaatcaactaaccgaactttaaaacgcgtaccctaaaacgcgaaacgcgtttactacgatacgaaaactactcgaaactccgtcccctaaactaaaaacgcgccgaatataaccgcctcccgctccctcacccgccgcgaaaaaaaaaaacgaacgaaaaactaccgccgaacgacaaaacgttaaaacgaccctaactccctcaaataaataacaaaaccgaatcgtaaataccgaaaaaaccgaacgacgaaactaaaaaatcgacttccaaaacgaccgaacctaaataacgctaataaaacgccctcgcgactaccgaacaaaaaacttaaaccaacccgctatcaccccgaataacgttaaacgaaaaccccgaaatccgatatcataaccgacgaaccgaattcccacatcccactcaaatttccttatatttaacgaaaacgtaccaacgccacccttataccatacgcattcctcatatttaacaataaaaaaatccgcccaaaactaccccatatctattatcacttaaa

SEQ ID NO: 32237 - DNA, 542 bp, Artificial Sequence
  chemically treated genomic DNA (Homo sapiens) CpG-island No: 32237
gcgtcggttttagggcgttgtgggtcgcggtaaggtcgaggttcggtggcgaggtttgtacgttcgcgggagtgggtcgttagttagagtcgagagagggtttcgttcgagttttgtagttaggtttttaggtcggtcgcgggtcggggcgtcggtcgttgggaaatttcgcggtttggcggagtgtaggggtcgggtcggtttcggggattggagggtggggtggttcggtcgggaggcgagcgttttgcgttcgaaggagttaaaatcgagattgatagacgggacggcgagcggggtttattggtcggggagaaggggtcggggcggcgaaagtaagtttagtagggttcgcggttgttggttttttaggtttttcggtaggatgagtcgttgacggtttaggagggggtcgttttttttggtttcgaagggcgaggtcgttatagcgggggttttcgttacggttgaggtttttcgcgtttcgagtagacggggtttagttgggtttgtttcgggttttcggggatttttttaggaaa

SEQ ID NO: 32238 - DNA, 542 bp, Artificial Sequence
  chemically treated genomic DNA (Homo sapiens) CpG-island No: 32238
tttcctaaaaaaatccccgaaaacccgaaacaaacccaactaaaccccgtctactcgaaacgcgaaaaacctcaaccgtaacgaaaacccccgctataacgacctcgcccttcgaaaccaaaaaaaacgaccccctcctaaaccgtcaacgactcatcctaccgaaaaacctaaaaaaccaacaaccgcgaaccctactaaacttactttcgccgccccgaccccttctccccgaccaataaaccccgctcgccgtcccgtctatcaatctcgattttaactccttcgaacgcaaaacgctcgcctcccgaccgaaccaccccaccctccaatccccgaaaccgacccgacccctacactccgccaaaccgcgaaatttcccaacgaccgacgccccgacccgcgaccgacctaaaaacctaactacaaaactcgaacgaaaccctctctcgactctaactaacgacccactcccgcgaacgtacaaacctcgccaccgaacctcgaccttaccgcgacccacaacgccctaaaaccgacgc

SEQ ID NO: 32239 - DNA, 542 bp, Artificial Sequence
  chemically treated genomic DNA (Homo sapiens) CpG-island No: 32239
ttttttgggaggattttcgggggttcgaggtaggtttagttgggtttcgtttgttcgggacgcgggaggttttagtcgtggcgggagttttcgttgtggcggtttcgtttttcgaggttaggagaagcggtttttttttaagtcgttagcggtttattttatcgggagatttggaaaattagtagtcgcgggttttgttgggtttgttttcgtcgtttcggtttttttttttcggttagtggatttcgttcgtcgtttcgtttgttagtttcggttttagttttttcgggcgtagggcgttcgtttttcggtcgggttattttattttttaattttcgaggtcgattcgatttttgtatttcgttaggtcgcgaggttttttagcgatcggcgtttcggttcgcggtcgatttggaggtttgattgtagggttcgggcggggttttttttcggttttggttggcggtttattttcgcgggcgtataggtttcgttatcgggtttcggttttgtcgcggtttatagcgttttgggatcggcgt

SEQ ID NO: 32240 - DNA, 542 bp, Artificial Sequence
  chemically treated genomic DNA (Homo sapiens) CpG-island No: 32240
acgccgatcccaaaacgctataaaccgcgacaaaaccgaaacccgataacgaaacctatacgcccgcgaaaataaaccgccaaccaaaaccgaaaaaaaaccccgcccgaaccctacaatcaaacctccaaatcgaccgcgaaccgaaacgccgatcgctaaaaaacctcgcgacctaacgaaatacaaaaatcgaatcgacctcgaaaattaaaaaataaaataacccgaccgaaaaacgaacgccctacgcccgaaaaaactaaaaccgaaactaacaaacgaaacgacgaacgaaatccactaaccgaaaaaaaaaaaccgaaacgacgaaaacaaacccaacaaaacccgcgactactaattttccaaatctcccgataaaataaaccgctaacgacttaaaaaaaaaccgcttctcctaacctcgaaaaacgaaaccgccacaacgaaaactcccgccacgactaaaacctcccgcgtcccgaacaaacgaaacccaactaaacctacctcgaacccccgaaaatcctcccaaaaaa

SEQ ID NO: 32241 - DNA, 1111 bp, Artificial Sequence
  chemically treated genomic DNA (Homo sapiens) CpG-island No: 32241
cgcgttttttttagtagttcgttgcggatagattattttaatttcgtaggagtgcggagttcggttcgaaggcgggcggggttaaggggcgagtttgcgtcgttaatcgaaggtcgtttataaagagtcgagttcgaggttagtcgtgtaggaaagtagtcgggattattagaaacgtttttcgggattttggcgattatttatttatgggtcgtttgaaggtttttttcgagaagtattagattagcggatttggtagttgtatcgaatattcgggttatagcgagttcggcggtttcgtttttcggtaattcgggcgatagtttcgaagtttttttttcgttttcgggtttaggtttcgagatttcgtttttcggacgtggttggttagcgtttcgtttttttttcgcggagttagtgggtaagggtcgggtttgaagttatagttgcgggatcgtattcgtttttttcgacgtagattatggagagcgcgttggcggtgtttcggttgttttcgtatgatttagggacgtcggtgttgtcggtggtggatatgtatacgggcggcgagtttttgcgtatcgtgttggcggggtgttcggaggtgtttgggtttattttgttggttaagcggcgttatatgcgttagtattttgattacgtgcggcgacggtttatgttcgagtttcgagggtatcgggatatgtacggggcggttttagtttcgagcgagttgtcggacgcgtatttgggcgttttgtttttgtataacgagggttatagttttatgtgcggttacgtagtgtggcgttgggtcgtttcgttttggatttcgggtttgtgtcggcgttttttgcgggtattcgcgaggttcgcgttaatatttattgtttttgcgggttggtgatcgttttcgtggtatgcgaggacggtcgtagttacggatcggtgcgtttttatagcgtttcggttttcgtgttggttataggtaatgggcgggatttttttagtttagggtagagttgtaatcgggacgcgattaattatattaacggtttttttgggttggaattttggtaattaatttatttcgcgaatttttgtaattaat

SEQ ID NO: 32242 - DNA, 1111 bp, Artificial Sequence
  chemically treated genomic DNA (Homo sapiens) CpG-island No: 32242
attaattacaaaaattcgcgaaataaattaattaccaaaattccaacccaaaaaaaccgttaatataattaatcgcgtcccgattacaactctaccctaaactaaaaaaatcccgcccattacctataaccaacacgaaaaccgaaacgctataaaaacgcaccgatccgtaactacgaccgtcctcgcataccacgaaaacgatcaccaacccgcaaaaacaataaatattaacgcgaacctcgcgaatacccgcaaaaaacgccgacacaaacccgaaatccaaaacgaaacgacccaacgccacactacgtaaccgcacataaaactataaccctcgttatacaaaaacaaaacgcccaaatacgcgtccgacaactcgctcgaaactaaaaccgccccgtacatatcccgataccctcgaaactcgaacataaaccgtcgccgcacgtaatcaaaatactaacgcatataacgccgcttaaccaacaaaataaacccaaacacctccgaacaccccgccaacacgatacgcaaaaactcgccgcccgtatacatatccaccaccgacaacaccgacgtccctaaatcatacgaaaacaaccgaaacaccgccaacgcgctctccataatctacgtcgaaaaaaacgaatacgatcccgcaactataacttcaaacccgacccttacccactaactccgcgaaaaaaaaacgaaacgctaaccaaccacgtccgaaaaacgaaatctcgaaacctaaacccgaaaacgaaaaaaaaacttcgaaactatcgcccgaattaccgaaaaacgaaaccgccgaactcgctataacccgaatattcgatacaactaccaaatccgctaatctaatacttctcgaaaaaaaccttcaaacgacccataaataaataatcgccaaaatcccgaaaaacgtttctaataatcccgactactttcctacacgactaacctcgaactcgactctttataaacgaccttcgattaacgacgcaaactcgccccttaaccccgcccgccttcgaaccgaactccgcactcctacgaaattaaaataatctatccgcaacgaactactaaaaaaaacgcg

SEQ ID NO: 32243 - DNA, 1111 bp, Artificial Sequence
  chemically treated genomic DNA (Homo sapiens) CpG-island No: 32243
attaattgtaagggttcgcggagtaggttagttgttagagttttagtttagaaaaatcgttaatgtagttagtcgcgtttcggttgtagttttgttttgggttggaaaggtttcgtttattatttgtggttagtacgaaggtcgggacgttgtggaagcgtatcggttcgtggttgcggtcgttttcgtatgttacgaaggcggttattagttcgtaggggtagtggatattgacgcgggtttcgcgggtgttcgtagggggcgtcggtataagttcgaagtttaaagcgaagcggtttagcgttatattgcgtggtcgtatatggagttgtagttttcgttgtgtaggaataggacgtttagatgcgcgttcggtagttcgttcgggattaggatcgtttcgtatatgtttcggtgttttcggggttcgaatatgagtcgtcgtcgtacgtggttaaggtgttggcgtatgtagcgtcgtttggttagtagggtgggtttagatattttcggatatttcgttagtacgatacgtaagggttcgtcgttcgtgtgtatgtttattatcgatagtatcggcgtttttggattatgcgggggtagtcggggtatcgttagcgcgttttttatggtttgcgtcgggggagacgagtacggtttcgtagttatggttttaagttcgatttttatttattgatttcgcgggaggagggcgggacgttaattagttacgttcggggggcggggtttcggagtttaaattcggaagcgagggaggaatttcggagttgtcgttcgggttatcgggaggcggagtcgtcgagttcgttgtggttcggatgttcggtgtagttgttagattcgttgatttagtgtttttcgaaaaaaatttttaggcggtttatgggtgagtggtcgttaagatttcgggaagcgtttttggtagtttcgattatttttttatacggttggtttcgggttcggttttttgtaggcggttttcggttggcggcgtaggttcgttttttgatttcgttcgttttcgggtcgggtttcgtatttttgcggggttggggtggtttgttcgtaacgggttattaggggaggcgcg

SEQ ID NO: 32244 - DNA, 1111 bp, Artificial Sequence
  chemically treated genomic DNA (Homo sapiens) CpG-island No: 32244
cgcgcctcccctaataacccgttacgaacaaaccaccccaaccccgcaaaaatacgaaacccgacccgaaaacgaacgaaatcaaaaaacgaacctacgccgccaaccgaaaaccgcctacaaaaaaccgaacccgaaaccaaccgtataaaaaaataatcgaaactaccaaaaacgcttcccgaaatcttaacgaccactcacccataaaccgcctaaaaatttttttcgaaaaacactaaatcaacgaatctaacaactacaccgaacatccgaaccacaacgaactcgacgactccgcctcccgataacccgaacgacaactccgaaattcctccctcgcttccgaatttaaactccgaaaccccgccccccgaacgtaactaattaacgtcccgccctcctcccgcgaaatcaataaataaaaatcgaacttaaaaccataactacgaaaccgtactcgtctcccccgacgcaaaccataaaaaacgcgctaacgataccccgactacccccgcataatccaaaaacgccgatactatcgataataaacatacacacgaacgacgaacccttacgtatcgtactaacgaaatatccgaaaatatctaaacccaccctactaaccaaacgacgctacatacgccaacaccttaaccacgtacgacgacgactcatattcgaaccccgaaaacaccgaaacatatacgaaacgatcctaatcccgaacgaactaccgaacgcgcatctaaacgtcctattcctacacaacgaaaactacaactccatatacgaccacgcaatataacgctaaaccgcttcgctttaaacttcgaacttataccgacgccccctacgaacacccgcgaaacccgcgtcaatatccactacccctacgaactaataaccgccttcgtaacatacgaaaacgaccgcaaccacgaaccgatacgcttccacaacgtcccgaccttcgtactaaccacaaataataaacgaaacctttccaacccaaaacaaaactacaaccgaaacgcgactaactacattaacgatttttctaaactaaaactctaacaactaacctactccgcgaacccttacaattaat

SEQ ID NO: 32245 - DNA, 1177 bp, Artificial Sequence
  chemically treated genomic DNA (Homo sapiens) CpG-island No: 32245
atttggtattttcggaaattcgaatattcgggtcggtaattttcggagtggcggtgtcgcgggtcggttttgtagcgggtattgggttgtcgtttcgtttcgcgtttttgcgtaaatacgcggttttttcggtaacgttggaatttacgttaaaggtttcgttaggtttttagcgatcgttattttttcggtcgagtttagtttttcgcggcggtcgttagttttcggtttcgagttattatttcgatttagtggtcgtcgttttcggtgcgggatgaggagattcgcggtcgttattgggttttatggaggagtcgtcgtcgtttcgtttattagcgagtatggttttattgggtagttagtatttcggcgtttttttcgcggtcggtttatttggcgggatttttttcgcggttacggcggtcgtgtttttttttagtatcgtggcgatcgcggcgttggggaatttgagcgacgtaagcggaggcggtatagttgtcgttttcggtggcggcggttttggcgggttcggggtagcgcgggaggcgggggcggcggtgaggcggtcgttaggttcggaggcggcgtcgttgttgtcgtacggagttgtagtggcggtttaggcgttcgtttttttgtttatttttttgttgtttagttttggtaattgcgcggtgatgggggtgattgtgaagtatcggtagtttcgtatcgttattaacgtttttattttgtcgttgtttttatcggatttgtttacggcgttgttttgtttgttcgtcgtttttttggatttttttatttcgttcgggggttcggcgtttgtcgtcgtcgcggggttttggcgcggtttttgcgtcgttagtcgtttttttagttcgtgtttcggtatcgtgtttacgtttagcgtggcgtttatttcgttggatcgttattgcgttatcgtgcggtcgtcgcgggagaagatcggtcgtcgtcgcgcgttgtagttgttggcgggcgtttggttgacggttttgggtttttttttgttttgggagttgttcggggcgtttcgggaattcgcggcggcgtagagtttttacggttgtttttatcggattttttcggatttcgcgtagttgggcgcggtttttagcgtggggttggtggtggtttgttatttgttgtttttttt

SEQ ID NO: 32246 - DNA, 1177 bp, Artificial Sequence
  chemically treated genomic DNA (Homo sapiens) CpG-island No: 32246
aaaaaaaacaacaaataacaaaccaccaccaaccccacgctaaaaaccgcgcccaactacgcgaaatccgaaaaaatccgataaaaacaaccgtaaaaactctacgccgccgcgaattcccgaaacgccccgaacaactcccaaaacaaaaaaaaacccaaaaccgtcaaccaaacgcccgccaacaactacaacgcgcgacgacgaccgatcttctcccgcgacgaccgcacgataacgcaataacgatccaacgaaataaacgccacgctaaacgtaaacacgataccgaaacacgaactaaaaaaacgactaacgacgcaaaaaccgcgccaaaaccccgcgacgacgacaaacgccgaacccccgaacgaaataaaaaaatccaaaaaaacgacgaacaaacaaaacaacgccgtaaacaaatccgataaaaacaacgacaaaataaaaacgttaataacgatacgaaactaccgatacttcacaatcacccccatcaccgcgcaattaccaaaactaaacaacaaaaaaataaacaaaaaaacgaacgcctaaaccgccactacaactccgtacgacaacaacgacgccgcctccgaacctaacgaccgcctcaccgccgcccccgcctcccgcgctaccccgaacccgccaaaaccgccgccaccgaaaacgacaactataccgcctccgcttacgtcgctcaaattccccaacgccgcgatcgccacgatactaaaaaaaaacacgaccgccgtaaccgcgaaaaaaatcccgccaaataaaccgaccgcgaaaaaaacgccgaaatactaactacccaataaaaccatactcgctaataaacgaaacgacgacgactcctccataaaacccaataacgaccgcgaatctcctcatcccgcaccgaaaacgacgaccactaaatcgaaataataactcgaaaccgaaaactaacgaccgccgcgaaaaactaaactcgaccgaaaaaataacgatcgctaaaaacctaacgaaacctttaacgtaaattccaacgttaccgaaaaaaccgcgtatttacgcaaaaacgcgaaacgaaacgacaacccaatacccgctacaaaaccgacccgcgacaccgccactccgaaaattaccgacccgaatattcgaatttccgaaaataccaaat

SEQ ID NO: 32247 - DNA, 1177 bp, Artificial Sequence
  chemically treated genomic DNA (Homo sapiens) CpG-island No: 32247
aggaagggtagtaggtagtaggttattattagttttacgttgaaggtcgcgtttagttgcgcggggttcggggaggttcggtagaggtagtcgtggaagttttgcgtcgtcgcgagttttcggggcgtttcgagtagtttttagggtaaggagaagtttagggtcgttagttaggcgttcgttagtagttgtagcgcgcggcggcggtcgattttttttcgcggcggtcgtacgatagcgtagtaacggtttaacgagatgagcgttacgttgagcgtggatacgatgtcgaagtacgagttgaagaagcggttggcggcgtagaagtcgcgttagggtttcgcggcggcggtaggcgtcgaattttcgggcggagtgaagaggtttaggaaggcggcgggtaggtagagtagcgtcgtgagtagattcgatagggatagcgataggatgaaggcgttggtgacggtgcggagttgtcggtgttttataattatttttattatcgcgtagttgttaaggttagatagtaggaagatgagtaggaggacgagcgtttgggtcgttattgtagtttcgtgcgatagtagcggcgtcgttttcgggtttagcggtcgttttatcgtcgttttcgtttttcgcgttgtttcggattcgttaaggtcgtcgttatcgggagcggtagttgtgtcgttttcgtttgcgtcgtttaggttttttagcgtcgcggtcgttacggtgttgaaggagagtacggtcgtcgtggtcgcggaggaagtttcgttaggtgggtcggtcgcggagggggcgtcggagtgttggttgtttagtaaggttatgttcgttggtgggcggggcggcggcggtttttttatggggtttagtggcggtcgcggatttttttatttcgtatcgggggcggcggttattaggtcggagtggtggttcggggtcgggggttagcggtcgtcgcggggagttgggttcggtcggaggggtggcggtcgttggggatttggcggagtttttgacgtgggttttagcgttgtcgagggaatcgcgtgtttacgtaggagcgcggggcgggacggtagtttagtattcgttgtaaagtcgattcgcgatatcgttatttcggaggttatcggttcgggtgttcgggttttcgagagtgttaggt

SEQ ID NO: 32248 - DNA, 1177 bp, Artificial Sequence
  chemically treated genomic DNA (Homo sapiens) CpG-island No: 32248
acctaacactctcgaaaacccgaacacccgaaccgataacctccgaaataacgatatcgcgaatcgactttacaacgaatactaaactaccgtcccgccccgcgctcctacgtaaacacgcgattccctcgacaacgctaaaacccacgtcaaaaactccgccaaatccccaacgaccgccacccctccgaccgaacccaactccccgcgacgaccgctaacccccgaccccgaaccaccactccgacctaataaccgccgcccccgatacgaaataaaaaaatccgcgaccgccactaaaccccataaaaaaaccgccgccgccccgcccaccaacgaacataaccttactaaacaaccaacactccgacgccccctccgcgaccgacccacctaacgaaacttcctccgcgaccacgacgaccgtactctccttcaacaccgtaacgaccgcgacgctaaaaaacctaaacgacgcaaacgaaaacgacacaactaccgctcccgataacgacgaccttaacgaatccgaaacaacgcgaaaaacgaaaacgacgataaaacgaccgctaaacccgaaaacgacgccgctactatcgcacgaaactacaataacgacccaaacgctcgtcctcctactcatcttcctactatctaaccttaacaactacgcgataataaaaataattataaaacaccgacaactccgcaccgtcaccaacgccttcatcctatcgctatccctatcgaatctactcacgacgctactctacctacccgccgccttcctaaacctcttcactccgcccgaaaattcgacgcctaccgccgccgcgaaaccctaacgcgacttctacgccgccaaccgcttcttcaactcgtacttcgacatcgtatccacgctcaacgtaacgctcatctcgttaaaccgttactacgctatcgtacgaccgccgcgaaaaaaaatcgaccgccgccgcgcgctacaactactaacgaacgcctaactaacgaccctaaacttctccttaccctaaaaactactcgaaacgccccgaaaactcgcgacgacgcaaaacttccacgactacctctaccgaacctccccgaaccccgcgcaactaaacgcgaccttcaacgtaaaactaataataacctactacctactacccttcct

SEQ ID NO: 32249 - DNA, 555 bp, Artificial Sequence
  chemically treated genomic DNA (Homo sapiens) CpG-island No: 32249
  unsure (466..)
ttatagtttttataaggagatgttcggtatgagttagagtttgttttcgttggtcgttacgtcgttgggtaacgggttaggcggtttttataacgcgtagtagagtttgtttaattacggttcgtcgggttacgataaaatgtttagttttaatttcgacgcgtattatattgttatgttgattcgcggtgagtaatatttgtttcgcggtttgggtattttatttgcggttatgatgtcgtatttgaacggtttgtattattcgggttatatttagttttacgggtcggtgttggtatttagtcgcgagcggttattttcgtttttatcgggttcgtaggtggttacgtcgggttagttggaagaaattaatattaaagaggtggtttagcgtattatagcggagttgaagcgttatagtattttttaggcgatttttgcgtagagggtgttgtgtcggttttannngatttttttcgatttgtttcggaatttaaaatcgtggagtaaatttaaatttggtagggagatttttcgtaggatgtggaagtggtt

SEQ ID NO: 32250 - DNA, 555 bp, Artificial Sequence
  chemically treated genomic DNA (Homo sapiens) CpG-island No: 32250
  unsure (88..)
aaccacttccacatcctacgaaaaatctccctaccaaatttaaatttactccacgattttaaattccgaaacaaatcgaaaaaaatcnnntaaaaccgacacaacaccctctacgcaaaaatcgcctaaaaaatactataacgcttcaactccgctataatacgctaaaccacctctttaatattaatttcttccaactaacccgacgtaaccacctacgaacccgataaaaacgaaaataaccgctcgcgactaaataccaacaccgacccgtaaaactaaatataacccgaataatacaaaccgttcaaatacgacatcataaccgcaaataaaatacccaaaccgcgaaacaaatattactcaccgcgaatcaacataacaatataatacgcgtcgaaattaaaactaaacattttatcgtaacccgacgaaccgtaattaaacaaactctactacgcgttataaaaaccgcctaacccgttacccaacgacgtaacgaccaacgaaaacaaactctaactcataccgaacatctccttataaaaactataa

SEQ ID NO: 32251 - DNA, 555 bp, Artificial Sequence
  chemically treated genomic DNA (Homo sapiens) CpG-island No: 32251
  unsure (88..)
agttatttttatattttgcggaaggtttttttgttagatttgagtttattttacggttttggatttcggagtaggtcggagagagttnnntgagatcggtatagtattttttgcgtaaagatcgtttgggggatattgtagcgttttagtttcgttgtgatgcgttgggttatttttttggtgttgattttttttagttggttcgacgtggttatttgcgagttcgatgaggacgagggtggtcgttcgcgattgggtgttagtatcggttcgtgagattgagtgtggttcgggtggtgtaggtcgtttaggtgcgatattatggtcgtaggtggggtgtttaggtcgcgggataggtgttgtttatcgcgggttagtatggtagtgtggtgcgcgtcgaagttggggttgagtattttgtcgtggttcggcggatcgtagttgggtagattttgttgcgcgttgtggaggtcgtttagttcgttgtttagcggcgtggcggttagcggggataggttttggtttatgtcgggtatttttttgtagggattgtag

SEQ ID NO: 32252 - DNA, 555 bp, Artificial Sequence
  chemically treated genomic DNA (Homo sapiens) CpG-island No: 32252
  unsure (466..)
ctacaatccctacaaaaaaatacccgacataaaccaaaacctatccccgctaaccgccacgccgctaaacaacgaactaaacgacctccacaacgcgcaacaaaatctacccaactacgatccgccgaaccacgacaaaatactcaaccccaacttcgacgcgcaccacactaccatactaacccgcgataaacaacacctatcccgcgacctaaacaccccacctacgaccataatatcgcacctaaacgacctacaccacccgaaccacactcaatctcacgaaccgatactaacacccaatcgcgaacgaccaccctcgtcctcatcgaactcgcaaataaccacgtcgaaccaactaaaaaaaatcaacaccaaaaaaataacccaacgcatcacaacgaaactaaaacgctacaatatcccccaaacgatctttacgcaaaaaatactataccgatctcannnaactctctccgacctactccgaaatccaaaaccgtaaaataaactcaaatctaacaaaaaaaccttccgcaaaatataaaaataact

SEQ ID NO: 32253 - DNA, 503 bp, Artificial Sequence
  chemically treated genomic DNA (Homo sapiens) CpG-island No: 32253
ttagatggtgagagtcgcggggatattcgacgtcggggtaggttgatttacgattttgggtgtgcgtaacgtcgtttggggtttcgtgggcgagggacgtgtggggataggtgtatcggaaattgttagattggagagttgaggtatcggaggcgcgagaatagtattattattgcggcgagacgagcgcggcgtattttaaagttcggttaaatgcgttcgtttttgggaggggagggaggcgcgtttggagcggggataggtgaggtcgcgcgaacgttttagtttggcgcggttgcgggattcgggcgcgttgggaaagcgagtaggatttcgcgcgggaattagggagtatcgtaggttgtcgggtagtttttcgcggaagtgcgggttggggcgggttggggcgggttggggtaggtcggggcgtttagtttattttttttcggggtttgtttcgtcgttttgatggaggtgtaaatatttggagaagggcgggggtg

SEQ ID NO: 32254 - DNA, 503 bp, Artificial Sequence
  chemically treated genomic DNA (Homo sapiens) CpG-island No: 32254
cacccccgcccttctccaaatatttacacctccatcaaaacgacgaaacaaaccccgaaaaaaaataaactaaacgccccgacctaccccaacccgccccaacccgccccaacccgcacttccgcgaaaaactacccgacaacctacgatactccctaattcccgcgcgaaatcctactcgctttcccaacgcgcccgaatcccgcaaccgcgccaaactaaaacgttcgcgcgacctcacctatccccgctccaaacgcgcctccctcccctcccaaaaacgaacgcatttaaccgaactttaaaatacgccgcgctcgtctcgccgcaataataatactattctcgcgcctccgatacctcaactctccaatctaacaatttccgatacacctatccccacacgtccctcgcccacgaaaccccaaacgacgttacgcacacccaaaatcgtaaatcaacctaccccgacgtcgaatatccccgcgactctcaccatctaa

SEQ ID NO: 32255 - DNA, 503 bp, Artificial Sequence
  chemically treated genomic DNA (Homo sapiens) CpG-island No: 32255
tattttcgtttttttttaaatgtttgtatttttattaaagcggcggggtaagtttcggaggaaggtaagttggacgtttcggtttgttttagttcgttttagttcgttttagttcgtattttcgcgaggggttgttcggtagtttgcgatgttttttgattttcgcgcggggttttgttcgtttttttagcgcgttcggatttcgtagtcgcgttaggttggaacgttcgcgcggttttatttgttttcgttttaggcgcgtttttttttttttttagggacgagcgtatttggtcgggttttgggatgcgtcgcgttcgtttcgtcgtagtagtagtgttgttttcgcgttttcgatgttttaattttttagtttggtagttttcggtgtatttgtttttatacgtttttcgtttacggagttttaggcggcgttacgtatatttaggatcgtggattagtttgtttcggcgtcgggtgttttcgcggtttttattatttgg

SEQ ID NO: 32256 - DNA, 503 bp, Artificial Sequence
  chemically treated genomic DNA (Homo sapiens) CpG-island No: 32256
ccaaataataaaaaccgcgaaaacacccgacgccgaaacaaactaatccacgatcctaaatatacgtaacgccgcctaaaactccgtaaacgaaaaacgtataaaaacaaatacaccgaaaactaccaaactaaaaaattaaaacatcgaaaacgcgaaaacaacactactactacgacgaaacgaacgcgacgcatcccaaaacccgaccaaatacgctcgtccctaaaaaaaaaaaaaaacgcgcctaaaacgaaaacaaataaaaccgcgcgaacgttccaacctaacgcgactacgaaatccgaacgcgctaaaaaaacgaacaaaaccccgcgcgaaaatcaaaaaacatcgcaaactaccgaacaacccctcgcgaaaatacgaactaaaacgaactaaaacgaactaaaacaaaccgaaacgtccaacttaccttcctccgaaacttaccccgccgctttaataaaaatacaaacatttaaaaaaaaacgaaaata

SEQ ID NO: 32257 - DNA, 509 bp, Artificial Sequence
  chemically treated genomic DNA (Homo sapiens) CpG-island No: 32257
ggcgtaggggtttaaagagttacggcgtttcgtattattgatcgtattggggattcgacgcgaatttattttattacgagttaggcgaggaaaagtttggacgtcgttgcgtcgaggcgtcgatcgtttacggttttttttttggtttattcgatttttatttattcgcgggggagggagtcggtcgcgtattatcgagttataggatacgtttcggtcgggtcggtcgaggtttaggcgggcggttgcgggttcgagattcggtcgggggcggtcggtcgcgttttattttatttattggtcggttagtcgcggggtcgaatcgtttttaaaattttttcgtttttttttttttttttcgggtcgggtagggggcgggcgcggggcggggtagcgtcgtcgttatgtgttttcgagtcggttcgtttttagtttttttgttttgttttttaattttgtttcgttttttaatttaaggttaattttttttttttttgtttcgaaattag

SEQ ID NO: 32258 - DNA, 509 bp, Artificial Sequence
  chemically treated genomic DNA (Homo sapiens) CpG-island No: 32258
ctaatttcgaaacaaaaaaaaaaaaaattaaccttaaattaaaaaacgaaacaaaattaaaaaacaaaacaaaaaaactaaaaacgaaccgactcgaaaacacataacgacgacgctaccccgccccgcgcccgccccctacccgacccgaaaaaaaaaaaaaaaaacgaaaaaattttaaaaacgattcgaccccgcgactaaccgaccaataaataaaataaaacgcgaccgaccgcccccgaccgaatctcgaacccgcaaccgcccgcctaaacctcgaccgacccgaccgaaacgtatcctataactcgataatacgcgaccgactccctcccccgcgaataaataaaaatcgaataaaccaaaaaaaaaaccgtaaacgatcgacgcctcgacgcaacgacgtccaaacttttcctcgcctaactcgtaataaaataaattcgcgtcgaatccccaatacgatcaataatacgaaacgccgtaactctttaaacccctacgcc

SEQ ID NO: 32259 - DNA, 509 bp, Artificial Sequence
  chemically treated genomic DNA (Homo sapiens) CpG-island No: 32259
ttgatttcgggataaggagggagaaagttggttttgagttgggggacgggatagagttgggggataggatagagaaattgggggcgggtcggttcgggggtatatgacggcgacgttgtttcgtttcgcgttcgttttttgttcggttcggggagggggggaggagacgggaaggttttaaaagcgattcggtttcgcggttggtcggttagtgagtggggtggagcgcggtcggtcgttttcggtcggatttcgggttcgtagtcgttcgtttgagtttcggtcggttcggtcggggcgtgttttgtagttcggtagtgcgcgatcggttttttttttcgcgggtaagtggaagtcggatggattaggaagaaggtcgtgagcgatcggcgtttcggcgtagcggcgtttagattttttttcgtttggttcgtagtgaagtagattcgcgtcgggtttttaatacgattagtaatgcgaggcgtcgtggttttttgaatttttgcgtt

SEQ ID NO: 32260 - DNA, 509 bp, Artificial Sequence
  chemically treated genomic DNA (Homo sapiens) CpG-island No: 32260
aacgcaaaaattcaaaaaaccacgacgcctcgcattactaatcgtattaaaaacccgacgcgaatctacttcactacgaaccaaacgaaaaaaaatctaaacgccgctacgccgaaacgccgatcgctcacgaccttcttcctaatccatccgacttccacttacccgcgaaaaaaaaaaccgatcgcgcactaccgaactacaaaacacgccccgaccgaaccgaccgaaactcaaacgaacgactacgaacccgaaatccgaccgaaaacgaccgaccgcgctccaccccactcactaaccgaccaaccgcgaaaccgaatcgcttttaaaaccttcccgtctcctccccccctccccgaaccgaacaaaaaacgaacgcgaaacgaaacaacgtcgccgtcatatacccccgaaccgacccgcccccaatttctctatcctatcccccaactctatcccgtcccccaactcaaaaccaactttctccctccttatcccgaaatcaa

SEQ ID NO: 32261 - DNA, 818 bp, Artificial Sequence
  chemically treated genomic DNA (Homo sapiens) CpG-island No: 32261
  unsure (602)
tttcgtttcggaaatcgtggtttgtaagtttaagaggtcggtttttgattcggtcgaatttatttgggagattttggaggtaatgaaggcgagtacgaaggtaaggggcgtcgggtcggaaatcgtgtaattttagatattttttagattcggtttatcgttttcgttcgtagtttgggttagggtgtttgtttatttgggttatgcgtttgcgaatttgcgttatttttttttgaaattcgatatttttttgcggattaagcgataggattggtttagtcggtttagaaaaagtcgttatgttaaaagttgtcgacgttaattacgcggcgttttcggaaacgtcgggtttttagttttttcgaggcggaagtagagttaggataggtggcggggcgaagcgttaaggcgaggcgaggcgtggcgaggagcggggagggttatgagtcgggcgcggggttggagtaggagttgttcggagaagcgggggcgtggtacggatgtggcgaggcgcgggtgggttttaaattgcgttaggggcgagggcgcgttcgaggtcgtgtcgagagattgggagaggcgtgagtcgcgcggattttgtnggggcgtgacgaggagcggagggcgggttttgagatacgtcgaggcgcggaggcggggtataggggcgtgtcgaggcgcggtagcggggtttggggttggggttgggtcgtggggagttttcgtattttcggttgtcggggcgtcggttggtttcgtttaagagtgtttgaaataattacgtttacgtttatttttaaaaaaggtttaaaataaat

SEQ ID NO: 32262 - DNA, 818 bp, Artificial Sequence
  chemically treated genomic DNA (Homo sapiens) CpG-island No: 32262
  unsure (217)
atttattttaaaccttttttaaaaataaacgtaaacgtaattatttcaaacactcttaaacgaaaccaaccgacgccccgacaaccgaaaatacgaaaactccccacgacccaaccccaaccccaaaccccgctaccgcgcctcgacacgcccctataccccgcctccgcgcctcgacgtatctcaaaacccgccctccgctcctcgtcacgccccnacaaaatccgcgcgactcacgcctctcccaatctctcgacacgacctcgaacgcgccctcgcccctaacgcaatttaaaacccacccgcgcctcgccacatccgtaccacgcccccgcttctccgaacaactcctactccaaccccgcgcccgactcataaccctccccgctcctcgccacgcctcgcctcgccttaacgcttcgccccgccacctatcctaactctacttccgcctcgaaaaaactaaaaacccgacgtttccgaaaacgccgcgtaattaacgtcgacaacttttaacataacgactttttctaaaccgactaaaccaatcctatcgcttaatccgcaaaaaaatatcgaatttcaaaaaaaaataacgcaaattcgcaaacgcataacccaaataaacaaacaccctaacccaaactacgaacgaaaacgataaaccgaatctaaaaaatatctaaaattacacgatttccgacccgacgccccttaccttcgtactcgccttcattacctccaaaatctcccaaataaattcgaccgaatcaaaaaccgacctcttaaacttacaaaccacgatttccgaaacgaaa

SEQ ID NO: 32263 - DNA, 818 bp, Artificial Sequence
  chemically treated genomic DNA (Homo sapiens) CpG-island No: 32263
  unsure (217)
atttattttagattttttttgaaagtaggcgtgaacgtaattgttttaggtatttttaagcgaagttagtcggcgtttcgatagtcgagggtgcgggagttttttacggtttagttttagttttagatttcgttgtcgcgtttcggtacgtttttgtgtttcgttttcgcgtttcggcgtattttaagattcgtttttcgtttttcgttacgttttnatagggttcgcgcgatttacgttttttttagtttttcggtacgatttcgaacgcgttttcgtttttggcgtaatttaaaatttattcgcgtttcgttatattcgtgttacgttttcgttttttcgggtaatttttgttttaatttcgcgttcgatttatggtttttttcgtttttcgttacgtttcgtttcgttttagcgtttcgtttcgttatttgttttgattttattttcgtttcgggggagttgggagttcgacgttttcgggagcgtcgcgtggttagcgtcggtagtttttggtatggcgattttttttgggtcggttgggttaattttgtcgtttaattcgtaggaagatgtcgagttttaaaaggaggtggcgtaggttcgtaagcgtataatttaggtgagtaggtattttggtttaggttgcgagcgggggcgatggatcgggtttagagagtatttggggttgtacggttttcggttcggcgttttttgttttcgtgttcgtttttattatttttagggttttttaagtggattcgatcgaattagggatcgattttttaagtttgtaggttacggttttcgagacgaaa

SEQ ID NO: 32264 - DNA, 818 bp, Artificial Sequence
  chemically treated genomic DNA (Homo sapiens) CpG-island No: 32264
  unsure (602)
tttcgtctcgaaaaccgtaacctacaaacttaaaaaatcgatccctaattcgatcgaatccacttaaaaaaccctaaaaataataaaaacgaacacgaaaacaaaaaacgccgaaccgaaaaccgtacaaccccaaatactctctaaacccgatccatcgcccccgctcgcaacctaaaccaaaatacctactcacctaaattatacgcttacgaacctacgccacctccttttaaaactcgacatcttcctacgaattaaacgacaaaattaacccaaccgacccaaaaaaaatcgccataccaaaaactaccgacgctaaccacgcgacgctcccgaaaacgtcgaactcccaactcccccgaaacgaaaataaaatcaaaacaaataacgaaacgaaacgctaaaacgaaacgaaacgtaacgaaaaacgaaaaaaaccataaatcgaacgcgaaattaaaacaaaaattacccgaaaaaacgaaaacgtaacacgaatataacgaaacgcgaataaattttaaattacgccaaaaacgaaaacgcgttcgaaatcgtaccgaaaaactaaaaaaaacgtaaatcgcgcgaaccctatnaaaacgtaacgaaaaacgaaaaacgaatcttaaaatacgccgaaacgcgaaaacgaaacacaaaaacgtaccgaaacgcgacaacgaaatctaaaactaaaactaaaccgtaaaaaactcccgcaccctcgactatcgaaacgccgactaacttcgcttaaaaatacctaaaacaattacgttcacgcctactttcaaaaaaaatctaaaataaat

SEQ ID NO: 32265 - DNA, 683 bp, Artificial Sequence
  chemically treated genomic DNA (Homo sapiens) CpG-island No: 32265
gttcgtcgcggggttttcggtgcgtttcgttttttcgattttcggtagtttcgcgttttaggagtaggtgtcgggagtttgcgcggttgttgtaatttgtgtttttagcggatcgtagtcgttggttattcgtttaggggaagggcgcgtaggcgggtatatggagagcggcggtggaatgtttcggtcggggtttcggggcggcgagcgagtttttttagtgttcgtcgtcgtcgggggtggagggcgcggtcgggtcggcggagttcgacggggcggcggagggcgcggtaggcggtagcggcgagggcgagagtgggggcgggtcgcggcgggttttgcgggtagtatacgtgcgtagtgagagtttttagggcggcgcggtcggcggttcggaggttggggcgcggtagtgtttgttgcgggtttgcgaggtcgagggcgtttattttattttcgtgtttttcggggagttggatttcggggagacggtcgtgttcgacgttttttacgacgtaggtgagagcggtttcgtttttattttagttttagtttatttatttttatacgagttagggtattcgtttcgttttttcgtttttttttttcgtttttttttttttcgttttttttttttttttttcgttttttttttttttttttcgtttttttttttttttttt

SEQ ID NO: 32266 - DNA, 683 bp, Artificial Sequence
  chemically treated genomic DNA (Homo sapiens) CpG-island No: 32266
aaaaaaaaaaaaaaaaaacgaaaaaaaaaaaaaaaaaacgaaaaaaaaaaaaaaaaaacgaaaaaaaaaaaaacgaaaaaaaaaaacgaaaaaacgaaacgaataccctaactcgtataaaaataaataaactaaaactaaaataaaaacgaaaccgctctcacctacgtcgtaaaaaacgtcgaacacgaccgtctccccgaaatccaactccccgaaaaacacgaaaataaaataaacgccctcgacctcgcaaacccgcaacaaacactaccgcgccccaacctccgaaccgccgaccgcgccgccctaaaaactctcactacgcacgtatactacccgcaaaacccgccgcgacccgcccccactctcgccctcgccgctaccgcctaccgcgccctccgccgccccgtcgaactccgccgacccgaccgcgccctccacccccgacgacgacgaacactaaaaaaactcgctcgccgccccgaaaccccgaccgaaacattccaccgccgctctccatatacccgcctacgcgcccttcccctaaacgaataaccaacgactacgatccgctaaaaacacaaattacaacaaccgcgcaaactcccgacacctactcctaaaacgcgaaactaccgaaaatcgaaaaaacgaaacgcaccgaaaaccccgcgacgaac

SEQ ID NO: 32267 - DNA, 683 bp, Artificial Sequence
  chemically treated genomic DNA (Homo sapiens) CpG-island No: 32267
agggggaggggagggggacgagggggaggggagggggacgagggggaggggagggggacgagggggagggggacgggggagaagggcgagggggcggggcgggtgttttggttcgtgtgagggtaggtgaattgggattgaggtggggacgaagtcgtttttatttgcgtcgtagaaggcgtcgagtacggtcgttttttcgaagtttagtttttcgaagggtacggaggtgaggtgagcgttttcggtttcgtaggttcgtagtaggtattgtcgcgttttagttttcgggtcgtcggtcgcgtcgttttgggagtttttattgcgtacgtatattgttcgtagagttcgtcgcggttcgtttttattttcgttttcgtcgttgtcgtttgtcgcgtttttcgtcgtttcgtcgggtttcgtcggttcggtcgcgttttttattttcggcggcggcgggtattgaggggattcgttcgtcgtttcgaggtttcggtcggagtattttatcgtcgttttttatgtgttcgtttgcgcgttttttttttgggcgagtggttagcggttgcgattcgttagaggtataagttatagtagtcgcgtaggttttcggtatttgtttttgaagcgcgggattatcgggaatcgagggaacggagcgtatcggggatttcgcggcgggt

SEQ ID NO: 32268 - DNA, 683 bp, Artificial Sequence
  chemically treated genomic DNA (Homo sapiens) CpG-island No: 32268
acccgccgcgaaatccccgatacgctccgttccctcgattcccgataatcccgcgcttcaaaaacaaataccgaaaacctacgcgactactataacttatacctctaacgaatcgcaaccgctaaccactcgcccaaaaaaaaaacgcgcaaacgaacacataaaaaacgacgataaaatactccgaccgaaacctcgaaacgacgaacgaatcccctcaatacccgccgccgccgaaaataaaaaacgcgaccgaaccgacgaaacccgacgaaacgacgaaaaacgcgacaaacgacaacgacgaaaacgaaaataaaaacgaaccgcgacgaactctacgaacaatatacgtacgcaataaaaactcccaaaacgacgcgaccgacgacccgaaaactaaaacgcgacaatacctactacgaacctacgaaaccgaaaacgctcacctcacctccgtacccttcgaaaaactaaacttcgaaaaaacgaccgtactcgacgccttctacgacgcaaataaaaacgacttcgtccccacctcaatcccaattcacctaccctcacacgaaccaaaacacccgccccgccccctcgcccttctcccccgtccccctccccctcgtccccctcccctccccctcgtccccctcccctccccctcgtccccctcccctccccct

SEQ ID NO: 32269 - DNA, 864 bp, Artificial Sequence
  chemically treated genomic DNA (Homo sapiens) CpG-island No: 32269
agttcgcgttaacgttttcgttttagtaggtttattcggtattttaaattcgaaagggtttgtagaaatcggggcggggtaagggtttattttcgtcgtggtagaaattgattttttttagaaagtttaaaaaattatttattaattatttcggttttttttttcgagagatgtcgtcgttcgtcgtttttttttaggttttgggtttggcgtaggttcggagggttggcgtcgtcggttttttttcgttattcgggttcggattcggcgtttacgggacgagttgttgtaattttttcgtattcgtttttttcggtcggggcggttttcggcgtcgggttttcgacgggtagagacgtttttcgtttcgtttattcgttcgggtggtgttcgttaggtcgtggttggtcgtttttcggggaaatttttttagttttcggtcgtttaggtttagtattttagtgatcgtcgttttttttagggttcgatcgagagagcggttttacgagttcgggttaaaattagggtttgtttcggagtttgggtcgtagtgaatattagggaggttatttttcgacgttatcgtgttagagtattcggtagtcgttgttatagcgattaagttcgcggtcgttattttttagtcgataatattcgggttcgttagtttagcgtatgcgcggtcggatcgttgggtgggcggagaaaggggtttacggatcgatttcggacggttttcgtgatgggtagtatcgtggtgtttttcggcgtagttaggcgtttgttttcgtttatatgatgcgttttttaagggaagttaaaacggattttataaatttagagtagttttttattttaattttt

SEQ ID NO: 32270 - DNA, 864 bp, Artificial Sequence
  chemically treated genomic DNA (Homo sapiens) CpG-island No: 32270
aaaaattaaaataaaaaactactctaaatttataaaatccgttttaacttcccttaaaaaacgcatcatataaacgaaaacaaacgcctaactacgccgaaaaacaccacgatactacccatcacgaaaaccgtccgaaatcgatccgtaaacccctttctccgcccacccaacgatccgaccgcgcatacgctaaactaacgaacccgaatattatcgactaaaaaataacgaccgcgaacttaatcgctataacaacgactaccgaatactctaacacgataacgtcgaaaaataacctccctaatattcactacgacccaaactccgaaacaaaccctaattttaacccgaactcgtaaaaccgctctctcgatcgaaccctaaaaaaaacgacgatcactaaaatactaaacctaaacgaccgaaaactaaaaaaatttccccgaaaaacgaccaaccacgacctaacgaacaccacccgaacgaataaacgaaacgaaaaacgtctctacccgtcgaaaacccgacgccgaaaaccgccccgaccgaaaaaaacgaatacgaaaaaattacaacaactcgtcccgtaaacgccgaatccgaacccgaataacgaaaaaaaaccgacgacgccaaccctccgaacctacgccaaacccaaaacctaaaaaaaaacgacgaacgacgacatctctcgaaaaaaaaaaccgaaataattaataaataattttttaaactttctaaaaaaaatcaatttctaccacgacgaaaataaacccttaccccgccccgatttctacaaaccctttcgaatttaaaataccgaataaacctactaaaacgaaaacgttaacgcgaact

SEQ ID NO: 32271 - DNA, 864 bp, Artificial Sequence
  chemically treated genomic DNA (Homo sapiens) CpG-island No: 32271
ggaggttagagtagggggttgttttggatttgtgaggttcgttttaattttttttgaaaagcgtattatgtgggcgggggtaagcgtttggttgcgtcggggggtattacggtgttgtttattacgggaatcgttcggggtcggttcgtgagttttttttttcgtttatttagcggttcggtcgcgtatgcgttgagttggcgggttcgagtgttgtcggttgggaaatggcggtcgcgggtttggtcgttgtggtagcggttgtcgagtattttggtacggtagcgtcgggaggtaatttttttggtgtttattgcggtttaagtttcggggtaggttttggttttggttcgggttcgtggagtcgttttttcgatcgagttttggaggaggcggcggttattggggtgttgagtttgagcggtcggaaattgagggagttttttcggggagcggttaattacgatttgacggatattattcgggcgggtgagcggggcggggggcgtttttgttcgtcggagattcggcgtcgggagtcgtttcggtcgggggaggcggatgcgggggagttatagtagttcgtttcgtaggcgtcgggttcggattcgggtaacggggagaagtcgacggcgttagtttttcgggtttgcgttagatttagagtttggggagaggcggcgggcggcggtatttttcggggaagggggtcggagtgattgatggatgattttttaggttttttgaggaaaattagtttttgttacggcggaggtagatttttgtttcgtttcggtttttgtaggttttttcggatttggggtgtcgaatggatttgttaagacgggaacgttagcgcgagtt

SEQ ID NO: 32272 - DNA, 864 bp, Artificial Sequence
  chemically treated genomic DNA (Homo sapiens) CpG-island No: 32272
aactcgcgctaacgttcccgtcttaacaaatccattcgacaccccaaatccgaaaaaacctacaaaaaccgaaacgaaacaaaaatctacctccgccgtaacaaaaactaattttcctcaaaaaacctaaaaaatcatccatcaatcactccgacccccttccccgaaaaataccgccgcccgccgcctctccccaaactctaaatctaacgcaaacccgaaaaactaacgccgtcgacttctccccgttacccgaatccgaacccgacgcctacgaaacgaactactataactcccccgcatccgcctcccccgaccgaaacgactcccgacgccgaatctccgacgaacaaaaacgccccccgccccgctcacccgcccgaataatatccgtcaaatcgtaattaaccgctccccgaaaaaactccctcaatttccgaccgctcaaactcaacaccccaataaccgccgcctcctccaaaactcgatcgaaaaaacgactccacgaacccgaaccaaaaccaaaacctaccccgaaacttaaaccgcaataaacaccaaaaaaattacctcccgacgctaccgtaccaaaatactcgacaaccgctaccacaacgaccaaacccgcgaccgccatttcccaaccgacaacactcgaacccgccaactcaacgcatacgcgaccgaaccgctaaataaacgaaaaaaaaaactcacgaaccgaccccgaacgattcccgtaataaacaacaccgtaataccccccgacgcaaccaaacgcttacccccgcccacataatacgcttttcaaaaaaaattaaaacgaacctcacaaatccaaaacaaccccctactctaacctcc

SEQ ID NO: 32273 - DNA, 525 bp, Artificial Sequence
  chemically treated genomic DNA (Homo sapiens) CpG-island No: 32273
  unsure (469, 472, 479)
tttcgtcgcgtttgtattttagtatagtatttttttatcgcggaatttcggggttcgtagcgattttttgtttttagtcgcggttattttttttttattttattggtcgcggcggtggtagagggtttgggggcggggtcggttgcgcgttcgggttgagcgagagtcgtagtagcgttcggttgtcgcgcgcgttttagttgggattcgtcgcgagttcgtttaggttatgcgcgcgattttgtttggttttttaagttttgacgcgggttgcgttttttttattttaaaggcggagcgggtaagaggtaagcggttgggttggttcgggaattttttgagcgtaggggcggacgggaggcgggtagtaatttttcgtttttgttttcgtttagagttggtcggtaggtttagaaattgaagtcggggatcggtgttttttcgtagattttcggtatttttttacggnttnacgttgnttgtttattgtttcggggtttttttggggaaaagggagggaaggga

SEQ ID NO: 32274 - DNA, 525 bp, Artificial Sequence
  chemically treated genomic DNA (Homo sapiens) CpG-island No: 32274
  unsure (47, 54, 57)
tcccttccctcccttttccccaaaaaaaccccgaaacaataaacaancaacgtnaanccgtaaaaaaataccgaaaatctacgaaaaaacaccgatccccgacttcaatttctaaacctaccgaccaactctaaacgaaaacaaaaacgaaaaattactacccgcctcccgtccgcccctacgctcaaaaaattcccgaaccaacccaaccgcttacctcttacccgctccgcctttaaaataaaaaaaacgcaacccgcgtcaaaacttaaaaaaccaaacaaaatcgcgcgcataacctaaacgaactcgcgacgaatcccaactaaaacgcgcgcgacaaccgaacgctactacgactctcgctcaacccgaacgcgcaaccgaccccgcccccaaaccctctaccaccgccgcgaccaataaaataaaaaaaaaataaccgcgactaaaaacaaaaaatcgctacgaaccccgaaattccgcgataaaaaaatactatactaaaatacaaacgcgacgaaa

SEQ ID NO: 32275 - DNA, 525 bp, Artificial Sequence
  chemically treated genomic DNA (Homo sapiens) CpG-island No: 32275
  unsure (47, 54, 57)
tttttttttttttttttttttaagggggtttcggagtaatgggtaantagcgtnaantcgtgagggggtgtcgaaaatttgcgggaaagtatcggttttcggttttagtttttaagtttatcggttagttttggacgggagtaagggcgagaggttgttgttcgtttttcgttcgtttttgcgtttaagaggttttcgaattagtttagtcgtttgttttttgttcgtttcgtttttgaagtgagaagggcgtagttcgcgttagaatttagagggttaggtagggtcgcgcgtatggtttgggcgggttcgcggcgggttttagttgggacgcgcgcggtagtcgagcgttgttgcggttttcgtttagttcgggcgcgtaatcggtttcgtttttaggttttttgttatcgtcgcgattaatgaggtgagagggaggtgatcgcggttgagggtagggggtcgttgcgaatttcggggtttcgcggtggaggggtgttatattgggatgtaggcgcggcgggg

SEQ ID NO: 32276 - DNA, 525 bp, Artificial Sequence
  chemically treated genomic DNA (Homo sapiens) CpG-island No: 32276
  unsure (469, 472, 479)
ccccgccgcgcctacatcccaatataacacccctccaccgcgaaaccccgaaattcgcaacgaccccctaccctcaaccgcgatcacctccctctcacctcattaatcgcgacgataacaaaaaacctaaaaacgaaaccgattacgcgcccgaactaaacgaaaaccgcaacaacgctcgactaccgcgcgcgtcccaactaaaacccgccgcgaacccgcccaaaccatacgcgcgaccctacctaaccctctaaattctaacgcgaactacgcccttctcacttcaaaaacgaaacgaacaaaaaacaaacgactaaactaattcgaaaacctcttaaacgcaaaaacgaacgaaaaacgaacaacaacctctcgcccttactcccgtccaaaactaaccgataaacttaaaaactaaaaccgaaaaccgatactttcccgcaaattttcgacaccccctcacganttnacgctanttacccattactccgaaacccccttaaaaaaaaaaaaaaaaaaaaa

SEQ ID NO: 32277 - DNA, 576 bp, Artificial Sequence
  chemically treated genomic DNA (Homo sapiens) CpG-island No: 32277
ttggagcggagagtatagcgcggttagttgcgtgagtcggggagtcggcgcgcgagttcgggggtgtaggggttgttggggtcgttagggtggggcggagggcgttgcggtcggggttcgtttgcgcggggagcgtcgggattaggacggtcgttagggagcgttgcggtttttaattcgttcgtttttcggtaggcggggtcgcgttttttttgtagtcgttatcgtagtcgtcgtttgggtcgtttcgtgttttcggtggagtcgtcgtcgtcgtcgtcgggagttcgatgcggacggagttcgggtcgagttatggggatttttagtattacggattaggttagtttttttgttttttttcgttttttttttttagggttcggcgttgtcgttacgcgagttcggggatgtgcggtttaggttgggtttgagttcggggttttcgtagttttcgtttcgttttatgtcgcgttttttttaatcgagtcggtgtttttggggatttggtaatcggcggaggtatcgcgggagttcgttttagttagaatttttagagtggagtttttttacgga

SEQ ID NO: 32278 - DNA, 576 bp, Artificial Sequence
  chemically treated genomic DNA (Homo sapiens) CpG-island No: 32278
tccgtaaaaaaactccactctaaaaattctaactaaaacgaactcccgcgatacctccgccgattaccaaatccccaaaaacaccgactcgattaaaaaaaacgcgacataaaacgaaacgaaaactacgaaaaccccgaactcaaacccaacctaaaccgcacatccccgaactcgcgtaacgacaacgccgaaccctaaaaaaaaaaaacgaaaaaaaacaaaaaaactaacctaatccgtaatactaaaaatccccataactcgacccgaactccgtccgcatcgaactcccgacgacgacgacgacgactccaccgaaaacacgaaacgacccaaacgacgactacgataacgactacaaaaaaaacgcgaccccgcctaccgaaaaacgaacgaattaaaaaccgcaacgctccctaacgaccgtcctaatcccgacgctccccgcgcaaacgaaccccgaccgcaacgccctccgccccaccctaacgaccccaacaacccctacacccccgaactcgcgcgccgactccccgactcacgcaactaaccgcgctatactctccgctccaa

SEQ ID NO: 32279 - DNA, 576 bp, Artificial Sequence
  chemically treated genomic DNA (Homo sapiens) CpG-island No: 32279
ttcgtggaggggttttattttagggattttggttggagcgagttttcgcggtgttttcgtcggttgttaggtttttaaggatatcggttcggttgaggggagcgcggtatggggcggggcgggagttgcgggagtttcgggtttaggtttagtttaggtcgtatattttcgggttcgcgtgacggtagcgtcgagttttggaaggaggaagcgggaaagggtaggagggttgatttggttcgtgatgttgaggatttttatggttcggttcgggtttcgttcgtatcgagttttcggcggcggcggcggcggttttatcggggatacggagcggtttaggcggcggttgcggtggcggttgtagggagagcgcggtttcgtttatcggggggcgggcgagttggaggtcgtagcgttttttggcggtcgttttggtttcggcgtttttcgcgtaaacggatttcggtcgtagcgtttttcgttttattttggcggttttagtagtttttgtattttcgaattcgcgcgtcggtttttcggtttacgtagttggtcgcgttgtgtttttcgttttag

SEQ ID NO: 32280 - DNA, 576 bp, Artificial Sequence
  chemically treated genomic DNA (Homo sapiens) CpG-island No: 32280
ctaaaacgaaaaacacaacgcgaccaactacgtaaaccgaaaaaccgacgcgcgaattcgaaaatacaaaaactactaaaaccgccaaaataaaacgaaaaacgctacgaccgaaatccgtttacgcgaaaaacgccgaaaccaaaacgaccgccaaaaaacgctacgacctccaactcgcccgccccccgataaacgaaaccgcgctctccctacaaccgccaccgcaaccgccgcctaaaccgctccgtatccccgataaaaccgccgccgccgccgccgaaaactcgatacgaacgaaacccgaaccgaaccataaaaatcctcaacatcacgaaccaaatcaaccctcctaccctttcccgcttcctccttccaaaactcgacgctaccgtcacgcgaacccgaaaatatacgacctaaactaaacctaaacccgaaactcccgcaactcccgccccgccccataccgcgctcccctcaaccgaaccgatatccttaaaaacctaacaaccgacgaaaacaccgcgaaaactcgctccaaccaaaatccctaaaataaaacccctccacgaa

SEQ ID NO: 32281 - DNA, 568 bp, Artificial Sequence
  chemically treated genomic DNA (Homo sapiens) CpG-island No: 32281
  unsure (502)
ttgttatataatcggaatagtcggtgaagtttagtaattgatcgtaacggttttacgttatggtttttcggttgtcggtggtatttttcgttgcgtagggtaagttattgtgtggattattataacggtagcgggtgatatcgtcgttaggggtagttttttgaattagacggtttaatttattatattttcggcgtaattttagttcgttaggttcggtggttgacgttaattggttgtggtggttatagtaaaacgtcgatgttttgttattcggcgtggttatgcgcgtgatgaggttcgttattatattcgggttgtattttgttgttttgtttgcggtattcgtttgtgttttgagtttgtttacggcgttaaattgattttgcgtgacgttgtcgttcgcgtgttttttttttattattcgttttagttcggtttcgttttgcgtgtgtagtaattttacggcggttttaggttgtcggagatgggtgatgtcggntttttttttattattgataatcgtggtaagttttaaagtttttggtcgggggtttttagatttgtt

SEQ ID NO: 32282 - DNA, 568 bp, Artificial Sequence
  chemically treated genomic DNA (Homo sapiens) CpG-island No: 32282
  unsure (67)
aacaaatctaaaaacccccgaccaaaaactttaaaacttaccacgattatcaataataaaaaaaaanccgacatcacccatctccgacaacctaaaaccgccgtaaaattactacacacgcaaaacgaaaccgaactaaaacgaataataaaaaaaaaacacgcgaacgacaacgtcacgcaaaatcaatttaacgccgtaaacaaactcaaaacacaaacgaataccgcaaacaaaacaacaaaatacaacccgaatataataacgaacctcatcacgcgcataaccacgccgaataacaaaacatcgacgttttactataaccaccacaaccaattaacgtcaaccaccgaacctaacgaactaaaattacgccgaaaatataataaattaaaccgtctaattcaaaaaactacccctaacgacgatatcacccgctaccgttataataatccacacaataacttaccctacgcaacgaaaaataccaccgacaaccgaaaaaccataacgtaaaaccgttacgatcaattactaaacttcaccgactattccgattatataacaa

SEQ ID NO: 32283 - DNA, 568 bp, Artificial Sequence
  chemically treated genomic DNA (Homo sapiens) CpG-island No: 32283
  unsure (67)
aataagtttaaaaattttcggttaagggttttaaagtttattacggttattagtaatgaagaaaagntcggtattatttattttcgatagtttgggatcgtcgtgaagttgttgtatacgtagggcgaagtcgggttgaagcgggtggtgaaaaaggaatacgcggacggtagcgttacgtagagttagtttgacgtcgtgggtaggtttagggtatagacggatgtcgtaggtaggataatagagtatagttcggatgtggtgacgggttttattacgcgtataattacgtcggatggtagggtatcggcgttttattataattattataattagttaacgttagttatcgggtttgacgggttggaattgcgtcgggaatatgatgaattgggtcgtttgatttaggaaattgtttttgacggcgatattattcgttatcgttatgataatttatatagtgatttattttgcgtaacggaagatgttatcggtagtcggaaaattatgacgtggagtcgttacggttagttgttgagttttatcgattgtttcggttatgtaataa

SEQ ID NO: 32284 - DNA, 568 bp, Artificial Sequence
  chemically treated genomic DNA (Homo sapiens) CpG-island No: 32284
  unsure (502)
ttattacataaccgaaacaatcgataaaactcaacaactaaccgtaacgactccacgtcataattttccgactaccgataacatcttccgttacgcaaaataaatcactatataaattatcataacgataacgaataatatcgccgtcaaaaacaatttcctaaatcaaacgacccaattcatcatattcccgacgcaattccaacccgtcaaacccgataactaacgttaactaattataataattataataaaacgccgataccctaccatccgacgtaattatacgcgtaataaaacccgtcaccacatccgaactatactctattatcctacctacgacatccgtctataccctaaacctacccacgacgtcaaactaactctacgtaacgctaccgtccgcgtattcctttttcaccacccgcttcaacccgacttcgccctacgtatacaacaacttcacgacgatcccaaactatcgaaaataaataataccgancttttcttcattactaataaccgtaataaactttaaaacccttaaccgaaaatttttaaacttatt

SEQ ID NO: 32285 - DNA, 730 bp, Artificial Sequence
  chemically treated genomic DNA (Homo sapiens) CpG-island No: 32285
gagcggaagaggtagtttaaggggagcgttaaggggtacgagttgttcgatagttgcgtagatcggcggtatggattttaacgagcggttgtagtaagaacgttttaacgcgtaggtttttttttgcgcgttggttggttagttgggtattattcggttgatagatatcgtttttggtattacgttggatgtcggataaatagtcgaatcgttggcgttgttcggtgaggatgatgatatggattttcgtttattacgtagttattaggtggtaaatggtatcgcggttttgtcggatttcggtacgttggttagtaaaattcgtgcgttttagttttatttcgggatgacggggtatagcgggattattgttcgtttgtagtaggtaattagagatttcggcgttgacgggatttttttggatatggatacgtcgggtggaatggtgttcggggcgtttgattgcgtcgatattattggtcgtatgcgcgatattaaatttatttgggcgttggttaaagataagaaattgtacgtaaggtaatttatttgttagagggtatcgcgacggttggttatataaacggttaggaacggttttattgggggtatgatggcgtataataattatggcgttgcgtttaaaaataaacggcgttgaggggtaacgttggaaattaaagggggtaaatcgttaagggcgaaagggtaaattttttaaaaaaaaggt

SEQ ID NO: 32286 - DNA, 730 bp, Artificial Sequence
  chemically treated genomic DNA (Homo sapiens) CpG-island No: 32286
accttttttttaaaaaatttaccctttcgcccttaacgatttaccccctttaatttccaacgttacccctcaacgccgtttatttttaaacgcaacgccataattattatacgccatcatacccccaataaaaccgttcctaaccgtttatataaccaaccgtcgcgataccctctaacaaataaattaccttacgtacaatttcttatctttaaccaacgcccaaataaatttaatatcgcgcatacgaccaataatatcgacgcaatcaaacgccccgaacaccattccacccgacgtatccatatccaaaaaaatcccgtcaacgccgaaatctctaattacctactacaaacgaacaataatcccgctataccccgtcatcccgaaataaaactaaaacgcacgaattttactaaccaacgtaccgaaatccgacaaaaccgcgataccatttaccacctaataactacgtaataaacgaaaatccatatcatcatcctcaccgaacaacgccaacgattcgactatttatccgacatccaacgtaataccaaaaacgatatctatcaaccgaataatacccaactaaccaaccaacgcgcaaaaaaaaacctacgcgttaaaacgttcttactacaaccgctcgttaaaatccataccgccgatctacgcaactatcgaacaactcgtaccccttaacgctccccttaaactacctcttccgctc

SEQ ID NO: 32287 - DNA, 730 bp, Artificial Sequence
  chemically treated genomic DNA (Homo sapiens) CpG-island No: 32287
attttttttttaaggggtttgttttttcgtttttggcgatttgttttttttaatttttagcgttgttttttaacgtcgtttatttttaggcgtagcgttatagttattgtgcgttattatgtttttaatggagtcgtttttggtcgtttgtgtgattagtcgtcgcgatgttttttggtaaataagttgttttgcgtgtagttttttgtttttggttagcgtttagatgggtttgatgtcgcgtatacggttaataatgtcggcgtagttaaacgtttcggatattattttattcggcgtatttatatttagaagaatttcgttaacgtcggggtttttgattgtttgttgtaggcgagtaatgatttcgttgtatttcgttatttcggaataaggttgaagcgtacgggttttgttgattagcgtgtcggaattcggtaagatcgcgatattatttgttatttgatagttgcgtgatggacggggatttatgttattatttttatcgaatagcgttagcggttcggttatttgttcggtatttagcgtgatgttagagacggtatttgttagtcgggtgatgtttaattggttagttagcgcgtaaaagaaaatttgcgcgttgaagcgtttttgttgtaatcgttcgttaaagtttatgtcgtcgatttgcgtaattatcgggtagttcgtgttttttagcgttttttttaaattgtttttttcgttt

SEQ ID NO: 32288 - DNA, 730 bp, Artificial Sequence
  chemically treated genomic DNA (Homo sapiens) CpG-island No: 32288
aaacgaaaaaaacaatttaaaaaaaacgctaaaaaacacgaactacccgataattacgcaaatcgacgacataaactttaacgaacgattacaacaaaaacgcttcaacgcgcaaattttcttttacgcgctaactaaccaattaaacatcacccgactaacaaataccgtctctaacatcacgctaaataccgaacaaataaccgaaccgctaacgctattcgataaaaataataacataaatccccgtccatcacgcaactatcaaataacaaataatatcgcgatcttaccgaattccgacacgctaatcaacaaaacccgtacgcttcaaccttattccgaaataacgaaatacaacgaaatcattactcgcctacaacaaacaatcaaaaaccccgacgttaacgaaattcttctaaatataaatacgccgaataaaataatatccgaaacgtttaactacgccgacattattaaccgtatacgcgacatcaaacccatctaaacgctaaccaaaaacaaaaaactacacgcaaaacaacttatttaccaaaaaacatcgcgacgactaatcacacaaacgaccaaaaacgactccattaaaaacataataacgcacaataactataacgctacgcctaaaaataaacgacgttaaaaaacaacgctaaaaattaaaaaaaacaaatcgccaaaaacgaaaaaacaaaccccttaaaaaaaaaat

SEQ ID NO: 32289 - DNA, 726 bp, Artificial Sequence
  chemically treated genomic DNA (Homo sapiens) CpG-island No: 32289
  unsure (701, 710, 713..714, 716, 718, 721..722, 725)
tgaacgcgttaaatattatcgtcgattatgaggtgattcgcgtcgttgaaattggtttggtatagatttaggcgcggatgggcggtatcggcgaacgtttttttgtcggcgacgttacgttgattcgcgtcgtcgtgcgtttgattgacggtacgttcggttatagttgggtgtaggggcgtgataaatagtacgtcgaacgttgcgcgttgattgacgcgttgatgtagtaatttcgttatttttaaaatttattagaaatttttattgtttcgttggacgttgatcgtatggtacgtattgtcgtacgttaggtcgaagtgaacgttagtcgggtcgatttttttacgatggttcgcggagataacgtatgattttggaaatcgtttttatgtttttcgtgtaggatgtttagtatagttttcgtcgtttgttaaaggttatgagcgagtcgggcgtgattgtcgttttgtattagtttaaacgcggttggtaatcgttgaatatcgttattattagcgtgttgttgacgttggtcgataacgatacgtcggtgtggttttttattttattaaataacgatatcgttaattagagtttgcgtttttatattaacgcgtcgttggttagttagtcggaataggcgattttcgcggtgacggatgaggcgatttttaacgaatagtttaacgttttttttnttaatattnttnntntnttnnnant

SEQ ID NO: 32290 - DNA, 726 bp, Artificial Sequence
  chemically treated genomic DNA (Homo sapiens) CpG-island No: 32290
  unsure (2, 4..5, 9, 11, 13..14, 17, 26)
antnnnaananannaanaatattaanaaaaaaaacgttaaactattcgttaaaaatcgcctcatccgtcaccgcgaaaatcgcctattccgactaactaaccaacgacgcgttaatataaaaacgcaaactctaattaacgatatcgttatttaataaaataaaaaaccacaccgacgtatcgttatcgaccaacgtcaacaacacgctaataataacgatattcaacgattaccaaccgcgtttaaactaatacaaaacgacaatcacgcccgactcgctcataacctttaacaaacgacgaaaactatactaaacatcctacacgaaaaacataaaaacgatttccaaaatcatacgttatctccgcgaaccatcgtaaaaaaatcgacccgactaacgttcacttcgacctaacgtacgacaatacgtaccatacgatcaacgtccaacgaaacaataaaaatttctaataaattttaaaaataacgaaattactacatcaacgcgtcaatcaacgcgcaacgttcgacgtactatttatcacgcccctacacccaactataaccgaacgtaccgtcaatcaaacgcacgacgacgcgaatcaacgtaacgtcgccgacaaaaaaacgttcgccgataccgcccatccgcgcctaaatctataccaaaccaatttcaacgacgcgaatcacctcataatcgacgataatatttaacgcgttca

SEQ ID NO: 32291 - DNA, 726 bp, Artificial Sequence
  chemically treated genomic DNA (Homo sapiens) CpG-island No: 32291
  unsure (2, 4..5, 9, 11, 13..14, 17, 26)
gntnnnggngnannggnggtgttggnggaaagggcgttgagttgttcgttggaaatcgttttattcgttatcgcgaaggtcgtttgtttcggttggttgattagcggcgcgttggtatgaaaacgtaggttttggttgacgatatcgttatttaatggggtagaaagttatatcggcgtgtcgttatcggttagcgttagtagtacgttggtggtggcgatatttagcggttgttagtcgcgtttgagttgatgtagggcgataattacgttcggttcgtttatggtttttaataggcgacgaaaattgtgttgggtattttgtacgggaagtataaaagcggtttttagggttatgcgttgttttcgcgaattatcgtaaagaagtcgattcggttggcgtttatttcggtttggcgtgcggtaatgcgtgttatacggttagcgtttagcggggtaataagggtttttgataagttttgaaagtggcgagattgttgtattagcgcgttaattagcgcgtagcgttcggcgtgttgtttattacgtttttgtatttagttgtagtcgagcgtgtcgttagttaggcgtacggcggcgcgggttagcgtggcgtcgtcggtaaaaaaacgttcgtcggtgtcgtttattcgcgtttgaatttgtattaggttagttttagcggcgcggattattttatagtcggcggtgatgtttagcgcgttta

SEQ ID NO: 32292 - DNA, 726 bp, Artificial Sequence
  chemically treated genomic DNA (Homo sapiens) CpG-island No: 32292
  unsure (701, 710, 713..714, 716, 718, 721..722, 725)
taaacgcgctaaacatcaccgccgactataaaataatccgcgccgctaaaactaacctaatacaaattcaaacgcgaataaacgacaccgacgaacgtttttttaccgacgacgccacgctaacccgcgccgccgtacgcctaactaacgacacgctcgactacaactaaatacaaaaacgtaataaacaacacgccgaacgctacgcgctaattaacgcgctaatacaacaatctcgccactttcaaaacttatcaaaaacccttattaccccgctaaacgctaaccgtataacacgcattaccgcacgccaaaccgaaataaacgccaaccgaatcgacttctttacgataattcgcgaaaacaacgcataaccctaaaaaccgcttttatacttcccgtacaaaatacccaacacaattttcgtcgcctattaaaaaccataaacgaaccgaacgtaattatcgccctacatcaactcaaacgcgactaacaaccgctaaatatcgccaccaccaacgtactactaacgctaaccgataacgacacgccgatataactttctaccccattaaataacgatatcgtcaaccaaaacctacgttttcataccaacgcgccgctaatcaaccaaccgaaacaaacgaccttcgcgataacgaataaaacgatttccaacgaacaactcaacgccctttccnccaacaccnccnntncnccnnnanc

SEQ ID NO: 32293 - DNA, 996 bp, Artificial Sequence
  chemically treated genomic DNA (Homo sapiens) CpG-island No: 32293
  unsure (453)
tatttagcgttagttatcgcgtgcggcgttgattggtagtaggagttttacgaataattggtcgtgattgttaacgttgttattttcgttgcgtatgaagggcgcgtttttgaacgttttacgtaatatggttcgttggcgatgttgtcgatgtttgacggacgttgttcgttggtttggtgttatttattggaacggcgcgaagaggtgttgtcgtggagtgacgagaagttttgtcgtgaattttagtcggtttttggttggcgatttgggaaaattatttacgttggtaaacgtagtgtttattcgttggcgttaatttacgtcgttagatttattatttatcgtatcgtgttggtgggtaatgcggcgtaaattttgtattcgattgtcgggtaagggtttaatttcggtatgcgagatgtgatgagttttgcggaaattttgatttangcgtaggagcgcggagaagatatgggggattacggcgtattgtgtcgttattagtagcgtcgatagagcgatcgcgaagtaattattggcgttacggatagttttgtatatttttttgttaattcgtgggtatcgtttgtttgtcggcgtaatatcgggttgatgacgatgggattatttattttcgtacgcgatgtgttgtcgtagcgtattttcggttgggtggcgcgttgaaggcggttttaaggaataaataatgtaaagtgttgatgtagttattgttggcggcggtatggtggggttggcggttgtttgtggtttataggggagcggtttacgcgttgtcgtattggagtagcgcgtataggaatttttggcggcgaatgtattattataattgcgcgtttcggttattaatgtcgttagcgaaaaattatttattcgttttggcgtttggtaggatattttttttcgtagggttagttgttattacggtatggaagtgtgggataaagatagttttggttatatttcgtttgacga

SEQ ID NO: 32294 - DNA, 996 bp, Artificial Sequence
  chemically treated genomic DNA (Homo sapiens) CpG-island No: 32294
  unsure (544)
tcgtcaaacgaaatataaccaaaactatctttatcccacacttccataccgtaataacaactaaccctacgaaaaaaaatatcctaccaaacgccaaaacgaataaataatttttcgctaacgacattaataaccgaaacgcgcaattataataatacattcgccgccaaaaattcctatacgcgctactccaatacgacaacgcgtaaaccgctcccctataaaccacaaacaaccgccaaccccaccataccgccgccaacaataactacatcaacactttacattatttattccttaaaaccgccttcaacgcgccacccaaccgaaaatacgctacgacaacacatcgcgtacgaaaataaataatcccatcgtcatcaacccgatattacgccgacaaacaaacgatacccacgaattaacaaaaaaatatacaaaactatccgtaacgccaataattacttcgcgatcgctctatcgacgctactaataacgacacaatacgccgtaatcccccatatcttctccgcgctcctacgcntaaatcaaaatttccgcaaaactcatcacatctcgcataccgaaattaaacccttacccgacaatcgaatacaaaatttacgccgcattacccaccaacacgatacgataaataataaatctaacgacgtaaattaacgccaacgaataaacactacgtttaccaacgtaaataattttcccaaatcgccaaccaaaaaccgactaaaattcacgacaaaacttctcgtcactccacgacaacacctcttcgcgccgttccaataaataacaccaaaccaacgaacaacgtccgtcaaacatcgacaacatcgccaacgaaccatattacgtaaaacgttcaaaaacgcgcccttcatacgcaacgaaaataacaacgttaacaatcacgaccaattattcgtaaaactcctactaccaatcaacgccgcacgcgataactaacgctaaata

SEQ ID NO: 32295 - DNA, 996 bp, Artificial Sequence
  chemically treated genomic DNA (Homo sapiens) CpG-island No: 32295
  unsure (544)
tcgttaaacgaaatgtgattaaagttgtttttgttttatatttttatatcgtgataatagttggttttacgagagagaatgttttgttagacgttaagacgggtgagtaatttttcgttggcggtattgatagtcgaaacgcgtagttgtggtggtgtattcgtcgttagaggtttttgtacgcgttgttttagtacggtaacgcgtaagtcgtttttttgtaagttataggtaatcgttagttttattatgtcgtcgttaataatggttatattaatattttgtattgtttattttttaaaatcgtttttaacgcgttatttaatcgagggtgcgttgcgatagtatatcgcgtgcgggggtgaataattttatcgttattagttcgatgttgcgtcgataaataagcggtgtttacgggttggtaaaaagatgtataaggttgttcgtgacgttaatggttgtttcgcgatcgttttgtcgacgttgttgataacggtataatacgtcgtaattttttatgtttttttcgcgtttttgcgtntgagttagggttttcgtaagatttattatatttcgtatatcgaggttaaatttttgttcggtaatcgggtgtagagtttgcgtcgtattgtttattagtacggtacgatgggtaatagatttggcggcgtgggttaacgttagcggataagtattgcgtttattagcgtgggtaatttttttaagtcgttagttaaaggtcgattggagtttacggtaaaatttttcgttattttacgataatattttttcgcgtcgttttagtggatgatattagattagcgaatagcgttcgttagatatcggtaatatcgttagcgggttatgttgcgtaaagcgtttaaaagcgcgttttttatgcgtaacggaagtagtaacgttggtaattacggttagttgttcgtaaggtttttgttgttagttaacgtcgtacgcggtggttaacgttgaatg

SEQ ID NO: 32296 - DNA, 996 bp, Artificial Sequence
  chemically treated genomic DNA (Homo sapiens) CpG-island No: 32296
  unsure (453)
cattcaacgttaaccaccgcgtacgacgttaactaacaacaaaaaccttacgaacaactaaccgtaattaccaacgttactacttccgttacgcataaaaaacgcgcttttaaacgctttacgcaacataacccgctaacgatattaccgatatctaacgaacgctattcgctaatctaatatcatccactaaaacgacgcgaaaaaatattatcgtaaaataacgaaaaattttaccgtaaactccaatcgacctttaactaacgacttaaaaaaattacccacgctaataaacgcaatacttatccgctaacgttaacccacgccgccaaatctattacccatcgtaccgtactaataaacaatacgacgcaaactctacacccgattaccgaacaaaaatttaacctcgatatacgaaatataataaatcttacgaaaaccctaactcanacgcaaaaacgcgaaaaaaacataaaaaattacgacgtattataccgttatcaacaacgtcgacaaaacgatcgcgaaacaaccattaacgtcacgaacaaccttatacatctttttaccaacccgtaaacaccgcttatttatcgacgcaacatcgaactaataacgataaaattattcacccccgcacgcgatatactatcgcaacgcaccctcgattaaataacgcgttaaaaacgattttaaaaaataaacaatacaaaatattaatataaccattattaacgacgacataataaaactaacgattacctataacttacaaaaaaacgacttacgcgttaccgtactaaaacaacgcgtacaaaaacctctaacgacgaatacaccaccacaactacgcgtttcgactatcaataccgccaacgaaaaattactcacccgtcttaacgtctaacaaaacattctctctcgtaaaaccaactattatcacgatataaaaatataaaacaaaaacaactttaatcacatttcgtttaacga

SEQ ID NO: 32297 - DNA, 583 bp, Artificial Sequence
  chemically treated genomic DNA (Homo sapiens) CpG-island No: 32297
tttagttattggtcgatcgtcggttttatttcgttaaataggttgggcgtaatcgggtattcgcgagcgataacgtttaacgggcggagaaaaaatggtttagttttttacgttattttttcggttttttacgttgcgttcgttagacgcgggtcggatttttattatgtagatgtatttttttacgatttagtttttttataattatcgcgtaatttattatttttagtatgggcgtatcgtttggtttatcgtttaggttaagtgtggttgggcgtttgtttgataattgttgataggtcgcgataatttagttggtagtttgatttttttcggtagaagtatttagtacgtgttagatgcgcgtattttgtataaattgtaagtttagttcgtttagacgagcggtaaattgtgttatacgttcgttattgtcgcgttagattagcgttatcgacgttttatgaagttgcgttagcgtcgtttggttacggtttaatttcgtttattcggcgacggttgtatcgtcgatattattaaaagtcgcgaatttataacgttttttttcgcgtagcgtatttaa

SEQ ID NO: 32298 - DNA, 583 bp, Artificial Sequence
  chemically treated genomic DNA (Homo sapiens) CpG-island No: 32298
ttaaatacgctacgcgaaaaaaaacgttataaattcgcgacttttaataatatcgacgatacaaccgtcgccgaataaacgaaattaaaccgtaaccaaacgacgctaacgcaacttcataaaacgtcgataacgctaatctaacgcgacaataacgaacgtataacacaatttaccgctcgtctaaacgaactaaacttacaatttatacaaaatacgcgcatctaacacgtactaaatacttctaccgaaaaaaatcaaactaccaactaaattatcgcgacctatcaacaattatcaaacaaacgcccaaccacacttaacctaaacgataaaccaaacgatacgcccatactaaaaataataaattacgcgataattataaaaaaactaaatcgtaaaaaaatacatctacataataaaaatccgacccgcgtctaacgaacgcaacgtaaaaaaccgaaaaaataacgtaaaaaactaaaccattttttctccgcccgttaaacgttatcgctcgcgaatacccgattacgcccaacctatttaacgaaataaaaccgacgatcgaccaataactaaa

SEQ ID NO: 32299 - DNA, 583 bp, Artificial Sequence
  chemically treated genomic DNA (Homo sapiens) CpG-island No: 32299
ttaaatacgttacgcgagaaagaacgttgtaaattcgcgatttttgatgatgtcggcgatgtagtcgtcgtcgaatggacgggattaagtcgtagttaggcggcgttgacgtagttttatgaggcgtcggtaacgttaatttggcgcgatagtgacgagcgtatggtataatttatcgttcgtttgaacgaattgggtttatagtttatgtagggtgcgcgtatttggtacgtattggatgtttttgtcggaaaagattaggttgttaattggattatcgcgatttattaataattgttaggtaaacgtttaattatatttggtttgggcgatgggttaaacgatgcgtttatattggaggtaatggattacgcggtgattgtgaaagggttaaatcgtgaaggggtgtatttgtatgatgaggattcggttcgcgtttggcgaacgtagcgtgaaggatcggaaggatggcgtgaagggttggattatttttttttcgttcgttaagcgttatcgttcgcgaatattcgattacgtttagtttgtttagcgagataaagtcgacggtcggttagtgattgga

SEQ ID NO: 32300 - DNA, 583 bp, Artificial Sequence
  chemically treated genomic DNA (Homo sapiens) CpG-island No: 32300
tccaatcactaaccgaccgtcgactttatctcgctaaacaaactaaacgtaatcgaatattcgcgaacgataacgcttaacgaacgaaaaaaaaataatccaacccttcacgccatccttccgatccttcacgctacgttcgccaaacgcgaaccgaatcctcatcatacaaatacaccccttcacgatttaaccctttcacaatcaccgcgtaatccattacctccaatataaacgcatcgtttaacccatcgcccaaaccaaatataattaaacgtttacctaacaattattaataaatcgcgataatccaattaacaacctaatcttttccgacaaaaacatccaatacgtaccaaatacgcgcaccctacataaactataaacccaattcgttcaaacgaacgataaattataccatacgctcgtcactatcgcgccaaattaacgttaccgacgcctcataaaactacgtcaacgccgcctaactacgacttaatcccgtccattcgacgacgactacatcgccgacatcatcaaaaatcgcgaatttacaacgttctttctcgcgtaacgtatttaa

SEQ ID NO: 32301 - DNA, 600 bp, Artificial Sequence
  chemically treated genomic DNA (Homo sapiens) CpG-island No: 32301
taggtggcggcgatttgtagtcgtttacggttagtaatgatatcgttatgtagacgtttaatggtttttttcgtattagttagtttttcggtgtatttggtatttagtgtagcgatattacgttgacgggtttgtatgtttttgatggtgtcgttagttaggcggagatttttggtggttttgtcgcgttggtttttgtaggtgatggcgttgtcgcggtagtggttaatggtttaggttatggaaattagtaggtagataacgatagcgtagatgattgcggttaatcggtttatttttggttttattcgtagattttacgtttaatttcgcgtcgggtgattagttttttttattgtttgtcgttagtataagtttagcgttgtagttttttatacgtattcggaatattatcggagtttagtttttttagtagcgtcgagttggtaaaagtattagagttaacgttataggtgaaggagtaaagcgcggcgtagggtttgtttagggatgcgaattttgattagcgggtcgatggcgttgttatttttcgtagatttgttttagtaggtgtttattttttgtcggttatcgggatcg

SEQ ID NO: 32302 - DNA, 600 bp, Artificial Sequence
  chemically treated genomic DNA (Homo sapiens) CpG-island No: 32302
cgatcccgataaccgacaaaaaataaacacctactaaaacaaatctacgaaaaataacaacgccatcgacccgctaatcaaaattcgcatccctaaacaaaccctacgccgcgctttactccttcacctataacgttaactctaatacttttaccaactcgacgctactaaaaaaactaaactccgataatattccgaatacgtataaaaaactacaacgctaaacttatactaacgacaaacaataaaaaaaactaatcacccgacgcgaaattaaacgtaaaatctacgaataaaaccaaaaataaaccgattaaccgcaatcatctacgctatcgttatctacctactaatttccataacctaaaccattaaccactaccgcgacaacgccatcacctacaaaaaccaacgcgacaaaaccaccaaaaatctccgcctaactaacgacaccatcaaaaacatacaaacccgtcaacgtaatatcgctacactaaataccaaatacaccgaaaaactaactaatacgaaaaaaaccattaaacgtctacataacgatatcattactaaccgtaaacgactacaaatcgccgccaccta

SEQ ID NO: 32303 - DNA, 600 bp, Artificial Sequence
  chemically treated genomic DNA (Homo sapiens) CpG-island No: 32303
cggtttcgataatcggtaaagagtggatatttgttaaggtagatttgcgaaaggtggtagcgttatcgattcgttgattaaggttcgtatttttgagtaaattttgcgtcgcgttttatttttttatttataacgttggttttggtgtttttgttagttcgacgttgttgaagaagttgaatttcggtgatgtttcgggtgcgtgtaaagaattgtagcgttggatttatgttggcggtaagtagtggaaggggttgattattcggcgcgagattgagcgtgaagtttgcgagtggggttagaaatgagtcgattaatcgtaattatttgcgttgtcgttatttgtttgttggtttttatggtttgggttattaattattatcgcgataacgttattatttataaagattagcgcgataaagttattaaaagttttcgtttggttaacgatattattaaagatatgtagattcgttagcgtgatgtcgttgtattggatgttaaatatatcggagaattggttgatgcgaaagaaattattgagcgtttgtatagcgatgttattgttggtcgtaagcggttgtaagtcgtcgttatttg

SEQ ID NO: 32304 - DNA, 600 bp, Artificial Sequence
  chemically treated genomic DNA (Homo sapiens) CpG-island No: 32304
caaataacgacgacttacaaccgcttacgaccaacaataacatcgctatacaaacgctcaataatttctttcgcatcaaccaattctccgatatatttaacatccaatacaacgacatcacgctaacgaatctacatatctttaataatatcgttaaccaaacgaaaacttttaataactttatcgcgctaatctttataaataataacgttatcgcgataataattaataacccaaaccataaaaaccaacaaacaaataacgacaacgcaaataattacgattaatcgactcatttctaaccccactcgcaaacttcacgctcaatctcgcgccgaataatcaaccccttccactacttaccgccaacataaatccaacgctacaattctttacacgcacccgaaacatcaccgaaattcaacttcttcaacaacgtcgaactaacaaaaacaccaaaaccaacgttataaataaaaaaataaaacgcgacgcaaaatttactcaaaaatacgaaccttaatcaacgaatcgataacgctaccacctttcgcaaatctaccttaacaaatatccactctttaccgattatcgaaaccg

SEQ ID NO: 32305 - DNA, 934 bp, Artificial Sequence
  chemically treated genomic DNA (Homo sapiens) CpG-island No: 32305
gtaaagtttttaagtcgattgtgagatcgggcggagtttggcgttgtaggaagaggcgatagttatagttttattgacgagttcgaggggtgaatttttcggcgggaggttcgaatttttaaatatcgggaagcggaggtgggggtcggttgggggatcggtttatcggtttttatttcggcgtatagggattttaggtttcggcgagcgttggtttagcggtttttatagcgataggtcgggcgcgcgttttcgcgcgtgcgtagtttttcgttcgttttcgggtgggcggagtaaggaatagttgggcggggacgatcgttttacgtcgcgcgggaatttttgggggtcggggttgtaggtagttgggaatcgcgggcgttaggcgcgcgtatttagtattcggttttagtcgataaatttggggtagcgcgcggtaggagttgcgggcggttaggtttttttttgcgttcgtatttggtttcgcgcgtttttttcgggcgttcggttttcggcgttttggcggttcgggtggcggcggttcgggcggtcgtttggttgtttttcggggcggcgatcgggtttacgcgcgggttcgtcgcggtttttatcgtcgcgcgttttgacgtcggtaaggggggcggggtttggggggttagagcgtgggagcggtttcggttttcgggtttttcggcgggttgcggggatgtggggattcggcgcgggatttagattagtagggcgagtcggaggaggttagatattagagtcgtgtgttttttttttttttcgtgcgttttgttttgcggcggatttcgggttttcgggagagtcgggttcgggttttgcggtttttaggttggattggtcgttttgttattaaagttttgagaaggaaagttagtcgttaagcgttttgggatgtttttgagtt

SEQ ID NO: 32306 - DNA, 934 bp, Artificial Sequence
  chemically treated genomic DNA (Homo sapiens) CpG-island No: 32306
aactcaaaaacatcccaaaacgcttaacgactaactttccttctcaaaactttaataacaaaacgaccaatccaacctaaaaaccgcaaaacccgaacccgactctcccgaaaacccgaaatccgccgcaaaacaaaacgcacgaaaaaaaaaaaaaacacacgactctaatatctaacctcctccgactcgccctactaatctaaatcccgcgccgaatccccacatccccgcaacccgccgaaaaacccgaaaaccgaaaccgctcccacgctctaaccccccaaaccccgccccccttaccgacgtcaaaacgcgcgacgataaaaaccgcgacgaacccgcgcgtaaacccgatcgccgccccgaaaaacaaccaaacgaccgcccgaaccgccgccacccgaaccgccaaaacgccgaaaaccgaacgcccgaaaaaaacgcgcgaaaccaaatacgaacgcaaaaaaaaacctaaccgcccgcaactcctaccgcgcgctaccccaaatttatcgactaaaaccgaatactaaatacgcgcgcctaacgcccgcgattcccaactacctacaaccccgacccccaaaaattcccgcgcgacgtaaaacgatcgtccccgcccaactattccttactccgcccacccgaaaacgaacgaaaaactacgcacgcgcgaaaacgcgcgcccgacctatcgctataaaaaccgctaaaccaacgctcgccgaaacctaaaatccctatacgccgaaataaaaaccgataaaccgatcccccaaccgacccccacctccgcttcccgatatttaaaaattcgaacctcccgccgaaaaattcacccctcgaactcgtcaataaaactataactatcgcctcttcctacaacgccaaactccgcccgatctcacaatcgacttaaaaactttac

SEQ ID NO: 32307 - DNA, 934 bp, Artificial Sequence
  chemically treated genomic DNA (Homo sapiens) CpG-island No: 32307
agtttaagagtattttaagacgtttgacggttgatttttttttttagaattttagtaatagggcggttagtttagtttgggaatcgtagggttcgagttcgattttttcggagattcgggattcgtcgtagagtaaagcgtacgggagggaaggagggtatacggttttagtgtttgatttttttcggttcgttttattgatttaggtttcgcgtcgggtttttatattttcgtaattcgtcgagaggttcgggagtcgggatcgtttttacgttttggttttttaagtttcgttttttttatcggcgttagagcgcgcggcggtgaaggtcgcggcgggttcgcgcgtgagttcggtcgtcgtttcgaggagtagttaggcggtcgttcgaatcgtcgttattcgagtcgttaggacgtcggaagtcggacgttcgagaggggcgcgcggggttaggtgcggacgtaggaaggggtttggtcgttcgtagtttttatcgcgcgttgttttagatttatcggttgggatcgagtgttgggtgcgcgcgtttagcgttcgcggtttttagttgtttgtagtttcggtttttaagggttttcgcgcggcgtggggcggtcgttttcgtttagttgttttttgtttcgtttattcgggggcgggcgaggagttgcgtacgcgcggggacgcgcgttcggtttgtcgttgtggaaatcgttaggttagcgttcgtcgggatttggaatttttgtacgtcgaggtgggagtcggtggatcggttttttagtcggtttttattttcgtttttcggtgtttgagggttcgggtttttcgtcggggagtttatttttcgggttcgttagtagggttgtggttgtcgtttttttttgtagcgttaggtttcgttcggttttatagtcggtttaggggttttgt

SEQ ID NO: 32308 - DNA, 934 bp, Artificial Sequence
  chemically treated genomic DNA (Homo sapiens) CpG-island No: 32308
acaaaacccctaaaccgactataaaaccgaacgaaacctaacgctacaaaaaaaaacgacaaccacaaccctactaacgaacccgaaaaataaactccccgacgaaaaacccgaaccctcaaacaccgaaaaacgaaaataaaaaccgactaaaaaaccgatccaccgactcccacctcgacgtacaaaaattccaaatcccgacgaacgctaacctaacgatttccacaacgacaaaccgaacgcgcgtccccgcgcgtacgcaactcctcgcccgcccccgaataaacgaaacaaaaaacaactaaacgaaaacgaccgccccacgccgcgcgaaaacccttaaaaaccgaaactacaaacaactaaaaaccgcgaacgctaaacgcgcgcacccaacactcgatcccaaccgataaatctaaaacaacgcgcgataaaaactacgaacgaccaaaccccttcctacgtccgcacctaaccccgcgcgcccctctcgaacgtccgacttccgacgtcctaacgactcgaataacgacgattcgaacgaccgcctaactactcctcgaaacgacgaccgaactcacgcgcgaacccgccgcgaccttcaccgccgcgcgctctaacgccgataaaaaaaacgaaacttaaaaaaccaaaacgtaaaaacgatcccgactcccgaacctctcgacgaattacgaaaatataaaaacccgacgcgaaacctaaatcaataaaacgaaccgaaaaaaatcaaacactaaaaccgtataccctccttccctcccgtacgctttactctacgacgaatcccgaatctccgaaaaaatcgaactcgaaccctacgattcccaaactaaactaaccgccctattactaaaattctaaaaaaaaaaatcaaccgtcaaacgtcttaaaatactcttaaact

SEQ ID NO: 32309 - DNA, 621 bp, Artificial Sequence
  chemically treated genomic DNA (Homo sapiens) CpG-island No: 32309
tcgcgcgggtttgtttatgggaggtggcgttcgttttcgtttcggggagtttcggtttcggggcgggaggggttttgggttttggtttcgtttcgtttcgtttttcgtcgttttttttttttagggttgtggttacgcgtagcggcggcggttgtttcgtttttttttcggttcgggtcgtcgttattgtcgaaggttttttttttttttttttttggcgtgcgtaggatttcgtcgtcgttgggtttagcggtagtagcggttgttttagcgcggcgttttttttcgtttcgttttttttttttttttttttttttttcgtatcgcgcgttagttcggggcggtttcgtagttcgtcgggagttttgatcgaggcgtttcgttggggcggggattttgttttgttcggggtaagtgtatataggtcggtcggcgcgggacgtaggtcgggtttttttttttttttttttttttcgtggtttggcgggcgggagcggttcgggacggtcgatttgtttcgcgcggggtcggggagtcgttatttgcgtgttgggagtcgtagtttttggggcggtggtttattgtttgttttttagggtcgtttttttcgttggttttagt

SEQ ID NO: 32310 - DNA, 621 bp, Artificial Sequence
  chemically treated genomic DNA (Homo sapiens) CpG-island No: 32310
actaaaaccaacgaaaaaaacgaccctaaaaaacaaacaataaaccaccgccccaaaaactacgactcccaacacgcaaataacgactccccgaccccgcgcgaaacaaatcgaccgtcccgaaccgctcccgcccgccaaaccacgaaaaaaaaaaaaaaaaaaaaaaacccgacctacgtcccgcgccgaccgacctatatacacttaccccgaacaaaacaaaatccccgccccaacgaaacgcctcgatcaaaactcccgacgaactacgaaaccgccccgaactaacgcgcgatacgaaaaaaaaaaaaaaaaaaaaaaaaaacgaaacgaaaaaaaacgccgcgctaaaacaaccgctactaccgctaaacccaacgacgacgaaatcctacgcacgccaaaaaaaaaaaaaaaaaaaaccttcgacaataacgacgacccgaaccgaaaaaaaaacgaaacaaccgccgccgctacgcgtaaccacaaccctaaaaaaaaaaaacgacgaaaaacgaaacgaaacgaaaccaaaacccaaaacccctcccgccccgaaaccgaaactccccgaaacgaaaacgaacgccacctcccataaacaaacccgcgcga

SEQ ID NO: 32311 - DNA, 621 bp, Artificial Sequence
  chemically treated genomic DNA (Homo sapiens) CpG-island No: 32311
gttaaagttagcgaagaaaacggttttggggagtagataatgagttatcgttttaggagttgcggtttttagtacgtaggtggcggtttttcggtttcgcgcggggtaggtcggtcgtttcgggtcgttttcgttcgttaggttacggagaaggaaggaggaggaagagattcggtttgcgtttcgcgtcggtcggtttgtgtgtatttatttcgggtaaggtaaggttttcgttttagcgaggcgtttcggttagagttttcggcgggttgcggagtcgtttcgggttagcgcgcggtgcggggaggggaggggagggaaggggaagcggggcgggaagagacgtcgcgttggagtagtcgttgttatcgttaggtttagcggcggcggagttttgcgtacgttagggaggggaggggagggagttttcggtaatggcgacggttcgggtcggaggggaagcggaataatcgtcgtcgttgcgcgtggttataattttgggggaggaagacggcggggagcggggcggggcggggttagaatttagaatttttttcgtttcgaagtcggagtttttcggggcggagacgagcgttattttttatgggtaggttcgcgcgg

SEQ ID NO: 32312 - DNA, 621 bp, Artificial Sequence
  chemically treated genomic DNA (Homo sapiens) CpG-island No: 32312
ccgcgcgaacctacccataaaaaataacgctcgtctccgccccgaaaaactccgacttcgaaacgaaaaaaattctaaattctaaccccgccccgccccgctccccgccgtcttcctcccccaaaattataaccacgcgcaacgacgacgattattccgcttcccctccgacccgaaccgtcgccattaccgaaaactccctcccctcccctccctaacgtacgcaaaactccgccgccgctaaacctaacgataacaacgactactccaacgcgacgtctcttcccgccccgcttccccttccctcccctcccctccccgcaccgcgcgctaacccgaaacgactccgcaacccgccgaaaactctaaccgaaacgcctcgctaaaacgaaaaccttaccttacccgaaataaatacacacaaaccgaccgacgcgaaacgcaaaccgaatctcttcctcctccttccttctccgtaacctaacgaacgaaaacgacccgaaacgaccgacctaccccgcgcgaaaccgaaaaaccgccacctacgtactaaaaaccgcaactcctaaaacgataactcattatctactccccaaaaccgttttcttcgctaactttaac

SEQ ID NO: 32313 - DNA, 506 bp, Artificial Sequence
  chemically treated genomic DNA (Homo sapiens) CpG-island No: 32313
tgagttgcgggtcgcggacgttgattttttattatttaatttcgttcgagttcgtttatttggagaagggtttcggttgtgtttcggggacgtttttacgcgggaaatatttacggttttcgtaggcgtaggcggttgcgcggggcgtatcgttttcgggggtttcggttttttcgagagtagtcgaacgcggggttgggttatttttttgttgtggggtattagattattttagtattagcggaaggaacggacggaaattgaagttatatggagagcgggttgttcggcgatttagtataggtttatttagattcggttttttagagggaagcgcggcgcgggcgcgggggtggggcgggtcgggggagcggggttcgaatatttgtcggtttagcggtcgagtagcggggatgtttagacgattttttagtaatgcgatcgaggttttttcggtttttttgcgttggtgttttggtagggttgggggcggttagttaggggtt

SEQ ID NO: 32314 - DNA, 506 bp, Artificial Sequence
  chemically treated genomic DNA (Homo sapiens) CpG-island No: 32314
aacccctaactaaccgcccccaaccctaccaaaacaccaacgcaaaaaaaccgaaaaaacctcgatcgcattactaaaaaatcgtctaaacatccccgctactcgaccgctaaaccgacaaatattcgaaccccgctcccccgacccgccccacccccgcgcccgcgccgcgcttccctctaaaaaaccgaatctaaataaacctatactaaatcgccgaacaacccgctctccatataacttcaatttccgtccgttccttccgctaatactaaaataatctaataccccacaacaaaaaaataacccaaccccgcgttcgactactctcgaaaaaaccgaaacccccgaaaacgatacgccccgcgcaaccgcctacgcctacgaaaaccgtaaatatttcccgcgtaaaaacgtccccgaaacacaaccgaaacccttctccaaataaacgaactcgaacgaaattaaataataaaaaatcaacgtccgcgacccgcaactca

SEQ ID NO: 32315 - DNA, 506 bp, Artificial Sequence
  chemically treated genomic DNA (Homo sapiens) CpG-island No: 32315
ggtttttagttggtcgtttttagttttgttaaggtattaacgtaagaaagtcgggggagtttcggtcgtattgttggaagatcgtttaaatattttcgttgttcggtcgttaggtcggtaggtgttcgggtttcgttttttcggttcgttttattttcgcgttcgcgtcgcgtttttttttaagaggtcgggtttgagtgagtttgtgttgagtcgtcgagtagttcgttttttatgtgattttagttttcgttcgtttttttcgttggtgttaaaataatttgatgttttatagtaaggaggtagtttagtttcgcgttcggttgttttcgaggaggtcggagttttcggagacgatgcgtttcgcgtagtcgtttgcgtttgcgggagtcgtgagtatttttcgcgtgggggcgttttcggggtatagtcggggtttttttttaggtgggcgagttcgagcgaggttgggtggtaggaggttagcgttcgcggttcgtagttta

SEQ ID NO: 32316 - DNA, 506 bp, Artificial Sequence
  chemically treated genomic DNA (Homo sapiens) CpG-island No: 32316
taaactacgaaccgcgaacgctaacctcctaccacccaacctcgctcgaactcgcccacctaaaaaaaaaccccgactataccccgaaaacgcccccacgcgaaaaatactcacgactcccgcaaacgcaaacgactacgcgaaacgcatcgtctccgaaaactccgacctcctcgaaaacaaccgaacgcgaaactaaactacctccttactataaaacatcaaattattttaacaccaacgaaaaaaacgaacgaaaactaaaatcacataaaaaacgaactactcgacgactcaacacaaactcactcaaacccgacctcttaaaaaaaaacgcgacgcgaacgcgaaaataaaacgaaccgaaaaaacgaaacccgaacacctaccgacctaacgaccgaacaacgaaaatatttaaacgatcttccaacaatacgaccgaaactcccccgactttcttacgttaataccttaacaaaactaaaaacgaccaactaaaaacc

SEQ ID NO: 32317 - DNA, 804 bp, Artificial Sequence
  chemically treated genomic DNA (Homo sapiens) CpG-island No: 32317
  unsure (687)
ttcgcgcggtatgtcgaatattacgtaatttgtttcgttttgcgtaagggtttatgttttcgtttgacgtatcgttaatattttcgtcgcgtcgtcgttgtttatatcggttaggattattttaatcgtattacgtttcgtttgtttggcgatagaatggaataatatatttatcgaaggtcgatgacggttaatcgtcgggtttatcgtgaattttgatttggtaatttgcgttattacgcgatagttttatatgtcgatcgttcggcgtaatataggtatgtttcggtaagatacgtttttcgttttcggtttttttaatttcgatttggtaaagtttattaagtttgtcggtaaaagagcgggtgaaatcgggcggtatatgttgggtaattaatagtgtcgggttggaaagcggtaacggttgtagtacgtgacgaattgttttagttttattcgttgaagtattaatcgtaattagttttttagaatttaataacggtttcgtttttagcgttgtcggtgtcgataatggtttatgtgttgtaaggttcgtttttgttgtcgtacgtatttttttagtaattatttcgttatacgttagtatattttcgcgaatattagtgcggttggtgataaaatttatcgtttttagttttagcgcgcgtagcgtgatttttgattttntgtcggttagggaagaaattattataacgggtattggacgtaaacgtattaatttttcgaggaaatttagttcgtttattcgcggtattttaatatttagcgttagtatatcgggat

SEQ ID NO: 32318 - DNA, 804 bp, Artificial Sequence
  chemically treated genomic DNA (Homo sapiens) CpG-island No: 32318
  unsure (118)
atcccgatatactaacgctaaatattaaaataccgcgaataaacgaactaaatttcctcgaaaaattaatacgtttacgtccaatacccgttataataatttcttccctaaccgacanaaaatcaaaaatcacgctacgcgcgctaaaactaaaaacgataaattttatcaccaaccgcactaatattcgcgaaaatatactaacgtataacgaaataattactaaaaaaatacgtacgacaacaaaaacgaaccttacaacacataaaccattatcgacaccgacaacgctaaaaacgaaaccgttattaaattctaaaaaactaattacgattaatacttcaacgaataaaactaaaacaattcgtcacgtactacaaccgttaccgctttccaacccgacactattaattacccaacatataccgcccgatttcacccgctcttttaccgacaaacttaataaactttaccaaatcgaaattaaaaaaaccgaaaacgaaaaacgtatcttaccgaaacatacctatattacgccgaacgatcgacatataaaactatcgcgtaataacgcaaattaccaaatcaaaattcacgataaacccgacgattaaccgtcatcgaccttcgataaatatattattccattctatcgccaaacaaacgaaacgtaatacgattaaaataatcctaaccgatataaacaacgacgacgcgacgaaaatattaacgatacgtcaaacgaaaacataaacccttacgcaaaacgaaacaaattacgtaatattcgacataccgcgcgaa

SEQ ID NO: 32319 - DNA, 804 bp, Artificial Sequence
  chemically treated genomic DNA (Homo sapiens) CpG-island No: 32319
  unsure (118)
atttcgatgtgttgacgttggatgttgaaatgtcgcggatggacggattggattttttcgaaaaattaatgcgtttgcgtttaatgttcgttgtgatggttttttttttgatcggtanagggttagaagttacgttgcgcgcgttggagttgggggcgatagattttgttattaatcgtattggtattcgcgaaggtatgttggcgtataacgaaatgattgttgaaaaggtgcgtacggtagtaaaggcgagttttgtagtatataagttattgtcggtatcgataacgttgaaggcggggtcgttgttgagttttgaaaaattgattgcgattggtgttttaacgggtggaattgaggtaattcgttacgtattgtaatcgttgtcgttttttagttcggtattgttaattatttagtatatgtcgttcggttttattcgtttttttgtcgatagatttaataagttttgttagatcggggttaaagaagtcgaagacggagaacgtgttttgtcggggtatgtttatattgcgtcgggcgatcggtatatggagttgtcgcgtagtggcgtaaattattaaattaaaatttacgatgggttcggcggttaatcgttatcggttttcggtagatgtgttgttttattttgtcgttaaataggcggggcgtaatgcggttggggtgattttgatcggtatgggtaacgacggcgcggcgggaatgttggcgatgcgttaggcgggggtatggatttttgcgtaaaacgaagtaagttgcgtggtgttcggtatgtcgcgcgag

SEQ ID NO: 32320 - DNA, 804 bp, Artificial Sequence
  chemically treated genomic DNA (Homo sapiens) CpG-island No: 32320
  unsure (687)
ctcgcgcgacataccgaacaccacgcaacttacttcgttttacgcaaaaatccatacccccgcctaacgcatcgccaacattcccgccgcgccgtcgttacccataccgatcaaaatcaccccaaccgcattacgccccgcctatttaacgacaaaataaaacaacacatctaccgaaaaccgataacgattaaccgccgaacccatcgtaaattttaatttaataatttacgccactacgcgacaactccatataccgatcgcccgacgcaatataaacataccccgacaaaacacgttctccgtcttcgacttctttaaccccgatctaacaaaacttattaaatctatcgacaaaaaaacgaataaaaccgaacgacatatactaaataattaacaataccgaactaaaaaacgacaacgattacaatacgtaacgaattacctcaattccacccgttaaaacaccaatcgcaatcaatttttcaaaactcaacaacgaccccgccttcaacgttatcgataccgacaataacttatatactacaaaactcgcctttactaccgtacgcaccttttcaacaatcatttcgttatacgccaacataccttcgcgaataccaatacgattaataacaaaatctatcgcccccaactccaacgcgcgcaacgtaacttctaaccctntaccgatcaaaaaaaaaaccatcacaacgaacattaaacgcaaacgcattaatttttcgaaaaaatccaatccgtccatccgcgacatttcaacatccaacgtcaacacatcgaaat

SEQ ID NO: 32321 - DNA, 693 bp, Artificial Sequence
  chemically treated genomic DNA (Homo sapiens) CpG-island No: 32321
  unsure (240)
tgataggttatcgtacgatgttgttaggcgttcggttgtcgttgttcggtttgaagttatgtatataacgttatatcgggtagcgtgtttcgatatattttgttagacggttttaggcggcggtatcgtaggaaggcgatatatcgtttagtaagcgaattattgtcgggtaattatttgtaatattcggtaattgattttgttattgacgttgtttcgttagcggtaagggtttcgatnaaatcgttattttcgtcggcgttgttaggtaaggatgattttttagtagagacgttagtcgcgttattaaagtttggttgatacgcgtatcgttttggaaaggatagcgttgtagtaataaatcggtagtttcgcgtggattgttcgttttgtattagttgttaggttagttgatttaggcgggtaagatttgtcggtttttgttgatatagtaatcgtgttagacgtagagttttagttttgttacgggtcgttacgttgatagtataacgttttttaagtattttattggcggggagggtggcgagtagtttttgcgttgcgtcgtattgatttttttttaatagtatcggtagcgtcgcgttaataatatattggcggttgtcggtaaattgtatcgtataattcgttaacgtttgaacggggttagcgttgtatttagataatagatag

SEQ ID NO: 32322 - DNA, 693 bp, Artificial Sequence
  chemically treated genomic DNA (Homo sapiens) CpG-island No: 32322
  unsure (454)
ctatctattatctaaatacaacgctaaccccgttcaaacgttaacgaattatacgatacaatttaccgacaaccgccaatatattattaacgcgacgctaccgatactattaaaaaaaaatcaatacgacgcaacgcaaaaactactcgccaccctccccgccaataaaatacttaaaaaacgttatactatcaacgtaacgacccgtaacaaaactaaaactctacgtctaacacgattactatatcaacaaaaaccgacaaatcttacccgcctaaatcaactaacctaacaactaatacaaaacgaacaatccacgcgaaactaccgatttattactacaacgctatcctttccaaaacgatacgcgtatcaaccaaactttaataacgcgactaacgtctctactaaaaaatcatccttacctaacaacgccgacgaaaataacgatttnatcgaaacccttaccgctaacgaaacaacgtcaataacaaaatcaattaccgaatattacaaataattacccgacaataattcgcttactaaacgatatatcgccttcctacgataccgccgcctaaaaccgtctaacaaaatatatcgaaacacgctacccgatataacgttatatacataacttcaaaccgaacaacgacaaccgaacgcctaacaacatcgtacgataacctatca

SEQ ID NO: 32323 - DNA, 693 bp, Artificial Sequence
  chemically treated genomic DNA (Homo sapiens) CpG-island No: 32323
  unsure (454)
ttatttgttatttaaatatagcgttaatttcgtttaggcgttggcgaattatacggtatagtttgtcgataatcgttagtatgttgttggcgcgacgttatcggtgttgttaaaagaaggttagtacgacgtagcgtaaaaattgttcgttatttttttcgttaatgaaatgtttgaggagcgttatgttgttagcgtggcgattcgtaataaggttgaagttttgcgtttggtacgattgttgtattagtaagaatcggtaaattttattcgtttggattaattaatttggtaattgatgtagaacgagtagtttacgcgaagttgtcgatttattgttgtaacgttattttttttagggcgatgcgcgtgttagttagattttaatggcgcgattggcgtttttgttggaaagttatttttatttggtaacgtcggcgaaggtggcgatttnatcgaaatttttatcgttggcggagtaacgttagtggtaaagttagttgtcgggtattgtagataattgttcggtaatagttcgtttgttgggcgatatgtcgtttttttacgatgtcgtcgtttggaatcgtttggtaaagtgtatcgggatacgttattcggtgtggcgttgtatgtatggttttaggtcgaataacgataatcgagcgtttggtaatatcgtgcggtagtttatta

SEQ ID NO: 32324 - DNA, 693 bp, Artificial Sequence
  chemically treated genomic DNA (Homo sapiens) CpG-island No: 32324
  unsure (240)
taataaactaccgcacgatattaccaaacgctcgattatcgttattcgacctaaaaccatacatacaacgccacaccgaataacgtatcccgatacactttaccaaacgattccaaacgacgacatcgtaaaaaaacgacatatcgcccaacaaacgaactattaccgaacaattatctacaatacccgacaactaactttaccactaacgttactccgccaacgataaaaatttcgatnaaatcgccaccttcgccgacgttaccaaataaaaataactttccaacaaaaacgccaatcgcgccattaaaatctaactaacacgcgcatcgccctaaaaaaaataacgttacaacaataaatcgacaacttcgcgtaaactactcgttctacatcaattaccaaattaattaatccaaacgaataaaatttaccgattcttactaatacaacaatcgtaccaaacgcaaaacttcaaccttattacgaatcgccacgctaacaacataacgctcctcaaacatttcattaacgaaaaaaataacgaacaatttttacgctacgtcgtactaaccttcttttaacaacaccgataacgtcgcgccaacaacatactaacgattatcgacaaactataccgtataattcgccaacgcctaaacgaaattaacgctatatttaaataacaaataa

SEQ ID NO: 32325 - DNA, 577 bp, Artificial Sequence
  chemically treated genomic DNA (Homo sapiens) CpG-island No: 32325
  unsure (535)
tagcgttagtttcgaggtcggaatcgggtcgtaatttataatcgatgggttataattaacgatcgttatcgaacgtatacgagcgcgcggtttaagatttaatttatgggcgcggtttttatttattattagtatggtagttgcgttatcggaaagtgtagaagatgtgttcgtcgttattatatcgtttattggattaaacgtcggacgtagcgtggcgagggtttttacggtggttttcgggcgaattatttcgtcgtaattaaattgttttaggacgtcgtcggtatcgtgattatcggtcgggatgattttatttttaaatgcggtcgattgcgtggcggtttaggcgcgggcgtgtgatcgcgcggtaaaggtattttgtattttacggttgatatcgtgtatacgcgttagtatttttgtcgttaagtttattatgttcgtcgttttggcgatattgcggtttaggtcggggtgaaaatcgacgttcgtgatttatcggtatatgtgtttatatgtttttacgtcgttnattagatattttttgcgtatcgttcgttatgattattcggtg

SEQ ID NO: 32326 - DNA, 577 bp, Artificial Sequence
  chemically treated genomic DNA (Homo sapiens) CpG-island No: 32326
  unsure (43)
caccgaataatcataacgaacgatacgcaaaaaatatctaatnaacgacgtaaaaacatataaacacatataccgataaatcacgaacgtcgattttcaccccgacctaaaccgcaatatcgccaaaacgacgaacataataaacttaacgacaaaaatactaacgcgtatacacgatatcaaccgtaaaatacaaaatacctttaccgcgcgatcacacgcccgcgcctaaaccgccacgcaatcgaccgcatttaaaaataaaatcatcccgaccgataatcacgataccgacgacgtcctaaaacaatttaattacgacgaaataattcgcccgaaaaccaccgtaaaaaccctcgccacgctacgtccgacgtttaatccaataaacgatataataacgacgaacacatcttctacactttccgataacgcaactaccatactaataataaataaaaaccgcgcccataaattaaatcttaaaccgcgcgctcgtatacgttcgataacgatcgttaattataacccatcgattataaattacgacccgattccgacctcgaaactaacgcta

SEQ ID NO: 32327 - DNA, 577 bp, Artificial Sequence
  chemically treated genomic DNA (Homo sapiens) CpG-island No: 32327
  unsure (43)
tatcgaatgattatgacgggcgatgcgtaaggaatgtttggtnggcggcgtggagatatatgggtatatgtgtcgatgagttacgggcgtcgatttttatttcggtttgagtcgtaatgtcgttaaagcggcgggtatgatgggtttaacggtagaaatgttggcgcgtatgtacggtattagtcgtgaaatgtaggatgtttttgtcgcgcggttatacgttcgcgtttgggtcgttacgtagtcggtcgtatttaaaaatgaaattatttcgatcggtggttacgatgtcgacggcgttttgaagtagtttaattacgacgaagtgattcgttcggaaattatcgtggaagttttcgttacgttgcgttcggcgtttgatttagtaaacggtatggtaacggcgggtatattttttgtatttttcgatggcgtagttgttatgttggtgatgagtgaaagtcgcgtttatgaattaggttttaagtcgcgcgttcgtgtgcgttcgatggcggtcgttggttgtgatttatcgattatgggttacggttcggtttcggtttcgaaattggcgttg

SEQ ID NO: 32328 - DNA, 577 bp, Artificial Sequence
  chemically treated genomic DNA (Homo sapiens) CpG-island No: 32328
  unsure (535)
caacgccaatttcgaaaccgaaaccgaaccgtaacccataatcgataaatcacaaccaacgaccgccatcgaacgcacacgaacgcgcgacttaaaacctaattcataaacgcgactttcactcatcaccaacataacaactacgccatcgaaaaatacaaaaaatatacccgccgttaccataccgtttactaaatcaaacgccgaacgcaacgtaacgaaaacttccacgataatttccgaacgaatcacttcgtcgtaattaaactacttcaaaacgccgtcgacatcgtaaccaccgatcgaaataatttcatttttaaatacgaccgactacgtaacgacccaaacgcgaacgtataaccgcgcgacaaaaacatcctacatttcacgactaataccgtacatacgcgccaacatttctaccgttaaacccatcatacccgccgctttaacgacattacgactcaaaccgaaataaaaatcgacgcccgtaactcatcgacacatatacccatatatctccacgccgccnaccaaacattccttacgcatcgcccgtcataatcattcgata

SEQ ID NO: 32329 - DNA, 628 bp, Artificial Sequence
  chemically treated genomic DNA (Homo sapiens) CpG-island No: 32329
ggtatcgttttgggtaatgttaagtttattcgttagcgatttttcgatttttataaattgttttggttgtaaaatcgcgtttaatagcgcgtgtttggtttagtagtggaagtgttcggttagacgataggtggtttcgatatacgggaatttatcggttttatttaatgtttcggcgtcgtttttaaagatacgtgtagtcgggttcgagataacgtttggatgtagcgggttagtttttagcggcgttttaaacggttcgtagtgtttcgggaacggatttttcgttattttatcgagggtaaatagacgttttatgtttttttgttgtatgataaacggttcgacgtcgttattcggaggcgttgcgttgtagttcggaatattttagtcggtttatttagtgtcgttttattttagtaattgacgtttcggattttacgggttattttgcggatttgcggaggcgcggttatatagaatgcggcggttaagcggttatgtttatgtttagtttagcgtgttatcgaggttagacggatcggcgttattacggcgtgttatttggttgtttttcggcgttagttatcggcgaaaatttaggtagtataggagttgttcgttatcg

SEQ ID NO: 32330 - DNA, 628 bp, Artificial Sequence
  chemically treated genomic DNA (Homo sapiens) CpG-island No: 32330
cgataacgaacaactcctatactacctaaattttcgccgataactaacgccgaaaaacaaccaaataacacgccgtaataacgccgatccgtctaacctcgataacacgctaaactaaacataaacataaccgcttaaccgccgcattctatataaccgcgcctccgcaaatccgcaaaataacccgtaaaatccgaaacgtcaattactaaaataaaacgacactaaataaaccgactaaaatattccgaactacaacgcaacgcctccgaataacgacgtcgaaccgtttatcatacaacaaaaaaacataaaacgtctatttaccctcgataaaataacgaaaaatccgttcccgaaacactacgaaccgtttaaaacgccgctaaaaactaacccgctacatccaaacgttatctcgaacccgactacacgtatctttaaaaacgacgccgaaacattaaataaaaccgataaattcccgtatatcgaaaccacctatcgtctaaccgaacacttccactactaaaccaaacacgcgctattaaacgcgattttacaaccaaaacaatttataaaaatcgaaaaatcgctaacgaataaacttaacattacccaaaacgatacc

SEQ ID NO: 32331 - DNA, 628 bp, Artificial Sequence
  chemically treated genomic DNA (Homo sapiens) CpG-island No: 32331
cgatgacggataatttttgtgttgtttggattttcgtcggtagttgacgtcggaaggtaattagatggtacgtcgtgataacgtcgattcgtttggtttcggtaatacgttgggttgggtatgggtatggtcgtttaatcgtcgtattttgtataatcgcgttttcgtagattcgtagggtaattcgtgggattcgaagcgttagttgttgaaatgggacggtattaagtggatcggttgggatatttcggattatagcgtagcgttttcgggtagcggcgtcgggtcgtttattatgtagtaggaaggtatggggcgtttgtttgttttcgataagatggcggaaggttcgttttcggaatattacgagtcgtttgaaacgtcgttgggaattaattcgttgtatttaaacgttatttcgaattcggttgtacgtatttttaaagacgacgtcgaagtattgggtaaagtcgataagttttcgtatgtcggaattatttatcgtttgatcgagtatttttattattggattaaatacgcgttgttgaacgcgattttgtagttagagtagtttgtggaaatcggggagtcgttggcgaataaatttggtattgtttagggcgatatt

SEQ ID NO: 32332 - DNA, 628 bp, Artificial Sequence
  chemically treated genomic DNA (Homo sapiens) CpG-island No: 32332
aatatcgccctaaacaataccaaatttattcgccaacgactccccgatttccacaaactactctaactacaaaatcgcgttcaacaacgcgtatttaatccaataataaaaatactcgatcaaacgataaataattccgacatacgaaaacttatcgactttacccaatacttcgacgtcgtctttaaaaatacgtacaaccgaattcgaaataacgtttaaatacaacgaattaattcccaacgacgtttcaaacgactcgtaatattccgaaaacgaaccttccgccatcttatcgaaaacaaacaaacgccccataccttcctactacataataaacgacccgacgccgctacccgaaaacgctacgctataatccgaaatatcccaaccgatccacttaataccgtcccatttcaacaactaacgcttcgaatcccacgaattaccctacgaatctacgaaaacgcgattatacaaaatacgacgattaaacgaccatacccatacccaacccaacgtattaccgaaaccaaacgaatcgacgttatcacgacgtaccatctaattaccttccgacgtcaactaccgacgaaaatccaaacaacacaaaaattatccgtcatcg

SEQ ID NO: 32333 - DNA, 575 bp, Artificial Sequence
  chemically treated genomic DNA (Homo sapiens) CpG-island No: 32333
  unsure (99)
ttcgacggtagtcgtttttttcgtaaattaggttattttaagcggatcgggtgttatacgttattttttagtaatggttttcgttatataacgttgttngcgtttaatgtcgtgatgtaggaattttgcgttttcgcgtatggttttgttgatttttttagcggcgatattatcggtataaggggttagtagtttcgtagggtcgaattttgttagatttgttagcgtaacgaagttttgtattatttgaatatcgtttgtatttttagtttattatgcgaattagtgcggtaagttgttggcgatcgcgaagtttcggtaatatattggcgtaggcgaaacggtgtagtagtatcgtttgtttattcgtttagtatattaatttggcgtttcgttggaaattattttaagggaaaattaatgacgtcgaaaagtttttatttttacgcgtaatattttatttagtagacgcgagcgggtcgtttttagcgcgggtgagcgatataggaaggtgttgagtagatttttaatttttgtcgttattaaaggtttaaaaggtattttcggttttttgt

SEQ ID NO: 32334 - DNA, 575 bp, Artificial Sequence
  chemically treated genomic DNA (Homo sapiens) CpG-island No: 32334
  unsure (477)
acaaaaaaccgaaaataccttttaaacctttaataacgacaaaaattaaaaatctactcaacaccttcctatatcgctcacccgcgctaaaaacgacccgctcgcgtctactaaataaaatattacgcgtaaaaataaaaacttttcgacgtcattaattttcccttaaaataatttccaacgaaacgccaaattaatatactaaacgaataaacaaacgatactactacaccgtttcgcctacgccaatatattaccgaaacttcgcgatcgccaacaacttaccgcactaattcgcataataaactaaaaatacaaacgatattcaaataatacaaaacttcgttacgctaacaaatctaacaaaattcgaccctacgaaactactaaccccttataccgataatatcgccgctaaaaaaatcaacaaaaccatacgcgaaaacgcaaaattcctacatcacgacattaaacgcnaacaacgttatataacgaaaaccattactaaaaaataacgtataacacccgatccgcttaaaataacctaatttacgaaaaaaacgactaccgtcgaa

SEQ ID NO: 32335 - DNA, 575 bp, Artificial Sequence
  chemically treated genomic DNA (Homo sapiens) CpG-island No: 32335
  unsure (477)
ataggagatcggaaatgttttttaaatttttagtgacggtaggaattgaaagtttgtttaatatttttttgtatcgtttattcgcgttgaaaacggttcgttcgcgtttgttgggtaaagtattgcgcgtggaggtaaaggtttttcgacgttattgatttttttttggggtggtttttagcgaaacgttaggttgatgtattgggcgaatgggtaggcgatgttattgtatcgtttcgtttacgttagtgtgttgtcgaaatttcgcgatcgttagtagtttatcgtattgattcgtatggtgagttggaagtgtaggcgatatttaggtggtgtaaaatttcgttgcgttggtagatttggtagagttcgattttgcggaattgttggttttttatatcggtgatatcgtcgttgaaggaattagtaaagttatgcgcggaggcgtaaagtttttgtattacggtattaagcgtnagtaacgttatgtggcggaagttattattgaagagtggcgtatggtattcggttcgtttgaagtggtttggtttgcggaagagacggttgtcgtcgag

SEQ ID NO: 32336 - DNA, 575 bp, Artificial Sequence
  chemically treated genomic DNA (Homo sapiens) CpG-island No: 32336
  unsure (99)
ctcgacgacaaccgtctcttccgcaaaccaaaccacttcaaacgaaccgaataccatacgccactcttcaataataacttccgccacataacgttactnacgcttaataccgtaatacaaaaactttacgcctccgcgcataactttactaattccttcaacgacgatatcaccgatataaaaaaccaacaattccgcaaaatcgaactctaccaaatctaccaacgcaacgaaattttacaccacctaaatatcgcctacacttccaactcaccatacgaatcaatacgataaactactaacgatcgcgaaatttcgacaacacactaacgtaaacgaaacgatacaataacatcgcctacccattcgcccaatacatcaacctaacgtttcgctaaaaaccaccccaaaaaaaaatcaataacgtcgaaaaacctttacctccacgcgcaatactttacccaacaaacgcgaacgaaccgttttcaacgcgaataaacgatacaaaaaaatattaaacaaactttcaattcctaccgtcactaaaaatttaaaaaacatttccgatctcctat

SEQ ID NO: 32337 - DNA, 533 bp, Artificial Sequence
  chemically treated genomic DNA (Homo sapiens) CpG-island No: 32337
aaggttttcgtgtcgggtggtatttgagtttttaggtagtttaagcgcgagtcgagtagaatcgcggcgatgttttgtcgggagggggcgtcgttagggtttcgggaggttttggtagggcgttttcgacgtttgtttagttttgttttgggatttattttttagttcgaatttgtaaaattttttcgttacgtttcgaattagggcgggcggtttcgtgttacgttttcgttggcgttttagacgtcgtataaggtcgtagattacgttgtttagggtttcggcgtagcgggcggtcgtttgaggtcggaggaggagcggggttaggagattgcggagtttttgttatttttcgttttttttgtagggttgaggagagagtgcgtatcgggaaggtggggacggttcgacgggattggttgtagtgaaggagcgcgttcggttgcggtggttaggagagggattgcgtttgtttttttggggtacggaaatttgtatcggtttgcgtttgttttttagtttttttttttttt

SEQ ID NO: 32338 - DNA, 533 bp, Artificial Sequence
  chemically treated genomic DNA (Homo sapiens) CpG-island No: 32338
aaaaaaaaaaaaaactaaaaaacaaacgcaaaccgatacaaatttccgtaccccaaaaaaacaaacgcaatccctctcctaaccaccgcaaccgaacgcgctccttcactacaaccaatcccgtcgaaccgtccccaccttcccgatacgcactctctcctcaaccctacaaaaaaaacgaaaaataacaaaaactccgcaatctcctaaccccgctcctcctccgacctcaaacgaccgcccgctacgccgaaaccctaaacaacgtaatctacgaccttatacgacgtctaaaacgccaacgaaaacgtaacacgaaaccgcccgccctaattcgaaacgtaacgaaaaaattttacaaattcgaactaaaaaataaatcccaaaacaaaactaaacaaacgtcgaaaacgccctaccaaaacctcccgaaaccctaacgacgccccctcccgacaaaacatcgccgcgattctactcgactcgcgcttaaactacctaaaaactcaaataccacccgacacgaaaacctt

SEQ ID NO: 32339 - DNA, 533 bp, Artificial Sequence
  chemically treated genomic DNA (Homo sapiens) CpG-island No: 32339
aaagaggaagggggttggaagataggcgtaggtcggtgtaggttttcgtattttaagggggtagacgtaattttttttttggttatcgtagtcgaacgcgtttttttattgtagttagtttcgtcgagtcgtttttattttttcgatgcgtattttttttttaattttgtagggaaggcgaagaatggtaaaggtttcgtagttttttggtttcgtttttttttcggttttaagcggtcgttcgttacgtcggaattttgaataacgtagtttgcgattttgtgcggcgtttgaggcgttagcggggacgtggtacggggtcgttcgttttggttcgggacgtggcgggggaattttataagttcggattggaaggtgagttttaggatagagttgggtaggcgtcgggggcgttttattagagtttttcggaattttgacggcgttttttttcgataaggtatcgtcgcggttttgttcggttcgcgtttgggttgtttggaggtttaagtgttattcgatacggagatttt

SEQ ID NO: 32340 - DNA, 533 bp, Artificial Sequence
  chemically treated genomic DNA (Homo sapiens) CpG-island No: 32340
aaaatctccgtatcgaataacacttaaacctccaaacaacccaaacgcgaaccgaacaaaaccgcgacgataccttatcgaaaaaaaacgccgtcaaaattccgaaaaactctaataaaacgcccccgacgcctacccaactctatcctaaaactcaccttccaatccgaacttataaaattcccccgccacgtcccgaaccaaaacgaacgaccccgtaccacgtccccgctaacgcctcaaacgccgcacaaaatcgcaaactacgttattcaaaattccgacgtaacgaacgaccgcttaaaaccgaaaaaaaaacgaaaccaaaaaactacgaaacctttaccattcttcgccttccctacaaaattaaaaaaaaaatacgcatcgaaaaaataaaaacgactcgacgaaactaactacaataaaaaaacgcgttcgactacgataaccaaaaaaaaaattacgtctacccccttaaaatacgaaaacctacaccgacctacgcctatcttccaacccccttcctcttt

SEQ ID NO: 32341 - DNA, 693 bp, Artificial Sequence
  chemically treated genomic DNA (Homo sapiens) CpG-island No: 32341
gagcgcgcgcgtgtttacggttttaggagcgcggcgagcgggcgagggcgcgcgcggaggggcggagcgcggggttaagaggaggcgggtaggttggtgggttgggcgggcggcgagcggtcgggaagcgcgcggtggattcggtcgcggcgagtagttagttagttgttgttagttagtgttagttgttcggcggcggcggtcgtggttattaggaaggggacgggacggacggtgatggtggtcgtcgcggcggcgtgtgcgttttttaggtaatagcggttcggttgttcgtattcgttcggttgttttttatttacgcgtcgtttgtgggattagggttgtcgcgggttgagggcgttgattcgggggaattcgggcggggcggcgcgggtattgggtggcggcgcgggttttgggtggcgtcgcgtcggggtttttgcgttcggttcgtttcgttcgggcggttattagtttttcggttattttcgcgtttcgtcggtgtcgcgcgttttttgtcggttttgttttttttttcggcggcggttttggagcgcgacgtttttagaggaaggaaagttgggatttgtcgcgaggacgttttcgggtcgggttgggaggttgcgggggaaagtgaagtttggaggagttggacgcggggaggtcggggtaggaggggtttttttggttttt

SEQ ID NO: 32342 - DNA, 693 bp, Artificial Sequence
  chemically treated genomic DNA (Homo sapiens) CpG-island No: 32342
aaaaaccaaaaaaacccctcctaccccgacctccccgcgtccaactcctccaaacttcactttcccccgcaacctcccaacccgacccgaaaacgtcctcgcgacaaatcccaactttccttcctctaaaaacgtcgcgctccaaaaccgccgccgaaaaaaaaaacaaaaccgacaaaaaacgcgcgacaccgacgaaacgcgaaaataaccgaaaaactaataaccgcccgaacgaaacgaaccgaacgcaaaaaccccgacgcgacgccacccaaaacccgcgccgccacccaatacccgcgccgccccgcccgaattcccccgaatcaacgccctcaacccgcgacaaccctaatcccacaaacgacgcgtaaataaaaaacaaccgaacgaatacgaacaaccgaaccgctattacctaaaaaacgcacacgccgccgcgacgaccaccatcaccgtccgtcccgtccccttcctaataaccacgaccgccgccgccgaacaactaacactaactaacaacaactaactaactactcgccgcgaccgaatccaccgcgcgcttcccgaccgctcgccgcccgcccaacccaccaacctacccgcctcctcttaaccccgcgctccgcccctccgcgcgcgccctcgcccgctcgccgcgctcctaaaaccgtaaacacgcgcgcgctc

SEQ ID NO: 32343 - DNA, 693 bp, Artificial Sequence
  chemically treated genomic DNA (Homo sapiens) CpG-island No: 32343
aggagttagagaagttttttttgtttcggttttttcgcgtttagtttttttaggttttattttttttcgtaattttttagttcggttcgggggcgttttcgcggtaggttttaatttttttttttttgggggcgtcgcgttttagggtcgtcgtcgagggagggggtagggtcggtagggggcgcgcggtatcggcggggcgcgggggtggtcggggagttagtagtcgttcgggcgggacgaatcgagcgtaagagtttcggcgcggcgttatttagaattcgcgtcgttatttagtattcgcgtcgtttcgttcggattttttcgggttagcgtttttaattcgcggtaattttggttttatagacggcgcgtgagtagaagataatcgagcggatgcggatagtcgggtcgttgttatttgaggggcgtatacgtcgtcgcggcgattattattatcgttcgtttcgttttttttttggtgattacggtcgtcgtcgtcgagtaattgatattgattaataataattaattaattattcgtcgcggtcgagtttatcgcgcgtttttcggtcgttcgtcgttcgtttagtttattagtttgttcgtttttttttggtttcgcgtttcgttttttcgcgcgcgttttcgttcgttcgtcgcgtttttggagtcgtgagtacgcgcgcgttt

SEQ ID NO: 32344 - DNA, 693 bp, Artificial Sequence
  chemically treated genomic DNA (Homo sapiens) CpG-island No: 32344
aaacgcgcgcgtactcacgactccaaaaacgcgacgaacgaacgaaaacgcgcgcgaaaaaacgaaacgcgaaaccaaaaaaaaacgaacaaactaataaactaaacgaacgacgaacgaccgaaaaacgcgcgataaactcgaccgcgacgaataattaattaattattattaatcaatatcaattactcgacgacgacgaccgtaatcaccaaaaaaaaaacgaaacgaacgataataataatcgccgcgacgacgtatacgcccctcaaataacaacgacccgactatccgcatccgctcgattatcttctactcacgcgccgtctataaaaccaaaattaccgcgaattaaaaacgctaacccgaaaaaatccgaacgaaacgacgcgaatactaaataacgacgcgaattctaaataacgccgcgccgaaactcttacgctcgattcgtcccgcccgaacgactactaactccccgaccacccccgcgccccgccgataccgcgcgccccctaccgaccctaccccctccctcgacgacgaccctaaaacgcgacgcccccaaaaaaaaaaaaattaaaacctaccgcgaaaacgcccccgaaccgaactaaaaaattacgaaaaaaaataaaacctaaaaaaactaaacgcgaaaaaaccgaaacaaaaaaaacttctctaactcct

SEQ ID NO: 32345 - DNA, 653 bp, Artificial Sequence
  chemically treated genomic DNA (Homo sapiens) CpG-island No: 32345
tcgtttcgtgtgagttttcggcgtcggtttttggtttttgatttggcgtttttttcgcgtttcggtatttcggcgggcggggggcgttagttgtgcggtttcggtcggttgggcggcgcgggcggagggcgggtcgggtcgggggcgttttcgcgagtggagttagtttgtgtggttggagttgttggggcggcggggggcggcgtatttgcgggaggttcgggcgcggggacggggtcgttgtagttgcggggtcgggcggggtgcgggttttcggtttcgcgtcgcgttttcgcgggtcggtgtagttgcggcgcggggcgggttttcggtcggtgtagttgcggtggcgtttttcgggtgcggagggcggcgggttgggggagggggtttgggagtagtcgtagttgtagtggcgttcgggacggtcgcggtttcggggatcggtgtagttgtagtggcgttcgggggagggggtcggcgggggagggggttttttcgggttggtgtagttgttcggaggtttcgggggttcgcgcgtcgcggtatcggggaagcggtagtaattatttttttttcgttggttgttttttacgattttttttttgttgttgtcgtgattcgggtttgtttttttttttgttgtttaaggt

SEQ ID NO: 32346 - DNA, 653 bp, Artificial Sequence
  chemically treated genomic DNA (Homo sapiens) CpG-island No: 32346
accttaaacaacaaaaaaaaaaacaaacccgaatcacgacaacaacaaaaaaaaaatcgtaaaaaacaaccaacgaaaaaaaaataattactaccgcttccccgataccgcgacgcgcgaacccccgaaacctccgaacaactacaccaacccgaaaaaaccccctcccccgccgaccccctcccccgaacgccactacaactacaccgatccccgaaaccgcgaccgtcccgaacgccactacaactacgactactcccaaaccccctcccccaacccgccgccctccgcacccgaaaaacgccaccgcaactacaccgaccgaaaacccgccccgcgccgcaactacaccgacccgcgaaaacgcgacgcgaaaccgaaaacccgcaccccgcccgaccccgcaactacaacgaccccgtccccgcgcccgaacctcccgcaaatacgccgccccccgccgccccaacaactccaaccacacaaactaactccactcgcgaaaacgcccccgacccgacccgccctccgcccgcgccgcccaaccgaccgaaaccgcacaactaacgccccccgcccgccgaaataccgaaacgcgaaaaaaacgccaaatcaaaaaccaaaaaccgacgccgaaaactcacacgaaacga

SEQ ID NO: 32347 - DNA, 653 bp, Artificial Sequence
  chemically treated genomic DNA (Homo sapiens) CpG-island No: 32347
attttaaataatagaggagaaaatagattcgggttacggtaataataaaagaaaagtcgtaagaagtagttagcgggaggagagtggttgttatcgttttttcgatgtcgcgacgcgcgagttttcggggttttcgggtaattgtattagttcgggagggttttttttttcgtcggttttttttttcgggcgttattgtagttgtatcggttttcggagtcgcggtcgtttcgggcgttattgtagttgcggttgtttttaagtttttttttttagttcgtcgtttttcgtattcgagaggcgttatcgtagttgtatcggtcgggagttcgtttcgcgtcgtagttgtatcggttcgcgggggcgcggcgcggagtcgggaattcgtatttcgttcgatttcgtagttgtagcggtttcgttttcgcgttcgggtttttcgtagatgcgtcgtttttcgtcgttttaatagttttaattatataaattaattttattcgcgggggcgttttcgattcggttcgtttttcgttcgcgtcgtttagtcggtcggggtcgtatagttggcgtttttcgttcgtcggggtgtcggggcgcggagggggcgttaggttaggggttaggggtcggcgtcggagatttatacggagcgg

SEQ ID NO: 32348 - DNA, 653 bp, Artificial Sequence
  chemically treated genomic DNA (Homo sapiens) CpG-island No: 32348
ccgctccgtataaatctccgacgccgacccctaacccctaacctaacgccccctccgcgccccgacaccccgacgaacgaaaaacgccaactatacgaccccgaccgactaaacgacgcgaacgaaaaacgaaccgaatcgaaaacgcccccgcgaataaaattaatttatataattaaaactattaaaacgacgaaaaacgacgcatctacgaaaaacccgaacgcgaaaacgaaaccgctacaactacgaaatcgaacgaaatacgaattcccgactccgcgccgcgcccccgcgaaccgatacaactacgacgcgaaacgaactcccgaccgatacaactacgataacgcctctcgaatacgaaaaacgacgaactaaaaaaaaaaacttaaaaacaaccgcaactacaataacgcccgaaacgaccgcgactccgaaaaccgatacaactacaataacgcccgaaaaaaaaaaccgacgaaaaaaaaaaccctcccgaactaatacaattacccgaaaaccccgaaaactcgcgcgtcgcgacatcgaaaaaacgataacaaccactctcctcccgctaactacttcttacgacttttcttttattattaccgtaacccgaatctattttctcctctattatttaaaat

SEQ ID NO: 32349 - DNA, 973 bp, Artificial Sequence
  chemically treated genomic DNA (Homo sapiens) CpG-island No: 32349
tagtgttgcgagtttttgaggtgcgtaattttcgtacgatcgtgggtgggaaatatcgaagttaaaatttcgttatagttttttagatgaaggcgtcgtttgattggtgatagtttggcgcgaatttgagtacgtcgaataaaggaagtgacggtagaagtcgcgtatttgacgagggtgggattatacggcgttgcgtcgcggtagtattgttttgattggttgattttttgcgatatcgttttgttagttttttgttttcgttagtgcggagggttttgtttttcgtaaagatggtcgcggaggtttttggagttaattgggagcgtagtacgcgttttttggagtatgggtagaggagataggaataagcgtacgattcgtgagtatcgattggttgaagcgagtatttcgggagttgattggtttcgtttattcgcgggaaggcgtttgtggtgttagagaaaagtagttagagcgcgtagtggcggtcgggtgttgtggtttttcgttatttttttagattcgtattttttcggtttttttgcggagaatcgtgattaagatgtggaatagtaatgatgggggtgcggggtggaggaggaagagaatcgtaggaggttttagtaagagggcgagtttagggttcgagaggcgtgtggtagcgggagaggaagggcgggacggagttggggcgtttgggggttatcgtaggaaggcgcgaggaaggttagggagattcgggtagtgtttgaaggggcgatttcgggagtttgcgggtttttcggaggcgtgggacgtggtataggtattaattttgttgtttaaaataggtggattcgaaagttatggtagttttttatacgggggagtcggcggttatacgtagttttcggggggttttggatcgttcgtatttttttaagtcgaaaagaaattagtaggttgaaaggagtatttagttttgttttat

SEQ ID NO: 32350 - DNA, 973 bp, Artificial Sequence
  chemically treated genomic DNA (Homo sapiens) CpG-island No: 32350
ataaaacaaaactaaatactcctttcaacctactaatttcttttcgacttaaaaaaatacgaacgatccaaaaccccccgaaaactacgtataaccgccgactcccccgtataaaaaactaccataactttcgaatccacctattttaaacaacaaaattaatacctataccacgtcccacgcctccgaaaaacccgcaaactcccgaaatcgccccttcaaacactacccgaatctccctaaccttcctcgcgccttcctacgataacccccaaacgccccaactccgtcccgcccttcctctcccgctaccacacgcctctcgaaccctaaactcgccctcttactaaaacctcctacgattctcttcctcctccaccccgcacccccatcattactattccacatcttaatcacgattctccgcaaaaaaaccgaaaaaatacgaatctaaaaaaataacgaaaaaccacaacacccgaccgccactacgcgctctaactacttttctctaacaccacaaacgccttcccgcgaataaacgaaaccaatcaactcccgaaatactcgcttcaaccaatcgatactcacgaatcgtacgcttattcctatctcctctacccatactccaaaaaacgcgtactacgctcccaattaactccaaaaacctccgcgaccatctttacgaaaaacaaaaccctccgcactaacgaaaacaaaaaactaacaaaacgatatcgcaaaaaatcaaccaatcaaaacaatactaccgcgacgcaacgccgtataatcccaccctcgtcaaatacgcgacttctaccgtcacttcctttattcgacgtactcaaattcgcgccaaactatcaccaatcaaacgacgccttcatctaaaaaactataacgaaattttaacttcgatatttcccacccacgatcgtacgaaaattacgcacctcaaaaactcgcaacacta

SEQ ID NO: 32351 - DNA, 973 bp, Artificial Sequence
  chemically treated genomic DNA (Homo sapiens) CpG-island No: 32351
ataaaataaaattaaatattttttttaatttattgattttttttcggtttgagaaggtgcgggcgatttaaagtttttcggggattgcgtgtagtcgtcggttttttcgtatgaggagttgttatagttttcgaatttatttgttttgaataataggattagtgtttgtgttacgttttacgttttcgagaaattcgtaggttttcggagtcgtttttttaaatattgttcgagtttttttaatttttttcgcgtttttttgcggtgatttttaaacgttttagtttcgtttcgttttttttttttcgttattatacgtttttcggattttaggttcgtttttttgttaaaattttttgcgatttttttttttttttatttcgtatttttattattattgttttatattttggttacgatttttcgtaaagaggtcgagaaggtgcgggtttgggggaatagcggaaaattatagtattcggtcgttattgcgcgttttggttatttttttttggtattataaacgttttttcgcgaatgggcggagttagttagttttcggggtgttcgttttagttaatcggtgtttacggatcgtacgtttgtttttgttttttttgtttatgttttagaaaacgcgtattgcgtttttagttggttttaaaagttttcgcggttatttttacgaagggtaaaatttttcgtattagcggaagtaaggggttggtagagcggtatcgtaagaaattaattaattagaataatattatcgcgacgtagcgtcgtgtgattttattttcgttaagtgcgcgatttttgtcgttattttttttgttcggcgtgtttaggttcgcgttaaattattattaattagacgacgtttttatttaaagggttgtagcggagttttggtttcggtgttttttatttacggtcgtgcgggaattgcgtattttagggattcgtagtatta

SEQ ID NO: 32352 - DNA, 973 bp, Artificial Sequence
  chemically treated genomic DNA (Homo sapiens) CpG-island No: 32352
taatactacgaatccctaaaatacgcaattcccgcacgaccgtaaataaaaaacaccgaaaccaaaactccgctacaaccctttaaataaaaacgtcgtctaattaataataatttaacgcgaacctaaacacgccgaacaaaaaaaataacgacaaaaatcgcgcacttaacgaaaataaaatcacacgacgctacgtcgcgataatattattctaattaattaatttcttacgataccgctctaccaaccccttacttccgctaatacgaaaaattttacccttcgtaaaaataaccgcgaaaacttttaaaaccaactaaaaacgcaatacgcgttttctaaaacataaacaaaaaaaacaaaaacaaacgtacgatccgtaaacaccgattaactaaaacgaacaccccgaaaactaactaactccgcccattcgcgaaaaaacgtttataataccaaaaaaaaataaccaaaacgcgcaataacgaccgaatactataattttccgctattcccccaaacccgcaccttctcgacctctttacgaaaaatcgtaaccaaaatataaaacaataataataaaaatacgaaataaaaaaaaaaaaaaatcgcaaaaaattttaacaaaaaaacgaacctaaaatccgaaaaacgtataataacgaaaaaaaaaaaacgaaacgaaactaaaacgtttaaaaatcaccgcaaaaaaacgcgaaaaaaattaaaaaaactcgaacaatatttaaaaaaacgactccgaaaacctacgaatttctcgaaaacgtaaaacgtaacacaaacactaatcctattattcaaaacaaataaattcgaaaactataacaactcctcatacgaaaaaaccgacgactacacgcaatccccgaaaaactttaaatcgcccgcaccttctcaaaccgaaaaaaaatcaataaattaaaaaaaatatttaattttattttat

SEQ ID NO: 32353 - DNA, 711 bp, Artificial Sequence
  chemically treated genomic DNA (Homo sapiens) CpG-island No: 32353
cgatttcgtttcgacggtagcggtttagttttgttttttgatttttgtttgagcgtcgttaggtttttcgttagttcgtcgcgttttatttgtattcggttacgttcgcggtttaatagttttagttttcgtcgtagttcgcgtagtttttgttggtatagttggtcggcgcgcgtcggtttttggtttcgggtttggtttagtttttcgcgtagggtcgcgttttgttgttttagaaagcgtattttttcgatgaagttggcgaagcggtcgttgagtttttgtagtttttgtttttcgttgttgcgcgtggttaggaatttttggttgagggtttcggttatggagaagtcgaggcgtttcgagggtaggcgtaggagggcgttcgttttcgttcgggggttacggaagttgtttaggcgtatcgaggagttcggggacgcggagtttagtaggcggttgttggagaagcgggagttggacgagtaggagaaggtttcgggggatagtgagggcggtggatcgaaggtacggcggtatgaggtggagttgaagtcggttcggaggttcgacgggtggtggtttattgcggttaaggatgggtagttatcgttcgtagagttaggtcgggggttgggaaggagtcgtagatcgttgcgaggcggttttatagttttgcggttttagggggggtacgggtagtttttttta

SEQ ID NO: 32354 - DNA, 711 bp, Artificial Sequence
  chemically treated genomic DNA (Homo sapiens) CpG-island No: 32354
taaaaaaaactacccgtaccccccctaaaaccgcaaaactataaaaccgcctcgcaacgatctacgactccttcccaacccccgacctaactctacgaacgataactacccatccttaaccgcaataaaccaccacccgtcgaacctccgaaccgacttcaactccacctcataccgccgtaccttcgatccaccgccctcactatcccccgaaaccttctcctactcgtccaactcccgcttctccaacaaccgcctactaaactccgcgtccccgaactcctcgatacgcctaaacaacttccgtaacccccgaacgaaaacgaacgccctcctacgcctaccctcgaaacgcctcgacttctccataaccgaaaccctcaaccaaaaattcctaaccacgcgcaacaacgaaaaacaaaaactacaaaaactcaacgaccgcttcgccaacttcatcgaaaaaatacgctttctaaaacaacaaaacgcgaccctacgcgaaaaactaaaccaaacccgaaaccaaaaaccgacgcgcgccgaccaactataccaacaaaaactacgcgaactacgacgaaaactaaaactattaaaccgcgaacgtaaccgaatacaaataaaacgcgacgaactaacgaaaaacctaacgacgctcaaacaaaaatcaaaaaacaaaactaaaccgctaccgtcgaaacgaaatcg

SEQ ID NO: 32355 - DNA, 711 bp, Artificial Sequence
  chemically treated genomic DNA (Homo sapiens) CpG-island No: 32355
tgggaggagttgttcgtgttttttttgagatcgtagggttataaagtcgtttcgtagcggtttgcggtttttttttagttttcggtttagttttgcgaacggtgattgtttatttttggtcgtaatgagttattattcgtcgggttttcgggtcggttttagttttattttatatcgtcgtattttcggtttatcgtttttattatttttcggggtttttttttattcgtttagttttcgtttttttagtagtcgtttgttgggtttcgcgttttcgagtttttcggtgcgtttgggtagttttcgtagttttcgagcgggagcgggcgtttttttgcgtttgttttcggagcgtttcgatttttttatggtcgaggtttttaattaggagtttttggttacgcgtagtaacgagaagtaggagttgtaggagtttaacgatcgtttcgttaattttatcgagaaggtacgttttttggagtagtagaacgcggttttgcgcggggagttgagttaagttcggggttaggagtcggcgcgcgtcgattagttgtgttagtaggagttgcgcgagttgcggcgagagttggagttgttgggtcgcgagcgtgatcgggtgtaggtggagcgcgacgggttggcggaggatttggcggcgtttaagtagaggttagggggtagggttgggtcgttgtcgtcgaggcgaggtcg

SEQ ID NO: 32356 - DNA, 711 bp, Artificial Sequence
  chemically treated genomic DNA (Homo sapiens) CpG-island No: 32356
cgacctcgcctcgacgacaacgacccaaccctaccccctaacctctacttaaacgccgccaaatcctccgccaacccgtcgcgctccacctacacccgatcacgctcgcgacccaacaactccaactctcgccgcaactcgcgcaactcctactaacacaactaatcgacgcgcgccgactcctaaccccgaacttaactcaactccccgcgcaaaaccgcgttctactactccaaaaaacgtaccttctcgataaaattaacgaaacgatcgttaaactcctacaactcctacttctcgttactacgcgtaaccaaaaactcctaattaaaaacctcgaccataaaaaaatcgaaacgctccgaaaacaaacgcaaaaaaacgcccgctcccgctcgaaaactacgaaaactacccaaacgcaccgaaaaactcgaaaacgcgaaacccaacaaacgactactaaaaaaacgaaaactaaacgaataaaaaaaaaccccgaaaaataataaaaacgataaaccgaaaatacgacgatataaaataaaactaaaaccgacccgaaaacccgacgaataataactcattacgaccaaaaataaacaatcaccgttcgcaaaactaaaccgaaaactaaaaaaaaaccgcaaaccgctacgaaacgactttataaccctacgatctcaaaaaaaacacgaacaactcctccca

SEQ ID NO: 32357 - DNA, 539 bp, Artificial Sequence
  chemically treated genomic DNA (Homo sapiens) CpG-island No: 32357
gtcgtcgtcgtagtgcgggtgtaggaatcgggttagtattgcgtttagggcgtagtagagcgttggggaggaataaaggcggcgtttaggcgtttgtgttattcgagagattttcgggggtcgcgggtagttcgtttgtcgcgatcgaggggtttggggcgtttcggttgggtttcgtgtttgtgcgtacggtttcgttgatgttgaggggttattttttgtttcgcgttgttttttggggatcgggagaggaggaggtatttaaaaagagcgggggcgttgggcgagttgggggacgtgggagggggaacgggaataaagcgtagtttagggttagcgtgggaagatttttcgcggtttttggcgttttggaaagatatttatatattttcgggaaaatatggtgagtttttgtcggagttttcggtagcgggtgttagggcggcgtaggggcggggttgtttgtttttggtttttatggcgttggagttattgggcggggttcgtttttattgaattttttttgttaggagttgatt

SEQ ID NO: 32358 - DNA, 539 bp, Artificial Sequence
  chemically treated genomic DNA (Homo sapiens) CpG-island No: 32358
aatcaactcctaacaaaaaaaattcaataaaaacgaaccccgcccaataactccaacgccataaaaaccaaaaacaaacaaccccgcccctacgccgccctaacacccgctaccgaaaactccgacaaaaactcaccatattttcccgaaaatatataaatatctttccaaaacgccaaaaaccgcgaaaaatcttcccacgctaaccctaaactacgctttattcccgttccccctcccacgtcccccaactcgcccaacgcccccgctctttttaaatacctcctcctctcccgatccccaaaaaacaacgcgaaacaaaaaataacccctcaacatcaacgaaaccgtacgcacaaacacgaaacccaaccgaaacgccccaaacccctcgatcgcgacaaacgaactacccgcgacccccgaaaatctctcgaataacacaaacgcctaaacgccgcctttattcctccccaacgctctactacgccctaaacgcaatactaacccgattcctacacccgcactacgacgacgac

SEQ ID NO: 32359 - DNA, 539 bp, Artificial Sequence
  chemically treated genomic DNA (Homo sapiens) CpG-island No: 32359
agttagtttttgatagaagaggtttagtgagggcgaatttcgtttagtggttttaacgttatagaagttagaaataaataatttcgtttttgcgtcgttttgatattcgttgtcgggggtttcggtagaaatttattatgttttttcgggaatgtgtgggtatttttttaaaacgttaaagatcgcggagggtttttttacgttaattttaggttgcgttttgttttcgtttttttttttacgttttttagttcgtttaacgttttcgttttttttgggtgtttttttttttttcggtttttagagaataacgcgagatagaaagtggttttttagtattagcgaaatcgtgcgtatagatacggggtttagtcgggacgttttagatttttcggtcgcggtagacgggttgttcgcggttttcgaaagtttttcggataatataggcgtttaggcgtcgtttttgtttttttttagcgttttgttgcgttttgggcgtagtattggttcggtttttgtattcgtattgcggcggcggt

SEQ ID NO: 32360 - DNA, 539 bp, Artificial Sequence
  chemically treated genomic DNA (Homo sapiens) CpG-island No: 32360
accgccgccgcaatacgaatacaaaaaccgaaccaatactacgcccaaaacgcaacaaaacgctaaaaaaaaacaaaaacgacgcctaaacgcctatattatccgaaaaactttcgaaaaccgcgaacaacccgtctaccgcgaccgaaaaatctaaaacgtcccgactaaaccccgtatctatacgcacgatttcgctaatactaaaaaaccactttctatctcgcgttattctctaaaaaccgaaaaaaaaaaaaacacccaaaaaaaacgaaaacgttaaacgaactaaaaaacgtaaaaaaaaaaacgaaaacaaaacgcaacctaaaattaacgtaaaaaaaccctccgcgatctttaacgttttaaaaaaatacccacacattcccgaaaaaacataataaatttctaccgaaacccccgacaacgaatatcaaaacgacgcaaaaacgaaattatttatttctaacttctataacgttaaaaccactaaacgaaattcgccctcactaaacctcttctatcaaaaactaact

SEQ ID NO: 32361 - DNA, 584 bp, Artificial Sequence
  chemically treated genomic DNA (Homo sapiens) CpG-island No: 32361
gttttcgtacgtttagtcgtttcgatttttttcgttattttagttttatatagagtatgagtaggtttttttttttcgataggttcgggttagcgttattgtttaggacgcggattagaattacgattacgttagtaatagcgttattttgtatttggacgtgggcgacgaggtttttattaagttggacggcgggaaagtgtacggcggtaatattaataagtatagtatttttttcggtttattatttatttcgattgagtcggtttcgtttcgtgttttcgttcgttttttttttttcggtttttatttatttttttggtcgttttattcgaggcgttattttattttttgagagtttggcggtggggtggattttttcgttttcgttggcggtttaaatgggcgaatttttggtgtttaagggtataagtggtcgggaagaggaggagattcggttagaggagtagagcgattttcggagggattattcgtatttaagtgcgcgttggattttataggggtagaggtcgtggtttttttttttgtatagagatggggagtagttttaatagcgggattta

SEQ ID NO: 32362 - DNA, 584 bp, Artificial Sequence
  chemically treated genomic DNA (Homo sapiens) CpG-island No: 32362
taaatcccgctattaaaactactccccatctctatacaaaaaaaaaaaccacgacctctacccctataaaatccaacgcgcacttaaatacgaataatccctccgaaaatcgctctactcctctaaccgaatctcctcctcttcccgaccacttatacccttaaacaccaaaaattcgcccatttaaaccgccaacgaaaacgaaaaaatccaccccaccgccaaactctcaaaaaataaaataacgcctcgaataaaacgaccaaaaaaataaataaaaaccgaaaaaaaaaaaacgaacgaaaacacgaaacgaaaccgactcaatcgaaataaataataaaccgaaaaaaatactatacttattaatattaccgccgtacactttcccgccgtccaacttaataaaaacctcgtcgcccacgtccaaatacaaaataacgctattactaacgtaatcgtaattctaatccgcgtcctaaacaataacgctaacccgaacctatcgaaaaaaaaaaacctactcatactctatataaaactaaaataacgaaaaaaatcgaaacgactaaacgtacgaaaac

SEQ ID NO: 32363 - DNA, 584 bp, Artificial Sequence
  chemically treated genomic DNA (Homo sapiens) CpG-island No: 32363
tgagtttcgttattaaaattgttttttatttttgtataaaagagaaagttacgatttttgtttttatggggtttagcgcgtatttgggtgcgggtgattttttcggaagtcgttttgtttttttggtcgggttttttttttttttcggttatttatatttttgagtattaagagttcgtttatttaggtcgttaacgggaacggaagggtttattttatcgttaggtttttaaagggtggggtggcgtttcgggtggggcggttaagaaggtgggtgaggatcgggagagaaggggcgagcgggggtacggggcggggtcggtttagtcggggtagatgataagtcggagaaggtgttgtatttgttggtgttgtcgtcgtgtattttttcgtcgtttagtttgatgaagatttcgtcgtttacgtttaggtgtagaatgacgttgttgttggcgtagtcgtagttttggttcgcgttttgagtaatggcgttggttcggatttatcgagggagaagaatttgtttatgttttgtgtggagttggggtgacgagaggggtcggggcggttgggcgtgcgaaggt

SEQ ID NO: 32364 - DNA, 584 bp, Artificial Sequence
  chemically treated genomic DNA (Homo sapiens) CpG-island No: 32364
accttcgcacgcccaaccgccccgacccctctcgtcaccccaactccacacaaaacataaacaaattcttctccctcgataaatccgaaccaacgccattactcaaaacgcgaaccaaaactacgactacgccaacaacaacgtcattctacacctaaacgtaaacgacgaaatcttcatcaaactaaacgacgaaaaaatacacgacgacaacaccaacaaatacaacaccttctccgacttatcatctaccccgactaaaccgaccccgccccgtacccccgctcgccccttctctcccgatcctcacccaccttcttaaccgccccacccgaaacgccaccccaccctttaaaaacctaacgataaaataaacccttccgttcccgttaacgacctaaataaacgaactcttaatactcaaaaatataaataaccgaaaaaaaaaaaaaacccgaccaaaaaaacaaaacgacttccgaaaaaatcacccgcacccaaatacgcgctaaaccccataaaaacaaaaatcgtaactttctcttttatacaaaaataaaaaacaattttaataacgaaactca

SEQ ID NO: 32365 - DNA, 882 bp, Artificial Sequence
  chemically treated genomic DNA (Homo sapiens) CpG-island No: 32365
tgcgggtgttgttgcgggtgcggcgcgggcggcggcggcggttgttgcggcgtcggcggcggttttttcgttacgttattcgcgtcgttcgacgggtgggtattttttttcgaggggttcgcggcgtcgtggtcgtttttggagtttttttgtttggtcgagggtatggcgggcgcggcggcggttcgggtcgcgggttgggaggcgagcgagcgcggcgcgcggttcgggaaatttgtaggggttttttcgggattgggcgagcggtacgcgggcgttgttggcgtcggagcggcgagaggacgcgcggtcggggaaggaggtcgggtcgaggaggcgggaggagggggtttgttttcgtcgtcgcggcgtcgatttcgtttttcggtaagggaggtcgagcgagtcgagtcgggagagtttgttacgtacgtcggttcggcggtttttttttttcgtcgttacgatttcggagagggagggtcgggcggggtttacgggggtcgggaagtcggcgcgggggtggttgggcgcggggcggggtttcggcggggtttgcggaggtcggggtgggtatcgaggtggtcgcgaggggaggggagaagagcggagcggaggggaggggacgcggtcgaggtggggttggcggttcggcgggttttacgtaggttgggggcggagggttagatcgattttagtcggggcggtcgagtagggtttacgggggtcggggatgggcggttaggcggggtcggagggacgaaagtcggggtgaatttgcgtcgcgggttaagcgcgatttttttttttttcgatttgtgcggagaggagagaaatgaaggggggcgtttaaggagttttggtttcgggagtgggagttag

SEQ ID NO: 32366 - DNA, 882 bp, Artificial Sequence
  chemically treated genomic DNA (Homo sapiens) CpG-island No: 32366
ctaactcccactcccgaaaccaaaactccttaaacgccccccttcatttctctcctctccgcacaaatcgaaaaaaaaaaaaatcgcgcttaacccgcgacgcaaattcaccccgactttcgtccctccgaccccgcctaaccgcccatccccgacccccgtaaaccctactcgaccgccccgactaaaatcgatctaaccctccgcccccaacctacgtaaaacccgccgaaccgccaaccccacctcgaccgcgtcccctcccctccgctccgctcttctcccctcccctcgcgaccacctcgatacccaccccgacctccgcaaaccccgccgaaaccccgccccgcgcccaaccacccccgcgccgacttcccgacccccgtaaaccccgcccgaccctccctctccgaaatcgtaacgacgaaaaaaaaaaaccgccgaaccgacgtacgtaacaaactctcccgactcgactcgctcgacctcccttaccgaaaaacgaaatcgacgccgcgacgacgaaaacaaaccccctcctcccgcctcctcgacccgacctccttccccgaccgcgcgtcctctcgccgctccgacgccaacaacgcccgcgtaccgctcgcccaatcccgaaaaaacccctacaaatttcccgaaccgcgcgccgcgctcgctcgcctcccaacccgcgacccgaaccgccgccgcgcccgccataccctcgaccaaacaaaaaaactccaaaaacgaccacgacgccgcgaacccctcgaaaaaaaatacccacccgtcgaacgacgcgaataacgtaacgaaaaaaccgccgccgacgccgcaacaaccgccgccgccgcccgcgccgcacccgcaacaacacccgca

SEQ ID NO: 32367 - DNA, 882 bp, Artificial Sequence
  chemically treated genomic DNA (Homo sapiens) CpG-island No: 32367
ttgatttttattttcggggttagggttttttgggcgtttttttttatttttttttttttcgtataggtcgggaagggagggggtcgcgtttggttcgcggcgtaggtttatttcggttttcgttttttcgatttcgtttggtcgtttattttcgattttcgtggattttgttcggtcgtttcggttggggtcgatttggtttttcgtttttagtttgcgtggaattcgtcgggtcgttagttttatttcggtcgcgttttttttttttcgtttcgtttttttttttttttttcgcggttatttcggtgtttatttcggttttcgtagatttcgtcgggatttcgtttcgcgtttagttattttcgcgtcggtttttcggttttcgtagatttcgttcggtttttttttttcggggtcgtggcggcggggaggaggggtcgtcgggtcggcgtgcgtggtaagttttttcggttcggttcgttcggttttttttatcgggaggcggggtcggcgtcgcggcggcggaggtaggtttttttttttcgttttttcggttcggttttttttttcggtcgcgcgttttttcgtcgtttcgacgttagtagcgttcgcgtgtcgttcgtttagtttcgggggagtttttgtaagtttttcgggtcgcgcgtcgcgttcgttcgttttttagttcgcggttcgagtcgtcgtcgcgttcgttatgttttcggttaaataaaggggttttaagggcggttacggcgtcgcgagtttttcggagaagggtgtttattcgtcgggcggcgcggatgacgtggcgaagaagtcgtcgtcggcgtcgtagtagtcgtcgtcgtcgttcgcgtcgtattcgtagtagtattcgta

SEQ ID NO: 32368 - DNA, 882 bp, Artificial Sequence
  chemically treated genomic DNA (Homo sapiens) CpG-island No: 32368
tacgaatactactacgaatacgacgcgaacgacgacgacgactactacgacgccgacgacgacttcttcgccacgtcatccgcgccgcccgacgaataaacacccttctccgaaaaactcgcgacgccgtaaccgcccttaaaacccctttatttaaccgaaaacataacgaacgcgacgacgactcgaaccgcgaactaaaaaacgaacgaacgcgacgcgcgacccgaaaaacttacaaaaactcccccgaaactaaacgaacgacacgcgaacgctactaacgtcgaaacgacgaaaaaacgcgcgaccgaaaaaaaaaaccgaaccgaaaaaacgaaaaaaaaaaacctacctccgccgccgcgacgccgaccccgcctcccgataaaaaaaaccgaacgaaccgaaccgaaaaaacttaccacgcacgccgacccgacgacccctcctccccgccgccacgaccccgaaaaaaaaaaaccgaacgaaatctacgaaaaccgaaaaaccgacgcgaaaataactaaacgcgaaacgaaatcccgacgaaatctacgaaaaccgaaataaacaccgaaataaccgcgaaaaaaaaaaaaaaaaacgaaacgaaaaaaaaaaaacgcgaccgaaataaaactaacgacccgacgaattccacgcaaactaaaaacgaaaaaccaaatcgaccccaaccgaaacgaccgaacaaaatccacgaaaatcgaaaataaacgaccaaacgaaatcgaaaaaacgaaaaccgaaataaacctacgccgcgaaccaaacgcgaccccctcccttcccgacctatacgaaaaaaaaaaaaataaaaaaaaacgcccaaaaaaccctaaccccgaaaataaaaatcaa

SEQ ID NO: 32369 - DNA, 796 bp, Artificial Sequence
  chemically treated genomic DNA (Homo sapiens) CpG-island No: 32369
  unsure (679, 702)
agcgattttttcgttgtcgaggaaaagttagtttaagaagtcgggggaagggtggggtatcgcgtgtttcggagtagcgtttttcgaaggcgggggtaggaagtagtcgtcgcgtttcgtttcgttttttttttttcgggttagaataatggttttttgttcggaaaacggagttgggagtaagggcgggcgcgtttcgggaattacgcgggattcggtgggcgttttaggttcgaagtttttaggtatttttttttttagttaggggttcgttcgcgtttttattttcgttttcgttttcgttcggggtttcgcgcgggatttttcgtcggagcgcgaggtttagttcgtcgcggataatgcgcgtttcgtttcgtttcgtattcgttttttttcgttgattggttcgtacgggatttgggtagcgcgcgggggcgggcggcgggtcggggcgcgggcgcggagcggcggtgcgcgtgcgcggggcgggtcggcgtcgggcgggggcggtgttttgtgtgttgtcggcggggcgcgcggcggtgcgggcgggtgattggcggcgggcgtcgcggtcgggttggttgtcgggtagtatggaggagttgagtagcgtgggcgagtaggttttcgtcgtcgagtgtattttgagtaagcggtttcgtaaggtgcgtgcggntcgtcgggtttttcgttcggcgntcgttgttcgtttggtttacgggttttttttttttttcgtagggtaagttggagtattttggttaagtggcgcggttggtttttttagtgaagt

SEQ ID NO: 32370 - DNA, 796 bp, Artificial Sequence
  chemically treated genomic DNA (Homo sapiens) CpG-island No: 32370
  unsure (95, 118)
acttcactaaaaaaaccaaccgcgccacttaaccaaaatactccaacttaccctacgaaaaaaaaaaaaaacccgtaaaccaaacgaacaacgancgccgaacgaaaaacccgacganccgcacgcaccttacgaaaccgcttactcaaaatacactcgacgacgaaaacctactcgcccacgctactcaactcctccatactacccgacaaccaacccgaccgcgacgcccgccgccaatcacccgcccgcaccgccgcgcgccccgccgacaacacacaaaacaccgcccccgcccgacgccgacccgccccgcgcacgcgcaccgccgctccgcgcccgcgccccgacccgccgcccgcccccgcgcgctacccaaatcccgtacgaaccaatcaacgaaaaaaaacgaatacgaaacgaaacgaaacgcgcattatccgcgacgaactaaacctcgcgctccgacgaaaaatcccgcgcgaaaccccgaacgaaaacgaaaacgaaaataaaaacgcgaacgaacccctaactaaaaaaaaaaatacctaaaaacttcgaacctaaaacgcccaccgaatcccgcgtaattcccgaaacgcgcccgcccttactcccaactccgttttccgaacaaaaaaccattattctaacccgaaaaaaaaaaaacgaaacgaaacgcgacgactacttcctacccccgccttcgaaaaacgctactccgaaacacgcgataccccacccttcccccgacttcttaaactaacttttcctcgacaacgaaaaaatcgct

SEQ ID NO: 32371 - DNA, 796 bp, Artificial Sequence
  chemically treated genomic DNA (Homo sapiens) CpG-island No: 32371
  unsure (95, 118)
attttattgggaggattagtcgcgttatttgattaaggtattttagtttgttttgcggggagagaagagggttcgtgagttaaacggatagcggncgtcgggcggggggttcggcggntcgtacgtattttgcggagtcgtttgtttaggatgtattcggcggcgaagatttgttcgtttacgttgtttagtttttttatgttgttcggtagttagttcgatcgcggcgttcgtcgttagttattcgttcgtatcgtcgcgcgtttcgtcggtagtatataaagtatcgttttcgttcggcgtcggttcgtttcgcgtacgcgtatcgtcgtttcgcgttcgcgtttcggttcgtcgttcgttttcgcgcgttgtttaaatttcgtgcgggttaattagcgagggggggcgggtgcggggcggggcggggcgcgtattgttcgcggcgggttgggtttcgcgtttcggcggggggtttcgcgcggggtttcgggcgggggcgggggcgggggtgggggcgcgggcgggtttttggttgggggaggaggtgtttagggatttcgggtttggggcgtttatcgagtttcgcgtgattttcggggcgcgttcgtttttgtttttaatttcgtttttcgggtaaaaagttattgttttggttcgaagggagggaagcgggacggggcgcggcggttgttttttgttttcgttttcgaggggcgttgtttcggggtacgcggtgttttatttttttttcggttttttgaattggttttttttcggtagcgggggagtcgtt

SEQ ID NO: 32372 - DNA, 796 bp, Artificial Sequence
  chemically treated genomic DNA (Homo sapiens) CpG-island No: 32372
  unsure (679, 702)
aacgactcccccgctaccgaaaaaaaaccaattcaaaaaaccgaaaaaaaaataaaacaccgcgtaccccgaaacaacgcccctcgaaaacgaaaacaaaaaacaaccgccgcgccccgtcccgcttccctcccttcgaaccaaaacaataactttttacccgaaaaacgaaattaaaaacaaaaacgaacgcgccccgaaaatcacgcgaaactcgataaacgccccaaacccgaaatccctaaacacctcctcccccaaccaaaaacccgcccgcgcccccacccccgcccccgcccccgcccgaaaccccgcgcgaaaccccccgccgaaacgcgaaacccaacccgccgcgaacaatacgcgccccgccccgccccgcacccgccccccctcgctaattaacccgcacgaaatttaaacaacgcgcgaaaacgaacgacgaaccgaaacgcgaacgcgaaacgacgatacgcgtacgcgaaacgaaccgacgccgaacgaaaacgatactttatatactaccgacgaaacgcgcgacgatacgaacgaataactaacgacgaacgccgcgatcgaactaactaccgaacaacataaaaaaactaaacaacgtaaacgaacaaatcttcgccgccgaatacatcctaaacaaacgactccgcaaaatacgtacganccgccgaaccccccgcccgacgnccgctatccgtttaactcacgaaccctcttctctccccgcaaaacaaactaaaataccttaatcaaataacgcgactaatcctcccaataaaat

SEQ ID NO: 32373 - DNA, 634 bp, Artificial Sequence
  chemically treated genomic DNA (Homo sapiens) CpG-island No: 32373
gggcgatttcggtagtcgagcgacgttttttttttttttttttttttttattttttttttttttttagttagtttcgtttttttttttttttcgggttcgtttgttttgatagtaatggcggtcgtcgatcgcggttcggttcgttattggttggcgtttggttacgtgacgggcgtcggtcgcgcggggggagcgaggggcgggcgggggaggggttcggagtggcggcggcggcggcggttcgcgggaggcgttgttgagttgagcgcggtcgggtttttcggtcgggaagagggagggagggaggtagagagggagagaaagaagtgcgggcggtcgggtttttcggcgggcggcggattgtcggttcgtggttgtcgtgggttgtttttcgtggtcgtttcgttttttcgcggtgtattgatcgtggcggggcgggatcgtgggtttcgggcgcgttcgtggtggtcgcggaggagggcgcgggattttcggtttgtgttttcgtagtttaggtcggttggcgtggcgcggcggtcgcgatgtgggttaggtagcgggttcgagtgttttggggaatgtgtttttagaggttcgcgtcgtcgttcgttttttgtagaggagaaaattaaa

SEQ ID NO: 32374 - DNA, 634 bp, Artificial Sequence
  chemically treated genomic DNA (Homo sapiens) CpG-island No: 32374
tttaattttctcctctacaaaaaacgaacgacgacgcgaacctctaaaaacacattccccaaaacactcgaacccgctacctaacccacatcgcgaccgccgcgccacgccaaccgacctaaactacgaaaacacaaaccgaaaatcccgcgccctcctccgcgaccaccacgaacgcgcccgaaacccacgatcccgccccgccacgatcaatacaccgcgaaaaaacgaaacgaccacgaaaaacaacccacgacaaccacgaaccgacaatccgccgcccgccgaaaaacccgaccgcccgcacttctttctctccctctctacctccctccctccctcttcccgaccgaaaaacccgaccgcgctcaactcaacaacgcctcccgcgaaccgccgccgccgccgccactccgaacccctcccccgcccgcccctcgctccccccgcgcgaccgacgcccgtcacgtaaccaaacgccaaccaataacgaaccgaaccgcgatcgacgaccgccattactatcaaaacaaacgaacccgaaaaaaaaaaaaaaacgaaactaactaaaaaaaaaaaaaaaataaaaaaaaaaaaaaaaaaaaaaaacgtcgctcgactaccgaaatcgccc

SEQ ID NO: 32375 - DNA, 634 bp, Artificial Sequence
  chemically treated genomic DNA (Homo sapiens) CpG-island No: 32375
tttagtttttttttttgtaaaaggcggacggcggcgcgagtttttgaggatatattttttagggtattcggattcgttgtttggtttatatcgcggtcgtcgcgttacgttagtcggtttgggttgcgagggtataggtcgggggtttcgcgttttttttcgcggttattacgggcgcgttcgggatttacggtttcgtttcgttacgattagtgtatcgcgagggggcggggcggttacgaggggtagtttacggtagttacgggtcggtagttcgtcgttcgtcggggagttcggtcgttcgtatttttttttttttttttttgttttttttttttttttttttcggtcggaggattcggtcgcgtttagtttagtagcgtttttcgcgagtcgtcgtcgtcgtcgttatttcggatttttttttcgttcgtttttcgtttttttcgcgcggtcggcgttcgttacgtgattaagcgttagttaatggcgggtcgagtcgcggtcggcggtcgttattgttgttagagtaagcgagttcggggagggaggagaagcgaggttgattggggaggaggggggggtgggggaggaagaggaaggaggggacgtcgttcggttgtcggggtcgttt

SEQ ID NO: 32376 - DNA, 634 bp, Artificial Sequence
  chemically treated genomic DNA (Homo sapiens) CpG-island No: 32376
aaacgaccccgacaaccgaacgacgtcccctccttcctcttcctcccccacccccccctcctccccaatcaacctcgcttctcctccctccccgaactcgcttactctaacaacaataacgaccgccgaccgcgactcgacccgccattaactaacgcttaatcacgtaacgaacgccgaccgcgcgaaaaaaacgaaaaacgaacgaaaaaaaaatccgaaataacgacgacgacgacgactcgcgaaaaacgctactaaactaaacgcgaccgaatcctccgaccgaaaaaaaaaaaaaaaaaaaacaaaaaaaaaaaaaaaaaaatacgaacgaccgaactccccgacgaacgacgaactaccgacccgtaactaccgtaaactacccctcgtaaccgccccgccccctcgcgatacactaatcgtaacgaaacgaaaccgtaaatcccgaacgcgcccgtaataaccgcgaaaaaaaacgcgaaacccccgacctataccctcgcaacccaaaccgactaacgtaacgcgacgaccgcgatataaaccaaacaacgaatccgaataccctaaaaaatatatcctcaaaaactcgcgccgccgtccgccttttacaaaaaaaaaaactaaa

SEQ ID NO: 32377 - DNA, 600 bp, Artificial Sequence
  chemically treated genomic DNA (Homo sapiens) CpG-island No: 32377
gattcgtaattgtttttttgattatagcggttatcgtttaatattttcgagaagttatcgttattatcggtaggagaatttagggtttataaagttattttcgcgatcgattaaagttacgttaataattatggcgggcgacgggcggcgggtagaggcggtgcgggaaggatggggtgtgtacgttatttttagggtttttattcgagagggaaggggtcggttcgttttttaaaatggcggtagtagcgatgcgtttgcgtatagaattttttcgtcgcgttagggtcggcgggaagtgaggttttcggacgagtcgttagaagtgtacggcgatttcgagtttttggtggttaaagaaaggttttcggtgggaaaacgaattcggttagaagagtttcggttcgattttgcgaaagaggaagtgagagaaagcgcgtattattttcggtttaggtagcggaggtagtcgcgattttaggaaatcgaggaaatgaagacgcgaaggattattcgtttttagtagtagtatttagagtagttttcgttatagtcgttttttgttacgattaggagagggttgcgggatttttatttttt

SEQ ID NO: 32378 - DNA, 600 bp, Artificial Sequence
  chemically treated genomic DNA (Homo sapiens) CpG-island No: 32378
aaaaaataaaaatcccgcaaccctctcctaatcgtaacaaaaaacgactataacgaaaactactctaaatactactactaaaaacgaataatccttcgcgtcttcatttcctcgatttcctaaaatcgcgactacctccgctacctaaaccgaaaataatacgcgctttctctcacttcctctttcgcaaaatcgaaccgaaactcttctaaccgaattcgttttcccaccgaaaacctttctttaaccaccaaaaactcgaaatcgccgtacacttctaacgactcgtccgaaaacctcacttcccgccgaccctaacgcgacgaaaaaattctatacgcaaacgcatcgctactaccgccattttaaaaaacgaaccgaccccttccctctcgaataaaaaccctaaaaataacgtacacaccccatccttcccgcaccgcctctacccgccgcccgtcgcccgccataattattaacgtaactttaatcgatcgcgaaaataactttataaaccctaaattctcctaccgataataacgataacttctcgaaaatattaaacgataaccgctataatcaaaaaaacaattacgaatc

SEQ ID NO: 32379 - DNA, 600 bp, Artificial Sequence
  chemically treated genomic DNA (Homo sapiens) CpG-island No: 32379
gaggaatgagagtttcgtagtttttttttggtcgtaataggagacggttgtagcggaggttgttttgagtgttgttgttgaaggcgggtagtttttcgcgtttttattttttcggttttttggggtcgcggttgttttcgttgtttagatcgaaggtagtacgcgtttttttttattttttttttcgtagaatcggatcggaatttttttagtcgggttcgtttttttatcggggatttttttttggttattaggggttcgaagtcgtcgtatatttttggcggttcgttcgagaattttatttttcgtcggttttggcgcgacggaggagttttgtacgtaggcgtatcgttgttgtcgttattttgaggggcgagtcggttttttttttttcggatgggggttttgggggtgacgtatatattttatttttttcgtatcgtttttgttcgtcgttcgtcgttcgttatagttgttgacgtagttttagtcgatcgcgaagatggttttatggattttaggtttttttgtcggtggtggcgatggtttttcgggggtgttgggcggtggtcgttgtggttagggaggtagttgcgagtt

SEQ ID NO: 32380 - DNA, 600 bp, Artificial Sequence
  chemically treated genomic DNA (Homo sapiens) CpG-island No: 32380
aactcgcaactacctccctaaccacaacgaccaccgcccaacacccccgaaaaaccatcgccaccaccgacaaaaaaacctaaaatccataaaaccatcttcgcgatcgactaaaactacgtcaacaactataacgaacgacgaacgacgaacaaaaacgatacgaaaaaaataaaatatatacgtcacccccaaaacccccatccgaaaaaaaaaaaaccgactcgcccctcaaaataacgacaacaacgatacgcctacgtacaaaactcctccgtcgcgccaaaaccgacgaaaaataaaattctcgaacgaaccgccaaaaatatacgacgacttcgaacccctaataaccaaaaaaaaatccccgataaaaaaacgaacccgactaaaaaaattccgatccgattctacgaaaaaaaaaataaaaaaaaacgcgtactaccttcgatctaaacaacgaaaacaaccgcgaccccaaaaaaccgaaaaaataaaaacgcgaaaaactacccgccttcaacaacaacactcaaaacaacctccgctacaaccgtctcctattacgaccaaaaaaaaactacgaaactctcattcctc

SEQ ID NO: 32381 - DNA, 967 bp, Artificial Sequence
  chemically treated genomic DNA (Homo sapiens) CpG-island No: 32381
aggtcgcgtcgtttcgtttcgtttttcgttttacgtatcgtagttcgtgtagtcgtcggtttttcgtttggttttaggttattagttcgcggtgttcggcggcgttttttagggttttgcgtttcgttagaatttcggttcgggtttcgtgtatttttttttgtatttcggatacgaattttattttgggtgtagacgcgttaggaattagtatttttttcgtttatttttatcgttattagcgcgcgcgggcggttattttttttcggtcgtatatttgagggcgcgtacggtttggcggtagtgttggtaacgttttattagtacgaagaatttcgtagggtttatcgcgggcggtatgtttattcgttcgattttggatttggttagcgggtcgtggcgggttttgcggtcgcgcgttggtagtattagaggggttcggggtttgtacggggttttcgcgtttaggcggtttagcgcgcgtagtatggtcgagtttttttattgcggtcgcggtgtcgggacgttatcgtgtttcggaagcggcgcggggaattttgggatttgtagttttcgggttgttttttacgtttcgttcggtcgtgtggtttttggaatcgaagcggcgattttgcggacgttcgtatttcgtttttaggttttggttcggttttttcgttagggttcggggttattttttagttattttcgttcgcggggtcggattcgcgtttttttagtttttacgtagggaagggttttagcggggaagatagggaggggacgaaggatagaattcgacgtaatagtttcggagaattttatattttattggaggatggcggggcggggcggggttttcgggttgcggtttgcggagggagaggtggcggttatgttttaggatattggtttcgtaatcgtcgagttgttatttttttggtttttttttttttcgtttttttta

SEQ ID NO: 32382 - DNA, 967 bp, Artificial Sequence
  chemically treated genomic DNA (Homo sapiens) CpG-island No: 32382
taaaaaaaacgaaaaaaaaaaaaaccaaaaaaataacaactcgacgattacgaaaccaatatcctaaaacataaccgccacctctccctccgcaaaccgcaacccgaaaaccccgccccgccccgccatcctccaataaaatataaaattctccgaaactattacgtcgaattctatccttcgtcccctccctatcttccccgctaaaacccttccctacgtaaaaactaaaaaaacgcgaatccgaccccgcgaacgaaaataactaaaaaataaccccgaaccctaacgaaaaaaccgaaccaaaacctaaaaacgaaatacgaacgtccgcaaaatcgccgcttcgattccaaaaaccacacgaccgaacgaaacgtaaaaaacaacccgaaaactacaaatcccaaaattccccgcgccgcttccgaaacacgataacgtcccgacaccgcgaccgcaataaaaaaactcgaccatactacgcgcgctaaaccgcctaaacgcgaaaaccccgtacaaaccccgaacccctctaatactaccaacgcgcgaccgcaaaacccgccacgacccgctaaccaaatccaaaatcgaacgaataaacataccgcccgcgataaaccctacgaaattcttcgtactaataaaacgttaccaacactaccgccaaaccgtacgcgccctcaaatatacgaccgaaaaaaaataaccgcccgcgcgcgctaataacgataaaaataaacgaaaaaaatactaattcctaacgcgtctacacccaaaataaaattcgtatccgaaatacaaaaaaaaatacacgaaacccgaaccgaaattctaacgaaacgcaaaaccctaaaaaacgccgccgaacaccgcgaactaataacctaaaaccaaacgaaaaaccgacgactacacgaactacgatacgtaaaacgaaaaacgaaacgaaacgacgcgacct

SEQ ID NO: 32383 - DNA, 967 bp, Artificial Sequence
  chemically treated genomic DNA (Homo sapiens) CpG-island No: 32383
tgggggggacgagaggggagagaattaggaagatggtagttcggcggttacgagattagtgttttgagatatgatcgttattttttttttcgtagatcgtagttcgagagtttcgtttcgtttcgttattttttaataaagtgtgaggtttttcgaagttgttgcgtcgagttttgtttttcgttttttttttgtttttttcgttgagatttttttttgcgtgggggttggagggacgcgggttcggtttcgcgggcgggagtaattaagggatggtttcgggttttggcgggaaggtcgggttagagtttgggggcgggatgcggacgttcgtagggtcgtcgtttcggttttagaggttatacggtcgggcggggcgtgagggatagttcgaggattataggttttaaggtttttcgcgtcgttttcggggtacggtggcgtttcggtatcgcggtcgtagtgaggagattcggttatgttacgcgcgttgagtcgtttgggcgcggggatttcgtgtaggtttcgggtttttttggtgttgttagcgcgcggtcgtaagattcgttacgattcgttggttaaatttaagatcgagcgagtgaatatgtcgttcgcggtggattttgcggagtttttcgtgttgatggagcgttattagtattatcgttagatcgtgcgcgtttttaggtgtgcggtcggggggaggtggtcgttcgcgcgcgttggtgacggtgggagtgggcggagagggtgttgatttttggcgcgtttgtatttaggatggagttcgtgttcgaggtgtagaggaaggtgtacgaggttcgagtcggggttttggcggagcgtaaggttttgaaggacgtcgtcgagtatcgcgagttgatggtttggaattaggcggagaatcggcggttgtacgagttgcggtgcgtggggcgggaggcggggcggggcggcgcggttt

SEQ ID NO: 32384 - DNA, 967 bp, Artificial Sequence
  chemically treated genomic DNA (Homo sapiens) CpG-island No: 32384
aaaccgcgccgccccgccccgcctcccgccccacgcaccgcaactcgtacaaccgccgattctccgcctaattccaaaccatcaactcgcgatactcgacgacgtccttcaaaaccttacgctccgccaaaaccccgactcgaacctcgtacaccttcctctacacctcgaacacgaactccatcctaaatacaaacgcgccaaaaatcaacaccctctccgcccactcccaccgtcaccaacgcgcgcgaacgaccacctccccccgaccgcacacctaaaaacgcgcacgatctaacgataatactaataacgctccatcaacacgaaaaactccgcaaaatccaccgcgaacgacatattcactcgctcgatcttaaatttaaccaacgaatcgtaacgaatcttacgaccgcgcgctaacaacaccaaaaaaacccgaaacctacacgaaatccccgcgcccaaacgactcaacgcgcgtaacataaccgaatctcctcactacgaccgcgataccgaaacgccaccgtaccccgaaaacgacgcgaaaaaccttaaaacctataatcctcgaactatccctcacgccccgcccgaccgtataacctctaaaaccgaaacgacgaccctacgaacgtccgcatcccgcccccaaactctaacccgaccttcccgccaaaacccgaaaccatcccttaattactcccgcccgcgaaaccgaacccgcgtccctccaacccccacgcaaaaaaaaatctcaacgaaaaaaacaaaaaaaaaacgaaaaacaaaactcgacgcaacaacttcgaaaaacctcacactttattaaaaaataacgaaacgaaacgaaactctcgaactacgatctacgaaaaaaaaaataacgatcatatctcaaaacactaatctcgtaaccgccgaactaccatcttcctaattctctcccctctcgtccccccca

SEQ ID NO: 32385 - DNA, 550 bp, Artificial Sequence
  chemically treated genomic DNA (Homo sapiens) CpG-island No: 32385
tcgggcgtagcggtcgcgaatatttatagagtcgggcgttgggcgggatcgttggggacgaggatagcggtttcgtttcggtttcgcggcggcgtttcgggtcgttattagtttttagggtcgtcgttcggttcgcggtttcgagtttcgcggcggcggcggcggtttcgtttttatggcgaggggaagcggttgaggggcgattgggcgggcgatagtgatggcggtagcggtcggggttcgagcgcgatcgcgcgcgcgcgcgtttttgttagcgtcgtattcgtcgtagtttcgttttcgattcggttttggttgtaaggcgcgtgtttattggttgtttagagataggcgttggttggtcgatagcgaacgggcgttttcggttcgcgcgggtatcgtttttgcgtttcgttgggcgtttatttgtcggttggggcgtcgaattcggtcgtacgtttttttggtagttttagaggggttcgtttcggggttgtttagtttttcgggaagttggatttcggaaggatcggttgcgagtgtattagtg

SEQ ID NO: 32386 - DNA, 550 bp, Artificial Sequence
  chemically treated genomic DNA (Homo sapiens) CpG-island No: 32386
cactaatacactcgcaaccgatccttccgaaatccaacttcccgaaaaactaaacaaccccgaaacgaacccctctaaaactaccaaaaaaacgtacgaccgaattcgacgccccaaccgacaaataaacgcccaacgaaacgcaaaaacgatacccgcgcgaaccgaaaacgcccgttcgctatcgaccaaccaacgcctatctctaaacaaccaataaacacgcgccttacaaccaaaaccgaatcgaaaacgaaactacgacgaatacgacgctaacaaaaacgcgcgcgcgcgcgatcgcgctcgaaccccgaccgctaccgccatcactatcgcccgcccaatcgcccctcaaccgcttcccctcgccataaaaacgaaaccgccgccgccgccgcgaaactcgaaaccgcgaaccgaacgacgaccctaaaaactaataacgacccgaaacgccgccgcgaaaccgaaacgaaaccgctatcctcgtccccaacgatcccgcccaacgcccgactctataaatattcgcgaccgctacgcccga

SEQ ID NO: 32387 - DNA, 550 bp, Artificial Sequence
  chemically treated genomic DNA (Homo sapiens) CpG-island No: 32387
tattggtgtattcgtagtcggttttttcggggtttagtttttcgaaggattgggtagtttcggggcgaatttttttggagttattaggagaacgtgcgatcgggttcggcgttttagtcggtaagtgagcgtttagcggagcgtaagggcggtgttcgcgcgggtcggagacgttcgttcgttgtcggttaattagcgtttgtttttgaatagttaatgaatacgcgttttatagttaaggtcgggtcgggagcgaggttgcggcgagtgcggcgttgatagagacgcgcgcgcgcgcgatcgcgttcggatttcggtcgttgtcgttattattgtcgttcgtttagtcgttttttagtcgttttttttcgttatggaggcgaggtcgtcgtcgtcgtcgcggggttcggagtcgcgggtcgggcggcggttttgagggttagtggcggttcgaaacgtcgtcgcggagtcgaggcggagtcgttgttttcgtttttagcggtttcgtttaacgttcgattttgtgagtgttcgcggtcgttgcgttcgg

SEQ ID NO: 32388 - DNA, 550 bp, Artificial Sequence
  chemically treated genomic DNA (Homo sapiens) CpG-island No: 32388
ccgaacgcaacgaccgcgaacactcacaaaatcgaacgttaaacgaaaccgctaaaaacgaaaacaacgactccgcctcgactccgcgacgacgtttcgaaccgccactaaccctcaaaaccgccgcccgacccgcgactccgaaccccgcgacgacgacgacgacctcgcctccataacgaaaaaaaacgactaaaaaacgactaaacgaacgacaataataacgacaacgaccgaaatccgaacgcgatcgcgcgcgcgcgcgtctctatcaacgccgcactcgccgcaacctcgctcccgacccgaccttaactataaaacgcgtattcattaactattcaaaaacaaacgctaattaaccgacaacgaacgaacgtctccgacccgcgcgaacaccgcccttacgctccgctaaacgctcacttaccgactaaaacgccgaacccgatcgcacgttctcctaataactccaaaaaaattcgccccgaaactacccaatccttcgaaaaactaaaccccgaaaaaaccgactacgaatacaccaata

SEQ ID NO: 32389 - DNA, 637 bp, Artificial Sequence
  chemically treated genomic DNA (Homo sapiens) CpG-island No: 32389
gtcgttttatattaagttagtttacgtcgtttttattcgagttttagggtaatttttttcgttttttagatgcgtatgttggggtttcgttcgttatcgagttgagtagaagtataatatatggtgttttgcgatggaggtgttttttgcgatacgtttggcgggggaggggaggtttaaaacgtagagaggagttagagtgcgttttttttcggtcggggttggggcgcgtatttttttttcggcgttttcggtacggcgtttggtgcgtgatattcgcgaagtaatcgtttagtttatttagcggtagtaggtttttatacggattttcgcgggtgttgtaggatttgagcgtttgcggttgaaagtcgattacgtagtcgagataggtggtggtaaatgcgatatttcgtcgggttgtgatttttagtagggatttttggatatttcgagattcgcgtagggcgagcggttgggcgtttgtaggtaaaagatagattgtatagtagcgtataaatcgagtttgcgggtaggggacgttttattttagatttagagtttgcggttttcggggtaggtggcggcgagttttttttttagatcgggtaatttttgagttttttttacgtattttagg

SEQ ID NO: 32390 - DNA, 637 bp, Artificial Sequence
  chemically treated genomic DNA (Homo sapiens) CpG-island No: 32390
cctaaaatacgtaaaaaaaactcaaaaattacccgatctaaaaaaaaaactcgccgccacctaccccgaaaaccgcaaactctaaatctaaaataaaacgtcccctacccgcaaactcgatttatacgctactatacaatctatcttttacctacaaacgcccaaccgctcgccctacgcgaatctcgaaatatccaaaaatccctactaaaaatcacaacccgacgaaatatcgcatttaccaccacctatctcgactacgtaatcgactttcaaccgcaaacgctcaaatcctacaacacccgcgaaaatccgtataaaaacctactaccgctaaataaactaaacgattacttcgcgaatatcacgcaccaaacgccgtaccgaaaacgccgaaaaaaaaatacgcgccccaaccccgaccgaaaaaaaacgcactctaactcctctctacgttttaaacctcccctcccccgccaaacgtatcgcaaaaaacacctccatcgcaaaacaccatatattatacttctactcaactcgataacgaacgaaaccccaacatacgcatctaaaaaacgaaaaaaattaccctaaaactcgaataaaaacgacgtaaactaacttaatataaaacgac

SEQ ID NO: 32391 - DNA, 637 bp, Artificial Sequence
  chemically treated genomic DNA (Homo sapiens) CpG-island No: 32391
tttggggtgcgtgagggggatttaggggttgttcggtttggaggagagattcgtcgttatttatttcgggaatcgtagattttgggtttgggataaagcgttttttattcgtaagttcggtttgtgcgttattgtgtaatttgttttttgtttgtagacgtttagtcgttcgttttgcgcgggtttcggaatgtttaggggtttttattggggattataattcggcgaaatgtcgtatttgttattatttatttcgattgcgtaatcggtttttagtcgtagacgtttaggttttgtagtattcgcggggattcgtgtaggaatttgttgtcgttggatggattgagcgattgtttcgcgggtgttacgtattagacgtcgtgtcgggagcgtcgggaagggggtacgcgttttaatttcggtcgggggagggcgtattttggtttttttttgcgttttgagttttttttttttcgttaggcgtatcgtaaaaggtatttttatcgtagagtattatgtgttgtgtttttatttagttcggtggcgagcggggttttagtatgcgtatttggaaagcgggggagattattttggagttcgggtggggacggcgtgggttgatttgatataagacgat

SEQ ID NO: 32392 - DNA, 637 bp, Artificial Sequence
  chemically treated genomic DNA (Homo sapiens) CpG-island No: 32392
atcgtcttatatcaaatcaacccacgccgtccccacccgaactccaaaataatctcccccgctttccaaatacgcatactaaaaccccgctcgccaccgaactaaataaaaacacaacacataatactctacgataaaaataccttttacgatacgcctaacgaaaaaaaaaaaactcaaaacgcaaaaaaaaaccaaaatacgccctcccccgaccgaaattaaaacgcgtacccccttcccgacgctcccgacacgacgtctaatacgtaacacccgcgaaacaatcgctcaatccatccaacgacaacaaattcctacacgaatccccgcgaatactacaaaacctaaacgtctacgactaaaaaccgattacgcaatcgaaataaataataacaaatacgacatttcgccgaattataatccccaataaaaacccctaaacattccgaaacccgcgcaaaacgaacgactaaacgtctacaaacaaaaaacaaattacacaataacgcacaaaccgaacttacgaataaaaaacgctttatcccaaacccaaaatctacgattcccgaaataaataacgacgaatctctcctccaaaccgaacaacccctaaatccccctcacgcaccccaaa

SEQ ID NO: 32393 - DNA, 581 bp, Artificial Sequence
  chemically treated genomic DNA (Homo sapiens) CpG-island No: 32393
gcgttttcgaattacgtgtttgcgttagttgtcggattggttgagcgtattttagcgttgcggtttagacgttcgcggtttcgtttagttgttagaggagtcgggatatcgagggaagaggtcggagggagatcgcggaggggagggggcgggaggggggtggggtattttgagtcgttcgtggttcggagtttggaaggttttagagcggcgttagtcgattcgtttcgttataatttgtttagattagatacgttttattttgcgttttgtaagaaggagtcggtttgttttttttcgttttgttgtttttcggttttcgcgggttcggttcgcgttagtagcgattttggggtttgggttttttgtgtcgttttcgttcgtttgtagcgttcggtattcgtttaggagcgcgtagttggggtgagtcgagatcggggatgcgttaggcgtttataggaggtggttgacggggtatttcgatattcgcgaagtcggtttttttgtttttttaggttgcgagtcgagtttttgtagatttagttggagtagtcgtcgttgtttttattgtttgtttgttt

SEQ ID NO: 32394 - DNA, 581 bp, Artificial Sequence
  chemically treated genomic DNA (Homo sapiens) CpG-island No: 32394
aaacaaacaaacaataaaaacaacgacgactactccaactaaatctacaaaaactcgactcgcaacctaaaaaaacaaaaaaaccgacttcgcgaatatcgaaataccccgtcaaccacctcctataaacgcctaacgcatccccgatctcgactcaccccaactacgcgctcctaaacgaataccgaacgctacaaacgaacgaaaacgacacaaaaaacccaaaccccaaaatcgctactaacgcgaaccgaacccgcgaaaaccgaaaaacaacaaaacgaaaaaaaacaaaccgactccttcttacaaaacgcaaaataaaacgtatctaatctaaacaaattataacgaaacgaatcgactaacgccgctctaaaaccttccaaactccgaaccacgaacgactcaaaataccccacccccctcccgccccctcccctccgcgatctccctccgacctcttccctcgatatcccgactcctctaacaactaaacgaaaccgcgaacgtctaaaccgcaacgctaaaatacgctcaaccaatccgacaactaacgcaaacacgtaattcgaaaacgc

SEQ ID NO: 32395 - DNA, 581 bp, Artificial Sequence
  chemically treated genomic DNA (Homo sapiens) CpG-island No: 32395
aggtaaataggtagtgggggtagcggcggttattttagttggatttgtagaggttcggttcgtagtttggagaggtaggagggtcggtttcgcgggtatcgggatgtttcgttagttattttttgtgggcgtttggcgtattttcggtttcggtttattttagttgcgcgtttttgggcgggtgtcgggcgttgtaggcgggcgggggcgatataggggatttagattttagggtcgttgttgacgcgggtcgggttcgcggaggtcgaggagtagtaaagcggagagaggtaggtcggtttttttttgtagggcgtaggatgaaacgtgtttggtttgggtaagttgtggcgaggcgggtcgattggcgtcgttttagggttttttagatttcggattacggacgatttaggatattttatttttttttcgttttttttttttcgcgattttttttcggttttttttttcggtgtttcggtttttttggtaattgggcgggatcgcgagcgtttagatcgtagcgttaaaatgcgtttagttaattcggtagttggcgtagatacgtggttcgggggcgt

SEQ ID NO: 32396 - DNA, 581 bp, Artificial Sequence
  chemically treated genomic DNA (Homo sapiens) CpG-island No: 32396
acgcccccgaaccacgtatctacgccaactaccgaattaactaaacgcattttaacgctacgatctaaacgctcgcgatcccgcccaattaccaaaaaaaccgaaacaccgaaaaaaaaaaccgaaaaaaaatcgcgaaaaaaaaaaaacgaaaaaaaaataaaatatcctaaatcgtccgtaatccgaaatctaaaaaaccctaaaacgacgccaatcgacccgcctcgccacaacttacccaaaccaaacacgtttcatcctacgccctacaaaaaaaaaccgacctacctctctccgctttactactcctcgacctccgcgaacccgacccgcgtcaacaacgaccctaaaatctaaatcccctatatcgcccccgcccgcctacaacgcccgacacccgcccaaaaacgcgcaactaaaataaaccgaaaccgaaaatacgccaaacgcccacaaaaaataactaacgaaacatcccgatacccgcgaaaccgaccctcctacctctccaaactacgaaccgaacctctacaaatccaactaaaataaccgccgctacccccactacctatttacct

SEQ ID NO: 32397 - DNA, 721 bp, Artificial Sequence
  chemically treated genomic DNA (Homo sapiens) CpG-island No: 32397
gggttcgcgagtgaagaggaggaaaggtgtgtggtttattagtacgcgtcggcgtttcggtagtagttgcgttcgttcgtcgtcggttttcgtttaggttttagtggttttggagtttagtagaggaaggtagcggtgggcggggttcgggcgacgttacgttttagagcgtcgtcgttatttaatcgttttttttttggcggtttttttttcgggttcgtcggggtcgtggttcgcgttgataggttgcggaggtcgtcgtttcgtttcgtttttgataggataacgtggaagtacgagacgaggttgcgttcgtcggtcgtagagttgttagtaagttttaaatcgcggttgtcgttcggagggaagtagacggggagtcggtggcggtcgtcgagttcgtatgcgtaggttgtaaaggtttttttgggtcggtttcgtcgcgttaggttggcgagtgggattatttgattttttttaggttcgttagcgtggtgttacgagaggaaagcgtagtcgtagcgtacgaatgggaaggttaaatacggtttcggggagtttgagggaagttgtagggcgtttggaattggggtttcgagtgagtcggtaaaaatcgtttttcgttgagcgtttcggaataaatattgtttgaattgagtcgtaagtaagaaacggttaggagaagttggggcgatttgatgattagaatattttagggatt

SEQ ID NO: 32398 - DNA, 721 bp, Artificial Sequence
  chemically treated genomic DNA (Homo sapiens) CpG-island No: 32398
aatccctaaaatattctaatcatcaaatcgccccaacttctcctaaccgtttcttacttacgactcaattcaaacaatatttattccgaaacgctcaacgaaaaacgatttttaccgactcactcgaaaccccaattccaaacgccctacaacttccctcaaactccccgaaaccgtatttaaccttcccattcgtacgctacgactacgctttcctctcgtaacaccacgctaacgaacctaaaaaaaatcaaataatcccactcgccaacctaacgcgacgaaaccgacccaaaaaaacctttacaacctacgcatacgaactcgacgaccgccaccgactccccgtctacttccctccgaacgacaaccgcgatttaaaacttactaacaactctacgaccgacgaacgcaacctcgtctcgtacttccacgttatcctatcaaaaacgaaacgaaacgacgacctccgcaacctatcaacgcgaaccacgaccccgacgaacccgaaaaaaaaaccgccaaaaaaaaaacgattaaataacgacgacgctctaaaacgtaacgtcgcccgaaccccgcccaccgctaccttcctctactaaactccaaaaccactaaaacctaaacgaaaaccgacgacgaacgaacgcaactactaccgaaacgccgacgcgtactaataaaccacacacctttcctcctcttcactcgcgaaccc

SEQ ID NO: 32399 - DNA, 721 bp, Artificial Sequence
  chemically treated genomic DNA (Homo sapiens) CpG-island No: 32399
agtttttgaaatgttttaattattagatcgttttagttttttttgatcgttttttgtttacggtttagtttagatagtatttgtttcgggacgtttagcgggaggcggtttttatcggtttattcgagattttaattttaggcgttttgtagttttttttagatttttcgggatcgtgtttggtttttttattcgtacgttgcggttgcgtttttttttcgtaatattacgttggcgaatttggaaaggattaaatagttttattcgttaatttagcgcggcgggatcggtttaaaagggtttttgtagtttgcgtatgcggattcggcggtcgttatcgatttttcgtttgttttttttcgggcggtagtcgcggtttggagtttgttgatagttttgcgatcggcgggcgtagtttcgtttcgtgtttttacgttattttattagggacggggcggggcggcggttttcgtagtttattagcgcgaattacgatttcggcgagttcgggaggaaagtcgttagaaagaaggcgattggatggcggcggcgttttggggcgtagcgtcgttcgggtttcgtttatcgttgtttttttttgttgggttttagagttattgaggtttgagcgagagtcgacggcgggcgggcgtagttgttgtcggagcgtcggcgcgtgttggtgggttatatatttttttttttttttattcgcgagttt

SEQ ID NO: 32400 - DNA, 721 bp, Artificial Sequence
  chemically treated genomic DNA (Homo sapiens) CpG-island No: 32400
aaactcgcgaataaaaaaaaaaaaaaatatataacccaccaacacgcgccgacgctccgacaacaactacgcccgcccgccgtcgactctcgctcaaacctcaataactctaaaacccaacaaaaaaaaacaacgataaacgaaacccgaacgacgctacgccccaaaacgccgccgccatccaatcgccttctttctaacgactttcctcccgaactcgccgaaatcgtaattcgcgctaataaactacgaaaaccgccgccccgccccgtccctaataaaataacgtaaaaacacgaaacgaaactacgcccgccgatcgcaaaactatcaacaaactccaaaccgcgactaccgcccgaaaaaaaacaaacgaaaaatcgataacgaccgccgaatccgcatacgcaaactacaaaaacccttttaaaccgatcccgccgcgctaaattaacgaataaaactatttaatcctttccaaattcgccaacgtaatattacgaaaaaaaaacgcaaccgcaacgtacgaataaaaaaaccaaacacgatcccgaaaaatctaaaaaaaactacaaaacgcctaaaattaaaatctcgaataaaccgataaaaaccgcctcccgctaaacgtcccgaaacaaatactatctaaactaaaccgtaaacaaaaaacgatcaaaaaaaactaaaacgatctaataattaaaacatttcaaaaact

SEQ ID NO: 32401 - DNA, 607 bp, Artificial Sequence
  chemically treated genomic DNA (Homo sapiens) CpG-island No: 32401
aggcggtcgttaggggttttcgttcggcgttttcgcgagatagtcgagtttcggtcggttgcgcggcgcgttgggtgtatgagggggttgtttcggagcgacggcggttgtagttggagttaggcgttcgttcgttcgtcggttggttcgtcgggatttcgcgtatcggcggtagagttttttgcgtggattggtaagcgacgttttatttgtttcgagtttattattttttttcgcgttggttgtagttgattcggcgaagggagtcgatcgggttttgggttggaggtaaaattttacggtgagtaagaattcgttttaagttaggggaggcggcgtagttcggtggttgttcgttttcgatttcgttcgggcgggcggcgaggtttggggcgtatttgggcgcgggtgtaagaaggtgcgggaggcggcggatcggttttttgttcgtcggttacgggttttcggggttggagttttttttagatttttgtcggcgtttgggtttttggtcggtttttcgtgtgtatttttcggtaggaataagggtcgtttattttttatttcgggattttgatttgtttttgatttgaaaagatataaatta

SEQ ID NO: 32402 - DNA, 607 bp, Artificial Sequence
  chemically treated genomic DNA (Homo sapiens) CpG-island No: 32402
taatttatatcttttcaaatcaaaaacaaatcaaaatcccgaaataaaaaataaacgacccttattcctaccgaaaaatacacacgaaaaaccgaccaaaaacccaaacgccgacaaaaatctaaaaaaaactccaaccccgaaaacccgtaaccgacgaacaaaaaaccgatccgccgcctcccgcaccttcttacacccgcgcccaaatacgccccaaacctcgccgcccgcccgaacgaaatcgaaaacgaacaaccaccgaactacgccgcctcccctaacttaaaacgaattcttactcaccgtaaaattttacctccaacccaaaacccgatcgactcccttcgccgaatcaactacaaccaacgcgaaaaaaaataataaactcgaaacaaataaaacgtcgcttaccaatccacgcaaaaaactctaccgccgatacgcgaaatcccgacgaaccaaccgacgaacgaacgaacgcctaactccaactacaaccgccgtcgctccgaaacaaccccctcatacacccaacgcgccgcgcaaccgaccgaaactcgactatctcgcgaaaacgccgaacgaaaacccctaacgaccgcct

SEQ ID NO: 32403 - DNA, 607 bp, Artificial Sequence
  chemically treated genomic DNA (Homo sapiens) CpG-island No: 32403
tgatttatatttttttaaattaaggataaattaagatttcggggtggaaagtgggcgatttttgtttttgtcgggaagtgtatacgaggagtcggttagaaatttaggcgtcggtaggggtttgaagaggattttagtttcggaagttcgtggtcggcgggtagaagatcggttcgtcgtttttcgtatttttttgtattcgcgtttaggtgcgttttaaatttcgtcgttcgttcgggcgagatcgggagcgagtagttatcgggttgcgtcgttttttttagtttggagcgggtttttatttatcgtggggttttatttttagtttagggttcggtcggtttttttcgtcgggttagttgtagttagcgcgaaagaaaatggtgagttcggggtaggtggggcgtcgtttgttaatttacgtaagggattttgtcgtcggtgcgcgaggtttcggcgagttaatcggcggacgggcgagcgtttggttttagttgtagtcgtcgtcgtttcggagtagtttttttatgtatttagcgcgtcgcgtagtcggtcggggttcgattgtttcgcggggacgtcgagcggggatttttggcggtcgttt

SEQ ID NO: 32404 - DNA, 607 bp, Artificial Sequence
  chemically treated genomic DNA (Homo sapiens) CpG-island No: 32404
aaacgaccgccaaaaatccccgctcgacgtccccgcgaaacaatcgaaccccgaccgactacgcgacgcgctaaatacataaaaaaactactccgaaacgacgacgactacaactaaaaccaaacgctcgcccgtccgccgattaactcgccgaaacctcgcgcaccgacgacaaaatcccttacgtaaattaacaaacgacgccccacctaccccgaactcaccattttctttcgcgctaactacaactaacccgacgaaaaaaaccgaccgaaccctaaactaaaaataaaaccccacgataaataaaaacccgctccaaactaaaaaaaacgacgcaacccgataactactcgctcccgatctcgcccgaacgaacgacgaaatttaaaacgcacctaaacgcgaatacaaaaaaatacgaaaaacgacgaaccgatcttctacccgccgaccacgaacttccgaaactaaaatcctcttcaaacccctaccgacgcctaaatttctaaccgactcctcgtatacacttcccgacaaaaacaaaaatcgcccactttccaccccgaaatcttaatttatccttaatttaaaaaaatataaatca

SEQ ID NO: 32405 - DNA, 645 bp, Artificial Sequence
  chemically treated genomic DNA (Homo sapiens) CpG-island No: 32405
gggtcggggtcggggtcggggcgtggtcggggcgggttcgggggcgggttcggggcggggttgcggttgcggtgtttgcgttcgcggcggcggaggcgtaggcggtggcgagtgggtgagtgaggaggcggtattttggcgggtggttgtttggggttcggttgtcgggaagaggcgcgggtagaagcgggggttttttttagagttcgacgtatttttatttttttttttatttttttgatcgaagttgggtgtcgggttttcgtttttagcgattggtggaattgtttgtattcgggtttcgggtttttcggcggcggcggcggcggcggcggcgtagggataagggatggggatttggttttttttttgttttttcgtttttagtattcgagttgtttttttttcggggattcgttgggagcgttgtcgttgcgggttcgagaaaagggagtttcgggtattgagaggtttcgtttgggggaaggtcggagggtgggcggcgcgcggtttttgcggattaagtcggggttcgttaggaattcgagacggtttttgtcggcgaggagattatgcgggatgagatgggggtgtggagacgtttgtataattttagtttaagtttttagagagtggtgatgattt

SEQ ID NO: 32406 - DNA, 645 bp, Artificial Sequence
  chemically treated genomic DNA (Homo sapiens) CpG-island No: 32406
aaatcatcaccactctctaaaaacttaaactaaaattatacaaacgtctccacacccccatctcatcccgcataatctcctcgccgacaaaaaccgtctcgaattcctaacgaaccccgacttaatccgcaaaaaccgcgcgccgcccaccctccgaccttcccccaaacgaaacctctcaatacccgaaactcccttttctcgaacccgcaacgacaacgctcccaacgaatccccgaaaaaaaaacaactcgaatactaaaaacgaaaaaacaaaaaaaaaaccaaatccccatcccttatccctacgccgccgccgccgccgccgccgccgaaaaacccgaaacccgaatacaaacaattccaccaatcgctaaaaacgaaaacccgacacccaacttcgatcaaaaaaataaaaaaaaaaataaaaatacgtcgaactctaaaaaaaacccccgcttctacccgcgcctcttcccgacaaccgaaccccaaacaaccacccgccaaaataccgcctcctcactcacccactcgccaccgcctacgcctccgccgccgcgaacgcaaacaccgcaaccgcaaccccgccccgaacccgcccccgaacccgccccgaccacgccccgaccccgaccccgaccc

SEQ ID NO: 32407 - DNA, 645 bp, Artificial Sequence
  chemically treated genomic DNA (Homo sapiens) CpG-island No: 32407
aagttattattattttttagaagtttgggttgaaattgtgtaggcgtttttatatttttattttatttcgtatgattttttcgtcggtagggatcgtttcgggtttttagcgaatttcgatttggttcgtagaagtcgcgcgtcgtttatttttcggtttttttttaggcgaggttttttagtattcgaggtttttttttttcgagttcgtagcggtagcgtttttagcgggttttcgggaaggagatagttcgggtattgagggcgggaaagtaaggaagaggttagatttttattttttgtttttgcgtcgtcgtcgtcgtcgtcgtcgtcgggaagttcggggttcggatgtaggtaattttattagtcgttagaggcgaaagttcgatatttagtttcggttagagaaatgagagggaaagtaaaaatgcgtcgagttttgaggagagttttcgtttttattcgcgttttttttcggtagtcgaattttaaatagttattcgttaggatgtcgtttttttatttatttattcgttatcgtttgcgttttcgtcgtcgcgggcgtaggtatcgtaatcgtagtttcgtttcgggttcgttttcgggttcgtttcgattacgtttcggtttcggtttcggttt

SEQ ID NO: 32408 - DNA, 645 bp, Artificial Sequence
  chemically treated genomic DNA (Homo sapiens) CpG-island No: 32408
aaaccgaaaccgaaaccgaaacgtaatcgaaacgaacccgaaaacgaacccgaaacgaaactacgattacgatacctacgcccgcgacgacgaaaacgcaaacgataacgaataaataaataaaaaaacgacatcctaacgaataactatttaaaattcgactaccgaaaaaaaacgcgaataaaaacgaaaactctcctcaaaactcgacgcatttttactttccctctcatttctctaaccgaaactaaatatcgaactttcgcctctaacgactaataaaattacctacatccgaaccccgaacttcccgacgacgacgacgacgacgacgacgcaaaaacaaaaaataaaaatctaacctcttccttactttcccgccctcaatacccgaactatctccttcccgaaaacccgctaaaaacgctaccgctacgaactcgaaaaaaaaaaacctcgaatactaaaaaacctcgcctaaaaaaaaaccgaaaaataaacgacgcgcgacttctacgaaccaaatcgaaattcgctaaaaacccgaaacgatccctaccgacgaaaaaatcatacgaaataaaataaaaatataaaaacgcctacacaatttcaacccaaacttctaaaaaataataataactt

SEQ ID NO: 32409 - DNA, 777 bp, Artificial Sequence
  chemically treated genomic DNA (Homo sapiens) CpG-island No: 32409
aaggaggcggttcggggggcgacgcggcgcgacgcgacgggtatttttattcggtttcgaggcgggggcggcgacggttttttttgagtaatcgtatttcgaaagttttgggtcggaagagtcgcggacggaaaacggtataggattaggcgagaggaaggggagatgtgaggcgcggatagaggggagtttcgttcggaagttgtatcgttcgcggtcgtcgacgtttttatcgtttttttacgattgcgggtcgtcgtcgtcgatttgttcggggtcgtttcggaagttcgtcggcgttagtttcgttgtttggtttgttcggcgttttcgtttcgtttttgggtttcgagtcgtgtcggagcgacgtcggggtaggagcgttcggcgcggagaacgtcggtgaggtgttcgggagtcgggttatatgcggcgggttcggtcgtatttcgtcgggtcgtgtcggtcggagataacgcggaggggtaggattattcgcgtcgtacgagtgggggcggtgtttgtttgcgacgacgtcgcggttggcggcggggtttatttgaggagtagtttatttggagtcggcgggtgaaggatttcgaattgtcgcggaggtttcgagtcgagttcgttggggtagggttatttttttttttgagttttcgttacgtttagttcgatttattttacgcgtcgtttttttataggcggttaagtgattatcgtaattgatttaagttttaggttgttttaacgattatttttaggaaaaaaaaa

SEQ ID NO: 32410 - DNA, 777 bp, Artificial Sequence
  chemically treated genomic DNA (Homo sapiens) CpG-island No: 32410
tttttttttcctaaaaataatcgttaaaacaacctaaaacttaaatcaattacgataatcacttaaccgcctataaaaaaacgacgcgtaaaataaatcgaactaaacgtaacgaaaactcaaaaaaaaaaataaccctaccccaacgaactcgactcgaaacctccgcgacaattcgaaatccttcacccgccgactccaaataaactactcctcaaataaaccccgccgccaaccgcgacgtcgtcgcaaacaaacaccgcccccactcgtacgacgcgaataatcctacccctccgcgttatctccgaccgacacgacccgacgaaatacgaccgaacccgccgcatataacccgactcccgaacacctcaccgacgttctccgcgccgaacgctcctaccccgacgtcgctccgacacgactcgaaacccaaaaacgaaacgaaaacgccgaacaaaccaaacaacgaaactaacgccgacgaacttccgaaacgaccccgaacaaatcgacgacgacgacccgcaatcgtaaaaaaacgataaaaacgtcgacgaccgcgaacgatacaacttccgaacgaaactcccctctatccgcgcctcacatctccccttcctctcgcctaatcctataccgttttccgtccgcgactcttccgacccaaaactttcgaaatacgattactcaaaaaaaaccgtcgccgcccccgcctcgaaaccgaataaaaatacccgtcgcgtcgcgccgcgtcgccccccgaaccgcctcctt

SEQ ID NO: 32411 - DNA, 777 bp, Artificial Sequence
  chemically treated genomic DNA (Homo sapiens) CpG-island No: 32411
ttttttttttttaaaaatggtcgttaaagtagtttaggatttaggttaattgcggtggttatttgatcgtttgtgaggaggcggcgcgtggggtggatcggattgggcgtggcgggggtttaggaaggagggtggttttattttagcgggttcggttcggggttttcgcggtagttcggggttttttattcgtcggttttaggtaggttattttttaggtaagtttcgtcgttagtcgcgacgtcgtcgtagataggtatcgtttttattcgtgcggcgcgagtagttttgttttttcgcgttgttttcggtcggtacggttcggcggggtacggtcgagttcgtcgtatgtggttcggttttcggatattttatcggcgtttttcgcgtcgggcgtttttgtttcgacgtcgtttcggtacggttcggggtttagaggcgaggcgaggacgtcgggtaagttaggtagcggaattgacgtcggcgagttttcggggcggtttcgggtaggtcggcggcggcggttcgtagtcgtggaggagcggtgggagcgtcggcggtcgcgggcgatgtaattttcggacgggatttttttttgttcgcgttttatattttttttttttttcgtttagttttgtgtcgtttttcgttcgcgattttttcggtttagagttttcggagtgcggttgtttaggggaagtcgtcgtcgttttcgtttcggggtcgagtgagagtgttcgtcgcgtcgcgtcgcgtcgtttttcgggtcgttttttt

SEQ ID NO: 32412 - DNA, 777 bp, Artificial Sequence
  chemically treated genomic DNA (Homo sapiens) CpG-island No: 32412
aaaaaaacgacccgaaaaacgacgcgacgcgacgcgacgaacactctcactcgaccccgaaacgaaaacgacgacgacttcccctaaacaaccgcactccgaaaactctaaaccgaaaaaatcgcgaacgaaaaacgacacaaaactaaacgaaaaaaaaaaaaaatataaaacgcgaacaaaaaaaaatcccgtccgaaaattacatcgcccgcgaccgccgacgctcccaccgctcctccacgactacgaaccgccgccgccgacctacccgaaaccgccccgaaaactcgccgacgtcaattccgctacctaacttacccgacgtcctcgcctcgcctctaaaccccgaaccgtaccgaaacgacgtcgaaacaaaaacgcccgacgcgaaaaacgccgataaaatatccgaaaaccgaaccacatacgacgaactcgaccgtaccccgccgaaccgtaccgaccgaaaacaacgcgaaaaaacaaaactactcgcgccgcacgaataaaaacgatacctatctacgacgacgtcgcgactaacgacgaaacttacctaaaaaataacctacctaaaaccgacgaataaaaaaccccgaactaccgcgaaaaccccgaaccgaacccgctaaaataaaaccaccctccttcctaaacccccgccacgcccaatccgatccaccccacgcgccgcctcctcacaaacgatcaaataaccaccgcaattaacctaaatcctaaactactttaacgaccatttttaaaaaaaaaaaa

SEQ ID NO: 32413 - DNA, 743 bp, Artificial Sequence
  chemically treated genomic DNA (Homo sapiens) CpG-island No: 32413
atggggttttgtcgtttttcgaagagtcggatgggggcgttcgttttcggtgtattaagaggttggtttcgttaggggcgagcggttggtatcgaatttcgcgtatttcgtcgcgggcggggttgggtcgtagtcggttcgatttaaggttggtatttaaggttgcggtcggttaggcgaggcgaggcgaggcgacgtgagcgagggtgtttagggagaatagtcgttggtagtttaatgttgggtggttaacgttcgacggtgttcggtagtaattcggtcgatatttcgattcggatttcgagttgcgtcgcggataatgtcgcgggttcgtttcggattacgattttcgacgggttttgcgatcgtttcggggcggtttagcgtgtattgcgtcggttagtttgatagtcgggcgttttattcggttagttttgtttttagttagggacgttggttttttcgcggttttttttcgatgtttttttttattttagttgtttgaaattcggttttacgaatggtaggtagcgtttaaaatttaatttcgtaaagttagtattagttaataaagcgtacggatggaggttacgtgatagtagtgggtcggtttttcggttgagttttgatttttatggttttcgcggttcgttagaaggagtgcggtttattggaggtttttttatattttttttttattattttattgttttcggtggttgttgggatatcggaggattcgg

SEQ ID NO: 32414 - DNA, 743 bp, Artificial Sequence
  chemically treated genomic DNA (Homo sapiens) CpG-island No: 32414
ccgaatcctccgatatcccaacaaccaccgaaaacaataaaataataaaaaaaaaatataaaaaaacctccaataaaccgcactccttctaacgaaccgcgaaaaccataaaaatcaaaactcaaccgaaaaaccgacccactactatcacgtaacctccatccgtacgctttattaactaatactaactttacgaaattaaattttaaacgctacctaccattcgtaaaaccgaatttcaaacaactaaaataaaaaaaaacatcgaaaaaaaaccgcgaaaaaaccaacgtccctaactaaaaacaaaactaaccgaataaaacgcccgactatcaaactaaccgacgcaatacacgctaaaccgccccgaaacgatcgcaaaacccgtcgaaaatcgtaatccgaaacgaacccgcgacattatccgcgacgcaactcgaaatccgaatcgaaatatcgaccgaattactaccgaacaccgtcgaacgttaaccacccaacattaaactaccaacgactattctccctaaacaccctcgctcacgtcgcctcgcctcgcctcgcctaaccgaccgcaaccttaaataccaaccttaaatcgaaccgactacgacccaaccccgcccgcgacgaaatacgcgaaattcgataccaaccgctcgcccctaacgaaaccaacctcttaatacaccgaaaacgaacgcccccatccgactcttcgaaaaacgacaaaaccccat

SEQ ID NO: 32415 - DNA, 743 bp, Artificial Sequence
  chemically treated genomic DNA (Homo sapiens) CpG-island No: 32415
tcgagtttttcggtattttagtagttatcggaggtagtgagataatggaggaagaatgtagggagatttttagtggatcgtattttttttagcgagtcgcggaaattatagagattagggtttagtcggagggtcggtttattgttgttacgtggtttttattcgtgcgttttattggttggtgttggttttacggggttgaattttggacgttgtttgttattcgtgggatcgagttttaggtagttggaataaagagagatatcgggggaaagtcgcgagaaggttagcgtttttggttgggagtagagttagtcgagtagggcgttcggttgttaaattggtcggcgtagtgtacgttgggtcgtttcggagcggtcgtagagttcgtcgggagtcgtagttcgggacgggttcgcggtattgttcgcgacgtagttcgggattcgggtcggggtgtcggtcgggttgttgtcgggtatcgtcgagcgttagttatttagtattgagttgttagcggttgttttttttaagtattttcgtttacgtcgtttcgtttcgtttcgtttgatcggtcgtagttttggatattagttttaaatcgagtcgattacggtttagtttcgttcgcggcgaggtgcgcggggttcggtgttagtcgttcgtttttggcggggttagttttttgatgtatcggggacgggcgtttttattcgatttttcgaggggcggtagggttttat

SEQ ID NO: 32416 - DNA, 743 bp, Artificial Sequence
  chemically treated genomic DNA (Homo sapiens) CpG-island No: 32416
ataaaaccctaccgcccctcgaaaaatcgaataaaaacgcccgtccccgatacatcaaaaaactaaccccgccaaaaacgaacgactaacaccgaaccccgcgcacctcgccgcgaacgaaactaaaccgtaatcgactcgatttaaaactaatatccaaaactacgaccgatcaaacgaaacgaaacgaaacgacgtaaacgaaaatacttaaaaaaaacaaccgctaacaactcaatactaaataactaacgctcgacgatacccgacaacaacccgaccgacaccccgacccgaatcccgaactacgtcgcgaacaataccgcgaacccgtcccgaactacgactcccgacgaactctacgaccgctccgaaacgacccaacgtacactacgccgaccaatttaacaaccgaacgccctactcgactaactctactcccaaccaaaaacgctaaccttctcgcgactttcccccgatatctctctttattccaactacctaaaactcgatcccacgaataacaaacaacgtccaaaattcaaccccgtaaaaccaacaccaaccaataaaacgcacgaataaaaaccacgtaacaacaataaaccgaccctccgactaaaccctaatctctataatttccgcgactcgctaaaaaaaatacgatccactaaaaatctccctacattcttcctccattatctcactacctccgataactactaaaataccgaaaaactcga

SEQ ID NO: 32417 - DNA, 908 bp, Artificial Sequence
  chemically treated genomic DNA (Homo sapiens) CpG-island No: 32417
gcgtttcgggtttcgtttgcgtggttattgatcggaaacgcggcggcgggtgggttaggcggtttatttttcgttcggttcgtcgggcgcggcgttacggcgacgttttttagattcgtttgggtagttgttttatagtggtgttgaatggcgagcgcgttatttattaggttttggtgtagtagggttcggttttcgtcgatcggtcggttttcgttttttttcgtgtggtgttcggcggtcgtagtatggttttcggttattattcggagtattggaaggtgtagcggcgcgtagtttatagtatgatgcgtaatttttttacgcgttagtcgcgtagtcgttaagttttcgagggttacgtgttgagcgaggcgcgcgagttggtggcgttgttggtgcgcggtagcgcggacggcgtttttttcgattcgaggtcgttgatcgtcgtggtcgtggttaacgttatgagtgtcgtgtgtttcggttgtcgttatagttacgacgatttcgagtttcgtgagttgtttagttataacgaagagttcgggcgtacggtgggcgcgggtagtttggtggacgtgatgttttggttgtagtatttttttaattcggtgcgtatcgtttttcgcgaattcgagtagtttaatcgtaattttagtaattttattttggataagtttttgaggtattgcgaaagttttcggttcggggtcgtttttcgcgatatgatggacgtttttattttttttgcggaaaagaaggcggtcggggattcgtacggtggtggcgcgcggttggatttggagaacgtatcggttattattattgatattttcggcgttagttaggatattttgtttatcgcgttgtagtggttgttttttttttttattaggtaaagtttt

SEQ ID NO: 32418 - DNA, 908 bp, Artificial Sequence
  chemically treated genomic DNA (Homo sapiens) CpG-island No: 32418
aaaactttacctaataaaaaaaaaaaacaaccactacaacgcgataaacaaaatatcctaactaacgccgaaaatatcaataataataaccgatacgttctccaaatccaaccgcgcgccaccaccgtacgaatccccgaccgccttcttttccgcaaaaaaaataaaaacgtccatcatatcgcgaaaaacgaccccgaaccgaaaactttcgcaatacctcaaaaacttatccaaaataaaattactaaaattacgattaaactactcgaattcgcgaaaaacgatacgcaccgaattaaaaaaatactacaaccaaaacatcacgtccaccaaactacccgcgcccaccgtacgcccgaactcttcgttataactaaacaactcacgaaactcgaaatcgtcgtaactataacgacaaccgaaacacacgacactcataacgttaaccacgaccacgacgatcaacgacctcgaatcgaaaaaaacgccgtccgcgctaccgcgcaccaacaacgccaccaactcgcgcgcctcgctcaacacgtaaccctcgaaaacttaacgactacgcgactaacgcgtaaaaaaattacgcatcatactataaactacgcgccgctacaccttccaatactccgaataataaccgaaaaccatactacgaccgccgaacaccacacgaaaaaaaacgaaaaccgaccgatcgacgaaaaccgaaccctactacaccaaaacctaataaataacgcgctcgccattcaacaccactataaaacaactacccaaacgaatctaaaaaacgtcgccgtaacgccgcgcccgacgaaccgaacgaaaaataaaccgcctaacccacccgccgccgcgtttccgatcaataaccacgcaaacgaaacccgaaacgc

SEQ ID NO: 32419 - DNA, 908 bp, Artificial Sequence
  chemically treated genomic DNA (Homo sapiens) CpG-island No: 32419
gaggttttatttggtgaagaggaggagtagttattgtagcgcggtggatagggtgttttggttggcgtcgaagatgttagtgatagtggtcggtacgttttttaaatttagtcgcgcgttattatcgtgcgagttttcggtcgttttttttttcgtagagaggataaaggcgtttattatgtcgcggggggcggtttcgggtcgaaggttttcgtagtgttttaagaatttgtttaggatgaagttgttgaagttgcggttgagttgttcgaattcgcggaaaacggtgcgtatcgggttggggaagtattgtagttagggtattacgtttattaggttgttcgcgtttatcgtgcgttcgaatttttcgttgtggttgagtagtttacggaattcggggtcgtcgtggttgtagcggtagtcgaaatatacggtatttatgacgttggttacggttacgacggttagcggtttcgggtcgaggaaggcgtcgttcgcgttgtcgcgtattagtagcgttattagttcgcgcgtttcgtttagtacgtggttttcgaggatttggcggttgcgcggttggcgcgtgaagaagttgcgtattatgttgtgggttgcgcgtcgttgtattttttagtgtttcgagtagtggtcgaaagttatgttgcggtcgtcggatattatacggaaggaggcgaaggtcggtcggtcggcgaaggtcgagttttgttgtattagggtttggtggatggcgcgttcgttatttagtattattatggggtagttgtttaggcggatttggaaaacgtcgtcgtagcgtcgcgttcggcgagtcgaacgagaggtgagtcgtttggtttattcgtcgtcgcgttttcgattagtggttacgtaaacggggttcggggcgt

SEQ ID NO: 32420 - DNA, 908 bp, Artificial Sequence
  chemically treated genomic DNA (Homo sapiens) CpG-island No: 32420
acgccccgaaccccgtttacgtaaccactaatcgaaaacgcgacgacgaataaaccaaacgactcacctctcgttcgactcgccgaacgcgacgctacgacgacgttttccaaatccgcctaaacaactaccccataataatactaaataacgaacgcgccatccaccaaaccctaatacaacaaaactcgaccttcgccgaccgaccgaccttcgcctccttccgtataatatccgacgaccgcaacataactttcgaccactactcgaaacactaaaaaatacaacgacgcgcaacccacaacataatacgcaacttcttcacgcgccaaccgcgcaaccgccaaatcctcgaaaaccacgtactaaacgaaacgcgcgaactaataacgctactaatacgcgacaacgcgaacgacgccttcctcgacccgaaaccgctaaccgtcgtaaccgtaaccaacgtcataaataccgtatatttcgactaccgctacaaccacgacgaccccgaattccgtaaactactcaaccacaacgaaaaattcgaacgcacgataaacgcgaacaacctaataaacgtaataccctaactacaatacttccccaacccgatacgcaccgttttccgcgaattcgaacaactcaaccgcaacttcaacaacttcatcctaaacaaattcttaaaacactacgaaaaccttcgacccgaaaccgccccccgcgacataataaacgcctttatcctctctacgaaaaaaaaaacgaccgaaaactcgcacgataataacgcgcgactaaatttaaaaaacgtaccgaccactatcactaacatcttcgacgccaaccaaaacaccctatccaccgcgctacaataactactcctcctcttcaccaaataaaacctc

SEQ ID NO: 32421 - DNA, 1133 bp, Artificial Sequence
  chemically treated genomic DNA (Homo sapiens) CpG-island No: 32421
ggacggtgttcgatattacgatttagggagcgatatttgagttcgttcggtaattttcgggtttcggggacgggtttgggcggggaaggagtcggggcgcgtagtagtattcggcgagattgtagggcgttcgagtggtcggacgggggagcgagagttaaagtttgcggagcgcgtcgagtcgcgggcgttggcggtttcggtcggggagttgacgcgagtttgtcgggtcgcgggagttgcgggaggcggaggtcgagttgggggcggagcgggcggcgtttgggaggcggaggcggtgttttttagagttgcgtaggcgttgttcgtattttgttgattagttagtgttgggagcgttgttatggcgttttttaaattcgcggtttttttttatacgttcgaggcggagggaaggaggggtaagaggaggaggaggcgagcgggcggtcgtcgtagttgtagatttagggttagaggaggaggcggagcgggagtcgtcgtagttattcgggtcgtcgtcgtcgttcgtagtcgcgcggttgttttgagtttttttcgggcgtgagggtacgcggggcgttttagttatgtttcgtagcggtagttgagtcgggcgtcggtttttttttttcgggtcgttttagtcgtcgcgttttttcggttgttcgcggtcggagttgttcggcgtttttcgcgcgttttagatcgcgagcgcgagtagcggcggtcgtcgaggcgcgggtggtgtcggtggcggcggcgggggagcgcgggataggaggtttcggggaagatggattcggcgttttcgttgggttgtagttttaaggatgtgaagtggagttcggtggtcgtgtcgttcgattttttggttagtatttatcggttgttttagatcgcgcgtttggataacggtgagttttagttggggcgcggggtagacgggcgaggatagtcgtttttacgcgggtgtgcgcgcgtgtgttggaaagggtgggattcgcggggagtgggttgttcgtttttgagcgtcggagttggttcgagcggttgtcgtagttttggcgcgttgtttttaattttttttagtagtagataaggaggtggaaattagagtttttgtagtataa

SEQ ID NO: 32422 - DNA, 1133 bp, Artificial Sequence
  chemically treated genomic DNA (Homo sapiens) CpG-island No: 32422
ttatactacaaaaactctaatttccacctccttatctactactaaaaaaaattaaaaacaacgcgccaaaactacgacaaccgctcgaaccaactccgacgctcaaaaacgaacaacccactccccgcgaatcccaccctttccaacacacgcgcgcacacccgcgtaaaaacgactatcctcgcccgtctaccccgcgccccaactaaaactcaccgttatccaaacgcgcgatctaaaacaaccgataaatactaaccaaaaaatcgaacgacacgaccaccgaactccacttcacatccttaaaactacaacccaacgaaaacgccgaatccatcttccccgaaacctcctatcccgcgctcccccgccgccgccaccgacaccacccgcgcctcgacgaccgccgctactcgcgctcgcgatctaaaacgcgcgaaaaacgccgaacaactccgaccgcgaacaaccgaaaaaacgcgacgactaaaacgacccgaaaaaaaaaaaccgacgcccgactcaactaccgctacgaaacataactaaaacgccccgcgtaccctcacgcccgaaaaaaactcaaaacaaccgcgcgactacgaacgacgacgacgacccgaataactacgacgactcccgctccgcctcctcctctaaccctaaatctacaactacgacgaccgcccgctcgcctcctcctcctcttacccctccttccctccgcctcgaacgtataaaaaaaaaccgcgaatttaaaaaacgccataacaacgctcccaacactaactaatcaacaaaatacgaacaacgcctacgcaactctaaaaaacaccgcctccgcctcccaaacgccgcccgctccgcccccaactcgacctccgcctcccgcaactcccgcgacccgacaaactcgcgtcaactccccgaccgaaaccgccaacgcccgcgactcgacgcgctccgcaaactttaactctcgctcccccgtccgaccactcgaacgccctacaatctcgccgaatactactacgcgccccgactccttccccgcccaaacccgtccccgaaacccgaaaattaccgaacgaactcaaatatcgctccctaaatcgtaatatcgaacaccgtcc

SEQ ID NO: 32423 - DNA, 1133 bp, Artificial Sequence
  chemically treated genomic DNA (Homo sapiens) CpG-island No: 32423
ttatattgtaaggattttgatttttatttttttgtttgttgttggggggagttgagagtaacgcgttagggttgcggtagtcgttcgggttaatttcggcgtttaggggcgggtagtttatttttcgcgggttttattttttttagtatacgcgcgtatattcgcgtggagacggttgttttcgttcgtttgtttcgcgttttagttgggatttatcgttgtttaggcgcgcgatttggggtagtcggtaagtgttgattaggaggtcgagcggtacggttatcgagttttattttatatttttgaggttgtagtttagcgagggcgtcgggtttatttttttcgaagttttttgtttcgcgttttttcgtcgtcgttatcggtattattcgcgtttcggcggtcgtcgttgttcgcgttcgcggtttggggcgcgcgggaggcgtcgggtagtttcggtcgcgggtagtcgggggggcgcggcgattggggcggttcggagggagggggtcggcgttcggtttagttgtcgttgcggggtatggttggggcgtttcgcgtgtttttacgttcggagaagatttagagtagtcgcgcggttgcgggcggcggcggcggttcgggtggttgcggcggttttcgtttcgtttttttttttggttttgggtttgtagttgcggcggtcgttcgttcgtttttttttttttttattttttttttttttcgtttcgagcgtgtgaggaggagtcgcgggtttgagaaacgttatagtagcgtttttagtattgattaattaataaggtgcgagtaacgtttgcgtagttttgggagatatcgttttcgttttttaggcgtcgttcgtttcgtttttagttcggttttcgtttttcgtagttttcgcggttcggtaggttcgcgttagtttttcggtcggggtcgttagcgttcgcggttcggcgcgtttcgtaagttttagttttcgttttttcgttcgattattcgggcgttttgtagtttcgtcgggtgttgttgcgcgtttcggtttttttttcgtttaggttcgttttcggagttcgggaattgtcgagcgagtttaggtatcgttttttgagtcgtggtgtcgggtatcgttt

SEQ ID NO: 32424 - DNA, 1133 bp, Artificial Sequence
  chemically treated genomic DNA (Homo sapiens) CpG-island No: 32424
aaacgatacccgacaccacgactcaaaaaacgatacctaaactcgctcgacaattcccgaactccgaaaacgaacctaaacgaaaaaaaaaccgaaacgcgcaacaacacccgacgaaactacaaaacgcccgaataatcgaacgaaaaaacgaaaactaaaacttacgaaacgcgccgaaccgcgaacgctaacgaccccgaccgaaaaactaacgcgaacctaccgaaccgcgaaaactacgaaaaacgaaaaccgaactaaaaacgaaacgaacgacgcctaaaaaacgaaaacgatatctcccaaaactacgcaaacgttactcgcaccttattaattaatcaatactaaaaacgctactataacgtttctcaaacccgcgactcctcctcacacgctcgaaacgaaaaaaaaaaaaaataaaaaaaaaaaaaaacgaacgaacgaccgccgcaactacaaacccaaaaccaaaaaaaaaaacgaaacgaaaaccgccgcaaccacccgaaccgccgccgccgcccgcaaccgcgcgactactctaaatcttctccgaacgtaaaaacacgcgaaacgccccaaccataccccgcaacgacaactaaaccgaacgccgaccccctccctccgaaccgccccaatcgccgcgcccccccgactacccgcgaccgaaactacccgacgcctcccgcgcgccccaaaccgcgaacgcgaacaacgacgaccgccgaaacgcgaataataccgataacgacgacgaaaaaacgcgaaacaaaaaacttcgaaaaaaataaacccgacgccctcgctaaactacaacctcaaaaatataaaataaaactcgataaccgtaccgctcgacctcctaatcaacacttaccgactaccccaaatcgcgcgcctaaacaacgataaatcccaactaaaacgcgaaacaaacgaacgaaaacaaccgtctccacgcgaatatacgcgcgtatactaaaaaaaataaaacccgcgaaaaataaactacccgcccctaaacgccgaaattaacccgaacgactaccgcaaccctaacgcgttactctcaactccccccaacaacaaacaaaaaaataaaaatcaaaatccttacaatataa

SEQ ID NO: 32425 - DNA, 540 bp, Artificial Sequence
  chemically treated genomic DNA (Homo sapiens) CpG-island No: 32425
gagttcgcgttttcggttgtagtcgcgcggtttaggagcgggtttcggtcgacggaagggagcggcgcggggaggaagtgagtttattcgggaaggaaggaaataaatgaggtttttgttcggtagtcgttaggtcgaagcgtatagttttggggagaggttgcgagcgtaggtttcgttatcgttttttaaggaggtcgggggtagaggtcggttttgtaaagcgttgcggttttcgttatcgatatcgtttcgatttcgcgtattttattcgtcgtgttttcggggaggaaaagcgttaggttttattcgcgaggtttaggtttttaggatagagtgggaggtttagagcgcgcgagggttttatttaggtagatgtcgtttttagtttttacgcgttttatttttttcgcgagtgagatttagttttcgaagttttcgtacgcgcgcgcgtaatttttttttttttttttagtgtttttcgtaaaagtaggttttggagttttgatttacgattagagtgttgagttatttgtatga

SEQ ID NO: 32426 - DNA, 540 bp, Artificial Sequence
  chemically treated genomic DNA (Homo sapiens) CpG-island No: 32426
tcatacaaataactcaacactctaatcgtaaatcaaaactccaaaacctacttttacgaaaaacactaaaaaaaaaaaaaaaaattacgcgcgcgcgtacgaaaacttcgaaaactaaatctcactcgcgaaaaaaataaaacgcgtaaaaactaaaaacgacatctacctaaataaaaccctcgcgcgctctaaacctcccactctatcctaaaaacctaaacctcgcgaataaaacctaacgcttttcctccccgaaaacacgacgaataaaatacgcgaaatcgaaacgatatcgataacgaaaaccgcaacgctttacaaaaccgacctctacccccgacctccttaaaaaacgataacgaaacctacgctcgcaacctctccccaaaactatacgcttcgacctaacgactaccgaacaaaaacctcatttatttccttccttcccgaataaactcacttcctccccgcgccgctcccttccgtcgaccgaaacccgctcctaaaccgcgcgactacaaccgaaaacgcgaactc

SEQ ID NO: 32427 - DNA, 540 bp, Artificial Sequence
  chemically treated genomic DNA (Homo sapiens) CpG-island No: 32427
ttatgtaaataatttaatattttaatcgtaaattaaagttttagggtttatttttgcgaggggtattggagaaagaagagagggttgcgcgcgcgcgtgcgggagtttcggaagttaaattttattcgcggggaggatgggacgcgtggggattgaaggcggtatttgtttgaataaagttttcgcgcgttttgagttttttattttgttttggaggtttgaatttcgcgagtagagtttggcgtttttttttttcgggagtacgacggatagaatgcgcggggtcgagacggtgtcggtagcgggggtcgtagcgttttgtaaagtcggtttttgttttcggtttttttggagggcggtagcgggatttgcgttcgtagtttttttttagggttgtgcgtttcggtttggcggttgtcgggtaaaaattttatttatttttttttttttcgagtgagtttatttttttttcgcgtcgttttttttcgtcggtcggaattcgtttttgggtcgcgcggttgtagtcgggagcgcggattt

SEQ ID NO: 32428 - DNA, 540 bp, Artificial Sequence
  chemically treated genomic DNA (Homo sapiens) CpG-island No: 32428
aaatccgcgctcccgactacaaccgcgcgacccaaaaacgaattccgaccgacgaaaaaaaacgacgcgaaaaaaaaataaactcactcgaaaaaaaaaaaaataaataaaatttttacccgacaaccgccaaaccgaaacgcacaaccctaaaaaaaaactacgaacgcaaatcccgctaccgccctccaaaaaaaccgaaaacaaaaaccgactttacaaaacgctacgacccccgctaccgacaccgtctcgaccccgcgcattctatccgtcgtactcccgaaaaaaaaaaacgccaaactctactcgcgaaattcaaacctccaaaacaaaataaaaaactcaaaacgcgcgaaaactttattcaaacaaataccgccttcaatccccacgcgtcccatcctccccgcgaataaaatttaacttccgaaactcccgcacgcgcgcgcgcaaccctctcttctttctccaatacccctcgcaaaaataaaccctaaaactttaatttacgattaaaatattaaattatttacataa

SEQ ID NO: 32429 - DNA, 553 bp, Artificial Sequence
  chemically treated genomic DNA (Homo sapiens) CpG-island No: 32429
gtagcgaggtttagaaaaaaggttttttaggggatgtggggttaggggagcggagacgtcggggaggggttcgtattagtcgagggttcgggcgttgggggtttcgtttcgtgtttcgttttggtagaggaacgaacgggagtcgggaagaattttcgaaggaagatcgcgatttttagtatttcgatcgttacgtaataggtagcgaaagtttcggagtttagtcgtatcgtggatacgttaggttggatgcggaatcgattttatttggagtttcgttttgttgtagtcgcgttttcggttttaggtagtcgtttttaagtaataacgttaggttttatcgtcgtagcgatagtggcgttacgttcgtcggcgcgttatagtagcgcgttattttcgttagttcgttatagcggggcgttatttcggatatacgaatagcgggcggtgttttcggtttcgtggggtcgttttttcggcgagttcgcgacggtcgtcgtttacggcgaggtacgaggttttaaaaagtttttaatttggaaggtagggtgta

SEQ ID NO: 32430 - DNA, 553 bp, Artificial Sequence
  chemically treated genomic DNA (Homo sapiens) CpG-island No: 32430
tacaccctaccttccaaattaaaaactttttaaaacctcgtacctcgccgtaaacgacgaccgtcgcgaactcgccgaaaaaacgaccccacgaaaccgaaaacaccgcccgctattcgtatatccgaaataacgccccgctataacgaactaacgaaaataacgcgctactataacgcgccgacgaacgtaacgccactatcgctacgacgataaaacctaacgttattacttaaaaacgactacctaaaaccgaaaacgcgactacaacaaaacgaaactccaaataaaatcgattccgcatccaacctaacgtatccacgatacgactaaactccgaaactttcgctacctattacgtaacgatcgaaatactaaaaatcgcgatcttccttcgaaaattcttcccgactcccgttcgttcctctaccaaaacgaaacacgaaacgaaacccccaacgcccgaaccctcgactaatacgaacccctccccgacgtctccgctcccctaaccccacatcccctaaaaaaccttttttctaaacctcgctac

SEQ ID NO: 32431 - DNA, 553 bp, Artificial Sequence
  chemically treated genomic DNA (Homo sapiens) CpG-island No: 32431
tgtattttgttttttaaattaaaaattttttaaaatttcgtatttcgtcgtgggcggcgatcgtcgcggattcgtcgggaagacggttttacggagtcgggaatatcgttcgttgttcgtatgttcgaggtgacgtttcgttgtggcgggttggcggaagtgacgcgttgttgtggcgcgtcggcggacgtgacgttattgtcgttgcgacgataaggtttggcgttattgtttagaggcggttatttggagtcggaagcgcggttgtagtagggcgaggttttaggtggggtcggtttcgtatttagtttagcgtgtttacgatgcggttgggtttcgggattttcgttatttgttgcgtagcgatcgaggtgttagggatcgcggttttttttcggggatttttttcggttttcgttcgtttttttgttagagcggaatacggagcggagtttttagcgttcgaattttcggttggtacggattttttttcggcgttttcgtttttttgattttatattttttagaagattttttttttgagtttcgttgt

SEQ ID NO: 32432 - DNA, 553 bp, Artificial Sequence
  chemically treated genomic DNA (Homo sapiens) CpG-island No: 32432
acaacgaaactcaaaaaaaaaatcttctaaaaaatataaaatcaaaaaaacgaaaacgccgaaaaaaaatccgtaccaaccgaaaattcgaacgctaaaaactccgctccgtattccgctctaacaaaaaaacgaacgaaaaccgaaaaaaatccccgaaaaaaaaccgcgatccctaacacctcgatcgctacgcaacaaataacgaaaatcccgaaacccaaccgcatcgtaaacacgctaaactaaatacgaaaccgaccccacctaaaacctcgccctactacaaccgcgcttccgactccaaataaccgcctctaaacaataacgccaaaccttatcgtcgcaacgacaataacgtcacgtccgccgacgcgccacaacaacgcgtcacttccgccaacccgccacaacgaaacgtcacctcgaacatacgaacaacgaacgatattcccgactccgtaaaaccgtcttcccgacgaatccgcgacgatcgccgcccacgacgaaatacgaaattttaaaaaatttttaatttaaaaaacaaaataca

SEQ ID NO: 32433 - DNA, 610 bp, Artificial Sequence
  chemically treated genomic DNA (Homo sapiens) CpG-island No: 32433
tttaggaagcggtaagtcgttttcgtcgttcgttttaggcgtttggttagaaggcggcgcgcgatttggtcgggtgagttgaggcggtaagtcggagcgcggatgtttcgggttcggtcgcgagcgtagtgtttggggcgcgcgaaatatcgcgtacgtagacggaggcgcggtttcgtaaattcgtgtcggagcgagttcgggcgcggatattcgttttttcgggggattttggttttatttcgacgttacgatttcgttttcgcggtgttgtcggcgtcgggatgtagcgtttttttgcgcgttttaaaattagtttattcgaaattcgaggttcgtacgttattcggggcgtttttttaggtcggggcgtttcgttcgtcgtttattagtttttttttttttttttttttcgcgtttttacggaggttatttttaatttttcgacgttgtagttgggttatcgagtttgaggtcgtttagcgcgttgtttcgggtagagtaggcgataggtcgggggtttcgagtcggagaggaggtttgatagtgtagatgggtttgggtttttgtcgcgattggaaagttaagtatgtggtacgtgttttcgttt

SEQ ID NO: 32434 - DNA, 610 bp, Artificial Sequence
  chemically treated genomic DNA (Homo sapiens) CpG-island No: 32434
aaacgaaaacacgtaccacatacttaactttccaatcgcgacaaaaacccaaacccatctacactatcaaacctcctctccgactcgaaacccccgacctatcgcctactctacccgaaacaacgcgctaaacgacctcaaactcgataacccaactacaacgtcgaaaaattaaaaataacctccgtaaaaacgcgaaaaaaaaaaaaaaaaaaaaactaataaacgacgaacgaaacgccccgacctaaaaaaacgccccgaataacgtacgaacctcgaatttcgaataaactaattttaaaacgcgcaaaaaaacgctacatcccgacgccgacaacaccgcgaaaacgaaatcgtaacgtcgaaataaaaccaaaatcccccgaaaaaacgaatatccgcgcccgaactcgctccgacacgaatttacgaaaccgcgcctccgtctacgtacgcgatatttcgcgcgccccaaacactacgctcgcgaccgaacccgaaacatccgcgctccgacttaccgcctcaactcacccgaccaaatcgcgcgccgccttctaaccaaacgcctaaaacgaacgacgaaaacgacttaccgcttcctaaa

SEQ ID NO: 32435 - DNA, 610 bp, Artificial Sequence
  chemically treated genomic DNA (Homo sapiens) CpG-island No: 32435
gggcgggggtacgtattatatgtttggttttttaatcgcgatagaggtttaggtttatttatattgttaagtttttttttcggttcggagttttcggtttgtcgtttgttttattcgggatagcgcgttaggcggttttaggttcggtagtttagttgtagcgtcgggaagttaaaaataattttcgtgggagcgcgggggaggaagaaagagggaagttggtgggcggcgggcgagacgtttcggtttggagaggcgtttcgggtggcgtgcgggtttcgaatttcgggtgggttagttttagagcgcgtaaaagggcgttgtatttcggcgtcgatagtatcgcgggggcgaggtcgtggcgtcgaggtgaaattaaggtttttcgggagagcggatgttcgcgttcgggttcgtttcgatacgagtttgcggagtcgcgttttcgtttgcgtgcgcggtgtttcgcgcgttttagatattgcgttcgcggtcgggttcgggatattcgcgtttcggtttgtcgttttagtttattcggttaggtcgcgcgtcgttttttagttagacgtttaggacgagcggcgggggcggtttgtcgttttttagg

SEQ ID NO: 32436 - DNA, 610 bp, Artificial Sequence
  chemically treated genomic DNA (Homo sapiens) CpG-island No: 32436
cctaaaaaacgacaaaccgcccccgccgctcgtcctaaacgtctaactaaaaaacgacgcgcgacctaaccgaataaactaaaacgacaaaccgaaacgcgaatatcccgaacccgaccgcgaacgcaatatctaaaacgcgcgaaacaccgcgcacgcaaacgaaaacgcgactccgcaaactcgtatcgaaacgaacccgaacgcgaacatccgctctcccgaaaaaccttaatttcacctcgacgccacgacctcgcccccgcgatactatcgacgccgaaatacaacgcccttttacgcgctctaaaactaacccacccgaaattcgaaacccgcacgccacccgaaacgcctctccaaaccgaaacgtctcgcccgccgcccaccaacttccctctttcttcctcccccgcgctcccacgaaaattatttttaacttcccgacgctacaactaaactaccgaacctaaaaccgcctaacgcgctatcccgaataaaacaaacgacaaaccgaaaactccgaaccgaaaaaaaaacttaacaatataaataaacctaaacctctatcgcgattaaaaaaccaaacatataatacgtacccccgccc

SEQ ID NO: 32437 - DNA, 645 bp, Artificial Sequence
  chemically treated genomic DNA (Homo sapiens) CpG-island No: 32437
ttttttatcgttttttaaagtcgagaagaggtaggtttaggaggagtacgtagttaattagtcgggcggcgttttgaatttcggtacgttttcgcggtgttttttttttcggaggatttaggtagttcggtttcgttttttaatatttggggggttagacgggcgggattcgagagttttcgggcgggtcggggggtattggttgggacgcggggtttttggggtcgtagtttcgcgcgcgtaatcggcgggtgcgttttcgttttgcgcggttttcgggtagttttcgttgggtttagagcgtttcgagcgcgtttcgggaaggtgatttagcgacgcgtttaggggtcgaaaaatttcgagaaataggaacgaggggagggagtaggggcgttattttcgatttttggcgtcgcggcgcgtgtcggaatgatgggttttgtattttcgagttttttatttttttgttttaggaattcggcgcgggcgggggagagagttttgtagtcgtagtgttcgcggttatgcgttgcggggacgcgagcggcggttgtgggatggatgtggtcgcgcggagtttaggattagattcgttcgtttttttttttttttttgtttttttttttttttttttttttagcgagg

SEQ ID NO: 32438 - DNA, 645 bp, Artificial Sequence
  chemically treated genomic DNA (Homo sapiens) CpG-island No: 32438
cctcgctaaaaaaaaaaaaaaaaaaaaaaacaaaaaaaaaaaaaaaaacgaacgaatctaatcctaaactccgcgcgaccacatccatcccacaaccgccgctcgcgtccccgcaacgcataaccgcgaacactacgactacaaaactctctcccccgcccgcgccgaattcctaaaacaaaaaaataaaaaactcgaaaatacaaaacccatcattccgacacgcgccgcgacgccaaaaatcgaaaataacgcccctactccctcccctcgttcctatttctcgaaatttttcgacccctaaacgcgtcgctaaatcaccttcccgaaacgcgctcgaaacgctctaaacccaacgaaaactacccgaaaaccgcgcaaaacgaaaacgcacccgccgattacgcgcgcgaaactacgaccccaaaaaccccgcgtcccaaccaataccccccgacccgcccgaaaactctcgaatcccgcccgtctaaccccccaaatattaaaaaacgaaaccgaactacctaaatcctccgaaaaaaaaaacaccgcgaaaacgtaccgaaattcaaaacgccgcccgactaattaactacgtactcctcctaaacctacctcttctcgactttaaaaaacgataaaaaa

SEQ ID NO: 32439 - DNA, 645 bp, Artificial Sequence
  chemically treated genomic DNA (Homo sapiens) CpG-island No: 32439
tttcgttggaggaagaggaggggaagaaggtagaggagaggggaggggcggacggatttggttttgggtttcgcgcggttatatttattttatagtcgtcgttcgcgttttcgtagcgtatgatcgcgggtattgcggttgtagggttttttttttcgttcgcgtcggatttttggagtaagggggtggggggttcggaggtgtaggatttattatttcgatacgcgtcgcgacgttaggagtcggggatgacgtttttgtttttttttttcgtttttgtttttcggagtttttcgatttttgagcgcgtcgttgagttattttttcggaacgcgttcgggacgttttggatttagcggggattgttcgggggtcgcgtaaggcgaaggcgtattcgtcgattacgcgcgcggagttgcggttttagggatttcgcgttttagttagtgtttttcgattcgttcggggattttcgggtttcgttcgtttgattttttaagtgttgggaaacggggtcgagttgtttgggtttttcggaagagaagatatcgcggaggcgtgtcggagtttagggcgtcgttcggttaattggttgcgtgttttttttggatttgttttttttcgattttaagaagcgatgagaga

SEQ ID NO: 32440 - DNA, 645 bp, Artificial Sequence
  chemically treated genomic DNA (Homo sapiens) CpG-island No: 32440
tctctcatcgcttcttaaaatcgaaaaaaaacaaatccaaaaaaaacacgcaaccaattaaccgaacgacgccctaaactccgacacgcctccgcgatatcttctcttccgaaaaacccaaacaactcgaccccgtttcccaacacttaaaaaatcaaacgaacgaaacccgaaaatccccgaacgaatcgaaaaacactaactaaaacgcgaaatccctaaaaccgcaactccgcgcgcgtaatcgacgaatacgccttcgccttacgcgacccccgaacaatccccgctaaatccaaaacgtcccgaacgcgttccgaaaaaataactcaacgacgcgctcaaaaatcgaaaaactccgaaaaacaaaaacgaaaaaaaaaaacaaaaacgtcatccccgactcctaacgtcgcgacgcgtatcgaaataataaatcctacacctccgaaccccccacccccttactccaaaaatccgacgcgaacgaaaaaaaaaaccctacaaccgcaatacccgcgatcatacgctacgaaaacgcgaacgacgactataaaataaatataaccgcgcgaaacccaaaaccaaatccgtccgcccctcccctctcctctaccttcttcccctcctcttcctccaacgaaa

SEQ ID NO: 32441 - DNA, 675 bp, Artificial Sequence
  chemically treated genomic DNA (Homo sapiens) CpG-island No: 32441
tacgtttttgcgtttttttcggggcgtttttttggtatttttttgggcgcgggtaggtgcgggatgttgaacgagtttcggacggattgtagcgagcggttgggttcgggcgacgagggttggaagtcgattcgggtattttggaggtcgaggtttttgagtatggttacgatgagcgtgtgtagggtcgtgaagttgacggcgtttatttttggcgtgtcgatggagaggttcgttagttttcggagggagatcgtggtcgcgggcggtatcgtggttgttaggagttgtcgtcgtcgcggggcgtcggttaattatttttcgtttattgtacgtcgcgttttggggtttttcgggggttttgcgaggttttcggggcgtttttgtttcgggttcggtcgagttattggatagagtttttgtttttagggaatttgcgttttcgtttttcggcggggttcgcgatggttattttttcgttgtttgtcgttggtttcgggttttcgagttggagttttggatttttagttttcgcgtcggcggacgtttgaaacgtgggggttttcgcgtgttttgaagattttacgtaataatacgtttttttgcgagttacgggggcggggggaagtaaaggttattataaggattataaggggagttttggtaacgggttga

SEQ ID NO: 32442 - DNA, 675 bp, Artificial Sequence
  chemically treated genomic DNA (Homo sapiens) CpG-island No: 32442
tcaacccgttaccaaaactccccttataatccttataataacctttacttccccccgcccccgtaactcgcaaaaaaacgtattattacgtaaaatcttcaaaacacgcgaaaacccccacgtttcaaacgtccgccgacgcgaaaactaaaaatccaaaactccaactcgaaaacccgaaaccaacgacaaacaacgaaaaaataaccatcgcgaaccccgccgaaaaacgaaaacgcaaattccctaaaaacaaaaactctatccaataactcgaccgaacccgaaacaaaaacgccccgaaaacctcgcaaaacccccgaaaaaccccaaaacgcgacgtacaataaacgaaaaataattaaccgacgccccgcgacgacgacaactcctaacaaccacgataccgcccgcgaccacgatctccctccgaaaactaacgaacctctccatcgacacgccaaaaataaacgccgtcaacttcacgaccctacacacgctcatcgtaaccatactcaaaaacctcgacctccaaaatacccgaatcgacttccaaccctcgtcgcccgaacccaaccgctcgctacaatccgtccgaaactcgttcaacatcccgcacctacccgcgcccaaaaaaataccaaaaaaacgccccgaaaaaaacgcaaaaacgta

SEQ ID NO: 32443 - DNA, 675 bp, Artificial Sequence
  chemically treated genomic DNA (Homo sapiens) CpG-island No: 32443
ttagttcgttgttaaggttttttttgtgatttttgtggtggtttttattttttttcgttttcgtggttcgtagggaggcgtgttgttacgtggaatttttagggtacgcgggggtttttacgttttaaacgttcgtcggcgcggggattgggagtttagggttttagttcggggattcgaggttagcgatagatagcggaggggtggttatcgcggatttcgtcggggagcggaggcgtagattttttggaggtaggagttttgtttagtgattcggtcggattcggggtaggggcgtttcgaggatttcgtagggttttcgaaaggttttaaggcgcggcgtgtagtgagcgggaagtggttggtcggcgtttcgcggcggcgatagtttttgatagttacgatgtcgttcgcgattacggttttttttcgggagttggcggatttttttatcggtacgttagaggtgggcgtcgttaattttacggttttgtatacgtttatcgtggttatgtttaagaatttcgatttttaaaatattcggatcgatttttagttttcgtcgttcgagtttagtcgttcgttgtagttcgttcggagttcgtttagtatttcgtatttgttcgcgtttaaggaggtgttaagggggcgtttcgggagaagcgtaggggcgtg

SEQ ID NO: 32444 - DNA, 675 bp, Artificial Sequence
  chemically treated genomic DNA (Homo sapiens) CpG-island No: 32444
cacgcccctacgcttctcccgaaacgcccccttaacacctccttaaacgcgaacaaatacgaaatactaaacgaactccgaacgaactacaacgaacgactaaactcgaacgacgaaaactaaaaatcgatccgaatattttaaaaatcgaaattcttaaacataaccacgataaacgtatacaaaaccgtaaaattaacgacgcccacctctaacgtaccgataaaaaaatccgccaactcccgaaaaaaaaccgtaatcgcgaacgacatcgtaactatcaaaaactatcgccgccgcgaaacgccgaccaaccacttcccgctcactacacgccgcgccttaaaacctttcgaaaaccctacgaaatcctcgaaacgcccctaccccgaatccgaccgaatcactaaacaaaactcctacctccaaaaaatctacgcctccgctccccgacgaaatccgcgataaccacccctccgctatctatcgctaacctcgaatccccgaactaaaaccctaaactcccaatccccgcgccgacgaacgtttaaaacgtaaaaacccccgcgtaccctaaaaattccacgtaacaacacgcctccctacgaaccacgaaaacgaaaaaaaataaaaaccaccacaaaaatcacaaaaaaaaccttaacaacgaactaa

SEQ ID NO: 32445 - DNA, 514 bp, Artificial Sequence
  chemically treated genomic DNA (Homo sapiens) CpG-island No: 32445
cgggtgcgcgcgtagttgttgtttattagtcggtaattgttttagagtcgcggcgcgcgtagggttcgcgttgtcggggttggcgtttttttttcggttcgacgttagagtagtagttacgtgatttggttttttttagtttcgggttcgacggggtgcgttcgcgtcgtcgtagtttttttttttttttttcgtttgttttttattcgaggtgaattttgcgaagagaagttcgggggtgtagtgagagggcggaatcgtttcgcgggcgttcgaaagtttcgtttagtcgtcgtagttcgcggtgatcgagtgtagcgcgtttgcgttcgtcgcgggatacggtaggcggggcggggtcgaatacgagtggttaggggtacgacgggagttgtagtttagggtacggttcgattcgcgtgaagaggggaataattttttttttcggttcggttgtgttgtatatttattttggaagtattttagagggcgggcgttgttttttatttttaga

SEQ ID NO: 32446 - DNA, 514 bp, Artificial Sequence
  chemically treated genomic DNA (Homo sapiens) CpG-island No: 32446
tctaaaaataaaaaacaacgcccgccctctaaaatacttccaaaataaatatacaacacaaccgaaccgaaaaaaaaaattattcccctcttcacgcgaatcgaaccgtaccctaaactacaactcccgtcgtacccctaaccactcgtattcgaccccgccccgcctaccgtatcccgcgacgaacgcaaacgcgctacactcgatcaccgcgaactacgacgactaaacgaaactttcgaacgcccgcgaaacgattccgccctctcactacacccccgaacttctcttcgcaaaattcacctcgaataaaaaacaaacgaaaaaaaaaaaaaaaaactacgacgacgcgaacgcaccccgtcgaacccgaaactaaaaaaaaccaaatcacgtaactactactctaacgtcgaaccgaaaaaaaaacgccaaccccgacaacgcgaaccctacgcgcgccgcgactctaaaacaattaccgactaataaacaacaactacgcgcgcacccg

SEQ ID NO: 32447 - DNA, 514 bp, Artificial Sequence
  chemically treated genomic DNA (Homo sapiens) CpG-island No: 32447
tttgagggtgaggagtagcgttcgttttttaggatgtttttagagtgagtgtgtagtatagtcggatcgaggaaaaggattatttttttttttacgcgggtcgggtcgtgttttggattatagttttcgtcgtgtttttggttattcgtattcggtttcgtttcgtttgtcgtgtttcgcggcgagcgtaggcgcgttgtattcggttatcgcgggttgcggcggttgggcggggttttcgggcgttcgcgggacggtttcgtttttttattgtattttcgggttttttttcgtaaggtttatttcgaatgaggaataagcggggagggaagggaagggttgcggcggcgcgggcgtatttcgtcgggttcggggttgggggaggttaggttacgtaattgttgttttggcgtcgggtcggggagggggcgttagtttcggtagcgcgaattttgcgcgcgtcgcggttttgaaatagttatcggttagtaaataatagttgcgcgcgtattcg

SEQ ID NO: 32448 - DNA, 514 bp, Artificial Sequence
  chemically treated genomic DNA (Homo sapiens) CpG-island No: 32448
cgaatacgcgcgcaactattatttactaaccgataactatttcaaaaccgcgacgcgcgcaaaattcgcgctaccgaaactaacgccccctccccgacccgacgccaaaacaacaattacgtaacctaacctcccccaaccccgaacccgacgaaatacgcccgcgccgccgcaacccttcccttccctccccgcttattcctcattcgaaataaaccttacgaaaaaaaacccgaaaatacaataaaaaaacgaaaccgtcccgcgaacgcccgaaaaccccgcccaaccgccgcaacccgcgataaccgaatacaacgcgcctacgctcgccgcgaaacacgacaaacgaaacgaaaccgaatacgaataaccaaaaacacgacgaaaactataatccaaaacacgacccgacccgcgtaaaaaaaaaaataatccttttcctcgatccgactatactacacactcactctaaaaacatcctaaaaaacgaacgctactcctcaccctcaaa

SEQ ID NO: 32449 - DNA, 605 bp, Artificial Sequence
  chemically treated genomic DNA (Homo sapiens) CpG-island No: 32449
ggattattcgcgggattttcggacggtagagtagggattcgttgggttttgggagttgggttgagcgaggagcgtcggggtttcggtttatagggcgcggaggcgtagacggcgatagggaggatttcggcggggagtttttaggtagaagtagtatcgcgttagggatataggcgtcggtcgttgttcgaggaggggtcgtttttcgggcgttgcgttggggtcggggcgtagcggggaagacgttttcgcggggttgattcggtagagcggttagcgtcgcgttgttcgtttggtttaaagtcgaatttaggcggtttttcgtgcgcgtagggggaggggcggcgttgttcgagaggttcgcgttggaggcggaggtttggcgtttcggaggataggatcgagaggtcggcgcggcggtcgtcgggggattcgttggggtttttcgtagggtttggcgcgcggggttcggggaggagatcgcggtcgtggggaggagagagttcgaggattaggaatagttcggggttttttacgatttcgcgtttgttttcgtttttatcgtttggatgggtttttgcgttagtttagtatggtgaattttg

SEQ ID NO: 32450 - DNA, 605 bp, Artificial Sequence
  chemically treated genomic DNA (Homo sapiens) CpG-island No: 32450
caaaattcaccatactaaactaacgcaaaaacccatccaaacgataaaaacgaaaacaaacgcgaaatcgtaaaaaaccccgaactattcctaatcctcgaactctctcctccccacgaccgcgatctcctccccgaaccccgcgcgccaaaccctacgaaaaaccccaacgaatcccccgacgaccgccgcgccgacctctcgatcctatcctccgaaacgccaaacctccgcctccaacgcgaacctctcgaacaacgccgcccctccccctacgcgcacgaaaaaccgcctaaattcgactttaaaccaaacgaacaacgcgacgctaaccgctctaccgaatcaaccccgcgaaaacgtcttccccgctacgccccgaccccaacgcaacgcccgaaaaacgacccctcctcgaacaacgaccgacgcctatatccctaacgcgatactacttctacctaaaaactccccgccgaaatcctccctatcgccgtctacgcctccgcgccctataaaccgaaaccccgacgctcctcgctcaacccaactcccaaaacccaacgaatccctactctaccgtccgaaaatcccgcgaataatcc

SEQ ID NO: 32451 - DNA, 605 bp, Artificial Sequence
  chemically treated genomic DNA (Homo sapiens) CpG-island No: 32451
tagggtttattatgttgggttggcgtagagatttatttaggcggtaggagcggggataggcgcggggtcgtggagggtttcgggttgtttttgattttcgaatttttttttttttacggtcgcggtttttttttcgggtttcgcgcgttaggttttgcgaaaagttttaacgggtttttcggcgatcgtcgcgtcggtttttcggttttgtttttcgaggcgttaggttttcgtttttagcgcgggtttttcgggtagcgtcgtttttttttttgcgcgtacgggaggtcgtttgggttcggttttggattaggcgagtagcgcggcgttggtcgttttgtcgggttagtttcgcggagacgtttttttcgttgcgtttcggttttagcgtagcgttcggggagcggttttttttcgggtagcggtcggcgtttgtgtttttagcgcggtattgtttttgtttgaggatttttcgtcggggttttttttgtcgtcgtttgcgttttcgcgttttgtgggtcgaggtttcggcgtttttcgtttagtttaatttttaaggtttagcgggtttttgttttgtcgttcggggatttcgcgggtggttt

SEQ ID NO: 32452 - DNA, 605 bp, Artificial Sequence
  chemically treated genomic DNA (Homo sapiens) CpG-island No: 32452
aaaccacccgcgaaatccccgaacgacaaaacaaaaacccgctaaaccttaaaaattaaactaaacgaaaaacgccgaaacctcgacccacaaaacgcgaaaacgcaaacgacgacaaaaaaaaccccgacgaaaaatcctcaaacaaaaacaataccgcgctaaaaacacaaacgccgaccgctacccgaaaaaaaaccgctccccgaacgctacgctaaaaccgaaacgcaacgaaaaaaacgtctccgcgaaactaacccgacaaaacgaccaacgccgcgctactcgcctaatccaaaaccgaacccaaacgacctcccgtacgcgcaaaaaaaaaaacgacgctacccgaaaaacccgcgctaaaaacgaaaacctaacgcctcgaaaaacaaaaccgaaaaaccgacgcgacgatcgccgaaaaacccgttaaaacttttcgcaaaacctaacgcgcgaaacccgaaaaaaaaaccgcgaccgtaaaaaaaaaaaaattcgaaaatcaaaaacaacccgaaaccctccacgaccccgcgcctatccccgctcctaccgcctaaataaatctctacgccaacccaacataataaacccta

SEQ ID NO: 32453 - DNA, 738 bp, Artificial Sequence
  chemically treated genomic DNA (Homo sapiens) CpG-island No: 32453
ggagcggagatcgtaaaatttttttggggtcggtattttttgttttcgttttggcgtagacgtgtttatttttgggacggtttcgagcgtacgtagtcggcgggcgattttttttttagagatttgtacgttgttttcggtttttagcgtatcgttatttttaattcgatatatttaagttcgttttagttacgcgttaagacgtttatttttcgtagtaggcgttttaggtgcggttcggtttaggcgtttagggcgtttggcggtttcgcgcgtcgtagtagttttcgttttttttcgagcgtcgttattcggttttgtagcgcggtcgtttggatatttagtagtaggtaggtagtcgtcgagtttacggagagtagtaggtatagcgcgtttatcgttcgggattcggtcgtcgtcgtcgagcgtttttcgtcgtcgtcgttcgtcgtattgttttttttcgcgtcgtcgtcgttatcggcgcgttcgtttgggtttatggcgcgttcgtcgcgcgtggatttttcgagggggcggtgttgttggggtagaggttgggtgcgagaggagtaggcgggatagttcgaggtacgaggttcgtcgggcgcgggggttagttttcgggtagtagcggatcgtcgcgtacgtttttttcgtcgtagttagtttttttatagcggttattttgggtagttttttttatgtaaatagattttgttagaaaaggagtaggga

SEQ ID NO: 32454 - DNA, 738 bp, Artificial Sequence
  chemically treated genomic DNA (Homo sapiens) CpG-island No: 32454
tccctactccttttctaacaaaatctatttacataaaaaaaactacccaaaataaccgctataaaaaaactaactacgacgaaaaaaacgtacgcgacgatccgctactacccgaaaactaacccccgcgcccgacgaacctcgtacctcgaactatcccgcctactcctctcgcacccaacctctaccccaacaacaccgccccctcgaaaaatccacgcgcgacgaacgcgccataaacccaaacgaacgcgccgataacgacgacgacgcgaaaaaaaacaatacgacgaacgacgacgacgaaaaacgctcgacgacgacgaccgaatcccgaacgataaacgcgctatacctactactctccgtaaactcgacgactacctacctactactaaatatccaaacgaccgcgctacaaaaccgaataacgacgctcgaaaaaaaacgaaaactactacgacgcgcgaaaccgccaaacgccctaaacgcctaaaccgaaccgcacctaaaacgcctactacgaaaaataaacgtcttaacgcgtaactaaaacgaacttaaatatatcgaattaaaaataacgatacgctaaaaaccgaaaacaacgtacaaatctctaaaaaaaaaatcgcccgccgactacgtacgctcgaaaccgtcccaaaaataaacacgtctacgccaaaacgaaaacaaaaaataccgaccccaaaaaaattttacgatctccgctcc

SEQ ID NO: 32455 - DNA, 738 bp, Artificial Sequence
  chemically treated genomic DNA (Homo sapiens) CpG-island No: 32455
tttttgttttttttttggtagggtttatttgtatagaggaaattgtttaaagtggtcgttgtggaggagttggttgcggcgaagggggcgtgcgcggcgattcgttgttattcggaggttaattttcgcgttcggcggatttcgtgtttcgggttgtttcgtttgtttttttcgtatttagtttttgttttagtagtatcgttttttcggagagtttacgcgcgacgaacgcgttatgggtttaggcgagcgcgtcggtggcggcggcgacgcggggaagggtaatgcggcgggcggcggcggcggagggcgttcggcgacgacggtcgggtttcgggcggtgagcgcgttgtgtttgttgtttttcgtgggttcggcggttgtttgtttgttgttgggtgtttaggcggtcgcgttgtagggtcgggtggcggcgttcgaggaggagcgggagttgttgcggcgcgcggggtcgttaggcgttttggacgtttgggtcgagtcgtatttggagcgtttgttgcgggaggtgagcgttttggcgcgtggttggggcggatttgggtgtgtcgggttgagggtggcggtacgttgggagtcgggggtagcgtgtaggtttttgggaggagggtcgttcgtcggttgcgtgcgttcggggtcgttttagagatgggtacgtttgcgttaaggcggaggtagggggtgtcggttttaagggggttttgcggttttcgtttt

SEQ ID NO: 32456 - DNA, 738 bp, Artificial Sequence
  chemically treated genomic DNA (Homo sapiens) CpG-island No: 32456
aaaacgaaaaccgcaaaacccccttaaaaccgacaccccctacctccgccttaacgcaaacgtacccatctctaaaacgaccccgaacgcacgcaaccgacgaacgaccctcctcccaaaaacctacacgctacccccgactcccaacgtaccgccaccctcaacccgacacacccaaatccgccccaaccacgcgccaaaacgctcacctcccgcaacaaacgctccaaatacgactcgacccaaacgtccaaaacgcctaacgaccccgcgcgccgcaacaactcccgctcctcctcgaacgccgccacccgaccctacaacgcgaccgcctaaacacccaacaacaaacaaacaaccgccgaacccacgaaaaacaacaaacacaacgcgctcaccgcccgaaacccgaccgtcgtcgccgaacgccctccgccgccgccgcccgccgcattacccttccccgcgtcgccgccgccaccgacgcgctcgcctaaacccataacgcgttcgtcgcgcgtaaactctccgaaaaaacgatactactaaaacaaaaactaaatacgaaaaaaacaaacgaaacaacccgaaacacgaaatccgccgaacgcgaaaattaacctccgaataacaacgaatcgccgcgcacgcccccttcgccgcaaccaactcctccacaacgaccactttaaacaatttcctctatacaaataaaccctaccaaaaaaaaaacaaaaa

SEQ ID NO: 32457 - DNA, 860 bp, Artificial Sequence
  chemically treated genomic DNA (Homo sapiens) CpG-island No: 32457
agatacgcggtatatattgagggcgggatacgggcgttttttttcggttttattcgagttcgtagagaacgtaaatattttttcggtttagaggtttcgggattcgggtgggcgggggggggggggtggaaatgtttgggtcgcgtagtcgtagtgtggaggttcgagtttcgtttttacgttacgtggagtttcgtttttaggtggagcggcgggagcgcgtaaggttttgttacgtaggcgcgttcgcgcggcgtaggtggtgttagaggcgattcgggggattttagggcgacggcgttgtcgttattttgtggggtgtttgtcgtagcggtcgaggagggaagacggtagtttggcgatatttttcggtcgaagggttatttgtttttgcggaggtagggttgtagatggtgtgtgttgggataggcggttgtcggtttttaggttttcgagttaggtgtcggagaaacgatcgcgttaggggtttgggtttttggagttgagttgggagttttgcgaggcgttgttcggttggtgtacgtcggtagtatcgaaagttgttcgggcgtcgcggttttgtcgttgatttttttttgagggttttggtcgttcgcgtcgcggcgttcggaggtcgtgggttcgcggttttttgttgtttggcgagcgcggttgttggttaattttgtcgggattttttttagtcggcgggcgttaggatttgtcgggagatttttcgagagtcgtttttggtattcgtgttgtcggagattaagtttttttttggatttttggtttgggtcgtttgtagcgtttcgggggttttttagagttaagtatttgtttttgttttgagtgcg

SEQ ID NO: 32458 - DNA, 860 bp, Artificial Sequence
  chemically treated genomic DNA (Homo sapiens) CpG-island No: 32458
cgcactcaaaacaaaaacaaatacttaactctaaaaaacccccgaaacgctacaaacgacccaaaccaaaaatccaaaaaaaaacttaatctccgacaacacgaataccaaaaacgactctcgaaaaatctcccgacaaatcctaacgcccgccgactaaaaaaaatcccgacaaaattaaccaacaaccgcgctcgccaaacaacaaaaaaccgcgaacccacgacctccgaacgccgcgacgcgaacgaccaaaaccctcaaaaaaaaatcaacgacaaaaccgcgacgcccgaacaactttcgatactaccgacgtacaccaaccgaacaacgcctcgcaaaactcccaactcaactccaaaaacccaaacccctaacgcgatcgtttctccgacacctaactcgaaaacctaaaaaccgacaaccgcctatcccaacacacaccatctacaaccctacctccgcaaaaacaaataacccttcgaccgaaaaatatcgccaaactaccgtcttccctcctcgaccgctacgacaaacaccccacaaaataacgacaacgccgtcgccctaaaatcccccgaatcgcctctaacaccacctacgccgcgcgaacgcgcctacgtaacaaaaccttacgcgctcccgccgctccacctaaaaacgaaactccacgtaacgtaaaaacgaaactcgaacctccacactacgactacgcgacccaaacatttccacccccccccccccgcccacccgaatcccgaaacctctaaaccgaaaaaatatttacgttctctacgaactcgaataaaaccgaaaaaaaacgcccgtatcccgccctcaatatataccgcgtatct

SEQ ID NO: 32459 - DNA, 860 bp, Artificial Sequence
  chemically treated genomic DNA (Homo sapiens) CpG-island No: 32459
cgtatttaagataggggtaaatgtttgattttggaaaattttcgaaacgttataaacggtttaggttaggaatttaggggaagatttgattttcgataatacgaatgttagagacggttttcgaagggtttttcgataggttttagcgttcgtcggttggaagaggtttcgatagggttaattaatagtcgcgttcgttaggtagtaggggatcgcgagtttacggttttcggacgtcgcgacgcgagcggttagggtttttagagaagggttagcggtagaatcgcgacgttcgagtaattttcggtgttgtcggcgtgtattagtcgagtagcgtttcgtagaatttttaatttagttttagaagtttaggtttttaacgcggtcgttttttcgatatttggttcggagatttaaagatcgatagtcgtttgttttagtatatattatttgtaattttattttcgtaaaagtaaatggtttttcggtcgagaaatgtcgttaaattgtcgtttttttttttcggtcgttgcgataaatattttataaaatggcggtagcgtcgtcgttttagaatttttcgagtcgtttttagtattatttacgtcgcgcgaacgcgtttgcgtgatagaattttgcgcgttttcgtcgttttatttaagggcggggttttacgtgacgtaagagcggggttcgagtttttatattgcggttgcgcggtttaagtatttttattttttttttttcgtttattcgggtttcggggtttttaggtcgggagggtgtttacgttttttacgggttcgggtggaatcgggaaggaacgttcgtgtttcgtttttagtgtgtatcgcgtgttt

SEQ ID NO: 32460 - DNA, 860 bp, Artificial Sequence
  chemically treated genomic DNA (Homo sapiens) CpG-island No: 32460
aaacacgcgatacacactaaaaacgaaacacgaacgttccttcccgattccacccgaacccgtaaaaaacgtaaacaccctcccgacctaaaaaccccgaaacccgaataaacgaaaaaaaaaaaataaaaatacttaaaccgcgcaaccgcaatataaaaactcgaaccccgctcttacgtcacgtaaaaccccgcccttaaataaaacgacgaaaacgcgcaaaattctatcacgcaaacgcgttcgcgcgacgtaaataatactaaaaacgactcgaaaaattctaaaacgacgacgctaccgccattttataaaatatttatcgcaacgaccgaaaaaaaaaaacgacaatttaacgacatttctcgaccgaaaaaccatttacttttacgaaaataaaattacaaataatatatactaaaacaaacgactatcgatctttaaatctccgaaccaaatatcgaaaaaacgaccgcgttaaaaacctaaacttctaaaactaaattaaaaattctacgaaacgctactcgactaatacacgccgacaacaccgaaaattactcgaacgtcgcgattctaccgctaacccttctctaaaaaccctaaccgctcgcgtcgcgacgtccgaaaaccgtaaactcgcgatcccctactacctaacgaacgcgactattaattaaccctatcgaaacctcttccaaccgacgaacgctaaaacctatcgaaaaacccttcgaaaaccgtctctaacattcgtattatcgaaaatcaaatcttcccctaaattcctaacctaaaccgtttataacgtttcgaaaattttccaaaatcaaacatttacccctatcttaaatacg

SEQ ID NO: 32461 - DNA, 1683 bp, Artificial Sequence
  chemically treated genomic DNA (Homo sapiens) CpG-island No: 32461
gtatttataacggggttggtagttcgagtagtcggtgaacgttagtaattgttcgtagcggttttaggttatttgtcgggtgttgttcgtcgtattcgttgtcgtcgtcggtaatttattgtgcgcgttatcgtagcggtagcgtattgttttttcgttgcgcgatgttttcgatattagtttgttcggtttattatattttcggcggttttttagttcgttcggggatattatcgtcgttagttggtttcgcgtcgtgtataagttaagaatgtgtcgtgttcgtcgcgtcgtcgcggtgtggtgatgttcgtgatatcgtcggatattatatttagatcgtattttgtttttcgtttcgtcgcgttcgtttgcgtcgtgagtttttttgtcgcgttatattcgttgcgcgtgacgttgtcgttcgttagttttttttttattattcgttttagttcggtttcgttttttgtatgtagtattttacgtcggtttaggttgtcggtgatggtgatgcggttttgtttatattgatacgtgtagtttaagtttgtcgggtttagttgtttttgttattcgttcgttttgtcgtacggtacggatttcggtcggtcgtgtgacggtgcgttatttattcggtttcggtatttattatcgtaagtaaagttgcgtatttgtttgttattacggttatatattatcgttagttcgtcgcgtggcgtttagttatagcgtattagcggcgcggtaggtaaatttttcgggtatttcgggtcgtgcgttagttatacggtagatagacggatgtcgttgtttcggttatattcggtgtaattcggtagggtattaggaaaagcggacggtttcgtttcgtcggaaatggtttgttgtcgggttttttttgttcgttgcgtttgcgtggttagtattagtcggaagtgacgttaggtattattcgttacgtcggtgatttcgtcgttgaatttatcggcggtttcgcggtggaacgtttgtgtgcgttcgaagcggtttattagttcggttagtattcggtacggcggtagcggcgtaggtagtattttattcgttttcggtattcgtttatattaatcgagtagttattacggtttttgcggattgtttgtcgttagataacgatgcggatttaagcggagttttttcggtagcgtttgttagagtgcggttagtcggtgatttttatttagtttcgttacgtcgtcgcgtattagttatagtgattcgttgcggttgtaatcgtttttatcgggaaataggtgtttaaaatataggtttttgtcgtcgttattattgagtattagtgtgttatcgcgtagttgtaagcggatattcgtaggtattttttagtcggggtcgaggttttttatcggcgcgggcgtttttgttcggtaattgttgtaggtgcgggagaggatgaacggtagcgggtcgggtagggcgatgtcggttttatcgggaaggatttttgtatcgagtttggggattgatcggatggtcggacgttatttcgtcggggtatatcgaataggttacgttcggtgggggtattaatacgtatattcggtttaatttttgaataatgttatcgttatattgcgttatgttatttgacgcgtcgtcgtttttcgtttatcgtaaaatttt

SEQ ID NO: 32462 - DNA, 1683 bp, Artificial Sequence
  chemically treated genomic DNA (Homo sapiens) CpG-island No: 32462
aaaattttacgataaacgaaaaacgacgacgcgtcaaataacataacgcaatataacgataacattattcaaaaattaaaccgaatatacgtattaatacccccaccgaacgtaacctattcgatataccccgacgaaataacgtccgaccatccgatcaatccccaaactcgatacaaaaatccttcccgataaaaccgacatcgccctacccgacccgctaccgttcatcctctcccgcacctacaacaattaccgaacaaaaacgcccgcgccgataaaaaacctcgaccccgactaaaaaatacctacgaatatccgcttacaactacgcgataacacactaatactcaataataacgacgacaaaaacctatattttaaacacctatttcccgataaaaacgattacaaccgcaacgaatcactataactaatacgcgacgacgtaacgaaactaaataaaaatcaccgactaaccgcactctaacaaacgctaccgaaaaaactccgcttaaatccgcatcgttatctaacgacaaacaatccgcaaaaaccgtaataactactcgattaatataaacgaataccgaaaacgaataaaatactacctacgccgctaccgccgtaccgaatactaaccgaactaataaaccgcttcgaacgcacacaaacgttccaccgcgaaaccgccgataaattcaacgacgaaatcaccgacgtaacgaataatacctaacgtcacttccgactaatactaaccacgcaaacgcaacgaacaaaaaaaacccgacaacaaaccatttccgacgaaacgaaaccgtccgcttttcctaataccctaccgaattacaccgaatataaccgaaacaacgacatccgtctatctaccgtataactaacgcacgacccgaaatacccgaaaaatttacctaccgcgccgctaatacgctataactaaacgccacgcgacgaactaacgataatatataaccgtaataacaaacaaatacgcaactttacttacgataataaataccgaaaccgaataaataacgcaccgtcacacgaccgaccgaaatccgtaccgtacgacaaaacgaacgaataacaaaaacaactaaacccgacaaacttaaactacacgtatcaatataaacaaaaccgcatcaccatcaccgacaacctaaaccgacgtaaaatactacatacaaaaaacgaaaccgaactaaaacgaataataaaaaaaaaactaacgaacgacaacgtcacgcgcaacgaatataacgcgacaaaaaaactcacgacgcaaacgaacgcgacgaaacgaaaaacaaaatacgatctaaatataatatccgacgatatcacgaacatcaccacaccgcgacgacgcgacgaacacgacacattcttaacttatacacgacgcgaaaccaactaacgacgataatatccccgaacgaactaaaaaaccgccgaaaatataataaaccgaacaaactaatatcgaaaacatcgcgcaacgaaaaaacaatacgctaccgctacgataacgcgcacaataaattaccgacgacgacaacgaatacgacgaacaacacccgacaaataacctaaaaccgctacgaacaattactaacgttcaccgactactcgaactaccaaccccgttataaatac

SEQ ID NO: 32463 - DNA, 1683 bp, Artificial Sequence
  chemically treated genomic DNA (Homo sapiens) CpG-island No: 32463
aggattttacgatgagcggaaaacggcggcgcgttaggtgatatgacgtagtatggcggtagtattgtttaggggttgagtcgggtgtacgtattggtgtttttatcgagcgtggtttgttcggtgtgtttcggcggagtgacgttcggttattcggttaatttttagattcggtgtaaaggtttttttcggtgaaatcgatatcgttttgttcggttcgttgtcgtttattttttttcgtatttatagtagttatcggataaaaacgttcgcgtcggtggggagtttcggtttcggttggaaaatgtttgcggatattcgtttatagttgcgcgataatatattgatatttagtgataacggcggtagaagtttgtattttgagtatttgtttttcggtgaggacggttatagtcgtagcgagttattgtggttggtgcgcggcggcgtggcgaaattggatgaaggttatcggttggtcgtattttggtaggcgttgtcggaagaatttcgtttaagttcgtatcgttatttggcgataaatagttcgtaggggtcgtggtggttgttcggttggtgtgagcgggtgtcggaagcggatgaggtgttgtttgcgtcgttgtcgtcgtatcgggtattgatcgggttggtggatcgtttcgggcgtatatagacgttttatcgcgaagtcgtcggtgaatttagcggcgaaattatcggcgtgacggatggtgtttggcgttattttcggttggtattgattacgtaggcgtagcgggtagaagaagttcggtagtaggttattttcggcgggacggaatcgttcgttttttttgatattttgtcgggttatatcgaatatggtcgggataacggtattcgtttgtttgtcgtgtggttgacgtacgattcggaatattcggagaatttatttgtcgcgtcgttggtgcgttatggttggacgttacgcggcgaattggcggtggtgtatgatcgtagtggtaaataggtgcgtagttttatttacgatgataaatatcggggtcggatgggtggcgtatcgttatacggtcggtcggaattcgtatcgtacgataggacgggcgggtgataggaatagttaaattcggtaggtttaagttatacgtattagtatgagtaggatcgtattattattatcgatagtttgaatcggcgtgaagtgttgtatatagaaggcggggtcgggttgaaacgggtggtgaaaaaagaattggcggacggtagcgttacgcgtagcgggtatgacgcggtaggaaggtttacggcgtagacggacgcggcgggacggaggatagagtacggtttgaatgtggtgttcggcgatattacggatattattatatcgcgacggcgcggcgagtacgatatatttttaatttatatacgacgcggaattagttgacggcggtggtgttttcggacgggttggagagtcgtcgggaatatgatgaatcgggtaggttggtatcggagatatcgcgtagcggggagatagtacgttatcgttacgatgacgcgtatagtgagttatcggcgacgataacggatgcgacgggtagtattcggtagatgatttggagtcgttacgggtagttgttggcgtttatcgattgttcgggttattagtttcgttatgaatat

SEQ ID NO: 32464 - DNA, 1683 bp, Artificial Sequence
  chemically treated genomic DNA (Homo sapiens) CpG-island No: 32464
atattcataacgaaactaataacccgaacaatcgataaacgccaacaactacccgtaacgactccaaatcatctaccgaatactacccgtcgcatccgttatcgtcgccgataactcactatacgcgtcatcgtaacgataacgtactatctccccgctacgcgatatctccgataccaacctacccgattcatcatattcccgacgactctccaacccgtccgaaaacaccaccgccgtcaactaattccgcgtcgtatataaattaaaaatatatcgtactcgccgcgccgtcgcgatataataatatccgtaatatcgccgaacaccacattcaaaccgtactctatcctccgtcccgccgcgtccgtctacgccgtaaaccttcctaccgcgtcatacccgctacgcgtaacgctaccgtccgccaattcttttttcaccacccgtttcaacccgaccccgccttctatatacaacacttcacgccgattcaaactatcgataataataatacgatcctactcatactaatacgtataacttaaacctaccgaatttaactattcctatcacccgcccgtcctatcgtacgatacgaattccgaccgaccgtataacgatacgccacccatccgaccccgatatttatcatcgtaaataaaactacgcacctatttaccactacgatcatacaccaccgccaattcgccgcgtaacgtccaaccataacgcaccaacgacgcgacaaataaattctccgaatattccgaatcgtacgtcaaccacacgacaaacaaacgaataccgttatcccgaccatattcgatataacccgacaaaatatcaaaaaaaacgaacgattccgtcccgccgaaaataacctactaccgaacttcttctacccgctacgcctacgtaatcaataccaaccgaaaataacgccaaacaccatccgtcacgccgataatttcgccgctaaattcaccgacgacttcgcgataaaacgtctatatacgcccgaaacgatccaccaacccgatcaatacccgatacgacgacaacgacgcaaacaacacctcatccgcttccgacacccgctcacaccaaccgaacaaccaccacgacccctacgaactatttatcgccaaataacgatacgaacttaaacgaaattcttccgacaacgcctaccaaaatacgaccaaccgataaccttcatccaatttcgccacgccgccgcgcaccaaccacaataactcgctacgactataaccgtcctcaccgaaaaacaaatactcaaaatacaaacttctaccgccgttatcactaaatatcaatatattatcgcgcaactataaacgaatatccgcaaacattttccaaccgaaaccgaaactccccaccgacgcgaacgtttttatccgataactactataaatacgaaaaaaaataaacgacaacgaaccgaacaaaacgatatcgatttcaccgaaaaaaacctttacaccgaatctaaaaattaaccgaataaccgaacgtcactccgccgaaacacaccgaacaaaccacgctcgataaaaacaccaatacgtacacccgactcaacccctaaacaatactaccgccatactacgtcatatcacctaacgcgccgccgttttccgctcatcgtaaaatcct

SEQ ID NO: 32465 - DNA, 1342 bp, Artificial Sequence
  chemically treated genomic DNA (Homo sapiens) CpG-island No: 32465
  unsure (1262, 1314)
ttttgcgttatttattgtgggtttcgcgtttagttaaaattgtaggtacgcgtcgatagtgtatttttacgtaaatgtaagaaattgtttaaaggtcgcgatttttttaatcgtgtagaattttttacgtttcgatttcggaattatcggcgcgttgttgcgtttttttatacgttgggtacgtattggaatatttttttgttttattatcgtagttatggtatcgattacgggcgcgtattggcggcgttcgaatttggcgattatgaatcggatttcgaaattcggttgaatgagttgggttacgattgttacgacgaaattaataattcggcgtttaggttttttttggcgggttagggaaaaatgtttgatagcgtttcgtttattaggtttattcgcgcgataacgttatttgtggttcggtaaaattttttagaatgttttaattagcggtttatgtagtcgttttttttgcgtatatacgtttagtttaaacggcgtttttttatcgttgcgttttaaaattattacgcggttacgtatcggttcggggttgttttttagtattattttcggtaataatgttacgttatagtcgagtgttattatcgatattatcgttttatgttcgttaatcgtggcgtaaattatcgggttattgattttattgcgtcgaaattatagtttaatgcggcggcgtatcggtttttgatcggttataataaacggtatcgttgattagttcggtttttttatcgatatttgattacgtatcgggtagggtagcgcgggggtaattagtattattgttagattttttagtatcgaaaacgttattgcgtcgggtaaggttttcggtttattcgtaatcgttagattcgttttattagtgattattttttttatcgtatttgtcgtattattagtagtaagtttaatttttatcgacgggtgtttcgcgcggaagcgatttagaatcggcggtagatggttgtaggtagcggttatcgagtagaagatatgtaattcgttagagagcgacggtttttgttgatcgatggtgtggcgtaattgttgatattgtaatagcgtttgttgggcgaaaacgcgtagtttttcgttcgttttagttagcgttatcgtgcggttatcgcgtataaatagcggttgatcgagatttttttttaggcgttgaatttgtcgtgagagcgtggatgggttaacgtgtatcgttcgcgcgttgcggttaaaatggcggnttttcgttagatgtaggaaggtttttagatcgcgtaaatttatagggatagntttcgatgttgacgttgtaaaaattgcg

SEQ ID NO: 32466 - DNA, 1342 bp, Artificial Sequence
  chemically treated genomic DNA (Homo sapiens) CpG-island No: 32466
  unsure (29, 81)
cgcaatttttacaacgtcaacatcgaaanctatccctataaatttacgcgatctaaaaaccttcctacatctaacgaaaanccgccattttaaccgcaacgcgcgaacgatacacgttaacccatccacgctctcacgacaaattcaacgcctaaaaaaaaatctcgatcaaccgctatttatacgcgataaccgcacgataacgctaactaaaacgaacgaaaaactacgcgttttcgcccaacaaacgctattacaatatcaacaattacgccacaccatcgatcaacaaaaaccgtcgctctctaacgaattacatatcttctactcgataaccgctacctacaaccatctaccgccgattctaaatcgcttccgcgcgaaacacccgtcgataaaaattaaacttactactaataatacgacaaatacgataaaaaaaataatcactaataaaacgaatctaacgattacgaataaaccgaaaaccttacccgacgcaataacgttttcgatactaaaaaatctaacaataatactaattacccccgcgctaccctacccgatacgtaatcaaatatcgataaaaaaaccgaactaatcaacgataccgtttattataaccgatcaaaaaccgatacgccgccgcattaaactataatttcgacgcaataaaatcaataacccgataatttacgccacgattaacgaacataaaacgataatatcgataataacactcgactataacgtaacattattaccgaaaataatactaaaaaacaaccccgaaccgatacgtaaccgcgtaataattttaaaacgcaacgataaaaaaacgccgtttaaactaaacgtatatacgcaaaaaaaacgactacataaaccgctaattaaaacattctaaaaaattttaccgaaccacaaataacgttatcgcgcgaataaacctaataaacgaaacgctatcaaacatttttccctaacccgccaaaaaaaacctaaacgccgaattattaatttcgtcgtaacaatcgtaacccaactcattcaaccgaatttcgaaatccgattcataatcgccaaattcgaacgccgccaatacgcgcccgtaatcgataccataactacgataataaaacaaaaaaatattccaatacgtacccaacgtataaaaaaacgcaacaacgcgccgataattccgaaatcgaaacgtaaaaaattctacacgattaaaaaaatcgcgacctttaaacaatttcttacatttacgtaaaaatacactatcgacgcgtacctacaattttaactaaacgcgaaacccacaataaataacgcaaaa

SEQ ID NO: 32467 - DNA, 1342 bp, Artificial Sequence
  chemically treated genomic DNA (Homo sapiens) CpG-island No: 32467
  unsure (29, 81)
cgtaatttttgtaacgttaatatcgaggnttgtttttgtggatttacgcgatttgaaaatttttttgtatttggcggaaantcgttattttggtcgtagcgcgcgggcgatgtacgttagtttatttacgtttttacggtagatttagcgtttggaagaagatttcggttagtcgttgtttgtgcgcgataatcgtacggtgacgttgattgaagcgggcgaagagttgcgcgttttcgtttagtaaacgttgttgtagtattagtagttgcgttatattatcgattagtaagggtcgtcgttttttggcgaattatatattttttgttcggtgatcgttgtttatagttatttgtcgtcgattttggatcgttttcgcgcggaatattcgtcggtggagattaaatttattattggtgatgcggtagatgcgatggaaaaggtggttattggtgaagcggatttggcgattgcgggtaaatcggaaattttgttcggcgtagtggcgttttcgatgttggagaatttggtagtagtgttgattgttttcgcgttgttttgttcggtgcgtaattaggtgtcggtagagaagtcggattggttaacggtgtcgtttattatggtcgattaggggtcggtacgtcgtcgtattgaattgtggtttcgacgtaataaaattagtaattcgatgatttacgttacggttggcgggtatgaagcgatggtatcgatggtggtattcggttgtggcgtggtattgttgtcggaagtggtgttggaaaatagtttcgaatcggtgcgtaatcgcgtgatgattttagagcgtagcgatgagaaaacgtcgtttgagttgggcgtgtgtgcgtagaaaaagcggttatatgagtcgttaattgaggtattttggaagattttgtcgaattataaatgacgttgtcgcgcgggtaggtttgataagcgaagcgttattaggtatttttttttaattcgttaaaaagaatttgaacgtcgggttattggtttcgtcgtggtaatcgtagtttagtttatttagtcgggtttcgaaattcggtttatggtcgttaagttcgaacgtcgttagtacgcgttcgtagtcggtgttatggttgcgatagtggaataaagaaatgttttagtacgtatttagcgtgtgaggaagcgtagtagcgcgtcggtgatttcggaatcgaagcgtgaaaggttttgtacggttggaggagtcgcgatttttaggtagttttttgtatttgcgtgagggtatattgtcggcgcgtgtttgtaattttggttaggcgcggggtttataataggtggcgtaagg

SEQ ID NO: 32468 - DNA, 1342 bp, Artificial Sequence
  chemically treated genomic DNA (Homo sapiens) CpG-island No: 32468
  unsure (1262, 1314)
ccttacgccacctattataaaccccgcgcctaaccaaaattacaaacacgcgccgacaatataccctcacgcaaatacaaaaaactacctaaaaatcgcgactcctccaaccgtacaaaacctttcacgcttcgattccgaaatcaccgacgcgctactacgcttcctcacacgctaaatacgtactaaaacatttctttattccactatcgcaaccataacaccgactacgaacgcgtactaacgacgttcgaacttaacgaccataaaccgaatttcgaaacccgactaaataaactaaactacgattaccacgacgaaaccaataacccgacgttcaaattctttttaacgaattaaaaaaaaatacctaataacgcttcgcttatcaaacctacccgcgcgacaacgtcatttataattcgacaaaatcttccaaaatacctcaattaacgactcatataaccgctttttctacgcacacacgcccaactcaaacgacgttttctcatcgctacgctctaaaatcatcacgcgattacgcaccgattcgaaactattttccaacaccacttccgacaacaataccacgccacaaccgaataccaccatcgataccatcgcttcatacccgccaaccgtaacgtaaatcatcgaattactaattttattacgtcgaaaccacaattcaatacgacgacgtaccgacccctaatcgaccataataaacgacaccgttaaccaatccgacttctctaccgacacctaattacgcaccgaacaaaacaacgcgaaaacaatcaacactactaccaaattctccaacatcgaaaacgccactacgccgaacaaaatttccgatttacccgcaatcgccaaatccgcttcaccaataaccaccttttccatcgcatctaccgcatcaccaataataaatttaatctccaccgacgaatattccgcgcgaaaacgatccaaaatcgacgacaaataactataaacaacgatcaccgaacaaaaaatatataattcgccaaaaaacgacgacccttactaatcgataatataacgcaactactaatactacaacaacgtttactaaacgaaaacgcgcaactcttcgcccgcttcaatcaacgtcaccgtacgattatcgcgcacaaacaacgactaaccgaaatcttcttccaaacgctaaatctaccgtaaaaacgtaaataaactaacgtacatcgcccgcgcgctacgaccaaaataacgantttccgccaaatacaaaaaaattttcaaatcgcgtaaatccacaaaaacaancctcgatattaacgttacaaaaattacg

SEQ ID NO: 32469 - DNA, 896 bp, Artificial Sequence
  chemically treated genomic DNA (Homo sapiens) CpG-island No: 32469
tttttagcgtgatcgattagtttttttttaatttcgcgatggtttattgtaaggcggcgatggatgttggcgcgatgattcgcgtaggtagtatcgttacggtaatgattcgtaacggtaatatgttcgggattcgggtaagcgggttgggcgaacgttggtttattgcgtttgtaaatatttcgtaaggtttgttttttatcggtttttcgtaggagtaggcgaattcggatatgggcgatagcgcgattatcgaaatttttggtatcggaggtgcggtaatgatcgtagcgtttggcgtaacgcgttttgtcggtgcgggtggtatggaagcggtaagagcggtatttgaagagatggcggaaatttattttgaacgtaatatgtagttgtagattttaagttgggatttttagggcgcgtgtttggggttggatattcgtcgcgtggtagaaatcggtattacgttatttattaatatcggtatcgtttataaagaggcggggatcgggtagattggcgtaggtatcgtgcgggtatcgtatggcgtgttttgaataggcgttggaagtattggttgaaagtatgggtattggttgaggaacgcgtaatgacgattatttattttttgtttgttagtagtagcgtatcgaattatcgttagttttggcggttagcgggagtgtggcggcgggcgattaatttgatgacggaaagcggcgaattgttaacgttgtatcgttagggtagtggtttcggtttcggaggatgggtgtttcgtcgatgcgtaattcgatgcgttatgcggatggattatgtaggtaatgaacgattataggttgtggtttaagggattcgtttcgggcgtaatacggtataaatagattatagagata

SEQ ID NO: 32470 - DNA, 896 bp, Artificial Sequence
  chemically treated genomic DNA (Homo sapiens) CpG-island No: 32470
tatctctataatctatttataccgtattacgcccgaaacgaatcccttaaaccacaacctataatcgttcattacctacataatccatccgcataacgcatcgaattacgcatcgacgaaacacccatcctccgaaaccgaaaccactaccctaacgatacaacgttaacaattcgccgctttccgtcatcaaattaatcgcccgccgccacactcccgctaaccgccaaaactaacgataattcgatacgctactactaacaaacaaaaaataaataatcgtcattacgcgttcctcaaccaatacccatactttcaaccaatacttccaacgcctattcaaaacacgccatacgatacccgcacgatacctacgccaatctacccgatccccgcctctttataaacgataccgatattaataaataacgtaataccgatttctaccacgcgacgaatatccaaccccaaacacgcgccctaaaaatcccaacttaaaatctacaactacatattacgttcaaaataaatttccgccatctcttcaaataccgctcttaccgcttccataccacccgcaccgacaaaacgcgttacgccaaacgctacgatcattaccgcacctccgataccaaaaatttcgataatcgcgctatcgcccatatccgaattcgcctactcctacgaaaaaccgataaaaaacaaaccttacgaaatatttacaaacgcaataaaccaacgttcgcccaacccgcttacccgaatcccgaacatattaccgttacgaatcattaccgtaacgatactacctacgcgaatcatcgcgccaacatccatcgccgccttacaataaaccatcgcgaaattaaaaaaaaactaatcgatcacgctaaaaa

SEQ ID NO: 32471 - DNA, 896 bp, Artificial Sequence
  chemically treated genomic DNA (Homo sapiens) CpG-island No: 32471
tatttttgtggtttgtttatatcgtgttacgttcgaggcgaattttttgagttataatttgtggtcgtttattgtttgtataatttattcgtataacgtatcgaattgcgtatcggcgaagtatttatttttcggggtcgaaattattattttgacgatgtaacgttaatagttcgtcgtttttcgttattaggttaatcgttcgtcgttatattttcgttaatcgttaggattggcgataattcggtgcgttattattggtaagtagaggatggatgatcgttattgcgcgttttttaattaatatttatgtttttagttagtgtttttagcgtttgtttaaagtacgttatgcggtgttcgtacggtgtttgcgttaatttgttcgattttcgtttttttatgggcgatatcggtattgatgagtggcgtaatgtcggtttttattacgcgacgaatgtttagttttaggtacgcgttttgaaaattttagtttgggatttgtaattgtatattgcgtttaaggtaaattttcgttatttttttagatatcgtttttgtcgtttttatgttattcgtatcgataaagcgcgttacgttaggcgttgcgattattgtcgtattttcgatattaaaggtttcggtaatcgcgttatcgtttatattcgggttcgtttgtttttgcgagaagtcggtgaaaaatagattttgcggagtgtttataggcgtagtaaattagcgttcgtttagttcgtttattcgaatttcgaatatattgtcgttgcgggttattgtcgtgacgatgttgtttgcgcggattatcgcgttagtatttatcgtcgttttgtagtaagttatcgcgaggttgaggaagaattgatcggttacgttgagga

SEQ ID NO: 32472 - DNA, 896 bp, Artificial Sequence
  chemically treated genomic DNA (Homo sapiens) CpG-island No: 32472
tcctcaacgtaaccgatcaattcttcctcaacctcgcgataacttactacaaaacgacgataaatactaacgcgataatccgcgcaaacaacatcgtcacgacaataacccgcaacgacaatatattcgaaattcgaataaacgaactaaacgaacgctaatttactacgcctataaacactccgcaaaatctatttttcaccgacttctcgcaaaaacaaacgaacccgaatataaacgataacgcgattaccgaaacctttaatatcgaaaatacgacaataatcgcaacgcctaacgtaacgcgctttatcgatacgaataacataaaaacgacaaaaacgatatctaaaaaaataacgaaaatttaccttaaacgcaatatacaattacaaatcccaaactaaaattttcaaaacgcgtacctaaaactaaacattcgtcgcgtaataaaaaccgacattacgccactcatcaataccgatatcgcccataaaaaaacgaaaatcgaacaaattaacgcaaacaccgtacgaacaccgcataacgtactttaaacaaacgctaaaaacactaactaaaaacataaatattaattaaaaaacgcgcaataacgatcatccatcctctacttaccaataataacgcaccgaattatcgccaatcctaacgattaacgaaaatataacgacgaacgattaacctaataacgaaaaacgacgaactattaacgttacatcgtcaaaataataatttcgaccccgaaaaataaatacttcgccgatacgcaattcgatacgttatacgaataaattatacaaacaataaacgaccacaaattataactcaaaaaattcgcctcgaacgtaacacgatataaacaaaccacaaaaata

SEQ ID NO: 32473 - DNA, 693 bp, Artificial Sequence
  chemically treated genomic DNA (Homo sapiens) CpG-island No: 32473
ggcgacgattcgtaatttgagaggtagtagtggttattcgacgaataattgaaattggcgaaacgttacgatttgtcggtgattttgtatttacggcgtacgtacgataaattggcgatgtattttaaacgttacgatttatcgcgtattggcgtggtttacggttttttcggtagtttgtaataggtcgaacggtttgtatagttgggttataaaattggcgtaggcggtattattatttatttacgcgttagtaaaattcgcgatgttatcgtaaaattatcgttggtatcgttattgttggaaatcgacgcgtcggatatgtcgtttaacggtttttaggggtagtttaatcgttcggagtaggttgttcgtgtgttcgtcgtgttttgcgagttgcgtcgggaatcggcggatgagattgcgtaagcgttgtttaataatacgtatacgttgtttaacgtgtcgtaggtcggataaggcgtttacgtcgtattcggtagttggcgtataatgtttgatgcgacgtttaacgcgttttattatgtttataggtttgtgtcgaatcgtaggtcggataaggcgtttacgtcgtattcggtaattttttgtttttgatgagggcgttaaatgtcgcgtggtttggaattattgattgtttaagattattttgtaaggtttcgatgttttagt

SEQ ID NO: 32474 - DNA, 693 bp, Artificial Sequence
  chemically treated genomic DNA (Homo sapiens) CpG-island No: 32474
actaaaacatcgaaaccttacaaaataatcttaaacaatcaataattccaaaccacgcgacatttaacgccctcatcaaaaacaaaaaattaccgaatacgacgtaaacgccttatccgacctacgattcgacacaaacctataaacataataaaacgcgttaaacgtcgcatcaaacattatacgccaactaccgaatacgacgtaaacgccttatccgacctacgacacgttaaacaacgtatacgtattattaaacaacgcttacgcaatctcatccgccgattcccgacgcaactcgcaaaacacgacgaacacacgaacaacctactccgaacgattaaactacccctaaaaaccgttaaacgacatatccgacgcgtcgatttccaacaataacgataccaacgataattttacgataacatcgcgaattttactaacgcgtaaataaataataataccgcctacgccaattttataacccaactatacaaaccgttcgacctattacaaactaccgaaaaaaccgtaaaccacgccaatacgcgataaatcgtaacgtttaaaatacatcgccaatttatcgtacgtacgccgtaaatacaaaatcaccgacaaatcgtaacgtttcgccaatttcaattattcgtcgaataaccactactacctctcaaattacgaatcgtcgcc

SEQ ID NO: 32475 - DNA, 693 bp, Artificial Sequence
  chemically treated genomic DNA (Homo sapiens) CpG-island No: 32475
attgagatatcgaagttttgtaaaatggttttgagtaattaataattttaggttacgcggtatttagcgtttttattaggagtagagaattgtcggatgcggcgtaaacgttttattcggtttacggttcggtataaatttgtaggtatgataagacgcgttaagcgtcgtattaggtattgtgcgttaattgtcggatgcggcgtgaacgttttattcggtttacggtacgttaaataacgtatacgtgttattaagtaacgtttgcgtaattttattcgtcggttttcggcgtaattcgtaaagtacggcgaatatacgggtagtttgtttcgggcggttaggttgtttttgaaaatcgttgagcggtatattcggcgcgtcggtttttagtaataacgatgttagcggtaattttgcgatgatatcgcgggttttattggcgcgtggataggtgatagtatcgtttacgttaattttgtagtttagttgtataaatcgttcggtttgttgtaggttgtcggaaaaatcgtgaattacgttagtgcgcggtaaatcgtggcgtttaagatgtatcgttagtttgtcgtgcgtgcgtcgtgaatgtaggattatcggtagatcgtagcgtttcgttagttttagttgttcgtcgagtaattattgttgttttttaaattgcggatcgtcgtt

SEQ ID NO: 32476 - DNA, 693 bp, Artificial Sequence
  chemically treated genomic DNA (Homo sapiens) CpG-island No: 32476
aacgacgatccgcaatttaaaaaacaacaataattactcgacgaacaactaaaactaacgaaacgctacgatctaccgataatcctacattcacgacgcacgcacgacaaactaacgatacatcttaaacgccacgatttaccgcgcactaacgtaattcacgatttttccgacaacctacaacaaaccgaacgatttatacaactaaactacaaaattaacgtaaacgatactatcacctatccacgcgccaataaaacccgcgatatcatcgcaaaattaccgctaacatcgttattactaaaaaccgacgcgccgaatataccgctcaacgattttcaaaaacaacctaaccgcccgaaacaaactacccgtatattcgccgtactttacgaattacgccgaaaaccgacgaataaaattacgcaaacgttacttaataacacgtatacgttatttaacgtaccgtaaaccgaataaaacgttcacgccgcatccgacaattaacgcacaatacctaatacgacgcttaacgcgtcttatcatacctacaaatttataccgaaccgtaaaccgaataaaacgtttacgccgcatccgacaattctctactcctaataaaaacgctaaataccgcgtaacctaaaattattaattactcaaaaccattttacaaaacttcgatatctcaat

SEQ ID NO: 32477 - DNA, 855 bp, Artificial Sequence
  chemically treated genomic DNA (Homo sapiens) CpG-island No: 32477
tcgcgttgaataatataggttttattttggtttaggtattggtgtttgttgcggcgcgtgcggtgattattattcgtaatttatttttttcgggcgaattttaatcggggatttttttttacgagttcgatttttgtatcgttattgtaacgtttttgcgtatttggttcgttcgtttttttattaagcgtttcgttgtatttgcgcgaaaattttgcgttcgtttatttaattttttaatttcgtttttgtttagtttattatttttttttttttttcgtttagtatttggtcgttatattacgtcggatagtacgcgttttcgttatatcgtattcggcgttttttttatatattacgttttgttcgtacgtttttgtatattgcgtcgtaaattgcgtcgttttttgtattcgtcgcgttatttttttttttttttttaacgttatttttcgttgtcgcgttattttttattaattcgttaattattgcgttgtattttttttagttattaatttttgttttttgtattggttcgtaataagtttaacgttttaagtttttcgtaatattttcgttataaatattttcgtttgtacggcgttttttgtatcgcgcgttttgtttttgtttttcgggttatttcgtttttatagaataacgtttgttgaattcgttttttcgggaagttcgtattgtgttattaaggttttttattcggttatttattcgaaaacgtcgcgaagaatcgaaacgggttttcgttgtattatcgttttaatttttataaggttaattgtttttgattattaattggtaattttatatcgtttaggttggtatttttatcgcggg

SEQ ID NO: 32478 - DNA, 855 bp, Artificial Sequence
  chemically treated genomic DNA (Homo sapiens) CpG-island No: 32478
cccgcgataaaaataccaacctaaacgatataaaattaccaattaataatcaaaaacaattaaccttataaaaattaaaacgataatacaacgaaaacccgtttcgattcttcgcgacgttttcgaataaataaccgaataaaaaaccttaataacacaatacgaacttcccgaaaaaacgaattcaacaaacgttattctataaaaacgaaataacccgaaaaacaaaaacaaaacgcgcgatacaaaaaacgccgtacaaacgaaaatatttataacgaaaatattacgaaaaacttaaaacgttaaacttattacgaaccaatacaaaaaacaaaaattaataactaaaaaaaatacaacgcaataattaacgaattaataaaaaataacgcgacaacgaaaaataacgttaaaaaaaaaaaaaaaaataacgcgacgaatacaaaaaacgacgcaatttacgacgcaatatacaaaaacgtacgaacaaaacgtaatatataaaaaaaacgccgaatacgatataacgaaaacgcgtactatccgacgtaatataacgaccaaatactaaacgaaaaaaaaaaaaaaataataaactaaacaaaaacgaaattaaaaaattaaataaacgaacgcaaaattttcgcgcaaatacaacgaaacgcttaataaaaaaacgaacgaaccaaatacgcaaaaacgttacaataacgatacaaaaatcgaactcgtaaaaaaaaatccccgattaaaattcgcccgaaaaaaataaattacgaataataatcaccgcacgcgccgcaacaaacaccaatacctaaaccaaaataaaacctatattattcaacgcga

SEQ ID NO: 32479 - DNA, 855 bp, Artificial Sequence
  chemically treated genomic DNA (Homo sapiens) CpG-island No: 32479
ttcgcgataagggtgttaatttggacggtgtaaggttattagttagtgattagggatagttaattttataaaaattagggcggtagtgtagcgagggttcgtttcggtttttcgcggcgttttcgggtgagtgatcgggtgaaaaattttggtgatatagtgcgagtttttcgggaggacgggtttaataggcgttgttttgtaaaggcggagtggttcgggaggtaggagtaaggcgcgcggtgtagggggcgtcgtgtaggcgggggtgtttgtggcgggggtgttgcggggggtttggggcgttaagtttattgcgggttagtgtagagggtaggagttggtagttggaggaggtgtagcgtagtagttggcgggttggtgaagagtagcgcggtagcgagaagtggcgttaaagggaaggaagaaagtagcgcggcgagtgtagggggcggcgtagtttgcggcgtagtgtgtaggggcgtgcgggtagagcgtggtgtgtggagagggcgtcgagtgcggtgtggcgggggcgcgtgttgttcggcgtagtgtagcggttaggtgttgggcggagaaagggggggagtggtgggttgggtaagggcggagttagagggttgggtaagcgggcgtagggttttcgcgtaggtgtagcggagcgtttggtagagaagcgagcgggttaggtgcgtaagggcgttgtagtggcggtgtaggggtcgagttcgtaggagggagttttcggttgaggttcgttcgagagaagtaagttgcgagtagtagttatcgtacgcgtcgtagtaggtattagtgtttaggttaggataaagtttgtgttgtttagcgcga

SEQ ID NO: 32480 - DNA, 855 bp, Artificial Sequence
  chemically treated genomic DNA (Homo sapiens) CpG-island No: 32480
tcgcgctaaacaacacaaactttatcctaacctaaacactaatacctactacgacgcgtacgataactactactcgcaacttacttctctcgaacgaacctcaaccgaaaactccctcctacgaactcgacccctacaccgccactacaacgcccttacgcacctaacccgctcgcttctctaccaaacgctccgctacacctacgcgaaaaccctacgcccgcttacccaaccctctaactccgcccttacccaacccaccactccccccctttctccgcccaacacctaaccgctacactacgccgaacaacacgcgcccccgccacaccgcactcgacgccctctccacacaccacgctctacccgcacgcccctacacactacgccgcaaactacgccgccccctacactcgccgcgctactttcttccttccctttaacgccacttctcgctaccgcgctactcttcaccaacccgccaactactacgctacacctcctccaactaccaactcctaccctctacactaacccgcaataaacttaacgccccaaaccccccgcaacacccccgccacaaacacccccgcctacacgacgccccctacaccgcgcgccttactcctacctcccgaaccactccgcctttacaaaacaacgcctattaaacccgtcctcccgaaaaactcgcactatatcaccaaaatttttcacccgatcactcacccgaaaacgccgcgaaaaaccgaaacgaaccctcgctacactaccgccctaatttttataaaattaactatccctaatcactaactaataaccttacaccgtccaaattaacacccttatcgcgaa

SEQ ID NO: 32481 - DNA, 1039 bp, Artificial Sequence
  chemically treated genomic DNA (Homo sapiens) CpG-island No: 32481
ggcgagtatttttttattttattttttttttcgtttttgtttttagtttacgttttttttagttttttattttaggatcgtttcgtttgtcggtcgcggcgtttagtattcggtatttttataaattttttcgttcggagttttagaaaacgaaagataaagttattcgtttaattcggcggtcggggcgcgggttcgcggggcgttagagtcgggtatgcgtagaggtcgcggcgggttgtcggtttggaagagcgaggttggggcgagaagtcgtcgggatttataattgggtcggcggttcgagtttcgtttgttagcgttcgcggttttaagggtcgggtaggagcggtagggcgtcggcgaaaggcggggcgggggcggcgcgggcggcgggggcgtcgcgtatttggtagcggttagtgagtagttggtttcgcgacggcgtgtatagcggttgcgtgtagtagttgtttaggagtatttcgtcggtcgttagcggcgtttaggtgcggcgtgcggatgcgggattcgtggaagtcgacgtcgttttagtttaggtcgtttgttagtaagaagattaggtgggcggtcggttggtttcggcgttcgagttcggcggcgttaataatagtagtagtagtagcgggaggacgacggggaggagtagtcgtcgaggttcggggtttcggggtaagttcgtcgcgtcgcgcggatttatttttgttcgttcgcggttttagcgtttgtggcgttattagttttttgtatcgttgatagaatgaggaattgggttgtcggggtttgtttcgtttcggcgcgggacggtatttttagcgggtcgtgggtttgcgaggtcgggcgttcggttttcgtcgttttcgattcgggttttcggttgttgtggcggaggaggagttagagacgaattcgcgggcgttcgttgttcggttttttggaaatttagttgacgtttggagggtattaaggttcgttatttttttcggtaattaaatttgtattgtggttttttaaaaaa

SEQ ID NO: 32482 - DNA, 1039 bp, Artificial Sequence
  chemically treated genomic DNA (Homo sapiens) CpG-island No: 32482
ttttttaaaaaaccacaatacaaatttaattaccgaaaaaaataacgaaccttaataccctccaaacgtcaactaaatttccaaaaaaccgaacaacgaacgcccgcgaattcgtctctaactcctcctccgccacaacaaccgaaaacccgaatcgaaaacgacgaaaaccgaacgcccgacctcgcaaacccacgacccgctaaaaataccgtcccgcgccgaaacgaaacaaaccccgacaacccaattcctcattctatcaacgatacaaaaaactaataacgccacaaacgctaaaaccgcgaacgaacaaaaataaatccgcgcgacgcgacgaacttaccccgaaaccccgaacctcgacgactactcctccccgtcgtcctcccgctactactactactattattaacgccgccgaactcgaacgccgaaaccaaccgaccgcccacctaatcttcttactaacaaacgacctaaactaaaacgacgtcgacttccacgaatcccgcatccgcacgccgcacctaaacgccgctaacgaccgacgaaatactcctaaacaactactacacgcaaccgctatacacgccgtcgcgaaaccaactactcactaaccgctaccaaatacgcgacgcccccgccgcccgcgccgcccccgccccgcctttcgccgacgccctaccgctcctacccgacccttaaaaccgcgaacgctaacaaacgaaactcgaaccgccgacccaattataaatcccgacgacttctcgccccaacctcgctcttccaaaccgacaacccgccgcgacctctacgcatacccgactctaacgccccgcgaacccgcgccccgaccgccgaattaaacgaataactttatctttcgttttctaaaactccgaacgaaaaaatttataaaaataccgaatactaaacgccgcgaccgacaaacgaaacgatcctaaaataaaaaactaaaaaaaacgtaaactaaaaacaaaaacgaaaaaaaaaataaaataaaaaaatactcgcc

SEQ ID NO: 32483 - DNA, 1039 bp, Artificial Sequence
  chemically treated genomic DNA (Homo sapiens) CpG-island No: 32483
ttttttaggaaattatagtgtaaatttaattgtcggggaagataacgggttttggtgttttttaagcgttagttgagtttttaagaagtcgggtagcgggcgttcgcgggttcgtttttggtttttttttcgttatagtagtcgggggttcgggtcggaggcggcgggggtcgagcgttcggtttcgtaagtttacggttcgttgggggtgtcgtttcgcgtcggggcggagtaggtttcggtagtttagttttttattttattagcggtataaggggttggtggcgttataggcgttgggatcgcgggcggataaggatgggttcgcgcggcgcggcgagtttgtttcgaggtttcggatttcggcggttgttttttttcgtcgttttttcgttgttgttgttgttgttgttggcgtcgtcgggttcgggcgtcggggttagtcggtcgtttatttggtttttttgttggtagacgatttaggttggaacgacgtcggtttttacgggtttcgtattcgtacgtcgtatttggacgtcgttggcggtcggcggggtgtttttggataattattatacgtagtcgttgtgtacgtcgtcgcggagttagttgtttattggtcgttattaggtacgcggcgttttcgtcgttcgcgtcgttttcgtttcgtttttcgtcggcgttttgtcgtttttattcggtttttgaggtcgcgggcgttggtaggcggggttcggatcgtcgatttagttatgggtttcggcggtttttcgttttaatttcgtttttttaggtcggtagttcgtcgcggtttttgcgtatgttcggttttggcgtttcgcggattcgcgtttcggtcgtcgggttgggcgggtggttttgtttttcgttttttgaagtttcgggcgaaggggtttatgggaatgtcgggtgttgggcgtcgcggtcggtaggcggagcggttttgaggtgggaggttggggagggcgtgggttgggagtaaagacgaggggagaggtaaaatgaaggggtgttcgtt

SEQ ID NO: 32484 - DNA, 1039 bp, Artificial Sequence
  chemically treated genomic DNA (Homo sapiens) CpG-island No: 32484
aacgaacaccccttcattttacctctcccctcgtctttactcccaacccacgccctccccaacctcccacctcaaaaccgctccgcctaccgaccgcgacgcccaacacccgacattcccataaaccccttcgcccgaaacttcaaaaaacgaaaaacaaaaccacccgcccaacccgacgaccgaaacgcgaatccgcgaaacgccaaaaccgaacatacgcaaaaaccgcgacgaactaccgacctaaaaaaacgaaattaaaacgaaaaaccgccgaaacccataactaaatcgacgatccgaaccccgcctaccaacgcccgcgacctcaaaaaccgaataaaaacgacaaaacgccgacgaaaaacgaaacgaaaacgacgcgaacgacgaaaacgccgcgtacctaataacgaccaataaacaactaactccgcgacgacgtacacaacgactacgtataataattatccaaaaacaccccgccgaccgccaacgacgtccaaatacgacgtacgaatacgaaacccgtaaaaaccgacgtcgttccaacctaaatcgtctaccaacaaaaaaaccaaataaacgaccgactaaccccgacgcccgaacccgacgacgccaacaacaacaacaacaacaacgaaaaaacgacgaaaaaaaacaaccgccgaaatccgaaacctcgaaacaaactcgccgcgccgcgcgaacccatccttatccgcccgcgatcccaacgcctataacgccaccaaccccttataccgctaataaaataaaaaactaaactaccgaaacctactccgccccgacgcgaaacgacacccccaacgaaccgtaaacttacgaaaccgaacgctcgacccccgccgcctccgacccgaacccccgactactataacgaaaaaaaaaccaaaaacgaacccgcgaacgcccgctacccgacttcttaaaaactcaactaacgcttaaaaaacaccaaaacccgttatcttccccgacaattaaatttacactataatttcctaaaaaa

SEQ ID NO: 32485 - DNA, 993 bp, Artificial Sequence
  chemically treated genomic DNA (Homo sapiens) CpG-island No: 32485
cgtttcgttcgtgcgggatattagtttttaggatgcgttaatcgtagatcgtttaagcgtaagaggtggcgagaggttattacggttgtttaatagttgcgtttttaggttgtttggtgtgacgtagtagttttcgttcggattttgaggtttggcgtttcgattgagtcgaggtttgtgttattcgatattttttgcgattcggttttttaggtttatttagcgcggtttttttcggtttttcgagttttatcgtagtttttttttattttcgttttttttcggttttttgttagtgttcgtcgcgatgtttttgcgtaattattttaagtgatattagcgtttatattcgtacggagcgagtttgaagtttttatttttcggaatttaacgtcgggtcgttaagggcgggtatttaagcgaggattagcggattaaggtcgcgattagagtttagcggttttcgcgtagttagagttcgatagtttttgcgtattcgtcgtgcgtatttttattcgtgcgcgtgcgcgtattcgtttttttcgtttcgttttagtattaatcgttttttttttacgtttacgattttttaacgtagtttttttcgttttttcgcgcgcgagtagaaaggtttcggcgtgcgcgcgttcgttcgtttcgcgttttgtcgggaaggggagtgagtagaggcgtttacgtcgcgcgggaggcggaggcgacggcgatttcggtggcggcggcggttacgacggagacggttgcgttcgtttgttttttcggcgttatggcggttgtcgggggtagataagcggagggagcgggagcgcgcgcgcgacggcggcggcggcggcggcgacgattggttatttatagtttttgttgttttcgatttttggtgttttaataatgaatgttagttttatttcgtaggggatcgcgcgtcggtgttggcgtatcgggggttttttatttatttattttcgagattaggaa

SEQ ID NO: 32486 - DNA, 993 bp, Artificial Sequence
  chemically treated genomic DNA (Homo sapiens) CpG-island No: 32486
ttcctaatctcgaaaataaataaataaaaaacccccgatacgccaacaccgacgcgcgatcccctacgaaataaaactaacattcattattaaaacaccaaaaatcgaaaacaacaaaaactataaataaccaatcgtcgccgccgccgccgccgccgtcgcgcgcgcgctcccgctccctccgcttatctacccccgacaaccgccataacgccgaaaaaacaaacgaacgcaaccgtctccgtcgtaaccgccgccgccaccgaaatcgccgtcgcctccgcctcccgcgcgacgtaaacgcctctactcactccccttcccgacaaaacgcgaaacgaacgaacgcgcgcacgccgaaacctttctactcgcgcgcgaaaaaacgaaaaaaactacgttaaaaaatcgtaaacgtaaaaaaaaaacgattaatactaaaacgaaacgaaaaaaacgaatacgcgcacgcgcacgaataaaaatacgcacgacgaatacgcaaaaactatcgaactctaactacgcgaaaaccgctaaactctaatcgcgaccttaatccgctaatcctcgcttaaatacccgcccttaacgacccgacgttaaattccgaaaaataaaaacttcaaactcgctccgtacgaatataaacgctaatatcacttaaaataattacgcaaaaacatcgcgacgaacactaacaaaaaaccgaaaaaaaacgaaaataaaaaaaaactacgataaaactcgaaaaaccgaaaaaaaccgcgctaaataaacctaaaaaaccgaatcgcaaaaaatatcgaataacacaaacctcgactcaatcgaaacgccaaacctcaaaatccgaacgaaaactactacgtcacaccaaacaacctaaaaacgcaactattaaacaaccgtaataacctctcgccacctcttacgcttaaacgatctacgattaacgcatcctaaaaactaatatcccgcacgaacgaaacg

SEQ ID NO: 32487 - DNA, 993 bp, Artificial Sequence
  chemically treated genomic DNA (Homo sapiens) CpG-island No: 32487
tttttgatttcgggagtgggtaagtgggaagttttcggtgcgttagtatcgacgcgcgattttttgcggagtggagttgatatttattattgaagtattaagggtcgagggtagtaagagttataagtaattagtcgtcgtcgtcgtcgtcgtcgtcgtcgcgcgcgcgttttcgtttttttcgtttatttgttttcggtagtcgttatgacgtcgagaaagtaagcgagcgtaatcgttttcgtcgtagtcgtcgtcgttatcgaggtcgtcgtcgttttcgtttttcgcgcgacgtaagcgtttttgtttattttttttttcgatagagcgcgaggcgggcgggcgcgcgtacgtcgaagtttttttgttcgcgcgcgggagggcgggagggattacgttgaagggtcgtgggcgtaggaaaaaagcgattggtgttggggcggggcggggggggcgagtgcgcgtacgcgtacgaatgggagtgcgtacggcggatgcgtagaggttgtcggattttgattgcgcggagatcgttggattttggtcgcggttttagttcgttgattttcgtttgggtgttcgtttttagcggttcggcgttgaatttcgggaagtgggagttttaggttcgtttcgtgcgggtatgggcgttaatgttatttgggatggttgcgtaaggatatcgcggcggatattgataaggaatcggggaggaacgggggtggggagagattgcgatgggattcgggaagtcgggaagggtcgcgttgaataagtttaaggggtcgggtcgtaaggagtgtcgggtagtataggtttcggtttagtcggagcgttaggttttagggttcgggcgggggttgttgcgttatattaggtagtttgggaacgtaattgttgggtaatcgtggtggtttttcgttattttttacgtttgggcgatttgcgattgacgtattttgggagttgatgtttcgtacgggcggggcg

SEQ ID NO: 32488 - DNA, 993 bp, Artificial Sequence
  chemically treated genomic DNA (Homo sapiens) CpG-island No: 32488
cgccccgcccgtacgaaacatcaactcccaaaatacgtcaatcgcaaatcgcccaaacgtaaaaaataacgaaaaaccaccacgattacccaacaattacgttcccaaactacctaatataacgcaacaacccccgcccgaaccctaaaacctaacgctccgactaaaccgaaacctatactacccgacactccttacgacccgaccccttaaacttattcaacgcgacccttcccgacttcccgaatcccatcgcaatctctccccacccccgttcctccccgattccttatcaatatccgccgcgatatccttacgcaaccatcccaaataacattaacgcccatacccgcacgaaacgaacctaaaactcccacttcccgaaattcaacgccgaaccgctaaaaacgaacacccaaacgaaaatcaacgaactaaaaccgcgaccaaaatccaacgatctccgcgcaatcaaaatccgacaacctctacgcatccgccgtacgcactcccattcgtacgcgtacgcgcactcgccccccccgccccgccccaacaccaatcgcttttttcctacgcccacgacccttcaacgtaatccctcccgccctcccgcgcgcgaacaaaaaaacttcgacgtacgcgcgcccgcccgcctcgcgctctatcgaaaaaaaaaataaacaaaaacgcttacgtcgcgcgaaaaacgaaaacgacgacgacctcgataacgacgacgactacgacgaaaacgattacgctcgcttactttctcgacgtcataacgactaccgaaaacaaataaacgaaaaaaacgaaaacgcgcgcgcgacgacgacgacgacgacgacgacgactaattacttataactcttactaccctcgacccttaatacttcaataataaatatcaactccactccgcaaaaaatcgcgcgtcgatactaacgcaccgaaaacttcccacttacccactcccgaaatcaaaaa

SEQ ID NO: 32489 - DNA, 1335 bp, Artificial Sequence
  chemically treated genomic DNA (Homo sapiens) CpG-island No: 32489
  unsure (1124)
ggacggttatacgttggcgcggttgtggggggcgttgtcgtcggatattcggttaagttcgtatttttatttggcgattaatagcgtataggggtcgtggtggatattggggtggtttgagcgggtgtcgggtgttgaggacgtattgttagcgtcgttgtcgtcgtatcgggtgtttatcgggatggcggatcgtttcgggcggacgttgacgtatcggcgtgaggtcgtcggtgatttggtcggggaaattatcggcgtgacggacggtgtcgggcgggagtttcgtttggtgttgattacgtaggcgtagcgtgcggaagaggttcgtattttttcgttatttttttttgatagttttcgtttttttttagttttagcgtttttcgatatattgttcggtatcgaatacggtttcgataggggtattcgtttttcggcggtgtggttgatgtacgattcggtatattcggagagtttgttcgttgcgttattggtgcggtatacgtatacggaagtcggtgaattgttggcggtatatgatcgtagtaatacgtaggtgcgcgtttttacgtatgacgcgtagtattcgggtcggatggtggcgtatcgttacgcgggaaggtcggagatgcgttatcgttacgacgatacggggcgggtggtggagtaattgaattcggtagggttaagttatcgttatttttatgagtaggatcgtattatcgttatcgatagtttgaatcggcgtgaggtgttgtatatagaaggcggggtcgggttgaaacgggtggtgaaaaaagaattggcggacggtagcgttacgcgtagcgggtatacgcggtaggaaggtttacggcgtagacggacgcggcgggacggaggatagagtacggtttgaatgtggtgttcggcgatattacggatattattatatcggacgggcgggagacgaaattttattataacgacgggaattagttgacggcggtggtgttttcggacgggttggagagtcgtcgggaatatgatgaatcgggtaggttggtatcggagatatcgcgtagcggggagatagtacgttatcgttacgatgacgcgtatagtgagttatcggcgacgantacggatgcgacgggtagtattcggtagatatttggagtcgttacgggtagttgttggcgtttatcgattgttcgggttattagattcggttatgaatacgatcgtttcgggtagattaacggcggtttatcgcggaggaaagtattagttttatcggcgttttgatatcggtggcggttaatttcgtgaagacgtacggggcgtaaacgt

SEQ ID NO: 32490 - DNA, 1335 bp, Artificial Sequence
  chemically treated genomic DNA (Homo sapiens) CpG-island No: 32490
  unsure (212)
acgtttacgccccgtacgtcttcacgaaattaaccgccaccgatatcaaaacgccgataaaactaatactttcctccgcgataaaccgccgttaatctacccgaaacgatcgtattcataaccgaatctaataacccgaacaatcgataaacgccaacaactacccgtaacgactccaaatatctaccgaatactacccgtcgcatccgtantcgtcgccgataactcactatacgcgtcatcgtaacgataacgtactatctccccgctacgcgatatctccgataccaacctacccgattcatcatattcccgacgactctccaacccgtccgaaaacaccaccgccgtcaactaattcccgtcgttataataaaatttcgtctcccgcccgtccgatataataatatccgtaatatcgccgaacaccacattcaaaccgtactctatcctccgtcccgccgcgtccgtctacgccgtaaaccttcctaccgcgtatacccgctacgcgtaacgctaccgtccgccaattcttttttcaccacccgtttcaacccgaccccgccttctatatacaacacctcacgccgattcaaactatcgataacgataatacgatcctactcataaaaataacgataacttaaccctaccgaattcaattactccaccacccgccccgtatcgtcgtaacgataacgcatctccgaccttcccgcgtaacgatacgccaccatccgacccgaatactacgcgtcatacgtaaaaacgcgcacctacgtattactacgatcatataccgccaacaattcaccgacttccgtatacgtataccgcaccaataacgcaacgaacaaactctccgaatataccgaatcgtacatcaaccacaccgccgaaaaacgaatacccctatcgaaaccgtattcgataccgaacaatatatcgaaaaacgctaaaactaaaaaaaaacgaaaactatcaaaaaaaaataacgaaaaaatacgaacctcttccgcacgctacgcctacgtaatcaacaccaaacgaaactcccgcccgacaccgtccgtcacgccgataatttccccgaccaaatcaccgacgacctcacgccgatacgtcaacgtccgcccgaaacgatccgccatcccgataaacacccgatacgacgacaacgacgctaacaatacgtcctcaacacccgacacccgctcaaaccaccccaatatccaccacgacccctatacgctattaatcgccaaataaaaatacgaacttaaccgaatatccgacgacaacgccccccacaaccgcgccaacgtataaccgtcc

SEQ ID NO: 32491 - DNA, 1335 bp, Artificial Sequence
  chemically treated genomic DNA (Homo sapiens) CpG-island No: 32491
  unsure (212)
gcgtttacgtttcgtgcgtttttacgaggttaatcgttatcggtgttaaagcgtcggtaaagttgatgttttttttcgcggtggatcgtcgttaatttgttcgaagcggtcgtatttataatcgggtttggtagttcgagtagtcggtgaacgttagtaattgttcgtagcggttttaggtatttgtcgggtgttgttcgtcgtattcgtgntcgtcgtcggtaatttattgtgcgcgttatcgtagcggtagcgtattgttttttcgttgcgcgatgttttcgatattagtttgttcggtttattatattttcggcggttttttagttcgttcggggatattatcgtcgttagttggttttcgtcgttatagtaaaatttcgtttttcgttcgttcggtgtggtgatgttcgtgatatcgtcggatattatatttagatcgtattttgtttttcgtttcgtcgcgttcgtttgcgtcgtgagtttttttgtcgcgtatattcgttgcgcgtgacgttgtcgttcgttagttttttttttattattcgttttagttcggtttcgttttttgtatgtagtattttacgtcggtttaggttgtcggtgacggtgatgcggttttgtttataaagatagcggtagtttaattttgtcgggtttagttgttttattattcgtttcgtatcgtcgtagcggtagcgtattttcggttttttcgcgtaacggtgcgttattattcggttcgggtgttgcgcgttatacgtgaaagcgcgtatttgcgtattgttgcggttatatatcgttagtagtttatcggttttcgtatacgtgtatcgtattagtggcgtagcgggtaggtttttcgggtatgtcgggtcgtgtattagttatatcgtcgaaaggcggatatttttgtcggggtcgtattcggtatcgggtagtgtgtcggggaacgttgaggttgagagagggcgggaattgttagaagaagatagcgaagaggtgcgggtttttttcgtacgttgcgtttgcgtggttagtattagacggaattttcgttcggtatcgttcgttacgtcggtgattttttcggttaggttatcggcggttttacgtcggtacgttagcgttcgttcgaagcggttcgttatttcggtaagtattcggtacggcggtagcggcgttggtagtacgtttttagtattcggtattcgtttagattattttagtatttattacggtttttgtgcgttgttggtcgttaggtaaagatgcgggtttaatcggatattcggcggtagcgttttttatagtcgcgttagcgtatggtcgttt

SEQ ID NO: 32492 - DNA, 1335 bp, Artificial Sequence
  chemically treated genomic DNA (Homo sapiens) CpG-island No: 32492
  unsure (1124)
aaacgaccatacgctaacgcgactataaaaaacgctaccgccgaatatccgattaaacccgcatctttacctaacgaccaacaacgcacaaaaaccgtaataaatactaaaataatctaaacgaataccgaatactaaaaacgtactaccaacgccgctaccgccgtaccgaatacttaccgaaataacgaaccgcttcgaacgaacgctaacgtaccgacgtaaaaccgccgataacctaaccgaaaaaatcaccgacgtaacgaacgataccgaacgaaaattccgtctaatactaaccacgcaaacgcaacgtacgaaaaaaacccgcacctcttcgctatcttcttctaacaattcccgccctctctcaacctcaacgttccccgacacactacccgataccgaatacgaccccgacaaaaatatccgcctttcgacgatataactaatacacgacccgacatacccgaaaaacctacccgctacgccactaatacgatacacgtatacgaaaaccgataaactactaacgatatataaccgcaacaatacgcaaatacgcgctttcacgtataacgcgcaacacccgaaccgaataataacgcaccgttacgcgaaaaaaccgaaaatacgctaccgctacgacgatacgaaacgaataataaaacaactaaacccgacaaaattaaactaccgctatctttataaacaaaaccgcatcaccgtcaccgacaacctaaaccgacgtaaaatactacatacaaaaaacgaaaccgaactaaaacgaataataaaaaaaaaactaacgaacgacaacgtcacgcgcaacgaatatacgcgacaaaaaaactcacgacgcaaacgaacgcgacgaaacgaaaaacaaaatacgatctaaatataatatccgacgatatcacgaacatcaccacaccgaacgaacgaaaaacgaaattttactataacgacgaaaaccaactaacgacgataatatccccgaacgaactaaaaaaccgccgaaaatataataaaccgaacaaactaatatcgaaaacatcgcgcaacgaaaaaacaatacgctaccgctacgataacgcgcacaataaattaccgacgacgancacgaatacgacgaacaacacccgacaaatacctaaaaccgctacgaacaattactaacgttcaccgactactcgaactaccaaacccgattataaatacgaccgcttcgaacaaattaacgacgatccaccgcgaaaaaaaacatcaactttaccgacgctttaacaccgataacgattaacctcgtaaaaacgcacgaaacgtaaacgc

SEQ ID NO: 32493 - DNA, 610 bp, Artificial Sequence
  chemically treated genomic DNA (Homo sapiens) CpG-island No: 32493
tggcggtaggaattattattagcgcgggaattagcgttagatttagtaacgtttttttataatcgtttaaacggtaattgacgtagtacgcgagaacgttaattaagttgtcgataattagcgataacgtattatttgcggtatcgcgaaagttttttattagcgttagtaataggttgttttaggcgatttttatttgtattagcgttattaaacgtattagtttttgatagtcggtattattaaataatttttggttgattggcgtagttgttagtataaaaattagcgttattagcgtagagaaattaagtattatcgttgatgaagtgtcgattacgcggcgtagttgttgcggattattatggtattgggtaacgtatttggttatatcgttaaagatgttagtttcggtaagtacgtcgagtacggtaattaattggcggaaatttgtcgttagtttaagtttcgtcggattaaatgatatcgatagtaatttatcgaatagtaattcggtattaattttggatagtgtattgggtcgtcggttttattaaggacgttttttgtttaacgataatattagggaaaaagtagtttaaataaagtt

SEQ ID NO: 32494 - DNA, 610 bp, Artificial Sequence
  chemically treated genomic DNA (Homo sapiens) CpG-island No: 32494
aactttatttaaactactttttccctaatattatcgttaaacaaaaaacgtccttaataaaaccgacgacccaatacactatccaaaattaataccgaattactattcgataaattactatcgatatcatttaatccgacgaaacttaaactaacgacaaatttccgccaattaattaccgtactcgacgtacttaccgaaactaacatctttaacgatataaccaaatacgttacccaataccataataatccgcaacaactacgccgcgtaatcgacacttcatcaacgataatacttaatttctctacgctaataacgctaatttttatactaacaactacgccaatcaaccaaaaattatttaataataccgactatcaaaaactaatacgtttaataacgctaatacaaataaaaatcgcctaaaacaacctattactaacgctaataaaaaactttcgcgataccgcaaataatacgttatcgctaattatcgacaacttaattaacgttctcgcgtactacgtcaattaccgtttaaacgattataaaaaaacgttactaaatctaacgctaattcccgcgctaataataattcctaccgcca

SEQ ID NO: 32495 - DNA, 610 bp, Artificial Sequence
  chemically treated genomic DNA (Homo sapiens) CpG-island No: 32495
aattttgtttgaattattttttttttgatattgtcgttgggtaaaaagcgtttttggtgggatcggcggtttagtatattgtttaagattggtgtcgggttattgttcggtaagttgttgtcggtgttatttggttcggcggggtttgggttggcggtaaattttcgttagttgattatcgtgttcggcgtgtttgtcggggttggtatttttaacggtgtaattaaatacgttgtttagtattatgataattcgtaatagttgcgtcgcgtggtcggtattttattagcgatggtatttggtttttttacgttgatggcgttggtttttgtgttggtagttgcgttaattagttagggattgtttggtaatatcgattattaggggttggtgcgtttagtggcgttggtgtaaatggggatcgtttggggtaatttgttattggcgttgatgaaaggttttcgcgatgtcgtaggtaatgcgttatcgttgattgtcggtagtttgattggcgttttcgcgtattacgttagttatcgtttgggcggttatgaaggggcgttgttgggtttggcgttgattttcgcgttggtggtaatttttgtcgtta

SEQ ID NO: 32496 - DNA, 610 bp, Artificial Sequence
  chemically treated genomic DNA (Homo sapiens) CpG-island No: 32496
taacgacaaaaattaccaccaacgcgaaaatcaacgccaaacccaacaacgccccttcataaccgcccaaacgataactaacgtaatacgcgaaaacgccaatcaaactaccgacaatcaacgataacgcattacctacgacatcgcgaaaacctttcatcaacgccaataacaaattaccccaaacgatccccatttacaccaacgccactaaacgcaccaacccctaataatcgatattaccaaacaatccctaactaattaacgcaactaccaacacaaaaaccaacgccatcaacgtaaaaaaaccaaataccatcgctaataaaataccgaccacgcgacgcaactattacgaattatcataatactaaacaacgtatttaattacaccgttaaaaataccaaccccgacaaacacgccgaacacgataatcaactaacgaaaatttaccgccaacccaaaccccgccgaaccaaataacaccgacaacaacttaccgaacaataacccgacaccaatcttaaacaatatactaaaccgccgatcccaccaaaaacgctttttacccaacgacaatatcaaaaaaaaaataattcaaacaaaatt

SEQ ID NO: 32497 - DNA, 816 bp, Artificial Sequence
  chemically treated genomic DNA (Homo sapiens) CpG-island No: 32497
cggttggggtggttggtggttttgggattcggtagaaaacgtttcgtttatgtcgtggttggtggggattgcgttgatgtatttattggcggttattgaataacgcgttagttttaaagcgtggatattattgttggtaattagtgttttttcgttgtgtttgttggggatttttttcgtgcgtttcggcgtgttggtatcggtatacgcgtttgcgtttgattcggcgcgcggtatgtttattttcgtttttatggtgttggtgattggcggttcgttgttgttgtttgtcgcgcgtggatataaagttcgtttacgcgtaaataatgcgttgtggtcgcgggaatttttgttgttagcgaataatgttttgttggtcgttgcgatgttggtggtgttgttggggacgttgttgtcgttggtgtataagtaattgggattgggtagtatttcgattggcgaatcgttttttaatattatgtttatttggttgatggtgtcgtttgcgttattgtttggtgtcggttttttggtgcgttgggggcgggatcgttcgcgtaagattcgtaatttattgattatcgtttttatttttacgttggtgttgtcgttgttgttgtcgtggttgttcgaaagtaaagttgtggcgatgacggtgttcggtttggtaatggtttgttggattgcggtgttggtaattgcggaagttgcgttacgtattttacgcggtacgaaaattatttttagttattgggggatggtggcggtttattttgggttggtagtgataattgttggtattgtttttagttagaa

SEQ ID NO: 32498 - DNA, 816 bp, Artificial Sequence
  chemically treated genomic DNA (Homo sapiens) CpG-island No: 32498
ttctaactaaaaacaataccaacaattatcactaccaacccaaaataaaccgccaccatcccccaataactaaaaataattttcgtaccgcgtaaaatacgtaacgcaacttccgcaattaccaacaccgcaatccaacaaaccattaccaaaccgaacaccgtcatcgccacaactttactttcgaacaaccacgacaacaacaacgacaacaccaacgtaaaaataaaaacgataatcaataaattacgaatcttacgcgaacgatcccgcccccaacgcaccaaaaaaccgacaccaaacaataacgcaaacgacaccatcaaccaaataaacataatattaaaaaacgattcgccaatcgaaatactacccaatcccaattacttatacaccaacgacaacaacgtccccaacaacaccaccaacatcgcaacgaccaacaaaacattattcgctaacaacaaaaattcccgcgaccacaacgcattatttacgcgtaaacgaactttatatccacgcgcgacaaacaacaacaacgaaccgccaatcaccaacaccataaaaacgaaaataaacataccgcgcgccgaatcaaacgcaaacgcgtataccgataccaacacgccgaaacgcacgaaaaaaatccccaacaaacacaacgaaaaaacactaattaccaacaataatatccacgctttaaaactaacgcgttattcaataaccgccaataaatacatcaacgcaatccccaccaaccacgacataaacgaaacgttttctaccgaatcccaaaaccaccaaccaccccaaccg

SEQ ID NO: 32499 - DNA, 816 bp, Artificial Sequence
  chemically treated genomic DNA (Homo sapiens) CpG-island No: 32499
ttttggttaaaggtaatgttaataattgttattgttagtttaaggtgagtcgttattattttttaataattgaaggtggttttcgtgtcgcgtgaaatacgtagcgtagttttcgtaattgttagtatcgtaatttagtaggttattgttaggtcgagtatcgttatcgttataattttgttttcgaatagttacggtaatagtagcgatagtattagcgtagagatgaaggcgataattaataaattgcggattttacgcgggcgatttcgtttttagcgtattagaggatcgatattaagtagtagcgtaaacggtattattagttaggtaaatatggtgttgaagaacggttcgttaatcgaaatattgtttagttttagttgtttatgtattaacggtagtagcgtttttagtaatattattagtatcgtagcgattagtaaaatattgttcgttaatagtaaagattttcgcgattatagcgtattgtttacgcgtgagcgaattttgtgtttacgcgcggtaaatagtagtagcgaatcgttaattattagtattataaaggcgaggataaatatatcgcgcgtcggattagacgtaaacgcgtgtatcgatattagtacgtcggaacgtacgaggaaagtttttaatagatataacgagaaggtattgattgttagtagtaatgtttacgttttgaagttggcgcgttgtttagtgatcgttagtgagtgtattagcgtagtttttattagttacggtataaacgaggcgttttttatcggattttagaattattagttattttagtcg

SEQ ID NO: 32500 - DNA, 816 bp, Artificial Sequence
  chemically treated genomic DNA (Homo sapiens) CpG-island No: 32500
cgactaaaataactaataattctaaaatccgataaaaaacgcctcgtttataccgtaactaataaaaactacgctaatacactcactaacgatcactaaacaacgcgccaacttcaaaacgtaaacattactactaacaatcaataccttctcgttatatctattaaaaactttcctcgtacgttccgacgtactaatatcgatacacgcgtttacgtctaatccgacgcgcgatatatttatcctcgcctttataatactaataattaacgattcgctactactatttaccgcgcgtaaacacaaaattcgctcacgcgtaaacaatacgctataatcgcgaaaatctttactattaacgaacaatattttactaatcgctacgatactaataatattactaaaaacgctactaccgttaatacataaacaactaaaactaaacaatatttcgattaacgaaccgttcttcaacaccatatttacctaactaataataccgtttacgctactacttaatatcgatcctctaatacgctaaaaacgaaatcgcccgcgtaaaatccgcaatttattaattatcgccttcatctctacgctaatactatcgctactattaccgtaactattcgaaaacaaaattataacgataacgatactcgacctaacaataacctactaaattacgatactaacaattacgaaaactacgctacgtatttcacgcgacacgaaaaccaccttcaattattaaaaaataataacgactcaccttaaactaacaataacaattattaacattacctttaaccaaaa

SEQ ID NO: 32501 - DNA, 633 bp, Artificial Sequence
  chemically treated genomic DNA (Homo sapiens) CpG-island No: 32501
tattcgttcgtgacgtcgcgcgtttcggcggcggtgtggggcgagcgtgaagtgcgcgatatgtacggtttgatttcggttggtttgtcggatgaacgtcgtttggtgttgtcggatgattggtcggatgaattttattcgttgcgtaaagatagtatggattatcgttagcgttcggtatcgattatcgatgttgaaatttacgagtttattaacgaattgggcgataagaaaaataacgtcgtgtcgattggttcgttgtacgttatttttgatgaatcgggttattttcgtttgttcgtcgatggcgaaaatattatcgacgtcgattatcgtttgtttacgtttattcgcggttggaaaattggcggaattcggatgggtattacgaagtgattttttcgtttgacgtgttgtcggatttgcggttcggtatagatcgttatatagatggggaaaagcgagggaatcgggtcgtatcggttatgattaggtatcgtagaggaataattggtatttaggataagggcggtatataaacgcgcgtatagggagaataaataggggaaaaagacgcggatttagggaataattggatagtaggatcgtataaatcgttacgacgtagggtgt

SEQ ID NO: 32502 - DNA, 633 bp, Artificial Sequence
  chemically treated genomic DNA (Homo sapiens) CpG-island No: 32502
acaccctacgtcgtaacgatttatacgatcctactatccaattattccctaaatccgcgtctttttcccctatttattctccctatacgcgcgtttatataccgcccttatcctaaataccaattattcctctacgatacctaatcataaccgatacgacccgattccctcgcttttccccatctatataacgatctataccgaaccgcaaatccgacaacacgtcaaacgaaaaaatcacttcgtaatacccatccgaattccgccaattttccaaccgcgaataaacgtaaacaaacgataatcgacgtcgataatattttcgccatcgacgaacaaacgaaaataacccgattcatcaaaaataacgtacaacgaaccaatcgacacgacgttatttttcttatcgcccaattcgttaataaactcgtaaatttcaacatcgataatcgataccgaacgctaacgataatccatactatctttacgcaacgaataaaattcatccgaccaatcatccgacaacaccaaacgacgttcatccgacaaaccaaccgaaatcaaaccgtacatatcgcgcacttcacgctcgccccacaccgccgccgaaacgcgcgacgtcacgaacgaata

SEQ ID NO: 32503 - DNA, 633 bp, Artificial Sequence
  chemically treated genomic DNA (Homo sapiens) CpG-island No: 32503
atattttacgtcgtggcggtttgtgcggttttattgtttagttgttttttggattcgcgttttttttttttgtttgttttttttgtgcgcgcgtttgtatgtcgtttttgttttgagtgttagttgtttttttgcgatgtttggttatagtcgatgcggttcggttttttcgtttttttttatttgtatagcggtttgtgtcgagtcgtagattcggtaatacgttagacgaggaagttatttcgtaatatttattcgggtttcgttagttttttagtcgcggatggacgtagatagacggtagtcggcgtcgataatgttttcgttatcgacgaatagacggaagtggttcggtttattagaagtgacgtgtagcggattaatcggtacgacgttgttttttttgtcgtttagttcgttgatgaattcgtaggttttagtatcggtggtcggtgtcggacgttgacgataatttatgttgtttttacgtagcggataaagtttattcggttagttattcggtagtattagacgacgtttattcggtagattaatcggaattaaatcgtatatatcgcgtattttacgttcgttttatatcgtcgtcggaacgcgcggcgttacggacggata

SEQ ID NO: 32504 - DNA, 633 bp, Artificial Sequence
  chemically treated genomic DNA (Homo sapiens) CpG-island No: 32504
tatccgtccgtaacgccgcgcgttccgacgacgatataaaacgaacgtaaaatacgcgatatatacgatttaattccgattaatctaccgaataaacgtcgtctaatactaccgaataactaaccgaataaactttatccgctacgtaaaaacaacataaattatcgtcaacgtccgacaccgaccaccgatactaaaacctacgaattcatcaacgaactaaacgacaaaaaaaacaacgtcgtaccgattaatccgctacacgtcacttctaataaaccgaaccacttccgtctattcgtcgataacgaaaacattatcgacgccgactaccgtctatctacgtccatccgcgactaaaaaactaacgaaacccgaataaatattacgaaataacttcctcgtctaacgtattaccgaatctacgactcgacacaaaccgctatacaaataaaaaaaaacgaaaaaaccgaaccgcatcgactataaccaaacatcgcaaaaaaacaactaacactcaaaacaaaaacgacatacaaacgcgcgcacaaaaaaaacaaacaaaaaaaaaaaacgcgaatccaaaaaacaactaaacaataaaaccgcacaaaccgccacgacgtaaaatat

SEQ ID NO: 32505 - DNA, 542 bp, Artificial Sequence
  chemically treated genomic DNA (Homo sapiens) CpG-island No: 32505
aacgttttgttttttacggaatagattcggtaaaatgttttcgtaagagatatttattgagtttttagtatcgtaaatggtgaaggttatttttagcgaattgggatcgcgttgtatattattcggtattattatttcgttaacgcgtagacgttgatcgattttcggtatttgttgagttttacgtttgtcgtagagaatttttttcggcgtataaaagagatcgatattcgagcgtagcgtatatagtattagatcgatagttagcgttagttttgttaatacggtataggtaatttataagcggtttttacggcgaatatttatgtagttttttgttgttgcgtagtacgtaaacgcgttttacgcgttcgttgttgcgttacgttacgtagaattgcgcgatgttgtattatcgagtgtacgattaaaattattagcggaataacggttattattatcgttagttagataaaaaaggcgtaatcgtttattgcgaaaaatttattttaggaagtaaatgtaggggttatttacggttt

SEQ ID NO: 32506 - DNA, 542 bp, Artificial Sequence
  chemically treated genomic DNA (Homo sapiens) CpG-island No: 32506
aaaccgtaaataacccctacatttacttcctaaaataaatttttcgcaataaacgattacgccttttttatctaactaacgataataataaccgttattccgctaataattttaatcgtacactcgataatacaacatcgcgcaattctacgtaacgtaacgcaacaacgaacgcgtaaaacgcgtttacgtactacgcaacaacaaaaaactacataaatattcgccgtaaaaaccgcttataaattacctataccgtattaacaaaactaacgctaactatcgatctaatactatatacgctacgctcgaatatcgatctcttttatacgccgaaaaaaattctctacgacaaacgtaaaactcaacaaataccgaaaatcgatcaacgtctacgcgttaacgaaataataataccgaataatatacaacgcgatcccaattcgctaaaaataaccttcaccatttacgatactaaaaactcaataaatatctcttacgaaaacattttaccgaatctattccgtaaaaaacaaaacgtt

SEQ ID NO: 32507 - DNA, 542 bp, Artificial Sequence
  chemically treated genomic DNA (Homo sapiens) CpG-island No: 32507
aggtcgtaaatgatttttgtatttgttttttggaatgaatttttcgtaatgggcggttacgttttttttgtttggttggcggtggtgatgatcgttatttcgttggtggttttggtcgtgtattcggtgatgtaatatcgcgtaattttgcgtggcgtggcgtaatagcgggcgcgtgaggcgcgtttacgtgttgcgtaatagtaggaggttgtatgaatattcgtcgtaaaaatcgtttgtggattgtttgtgtcgtgttggtagggttggcgttgattatcggtttggtgttatatgcgttgcgttcgaatatcgattttttttatacgtcgggggaaattttttacggtaagcgtgaaatttagtaaatgtcggaagtcggttagcgtttgcgcgttggcgggatggtgatgtcgggtagtgtgtagcgcgattttaattcgttgaaagtgatttttattatttacgatgttgaaggtttagtggatgttttttacgaaggtattttgtcggatttgtttcgtgaagggtagggcgtt

SEQ ID NO: 32508 - DNA, 542 bp, Artificial Sequence
  chemically treated genomic DNA (Homo sapiens) CpG-island No: 32508
aacgccctacccttcacgaaacaaatccgacaaaataccttcgtaaaaaacatccactaaaccttcaacatcgtaaataataaaaatcactttcaacgaattaaaatcgcgctacacactacccgacatcaccatcccgccaacgcgcaaacgctaaccgacttccgacatttactaaatttcacgcttaccgtaaaaaatttcccccgacgtataaaaaaaatcgatattcgaacgcaacgcatataacaccaaaccgataatcaacgccaaccctaccaacacgacacaaacaatccacaaacgatttttacgacgaatattcatacaacctcctactattacgcaacacgtaaacgcgcctcacgcgcccgctattacgccacgccacgcaaaattacgcgatattacatcaccgaatacacgaccaaaaccaccaacgaaataacgatcatcaccaccgccaaccaaacaaaaaaaacgtaaccgcccattacgaaaaattcattccaaaaaacaaatacaaaaatcatttacgacct

SEQ ID NO: 32509 - DNA, 1241 bp, Artificial Sequence
  chemically treated genomic DNA (Homo sapiens) CpG-island No: 32509
attttacggatttatcgtttttttttatttagttcggtcgtttcgcgggtggaggaggacgcgggacgttcgggtttttaggcgttgtcgttgcgggttttatggcgtacgtaggtgtttgcggaaaatagcggcgatatcgcggtgagacggcggggttcgcgggagaggagtcgcgggggattcgtttttagttgttcggattcgcggttttcgcgttggtgggagcgttcgggatttatttgttcggttatttgcgttaatagtatttatagcgtcgttaagtttcgttattcgcgcgcgcggggttttatttaggagcgtttcgaggggttaggggttatcggagggttttcggtcggtagcgtgcgagcgggtagggaggattcgatttaggtagagcgcgggaggattttttatagcgatttcgtcgtcgcgtcggggttattattgaagtttcgtgcggcgcggggggcggagtggtagtcgcggcggcgggggcggcgggagcggtgggagagcgcggggcgggtaggggagagaggaggggaggaggtgagggcgggggggttagaggatcgaggaggggagagtgtagggataaagagtagaggggaggaggcgaggttagcggggcgttgaggcggaggcgagcggggagtagagggaaggcgggagatagcgggtagcgttagaggaggaggacgcgggaagatggagttgtttacggtttgtagttcgtgtttttttgttcgcgcggggattatatagttggagaggttgtcgggtatcggcgcgggcgatgtttagtatggattttcggtcggtgcgcgtttttgttttgttttggggttggggattcggcgggattttagttattgtagtggtttcgcgggtttttattttcgggtcgtatcggcgtcgttagaggtcgggatatttgtagttcgcggagtgcggtttggtcgcgtttttgtgttcgggtatagttgtggggatattgggtgcggaaaatcgggcgttaggacgtgggagagtcgcggatttgtttttaaaggcgcgtgtttcgttttggagtttgcggagcgatcggagacggggaggttgaggaggaaatttttttttcgcgttatttgtttcgagatgtggcggcgtttttggtttcgcggttacggttatttttaattggttaggtcgcggaggtcggtgattggttgttgggtgtaatttttagggaggtt

SEQ ID NO: 32510 - DNA, 1241 bp, Artificial Sequence
  chemically treated genomic DNA (Homo sapiens) CpG-island No: 32510
aacctccctaaaaattacacccaacaaccaatcaccgacctccgcgacctaaccaattaaaaataaccgtaaccgcgaaaccaaaaacgccgccacatctcgaaacaaataacgcgaaaaaaaaatttcctcctcaacctccccgtctccgatcgctccgcaaactccaaaacgaaacacgcgcctttaaaaacaaatccgcgactctcccacgtcctaacgcccgattttccgcacccaatatccccacaactatacccgaacacaaaaacgcgaccaaaccgcactccgcgaactacaaatatcccgacctctaacgacgccgatacgacccgaaaataaaaacccgcgaaaccactacaataactaaaatcccgccgaatccccaaccccaaaacaaaacaaaaacgcgcaccgaccgaaaatccatactaaacatcgcccgcgccgatacccgacaacctctccaactatataatccccgcgcgaacaaaaaaacacgaactacaaaccgtaaacaactccatcttcccgcgtcctcctcctctaacgctacccgctatctcccgccttccctctactccccgctcgcctccgcctcaacgccccgctaacctcgcctcctcccctctactctttatccctacactctcccctcctcgatcctctaacccccccgccctcacctcctcccctcctctctcccctacccgccccgcgctctcccaccgctcccgccgcccccgccgccgcgactaccactccgccccccgcgccgcacgaaacttcaataataaccccgacgcgacgacgaaatcgctataaaaaatcctcccgcgctctacctaaatcgaatcctccctacccgctcgcacgctaccgaccgaaaaccctccgataacccctaacccctcgaaacgctcctaaataaaaccccgcgcgcgcgaataacgaaacttaacgacgctataaatactattaacgcaaataaccgaacaaataaatcccgaacgctcccaccaacgcgaaaaccgcgaatccgaacaactaaaaacgaatcccccgcgactcctctcccgcgaaccccgccgtctcaccgcgatatcgccgctattttccgcaaacacctacgtacgccataaaacccgcaacgacaacgcctaaaaacccgaacgtcccgcgtcctcctccacccgcgaaacgaccgaactaaataaaaaaaaacgataaatccgtaaaat

SEQ ID NO: 32511 - DNA, 1241 bp, Artificial Sequence
  chemically treated genomic DNA (Homo sapiens) CpG-island No: 32511
gatttttttagggattgtatttagtagttagttatcggttttcgcggtttggttagttgagggtggtcgtgatcgcggggttaggagcgtcgttatatttcggggtaaatggcgcgggggaagagttttttttttagttttttcgttttcgatcgtttcgtaaattttagagcgaggtacgcgtttttaaaggtaggttcgcggtttttttacgttttggcgttcggtttttcgtatttagtgtttttatagttgtgttcgggtatagaggcgcggttagatcgtatttcgcgggttgtaggtgtttcggtttttggcggcgtcggtgcggttcggaggtgggagttcgcggagttattgtagtagttggagtttcgtcgagtttttagttttaaggtagggtaggagcgcgtatcggtcggaggtttatgttgagtatcgttcgcgtcggtgttcggtagtttttttaattgtgtggttttcgcgcgggtagagaggtacggattgtaggtcgtgggtagttttattttttcgcgttttttttttttggcgttgttcgttgtttttcgttttttttttgtttttcgttcgttttcgttttagcgtttcgttgatttcgtttttttttttttgttttttgtttttgtattttttttttttcggttttttgattttttcgtttttatttttttttttttttttttttttgttcgtttcgcgtttttttatcgttttcgtcgttttcgtcgtcgcggttgttatttcgtttttcgcgtcgtacggagttttagtaataatttcggcgcggcggcggagtcgttgtggggaattttttcgcgttttgtttgggtcgggttttttttgttcgttcgtacgttgtcggtcggggatttttcggtggtttttagtttttcggagcgtttttggatgaagtttcgcgcgcgcggatggcggggtttggcggcgttgtggatgttgttggcgtaggtggtcgagtaggtgagtttcgggcgtttttattagcgcggaaatcgcgggttcggatagttggaggcgagtttttcgcggtttttttttcgcggatttcgtcgttttatcgcgatgtcgtcgttgtttttcgtaggtatttgcgtgcgttatgggattcgtagcggtagcgtttgggagttcgagcgtttcgcgtttttttttattcgcggagcggtcgggttggatggaaaagggcggtaagttcgtgaggt

SEQ ID NO: 32512 - DNA, 1241 bp, Artificial Sequence
  chemically treated genomic DNA (Homo sapiens) CpG-island No: 32512
acctcacgaacttaccgcccttttccatccaacccgaccgctccgcgaataaaaaaaaacgcgaaacgctcgaactcccaaacgctaccgctacgaatcccataacgcacgcaaatacctacgaaaaacaacgacgacatcgcgataaaacgacgaaatccgcgaaaaaaaaaccgcgaaaaactcgcctccaactatccgaacccgcgatttccgcgctaataaaaacgcccgaaactcacctactcgaccacctacgccaacaacatccacaacgccgccaaaccccgccatccgcgcgcgcgaaacttcatccaaaaacgctccgaaaaactaaaaaccaccgaaaaatccccgaccgacaacgtacgaacgaacaaaaaaaacccgacccaaacaaaacgcgaaaaaattccccacaacgactccgccgccgcgccgaaattattactaaaactccgtacgacgcgaaaaacgaaataacaaccgcgacgacgaaaacgacgaaaacgataaaaaaacgcgaaacgaacaaaaaaaaaaaaaaaaaaaaaaataaaaacgaaaaaatcaaaaaaccgaaaaaaaaaaaatacaaaaacaaaaaacaaaaaaaaaaaaacgaaatcaacgaaacgctaaaacgaaaacgaacgaaaaacaaaaaaaaaacgaaaaacaacgaacaacgccaaaaaaaaaaaacgcgaaaaaataaaactacccacgacctacaatccgtacctctctacccgcgcgaaaaccacacaattaaaaaaactaccgaacaccgacgcgaacgatactcaacataaacctccgaccgatacgcgctcctaccctaccttaaaactaaaaactcgacgaaactccaactactacaataactccgcgaactcccacctccgaaccgcaccgacgccgccaaaaaccgaaacacctacaacccgcgaaatacgatctaaccgcgcctctatacccgaacacaactataaaaacactaaatacgaaaaaccgaacgccaaaacgtaaaaaaaccgcgaacctacctttaaaaacgcgtacctcgctctaaaatttacgaaacgatcgaaaacgaaaaaactaaaaaaaaaactcttcccccgcgccatttaccccgaaatataacgacgctcctaaccccgcgatcacgaccaccctcaactaaccaaaccgcgaaaaccgataactaactactaaatacaatccctaaaaaaatc

SEQ ID NO: 32513 - DNA, 953 bp, Artificial Sequence
  chemically treated genomic DNA (Homo sapiens) CpG-island No: 32513
ggcggtttaggaggcggttttgtcgagggattcggagcgggagtcgaggttggagttggagtcggcgtcgatattgcgttttcggtaattttagtgtttattgaggtcgtaggagatgaagtagtttgggtcgagttcgaggaggtcgcggttattttttcgtcgtcgggttcggtcgcgtcgtttttagcgtcggttttgtcgtttttttttttttttttttttattagtatcgcggtgagaggcggtttcgttttttgcgcggcgggttcggcggtttcggtagttatcggcgcgttgtcgttgttttcgtcgtcgtttttagtttcgtcgtcgtttttgtttttcgttatgtttttttttttgaattcgtcggatcgtttcgcgtcgttcgtcgttcgcgtcgtcgtcgtcgtcgtttttagttttagtcgtagtcgtagtaagagcggtagtcgagagttagcgagagagcgaattaacgagagcgcgcgcgtacgcggcgttttcgttttcgcgtcgcgcgtttgaaggagggcggttgcggtacgcgtacgtacgtacggacgttttttcgagggaggcgggaattcggttcgcgggcgcggagcggtttcggattttcgaagttagttttttgcgttagtgtcgcggttttttaattcgaagggagattttttttttaaagttagaggtcgttgacgttgggtagtttttggttggggttggttatgaatttcgatatagcggtggtgtatacggaagggtggtagtcgggacggtttcggtttttgcgagcgtgtttcgggcgttttcgcggaagttttatttgtcgcgtcgttcgatcgtcgggattttttgggtttttgttgtgcgtagattagtcgcgtttttttgggtggtcgtggagtattaaagcggggtttattgtttgtttggttttggtttttttt

SEQ ID NO: 32514 - DNA, 953 bp, Artificial Sequence
  chemically treated genomic DNA (Homo sapiens) CpG-island No: 32514
aaaaaaaaccaaaaccaaacaaacaataaaccccgctttaatactccacgaccacccaaaaaaacgcgactaatctacgcacaacaaaaacccaaaaaatcccgacgatcgaacgacgcgacaaataaaacttccgcgaaaacgcccgaaacacgctcgcaaaaaccgaaaccgtcccgactaccacccttccgtatacaccaccgctatatcgaaattcataaccaaccccaaccaaaaactacccaacgtcaacgacctctaactttaaaaaaaaaatctcccttcgaattaaaaaaccgcgacactaacgcaaaaaactaacttcgaaaatccgaaaccgctccgcgcccgcgaaccgaattcccgcctccctcgaaaaaacgtccgtacgtacgtacgcgtaccgcaaccgccctccttcaaacgcgcgacgcgaaaacgaaaacgccgcgtacgcgcgcgctctcgttaattcgctctctcgctaactctcgactaccgctcttactacgactacgactaaaactaaaaacgacgacgacgacgacgcgaacgacgaacgacgcgaaacgatccgacgaattcaaaaaaaaaaacataacgaaaaacaaaaacgacgacgaaactaaaaacgacgacgaaaacaacgacaacgcgccgataactaccgaaaccgccgaacccgccgcgcaaaaaacgaaaccgcctctcaccgcgatactaataaaaaaaaaaaaaaaaaaaaacgacaaaaccgacgctaaaaacgacgcgaccgaacccgacgacgaaaaaataaccgcgacctcctcgaactcgacccaaactacttcatctcctacgacctcaataaacactaaaattaccgaaaacgcaatatcgacgccgactccaactccaacctcgactcccgctccgaatccctcgacaaaaccgcctcctaaaccgcc

SEQ ID NO: 32515 - DNA, 953 bp, Artificial Sequence
  chemically treated genomic DNA (Homo sapiens) CpG-island No: 32515
aaaaaaaattaaaattaaataaataataagtttcgttttagtgttttacggttatttaaaggaacgcggttggtttacgtatagtagagatttaggaggtttcggcgatcgagcggcgcggtaggtgaaattttcgcggagacgttcgggatacgttcgtagggatcggaatcgtttcggttattattttttcgtatgtattatcgttgtgtcggagtttataattaattttagttaaaggttatttagcgttaacggtttttggttttaaaaaaaaaattttttttcgggttaaagagtcgcggtattgacgtaaggaattggtttcgagggttcgggatcgtttcgcgttcgcgaatcgagttttcgtttttttcgggaggacgttcgtgcgtacgtgcgcgtgtcgtaatcgtttttttttaaacgcgcgacgcgagggcgggggcgtcgcgtgcgcgcgcgttttcgttggttcgttttttcgttagttttcggttgtcgtttttgttgcggttgcggttggggttgggggcggcggcggcggcgacgcgggcggcgggcggcgcggggcggttcggcgggtttaaagaggaaaatatggcggaaaataaaggcggcggcgaggttgagagcggcggcgggggtagcggtagcgcgtcggtaattgtcggggtcgtcgggttcgtcgcgtaggaggcggagtcgttttttatcgcggtgttggtggaggaggaggaggaggaaggcggtagggtcggcgttgagggcggcgcggtcgggttcgacgacgggggggtggtcgcggttttttcgggttcggtttaggttgttttattttttgcggttttagtgggtattggagttgtcgggggcgtagtatcgacgtcggttttagttttagtttcggttttcgtttcgggtttttcggtagggtcgttttttggatcgtt

SEQ ID NO: 32516 - DNA, 953 bp, Artificial Sequence
  chemically treated genomic DNA (Homo sapiens) CpG-island No: 32516
aacgatccaaaaaacgaccctaccgaaaaacccgaaacgaaaaccgaaactaaaactaaaaccgacgtcgatactacgcccccgacaactccaatacccactaaaaccgcaaaaaataaaacaacctaaaccgaacccgaaaaaaccgcgaccacccccccgtcgtcgaacccgaccgcgccgccctcaacgccgaccctaccgccttcctcctcctcctcctccaccaacaccgcgataaaaaacgactccgcctcctacgcgacgaacccgacgaccccgacaattaccgacgcgctaccgctacccccgccgccgctctcaacctcgccgccgcctttattttccgccatattttcctctttaaacccgccgaaccgccccgcgccgcccgccgcccgcgtcgccgccgccgccgcccccaaccccaaccgcaaccgcaacaaaaacgacaaccgaaaactaacgaaaaaacgaaccaacgaaaacgcgcgcgcacgcgacgcccccgccctcgcgtcgcgcgtttaaaaaaaaacgattacgacacgcgcacgtacgcacgaacgtcctcccgaaaaaaacgaaaactcgattcgcgaacgcgaaacgatcccgaaccctcgaaaccaattccttacgtcaataccgcgactctttaacccgaaaaaaaattttttttttaaaaccaaaaaccgttaacgctaaataacctttaactaaaattaattataaactccgacacaacgataatacatacgaaaaaataataaccgaaacgattccgatccctacgaacgtatcccgaacgtctccgcgaaaatttcacctaccgcgccgctcgatcgccgaaacctcctaaatctctactatacgtaaaccaaccgcgttcctttaaataaccgtaaaacactaaaacgaaacttattatttatttaattttaatttttttt

SEQ ID NO: 32517 - DNA, 709 bp, Artificial Sequence
  chemically treated genomic DNA (Homo sapiens) CpG-island No: 32517
cgcggttttagagttcgagttcgcgttcgcgttcgcgtcgtcgtcgttatagttagcgtcgttcgaggttgttttagttttcggggtcggcgtcgttatcgttttattagtcggttttagggtcgtcgttgtcgtcgtcgtttttcgtcgtttttgttcggaaggttaagtttcgttcggagatcggagcggttcgtttatcgtttttgttagtgttaatcgtcggcgtttttattattttcgtttttgttcgggggcgttcgtcgcgcgtttcgttttattgagggtagacgtatcggttgtaggggcgtttttcgtttttttttcgcggtttagcgcgggcgtcgaaatcgttcgattcgttcggttttttcgcggcgcgttagcggtttcgttatgcgggttgagggtacgaagtaagggcgtacgtttagttcgttcgcggtttttttcggtttcggatgtgattgtttggttgcgtcgttttacgtttgacgttcgacgggattgggcgtcggcgggtgaggttattattaggcgtcgaggaggggagcgggaagcgtaggtatgaggttggcgtcggtggtttcgatgttgtttttcggtgatttcgatgttgttttttagtgtttttttttttttttggtttggtggtttcgcgtttgtttttttgggtttttttttttgtgacgtttttttgtgttcgtta

SEQ ID NO: 32518 - DNA, 709 bp, Artificial Sequence
  chemically treated genomic DNA (Homo sapiens) CpG-island No: 32518
taacgaacacaaaaaaacgtcacaaaaaaaaaaacccaaaaaaacaaacgcgaaaccaccaaaccaaaaaaaaaaaaaaacactaaaaaacaacatcgaaatcaccgaaaaacaacatcgaaaccaccgacgccaacctcatacctacgcttcccgctcccctcctcgacgcctaataataacctcacccgccgacgcccaatcccgtcgaacgtcaaacgtaaaacgacgcaaccaaacaatcacatccgaaaccgaaaaaaaccgcgaacgaactaaacgtacgcccttacttcgtaccctcaacccgcataacgaaaccgctaacgcgccgcgaaaaaaccgaacgaatcgaacgatttcgacgcccgcgctaaaccgcgaaaaaaaaacgaaaaacgcccctacaaccgatacgtctaccctcaataaaacgaaacgcgcgacgaacgcccccgaacaaaaacgaaaataataaaaacgccgacgattaacactaacaaaaacgataaacgaaccgctccgatctccgaacgaaacttaaccttccgaacaaaaacgacgaaaaacgacgacgacaacgacgaccctaaaaccgactaataaaacgataacgacgccgaccccgaaaactaaaacaacctcgaacgacgctaactataacgacgacgacgcgaacgcgaacgcgaactcgaactctaaaaccgcg

SEQ ID NO: 32519 - DNA, 709 bp, Artificial Sequence
  chemically treated genomic DNA (Homo sapiens) CpG-island No: 32519
taacggatatagggaaacgttataggaaagggagtttaggagagtagacgcggagttattagattagaaaaaggaaaaagtattggaaaatagtatcgaagttatcggaaagtagtatcgaagttatcggcgttagttttatatttgcgtttttcgttttttttttcggcgtttagtgataattttattcgtcggcgtttaatttcgtcgagcgttaggcgtgaggcggcgtagttaaatagttatattcggggtcgagaggaatcgcgaacgagttgggcgtgcgtttttgtttcgtgtttttaattcgtatggcggagtcgttggcgcgtcgcggagaggtcgggcgagtcgggcggtttcggcgttcgcgttgagtcgcggaggaggggcggaggacgtttttgtagtcggtgcgtttgtttttagtgaggcggggcgcgcggcggacgttttcgggtaggggcgggagtggtggaggcgtcggcggttggtattgataggggcggtgagcgagtcgtttcggttttcgggcgaggtttggtttttcgagtagagacggcgggaagcggcggcggtagcggcggttttagggtcggttggtgaggcgatggcggcgtcggtttcgggggttggggtagtttcgggcggcgttggttgtagcggcggcggcgcgggcgcgggcgcgggttcgggttttggggtcgcg

SEQ ID NO: 32520 - DNA, 709 bp, Artificial Sequence
  chemically treated genomic DNA (Homo sapiens) CpG-island No: 32520
cgcgaccccaaaacccgaacccgcgcccgcgcccgcgccgccgccgctacaaccaacgccgcccgaaactaccccaacccccgaaaccgacgccgccatcgcctcaccaaccgaccctaaaaccgccgctaccgccgccgcttcccgccgtctctactcgaaaaaccaaacctcgcccgaaaaccgaaacgactcgctcaccgcccctatcaataccaaccgccgacgcctccaccactcccgcccctacccgaaaacgtccgccgcgcgccccgcctcactaaaaacaaacgcaccgactacaaaaacgtcctccgcccctcctccgcgactcaacgcgaacgccgaaaccgcccgactcgcccgacctctccgcgacgcgccaacgactccgccatacgaattaaaaacacgaaacaaaaacgcacgcccaactcgttcgcgattcctctcgaccccgaatataactatttaactacgccgcctcacgcctaacgctcgacgaaattaaacgccgacgaataaaattatcactaaacgccgaaaaaaaaaacgaaaaacgcaaatataaaactaacgccgataacttcgatactactttccgataacttcgatactattttccaatactttttcctttttctaatctaataactccgcgtctactctcctaaactccctttcctataacgtttccctatatccgtta

SEQ ID NO: 32521 - DNA, 507 bp, Artificial Sequence
  chemically treated genomic DNA (Homo sapiens) CpG-island No: 32521
attttcgttgttcggtcgttaggtcggtaggtgttcgggtttcgttttttcggttcgttttattttcgcgttcgcgtcgcgtttttttttaagaggtcgggtttgagtgagtttgtgttgagtcgtcgagtagttcgttttttatgtgattttagttttcgttcgtttttttcgttggtgttaaaataatttgatgttttatagtaaggaggtagtttagtttcgcgttcggttgttttcgaggaggtcggagttttcggagacgatgcgtttcgcgtagtcgtttgcgtttgcgggagtcgtgagtatttttcgcgtgggggcgttttcggggtatagtcggggtttttttttaggtgggcgagttcgagcgaggttgggtggtaggaggttagcgttcgcggttcgtagtttagggtttacgaggaagttgtggtttgttgcgtttaagcgtcgtcgtttttgtgttgggcgtgggggttgtagttttgggtggaggtggaaata

SEQ ID NO: 32522 - DNA, 507 bp, Artificial Sequence
  chemically treated genomic DNA (Homo sapiens) CpG-island No: 32522
tatttccacctccacccaaaactacaacccccacgcccaacacaaaaacgacgacgcttaaacgcaacaaaccacaacttcctcgtaaaccctaaactacgaaccgcgaacgctaacctcctaccacccaacctcgctcgaactcgcccacctaaaaaaaaaccccgactataccccgaaaacgcccccacgcgaaaaatactcacgactcccgcaaacgcaaacgactacgcgaaacgcatcgtctccgaaaactccgacctcctcgaaaacaaccgaacgcgaaactaaactacctccttactataaaacatcaaattattttaacaccaacgaaaaaaacgaacgaaaactaaaatcacataaaaaacgaactactcgacgactcaacacaaactcactcaaacccgacctcttaaaaaaaaacgcgacgcgaacgcgaaaataaaacgaaccgaaaaaacgaaacccgaacacctaccgacctaacgaccgaacaacgaaaat

SEQ ID NO: 32523 - DNA, 507 bp, Artificial Sequence
  chemically treated genomic DNA (Homo sapiens) CpG-island No: 32523
tatttttatttttatttagagttgtagtttttacgtttagtataaaagcggcggcgtttggacgtagtaagttatagttttttcgtgagttttgagttgcgggtcgcggacgttgattttttattatttaatttcgttcgagttcgtttatttggagaagggtttcggttgtgtttcggggacgtttttacgcgggaaatatttacggttttcgtaggcgtaggcggttgcgcggggcgtatcgttttcgggggtttcggttttttcgagagtagtcgaacgcggggttgggttatttttttgttgtggggtattagattattttagtattagcggaaggaacggacggaaattgaagttatatggagagcgggttgttcggcgatttagtataggtttatttagattcggttttttagagggaagcgcggcgcgggcgcgggggtggggcgggtcgggggagcggggttcgaatatttgtcggtttagcggtcgagtagcggggat

SEQ ID NO: 32524 - DNA, 507 bp, Artificial Sequence
  chemically treated genomic DNA (Homo sapiens) CpG-island No: 32524
atccccgctactcgaccgctaaaccgacaaatattcgaaccccgctcccccgacccgccccacccccgcgcccgcgccgcgcttccctctaaaaaaccgaatctaaataaacctatactaaatcgccgaacaacccgctctccatataacttcaatttccgtccgttccttccgctaatactaaaataatctaataccccacaacaaaaaaataacccaaccccgcgttcgactactctcgaaaaaaccgaaacccccgaaaacgatacgccccgcgcaaccgcctacgcctacgaaaaccgtaaatatttcccgcgtaaaaacgtccccgaaacacaaccgaaacccttctccaaataaacgaactcgaacgaaattaaataataaaaaatcaacgtccgcgacccgcaactcaaaactcacgaaaaaactataacttactacgtccaaacgccgccgcttttatactaaacgtaaaaactacaactctaaataaaaataaaaata

SEQ ID NO: 32525 - DNA, 611 bp, Artificial Sequence
  chemically treated genomic DNA (Homo sapiens) CpG-island No: 32525
cggttgggagggagggcgggcggcgcgtagatttcggaagtttcgtttcgggaacgttcgtttttgggtagttttttgggtgggaagtgcgattttggcgggcggttgtgacgttgttagcgtttgttcggtggttgttgcgttgtcgtaacgaatagggtttttggttgcgtaggagggacgggggcgcggagttttgggaaattgcgttaggcgttcgaaaggtgaatacgggagtcgcgcgtttttttcgtagtagcggtaaagcggaagttatgttgtagtcggagttcgggttttttttcggagtcgcgtttcggggttcggttgtttcgagttgagcggagtatttttttcgggtgaggggaggagaggatttggcgcgtttttttcgttgtttcgggagtcgtagtcgcggtgtttatgtcgcggagtagttaggttttttcgacgaaaatttgtatttatttgttggcgggacgtttgttttgaaaatggataaagacgtcgtttttcggggtatttttgtttgtttgattttgagagcgtttttttgttttaagacgtgttggatgtttttgtttttcgaattttgatacgtttttgggtat

SEQ ID NO: 32526 - DNA, 611 bp, Artificial Sequence
  chemically treated genomic DNA (Homo sapiens) CpG-island No: 32526
atacccaaaaacgtatcaaaattcgaaaaacaaaaacatccaacacgtcttaaaacaaaaaaacgctctcaaaatcaaacaaacaaaaataccccgaaaaacgacgtctttatccattttcaaaacaaacgtcccgccaacaaataaatacaaattttcgtcgaaaaaacctaactactccgcgacataaacaccgcgactacgactcccgaaacaacgaaaaaaacgcgccaaatcctctcctcccctcacccgaaaaaaatactccgctcaactcgaaacaaccgaaccccgaaacgcgactccgaaaaaaaacccgaactccgactacaacataacttccgctttaccgctactacgaaaaaaacgcgcgactcccgtattcacctttcgaacgcctaacgcaatttcccaaaactccgcgcccccgtccctcctacgcaaccaaaaaccctattcgttacgacaacgcaacaaccaccgaacaaacgctaacaacgtcacaaccgcccgccaaaatcgcacttcccacccaaaaaactacccaaaaacgaacgttcccgaaacgaaacttccgaaatctacgcgccgcccgccctccctcccaaccg

SEQ ID NO: 32527 - DNA, 611 bp, Artificial Sequence
  chemically treated genomic DNA (Homo sapiens) CpG-island No: 32527
atgtttagaagcgtattagaattcggagaataggagtatttaatacgttttgaagtaaaaaggcgtttttagggttaggtaaataggaatatttcggagggcggcgtttttgtttatttttaaggtaaacgtttcgttagtaaataaatgtaggttttcgtcggaggagtttggttgtttcgcggtatgaatatcgcggttgcggttttcggggtagcgaggggaacgcgttaagtttttttttttttttattcggaaaggatgtttcgtttagttcggggtagtcgggtttcgggacgcggtttcgggaggaagttcgggtttcggttgtagtataattttcgttttatcgttgttgcgggggagacgcgcgattttcgtgtttatttttcgggcgtttggcgtagttttttagagtttcgcgttttcgttttttttacgtagttagaaattttattcgttgcggtagcgtagtagttatcggataagcgttagtaacgttataatcgttcgttaaaatcgtattttttatttagaaaattgtttaagggcgaacgttttcggggcgggattttcggggtttgcgcgtcgttcgtttttttttttagtcg

SEQ ID NO: 32528 - DNA, 611 bp, Artificial Sequence
  chemically treated genomic DNA (Homo sapiens) CpG-island No: 32528
cgactaaaaaaaaaaacgaacgacgcgcaaaccccgaaaatcccgccccgaaaacgttcgcccttaaacaattttctaaataaaaaatacgattttaacgaacgattataacgttactaacgcttatccgataactactacgctaccgcaacgaataaaatttctaactacgtaaaaaaaacgaaaacgcgaaactctaaaaaactacgccaaacgcccgaaaaataaacacgaaaatcgcgcgtctcccccgcaacaacgataaaacgaaaattatactacaaccgaaacccgaacttcctcccgaaaccgcgtcccgaaacccgactaccccgaactaaacgaaacatcctttccgaataaaaaaaaaaaaaaacttaacgcgttcccctcgctaccccgaaaaccgcaaccgcgatattcataccgcgaaacaaccaaactcctccgacgaaaacctacatttatttactaacgaaacgtttaccttaaaaataaacaaaaacgccgccctccgaaatattcctatttacctaaccctaaaaacgcctttttacttcaaaacgtattaaatactcctattctccgaattctaatacgcttctaaacat

SEQ ID NO: 32529 - DNA, 989 bp, Artificial Sequence
  chemically treated genomic DNA (Homo sapiens) CpG-island No: 32529
ttttcggtttcggaggatagacgttcgggtttacggtgttataagtggtttttttttcggttttagaggatagacgttcggtttacggtgttatagagtggtttttttttcggttttggaggatagacgttcgggtttacggtgttataagtggtttttttttcggtttcggaggatagacgttcggtttacggtgttatagagtggtttttttttcggttttggaggatagacgttcgggttcgcggtgttatagaggggtttttttttcggttttggaggatagacgttcgggttcgcggtgttatagaggggtttttttttcggttttggaggatagacgttcgggttcgcggtgttagtagagggttttttttttcggttttggaggatagacgttcgggttcgcggtgttagtagaggggtttttttttcggttttggaggatagacgttcgggttcgcggtgttagtagagtggtttttttttcgtttttggaggatagacgttcgagttcgcggtgttagtagagtggtttttttttcgtttttggaggatagacgttcgggttcgcggtgttagtagagtggtttttttttcgtttttggaggatagacgttcgggttcgcggtgttagtagagtggtttttttttcggttttggaggatagacgttcgggttcgcggtgttagtagagtggtttttttttcggttttggaggatagacgttcgggttcgcggtgttatagaggggtttttttttcggttttggaggatagacgttcgggttcgcggtgttatagaggggtttttttttcggttttggaggatagacgttcgggttcgcggtgttagtagaggggtttttttttcggttttggaggatagacgttcgggttcgcggtgttagtagagtggtttttttttcggttttggaggatatacgttcgggttcgtggtgttatagagtggttttttttttgtttttg

SEQ ID NO: 32530 - DNA, 989 bp, Artificial Sequence
  chemically treated genomic DNA (Homo sapiens) CpG-island No: 32530
caaaaacaaaaaaaaaaccactctataacaccacgaacccgaacgtatatcctccaaaaccgaaaaaaaaaccactctactaacaccgcgaacccgaacgtctatcctccaaaaccgaaaaaaaaacccctctactaacaccgcgaacccgaacgtctatcctccaaaaccgaaaaaaaaacccctctataacaccgcgaacccgaacgtctatcctccaaaaccgaaaaaaaaacccctctataacaccgcgaacccgaacgtctatcctccaaaaccgaaaaaaaaaccactctactaacaccgcgaacccgaacgtctatcctccaaaaccgaaaaaaaaaccactctactaacaccgcgaacccgaacgtctatcctccaaaaacgaaaaaaaaaccactctactaacaccgcgaacccgaacgtctatcctccaaaaacgaaaaaaaaaccactctactaacaccgcgaactcgaacgtctatcctccaaaaacgaaaaaaaaaccactctactaacaccgcgaacccgaacgtctatcctccaaaaccgaaaaaaaaacccctctactaacaccgcgaacccgaacgtctatcctccaaaaccgaaaaaaaaaaccctctactaacaccgcgaacccgaacgtctatcctccaaaaccgaaaaaaaaacccctctataacaccgcgaacccgaacgtctatcctccaaaaccgaaaaaaaaacccctctataacaccgcgaacccgaacgtctatcctccaaaaccgaaaaaaaaaccactctataacaccgtaaaccgaacgtctatcctccgaaaccgaaaaaaaaaccacttataacaccgtaaacccgaacgtctatcctccaaaaccgaaaaaaaaaccactctataacaccgtaaaccgaacgtctatcctctaaaaccgaaaaaaaaaccacttataacaccgtaaacccgaacgtctatcctccgaaaccgaaaa

SEQ ID NO: 32531 - DNA, 989 bp, Artificial Sequence
  chemically treated genomic DNA (Homo sapiens) CpG-island No: 32531
tagaggtagaggaagggttattttgtgatattacgagttcggacgtgtgttttttagagtcggaggaagggttattttgttgatatcgcgagttcggacgtttgttttttagagtcggaggaagggtttttttgttgatatcgcgagttcggacgtttgttttttagagtcggaggaagggtttttttgtgatatcgcgagttcggacgtttgttttttagagtcggaggaagggtttttttgtgatatcgcgagttcggacgtttgttttttagagtcggaggaagggttattttgttgatatcgcgagttcggacgtttgttttttagagtcggaggaagggttattttgttgatatcgcgagttcggacgtttgttttttagaggcggaggaagggttattttgttgatatcgcgagttcggacgtttgttttttagaggcggaggaagggttattttgttgatatcgcgagttcggacgtttgttttttagaggcggaggaagggttattttgttgatatcgcgagttcggacgtttgttttttagagtcggaggaagggtttttttgttgatatcgcgagttcggacgtttgttttttagagtcggaggaagggattttttgttgatatcgcgagttcggacgtttgttttttagagtcggaggaagggtttttttgtgatatcgcgagttcggacgtttgttttttagagtcggaggaagggtttttttgtgatatcgcgagttcggacgtttgttttttagagtcggaggaagggttattttgtgatatcgtgagtcggacgtttgtttttcggagtcggaggaagggttatttgtgatatcgtgagttcggacgtttgttttttagagtcggaggaagggttattttgtgatatcgtgagtcggacgtttgttttttggagtcggaggaagggttatttgtgatatcgtgagttcggacgtttgtttttcggagtcggagg

SEQ ID NO: 32532 - DNA, 989 bp, Artificial Sequence
  chemically treated genomic DNA (Homo sapiens) CpG-island No: 32532
cctccgactccgaaaaacaaacgtccgaactcacgatatcacaaataacccttcctccgactccaaaaaacaaacgtccgactcacgatatcacaaaataacccttcctccgactctaaaaaacaaacgtccgaactcacgatatcacaaataacccttcctccgactccgaaaaacaaacgtccgactcacgatatcacaaaataacccttcctccgactctaaaaaacaaacgtccgaactcgcgatatcacaaaaaaacccttcctccgactctaaaaaacaaacgtccgaactcgcgatatcacaaaaaaacccttcctccgactctaaaaaacaaacgtccgaactcgcgatatcaacaaaaaatcccttcctccgactctaaaaaacaaacgtccgaactcgcgatatcaacaaaaaaacccttcctccgactctaaaaaacaaacgtccgaactcgcgatatcaacaaaataacccttcctccgcctctaaaaaacaaacgtccgaactcgcgatatcaacaaaataacccttcctccgcctctaaaaaacaaacgtccgaactcgcgatatcaacaaaataacccttcctccgcctctaaaaaacaaacgtccgaactcgcgatatcaacaaaataacccttcctccgactctaaaaaacaaacgtccgaactcgcgatatcaacaaaataacccttcctccgactctaaaaaacaaacgtccgaactcgcgatatcacaaaaaaacccttcctccgactctaaaaaacaaacgtccgaactcgcgatatcacaaaaaaacccttcctccgactctaaaaaacaaacgtccgaactcgcgatatcaacaaaaaaacccttcctccgactctaaaaaacaaacgtccgaactcgcgatatcaacaaaataacccttcctccgactctaaaaaacacacgtccgaactcgtaatatcacaaaataacccttcctctacctcta

SEQ ID NO: 32533 - DNA, 803 bp, Artificial Sequence
  chemically treated genomic DNA (Homo sapiens) CpG-island No: 32533
gtcggcgtcgaagggcgtgatgttggttttgacggtggttacgtttaggtttattagtattagtttcgcgaaggtggtcggtgagtagtagcgggcggcggcgtcgggattaggcgtcgtgtagttgagtaggcgcgcggaatcgtagagcgcggttcgcgtggcgggcgcggttagtagcgggaaggttagtatgtttagtaggtagagcgttaggtttagtaggatggcgcgcgttcggtttagtcgcgcgtcggttagttagttttcgaacggcgagtttaggtaggtgaggtttatgaagagtagtagcgtttcgttggtttgcgcgtttttttagtagaacggcgtttcgtttaggaatagtattaggttggacgtgatgtcgtagaaagcggcgcgttttagtagtttcgttagtagtacggtttcgtacgtcgcgcgtcggttcgcgaacgttttagtcgtcgtcgcggtcgtcgtcgttcgtcgcgcgtttagtagcggcgttcgttcgttcgtatcgtttttagagttttttatgcgacgtcgttagttgtttcgtttcgtcgtcgggttatttgttttagaatttagggtcgtcgtttttttcgcgagattgtcgggtttgagatgtttttattgggcgggttcgtcgttgtttaacgttttattcgtcggaattttcggtttcgtttcgggtattaggcgaggaggtggtcggtattttggattattgcgtgttttggggagtttgggatttcgtagtttggcggtcgagagtttttgtttgtttttttgag

SEQ ID NO: 32534 - DNA, 803 bp, Artificial Sequence
  chemically treated genomic DNA (Homo sapiens) CpG-island No: 32534
ctcaaaaaaacaaacaaaaactctcgaccgccaaactacgaaatcccaaactccccaaaacacgcaataatccaaaataccgaccacctcctcgcctaatacccgaaacgaaaccgaaaattccgacgaataaaacgttaaacaacgacgaacccgcccaataaaaacatctcaaacccgacaatctcgcgaaaaaaacgacgaccctaaattctaaaacaaataacccgacgacgaaacgaaacaactaacgacgtcgcataaaaaactctaaaaacgatacgaacgaacgaacgccgctactaaacgcgcgacgaacgacgacgaccgcgacgacgactaaaacgttcgcgaaccgacgcgcgacgtacgaaaccgtactactaacgaaactactaaaacgcgccgctttctacgacatcacgtccaacctaatactattcctaaacgaaacgccgttctactaaaaaaacgcgcaaaccaacgaaacgctactactcttcataaacctcacctacctaaactcgccgttcgaaaactaactaaccgacgcgcgactaaaccgaacgcgcgccatcctactaaacctaacgctctacctactaaacatactaaccttcccgctactaaccgcgcccgccacgcgaaccgcgctctacgattccgcgcgcctactcaactacacgacgcctaatcccgacgccgccgcccgctactactcaccgaccaccttcgcgaaactaatactaataaacctaaacgtaaccaccgtcaaaaccaacatcacgcccttcgacgccgac

SEQ ID NO: 32535 - DNA, 803 bp, Artificial Sequence
  chemically treated genomic DNA (Homo sapiens) CpG-island No: 32535
tttaaaaaggtaaataaaggttttcggtcgttaagttgcggaattttaagttttttaagatacgtagtgatttagaatatcggttattttttcgtttagtgttcggggcggggtcggaagtttcggcgagtggggcgttgagtagcggcgagttcgtttaatagggatattttaggttcggtagtttcgcgagaagggcggcggttttgggttttgggataggtgattcggcggcggggcgaggtagttggcggcgtcgtatggagggttttgggggcggtgcgggcgagcgggcgtcgttgttgggcgcgcggcgggcggcggcggtcgcggcggcggttggggcgttcgcgggtcggcgcgcggcgtgcggggtcgtgttgttgacggagttgttggagcgcgtcgttttttacggtattacgtttaatttggtgttatttttgaacggggcgtcgttttgttgggagggcgcgtaggttagcgaggcgttgttgttttttatgggttttatttatttgggttcgtcgttcggaggttggttggtcgacgcgcggttgggtcgggcgcgcgttattttgttgagtttggcgttttatttgttgggtatgttggttttttcgttgttggtcgcgttcgttacgcgagtcgcgttttgcggtttcgcgcgtttgtttaattgtacggcgtttggtttcgacgtcgtcgttcgttgttgtttatcggttattttcgcggggttggtgttggtgggtttgggcgtggttatcgttaaggttaatattacgtttttcggcgtcgat

SEQ ID NO: 32536 - DNA, 803 bp, Artificial Sequence
  chemically treated genomic DNA (Homo sapiens) CpG-island No: 32536
atcgacgccgaaaaacgtaatattaaccttaacgataaccacgcccaaacccaccaacaccaaccccgcgaaaataaccgataaacaacaacgaacgacgacgtcgaaaccaaacgccgtacaattaaacaaacgcgcgaaaccgcaaaacgcgactcgcgtaacgaacgcgaccaacaacgaaaaaaccaacatacccaacaaataaaacgccaaactcaacaaaataacgcgcgcccgacccaaccgcgcgtcgaccaaccaacctccgaacgacgaacccaaataaataaaacccataaaaaacaacaacgcctcgctaacctacgcgccctcccaacaaaacgacgccccgttcaaaaataacaccaaattaaacgtaataccgtaaaaaacgacgcgctccaacaactccgtcaacaacacgaccccgcacgccgcgcgccgacccgcgaacgccccaaccgccgccgcgaccgccgccgcccgccgcgcgcccaacaacgacgcccgctcgcccgcaccgcccccaaaaccctccatacgacgccgccaactacctcgccccgccgccgaatcacctatcccaaaacccaaaaccgccgcccttctcgcgaaactaccgaacctaaaatatccctattaaacgaactcgccgctactcaacgccccactcgccgaaacttccgaccccgccccgaacactaaacgaaaaaataaccgatattctaaatcactacgtatcttaaaaaacttaaaattccgcaacttaacgaccgaaaacctttatttacctttttaaa

SEQ ID NO: 32537 - DNA, 614 bp, Artificial Sequence
  chemically treated genomic DNA (Homo sapiens) CpG-island No: 32537
agcgcgaggttaatgcgtcggtcgtacggagattcggggatacgcgcgttacgtagaaggtatcgattttcgcgcgttcggtaggcggtatcggtttattcgtttgtgcgcgcggttcgggacggtttcggcgcggttggagggggtttggttgagcgtttcgcgttttcgggtttcgcgttttcgtttttcggttttcggtttaggtttcgtaggtttcggcgttttgtatttatcgaacgcgttgggtcgtgatcgcgttgtcggtgtgtggtcgtagtatcgttaggaataggagtcgtatgtcgtcgtcgtcgttcgggttatcgatcggtttcgtcgtcgtcgattaggtttcggggtcggcgtagacgcggacggcgggggagtcggggcggttgggtttgtttcgttcgttttttttcgaggtcgcgttttagttcgtaggtttcggcgttaggcggggagggggacgggaatcgggggtttcgggcggcgcgagttttgggtgcggggtggcgcgggtgtgtttcgtggggtttattattagggtagtcgcggttcgtttttatttggattaggattagcggtgattatagttttttttacgggga

SEQ ID NO: 32538 - DNA, 614 bp, Artificial Sequence
  chemically treated genomic DNA (Homo sapiens) CpG-island No: 32538
tccccgtaaaaaaaactataatcaccgctaatcctaatccaaataaaaacgaaccgcgactaccctaataataaaccccacgaaacacacccgcgccaccccgcacccaaaactcgcgccgcccgaaacccccgattcccgtccccctccccgcctaacgccgaaacctacgaactaaaacgcgacctcgaaaaaaaacgaacgaaacaaacccaaccgccccgactcccccgccgtccgcgtctacgccgaccccgaaacctaatcgacgacgacgaaaccgatcgataacccgaacgacgacgacgacatacgactcctattcctaacgatactacgaccacacaccgacaacgcgatcacgacccaacgcgttcgataaatacaaaacgccgaaacctacgaaacctaaaccgaaaaccgaaaaacgaaaacgcgaaacccgaaaacgcgaaacgctcaaccaaaccccctccaaccgcgccgaaaccgtcccgaaccgcgcgcacaaacgaataaaccgataccgcctaccgaacgcgcgaaaatcgataccttctacgtaacgcgcgtatccccgaatctccgtacgaccgacgcattaacctcgcgct

SEQ ID NO: 32539 - DNA, 614 bp, Artificial Sequence
  chemically treated genomic DNA (Homo sapiens) CpG-island No: 32539
ttttcgtggaagggattgtggttatcgttggttttggtttaggtgggaacggatcgcggttattttggtgatggattttacggggtatattcgcgttatttcgtatttagggttcgcgtcgttcgaggttttcggttttcgttttttttttcgtttggcgtcggaatttgcgagttggggcgcggtttcggggaggggcgggcgggatagatttagtcgtttcggttttttcgtcgttcgcgtttgcgtcggtttcggggtttggtcggcggcggcggggtcggtcgatggttcgggcggcggcggcggtatgcggtttttgtttttggcggtgttgcggttatatatcggtaacgcggttacggtttagcgcgttcggtaggtgtagggcgtcggggtttacgaagtttgggtcgggggtcggggggcggggacgcgggattcggggacgcggggcgtttagttaggttttttttagtcgcgtcggggtcgtttcgagtcgcgcgtataaacggatgggtcggtgtcgtttgtcgggcgcgcgggggtcggtgttttttgcgtggcgcgcgtgttttcgggttttcgtgcggtcggcgtattggtttcgcgtt

SEQ ID NO: 32540 - DNA, 614 bp, Artificial Sequence
  chemically treated genomic DNA (Homo sapiens) CpG-island No: 32540
aacgcgaaaccaatacgccgaccgcacgaaaacccgaaaacacgcgcgccacgcaaaaaacaccgacccccgcgcgcccgacaaacgacaccgacccatccgtttatacgcgcgactcgaaacgaccccgacgcgactaaaaaaaacctaactaaacgccccgcgtccccgaatcccgcgtccccgccccccgacccccgacccaaacttcgtaaaccccgacgccctacacctaccgaacgcgctaaaccgtaaccgcgttaccgatatataaccgcaacaccgccaaaaacaaaaaccgcataccgccgccgccgcccgaaccatcgaccgaccccgccgccgccgaccaaaccccgaaaccgacgcaaacgcgaacgacgaaaaaaccgaaacgactaaatctatcccgcccgcccctccccgaaaccgcgccccaactcgcaaattccgacgccaaacgaaaaaaaaaacgaaaaccgaaaacctcgaacgacgcgaaccctaaatacgaaataacgcgaatataccccgtaaaatccatcaccaaaataaccgcgatccgttcccacctaaaccaaaaccaacgataaccacaatcccttccacgaaaa

SEQ ID NO: 32541 - DNA, 667 bp, Artificial Sequence
  chemically treated genomic DNA (Homo sapiens) CpG-island No: 32541
atttttttcgtcggaggattagtaaattttggtcgtttatgtttatttcgcggtaggcgtgggttttagattcgttttatcgcggtttcgcgttcgttcgtcgtttatttgtttggattttagcggttggtgtttacgtttttagttcggttttcgttttcgtttcgggcgtagtcgtttcgtcgtttttgttcgttttcggtttattcggtttttgttttttttttatttcgcggcgttttcgtttcgatttttatcgtttttcggagttcgcggcggtttttttatttttttacgtcggaattagtttttagtttttttttttcgagtattcggtcggttttattttttgcgttttttttagtacgcgacggattcgtaggtcgcgagatttaggtttttttgttgtcgtcgtcgtcgtcgagattggaggttcggtagtcgtcggtttcgtttttttcggaaatggtttcgggggtatcggttcggttttcggattttggcgtgcgcggtttcgttgttattagtcgcgcgtacgtttagattcgggttttacggtttgtgcgcgtcgtttatcggttaggtagcgggttgtatttagattttttagtgaatgttttaattaggtcgttttggggcggttgtggtatttcgacggttattaatt

SEQ ID NO: 32542 - DNA, 667 bp, Artificial Sequence
  chemically treated genomic DNA (Homo sapiens) CpG-island No: 32542
aattaataaccgtcgaaataccacaaccgccccaaaacgacctaattaaaacattcactaaaaaatctaaatacaacccgctacctaaccgataaacgacgcgcacaaaccgtaaaacccgaatctaaacgtacgcgcgactaataacaacgaaaccgcgcacgccaaaatccgaaaaccgaaccgatacccccgaaaccatttccgaaaaaaacgaaaccgacgactaccgaacctccaatctcgacgacgacgacgacaacaaaaaaacctaaatctcgcgacctacgaatccgtcgcgtactaaaaaaaacgcaaaaaataaaaccgaccgaatactcgaaaaaaaaaaactaaaaactaattccgacgtaaaaaaataaaaaaaccgccgcgaactccgaaaaacgataaaaatcgaaacgaaaacgccgcgaaataaaaaaaaaacaaaaaccgaataaaccgaaaacgaacaaaaacgacgaaacgactacgcccgaaacgaaaacgaaaaccgaactaaaaacgtaaacaccaaccgctaaaatccaaacaaataaacgacgaacgaacgcgaaaccgcgataaaacgaatctaaaacccacgcctaccgcgaaataaacataaacgaccaaaatttactaatcctccgacgaaaaaaat

SEQ ID NO: 32543 - DNA, 667 bp, Artificial Sequence
  chemically treated genomic DNA (Homo sapiens) CpG-island No: 32543
agttggtgatcgtcgggatattatagtcgttttaggacggtttggttgagatatttattggagggtttgggtgtagttcgttgtttggtcggtaggcggcgcgtataggtcgtggggttcgggtttgggcgtgcgcgcggttggtagtagcggggtcgcgtacgttagggttcgggagtcgggtcggtgttttcggagttattttcgggaggggcgaggtcggcggttgtcgggtttttaatttcggcggcggcggcggtaataggggagtttgggtttcgcggtttgcgagttcgtcgcgtgttgagggagacgtaggaggtggagtcggtcgggtgttcgagggaaggagattggaagttggtttcggcgtgaggaggtggaggggtcgtcgcgggtttcggggggcggtgagggtcgggacggaggcgtcgcggggtgaggagaggataggggtcgggtgggtcgagggcgggtagaggcggcggggcggttgcgttcggggcgggggcgggggtcgggttgaaggcgtgggtattagtcgttgaggtttaagtaagtggacggcgggcgggcgcggggtcgcggtggggcgggtttggagtttacgtttgtcgcggggtaggtatgggcggttaggatttgttggtttttcgacgggaggggt

SEQ ID NO: 32544 - DNA, 667 bp, Artificial Sequence
  chemically treated genomic DNA (Homo sapiens) CpG-island No: 32544
acccctcccgtcgaaaaaccaacaaatcctaaccgcccatacctaccccgcgacaaacgtaaactccaaacccgccccaccgcgaccccgcgcccgcccgccgtccacttacttaaacctcaacgactaatacccacgccttcaacccgacccccgcccccgccccgaacgcaaccgccccgccgcctctacccgccctcgacccacccgacccctatcctctcctcaccccgcgacgcctccgtcccgaccctcaccgccccccgaaacccgcgacgacccctccacctcctcacgccgaaaccaacttccaatctccttccctcgaacacccgaccgactccacctcctacgtctccctcaacacgcgacgaactcgcaaaccgcgaaacccaaactcccctattaccgccgccgccgccgaaattaaaaacccgacaaccgccgacctcgcccctcccgaaaataactccgaaaacaccgacccgactcccgaaccctaacgtacgcgaccccgctactaccaaccgcgcgcacgcccaaacccgaaccccacgacctatacgcgccgcctaccgaccaaacaacgaactacacccaaaccctccaataaatatctcaaccaaaccgtcctaaaacgactataatatcccgacgatcaccaact

SEQ ID NO: 32545 - DNA, 721 bp, Artificial Sequence
  chemically treated genomic DNA (Homo sapiens) CpG-island No: 32545
  unsure (279)
tatgcgtcgtcgtaatcggggttttcgacgcggcgtacgcgaacgtttgatcgtattcggtattcgggttagcgcgtatgtttattttacgatttcgggagtgtgaagttgattttcgtcgtatttcgttatacggttttttcgcgcgcggttatttttttatcgtcgttggtgggaattcggattcgcggatacggggatattttttaattcgggaattttcggaatcgcgtaatgcgcgtatacgtgaatttcggtcgacggggaatcgggggtagntcgttttatgcggaattcgcgtatattcgcgggttttcggaaattatcggtattaacggcgtattcggggtaatttttcgtaattcgataattgttcgattcgttaggttatttggattatttcgcgtgggttttcgtgaaatcggtttgattcgtattagtggagattgtttcgtttggaattttttttcgtcgtgttcgcgggagtcgttaacgtttttattcgcgttaatgtcgtcgtggtacgttaatagtagtttcgtcgcggtatattgttcgtatataatcggtcgttattagagttcgtcgtggtgtgaattgtgcgtagtttttgagcgcggtatttgatcgtattttatcgtcgcgcgagacgacgcggtgattattttttggcgacgatattattatcgcgttcgcggtgtttatattgtagtgcgtacgt

SEQ ID NO: 32546 - DNA, 721 bp, Artificial Sequence
  chemically treated genomic DNA (Homo sapiens) CpG-island No: 32546
  unsure (443)
acgtacgcactacaatataaacaccgcgaacgcgataataatatcgtcgccaaaaaataatcaccgcgtcgtctcgcgcgacgataaaatacgatcaaataccgcgctcaaaaactacgcacaattcacaccacgacgaactctaataacgaccgattatatacgaacaatataccgcgacgaaactactattaacgtaccacgacgacattaacgcgaataaaaacgttaacgactcccgcgaacacgacgaaaaaaaattccaaacgaaacaatctccactaatacgaatcaaaccgatttcacgaaaacccacgcgaaataatccaaataacctaacgaatcgaacaattatcgaattacgaaaaattaccccgaatacgccgttaataccgataatttccgaaaacccgcgaatatacgcgaattccgcataaaacganctacccccgattccccgtcgaccgaaattcacgtatacgcgcattacgcgattccgaaaattcccgaattaaaaaatatccccgtatccgcgaatccgaattcccaccaacgacgataaaaaaataaccgcgcgcgaaaaaaccgtataacgaaatacgacgaaaatcaacttcacactcccgaaatcgtaaaataaacatacgcgctaacccgaataccgaatacgatcaaacgttcgcgtacgccgcgtcgaaaaccccgattacgacgacgcata

SEQ ID NO: 32547 - DNA, 721 bp, Artificial Sequence
  chemically treated genomic DNA (Homo sapiens) CpG-island No: 32547
  unsure (443)
gcgtgcgtattgtagtgtggatatcgcggacgcggtagtagtgtcgtcgttagagaataattatcgcgtcgtttcgcgcgacggtagagtgcgattagatgtcgcgtttagaggttgcgtatagtttatattacggcgggttttgatggcgatcggttatgtgcgagtagtatgtcgcgacggaattattgttggcgtgttacggcggtattaacgcgggtgagaacgttgacggttttcgcggatacggcggaggagggttttaagcgagatagtttttattagtgcgggttaggtcggttttacgggggtttacgcggagtggtttagatagtttggcgagtcggataattgtcggattgcgagggattatttcgggtgcgtcgttagtatcggtagttttcgggagttcgcgggtgtgcgcggatttcgtatagggcggnttgttttcggtttttcgtcggtcggaatttacgtgtgcgcgtattgcgcgatttcgggagttttcggattaaggagtattttcgtgttcgcgggttcggatttttattagcggcggtgagggaataatcgcgcgcgagagagtcgtgtagcggggtgcggcgggagttagttttatattttcggggtcgtagggtagatatacgcgttagttcgggtgtcgagtacgattaggcgttcgcgtgcgtcgcgtcgggggtttcggttgcggcggcgtatg

SEQ ID NO: 32548 - DNA, 721 bp, Artificial Sequence
  chemically treated genomic DNA (Homo sapiens) CpG-island No: 32548
  unsure (279)
catacgccgccgcaaccgaaacccccgacgcgacgcacgcgaacgcctaatcgtactcgacacccgaactaacgcgtatatctaccctacgaccccgaaaatataaaactaactcccgccgcaccccgctacacgactctctcgcgcgcgattattccctcaccgccgctaataaaaatccgaacccgcgaacacgaaaatactccttaatccgaaaactcccgaaatcgcgcaatacgcgcacacgtaaattccgaccgacgaaaaaccgaaaacaanccgccctatacgaaatccgcgcacacccgcgaactcccgaaaactaccgatactaacgacgcacccgaaataatccctcgcaatccgacaattatccgactcgccaaactatctaaaccactccgcgtaaacccccgtaaaaccgacctaacccgcactaataaaaactatctcgcttaaaaccctcctccgccgtatccgcgaaaaccgtcaacgttctcacccgcgttaataccgccgtaacacgccaacaataattccgtcgcgacatactactcgcacataaccgatcgccatcaaaacccgccgtaatataaactatacgcaacctctaaacgcgacatctaatcgcactctaccgtcgcgcgaaacgacgcgataattattctctaacgacgacactactaccgcgtccgcgatatccacactacaatacgcacgc

SEQ ID NO: 32549 - DNA, 538 bp, Artificial Sequence
  chemically treated genomic DNA (Homo sapiens) CpG-island No: 32549
cgggttcgaaatgcggttcggttcgttatggttttggcgcgggggtcgggtattggggttcgttcgtatatgggtaaaaagtataagaagtttaagtcggataattacgtttcgaagggtgagtaggggttcggggtgcggcggtagggttttcggcggttttgcggggttttcgtttttttttagtggtttcgggcgcgttcggggttttttttttttacggtaggtttaggtcggcgaagggggcgtgttttgtcgtagatcgcgttgtttttagtgcggtagcggtattcgaattcgggttttcgtggttcggtgggtttttggtgggaagacgtgaggcgggttcggtagttttgggagcgttcggggcgggcggcgtcgtcgtattttcgggtcggggttcgttatttaataggtgtttcgcggagcgtttaaagtcgtttcgggtttgttgcgttttggcgttttgtatttttagtattttttggagagtttcgattttaatcgacgcgttttttttttttttttttttttt

SEQ ID NO: 32550 - DNA, 538 bp, Artificial Sequence
  chemically treated genomic DNA (Homo sapiens) CpG-island No: 32550
aaaaaaaaaaaaaaaaaaaaaaacgcgtcgattaaaatcgaaactctccaaaaaatactaaaaatacaaaacgccaaaacgcaacaaacccgaaacgactttaaacgctccgcgaaacacctattaaataacgaaccccgacccgaaaatacgacgacgccgcccgccccgaacgctcccaaaactaccgaacccgcctcacgtcttcccaccaaaaacccaccgaaccacgaaaacccgaattcgaataccgctaccgcactaaaaacaacgcgatctacgacaaaacacgcccccttcgccgacctaaacctaccgtaaaaaaaaaaaaccccgaacgcgcccgaaaccactaaaaaaaaacgaaaaccccgcaaaaccgccgaaaaccctaccgccgcaccccgaacccctactcacccttcgaaacgtaattatccgacttaaacttcttatactttttacccatatacgaacgaaccccaatacccgacccccgcgccaaaaccataacgaaccgaaccgcatttcgaacccg

SEQ ID NO: 32551 - DNA, 538 bp, Artificial Sequence
  chemically treated genomic DNA (Homo sapiens) CpG-island No: 32551
aaagaaaagaaaagaaaggaaagcgcgtcgattaaaatcggggttttttagggagtgttaaggatgtagagcgttaaagcgtaataagttcgaggcggttttgggcgtttcgcgaagtatttgttgaatgacggatttcggttcgggggtgcggcggcgtcgttcgtttcgaacgtttttaggattatcgggttcgttttacgtttttttattagagatttatcggattacggggattcgggttcgaatgtcgttgtcgtattgggggtagcgcggtttacggtaggatacgtttttttcgtcggtttgggtttgtcgtgggaaggaaaggtttcgggcgcgttcggaattattgggaaagagcggaagtttcgtagagtcgtcgagggttttgtcgtcgtatttcgggtttttgtttatttttcgagacgtgattgttcgatttgagttttttgtgttttttgtttatgtacgaacgggttttagtgttcggttttcgcgttagggttatgacgggtcgagtcgtatttcggattcg

SEQ ID NO: 32552 - DNA, 538 bp, Artificial Sequence
  chemically treated genomic DNA (Homo sapiens) CpG-island No: 32552
cgaatccgaaatacgactcgacccgtcataaccctaacgcgaaaaccgaacactaaaacccgttcgtacataaacaaaaaacacaaaaaactcaaatcgaacaatcacgtctcgaaaaataaacaaaaacccgaaatacgacgacaaaaccctcgacgactctacgaaacttccgctctttcccaataattccgaacgcgcccgaaacctttccttcccacgacaaacccaaaccgacgaaaaaaacgtatcctaccgtaaaccgcgctacccccaatacgacaacgacattcgaacccgaatccccgtaatccgataaatctctaataaaaaaacgtaaaacgaacccgataatcctaaaaacgttcgaaacgaacgacgccgccgcacccccgaaccgaaatccgtcattcaacaaatacttcgcgaaacgcccaaaaccgcctcgaacttattacgctttaacgctctacatccttaacactccctaaaaaaccccgattttaatcgacgcgctttcctttcttttcttttcttt

SEQ ID NO: 32553 - DNA, 704 bp, Artificial Sequence
  chemically treated genomic DNA (Homo sapiens) CpG-island No: 32553
tagaggcggttttttttatagacgttgtttggaattcgtcgttaagtttttagtaggcggttcgtttggcgttttttagttttcgtataagtagggttacggtttggggtttttaaggtcgtttacgcgggcgcgtttcgtcgagggttagtttgttagcgttttattcgcggttttttattttagacgatcggttttgggcggcgtcgttttaattttacgcgtttagttcgttcgggaaagcgcgcgttatttttttaacggttttatttcggtaggggtgcggttgttttcgaggtttagcgttcgaggttacgtttcgcgttcgttttgggttcgtttcgtgtttttcggagacgtttttcgcgtcgtttttcgtttttcgtttttcgtttttcgtttttcgtcgtcgttatcgcggttagttagcggattagcggtaggagtcgtttttcgacgggtagtagggcgttcggttttcgcgtgtgggttgagcgcggcgacgttgttgtttcgaaattttcgtggattttgagtcggtaagtggttagggaggatgagcgatattgggggacggaagtcgggtttcgtggtgtggaggaggcgggtgggcgtcgttttttaggttcgatttcgggaaagttgaggcgaggaagagaagttttgaggtgggtcgggaaattttttagggtttttttagtatt

SEQ ID NO: 32554 - DNA, 704 bp, Artificial Sequence
  chemically treated genomic DNA (Homo sapiens) CpG-island No: 32554
aatactaaaaaaaccctaaaaaatttcccgacccacctcaaaacttctcttcctcgcctcaactttcccgaaatcgaacctaaaaaacgacgcccacccgcctcctccacaccacgaaacccgacttccgtcccccaatatcgctcatcctccctaaccacttaccgactcaaaatccacgaaaatttcgaaacaacaacgtcgccgcgctcaacccacacgcgaaaaccgaacgccctactacccgtcgaaaaacgactcctaccgctaatccgctaactaaccgcgataacgacgacgaaaaacgaaaaacgaaaaacgaaaaacgaaaaacgacgcgaaaaacgtctccgaaaaacacgaaacgaacccaaaacgaacgcgaaacgtaacctcgaacgctaaacctcgaaaacaaccgcacccctaccgaaataaaaccgttaaaaaaataacgcgcgctttcccgaacgaactaaacgcgtaaaattaaaacgacgccgcccaaaaccgatcgtctaaaataaaaaaccgcgaataaaacgctaacaaactaaccctcgacgaaacgcgcccgcgtaaacgaccttaaaaaccccaaaccgtaaccctacttatacgaaaactaaaaaacgccaaacgaaccgcctactaaaaacttaacgacgaattccaaacaacgtctataaaaaaaaccgcctcta

SEQ ID NO: 32555 - DNA, 704 bp, Artificial Sequence
  chemically treated genomic DNA (Homo sapiens) CpG-island No: 32555
ggtattgaaggggttttaagagatttttcgatttattttagagtttttttttttcgttttaattttttcggggtcgggtttgggagacggcgtttattcgttttttttatattacggggttcgattttcgttttttagtgtcgtttattttttttagttatttatcgatttaaaatttacggggatttcggggtagtagcgtcgtcgcgtttagtttatacgcggaggtcgagcgttttgttgttcgtcggggaacggtttttgtcgttggttcgttggttgatcgcggtggcggcggcggggggcgaggggcggggggcgaggggcggagggcggcgcggaaggcgttttcgaggggtacgaggcgggtttagggcgggcgcggggcgtggtttcgggcgttgagtttcgagagtagtcgtatttttgtcggggtagaatcgttaaaagggtggcgcgcgttttttcgggcgagttgggcgcgtggggttggagcggcgtcgtttagagtcggtcgtttagggtaggaggtcgcgagtgaggcgttgataggttagttttcgacggggcgcgttcgcgtgaacggttttgggggttttagatcgtggttttgtttgtgcgaagattgggaggcgttaggcgggtcgtttgttgggggtttggcggcgggttttaggtagcgtttgtgagggaggtcgtttttg

SEQ ID NO: 32556 - DNA, 704 bp, Artificial Sequence
  chemically treated genomic DNA (Homo sapiens) CpG-island No: 32556
caaaaacgacctccctcacaaacgctacctaaaacccgccgccaaacccccaacaaacgacccgcctaacgcctcccaatcttcgcacaaacaaaaccacgatctaaaacccccaaaaccgttcacgcgaacgcgccccgtcgaaaactaacctatcaacgcctcactcgcgacctcctaccctaaacgaccgactctaaacgacgccgctccaaccccacgcgcccaactcgcccgaaaaaacgcgcgccacccttttaacgattctaccccgacaaaaatacgactactctcgaaactcaacgcccgaaaccacgccccgcgcccgccctaaacccgcctcgtacccctcgaaaacgccttccgcgccgccctccgcccctcgccccccgcccctcgccccccgccgccgccaccgcgatcaaccaacgaaccaacgacaaaaaccgttccccgacgaacaacaaaacgctcgacctccgcgtataaactaaacgcgacgacgctactaccccgaaatccccgtaaattttaaatcgataaataactaaaaaaaataaacgacactaaaaaacgaaaatcgaaccccgtaatataaaaaaaacgaataaacgccgtctcccaaacccgaccccgaaaaaattaaaacgaaaaaaaaaaactctaaaataaatcgaaaaatctcttaaaaccccttcaatacc

SEQ ID NO: 32557 - DNA, 551 bp, Artificial Sequence
  chemically treated genomic DNA (Homo sapiens) CpG-island No: 32557
tttagcgcgagttttcgggaacgttttaacgtttttagtttgtgttttaggaacggggttcggtttttcgttttaatttttaatagtttgtttgtgtttcgggaacgcgttaatatttttggggagcgttttagttataagatattgtgttgagaacgttgttattattcgtagttgtaagtttcggagcggtagtgggaagtatgcgggattattacgaggtgatcgtttttttgggcgagagggggcgttttttagcgttttattttttttttgtttatcgttagtattatttttaatgggtttaatgggatgttagtcgtgtttttggcggggatttcggagtatcgttgtcgagtgttcgacgtttcgaatttgagtagcgtttggcgtaataatattgtttcgttgtggttgcgggatagtcgcgaggtgttttatagttgtagtcgttatcggttcgttattatttttaatttttttgcgttttggttgtagttcgggcgcgatatggatttggggtagttggagtacgagagttgtttggatgg

SEQ ID NO: 32558 - DNA, 551 bp, Artificial Sequence
  chemically treated genomic DNA (Homo sapiens) CpG-island No: 32558
ccatccaaacaactctcgtactccaactaccccaaatccatatcgcgcccgaactacaaccaaaacgcaaaaaaattaaaaataataacgaaccgataacgactacaactataaaacacctcgcgactatcccgcaaccacaacgaaacaatattattacgccaaacgctactcaaattcgaaacgtcgaacactcgacaacgatactccgaaatccccgccaaaaacacgactaacatcccattaaacccattaaaaataatactaacgataaacaaaaaaaaaataaaacgctaaaaaacgccccctctcgcccaaaaaaacgatcacctcgtaataatcccgcatacttcccactaccgctccgaaacttacaactacgaataataacaacgttctcaacacaatatcttataactaaaacgctccccaaaaatattaacgcgttcccgaaacacaaacaaactattaaaaattaaaacgaaaaaccgaaccccgttcctaaaacacaaactaaaaacgttaaaacgttcccgaaaactcgcgctaaa

SEQ ID NO: 32559 - DNA, 551 bp, Artificial Sequence
  chemically treated genomic DNA (Homo sapiens) CpG-island No: 32559
ttatttaggtagttttcgtgttttagttgttttaggtttatgtcgcgttcgggttatagttagagcgtagagaagttggagatggtggcgagtcggtagcggttgtagttgtggggtatttcgcggttgtttcgtagttatagcgggatagtgttgttgcgttaggcgttgtttaggttcggggcgtcgggtattcgatagcggtgtttcggggttttcgttaggaatacgattgatattttattgaatttattggggatgatgttggcgatgagtaggaagaagatgaggcgttgaaaggcgttttttttcgtttaggaaggcgattatttcgtagtagtttcgtatgttttttattgtcgtttcgaaatttgtaattacgggtgatgatagcgtttttagtatagtgttttgtagttggggcgttttttaaggatgttagcgcgttttcggggtataggtaggttgttagaaattggggcgagaagtcgggtttcgtttttgggatataggttgaaggcgttggagcgttttcgggagttcgcgttgag

SEQ ID NO: 32560 - DNA, 551 bp, Artificial Sequence
  chemically treated genomic DNA (Homo sapiens) CpG-island No: 32560
ctcaacgcgaactcccgaaaacgctccaacgccttcaacctatatcccaaaaacgaaacccgacttctcgccccaatttctaacaacctacctataccccgaaaacgcgctaacatccttaaaaaacgccccaactacaaaacactatactaaaaacgctatcatcacccgtaattacaaatttcgaaacgacaataaaaaacatacgaaactactacgaaataatcgccttcctaaacgaaaaaaaacgcctttcaacgcctcatcttcttcctactcatcgccaacatcatccccaataaattcaataaaatatcaatcgtattcctaacgaaaaccccgaaacaccgctatcgaatacccgacgccccgaacctaaacaacgcctaacgcaacaacactatcccgctataactacgaaacaaccgcgaaataccccacaactacaaccgctaccgactcgccaccatctccaacttctctacgctctaactataacccgaacgcgacataaacctaaaacaactaaaacacgaaaactacctaaataa

SEQ ID NO: 32561 - DNA, 655 bp, Artificial Sequence
  chemically treated genomic DNA (Homo sapiens) CpG-island No: 32561
gcgatttcgtgataatgtcggtattcgggtattaattggtttttgcgaatcgtttttcgtttttcgttcggatttcgaagttcggagtcgtttatagtttgaggcgtcgtgtgtcgttttttggtggtcggaggtcgttattgtcgcggttgagggggcgtttcggtgtattcgtagcgcgttttggtcgttttttggtggtcggaggtcgttattgtttttttttagggggcgtttcggtgtattcgtagcgcgttttggtcgttttttggtggtcggaggtcgttattgtcgcggttgagggggcgtttcggtgtattcgtagcgcgttttggtcgatttttggtggtcggaggttgttattgtcgcggttgaaggggcgtgtttcggtgtattcgtagcgcgttttggttgttttttggtggtcggaggtcgttattgtcgcggttgagggggcgtttcggtgtattcgtagcgcgttttgtttcgttatatatatttcgtgttttttaaatattcgtcgtgggttaagtatgggatttacgtggggcggggatatacggcgataaagagttaggttttcgttgttaaggagttttttcgtaatatcgatgtattaaataaaaggtagtaaaagtgtttgggtttttgcgtt

SEQ ID NO: 32562 - DNA, 655 bp, Artificial Sequence
  chemically treated genomic DNA (Homo sapiens) CpG-island No: 32562
aacgcaaaaacccaaacacttttactaccttttatttaatacatcgatattacgaaaaaactccttaacaacgaaaacctaactctttatcgccgtatatccccgccccacgtaaatcccatacttaacccacgacgaatatttaaaaaacacgaaatatatataacgaaacaaaacgcgctacgaatacaccgaaacgccccctcaaccgcgacaataacgacctccgaccaccaaaaaacaaccaaaacgcgctacgaatacaccgaaacacgccccttcaaccgcgacaataacaacctccgaccaccaaaaatcgaccaaaacgcgctacgaatacaccgaaacgccccctcaaccgcgacaataacgacctccgaccaccaaaaaacgaccaaaacgcgctacgaatacaccgaaacgccccctaaaaaaaaacaataacgacctccgaccaccaaaaaacgaccaaaacgcgctacgaatacaccgaaacgccccctcaaccgcgacaataacgacctccgaccaccaaaaaacgacacacgacgcctcaaactataaacgactccgaacttcgaaatccgaacgaaaaacgaaaaacgattcgcaaaaaccaattaatacccgaataccgacattatcacgaaatcgc

SEQ ID NO: 32563 - DNA, 655 bp, Artificial Sequence
  chemically treated genomic DNA (Homo sapiens) CpG-island No: 32563
aacgtaaaaatttaggtatttttattattttttgtttgatgtatcggtgttacgggaaagttttttggtagcgagggtttggttttttatcgtcgtgtgttttcgttttacgtgggttttatgtttagtttacggcgggtgtttgaaaagtacggaatgtatatggcgggatagggcgcgttgcggatatatcgggacgtttttttagtcgcgatagtaacggttttcggttattagggggtagttagggcgcgttgcggatatatcgggatacgtttttttagtcgcgatagtaatagttttcggttattaggggtcggttagggcgcgttgcggatatatcgggacgtttttttagtcgcgatagtaacggttttcggttattagggggcggttagggcgcgttgcggatatatcgggacgttttttggggggggatagtaacggttttcggttattagagggcggttagggcgcgttgcggatatatcgggacgtttttttagtcgcgatagtaacggttttcggttattagggggcggtatacggcgttttaaattgtaaacggtttcgggtttcggaattcgggcggggagcggagagcggttcgtaaaagttagttggtgttcggatgtcggtattgttacgggatcgt

SEQ ID NO: 32564 - DNA, 655 bp, Artificial Sequence
  chemically treated genomic DNA (Homo sapiens) CpG-island No: 32564
acgatcccgtaacaataccgacatccgaacaccaactaacttttacgaaccgctctccgctccccgcccgaattccgaaacccgaaaccgtttacaatttaaaacgccgtataccgccccctaataaccgaaaaccgttactatcgcgactaaaaaaacgtcccgatatatccgcaacgcgccctaaccgccctctaataaccgaaaaccgttactatccccccccaaaaaacgtcccgatatatccgcaacgcgccctaaccgccccctaataaccgaaaaccgttactatcgcgactaaaaaaacgtcccgatatatccgcaacgcgccctaaccgacccctaataaccgaaaactattactatcgcgactaaaaaaacgtatcccgatatatccgcaacgcgccctaactaccccctaataaccgaaaaccgttactatcgcgactaaaaaaacgtcccgatatatccgcaacgcgccctatcccgccatatacattccgtacttttcaaacacccgccgtaaactaaacataaaacccacgtaaaacgaaaacacacgacgataaaaaaccaaaccctcgctaccaaaaaactttcccgtaacaccgatacatcaaacaaaaaataataaaaatacctaaatttttacgtt

SEQ ID NO: 32565 - DNA, 821 bp, Artificial Sequence
  chemically treated genomic DNA (Homo sapiens) CpG-island No: 32565
cgttcgttatttagtatttttgttttagggtcgttagcgggtaattcgttttttgttcgtattttattttcgttcgttaattcgcgttttttgttttgggcgcgtaatttgttttgttcggggtcgtttttgcgtttttcggattttttttcgtcgttgttagcgtaaagtgattgtcgttgtatttattttttttaggatatggtggggaggttggggcgggggaaggggaacggttagattttcgtcgtcgttgttgtcgtcgttattagtaagtttaatattggttgatcggcggtgaggatggagaggatgataatttcggtagtggtagtcgttttgttgacggtgggtagagtaatagtgttgttattttataagaggcggcgaggtagcggcgttaaatcgcgtagagggggacgcgggtattcgttcgtttttagcggcggcggtcgggtttttggcgggtttttttttcggggttgcgcgttcgttcggcgttgatagcggcgtttttgggagtcgggaagttcggtaggaggatttcgcgttcgtcgtttcgtagcgttatttttcgcgtttttttttcgggttttgggtggtcggtgatagtttcggcggtcgagcgcgtgtgtgagggggcggtcgtagggggagtttgcgttttttttttcgggttacgtttttacgagcgggaggaggcggtatcgcgttcggttattcgcgggtgggaaacgggtaggggcgtcggtagtcgtttttttattacggttattgataatttggaggttaaaggaaaattgagtttaaatgtacgtatt

SEQ ID NO: 32566 - DNA, 821 bp, Artificial Sequence
  chemically treated genomic DNA (Homo sapiens) CpG-island No: 32566
aatacgtacatttaaactcaattttcctttaacctccaaattatcaataaccgtaataaaaaaacgactaccgacgcccctacccgtttcccacccgcgaataaccgaacgcgataccgcctcctcccgctcgtaaaaacgtaacccgaaaaaaaaaacgcaaactccccctacgaccgccccctcacacacgcgctcgaccgccgaaactatcaccgaccacccaaaacccgaaaaaaaaacgcgaaaaataacgctacgaaacgacgaacgcgaaatcctcctaccgaacttcccgactcccaaaaacgccgctatcaacgccgaacgaacgcgcaaccccgaaaaaaaaacccgccaaaaacccgaccgccgccgctaaaaacgaacgaatacccgcgtccccctctacgcgatttaacgccgctacctcgccgcctcttataaaataacaacactattactctacccaccgtcaacaaaacgactaccactaccgaaattatcatcctctccatcctcaccgccgatcaaccaatattaaacttactaataacgacgacaacaacgacgacgaaaatctaaccgttccccttcccccgccccaacctccccaccatatcctaaaaaaaataaatacaacgacaatcactttacgctaacaacgacgaaaaaaaatccgaaaaacgcaaaaacgaccccgaacaaaacaaattacgcgcccaaaacaaaaaacgcgaattaacgaacgaaaataaaatacgaacaaaaaacgaattacccgctaacgaccctaaaacaaaaatactaaataacgaacg

SEQ ID NO: 32567 - DNA, 821 bp, Artificial Sequence
  chemically treated genomic DNA (Homo sapiens) CpG-island No: 32567
ggtgcgtgtatttgggtttagtttttttttggtttttaggttgttagtggtcgtagtgggagggcggttgtcggcgtttttgttcgttttttattcgcgggtggtcggacgcggtgtcgttttttttcgttcgtgagggcgtgattcggggaggggggcgtaggttttttttgcgatcgtttttttatatacgcgttcggtcgtcggagttgttatcggttatttagggttcggggagggggcgcggagagtggcgttgcggagcggcgggcgcgggatttttttgtcggatttttcggtttttagggacgtcgttgttaacgtcgagcggacgcgtagtttcgggagaggggttcgttagaggttcggtcgtcgtcgttgggggcgggcgggtgttcgcgtttttttttgcgcgatttggcgtcgttgtttcgtcgttttttgtagggtaatagtattattgttttatttatcgttagtagggcgattgttattgtcgggattattattttttttatttttatcgtcgattagttaatattggatttgttggtggcggcggtagtagcggcggcgggagtttagtcgttttttttttttcgttttagtttttttattatgttttagaaaaggtgagtgtagcgatagttattttgcgttgatagcggcgagagggggttcggagagcgtaggggcggtttcgggtaaggtaggttgcgcgtttagggtagagggcgcgggttggcgagcggaggtgggatgcgggtaggagacgagttgttcgttggcggttttggggtaagggtgttgggtggcgggcg

SEQ ID NO: 32568 - DNA, 821 bp, Artificial Sequence
  chemically treated genomic DNA (Homo sapiens) CpG-island No: 32568
cgcccgccacccaacacccttaccccaaaaccgccaacgaacaactcgtctcctacccgcatcccacctccgctcgccaacccgcgccctctaccctaaacgcgcaacctaccttacccgaaaccgcccctacgctctccgaaccccctctcgccgctatcaacgcaaaataactatcgctacactcaccttttctaaaacataataaaaaaactaaaacgaaaaaaaaaaaacgactaaactcccgccgccgctactaccgccgccaccaacaaatccaatattaactaatcgacgataaaaataaaaaaaataataatcccgacaataacaatcgccctactaacgataaataaaacaataatactattaccctacaaaaaacgacgaaacaacgacgccaaatcgcgcaaaaaaaaacgcgaacacccgcccgcccccaacgacgacgaccgaacctctaacgaacccctctcccgaaactacgcgtccgctcgacgttaacaacgacgtccctaaaaaccgaaaaatccgacaaaaaaatcccgcgcccgccgctccgcaacgccactctccgcgccccctccccgaaccctaaataaccgataacaactccgacgaccgaacgcgtatataaaaaaacgatcgcaaaaaaaacctacgcccccctccccgaatcacgccctcacgaacgaaaaaaaacgacaccgcgtccgaccacccgcgaataaaaaacgaacaaaaacgccgacaaccgccctcccactacgaccactaacaacctaaaaaccaaaaaaaaactaaacccaaatacacgcacc

SEQ ID NO: 32569 - DNA, 700 bp, Artificial Sequence
  chemically treated genomic DNA (Homo sapiens) CpG-island No: 32569
tttcgcgcggggggcgggagggaaaagttttttttttttgtttttcggttgtttatttcgttaggttgttttttttttcgtttttttcgggttcgtcgcgtttttgttttattttcgtcgtgggggggcgtcgaggagggagcgggcgtttgtgcgcggaggcgtgcggggagttggttggggcgttgcggtcgcgatcggttttttcgttttgacggcggtttagacgttcgcggaggcggttcggcggggtaagtcgaggaaggggtcgagagtcgggattttttttttttcgttcgcggcgcgtcgcgcgttttcgcgttttttggcgcgttttcgcgttttcgtgttcgttcgggtagatatttacgtagacgcgaaagtgaaaggggggcgattgggttcggtaggcgggcggtcggcggcgcgcgggtacgcggtaggggatagaggatggatgggtgaattcggatttcgggattttttcgcgttcgttgtttttttgcggagttttttcggagttttacgtttttatttcggttacggagattattacgttaggagatatgtatgcgtgtgtatgtgtgtgcgcgcgtgtttacgcgcgtgtgcgaggtacgtttttgttttagatttttttttcgtatcgttatatatatttttagatggaagattgggggtttgggaggggggagaagtg

SEQ ID NO: 32570 - DNA, 700 bp, Artificial Sequence
  chemically treated genomic DNA (Homo sapiens) CpG-island No: 32570
cacttctcccccctcccaaacccccaatcttccatctaaaaatatatataacgatacgaaaaaaaaatctaaaacaaaaacgtacctcgcacacgcgcgtaaacacgcgcgcacacacatacacacgcatacatatctcctaacgtaataatctccgtaaccgaaataaaaacgtaaaactccgaaaaaactccgcaaaaaaacaacgaacgcgaaaaaatcccgaaatccgaattcacccatccatcctctatcccctaccgcgtacccgcgcgccgccgaccgcccgcctaccgaacccaatcgcccccctttcactttcgcgtctacgtaaatatctacccgaacgaacacgaaaacgcgaaaacgcgccaaaaaacgcgaaaacgcgcgacgcgccgcgaacgaaaaaaaaaaaatcccgactctcgaccccttcctcgacttaccccgccgaaccgcctccgcgaacgtctaaaccgccgtcaaaacgaaaaaaccgatcgcgaccgcaacgccccaaccaactccccgcacgcctccgcgcacaaacgcccgctccctcctcgacgcccccccacgacgaaaataaaacaaaaacgcgacgaacccgaaaaaaacgaaaaaaaaaacaacctaacgaaataaacaaccgaaaaacaaaaaaaaaaaacttttccctcccgccccccgcgcgaaa

SEQ ID NO: 32571 - DNA, 700 bp, Artificial Sequence
  chemically treated genomic DNA (Homo sapiens) CpG-island No: 32571
tatttttttttttttttaaatttttaattttttatttaagggtgtgtgtaacggtgcgggggaagagtttggggtagaagcgtatttcgtatacgcgcgtgaatacgcgcgtatatatatgtatacgtatatatattttttgacgtggtgattttcgtggtcggggtgggggcgtgggatttcggggaggtttcgtagaggggtagcgggcgcgggagaatttcgggattcgggtttatttatttattttttgttttttgtcgcgtgttcgcgcgtcgtcggtcgttcgtttgtcgggtttagtcgttttttttttattttcgcgtttgcgtaggtgtttgttcgagcgggtacgagggcgcgggggcgcgttaggagacgcgggggcgcgcggcgcgtcgcgagcggaggaggaggggtttcggttttcggtttttttttcggtttgtttcgtcgagtcgttttcgcgggcgtttgagtcgtcgttagagcgaggggatcggtcgcgatcgtagcgttttagttagtttttcgtacgttttcgcgtatagacgttcgtttttttttcggcgtttttttacggcgggggtggggtagaggcgcggcgagttcgagaggggcggggagaggagtagtttggcggggtgggtagtcgaggagtaggaaaagaaaatttttttttttcgtttttcgcgcgagg

SEQ ID NO: 32572 - DNA, 700 bp, Artificial Sequence
  chemically treated genomic DNA (Homo sapiens) CpG-island No: 32572
cctcgcgcgaaaaacgaaaaaaaaaaattttcttttcctactcctcgactacccaccccgccaaactactcctctccccgcccctctcgaactcgccgcgcctctaccccacccccgccgtaaaaaaacgccgaaaaaaaaacgaacgtctatacgcgaaaacgtacgaaaaactaactaaaacgctacgatcgcgaccgatcccctcgctctaacgacgactcaaacgcccgcgaaaacgactcgacgaaacaaaccgaaaaaaaaaccgaaaaccgaaacccctcctcctccgctcgcgacgcgccgcgcgcccccgcgtctcctaacgcgcccccgcgccctcgtacccgctcgaacaaacacctacgcaaacgcgaaaataaaaaaaaaacgactaaacccgacaaacgaacgaccgacgacgcgcgaacacgcgacaaaaaacaaaaaataaataaataaacccgaatcccgaaattctcccgcgcccgctacccctctacgaaacctccccgaaatcccacgcccccaccccgaccacgaaaatcaccacgtcaaaaaatatatatacgtatacatatatatacgcgcgtattcacgcgcgtatacgaaatacgcttctaccccaaactcttcccccgcaccgttacacacacccttaaataaaaaattaaaaatttaaaaaaaaaaaaaaata

SEQ ID NO: 32573 - DNA, 1057 bp, Artificial Sequence
  chemically treated genomic DNA (Homo sapiens) CpG-island No: 32573
agagtttcgggacgggtttcgtgggttaggtgttgtttttgagagatgagtaaggatcggttcgggacgttggggaatggagggtaaaggttttggggttagacgaagtcgtttttgcgaaaggggcgttttttttcgtcgtggaagggatttttatttcggggaacgtcgtgcgagtgggatattggcgcgtacggttagggcgcggtttcgttaaggttgagaaggtttttgaggtagggcgtttcggacggggattttcggtttttagttttttcggcgagaggatttcggagtcgcgtatgttttggtcgaggtcgagcggtattggaaggtcggaggatttcgggtagttagtttcgggtttttcgggagttttaatttggagcgttcggtcggggtttttcgcgttcgtgtttcggcgtcggaggtcgtcgggttttttatttgttttgtttatttttagcgcgcggggttcgggtcgtcgtcggcgttttagttcgttcgcgggttttagtgcgatttcgtatatcgttttttttcgcggtcgtttcgcggggttcgtattttttggcgttcgttcggtttcggcgcgtttcggatttcgcgcggcgcgtagggtagtgggggcgcgggtcgcgagttttcggggcggggtcgtcgggcgggggcgcggggcgggggaggaggagggggcgcgagcgcgggggcggcggttggggtagcgtcgggcgtcgcgttcgttttcggtttcgggcgcgttgcgttttggtcgtcgtgttttcgtttgcgtttttgtttgcgtcgtagtcgcgtttttatttttttttagatatttttttcgttttcgaagaggaaggattttttttttttttgttcggttagagatttagggaggcgagggtcggggcgtttttgcgtatatttaaaggggtcgtggttatgggtatcgcgggaggcgttgggggttcgaaggacgagaatttagcgagttgggtttttggggtgtttttggttttttcgtttagcggattatttatttttttatttttaattt

SEQ ID NO: 32574 - DNA, 1057 bp, Artificial Sequence
  chemically treated genomic DNA (Homo sapiens) CpG-island No: 32574
aaattaaaaataaaaaaataaataatccgctaaacgaaaaaaccaaaaacaccccaaaaacccaactcgctaaattctcgtccttcgaacccccaacgcctcccgcgatacccataaccacgacccctttaaatatacgcaaaaacgccccgaccctcgcctccctaaatctctaaccgaacaaaaaaaaaaaaaatccttcctcttcgaaaacgaaaaaaatatctaaaaaaaaataaaaacgcgactacgacgcaaacaaaaacgcaaacgaaaacacgacgaccaaaacgcaacgcgcccgaaaccgaaaacgaacgcgacgcccgacgctaccccaaccgccgcccccgcgctcgcgccccctcctcctcccccgccccgcgcccccgcccgacgaccccgccccgaaaactcgcgacccgcgcccccactaccctacgcgccgcgcgaaatccgaaacgcgccgaaaccgaacgaacgccaaaaaatacgaaccccgcgaaacgaccgcgaaaaaaaacgatatacgaaatcgcactaaaacccgcgaacgaactaaaacgccgacgacgacccgaaccccgcgcgctaaaaataaacaaaacaaataaaaaacccgacgacctccgacgccgaaacacgaacgcgaaaaaccccgaccgaacgctccaaattaaaactcccgaaaaacccgaaactaactacccgaaatcctccgaccttccaataccgctcgacctcgaccaaaacatacgcgactccgaaatcctctcgccgaaaaaactaaaaaccgaaaatccccgtccgaaacgccctacctcaaaaaccttctcaaccttaacgaaaccgcgccctaaccgtacgcgccaatatcccactcgcacgacgttccccgaaataaaaatcccttccacgacgaaaaaaaacgcccctttcgcaaaaacgacttcgtctaaccccaaaacctttaccctccattccccaacgtcccgaaccgatccttactcatctctcaaaaacaacacctaacccacgaaacccgtcccgaaactct

SEQ ID NO: 32575 - DNA, 1057 bp, Artificial Sequence
  chemically treated genomic DNA (Homo sapiens) CpG-island No: 32575
gagttaaaaataaagggatagatggttcgttgggcgaaggagttaggaatattttagaaatttaattcgttgagttttcgtttttcgaatttttagcgtttttcgcggtgtttatggttacggtttttttaaatgtgcgtagggacgtttcggttttcgtttttttgaatttttgatcgagtaggggaaaaaaaaatttttttttttcgggagcggaggaaatgtttaggagggggtggaggcgcggttgcggcgtaggtagaggcgtaggcggaggtacggcggttagagcgtagcgcgttcggagtcgggagcggacgcgacgttcggcgttgttttagtcgtcgttttcgcgttcgcgttttttttttttttttcgtttcgcgttttcgttcggcggtttcgtttcggaggttcgcggttcgcgtttttattgttttgcgcgtcgcgcggagttcgaggcgcgtcggggtcgggcgggcgttagggggtgcgggtttcgcggggcggtcgcggagggaggcggtgtgcggagtcgtattgggattcgcggacggattgaaacgtcgacggcggttcgggtttcgcgcgttgaagatgaatagagtaggtaggaggttcggcgattttcggcgtcgaggtacgagcgcgagggatttcggtcgggcgttttaagttggagttttcggggagttcggggttagttgttcgaaatttttcgattttttagtgtcgttcggtttcggttaaagtatgcgcggtttcggggttttttcgtcgaggaggttgagaatcgggggttttcgttcgaagcgttttgttttagggatttttttagttttggcgaggtcgcgttttggtcgtgcgcgttagtattttattcgtacggcgtttttcggagtgagggttttttttacgacgaagaaagacgtttttttcgtaaaagcgatttcgtttggttttaaaatttttgttttttattttttagcgtttcggatcggtttttgtttattttttaggggtaatatttgatttacggggttcgtttcggagtttt

SEQ ID NO: 32576 - DNA, 1057 bp, Artificial Sequence
  chemically treated genomic DNA (Homo sapiens) CpG-island No: 32576
aaaactccgaaacgaaccccgtaaatcaaatattacccctaaaaaataaacaaaaaccgatccgaaacgctaaaaaataaaaaacaaaaattttaaaaccaaacgaaatcgcttttacgaaaaaaacgtctttcttcgtcgtaaaaaaaaccctcactccgaaaaacgccgtacgaataaaatactaacgcgcacgaccaaaacgcgacctcgccaaaactaaaaaaatccctaaaacaaaacgcttcgaacgaaaacccccgattctcaacctcctcgacgaaaaaaccccgaaaccgcgcatactttaaccgaaaccgaacgacactaaaaaatcgaaaaatttcgaacaactaaccccgaactccccgaaaactccaacttaaaacgcccgaccgaaatccctcgcgctcgtacctcgacgccgaaaatcgccgaacctcctacctactctattcatcttcaacgcgcgaaacccgaaccgccgtcgacgtttcaatccgtccgcgaatcccaatacgactccgcacaccgcctccctccgcgaccgccccgcgaaacccgcaccccctaacgcccgcccgaccccgacgcgcctcgaactccgcgcgacgcgcaaaacaataaaaacgcgaaccgcgaacctccgaaacgaaaccgccgaacgaaaacgcgaaacgaaaaaaaaaaaaaaaacgcgaacgcgaaaacgacgactaaaacaacgccgaacgtcgcgtccgctcccgactccgaacgcgctacgctctaaccgccgtacctccgcctacgcctctacctacgccgcaaccgcgcctccaccccctcctaaacatttcctccgctcccgaaaaaaaaaaatttttttttcccctactcgatcaaaaattcaaaaaaacgaaaaccgaaacgtccctacgcacatttaaaaaaaccgtaaccataaacaccgcgaaaaacgctaaaaattcgaaaaacgaaaactcaacgaattaaatttctaaaatattcctaactccttcgcccaacgaaccatctatccctttatttttaactc

SEQ ID NO: 32577 - DNA, 655 bp, Artificial Sequence
  chemically treated genomic DNA (Homo sapiens) CpG-island No: 32577
gacgttttgggttgggcggtttttaggttcgcgtcgtcgggcggggtttcggcggcggcgcgcgcgtgcgcggttgggggcgcggttttgcgggttgcgcgagttggaggtgcgcgtgagcgagttgggtttgggttacgcgttcgacgagacggtgttgtttcgttattgcgtaggcgtttgcgaggttgtcgcgcgcgtttacgatttcgggttgcgacgattgcgttagcggcggcgtttgcggcgggagcgggtgcgcgcgtagttttgttgtcgttcgacggtttacgaggacgaggtgttttttttggacgcgtatagtcgttattatacggtgtacgagttgtcggcgcgcgagtgcgtttgcgtgtgattttattttattcggtcggcgcggcggttatttttttcgtttcgacggtattattggtcggtttcgcgaaagattgcgcgtgcgtagagtacgtcggcgcggtttcgggattttcgcgataattgtattgagataaagtgtggtaattcgagttggttggtgatttattttcggcgaggggttcgcgtgtgggttacgtcgtcgtttttatcgggaaagcggggattagtggggggggtttagttgtagggtagtgggaggatgttgtttgttttgggg

SEQ ID NO: 32578 - DNA, 655 bp, Artificial Sequence
  chemically treated genomic DNA (Homo sapiens) CpG-island No: 32578
ccccaaaacaaacaacatcctcccactaccctacaactaaaccccccccactaatccccgctttcccgataaaaacgacgacgtaacccacacgcgaacccctcgccgaaaataaatcaccaaccaactcgaattaccacactttatctcaatacaattatcgcgaaaatcccgaaaccgcgccgacgtactctacgcacgcgcaatctttcgcgaaaccgaccaataataccgtcgaaacgaaaaaaataaccgccgcgccgaccgaataaaataaaatcacacgcaaacgcactcgcgcgccgacaactcgtacaccgtataataacgactatacgcgtccaaaaaaaacacctcgtcctcgtaaaccgtcgaacgacaacaaaactacgcgcgcacccgctcccgccgcaaacgccgccgctaacgcaatcgtcgcaacccgaaatcgtaaacgcgcgcgacaacctcgcaaacgcctacgcaataacgaaacaacaccgtctcgtcgaacgcgtaacccaaacccaactcgctcacgcgcacctccaactcgcgcaacccgcaaaaccgcgcccccaaccgcgcacgcgcgcgccgccgccgaaaccccgcccgacgacgcgaacctaaaaaccgcccaacccaaaacgtc

SEQ ID NO: 32579 - DNA, 655 bp, Artificial Sequence
  chemically treated genomic DNA (Homo sapiens) CpG-island No: 32579
ttttaaagtaaatagtatttttttattattttgtagttgggttttttttattggttttcgttttttcggtggagacggcgacgtggtttatacgcgagtttttcgtcgaggatgaattattagttagttcgagttgttatattttattttagtatagttatcgcgagagtttcggggtcgcgtcggcgtgttttacgtacgcgtagtttttcgcggggtcggttagtggtgtcgtcgaggcggggggagtggtcgtcgcgtcggtcgagtgaggtagggttatacgtaggcgtattcgcgcgtcgatagttcgtgtatcgtgtggtagcggttgtgcgcgtttaggaaggatatttcgttttcgtaggtcgtcgggcggtagtagggttgcgcgcgtattcgttttcgtcgtaggcgtcgtcgttggcgtagtcgtcgtagttcgaggtcgtagacgcgcgcggtagtttcgtaggcgtttgcgtagtagcggaatagtatcgtttcgtcggacgcgtagtttaggtttagttcgtttacgcgtatttttagttcgcgtagttcgtaaggtcgcgtttttaatcgcgtacgcgcgcgtcgtcgtcggggtttcgttcgacggcgcggatttgggggtcgtttagtttagggcgtt

SEQ ID NO: 32580 - DNA, 655 bp, Artificial Sequence
  chemically treated genomic DNA (Homo sapiens) CpG-island No: 32580
aacgccctaaactaaacgacccccaaatccgcgccgtcgaacgaaaccccgacgacgacgcgcgcgtacgcgattaaaaacgcgaccttacgaactacgcgaactaaaaatacgcgtaaacgaactaaacctaaactacgcgtccgacgaaacgatactattccgctactacgcaaacgcctacgaaactaccgcgcgcgtctacgacctcgaactacgacgactacgccaacgacgacgcctacgacgaaaacgaatacgcgcgcaaccctactaccgcccgacgacctacgaaaacgaaatatccttcctaaacgcgcacaaccgctaccacacgatacacgaactatcgacgcgcgaatacgcctacgtataaccctacctcactcgaccgacgcgacgaccactccccccgcctcgacgacaccactaaccgaccccgcgaaaaactacgcgtacgtaaaacacgccgacgcgaccccgaaactctcgcgataactatactaaaataaaatataacaactcgaactaactaataattcatcctcgacgaaaaactcgcgtataaaccacgtcgccgtctccaccgaaaaaacgaaaaccaataaaaaaaacccaactacaaaataataaaaaaatactatttactttaaaa

SEQ ID NO: 32581 - DNA, 715 bp, Artificial Sequence
  chemically treated genomic DNA (Homo sapiens) CpG-island No: 32581
gagtcgttgttcggttgcgataggtttagcgtttcggttaggtagtttattgagttagcggtaaatatttcggagtaggaatcgtaggtcggatacgcggaacgtttaatttgatcgttttgggagttagatattttcgggtttgcgttttggattatcgtattaattagatcgagtttgatgatttgatcggaaagtttggttttttcggtttttatcgggtcgtcggaaataaagattatcggaatatttaggcgtagggaagttattagtattttcggggtgattttgtcgtagttagagatgtagattatggcgtcggcgtagtgggcgttgattatatatttaacggaattagcgattagttcgcgagatggtagtgaataaagtattttttcgtggtttatggtaattttattatttatcgtaatggtgttgaattttttggtaacgtcgttagtcgttttaatttgttcggcgattagtttatcgagatcgcgtagatggacgtgattcggtataaattgggtgaacgagtttataatcgcgataatcggtttatcgaaatcggcgtcggttatttcggtggcgcgttatagcgtacgagtattcgttatattacgattatgagtggtggtggcggaacggtatttaggtatattttatttatttttagtgtttgtttcgtaaatgggacggtgcgtgtcgttttatt

SEQ ID NO: 32582 - DNA, 715 bp, Artificial Sequence
  chemically treated genomic DNA (Homo sapiens) CpG-island No: 32582
aataaaacgacacgcaccgtcccatttacgaaacaaacactaaaaataaataaaatatacctaaataccgttccgccaccaccactcataatcgtaatataacgaatactcgtacgctataacgcgccaccgaaataaccgacgccgatttcgataaaccgattatcgcgattataaactcgttcacccaatttataccgaatcacgtccatctacgcgatctcgataaactaatcgccgaacaaattaaaacgactaacgacgttaccaaaaaattcaacaccattacgataaataataaaattaccataaaccacgaaaaaatactttattcactaccatctcgcgaactaatcgctaattccgttaaatatataatcaacgcccactacgccgacgccataatctacatctctaactacgacaaaatcaccccgaaaatactaataacttccctacgcctaaatattccgataatctttatttccgacgacccgataaaaaccgaaaaaaccaaactttccgatcaaatcatcaaactcgatctaattaatacgataatccaaaacgcaaacccgaaaatatctaactcccaaaacgatcaaattaaacgttccgcgtatccgacctacgattcctactccgaaatatttaccgctaactcaataaactacctaaccgaaacgctaaacctatcgcaaccgaacaacgactc

SEQ ID NO: 32583 - DNA, 715 bp, Artificial Sequence
  chemically treated genomic DNA (Homo sapiens) CpG-island No: 32583
aatgggacggtacgtatcgttttatttacgagatagatattgggagtaaataaagtatgtttaagtatcgtttcgttattattatttatggtcgtaatatggcgggtgttcgtgcgttgtggcgcgttatcggaatgatcgacgtcgatttcggtaagtcgattatcgcggttgtgaattcgtttatttaatttgtatcgggttacgtttatttgcgcgatttcggtaaattggtcgtcgaataaattgaagcggttggcggcgttgttaaagagtttaatattattgcggtggatgatgggattgttatgggttacggggggatgttttatttattgttatttcgcgaattgatcgttgatttcgttgagtatatggttaacgtttattgcgtcgacgttatggtttgtatttttaattgcgataaaattatttcggggatgttgatggtttttttgcgtttgaatatttcggtgatttttgttttcggcggttcgatggaggtcgggaaaattaaatttttcgattagattattaagttcgatttggttgatgcgatgatttagggcgtagattcgaaagtatttgatttttagagcgattaggttgaacgtttcgcgtgttcgatttgcggtttttgtttcgggatgtttatcgttaatttaatgaattgtttgatcgaagcgttgggtttgtcgtagtcgggtaacggttt

SEQ ID NO: 32584 - DNA, 715 bp, Artificial Sequence
  chemically treated genomic DNA (Homo sapiens) CpG-island No: 32584
aaaccgttacccgactacgacaaacccaacgcttcgatcaaacaattcattaaattaacgataaacatcccgaaacaaaaaccgcaaatcgaacacgcgaaacgttcaacctaatcgctctaaaaatcaaatactttcgaatctacgccctaaatcatcgcatcaaccaaatcgaacttaataatctaatcgaaaaatttaattttcccgacctccatcgaaccgccgaaaacaaaaatcaccgaaatattcaaacgcaaaaaaaccatcaacatccccgaaataattttatcgcaattaaaaatacaaaccataacgtcgacgcaataaacgttaaccatatactcaacgaaatcaacgatcaattcgcgaaataacaataaataaaacatccccccgtaacccataacaatcccatcatccaccgcaataatattaaactctttaacaacgccgccaaccgcttcaatttattcgacgaccaatttaccgaaatcgcgcaaataaacgtaacccgatacaaattaaataaacgaattcacaaccgcgataatcgacttaccgaaatcgacgtcgatcattccgataacgcgccacaacgcacgaacacccgccatattacgaccataaataataataacgaaacgatacttaaacatactttatttactcccaatatctatctcgtaaataaaacgatacgtaccgtcccatt

SEQ ID NO: 32585 - DNA, 562 bp, Artificial Sequence
  chemically treated genomic DNA (Homo sapiens) CpG-island No: 32585
gggaacgcgtagcgcgaggtttcgggttcgttaagttttcggtatgtagcgcggcgatttcggcgagtattttggcgcgcggagttggtattttggcgttgttggtggcggcggagatagttgtgaagtgtgaggttttttgtttgttggtagttaggggcgacgaggcgggacgttatggaagtgtaagttttttcgggcgcgttttttttcggtcgaggagtttaacggtttgatcgttgagagttgagagtcgagagtcgtggggattgggcgattttcgtacgggagtgagggtagcgggtcggttttgttcgggagggtcgcggggtggtgacggggacgaacgggattttcgttttgttttttcgaattttcgttttttttttacgtcgtgtttggtgcggggtcgagtattttcgtgttcggttgttttttaatgtgtttttttttttttttattcgtttattagcgtttttgggttatagtgcgggggtggagtttagtttggtattcgatttcggatttagaaggttataaaggtttgagtttgttcgttttg

SEQ ID NO: 32586 - DNA, 562 bp, Artificial Sequence
  chemically treated genomic DNA (Homo sapiens) CpG-island No: 32586
caaaacgaacaaactcaaacctttataaccttctaaatccgaaatcgaataccaaactaaactccacccccgcactataacccaaaaacgctaataaacgaataaaaaaaaaaaaaaacacattaaaaaacaaccgaacacgaaaatactcgaccccgcaccaaacacgacgtaaaaaaaaaacgaaaattcgaaaaaacaaaacgaaaatcccgttcgtccccgtcaccaccccgcgaccctcccgaacaaaaccgacccgctaccctcactcccgtacgaaaatcgcccaatccccacgactctcgactctcaactctcaacgatcaaaccgttaaactcctcgaccgaaaaaaaacgcgcccgaaaaaacttacacttccataacgtcccgcctcgtcgcccctaactaccaacaaacaaaaaacctcacacttcacaactatctccgccgccaccaacaacgccaaaataccaactccgcgcgccaaaatactcgccgaaatcgccgcgctacataccgaaaacttaacgaacccgaaacctcgcgctacgcgttccc

SEQ ID NO: 32587 - DNA, 562 bp, Artificial Sequence
  chemically treated genomic DNA (Homo sapiens) CpG-island No: 32587
tagggcggatagatttaggtttttatagttttttaagttcggggtcggatattagattgggttttattttcgtattgtgatttagaaacgttggtaaacgaatgagagaaggagggggtatattgaaaggtagtcggatacggaagtgttcggtttcgtattagatacggcgtggaggggaagcgaaggttcggaagggtaaagcgagagtttcgttcgttttcgttattatttcgcggttttttcggatagggtcggttcgttgtttttattttcgtacgagggtcgtttagtttttacggttttcggtttttagtttttagcggttaaatcgttgggtttttcggtcgaaaagggacgcgttcgagaagatttatatttttatgacgtttcgtttcgtcgtttttagttgttagtagataaagaattttatattttatagttgttttcgtcgttattaatagcgttaaggtgttagtttcgcgcgttaaggtgttcgtcgggatcgtcgcgttgtatgtcgggagtttggcggattcggaatttcgcgttgcgcgttttt

SEQ ID NO: 32588 - DNA, 562 bp, Artificial Sequence
  chemically treated genomic DNA (Homo sapiens) CpG-island No: 32588
aaaaacgcgcaacgcgaaattccgaatccgccaaactcccgacatacaacgcgacgatcccgacgaacaccttaacgcgcgaaactaacaccttaacgctattaataacgacgaaaacaactataaaatataaaattctttatctactaacaactaaaaacgacgaaacgaaacgtcataaaaatataaatcttctcgaacgcgtcccttttcgaccgaaaaacccaacgatttaaccgctaaaaactaaaaaccgaaaaccgtaaaaactaaacgaccctcgtacgaaaataaaaacaacgaaccgaccctatccgaaaaaaccgcgaaataataacgaaaacgaacgaaactctcgctttacccttccgaaccttcgcttcccctccacgccgtatctaatacgaaaccgaacacttccgtatccgactacctttcaatataccccctccttctctcattcgtttaccaacgtttctaaatcacaatacgaaaataaaacccaatctaatatccgaccccgaacttaaaaaactataaaaacctaaatctatccgcccta

SEQ ID NO: 32589 - DNA, 958 bp, Artificial Sequence
  chemically treated genomic DNA (Homo sapiens) CpG-island No: 32589
cgtataacgggtaggatgatggggcgatgagtttaagaagcgtagtcggggtagacgtgggggtaaatgttcgatttcggcgagacgagggttttattttaggggattgcggggttaggacgtggttttagggttgcgagaagggagagaaagggtagaggggagaggtttcggcggtcggggcgaagtcgagttcgggaaatgtcggcgatgggggaaggggcgtgggagtaggggtcggacgggttagattcggggtttcgcgttcgggggcggggttggataatcgggaggtatcgagtagaaggcgataaggggttaagggatgttaggacggggtatagggtcgggtgtgaggagacgagaggggagcggagtcgtagcgagcgtcgcgttttttttatttgggatgagtgaggagtcgtcgcgtcgtttggacggtattttggttttagtcgttggttttatcgttttcggtggggggttattcgggagttcgtttttatcgttaagcgtcggtagttgttagtttggatcggtttcgtagagtagcgtcgtttcgattcgtaatcgaagtcgttttagtagcgtttttcgcggtcgttaatttagcgataatcgttagggttcggggaggtggcgggattatatatttgttacgattggttgagcggacgatgtgtcggttgttttgattcgtgagtttcggtcggttgtttatcgaaggaggcgcggttgggaatggagttgggttcggtaggcgtcgaggggcgggggtttgacgtcgtagtcggttagcgtttttatagtttttttcgtgcgcgttttcgagggggtttttcggtagtcgtaggtttggtcgggtggttgttttagtaatagcgcgcgtggtttggttgtaggggagtcgcgggtaggtggcggtttttatcgtttttatttttaacgtgggtgtttt

SEQ ID NO: 32590 - DNA, 958 bp, Artificial Sequence
  chemically treated genomic DNA (Homo sapiens) CpG-island No: 32590
aaaacacccacgttaaaaataaaaacgataaaaaccgccacctacccgcgactcccctacaaccaaaccacgcgcgctattactaaaacaaccacccgaccaaacctacgactaccgaaaaaccccctcgaaaacgcgcacgaaaaaaactataaaaacgctaaccgactacgacgtcaaacccccgcccctcgacgcctaccgaacccaactccattcccaaccgcgcctccttcgataaacaaccgaccgaaactcacgaatcaaaacaaccgacacatcgtccgctcaaccaatcgtaacaaatatataatcccgccacctccccgaaccctaacgattatcgctaaattaacgaccgcgaaaaacgctactaaaacgacttcgattacgaatcgaaacgacgctactctacgaaaccgatccaaactaacaactaccgacgcttaacgataaaaacgaactcccgaataaccccccaccgaaaacgataaaaccaacgactaaaaccaaaataccgtccaaacgacgcgacgactcctcactcatcccaaataaaaaaaacgcgacgctcgctacgactccgctcccctctcgtctcctcacacccgaccctataccccgtcctaacatcccttaaccccttatcgccttctactcgatacctcccgattatccaaccccgcccccgaacgcgaaaccccgaatctaacccgtccgacccctactcccacgccccttcccccatcgccgacatttcccgaactcgacttcgccccgaccgcagaaaccuctcccctctaccctttctctcccttctcgcaaccctaaaaccacgtcctaaccccgcaatcccctaaaataaaaccctcgtctcgccgaaatcgaacatttacccccacgtctaccccgactacgcttcttaaactcatcgccccatcatcctacccgttatacg

SEQ ID NO: 32591 - DNA, 958 bp, Artificial Sequence
  chemically treated genomic DNA (Homo sapiens) CpG-island No: 32591
gggatatttacgttgggggtgggggcggtgaggatcgttatttgttcgcggtttttttgtagttaggttacgcgcgttgttgttagggtaattattcggttaggtttgcggttgtcgggaagttttttcgggagcgcgtacgggaagggttgtgggggcgttggtcggttgcgacgttagattttcgtttttcggcgtttgtcggatttagttttatttttagtcgcgtttttttcggtgggtagtcggtcggaatttacgaattagagtagtcgatatatcgttcgtttagttaatcgtagtagatgtgtgatttcgttattttttcggattttggcggttgtcgttgagttggcgatcgcgggagacgttgttgaggcggtttcggttgcgggtcggaacggcgttgttttgcggggtcggtttaggttggtagttgtcggcgtttggcggtgagggcgggttttcgagtggttttttatcgaaggcggtgggattagcggttgaggttaggatgtcgtttaggcggcgcggcggttttttatttattttaggtaagggggacgcggcgttcgttgcggtttcgtttttttttcgtttttttatattcggttttgtgtttcgttttggtattttttggttttttgtcgttttttgttcggtgtttttcggttgtttaatttcgttttcgagcgcggagtttcgggtttggttcgttcggtttttgtttttacgtttttttttttatcgtcggtatttttcgggttcggtttcgtttcggtcgtcggggttttttttttttgtttttttttttttttttcgtagttttgggattacgttttagtttcgtagttttttgggatgagattttcgtttcgtcgggatcggatatttgtttttacgtttatttcggttgcgttttttgagtttatcgttttattattttattcgttgtacg

SEQ ID NO: 32592 - DNA, 958 bp, Artificial Sequence
  chemically treated genomic DNA (Homo sapiens) CpG-island No: 32592
cgtacaacgaataaaataataaaacgataaactcaaaaaacgcaaccgaaataaacgtaaaaacaaatatccgatcccgacgaaacgaaaatctcatcccaaaaaactacgaaactaaaacgtaatcccaaaactacgaaaaaaaaaaaaaaaaacaaaaaaaaaaaaccccgacgaccgaaacgaaaccgaacccgaaaaataccgacgataaaaaaaaaaacgtaaaaacaaaaaccgaacgaaccaaacccgaaactccgcgctcgaaaacgaaattaaacaaccgaaaaacaccgaacaaaaaacgacaaaaaaccaaaaaataccaaaacgaaacacaaaaccgaatataaaaaaacgaaaaaaaaacgaaaccgcaacgaacgccgcgtcccccttacctaaaataaataaaaaaccgccgcgccgcctaaacgacatcctaacctcaaccgctaatcccaccgccttcgataaaaaaccactcgaaaacccgccctcaccgccaaacgccgacaactaccaacctaaaccgaccccgcaaaacaacgccgttccgacccgcaaccgaaaccgcctcaacaacgtctcccgcgatcgccaactcaacgacaaccgccaaaatccgaaaaaataacgaaatcacacatctactacgattaactaaacgaacgatatatcgactactctaattcgtaaattccgaccgactacccaccgaaaaaaacgcgactaaaaataaaactaaatccgacaaacgccgaaaaacgaaaatctaacgtcgcaaccgaccaacgcccccacaacccttcccgtacgcgctcccgaaaaaacttcccgacaaccgcaaacctaaccgaataattaccctaacaacaacgcgcgtaacctaactacaaaaaaaccgcgaacaaataacgatcctcaccgcccccacccccaacgtaaatatccc

SEQ ID NO: 32593 - DNA, 805 bp, Artificial Sequence
  chemically treated genomic DNA (Homo sapiens) CpG-island No: 32593
tgcgtgggcgggtatattttattttcgcgcgttttttatattcgtttagggtttcggagttagggtttttttgtttggcgtgggacggtttaaggggtttggaaatgtggtcgggatttttatagcggttttttcggtgcgcgtttttcgttcggtttttttagcgtttagtgtgtttcgagggcgagtagttacgcgtggtcgggattaagcgagtatttaggggttagaatggggcgtttagtattcgttacgtggatagagttagtttcgcgtagcgttgtcgggcggtaggaggcggggggggagggcgcggtttttagttcgtttagtgtatttgtcgcgtagatttcgttataggaggtttcgagatcggattttgtcgttcgtttttgtcgtgatcgcgcggtagttttaggagttcgcgaggtttttggttcggtttaagtttggttgcgtgtttcgttgcgtggaggacgttttcgagagtaagacgttgtcgttggacgttttgggcggcggtcgttcgggttttcgggttgggaggcgagtttgcgcggcgcgcggagattttttaacggtcgtagtaagttttcgagggtagttcggcgtggtttaggttcgggatttttagtaggtagtggtcgcgggatagaggtcgtgggttcgggttcggatttttcgagattttcgtattcggaggacgtcgggcgtggggttttttcgtttttttttgcggggttttttttattcgtaaaggttttgagttttttgggttttgcgattattttttattttcgcgagg

SEQ ID NO: 32594 - DNA, 805 bp, Artificial Sequence
  chemically treated genomic DNA (Homo sapiens) CpG-island No: 32594
cctcgcgaaaataaaaaataatcgcaaaacccaaaaaactcaaaacctttacgaataaaaaaaaccccgcaaaaaaaaacgaaaaaaccccacgcccgacgtcctccgaatacgaaaatctcgaaaaatccgaacccgaacccacgacctctatcccgcgaccactacctactaaaaatcccgaacctaaaccacgccgaactaccctcgaaaacttactacgaccgttaaaaaatctccgcgcgccgcgcaaactcgcctcccaacccgaaaacccgaacgaccgccgcccaaaacgtccaacgacaacgtcttactctcgaaaacgtcctccacgcaacgaaacacgcaaccaaacttaaaccgaaccaaaaacctcgcgaactcctaaaactaccgcgcgatcacgacaaaaacgaacgacaaaatccgatctcgaaacctcctataacgaaatctacgcgacaaatacactaaacgaactaaaaaccgcgccctccccccccgcctcctaccgcccgacaacgctacgcgaaactaactctatccacgtaacgaatactaaacgccccattctaacccctaaatactcgcttaatcccgaccacgcgtaactactcgccctcgaaacacactaaacgctaaaaaaaccgaacgaaaaacgcgcaccgaaaaaaccgctataaaaatcccgaccacatttccaaaccccttaaaccgtcccacgccaaacaaaaaaaccctaactccgaaaccctaaacgaatataaaaaacgcgcgaaaataaaatatacccgcccacgca

SEQ ID NO: 32595 - DNA, 805 bp, Artificial Sequence
  chemically treated genomic DNA (Homo sapiens) CpG-island No: 32595
tttcgcgggggtggggggtggtcgtaggatttagaaggtttaggatttttacggatagggaggatttcgtaggggggagcgggggagttttacgttcggcgtttttcgggtgcgagggtttcggggagttcgagttcgggtttacggtttttgtttcgcggttattatttgttgggggtttcgggtttgggttacgtcgggttgttttcggggatttgttgcggtcgttgaggggttttcgcgcgtcgcgtagattcgttttttaattcgagggttcgggcggtcgtcgtttagagcgtttagcggtagcgttttgttttcgaaggcgttttttacgtagcggaatacgtagttaagtttgggtcgggttagaggtttcgcgggtttttgaggttgtcgcgcggttacggtaggagcgggcgatagaattcggtttcggagttttttgtagcgaggtttgcgcggtaggtgtattgggcggattggaggtcgcgtttttttttttcgttttttgtcgttcggtagcgttgcgcggagttggttttgtttacgtagcgggtgttgaacgttttattttggtttttgggtgttcgtttagtttcggttacgcgtggttgttcgttttcgggatatattgggcgttgggaaggtcgggcggggagcgcgtatcggagaaatcgttgtgggaatttcggttatatttttaggttttttgggtcgttttacgttagataagaaagttttgatttcgaaattttgggcgagtgtggagggcgcgcgggggtggggtgtattcgtttacgta

SEQ ID NO: 32596 - DNA, 805 bp, Artificial Sequence
  chemically treated genomic DNA (Homo sapiens) CpG-island No: 32596
tacgtaaacgaatacaccccacccccgcgcgccctccacactcgcccaaaatttcgaaatcaaaactttcttatctaacgtaaaacgacccaaaaaacctaaaaatataaccgaaattcccacaacgatttctccgatacgcgctccccgcccgaccttcccaacgcccaatatatcccgaaaacgaacaaccacgcgtaaccgaaactaaacgaacacccaaaaaccaaaataaaacgttcaacacccgctacgtaaacaaaaccaactccgcgcaacgctaccgaacgacaaaaaacgaaaaaaaaaaacgcgacctccaatccgcccaatacacctaccgcgcaaacctcgctacaaaaaactccgaaaccgaattctatcgcccgctcctaccgtaaccgcgcgacaacctcaaaaacccgcgaaacctctaacccgacccaaacttaactacgtattccgctacgtaaaaaacgccttcgaaaacaaaacgctaccgctaaacgctctaaacgacgaccgcccgaaccctcgaattaaaaaacgaatctacgcgacgcgcgaaaacccctcaacgaccgcaacaaatccccgaaaacaacccgacgtaacccaaacccgaaacccccaacaaataataaccgcgaaacaaaaaccgtaaacccgaactcgaactccccgaaaccctcgcacccgaaaaacgccgaacgtaaaactcccccgctcccccctacgaaatcctccctatccgtaaaaatcctaaaccttctaaatcctacgaccaccccccacccccgcgaaa

SEQ ID NO: 32597 - DNA, 942 bp, Artificial Sequence
  chemically treated genomic DNA (Homo sapiens) CpG-island No: 32597
gtttattatcgcgtttcggtttttggggagcgcgtgcgtttttttttgtttttttttttttttttttttgttttattcgggttttttttgtttttcgtttttcgcggttagcgtggaatagtttcgcggggttatagtttggcgttcggattttggttcgggttatttgcgaaggagtcggttttggttaaggtgtttttttggacgggtgtggtttttagagcgtcgcggttcggggttgattggttcggaatttcggggttttgggcgtttcgcgttttttgggatttgggtttcgcgttggagggtagcgggggcgcgggcggggtttggtaggacgtggtcggattttttttttcgttttttcggggtgtaaatttcgcgtatattagttggagtaggttgaaatttttatttagcgttcgttcgcgggtttgcgcgggggttcggggtgtagagattagattttgtagcggttttagcgttgggggggttttaaagcgaaggagtggttgagggcgggggcggggttgatgggcggggtgaggcggggttcgggttggggcgggttttatcgggggcggggtttgtcgggggcggagtcggggtgggggcggggtttagcgggggcgggatcggaacggagtcgtgcggtttcgcgcgttcgtagtttgtttttcgtcgtttttacgtacgcgtttcggtttacgcgttttttcgttcgttcgttcgttcgttcgttttcgtttgtgtcgtttttattagagatttttaggagtaggatgtttttttagggtaagaaaagtatttttcggattacggtgagttcggtttcgtttcgttcggcgttttttgttcgtcgttcggagtggggtttggacgtcgggcggatttttttggttttgtgcgtgggtggggggtttttgtttttgcgtttggttt

SEQ ID NO: 32598 - DNA, 942 bp, Artificial Sequence
  chemically treated genomic DNA (Homo sapiens) CpG-island No: 32598
aaaccaaacgcaaaaacaaaaaccccccacccacgcacaaaaccaaaaaaatccgcccgacgtccaaaccccactccgaacgacgaacaaaaaacgccgaacgaaacgaaaccgaactcaccgtaatccgaaaaatacttttcttaccctaaaaaaacatcctactcctaaaaatctctaataaaaacgacacaaacgaaaacgaacgaacgaacgaacgaacgaaaaaacgcgtaaaccgaaacgcgtacgtaaaaacgacgaaaaacaaactacgaacgcgcgaaaccgcacgactccgttccgatcccgcccccgctaaaccccgcccccaccccgactccgcccccgacaaaccccgcccccgataaaacccgccccaacccgaaccccgcctcaccccgcccatcaaccccgcccccgccctcaaccactccttcgctttaaaacccccccaacgctaaaaccgctacaaaatctaatctctacaccccgaacccccgcgcaaacccgcgaacgaacgctaaataaaaatttcaacctactccaactaatatacgcgaaatttacaccccgaaaaaacgaaaaaaaaaatccgaccacgtcctaccaaaccccgcccgcgcccccgctaccctccaacgcgaaacccaaatcccaaaaaacgcgaaacgcccaaaaccccgaaattccgaaccaatcaaccccgaaccgcgacgctctaaaaaccacacccgtccaaaaaaacaccttaaccaaaaccgactccttcgcaaataacccgaaccaaaatccgaacgccaaactataaccccgcgaaactattccacgctaaccgcgaaaaacgaaaaacaaaaaaaacccgaataaaacaaaaaaaaaaaaaaaaaaaaacaaaaaaaaacgcacgcgctccccaaaaaccgaaacgcgataataaac

SEQ ID NO: 32599 - DNA, 942 bp, Artificial Sequence
  chemically treated genomic DNA (Homo sapiens) CpG-island No: 32599
ggattagacgtaaaggtagggattttttatttacgtataagattaggagggttcgttcggcgtttaggttttatttcgggcggcgggtagggggcgtcgggcgaagcgggatcgggtttatcgtgattcgggggatgttttttttgttttggaaggatattttgtttttgggggtttttggtaggggcggtataagcgggggcgggcgggcgggcgggcgggcggggggacgcgtgagtcgggacgcgtgcgtggggacggcgggagatagattgcgagcgcgcggggtcgtacggtttcgtttcggtttcgttttcgttgggtttcgtttttatttcggtttcgttttcggtaggtttcgttttcgatagggttcgttttagttcgagtttcgttttatttcgtttattagtttcgttttcgtttttagttattttttcgttttaaagtttttttagcgttggaatcgttgtagggtttgatttttgtatttcgggttttcgcgtagattcgcggacgagcgttgggtggggattttaatttgttttagttgatgtgcgcggggtttgtatttcggggaggcgagggagagagttcggttacgttttgttaggtttcgttcgcgttttcgttgttttttagcgcggaatttaggttttaggagacgcgaggcgtttaaggtttcgggatttcgagttagttaatttcgggtcgcgacgttttgggaattatattcgtttaggaaggtattttggttaaagtcggttttttcgtagatgattcgggttagggttcgagcgttaggttgtgatttcgcgaggttgttttacgttggtcgcgagagacggagggtaggaggggttcgaataggatagagagagagagagagagagatagaaggaggcgtacgcgttttttagggatcgggacgcggtggtgggt

SEQ ID NO: 32600 - DNA, 942 bp, Artificial Sequence
  chemically treated genomic DNA (Homo sapiens) CpG-island No: 32600
acccaccaccgcgtcccgatccctaaaaaacgcgtacgcctccttctatctctctctctctctctctctatcctattcgaacccctcctaccctccgtctctcgcgaccaacgtaaaacaacctcgcgaaatcacaacctaacgctcgaaccctaacccgaatcatctacgaaaaaaccgactttaaccaaaataccttcctaaacgaatataattcccaaaacgtcgcgacccgaaattaactaactcgaaatcccgaaaccttaaacgcctcgcgtctcctaaaacctaaattccgcgctaaaaaacaacgaaaacgcgaacgaaacctaacaaaacgtaaccgaactctctccctcgcctccccgaaatacaaaccccgcgcacatcaactaaaacaaattaaaatccccacccaacgctcgtccgcgaatctacgcgaaaacccgaaatacaaaaatcaaaccctacaacgattccaacgctaaaaaaactttaaaacgaaaaaataactaaaaacgaaaacgaaactaataaacgaaataaaacgaaactcgaactaaaacgaaccctatcgaaaacgaaacctaccgaaaacgaaaccgaaataaaaacgaaacccaacgaaaacgaaaccgaaacgaaaccgtacgaccccgcgcgctcgcaatctatctcccgccgtccccacgcacgcgtcccgactcacgcgtccccccgcccgcccgcccgcccgcccgcccccgcttataccgcccctaccaaaaacccccaaaaacaaaatatccttccaaaacaaaaaaaacatcccccgaatcacgataaacccgatcccgcttcgcccgacgccccctacccgccgcccgaaataaaacctaaacgccgaacgaaccctcctaatcttatacgtaaataaaaaatccctacctttacgtctaatcc

SEQ ID NO: 32601 - DNA, 795 bp, Artificial Sequence
  chemically treated genomic DNA (Homo sapiens) CpG-island No: 32601
cggcgcgtttttaattttggtgtttacgtcggttaggtagtttttgcggaattggtcgaagagtttttggtttttgaggtggtttacgattatggttacgagttgcgggttttcggcgttcgtattcgcgtcgttcgtttcgttcgcgtcggggttagtttcggggttcggcggcggcggcggtggttgtggttgcggttgcggcgggggaggcggcggcgttttaggaggcggttgcggttgtgggttggtggttatggtggtttgtgtcggggagggtaagggttttgatcggcggacgattttgggaggcggcggttgtattggtttcgtcgtttgagggaagttaacgggatgttgttacggaattagcggatttagagtaatttcggaagtgaaagggaattgggggaaaggaggaaaagacggtgataatattgacgaaagttcggcgacggaggtcgcgaagagttagtttcgatcgtcgtcgggcgtaagcgttttcgcgaggtcgagttgcgtcggaagtggcggcgattgtggcgacggagacgataagattgtgttggtcgcgggttgtggggtttaggttatcggtaggggtttggagtttttggaggttagggtttcgattcgcgcgatatttggggttttaggtttgagcgggggtagtgcgtttttggtttcgttttattcgcgacggtattttaggtttgttttttttgttttagtttttcggagtagtgtatagagatttatagatatttgtaatgcgaattttacgtggatttgttt

SEQ ID NO: 32602 - DNA, 795 bp, Artificial Sequence
  chemically treated genomic DNA (Homo sapiens) CpG-island No: 32602
aaacaaatccacgtaaaattcgcattacaaatatctataaatctctatacactactccgaaaaactaaaacaaaaaaaacaaacctaaaataccgtcgcgaataaaacgaaaccaaaaacgcactacccccgctcaaacctaaaaccccaaatatcgcgcgaatcgaaaccctaacctccaaaaactccaaacccctaccgataacctaaaccccacaacccgcgaccaacacaatcttatcgtctccgtcgccacaatcgccgccacttccgacgcaactcgacctcgcgaaaacgcttacgcccgacgacgatcgaaactaactcttcgcgacctccgtcgccgaactttcgtcaatattatcaccgtcttttcctcctttcccccaattccctttcacttccgaaattactctaaatccgctaattccgtaacaacatcccgttaacttccctcaaacgacgaaaccaatacaaccgccgcctcccaaaatcgtccgccgatcaaaacccttaccctccccgacacaaaccaccataaccaccaacccacaaccgcaaccgcctcctaaaacgccgccgcctcccccgccgcaaccgcaaccacaaccaccgccgccgccgccgaaccccgaaactaaccccgacgcgaacgaaacgaacgacgcgaatacgaacgccgaaaacccgcaactcgtaaccataatcgtaaaccacctcaaaaaccaaaaactcttcgaccaattccgcaaaaactacctaaccgacgtaaacaccaaaattaaaaacgcgccg

SEQ ID NO: 32603 - DNA, 795 bp, Artificial Sequence
  chemically treated genomic DNA (Homo sapiens) CpG-island No: 32603
gagtagatttacgtagggttcgtattataaatgtttatggatttttatgtattgtttcgggaaattggagtaagagaggtaggtttaaaatgtcgtcgcggatgaagcggggttagaaacgtattgttttcgtttagatttagggttttaggtgtcgcgcgggtcgaagttttaatttttagggattttagatttttgtcggtgatttaaattttataattcgcgattagtatagttttgtcgttttcgtcgttatagtcgtcgttattttcggcgtagttcggtttcgcgagggcgtttgcgttcggcgacggtcgaaattggtttttcgcggttttcgtcgtcggattttcgttaatgttgttatcgtttttttttttttttttttagtttttttttattttcggggttgttttggattcgttggtttcgtaataatatttcgttggttttttttaggcggcgggattagtgtagtcgtcgttttttaggatcgttcgtcggttagggtttttgtttttttcggtataggttattatggttattaatttatagtcgtagtcgttttttggggcgtcgtcgtttttttcgtcgtagtcgtagttatagttatcgtcgtcgtcgtcgggtttcggggttggtttcggcgcgggcggggcgggcggcgcgggtgcgggcgtcggggattcgtagttcgtggttatgatcgtgaattattttaagagttaggggtttttcgattagtttcgtagagattgtttggtcgacgtggatattaaggttaggagcgcgtcg

SEQ ID NO: 32604 - DNA, 795 bp, Artificial Sequence
  chemically treated genomic DNA (Homo sapiens) CpG-island No: 32604
cgacgcgctcctaaccttaatatccacgtcgaccaaacaatctctacgaaactaatcgaaaaacccctaactcttaaaataattcacgatcataaccacgaactacgaatccccgacgcccgcacccgcgccgcccgccccgcccgcgccgaaaccaaccccgaaacccgacgacgacgacgataactataactacgactacgacgaaaaaaacgacgacgccccaaaaaacgactacgactataaattaataaccataataacctataccgaaaaaaacaaaaaccctaaccgacgaacgatcctaaaaaacgacgactacactaatcccgccgcctaaaaaaaaccaacgaaatattattacgaaaccaacgaatccaaaacaaccccgaaaataaaaaaaaactaaaaaaaaaaaaaaaaaaacgataacaacattaacgaaaatccgacgacgaaaaccgcgaaaaaccaatttcgaccgtcgccgaacgcaaacgccctcgcgaaaccgaactacgccgaaaataacgacgactataacgacgaaaacgacaaaactatactaatcgcgaattataaaatttaaatcaccgacaaaaatctaaaatccctaaaaattaaaacttcgacccgcgcgacacctaaaaccctaaatctaaacgaaaacaatacgtttctaaccccgcttcatccgcgacgacattttaaacctacctctcttactccaatttcccgaaacaatacataaaaatccataaacatttataatacgaaccctacgtaaatctactc

SEQ ID NO: 32605 - DNA, 686 bp, Artificial Sequence
  chemically treated genomic DNA (Homo sapiens) CpG-island No: 32605
cgaggcgttcgtttttttattttcgtgagtgttgtcgaggggaaaattggggaagtgggttagttcggcggtttttatttatagattttttttcgtttcggtcgttcgttttttttcggagtttaaggcgtttgttttcgttcggtagtgttgtaagagtggttttgtttaggcgtgggtcgggtcggtgtttgcgttaaggcgttgcgttcgtcggttgtttttgtttacgtttggcgtttattttgaggcgtcgttggttttttcgttattttttcggcggggtttttttttttattatggtaatagtgatatttagaggaaaaggttagcgcggcgacggcgtttcggttttcgtagagcggaggttcgggttgcggacggggttgcgcgtattcgtatcgttggacgtcgcggggcgggcggtcgtcgagtttttttcgttcggtttagttttttcgtcgtagtcgcggggtagtttcgagttacggtttcggttggcgggcgggttgcgggtaggattttggcgttcgggttttggtaaggggaaaggatagaaacggcgtatcgggagggattttgttttatcgtttgtatatggtaaagtttttcgtcgagtttttgggttgtacgttgtcgagtaagggcgttttttttatgtttgaggtaggtggagggtgtgtttt

SEQ ID NO: 32606 - DNA, 686 bp, Artificial Sequence
  chemically treated genomic DNA (Homo sapiens) CpG-island No: 32606
aaaacacaccctccacctacctcaaacataaaaaaaacgcccttactcgacaacgtacaacccaaaaactcgacgaaaaactttaccatatacaaacgataaaacaaaatccctcccgatacgccgtttctatcctttccccttaccaaaacccgaacgccaaaatcctacccgcaacccgcccgccaaccgaaaccgtaactcgaaactaccccgcgactacgacgaaaaaactaaaccgaacgaaaaaaactcgacgaccgcccgccccgcgacgtccaacgatacgaatacgcgcaaccccgtccgcaacccgaacctccgctctacgaaaaccgaaacgccgtcgccgcgctaaccttttcctctaaatatcactattaccataataaaaaaaaaaaccccgccgaaaaaataacgaaaaaaccaacgacgcctcaaaataaacgccaaacgtaaacaaaaacaaccgacgaacgcaacgccttaacgcaaacaccgacccgacccacgcctaaacaaaaccactcttacaacactaccgaacgaaaacaaacgccttaaactccgaaaaaaaacgaacgaccgaaacgaaaaaaaatctataaataaaaaccgccgaactaacccacttccccaattttcccctcgacaacactcacgaaaataaaaaaacgaacgcctcg

SEQ ID NO: 32607 - DNA, 686 bp, Artificial Sequence
  chemically treated genomic DNA (Homo sapiens) CpG-island No: 32607
gggatatattttttatttattttaaatatgggagaggcgtttttgttcggtaacgtgtagtttaggagttcggcgagaaattttgttatatataagcggtgaggtagggtttttttcgatgcgtcgtttttgttttttttttttgttagagttcgagcgttaggattttgttcgtagttcgttcgttagtcggggtcgtggttcggggttgtttcgcggttgcggcggaggggttgggtcgggcggggagagttcggcggtcgttcgtttcgcggcgtttagcggtgcgagtgcgcgtagtttcgttcgtagttcgagttttcgttttgcgggagtcggggcgtcgtcgtcgcgttagtttttttttttgaatgttattattattatagtaaagggaagggtttcgtcgagggggtggcgggagggttaacggcgttttaggatgggcgttaagcgtgagtaagggtagtcggcgggcgtagcgttttggcgtagatatcggttcgatttacgtttgggtagggttatttttgtaatattgtcgggcgggagtagacgttttaagtttcgagggagagcgggcggtcggggcgggggagggtttgtggatggaagtcgtcgggttgatttatttttttagtttttttttcggtagtatttacggaggtggaaaggcgggcgtttcg

SEQ ID NO: 32608 - DNA, 686 bp, Artificial Sequence
  chemically treated genomic DNA (Homo sapiens) CpG-island No: 32608
cgaaacgcccgcctttccacctccgtaaatactaccgaaaaaaaaactaaaaaaataaatcaacccgacgacttccatccacaaaccctcccccgccccgaccgcccgctctccctcgaaacttaaaacgtctactcccgcccgacaatattacaaaaataaccctacccaaacgtaaatcgaaccgatatctacgccaaaacgctacgcccgccgactacccttactcacgcttaacgcccatcctaaaacgccgttaaccctcccgccaccccctcgacgaaacccttccctttactataataataataacattcaaaaaaaaaaactaacgcgacgacgacgccccgactcccgcaaaacgaaaactcgaactacgaacgaaactacgcgcactcgcaccgctaaacgccgcgaaacgaacgaccgccgaactctccccgcccgacccaacccctccgccgcaaccgcgaaacaaccccgaaccacgaccccgactaacgaacgaactacgaacaaaatcctaacgctcgaactctaacaaaaaaaaaaaacaaaaacgacgcatcgaaaaaaaccctacctcaccgcttatatataacaaaatttctcgccgaactcctaaactacacgttaccgaacaaaaacgcctctcccatatttaaaataaataaaaaatatatccc

SEQ ID NO: 32609 - DNA, 581 bp, Artificial Sequence
  chemically treated genomic DNA (Homo sapiens) CpG-island No: 32609
gtcgaggcgtcggtcgggagtgtgggagaagagggcgagagaaaggttggggagggggcggagaggtcgaggcgcggagttggtttttaggcggtcgtcgttttttattttttcgtggttttgttttttttttcggagttttttcggtcgttttttgaggggtgttcgtcggggtcgcgcgttcggtcgtcgttttataggttcgcgttcgtcgcgtcgtcgtcgaggtcgtgtgtaatcggtagttgttgtagtcgcgggaggagagtcgggatcgtcgcgaggaattcgggaggaggcggggcgcgcggcggaggaatacgtaggcgtcgttttttttttttttttttttcgggggcgagggggcggtgcggggggaggggaggaaaggggaggcggggggtcgggcgtattttttcgcgtcggcggtcgggttttcgtcggattgcggagagcgaggttgggagagagcgagcgcgacggcggcggcggcggagagaggttttttgttgtttttttatttcgttttttgtatttttttgggattcgggcgggttattatttttttttttcgtttaata

SEQ ID NO: 32610 - DNA, 581 bp, Artificial Sequence
  chemically treated genomic DNA (Homo sapiens) CpG-island No: 32610
tattaaacgaaaaaaaaaaataataacccgcccgaatcccaaaaaaatacaaaaaacgaaataaaaaaacaacaaaaaacctctctccgccgccgccgccgtcgcgctcgctctctcccaacctcgctctccgcaatccgacgaaaacccgaccgccgacgcgaaaaaatacgcccgaccccccgcctcccctttcctcccctccccccgcaccgccccctcgcccccgaaaaaaaaaaaaaaaaaaaacgacgcctacgtattcctccgccgcgcgccccgcctcctcccgaattcctcgcgacgatcccgactctcctcccgcgactacaacaactaccgattacacacgacctcgacgacgacgcgacgaacgcgaacctataaaacgacgaccgaacgcgcgaccccgacgaacacccctcaaaaaacgaccgaaaaaactccgaaaaaaaaaacaaaaccacgaaaaaataaaaaacgacgaccgcctaaaaaccaactccgcgcctcgacctctccgccccctccccaacctttctctcgccctcttctcccacactcccgaccgacgcctcgac

SEQ ID NO: 32611 - DNA, 581 bp, Artificial Sequence
  chemically treated genomic DNA (Homo sapiens) CpG-island No: 32611
tgttgggcgggaggggggggtggtggttcgttcgaattttagaggggtgtagggggcggggtagggaggtaataaagagttttttttcgtcgtcgtcgtcgtcgcgttcgtttttttttagtttcgtttttcgtagttcggcgggggttcggtcgtcggcgcgggggagtgcgttcggtttttcgtttttttttttttttttttttttcgtatcgttttttcgttttcgggggaaggaggggaggagggcggcgtttgcgtgttttttcgtcgcgcgtttcgttttttttcgggtttttcgcggcgatttcgatttttttttcgcggttgtagtagttgtcggttgtatacggtttcggcggcggcgcggcgagcgcgggtttgtggagcggcggtcgggcgcgcggtttcggcgggtattttttagagggcggtcgaggaagtttcgggaggaggagtaggattacgaggaggtgggaggcggcggtcgtttggggattagtttcgcgtttcggttttttcgttttttttttagtttttttttcgttttttttttttatattttcggtcggcgtttcggt

SEQ ID NO: 32612 - DNA, 581 bp, Artificial Sequence
  chemically treated genomic DNA (Homo sapiens) CpG-island No: 32612
accgaaacgccgaccgaaaatataaaaaaaaaaaacgaaaaaaaaactaaaaaaaaaacgaaaaaaccgaaacgcgaaactaatccccaaacgaccgccgcctcccacctcctcgtaatcctactcctcctcccgaaacttcctcgaccgccctctaaaaaatacccgccgaaaccgcgcgcccgaccgccgctccacaaacccgcgctcgccgcgccgccgccgaaaccgtatacaaccgacaactactacaaccgcgaaaaaaaaatcgaaatcgccgcgaaaaacccgaaaaaaaacgaaacgcgcgacgaaaaaacacgcaaacgccgccctcctcccctccttcccccgaaaacgaaaaaacgatacgaaaaaaaaaaaaaaaaaaaaaaacgaaaaaccgaacgcactcccccgcgccgacgaccgaacccccgccgaactacgaaaaacgaaactaaaaaaaaacgaacgcgacgacgacgacgacgaaaaaaaactctttattacctccctaccccgccccctacacccctctaaaattcgaacgaaccaccacccccccctcccgcccaaca

SEQ ID NO: 32613 - DNA, 1047 bp, Artificial Sequence
  chemically treated genomic DNA (Homo sapiens) CpG-island No: 32613
agttcgacgttagcggttcggttggttggggcgtttcgatcgcgcggtttttatttttgttttaattttttcgcgcgtcgagggatggggttcggtgaggcgggtggttcggaagcgtttacgtttcgggggtttttagtatcgagggtagggttcgcggggtttttttgtcgcgcgcgagtgtttagaattttcgttcggtcgtttagaattttcgttcggtcgcgtatttatttgttgttttcgtttttggtttcgcgtatagtcgttcgttttcggggtcgttttcgcgtagtttcgaggttcgtcgcgtgtcggttagtagtcggcgtcgcgttttttgtcgtcgcgtgatcggtttcgttttcgggtcgcgcgattggtcgtcggggtcgatttcgtaggtttttattggttttggggcggggcgcgagtcggtgcgttcgggttatataagttagggcgagggggcggggttttcggggcgcgttatataacgcgcgggttcgggcggaggtcggcgttcggttaattttagtaggtcggcgggcgggtaggggacggggtggtttttagcggttttaggtttgtgtcgcgcgattggagtgttcggttttttggtacggcgtcggggcggagtcgttgaagttagcgtagaaatgatagggttaggaagttgttagttacgtgggggcgggattcgggttttgtggggcggggcgggttcggtttaatttttacgtgagaggcgggcggggaaggagaggggagtgagaggcgggggtagagaggggcgagaggcggagtcggggggtttgagtcggggttagggggaggttggaaatggggacggatgggggcgagaggcggggacgggggggcggatgggagcgggggtgtcgagagacgtggggagcgagaggtaggggcgggggggcgacggtgtcgagggcgggggtagaagagggagggagaggcggggattgggggcgagtaggggcggtttaggttagcgttttggggtcgagttttggagtttgtaggtgg

SEQ ID NO: 32614 - DNA, 1047 bp, Artificial Sequence
  chemically treated genomic DNA (Homo sapiens) CpG-island No: 32614
ccacctacaaactccaaaactcgaccccaaaacgctaacctaaaccgcccctactcgcccccaatccccgcctctccctccctcttctacccccgccctcgacaccgtcgcccccccgcccctacctctcgctccccacgtctctcgacacccccgctcccatccgcccccccgtccccgcctctcgcccccatccgtccccatttccaacctccccctaaccccgactcaaaccccccgactccgcctctcgcccctctctacccccgcctctcactcccctctccttccccgcccgcctctcacgtaaaaattaaaccgaacccgccccgccccacaaaacccgaatcccgcccccacgtaactaacaacttcctaaccctatcatttctacgctaacttcaacgactccgccccgacgccgtaccaaaaaaccgaacactccaatcgcgcgacacaaacctaaaaccgctaaaaaccaccccgtcccctacccgcccgccgacctactaaaattaaccgaacgccgacctccgcccgaacccgcgcgttatataacgcgccccgaaaaccccgccccctcgccctaacttatataacccgaacgcaccgactcgcgccccgccccaaaaccaataaaaacctacgaaatcgaccccgacgaccaatcgcgcgacccgaaaacgaaaccgatcacgcgacgacaaaaaacgcgacgccgactactaaccgacacgcgacgaacctcgaaactacgcgaaaacgaccccgaaaacgaacgactatacgcgaaaccaaaaacgaaaacaacaaataaatacgcgaccgaacgaaaattctaaacgaccgaacgaaaattctaaacactcgcgcgcgacaaaaaaaccccgcgaaccctaccctcgatactaaaaacccccgaaacgtaaacgcttccgaaccacccgcctcaccgaaccccatccctcgacgcgcgaaaaaattaaaacaaaaataaaaaccgcgcgatcgaaacgccccaaccaaccgaaccgctaacgtcgaact

SEQ ID NO: 32615 - DNA, 1047 bp, Artificial Sequence
  chemically treated genomic DNA (Homo sapiens) CpG-island No: 32615
ttatttataaattttaggattcgattttagagcgttggtttgagtcgtttttgttcgtttttagttttcgttttttttttttttttttgttttcgttttcgatatcgtcgttttttcgtttttgtttttcgttttttacgtttttcggtattttcgtttttattcgttttttcgttttcgtttttcgtttttattcgtttttatttttagtttttttttgatttcgatttaagtttttcgatttcgtttttcgtttttttttgttttcgttttttattttttttttttttttcgttcgttttttacgtggaggttgggtcggattcgtttcgttttatagagttcgggtttcgtttttacgtggttggtagttttttggttttattatttttgcgttggttttagcggtttcgtttcggcgtcgtgttagggggtcggatattttagtcgcgcggtataggtttgaggtcgttgagggttatttcgttttttgttcgttcgtcggtttgttgggattggtcgagcgtcggttttcgttcgagttcgcgcgttatgtaacgcgtttcgggggtttcgttttttcgttttggtttatataattcgggcgtatcggttcgcgtttcgttttagggttaatggaggtttgcggagtcggtttcgacgattaatcgcgcggttcgggggcggggtcggttacgcggcggtagggggcgcggcgtcggttgttgatcggtacgcggcgagtttcgagattgcgcgagggcggtttcgggggcgagcggttgtgcgcggggttaagggcgggggtagtaggtgagtgcgcggtcgggcgggagttttgggcgatcgggcgggagttttgggtattcgcgcgcggtagaggagtttcgcgagttttgttttcggtattgggggttttcggagcgtgggcgttttcgagttattcgttttatcgggttttatttttcggcgcgcgggaaagttggggtaggggtgaggatcgcgcggtcggggcgttttagttagtcgggtcgttggcgtcggatt

SEQ ID NO: 32616 - DNA, 1047 bp, Artificial Sequence
  chemically treated genomic DNA (Homo sapiens) CpG-island No: 32616
aatccgacgccaacgacccgactaactaaaacgccccgaccgcgcgatcctcacccctaccccaactttcccgcgcgccgaaaaataaaacccgataaaacgaataactcgaaaacgcccacgctccgaaaacccccaataccgaaaacaaaactcgcgaaactcctctaccgcgcgcgaatacccaaaactcccgcccgatcgcccaaaactcccgcccgaccgcgcactcacctactacccccgcccttaaccccgcgcacaaccgctcgcccccgaaaccgccctcgcgcaatctcgaaactcgccgcgtaccgatcaacaaccgacgccgcgccccctaccgccgcgtaaccgaccccgcccccgaaccgcgcgattaatcgtcgaaaccgactccgcaaacctccattaaccctaaaacgaaacgcgaaccgatacgcccgaattatataaaccaaaacgaaaaaacgaaacccccgaaacgcgttacataacgcgcgaactcgaacgaaaaccgacgctcgaccaatcccaacaaaccgacgaacgaacaaaaaacgaaataaccctcaacgacctcaaacctataccgcgcgactaaaatatccgaccccctaacacgacgccgaaacgaaaccgctaaaaccaacgcaaaaataataaaaccaaaaaactaccaaccacgtaaaaacgaaacccgaactctataaaacgaaacgaatccgacccaacctccacgtaaaaaacgaacgaaaaaaaaaaaaaaaataaaaaacgaaaacaaaaaaaaacgaaaaacgaaatcgaaaaacttaaatcgaaatcaaaaaaaaactaaaaataaaaacgaataaaaacgaaaaacgaaaacgaaaaaacgaataaaaacgaaaataccgaaaaacgtaaaaaacgaaaaacaaaaacgaaaaaacgacgatatcgaaaacgaaaacaaaaaaaaaaaaaaaaaacgaaaactaaaaacgaacaaaaacgactcaaaccaacgctctaaaatcgaatcctaaaatttataaataa

SEQ ID NO: 32617 - DNA, 503 bp, Artificial Sequence
  chemically treated genomic DNA (Homo sapiens) CpG-island No: 32617
aaggttatgaggtgcgggttattatcgtatcgttttattattcgtaatggtaggtgggcgagaattatttcgtttggcgttataaacgagaagagggggtcgttacggtgtggcgttgttcgttgtatgtgttaaaatagtcgagtattttgaaacgtttgttgtatttgggtagttttgtcgttagtagttttttttcgttgatggcgtaacgtcgttggaagtcggatcgtattattggcgtggtgttaacgttgttttgcgcgtcgggaatgcgtttgttggcgaaattttttggtgcgcgtatcgtgttgtatatttaggattacgaagtggacgttatgttggggttgggttttgtcggaaaaggtaaaggcggtaaagtggtatagttggtaacggcgttcgaacgtagcggattgtataacgtcgataacgtttttacgatttcgcgttcgatgatgaataaagttatcgaaaaaggcgtggcggcggaaaacgtt

SEQ ID NO: 32618 - DNA, 503 bp, Artificial Sequence
  chemically treated genomic DNA (Homo sapiens) CpG-island No: 32618
aacgttttccgccgccacgcctttttcgataactttattcatcatcgaacgcgaaatcgtaaaaacgttatcgacgttatacaatccgctacgttcgaacgccgttaccaactataccactttaccgcctttaccttttccgacaaaacccaaccccaacataacgtccacttcgtaatcctaaatatacaacacgatacgcgcaccaaaaaatttcgccaacaaacgcattcccgacgcgcaaaacaacgttaacaccacgccaataatacgatccgacttccaacgacgttacgccatcaacgaaaaaaaactactaacgacaaaactacccaaatacaacaaacgtttcaaaatactcgactattttaacacatacaacgaacaacgccacaccgtaacgaccccctcttctcgtttataacgccaaacgaaataattctcgcccacctaccattacgaataataaaacgatacgataataacccgcacctcataacctt

SEQ ID NO: 32619 - DNA, 503 bp, Artificial Sequence
  chemically treated genomic DNA (Homo sapiens) CpG-island No: 32619
gacgtttttcgtcgttacgtttttttcgatggttttatttattatcgaacgcgaaatcgtggagacgttatcgacgttatgtagttcgttacgttcgaacgtcgttgttagttgtgttattttgtcgtttttgtttttttcggtaaggtttagttttagtatggcgtttatttcgtaattttgaatatgtagtacggtacgcgtattagagagtttcgttagtaggcgtattttcggcgcgtaaaatagcgttggtattacgttaataatgcgattcggtttttagcgacgttgcgttattagcggaaagaaattgttgacggtaaaattgtttagatgtaataggcgttttagggtgttcggttgttttggtatatatagcgggtagcgttatatcgtggcggtttttttttttcgtttgtagcgttaggcggaatagttttcgtttatttgttattgcgggtagtaaggcggtgcggtaatgattcgtattttatgatttt

SEQ ID NO: 32620 - DNA, 503 bp, Artificial Sequence
  chemically treated genomic DNA (Homo sapiens) CpG-island No: 32620
aaaatcataaaatacgaatcattaccgcaccgccttactacccgcaataacaaataaacgaaaactattccgcctaacgctacaaacgaaaaaaaaaaaccgccacgatataacgctacccgctatatataccaaaacaaccgaacaccctaaaacgcctattacatctaaacaattttaccgtcaacaatttctttccgctaataacgcaacgtcgctaaaaaccgaatcgcattattaacgtaataccaacgctattttacgcgccgaaaatacgcctactaacgaaactctctaatacgcgtaccgtactacatattcaaaattacgaaataaacgccatactaaaactaaaccttaccgaaaaaaacaaaaacgacaaaataacacaactaacaacgacgttcgaacgtaacgaactacataacgtcgataacgtctccacgatttcgcgttcgataataaataaaaccatcgaaaaaaacgtaacgacgaaaaacgtc

SEQ ID NO: 32621 - DNA, 595 bp, Artificial Sequence
  chemically treated genomic DNA (Homo sapiens) CpG-island No: 32621
  unsure (504)
acgcgtttcgtttaaggtcgtaatagcgttagcgtttcgtcgagagttagtttattagatttcgtcggaggtcggcgatcgatatcgatcgtatacgtcggtaaatacggttgttatttaggtttttatcggttgcgcggtacgttatcgcggtattacgtatagagttttcgggcgacgatagacggtcgcgcgtagagacgtagcggtatagttcggaggacgtacgtacgtagttagcgttatattcgagcggcgcgaacgtagcgacgtataatacggtaaggcgcgagggcgggttagcggagggagaggcgagaagataacgattcgtttatagtacgcgagtttagttatttagtatcgtagcggagtagcgagagtatcgacgtagtaggttcgagatataagcggatataaacgtataaggggagttggggacgcggggagcgcggacgagagcgtataggaatacgacgatattcgaagtacgagatttagatngcgtagcgcggcgttgagcgagataatcgtagtaacgtagtaaaagtagttcgagttatatagtattttattttattatttattatattta

SEQ ID NO: 32622 - DNA, 595 bp, Artificial Sequence
  chemically treated genomic DNA (Homo sapiens) CpG-island No: 32622
  unsure (92)
taaatataataaataataaaataaaatactatataactcgaactacttttactacgttactacgattatctcgctcaacgccgcgctacgcnatctaaatctcgtacttcgaatatcgtcgtattcctatacgctctcgtccgcgctccccgcgtccccaactccccttatacgtttatatccgcttatatctcgaacctactacgtcgatactctcgctactccgctacgatactaaataactaaactcgcgtactataaacgaatcgttatcttctcgcctctccctccgctaacccgccctcgcgccttaccgtattatacgtcgctacgttcgcgccgctcgaatataacgctaactacgtacgtacgtcctccgaactataccgctacgtctctacgcgcgaccgtctatcgtcgcccgaaaactctatacgtaataccgcgataacgtaccgcgcaaccgataaaaacctaaataacaaccgtatttaccgacgtatacgatcgatatcgatcgccgacctccgacgaaatctaataaactaactctcgacgaaacgctaacgctattacgaccttaaacgaaacgcgt

SEQ ID NO: 32623 - DNA, 595 bp, Artificial Sequence
  chemically treated genomic DNA (Homo sapiens) CpG-island No: 32623
  unsure (92)
tagatgtggtggatggtggaatggagtgttgtgtagttcgggttgtttttgttgcgttgttgcggttgtttcgtttagcgtcgcgttgcgtngtttaggtttcgtgtttcgggtgtcgtcgtgtttttgtgcgttttcgttcgcgtttttcgcgtttttagttttttttgtgcgtttatattcgtttgtgtttcgggtttgttgcgtcggtgttttcgttgtttcgttgcggtgttgggtggttgggttcgcgtgttgtgggcgggtcgttgttttttcgttttttttttcgttggttcgttttcgcgttttgtcgtgttgtgcgtcgttgcgttcgcgtcgttcgggtgtgacgttggttgcgtgcgtacgtttttcgagttgtgtcgttgcgtttttgcgcgcggtcgtttgtcgtcgttcggaggttttgtgcgtgatgtcgcggtggcgtgtcgcgtagtcggtggggatttgagtggtagtcgtgtttgtcggcgtgtgcggtcggtgtcggtcgtcggttttcgacggggtttggtgggttggttttcggcgaggcgttggcgttgttgcggttttgagcgagacgcgt

SEQ ID NO: 32624 - DNA, 595 bp, Artificial Sequence
  chemically treated genomic DNA (Homo sapiens) CpG-island No: 32624
  unsure (504)
acgcgtctcgctcaaaaccgcaacaacgccaacgcctcgccgaaaaccaacccaccaaaccccgtcgaaaaccgacgaccgacaccgaccgcacacgccgacaaacacgactaccactcaaatccccaccgactacgcgacacgccaccgcgacatcacgcacaaaacctccgaacgacgacaaacgaccgcgcgcaaaaacgcaacgacacaactcgaaaaacgtacgcacgcaaccaacgtcacacccgaacgacgcgaacgcaacgacgcacaacacgacaaaacgcgaaaacgaaccaacgaaaaaaaaaacgaaaaaacaacgacccgcccacaacacgcgaacccaaccacccaacaccgcaacgaaacaacgaaaacaccgacgcaacaaacccgaaacacaaacgaatataaacgcacaaaaaaaactaaaaacgcgaaaaacgcgaacgaaaacgcacaaaaacacgacgacacccgaaacacgaaacctaaacnacgcaacgcgacgctaaacgaaacaaccgcaacaacgcaacaaaaacaacccgaactacacaacactccattccaccatccaccacatcta

SEQ ID NO: 32625 - DNA, 507 bp, Artificial Sequence
  chemically treated genomic DNA (Homo sapiens) CpG-island No: 32625
cgggaacggtattgcgtaaattcggtacgttggtgggtaattaaaatgtcgtcgcgtgggtggttgcggtaattgtttcgcgtattatttcggaatatggtgttgaagttggattttttgtcggatttttaacgttggcgttgtggcggcgatggatatgattaatggcggattttacgtttttattatgtagtagtacggtataaaagaagaagttggggtatttgtgttgatgtcgttggagttcgggtcgtttagtcggcgtttttgtatcgttcgcgtttagtttttcgataattcggtagcggagagtaaacggtgatattgatcgttattaaacggtatatgttatgcgatggcggtagttttttgtacggttatatcgttgatacgggaaattaattttagcggcgcgttcgtagatattttttttggcgttattacgttatataattattttattttatttgtgttttgtattaattgcgttatatcgttgatattaaa

SEQ ID NO: 32626 - DNA, 507 bp, Artificial Sequence
  chemically treated genomic DNA (Homo sapiens) CpG-island No: 32626
tttaatatcaacgatataacgcaattaatacaaaacacaaataaaataaaataattatataacgtaataacgccaaaaaaaatatctacgaacgcgccgctaaaattaatttcccgtatcaacgatataaccgtacaaaaaactaccgccatcgcataacatataccgtttaataacgatcaatatcaccgtttactctccgctaccgaattatcgaaaaactaaacgcgaacgatacaaaaacgccgactaaacgacccgaactccaacgacatcaacacaaataccccaacttcttcttttataccgtactactacataataaaaacgtaaaatccgccattaatcatatccatcgccgccacaacgccaacgttaaaaatccgacaaaaaatccaacttcaacaccatattccgaaataatacgcgaaacaattaccgcaaccacccacgcgacgacattttaattacccaccaacgtaccgaatttacgcaataccgttcccg

SEQ ID NO: 32627 - DNA, 507 bp, Artificial Sequence
  chemically treated genomic DNA (Homo sapiens) CpG-island No: 32627
tttgatattagcgatatagcgtagttgatgtaaaatataggtaaggtggggtggttgtatagcgtgatagcgttagggaaagtgtttgcggacgcgtcgttggagttggtttttcgtgttagcgatgtgatcgtgtaggaggttgtcgttatcgtatggtatatgtcgtttgatgacgattaatattatcgtttatttttcgttgtcgggttatcgaaaagttggacgcggacgatgtaaaagcgtcgattgagcggttcggattttaacgatattaatataaatgttttagtttttttttttgtgtcgtattgttgtatgatggaagcgtaaagttcgttattggttatatttatcgtcgttatagcgttagcgttgaaagttcggtaaagaatttaattttaatattatgtttcggaataatacgcgaggtaattgtcgtaattatttacgcgacggtattttagttatttattagcgtatcggatttacgtagtatcgttttcg

SEQ ID NO: 32628 - DNA, 507 bp, Artificial Sequence
  chemically treated genomic DNA (Homo sapiens) CpG-island No: 32628
cgaaaacgatactacgtaaatccgatacgctaataaataactaaaataccgtcgcgtaaataattacgacaattacctcgcgtattattccgaaacataatattaaaattaaattctttaccgaactttcaacgctaacgctataacgacgataaatataaccaataacgaactttacgcttccatcatacaacaatacgacacaaaaaaaaaaactaaaacatttatattaatatcgttaaaatccgaaccgctcaatcgacgcttttacatcgtccgcgtccaacttttcgataacccgacaacgaaaaataaacgataatattaatcgtcatcaaacgacatataccatacgataacgacaacctcctacacgatcacatcgctaacacgaaaaaccaactccaacgacgcgtccgcaaacactttccctaacgctatcacgctatacaaccaccccaccttacctatattttacatcaactacgctatatcgctaatatcaaa

SEQ ID NO: 32629 - DNA, 643 bp, Artificial Sequence
  chemically treated genomic DNA (Homo sapiens) CpG-island No: 32629
cggtttcggagcggcggagttagttattcggtacggtacgttggtcgtttatttcgcgaggtgtagggagtacgtgggtcgacgcgcggattttagagagcgtagcgtgatttgttgtacggattttcggatgagagatttggggcgggatttgcgatcggggttcgtttttacgttaggagggagggtcggtcggcgggggaagcgtttgcggtggcgttcgttgttttcgttcggttgttcggaaatttttatcggcggcggtgacggttacgttgttttgcgtacgcgtagcgcggtttaggcggtagttcggtgatatcggttttagcgcgtatgtttgtacgtcggggtttgcgcgtcgcggcggggtcgagggcggcgtgcgggttttttagtcgttgtttattttatttaacgtcggtttagattagtaatggtttaacgttatcgtttttttttttagttttttttagtcgcgtagtttttgacgtcgtttttatttcgttcgcggtcgacgggggttttaacgcgtaggcgcggtaattacggcggcggtgtttagtgaggatttgaaatcggtcgcgcgtgcgtatcggcgatacggttcggcgatcgaggtcgcgtttttttttcgtttgcg

SEQ ID NO: 32630 - DNA, 643 bp, Artificial Sequence
  chemically treated genomic DNA (Homo sapiens) CpG-island No: 32630
cgcaaacgaaaaaaaaacgcgacctcgatcgccgaaccgtatcgccgatacgcacgcgcgaccgatttcaaatcctcactaaacaccgccgccgtaattaccgcgcctacgcgttaaaacccccgtcgaccgcgaacgaaataaaaacgacgtcaaaaactacgcgactaaaaaaaactaaaaaaaaaaacgataacgttaaaccattactaatctaaaccgacgttaaataaaataaacaacgactaaaaaacccgcacgccgccctcgaccccgccgcgacgcgcaaaccccgacgtacaaacatacgcgctaaaaccgatatcaccgaactaccgcctaaaccgcgctacgcgtacgcaaaacaacgtaaccgtcaccgccgccgataaaaatttccgaacaaccgaacgaaaacaacgaacgccaccgcaaacgcttcccccgccgaccgaccctccctcctaacgtaaaaacgaaccccgatcgcaaatcccgccccaaatctctcatccgaaaatccgtacaacaaatcacgctacgctctctaaaatccgcgcgtcgacccacgtactccctacacctcgcgaaataaacgaccaacgtaccgtaccgaataactaactccgccgctccgaaaccg

SEQ ID NO: 32631 - DNA, 643 bp, Artificial Sequence
  chemically treated genomic DNA (Homo sapiens) CpG-island No: 32631
cgtaagcgaggaggaagcgcggtttcggtcgtcgggtcgtgtcgtcggtgcgtacgcgcgatcgattttaaatttttattagatatcgtcgtcgtggttatcgcgtttgcgcgttggggttttcgtcggtcgcgggcggggtgaggacggcgttagaagttacgcgattgggaggggttggagggagaggcggtggcgttgagttattattgatttaggtcggcgttgggtggaataggtagcggttggaaggttcgtacgtcgttttcggtttcgtcgcggcgcgtagatttcggcgtgtagatatgcgcgttagggtcggtgttatcgggttgtcgtttgagtcgcgttgcgcgtgcgtagggtagcgtggtcgttatcgtcgtcggtggaagttttcgagtagtcgggcgggggtagcggacgttatcgtaggcgtttttttcgtcggtcggtttttttttttgacgtaagggcgggtttcggtcgtagatttcgttttaggttttttattcgagggttcgtgtagtaggttacgttgcgttttttggggttcgcgcgtcggtttacgtgttttttgtatttcgcggggtgagcggttagcgtgtcgtgtcgggtggttggtttcgtcgtttcggagtcg

SEQ ID NO: 32632 - DNA, 643 bp, Artificial Sequence
  chemically treated genomic DNA (Homo sapiens) CpG-island No: 32632
cgactccgaaacgacgaaaccaaccacccgacacgacacgctaaccgctcaccccgcgaaatacaaaaaacacgtaaaccgacgcgcgaaccccaaaaaacgcaacgtaacctactacacgaaccctcgaataaaaaacctaaaacgaaatctacgaccgaaacccgcccttacgtcaaaaaaaaaaaccgaccgacgaaaaaaacgcctacgataacgtccgctacccccgcccgactactcgaaaacttccaccgacgacgataacgaccacgctaccctacgcacgcgcaacgcgactcaaacgacaacccgataacaccgaccctaacgcgcatatctacacgccgaaatctacgcgccgcgacgaaaccgaaaacgacgtacgaaccttccaaccgctacctattccacccaacgccgacctaaatcaataataactcaacgccaccgcctctccctccaacccctcccaatcgcgtaacttctaacgccgtcctcaccccgcccgcgaccgacgaaaaccccaacgcgcaaacgcgataaccacgacgacgatatctaataaaaatttaaaatcgatcgcgcgtacgcaccgacgacacgacccgacgaccgaaaccgcgcttcctcctcgcttacg

SEQ ID NO: 32633 - DNA, 1221 bp, Artificial Sequence
  chemically treated genomic DNA (Homo sapiens) CpG-island No: 32633
taaggaatcgttttttcgtcgtcgtttcgtaggtttcggtgttcgggaagtttaggaggagtttttggttcgttcgtcgggtttcggtttttatcgtttcgtcgcgttttttattattttcggcgttatttttcgcgtttttcggtcgttgttgttgttggagtcgtcgatttcgcgatcgtcgttttatagtttacgcggtcgcgtacgtagtacgtagaaatcggttcgttacggttagaattttagttttatatttttcgggattttcggtcggaaattaaggttttacgtgttcgggtttggttttttcggggatttttggggatcgtttaggaataagtttaaaagcgtataattcgttttttagaaaagcggcgtgataggaaaatagcgaatagttttaaggggaaaaaaatgttttaggaagtagttataaaggcgttttcgcgcgaagcgtttaggttttttacgcggggtttaaggagtttcgcggatagtttgaagtcgcgcgtgcgtagagcggcgcggggttattgcggtttcggcgtgggtgggggcgtttgtaggttttttttcgcgtaagtgttcgtttcgttttcggggtcgtatttatagtttcggttatttcggagaagtttgatttgagaattttttttgtagagtttcggtagtgcgggatttcggtagtcgttttttcggtagtcgttttttttgttttcgcgtcgtcgttttatatgttgttcgtcgcggtttttggggtatggagtacgttgtttagttttggcgatggtaacggcgacgggggtggcggaggagcgtttgttggtcgcgttcgtttatttgtagtgcgtcgtgggttgcgcggttttcgcgcggaatcgttagacgaatttagtgtacggtcgttacgcgttgtttagttataggtttcgagtgtcggcgcgggtcgtttgggtggtgtaggagttgttttcgttggttttgtcgttttattagtacgttagcgagttcgtttcgcgttttcgtagcgcgtttaattgtatttttttggttatgtttttcgtttattacgggtatcggtaacgttttcggttttcggttttttattttattttcggttcggcgtttttttcgattttttttttattgttcggtgtttttttttcgaagttttttttatttagatgttttttttttgttagatttttcggggcgttt

SEQ ID NO: 32634 - DNA, 1221 bp, Artificial Sequence
  chemically treated genomic DNA (Homo sapiens) CpG-island No: 32634
aaacgccccgaaaaatctaacaaaaaaaaaacatctaaataaaaaaaacttcgaaaaaaaaacaccgaacaataaaaaaaaaatcgaaaaaaacgccgaaccgaaaataaaataaaaaaccgaaaaccgaaaacgttaccgatacccgtaataaacgaaaaacataaccaaaaaaatacaattaaacgcgctacgaaaacgcgaaacgaactcgctaacgtactaataaaacgacaaaaccaacgaaaacaactcctacaccacccaaacgacccgcgccgacactcgaaacctataactaaacaacgcgtaacgaccgtacactaaattcgtctaacgattccgcgcgaaaaccgcgcaacccacgacgcactacaaataaacgaacgcgaccaacaaacgctcctccgccacccccgtcgccgttaccatcgccaaaactaaacaacgtactccataccccaaaaaccgcgacgaacaacatataaaacgacgacgcgaaaacaaaaaaaacgactaccgaaaaaacgactaccgaaatcccgcactaccgaaactctacaaaaaaaattctcaaatcaaacttctccgaaataaccgaaactataaatacgaccccgaaaacgaaacgaacacttacgcgaaaaaaaacctacaaacgcccccacccacgccgaaaccgcaataaccccgcgccgctctacgcacgcgcgacttcaaactatccgcgaaactccttaaaccccgcgtaaaaaacctaaacgcttcgcgcgaaaacgcctttataactacttcctaaaacatttttttccccttaaaactattcgctattttcctatcacgccgcttttctaaaaaacgaattatacgcttttaaacttattcctaaacgatccccaaaaatccccgaaaaaaccaaacccgaacacgtaaaaccttaatttccgaccgaaaatcccgaaaaatataaaactaaaattctaaccgtaacgaaccgatttctacgtactacgtacgcgaccgcgtaaactataaaacgacgatcgcgaaatcgacgactccaacaacaacaacgaccgaaaaacgcgaaaaataacgccgaaaataataaaaaacgcgacgaaacgataaaaaccgaaacccgacgaacgaaccaaaaactcctcctaaacttcccgaacaccgaaacctacgaaacgacgacgaaaaaacgattcctta

SEQ ID NO: 32635 - DNA, 1221 bp, Artificial Sequence
  chemically treated genomic DNA (Homo sapiens) CpG-island No: 32635
ggacgtttcgggggatttggtagggagagggtatttgggtgggggaggtttcggggagagggtatcgggtagtgaggggagggtcggagaggacgtcgggtcgggagtagggtagggggtcgggggtcggggacgttatcgatgttcgtagtggacgaggaatatggttaggaggatgtagttgggcgcgttgcggagacgcggggcggattcgttggcgtattggtagagcggtagggttagcgagggtagtttttgtattatttaggcggttcgcgtcggtattcggagtttgtggttgggtagcgcgtggcggtcgtatattgagttcgtttgacgatttcgcgcgaagatcgcgtagtttacggcgtattgtaggtaggcgagcgcggttagtaggcgttttttcgttattttcgtcgtcgttgttatcgttagggttgggtagcgtgttttatgttttagaggtcgcggcgggtaatatatagggcggcggcgcgggggtaggaggggcggttatcggaggggcggttatcggagtttcgtattgtcgggattttgtagaaagggtttttaagttaggttttttcggggtagtcggggttgtgggtgcggtttcgggggcggggcgagtatttgcgcggggagggatttgtaagcgtttttatttacgtcggggtcgtagtaatttcgcgtcgttttgcgtacgcgcggttttaggttgttcgcggagttttttgagtttcgcgtgggaaatttgggcgtttcgcgcggagacgtttttgtggttgttttttggagtatttttttttttttagagttgttcgttgtttttttgttacgtcgtttttttgaaagacgggttgtgcgtttttgggtttatttttggacggtttttaaaggttttcgaaaggattaggttcggatacgtggggttttggttttcggtcggaagtttcgggaggtgtagggttagagttttggtcgtggcgggtcggtttttgcgtgttgcgtgcgcggtcgcgtgggttatggggcggcggtcgcggggtcggcggttttagtaatagtagcggtcggaggacgcggaggatggcgtcgagggtggtggaaagcgcggcgaggcggtaggagtcgggattcggcgggcgggttaggggttttttttgggtttttcggatatcgaggtttgcgaggcggcggcgagggggcggttttttg

SEQ ID NO: 32636 - DNA, 1221 bp, Artificial Sequence
  chemically treated genomic DNA (Homo sapiens) CpG-island No: 32636
caaaaaaccgccccctcgccgccgcctcgcaaacctcgatatccgaaaaacccaaaaaaaacccctaacccgcccgccgaatcccgactcctaccgcctcgccgcgctttccaccaccctcgacgccatcctccgcgtcctccgaccgctactattactaaaaccgccgaccccgcgaccgccgccccataacccacgcgaccgcgcacgcaacacgcaaaaaccgacccgccacgaccaaaactctaaccctacacctcccgaaacttccgaccgaaaaccaaaaccccacgtatccgaacctaatcctttcgaaaacctttaaaaaccgtccaaaaataaacccaaaaacgcacaacccgtctttcaaaaaaacgacgtaacaaaaaaacaacgaacaactctaaaaaaaaaaaaatactccaaaaaacaaccacaaaaacgtctccgcgcgaaacgcccaaatttcccacgcgaaactcaaaaaactccgcgaacaacctaaaaccgcgcgtacgcaaaacgacgcgaaattactacgaccccgacgtaaataaaaacgcttacaaatccctccccgcgcaaatactcgccccgcccccgaaaccgcacccacaaccccgactaccccgaaaaaacctaacttaaaaaccctttctacaaaatcccgacaatacgaaactccgataaccgcccctccgataaccgcccctcctacccccgcgccgccgccctatatattacccgccgcgacctctaaaacataaaacacgctacccaaccctaacgataacaacgacgacgaaaataacgaaaaaacgcctactaaccgcgctcgcctacctacaatacgccgtaaactacgcgatcttcgcgcgaaatcgtcaaacgaactcaatatacgaccgccacgcgctacccaaccacaaactccgaataccgacgcgaaccgcctaaataatacaaaaactaccctcgctaaccctaccgctctaccaatacgccaacgaatccgccccgcgtctccgcaacgcgcccaactacatcctcctaaccatattcctcgtccactacgaacatcgataacgtccccgacccccgaccccctaccctactcccgacccgacgtcctctccgaccctcccctcactacccgataccctctccccgaaacctcccccacccaaataccctctccctaccaaatcccccgaaacgtcc

SEQ ID NO: 32637 - DNA, 1216 bp, Artificial Sequence
  chemically treated genomic DNA (Homo sapiens) CpG-island No: 32637
agttatcgcgtttcgcgtgcgcgttcgtttgtttcgcgtatttgtcgtggtcgtcgcgcgggtttgatcggttggcgggcgggcggcgcgtataggtggcggcgattgggtaggcggggtttagagggtgacgttacgggtttcggtttcggcggtagaaatagggtagtcgcggcggcggtggtatagtagcgggtagcggcggtttagggagttggagttttaatagtttttagcgagttcgggattcgtcgatagttcgagaaattagtcgaaggacgcggggcggggtcgtcgtcgtcgttacggggtgttttttttttttcgtttaagttcggttatttggtttttttttcggtttcggtcgttttaggtacgcgggcgtagtttttagcgggcgcggggagggtgttatgtcgttggcgtcgttattagtcggtttcgttgtattttattggggttttggcgttcgcggtttcgtattttgttgtagggttcggcgcgggcgtttgtttgtttttattgttcgcgtcgggaaagttaagtttgttcgcggggaagggatcgttgggttagggttcggtagggttatttcggttaaggttaggattcgaggagaggttgggacgtcgaggttcgtggtcggggtttacggtggggatcggagtgattcggttggtacgtcgggcgttacgtagaagcgttcgggtcgagttcgtagttcgcgttcggtttcgaaattttgtaggcgtcgtttttgggtttaggatttcgagcggtttcggcggagttaggcgagcgcggtttttcggttcgggttcggtgtttttggtttcgggttggggcgtcgggtaggtatttttagtatttttttttcgcggttttgcggggaaatttgcgttttttcgttgtagtttaaagggttcgttgcgtttcgtttggttttggttttttcggggttcgtcgtatgtgaggttggggaggaaggaattagggtacgattcgattttaggtagtttgcggcgttgtttgtgcgtagtcggtcgcggtttagagtgagcggttcggggtattcgtttgaacgtgtttagggagtagtgtgttgggggcgtttagcgttcgggttgggggtttggttttaagagagtttgtattgtggatgattttcgttttttttgcgttcgtaaaataaagacgagttttgagttttaggagg

SEQ ID NO: 32638 - DNA, 1216 bp, Artificial Sequence
  chemically treated genomic DNA (Homo sapiens) CpG-island No: 32638
cctcctaaaactcaaaactcgtctttattttacgaacgcaaaaaaaacgaaaatcatccacaatacaaactctcttaaaaccaaacccccaacccgaacgctaaacgcccccaacacactactccctaaacacgttcaaacgaataccccgaaccgctcactctaaaccgcgaccgactacgcacaaacaacgccgcaaactacctaaaatcgaatcgtaccctaattccttcctccccaacctcacatacgacgaaccccgaaaaaaccaaaaccaaacgaaacgcaacgaaccctttaaactacaacgaaaaaacgcaaatttccccgcaaaaccgcgaaaaaaaaatactaaaaatacctacccgacgccccaacccgaaaccaaaaacaccgaacccgaaccgaaaaaccgcgctcgcctaactccgccgaaaccgctcgaaatcctaaacccaaaaacgacgcctacaaaatttcgaaaccgaacgcgaactacgaactcgacccgaacgcttctacgtaacgcccgacgtaccaaccgaatcactccgatccccaccgtaaaccccgaccacgaacctcgacgtcccaacctctcctcgaatcctaaccttaaccgaaataaccctaccgaaccctaacccaacgatcccttccccgcgaacaaacttaactttcccgacgcgaacaataaaaacaaacaaacgcccgcgccgaaccctacaacaaaatacgaaaccgcgaacgccaaaaccccaataaaatacaacgaaaccgactaataacgacgccaacgacataacaccctccccgcgcccgctaaaaactacgcccgcgtacctaaaacgaccgaaaccgaaaaaaaaaccaaataaccgaacttaaacgaaaaaaaaaaaacaccccgtaacgacgacgacgaccccgccccgcgtccttcgactaatttctcgaactatcgacgaatcccgaactcgctaaaaactattaaaactccaactccctaaaccgccgctacccgctactataccaccgccgccgcgactaccctatttctaccgccgaaaccgaaacccgtaacgtcaccctctaaaccccgcctacccaatcgccgccacctatacgcgccgcccgcccgccaaccgatcaaacccgcgcgacgaccacgacaaatacgcgaaacaaacgaacgcgcacgcgaaacgcgataact

SEQ ID NO: 32639 - DNA, 1216 bp, Artificial Sequence
  chemically treated genomic DNA (Homo sapiens) CpG-island No: 32639
ttttttgaaatttagaattcgtttttgttttgcgggcgtaaagagggcggagattatttatagtgtaagtttttttaggattaagtttttagttcgaacgttgaacgtttttaatatattgttttttagatacgtttaagcgggtatttcgggtcgtttattttggatcgcggtcggttacgtataagtagcgtcgtaggttgtttggagtcgggtcgtgttttgatttttttttttttagttttatatgcggcggatttcggggaagttagggttaggcgaagcgtagcgggttttttgggttgtagcgaggagacgtaagttttttcgtaaagtcgcggggaggaggtgttgagaatgtttgttcggcgttttaattcggagttaagggtatcgggttcgggtcgaggggtcgcgttcgtttggtttcgtcggggtcgttcggggttttgaatttaagaacggcgtttgtaggatttcggagtcgggcgcgagttgcgggttcggttcgagcgtttttgcgtggcgttcggcgtgttaatcgggttatttcggtttttatcgtagatttcggttacgagtttcggcgttttagttttttttcgagttttggttttggtcggggtagttttgtcgagttttggtttagcggtttttttttcgcgggtaaatttggttttttcggcgcgggtagtaaggataagtaagcgttcgcgtcgggttttgtagtaagatgcggggtcgcgggcgttaggattttagtggggtgtagcgggatcggttggtggcggcgttagcgatatggtatttttttcgcgttcgttgggagttgcgttcgcgtatttgagacggtcggggtcgaggggaagattaggtggtcggatttgggcgggagggagggagtatttcgtggcggcggcggcgatttcgtttcgcgtttttcggttggtttttcgggttgtcggcgggtttcgggttcgttggaggttgttgaggttttagttttttgagtcgtcgttgttcgttgttgtgttatcgtcgtcgcggttgttttatttttgtcgtcgggatcggagttcgtgacgttattttttgggtttcgtttgtttaatcgtcgttatttgtgcgcgtcgttcgttcgttagtcggttagattcgcgcggcggttacggtaggtgcgcggagtaggcgggcgcgtacgcggggcgcgatgatt

SEQ ID NO: 32640 - DNA, 1216 bp, Artificial Sequence
  chemically treated genomic DNA (Homo sapiens) CpG-island No: 32640
aatcatcgcgccccgcgtacgcgcccgcctactccgcgcacctaccgtaaccgccgcgcgaatctaaccgactaacgaacgaacgacgcgcacaaataacgacgattaaacaaacgaaacccaaaaaataacgtcacgaactccgatcccgacgacaaaaataaaacaaccgcgacgacgataacacaacaacgaacaacgacgactcaaaaaactaaaacctcaacaacctccaacgaacccgaaacccgccgacaacccgaaaaaccaaccgaaaaacgcgaaacgaaatcgccgccgccgccacgaaatactccctccctcccgcccaaatccgaccacctaatcttcccctcgaccccgaccgtctcaaatacgcgaacgcaactcccaacgaacgcgaaaaaaataccatatcgctaacgccgccaccaaccgatcccgctacaccccactaaaatcctaacgcccgcgaccccgcatcttactacaaaacccgacgcgaacgcttacttatccttactacccgcgccgaaaaaaccaaatttacccgcgaaaaaaaaaccgctaaaccaaaactcgacaaaactaccccgaccaaaaccaaaactcgaaaaaaaactaaaacgccgaaactcgtaaccgaaatctacgataaaaaccgaaataacccgattaacacgccgaacgccacgcaaaaacgctcgaaccgaacccgcaactcgcgcccgactccgaaatcctacaaacgccgttcttaaattcaaaaccccgaacgaccccgacgaaaccaaacgaacgcgacccctcgacccgaacccgatacccttaactccgaattaaaacgccgaacaaacattctcaacacctcctccccgcgactttacgaaaaaacttacgtctcctcgctacaacccaaaaaacccgctacgcttcgcctaaccctaacttccccgaaatccgccgcatataaaactaaaaaaaaaaaaatcaaaacacgacccgactccaaacaacctacgacgctacttatacgtaaccgaccgcgatccaaaataaacgacccgaaatacccgcttaaacgtatctaaaaaacaatatattaaaaacgttcaacgttcgaactaaaaacttaatcctaaaaaaacttacactataaataatctccgccctctttacgcccgcaaaacaaaaacgaattctaaatttcaaaaaa

SEQ ID NO: 32641 - DNA, 787 bp, Artificial Sequence
  chemically treated genomic DNA (Homo sapiens) CpG-island No: 32641
ttttttcggacgttcgttagtcgtttttttttttttatttttatatcgggagcgacgtatattttattcgttttttagtttcgtaggttcggttttttaaagagatatatacgggttatcgatttgtcgttagtcgcgtgttttgtagttgttggtttgattttaggtcgggacgggtagagcggaatattgttcggcgggtttaggtcgatcgtgtttgtggttttcggaataataaattttcggttttagtgatgtgggttagatcggatttggagaggcggtatcggatttttttcgtaattcgtttgggtcgggggagcgtgattcggtcgttatcgtgttatagttggcgattgataaatagtaggcgacgtcgggagaatttttcgagatattcgagatattagttttttcgtttcgcggttttgtaggatttgttcgtcggagtttcggagttcgcggtagtcgtagggttttttttttaggtttttgggttttgaggtaacgcggtcgcgttgttttcgggtttttcgttttattcgttttttttttttttattttttttcgtttttttttttttttgttcgtttatttcgattttttagtaagtatggaagtttagcgaggcgggggattgttcggaggtcgagttttcggtagtttttttcgttttttttttcgttgtgttttcggggttttatttttatttcggcgcggcgttttgtttttattcgaagtttttaaggcggtattttttttttttgtgtggtttttggggttttag

SEQ ID NO: 32642 - DNA, 787 bp, Artificial Sequence
  chemically treated genomic DNA (Homo sapiens) CpG-island No: 32642
ctaaaaccccaaaaaccacacaaaaaaaaaaaataccgccttaaaaacttcgaataaaaacaaaacgccgcgccgaaataaaaataaaaccccgaaaacacaacgaaaaaaaaaacgaaaaaaactaccgaaaactcgacctccgaacaatcccccgcctcgctaaacttccatacttactaaaaaatcgaaataaacgaacaaaaaaaaaaaaaaacgaaaaaaaataaaaaaaaaaaaaacgaataaaacgaaaaacccgaaaacaacgcgaccgcgttacctcaaaacccaaaaacctaaaaaaaaaaccctacgactaccgcgaactccgaaactccgacgaacaaatcctacaaaaccgcgaaacgaaaaaactaatatctcgaatatctcgaaaaattctcccgacgtcgcctactatttatcaatcgccaactataacacgataacgaccgaatcacgctcccccgacccaaacgaattacgaaaaaaatccgataccgcctctccaaatccgatctaacccacatcactaaaaccgaaaatttattattccgaaaaccacaaacacgatcgacctaaacccgccgaacaatattccgctctacccgtcccgacctaaaatcaaaccaacaactacaaaacacgcgactaacgacaaatcgataacccgtatatatctctttaaaaaaccgaacctacgaaactaaaaaacgaataaaatatacgtcgctcccgatataaaaataaaaaaaaaaaaacgactaacgaacgtccgaaaaaa

SEQ ID NO: 32643 - DNA, 787 bp, Artificial Sequence
  chemically treated genomic DNA (Homo sapiens) CpG-island No: 32643
ttaaggttttaagaattatataggagaggggagtgtcgttttggagatttcgggtgggggtagagcgtcgcgtcgaggtggaggtaggatttcgagggtatagcgggaaggaaggcggaggaggttgtcgggagttcggttttcgagtaatttttcgtttcgttgggtttttatgtttgttaaagggtcgagatgaacgggtaagggagagagagggcgaggaaaaataaaaaagagaggggcgagtgggacgaggggttcgggagtagcgcggtcgcgttattttagagtttagaggtttgggggaggggttttacggttgtcgcggatttcggggtttcggcgggtaggttttgtagggtcgcggagcgagaaggttgatgtttcgggtgtttcggggagttttttcgacgtcgtttgttgtttgttagtcgttagttgtgatacggtagcggtcgggttacgttttttcggtttaggcgggttgcgggaggggttcggtgtcgtttttttaggttcggtttggtttatattattggggtcgggggtttattgtttcggagattataggtacggtcggtttggattcgtcgggtagtgtttcgttttgttcgtttcggtttggggttaagttaatagttgtaaggtacgcgattggcggtagatcggtggttcgtgtgtgtttttttaaggggtcgggtttgcgaagttgaggggcgggtggggtgtgcgtcgttttcggtgtgagggtgagagggagagagcggttggcgggcgttcgagggag

SEQ ID NO: 32644 - DNA, 787 bp, Artificial Sequence
  chemically treated genomic DNA (Homo sapiens) CpG-island No: 32644
ctccctcgaacgcccgccaaccgctctctccctctcaccctcacaccgaaaacgacgcacaccccacccgcccctcaacttcgcaaacccgaccccttaaaaaaacacacacgaaccaccgatctaccgccaatcgcgtaccttacaactattaacttaaccccaaaccgaaacgaacaaaacgaaacactacccgacgaatccaaaccgaccgtacctataatctccgaaacaataaacccccgaccccaataatataaaccaaaccgaacctaaaaaaacgacaccgaacccctcccgcaacccgcctaaaccgaaaaaacgtaacccgaccgctaccgtatcacaactaacgactaacaaacaacaaacgacgtcgaaaaaactccccgaaacacccgaaacatcaaccttctcgctccgcgaccctacaaaacctacccgccgaaaccccgaaatccgcgacaaccgtaaaacccctcccccaaacctctaaactctaaaataacgcgaccgcgctactcccgaacccctcgtcccactcgcccctctcttttttatttttcctcgccctctctctcccttacccgttcatctcgaccctttaacaaacataaaaacccaacgaaacgaaaaattactcgaaaaccgaactcccgacaacctcctccgccttccttcccgctataccctcgaaatcctacctccacctcgacgcgacgctctacccccacccgaaatctccaaaacgacactcccctctcctatataattcttaaaaccttaa

SEQ ID NO: 32645 - DNA, 862 bp, Artificial Sequence
  chemically treated genomic DNA (Homo sapiens) CpG-island No: 32645
cgtgtttggtcgggaatatgtcggtatttttaggtgttgtttattgaggttaggtggtacggcgtttttagttatttgggaggaatgtagcgatgtcggcgtttgttatttaggaggcggtagcgttttttttacgggggtttcggaggtcgggtgaatcgtagcgcgaggggtttaggaagcggcggggcgcggcgtatttatttgttggttttaggagcgcgattgtcgtcgagtatttgtcggtcgtttcggcgaattgttcgtttcggaatagttcgttgttttggttttttaggtcggtagggtttttcgcgttttgttcgtcgttcggatgttcggtggcgtcgtcgttcgtcgtcgtcgtcgtagaggttcgtcgtgggtttcgtttgttcgcgtcggttttcggggtttggtttcgttgcggcgcgttttttgtcggtcgtttgtcgttttcggttttgttagttagttttttttggatgttgtttatgacgtacggttgggcggcgcgcgcggttttcgtcggtttcgcgggttttgtgaggaagtggatgcgggaagtgagggtttgtattatcgggagtagttgtcgcggaggtcgcggaggtcgcgggggtgtaggacgcggagggcgggttttagggaagtcggttcgggtatcgtttttgcgggcggagtttgtgttgtcggatttttagagttagtcggtttagttcgttttttcgaggttttttgcggttttttgaggattcggttttcgggtttcggttagaaacgtattttgtttttaattgtttaagcgttgaagggtttgtggttgaaaatcggtattttagagttattttttttattaagt

SEQ ID NO: 32646 - DNA, 862 bp, Artificial Sequence
  chemically treated genomic DNA (Homo sapiens) CpG-island No: 32646
acttaataaaaaaaataactctaaaataccgattttcaaccacaaacccttcaacgcttaaacaattaaaaacaaaatacgtttctaaccgaaacccgaaaaccgaatcctcaaaaaaccgcaaaaaacctcgaaaaaacgaactaaaccgactaactctaaaaatccgacaacacaaactccgcccgcaaaaacgatacccgaaccgacttccctaaaacccgccctccgcgtcctacacccccgcgacctccgcgacctccgcgacaactactcccgataatacaaaccctcacttcccgcatccacttcctcacaaaacccgcgaaaccgacgaaaaccgcgcgcgccgcccaaccgtacgtcataaacaacatccaaaaaaaactaactaacaaaaccgaaaacgacaaacgaccgacaaaaaacgcgccgcaacgaaaccaaaccccgaaaaccgacgcgaacaaacgaaacccacgacgaacctctacgacgacgacgacgaacgacgacgccaccgaacatccgaacgacgaacaaaacgcgaaaaaccctaccgacctaaaaaaccaaaacaacgaactattccgaaacgaacaattcgccgaaacgaccgacaaatactcgacgacaatcgcgctcctaaaaccaacaaataaatacgccgcgccccgccgcttcctaaacccctcgcgctacgattcacccgacctccgaaacccccgtaaaaaaaacgctaccgcctcctaaataacaaacgccgacatcgctacattcctcccaaataactaaaaacgccgtaccacctaacctcaataaacaacacctaaaaataccgacatattcccgaccaaacacg

SEQ ID NO: 32647 - DNA, 862 bp, Artificial Sequence
  chemically treated genomic DNA (Homo sapiens) CpG-island No: 32647
atttgatgaaggggatggttttgagatgtcggtttttagttataggttttttagcgtttaaatagttagagatagggtacgtttttggtcgaaattcgggagtcgagtttttaggaagtcgtagggggtttcgagggagcggattgggtcgattggttttagaggttcggtagtataggtttcgttcgtaggggcggtgttcgagtcggtttttttagagttcgtttttcgcgttttgtattttcgcggttttcgcggttttcgcggtaattgttttcggtgatgtaaatttttatttttcgtatttatttttttatagagttcgcggagtcggcgggagtcgcgcgcgtcgtttagtcgtgcgttatgggtaatatttagaagaagttgattggtaaagtcgaaggcggtaagcggtcggtaaggggcgcgtcgtagcggggttagatttcggaggtcggcgcggataagcggagtttacggcgggtttttgcggcggcggcggcgggcggcggcgttatcgggtattcgggcggcgggtagggcgcggagaattttgtcggtttgaagagttagggtaacgagttgtttcgaagcgggtagttcgtcgaggcggtcggtaagtattcggcggtaatcgcgtttttggagttagtaggtaggtgcgtcgcgtttcgtcgttttttgggtttttcgcgttgcggtttattcgattttcggggttttcgtgggagaggcgttgtcgttttttgaatgataggcgtcggtatcgttgtattttttttaggtgattaagagcgtcgtgttatttgattttagtgagtagtatttgggaatgtcggtatgttttcggttaggtacg

SEQ ID NO: 32648 - DNA, 862 bp, Artificial Sequence
  chemically treated genomic DNA (Homo sapiens) CpG-island No: 32648
cgtacctaaccgaaaacataccgacattcccaaatactactcactaaaatcaaataacacgacgctcttaatcacctaaaaaaaatacaacgataccgacgcctatcattcaaaaaacgacaacgcctctcccacgaaaaccccgaaaatcgaataaaccgcaacgcgaaaaacccaaaaaacgacgaaacgcgacgcacctacctactaactccaaaaacgcgattaccgccgaatacttaccgaccgcctcgacgaactacccgcttcgaaacaactcgttaccctaactcttcaaaccgacaaaattctccgcgccctacccgccgcccgaatacccgataacgccgccgcccgccgccgccgccgcaaaaacccgccgtaaactccgcttatccgcgccgacctccgaaatctaaccccgctacgacgcgccccttaccgaccgcttaccgccttcgactttaccaatcaacttcttctaaatattacccataacgcacgactaaacgacgcgcgcgactcccgccgactccgcgaactctataaaaaaataaatacgaaaaataaaaatttacatcaccgaaaacaattaccgcgaaaaccgcgaaaaccgcgaaaatacaaaacgcgaaaaacgaactctaaaaaaaccgactcgaacaccgcccctacgaacgaaacctatactaccgaacctctaaaaccaatcgacccaatccgctccctcgaaaccccctacgacttcctaaaaactcgactcccgaatttcgaccaaaaacgtaccctatctctaactatttaaacgctaaaaaacctataactaaaaaccgacatctcaaaaccatccccttcatcaaat

SEQ ID NO: 32649 - DNA, 650 bp, Artificial Sequence
  chemically treated genomic DNA (Homo sapiens) CpG-island No: 32649
cgacgagagaaggagcgggatcggaagaggaagcgaaagagttgcggtaaaaagggaagggagtaaaggttaaggtcgagagggtcgagggtcggggcggcgattaagtttatttagaggtggtttgtaaggagtcgtaggagtcgtcggggttggtcgtttataaggtggaggtgaatgagtacgagtcggttagtaaggcgtaaagaggaggaataggtaggagttgaaggggagtttcgcgtagcggaaagggaggaagttcgggcgttgttgaatttcggggtcgggattagcggaaggtacgagagttggaggttaacgtgaaggggtcgcggatagatttgtcgaattaggcggagggcgcgataattcggaacgtttagcgtttgttttaggggtttgaggcgtagggagaagcgcgggagcggcggcggcggcgtcgttagcgggaggagcgcggggcggacgaggtggagaagaagcggcggcgttaaaatttaagtaggaagaaggcggttagtttttcgcgttttttgtattgggttcgtaaggggacgatttcgtttaggatttggagcgcgtcggtttcgtgggggcgttcgagggtttttttttttttttattttaggtttagcgtgtttttggtt

SEQ ID NO: 32650 - DNA, 650 bp, Artificial Sequence
  chemically treated genomic DNA (Homo sapiens) CpG-island No: 32650
aaccaaaaacacgctaaacctaaaataaaaaaaaaaaaaaaccctcgaacgcccccacgaaaccgacgcgctccaaatcctaaacgaaatcgtccccttacgaacccaatacaaaaaacgcgaaaaactaaccgccttcttcctacttaaattttaacgccgccgcttcttctccacctcgtccgccccgcgctcctcccgctaacgacgccgccgccgccgctcccgcgcttctccctacgcctcaaacccctaaaacaaacgctaaacgttccgaattatcgcgccctccgcctaattcgacaaatctatccgcgaccccttcacgttaacctccaactctcgtaccttccgctaatcccgaccccgaaattcaacaacgcccgaacttcctccctttccgctacgcgaaactccccttcaactcctacctattcctcctctttacgccttactaaccgactcgtactcattcacctccaccttataaacgaccaaccccgacgactcctacgactccttacaaaccacctctaaataaacttaatcgccgccccgaccctcgaccctctcgaccttaacctttactcccttccctttttaccgcaactctttcgcttcctcttccgatcccgctccttctctcgtcg

SEQ ID NO: 32651 - DNA, 650 bp, Artificial Sequence
  chemically treated genomic DNA (Homo sapiens) CpG-island No: 32651
ggttagggatacgttgggtttggggtgggggaaggggggagttttcgggcgtttttacgaggtcggcgcgttttaggttttggacgggatcgtttttttgcgggtttagtgtagggagcgcggggagttggtcgttttttttttgtttaggttttggcgtcgtcgttttttttttatttcgttcgtttcgcgtttttttcgttggcggcgtcgtcgtcgtcgttttcgcgtttttttttgcgttttaagtttttagggtaggcgttaggcgtttcggattgtcgcgtttttcgtttggttcggtaggtttgttcgcggtttttttacgttggtttttagttttcgtgtttttcgttggtttcggtttcggagtttagtagcgttcggatttttttttttttcgttgcgcgaggtttttttttagtttttgtttgttttttttttttgcgttttgttggtcggttcgtgtttatttatttttattttgtggacgattagtttcgacggtttttgcggttttttgtaggttatttttgggtgggtttgatcgtcgtttcggttttcggttttttcggttttggtttttgtttttttttttttttgtcgtagttttttcgttttttttttcggtttcgttttttttttcgtcg

SEQ ID NO: 32652 - DNA, 650 bp, Artificial Sequence
  chemically treated genomic DNA (Homo sapiens) CpG-island No: 32652
cgacgaaaaaaaaaacgaaaccgaaaaaaaaaacgaaaaaactacgacaaaaaaaaaaaaaaacaaaaaccaaaaccgaaaaaaccgaaaaccgaaacgacgatcaaacccacccaaaaataacctacaaaaaaccgcaaaaaccgtcgaaactaatcgtccacaaaataaaaataaataaacacgaaccgaccaacaaaacgcaaaaaaaaaaaacaaacaaaaactaaaaaaaaacctcgcgcaacgaaaaaaaaaaaaatccgaacgctactaaactccgaaaccgaaaccaacgaaaaacacgaaaactaaaaaccaacgtaaaaaaaccgcgaacaaacctaccgaaccaaacgaaaaacgcgacaatccgaaacgcctaacgcctaccctaaaaacttaaaacgcaaaaaaaaacgcgaaaacgacgacgacgacgccgccaacgaaaaaaacgcgaaacgaacgaaataaaaaaaaaacgacgacgccaaaacctaaacaaaaaaaaaacgaccaactccccgcgctccctacactaaacccgcaaaaaaacgatcccgtccaaaacctaaaacgcgccgacctcgtaaaaacgcccgaaaactccccccttcccccaccccaaacccaacgtatccctaacc

SEQ ID NO: 32653 - DNA, 539 bp, Artificial Sequence
  chemically treated genomic DNA (Homo sapiens) CpG-island No: 32653
  unsure (521..522, 526, 534)
agagtatcgtcgatgaatttttagttttgttaaaatagtaggcgtaaaattggtagtcgggttatttatttgatttcgtaattattatgggtattttaatcgattgcgtttacgtcgattcggtttatagttttattcgggaaggcgaaagtaaagggtaattgttgttggatggtcgtaacgtcgggttggttgtcgttatcggttcgattatttttgtggatgtggattcgaatgcgtttttaagtcgcgaagagattttcggttcggtgttggtggttacgcgttttatattagaagaataggcgttatagtttgttaacgatagttagtacggttttggcgcggcggtatggacgcgcgatttttttcgcgcgtatcgtatgagtcgacgtttgaaagtcggtttcgttttcgttaataattataacgacggcgatatgatcgtgtcgtttggcggttataagtagagcggtaacggtcgcgataaatttttgtatgtttttgaaaaatttattgannnatntggagaanatttt

SEQ ID NO: 32654 - DNA, 539 bp, Artificial Sequence
  chemically treated genomic DNA (Homo sapiens) CpG-island No: 32654
  unsure (6, 14, 17..)
aaaatnttctccanatnnntcaataaatttttcaaaaacatacaaaaatttatcgcgaccgttaccgctctacttataaccgccaaacgacacgatcatatcgccgtcgttataattattaacgaaaacgaaaccgactttcaaacgtcgactcatacgatacgcgcgaaaaaaatcgcgcgtccataccgccgcgccaaaaccgtactaactatcgttaacaaactataacgcctattcttctaatataaaacgcgtaaccaccaacaccgaaccgaaaatctcttcgcgacttaaaaacgcattcgaatccacatccacaaaaataatcgaaccgataacgacaaccaacccgacgttacgaccatccaacaacaattaccctttactttcgccttcccgaataaaactataaaccgaatcgacgtaaacgcaatcgattaaaatacccataataattacgaaatcaaataaataacccgactaccaattttacgcctactattttaacaaaactaaaaattcatcgacgatactct

SEQ ID NO: 32655 - DNA, 539 bp, Artificial Sequence
  chemically treated genomic DNA (Homo sapiens) CpG-island No: 32655
  unsure (6, 14, 17..)
ggggtnttttttangtnnnttagtgaattttttaagggtatgtagggatttgtcgcgatcgttgtcgttttgtttatagtcgttaaacggtacggttatatcgtcgtcgttgtagttattgacgaagacggaatcggtttttaggcgtcggtttatgcggtgcgcgcgggagaggtcgcgcgtttatatcgtcgcgttaaggtcgtattggttgtcgttggtaagttgtagcgtttgtttttttgatgtgaaacgcgtgattattagtatcggatcgaaaattttttcgcgatttaaggacgtattcgggtttatatttataaagatggtcgggtcgatggcggtagttagttcggcgttacggttatttaataatagttgttttttgttttcgttttttcgaataaagttatggatcgagtcggcgtgggcgtagtcgattaaggtgtttatggtggttgcgggattaagtggatggttcggttgttagttttgcgtttgttgttttaatagggttaagaatttatcggcgatgtttt

SEQ ID NO: 32656 - DNA, 539 bp, Artificial Sequence
  chemically treated genomic DNA (Homo sapiens) CpG-island No: 32656
  unsure (521..522, 526, 534)
aaaacatcgccgataaattcttaaccctattaaaacaacaaacgcaaaactaacaaccgaaccatccacttaatcccgcaaccaccataaacaccttaatcgactacgcccacgccgactcgatccataactttattcgaaaaaacgaaaacaaaaaacaactattattaaataaccgtaacgccgaactaactaccgccatcgacccgaccatctttataaatataaacccgaatacgtccttaaatcgcgaaaaaattttcgatccgatactaataatcacgcgtttcacatcaaaaaaacaaacgctacaacttaccaacgacaaccaatacgaccttaacgcgacgatataaacgcgcgacctctcccgcgcgcaccgcataaaccgacgcctaaaaaccgattccgtcttcgtcaataactacaacgacgacgatataaccgtaccgtttaacgactataaacaaaacgacaacgatcgcgacaaatccctacatacccttaaaaaattcactaannnacntaaaaaanacccc

SEQ ID NO: 32657 - DNA, 528 bp, Artificial Sequence
  chemically treated genomic DNA (Homo sapiens) CpG-island No: 32657
gtggcgtttttttcggattcggggttgggagggtggcggtgagattattttcggtcggaggttttgattcgggcggaatacgtttgtaaagtcgttcgagtttcggtggttcgtttttttcggcgttttcgtttttatcggagacgtttaggtcgatttttttatttttattagtcgatagttttcgggaataaagtgtatagagagttttttttttcgttttattatgttcgtcgtttttacgtcgtagttttagcggtcgttattttttttaatttaggatcgacgcgggttttagtttagacgttttcggttcgttttttttaggtttagaacgatttcgttcgtcgttttcggttttcgttgttatagtcgcgttcgttgattggttacgtttcgtcgacgttttagaaagagggcgggtacgcgcggtttgtttttagtttacgcgtcgatgtttaaagcgatatataaaagaaaggttttgattttaggtagtgaatttaggttttgtttcggagattttat

SEQ ID NO: 32658 - DNA, 528 bp, Artificial Sequence
  chemically treated genomic DNA (Homo sapiens) CpG-island No: 32658
ataaaatctccgaaacaaaacctaaattcactacctaaaatcaaaacctttcttttatatatcgctttaaacatcgacgcgtaaactaaaaacaaaccgcgcgtacccgccctctttctaaaacgtcgacgaaacgtaaccaatcaacgaacgcgactataacaacgaaaaccgaaaacgacgaacgaaatcgttctaaacctaaaaaaaacgaaccgaaaacgtctaaactaaaacccgcgtcgatcctaaattaaaaaaaataacgaccgctaaaactacgacgtaaaaacgacgaacataataaaacgaaaaaaaaaactctctatacactttattcccgaaaactatcgactaataaaaataaaaaaatcgacctaaacgtctccgataaaaacgaaaacgccgaaaaaaacgaaccaccgaaactcgaacgactttacaaacgtattccgcccgaatcaaaacctccgaccgaaaataatctcaccgccaccctcccaaccccgaatccgaaaaaaacgccac

SEQ ID NO: 32659 - DNA, 528 bp, Artificial Sequence
  chemically treated genomic DNA (Homo sapiens) CpG-island No: 32659
ataaaattttcgaaataaaatttgaatttattgtttaaggttagggttttttttttgtgtgtcgttttaagtatcggcgcgtgggttgggggtagatcgcgcgtattcgttttttttttggggcgtcggcggagcgtggttaattaacgggcgcggttatggtagcggaagtcggaagcggcgagcggggtcgttttgggtttaggggaggcgggtcgagggcgtttgagttgaggttcgcgtcgattttgggttggaggaggtggcggtcgttgaggttgcggcgtgaagacggcgggtatggtggggcgggagaaagagttttttatatattttgttttcgggagttgtcggttggtggaggtgagggagtcggtttgggcgttttcggtgggagcgggggcgtcgagggggacgagttatcggggttcgggcggttttgtaggcgtatttcgttcgggttagagttttcggtcgggagtggttttatcgttatttttttagtttcggattcgaggggggcgttat

SEQ ID NO: 32660 - DNA, 528 bp, Artificial Sequence
  chemically treated genomic DNA (Homo sapiens) CpG-island No: 32660
ataacgcccccctcgaatccgaaactaaaaaaataacgataaaaccactcccgaccgaaaactctaacccgaacgaaatacgcctacaaaaccgcccgaaccccgataactcgtccccctcgacgcccccgctcccaccgaaaacgcccaaaccgactccctcacctccaccaaccgacaactcccgaaaacaaaatatataaaaaactctttctcccgccccaccatacccgccgtcttcacgccgcaacctcaacgaccgccacctcctccaacccaaaatcgacgcgaacctcaactcaaacgccctcgacccgcctcccctaaacccaaaacgaccccgctcgccgcttccgacttccgctaccataaccgcgcccgttaattaaccacgctccgccgacgccccaaaaaaaaaacgaatacgcgcgatctacccccaacccacgcgccgatacttaaaacgacacacaaaaaaaaaaccctaaccttaaacaataaattcaaattttatttcgaaaattttat

SEQ ID NO: 32661 - DNA, 584 bp, Artificial Sequence
  chemically treated genomic DNA (Homo sapiens) CpG-island No: 32661
cgcggggagcggggtcgggtaggagagtaggcggggaagttttgtttgtcgtagtttcgacggtggcgggaggcgagtgagttattgtaggtataggcgtcggtttagttagcgcgtttttttttcgttttttggaagtttcgcggttattttgggtaggtagagttcgtgtcggtttttttttcgcggtggtcgagtgcgggagtgcgtcgagttttttcggtagtatagttaggttgttttggaggtatttttagtagtagcggttttgcgttttcgtcgtcgcgtagttcgttttcgtttgggtttttgtcgttgtagttgcgggtatcggcggtttttgttcgggattgtttttcgattcgtcgtttttttcgggcgttttacgggagtcgttgttcgggagtttattgtaagttgcgtcggcggttttggttgttgtatttgttggtttttttttcggttttttttcgcgtcgtcgtcgtttgggttgttgttggggcggtttttttcggcgcgcgtttcgcggggagtagggcgtagttttttttgtattgggggcggtcgcgggcggttcgcggggt

SEQ ID NO: 32662 - DNA, 584 bp, Artificial Sequence
  chemically treated genomic DNA (Homo sapiens) CpG-island No: 32662
accccgcgaaccgcccgcgaccgcccccaatacaaaaaaaactacgccctactccccgcgaaacgcgcgccgaaaaaaaccgccccaacaacaacccaaacgacgacgacgcgaaaaaaaaccgaaaaaaaaaccaacaaatacaacaaccaaaaccgccgacgcaacttacaataaactcccgaacaacgactcccgtaaaacgcccgaaaaaaacgacgaatcgaaaaacaatcccgaacaaaaaccgccgatacccgcaactacaacgacaaaaacccaaacgaaaacgaactacgcgacgacgaaaacgcaaaaccgctactactaaaaatacctccaaaacaacctaactatactaccgaaaaaactcgacgcactcccgcactcgaccaccgcgaaaaaaaaaccgacacgaactctacctacccaaaataaccgcgaaacttccaaaaaacgaaaaaaaaacgcgctaactaaaccgacgcctatacctacaataactcactcgcctcccgccaccgtcgaaactacgacaaacaaaacttccccgcctactctcctacccgaccccgctccccgcg

SEQ ID NO: 32663 - DNA, 584 bp, Artificial Sequence
  chemically treated genomic DNA (Homo sapiens) CpG-island No: 32663
atttcgcgagtcgttcgcggtcgtttttagtgtagggggagttgcgttttgtttttcgcgaggcgcgcgtcggggggagtcgttttagtagtagtttaggcggcggcggcgcgagaaggagtcggaggaggagttagtaggtgtagtagttagagtcgtcgacgtagtttgtaatggattttcgggtagcgattttcgtagggcgttcgggaagggcggcggatcgaagggtagtttcggatagaggtcgtcggtgttcgtagttgtagcggtaggggtttaggcgagagcgagttgcgcggcggcgaagacgtagggtcgttgttgttgggaatgtttttagaataatttggttgtattgtcgggagagttcggcgtattttcgtattcggttatcgcggaggagaagtcggtacgggttttgtttgtttaggatgatcgcggggtttttagggagcgggaagaaggcgcgttagttgagtcggcgtttgtgtttgtagtggtttattcgtttttcgttatcgtcgaggttgcgataagtagggttttttcgtttgtttttttgttcggtttcgtttttcgcg

SEQ ID NO: 32664 - DNA, 584 bp, Artificial Sequence
  chemically treated genomic DNA (Homo sapiens) CpG-island No: 32664
cgcgaaaaacgaaaccgaacaaaaaaacaaacgaaaaaaccctacttatcgcaacctcgacgataacgaaaaacgaataaaccactacaaacacaaacgccgactcaactaacgcgccttcttcccgctccctaaaaaccccgcgatcatcctaaacaaacaaaacccgtaccgacttctcctccgcgataaccgaatacgaaaatacgccgaactctcccgacaatacaaccaaattattctaaaaacattcccaacaacaacgaccctacgtcttcgccgccgcgcaactcgctctcgcctaaacccctaccgctacaactacgaacaccgacgacctctatccgaaactacccttcgatccgccgcccttcccgaacgccctacgaaaatcgctacccgaaaatccattacaaactacgtcgacgactctaactactacacctactaactcctcctccgactccttctcgcgccgccgccgcctaaactactactaaaacgactccccccgacgcgcgcctcgcgaaaaacaaaacgcaactccccctacactaaaaacgaccgcgaacgactcgcgaaat

SEQ ID NO: 32665 - DNA, 881 bp, Artificial Sequence
  chemically treated genomic DNA (Homo sapiens) CpG-island No: 32665
agaacggcggcgcggcggacgttgttgcggtaggacgtgttcgattttttagtttatataagggagcgtatcgtttaagtggttcgcggttcgttcgatcgagcgcgtcgttgtcggtttttgcgttaacgcgtacgcgcggtcgttattcgggtgttggcggttgttgttgtaggttgcgttagggtggcggatcgggggaggggttagcggtttattgtgcgtagcgttgcgcggcgtcggcggtcgtcgaggtttgggtggaagttggcgttgttgtcgtcgttttgtagtttattcgttgtttcggtagcgcgttgtttttttaagatggttgtcgttatcggtgcggtggtagtttcggtcgtttcgggttaggcggaaggtaaaaagattatcgatttgcgggttatcgatttgaagttcgagttgaagcggcggaatttagatattatcggagttaagatcgtgtttatttttcgatttaagtaggtgaggttcggcgaggatcggaaaggatcgggaaggggaatttaggtcgcgtttcggcgtttcgttttcgtcgtagttttcggttgttcgtagtcgttgggatttgcggaacggtatggtagggaggttaggggcggttttcgcgagcgtggaggacggggattttttcgcggtgttttcgtttcgcgtttcgggtcgggtcgggtttgcgagggatcggttatcgtagtttagcgtgttttcgttttttcgggacgttttcgttaggttgcgagggttgcggtcggtcggcgcggttttttaagggcgatcgcggagatttgggaggcgttggttttttagtttttagttatggtgagcgtgtgtattttttggttttagagggaatg

SEQ ID NO: 32666 - DNA, 881 bp, Artificial Sequence
  chemically treated genomic DNA (Homo sapiens) CpG-island No: 32666
cattccctctaaaaccaaaaaatacacacgctcaccataactaaaaactaaaaaaccaacgcctcccaaatctccgcgatcgcccttaaaaaaccgcgccgaccgaccgcaaccctcgcaacctaacgaaaacgtcccgaaaaaacgaaaacacgctaaactacgataaccgatccctcgcaaacccgacccgacccgaaacgcgaaacgaaaacaccgcgaaaaaatccccgtcctccacgctcgcgaaaaccgcccctaacctccctaccataccgttccgcaaatcccaacgactacgaacaaccgaaaactacgacgaaaacgaaacgccgaaacgcgacctaaattccccttcccgatcctttccgatcctcgccgaacctcacctacttaaatcgaaaaataaacacgatcttaactccgataatatctaaattccgccgcttcaactcgaacttcaaatcgataacccgcaaatcgataatctttttaccttccgcctaacccgaaacgaccgaaactaccaccgcaccgataacgacaaccatcttaaaaaaacaacgcgctaccgaaacaacgaataaactacaaaacgacgacaacaacgccaacttccacccaaacctcgacgaccgccgacgccgcgcaacgctacgcacaataaaccgctaacccctcccccgatccgccaccctaacgcaacctacaacaacaaccgccaacacccgaataacgaccgcgcgtacgcgttaacgcaaaaaccgacaacgacgcgctcgatcgaacgaaccgcgaaccacttaaacgatacgctcccttatataaactaaaaaatcgaacacgtcctaccgcaacaacgtccgccgcgccgccgttct

SEQ ID NO: 32667 - DNA, 881 bp, Artificial Sequence
  chemically treated genomic DNA (Homo sapiens) CpG-island No: 32667
tattttttttgaggttaagaaatgtatacgtttattatggttaaaggttggggagttagcgttttttaggttttcgcgatcgtttttgggaggtcgcgtcggtcggtcgtaattttcgtagtttggcggggacgtttcggggaggcggaggtacgttgggttgcggtggtcggtttttcgtaggttcggttcggttcggggcgcggggcgggggtatcgcggaagggttttcgttttttacgttcgcgggagtcgtttttggtttttttattatgtcgtttcgtaggttttagcggttgcgggtagtcggaggttgcggcggaagcggggcgtcgaggcgcggtttaagttttttttttcggtttttttcggttttcgtcgggttttatttgtttgagtcgggagatgagtacggttttgatttcggtgatgtttaagtttcgtcgttttagttcggattttagatcgatgattcgtagatcggtgatttttttatttttcgtttgattcgaggcggtcgaggttgttatcgtatcggtagcggtagttattttagaagagtagcgcgttgtcgaggtagcgagtgggttgtagggcggcggtagtagcgttaatttttatttaggtttcggcggtcgtcggcgtcgcgtagcgttgcgtataatgagtcgttggtttttttttcggttcgttattttagcgtaatttgtagtagtagtcgttagtattcggatgacggtcgcgcgtgcgcgttggcgtagggatcggtagcggcgcgttcggtcgagcgggtcgcgggttatttgggcggtgcgtttttttgtgtggattgggaggtcgggtacgttttatcgtagtaacgttcgtcgcgtcgtcgtttt

SEQ ID NO: 32668 - DNA, 881 bp, Artificial Sequence
  chemically treated genomic DNA (Homo sapiens) CpG-island No: 32668
aaaacgacgacgcgacgaacgttactacgataaaacgtacccgacctcccaatccacacaaaaaaacgcaccgcccaaataacccgcgacccgctcgaccgaacgcgccgctaccgatccctacgccaacgcgcacgcgcgaccgtcatccgaatactaacgactactactacaaattacgctaaaataacgaaccgaaaaaaaaaccaacgactcattatacgcaacgctacgcgacgccgacgaccgccgaaacctaaataaaaattaacgctactaccgccgccctacaacccactcgctacctcgacaacgcgctactcttctaaaataactaccgctaccgatacgataacaacctcgaccgcctcgaatcaaacgaaaaataaaaaaatcaccgatctacgaatcatcgatctaaaatccgaactaaaacgacgaaacttaaacatcaccgaaatcaaaaccgtactcatctcccgactcaaacaaataaaacccgacgaaaaccgaaaaaaaccgaaaaaaaaaacttaaaccgcgcctcgacgccccgcttccgccgcaacctccgactacccgcaaccgctaaaacctacgaaacgacataataaaaaaaccaaaaacgactcccgcgaacgtaaaaaacgaaaacccttccgcgatacccccgccccgcgccccgaaccgaaccgaacctacgaaaaaccgaccaccgcaacccaacgtacctccgcctccccgaaacgtccccgccaaactacgaaaattacgaccgaccgacgcgacctcccaaaaacgatcgcgaaaacctaaaaaacgctaactccccaacctttaaccataataaacgtatacatttcttaacctcaaaaaaaata

SEQ ID NO: 32669 - DNA, 710 bp, Artificial Sequence
  chemically treated genomic DNA (Homo sapiens) CpG-island No: 32669
tgcgtagcgcggggcgcgttttcgaaggtgttcgtcgggggagtgtgggcgtgcgtacgtgcggcggcgatggtcgcgggtcgggtggtcgcggtgtaggtttcgtgttttttatttttttcgtttcggtgttgattggttcggcgtcgtgacgggtcggttttcgttcggggcggcggcggcggcggcgggcgcgggtgttcgcgtgtgcgttgggagtcgcgtgtgcgtcggggtgtgcgttcggtcgggtgtgcggagagcgagggagcgcgttttttttcgacgcgcgggtcgtcgcggttaagttcgagggtgcgtggcgttttcgttcgttcggttcggttatggttttcgttcggggtcgtttgttttttgcgttttgggtcgttacggtcgcggcggcggcggttatttgcgtgttcgcggcgcgcggcgaaggtgagcggcggcggcggggcggggtaggggcggtcgaggggcgcggggcgcggcgcgcgttgtttgcggtttaattttttttgtatggattttgagttttaaggcggtcgggatttttcggttcggggggcggggtggtatcgcggaagagattcgggattaagggatagagcggtggagatgggaattcgcgagtttgaggaagacggataggtatcggggattgggggatagtgggaaaggataggagataggattgagggatgtgt

SEQ ID NO: 32670 - DNA, 710 bp, Artificial Sequence
  chemically treated genomic DNA (Homo sapiens) CpG-island No: 32670
acacatccctcaatcctatctcctatcctttcccactatcccccaatccccgatacctatccgtcttcctcaaactcgcgaattcccatctccaccgctctatcccttaatcccgaatctcttccgcgataccaccccgccccccgaaccgaaaaatcccgaccgccttaaaactcaaaatccatacaaaaaaaattaaaccgcaaacaacgcgcgccgcgccccgcgcccctcgaccgcccctaccccgccccgccgccgccgctcaccttcgccgcgcgccgcgaacacgcaaataaccgccgccgccgcgaccgtaacgacccaaaacgcaaaaaacaaacgaccccgaacgaaaaccataaccgaaccgaacgaacgaaaacgccacgcaccctcgaacttaaccgcgacgacccgcgcgtcgaaaaaaaacgcgctccctcgctctccgcacacccgaccgaacgcacaccccgacgcacacgcgactcccaacgcacacgcgaacacccgcgcccgccgccgccgccgccgccccgaacgaaaaccgacccgtcacgacgccgaaccaatcaacaccgaaacgaaaaaaataaaaaacacgaaacctacaccgcgaccacccgacccgcgaccatcgccgccgcacgtacgcacgcccacactcccccgacgaacaccttcgaaaacgcgccccgcgctacgca

SEQ ID NO: 32671 - DNA, 710 bp, Artificial Sequence
  chemically treated genomic DNA (Homo sapiens) CpG-island No: 32671
gtatattttttagttttgttttttgtttttttttattgttttttagttttcggtatttgttcgttttttttaagttcgcgggtttttatttttatcgttttgttttttaatttcgggtttttttcgcggtgttatttcgtttttcgggtcgagggatttcggtcgttttggagtttagggtttatgtaaaggaagttgagtcgtaggtagcgcgcgtcgcgtttcgcgtttttcggtcgtttttgtttcgtttcgtcgtcgtcgtttattttcgtcgcgcgtcgcggatacgtaggtggtcgtcgtcgtcgcggtcgtgacgatttagagcgtagggggtaggcggtttcgggcgggggttatggtcgggtcgggcgggcgggggcgttacgtattttcgggtttggtcgcggcggttcgcgcgtcgggagggagcgcgttttttcgtttttcgtatattcggtcgggcgtatatttcggcgtatacgcggtttttagcgtatacgcgggtattcgcgttcgtcgtcgtcgtcgtcgtttcgggcgggggtcggttcgttacggcgtcgagttaattagtatcgaggcggggggggtgggggatacggagtttgtatcgcggttattcggttcgcggttatcgtcgtcgtacgtgcgtacgtttatattttttcggcgggtattttcgggggcgcgtttcgcgttgcgta

SEQ ID NO: 32672 - DNA, 710 bp, Artificial Sequence
  chemically treated genomic DNA (Homo sapiens) CpG-island No: 32672
tacgcaacgcgaaacgcgcccccgaaaatacccgccgaaaaaatataaacgtacgcacgtacgacgacgataaccgcgaaccgaataaccgcgatacaaactccgtatcccccaccccccccgcctcgatactaattaactcgacgccgtaacgaaccgacccccgcccgaaacgacgacgacgacgacgaacgcgaatacccgcgtatacgctaaaaaccgcgtatacgccgaaatatacgcccgaccgaatatacgaaaaacgaaaaaacgcgctccctcccgacgcgcgaaccgccgcgaccaaacccgaaaatacgtaacgcccccgcccgcccgacccgaccataacccccgcccgaaaccgcctaccccctacgctctaaatcgtcacgaccgcgacgacgacgaccacctacgtatccgcgacgcgcgacgaaaataaacgacgacgacgaaacgaaacaaaaacgaccgaaaaacgcgaaacgcgacgcgcgctacctacgactcaacttcctttacataaaccctaaactccaaaacgaccgaaatccctcgacccgaaaaacgaaataacaccgcgaaaaaaacccgaaattaaaaaacaaaacgataaaaataaaaacccgcgaacttaaaaaaaacgaacaaataccgaaaactaaaaaacaataaaaaaaaacaaaaaacaaaactaaaaaatatac

SEQ ID NO: 32673 - DNA, 711 bp, Artificial Sequence
  chemically treated genomic DNA (Homo sapiens) CpG-island No: 32673
gggttagagattgggaacggtaatgtcggttagacgggttcgagcgtttcgggagttttagttttttttcggttgcggggtcgttgtttttgttttcgggtcgttacggagttttgagggagggggcgggcgagcgggggttttggggcggttagggcgttgggagggaggattgggcggtggggatcggaggggagggagggttttggaggcggagaggagggacgggttgggagagggttcggattaggggcggcgggtatcgtaggagtttcgcgcggttgtagcgcgggcgggagcggggacgcgatgtcgtcgtcgtcgtttttttgcgggtcggggttgcgttttcggggttgagtcgtcgttagagtcgatagtcgagtagtcgttgggcgttttcgcggcgtaggaggatgggttgcggcgggagtcgggcggatgttatcgagtttcgttattacgagagttggattcgggagatagaatttatttggtttatttatatcgattcggacgcgtcgtttagcgtcgtcgtttcggatagcggtttcgaagcgggcggtttgtattcgggtaagtggtcgggtttttgtagattttcgttcgttcgttatttcgggcgttttggttcgggtattgagagaggagtcggttttttgaggaattgatggcgcggcgggggtggttgggaggaagtagaggtaggat

SEQ ID NO: 32674 - DNA, 711 bp, Artificial Sequence
  chemically treated genomic DNA (Homo sapiens) CpG-island No: 32674
atcctacctctacttcctcccaaccacccccgccgcgccatcaattcctcaaaaaaccgactcctctctcaatacccgaaccaaaacgcccgaaataacgaacgaacgaaaatctacaaaaacccgaccacttacccgaatacaaaccgcccgcttcgaaaccgctatccgaaacgacgacgctaaacgacgcgtccgaatcgatataaataaaccaaataaattctatctcccgaatccaactctcgtaataacgaaactcgataacatccgcccgactcccgccgcaacccatcctcctacgccgcgaaaacgcccaacgactactcgactatcgactctaacgacgactcaaccccgaaaacgcaaccccgacccgcaaaaaaacgacgacgacgacatcgcgtccccgctcccgcccgcgctacaaccgcgcgaaactcctacgatacccgccgcccctaatccgaaccctctcccaacccgtccctcctctccgcctccaaaaccctccctcccctccgatccccaccgcccaatcctccctcccaacgccctaaccgccccaaaacccccgctcgcccgccccctccctcaaaactccgtaacgacccgaaaacaaaaacaacgaccccgcaaccgaaaaaaaactaaaactcccgaaacgctcgaacccgtctaaccgacattaccgttcccaatctctaaccc

SEQ ID NO: 32675 - DNA, 711 bp, Artificial Sequence
  chemically treated genomic DNA (Homo sapiens) CpG-island No: 32675
gttttgtttttgtttttttttagttattttcgtcgcgttattaattttttagggaatcggttttttttttagtgttcgggttaaggcgttcggggtagcgggcgggcgagggtttgtaggggttcggttatttattcgagtgtaggtcgttcgtttcggggtcgttgttcggggcggcggcgttgggcggcgcgttcgagtcggtgtaggtgagttaggtggattttgtttttcgggtttagttttcgtagtagcggggttcgatggtattcgttcggttttcgtcgtagtttatttttttgcgtcgcgggagcgtttagcggttgttcggttgtcggttttggcggcggtttagtttcggaggcgtagtttcggttcgtaaggaggcggcggcggcgatatcgcgttttcgttttcgttcgcgttgtagtcgcgcggagtttttgcggtgttcgtcgtttttagttcgggtttttttttagttcgtttttttttttcgtttttaaggttttttttttttttcggtttttatcgtttagtttttttttttagcgttttggtcgttttaaggttttcgttcgttcgtttttttttttagggtttcgtgacggttcgggagtaggagtagcggtttcgtagtcggaggagggttggggttttcgaggcgttcggattcgtttggtcggtattatcgtttttagtttttggttt

SEQ ID NO: 32676 - DNA, 711 bp, Artificial Sequence
  chemically treated genomic DNA (Homo sapiens) CpG-island No: 32676
aaaccaaaaactaaaaacgataataccgaccaaacgaatccgaacgcctcgaaaaccccaaccctcctccgactacgaaaccgctactcctactcccgaaccgtcacgaaaccctaaaaaaaaaaacgaacgaacgaaaaccttaaaacgaccaaaacgctaaaaaaaaaaactaaacgataaaaaccgaaaaaaaaaaaaaaccttaaaaacgaaaaaaaaaaacgaactaaaaaaaaacccgaactaaaaacgacgaacaccgcaaaaactccgcgcgactacaacgcgaacgaaaacgaaaacgcgatatcgccgccgccgcctccttacgaaccgaaactacgcctccgaaactaaaccgccgccaaaaccgacaaccgaacaaccgctaaacgctcccgcgacgcaaaaaaataaactacgacgaaaaccgaacgaataccatcgaaccccgctactacgaaaactaaacccgaaaaacaaaatccacctaactcacctacaccgactcgaacgcgccgcccaacgccgccgccccgaacaacgaccccgaaacgaacgacctacactcgaataaataaccgaacccctacaaaccctcgcccgcccgctaccccgaacgccttaacccgaacactaaaaaaaaaaccgattccctaaaaaattaataacgcgacgaaaataactaaaaaaaaacaaaaacaaaac

SEQ ID NO: 32677 - DNA, 566 bp, Artificial Sequence
  chemically treated genomic DNA (Homo sapiens) CpG-island No: 32677
cgtgtgttagcggtagttcgggttttagggagtcggcgttgggggtgggaggaggagggaagatataaggggttagaaggcgaggagatttataatcgcgggcggggggtttaggcggcggtggaggggagaaggatgttgagttcgcgcgttcgttcgtttgtttttttcgggtcgcgcgtcggtatttacgttgaggggagagagcgagttgtcggggagcggagggggggttaggtcgatattgtcgtcgtcgttgttagagtcgtcgtttttttttttagtttcgtttttttataagttagttcgggttcgttagtcgtatcgtcgcgttcgggtttagtattgcgggtagcgtagtttgatgacgttacggatagcgtcgcgtttcggttttttttcggtcgggtttcggtttcgggaaaggtagttgaggtttggttcgttttattttttaatttgggaggtttaggggcgtttgcgcggaaaagtcgttcggaaaaggttgtaaaagtaaaagtaattatttttttttttggttttgaggaagagaaattaatataaaa

SEQ ID NO: 32678 - DNA, 566 bp, Artificial Sequence
  chemically treated genomic DNA (Homo sapiens) CpG-island No: 32678
ttttatattaatttctcttcctcaaaaccaaaaaaaaaaataattacttttacttttacaaccttttccgaacgacttttccgcgcaaacgcccctaaacctcccaaattaaaaaataaaacgaaccaaacctcaactacctttcccgaaaccgaaacccgaccgaaaaaaaaccgaaacgcgacgctatccgtaacgtcatcaaactacgctacccgcaatactaaacccgaacgcgacgatacgactaacgaacccgaactaacttataaaaaaacgaaactaaaaaaaaaaacgacgactctaacaacgacgacgacaatatcgacctaaccccccctccgctccccgacaactcgctctctcccctcaacgtaaataccgacgcgcgacccgaaaaaaacaaacgaacgaacgcgcgaactcaacatccttctcccctccaccgccgcctaaaccccccgcccgcgattataaatctcctcgccttctaaccccttatatcttccctcctcctcccacccccaacgccgactccctaaaacccgaactaccgctaacacacg

SEQ ID NO: 32679 - DNA, 566 bp, Artificial Sequence
  chemically treated genomic DNA (Homo sapiens) CpG-island No: 32679
ttttgtattggttttttttttttagagttaaaggaggagatagttatttttgtttttgtagtttttttcgggcggttttttcgcgtaggcgtttttggattttttaggttgagaggtggagcgggttaaattttagttgtttttttcggggtcgggattcggtcgggggaggatcgaggcgcggcgttgttcgtgacgttattaggttgcgttgttcgtagtattggattcgagcgcgacggtgcggttggcggattcgggttggtttgtggggaaacgaaattgagggaggaggcggcggttttggtagcggcggcgatagtgtcggtttgatttttttttcgtttttcggtagttcgttttttttttttagcgtgagtgtcgacgcgcggttcggggggagtaagcgggcgggcgcgcgggtttagtattttttttttttttatcgtcgtttgggtttttcgttcgcggttatgggttttttcgttttttggttttttatgtttttttttttttttttatttttaacgtcggttttttggagttcgagttgtcgttgatatacg

SEQ ID NO: 32680 - DNA, 566 bp, Artificial Sequence
  chemically treated genomic DNA (Homo sapiens) CpG-island No: 32680
cgtatatcaacgacaactcgaactccaaaaaaccgacgttaaaaataaaaaaaaaaaaaaaaacataaaaaaccaaaaaacgaaaaaacccataaccgcgaacgaaaaacccaaacgacgataaaaaaaaaaaaaatactaaacccgcgcgcccgcccgcttactccccccgaaccgcgcgtcgacactcacgctaaaaaaaaaaaacgaactaccgaaaaacgaaaaaaaaatcaaaccgacactatcgccgccgctaccaaaaccgccgcctcctccctcaatttcgtttccccacaaaccaacccgaatccgccaaccgcaccgtcgcgctcgaatccaatactacgaacaacgcaacctaataacgtcacgaacaacgccgcgcctcgatcctcccccgaccgaatcccgaccccgaaaaaaacaactaaaatttaacccgctccacctctcaacctaaaaaatccaaaaacgcctacgcgaaaaaaccgcccgaaaaaaactacaaaaacaaaaataactatctcctcctttaactctaaaaaaaaaaaaccaatacaaaa

SEQ ID NO: 32681 - DNA, 692 bp, Artificial Sequence
  chemically treated genomic DNA (Homo sapiens) CpG-island No: 32681
gtcgtcgtcgtttttcggttatttcggttttagtcgtcgtcgtggtcgtcgttgtcgttgttagggatttttagttttagatatttgtttcgttgagaagtcgttgttagtagcgtttttaagattttattttaattgtagtcgtttttttcgtcgggttcggggtacgtttttagtttcggattttttttttggttttcggcggttgttagttttagtttttttagtagaatcggtcgtgttcgttttagtttttatcggttaatcgtcgtcgtcgtcgtcgttagggtagtaattgttttaggtagttttcggtcggtcggtttcgtttcgttcgtttagtttagatttcgttttcgttttcgttttcgtttcgtcgttcggtttttttttgttcgtcggtttcgttttcgcgtttttttttttttttatcgcgttttttcgtagtatttcgtgtttgggcgtgtgcggtcgtttgggattcgttgtcggcgcggcggggagatttgtttcggggcggcgtgggggtttcgttttttttaggggaggcggagaacggggcgggggttgcgtttttacgttttcgagtttacgcgagtcgttgtttttatttttttcgttattattgggttttgattttttttttgttttttaggtcggagggattcgtcggttgttggtgtcgtatttgt

SEQ ID NO: 32682 - DNA, 692 bp, Artificial Sequence
  chemically treated genomic DNA (Homo sapiens) CpG-island No: 32682
acaaatacgacaccaacaaccgacgaatccctccgacctaaaaaacaaaaaaaaaatcaaaacccaataataacgaaaaaaataaaaacaacgactcgcgtaaactcgaaaacgtaaaaacgcaacccccgccccgttctccgcctcccctaaaaaaaacgaaacccccacgccgccccgaaacaaatctccccgccgcgccgacaacgaatcccaaacgaccgcacacgcccaaacacgaaatactacgaaaaaacgcgataaaaaaaaaaaaaaacgcgaaaacgaaaccgacgaacaaaaaaaaaccgaacgacgaaacgaaaacgaaaacgaaaacgaaatctaaactaaacgaacgaaacgaaaccgaccgaccgaaaactacctaaaacaattactaccctaacgacgacgacgacgacgattaaccgataaaaactaaaacgaacacgaccgattctactaaaaaaactaaaactaacaaccgccgaaaaccaaaaaaaaaatccgaaactaaaaacgtaccccgaacccgacgaaaaaaacgactacaattaaaataaaatcttaaaaacgctactaacaacgacttctcaacgaaacaaatatctaaaactaaaaatccctaacaacgacaacgacgaccacgacgacgactaaaaccgaaataaccgaaaaacgacgacgac

SEQ ID NO: 32683 - DNA, 692 bp, Artificial Sequence
  chemically treated genomic DNA (Homo sapiens) CpG-island No: 32683
gtagatacggtattaatagtcggcgagttttttcggtttggaagataaaggaaggattagggtttagtggtgacggggagggtgggggtaacgattcgcgtgagttcggagacgtgagaacgtagttttcgtttcgtttttcgttttttttgagaaaggcggggtttttacgtcgtttcgagataggttttttcgtcgcgtcggtagcgggttttaggcggtcgtatacgtttaggtacgggatgttgcgggagagcgcggtgggggaggggaaggacgcggaggcggagtcggcgggtaaagaaaggtcgagcggcggggcgggggcgggggcgggggcggggtttgggttgggcgggcggggcggagtcggtcggtcgggggttgtttgagatagttattgttttgacggcggcggcggcggcggttggtcggtgggggttggggcgagtacgatcgattttgttgggaaagttggaattggtagtcgtcgggggttaagaggaggattcggagttgggagcgtgtttcgggttcggcggaggaggcggttgtagttggagtggagttttgggagcgttgttggtagcgattttttagcgaagtaagtgtttgagattgagagtttttaatagcggtagcggcggttacggcggcggttggggtcgaggtaatcggggggcggcggcggt

SEQ ID NO: 32684 - DNA, 692 bp, Artificial Sequence
  chemically treated genomic DNA (Homo sapiens) CpG-island No: 32684
accgccgccgccccccgattacctcgaccccaaccgccgccgtaaccgccgctaccgctattaaaaactctcaatctcaaacacttacttcgctaaaaaatcgctaccaacaacgctcccaaaactccactccaactacaaccgcctcctccgccgaacccgaaacacgctcccaactccgaatcctcctcttaacccccgacgactaccaattccaactttcccaacaaaatcgatcgtactcgccccaacccccaccgaccaaccgccgccgccgccgccgtcaaaacaataactatctcaaacaacccccgaccgaccgactccgccccgcccgcccaacccaaaccccgcccccgcccccgcccccgccccgccgctcgacctttctttacccgccgactccgcctccgcgtccttcccctcccccaccgcgctctcccgcaacatcccgtacctaaacgtatacgaccgcctaaaacccgctaccgacgcgacgaaaaaacctatctcgaaacgacgtaaaaaccccgcctttctcaaaaaaaacgaaaaacgaaacgaaaactacgttctcacgtctccgaactcacgcgaatcgttacccccaccctccccgtcaccactaaaccctaatccttcctttatcttccaaaccgaaaaaactcgccgactattaataccgtatctac

SEQ ID NO: 32685 - DNA, 740 bp, Artificial Sequence
  chemically treated genomic DNA (Homo sapiens) CpG-island No: 32685
  unsure (364..)
atttcgttgtttggcggggtgggtggcggcgttcgggacggcgaggtgattgtaggcggcggggtcggagtcgggtttggcgcgattttggcgggttttcgaggttggtggagtggcgggcggggtcgagttggaggttggtggtgcgttgtttatttcgggagcggggtcgggtttttgagtaacgacgggtttggaagagttttgcggcggtggcggcggttgttgttgttgatgcggttgtggatgcggcggcggttgatgcggtggcggttgttgcggcggtggttgttgcggtggtggttgttgttgttgttggtgtggaggcggtggcgggatcggaggtttagggtcgttttggcgnngttaggatttatggggtcgcgattttgattgaggtttatgcgggcggcggagaacggaagtcgtggaggtcgtcgcggcgtcgttttttttacgtttgtggaagttattatcgttatcgttacgatttcggaatcgatttcgagatatgtttgtggttaaggggcggtcgaggtaaaagcgaagaagacgtttaggaaacgtggaggttattttgttttttataaaatggcggatgatataggcggcgtcgtttttgttttcgttttatataggttagttggtacggtttcgtttattttacgatcgatagttttaatagttaattgtaattattatgtttgatgatattaagttgcgaatttttgattattttt

SEQ ID NO: 32686 - DNA, 740 bp, Artificial Sequence
  chemically treated genomic DNA (Homo sapiens) CpG-island No: 32686
  unsure (376..)
aaaaataatcaaaaattcgcaacttaatatcatcaaacataataattacaattaactattaaaactatcgatcgtaaaataaacgaaaccgtaccaactaacctatataaaacgaaaacaaaaacgacgccgcctatatcatccgccattttataaaaaacaaaataacctccacgtttcctaaacgtcttcttcgcttttacctcgaccgccccttaaccacaaacatatctcgaaatcgattccgaaatcgtaacgataacgataataacttccacaaacgtaaaaaaaacgacgccgcgacgacctccacgacttccgttctccgccgcccgcataaacctcaatcaaaatcgcgaccccataaatcctaacnncgccaaaacgaccctaaacctccgatcccgccaccgcctccacaccaacaacaacaacaaccaccaccgcaacaaccaccgccgcaacaaccgccaccgcatcaaccgccgccgcatccacaaccgcatcaacaacaacaaccgccgccaccgccgcaaaactcttccaaacccgtcgttactcaaaaacccgaccccgctcccgaaataaacaacgcaccaccaacctccaactcgaccccgcccgccactccaccaacctcgaaaacccgccaaaatcgcgccaaacccgactccgaccccgccgcctacaatcacctcgccgtcccgaacgccgccacccaccccgccaaacaacgaaat

SEQ ID NO: 32687 - DNA, 740 bp, Artificial Sequence
  chemically treated genomic DNA (Homo sapiens) CpG-island No: 32687
  unsure (376..)
aggaatgattagaggttcgtaatttagtgttattaagtatagtaattgtaattggttattggagttgtcgatcgtggagtaggcggggtcgtgttagttggtttatataagacgaggataaaggcggcgtcgtttgtgttattcgttattttgtgagaagtaaggtggtttttacgttttttgagcgtttttttcgtttttgtttcgatcgttttttgattatagatatgtttcgggatcggtttcggagtcgtggcggtggcggtggtggtttttataggcgtggaggaggcggcgtcgcggcggtttttacgattttcgtttttcgtcgttcgtatgggttttaattagaatcgcggttttatgggttttggtnncgttagagcggttttaagttttcgatttcgttatcgtttttatattaatagtagtaatagttattatcgtagtagttatcgtcgtagtagtcgttatcgtattagtcgtcgtcgtatttatagtcgtattagtagtagtagtcgtcgttatcgtcgtaggatttttttaagttcgtcgttgtttagggattcggtttcgttttcggagtaggtagcgtattattagtttttagttcggtttcgttcgttattttattaatttcgggggttcgttagggtcgcgttaggttcgatttcgatttcgtcgtttgtagttatttcgtcgtttcgggcgtcgttatttatttcgttaagtagcggggt

SEQ ID NO: 32688 - DNA, 740 bp, Artificial Sequence
  chemically treated genomic DNA (Homo sapiens) CpG-island No: 32688
  unsure (364..)
accccgctacttaacgaaataaataacgacgcccgaaacgacgaaataactacaaacgacgaaatcgaaatcgaacctaacgcgaccctaacgaacccccgaaattaataaaataacgaacgaaaccgaactaaaaactaataatacgctacctactccgaaaacgaaaccgaatccctaaacaacgacgaacttaaaaaaatcctacgacgataacgacgactactactactaatacgactataaatacgacgacgactaatacgataacgactactacgacgataactactacgataataactattactactattaatataaaaacgataacgaaatcgaaaacttaaaaccgctctaacgnnaccaaaacccataaaaccgcgattctaattaaaacccatacgaacgacgaaaaacgaaaatcgtaaaaaccgccgcgacgccgcctcctccacgcctataaaaaccaccaccgccaccgccacgactccgaaaccgatcccgaaacatatctataatcaaaaaacgatcgaaacaaaaacgaaaaaaacgctcaaaaaacgtaaaaaccaccttacttctcacaaaataacgaataacacaaacgacgccgcctttatcctcgtcttatataaaccaactaacacgaccccgcctactccacgatcgacaactccaataaccaattacaattactatacttaataacactaaattacgaacctctaatcattcct

SEQ ID NO: 32689 - DNA, 1375 bp, Artificial Sequence
  chemically treated genomic DNA (Homo sapiens) CpG-island No: 32689
ttttcgttttggattcgatttgtagggcgtaaagttttttgtattgaggcgtttttagggcgttcgtttttcgcgtttatattttttaggtaaaaaggtagcggattaagtaggggtgtttggaaggcgttcgttgtttgtttgattgcgtggttttatttggttcgcgtgtattagtttttttggcgggggatttttttcggatttcggttagcgttaattaggtcgcgcggtatttgtttttagttttggttatttggaggggcgatgaggttttacgttcggagtagggtagttttcggagcgtcggggaggcgcggagtttacgtgtgtcgttttagtcgttgggttcggaaggacgcgttgcgatttcgtggagtcgaacgcgggagtcgttgttcgagcggacgtgtttagtcgcggtaacgggtcggggttttatcgtgtaggggagcgagcggaggggcggggcggggcgcgggcgggttgaggagtcgtcgggttcgggtttcgcgcggggatgtgtttggttatcgcgtattttcgagggcgttttaatattcgggtaagcgcgtttcggttgtttttttttgtttatcgcgtcgtttttagcgtacgagttttttattgggtttgggtttgcgttttggtttttttttttcgcgttaggggtttttcgtttcgaggggcgcggcgattcgggggtattttcggtttcgtggtagatcgcgggtggcgtagttcgcgtttcggggtcggatttgtcgggtttttgttttcgggtcgtgcgaacgttttatttagcgtgtttgtagcgattcgtttttttgcgtttttagtcgggtcggattttacgcggattcgttgttgttgttgcgtttcgcgtcgtcgttattcggggagtatgaggtcggggtaggggattcgggtagggtgggggtcgatcgcggggtttgttgggttaatgcgtcgtcgtcggttagtgagttcggattcgtgtcggtaattgtgggtagttttgagatcggggttcggtttgttggtgattttttcgaagttttataaaataaagagggcgaagtgttttcgcggcgcggcgtgggtatgtaggcggtagggtttgtgggagtcggcgtttcggttagcgagtttggggttaggatagcgggggtaggacggagaagtcggacgtgttcgtgggtcgtcggtgtttttgttttcgaggttttagagcgggcgattcgatatcgattttagagggttttgcgcgtttaaggcgcggttatacggaagttttcgtttcgcggtttagagggggtttggttaagtagagagtagagcgggtaagtagaaggtagtgtggggacgaggttcg

SEQ ID NO: 32690 - DNA, 1375 bp, Artificial Sequence
  chemically treated genomic DNA (Homo sapiens) CpG-island No: 32690
cgaacctcgtccccacactaccttctacttacccgctctactctctacttaaccaaaccccctctaaaccgcgaaacgaaaacttccgtataaccgcgccttaaacgcgcaaaaccctctaaaatcgatatcgaatcgcccgctctaaaacctcgaaaacaaaaacaccgacgacccacgaacacgtccgacttctccgtcctacccccgctatcctaaccccaaactcgctaaccgaaacgccgactcccacaaaccctaccgcctacatacccacgccgcgccgcgaaaacacttcgccctctttattttataaaacttcgaaaaaatcaccaacaaaccgaaccccgatctcaaaactacccacaattaccgacacgaatccgaactcactaaccgacgacgacgcattaacccaacaaaccccgcgatcgacccccaccctacccgaatcccctaccccgacctcatactccccgaataacgacgacgcgaaacgcaacaacaacaacgaatccgcgtaaaatccgacccgactaaaaacgcaaaaaaacgaatcgctacaaacacgctaaataaaacgttcgcacgacccgaaaacaaaaacccgacaaatccgaccccgaaacgcgaactacgccacccgcgatctaccacgaaaccgaaaatacccccgaatcgccgcgcccctcgaaacgaaaaacccctaacgcgaaaaaaaaaaaccaaaacgcaaacccaaacccaataaaaaactcgtacgctaaaaacgacgcgataaacaaaaaaaaacaaccgaaacgcgcttacccgaatattaaaacgccctcgaaaatacgcgataaccaaacacatccccgcgcgaaacccgaacccgacgactcctcaacccgcccgcgccccgccccgcccctccgctcgctcccctacacgataaaaccccgacccgttaccgcgactaaacacgtccgctcgaacaacgactcccgcgttcgactccacgaaatcgcaacgcgtccttccgaacccaacgactaaaacgacacacgtaaactccgcgcctccccgacgctccgaaaactaccctactccgaacgtaaaacctcatcgcccctccaaataaccaaaactaaaaacaaataccgcgcgacctaattaacgctaaccgaaatccgaaaaaaatcccccgccaaaaaaactaatacacgcgaaccaaataaaaccacgcaatcaaacaaacaacgaacgccttccaaacacccctacttaatccgctacctttttacctaaaaaatataaacgcgaaaaacgaacgccctaaaaacgcctcaatacaaaaaactttacgccctacaaatcgaatccaaaacgaaaa

SEQ ID NO: 32691 - DNA, 1375 bp, Artificial Sequence
  chemically treated genomic DNA (Homo sapiens) CpG-island No: 32691
cgggtttcgtttttatattgttttttgtttgttcgttttgttttttgtttggttaggttttttttgggtcgcggggcggaggttttcgtgtggtcgcgttttgagcgcgtagggttttttggaatcggtgtcgggtcgttcgttttggggtttcgggagtaaggatatcgacggtttacgggtacgttcggttttttcgttttattttcgttgttttggttttagattcgttggtcgagacgtcggtttttataggttttgtcgtttgtatgtttacgtcgcgtcgcgaaggtatttcgttttttttattttgtaaaatttcggaaaaattattagtaaatcgagtttcggttttaaggttgtttatagttgtcggtacgaattcggatttattgatcgacggcggcgtattggtttagtagatttcgcggtcggtttttattttattcgggttttttgtttcggttttatgtttttcgggtggcggcggcgcgaggcgtagtagtagtagcgggttcgcgtgaggttcggttcggttgaaagcgtagagaagcgggtcgttgtagatacgttgagtagagcgttcgtacggttcgggggtagggattcggtaagttcggtttcgaggcgcgagttacgttattcgcggtttgttacgaggtcggagatgttttcgagtcgtcgcgtttttcggagcgagaggtttttggcgcggagagggagagttagggcgtagatttagatttagtggggaattcgtacgttgaaggcggcgcggtgggtagagggaggtagtcggggcgcgtttattcgggtgttgaggcgttttcgaaagtacgcggtggttagatatattttcgcgcggagttcgagttcggcggttttttagttcgttcgcgtttcgtttcgttttttcgttcgtttttttgtacgatgaggtttcgattcgttatcgcggttgagtacgttcgttcgggtagcgattttcgcgttcggttttacggggtcgtagcgcgttttttcgggtttagcggttggggcggtatacgtgagtttcgcgttttttcggcgtttcgaggattgttttgtttcgggcgtggagttttatcgtttttttaggtggttagggttgggggtaggtatcgcgcgatttgattggcgttggtcggagttcggggagaatttttcgttagagaggttgatgtacgcgggttaagtgaagttacgtagttaaataggtaacgggcgttttttaaatatttttgtttagttcgttgtttttttgtttaagaaatgtaaacgcgggaggcgggcgttttgggaacgttttagtataggggattttgcgttttatagatcgggtttaggacggaaa

SEQ ID NO: 32692 - DNA, 1375 bp, Artificial Sequence
  chemically treated genomic DNA (Homo sapiens) CpG-island No: 32692
tttccgtcctaaacccgatctataaaacgcaaaatcccctatactaaaacgttcccaaaacgcccgcctcccgcgtttacatttcttaaacaaaaaaacaacgaactaaacaaaaatatttaaaaaacgcccgttacctatttaactacgtaacttcacttaacccgcgtacatcaacctctctaacgaaaaattctccccgaactccgaccaacgccaatcaaatcgcgcgatacctacccccaaccctaaccacctaaaaaaacgataaaactccacgcccgaaacaaaacaatcctcgaaacgccgaaaaaacgcgaaactcacgtataccgccccaaccgctaaacccgaaaaaacgcgctacgaccccgtaaaaccgaacgcgaaaatcgctacccgaacgaacgtactcaaccgcgataacgaatcgaaacctcatcgtacaaaaaaacgaacgaaaaaacgaaacgaaacgcgaacgaactaaaaaaccgccgaactcgaactccgcgcgaaaatatatctaaccaccgcgtactttcgaaaacgcctcaacacccgaataaacgcgccccgactacctccctctacccaccgcgccgccttcaacgtacgaattccccactaaatctaaatctacgccctaactctccctctccgcgccaaaaacctctcgctccgaaaaacgcgacgactcgaaaacatctccgacctcgtaacaaaccgcgaataacgtaactcgcgcctcgaaaccgaacttaccgaatccctacccccgaaccgtacgaacgctctactcaacgtatctacaacgacccgcttctctacgctttcaaccgaaccgaacctcacgcgaacccgctactactactacgcctcgcgccgccgccacccgaaaaacataaaaccgaaacaaaaaacccgaataaaataaaaaccgaccgcgaaatctactaaaccaatacgccgccgtcgatcaataaatccgaattcgtaccgacaactataaacaaccttaaaaccgaaactcgatttactaataatttttccgaaattttacaaaataaaaaaaacgaaataccttcgcgacgcgacgtaaacatacaaacgacaaaacctataaaaaccgacgtctcgaccaacgaatctaaaaccaaaacaacgaaaataaaacgaaaaaaccgaacgtacccgtaaaccgtcgatatccttactcccgaaaccccaaaacgaacgacccgacaccgattccaaaaaaccctacgcgctcaaaacgcgaccacacgaaaacctccgccccgcgacccaaaaaaaacctaaccaaacaaaaaacaaaacgaacaaacaaaaaacaatataaaaacgaaacccg

SEQ ID NO: 32693 - DNA, 906 bp, Artificial Sequence
  chemically treated genomic DNA (Homo sapiens) CpG-island No: 32693
aagttacgggtttcgggtttggcgggtcgcggtatttttcgcgcgttttcgcgtttaggttggtttttgcgtttttgtttcgggtgtttcgtagtagtcgggttaggttgggtgcgggtttgggttttgcgagtcgagttagtgcggtgaggcgtttaggcgcgttgcggttcggtttagttttgcgcgtcgttatgttggtttttttttttttcgttttttttttttcgggcggcggggcgtttcggttttcggaagcggtacgggaggcgatcgtgttcgtcgttggtaggttagggttggcggcggcgtattttgtttgttttaaacgaaggagcggagggaggggtcgcgcggagcgtgtttaaggtgaaagggttgtcgtgtagttaggtagaggcgaggaaggtttttttatcgtcgttatcgttcgtttgtttcgtcggtaataggttttttcgggacgggaggggtcgtagcgcgcgtagttcgtagcgttgaacgtcgtcgaaattttttggtcggtcgagttttcgtagtcgcgattcggttttttttcgttcgagtttttcgagttttttcgaattttcgttggattttttttttttggtcggcgtcgttcgattcgtttttttattttagagggaattttttgcgtcgcggttgtgaggtatttttatttcggtttgaaatgtatcgtagttttgaaggaaatttatttttattttacgtagatttattcgtaacgttgtttgaatacgtttcgttgtttatagaaatttttgtttaaattagacgcgtggattatttaagacgaaatttatattcgattttagtttcgttagtttttgtcgaaattattttaaattcgttgaaattaatttttagttgttcgaattttttttt

SEQ ID NO: 32694 - DNA, 906 bp, Artificial Sequence
  chemically treated genomic DNA (Homo sapiens) CpG-island No: 32694
aaaaaaaaattcgaacaactaaaaattaatttcaacgaatttaaaataatttcgacaaaaactaacgaaactaaaatcgaatataaatttcgtcttaaataatccacgcgtctaatttaaacaaaaatttctataaacaacgaaacgtattcaaacaacgttacgaataaatctacgtaaaataaaaataaatttccttcaaaactacgatacatttcaaaccgaaataaaaatacctcacaaccgcgacgcaaaaaattccctctaaaataaaaaaacgaatcgaacgacgccgaccaaaaaaaaaaaatccaacgaaaattcgaaaaaactcgaaaaactcgaacgaaaaaaaaccgaatcgcgactacgaaaactcgaccgaccaaaaaatttcgacgacgttcaacgctacgaactacgcgcgctacgacccctcccgtcccgaaaaaacctattaccgacgaaacaaacgaacgataacgacgataaaaaaaccttcctcgcctctacctaactacacgacaaccctttcaccttaaacacgctccgcgcgacccctccctccgctccttcgtttaaaacaaacaaaatacgccgccgccaaccctaacctaccaacgacgaacacgatcgcctcccgtaccgcttccgaaaaccgaaacgccccgccgcccgaaaaaaaaaaaacgaaaaaaaaaaaaaccaacataacgacgcgcaaaactaaaccgaaccgcaacgcgcctaaacgcctcaccgcactaactcgactcgcaaaacccaaacccgcacccaacctaacccgactactacgaaacacccgaaacaaaaacgcaaaaaccaacctaaacgcgaaaacgcgcgaaaaataccgcgacccgccaaacccgaaacccgtaactt

SEQ ID NO: 32695 - DNA, 906 bp, Artificial Sequence
  chemically treated genomic DNA (Homo sapiens) CpG-island No: 32695
gaaggaaaattcggatagttgggaattaattttaacgggtttagggtgatttcggtaagggttggcggggttagggtcgagtgtgaatttcgttttgggtggtttacgcgtttggtttgggtaggaatttttgtgggtagcgaggcgtatttaggtagcgttgcgggtgaatttgcgtgggatgagggtggattttttttaggattgcggtgtattttaggtcggggtggaggtgttttatagtcgcggcgtagggaattttttttaggatgggggagcgggtcgggcggcgtcggttagggaggggaagtttaacgggggttcggagaggttcgggggattcggacggagagaagtcgggtcgcggttgcggaggttcggtcggttaagggatttcggcgacgtttagcgttgcgagttgcgcgcgttgcggtttttttcgtttcgggggaatttgttgtcggcgaaataggcgggcggtggcgacgatggagaagtttttttcgtttttgtttggttgtacggtagtttttttattttaggtacgtttcgcgcggttttttttttcgttttttcgtttaaaataaatagaatacgtcgtcgttaattttagtttgttaacggcgagtacggtcgtttttcgtgtcgttttcgggagtcgaggcgtttcgtcgttcggggaggaggaggcggagggggaggaggttaatatggcggcgcgtagggttgggtcgggtcgtagcgcgtttgagcgttttatcgtattagttcggttcgtaggatttaagttcgtatttagtttggttcggttgttgcggagtattcggggtaggaacgtaggggttaatttgggcgcggaggcgcgcggagggtgtcgcggttcgttaggttcgggattcgtagttt

SEQ ID NO: 32696 - DNA, 906 bp, Artificial Sequence
  chemically treated genomic DNA (Homo sapiens) CpG-island No: 32696
aaactacgaatcccgaacctaacgaaccgcgacaccctccgcgcgcctccgcgcccaaattaacccctacgttcctaccccgaatactccgcaacaaccgaaccaaactaaatacgaacttaaatcctacgaaccgaactaatacgataaaacgctcaaacgcgctacgacccgacccaaccctacgcgccgccatattaacctcctccccctccgcctcctcctccccgaacgacgaaacgcctcgactcccgaaaacgacacgaaaaacgaccgtactcgccgttaacaaactaaaattaacgacgacgtattctatttattttaaacgaaaaaacgaaaaaaaaaaccgcgcgaaacgtacctaaaataaaaaaactaccgtacaaccaaacaaaaacgaaaaaaacttctccatcgtcgccaccgcccgcctatttcgccgacaacaaattcccccgaaacgaaaaaaaccgcaacgcgcgcaactcgcaacgctaaacgtcgccgaaatcccttaaccgaccgaacctccgcaaccgcgacccgacttctctccgtccgaatcccccgaacctctccgaacccccgttaaacttcccctccctaaccgacgccgcccgacccgctcccccatcctaaaaaaaattccctacgccgcgactataaaacacctccaccccgacctaaaatacaccgcaatcctaaaaaaaatccaccctcatcccacgcaaattcacccgcaacgctacctaaatacgcctcgctacccacaaaaattcctacccaaaccaaacgcgtaaaccacccaaaacgaaattcacactcgaccctaaccccgccaacccttaccgaaatcaccctaaacccgttaaaattaattcccaactatccgaattttccttc

SEQ ID NO: 32697 - DNA, 524 bp, Artificial Sequence
  chemically treated genomic DNA (Homo sapiens) CpG-island No: 32697
tgatcgtgtgtgtatatatcgtatgtagatatttatgtgaattcgtgttcgggtaagacgtatgatcgtgtgtgtatatatcgcgtgtagatatttatgtgaattcgtgttcgtgtaagacgtatgatcgtgtgtgtatatatcgcgtgtagatatttatgtgaattcgtgttcgtgtaagacgtatgatcgtgtgtgtatatatcgcgtgtagatatttatgtgaattcgtgttcgtgtaagacgtatgatcgtgtgtgtatatattacgtgtagatatttatgtgaattcgtgttcggataagacgtatgatcgtgtgtgtatatatcgcgtgtagatatttacgtgaattcgtgttcgtgtaagatgtatgatcgtgtgtgtatatatcgtatgtagatatttttgtgaattcgtgttcgtgtaagacgtatgatcgtgtgtgtatatatcgtatgtagatatttttgtgaattcgtgttcgtgtaagatatatgatcgtgtgtgtatatatcgtatgtag

SEQ ID NO: 32698 - DNA, 524 bp, Artificial Sequence
  chemically treated genomic DNA (Homo sapiens) CpG-island No: 32698
ctacatacgatatatacacacacgatcatatatcttacacgaacacgaattcacaaaaatatctacatacgatatatacacacacgatcatacgtcttacacgaacacgaattcacaaaaatatctacatacgatatatacacacacgatcatacatcttacacgaacacgaattcacgtaaatatctacacgcgatatatacacacacgatcatacgtcttatccgaacacgaattcacataaatatctacacgtaatatatacacacacgatcatacgtcttacacgaacacgaattcacataaatatctacacgcgatatatacacacacgatcatacgtcttacacgaacacgaattcacataaatatctacacgcgatatatacacacacgatcatacgtcttacacgaacacgaattcacataaatatctacacgcgatatatacacacacgatcatacgtcttacccgaacacgaattcacataaatatctacatacgatatatacacacacgatca

SEQ ID NO: 32699 - DNA, 524 bp, Artificial Sequence
  chemically treated genomic DNA (Homo sapiens) CpG-island No: 32699
ttgtatgcgatgtgtgtatatacgattatgtgttttatacgggtacgagtttataaggatatttgtatgcgatgtgtgtatatacgattatgcgttttatacgggtacgagtttataaggatatttgtatgcgatgtgtgtatatacgattatgtattttatacgggtacgagtttacgtggatatttgtacgcgatgtgtgtatatacgattatgcgttttattcgggtacgagtttatatggatatttgtacgtgatgtgtgtatatacgattatgcgttttatacgggtacgagtttatatggatatttgtacgcgatgtgtgtatatacgattatgcgttttatacgggtacgagtttatatggatatttgtacgcgatgtgtgtatatacgattatgcgttttatacgggtacgagtttatatggatatttgtacgcgatgtgtgtatatacgattatgcgttttattcgggtacgagtttatatggatatttgtatgcgatgtgtgtatatacgatta

SEQ ID NO: 32700 - DNA, 524 bp, Artificial Sequence
  chemically treated genomic DNA (Homo sapiens) CpG-island No: 32700
taatcgtatatacacacatcgcatacaaatatccatataaactcgtacccgaataaaacgcataatcgtatatacacacatcgcgtacaaatatccatataaactcgtacccgtataaaacgcataatcgtatatacacacatcgcgtacaaatatccatataaactcgtacccgtataaaacgcataatcgtatatacacacatcgcgtacaaatatccatataaactcgtacccgtataaaacgcataatcgtatatacacacatcacgtacaaatatccatataaactcgtacccgaataaaacgcataatcgtatatacacacatcgcgtacaaatatccacgtaaactcgtacccgtataaaatacataatcgtatatacacacatcgcatacaaatatccttataaactcgtacccgtataaaacgcataatcgtatatacacacatcgcatacaaatatccttataaactcgtacccgtataaaacacataatcgtatatacacacatcgcatacaa

SEQ ID NO: 32701 - DNA, 623 bp, Artificial Sequence
  chemically treated genomic DNA (Homo sapiens) CpG-island No: 32701
  unsure (44, 513)
gcgcgttagtaaaaacgttagggacggggttttcgcgtttgtangtgaagttgggcgttttcggggtttgagtttttgagggtcgggtttagcgcgtgggttgttggatggcggaattttaggcggagtcggagtttttgttgggcgtggttcgcggcggtggcggcgattggcggcggggttgattatttatcgtagtatttaagtcggttttggtgagtcgttcggatttggggaggggattggttcgggaggattagggtcgcgcgtgggggtttcgttgttttagtatttcgttttttgtcgggcgcgttttattaggttcgagttcgagcggggttcgggcgttcggggttgttaggcgagtcggtgttttgagggcgagtgggttgcgttttgcggattcggatcgaggttagggtagagttggggtttttttcgtgtcgcgttttgatttcgattagtttggcgaagaggttttcgtttatttttggtaagtttcgagagaatcgnttatttgcggtaggtatttttcgtgtgtacgggcggcgttagatattatatttttcgattgtcgtcgtaatgagggtcgtttaattgatttagagaaggtagtattttga

SEQ ID NO: 32702 - DNA, 623 bp, Artificial Sequence
  chemically treated genomic DNA (Homo sapiens) CpG-island No: 32702
  unsure (111, 580)
tcaaaatactaccttctctaaatcaattaaacgaccctcattacgacgacaatcgaaaaatataatatctaacgccgcccgtacacacgaaaaatacctaccgcaaataancgattctctcgaaacttaccaaaaataaacgaaaacctcttcgccaaactaatcgaaatcaaaacgcgacacgaaaaaaaccccaactctaccctaacctcgatccgaatccgcaaaacgcaacccactcgccctcaaaacaccgactcgcctaacaaccccgaacgcccgaaccccgctcgaactcgaacctaataaaacgcgcccgacaaaaaacgaaatactaaaacaacgaaacccccacgcgcgaccctaatcctcccgaaccaatcccctccccaaatccgaacgactcaccaaaaccgacttaaatactacgataaataatcaaccccgccgccaatcgccgccaccgccgcgaaccacgcccaacaaaaactccgactccgcctaaaattccgccatccaacaacccacgcgctaaacccgaccctcaaaaactcaaaccccgaaaacgcccaacttcacntacaaacgcgaaaaccccgtccctaacgtttttactaacgcgc

SEQ ID NO: 32703 - DNA, 623 bp, Artificial Sequence
  chemically treated genomic DNA (Homo sapiens) CpG-island No: 32703
  unsure (111, 580)
ttaaagtgttgttttttttgagttaattaggcgatttttattacggcgatagtcgggaagtatggtgtttggcgtcgttcgtgtatacggagggtgtttgtcgtaggtggncggttttttcggggtttgttaagaatgagcgagggttttttcgttaagttggtcgggattaggacgcgatacggaagagattttagttttgttttgatttcggttcgggttcgtaggacgtagtttattcgtttttagaatatcggttcgtttggtaatttcgggcgttcgggtttcgttcggattcgaatttggtggggcgcgttcggtagaaagcggggtgttgggatagcgggatttttacgcgcgattttggttttttcgggttagttttttttttaggttcgggcggtttattagggtcgatttggatgttgcggtaagtggttagtttcgtcgttagtcgtcgttatcgtcgcgggttacgtttagtaggggtttcgatttcgtttggggtttcgttatttagtagtttacgcgttggattcgatttttagaagtttaagtttcgaaggcgtttagttttatntgtaggcgcggagatttcgtttttggcgtttttgttgacgcgt

SEQ ID NO: 32704 - DNA, 623 bp, Artificial Sequence
  chemically treated genomic DNA (Homo sapiens) CpG-island No: 32704
  unsure (44, 513)
acgcgtcaacaaaaacgccaaaaacgaaatctccgcgcctacanataaaactaaacgccttcgaaacttaaacttctaaaaatcgaatccaacgcgtaaactactaaataacgaaaccccaaacgaaatcgaaacccctactaaacgtaacccgcgacgataacgacgactaacgacgaaactaaccacttaccgcaacatccaaatcgaccctaataaaccgcccgaacctaaaaaaaaaactaacccgaaaaaaccaaaatcgcgcgtaaaaatcccgctatcccaacaccccgctttctaccgaacgcgccccaccaaattcgaatccgaacgaaacccgaacgcccgaaattaccaaacgaaccgatattctaaaaacgaataaactacgtcctacgaacccgaaccgaaatcaaaacaaaactaaaatctcttccgtatcgcgtcctaatcccgaccaacttaacgaaaaaaccctcgctcattcttaacaaaccccgaaaaaaccgnccacctacgacaaacaccctccgtatacacgaacgacgccaaacaccatacttcccgactatcgccgtaataaaaatcgcctaattaactcaaaaaaaacaacactttaa

SEQ ID NO: 32705 - DNA, 679 bp, Artificial Sequence
  chemically treated genomic DNA (Homo sapiens) CpG-island No: 32705
  unsure (384)
tcgcgttttcgggtagtgaatagaagcgtcggtttcggagttgttcgaggaggttcgggagtaaggtcgggtagggaacgcgagatttcggcgtcgacgtttcgtagtgggtttttgggatatttatcggtgcgggacgaaggtaggtgcgcggcggcggggttatttgtacgggtgaagttggagggcgcggtgagaagtgatgagggttagtgaagagggcgacgacgcggacgggtattaggatagggcggcgataggcgaggttgaggttggttttttgttcggatagatttcgagtcggttttcgttcgtcggtcggttttcgtcgagttttcggtattgcggcgtgtacgttacggttacggagcgttcgaaggcggngtgtagtcggggtcgcggtaggtcgtcgggcgcgcgtttcgggagggagcgtgtttcgggagagggcgcggaattttcgggttcgtcgttcgcggcgtagagtttttggggcgagggtaggcgtttgtagcgtagagaggggttgtttttggataagtcgggagtttttgttttttttatggcgaaacggttttttttgtcgcggtagttgtttttagtttcggtaaagtaggttttgttcggttggatattgtgattgtgtagtttattaatagcgagaattagtttaagtagg

SEQ ID NO: 32706 - DNA, 679 bp, Artificial Sequence
  chemically treated genomic DNA (Homo sapiens) CpG-island No: 32706
  unsure (296)
cctacttaaactaattctcgctattaataaactacacaatcacaatatccaaccgaacaaaacctactttaccgaaactaaaaacaactaccgcgacaaaaaaaaccgtttcgccataaaaaaaacaaaaactcccgacttatccaaaaacaacccctctctacgctacaaacgcctaccctcgccccaaaaactctacgccgcgaacgacgaacccgaaaattccgcgccctctcccgaaacacgctccctcccgaaacgcgcgcccgacgacctaccgcgaccccgactacacnccgccttcgaacgctccgtaaccgtaacgtacacgccgcaataccgaaaactcgacgaaaaccgaccgacgaacgaaaaccgactcgaaatctatccgaacaaaaaaccaacctcaacctcgcctatcgccgccctatcctaatacccgtccgcgtcgtcgccctcttcactaaccctcatcacttctcaccgcgccctccaacttcacccgtacaaataaccccgccgccgcgcacctaccttcgtcccgcaccgataaatatcccaaaaacccactacgaaacgtcgacgccgaaatctcgcgttccctacccgaccttactcccgaacctcctcgaacaactccgaaaccgacgcttctattcactacccgaaaacgcga

SEQ ID NO: 32707 - DNA, 679 bp, Artificial Sequence
  chemically treated genomic DNA (Homo sapiens) CpG-island No: 32707
  unsure (296)
tttgtttgaattgattttcgttgttggtagattgtatagttatagtatttagtcggataggatttgttttgtcgggattggaaataattatcgcggtaaaagaggtcgtttcgttatgggaagaataagaattttcggtttgtttaggggtagtttttttttgcgttgtaggcgtttattttcgttttagaggttttgcgtcgcgggcggcgagttcgggggtttcgcgttttttttcgaggtacgttttttttcggagcgcgcgttcgacggtttgtcgcggtttcggttgtatntcgttttcgggcgtttcgtagtcgtgacgtgtacgtcgtagtgtcggggattcggcgggggtcggtcggcgggcggagatcgattcgggatttgttcgagtaggaagttagttttagtttcgtttgtcgtcgttttgttttggtgttcgttcgcgtcgtcgttttttttattggtttttattattttttatcgcgttttttagttttattcgtataggtagtttcgtcgtcgcgtatttgttttcgtttcgtatcggtgagtgttttagagatttattgcggggcgtcggcgtcggggtttcgcgttttttgttcggttttgttttcgggttttttcgagtagtttcggggtcgacgtttttgtttattgttcgaggacgcgg

SEQ ID NO: 32708 - DNA, 679 bp, Artificial Sequence
  chemically treated genomic DNA (Homo sapiens) CpG-island No: 32708
  unsure (384)
ccgcgtcctcgaacaataaacaaaaacgtcgaccccgaaactactcgaaaaaacccgaaaacaaaaccgaacaaaaaacgcgaaaccccgacgccgacgccccgcaataaatctctaaaacactcaccgatacgaaacgaaaacaaatacgcgacgacgaaactacctatacgaataaaactaaaaaacgcgataaaaaataataaaaaccaataaaaaaaacgacgacgcgaacgaacaccaaaacaaaacgacgacaaacgaaactaaaactaacttcctactcgaacaaatcccgaatcgatctccgcccgccgaccgacccccgccgaatccccgacactacgacgtacacgtcacgactacgaaacgcccgaaaacganatacaaccgaaaccgcgacaaaccgtcgaacgcgcgctccgaaaaaaaacgtacctcgaaaaaaaacgcgaaacccccgaactcgccgcccgcgacgcaaaacctctaaaacgaaaataaacgcctacaacgcaaaaaaaaactacccctaaacaaaccgaaaattcttattcttcccataacgaaacgacctcttttaccgcgataattatttccaatcccgacaaaacaaatcctatccgactaaatactataactatacaatctaccaacaacgaaaatcaattcaaacaaa

SEQ ID NO: 32709 - DNA, 570 bp, Artificial Sequence
  chemically treated genomic DNA (Homo sapiens) CpG-island No: 32709
tcgcgggttagagttcgcggttaagttcgcgttcgtttataaagttttcgtttttttttcggttttcgtttcgtcgtgcgttgtaggtcgcggcgttgggggcgttttcgattttcgaggcgttgaggcggcggtttttcgagtttcgtttttttcgatttttagacgggcggtagcggcggcggaggcggcggcggcggcggcggcgagttgagtattaaaagggcgtttattttttcgggcgagttgtagtacgatcgtttttcgcgggcggtcggggttcgcgtcgtagttgtcgtcgcgtttcggtttaggttgtcgcgagaggcggcggtacggttttcgcgcggtcggtgcggcgtttttcggtcgtttcgcgtatagttcgcgtttcggttatggggttgggttgattcggggttcggttaagttgaggcggcggcgttcggtcgtgcgtttagtttgtaggcgtttggtttttacgatgatgaagaagaagaagtttaagtttaaggtggatttcgagttcgaggagttttttttagtgtttttcgttaatggggttttttt

SEQ ID NO: 32710 - DNA, 570 bp, Artificial Sequence
  chemically treated genomic DNA (Homo sapiens) CpG-island No: 32710
aaaaaaaccccattaacgaaaaacactaaaaaaaactcctcgaactcgaaatccaccttaaacttaaacttcttcttcttcatcatcgtaaaaaccaaacgcctacaaactaaacgcacgaccgaacgccgccgcctcaacttaaccgaaccccgaatcaacccaaccccataaccgaaacgcgaactatacgcgaaacgaccgaaaaacgccgcaccgaccgcgcgaaaaccgtaccgccgcctctcgcgacaacctaaaccgaaacgcgacgacaactacgacgcgaaccccgaccgcccgcgaaaaacgatcgtactacaactcgcccgaaaaaataaacgcccttttaatactcaactcgccgccgccgccgccgccgcctccgccgccgctaccgcccgtctaaaaatcgaaaaaaacgaaactcgaaaaaccgccgcctcaacgcctcgaaaatcgaaaacgcccccaacgccgcgacctacaacgcacgacgaaacgaaaaccgaaaaaaaaacgaaaactttataaacgaacgcgaacttaaccgcgaactctaacccgcga

SEQ ID NO: 32711 - DNA, 570 bp, Artificial Sequence
  chemically treated genomic DNA (Homo sapiens) CpG-island No: 32711
aagaggattttattgacgaagggtattgaggagagtttttcgagttcgaagtttattttaaatttaaatttttttttttttattatcgtgagagttaggcgtttgtaagttgggcgtacggtcgggcgtcgtcgttttagtttggtcgagtttcggattagtttagttttatggtcggggcgcgagttgtgcgcggggcggtcggggggcgtcgtatcggtcgcgcggaggtcgtgtcgtcgtttttcgcggtagtttgggtcggaacgcggcggtagttgcggcgcggatttcgatcgttcgcggggagcggtcgtgttgtagttcgttcggggaggtgagcgtttttttggtgtttagttcgtcgtcgtcgtcgtcgtcgttttcgtcgtcgttgtcgttcgtttgggagtcgggagaggcgaggttcgaggaatcgtcgttttagcgtttcgggggtcgggggcgtttttagcgtcgcggtttgtagcgtacggcggggcggaagtcggagggagggcggggattttgtgggcgggcgcgggtttggtcgcggattttaattcgcga

SEQ ID NO: 32712 - DNA, 570 bp, Artificial Sequence
  chemically treated genomic DNA (Homo sapiens) CpG-island No: 32712
tcgcgaattaaaatccgcgaccaaacccgcgcccgcccacaaaatccccgccctccctccgacttccgccccgccgtacgctacaaaccgcgacgctaaaaacgcccccgacccccgaaacgctaaaacgacgattcctcgaacctcgcctctcccgactcccaaacgaacgacaacgacgacgaaaacgacgacgacgacgacgacgaactaaacaccaaaaaaacgctcacctccccgaacgaactacaacacgaccgctccccgcgaacgatcgaaatccgcgccgcaactaccgccgcgttccgacccaaactaccgcgaaaaacgacgacacgacctccgcgcgaccgatacgacgccccccgaccgccccgcgcacaactcgcgccccgaccataaaactaaactaatccgaaactcgaccaaactaaaacgacgacgcccgaccgtacgcccaacttacaaacgcctaactctcacgataataaaaaaaaaaaaatttaaatttaaaataaacttcgaactcgaaaaactctcctcaatacccttcgtcaataaaatcctctt

SEQ ID NO: 32713 - DNA, 560 bp, Artificial Sequence
  chemically treated genomic DNA (Homo sapiens) CpG-island No: 32713
  unsure (220..221, 444)
tcgcgtggagttttgttgttttttttgtcgtttttcgttggttaggatcgtttttaggtttttgttacgtttcgggagcgttacgaatttaatagtcgtttaagtcgtttttcggttcgcggtttgcggacgcgttcggagttgggggttttcgttaatagttgtcgtatcgtgtcgcgtcgtagtcgtacgttagcggggttaacggcgcggtaggtannggggttttcgttaaggttcggaagaggattttgaaaatggtttttgggtatgcgttatagcggtcgttacgagacgtaaaatcgacgttttggaattgagagtttagagggacggagttcggcgtattatgaggttttcggggtttaaggtcgatcgtgagagcgtacgaggttggcgagttcgcgtgaggtcgagcgcgggtgcggcgcggcgtacggcggntacgttacgtagcgagtcgtgcgtgcgcggcgttagggcggtttgagttgaggagttggcgttttcgacgattttgtatttcggttgggtaattgtttacgtagatgatggagcga

SEQ ID NO: 32714 - DNA, 560 bp, Artificial Sequence
  chemically treated genomic DNA (Homo sapiens) CpG-island No: 32714
  unsure (117, 340..)
tcgctccatcatctacgtaaacaattacccaaccgaaatacaaaatcgtcgaaaacgccaactcctcaactcaaaccgccctaacgccgcgcacgcacgactcgctacgtaacgtanccgccgtacgccgcgccgcacccgcgctcgacctcacgcgaactcgccaacctcgtacgctctcacgatcgaccttaaaccccgaaaacctcataatacgccgaactccgtccctctaaactctcaattccaaaacgtcgattttacgtctcgtaacgaccgctataacgcatacccaaaaaccattttcaaaatcctcttccgaaccttaacgaaaaccccnntacctaccgcgccgttaaccccgctaacgtacgactacgacgcgacacgatacgacaactattaacgaaaacccccaactccgaacgcgtccgcaaaccgcgaaccgaaaaacgacttaaacgactattaaattcgtaacgctcccgaaacgtaacaaaaacctaaaaacgatcctaaccaacgaaaaacgacaaaaaaaacaacaaaactccacgcga

SEQ ID NO: 32715 - DNA, 560 bp, Artificial Sequence
  chemically treated genomic DNA (Homo sapiens) CpG-island No: 32715
  unsure (117, 340..)
tcgttttattatttgcgtaagtagttgtttaatcgaaatataaagtcgtcgggagcgttagttttttaatttaggtcgttttgacgtcgcgtacgtacggttcgttgcgtgacgtantcgtcgtacgtcgcgtcgtattcgcgttcggttttacgcgggttcgttaatttcgtgcgtttttacggtcggttttgggtttcgggagttttatggtgcgtcgagtttcgtttttttaggtttttagttttaaggcgtcggttttgcgtttcgtaacggtcgttgtggcgtatgtttagaagttatttttaaggttttttttcgaattttggcgaggattttnntgtttgtcgcgtcgttgatttcgttagcgtgcggttgcgacgcggtacggtacggtagttgttggcgaaggtttttaatttcgagcgcgttcgtagatcgcgagtcggaaggcggtttgggcggttgttgagttcgtggcgttttcgaggcgtggtaaaggtttaaaaacggttttggttagcggaaggcggtaagaggagtagtaaggttttacgcga

SEQ ID NO: 32716 - DNA, 560 bp, Artificial Sequence
  chemically treated genomic DNA (Homo sapiens) CpG-island No: 32716
  unsure (220..221, 444)
tcgcgtaaaaccttactactcctcttaccgccttccgctaaccaaaaccgtttttaaacctttaccacgcctcgaaaacgccacgaactcaacaaccgcccaaaccgccttccgactcgcgatctacgaacgcgctcgaaattaaaaaccttcgccaacaactaccgtaccgtaccgcgtcgcaaccgcacgctaacgaaatcaacgacgcgacaaacannaaaatcctcgccaaaattcgaaaaaaaaccttaaaaataacttctaaacatacgccacaacgaccgttacgaaacgcaaaaccgacgccttaaaactaaaaacctaaaaaaacgaaactcgacgcaccataaaactcccgaaacccaaaaccgaccgtaaaaacgcacgaaattaacgaacccgcgtaaaaccgaacgcgaatacgacgcgacgtacgacgantacgtcacgcaacgaaccgtacgtacgcgacgtcaaaacgacctaaattaaaaaactaacgctcccgacgactttatatttcgattaaacaactacttacgcaaataataaaacga

SEQ ID NO: 32717 - DNA, 545 bp, Artificial Sequence
  chemically treated genomic DNA (Homo sapiens) CpG-island No: 32717
  unsure (176)
gacgaagcgcgagaagtgattcgtggtagttagacgttgttgcgtggtgtgaaaattgggcgtaagaagtcgatgttcggttgacgaaagaagcgtagacgttgggcgttcggttgattaatttgacgggaatcgtgttgtatattaattttgggcgagttttataggcggaagtngggtggaagtcgttgcgtaggttatgcgttcgttagtgattttcgagtatgatttggacgacgtcggacgcggatatcggtatcgggcgttggtagttgtatgtgtcgtattacggaggcggaagatgtttgtatcgttaataataatgcggcggcggtgttattgatgttggcggttattgtatgcggaaaagaggtggtggtatttcgcggcgaattggtggagattcgcggcgcgtttcgtaatttcgatgttatgcgttaggtagggtgtattttatacgaatagggagtattaatcgtacgtacgtatatgattatcgttaggcggtgaatgaaaatatcgtattgttgatgagagtatatagt

SEQ ID NO: 32718 - DNA, 545 bp, Artificial Sequence
  chemically treated genomic DNA (Homo sapiens) CpG-island No: 32718
  unsure (370)
actatatactctcatcaacaatacgatattttcattcaccgcctaacgataatcatatacgtacgtacgattaatactccctattcgtataaaatacaccctacctaacgcataacatcgaaattacgaaacgcgccgcgaatctccaccaattcgccgcgaaataccaccacctcttttccgcatacaataaccgccaacatcaataacaccgccgccgcattattattaacgatacaaacatcttccgcctccgtaatacgacacatacaactaccaacgcccgataccgatatccgcgtccgacgtcgtccaaatcatactcgaaaatcactaacgaacgcataacctacgcaacgacttccacccnacttccgcctataaaactcgcccaaaattaatatacaacacgattcccgtcaaattaatcaaccgaacgcccaacgtctacgcttctttcgtcaaccgaacatcgacttcttacgcccaattttcacaccacgcaacaacgtctaactaccacgaatcacttctcgcgcttcgtc

SEQ ID NO: 32719 - DNA, 545 bp, Artificial Sequence
  chemically treated genomic DNA (Homo sapiens) CpG-island No: 32719
  unsure (370)
gttatgtatttttattaatagtgcggtatttttatttatcgtttgacgataattatgtgcgtgcgtgcggttggtgttttttattcgtgtagggtgtattttgtttgacgtataatatcgggattacgaaacgcgtcgcgaatttttattagttcgtcgcgagatattattatttttttttcgtatgtagtggtcgttaatattaataatatcgtcgtcgtattgttattgacgatataggtatttttcgttttcgtaatacggtatatgtagttgttagcgttcgatgtcgatgttcgcgttcggcgtcgtttagattatattcgagggttattggcgaacgtatagtttgcgtaacggtttttatttngttttcgtttgtaaagttcgtttaaggttggtatgtagtacggttttcgttaggttgattagtcggacgtttagcgtttgcgtttttttcgttaatcgggtatcgattttttgcgtttagtttttatattacgtagtagcgtttggttgttacgaattatttttcgcgtttcgtt

SEQ ID NO: 32720 - DNA, 545 bp, Artificial Sequence
  chemically treated genomic DNA (Homo sapiens) CpG-island No: 32720
  unsure (176)
aacgaaacgcgaaaaataattcgtaacaaccaaacgctactacgtaatataaaaactaaacgcaaaaaatcgatacccgattaacgaaaaaaacgcaaacgctaaacgtccgactaatcaacctaacgaaaaccgtactacataccaaccttaaacgaactttacaaacgaaaacnaaataaaaaccgttacgcaaactatacgttcgccaataaccctcgaatataatctaaacgacgccgaacgcgaacatcgacatcgaacgctaacaactacatataccgtattacgaaaacgaaaaatacctatatcgtcaataacaatacgacgacgatattattaatattaacgaccactacatacgaaaaaaaaataataatatctcgcgacgaactaataaaaattcgcgacgcgtttcgtaatcccgatattatacgtcaaacaaaatacaccctacacgaataaaaaacaccaaccgcacgcacgcacataattatcgtcaaacgataaataaaaataccgcactattaataaaaatacataac

SEQ ID NO: 32721 - DNA, 535 bp, Artificial Sequence
  chemically treated genomic DNA (Homo sapiens) CpG-island No: 32721
gcgggcgattttcgggttttcgtagaatttaatttttagcggtaacggagcgttaagtttttcgcgggcgattttcgggttttcgtagaatttaatttttagcggtaacggagcgttaagtttttcgcgggcgattttcgggttttcgtagaatttaatttttagcggtaacggagcgttaagtttttcgcgggcgattttcgggttttcgtagaatttaatttttagcggtaacggagcgttaagtttttcgcgggcgattttcgggttttcgtagaatttaatttttagcggtaacggagcgttaagtttttcgcgggcgattttcgggttttcgtagaatttaatttttagcggtaacggagcgttaagtttttcgcgggcgattttcgggttttcgtagaatttaatttttagcggtaacggagcgttaagtttttcgcgggcgattttcgggttttcgtagaagtatatttgttttttttttttatatttgatttttttaagggcgggttgttatttttattgtgtagtt

SEQ ID NO: 32722 - DNA, 535 bp, Artificial Sequence
  chemically treated genomic DNA (Homo sapiens) CpG-island No: 32722
aactacacaataaaaataacaacccgcccttaaaaaaatcaaatataaaaaaaaaaaacaaatatacttctacgaaaacccgaaaatcgcccgcgaaaaacttaacgctccgttaccgctaaaaattaaattctacgaaaacccgaaaatcgcccgcgaaaaacttaacgctccgttaccgctaaaaattaaattctacgaaaacccgaaaatcgcccgcgaaaaacttaacgctccgttaccgctaaaaattaaattctacgaaaacccgaaaatcgcccgcgaaaaacttaacgctccgttaccgctaaaaattaaattctacgaaaacccgaaaatcgcccgcgaaaaacttaacgctccgttaccgctaaaaattaaattctacgaaaacccgaaaatcgcccgcgaaaaacttaacgctccgttaccgctaaaaattaaattctacgaaaacccgaaaatcgcccgcgaaaaacttaacgctccgttaccgctaaaaattaaattctacgaaaacccgaaaatcgcccgc

SEQ ID NO: 32723 - DNA, 535 bp, Artificial Sequence
  chemically treated genomic DNA (Homo sapiens) CpG-island No: 32723
agttgtatagtggaggtaatagttcgtttttgaaggagttaagtgtgggaggaggaagtaaatgtgtttttgcggggattcggaaatcgttcgcggggggtttagcgtttcgttatcgttgagggttggattttgcggggattcggaaatcgttcgcggggggtttagcgtttcgttatcgttgagggttggattttgcggggattcggaaatcgttcgcggggggtttagcgtttcgttatcgttgagggttggattttgcggggattcggaaatcgttcgcggggggtttagcgtttcgttatcgttgagggttggattttgcggggattcggaaatcgttcgcggggggtttagcgtttcgttatcgttgagggttggattttgcggggattcggaaatcgttcgcggggggtttagcgtttcgttatcgttgagggttggattttgcggggattcggaaatcgttcgcggggggtttagcgtttcgttatcgttgagggttggattttgcggggattcggaaatcgttcgt

SEQ ID NO: 32724 - DNA, 535 bp, Artificial Sequence
  chemically treated genomic DNA (Homo sapiens) CpG-island No: 32724
acgaacgatttccgaatccccgcaaaatccaaccctcaacgataacgaaacgctaaaccccccgcgaacgatttccgaatccccgcaaaatccaaccctcaacgataacgaaacgctaaaccccccgcgaacgatttccgaatccccgcaaaatccaaccctcaacgataacgaaacgctaaaccccccgcgaacgatttccgaatccccgcaaaatccaaccctcaacgataacgaaacgctaaaccccccgcgaacgatttccgaatccccgcaaaatccaaccctcaacgataacgaaacgctaaaccccccgcgaacgatttccgaatccccgcaaaatccaaccctcaacgataacgaaacgctaaaccccccgcgaacgatttccgaatccccgcaaaatccaaccctcaacgataacgaaacgctaaaccccccgcgaacgatttccgaatccccgcaaaaacacatttacttcctcctcccacacttaactccttcaaaaacgaactattacctccactatacaact

SEQ ID NO: 32725 - DNA, 506 bp, Artificial Sequence
  chemically treated genomic DNA (Homo sapiens) CpG-island No: 32725
taagttaggtgttcgcggtgcggttgcggttggcgtcggttcgagttcgggagttgttgtttagcgagcggggaaagttcgtttatttcggttagcgcgcgcgggagataggatcgagtcgggcgataggggtagtcgttcggaggggcgcggggagtggggtagggtcgggtcgtatttgaaatcgcggggcggtttcggtttagttcggcggacgaatttcgggagattttttacgttttcgggcgggaggggtagtttttcgtcgtcggtttcgttttttttttcggtagcgtttagtagttttacggcgttgtttggggcgttttttcgcgggtgggtttaggcgattcgcggtagtagcggttttcgttttttattttttttttttttcgggttttcgtcgttcgcggacgttaatcggtcgggttcggagggattttttatggattttttttgtttttttcgcgttgagattagattagagtagttaggtgttagagatt

SEQ ID NO: 32726 - DNA, 506 bp, Artificial Sequence
  chemically treated genomic DNA (Homo sapiens) CpG-island No: 32726
aatctctaacacctaactactctaatctaatctcaacgcgaaaaaaacaaaaaaaatccataaaaaatccctccgaacccgaccgattaacgtccgcgaacgacgaaaacccgaaaaaaaaaaaaaataaaaaacgaaaaccgctactaccgcgaatcgcctaaacccacccgcgaaaaaacgccccaaacaacgccgtaaaactactaaacgctaccgaaaaaaaaaacgaaaccgacgacgaaaaactacccctcccgcccgaaaacgtaaaaaatctcccgaaattcgtccgccgaactaaaccgaaaccgccccgcgatttcaaatacgacccgaccctaccccactccccgcgcccctccgaacgactacccctatcgcccgactcgatcctatctcccgcgcgcgctaaccgaaataaacgaactttccccgctcgctaaacaacaactcccgaactcgaaccgacgccaaccgcaaccgcaccgcgaacacctaactta

SEQ ID NO: 32727 - DNA, 506 bp, Artificial Sequence
  chemically treated genomic DNA (Homo sapiens) CpG-island No: 32727
agtttttggtatttggttgttttgatttggttttagcgcggagggagtagagggagtttatggaggattttttcgagttcgatcggttggcgttcgcggacggcgggagttcggaggaggaggaggatggggagcgggagtcgttgttatcgcggatcgtttgggtttattcgcggagaggcgttttaggtagcgtcgtgaggttgttggacgttgtcggggaggagggcgaggtcggcgacgaggagttgtttttttcgttcggggacgtggggggtttttcggagttcgttcgtcgagttggatcggagtcgtttcgcggttttaggtgcgattcggttttgttttatttttcgcgttttttcgggcggttgtttttgtcgttcggttcggttttgtttttcgcgcgcgttggtcgaggtggacgggtttttttcgttcgttgggtagtagttttcgagttcggatcggcgttagtcgtagtcgtatcgcgggtatttagtttg

SEQ ID NO: 32728 - DNA, 506 bp, Artificial Sequence
  chemically treated genomic DNA (Homo sapiens) CpG-island No: 32728
caaactaaatacccgcgatacgactacgactaacgccgatccgaactcgaaaactactacccaacgaacgaaaaaaacccgtccacctcgaccaacgcgcgcgaaaaacaaaaccgaaccgaacgacaaaaacaaccgcccgaaaaaacgcgaaaaataaaacaaaaccgaatcgcacctaaaaccgcgaaacgactccgatccaactcgacgaacgaactccgaaaaaccccccacgtccccgaacgaaaaaaacaactcctcgtcgccgacctcgccctcctccccgacaacgtccaacaacctcacgacgctacctaaaacgcctctccgcgaataaacccaaacgatccgcgataacaacgactcccgctccccatcctcctcctcctccgaactcccgccgtccgcgaacgccaaccgatcgaactcgaaaaaatcctccataaactccctctactccctccgcgctaaaaccaaatcaaaacaaccaaataccaaaaact

SEQ ID NO: 32729 - DNA, 560 bp, Artificial Sequence
  chemically treated genomic DNA (Homo sapiens) CpG-island No: 32729
gaatattattttaagtttgcgatcgcgcggtattattttcgttttttttttttttttatttcgttttttttatttttttcgggagtttttgggagtcgggtcgtcgtgtgcgtaagcgtgtttagtttttttttcgtttttaattcgggttcgggttttcgttttttttgtaggcggattcgttcgtttttaggtcggattcgcgttcgggatagggattcggtcgagtcgagtcgtcgcgttagcgttgcgtcgtcggtcggtgcgtttagcggatcggagttgcgcgcggaatcgtgttgtttcgtttcgttttattcgtgagggtgagtacgcggcggcggtgcgcgggggttcgcggggcggggcggggcggggagtcgcggggttttcggtcgtttgattttagtcggcgtcgcgtttttcggaggggggtcgggttttgtacgtgggcgtagcgcgggtcggggtggggttgttatagttttgcggagttgtttttcggggtttttttttttggattagattttcgcgggaagtcggatttttttcgttttttt

SEQ ID NO: 32730 - DNA, 560 bp, Artificial Sequence
  chemically treated genomic DNA (Homo sapiens) CpG-island No: 32730
aaaaaaacgaaaaaaatccgacttcccgcgaaaatctaatccaaaaaaaaaaaccccgaaaaacaactccgcaaaactataacaaccccaccccgacccgcgctacgcccacgtacaaaacccgacccccctccgaaaaacgcgacgccgactaaaatcaaacgaccgaaaaccccgcgactccccgccccgccccgccccgcgaacccccgcgcaccgccgccgcgtactcaccctcacgaataaaacgaaacgaaacaacacgattccgcgcgcaactccgatccgctaaacgcaccgaccgacgacgcaacgctaacgcgacgactcgactcgaccgaatccctatcccgaacgcgaatccgacctaaaaacgaacgaatccgcctacaaaaaaaacgaaaacccgaacccgaattaaaaacgaaaaaaaaactaaacacgcttacgcacacgacgacccgactcccaaaaactcccgaaaaaaataaaaaaaacgaaataaaaaaaaaaaaaaaacgaaaataataccgcgcgatcgcaaacttaaaataatattc

SEQ ID NO: 32731 - DNA, 560 bp, Artificial Sequence
  chemically treated genomic DNA (Homo sapiens) CpG-island No: 32731
aagggagcggagaggattcggtttttcgcgaaaatttggtttagggaaagggatttcggaaagtagtttcgtagggttgtggtagttttatttcgattcgcgttgcgtttacgtgtagggttcgattttttttcgggaggcgcggcgtcggttggggttaggcggtcgaggatttcgcggtttttcgtttcgtttcgtttcgcgggttttcgcgtatcgtcgtcgcgtatttatttttacgggtggagcggggcggggtagtacggtttcgcgcgtagtttcgattcgttaggcgtatcgatcggcggcgtagcgttggcgcgacggttcgattcggtcgggtttttgtttcgggcgcgggttcggtttgggagcgggcgagttcgtttgtaggggaggcggggattcgggttcgggttgggggcggggaaggggttggatacgtttgcgtatacggcggttcgatttttaggagttttcgggaggggtagaaagggcggggtggaggagggggaagggcgggggtgatgtcgcgcggtcgtaggtttgggatggtgttt

SEQ ID NO: 32732 - DNA, 560 bp, Artificial Sequence
  chemically treated genomic DNA (Homo sapiens) CpG-island No: 32732
aaacaccatcccaaacctacgaccgcgcgacatcacccccgcccttccccctcctccaccccgccctttctacccctcccgaaaactcctaaaaatcgaaccgccgtatacgcaaacgtatccaaccccttccccgcccccaacccgaacccgaatccccgcctcccctacaaacgaactcgcccgctcccaaaccgaacccgcgcccgaaacaaaaacccgaccgaatcgaaccgtcgcgccaacgctacgccgccgatcgatacgcctaacgaatcgaaactacgcgcgaaaccgtactaccccgccccgctccacccgtaaaaataaatacgcgacgacgatacgcgaaaacccgcgaaacgaaacgaaacgaaaaaccgcgaaatcctcgaccgcctaaccccaaccgacgccgcgcctcccgaaaaaaaatcgaaccctacacgtaaacgcaacgcgaatcgaaataaaactaccacaaccctacgaaactactttccgaaatccctttccctaaaccaaattttcgcgaaaaaccgaatcctctccgctccctt

SEQ ID NO: 32733 - DNA, 604 bp, Artificial Sequence
  chemically treated genomic DNA (Homo sapiens) CpG-island No: 32733
ggttagagttgagatattagaggcgggggtcgttattaagttgcggggtagtttgaaggggacgagaaaacgaagcggagttcgggttacgcgtgagtggttagtgtgaggtgggcggggagggtgggaggaggcgcggaatagagtcgaaggggattatggatcgggttaggaaagaagagtttggagttttgattttacggggacggtatttgtagtagtacggaacgaattaacgcgttaacgggttcggtgtatgagtcgttaacgttttggaagtattagagtataagttcgtttttggagaaaatggtgaagaagtcgagtatggcggtagcggtagaggagttggggtcggcgtcgggaatttaggtcgcgttcgtcgtcgttttttgttgcgttaagcgcgggatacgttatattagtggtttcggaaatcggtttaatcgtattttcgtttagaacgtcgggtgttttttttattttcgttcgggggcgcgtaggattgacgtatcgtaaggttagttaatggcgggtgggagcgggtttgggtggggttttaggagaggttacggggagacggttatttagagtattgggcggg

SEQ ID NO: 32734 - DNA, 604 bp, Artificial Sequence
  chemically treated genomic DNA (Homo sapiens) CpG-island No: 32734
cccgcccaatactctaaataaccgtctccccgtaacctctcctaaaaccccacccaaacccgctcccacccgccattaactaaccttacgatacgtcaatcctacgcgcccccgaacgaaaataaaaaaaacacccgacgttctaaacgaaaatacgattaaaccgatttccgaaaccactaatataacgtatcccgcgcttaacgcaacaaaaaacgacgacgaacgcgacctaaattcccgacgccgaccccaactcctctaccgctaccgccatactcgacttcttcaccattttctccaaaaacgaacttatactctaatacttccaaaacgttaacgactcatacaccgaacccgttaacgcgttaattcgttccgtactactacaaataccgtccccgtaaaatcaaaactccaaactcttctttcctaacccgatccataatccccttcgactctattccgcgcctcctcccaccctccccgcccacctcacactaaccactcacgcgtaacccgaactccgcttcgttttctcgtccccttcaaactaccccgcaacttaataacgacccccgcctctaatatctcaactctaacc

SEQ ID NO: 32735 - DNA, 604 bp, Artificial Sequence
  chemically treated genomic DNA (Homo sapiens) CpG-island No: 32735
ttcgtttaatgttttaggtggtcgttttttcgtgattttttttggagttttatttaggttcgtttttattcgttattggttggttttgcgatacgttagttttgcgcgttttcgggcggagatggggagggtattcggcgttttgagcggaagtacggttgagtcgattttcggggttattggtgtgacgtgtttcgcgtttggcgtagtaggaagcggcggcgaacgcggtttgaattttcggcgtcggttttagtttttttgtcgttgtcgttatgttcgatttttttattattttttttaagggcgggtttgtgttttggtgtttttagggcgttagcgatttatgtatcggattcgttaacgcgttgattcgtttcgtgttgttgtaggtatcgttttcgtgggattagaattttaggttttttttttttgattcgatttatggtttttttcgattttatttcgcgtttttttttatttttttcgtttattttatattgattatttacgcgtaattcggatttcgtttcgttttttcgttttttttagattatttcgtaatttaatgacggttttcgtttttggtgttttaattttagtt

SEQ ID NO: 32736 - DNA, 604 bp, Artificial Sequence
  chemically treated genomic DNA (Homo sapiens) CpG-island No: 32736
aactaaaattaaaacaccaaaaacgaaaaccgtcattaaattacgaaataatctaaaaaaaacgaaaaaacgaaacgaaatccgaattacgcgtaaataatcaatataaaataaacgaaaaaaataaaaaaaaacgcgaaataaaatcgaaaaaaaccataaatcgaatcaaaaaaaaaaaacctaaaattctaatcccacgaaaacgatacctacaacaacacgaaacgaatcaacgcgttaacgaatccgatacataaatcgctaacgccctaaaaacaccaaaacacaaacccgcccttaaaaaaaataataaaaaaatcgaacataacgacaacgacaaaaaaactaaaaccgacgccgaaaattcaaaccgcgttcgccgccgcttcctactacgccaaacgcgaaacacgtcacaccaataaccccgaaaatcgactcaaccgtacttccgctcaaaacgccgaataccctccccatctccgcccgaaaacgcgcaaaactaacgtatcgcaaaaccaaccaataacgaataaaaacgaacctaaataaaactccaaaaaaaatcacgaaaaaacgaccacctaaaacattaaacgaa

SEQ ID NO: 32737 - DNA, 718 bp, Artificial Sequence
  chemically treated genomic DNA (Homo sapiens) CpG-island No: 32737
ttataacgtattgagcgttaggtttttttagcgaggtaagcgaaaggggagtcgtttcgcgcgagtttttttgcgatagaaaaggtgatatttttttcggagggtttttttatgtcgtttgcgtgttgcgggtgttagaaaggtgaagaagggaagcggatgtgtcgttagtagggtaaggtcggatcggaggcggcgcgtatttttgcggttttcggtggggtcgggattttggggtttaggtcggtcgcgtttcgtcgtttattttacggagtttcgtcgcgtttttcggtttttcgcgatttcgtttcgggtttatttgcgcgcgggtttagttgcgatgagggttgcgcggattgcgcgggtttcgcggggaagagtagcgcgtaggtttcgtttttcggaagcgtcgttcgtcgtattgttttttttacgtcgttaggtttagtttagattcgggagattttcgggtataattcggttgcgggagacgcgggacggggtagtttttgtgtttattgcggttcgagtttttgttagtttggtttttgtatgatttcgggttttcgtttttttcgtttgcgttggggcggttcgtagtaattcggagaggagttcgtggttagggtttttcggcgtttatcgtgataatttgaaatttgggttttgttttaggcgggggagaaggaaaaaaaaatattttatttcgtttatttaa

SEQ ID NO: 32738 - DNA, 718 bp, Artificial Sequence
  chemically treated genomic DNA (Homo sapiens) CpG-island No: 32738
ttaaataaacgaaataaaatatttttttttccttctcccccgcctaaaacaaaacccaaatttcaaattatcacgataaacgccgaaaaaccctaaccacgaactcctctccgaattactacgaaccgccccaacgcaaacgaaaaaaacgaaaacccgaaatcatacaaaaaccaaactaacaaaaactcgaaccgcaataaacacaaaaactaccccgtcccgcgtctcccgcaaccgaattatacccgaaaatctcccgaatctaaactaaacctaacgacgtaaaaaaaacaatacgacgaacgacgcttccgaaaaacgaaacctacgcgctactcttccccgcgaaacccgcgcaatccgcgcaaccctcatcgcaactaaacccgcgcgcaaataaacccgaaacgaaatcgcgaaaaaccgaaaaacgcgacgaaactccgtaaaataaacgacgaaacgcgaccgacctaaaccccaaaatcccgaccccaccgaaaaccgcaaaaatacgcgccgcctccgatccgaccttaccctactaacgacacatccgcttcccttcttcacctttctaacacccgcaacacgcaaacgacataaaaaaaccctccgaaaaaaatatcaccttttctatcgcaaaaaaactcgcgcgaaacgactcccctttcgcttacctcgctaaaaaaacctaacgctcaatacgttataa

SEQ ID NO: 32739 - DNA, 718 bp, Artificial Sequence
  chemically treated genomic DNA (Homo sapiens) CpG-island No: 32739
ttaaatgggcggaatagggtgtttttttttttttttttttcgtttagaataaaatttaggttttaggttgttacggtgggcgtcgggggattttggttacgggttttttttcgagttgttgcggatcgttttaacgtaagcggagaggacgggagttcggagttatgtagaagttaggttggtaggggttcgggtcgtagtggatataggggttgtttcgtttcgcgtttttcgtagtcggattgtgttcgagagtttttcgggtttggattgggtttggcggcgtgggaggggtagtgcggcgggcggcgttttcggagagcggggtttgcgcgttgttttttttcgcggagttcgcgtagttcgcgtagtttttatcgtaattgggttcgcgcgtaggtgagttcggggcggggtcgcgggggatcgggaggcgcggcggggtttcgtggggtgggcgacggagcgcggtcggtttgggttttagagtttcggttttatcgagagtcgtaggggtgcgcgtcgttttcggttcggttttgttttgttggcggtatattcgttttttttttttatttttttggtattcgtaatacgtaagcggtatgaaagggtttttcgaggagaatgttattttttttgtcgtaaagaagttcgcgcggggcggtttttttttcgtttgtttcgttggaagagtttggcgtttagtgcgttgtgg

SEQ ID NO: 32740 - DNA, 718 bp, Artificial Sequence
  chemically treated genomic DNA (Homo sapiens) CpG-island No: 32740
ccacaacgcactaaacgccaaactcttccaacgaaacaaacgaaaaaaaaaccgccccgcgcgaacttctttacgacaaaaaaaataacattctcctcgaaaaaccctttcataccgcttacgtattacgaataccaaaaaaataaaaaaaaaaaacgaatataccgccaacaaaacaaaaccgaaccgaaaacgacgcgcacccctacgactctcgataaaaccgaaactctaaaacccaaaccgaccgcgctccgtcgcccaccccacgaaaccccgccgcgcctcccgatcccccgcgaccccgccccgaactcacctacgcgcgaacccaattacgataaaaactacgcgaactacgcgaactccgcgaaaaaaaacaacgcgcaaaccccgctctccgaaaacgccgcccgccgcactacccctcccacgccgccaaacccaatccaaacccgaaaaactctcgaacacaatccgactacgaaaaacgcgaaacgaaacaacccctatatccactacgacccgaacccctaccaacctaacttctacataactccgaactcccgtcctctccgcttacgttaaaacgatccgcaacaactcgaaaaaaaacccgtaaccaaaatcccccgacgcccaccgtaacaacctaaaacctaaattttattctaaacgaaaaaaaaaaaaaaaaaaacaccctattccgcccatttaa

SEQ ID NO: 32741 - DNA, 511 bp, Artificial Sequence
  chemically treated genomic DNA (Homo sapiens) CpG-island No: 32741
gttttcgaggtttttttaataaacgcgtattttagtttcgattcggtatagaacgattcggggaattatcgtcgaggtcgagtcgagacgagagatattattataagtaatttattttttatttcgggttttataaaggggacgaatttttttggttagttcggagtcgcgtatgagtaagaaggagcggagttaggcgtgttgtttttatttcgttcggaattataatttttagaagcgttttggtatcgttagatttcggtttttcgtaggtgggagtatttatggtgaggttgggagaatcggtcgatcgaagagtttcgttcgtttcgcgagagtatgaggtagtattttttgtgtttaatttttagggtaagggagggagggagtagcggagacgcggatcggagttagggttcgttttcgcgttttgtttgtataagtttttgtggtatagtgtttagggttgttgagtttaatttaaattatttcggtgtaagatacgttaaaa

SEQ ID NO: 32742 - DNA, 511 bp, Artificial Sequence
  chemically treated genomic DNA (Homo sapiens) CpG-island No: 32742
ttttaacgtatcttacaccgaaataatttaaattaaactcaacaaccctaaacactataccacaaaaacttatacaaacaaaacgcgaaaacgaaccctaactccgatccgcgtctccgctactccctccctcccttaccctaaaaattaaacacaaaaaatactacctcatactctcgcgaaacgaacgaaactcttcgatcgaccgattctcccaacctcaccataaatactcccacctacgaaaaaccgaaatctaacgataccaaaacgcttctaaaaattataattccgaacgaaataaaaacaacacgcctaactccgctccttcttactcatacgcgactccgaactaaccaaaaaaattcgtcccctttataaaacccgaaataaaaaataaattacttataataatatctctcgtctcgactcgacctcgacgataattccccgaatcgttctataccgaatcgaaactaaaatacgcgtttattaaaaaaacctcgaaaac

SEQ ID NO: 32743 - DNA, 511 bp, Artificial Sequence
  chemically treated genomic DNA (Homo sapiens) CpG-island No: 32743
ttttaacgtattttatatcggagtaatttgggttgaatttagtagttttaagtattgtgttataggaatttgtgtagataaagcgcggggacggattttgatttcggttcgcgttttcgttgtttttttttttttttgttttgaggattagatataggagatgttgttttatattttcgcgagacggacggagtttttcgatcggtcgatttttttaattttattatgggtgtttttatttgcggagaatcggagtttggcgatgttaaggcgtttttgggaattgtagtttcgggcggaatgagagtagtacgtttggtttcgtttttttttatttatgcgcgatttcgagttggttaaagaagttcgttttttttgtgaggttcgggatgggaggtgagttgtttgtggtgatgtttttcgtttcggttcggtttcggcggtagtttttcgggtcgttttgtgtcgagtcggggttagagtgcgcgtttgttaaaggggtttcgagggt

SEQ ID NO: 32744 - DNA, 511 bp, Artificial Sequence
  chemically treated genomic DNA (Homo sapiens) CpG-island No: 32744
accctcgaaacccctttaacaaacgcgcactctaaccccgactcgacacaaaacgacccgaaaaactaccgccgaaaccgaaccgaaacgaaaaacatcaccacaaacaactcacctcccatcccgaacctcacaaaaaaaacgaacttctttaaccaactcgaaatcgcgcataaataaaaaaaaacgaaaccaaacgtactactctcattccgcccgaaactacaattcccaaaaacgccttaacatcgccaaactccgattctccgcaaataaaaacacccataataaaattaaaaaaatcgaccgatcgaaaaactccgtccgtctcgcgaaaatataaaacaacatctcctatatctaatcctcaaaacaaaaaaaaaaaaaaacaacgaaaacgcgaaccgaaatcaaaatccgtccccgcgctttatctacacaaattcctataacacaatacttaaaactactaaattcaacccaaattactccgatataaaatacgttaaaa

SEQ ID NO: 32745 - DNA, 797 bp, Artificial Sequence
  chemically treated genomic DNA (Homo sapiens) CpG-island No: 32745
ttcgatggcgcgggtgattaggttcgcgtaggataggtttttttaggcgtttcgtcgcgacgaatattttttcggttgttcggagtttttagtcgttttcggttgcggcggtggtagcggttgttgaggttgtagtagcgtttgtgtattttcgtttagttcgttcgtcgcggtggttggtttagattcggggttttgtttttcgggtgttagtattcggatcgagtttttaaggagtagttcggagattagcgtgcggttttcgtcgtcgtcgtcgatcgttatggtcgagtcggttcgtttttcgtcgttttcgtcgtttttatcgttttttttttcggggattatggagtcggcggtcgtttttttcgagggtttggtagggttcgtttggagtttcggtttttgtaggggttacgtataggatcgcggacggttttggggttcgaatttcgggtttagttttatttcgagcggagaaagcggggtcggggaagtcggtgtttttgttattttcgtcgttcgttcggtcgcggttggggttttcgcgtttttttttcgcgtcggggcggggtgtagcgggggagggacgtggacgtcgcgaaggtttcggttttcgggcgtcgtcgtcgtcgtcgtcgtttggggaagtacgagagaagagagaaggagagttggttattttcggtcggagtttcgttttcggcgagttttcgttcgttgtcgttattttttagttttgtcgcgttcgttttttaggaataggagattatattttttaataatattttttgttt

SEQ ID NO: 32746 - DNA, 797 bp, Artificial Sequence
  chemically treated genomic DNA (Homo sapiens) CpG-island No: 32746
aaacaaaaaatattattaaaaaatataatctcctattcctaaaaaacgaacgcgacaaaactaaaaaataacgacaacgaacgaaaactcgccgaaaacgaaactccgaccgaaaataaccaactctccttctctcttctctcgtacttccccaaacgacgacgacgacgacgacgcccgaaaaccgaaaccttcgcgacgtccacgtccctcccccgctacaccccgccccgacgcgaaaaaaaaacgcgaaaaccccaaccgcgaccgaacgaacgacgaaaataacaaaaacaccgacttccccgaccccgctttctccgctcgaaataaaactaaacccgaaattcgaaccccaaaaccgtccgcgatcctatacgtaacccctacaaaaaccgaaactccaaacgaaccctaccaaaccctcgaaaaaaacgaccgccgactccataatccccgaaaaaaaaaacgataaaaacgacgaaaacgacgaaaaacgaaccgactcgaccataacgatcgacgacgacgacgaaaaccgcacgctaatctccgaactactccttaaaaactcgatccgaatactaacacccgaaaaacaaaaccccgaatctaaaccaaccaccgcgacgaacgaactaaacgaaaatacacaaacgctactacaacctcaacaaccgctaccaccgccgcaaccgaaaacgactaaaaactccgaacaaccgaaaaaatattcgtcgcgacgaaacgcctaaaaaaacctatcctacgcgaacctaatcacccgcgccatcgaa

SEQ ID NO: 32747 - DNA, 797 bp, Artificial Sequence
  chemically treated genomic DNA (Homo sapiens) CpG-island No: 32747
aaataaaaagtgttattaagaagtatggttttttgtttttgggaggcgggcgcggtaagattgggaggtggcggtagcgggcgaggattcgtcgaggacggggtttcggtcggggataattaatttttttttttttttttttcgtgtttttttaggcggcggcggcggcggcggcgttcgggagtcggagttttcgcggcgtttacgtttttttttcgttgtatttcgtttcggcgcgagaggagagcgcgagaattttagtcgcggtcgggcgggcggcgaagatggtagaggtatcggttttttcggtttcgtttttttcgttcgaagtggagttggattcggagttcgagttttagagtcgttcgcgattttgtacgtggtttttgtaaaggtcggagttttaagcgagttttgttaagttttcgggggagacggtcgtcgattttatgattttcgaggaggaggacgatgaagacgacgaggacggcgggggacgggtcggttcggttatggcgatcggcggcggcggcgggagtcgtacgttggttttcgggttgttttttgaggattcggttcgggtgttggtattcggagggtaagatttcgggtttgggttagttatcgcggcgggcgggttgagcgggggtatataggcgttgttgtagttttagtaatcgttgttatcgtcgtagtcgggggcggttgggggtttcgggtagtcgaggaaatgttcgtcgcggcggaacgtttggggaaatttgttttacgcggatttgattattcgcgttatcgag

SEQ ID NO: 32748 - DNA, 797 bp, Artificial Sequence
  chemically treated genomic DNA (Homo sapiens) CpG-island No: 32748
ctcgataacgcgaataatcaaatccgcgtaaaacaaatttccccaaacgttccgccgcgacgaacatttcctcgactacccgaaacccccaaccgcccccgactacgacgataacaacgattactaaaactacaacaacgcctatatacccccgctcaacccgcccgccgcgataactaacccaaacccgaaatcttaccctccgaataccaacacccgaaccgaatcctcaaaaaacaacccgaaaaccaacgtacgactcccgccgccgccgccgatcgccataaccgaaccgacccgtcccccgccgtcctcgtcgtcttcatcgtcctcctcctcgaaaatcataaaatcgacgaccgtctcccccgaaaacttaacaaaactcgcttaaaactccgacctttacaaaaaccacgtacaaaatcgcgaacgactctaaaactcgaactccgaatccaactccacttcgaacgaaaaaaacgaaaccgaaaaaaccgatacctctaccatcttcgccgcccgcccgaccgcgactaaaattctcgcgctctcctctcgcgccgaaacgaaatacaacgaaaaaaaaacgtaaacgccgcgaaaactccgactcccgaacgccgccgccgccgccgccgcctaaaaaaacacgaaaaaaaaaaaaaaaaaaattaattatccccgaccgaaaccccgtcctcgacgaatcctcgcccgctaccgccacctcccaatcttaccgcgcccgcctcccaaaaacaaaaaaccatacttcttaataacactttttattt

SEQ ID NO: 32749 - DNA, 688 bp, Artificial Sequence
  chemically treated genomic DNA (Homo sapiens) CpG-island No: 32749
tttgttgttacggtacgcgaatcgattttacgtagcgatggttacgagttgtttaagatcggttcgcgcgtttaggttcgcgttggtcgttttttcggttttagcgtcgggtgtttcgttttttaaggtcggcggcggtatggcggttaggtagatttgggtacggacgggtgtcgcgttttgtaggtaatttttcgtcgtttcgtcgttagtatttttttgggtaagagttgggtttcgatagtagtttagtttaattttttgttttgttaacgagggaaattgcggcggtttcgcgtttagtacgttcggtaggtcggagagagcggcgaggttttcggtgagcgaagagttaatcgcggcggagcgatagatcgcggagttgtacgttgtcgtttgcgcggtgagatttttttttgttcgtttcgtttcgtcgcggtcgtttcgggttcggcgcgtttgcgtatttcgggttttttcggattcggaggtcgttcggtagaggtaaaggttgttggatatcggtgcggttttgtttcgggcgatattcgcgtacgtatacgaatttttagtttcgatattttcgcgggaaatttgtgtttgttttgagtatgagtgtgatttgtttttcgattagcgttcgagttaaatttcggtcgtagtgtgggatttattattatttttttgt

SEQ ID NO: 32750 - DNA, 688 bp, Artificial Sequence
  chemically treated genomic DNA (Homo sapiens) CpG-island No: 32750
acaaaaaaataataataaatcccacactacgaccgaaatttaactcgaacgctaatcgaaaaacaaatcacactcatactcaaaacaaacacaaatttcccgcgaaaatatcgaaactaaaaattcgtatacgtacgcgaatatcgcccgaaacaaaaccgcaccgatatccaacaacctttacctctaccgaacgacctccgaatccgaaaaaacccgaaatacgcaaacgcgccgaacccgaaacgaccgcgacgaaacgaaacgaacaaaaaaaaatctcaccgcgcaaacgacaacgtacaactccgcgatctatcgctccgccgcgattaactcttcgctcaccgaaaacctcgccgctctctccgacctaccgaacgtactaaacgcgaaaccgccgcaatttccctcgttaacaaaacaaaaaattaaactaaactactatcgaaacccaactcttacccaaaaaaatactaacgacgaaacgacgaaaaattacctacaaaacgcgacacccgtccgtacccaaatctacctaaccgccataccgccgccgaccttaaaaaacgaaacacccgacgctaaaaccgaaaaaacgaccaacgcgaacctaaacgcgcgaaccgatcttaaacaactcgtaaccatcgctacgtaaaatcgattcgcgtaccgtaacaacaaa

SEQ ID NO: 32751 - DNA, 688 bp, Artificial Sequence
  chemically treated genomic DNA (Homo sapiens) CpG-island No: 32751
ataaaagagtggtagtgggttttatattgcgatcggagtttagttcggacgttgatcggaaaataaattatatttatatttaagatagatataggtttttcgcgaaaatgtcggggttggaagttcgtgtgcgtgcgcgaatgtcgttcgaggtaggatcgtatcggtatttagtaatttttgtttttgtcgggcggttttcgggttcggagaggttcgggatgcgtaggcgcgtcgagttcggggcggtcgcggcggggcggggcgggtaggagggagttttatcgcgtaggcggtagcgtgtagtttcgcgatttgtcgtttcgtcgcggttaatttttcgtttatcgaaggtttcgtcgtttttttcggtttatcgggcgtgttgggcgcggagtcgtcgtagtttttttcgttagtagggtagagggttaagttgagttgttgtcggaatttagtttttatttagagaggtgttggcggcggggcggcggaaggttgtttgtagagcgcggtattcgttcgtgtttagatttgtttggtcgttatgtcgtcgtcggttttgggaggcggagtattcggcgttggggtcggaggggcgattaacgcgggtttgggcgcgcgagtcggttttgggtagttcgtggttatcgttgcgtggggtcggttcgcgtgtcgtggtagtagg

SEQ ID NO: 32752 - DNA, 688 bp, Artificial Sequence
  chemically treated genomic DNA (Homo sapiens) CpG-island No: 32752
cctactaccacgacacgcgaaccgaccccacgcaacgataaccacgaactacccaaaaccgactcgcgcgcccaaacccgcgttaatcgcccctccgaccccaacgccgaatactccgcctcccaaaaccgacgacgacataacgaccaaacaaatctaaacacgaacgaataccgcgctctacaaacaaccttccgccgccccgccgccaacacctctctaaataaaaactaaattccgacaacaactcaacttaaccctctaccctactaacgaaaaaaactacgacgactccgcgcccaacacgcccgataaaccgaaaaaaacgacgaaaccttcgataaacgaaaaattaaccgcgacgaaacgacaaatcgcgaaactacacgctaccgcctacgcgataaaactccctcctacccgccccgccccgccgcgaccgccccgaactcgacgcgcctacgcatcccgaacctctccgaacccgaaaaccgcccgacaaaaacaaaaattactaaataccgatacgatcctacctcgaacgacattcgcgcacgcacacgaacttccaaccccgacattttcgcgaaaaacctatatctatcttaaatataaatataatttattttccgatcaacgtccgaactaaactccgatcgcaatataaaacccactaccactcttttat

SEQ ID NO: 32753 - DNA, 1047 bp, Artificial Sequence
  chemically treated genomic DNA (Homo sapiens) CpG-island No: 32753
ttacgttagatagcgtaatagtttgatttagcgtgattttgtaggtcggataaggcgtttatgtcgtattcgatattaacgtttgatgcgacgtttaacgcgttttattaggtttacgttagatagcgtaatagtttgatttagcgtgattttgtaggtcggataaggcgtttacgtcgtattcgatattaacgtttgatgcgacgtttgtcgcgttttattaggtttacgttagatagcgtaatagtttgatttagcgtgattttgtaggtcggataaggcgtttatgtcgtattcgatattaacgtttgatgcgacgtttaacgcgttttattaggtttacgttagatagcgtaatagtttgatttagcgtgattttgtaggtcggataaggcgttcgcgtcgtattcgatattaatgtttgatgcgacgtttgtcgcgttttattaggtttataattattgtcgatttgtaggtttgataaggtatttgtgtcgtattcggtaattaatgtttgatgcgacgttgtcgcgttttattaggtttataattgttgtcgatttgtaggtcggataaggtatttgtgtcgtattcggtaattaatgtttgatgcgacgttgtcgcgttttattaggtttataattattgtcgatttgtaggtcggataaggtatttgtgtcgtattcggtaattaatgtttgatgcgacgttgtcgcgttttattaggtttataattgttgtcgattcgtaggtcggataaggcgttcgcgtcgtattcggcgttgttgttaaattttagtgtcgtaataatgtcggatgcgatgtttgcgtattttattcgatttatagtgatttaaacgatgtttaatcgtaggtcggataaggcgttcgcgtcgtattcggtattgttgttaaattttagtgtcgtaataatgtcggatgcgatatttgcgtattttatttcgatcgatagtgatttaaacgatgtttaattgtaggtcggataaagcgttcgcgtcggaatttcgggggtaattttggttttgg

SEQ ID NO: 32754 - DNA, 1047 bp, Artificial Sequence
  chemically treated genomic DNA (Homo sapiens) CpG-island No: 32754
ccaaaaccaaaattacccccgaaattccgacgcgaacgctttatccgacctacaattaaacatcgtttaaatcactatcgatcgaaataaaatacgcaaatatcgcatccgacattattacgacactaaaatttaacaacaataccgaatacgacgcgaacgccttatccgacctacgattaaacatcgtttaaatcactataaatcgaataaaatacgcaaacatcgcatccgacattattacgacactaaaatttaacaacaacgccgaatacgacgcgaacgccttatccgacctacgaatcgacaacaattataaacctaataaaacgcgacaacgtcgcatcaaacattaattaccgaatacgacacaaataccttatccgacctacaaatcgacaataattataaacctaataaaacgcgacaacgtcgcatcaaacattaattaccgaatacgacacaaataccttatccgacctacaaatcgacaacaattataaacctaataaaacgcgacaacgtcgcatcaaacattaattaccgaatacgacacaaataccttatcaaacctacaaatcgacaataattataaacctaataaaacgcgacaaacgtcgcatcaaacattaatatcgaatacgacgcgaacgccttatccgacctacaaaatcacgctaaatcaaactattacgctatctaacgtaaacctaataaaacgcgttaaacgtcgcatcaaacgttaatatcgaatacgacataaacgccttatccgacctacaaaatcacgctaaatcaaactattacgctatctaacgtaaacctaataaaacgcgacaaacgtcgcatcaaacgttaatatcgaatacgacgtaaacgccttatccgacctacaaaatcacgctaaatcaaactattacgctatctaacgtaaacctaataaaacgcgttaaacgtcgcatcaaacgttaatatcgaatacgacataaacgccttatccgacctacaaaatcacgctaaatcaaactattacgctatctaacgtaa

SEQ ID NO: 32755 - DNA, 1047 bp, Artificial Sequence
  chemically treated genomic DNA (Homo sapiens) CpG-island No: 32755
ttaaaattaaagttgttttcgggatttcggcgcgagcgttttattcggtttatagttgggtatcgtttgagttattgtcggtcggaataagatgcgtaagtatcgtattcgatattattgcggtattggagtttggtaatagtgtcggatgcggcgcgagcgttttattcggtttacggttgggtatcgtttgagttattgtaggtcggataagatgcgtaagtatcgtattcgatattattgcggtattggagtttggtaatagcgtcggatgcggcgcgagcgttttattcggtttacgggtcggtaatagttgtaggtttgataagacgcgatagcgtcgtattaggtattgattgtcggatgcggtataagtgttttattcggtttataggtcggtaatagttgtaggtttgataagacgcgatagcgtcgtattaggtattgattgtcggatgcggtataagtgttttattcggtttataggtcggtaatagttgtaggtttgataagacgcgatagcgtcgtattaggtattgattgtcggatgcggtataagtgttttattaggtttataggtcggtaatagttgtaggtttgataagacgcggtaagcgtcgtattaggtattgatgtcggatgcggcgcgagcgttttattcggtttataaaattacgttaaattaggttattgcgttgtttggcgtaggtttgataagacgcgttaagcgtcgtattaggcgttgatgtcggatgcggtataaacgttttattcgatttataaaattacgttaaattaggttattgcgttgtttggcgtaggtttgataagacgcggtaagcgtcgtattaggcgttgatgtcggatgcggcgtaaacgttttattcgatttataaaattacgttaaattaggttattgcgttgtttggcgtaggtttgataagacgcgttaagcgtcgtattaggcgttgatgtcggatgcggtataaacgttttattcgatttataaaattacgttaaattaggttattgcgttgtttggcgtag

SEQ ID NO: 32756 - DNA, 1047 bp, Artificial Sequence
  chemically treated genomic DNA (Homo sapiens) CpG-island No: 32756
ctacgccaaacaacgcaataacctaatttaacgtaattttataaatcgaataaaacgtttataccgcatccgacatcaacgcctaatacgacgcttaacgcgtcttatcaaacctacgccaaacaacgcaataacctaatttaacgtaattttataaatcgaataaaacgtttacgccgcatccgacatcaacgcctaatacgacgcttaccgcgtcttatcaaacctacgccaaacaacgcaataacctaatttaacgtaattttataaatcgaataaaacgtttataccgcatccgacatcaacgcctaatacgacgcttaacgcgtcttatcaaacctacgccaaacaacgcaataacctaatttaacgtaattttataaaccgaataaaacgctcgcgccgcatccgacatcaatacctaatacgacgcttaccgcgtcttatcaaacctacaactattaccgacctataaacctaataaaacacttataccgcatccgacaatcaatacctaatacgacgctatcgcgtcttatcaaacctacaactattaccgacctataaaccgaataaaacacttataccgcatccgacaatcaatacctaatacgacgctatcgcgtcttatcaaacctacaactattaccgacctataaaccgaataaaacacttataccgcatccgacaatcaatacctaatacgacgctatcgcgtcttatcaaacctacaactattaccgacccgtaaaccgaataaaacgctcgcgccgcatccgacgctattaccaaactccaataccgcaataatatcgaatacgatacttacgcatcttatccgacctacaataactcaaacgatacccaaccgtaaaccgaataaaacgctcgcgccgcatccgacactattaccaaactccaataccgcaataatatcgaatacgatacttacgcatcttattccgaccgacaataactcaaacgatacccaactataaaccgaataaaacgctcgcgccgaaatcccgaaaacaactttaattttaa

SEQ ID NO: 32757 - DNA, 1591 bp, Artificial Sequence
  chemically treated genomic DNA (Homo sapiens) CpG-island No: 32757
gaaattcgttatcgttacgatagcgacgggcgggtgatagaatagttaaattcggtaggtttaagttatacgtattagtatgagaaagatcgtattattattatcgatagtttggatcgtcgtgaagtgttgtatacgtagggcgaagtcgggttgaagcgggtggtgaaaaaggaatacgcggacggtagcgttacgtagagttagtttgacgtcgtgggtaggtttagggtatagacggatgtcgtaggtaggataatagagtatagttcggatgtggtgacgggttttattacgcgtataattacgtcggatggtagggtatcggcgttttattataattattataattagttaacgttagttatcgggtttgacgggttggaattgcgtcgggaatatgatgaattgggtcgtttgatttaggaaattgtttttgacggcgatattattcgttatcgttatgatatttatatagtgatttattttgcgtaacggaagatgttatcggtagtcggaaaattatgacgtggagtcgttacggttagttgttgagttttatcgattgtttcggttatgtaattcgttatgattatgatcgtttcgggtagatgacggcggtgtatcgcgaggaagggttgagttagtatcgcgtatacgatagtcgtggatagttaattgtcgtgaaagatacgtagggttatgaaacgcggtatgaatataatatcgtcggtgatttgatcgtcgttattgtttcggacggtagtagaaacgggatatagtacgatgcgtggggaaaggtcgttcgtattacgtagggcgggttgacgcgtagtatggaatacgatgttgtcggacgggttattcgtttgattagtgaaaacggtagttatattatttttcgttacgatgtatttgatcggttgatataggaaatcggttttgacggtcgtatatagcgttattattacgatttgatcggtaaatttattcgtagcgaggatgagggtttggttatttattggtattatgacgaagtagatcgttttacgtatcgtatcgtgaagggtgaaatcgtagagcggtggtagtatgacgaacgtggttggttgatagatattagttatattagcgaagggtatcgggtggcggtgtattataggtatgatgagaaaggtcggttgatcggtgagcgttagacggtgtattattcgtagacggaagtattgttttggtagtatgagattagatatgcgtataacgcgtaggggttggcgaatcgttgtatatcggatagtttgttcgtcgtggaatggttgatttacggtagcggttatttggtaggtatgaaattcggcgatatatcgttggtggagtatattcgcgatcgtttgtatcgggaaacgttgcgtagtttcggtcgttatgaatttattatcgtttatatttttgtcgggtagttatagagttagtatttgaatagtttgttgtttgatcgcgattatatttgtgaacgataacggcgaatttattcgtatttagaagtcgcgttagaattcgagtattagtaaagattatcgggagggtagtt

SEQ ID NO: 32758 - DNA, 1591 bp, Artificial Sequence
  chemically treated genomic DNA (Homo sapiens) CpG-island No: 32758
aactaccctcccgataatctttactaatactcgaattctaacgcgacttctaaatacgaataaattcgccgttatcgttcacaaatataatcgcgatcaaacaacaaactattcaaatactaactctataactacccgacaaaaatataaacgataataaattcataacgaccgaaactacgcaacgtttcccgatacaaacgatcgcgaatatactccaccaacgatatatcgccgaatttcatacctaccaaataaccgctaccgtaaatcaaccattccacgacgaacaaactatccgatatacaacgattcgccaacccctacgcgttatacgcatatctaatctcatactaccaaaacaatacttccgtctacgaataatacaccgtctaacgctcaccgatcaaccgacctttctcatcatacctataatacaccgccacccgatacccttcgctaatataactaatatctatcaaccaaccacgttcgtcatactaccaccgctctacgatttcacccttcacgatacgatacgtaaaacgatctacttcgtcataataccaataaataaccaaaccctcatcctcgctacgaataaatttaccgatcaaatcgtaataataacgctatatacgaccgtcaaaaccgatttcctatatcaaccgatcaaatacatcgtaacgaaaaataatataactaccgttttcactaatcaaacgaataacccgtccgacaacatcgtattccatactacgcgtcaacccgccctacgtaatacgaacgacctttccccacgcatcgtactatatcccgtttctactaccgtccgaaacaataacgacgatcaaatcaccgacgatattatattcataccgcgtttcataaccctacgtatctttcacgacaattaactatccacgactatcgtatacgcgatactaactcaacccttcctcgcgatacaccgccgtcatctacccgaaacgatcataatcataacgaattacataaccgaaacaatcgataaaactcaacaactaaccgtaacgactccacgtcataattttccgactaccgataacatcttccgttacgcaaaataaatcactatataaatatcataacgataacgaataatatcgccgtcaaaaacaatttcctaaatcaaacgacccaattcatcatattcccgacgcaattccaacccgtcaaacccgataactaacgttaactaattataataattataataaaacgccgataccctaccatccgacgtaattatacgcgtaataaaacccgtcaccacatccgaactatactctattatcctacctacgacatccgtctataccctaaacctacccacgacgtcaaactaactctacgtaacgctaccgtccgcgtattcctttttcaccacccgcttcaacccgacttcgccctacgtatacaacacttcacgacgatccaaactatcgataataataatacgatctttctcatactaatacgtataacttaaacctaccgaatttaactattctatcacccgcccgtcgctatcgtaacgataacgaatttc

SEQ ID NO: 32759 - DNA, 1591 bp, Artificial Sequence
  chemically treated genomic DNA (Homo sapiens) CpG-island No: 32759
ggttattttttcggtggtttttattgatattcgggttttggcgcggtttttagatgcgaatgagttcgtcgttgtcgtttataggtgtaatcgcggttagatagtaggttgtttaggtgttggttttgtaattgttcggtaggggtataagcggtggtgagtttataacggtcgaagttgcgtagcgtttttcggtgtaggcggtcgcgggtgtattttattagcggtgtgtcgtcgagttttatgtttgttaggtaatcgttgtcgtaggttagttattttacggcgggtaggttgttcggtatatagcggttcgttagtttttgcgcgttgtacgtatgtttggttttatgttgttagagtagtgttttcgtttgcgggtgatgtatcgtttgacgtttatcggttagtcggttttttttattatatttgtaatgtatcgttattcggtgtttttcgttgatatggttgatgtttgttagttagttacgttcgttatattgttatcgttttgcggttttattttttacggtgcggtgcgtgaggcggtttgtttcgttatagtgttagtgggtgattagatttttattttcgttgcggataagtttgtcggttaggtcgtggtgataacgttgtgtgcggtcgttaaagtcggttttttgtattagtcggttaagtatatcgtaacggaaggtggtgtggttgtcgtttttattggttaggcggatgattcgttcggtagtatcgtattttatattgcgcgttagttcgttttgcgtggtacggacggtttttttttacgtatcgtattgtgtttcgtttttgttgtcgttcggggtaatgacggcggttaggttatcggcgatgttgtatttatatcgcgttttatggttttgcgtgttttttacggtaattaattgtttacggttgtcgtatgcgcggtattgatttagttttttttcgcggtgtatcgtcgttatttgttcgaagcggttatggttataacgggttatataatcggaatagtcggtgaagtttagtaattgatcgtaacggttttacgttatggtttttcggttgtcggtggtatttttcgttgcgtagggtaagttattgtgtggatattataacggtagcgggtgatatcgtcgttaggggtagttttttgaattagacggtttaatttattatattttcggcgtaattttagttcgttaggttcggtggttgacgttaattggttgtggtggttatagtaaaacgtcgatgttttgttattcggcgtggttatgcgcgtgatgaggttcgttattatattcgggttgtattttgttgttttgtttgcggtattcgtttgtgttttgagtttgtttacggcgttaaattgattttgcgtgacgttgtcgttcgcgtgttttttttttattattcgttttagttcggtttcgttttgcgtgtgtagtattttacggcggtttaggttgtcggtgatggtgatgcggttttttttatattgatacgtgtagtttaagtttgtcgggtttagttgttttgttattcgttcgtcgttgtcgtaacggtaacggatttt

SEQ ID NO: 32760 - DNA, 1591 bp, Artificial Sequence
  chemically treated genomic DNA (Homo sapiens) CpG-island No: 32760
aaaatccgttaccgttacgacaacgacgaacgaataacaaaacaactaaacccgacaaacttaaactacacgtatcaatataaaaaaaaccgcatcaccatcaccgacaacctaaaccgccgtaaaatactacacacgcaaaacgaaaccgaactaaaacgaataataaaaaaaaaacacgcgaacgacaacgtcacgcaaaatcaatttaacgccgtaaacaaactcaaaacacaaacgaataccgcaaacaaaacaacaaaatacaacccgaatataataacgaacctcatcacgcgcataaccacgccgaataacaaaacatcgacgttttactataaccaccacaaccaattaacgtcaaccaccgaacctaacgaactaaaattacgccgaaaatataataaattaaaccgtctaattcaaaaaactacccctaacgacgatatcacccgctaccgttataatatccacacaataacttaccctacgcaacgaaaaataccaccgacaaccgaaaaaccataacgtaaaaccgttacgatcaattactaaacttcaccgactattccgattatataacccgttataaccataaccgcttcgaacaaataacgacgatacaccgcgaaaaaaaactaaatcaataccgcgcatacgacaaccgtaaacaattaattaccgtaaaaaacacgcaaaaccataaaacgcgatataaatacaacatcgccgataacctaaccgccgtcattaccccgaacgacaacaaaaacgaaacacaatacgatacgtaaaaaaaaaccgtccgtaccacgcaaaacgaactaacgcgcaatataaaatacgatactaccgaacgaatcatccgcctaaccaataaaaacgacaaccacaccaccttccgttacgatatacttaaccgactaatacaaaaaaccgactttaacgaccgcacacaacgttatcaccacgacctaaccgacaaacttatccgcaacgaaaataaaaatctaatcacccactaacactataacgaaacaaaccgcctcacgcaccgcaccgtaaaaaataaaaccgcaaaacgataacaatataacgaacgtaactaactaacaaacatcaaccatatcaacgaaaaacaccgaataacgatacattacaaatataataaaaaaaaccgactaaccgataaacgtcaaacgatacatcacccgcaaacgaaaacactactctaacaacataaaaccaaacatacgtacaacgcgcaaaaactaacgaaccgctatataccgaacaacctacccgccgtaaaataactaacctacgacaacgattacctaacaaacataaaactcgacgacacaccgctaataaaatacacccgcgaccgcctacaccgaaaaacgctacgcaacttcgaccgttataaactcaccaccgcttatacccctaccgaacaattacaaaaccaacacctaaacaacctactatctaaccgcgattacacctataaacgacaacgacgaactcattcgcatctaaaaaccgcgccaaaacccgaatatcaataaaaaccaccgaaaaaataacc

SEQ ID NO: 32761 - DNA, 932 bp, Artificial Sequence
  chemically treated genomic DNA (Homo sapiens) CpG-island No: 32761
cgggtcggtttattagtagttgaagattttttttaatgttgagggtaaaaagaggattggagatcgcgttcgaacgaatcggttttcggtatcgcgtttttattttatttttggttattatatttatatattttcgcgttcgtttcgcgcgtttttattatttcgttatttttttaaatatgatacgggttttttttttagttaaaggtcgtatttttttttttgggttggaatatcggattttcgtgttttggtaattggaaacggaagtcggtcgttcgttgtttttcggtaattttaaagtttttttttttagtttcgtattaatagttcgtttcgttagcgtttaatagtttggacgatcgtaggggaaagtaagtcggtcggatgagaaagtatagagatcggaaatgtgtttgtttttttttgttttaagttcggagttagcgttttttgtggttcggaagggaagtgacgttgttgttgggaagatggcgatcgcggcgattattttatcggtagttacggttatagtagcggttttcggcgaggtggaggatgaagggtttttggcgtcgttgtttcgggatcgttttttcgaggtttagtggcgcgagcggttcgatgtgggtcgttattttcgggagttgagcggttcggggttggagcggttgcggcgcgagttcgagcgtttggcggaggagcgggcgtagttgttgtagtagacgcgcgatttggttttcgttaattataagatttttattcgcggcgtcgagtgtatcgagcgtatttatcgtttgtttggcgacgtggaggcgtcgttcggtcgtttgttcgatcgtttgtttagtttttagtagagttgtaggtgcgacgcgtttggcgttaaaggggttttataattgtaaaagttgatatttacgatggtagaa

SEQ ID NO: 32762 - DNA, 932 bp, Artificial Sequence
  chemically treated genomic DNA (Homo sapiens) CpG-island No: 32762
ttctaccatcgtaaatatcaacttttacaattataaaacccctttaacgccaaacgcgtcgcacctacaactctactaaaaactaaacaaacgatcgaacaaacgaccgaacgacgcctccacgtcgccaaacaaacgataaatacgctcgatacactcgacgccgcgaataaaaatcttataattaacgaaaaccaaatcgcgcgtctactacaacaactacgcccgctcctccgccaaacgctcgaactcgcgccgcaaccgctccaaccccgaaccgctcaactcccgaaaataacgacccacatcgaaccgctcgcgccactaaacctcgaaaaaacgatcccgaaacaacgacgccaaaaacccttcatcctccacctcgccgaaaaccgctactataaccgtaactaccgataaaataatcgccgcgatcgccatcttcccaacaacaacgtcacttcccttccgaaccacaaaaaacgctaactccgaacttaaaacaaaaaaaaacaaacacatttccgatctctatactttctcatccgaccgacttactttcccctacgatcgtccaaactattaaacgctaacgaaacgaactattaatacgaaactaaaaaaaaaaactttaaaattaccgaaaaacaacgaacgaccgacttccgtttccaattaccaaaacacgaaaatccgatattccaacccaaaaaaaaaaatacgacctttaactaaaaaaaaaacccgtatcatatttaaaaaaataacgaaataataaaaacgcgcgaaacgaacgcgaaaatatataaatataataaccaaaaataaaataaaaacgcgataccgaaaaccgattcgttcgaacgcgatctccaatcctctttttaccctcaacattaaaaaaaatcttcaactactaataaaccgacccg

SEQ ID NO: 32763 - DNA, 932 bp, Artificial Sequence
  chemically treated genomic DNA (Homo sapiens) CpG-island No: 32763
ttttattatcgtaaatgttagtttttatagttataaaatttttttagcgttaggcgcgtcgtatttgtagttttgttggaagttgggtaaacggtcgagtaggcggtcgagcgacgtttttacgtcgttaaataggcggtggatgcgttcggtgtattcggcgtcgcggatgaaggttttgtagttagcgaaggttaagtcgcgcgtttgttgtagtagttgcgttcgttttttcgttaggcgttcgggttcgcgtcgtagtcgttttagtttcgagtcgtttaattttcggaggtagcggtttatatcgggtcgttcgcgttattgggtttcggggaagcggtttcggaatagcgacgttaggagttttttattttttatttcgtcgagagtcgttgttgtggtcgtggttatcgatgggatagtcgtcgcggtcgttatttttttagtaataacgttatttttttttcggattataaggggcgttgatttcgaatttaggataggaagaaataggtatattttcggtttttatgtttttttattcggtcggtttgtttttttttgcggtcgtttagattattgggcgttagcgagacgaattattggtacggggttagagaggaaggttttgggattgtcggggagtagcgagcgatcgattttcgtttttagttattaaggtacgaggattcggtgttttaatttagggggaaaaatgcggtttttgattgaagaggagattcgtgttatgtttgagaagatagcgaaatagtaggagcgcgcggggcggacgcgggagtgtgtgggtgtggtggttaagggtggagtgggggcgcggtgtcggagatcggttcgttcgggcgcggtttttagttttttttttgtttttagtattggggagaatttttaattgttggtggatcggttcg

SEQ ID NO: 32764 - DNA, 932 bp, Artificial Sequence
  chemically treated genomic DNA (Homo sapiens) CpG-island No: 32764
cgaaccgatccaccaacaattaaaaattctccccaatactaaaaacaaaaaaaaaactaaaaaccgcgcccgaacgaaccgatctccgacaccgcgcccccactccacccttaaccaccacacccacacactcccgcgtccgccccgcgcgctcctactatttcgctatcttctcaaacataacacgaatctcctcttcaatcaaaaaccgcatttttccccctaaattaaaacaccgaatcctcgtaccttaataactaaaaacgaaaatcgatcgctcgctactccccgacaatcccaaaaccttcctctctaaccccgtaccaataattcgtctcgctaacgcccaataatctaaacgaccgcaaaaaaaaacaaaccgaccgaataaaaaaacataaaaaccgaaaatatacctatttcttcctatcctaaattcgaaatcaacgccccttataatccgaaaaaaaaataacgttattactaaaaaaataacgaccgcgacgactatcccatcgataaccacgaccacaacaacgactctcgacgaaataaaaaataaaaaactcctaacgtcgctattccgaaaccgcttccccgaaacccaataacgcgaacgacccgatataaaccgctacctccgaaaattaaacgactcgaaactaaaacgactacgacgcgaacccgaacgcctaacgaaaaaacgaacgcaactactacaacaaacgcgcgacttaaccttcgctaactacaaaaccttcatccgcgacgccgaatacaccgaacgcatccaccgcctatttaacgacgtaaaaacgtcgctcgaccgcctactcgaccgtttacccaacttccaacaaaactacaaatacgacgcgcctaacgctaaaaaaattttataactataaaaactaacatttacgataataaaa

SEQ ID NO: 32765 - DNA, 1108 bp, Artificial Sequence
  chemically treated genomic DNA (Homo sapiens) CpG-island No: 32765
gcgagcggagacgtaggtcgaatcgtttagcgtggggttttagtcggcgttttttgtttttagaacgcggtgcgtgaggttttcggcgcggggtggttaggattgtttcgttttggaaggttcggggcgggttcgggaggcgggaaggcgttttcgggaggagagcggaagggggcggtgtttattgttagtttaagtaggaaggcggggatttagtcgcggtttcgttgtgtgttggtcgacggcgtttttcggcgtgtttcgcgttgcggtcggaaggggcgggtcgggttattgttaagggggtcgttatggttcggttgtggggcgcgttgagtttttggttattgtgggcggtcgtgtcgtggggcggggcggtagtcgtcggtgttcgggtttgtagttttacggtcgtttcggacggcgtcgagggttcggcgttgcggcgtttttattggcgttatttgaggcgtttggtgttgggttttttcgaatcgtcgttttcgtacgtgtgttaagtcggggattcggtgttgcgcggcgtggcggtttcggtggagcgggcgtagttaggcgggttcgagttgtagcggttgacgtaacggttggtttaggtgatgcggcggcggcgttgcgtgggtttaagcgcgtcgtagttgggggtgtcgcggtaggtgttggcgttggagtttttcgaggcgttgtgtcgggagtgttcgtttcgttagcgcgcgtttcgttaaatggagtttttttttttgcgcgtgttcgtgaattttagtttgcgagtgtttgatagtcgtttggttatttttttcgagggttgcgagagcgtcgtcggttttttggtttgcgtgtttcgtttttaggcggtgtagattttaggtgcgggcggcggggatcggggttgttggagtagcgcgcgcgttttttttgttcgatttcgcgagagcgtagaagtggtcgcggtttatacgtcggatttttcgtaggagcgaagtgggatgcgggagcggagaggttttaggacggatagaagtttttgtggggtagagttcgtttagataggacgtaggggcgaggagaggttttttagtttcgttgttat

SEQ ID NO: 32766 - DNA, 1108 bp, Artificial Sequence
  chemically treated genomic DNA (Homo sapiens) CpG-island No: 32766
ataacaacgaaactaaaaaacctctcctcgcccctacgtcctatctaaacgaactctaccccacaaaaacttctatccgtcctaaaacctctccgctcccgcatcccacttcgctcctacgaaaaatccgacgtataaaccgcgaccacttctacgctctcgcgaaatcgaacaaaaaaaacgcgcgcgctactccaacaaccccgatccccgccgcccgcacctaaaatctacaccgcctaaaaacgaaacacgcaaaccaaaaaaccgacgacgctctcgcaaccctcgaaaaaaataaccaaacgactatcaaacactcgcaaactaaaattcacgaacacgcgcaaaaaaaaaaactccatttaacgaaacgcgcgctaacgaaacgaacactcccgacacaacgcctcgaaaaactccaacgccaacacctaccgcgacacccccaactacgacgcgcttaaacccacgcaacgccgccgccgcatcacctaaaccaaccgttacgtcaaccgctacaactcgaacccgcctaactacgcccgctccaccgaaaccgccacgccgcgcaacaccgaatccccgacttaacacacgtacgaaaacgacgattcgaaaaaacccaacaccaaacgcctcaaataacgccaataaaaacgccgcaacgccgaaccctcgacgccgtccgaaacgaccgtaaaactacaaacccgaacaccgacgactaccgccccgccccacgacacgaccgcccacaataaccaaaaactcaacgcgccccacaaccgaaccataacgacccccttaacaataacccgacccgccccttccgaccgcaacgcgaaacacgccgaaaaacgccgtcgaccaacacacaacgaaaccgcgactaaatccccgccttcctacttaaactaacaataaacaccgcccccttccgctctcctcccgaaaacgccttcccgcctcccgaacccgccccgaaccttccaaaacgaaacaatcctaaccaccccgcgccgaaaacctcacgcaccgcgttctaaaaacaaaaaacgccgactaaaaccccacgctaaacgattcgacctacgtctccgctcgc

SEQ ID NO: 32767 - DNA, 1108 bp, Artificial Sequence
  chemically treated genomic DNA (Homo sapiens) CpG-island No: 32767
gtaatagcggaattaggggattttttttcgtttttgcgttttatttgagcgggttttattttataggagtttttattcgttttgaggttttttcgttttcgtattttatttcgtttttgcgggaggttcggcgtatgaatcgcgattatttttgcgttttcgcggagtcgggtagaagagacgcgcgcgttgttttagtagtttcggttttcgtcgttcgtatttgagatttgtatcgtttggaagcggggtacgtaggttaggaagtcggcgacgttttcgtagttttcgggaaaggtgattaggcggttgttaagtattcgtaggttggggtttacgaatacgcgtagggggaagggttttatttggcggagcgcgcgttggcggggcgggtattttcgatatagcgtttcggggagttttagcgttagtatttgtcgcggtatttttagttgcggcgcgtttaggtttacgtagcgtcgtcgtcgtattatttggattagtcgttgcgttagtcgttgtagttcgggttcgtttagttgcgttcgttttatcggggtcgttacgtcgcgtagtatcgggttttcgatttggtatacgtgcgagaacggcggttcgggaggatttagtattagacgttttaggtggcgttaataggagcgtcgtagcgtcgggttttcgacgtcgttcggggcggtcgtggagttgtaagttcggatatcgacggttgtcgtttcgttttacggtacggtcgtttatagtggttaaagatttagcgcgttttatagtcgggttatggcggtttttttaatagtgattcggttcgtttttttcggtcgtagcgcggggtacgtcgggaagcgtcgtcggttagtatatagcgaagtcgcgattggattttcgtttttttgtttagattggtagtgagtatcgttttttttcgtttttttttcgggagcgttttttcgtttttcgaattcgtttcggattttttagggcgaggtagttttggttatttcgcgtcgggaattttacgtatcgcgttttggaggtaggggacgtcggttagggttttacgttgggcggttcggtttgcgttttcgttcgt

SEQ ID NO: 32768 - DNA, 1108 bp, Artificial Sequence
  chemically treated genomic DNA (Homo sapiens) CpG-island No: 32768
acgaacgaaaacgcaaaccgaaccgcccaacgtaaaaccctaaccgacgtcccctacctccaaaacgcgatacgtaaaattcccgacgcgaaataaccaaaactacctcgccctaaaaaatccgaaacgaattcgaaaaacgaaaaaacgctcccgaaaaaaaaacgaaaaaaaacgatactcactaccaatctaaacaaaaaaacgaaaatccaatcgcgacttcgctatatactaaccgacgacgcttcccgacgtaccccgcgctacgaccgaaaaaaacgaaccgaatcactattaaaaaaaccgccataacccgactataaaacgcgctaaatctttaaccactataaacgaccgtaccgtaaaacgaaacgacaaccgtcgatatccgaacttacaactccacgaccgccccgaacgacgtcgaaaacccgacgctacgacgctcctattaacgccacctaaaacgtctaatactaaatcctcccgaaccgccgttctcgcacgtataccaaatcgaaaacccgatactacgcgacgtaacgaccccgataaaacgaacgcaactaaacgaacccgaactacaacgactaacgcaacgactaatccaaataatacgacgacgacgctacgtaaacctaaacgcgccgcaactaaaaataccgcgacaaatactaacgctaaaactccccgaaacgctatatcgaaaatacccgccccgccaacgcgcgctccgccaaataaaacccttccccctacgcgtattcgtaaaccccaacctacgaatacttaacaaccgcctaatcacctttcccgaaaactacgaaaacgtcgccgacttcctaacctacgtaccccgcttccaaacgatacaaatctcaaatacgaacgacgaaaaccgaaactactaaaacaacgcgcgcgtctcttctacccgactccgcgaaaacgcaaaaataatcgcgattcatacgccgaacctcccgcaaaaacgaaataaaatacgaaaacgaaaaaacctcaaaacgaataaaaactcctataaaataaaacccgctcaaataaaacgcaaaaacgaaaaaaaatcccctaattccgctattac

SEQ ID NO: 32769 - DNA, 659 bp, Artificial Sequence
  chemically treated genomic DNA (Homo sapiens) CpG-island No: 32769
cgttttaatttttttttttcggttcggtttttatttttgtatgatgtttcggatttgtttgaagttttcgtatcggttatttcgaaaggttcgtagcgtttcgtggaagtagaatttgagtatttagcgattgattgttttttttagtcgtgtttttttcgcgtcgcgtttcgtcgggttttttagtttcggttcgtggcgttttcgtcgggttcgttcgtattgcgggatcgttttcgttttggtttaagtttttggttttcgttttgttgttcgtcgttattttcgttttttttcgttatcgtgttcgatcgtcgcgcgtttttttcgttttttcggtcggtcgttttttcggttgtgacgtcgttgggttacgtacgacgttcgggtcggaagcggggttcgtcgtttcggttttcgcggttatgatagaaatagcgtttcgagtcgttcgcgggtttttgggagggaaaggatcggagggttcggttttttttttagacgtcgtagttttcgatgtgtcggtcgtaatgttttttggggtttgaagtttatatcgtttaggtcggtgaattcggcgggttttgtagttaatttcgtttcgaatttatagaaaatagttattatgttagggacgcggaatagtgtattagagattg

SEQ ID NO: 32770 - DNA, 659 bp, Artificial Sequence
  chemically treated genomic DNA (Homo sapiens) CpG-island No: 32770
caatctctaatacactattccgcgtccctaacataataactattttctataaattcgaaacgaaattaactacaaaacccgccgaattcaccgacctaaacgatataaacttcaaaccccaaaaaacattacgaccgacacatcgaaaactacgacgtctaaaaaaaaaaccgaaccctccgatcctttccctcccaaaaacccgcgaacgactcgaaacgctatttctatcataaccgcgaaaaccgaaacgacgaaccccgcttccgacccgaacgtcgtacgtaacccaacgacgtcacaaccgaaaaaacgaccgaccgaaaaaacgaaaaaaacgcgcgacgatcgaacacgataacgaaaaaaaacgaaaataacgacgaacaacaaaacgaaaaccaaaaacttaaaccaaaacgaaaacgatcccgcaatacgaacgaacccgacgaaaacgccacgaaccgaaactaaaaaacccgacgaaacgcgacgcgaaaaaaacacgactaaaaaaaacaatcaatcgctaaatactcaaattctacttccacgaaacgctacgaacctttcgaaataaccgatacgaaaacttcaaacaaatccgaaacatcatacaaaaataaaaaccgaaccgaaaaaaaaaaattaaaacg

SEQ ID NO: 32771 - DNA, 659 bp, Artificial Sequence
  chemically treated genomic DNA (Homo sapiens) CpG-island No: 32771
tagtttttaatatattgtttcgcgtttttagtatagtagttgttttttgtaaattcggagcgaagttgattgtaaaattcgtcgggtttatcggtttgggcggtgtggattttaagttttaggaggtattgcggtcggtatatcgggaattacggcgtttgagaagggggtcgggtttttcggtttttttttttttagaagttcgcgggcggttcggaacgttgtttttattatggtcgcgggagtcgggacggcgggtttcgttttcggttcgggcgtcgtgcgtgatttagcggcgttatagtcgaggaagcggtcggtcgggagggcggggagggcgcgcggcgatcggatacgatggcgggaggaggcgggagtagcgacggatagtagggcgagggttaaaggtttaggttaggacgggggcgatttcgtagtacgggcgggttcggcgggggcgttacgagtcggggttggggggttcggcggagcgcggcgcgggggaggtacggttggaagaggtagttaatcgttgggtgtttaagttttatttttacgaggcgttgcgggtttttcggggtagtcggtacggggattttagatagattcgggatattatgtaggggtgagggtcgggtcgggggaggggggttggagcg

SEQ ID NO: 32772 - DNA, 659 bp, Artificial Sequence
  chemically treated genomic DNA (Homo sapiens) CpG-island No: 32772
cgctccaacccccctcccccgacccgaccctcacccctacataatatcccgaatctatctaaaatccccgtaccgactaccccgaaaaacccgcaacgcctcgtaaaaataaaacttaaacacccaacgattaactacctcttccaaccgtacctcccccgcgccgcgctccgccgaaccccccaaccccgactcgtaacgcccccgccgaacccgcccgtactacgaaatcgcccccgtcctaacctaaacctttaaccctcgccctactatccgtcgctactcccgcctcctcccgccatcgtatccgatcgccgcgcgccctccccgccctcccgaccgaccgcttcctcgactataacgccgctaaatcacgcacgacgcccgaaccgaaaacgaaacccgccgtcccgactcccgcgaccataataaaaacaacgttccgaaccgcccgcgaacttctaaaaaaaaaaaaaccgaaaaacccgacccccttctcaaacgccgtaattcccgatataccgaccgcaatacctcctaaaacttaaaatccacaccgcccaaaccgataaacccgacgaattttacaatcaacttcgctccgaatttacaaaaaacaactactatactaaaaacgcgaaacaatatattaaaaacta

SEQ ID NO: 32773 - DNA, 944 bp, Artificial Sequence
  chemically treated genomic DNA (Homo sapiens) CpG-island No: 32773
gtcgcggtcgtggacgggtcggaggcggcgtcgttcgcgtcgttgcgtgcggtgtggtgcgaggcgggtgcgtcgggcggtcgcggcgcggcgggattatggagtttagagcgtagtttcggcgtcggcggcgggatcgcggatcggtgagtgagggttgcggtcgtttcggtttttcgttgtaggttgttgtggttttttcggtttcgggtcgggcggttgtcgggggaggggcggttttacggcgaattgaagttgttgtatcgtcgcgcgtttcggtcgggcggcggggtttattgcgggttgcggcgtcgtttcgcgtttatttttgtagttcggtcgtattttttcggtcggttttcgcgttggtaggggtttttcgtcgttacggcgcggttaggcggtttttttttttcgcgttttcgggttttcggttttttgtcgttcggtgcgcgttttttggattcgggatagttattcgtttttttcgtcgtaagtggcgttcgggttttcgttcgcgttttacgtacgacgtttcgggtcgtttcgcgttcgggattttcgtattcgtttagtgtttgcgcgttttcgttggttttggtttagtttcgcgtgtttttcggttttattcggtttttttcgttttggtttgtgtttttttggtgttcgcgtgcgtgttggttgcgggcgttttttttttcgaggttgcggtgtcgcgtggttttcggtttcggagattaggtcggatttttggagtgtaggggaggaggtggggcggttcgcgagtgcgggggatcgcgcgtacggagtcgcggcgcgcggggtattattttcgggggtttttattcgcgcgtttgggttttagcgagggtagaagtttttttttagtttgtggtgttgacgtgtaatggcgattgttttttgatttggtttttttgtaaggg

SEQ ID NO: 32774 - DNA, 944 bp, Artificial Sequence
  chemically treated genomic DNA (Homo sapiens) CpG-island No: 32774
cccttacaaaaaaaccaaatcaaaaaacaatcgccattacacgtcaacaccacaaactaaaaaaaaacttctaccctcgctaaaacccaaacgcgcgaataaaaacccccgaaaataataccccgcgcgccgcgactccgtacgcgcgatcccccgcactcgcgaaccgccccacctcctcccctacactccaaaaatccgacctaatctccgaaaccgaaaaccacgcgacaccgcaacctcgaaaaaaaaaacgcccgcaaccaacacgcacgcgaacaccaaaaaaacacaaaccaaaacgaaaaaaaccgaataaaaccgaaaaacacgcgaaactaaaccaaaaccaacgaaaacgcgcaaacactaaacgaatacgaaaatcccgaacgcgaaacgacccgaaacgtcgtacgtaaaacgcgaacgaaaacccgaacgccacttacgacgaaaaaaacgaataactatcccgaatccaaaaaacgcgcaccgaacgacaaaaaaccgaaaacccgaaaacgcgaaaaaaaaaaaccgcctaaccgcgccgtaacgacgaaaaacccctaccaacgcgaaaaccgaccgaaaaaatacgaccgaactacaaaaataaacgcgaaacgacgccgcaacccgcaataaaccccgccgcccgaccgaaacgcgcgacgatacaacaacttcaattcgccgtaaaaccgcccctcccccgacaaccgcccgacccgaaaccgaaaaaaccacaacaacctacaacgaaaaaccgaaacgaccgcaaccctcactcaccgatccgcgatcccgccgccgacgccgaaactacgctctaaactccataatcccgccgcgccgcgaccgcccgacgcacccgcctcgcaccacaccgcacgcaacgacgcgaacgacgccgcctccgacccgtccacgaccgcgac

SEQ ID NO: 32775 - DNA, 944 bp, Artificial Sequence
  chemically treated genomic DNA (Homo sapiens) CpG-island No: 32775
tttttgtagaggggttaaattaagaagtaatcgttattgtacgttagtattataaattgagaggaagtttttgttttcgttaaagtttaggcgcgcgggtaaagattttcggggatgatatttcgcgcgtcgcggtttcgtgcgcgcggtttttcgtattcgcgggtcgttttatttttttttttgtattttaagagttcggtttggttttcgaggtcgggagttacgcggtatcgtagtttcgagggagaggacgttcgtaattaatacgtacgcgggtattaagagggtataggttagggcggggagggtcgaatggggtcggggggtacgcggagttggattagaattagcgagggcgcgtagatattgaacggatgcgaaggtttcggacgcggagcggttcggggcgtcgtgcgtggggcgcgagcggaggttcgggcgttatttacggcggggagggcgggtggttgtttcgagtttagggagcgcgtatcggacggtaaagggtcggaggttcggaggcgcgggagagaagggtcgtttggtcgcgtcgtgacggcgagaagtttttgttagcgcgggagtcggtcgggaggatgcggtcgggttgtagggataggcgcgaggcggcgtcgtagttcgtagtgggtttcgtcgttcggtcggagcgcgcggcgatgtagtaattttagttcgtcgtggggtcgtttttttttcgatagtcgttcggttcggagtcgagagggttatagtagtttatagcggagagtcggggcgatcgtagtttttatttatcggttcgcggtttcgtcgtcggcgtcggggttgcgttttgagttttatggtttcgtcgcgtcgcggtcgttcggcgtattcgtttcgtattatatcgtacgtagcggcgcgagcgacgtcgttttcggttcgtttacggtcgcggt

SEQ ID NO: 32776 - DNA, 944 bp, Artificial Sequence
  chemically treated genomic DNA (Homo sapiens) CpG-island No: 32776
accgcgaccgtaaacgaaccgaaaacgacgtcgctcgcgccgctacgtacgatataatacgaaacgaatacgccgaacgaccgcgacgcgacgaaaccataaaactcaaaacgcaaccccgacgccgacgacgaaaccgcgaaccgataaataaaaactacgatcgccccgactctccgctataaactactataaccctctcgactccgaaccgaacgactatcgaaaaaaaaacgaccccacgacgaactaaaattactacatcgccgcgcgctccgaccgaacgacgaaacccactacgaactacgacgccgcctcgcgcctatccctacaacccgaccgcatcctcccgaccgactcccgcgctaacaaaaacttctcgccgtcacgacgcgaccaaacgacccttctctcccgcgcctccgaacctccgaccctttaccgtccgatacgcgctccctaaactcgaaacaaccacccgccctccccgccgtaaataacgcccgaacctccgctcgcgccccacgcacgacgccccgaaccgctccgcgtccgaaaccttcgcatccgttcaatatctacgcgccctcgctaattctaatccaactccgcgtaccccccgaccccattcgaccctccccgccctaacctataccctcttaatacccgcgtacgtattaattacgaacgtcctctccctcgaaactacgataccgcgtaactcccgacctcgaaaaccaaaccgaactcttaaaatacaaaaaaaaaaataaaacgacccgcgaatacgaaaaaccgcgcgcacgaaaccgcgacgcgcgaaatatcatccccgaaaatctttacccgcgcgcctaaactttaacgaaaacaaaaacttcctctcaatttataatactaacgtacaataacgattacttcttaatttaacccctctacaaaaa

SEQ ID NO: 32777 - DNA, 797 bp, Artificial Sequence
  chemically treated genomic DNA (Homo sapiens) CpG-island No: 32777
ggcgtcgttgttgttgttattggttaaggtcgcggcgatcgacgtatagtagaggtagtatagttggagcgtttgtaagagaaaaggtgatatcgcgcgtgaggggcgcggcggggttggcgtcgggcgttttttgttattcgttttcggagtttcgttcggcggtatttgttttggttacgcgttttagtttcgttaggtttttcggcgggttcgaattcgtagtcgggaaggtatacgcgagtaggagggcgtattttatggttaggtgcggacgcggcggttgcgggtggttagacgcggtaggcggagcgtacgggcggcgcgtatttttttcgcggtttcggagttcggcgttttaggtgcggttttaggtgagagtcgtcgtcgtttatatcgtagcgggggcgcgttgggattttttttttttcggtcgtttgcgcgtttttttttttttcggcgcgggtttgtcgagttgtagtttgcggtattttagagggtacggggggttttttgggtcgggattggagcgtaaacggttgggagattgtcggtgtttgttcgttcgtttgtgcgtttgtttgtgtcggtgtgagcgtttgaggcgatggggaagatagcgttagttggtttttttagcgcgtcggagtcgagcgttcgtttttttatcgcgcggtgattggcgattagcggttttcgggttcgttcgagttttcgggttggtgtaagggcgtgggattttcggttttagttttgagggagggggcgaagggggcggggaggttgggtgggagtga

SEQ ID NO: 32778 - DNA, 797 bp, Artificial Sequence
  chemically treated genomic DNA (Homo sapiens) CpG-island No: 32778
tcactcccacccaacctccccgcccccttcgccccctccctcaaaactaaaaccgaaaatcccacgcccttacaccaacccgaaaactcgaacgaacccgaaaaccgctaatcgccaatcaccgcgcgataaaaaaacgaacgctcgactccgacgcgctaaaaaaaccaactaacgctatcttccccatcgcctcaaacgctcacaccgacacaaacaaacgcacaaacgaacgaacaaacaccgacaatctcccaaccgtttacgctccaatcccgacccaaaaaaccccccgtaccctctaaaataccgcaaactacaactcgacaaacccgcgccgaaaaaaaaaaaaacgcgcaaacgaccgaaaaaaaaaaaatcccaacgcgcccccgctacgatataaacgacgacgactctcacctaaaaccgcacctaaaacgccgaactccgaaaccgcgaaaaaaatacgcgccgcccgtacgctccgcctaccgcgtctaaccacccgcaaccgccgcgtccgcacctaaccataaaatacgccctcctactcgcgtataccttcccgactacgaattcgaacccgccgaaaaacctaacgaaactaaaacgcgtaaccaaaacaaataccgccgaacgaaactccgaaaacgaataacaaaaaacgcccgacgccaaccccgccgcgcccctcacgcgcgatatcaccttttctcttacaaacgctccaactatactacctctactatacgtcgatcgccgcgaccttaaccaataacaacaacaacgacgcc

SEQ ID NO: 32779 - DNA, 797 bp, Artificial Sequence
  chemically treated genomic DNA (Homo sapiens) CpG-island No: 32779
ttatttttatttagttttttcgtttttttcgtttttttttttagagttggagtcgggaattttacgtttttgtattagttcgggggttcggacgagttcgggagtcgttggtcgttaattatcgcgcggtggagaggcgggcgttcggtttcggcgcgttgggggagttagttggcgttgttttttttatcgttttagacgtttatatcgatatagatagacgtatagacgggcgggtagatatcgatagttttttaatcgtttgcgttttagtttcggtttagggagtttttcgtattttttggggtgtcgtaaattgtagttcggtaggttcgcgtcgggagaagggagggcgcgtaggcggtcggaggaggggaggttttagcgcgttttcgttgcgatgtgaacggcggcggtttttatttggagtcgtatttggggcgtcgagtttcggggtcgcggaaagaatgcgcgtcgttcgtgcgtttcgtttgtcgcgtttggttattcgtagtcgtcgcgttcgtatttgattatggagtgcgtttttttgttcgcgtgtgttttttcggttgcgggttcgggttcgtcgaggggtttggcgggattggggcgcgtggttaaggtaggtgtcgtcgagcggagtttcgagagcgggtggtagggggcgttcgacgttagtttcgtcgcgttttttacgcgcgatgttatttttttttttgtaggcgttttagttgtgttgtttttgttgtgcgtcggtcgtcgcggttttagttagtgatagtagtagcggcgtt

SEQ ID NO: 32780 - DNA, 797 bp, Artificial Sequence
  chemically treated genomic DNA (Homo sapiens) CpG-island No: 32780
aacgccgctactactatcactaactaaaaccgcgacgaccgacgcacaacaaaaacaacacaactaaaacgcctacaaaaaaaaaaataacatcgcgcgtaaaaaacgcgacgaaactaacgtcgaacgccccctaccacccgctctcgaaactccgctcgacgacacctaccttaaccacgcgccccaatcccgccaaacccctcgacgaacccgaacccgcaaccgaaaaaacacacgcgaacaaaaaaacgcactccataatcaaatacgaacgcgacgactacgaataaccaaacgcgacaaacgaaacgcacgaacgacgcgcattctttccgcgaccccgaaactcgacgccccaaatacgactccaaataaaaaccgccgccgttcacatcgcaacgaaaacgcgctaaaacctcccctcctccgaccgcctacgcgccctcccttctcccgacgcgaacctaccgaactacaatttacgacaccccaaaaaatacgaaaaactccctaaaccgaaactaaaacgcaaacgattaaaaaactatcgatatctacccgcccgtctatacgtctatctatatcgatataaacgtctaaaacgataaaaaaaacaacgccaactaactcccccaacgcgccgaaaccgaacgcccgcctctccaccgcgcgataattaacgaccaacgactcccgaactcgtccgaacccccgaactaatacaaaaacgtaaaattcccgactccaactctaaaaaaaaaaacgaaaaaaacgaaaaaactaaataaaaataa

SEQ ID NO: 32781 - DNA, 597 bp, Artificial Sequence
  chemically treated genomic DNA (Homo sapiens) CpG-island No: 32781
tttcgcgtagttggtacgtttcggatggttttttcgcggcgggggttggttaagttttcgcgcgttgcgtttgcgttcgtttcgagagcgtgtttttggtatcggacgcgcgcgttttttttttttttttcgcgtttttaacgtgtggcggttcgcgattttcggtaattcggagaaggtttatagagcggtttgcgttagcgagtgagtattcgtcgtttgcgtatagtttcgtttatttttttttgttttttttttttttttagcgggttcgcggttcgttatttttcgggaggggcgtttttcgacgttaaggtaggtttttttcgacgtcggggcggttttttttgatgtcggggtgtgtttttcgcgacgcgggggtgggtttcggacgtcggggttggttttgtcgaagtcgggggtgggttttttcggacgtcgaagtgggttcgggatgcggggttgggattttttcgatttcggggcggatttcggacgtcgggatcggttattattggtgtcgggttgggtttttttagatgtcggggttgggttttttttaaggttgaggtgggttcgggacgcgggttgggtttt

SEQ ID NO: 32782 - DNA, 597 bp, Artificial Sequence
  chemically treated genomic DNA (Homo sapiens) CpG-island No: 32782
aaaacccaacccgcgtcccgaacccacctcaaccttaaaaaaaacccaaccccgacatctaaaaaaacccaacccgacaccaataataaccgatcccgacgtccgaaatccgccccgaaatcgaaaaaatcccaaccccgcatcccgaacccacttcgacgtccgaaaaaacccacccccgacttcgacaaaaccaaccccgacgtccgaaacccacccccgcgtcgcgaaaaacacaccccgacatcaaaaaaaaccgccccgacgtcgaaaaaaacctaccttaacgtcgaaaaacgcccctcccgaaaaataacgaaccgcgaacccgctaaaaaaaaaaaaaaaacaaaaaaaaataaacgaaactatacgcaaacgacgaatactcactcgctaacgcaaaccgctctataaaccttctccgaattaccgaaaatcgcgaaccgccacacgttaaaaacgcgaaaaaaaaaaaaaaaacgcgcgcgtccgataccaaaaacacgctctcgaaacgaacgcaaacgcaacgcgcgaaaacttaaccaacccccgccgcgaaaaaaccatccgaaacgtaccaactacgcgaaa

SEQ ID NO: 32783 - DNA, 597 bp, Artificial Sequence
  chemically treated genomic DNA (Homo sapiens) CpG-island No: 32783
gagatttaattcgcgtttcgaatttattttaattttgggaaggatttagtttcggtatttggagaagtttaattcggtattagtaatggtcggtttcggcgttcggaattcgtttcggaatcgggagggttttagtttcgtatttcgagtttatttcggcgttcggagggatttattttcgatttcggtaaggttagtttcggcgttcggagtttattttcgcgtcgcgagagatatatttcggtattaggaagggtcgtttcggcgtcgggagaggtttattttggcgtcgggaagcgtttttttcggagagtagcgggtcgcggattcgttgaggaagaaaaggaggtagggaggggtgggcggagttgtgcgtaggcggcgggtatttattcgttggcgtaggtcgttttgtagatttttttcgggttgtcgggggtcgcgagtcgttatacgttgggagcgcggggggagggggaggggcgcgcgcgttcgatgttagagatacgttttcggggcgggcgtaggcgtagcgcgcggagatttaattaattttcgtcgcgggggagttattcgggacgtattaattgcgcggga

SEQ ID NO: 32784 - DNA, 597 bp, Artificial Sequence
  chemically treated genomic DNA (Homo sapiens) CpG-island No: 32784
tcccgcgcaattaatacgtcccgaataactcccccgcgacgaaaattaattaaatctccgcgcgctacgcctacgcccgccccgaaaacgtatctctaacatcgaacgcgcgcgcccctccccctccccccgcgctcccaacgtataacgactcgcgacccccgacaacccgaaaaaaatctacaaaacgacctacgccaacgaataaatacccgccgcctacgcacaactccgcccacccctccctacctccttttcttcctcaacgaatccgcgacccgctactctccgaaaaaaacgcttcccgacgccaaaataaacctctcccgacgccgaaacgacccttcctaataccgaaatatatctctcgcgacgcgaaaataaactccgaacgccgaaactaaccttaccgaaatcgaaaataaatccctccgaacgccgaaataaactcgaaatacgaaactaaaaccctcccgattccgaaacgaattccgaacgccgaaaccgaccattactaataccgaattaaacttctccaaataccgaaactaaatccttcccaaaattaaaataaattcgaaacgcgaattaaatctc

SEQ ID NO: 32785 - DNA, 639 bp, Artificial Sequence
  chemically treated genomic DNA (Homo sapiens) CpG-island No: 32785
tttcgaatttacggtatacgttttgaggtattagaggtagtaaagtaaaataagcgcggggtttcgtacggtagcgcgggtgtagcgtttaaatttcgcgagatttgttggttgggttaagtattatttattaaatttcgcgatatttaggcgtttgagaggttttttatcggtgagggtttgcggggaagatggagtatttcgcgtcggttacggtgtaggtcgcggacggcggagcggtcgggttttatagtagttcggagttgttggagggttaggagtcggacggggtgcgttttgatcgcgagagggcgcgtcgtttgtgggaagtcgtgttcggtgtttagtcggtgggtagagaggaaggtgagtcgggggttttggaggtagaaagtttttcgttcgttgcgcggttcgcggggaattgcggaagcgtcgacggttatattttttggttcgtttttttgcgtgttgcgtttcgggatttttagatttgtgttttttattcgggcgcgggtattttaagaatcgggtttttagcgcgttgagggtgaagggtcgtttacgtttaggttttgggttttttttttttttttttattatttattatagcgtagttttttttatattcgaggattg

SEQ ID NO: 32786 - DNA, 639 bp, Artificial Sequence
  chemically treated genomic DNA (Homo sapiens) CpG-island No: 32786
caatcctcgaatataaaaaaaactacgctataataaataataaaaaaaaaaaaaaaaaacccaaaacctaaacgtaaacgacccttcaccctcaacgcgctaaaaacccgattcttaaaatacccgcgcccgaataaaaaacacaaatctaaaaatcccgaaacgcaacacgcaaaaaaacgaaccaaaaaatataaccgtcgacgcttccgcaattccccgcgaaccgcgcaacgaacgaaaaactttctacctccaaaacccccgactcaccttcctctctacccaccgactaaacaccgaacacgacttcccacaaacgacgcgccctctcgcgatcaaaacgcaccccgtccgactcctaaccctccaacaactccgaactactataaaacccgaccgctccgccgtccgcgacctacaccgtaaccgacgcgaaatactccatcttccccgcaaaccctcaccgataaaaaacctctcaaacgcctaaatatcgcgaaatttaataaataatacttaacccaaccaacaaatctcgcgaaatttaaacgctacacccgcgctaccgtacgaaaccccgcgcttattttactttactacctctaatacctcaaaacgtataccgtaaattcgaaa

SEQ ID NO: 32787 - DNA, 639 bp, Artificial Sequence
  chemically treated genomic DNA (Homo sapiens) CpG-island No: 32787
tagttttcgaatgtgggaaaaattgcgttgtagtgaatgatgaaggaggaggaggaaaatttagggtttgagcgtgagcggttttttatttttagcgcgttgggggttcgatttttggggtgttcgcgttcggatggggagtataagtttgggggtttcggggcgtagtacgtaaggaggcgggttagggggtgtgatcgtcggcgttttcgtagtttttcgcgagtcgcgtagcgggcgaggggttttttgtttttaaagttttcgatttatttttttttttatttatcggttgggtatcggatacggttttttataggcggcgcgttttttcgcggttaaagcgtatttcgttcggtttttggttttttagtaatttcgagttgttgtaaggttcggtcgtttcgtcgttcgcggtttgtatcgtggtcggcgcgggatattttatttttttcgtaaatttttatcggtagagagttttttaggcgtttaggtatcgcgagatttggtgggtggtatttggtttagttaataaatttcgcgaggtttgggcgttgtattcgcgttgtcgtgcgggatttcgcgtttattttgttttgttatttttggtattttagagcgtgtgtcgtggattcggaa

SEQ ID NO: 32788 - DNA, 639 bp, Artificial Sequence
  chemically treated genomic DNA (Homo sapiens) CpG-island No: 32788
ttccgaatccacgacacacgctctaaaataccaaaaataacaaaacaaaataaacgcgaaatcccgcacgacaacgcgaatacaacgcccaaacctcgcgaaatttattaactaaaccaaataccacccaccaaatctcgcgatacctaaacgcctaaaaaactctctaccgataaaaatttacgaaaaaaataaaatatcccgcgccgaccacgatacaaaccgcgaacgacgaaacgaccgaaccttacaacaactcgaaattactaaaaaaccaaaaaccgaacgaaatacgctttaaccgcgaaaaaacgcgccgcctataaaaaaccgtatccgatacccaaccgataaataaaaaaaaaaataaatcgaaaactttaaaaacaaaaaacccctcgcccgctacgcgactcgcgaaaaactacgaaaacgccgacgatcacaccccctaacccgcctccttacgtactacgccccgaaacccccaaacttatactccccatccgaacgcgaacaccccaaaaatcgaacccccaacgcgctaaaaataaaaaaccgctcacgctcaaaccctaaattttcctcctcctccttcatcattcactacaacgcaatttttcccacattcgaaaacta

SEQ ID NO: 32789 - DNA, 1134 bp, Artificial Sequence
  chemically treated genomic DNA (Homo sapiens) CpG-island No: 32789
attttttcggaacgcgttgggaggtttttttattttcgttttttttcgggcgtacggagattttcggttttagggagcgtttatcgattcggatgacgtggggtatttcgcgcgagttcgggatttagaaggcgtatacgaggagttcggtttagtatttttaaattagatttcggaggcgtcgttagggagcggttatcgttgggcgtcgtcgagcgtgttcggggcgcggtcgtggcgggttttttggggcggtagttttaggcgcgggcgcgtagtagtttcgaaggcgtcgtttggtttagtcgttcggttttcgagcgtcgttgtaagtgggggggcgtttcgcggcgtcgcgtatattttattggggggtcgtttcgtcggcgttcgtttcgtttggttgtcgtttacgggttgttcgcgagcgaggtttttgggtttcgttcggatttcgttcggattcggtttcggtttcgattcgcgtcggttcggttttcgcgcgggtttttatttgtttcggttgtcgggttttggcgggcgggttgtacgcgttttcggtcgttttttttttagtcgtcgtcgatgttatcgttcgggttcgtataaagtttcggagtggagttgtacgcgcgtatatttttttttttagtttttttttttgcgttttgtttttcgtttttcgcgtcgttcgtcgttcgcgtttttttcgcgtattttttcgcgtatatatattttatatttatatttgtcgaggcgtatattcgcgcgtttatatttgcgcggggggcggggaaggggattttggttttattgtagggggacgttcggagaacgaggatttttttcgttttttagacgtttttattcgtttcgtcggttttagttttttttattgcgagggtacggagttcgggagttaggcgtggagcgcgagagttggtatcgcgagttgggagacggcggtagtttagcggtcggattagttggaggagacgcgttcgtcgggagtagcgagatcgggagttcgtcgtttgcggagtttggtttcgcggtttttacgcggcgggcgttggttggacggcggtggtagcgggagattgattcgggaatcggtttttttttttaatttta

SEQ ID NO: 32790 - DNA, 1134 bp, Artificial Sequence
  chemically treated genomic DNA (Homo sapiens) CpG-island No: 32790
taaaattaaaaaaaaaaaccgattcccgaatcaatctcccgctaccaccgccgtccaaccaacgcccgccgcgtaaaaaccgcgaaaccaaactccgcaaacgacgaactcccgatctcgctactcccgacgaacgcgtctcctccaactaatccgaccgctaaactaccgccgtctcccaactcgcgataccaactctcgcgctccacgcctaactcccgaactccgtaccctcgcaataaaaaaaactaaaaccgacgaaacgaataaaaacgtctaaaaaacgaaaaaaatcctcgttctccgaacgtccccctacaataaaaccaaaatccccttccccgccccccgcgcaaatataaacgcgcgaatatacgcctcgacaaatataaatataaaatatatatacgcgaaaaaatacgcgaaaaaaacgcgaacgacgaacgacgcgaaaaacgaaaaacaaaacgcaaaaaaaaaaactaaaaaaaaaaatatacgcgcgtacaactccactccgaaactttatacgaacccgaacgataacatcgacgacgactaaaaaaaaaacgaccgaaaacgcgtacaacccgcccgccaaaacccgacaaccgaaacaaataaaaacccgcgcgaaaaccgaaccgacgcgaatcgaaaccgaaaccgaatccgaacgaaatccgaacgaaacccaaaaacctcgctcgcgaacaacccgtaaacgacaaccaaacgaaacgaacgccgacgaaacgaccccccaataaaatatacgcgacgccgcgaaacgcccccccacttacaacgacgctcgaaaaccgaacgactaaaccaaacgacgccttcgaaactactacgcgcccgcgcctaaaactaccgccccaaaaaacccgccacgaccgcgccccgaacacgctcgacgacgcccaacgataaccgctccctaacgacgcctccgaaatctaatttaaaaatactaaaccgaactcctcgtatacgccttctaaatcccgaactcgcgcgaaataccccacgtcatccgaatcgataaacgctccctaaaaccgaaaatctccgtacgcccgaaaaaaaacgaaaataaaaaaacctcccaacgcgttccgaaaaaat

SEQ ID NO: 32791 - DNA, 1134 bp, Artificial Sequence
  chemically treated genomic DNA (Homo sapiens) CpG-island No: 32791
tggggttggggagggaagtcggttttcgggttagtttttcgttgttatcgtcgtttagttagcgttcgtcgcgtgggagtcgcgaggttaggtttcgtagacggcgggttttcggtttcgttgttttcggcgggcgcgttttttttagttggttcggtcgttgggttgtcgtcgttttttagttcgcggtgttagttttcgcgttttacgtttggttttcgggtttcgtgttttcgtagtagaagggattggggtcggcggggcgggtggggacgtttgggaagcgaggagagttttcgtttttcgggcgtttttttataatggggttagggttttttttttcgtttttcgcgtaggtgtgagcgcgcgagtgtgcgtttcggtaagtgtgagtgtgaagtgtgtgtgcgcgggggagtgcgcggagggagcgcgggcggcgggcggcgcgggaggcgggaggtagggcgtaggggagggggttgggagggagagtgtgcgcgcgtgtaattttatttcggggttttgtgcgagttcgggcgatagtatcggcggcggttggaggaggagcggtcggagacgcgtgtagttcgttcgttagagttcggtagtcggggtaggtgggagttcgcgcgggagtcgagtcgacgcgagtcggagtcggagtcgagttcgagcggagttcgggcggagtttaggagtttcgttcgcgggtagttcgtgggcggtagttaggcggggcgggcgtcggcggggcggttttttagtaagatgtgcgcggcgtcgcggggcgtttttttatttgtagcggcgttcgggagtcgggcggttgggttaggcggcgttttcggggttgttgcgcgttcgcgtttagagttgtcgttttagggagttcgttacggtcgcgtttcgggtacgttcggcggcgtttaacgatgatcgttttttggcggcgttttcggagtttggtttgggaatattgggtcgggtttttcgtgtgcgttttttggatttcggattcgcgcgggatgttttacgttattcggatcggtaagcgttttttggagtcgggggttttcgtgcgttcgggagggggcgggaatgagggggttttttaacgcgtttcggagagat

SEQ ID NO: 32792 - DNA, 1134 bp, Artificial Sequence
  chemically treated genomic DNA (Homo sapiens) CpG-island No: 32792
atctctccgaaacgcgttaaaaaaccccctcattcccgccccctcccgaacgcacgaaaacccccgactccaaaaaacgcttaccgatccgaataacgtaaaacatcccgcgcgaatccgaaatccaaaaaacgcacacgaaaaacccgacccaatattcccaaaccaaactccgaaaacgccgccaaaaaacgatcatcgttaaacgccgccgaacgtacccgaaacgcgaccgtaacgaactccctaaaacgacaactctaaacgcgaacgcgcaacaaccccgaaaacgccgcctaacccaaccgcccgactcccgaacgccgctacaaataaaaaaacgccccgcgacgccgcgcacatcttactaaaaaaccgccccgccgacgcccgccccgcctaactaccgcccacgaactacccgcgaacgaaactcctaaactccgcccgaactccgctcgaactcgactccgactccgactcgcgtcgactcgactcccgcgcgaactcccacctaccccgactaccgaactctaacgaacgaactacacgcgtctccgaccgctcctcctccaaccgccgccgatactatcgcccgaactcgcacaaaaccccgaaataaaattacacgcgcgcacactctccctcccaaccccctcccctacgccctacctcccgcctcccgcgccgcccgccgcccgcgctccctccgcgcactcccccgcgcacacacacttcacactcacacttaccgaaacgcacactcgcgcgctcacacctacgcgaaaaacgaaaaaaaaaaccctaaccccattataaaaaaacgcccgaaaaacgaaaactctcctcgcttcccaaacgtccccacccgccccgccgaccccaatcccttctactacgaaaacacgaaacccgaaaaccaaacgtaaaacgcgaaaactaacaccgcgaactaaaaaacgacgacaacccaacgaccgaaccaactaaaaaaaacgcgcccgccgaaaacaacgaaaccgaaaacccgccgtctacgaaacctaacctcgcgactcccacgcgacgaacgctaactaaacgacgataacaacgaaaaactaacccgaaaaccgacttccctccccaacccca

SEQ ID NO: 32793 - DNA, 568 bp, Artificial Sequence
  chemically treated genomic DNA (Homo sapiens) CpG-island No: 32793
atggcgtagcgtacgtacggttttgagtgttaacgaaatttgaagggcgagagttcggggagtttcggtcgcgacggttacggcgatttttttatattagggatagcgggggtcgggtttcgtcgttttttttttgaggttgtgggtaagttcggatattcgttttgagggtgtcggcgtcgtcgtcgtcgcgtttttttttttcgggtgttattggttggtttcggttttttatttagtttcgggagtcgcggcggcgacgataacggtagtaggtgaattgtgcgttaagggcgtttgcgcggtttacgtggagtttatagaggttaattacggagtatcggatgggataagtataatgtcgggtttcgtatatgcgcgttcggtcggtcgttttcgaattcgttgtattggaggacgtaaggttcggttttgtttgatttcgttgcgtgcggagatcgtcgtcgcggtttagaatcggagcgtgggttagtttgaatattattttgatttttatttgggttttggttttgcgaaattagacggggagagtgttgtttttatcgat

SEQ ID NO: 32794 - DNA, 568 bp, Artificial Sequence
  chemically treated genomic DNA (Homo sapiens) CpG-island No: 32794
atcgataaaaacaacactctccccgtctaatttcgcaaaaccaaaacccaaataaaaatcaaaataatattcaaactaacccacgctccgattctaaaccgcgacgacgatctccgcacgcaacgaaatcaaacaaaaccgaaccttacgtcctccaatacaacgaattcgaaaacgaccgaccgaacgcgcatatacgaaacccgacattatacttatcccatccgatactccgtaattaacctctataaactccacgtaaaccgcgcaaacgcccttaacgcacaattcacctactaccgttatcgtcgccgccgcgactcccgaaactaaataaaaaaccgaaaccaaccaataacacccgaaaaaaaaaaacgcgacgacgacgacgccgacaccctcaaaacgaatatccgaacttacccacaacctcaaaaaaaaaacgacgaaacccgacccccgctatccctaatataaaaaaatcgccgtaaccgtcgcgaccgaaactccccgaactctcgcccttcaaatttcgttaacactcaaaaccgtacgtacgctacgccat

SEQ ID NO: 32795 - DNA, 568 bp, Artificial Sequence
  chemically treated genomic DNA (Homo sapiens) CpG-island No: 32795
atcgatagaagtagtatttttttcgtttgatttcgtagggttaaagtttaggtgagagttagggtagtgtttagattagtttacgtttcggttttgagtcgcgacggcggttttcgtacgtaacgaaattaggtaggatcgaattttgcgttttttagtgtagcgagttcggaagcgatcggtcgagcgcgtatgtgcgggattcgatattgtgtttgttttattcggtgtttcgtagttagtttttgtgagttttacgtaggtcgcgtaagcgtttttggcgtatagtttatttgttgtcgttgtcgtcgtcgtcgcggttttcggggttggatggggggtcgaggttagttagtggtattcggaagaaagagacgcggcggcggcgacgtcgatatttttaggacgagtgttcggatttgtttatagttttaaggaggagacggcgaggttcggttttcgttgtttttggtgtaaagaagtcgtcgtagtcgtcgcggtcgggatttttcgggttttcgttttttaggtttcgttgatatttaggatcgtacgtacgttgcgttat

SEQ ID NO: 32796 - DNA, 568 bp, Artificial Sequence
  chemically treated genomic DNA (Homo sapiens) CpG-island No: 32796
ataacgcaacgtacgtacgatcctaaatatcaacgaaacctaaaaaacgaaaacccgaaaaatcccgaccgcgacgactacgacgacttctttacaccaaaaacaacgaaaaccgaacctcgccgtctcctccttaaaactataaacaaatccgaacactcgtcctaaaaatatcgacgtcgccgccgccgcgtctctttcttccgaataccactaactaacctcgaccccccatccaaccccgaaaaccgcgacgacgacgacaacgacaacaaataaactatacgccaaaaacgcttacgcgacctacgtaaaactcacaaaaactaactacgaaacaccgaataaaacaaacacaatatcgaatcccgcacatacgcgctcgaccgatcgcttccgaactcgctacactaaaaaacgcaaaattcgatcctacctaatttcgttacgtacgaaaaccgccgtcgcgactcaaaaccgaaacgtaaactaatctaaacactaccctaactctcacctaaactttaaccctacgaaatcaaacgaaaaaaatactacttctatcgat

SEQ ID NO: 32797 - DNA, 1000 bp, Artificial Sequence
  chemically treated genomic DNA (Homo sapiens) CpG-island No: 32797
gttttgatatcgttttttgggggtgttcgttttgggatagaatcgtagtgtggcgtttaaggaggaagagaaggcgtttagggtattcgaaacggagggatagttgtttaatttaattttttttatagtgggaataatacgtattttttttttagcgcggtggaagggtgagcgttagaaattagacgggatgtttgagaacgtcgtaggtagggggcgattttagttcgggagttcgtcgcgggtcggttagtttttagggaagttcggttttttagtcgaggtcggaggcggcgcggattttacgggattgcggaggtcgggaaaaaggtttttaatttttcgttttttgtttttatcgggttggcgggaggagcggtttttatttgtgttagggcgcgcgttgcgattgcgtcgttgttcgggaagggtcgaagagttgttcgttcgttcggcgttcgttggggttatgggcgaggggcgtagttggacgatttagttttgggttttcggttaggcgggcggggatggacgcggcggttttcggtattggtagtcggttagtcggttaggtcgatgtgttttttgcgtcgcggttgagatagcgggaatcggtttcgggaggagtcgtagtttgagcggtcgattgaggaggcgaaggatgggcggggttatagggtcgacgatttatttattcggaagtagttgtggtcgcgattgttcgggagtggcgtttgtcgcggttcgggtttgtatttcgttgggtaaagtattcggggttgttatacggcgagttgagttttgggtcggcgggtgaggttttttaagcggcgatgtttttggttttttgtttcgttattgcgagtcgttagggttaagttggagggagggcggcgaggcgcggttgtcggtagggcggggttttgggttgttggcggggcggaggtcggaggcggttttgggcgggtggtttttttgggttttacggtttttgtttagg

SEQ ID NO: 32798 - DNA, 1000 bp, Artificial Sequence
  chemically treated genomic DNA (Homo sapiens) CpG-island No: 32798
cctaaacaaaaaccgtaaaacccaaaaaaaccacccgcccaaaaccgcctccgacctccgccccgccaacaacccaaaaccccgccctaccgacaaccgcgcctcgccgccctccctccaacttaaccctaacgactcgcaataacgaaacaaaaaaccaaaaacatcgccgcttaaaaaacctcacccgccgacccaaaactcaactcgccgtataacaaccccgaatactttacccaacgaaatacaaacccgaaccgcgacaaacgccactcccgaacaatcgcgaccacaactacttccgaataaataaatcgtcgaccctataaccccgcccatccttcgcctcctcaatcgaccgctcaaactacgactcctcccgaaaccgattcccgctatctcaaccgcgacgcaaaaaacacatcgacctaaccgactaaccgactaccaataccgaaaaccgccgcgtccatccccgcccgcctaaccgaaaacccaaaactaaatcgtccaactacgcccctcgcccataaccccaacgaacgccgaacgaacgaacaactcttcgacccttcccgaacaacgacgcaatcgcaacgcgcgccctaacacaaataaaaaccgctcctcccgccaacccgataaaaacaaaaaacgaaaaattaaaaacctttttcccgacctccgcaatcccgtaaaatccgcgccgcctccgacctcgactaaaaaaccgaacttccctaaaaactaaccgacccgcgacgaactcccgaactaaaatcgccccctacctacgacgttctcaaacatcccgtctaatttctaacgctcacccttccaccgcgctaaaaaaaaaatacgtattattcccactataaaaaaaattaaattaaacaactatccctccgtttcgaataccctaaacgccttctcttcctccttaaacgccacactacgattctatcccaaaacgaacacccccaaaaaacgatatcaaaac

SEQ ID NO: 32799 - DNA, 1000 bp, Artificial Sequence
  chemically treated genomic DNA (Homo sapiens) CpG-island No: 32799
tttgggtaggaatcgtgggatttagagaagttattcgtttaaggtcgttttcggttttcgtttcgttagtagtttagggtttcgttttatcggtagtcgcgtttcgtcgttttttttttagtttggttttaacggttcgtaatggcggaatagggagttaggggtatcgtcgtttggggaattttattcgtcggtttagggtttagttcgtcgtgtgatagtttcgggtattttgtttagcggggtgtaagttcggatcgcggtaagcgttattttcgggtagtcgcggttataattgttttcgggtgagtgggtcgtcgattttgtggtttcgtttatttttcgtttttttagtcggtcgtttaggttgcggtttttttcggggtcggttttcgttgttttagtcgcggcgtagagggtatatcggtttgatcgattagtcggttgttagtgtcgggagtcgtcgcgtttattttcgttcgtttggtcggggatttaggattgagtcgtttagttgcgtttttcgtttatagttttagcgggcgtcgggcgggcgagtagtttttcggtttttttcggatagcgacgtagtcgtagcgcgcgttttaatataggtaagggtcgtttttttcgttagttcggtgggagtagggagcggggagttgggaatttttttttcggttttcgtagtttcgtgggattcgcgtcgttttcgatttcggttagggggtcgggtttttttggggattggtcggttcgcggcgggttttcgggttggggtcgttttttgtttgcggcgtttttagatatttcgtttgatttttaacgtttatttttttatcgcgttggggaaaaggtacgtgttatttttattgtgggagaaattaaattgggtagttgttttttcgtttcgggtgttttaggcgttttttttttttttttagacgttatattacggttttgttttaggacgagtatttttagggaacggtgttaggat

SEQ ID NO: 32800 - DNA, 1000 bp, Artificial Sequence
  chemically treated genomic DNA (Homo sapiens) CpG-island No: 32800
atcctaacaccgttccctaaaaatactcgtcctaaaacaaaaccgtaatataacgtctaaaaaaaaaaaaaaaacgcctaaaacacccgaaacgaaaaaacaactacccaatttaatttctcccacaataaaaataacacgtaccttttccccaacgcgataaaaaaataaacgttaaaaatcaaacgaaatatctaaaaacgccgcaaacaaaaaacgaccccaacccgaaaacccgccgcgaaccgaccaatccccaaaaaaacccgaccccctaaccgaaatcgaaaacgacgcgaatcccacgaaactacgaaaaccgaaaaaaaaattcccaactccccgctccctactcccaccgaactaacgaaaaaaacgacccttacctatattaaaacgcgcgctacgactacgtcgctatccgaaaaaaaccgaaaaactactcgcccgcccgacgcccgctaaaactataaacgaaaaacgcaactaaacgactcaatcctaaatccccgaccaaacgaacgaaaataaacgcgacgactcccgacactaacaaccgactaatcgatcaaaccgatataccctctacgccgcgactaaaacaacgaaaaccgaccccgaaaaaaaccgcaacctaaacgaccgactaaaaaaacgaaaaataaacgaaaccacaaaatcgacgacccactcacccgaaaacaattataaccgcgactacccgaaaataacgcttaccgcgatccgaacttacaccccgctaaacaaaatacccgaaactatcacacgacgaactaaaccctaaaccgacgaataaaattccccaaacgacgatacccctaactccctattccgccattacgaaccgttaaaaccaaactaaaaaaaaaacgacgaaacgcgactaccgataaaacgaaaccctaaactactaacgaaacgaaaaccgaaaacgaccttaaacgaataacttctctaaatcccacgattcctacccaaa

SEQ ID NO: 32801 - DNA, 1528 bp, Artificial Sequence
  chemically treated genomic DNA (Homo sapiens) CpG-island No: 32801
ggcgcgggaattcgatcgagagttcgttaagtagcgggattttattagtagttgcgcgtttgcgtatcggggtcgagcgcgcgagcgtttttttttcgtttgtagttttttatttcgtcgttcggttcgcgcgtttgcgcgtcggttgggaggaatttagttttttcgttttggtaggcgggaggacgcgcgcgcgttcgcggcgagggggaggtagtgcggcggcgggagtcgggtcgcgcgcgttagtgggaagcgttcggttgttatagcgttagtttcgtcgtagtcgttgtcgttcgtgtttcgttcgttttttttttcgttttttcgttcgtttttgttcgggcgtatgcgttgtcggagcgcgagggtcggtttcgggtgtgtggtggcggtagagttgagttgcgaggttcgagagttagaatttgggggagagggatggtttttgtacgggggggagtcggaggagtcgtcgtcgttgtcgacgttatcgtcgtagtcgtcgtcgtcgtcgtttcggtattcgtttttcggcgttgacggtttcgtacgaagtcggcgagggggagttagtagcggcggtcgtcggtacgtcgtttagtatggttcgggaaattaggtatttttgggtgggtaatttattcgagaacgtgcgggaagagaagattatcgagtattttaaacggtgagtgatacgaggttcgcggtcgcgttcgtttttcgggcgtcgtttttcgtttcggttcgttgtcggtttttttcggagcgcggagttggtgaggaggatttcggttcggatttacgggcgttgtgggatttcgttagtcgttcggttcgcgtcgcggcgttgggtttcgggtgtcggcggtgcgggcggttaagtcgcgtcgttttcgaagagttcgcggggtttcggcggtcgcgttcgtgacgagggaggtgatcgaggttcggtttttacgtagtcggcgtttcggggttgttttcgcgttagttcgggagtcggtgggagatgcgttgggcggcggggtcgcgtttttgcgcgtagtgttcggttcggagtagtcgggattcgagttcgttcgatagtcgggttcggcgtcgttattttaagttgttttgcgggcgttcggtaatgtttgatttcgggagggtttcgtgcgaagggaaaggcggtgcgaaaatagaagtcgtagtaggtattgtggtcgcgtcgcggattcggagagattatttaggattttttcggaggatttgtagttttgaaatttattgggaatggtaaacgtttttcgtttttgcggggttgggtggagagtggtgtgaaataagttggtgcgttcgtttgggttttttcgttttcggcggaggagatcgcgtttgataggaggttgttagtttcggcgttcgtagtttcgggtcgtatttttaggtcgttttaagattttggtgttttttatttttgaattttcgaattaaacggtaaaatattttaaattttttacgatgagaagatgtagtt

SEQ ID NO: 32802 - DNA, 1528 bp, Artificial Sequence
  chemically treated genomic DNA (Homo sapiens) CpG-island No: 32802
aactacatcttctcatcgtaaaaaatttaaaatattttaccgtttaattcgaaaattcaaaaataaaaaacaccaaaatcttaaaacgacctaaaaatacgacccgaaactacgaacgccgaaactaacaacctcctatcaaacgcgatctcctccgccgaaaacgaaaaaacccaaacgaacgcaccaacttatttcacaccactctccacccaaccccgcaaaaacgaaaaacgtttaccattcccaataaatttcaaaactacaaatcctccgaaaaaatcctaaataatctctccgaatccgcgacgcgaccacaatacctactacgacttctattttcgcaccgcctttcccttcgcacgaaaccctcccgaaatcaaacattaccgaacgcccgcaaaacaacttaaaataacgacgccgaacccgactatcgaacgaactcgaatcccgactactccgaaccgaacactacgcgcaaaaacgcgaccccgccgcccaacgcatctcccaccgactcccgaactaacgcgaaaacaaccccgaaacgccgactacgtaaaaaccgaacctcgatcacctccctcgtcacgaacgcgaccgccgaaaccccgcgaactcttcgaaaacgacgcgacttaaccgcccgcaccgccgacacccgaaacccaacgccgcgacgcgaaccgaacgactaacgaaatcccacaacgcccgtaaatccgaaccgaaatcctcctcaccaactccgcgctccgaaaaaaaccgacaacgaaccgaaacgaaaaacgacgcccgaaaaacgaacgcgaccgcgaacctcgtatcactcaccgtttaaaatactcgataatcttctcttcccgcacgttctcgaataaattacccacccaaaaatacctaatttcccgaaccatactaaacgacgtaccgacgaccgccgctactaactccccctcgccgacttcgtacgaaaccgtcaacgccgaaaaacgaataccgaaacgacgacgacgacgactacgacgataacgtcgacaacgacgacgactcctccgactcccccccgtacaaaaaccatccctctcccccaaattctaactctcgaacctcgcaactcaactctaccgccaccacacacccgaaaccgaccctcgcgctccgacaacgcatacgcccgaacaaaaacgaacgaaaaaacgaaaaaaaaaacgaacgaaacacgaacgacaacgactacgacgaaactaacgctataacaaccgaacgcttcccactaacgcgcgcgacccgactcccgccgccgcactacctccccctcgccgcgaacgcgcgcgcgtcctcccgcctaccaaaacgaaaaaactaaattcctcccaaccgacgcgcaaacgcgcgaaccgaacgacgaaataaaaaactacaaacgaaaaaaaaacgctcgcgcgctcgaccccgatacgcaaacgcgcaactactaataaaatcccgctacttaacgaactctcgatcgaattcccgcgcc

SEQ ID NO: 32803 - DNA, 1528 bp, Artificial Sequence
  chemically treated genomic DNA (Homo sapiens) CpG-island No: 32803
agttatatttttttatcgtaaaaggtttggaatgttttatcgtttgattcgggaatttaggggtggggggtattagggttttagggcggtttgggagtgcgattcgaggttacgggcgtcggggttagtaattttttgttagacgcggtttttttcgtcggggacgaggaagtttaaacgggcgtattaatttattttatattattttttatttagtttcgtaaaaacgagaaacgtttgttatttttagtgagttttaaggttgtaaatttttcggagaggttttagatggttttttcgggttcgcgacgcgattatagtatttattgcgatttttgttttcgtatcgttttttttttcgtacggaattttttcgaagttagatattgtcgagcgttcgtagagtagtttggagtggcggcgtcggattcggttgtcgggcgggttcgggtttcggttgtttcgggtcgggtattgcgcgtaaggacgcgatttcgtcgtttagcgtattttttatcgattttcgggttgacgcgagggtagtttcggggcgtcggttgcgtggaggtcgagtttcggttatttttttcgttacggacgcggtcgtcggggtttcgcgggtttttcgaaggcggcgcggtttggtcgttcgtatcgtcgatattcgaggtttaacgtcgcgacgcgggtcgagcggttgacgaggttttatagcgttcgtgggttcgggtcggagttttttttattagtttcgcgtttcgggaggggtcggtaacgggtcggggcgggaagcggcgttcgaggagcgagcgcggtcgcgggtttcgtgttatttatcgtttgaaatgttcgatgatttttttttttcgtacgttttcgggtaagttgtttatttagagatgtttggtttttcggattatgttgggcggcgtgtcggcgatcgtcgttgttggttttttttcgtcggtttcgtacgagatcgttagcgtcgggaggcgggtgtcggggcggcggcggcggcggttgcggcggtggcgtcggtagcggcggcggttttttcggttttttttcgtgtagagattattttttttttttaggttttgattttcgggtttcgtagtttagttttgtcgttattatatattcgaagtcgattttcgcgtttcggtagcgtatgcgttcgggtaggggcgggcgggggagcgggaggaggggcgagcgggatacgggcggtagcgattacgacggagttggcgttgtggtagtcggacgttttttattggcgcgcgcggttcgattttcgtcgtcgtattgtttttttttcgtcgcgggcgcgcgcgcgttttttcgtttgttaaggcggagaagttgagttttttttagtcggcgcgtaggcgcgcggatcgggcgacgaagtgagggattataggcggggaaggaacgttcgcgcgttcggtttcggtgcgtaggcgcgtagttgttagtggagtttcgttgtttggcgggttttcggtcgggttttcgcgtt

SEQ ID NO: 32804 - DNA, 1528 bp, Artificial Sequence
  chemically treated genomic DNA (Homo sapiens) CpG-island No: 32804
aacgcgaaaacccgaccgaaaacccgccaaacaacgaaactccactaacaactacgcgcctacgcaccgaaaccgaacgcgcgaacgttccttccccgcctataatccctcacttcgtcgcccgatccgcgcgcctacgcgccgactaaaaaaaactcaacttctccgccttaacaaacgaaaaaacgcgcgcgcgcccgcgacgaaaaaaaaacaatacgacgacgaaaatcgaaccgcgcgcgccaataaaaaacgtccgactaccacaacgccaactccgtcgtaatcgctaccgcccgtatcccgctcgcccctcctcccgctcccccgcccgcccctacccgaacgcatacgctaccgaaacgcgaaaatcgacttcgaatatataataacgacaaaactaaactacgaaacccgaaaatcaaaacctaaaaaaaaaaaataatctctacacgaaaaaaaaccgaaaaaaccgccgccgctaccgacgccaccgccgcaaccgccgccgccgccgccccgacacccgcctcccgacgctaacgatctcgtacgaaaccgacgaaaaaaaaccaacaacgacgatcgccgacacgccgcccaacataatccgaaaaaccaaacatctctaaataaacaacttacccgaaaacgtacgaaaaaaaaaaatcatcgaacatttcaaacgataaataacacgaaacccgcgaccgcgctcgctcctcgaacgccgcttcccgccccgacccgttaccgacccctcccgaaacgcgaaactaataaaaaaaactccgacccgaacccacgaacgctataaaacctcgtcaaccgctcgacccgcgtcgcgacgttaaacctcgaatatcgacgatacgaacgaccaaaccgcgccgccttcgaaaaacccgcgaaaccccgacgaccgcgtccgtaacgaaaaaaataaccgaaactcgacctccacgcaaccgacgccccgaaactaccctcgcgtcaacccgaaaatcgataaaaaatacgctaaacgacgaaatcgcgtccttacgcgcaatacccgacccgaaacaaccgaaacccgaacccgcccgacaaccgaatccgacgccgccactccaaactactctacgaacgctcgacaatatctaacttcgaaaaaattccgtacgaaaaaaaaaacgatacgaaaacaaaaatcgcaataaatactataatcgcgtcgcgaacccgaaaaaaccatctaaaacctctccgaaaaatttacaaccttaaaactcactaaaaataacaaacgtttctcgtttttacgaaactaaataaaaaataatataaaataaattaatacgcccgtttaaacttcctcgtccccgacgaaaaaaaccgcgtctaacaaaaaattactaaccccgacgcccgtaacctcgaatcgcactcccaaaccgccctaaaaccctaataccccccacccctaaattcccgaatcaaacgataaaacattccaaaccttttacgataaaaaaatataact

SEQ ID NO: 32805 - DNA, 621 bp, Artificial Sequence
  chemically treated genomic DNA (Homo sapiens) CpG-island No: 32805
tttgcggatttttcggtcgcgttttaaggtttatacgtcgcgtggtagttcggatgtagttcggtttcgaggcggtcggcggtcgagattggggtttcgagtcgagaagcgaagaataaagcggtcgcgttagttcgtcgtttcgagggatagttcgggcgcgttcgtcgtttcgtttatatttcgtttttcggtcgcgcgaaatggcggcggtcgtattataaaatggtagtcgttcggtcgcggagaagtatttgttaaatttcgtgattttttttttttgttttgtttcgttagcgttaacgtcgtttttttcgtttaggcgtttcggtttttttacgtcgtttcgtttaggggtaatagggttcggagttcgttaataacgcggcgtttttgtgcgggcgtacgttatttttatttagttatacgggttttttttcggggggtttttttttaaaggggtaatcgttggaagaaacggagtatcgtcgttcgggacgttttttaggttcggggttattacggtttttttaattcgtagcgttagcgttaggttattaaagtgaagatgggtggtgaaaggattatagagttcgatagaagagaaaatttaggaaaaat

SEQ ID NO: 32806 - DNA, 621 bp, Artificial Sequence
  chemically treated genomic DNA (Homo sapiens) CpG-island No: 32806
atttttcctaaattttctcttctatcgaactctataatcctttcaccacccatcttcactttaataacctaacgctaacgctacgaattaaaaaaaccgtaataaccccgaacctaaaaaacgtcccgaacgacgatactccgtttcttccaacgattacccctttaaaaaaaaaccccccgaaaaaaaacccgtataactaaataaaaataacgtacgcccgcacaaaaacgccgcgttattaacgaactccgaaccctattacccctaaacgaaacgacgtaaaaaaaccgaaacgcctaaacgaaaaaaacgacgttaacgctaacgaaacaaaacaaaaaaaaaaaatcacgaaatttaacaaatacttctccgcgaccgaacgactaccattttataatacgaccgccgccatttcgcgcgaccgaaaaacgaaatataaacgaaacgacgaacgcgcccgaactatccctcgaaacgacgaactaacgcgaccgctttattcttcgcttctcgactcgaaaccccaatctcgaccgccgaccgcctcgaaaccgaactacatccgaactaccacgcgacgtataaaccttaaaacgcgaccgaaaaatccgcaaa

SEQ ID NO: 32807 - DNA, 621 bp, Artificial Sequence
  chemically treated genomic DNA (Homo sapiens) CpG-island No: 32807
attttttttaggtttttttttttatcgggttttgtggtttttttattatttatttttattttggtggtttgacgttaacgttgcgagttggggaaatcgtagtaatttcgggtttgaggggcgtttcgggcggcggtgtttcgttttttttagcggttgtttttttaagaaaaagtttttcggagaggggttcgtgtggttgagtaaaggtggcgtgcgttcgtataaaggcgtcgcgttgttggcgggtttcggattttgttgtttttgggcggggcggcgtgggaagatcggggcgtttgggcggggagaacgacgttggcgttagcggggtagggtagggggagggagttacgggatttagtaggtgttttttcgcgatcgagcgattgttattttgtggtgcggtcgtcgttatttcgcgcggtcgaggggcggggtgtgggcggagcggcgggcgcgttcgggttgtttttcggggcggcgggttaacgcggtcgttttgtttttcgtttttcggttcgaggttttagtttcgatcgtcgatcgtttcggaatcgggttgtattcgagttgttacgcggcgtgtgaattttgaagcgcggtcggggaattcgtaag

SEQ ID NO: 32808 - DNA, 621 bp, Artificial Sequence
  chemically treated genomic DNA (Homo sapiens) CpG-island No: 32808
cttacgaattccccgaccgcgcttcaaaattcacacgccgcgtaacaactcgaatacaacccgattccgaaacgatcgacgatcgaaactaaaacctcgaaccgaaaaacgaaaaacaaaacgaccgcgttaacccgccgccccgaaaaacaacccgaacgcgcccgccgctccgcccacaccccgcccctcgaccgcgcgaaataacgacgaccgcaccacaaaataacaatcgctcgatcgcgaaaaaacacctactaaatcccgtaactccctccccctaccctaccccgctaacgccaacgtcgttctccccgcccaaacgccccgatcttcccacgccgccccgcccaaaaacaacaaaatccgaaacccgccaacaacgcgacgcctttatacgaacgcacgccacctttactcaaccacacgaacccctctccgaaaaactttttcttaaaaaaacaaccgctaaaaaaaacgaaacaccgccgcccgaaacgcccctcaaacccgaaattactacgatttccccaactcgcaacgttaacgtcaaaccaccaaaataaaaataaataataaaaaaaccacaaaacccgataaaaaaaaaaacctaaaaaaaat

SEQ ID NO: 32809 - DNA, 706 bp, Artificial Sequence
  chemically treated genomic DNA (Homo sapiens) CpG-island No: 32809
ggttggggggtaggtaggggtcgttttcgcggggcgggaatttcgcgtttttttttttcgagttttattttttatggtaaagcggcgcggggcggcggggcggagggagtcgagggggcggggagggcggacgggcggaggggacgggaggtttagcggtttcgggtttcgttggttcgggcgtcggatcggagtcgtcggggcgcgggcggtttaggtaagcgggtcgggtgggtgggggtcgcgttttttcgtttttgttttcggtgtatataggtgatagcgtcggtagtgttcggtcggagtttgttcggtcgttagtcgggattttcggcgcggcgtttttggaggggtttgcgggtggggggtgcggtttttacgttttttgcgttttagttttttggttttttttttcggagtcggggagtcggtaggttcggggcgagggtttagtgaggtcggcggagggtcgagttttagttcgggagcgggagtcggggattcggcgcgtagggcggaagttttcgtataaaaggtcggagtttcgtatatggatcgaattaaagtttcggcggcgtttagcggtgatttcggcggtcgttttgttcggttgtttgcggagggtttcgcgttttcggagttcgggggcgttttaggtttttttttttagttagggttaggtaaggggagggacgggtttcggggt

SEQ ID NO: 32810 - DNA, 706 bp, Artificial Sequence
  chemically treated genomic DNA (Homo sapiens) CpG-island No: 32810
accccgaaacccgtccctccccttacctaaccctaactaaaaaaaaaaacctaaaacgcccccgaactccgaaaacgcgaaaccctccgcaaacaaccgaacaaaacgaccgccgaaatcaccgctaaacgccgccgaaactttaattcgatccatatacgaaactccgaccttttatacgaaaacttccgccctacgcgccgaatccccgactcccgctcccgaactaaaactcgaccctccgccgacctcactaaaccctcgccccgaacctaccgactccccgactccgaaaaaaaaaaccaaaaaactaaaacgcaaaaaacgtaaaaaccgcaccccccacccgcaaacccctccaaaaacgccgcgccgaaaatcccgactaacgaccgaacaaactccgaccgaacactaccgacgctatcacctatatacaccgaaaacaaaaacgaaaaaacgcgacccccacccacccgacccgcttacctaaaccgcccgcgccccgacgactccgatccgacgcccgaaccaacgaaacccgaaaccgctaaacctcccgtcccctccgcccgtccgccctccccgccccctcgactccctccgccccgccgccccgcgccgctttaccataaaaaataaaactcgaaaaaaaaaaacgcgaaattcccgccccgcgaaaacgacccctacctaccccccaacc

SEQ ID NO: 32811 - DNA, 706 bp, Artificial Sequence
  chemically treated genomic DNA (Homo sapiens) CpG-island No: 32811
gtttcgggattcgtttttttttttgtttgattttggttaggaaaaggggtttggagcgttttcgggtttcggaaacgcgggatttttcgtaggtagtcgagtagggcggtcgtcggggttatcgttgggcgtcgtcggagttttaattcgatttatgtgcgggatttcggttttttgtgcgggagttttcgttttgcgcgtcgggttttcggttttcgttttcgggttgggattcggtttttcgtcggttttattgagttttcgtttcggatttgtcgatttttcgatttcggggagagagattaagagattgggacgtaaagggcgtgaggatcgtattttttattcgtaggtttttttaggggcgtcgcgtcgggggtttcggttggcgatcgagtaggtttcggtcgagtattgtcggcgttgttatttgtgtgtatcggggatagggacggagggacgcgatttttatttattcggttcgtttatttgggtcgttcgcgtttcggcggtttcgattcgacgttcgagttagcggagttcggagtcgttgggtttttcgtttttttcgttcgttcgtttttttcgttttttcggtttttttcgtttcgtcgtttcgcgtcgttttattataaaaggtgaggttcggggggagggggcgcgggattttcgtttcgcggaagcggtttttatttgttttttaatt

SEQ ID NO: 32812 - DNA, 706 bp, Artificial Sequence
  chemically treated genomic DNA (Homo sapiens) CpG-island No: 32812
aattaaaaaacaaataaaaaccgcttccgcgaaacgaaaatcccgcgccccctccccccgaacctcaccttttataataaaacgacgcgaaacgacgaaacgaaaaaaaccgaaaaaacgaaaaaaacgaacgaacgaaaaaaacgaaaaacccaacgactccgaactccgctaactcgaacgtcgaatcgaaaccgccgaaacgcgaacgacccaaataaacgaaccgaataaataaaaatcgcgtccctccgtccctatccccgatacacacaaataacaacgccgacaatactcgaccgaaacctactcgatcgccaaccgaaacccccgacgcgacgcccctaaaaaaacctacgaataaaaaatacgatcctcacgccctttacgtcccaatctcttaatctctctccccgaaatcgaaaaatcgacaaatccgaaacgaaaactcaataaaaccgacgaaaaaccgaatcccaacccgaaaacgaaaaccgaaaacccgacgcgcaaaacgaaaactcccgcacaaaaaaccgaaatcccgcacataaatcgaattaaaactccgacgacgcccaacgataaccccgacgaccgccctactcgactacctacgaaaaatcccgcgtttccgaaacccgaaaacgctccaaaccccttttcctaaccaaaatcaaacaaaaaaaaaaacgaatcccgaaac

SEQ ID NO: 32813 - DNA, 517 bp, Artificial Sequence
  chemically treated genomic DNA (Homo sapiens) CpG-island No: 32813
aaagttacgaatttcgtttttcgttttttttgtttaattttgtagcgttttttttattagaaaatttacgaatttcgttttttattagtatggttcggtttttatttggtttatgttcgtattgataaaaagtaaattggggtcgtcgcggggtcgtacggaagcggagggtattagtcggtggttatggcggtttcgaaagaagtttagaaaggcggtttttacggtcgaggttttggttgtagggggtttcgatgagagcggtcgatggttgaggtttcgttatgcgggcgattttcgaatggttcgtcgtagttttcgggttgtagttgttattgacgttgttatcgtagtttcgggtagtgattttacgtggttaaagagtgacgagggaaggaagttaggcgttttttatagcggtttttggcggtaggaggatttagggggcggtttttgtcgtcggggtggaagcgatcgattgggtcgttggtagagtttagtatagcgttcggtatat

SEQ ID NO: 32814 - DNA, 517 bp, Artificial Sequence
  chemically treated genomic DNA (Homo sapiens) CpG-island No: 32814
atataccgaacgctatactaaactctaccaacgacccaatcgatcgcttccaccccgacgacaaaaaccgccccctaaatcctcctaccgccaaaaaccgctataaaaaacgcctaacttccttccctcgtcactctttaaccacgtaaaatcactacccgaaactacgataacaacgtcaataacaactacaacccgaaaactacgacgaaccattcgaaaatcgcccgcataacgaaacctcaaccatcgaccgctctcatcgaaaccccctacaaccaaaacctcgaccgtaaaaaccgcctttctaaacttctttcgaaaccgccataaccaccgactaataccctccgcttccgtacgaccccgcgacgaccccaatttactttttatcaatacgaacataaaccaaataaaaaccgaaccatactaataaaaaacgaaattcgtaaattttctaataaaaaaaacgctacaaaattaaacaaaaaaaacgaaaaacgaaattcgtaacttt

SEQ ID NO: 32815 - DNA, 517 bp, Artificial Sequence
  chemically treated genomic DNA (Homo sapiens) CpG-island No: 32815
atgtgtcgggcgttgtgttagattttgttagcgatttaatcgatcgtttttatttcggcggtagaggtcgttttttgagtttttttatcgttaggggtcgttgtaggaaacgtttggtttttttttttcgttattttttgattacgtaaagttattgttcggagttacgatggtagcgttagtggtagttgtagttcggaggttgcggcgggttattcgaaggtcgttcgtatggcggggttttagttatcggtcgtttttatcggagttttttgtagttaaggtttcggtcgtgagggtcgtttttttgaatttttttcgggatcgttatggttatcggttggtgtttttcgttttcgtgcggtttcgcggcgattttagtttgttttttgttaatgcgggtatgaattaggtgagggtcgaattatattgatagggagcggagttcgtgagttttttggtgagaaagacgttgtaggattgggtaaaagaagcgagaggcggagttcgtagtttt

SEQ ID NO: 32816 - DNA, 517 bp, Artificial Sequence
  chemically treated genomic DNA (Homo sapiens) CpG-island No: 32816
aaaactacgaactccgcctctcgcttcttttacccaatcctacaacgtctttctcaccaaaaaactcacgaactccgctccctatcaatataattcgaccctcacctaattcatacccgcattaacaaaaaacaaactaaaatcgccgcgaaaccgcacgaaaacgaaaaacaccaaccgataaccataacgatcccgaaaaaaattcaaaaaaacgaccctcacgaccgaaaccttaactacaaaaaactccgataaaaacgaccgataactaaaaccccgccatacgaacgaccttcgaataacccgccgcaacctccgaactacaactaccactaacgctaccatcgtaactccgaacaataactttacgtaatcaaaaaataacgaaaaaaaaaaaccaaacgtttcctacaacgacccctaacgataaaaaaactcaaaaaacgacctctaccgccgaaataaaaacgatcgattaaatcgctaacaaaatctaacacaacgcccgacacat

SEQ ID NO: 32817 - DNA, 736 bp, Artificial Sequence
  chemically treated genomic DNA (Homo sapiens) CpG-island No: 32817
gtagcgagcggtagcgttgggtttttgtttcgttttcggcgcgtttttttagtgttgggttgggttgggttgggttgggtcgggtcggttcgcgttcggcggtagtttcgggtgcgtcgtaggagtgagcgcgtgtacggggtggggcgcggagggtcggtttttttttagtcgcggtgtttttcgtattttcgttcgcggggattgtggggtgcggttttttcgtcgttattcgttgttgtaggtttagagtcggggattggattttagatagttaggagattttttcgtttcggttcgtaattcgtgtcggggattttcggtagtcgcgtcgcgtagcgtcgcgtttcgtttcgtttcgtaggtttcgttttcgtatttcgtcggcgttcgtttttcgcgtcgttttttatatttggcgatcgtcgtagtttcgcgcgtttattggtcgcgagttggcggcgtggggggcgggttcgggtcgggtcggggcggggaaggaaggtggcggcggttcggcgcggggggaggggggtgttgattcggatgtttatttttgggtattcggggaagtggaagcgtcgggttttgttgcgggggggagagttattgacgtcgggatcgggatcgtcgtcgtcgtcgttattatggtaaaggtcgtacggtttttttttcggttcgggggttttttcggagttcgcgtttttttttttttgtttatttttggtttgggacg

SEQ ID NO: 32818 - DNA, 736 bp, Artificial Sequence
  chemically treated genomic DNA (Homo sapiens) CpG-island No: 32818
cgtcccaaaccaaaaataaacaaaaaaaaaaaaacgcgaactccgaaaaaacccccgaaccgaaaaaaaaaccgtacgacctttaccataataacgacgacgacgacgatcccgatcccgacgtcaataactctcccccccgcaacaaaacccgacgcttccacttccccgaatacccaaaaataaacatccgaatcaacacccccctccccccgcgccgaaccgccgccaccttccttccccgccccgacccgacccgaacccgccccccacgccgccaactcgcgaccaataaacgcgcgaaactacgacgatcgccaaatataaaaaacgacgcgaaaaacgaacgccgacgaaatacgaaaacgaaacctacgaaacgaaacgaaacgcgacgctacgcgacgcgactaccgaaaatccccgacacgaattacgaaccgaaacgaaaaaatctcctaactatctaaaatccaatccccgactctaaacctacaacaacgaataacgacgaaaaaaccgcaccccacaatccccgcgaacgaaaatacgaaaaacaccgcgactaaaaaaaaaccgaccctccgcgccccaccccgtacacgcgctcactcctacgacgcacccgaaactaccgccgaacgcgaaccgacccgacccaacccaacccaacccaacccaacactaaaaaaacgcgccgaaaacgaaacaaaaacccaacgctaccgctcgctac

SEQ ID NO: 32819 - DNA, 736 bp, Artificial Sequence
  chemically treated genomic DNA (Homo sapiens) CpG-island No: 32819
cgttttaggttagggatgggtagggggagggggacgcgagtttcggaggggttttcgggtcggggagggggtcgtgcggtttttattatggtggcggcggcggcggcggtttcggtttcggcgttagtggttttttttttcgtagtagggttcggcgtttttattttttcgggtgtttaggagtgaatattcgggttagtattttttttttttcgcgtcgggtcgtcgttatttttttttttcgtttcggttcggttcgggttcgttttttacgtcgttagttcgcggttaatgagcgcgcggggttgcggcgatcgttaagtatggagagcggcgcgagaggcgggcgtcgacggggtgcgggggcggggtttgcgaggcggggcggggcgcggcgttgcgcggcgcggttgtcgggagttttcggtacgggttgcgggtcggggcggaaaggttttttggttgtttgaggtttagttttcgattttgggtttgtagtagcgagtggcggcgagggaatcgtattttatagttttcgcgggcggggatgcggaaggtatcgcggttgggaggggatcggtttttcgcgttttatttcgtgtacgcgtttatttttgcggcgtattcggaattgtcgtcgagcgcggatcggttcggtttagtttaatttagtttaatttagtattgggggagcgcgtcgggagcggggtaggagtttagcgttgtcgttcgttat

SEQ ID NO: 32820 - DNA, 736 bp, Artificial Sequence
  chemically treated genomic DNA (Homo sapiens) CpG-island No: 32820
ataacgaacgacaacgctaaactcctaccccgctcccgacgcgctcccccaatactaaattaaactaaattaaactaaaccgaaccgatccgcgctcgacgacaattccgaatacgccgcaaaaataaacgcgtacacgaaataaaacgcgaaaaaccgatcccctcccaaccgcgataccttccgcatccccgcccgcgaaaactataaaatacgattccctcgccgccactcgctactacaaacccaaaatcgaaaactaaacctcaaacaaccaaaaaacctttccgccccgacccgcaacccgtaccgaaaactcccgacaaccgcgccgcgcaacgccgcgccccgccccgcctcgcaaaccccgcccccgcaccccgtcgacgcccgcctctcgcgccgctctccatacttaacgatcgccgcaaccccgcgcgctcattaaccgcgaactaacgacgtaaaaaacgaacccgaaccgaaccgaaacgaaaaaaaaaaataacgacgacccgacgcgaaaaaaaaaaaatactaacccgaatattcactcctaaacacccgaaaaaataaaaacgccgaaccctactacgaaaaaaaaaaccactaacgccgaaaccgaaaccgccgccgccgccgccaccataataaaaaccgcacgaccccctccccgacccgaaaacccctccgaaactcgcgtccccctccccctacccatccctaacctaaaacg

SEQ ID NO: 32821 - DNA, 759 bp, Artificial Sequence
  chemically treated genomic DNA (Homo sapiens) CpG-island No: 32821
gggtcgtgatttcgagagcgtggaagcgtcgagagttcgggtcggggaggtgcgggggaggggggagtcgagttcgagcggggggcggtcgggaaatcgagagttcgttttcggtttttttagttcgttttcgtagcgaaattttagagtcgggcgttcgttttaagtggagataaagagtcgcggagtaggcggtaaagtcgtcggcgggcgtcggggtcgggcggcgggcgcgggttttgtgcgtttagggttcggcgggtagcggtcggtcgttttttttgggttgcgtcgagcgcgttaatgtttgggattgcgcggatatcgtcggttttttagtaggttcggcgcggggtttcgaggtcgggggttttttttggggcgagttcgggtttttttcgggttatttagcgggtcgcgtttgtaggggggcgcgtcggggtagttttaagtattcggggcgcgcgggttcgattttagaggcgttcgggtttggggttcgcggcgagaagaggaaggaggcgggttacgaggtggtggtttggggtcgtaggagcgtcggagggtgagggcgggagttcggcgcgggcgtttcgacgttttttttcggagaggagagtttgttgtttcgtttgttattgtcgttgtcgtcgtcgtcgtcgtcgttgtaagttttttttagggtcggggaggaatttcgggtttagtaggtgtaaattaaacgttttggtattttaagtttagcgggtacgggaagtt

SEQ ID NO: 32822 - DNA, 759 bp, Artificial Sequence
  chemically treated genomic DNA (Homo sapiens) CpG-island No: 32822
aacttcccgtacccgctaaacttaaaataccaaaacgtttaatttacacctactaaacccgaaattcctccccgaccctaaaaaaaacttacaacgacgacgacgacgacgacaacgacaataacaaacgaaacaacaaactctcctctccgaaaaaaaacgtcgaaacgcccgcgccgaactcccgccctcaccctccgacgctcctacgaccccaaaccaccacctcgtaacccgcctccttcctcttctcgccgcgaaccccaaacccgaacgcctctaaaatcgaacccgcgcgccccgaatacttaaaactaccccgacgcgcccccctacaaacgcgacccgctaaataacccgaaaaaaacccgaactcgccccaaaaaaaacccccgacctcgaaaccccgcgccgaacctactaaaaaaccgacgatatccgcgcaatcccaaacattaacgcgctcgacgcaacccaaaaaaaacgaccgaccgctacccgccgaaccctaaacgcacaaaacccgcgcccgccgcccgaccccgacgcccgccgacgactttaccgcctactccgcgactctttatctccacttaaaacgaacgcccgactctaaaatttcgctacgaaaacgaactaaaaaaaccgaaaacgaactctcgatttcccgaccgccccccgctcgaactcgactcccccctcccccgcacctccccgacccgaactctcgacgcttccacgctctcgaaatcacgaccc

SEQ ID NO: 32823 - DNA, 759 bp, Artificial Sequence
  chemically treated genomic DNA (Homo sapiens) CpG-island No: 32823
ggtttttcgtgttcgttggatttaggatgttagggcgtttgatttgtatttattgagttcggagttttttttcggttttgggaagggtttgtagcggcggcggcggcggcggtagcggtagtagtagacggaatagtaggttttttttttcgagggggggcgtcgaagcgttcgcgtcgggttttcgtttttatttttcggcgtttttgcggttttaagttattatttcgtagttcgtttttttttttttttcgtcgcgagttttaggttcggacgtttttaggatcggattcgcgcgtttcggatgtttggggttgtttcggcgcgtttttttataggcgcgattcgttgagtgattcggagggggttcgagttcgttttaggaggggttttcggtttcgggatttcgcgtcggatttgttggggagtcgacgatgttcgcgtagttttaggtattgacgcgttcgacgtagtttagggaaggcggtcggtcgttgttcgtcgagttttaggcgtataaagttcgcgttcgtcgttcggtttcggcgttcgtcgacgattttgtcgtttgtttcgcggttttttgtttttatttggggcgggcgttcgattttgggatttcgttgcgagaacgagttgggggggtcgggggcgagttttcggtttttcggtcgtttttcgttcgggttcggtttttttttttttcgtattttttcggttcgggttttcggcgtttttacgttttcggaattacgattt

SEQ ID NO: 32824 - DNA, 759 bp, Artificial Sequence
  chemically treated genomic DNA (Homo sapiens) CpG-island No: 32824
aaatcgtaattccgaaaacgtaaaaacgccgaaaacccgaaccgaaaaaatacgaaaaaaaaaaaaaccgaacccgaacgaaaaacgaccgaaaaaccgaaaactcgcccccgacccccccaactcgttctcgcaacgaaatcccaaaatcgaacgcccgccccaaataaaaacaaaaaaccgcgaaacaaacgacaaaatcgtcgacgaacgccgaaaccgaacgacgaacgcgaactttatacgcctaaaactcgacgaacaacgaccgaccgccttccctaaactacgtcgaacgcgtcaatacctaaaactacgcgaacatcgtcgactccccaacaaatccgacgcgaaatcccgaaaccgaaaacccctcctaaaacgaactcgaaccccctccgaatcactcaacgaatcgcgcctataaaaaaacgcgccgaaacaaccccaaacatccgaaacgcgcgaatccgatcctaaaaacgtccgaacctaaaactcgcgacgaaaaaaaaaaaaaaacgaactacgaaataataacttaaaaccgcaaaaacgccgaaaaataaaaacgaaaacccgacgcgaacgcttcgacgccccccctcgaaaaaaaaaacctactattccgtctactactaccgctaccgccgccgccgccgccgctacaaacccttcccaaaaccgaaaaaaaactccgaactcaataaatacaaatcaaacgccctaacatcctaaatccaacgaacacgaaaaacc

SEQ ID NO: 32825 - DNA, 547 bp, Artificial Sequence
  chemically treated genomic DNA (Homo sapiens) CpG-island No: 32825
gggttttcgttgtttttagtttgagtatcgcgtttttatcgaggagcgtttagcgttatcgtcgttgtcgcgtcggagcgtataggtaggagagcgttggaggggagacgtagttcgagatcggggagttttacggttttttttttttttttcggttcggttttttttttcgcgtttcggtaaatttttaaaatatatatatttaatatatatatacgcgcgtacgtatatatatatatattaaaaaaaaaagtgtttcggatttacggatattatatatagataggcgaaggggacgagtacgaggtttgaattgtcgcgagagtagttttaaatagggattgaaaagtaataaaataatgtggtagtttcgttcggcgttggttaatgggagcgcggggtttttacgtggggttgcgggattcggtttacgattgggtgtcgttgggcgcgacgttataatgtttttttgtgtttaaaattatgtatgaaaagtagtaattaggttttattcgttggtgattttcgtatgggagtgaaaaatagt

SEQ ID NO: 32826 - DNA, 547 bp, Artificial Sequence
  chemically treated genomic DNA (Homo sapiens) CpG-island No: 32826
actatttttcactcccatacgaaaatcaccaacgaataaaacctaattactacttttcatacataattttaaacacaaaaaaacattataacgtcgcgcccaacgacacccaatcgtaaaccgaatcccgcaaccccacgtaaaaaccccgcgctcccattaaccaacgccgaacgaaactaccacattattttattacttttcaatccctatttaaaactactctcgcgacaattcaaacctcgtactcgtccccttcgcctatctatatataatatccgtaaatccgaaacacttttttttttaatatatatatatatacgtacgcgcgtatatatatattaaatatatatattttaaaaatttaccgaaacgcgaaaaaaaaaaccgaaccgaaaaaaaaaaaaaaaaccgtaaaactccccgatctcgaactacgtctcccctccaacgctctcctacctatacgctccgacgcgacaacgacgataacgctaaacgctcctcgataaaaacgcgatactcaaactaaaaacaacgaaaaccc

SEQ ID NO: 32827 - DNA, 547 bp, Artificial Sequence
  chemically treated genomic DNA (Homo sapiens) CpG-island No: 32827
gttgttttttatttttatgcgaaagttattagcgggtagggtttgattgttattttttatgtatagttttagatataagagggtattgtgacgtcgcgtttagcggtatttagtcgtaggtcgagtttcgtagttttacgtgggggtttcgcgtttttattggttagcgtcggacgaagttgttatattattttgttattttttagtttttatttggaattgttttcgcggtagtttagatttcgtgttcgtttttttcgtttgtttgtgtgtggtattcgtaggttcggggtatttttttttttggtgtgtgtgtgtgtgcgtgcgcgcgtgtgtgtgtgttgggtgtgtgtgttttgggggtttgtcggggcgcggagaggagagtcgggtcgaggggaaggaaggaagtcgtagagtttttcggtttcgggttgcgttttttttttagcgtttttttgtttgtgcgtttcgacgcggtagcggcggtggcgttgagcgtttttcggtggggacgcggtgtttaagttgggagtagcgagaattt

SEQ ID NO: 32828 - DNA, 547 bp, Artificial Sequence
  chemically treated genomic DNA (Homo sapiens) CpG-island No: 32828
aaattctcgctactcccaacttaaacaccgcgtccccaccgaaaaacgctcaacgccaccgccgctaccgcgtcgaaacgcacaaacaaaaaaacgctaaaaaaaaaacgcaacccgaaaccgaaaaactctacgacttccttccttcccctcgacccgactctcctctccgcgccccgacaaacccccaaaacacacacacccaacacacacacacgcgcgcacgcacacacacacacaccaaaaaaaaaaataccccgaacctacgaataccacacacaaacaaacgaaaaaaacgaacacgaaatctaaactaccgcgaaaacaattccaaataaaaactaaaaaataacaaaataatataacaacttcgtccgacgctaaccaataaaaacgcgaaacccccacgtaaaactacgaaactcgacctacgactaaataccgctaaacgcgacgtcacaataccctcttatatctaaaactatacataaaaaataacaatcaaaccctacccgctaataactttcgcataaaaataaaaaacaac

SEQ ID NO: 32829 - DNA, 581 bp, Artificial Sequence
  chemically treated genomic DNA (Homo sapiens) CpG-island No: 32829
  unsure (462)
ggcgttggcggaagtttgtaggtgtttcggtcgttagtttggatatttcgagggacgcggacgttttttcgttcgttcgtttcggtttcgggtttttcggatttttcgtttggtcgtataggttattcgatttcggggttagtttgttcgtaaatcgatggtttcgttttttcgcgttcggggttacggcggggtagacgagtaagtagggagtggattttaaagcgcgtatcgttcggtggacggttaaggcgggattttcggggtttttttcggtaagttcgcgagttcgcgcgcgagtcggtcgcgcgttttcggatttatattttttttttattaggagtcggaggttcgtttttgtattttaatgaggagttgagagttagcgggcgttcggaggtcggagcgcggggagttatacgtgagtattcgttttagaattgaattttttcgcgttcgttntcgtcgttagtttcgaatcgcgtttttttttttatttatttatttttttaaataaaaatataaatcgtgtttcggcgcgtatcgaagacgggggagggagaagttcggttcgatagatg

SEQ ID NO: 32830 - DNA, 581 bp, Artificial Sequence
  chemically treated genomic DNA (Homo sapiens) CpG-island No: 32830
  unsure (120)
catctatcgaaccgaacttctccctcccccgtcttcgatacgcgccgaaacacgatttatatttttatttaaaaaaataaataaataaaaaaaaaaacgcgattcgaaactaacgacganaacgaacgcgaaaaaattcaattctaaaacgaatactcacgtataactccccgcgctccgacctccgaacgcccgctaactctcaactcctcattaaaatacaaaaacgaacctccgactcctaataaaaaaaaaatataaatccgaaaacgcgcgaccgactcgcgcgcgaactcgcgaacttaccgaaaaaaaccccgaaaatcccgccttaaccgtccaccgaacgatacgcgctttaaaatccactccctacttactcgtctaccccgccgtaaccccgaacgcgaaaaaacgaaaccatcgatttacgaacaaactaaccccgaaatcgaataacctatacgaccaaacgaaaaatccgaaaaacccgaaaccgaaacgaacgaacgaaaaaacgtccgcgtccctcgaaatatccaaactaacgaccgaaacacctacaaacttccgccaacgcc

SEQ ID NO: 32831 - DNA, 581 bp, Artificial Sequence
  chemically treated genomic DNA (Homo sapiens) CpG-island No: 32831
  unsure (120)
tatttgtcgagtcgggtttttttttttttcgttttcggtgcgcgtcgaaatacgatttatgtttttatttaggagaataaataaatgaagaggggagcgcggttcggggttggcggcggnagcgggcgcggggaggtttagttttgaggcgggtgtttacgtgtaatttttcgcgtttcggttttcgagcgttcgttagtttttagttttttattaagatgtaaaagcgaattttcggtttttaatgaggggaaaatatagattcggggacgcgcggtcggttcgcgcgcgggttcgcggatttgtcggggagggtttcgggggtttcgttttggtcgtttatcgggcggtgcgcgttttgaggtttattttttgtttgttcgtttgtttcgtcgtaatttcgagcgcgggagggcgaggttatcggtttgcgggtaagttggtttcggagtcgagtggtttgtgcgattaagcggggggttcggggggttcggggtcggggcgagcgagcgggggagcgttcgcgtttttcggagtgtttaggttagcgatcgagatatttataggttttcgttaacgtt

SEQ ID NO: 32832 - DNA, 581 bp, Artificial Sequence
  chemically treated genomic DNA (Homo sapiens) CpG-island No: 32832
  unsure (462)
aacgttaacgaaaacctataaatatctcgatcgctaacctaaacactccgaaaaacgcgaacgctcccccgctcgctcgccccgaccccgaaccccccgaaccccccgcttaatcgcacaaaccactcgactccgaaaccaacttacccgcaaaccgataacctcgccctcccgcgctcgaaattacgacgaaacaaacgaacaaacaaaaaataaacctcaaaacgcgcaccgcccgataaacgaccaaaacgaaacccccgaaaccctccccgacaaatccgcgaacccgcgcgcgaaccgaccgcgcgtccccgaatctatattttcccctcattaaaaaccgaaaattcgcttttacatcttaataaaaaactaaaaactaacgaacgctcgaaaaccgaaacgcgaaaaattacacgtaaacacccgcctcaaaactaaacctccccgcgcccgctnccgccgccaaccccgaaccgcgctcccctcttcatttatttattctcctaaataaaaacataaatcgtatttcgacgcgcaccgaaaacgaaaaaaaaaaaaacccgactcgacaaata

SEQ ID NO: 32833 - DNA, 881 bp, Artificial Sequence
  chemically treated genomic DNA (Homo sapiens) CpG-island No: 32833
tcgttggtttttcgcgttggaagtgtttttattgtttttttttcgttgtatagtttgcgagtggagatttagagttcgggaatgaggcgtcgtgtttttaggaatttcgcgttcggggagcgttgagggatcggggagtcgggtggggagcgggtttcggggcgttcggcggcggaggcgtttttattcgcgcggagagggatggagcgcgttttgcgagcgttttcgagtttagttattttacgggttagggggaggggagcggggtcggcgtattagttcgtttttttcggttcgtttttttttttcgcgtcggggagtcgcggtggtgcgtttcggttagttgtgcgtcgtcgagcgaggcgttagttcgtgggtgttgtcgggggcggcggcgcggtgggggttttcgtagttggcggaggcgcgggtcgcggcgttgggttcgcggcggggagcgaaggtgagcgttagaacgcggagggttggcgcggttcgcggcgtcgggtttcgtttttcgttcgcggcggttttgtaggcgatttcgcgtttttatcggcgggagttcggggaagagcgggcggcggcgttgttgttggcggcggtcggttggatgcgagattcgcgtagattcggcggcggacggcggttttcgatttcggagagcggatcgcggggcgtaggagttcgatcgcgttggttatggtttttaattttaacgatatagttaagtagggttacgtgaaaattcgtagtaggaagtttggggtgagtggttcgttcggtttgtttttttttcggcgttcgttcggttcggttggttgtttggggggggggtagggagaggtgattcgtgcgggtatagggtagagagggattcg

SEQ ID NO: 32834 - DNA, 881 bp, Artificial Sequence
  chemically treated genomic DNA (Homo sapiens) CpG-island No: 32834
cgaatccctctctaccctatacccgcacgaatcacctctccctaccccccccccaaacaaccaaccgaaccgaacgaacgccgaaaaaaaaacaaaccgaacgaaccactcaccccaaacttcctactacgaattttcacgtaaccctacttaactatatcgttaaaattaaaaaccataaccaacgcgatcgaactcctacgccccgcgatccgctctccgaaatcgaaaaccgccgtccgccgccgaatctacgcgaatctcgcatccaaccgaccgccgccaacaacaacgccgccgcccgctcttccccgaactcccgccgataaaaacgcgaaatcgcctacaaaaccgccgcgaacgaaaaacgaaacccgacgccgcgaaccgcgccaaccctccgcgttctaacgctcaccttcgctccccgccgcgaacccaacgccgcgacccgcgcctccgccaactacgaaaacccccaccgcgccgccgcccccgacaacacccacgaactaacgcctcgctcgacgacgcacaactaaccgaaacgcaccaccgcgactccccgacgcgaaaaaaaaaaacgaaccgaaaaaaacgaactaatacgccgaccccgctcccctccccctaacccgtaaaataactaaactcgaaaacgctcgcaaaacgcgctccatccctctccgcgcgaataaaaacgcctccgccgccgaacgccccgaaacccgctccccacccgactccccgatccctcaacgctccccgaacgcgaaattcctaaaaacacgacgcctcattcccgaactctaaatctccactcgcaaactatacaacgaaaaaaaaacaataaaaacacttccaacgcgaaaaaccaacga

SEQ ID NO: 32835 - DNA, 881 bp, Artificial Sequence
  chemically treated genomic DNA (Homo sapiens) CpG-island No: 32835
cgggtttttttttgttttgtattcgtacgggttatttttttttgttttttttttaggtagttagtcgggtcgaacgagcgtcggggaaggagtaagtcgagcgagttatttattttaagttttttgttgcggatttttacgtagttttgtttgattatgtcgttaaagttggaggttatggttagcgcgatcgggtttttgcgtttcgcgattcgtttttcggagtcgagagtcgtcgttcgtcgtcgggtttgcgcgggtttcgtatttagtcggtcgtcgttagtagtagcgtcgtcgttcgttttttttcgagttttcgtcggtggggacgcggggtcgtttgtagggtcgtcgcggacggggaacggggttcggcgtcgcgagtcgcgttagtttttcgcgttttggcgtttattttcgtttttcgtcgcgagtttagcgtcgcggttcgcgttttcgttagttgcgggagtttttatcgcgtcgtcgttttcggtagtatttacgggttggcgtttcgttcggcggcgtatagttggtcggagcgtattatcgcggtttttcggcgcggggggagggggcgggtcggggggggcgggttgatgcgtcggtttcgtttttttttttttggttcgtggggtggttgggttcggagacgttcgtaagacgcgttttattttttttcgcgcgggtgggagcgttttcgtcgtcgggcgtttcgaggttcgttttttattcggtttttcggttttttagcgtttttcgggcgcgagatttttaaggatacggcgttttattttcgggttttaaatttttattcgtaagttgtgtagcggggaaagggtagtggggatatttttaacgcggaaggttagcgg

SEQ ID NO: 32836 - DNA, 881 bp, Artificial Sequence
  chemically treated genomic DNA (Homo sapiens) CpG-island No: 32836
ccgctaaccttccgcgttaaaaatatccccactaccctttccccgctacacaacttacgaataaaaatttaaaacccgaaaataaaacgccgtatccttaaaaatctcgcgcccgaaaaacgctaaaaaaccgaaaaaccgaataaaaaacgaacctcgaaacgcccgacgacgaaaacgctcccacccgcgcgaaaaaaaataaaacgcgtcttacgaacgtctccgaacccaaccaccccacgaaccaaaaaaaaaaaaacgaaaccgacgcatcaacccgccccccccgacccgccccctccccccgcgccgaaaaaccgcgataatacgctccgaccaactatacgccgccgaacgaaacgccaacccgtaaatactaccgaaaacgacgacgcgataaaaactcccgcaactaacgaaaacgcgaaccgcgacgctaaactcgcgacgaaaaacgaaaataaacgccaaaacgcgaaaaactaacgcgactcgcgacgccgaaccccgttccccgtccgcgacgaccctacaaacgaccccgcgtccccaccgacgaaaactcgaaaaaaaacgaacgacgacgctactactaacgacgaccgactaaatacgaaacccgcgcaaacccgacgacgaacgacgactctcgactccgaaaaacgaatcgcgaaacgcaaaaacccgatcgcgctaaccataacctccaactttaacgacataatcaaacaaaactacgtaaaaatccgcaacaaaaaacttaaaataaataactcgctcgacttactccttccccgacgctcgttcgacccgactaactacctaaaaaaaaaacaaaaaaaaataacccgtacgaatacaaaacaaaaaaaaacccg

SEQ ID NO: 32837 - DNA, 619 bp, Artificial Sequence
  chemically treated genomic DNA (Homo sapiens) CpG-island No: 32837
ttgacgttttcgggtcgaggtgcgttaggtggcgagggtgttaggcgcggttaagtcgcggcggtttgagttagttatttaattatgttgcggaattagggaggtcggttgggtcgttttcgtcgttgagtttcggtttttttcgcgcggggcgtttgtttttcgttttcgcgggcggagaggaagcggcggtcgaggcgaggcgcgggagtatttgagtaaggcgcgggcgtcgggttcggcgttttcggagttgagcgcgggttcgcggttcgcgtttttcgtttttaggtgcggcggtcgcgatacgtcggttttattaatagcgtcgttcgcgcggtcgtcgttaggtagtagaggcgattgcggatagtcggcggggatcgggaaagaggaggtttggcgttttcggtagaggggcgaggatcgagcgtttaaggttgggagagacgtcggcgttgagttttttagcgtcgttttatttcgtttttcgaatttcgcgattcgagcgtaaggcgagtattcggggtttcgggaaggttgggtcgggatggtttacgcgggggtgggaggattttgtttggaggggttggggtttttcgatattttatcgggtaaa

SEQ ID NO: 32838 - DNA, 619 bp, Artificial Sequence
  chemically treated genomic DNA (Homo sapiens) CpG-island No: 32838
tttacccgataaaatatcgaaaaaccccaacccctccaaacaaaatcctcccacccccgcgtaaaccatcccgacccaaccttcccgaaaccccgaatactcgccttacgctcgaatcgcgaaattcgaaaaacgaaataaaacgacgctaaaaaactcaacgccgacgtctctcccaaccttaaacgctcgatcctcgcccctctaccgaaaacgccaaacctcctctttcccgatccccgccgactatccgcaatcgcctctactacctaacgacgaccgcgcgaacgacgctattaataaaaccgacgtatcgcgaccgccgcacctaaaaacgaaaaacgcgaaccgcgaacccgcgctcaactccgaaaacgccgaacccgacgcccgcgccttactcaaatactcccgcgcctcgcctcgaccgccgcttcctctccgcccgcgaaaacgaaaaacaaacgccccgcgcgaaaaaaaccgaaactcaacgacgaaaacgacccaaccgacctccctaattccgcaacataattaaataactaactcaaaccgccgcgacttaaccgcgcctaacaccctcgccacctaacgcacctcgacccgaaaacgtcaa

SEQ ID NO: 32839 - DNA, 619 bp, Artificial Sequence
  chemically treated genomic DNA (Homo sapiens) CpG-island No: 32839
tttattcggtgaagtgtcgaaaagttttagtttttttagatagggtttttttattttcgcgtgggttatttcggtttagttttttcgaggtttcgggtattcgttttgcgttcgggtcgcggagttcgaaaagcgaggtgaggcggcgttgggaagtttagcgtcggcgttttttttagttttgggcgttcggttttcgtttttttgtcggaggcgttaggttttttttttttcggttttcgtcggttgttcgtagtcgtttttgttgtttggcggcggtcgcgcgggcggcgttgttagtggggtcggcgtgtcgcggtcgtcgtatttggaggcggggagcgcgggtcgcggattcgcgtttagtttcggaaacgtcgagttcggcgttcgcgttttgtttaggtgttttcgcgtttcgtttcggtcgtcgtttttttttcgttcgcgggggcggggagtaggcgtttcgcgcgggggaagtcggagtttaacggcgggggcggtttagtcggtttttttggtttcgtagtatagttgggtgattgatttagatcgtcgcgatttggtcgcgtttggtattttcgttatttggcgtatttcggttcggaggcgttag

SEQ ID NO: 32840 - DNA, 619 bp, Artificial Sequence
  chemically treated genomic DNA (Homo sapiens) CpG-island No: 32840
ctaacgcctccgaaccgaaatacgccaaataacgaaaataccaaacgcgaccaaatcgcgacgatctaaatcaatcacccaactatactacgaaaccaaaaaaaccgactaaaccgcccccgccgttaaactccgacttcccccgcgcgaaacgcctactccccgcccccgcgaacgaaaaaaaaacgacgaccgaaacgaaacgcgaaaacacctaaacaaaacgcgaacgccgaactcgacgtttccgaaactaaacgcgaatccgcgacccgcgctccccgcctccaaatacgacgaccgcgacacgccgaccccactaacaacgccgcccgcgcgaccgccgccaaacaacaaaaacgactacgaacaaccgacgaaaaccgaaaaaaaaaaaacctaacgcctccgacaaaaaaacgaaaaccgaacgcccaaaactaaaaaaaacgccgacgctaaacttcccaacgccgcctcacctcgcttttcgaactccgcgacccgaacgcaaaacgaatacccgaaacctcgaaaaaactaaaccgaaataacccacgcgaaaataaaaaaaccctatctaaaaaaactaaaacttttcgacacttcaccgaataaa

SEQ ID NO: 32841 - DNA, 669 bp, Artificial Sequence
  chemically treated genomic DNA (Homo sapiens) CpG-island No: 32841
atacgcgcgcgcgcgcgtattaggtttttatagatgttttttttttagagtcgcggtcgtagacgtagacgtaaatataaatatttacggcgggtttcgttttcgttcgtttcgaggggaagtcgcggcggtatatagggttcgtaatcggggttcgcgggcgggcgcgtagggaattcgggttcggggtttcggggggttcgcgttttttttttatttgtatttagcgcgtcggggttcgggcggcggcggcggcggcggcgacggggcggttggtgttggtgttgcggcggcgggggaggcggcggcggcggtggcggcggggttgagggtagtaaagatatgtaggtagttcgtcggaggggagaggtatcggtcggaggggatgcggggcgggcgggtcgggtcgggtcgtttgacgaacggtagaggcggcggcgcggaaggcggttgaagggagcgaggagatagatcgggggtcgggaagggggacgagggtcgcgtcgtcgggtttcgaggatagtgattttaggcgcgtaagagaggtttcgcggtcgcggtcgtcggcgcgaaggttttagtcgaaggaagttgcgttttcgtagggtcggagtcgcggttattgtttcgagagttacgtagagtttggttttggttttggttttttgg

SEQ ID NO: 32842 - DNA, 669 bp, Artificial Sequence
  chemically treated genomic DNA (Homo sapiens) CpG-island No: 32842
ccaaaaaaccaaaaccaaaaccaaactctacgtaactctcgaaacaataaccgcgactccgaccctacgaaaacgcaacttccttcgactaaaaccttcgcgccgacgaccgcgaccgcgaaacctctcttacgcgcctaaaatcactatcctcgaaacccgacgacgcgaccctcgtcccccttcccgacccccgatctatctcctcgctcccttcaaccgccttccgcgccgccgcctctaccgttcgtcaaacgacccgacccgacccgcccgccccgcatcccctccgaccgatacctctcccctccgacgaactacctacatatctttactaccctcaaccccgccgccaccgccgccgccgcctcccccgccgccgcaacaccaacaccaaccgccccgtcgccgccgccgccgccgccgcccgaaccccgacgcgctaaatacaaataaaaaaaaaacgcgaaccccccgaaaccccgaacccgaattccctacgcgcccgcccgcgaaccccgattacgaaccctatataccgccgcgacttcccctcgaaacgaacgaaaacgaaacccgccgtaaatatttatatttacgtctacgtctacgaccgcgactctaaaaaaaaaacatctataaaaacctaatacgcgcgcgcgcgcgtat

SEQ ID NO: 32843 - DNA, 669 bp, Artificial Sequence
  chemically treated genomic DNA (Homo sapiens) CpG-island No: 32843
ttaggaggttaaggttaaggttaggttttgcgtggttttcggagtagtagtcgcggtttcggttttgcgggggcgtagtttttttcggttggggttttcgcgtcggcggtcgcggtcgcggggttttttttgcgcgtttggggttattgttttcgaagttcggcggcgcggttttcgttttttttttcgattttcggtttgttttttcgttttttttagtcgtttttcgcgtcgtcgtttttgtcgttcgttaggcggttcggttcggttcgttcgtttcgtatttttttcggtcggtgtttttttttttcggcgggttgtttgtatgtttttgttgtttttagtttcgtcgttatcgtcgtcgtcgtttttttcgtcgtcgtagtattagtattagtcgtttcgtcgtcgtcgtcgtcgtcgtcgttcggatttcggcgcgttgaatgtaggtgaggagggggcgcgggtttttcgagatttcgggttcgggttttttgcgcgttcgttcgcgagtttcggttacgggttttgtgtgtcgtcgcggttttttttcggggcgggcgggagcgaggttcgtcgtgggtgtttgtgtttgcgtttgcgtttgcggtcgcggttttggaggggaagtatttgtgggggtttggtgcgcgcgcgcgcgcgtgt

SEQ ID NO: 32844 - DNA, 669 bp, Artificial Sequence
  chemically treated genomic DNA (Homo sapiens) CpG-island No: 32844
acacgcgcgcgcgcgcgcaccaaacccccacaaatacttcccctccaaaaccgcgaccgcaaacgcaaacgcaaacacaaacacccacgacgaacctcgctcccgcccgccccgaaaaaaaaccgcgacgacacacaaaacccgtaaccgaaactcgcgaacgaacgcgcaaaaaacccgaacccgaaatctcgaaaaacccgcgccccctcctcacctacattcaacgcgccgaaatccgaacgacgacgacgacgacgacgacgaaacgactaatactaatactacgacgacgaaaaaaacgacgacgacgataacgacgaaactaaaaacaacaaaaacatacaaacaacccgccgaaaaaaaaaaacaccgaccgaaaaaaatacgaaacgaacgaaccgaaccgaaccgcctaacgaacgacaaaaacgacgacgcgaaaaacgactaaaaaaaacgaaaaaacaaaccgaaaatcgaaaaaaaaaacgaaaaccgcgccgccgaacttcgaaaacaataaccccaaacgcgcaaaaaaaaccccgcgaccgcgaccgccgacgcgaaaaccccaaccgaaaaaaactacgcccccgcaaaaccgaaaccgcgactactactccgaaaaccacgcaaaacctaaccttaaccttaacctcctaa

SEQ ID NO: 32845 - DNA, 577 bp, Artificial Sequence
  chemically treated genomic DNA (Homo sapiens) CpG-island No: 32845
ttagtatttcggttttttacggtttcgtttcgtttaattaggtttcgcggtttttatggtgatatattttttcgcgttcgtagttcgtggtttattttttcggcggttttttatttaggtcgaaggtttatcgtttttaaggcgtttcggcgatcgcggtttttaattatttttaagtgtttatttcgatcgattattggagttttaatttattattttcgcgtcggtcgaggaattttttttcgtattttatattatcggatttttttcgttcggtttttcgtaggtatttttttttttcgttatttcgtttttcgtttcgtttattaagtgggtcgggcgttttttttttttcgttttatttttagtgtttttattttttaggttttttttttattcggagttgcgcgcgtcgttttttttttagtttagtatttttatttggcgggacgcgttttttttttttaaaaggttcgaatttttcgcgttttttttgtagttttttttttgtatagtttttttttttcgattttgtttataagttatatttttaaatgttttagattcgatttttgta

SEQ ID NO: 32846 - DNA, 577 bp, Artificial Sequence
  chemically treated genomic DNA (Homo sapiens) CpG-island No: 32846
tacaaaaatcgaatctaaaacatttaaaaatataacttataaacaaaatcgaaaaaaaaaaactatacaaaaaaaaaactacaaaaaaaacgcgaaaaattcgaaccttttaaaaaaaaaaaacgcgtcccgccaaataaaaatactaaactaaaaaaaaaacgacgcgcgcaactccgaataaaaaaaaaacctaaaaaataaaaacactaaaaataaaacgaaaaaaaaaaaacgcccgacccacttaataaacgaaacgaaaaacgaaataacgaaaaaaaaaaatacctacgaaaaaccgaacgaaaaaaatccgataatataaaatacgaaaaaaaattcctcgaccgacgcgaaaataataaattaaaactccaataatcgatcgaaataaacacttaaaaataattaaaaaccgcgatcgccgaaacgccttaaaaacgataaaccttcgacctaaataaaaaaccgccgaaaaaataaaccacgaactacgaacgcgaaaaaatatatcaccataaaaaccgcgaaacctaattaaacgaaacgaaaccgtaaaaaaccgaaatactaa

SEQ ID NO: 32847 - DNA, 577 bp, Artificial Sequence
  chemically treated genomic DNA (Homo sapiens) CpG-island No: 32847
tgtaggggtcgagtttggagtatttgggggtgtagtttgtaaatagggtcggaggagagaggttgtgtaggaagagggttgtaggggagacgcggagagttcgggttttttggagggaggagacgcgtttcgttaggtgggggtgttgggttaaggaaggggcgacgcgcgtagtttcgggtggggagggggtttgggaggtgggagtattgggggtggggcgagaaggggaaggcgttcggtttatttggtgggcggggcggggggcggggtggcgggaaggaggaatgtttgcgggaggtcgaacggggagagttcggtggtgtggggtgcgaaaggaggtttttcggtcggcgcggagatagtgagttggggttttagtagtcgatcgaggtagatatttagaggtagttaagagtcgcggtcgtcgagacgttttggggacggtgggttttcggtttaggtgaggggtcgtcgagggggtgggttacgagttgcgagcgcgggggggtgtgttattatggggatcgcggggtttaattgggcggggcggggtcgtggggagtcgaagtgttgg

SEQ ID NO: 32848 - DNA, 577 bp, Artificial Sequence
  chemically treated genomic DNA (Homo sapiens) CpG-island No: 32848
ccaacacttcgactccccacgaccccgccccgcccaattaaaccccgcgatccccataataacacacccccccgcgctcgcaactcgtaacccaccccctcgacgacccctcacctaaaccgaaaacccaccgtccccaaaacgtctcgacgaccgcgactcttaactacctctaaatatctacctcgatcgactactaaaaccccaactcactatctccgcgccgaccgaaaaacctcctttcgcaccccacaccaccgaactctccccgttcgacctcccgcaaacattcctccttcccgccaccccgccccccgccccgcccaccaaataaaccgaacgccttccccttctcgccccacccccaatactcccacctcccaaaccccctccccacccgaaactacgcgcgtcgccccttccttaacccaacacccccacctaacgaaacgcgtctcctccctccaaaaaacccgaactctccgcgtctcccctacaaccctcttcctacacaacctctctcctccgaccctatttacaaactacacccccaaatactccaaactcgacccctaca

SEQ ID NO: 32849 - DNA, 938 bp, Artificial Sequence
  chemically treated genomic DNA (Homo sapiens) CpG-island No: 32849
ttttcgtcgggttttaagcgtttcgtcgttatgttttcgttttcgattttatttttatttcgttatttggtgggggtagtaggcgttatcgattttcgtagtttttcgttgaggtttttcgttttgggcggtgacgcggagcgcgttaagggtttgggtttaggtttagtttcgttttaggtcgtattttcgtttggggaaggagaggtttcgggggtagcggcggtacggtcgttttcgcgtgaggttttggtcgaggttttgttggtattatttagcgtcggagatttggggaagaagttgtatagggtgttttgtcgcgatatatcgatagtcggtaaggtttaatcgttttgtcggacggagtttttaaaagtatcgtatttatcgcgcggtttttgttggcgggaaatttggggggaggcgcgtttcgtcggaggaattcgggttttagtggttaattaataggcgtttcgtcgtgcgcgggcggtgcgcgttaggtttcgttttcgggcgcgcggcgacgtggggaagggcggggttggtatattggtgggtaggggcggggttggtacgttggcggtgaggggttcgttttgtcgtcgacgtttgggtttcgcgcggggaattgttgagtttttttttttttacgtcgcggggttggtcgggtcggaatatttcgattcggggttagttgcggtcgcggggttagtaggttcggaaagttttgtttttttggagcggaagcgggaatagcgggggcgcgtatcgttcgggcggggataatcggggggattcgaaaggtttcggaaaggggttcgcggggagaaacgcgtttagcgttcgcgtgattttttgtcgttagagtattttcgtaaggagacggagcgaaagggattaaattttagttagtagtttatttttacgttgtattttta

SEQ ID NO: 32850 - DNA, 938 bp, Artificial Sequence
  chemically treated genomic DNA (Homo sapiens) CpG-island No: 32850
taaaaatacaacgtaaaaataaactactaactaaaatttaatccctttcgctccgtctccttacgaaaatactctaacgacaaaaaatcacgcgaacgctaaacgcgtttctccccgcgaacccctttccgaaacctttcgaatccccccgattatccccgcccgaacgatacgcgcccccgctattcccgcttccgctccaaaaaaacaaaactttccgaacctactaaccccgcgaccgcaactaaccccgaatcgaaatattccgacccgaccaaccccgcgacgtaaaaaaaaaaaaactcaacaattccccgcgcgaaacccaaacgtcgacgacaaaacgaacccctcaccgccaacgtaccaaccccgcccctacccaccaatataccaaccccgcccttccccacgtcgccgcgcgcccgaaaacgaaacctaacgcgcaccgcccgcgcacgacgaaacgcctattaattaaccactaaaacccgaattcctccgacgaaacgcgcctccccccaaatttcccgccaacaaaaaccgcgcgataaatacgatacttttaaaaactccgtccgacaaaacgattaaaccttaccgactatcgatatatcgcgacaaaacaccctatacaacttcttccccaaatctccgacgctaaataataccaacaaaacctcgaccaaaacctcacgcgaaaacgaccgtaccgccgctacccccgaaacctctccttccccaaacgaaaatacgacctaaaacgaaactaaacctaaacccaaacccttaacgcgctccgcgtcaccgcccaaaacgaaaaacctcaacgaaaaactacgaaaatcgataacgcctactacccccaccaaataacgaaataaaaataaaatcgaaaacgaaaacataacgacgaaacgcttaaaacccgacgaaaa

SEQ ID NO: 32851 - DNA, 938 bp, Artificial Sequence
  chemically treated genomic DNA (Homo sapiens) CpG-island No: 32851
tgagaatataacgtgaaggtgaattgttgattaaagtttggtttttttcgtttcgtttttttgcgaaaatgttttaacggtaggaggttacgcgagcgttggacgcgttttttttcgcgagttttttttcgaggtttttcgggttttttcggttattttcgttcgggcggtgcgcgttttcgttgttttcgttttcgttttagagaggtagggtttttcgagtttgttagtttcgcggtcgtaattaatttcgggtcggagtgtttcggttcggttagtttcgcggcgtgagggaaggggagtttagtagtttttcgcgcggggtttaggcgtcggcggtagggcgggttttttatcgttagcgtgttagtttcgtttttatttattagtgtgttagtttcgtttttttttacgtcgtcgcgcgttcgggggcggggtttggcgcgtatcgttcgcgtacggcgaggcgtttgttgattggttattggggttcgggttttttcggcggagcgcgtttttttttagatttttcgttagtaggagtcgcgcggtagatgcggtgtttttaggagtttcgttcgatagaacggttgggttttgtcggttgtcggtatgtcgcgatagagtattttgtatagttttttttttaagttttcggcgttgagtgatgttaataaggtttcggttagggttttacgcgaaggcggtcgtgtcgtcgttgttttcggggtttttttttttttaggcggggatgcggtttggagcgaggttgggtttgggtttaggtttttggcgcgtttcgcgttatcgtttaaggcgaagaattttaacggagggttgcggagatcggtagcgtttgttgtttttattaggtagcggggtgggggtggggtcgaaggcgggggtatagcggcggggcgtttggaattcggcgaggg

SEQ ID NO: 32852 - DNA, 938 bp, Artificial Sequence
  chemically treated genomic DNA (Homo sapiens) CpG-island No: 32852
ccctcgccgaattccaaacgccccgccgctatacccccgccttcgaccccacccccaccccgctacctaataaaaacaacaaacgctaccgatctccgcaaccctccgttaaaattcttcgccttaaacgataacgcgaaacgcgccaaaaacctaaacccaaacccaacctcgctccaaaccgcatccccgcctaaaaaaaaaaaaaccccgaaaacaacgacgacacgaccgccttcgcgtaaaaccctaaccgaaaccttattaacatcactcaacgccgaaaacttaaaaaaaaaactatacaaaatactctatcgcgacataccgacaaccgacaaaacccaaccgttctatcgaacgaaactcctaaaaacaccgcatctaccgcgcgactcctactaacgaaaaatctaaaaaaaaacgcgctccgccgaaaaaacccgaaccccaataaccaatcaacaaacgcctcgccgtacgcgaacgatacgcgccaaaccccgcccccgaacgcgcgacgacgtaaaaaaaaacgaaactaacacactaataaataaaaacgaaactaacacgctaacgataaaaaacccgccctaccgccgacgcctaaaccccgcgcgaaaaactactaaactccccttccctcacgccgcgaaactaaccgaaccgaaacactccgacccgaaattaattacgaccgcgaaactaacaaactcgaaaaaccctacctctctaaaacgaaaacgaaaacaacgaaaacgcgcaccgcccgaacgaaaataaccgaaaaaacccgaaaaacctcgaaaaaaaactcgcgaaaaaaaacgcgtccaacgctcgcgtaacctcctaccgttaaaacattttcgcaaaaaaacgaaacgaaaaaaaccaaactttaatcaacaattcaccttcacgttatattctca

SEQ ID NO: 32853 - DNA, 835 bp, Artificial Sequence
  chemically treated genomic DNA (Homo sapiens) CpG-island No: 32853
cggttttacgcgggggtataggttggggtaggggcgatcgagtcgggtataggaattcgtagtagggtagggttggcggttacgtcgttttcggttcgcggggaattacgcgggttttcgggttacgtcgtcgcgtttcgatcgttttcggggagaggggaggagtttttagcgtcgggcggggcgtggttaaggtcggtgggttttatcgtagttagacgttgttcgtttaagcgtagagggtcgcgggttacgtggtgggcggggtgggggcgtggtattaggaagcggcgttcgcgtcgggtttagagtcgtagtcgtagtcgtcgttatagttcgggtcgggttttatcgcgtattttgttttattttggcgatcgttttcggggttttcgtcgcgggcgcggcgttcgttatgggcgaggaggattattatttggagttgtgcgagcggtcggtgtagttcgagaaggcgaattttgttaattgcgtttttttcgatgaggttaataagtaggttcggcgcgttcgcgttttttttttcgcgcggttttgtcggggtcgtgggcgcgttaaggtcggtttcgcgcgattaggttcgagcgtttttttttgttttgtttcgtttcgttttagcgcgggaggcggcgcgcgttttttttttgttgggtgggtttagtcgcggttaggtgttttcgtaggtgatttcggggttggattttcgagttagttgcgcggatgtagtggtttcgtggttagtgttttaattgttggcgcgttcgttttatttaggttttttttgttgtgtttgttattagttatattcgtagttaag

SEQ ID NO: 32854 - DNA, 835 bp, Artificial Sequence
  chemically treated genomic DNA (Homo sapiens) CpG-island No: 32854
cttaactacgaatataactaataacaaacacaacaaaaaaaacctaaataaaacgaacgcgccaacaattaaaacactaaccacgaaaccactacatccgcgcaactaactcgaaaatccaaccccgaaatcacctacgaaaacacctaaccgcgactaaacccacccaacaaaaaaaaaacgcgcgccgcctcccgcgctaaaacgaaacgaaacaaaacaaaaaaaaacgctcgaacctaatcgcgcgaaaccgaccttaacgcgcccacgaccccgacaaaaccgcgcgaaaaaaaaaacgcgaacgcgccgaacctacttattaacctcatcgaaaaaaacgcaattaacaaaattcgccttctcgaactacaccgaccgctcgcacaactccaaataataatcctcctcgcccataacgaacgccgcgcccgcgacgaaaaccccgaaaacgatcgccaaaataaaacaaaatacgcgataaaacccgacccgaactataacgacgactacgactacgactctaaacccgacgcgaacgccgcttcctaataccacgcccccaccccgcccaccacgtaacccgcgaccctctacgcttaaacgaacaacgtctaactacgataaaacccaccgaccttaaccacgccccgcccgacgctaaaaactcctcccctctccccgaaaacgatcgaaacgcgacgacgtaacccgaaaacccgcgtaattccccgcgaaccgaaaacgacgtaaccgccaaccctaccctactacgaattcctatacccgactcgatcgcccctaccccaacctatacccccgcgtaaaaccg

SEQ ID NO: 32855 - DNA, 835 bp, Artificial Sequence
  chemically treated genomic DNA (Homo sapiens) CpG-island No: 32855
tttgattacgagtgtaattaatgataaatataataaaagaagtttagataagacgggcgcgttaataattgagatattggttacggggttattgtattcgcgtagttggttcgggggtttagtttcgaggttatttgcgaggatatttggtcgcggttgagtttatttaataaggaaggagcgcgcgtcgtttttcgcgttgggacgggacgggataggataggaggggacgttcgggtttggtcgcgcgggatcggttttggcgcgtttacgatttcggtagggtcgcgcgggggaggaagcgcgggcgcgtcggatttgtttgttggttttatcgaagaagacgtagttgatagggttcgttttttcgaattgtatcggtcgttcgtatagttttagatagtagtttttttcgtttatggcgggcgtcgcgttcgcggcgggggtttcgggggcggtcgttagagtggagtaggatgcgcggtggagttcggttcggattgtagcggcggttgcggttgcggttttgggttcggcgcggacgtcgttttttggtgttacgtttttatttcgtttattacgtgattcgcggttttttgcgtttaaacgggtagcgtttggttgcggtggggtttatcggttttaattacgtttcgttcggcgttggaggtttttttttttttttcgagggcggtcggaacgcggcggcgtgattcggaagttcgcgtggtttttcgcggatcgagggcggcgtagtcgttaattttattttgttgcgagtttttgtgttcggttcggtcgtttttgttttaatttgtattttcgcgtgggatcg

SEQ ID NO: 32856 - DNA, 835 bp, Artificial Sequence
  chemically treated genomic DNA (Homo sapiens) CpG-island No: 32856
cgatcccacgcgaaaatacaaattaaaacaaaaacgaccgaaccgaacacaaaaactcgcaacaaaataaaattaacgactacgccgccctcgatccgcgaaaaaccacgcgaacttccgaatcacgccgccgcgttccgaccgccctcgaaaaaaaaaaaaaaacctccaacgccgaacgaaacgtaattaaaaccgataaaccccaccgcaaccaaacgctacccgtttaaacgcaaaaaaccgcgaatcacgtaataaacgaaataaaaacgtaacaccaaaaaacgacgtccgcgccgaacccaaaaccgcaaccgcaaccgccgctacaatccgaaccgaactccaccgcgcatcctactccactctaacgaccgcccccgaaacccccgccgcgaacgcgacgcccgccataaacgaaaaaaactactatctaaaactatacgaacgaccgatacaattcgaaaaaacgaaccctatcaactacgtcttcttcgataaaaccaacaaacaaatccgacgcgcccgcgcttcctcccccgcgcgaccctaccgaaatcgtaaacgcgccaaaaccgatcccgcgcgaccaaacccgaacgtcccctcctatcctatcccgtcccgtcccaacgcgaaaaacgacgcgcgctccttccttattaaataaactcaaccgcgaccaaatatcctcgcaaataacctcgaaactaaacccccgaaccaactacgcgaatacaataaccccgtaaccaatatctcaattattaacgcgcccgtcttatctaaacttcttttattatatttatcattaattacactcgtaatcaaa

SEQ ID NO: 32857 - DNA, 915 bp, Artificial Sequence
  chemically treated genomic DNA (Homo sapiens) CpG-island No: 32857
cgcggtttcgttattcggtagtattttacgttagtttagtagttttttttattgttttcgttttttatattcgggttttagcgtcgttttttttttatattgatttcgttttcgtagttatttagatagatatttttttcgttttcgtttaggtttgtatcgttattgtcgtttttgtcgtcgcgtttcgtttcggttttgttacgttaggtcgcgtatttttggttaggacgatcgttgtcgtcgtcgtcgtcgtcgagttttagattgaagtttgggcgttcgcgatcgtattagttttttggttttagagattttgagttttcggttgacgcggaagcgtagttatttttattatcgtcgttacggttaatacgggtgttacgcgtcgttatcgtcgtcgggtcgtcgtcgtcgtcgtcgtcgtcgtcgtcgttgttgtagatcgttcgtcgtttattatggtttagtagtaaataggtagtaggaaacggaaagcgttcgcggtcgaggcgggagtcgggagttcgtcgtcgtagggtttagcggcggcggacggagaggggtttttgttatttaagaagtagaagcggtcggcgacgcgtcgtaggttggtgtattatttgaagggtcgggaggtaggagcgcggggtttagtcgggttttagggtttcgagggcgagttgcggggttacgtcgtttagaggttgttcgagttgttgacggagcgttagttggatttgggtatttttaataaggtgttcgcgttatagtggttgaacgttaggtaggtggtgtgcggtattaagtgtaatacgttgtttgtggtggacgtgtagttaggttatattacgcgtattttttttatgcgggataaggaggtcgggttggtttaggtttattagcggttgcggt

SEQ ID NO: 32858 - DNA, 915 bp, Artificial Sequence
  chemically treated genomic DNA (Homo sapiens) CpG-island No: 32858
accgcaaccgctaataaacctaaaccaacccgacctccttatcccgcataaaaaaaatacgcgtaatataacctaactacacgtccaccacaaacaacgtattacacttaataccgcacaccacctacctaacgttcaaccactataacgcgaacaccttattaaaaatacccaaatccaactaacgctccgtcaacaactcgaacaacctctaaacgacgtaaccccgcaactcgccctcgaaaccctaaaacccgactaaaccccgcgctcctacctcccgacccttcaaataatacaccaacctacgacgcgtcgccgaccgcttctacttcttaaataacaaaaacccctctccgtccgccgccgctaaaccctacgacgacgaactcccgactcccgcctcgaccgcgaacgctttccgtttcctactacctatttactactaaaccataataaacgacgaacgatctacaacaacgacgacgacgacgacgacgacgacgacgacccgacgacgataacgacgcgtaacacccgtattaaccgtaacgacgataataaaaataactacgcttccgcgtcaaccgaaaactcaaaatctctaaaaccaaaaaactaatacgatcgcgaacgcccaaacttcaatctaaaactcgacgacgacgacgacgacaacgatcgtcctaaccaaaaatacgcgacctaacgtaacaaaaccgaaacgaaacgcgacgacaaaaacgacaataacgatacaaacctaaacgaaaacgaaaaaaatatctatctaaataactacgaaaacgaaatcaatataaaaaaaaaacgacgctaaaacccgaatataaaaaacgaaaacaataaaaaaaactactaaactaacgtaaaatactaccgaataacgaaaccgcg

SEQ ID NO: 32859 - DNA, 915 bp, Artificial Sequence
  chemically treated genomic DNA (Homo sapiens) CpG-island No: 32859
gtcgtagtcgttggtgggtttgggttagttcggtttttttgtttcgtatgagggggatgcgcgtgatgtggtttgattgtacgtttattataaatagcgtattatatttggtgtcgtatattatttgtttggcgtttagttattgtgacgcgaatattttgttgagggtgtttaggtttagttggcgtttcgttagtagttcgggtagtttttggacggcgtagtttcgtagttcgttttcgaagttttggagttcggttgggtttcgcgtttttatttttcggttttttagatagtgtattagtttgcgacgcgtcgtcggtcgtttttgttttttgggtagtagaggttttttttcgttcgtcgtcgttaaattttgcgacgacgagttttcggttttcgtttcgatcgcgggcgtttttcgttttttgttatttgtttgttgttgggttatggtgggcggcgggcgatttgtagtagcggcggcggcggcggcggcggcggcggcggttcggcggcggtggcggcgcgtggtattcgtgttggtcgtggcggcggtggtggggatggttgcgttttcgcgttagtcgagagtttaggatttttaagattaagaagttggtgcgatcgcgggcgtttagattttagtttgaggttcggcggcggcggcggcggtagcggtcgttttggttagagatgcgcggtttgacgtagtagagtcggggcgaagcgcggcggtaagggcggtagtggcggtgtagatttaggcgagagcgggaagagtgtttgtttggatggttgcgggagcgaagttagtgtggggggaggacgacgttggggttcgagtgtgaagggcggaggtagtgggaggagttgttgggttggcgtggggtgttgtcgggtagcgaggtcgcg

SEQ ID NO: 32860 - DNA, 915 bp, Artificial Sequence
  chemically treated genomic DNA (Homo sapiens) CpG-island No: 32860
cgcgacctcgctacccgacaacaccccacgccaacccaacaactcctcccactacctccgcccttcacactcgaaccccaacgtcgtcctccccccacactaacttcgctcccgcaaccatccaaacaaacactcttcccgctctcgcctaaatctacaccgccactaccgcccttaccgccgcgcttcgccccgactctactacgtcaaaccgcgcatctctaaccaaaacgaccgctaccgccgccgccgccgccgaacctcaaactaaaatctaaacgcccgcgatcgcaccaacttcttaatcttaaaaatcctaaactctcgactaacgcgaaaacgcaaccatccccaccaccgccgccacgaccaacacgaataccacgcgccgccaccgccgccgaaccgccgccgccgccgccgccgccgccgccgctactacaaatcgcccgccgcccaccataacccaacaacaaacaaataacaaaaaacgaaaaacgcccgcgatcgaaacgaaaaccgaaaactcgtcgtcgcaaaatttaacgacgacgaacgaaaaaaaacctctactacccaaaaaacaaaaacgaccgacgacgcgtcgcaaactaatacactatctaaaaaaccgaaaaataaaaacgcgaaacccaaccgaactccaaaacttcgaaaacgaactacgaaactacgccgtccaaaaactacccgaactactaacgaaacgccaactaaacctaaacaccctcaacaaaatattcgcgtcacaataactaaacgccaaacaaataatatacgacaccaaatataatacgctatttataataaacgtacaatcaaaccacatcacgcgcatccccctcatacgaaacaaaaaaaccgaactaacccaaacccaccaacgactacgac

SEQ ID NO: 32861 - DNA, 530 bp, Artificial Sequence
  chemically treated genomic DNA (Homo sapiens) CpG-island No: 32861
  unsure (104)
gtcgagggtcgtttgttgggttgagggcggatatatgtagtttggttgagttgtcgagttgaggcgtgggcggcggcggcggcgttgtggcgttgcgtagatangtcgtttttcgttgtgtcgtgtagttgggtcgcgcgttgtttttcgtttcgcgtttcgtttcgaaggtattggtttttcgaattagttagggcgatcggcgtgtttacggtggggggacgcggaagtggggttttatgggttcggatgagtagtgggttaggtgttagttgcgttttttacgagcgttttggattgcggcgcggggattgaaatagtcggttaattgtagtaagaatagtgttcgtcggagggggcgtagggttgaggacgttaatattttgtttcgtttttgttcgtaagggtgagaatgatttttttagcgattttcgtttttttgttttttcgttaagttgtttattttaggtttttaggtttacgacgttggtattcggatattttttgtagtattttataggttttcggaa

SEQ ID NO: 32862 - DNA, 530 bp, Artificial Sequence
  chemically treated genomic DNA (Homo sapiens) CpG-island No: 32862
  unsure (427)
ttccgaaaacctataaaatactacaaaaaatatccgaataccaacgtcgtaaacctaaaaacctaaaataaacaacttaacgaaaaaacaaaaaaacgaaaatcgctaaaaaaatcattctcacccttacgaacaaaaacgaaacaaaatattaacgtcctcaaccctacgccccctccgacgaacactattcttactacaattaaccgactatttcaatccccgcgccgcaatccaaaacgctcgtaaaaaacgcaactaacacctaacccactactcatccgaacccataaaaccccacttccgcgtccccccaccgtaaacacgccgatcgccctaactaattcgaaaaaccaataccttcgaaacgaaacgcgaaacgaaaaacaacgcgcgacccaactacacgacacaacgaaaaacgacntatctacgcaacgccacaacgccgccgccgccgcccacgcctcaactcgacaactcaaccaaactacatatatccgccctcaacccaacaaacgaccctcgac

SEQ ID NO: 32863 - DNA, 530 bp, Artificial Sequence
  chemically treated genomic DNA (Homo sapiens) CpG-island No: 32863
  unsure (427)
tttcggaggtttgtggagtattgtagagagtgttcgaatgttagcgtcgtgagtttggaggtttagggtgggtagtttggcgagagagtaggagggcgaaagtcgttggaagagttatttttatttttacgggtaggagcggaataaagtgttagcgtttttagttttgcgtttttttcggcggatattgtttttgttgtagttggtcggttgttttagttttcgcgtcgtagtttagggcgttcgtagagggcgtaattggtatttggtttattatttattcgagtttatggaattttattttcgcgtttttttatcgtaagtacgtcggtcgttttagttgattcgggaggttagtattttcggggcggggcgcggggcggagagtagcgcgcgatttaattgtacggtataacgagagacggtntgtttgcgtagcgttataacgtcgtcgtcgtcgtttacgttttaattcggtagtttagttaggttgtatgtgttcgtttttagtttagtaagcggttttcgat

SEQ ID NO: 32864 - DNA, 530 bp, Artificial Sequence
  chemically treated genomic DNA (Homo sapiens) CpG-island No: 32864
  unsure (104)
atcgaaaaccgcttactaaactaaaaacgaacacatacaacctaactaaactaccgaattaaaacgtaaacgacgacgacgacgttataacgctacgcaaacanaccgtctctcgttataccgtacaattaaatcgcgcgctactctccgccccgcgccccgccccgaaaatactaacctcccgaatcaactaaaacgaccgacgtacttacgataaaaaaacgcgaaaataaaattccataaactcgaataaataataaaccaaataccaattacgccctctacgaacgccctaaactacgacgcgaaaactaaaacaaccgaccaactacaacaaaaacaatatccgccgaaaaaaacgcaaaactaaaaacgctaacactttattccgctcctacccgtaaaaataaaaataactcttccaacgactttcgccctcctactctctcgccaaactacccaccctaaacctccaaactcacgacgctaacattcgaacactctctacaatactccacaaacctccgaaa

SEQ ID NO: 32865 - DNA, 1365 bp, Artificial Sequence
  chemically treated genomic DNA (Homo sapiens) CpG-island No: 32865
tgttatatttatttcgttttttcggattttgttataagggtatttatttcgtttttttggatttcgttataagggtatttatttcgtttttttggatttcgttataagggtatttatttcgttttttcggattttgttataagggtatttatttcgttttttcggatttcgttataagggtatttatttcgttttttcggattttgttataagggtatttatttcgttttttcggatttcgttataagggtatttatttcgttttttcggattttgttataagggtatttatttcgttttttcggatttcgttataagggtatttatttcgttttttcggatttcgttataagggtatttatttcgtttttttggatttcgttataagggtatttatttcgttttttcggattttgttataagggtatttatttcgttttttcggattttgttataagggtatttatttcgttttttcggatttcgttataagggtatttatttcgttttttcggattttgttataagggtatttatttcgttttttcggatttcgttataagggtatttatttcgtttttttggatttcgttataagggtatttatttcgttttttcggattttgttataagggtatttatttcgttttttcggatttcgttataagggtatttatttcgttttttcggattttgttataagggtatttatttcgttttttcggattttgttataagggtagttatttcgttttttcggatttcgttataagggtatttatttcgtttttttggattttgttataagggtatttatttcgttttttcggattttgttatatttatttcgttttttcggattttgttataagggtatttatttcgttttttcggatttcgttataagggtatttatttcgtttttttggatttcgttataagggtatttatttcgttttttcggattttgttataagggtatttatttcgttttttcggatttcgttataagggtatttatttcgtttttttggatttcgttataagggtatttatttcgttttttcggattttgttataagggtatttatttcgttttttcggatttcgttataagggtatttatttcgttttttcggattttgttataagggtatttatttcgttttttcggatttcgttataagggtatttatttcgttttttcggatttcgttataagggtagttatttcgttttttcggatttcgtaataagggtatttatttcgtttttttggattttgttataagggtatttatttcgttttttcggatttcgttataagggtatttatttcgttttttcggatttcgttataagggt

SEQ ID NO: 32866 - DNA, 1365 bp, Artificial Sequence
  chemically treated genomic DNA (Homo sapiens) CpG-island No: 32866
acccttataacgaaatccgaaaaaacgaaataaatacccttataacgaaatccgaaaaaacgaaataaatacccttataacaaaatccaaaaaaacgaaataaatacccttattacgaaatccgaaaaaacgaaataactacccttataacgaaatccgaaaaaacgaaataaatacccttataacgaaatccgaaaaaacgaaataaatacccttataacaaaatccgaaaaaacgaaataaatacccttataacgaaatccgaaaaaacgaaataaatacccttataacaaaatccgaaaaaacgaaataaatacccttataacgaaatccaaaaaaacgaaataaatacccttataacgaaatccgaaaaaacgaaataaatacccttataacaaaatccgaaaaaacgaaataaatacccttataacgaaatccaaaaaaacgaaataaatacccttataacgaaatccgaaaaaacgaaataaatacccttataacaaaatccgaaaaaacgaaataaatataacaaaatccgaaaaaacgaaataaatacccttataacaaaatccaaaaaaacgaaataaatacccttataacgaaatccgaaaaaacgaaataactacccttataacaaaatccgaaaaaacgaaataaatacccttataacaaaatccgaaaaaacgaaataaatacccttataacgaaatccgaaaaaacgaaataaatacccttataacaaaatccgaaaaaacgaaataaatacccttataacgaaatccaaaaaaacgaaataaatacccttataacgaaatccgaaaaaacgaaataaatacccttataacaaaatccgaaaaaacgaaataaatacccttataacgaaatccgaaaaaacgaaataaatacccttataacaaaatccgaaaaaacgaaataaatacccttataacaaaatccgaaaaaacgaaataaatacccttataacgaaatccaaaaaaacgaaataaatacccttataacgaaatccgaaaaaacgaaataaatacccttataacgaaatccgaaaaaacgaaataaatacccttataacaaaatccgaaaaaacgaaataaatacccttataacgaaatccgaaaaaacgaaataaatacccttataacaaaatccgaaaaaacgaaataaatacccttataacgaaatccgaaaaaacgaaataaatacccttataacaaaatccgaaaaaacgaaataaatacccttataacgaaatccaaaaaaacgaaataaatacccttataacgaaatccaaaaaaacgaaataaatacccttataacaaaatccgaaaaaacgaaataaatataaca

SEQ ID NO: 32867 - DNA, 1365 bp, Artificial Sequence
  chemically treated genomic DNA (Homo sapiens) CpG-island No: 32867
gtttttgtaacggagttcgggggaacgggatgggtgtttttgtaacggagttcgggggaacgggatgggtgtttttgtaatagagtttaggggaacgggatgggtgtttttgttacggagttcgggggaacgggatggttgtttttgtaacggagttcgggggaacgggatgggtgtttttgtaacggagttcgggggaacgggatgggtgtttttgtaatagagttcgggggaacgggatgggtgtttttgtaacggagttcgggggaacgggatgggtgtttttataatagagttcgggggaacgggatgggtgtttttgtaacggagtttaggggaacgggatgggtgtttttgtaacggagttcgggggaacgggatgggtgtttttgtaatagagttcgggggaacgggatgggtgtttttgtaacggagtttaggggaacgggatgggtgtttttgtaacggagttcgggggaacgggatgggtgtttttataatagagttcgggggaacgggatgggtgtaatagagttcgggggaacgggatgggtgtttttgtaatagagtttaggggaacgggatgggtgtttttgtaacggagttcgggggaacgggatggttgtttttgtaatagagttcgggggaacgggatgggtgtttttataatagagttcgggggaacgggatgggtgtttttgtaacggagttcgggggaacgggatgggtgtttttataatagagttcgggggaacgggatgggtgtttttgtaacggagtttaggggaacgggatgggtgtttttgtaacggagttcgggggaacgggatgggtgtttttgtaatagagttcgggggaacgggatgggtgtttttgtaacggagttcgggggaacgggatgggtgtttttgtaatagagttcgggggaacgggatgggtgtttttataatagagttcgggggaacgggatgggtgtttttgtaacggagtttaggggaacgggatgggtgtttttgtaacggagttcgggggaacgggatgggtgtttttgtaacggagttcgggggaacgggatgggtgtttttgtaatagagttcggggaaacgggatgggtgtttttgtaacggagttcgggggaacgggatgggtgtttttataatagagttcgggggaacgggatgggtgtttttgtaacggagttcgggggaacgggatgggtgtttttataatagagttcgggggaacgggatgggtgtttttgtaacggagtttaggggaacgggatgggtgtttttgtaacggagtttaggggaacgggatgggtgtttttataatagagttcgggggagcgggatgggtgtaata

SEQ ID NO: 32868 - DNA, 1365 bp, Artificial Sequence
  chemically treated genomic DNA (Homo sapiens) CpG-island No: 32868
tattacacccatcccgctcccccgaactctattataaaaacacccatcccgttcccctaaactccgttacaaaaacacccatcccgttcccctaaactccgttacaaaaacacccatcccgttcccccgaactctattataaaaacacccatcccgttcccccgaactccgttacaaaaacacccatcccgttcccccgaactctattataaaaacacccatcccgttcccccgaactccgttacaaaaacacccatcccgtttccccgaactctattacaaaaacacccatcccgttcccccgaactccgttacaaaaacacccatcccgttcccccgaactccgttacaaaaacacccatcccgttcccctaaactccgttacaaaaacacccatcccgttcccccgaactctattataaaaacacccatcccgttcccccgaactctattacaaaaacacccatcccgttcccccgaactccgttacaaaaacacccatcccgttcccccgaactctattacaaaaacacccatcccgttcccccgaactccgttacaaaaacacccatcccgttcccctaaactccgttacaaaaacacccatcccgttcccccgaactctattataaaaacacccatcccgttcccccgaactccgttacaaaaacacccatcccgttcccccgaactctattataaaaacacccatcccgttcccccgaactctattacaaaaacaaccatcccgttcccccgaactccgttacaaaaacacccatcccgttcccctaaactctattacaaaaacacccatcccgttcccccgaactctattacacccatcccgttcccccgaactctattataaaaacacccatcccgttcccccgaactccgttacaaaaacacccatcccgttcccctaaactccgttacaaaaacacccatcccgttcccccgaactctattacaaaaacacccatcccgttcccccgaactccgttacaaaaacacccatcccgttcccctaaactccgttacaaaaacacccatcccgttcccccgaactctattataaaaacacccatcccgttcccccgaactccgttacaaaaacacccatcccgttcccccgaactctattacaaaaacacccatcccgttcccccgaactccgttacaaaaacacccatcccgttcccccgaactccgttacaaaaacaaccatcccgttcccccgaactccgtaacaaaaacacccatcccgttcccctaaactctattacaaaaacacccatcccgttcccccgaactccgttacaaaaacacccatcccgttcccccgaactccgttacaaaaac

SEQ ID NO: 32869 - DNA, 536 bp, Artificial Sequence
  chemically treated genomic DNA (Homo sapiens) CpG-island No: 32869
  unsure (79, 124, 170, 216, 308, 353)
ggttgtagtttcggtaaatgtaattttggatgttcgcgtggtaggggtagttttagtttcggtaaatgtaattttggantggtcgtggcggggcgttttagtttcggtaaatgtaattttggantgcgcgtggcggggcggttttagtttcggtaaatgtaattttggantgcgcgtggcggggcggttttagtttcggtaaatgtaattttggantgcgcgtggcggggcggttttagtttcggtaaatgtaattttggatgttcgcgtgcggagcgtttttagtttcggtaaatgtaattttggantgcgcgtggcggggcgttttagtttcggtaaatgtaattttggantgcgcgtggcggggcggttttagtttcggtaaatgtaattttggattgcgcgtggcggggcgttttagtttcggtaaatgtaattttggatgcgcgtggcggggcggttttagtttcggtaaatgtaattttggatgtcgcgtggttgggaagtggagttattttacggcgtttagggtattt

SEQ ID NO: 32870 - DNA, 536 bp, Artificial Sequence
  chemically treated genomic DNA (Homo sapiens) CpG-island No: 32870
  unsure (184, 229, 321, 367, 413, 458)
aaataccctaaacgccgtaaaataactccacttcccaaccacgcgacatccaaaattacatttaccgaaactaaaaccgccccgccacgcgcatccaaaattacatttaccgaaactaaaacgccccgccacgcgcaatccaaaattacatttaccgaaactaaaaccgccccgccacgcgcantccaaaattacatttaccgaaactaaaacgccccgccacgcgcantccaaaattacatttaccgaaactaaaaacgctccgcacgcgaacatccaaaattacatttaccgaaactaaaaccgccccgccacgcgcantccaaaattacatttaccgaaactaaaaccgccccgccacgcgcantccaaaattacatttaccgaaactaaaaccgccccgccacgcgcantccaaaattacatttaccgaaactaaaacgccccgccacgaccantccaaaattacatttaccgaaactaaaactacccctaccacgcgaacatccaaaattacatttaccgaaactacaacc

SEQ ID NO: 32871 - DNA, 536 bp, Artificial Sequence
  chemically treated genomic DNA (Homo sapiens) CpG-island No: 32871
  unsure (184, 229, 321, 367, 413, 458)
ggatgttttgagcgtcgtagagtagttttattttttagttacgcggtatttaggattgtatttatcggggttggagtcgtttcgttacgcgtatttaggattgtatttatcggggttggagcgtttcgttacgcgtaatttaggattgtatttatcggggttggagtcgtttcgttacgcgtantttaggattgtatttatcggggttggagcgtttcgttacgcgtantttaggattgtatttatcggggttggaggcgtttcgtacgcgggtatttaggattgtatttatcggggttggagtcgtttcgttacgcgtantttaggattgtatttatcggggttggagtcgtttcgttacgcgtantttaggattgtatttatcggggttggagtcgtttcgttacgcgtantttaggattgtatttatcggggttggagcgtttcgttacggttantttaggattgtatttatcggggttggagttgtttttgttacgcgggtatttaggattgtatttatcgggattgtagtt

SEQ ID NO: 32872 - DNA, 536 bp, Artificial Sequence
  chemically treated genomic DNA (Homo sapiens) CpG-island No: 32872
  unsure (79, 124, 170, 216, 308, 353)
aactacaatcccgataaatacaatcctaaatacccgcgtaacaaaaacaactccaaccccgataaatacaatcctaaantaaccgtaacgaaacgctccaaccccgataaatacaatcctaaantacgcgtaacgaaacgactccaaccccgataaatacaatcctaaantacgcgtaacgaaacgactccaaccccgataaatacaatcctaaantacgcgtaacgaaacgactccaaccccgataaatacaatcctaaatacccgcgtacgaaacgcctccaaccccgataaatacaatcctaaantacgcgtaacgaaacgctccaaccccgataaatacaatcctaaantacgcgtaacgaaacgactccaaccccgataaatacaatcctaaattacgcgtaacgaaacgctccaaccccgataaatacaatcctaaatacgcgtaacgaaacgactccaaccccgataaatacaatcctaaataccgcgtaactaaaaaataaaactactctacgacgctcaaaacatcc

SEQ ID NO: 32873 - DNA, 705 bp, Artificial Sequence
  chemically treated genomic DNA (Homo sapiens) CpG-island No: 32873
gcgcgtatataggaggtacgtgattagggttcggttcgttttcgtaggtcgcggtttattatttttttatcgcgggcgtcgagaaatcgggttatcgtcgattttttcggtaaattagagcggttagtgagcggagagggacgggaagcggcgtgcgaggttggcgggttcgggcgttagcgcgtttcgttgggtttttgttagttttagttaattgcggagtttcgggtgcggtttggagttcggagttcgtttcgggttttttcgggtttgcgtttcgtttagtttcgcgggtcgttatgaggtgacgaagaggaggtgtagggcgtcgttttcggttttttatcgttttattacgtcggttttgattttgatttgttttacgcgaggatcggttatggtttttcgagcgtcgcgagaaggaggggcggagagtcggggtaatcgtggagggcgacgcgtagaggttgcggttatttaggcgtggtcgtcggcgcgtatgcgtaggttgcgcggttcgtcgttttcgttacgtttcgcggggcgggtttattagagggcggtattttgttttcgttagtttttttatttttcgtgcgtttttttattcgtagtgaaacgtgttttttttttttttttcggattgtttttttttttattttaggcgtaagttatatatttcggtttttatagtttgggtttttg

SEQ ID NO: 32874 - DNA, 705 bp, Artificial Sequence
  chemically treated genomic DNA (Homo sapiens) CpG-island No: 32874
caaaaacccaaactataaaaaccgaaatatataacttacgcctaaaataaaaaaaaaaacaatccgaaaaaaaaaaaaaaaacacgtttcactacgaataaaaaaacgcacgaaaaataaaaaaactaacgaaaacaaaataccgccctctaataaacccgccccgcgaaacgtaacgaaaacgacgaaccgcgcaacctacgcatacgcgccgacgaccacgcctaaataaccgcaacctctacgcgtcgccctccacgattaccccgactctccgcccctccttctcgcgacgctcgaaaaaccataaccgatcctcgcgtaaaacaaatcaaaatcaaaaccgacgtaataaaacgataaaaaaccgaaaacgacgccctacacctcctcttcgtcacctcataacgacccgcgaaactaaacgaaacgcaaacccgaaaaaacccgaaacgaactccgaactccaaaccgcacccgaaactccgcaattaactaaaactaacaaaaacccaacgaaacgcgctaacgcccgaacccgccaacctcgcacgccgcttcccgtccctctccgctcactaaccgctctaatttaccgaaaaaatcgacgataacccgatttctcgacgcccgcgataaaaaaataataaaccgcgacctacgaaaacgaaccgaaccctaatcacgtacctcctatatacgcgc

SEQ ID NO: 32875 - DNA, 705 bp, Artificial Sequence
  chemically treated genomic DNA (Homo sapiens) CpG-island No: 32875
taaaggtttaggttgtggagatcgggatgtgtaatttgcgtttgaagtaaaaagaggggtagttcgagagagaggaggagggtacgttttattacgggtaaaggggcgtacgaggggtaaagggattggcgggagtagggtatcgttttttagtaaattcgtttcgcggggcgtggcggggacgacgggtcgcgtagtttgcgtatgcgcgtcggcgattacgtttaaatagtcgtagtttttgcgcgtcgttttttacggttatttcggtttttcgtttttttttttcgcggcgttcgagggattatggtcgattttcgcgtgagatagattaagattaagatcggcgtggtgaagcggtaaggagtcgggagcggcgttttgtatttttttttcgttattttatggcggttcgcgaggttgagcggagcgtaggttcgaggaggttcgaggcgggtttcgaattttaggtcgtattcggggtttcgtagttggttgggattggtagggatttagcggggcgcgttgacgttcgagttcgttagtttcgtacgtcgtttttcgttttttttcgtttattggtcgttttgatttgtcggaagagtcggcggtggttcggtttttcggcgttcgcggtgggaaggtggtgggtcgcggtttgcgagggcgggtcgggttttgattacgtgttttttgtgtgcgcgt

SEQ ID NO: 32876 - DNA, 705 bp, Artificial Sequence
  chemically treated genomic DNA (Homo sapiens) CpG-island No: 32876
acgcgcacacaaaaaacacgtaatcaaaacccgacccgccctcgcaaaccgcgacccaccaccttcccaccgcgaacgccgaaaaaccgaaccaccgccgactcttccgacaaatcaaaacgaccaataaacgaaaaaaaacgaaaaacgacgtacgaaactaacgaactcgaacgtcaacgcgccccgctaaatccctaccaatcccaaccaactacgaaaccccgaatacgacctaaaattcgaaacccgcctcgaacctcctcgaacctacgctccgctcaacctcgcgaaccgccataaaataacgaaaaaaaaatacaaaacgccgctcccgactccttaccgcttcaccacgccgatcttaatcttaatctatctcacgcgaaaatcgaccataatccctcgaacgccgcgaaaaaaaaaaacgaaaaaccgaaataaccgtaaaaaacgacgcgcaaaaactacgactatttaaacgtaatcgccgacgcgcatacgcaaactacgcgacccgtcgtccccgccacgccccgcgaaacgaatttactaaaaaacgataccctactcccgccaatccctttacccctcgtacgcccctttacccgtaataaaacgtaccctcctcctctctctcgaactacccctctttttacttcaaacgcaaattacacatcccgatctccacaacctaaaccttta

SEQ ID NO: 32877 - DNA, 524 bp, Artificial Sequence
  chemically treated genomic DNA (Homo sapiens) CpG-island No: 32877
ttgtgttgacgttggtttgtattagtcgttttagtgttgcgtttattttattgaatgtggaagtataaacgcgtcgtttgggcgtttttgaatttatcgttagtttcgtcgtttttttcggtgtaattattggttagaacggttgcgtcggtttgtattcggtaatgttggcggtgatggttgcgtttacggttggtattaattcgttggattcgatgtggattgcgacgttggtcggtattgttatcgttagtttcgtaggcgttgtcggtgtcggtggtggtgtaattttcgtcgtattgattgtattgtttgcgatgggtttgttagtaattttggtggcgttgttaattttcgttgaatcgtttatcgatatgggtcgtacggcgttaaacgttagtggttcgatgatagttggtacgttgattagttagtggttgaagtaaatcgataaagttattttggatagcgaagacgacgtcgaattggtatattattaatttttatgttggtaacggttcgtt

SEQ ID NO: 32878 - DNA, 524 bp, Artificial Sequence
  chemically treated genomic DNA (Homo sapiens) CpG-island No: 32878
aacgaaccgttaccaacataaaaattaataatataccaattcgacgtcgtcttcgctatccaaaataactttatcgatttacttcaaccactaactaatcaacgtaccaactatcatcgaaccactaacgtttaacgccgtacgacccatatcgataaacgattcaacgaaaattaacaacgccaccaaaattactaacaaacccatcgcaaacaatacaatcaatacgacgaaaattacaccaccaccgacaccgacaacgcctacgaaactaacgataacaataccgaccaacgtcgcaatccacatcgaatccaacgaattaataccaaccgtaaacgcaaccatcaccgccaacattaccgaatacaaaccgacgcaaccgttctaaccaataattacaccgaaaaaaacgacgaaactaacgataaattcaaaaacgcccaaacgacgcgtttatacttccacattcaataaaataaacgcaacactaaaacgactaatacaaaccaacgtcaacacaa

SEQ ID NO: 32879 - DNA, 524 bp, Artificial Sequence
  chemically treated genomic DNA (Homo sapiens) CpG-island No: 32879
aacggatcgttgttagtataagaattaatggtgtgttagttcggcgtcgttttcgttatttagaatggttttatcggtttgttttagttattggttggttagcgtgttagttgttatcgagttattaacgtttaacgtcgtacggtttatgtcgataagcggtttaacggagattaatagcgttattagggttattggtaggtttatcgtaggtagtataattagtgcggcgaaagttgtattattatcgatatcggtaacgtttgcggaattaacggtaataatatcgattagcgtcgtaatttatatcgggtttagcgggttaatgttaatcgtaggcgtaattattatcgttagtattgtcggatataaatcggcgtagtcgttttgattaatggttgtatcgaaagaggcggcgaaattggcgatggatttaggaacgtttagacgacgcgtttgtgtttttatatttagtgggatagacgtagtattggaacggttggtataggttaacgttagtatag

SEQ ID NO: 32880 - DNA, 524 bp, Artificial Sequence
  chemically treated genomic DNA (Homo sapiens) CpG-island No: 32880
ctatactaacgttaacctataccaaccgttccaatactacgtctatcccactaaatataaaaacacaaacgcgtcgtctaaacgttcctaaatccatcgccaatttcgccgcctctttcgatacaaccattaatcaaaacgactacgccgatttatatccgacaatactaacgataataattacgcctacgattaacattaacccgctaaacccgatataaattacgacgctaatcgatattattaccgttaattccgcaaacgttaccgatatcgataataatacaactttcgccgcactaattatactacctacgataaacctaccaataaccctaataacgctattaatctccgttaaaccgcttatcgacataaaccgtacgacgttaaacgttaataactcgataacaactaacacgctaaccaaccaataactaaaacaaaccgataaaaccattctaaataacgaaaacgacgccgaactaacacaccattaattcttatactaacaacgatccgtt

SEQ ID NO: 32881 - DNA, 539 bp, Artificial Sequence
  chemically treated genomic DNA (Homo sapiens) CpG-island No: 32881
tgttggcggtagaaatcgttgtaaattgggattcgttatattatgtcggttattatcgaagataagcggtttagtacgttttattgatatgatcgacggttagattattacgcgttaagatcgacgaattgatcggtttgttttacgattggtggttttggatttcgtagaacgtatcgaaggatggataaagatttgcgttcggtattgaaaatcgttgatgtttagggtaacgaacgatacggattttaggtatcgatatgttagcgtagatatatattaggcgggtaacgcgatagaatagttggaagatggcgtatagattagttttggtgatattttggcgcgtatttcgtaggaattcggcggtattaaggatattatcggtggtttgtcgcgcgttgcggatttgttcgaagtacgtcgttcgaaagagtcggtaattttggttgaaattagcggtatcgtttttttcggtaaagaaattaaaggtaaacgtcgtttggttattatttcggtagacggtagcgattcgtacg

SEQ ID NO: 32882 - DNA, 539 bp, Artificial Sequence
  chemically treated genomic DNA (Homo sapiens) CpG-island No: 32882
cgtacgaatcgctaccgtctaccgaaataataaccaaacgacgtttacctttaatttctttaccgaaaaaaacgataccgctaatttcaaccaaaattaccgactctttcgaacgacgtacttcgaacaaatccgcaacgcgcgacaaaccaccgataatatccttaataccgccgaattcctacgaaatacgcgccaaaatatcaccaaaactaatctatacgccatcttccaactattctatcgcgttacccgcctaatatatatctacgctaacatatcgatacctaaaatccgtatcgttcgttaccctaaacatcaacgattttcaataccgaacgcaaatctttatccatccttcgatacgttctacgaaatccaaaaccaccaatcgtaaaacaaaccgatcaattcgtcgatcttaacgcgtaataatctaaccgtcgatcatatcaataaaacgtactaaaccgcttatcttcgataataaccgacataatataacgaatcccaatttacaacgatttctaccgccaaca

SEQ ID NO: 32883 - DNA, 539 bp, Artificial Sequence
  chemically treated genomic DNA (Homo sapiens) CpG-island No: 32883
cgtacggatcgttatcgtttatcggggtgataattagacgacgtttatttttggtttttttatcgaaggaaacgatatcgttgattttagttaggattgtcggttttttcggacgacgtgtttcgaataggttcgtaacgcgcggtagattatcggtgatgtttttggtatcgtcggatttttgcggaatacgcgttagggtgttattagagttgatttgtacgttattttttagttgttttatcgcgttattcgtttggtatgtatttgcgttggtatatcggtatttgggattcgtatcgttcgttattttgagtattaacgatttttagtgtcggacgtagatttttatttatttttcggtacgttttgcggaatttagaattattagtcgtaagatagatcggttagttcgtcggttttgacgcgtaatggtttggtcgtcgattatgttagtaaagcgtattaaatcgtttattttcggtgataatcggtatggtgtggcgggttttagtttgtaacggtttttgtcgttagta

SEQ ID NO: 32884 - DNA, 539 bp, Artificial Sequence
  chemically treated genomic DNA (Homo sapiens) CpG-island No: 32884
tactaacgacaaaaaccgttacaaactaaaacccgccacaccataccgattatcaccgaaaataaacgatttaatacgctttactaacataatcgacgaccaaaccattacgcgtcaaaaccgacgaactaaccgatctatcttacgactaataattctaaattccgcaaaacgtaccgaaaaataaataaaaatctacgtccgacactaaaaatcgttaatactcaaaataacgaacgatacgaatcccaaataccgatataccaacgcaaatacataccaaacgaataacgcgataaaacaactaaaaaataacgtacaaatcaactctaataacaccctaacgcgtattccgcaaaaatccgacgataccaaaaacatcaccgataatctaccgcgcgttacgaacctattcgaaacacgtcgtccgaaaaaaccgacaatcctaactaaaatcaacgatatcgtttccttcgataaaaaaaccaaaaataaacgtcgtctaattatcaccccgataaacgataacgatccgtacg

SEQ ID NO: 32885 - DNA, 1028 bp, Artificial Sequence
  chemically treated genomic DNA (Homo sapiens) CpG-island No: 32885
  unsure (763)
gtcggtttttcgtttttcgtttttgttgtataggttaatatcgtatcgggatcgttcgataaagcgtttaattagtatgtcgtatatagcggatttattttttcggttgacgttagtttgacgcgcggtaagtagagtaacggtttgtacggcgattacgacgtcgagagcggtttgtaataattgttggacggtagcggattgtaggtaaaatcgttgggaaataatagttggacgttggagttcgcgttcgtattaaaagaagatgttttgatcgtggtcggcgattggttgggtgatgcgcgtgaaaacgacgtatttgaatatgttggcgcgcgtgacgtgattcgtcgtgaggatttcgttaaaatcggcgtaattattatgcgtgaggtatttaatcgtatttttggcgttagcgcgtcggaaaataacggtatcggtagttacgatttggcgatgaattttggtattcggggtttgaattcgcgtttcgttagtcgttcgatcgttttgatggacggtattttcgtttttttcgttttttacggttagtcgtagtttttattggttttcgtttcgttcggtaatatggatttattgacgtgtacgcggtggtggtgcggtcgttacggatcgtaagcgtggcggcgtgtgaattttgttattcgtttatttcgtagattttggtatcgaggcgggcgtggaaggttagtttagtttaatttttttataaaataattcgaaagagacgtataatttngatggtgggcggtatagcggataacggttttggtatcgcgttgttttatttcggtacgcgcggtagtgattggcgcgagtatagcgttattcgtatcgacgatttgatgttgaaaagtaaatatgcgtcggatgaggtgtatatttttaatagtttgttgtaatattacgacggtgaagtcgatatgttcggtggtttgtttcgcgcggattacgacgtcgatcgttggtaatttattcgttcgtatgatcgtttttggggtcgt

SEQ ID NO: 32886 - DNA, 1028 bp, Artificial Sequence
  chemically treated genomic DNA (Homo sapiens) CpG-island No: 32886
  unsure (266)
acgaccccaaaaacgatcatacgaacgaataaattaccaacgatcgacgtcgtaatccgcgcgaaacaaaccaccgaacatatcgacttcaccgtcgtaatattacaacaaactattaaaaatatacacctcatccgacgcatatttacttttcaacatcaaatcgtcgatacgaataacgctatactcgcgccaatcactaccgcgcgtaccgaaataaaacaacgcgataccaaaaccgttatccgctataccgcccaccatcnaaattatacgtctctttcgaattattttataaaaaaattaaactaaactaaccttccacgcccgcctcgataccaaaatctacgaaataaacgaataacaaaattcacacgccgccacgcttacgatccgtaacgaccgcaccaccaccgcgtacacgtcaataaatccatattaccgaacgaaacgaaaaccaataaaaactacgactaaccgtaaaaaacgaaaaaaacgaaaataccgtccatcaaaacgatcgaacgactaacgaaacgcgaattcaaaccccgaataccaaaattcatcgccaaatcgtaactaccgataccgttattttccgacgcgctaacgccaaaaatacgattaaatacctcacgcataataattacgccgattttaacgaaatcctcacgacgaatcacgtcacgcgcgccaacatattcaaatacgtcgttttcacgcgcatcacccaaccaatcgccgaccacgatcaaaacatcttcttttaatacgaacgcgaactccaacgtccaactattatttcccaacgattttacctacaatccgctaccgtccaacaattattacaaaccgctctcgacgtcgtaatcgccgtacaaaccgttactctacttaccgcgcgtcaaactaacgtcaaccgaaaaaataaatccgctatatacgacatactaattaaacgctttatcgaacgatcccgatacgatattaacctatacaacaaaaacgaaaaacgaaaaaccgac

SEQ ID NO: 32887 - DNA, 1028 bp, Artificial Sequence
  chemically treated genomic DNA (Homo sapiens) CpG-island No: 32887
  unsure (266)
acgattttagaagcggttatacgggcgggtggattgttagcgatcggcgtcgtaattcgcgcgagataggttatcgggtatgtcggttttatcgtcgtaatattgtagtaggttgttgaaggtgtgtattttattcggcgtatatttgttttttagtattaggtcgtcgatgcgggtggcgttgtgttcgcgttagttattgtcgcgcgtgtcggagtagagtagcgcggtgttaaaatcgttgttcgttgtgtcgtttattattnaggttgtgcgtttttttcgggttgttttgtgaagaggttgggttgagttgattttttacgttcgtttcgatattaaagtttgcggaatggacgggtaataaagtttatacgtcgttacgtttgcggttcgtaacgatcgtattattatcgcgtatacgttaatggatttatgttgtcgagcgaaacgggagttagtgaaagttgcggttgatcgtaaggggcgaaggggacggggatgtcgtttattaggacggtcgagcggttggcgaggcgcgggtttaggtttcggatgttaaagtttatcgttaggtcgtggttgtcggtgtcgttgtttttcggcgcgttgacgttagggatgcggttaagtattttacgtatggtggttgcgtcggttttggcgaaatttttacggcggattacgttacgcgcgttagtatgtttaaatacgtcgtttttacgcgtattatttagttagtcgtcgattacggttagggtatttttttttggtgcgggcgcgggttttagcgtttagttgttattttttagcggttttatttgtagttcgttgtcgtttagtagttgttgtaggtcgttttcgacgtcgtaatcgtcgtgtaggtcgttgttttgtttgtcgcgcgttaggttggcgttaatcgagagggtaaattcgttgtgtgcggtatattgattgagcgttttatcgagcgatttcggtgcgatattaatttgtgtagtaaaagcggaaaacgagagatcggt

SEQ ID NO: 32888 - DNA, 1028 bp, Artificial Sequence
  chemically treated genomic DNA (Homo sapiens) CpG-island No: 32888
  unsure (763)
accgatctctcgttttccgcttttactacacaaattaatatcgcaccgaaatcgctcgataaaacgctcaatcaatataccgcacacaacgaatttaccctctcgattaacgccaacctaacgcgcgacaaacaaaacaacgacctacacgacgattacgacgtcgaaaacgacctacaacaactactaaacgacaacgaactacaaataaaaccgctaaaaaataacaactaaacgctaaaacccgcgcccgcaccaaaaaaaaataccctaaccgtaatcgacgactaactaaataatacgcgtaaaaacgacgtatttaaacatactaacgcgcgtaacgtaatccgccgtaaaaatttcgccaaaaccgacgcaaccaccatacgtaaaatacttaaccgcatccctaacgtcaacgcgccgaaaaacaacgacaccgacaaccacgacctaacgataaactttaacatccgaaacctaaacccgcgcctcgccaaccgctcgaccgtcctaataaacgacatccccgtccccttcgccccttacgatcaaccgcaactttcactaactcccgtttcgctcgacaacataaatccattaacgtatacgcgataataatacgatcgttacgaaccgcaaacgtaacgacgtataaactttattacccgtccattccgcaaactttaatatcgaaacgaacgtaaaaaatcaactcaacccaacctcttcacaaaacaacccgaaaaaaacgcacaacctnaataataaacgacacaacgaacaacgattttaacaccgcgctactctactccgacacgcgcgacaataactaacgcgaacacaacgccacccgcatcgacgacctaatactaaaaaacaaatatacgccgaataaaatacacaccttcaacaacctactacaatattacgacgataaaaccgacatacccgataacctatctcgcgcgaattacgacgccgatcgctaacaatccacccgcccgtataaccgcttctaaaatcgt

SEQ ID NO: 32889 - DNA, 508 bp, Artificial Sequence
  chemically treated genomic DNA (Homo sapiens) CpG-island No: 32889
taagtatcgtaaggtttacgacgcgaacgttggttggcggggcgtgtattgttttcgtatacgtttttttcgttatcggagatatttatggcgaataaggtaaatttgtatttgcgtcggaaatgtcgttatggtttaatttaagttatagcggtgacgatatcgttttgttgttgagtgatgaaggcgaagtcggttgcgatatcgaagtgattcgttcgcgcgttaattggcgttggttggcgaacgtcgtatttagtttcggggaatacgttgagatggacgtcgtgtattttgattagtaattggaaatgttttggcgtatttggacgcgtaaagaagttatcgttaaatagcgtggcggtagcgtttggtaaatcgttagcgtagatagtatttattatttttcgttgttagttagttattgttagtttgaaaatttaagttttgcgatttgtatttttattttttttacgtttatcgtcgatagtgtgtaatggatcgattt

SEQ ID NO: 32890 - DNA, 508 bp, Artificial Sequence
  chemically treated genomic DNA (Homo sapiens) CpG-island No: 32890
aaatcgatccattacacactatcgacgataaacgtaaaaaaaataaaaatacaaatcgcaaaacttaaattttcaaactaacaataactaactaacaacgaaaaataataaatactatctacgctaacgatttaccaaacgctaccgccacgctatttaacgataacttctttacgcgtccaaatacgccaaaacatttccaattactaatcaaaatacacgacgtccatctcaacgtattccccgaaactaaatacgacgttcgccaaccaacgccaattaacgcgcgaacgaatcacttcgatatcgcaaccgacttcgccttcatcactcaacaacaaaacgatatcgtcaccgctataacttaaattaaaccataacgacatttccgacgcaaatacaaatttaccttattcgccataaatatctccgataacgaaaaaaacgtatacgaaaacaatacacgccccgccaaccaacgttcgcgtcgtaaaccttacgatactta

SEQ ID NO: 32891 - DNA, 508 bp, Artificial Sequence
  chemically treated genomic DNA (Homo sapiens) CpG-island No: 32891
gaatcgatttattgtatattgtcggcggtgagcgtaaagggagtaggggtgtagatcgtaaggtttaaatttttaagttgataatggttgattgatagcgaggagtgataggtgttgtttacgttgacgatttgttaggcgttgtcgttacgttgtttaacgatggtttttttgcgcgtttagatgcgttagaatatttttagttgttgattaggatgtacggcgtttattttagcgtgtttttcgaggttgaatacggcgttcgttagttagcgttagttggcgcgcgggcgaattatttcgatatcgtagtcgatttcgtttttattatttaatagtagggcgatatcgttatcgttatggtttaagttgaattatagcggtattttcggcgtaaatgtaggtttgttttgttcgttatagatattttcggtagcggggaaagcgtgtgcgaaagtaatgtacgtttcgttagttagcgttcgcgtcgtggattttgcggtgtttg

SEQ ID NO: 32892 - DNA, 508 bp, Artificial Sequence
  chemically treated genomic DNA (Homo sapiens) CpG-island No: 32892
caaacaccgcaaaatccacgacgcgaacgctaactaacgaaacgtacattactttcgcacacgctttccccgctaccgaaaatatctataacgaacaaaacaaacctacatttacgccgaaaataccgctataattcaacttaaaccataacgataacgatatcgccctactattaaataataaaaacgaaatcgactacgatatcgaaataattcgcccgcgcgccaactaacgctaactaacgaacgccgtattcaacctcgaaaaacacgctaaaataaacgccgtacatcctaatcaacaactaaaaatattctaacgcatctaaacgcgcaaaaaaaccatcgttaaacaacgtaacgacaacgcctaacaaatcgtcaacgtaaacaacacctatcactcctcgctatcaatcaaccattatcaacttaaaaatttaaaccttacgatctacacccctactccctttacgctcaccgccgacaatatacaataaatcgattc

SEQ ID NO: 32893 - DNA, 921 bp, Artificial Sequence
  chemically treated genomic DNA (Homo sapiens) CpG-island No: 32893
tgtggtgatgttcgtgatatcgtcggatattatatttagatcgtattttgtttttcgtttcgtcgcgttcgtttgcgtcgtgagtttttttgtcgcgttatattcgttgcgcgtgacgttgtcgttcgttagttttttttttattattcgttttagttcggtttcgttttttgtatgtagtattttacgtcggtttaggttgtcggtgacggtgatgcggttttgtttataaagatagcggtagtttaattttgtcgggtttagttgttttattattcgtttcgtatcgtcgtagcggtagcgtattttcggttttttcgcgtaacggtgcgttattattcggttcgggtgttgcgcgttatacgtgaaagcgcgtatttgcgtattgttgcggttatatatcgttagtagtttatcggttttcgtatacgtgtatcgtattagtggcgtagcgggtaggtttttcgggtatgtcgggtcgtgtattagttatatcgtcgaaaggcggatatttttgtcggggtcgtattcggtatcgggtagtgtgtcggggaacgttgaggttgagagagggcgggaattgttagaagaagatagcgaagaggtgcgggtttttttcgtacgttgcgtttgcgtggttagtattagacggaattttcgttcggtatcgttcgttacgtcggtgattttttcggttaggattatcggacggttttacgtcggtacgttagcgttcgtttagaagcggttcgttatttcggtaagtatattaggtacggcggtagcggagttggtagtacgtttttagtattaggataatcgattagatatatttatagtatgtaataacggatcgttgtgtagttgaaggtacggttagggtaaagatgcgggttttataggatattcggcgggaagcga

SEQ ID NO: 32894 - DNA, 921 bp, Artificial Sequence
  chemically treated genomic DNA (Homo sapiens) CpG-island No: 32894
tcgcttcccgccgaatatcctataaaacccgcatctttaccctaaccgtaccttcaactacacaacgatccgttattacatactataaatatatctaatcgattatcctaatactaaaaacgtactaccaactccgctaccgccgtacctaatatacttaccgaaataacgaaccgcttctaaacgaacgctaacgtaccgacgtaaaaccgtccgataatcctaaccgaaaaaatcaccgacgtaacgaacgataccgaacgaaaattccgtctaatactaaccacgcaaacgcaacgtacgaaaaaaacccgcacctcttcgctatcttcttctaacaattcccgccctctctcaacctcaacgttccccgacacactacccgataccgaatacgaccccgacaaaaatatccgcctttcgacgatataactaatacacgacccgacatacccgaaaaacctacccgctacgccactaatacgatacacgtatacgaaaaccgataaactactaacgatatataaccgcaacaatacgcaaatacgcgctttcacgtataacgcgcaacacccgaaccgaataataacgcaccgttacgcgaaaaaaccgaaaatacgctaccgctacgacgatacgaaacgaataataaaacaactaaacccgacaaaattaaactaccgctatctttataaacaaaaccgcatcaccgtcaccgacaacctaaaccgacgtaaaatactacatacaaaaaacgaaaccgaactaaaacgaataataaaaaaaaaactaacgaacgacaacgtcacgcgcaacgaatataacgcgacaaaaaaactcacgacgcaaacgaacgcgacgaaacgaaaaacaaaatacgatctaaatataatatccgacgatatcacgaacatcaccaca

SEQ ID NO: 32895 - DNA, 921 bp, Artificial Sequence
  chemically treated genomic DNA (Homo sapiens) CpG-island No: 32895
tcgtttttcgtcggatattttgtgaagttcgtatttttattttggtcgtatttttagttgtatagcggttcgttgttgtatattgtgggtgtgtttgatcggttgttttggtgttgaggacgtattgttagtttcgttgtcgtcgtatttggtgtgtttatcgggatggcggatcgtttttgggcggacgttgacgtatcggcgtgaggtcgttcggtgattttggtcggggaaattatcggcgtgacggacggtgtcgggcgggagtttcgtttggtgttgattacgtaggcgtagcgtgcggaagaggttcgtattttttcgttatttttttttgatagttttcgtttttttttagttttagcgtttttcgatatattgttcggtatcgaatacggtttcgataggggtattcgtttttcggcggtgtggttgatgtacgattcggtatattcggagagtttgttcgttgcgttattggtgcggtatacgtatacggaagtcggtgaattgttggcggtatatgatcgtagtaatacgtaggtgcgcgtttttacgtatgacgcgtagtattcgggtcggatggtggcgtatcgttacgcgggaaggtcggagatgcgttatcgttacgacgatacggggcgggtggtggagtaattgaattcggtagggttaagttatcgttatttttatgagtaggatcgtattatcgttatcgatagtttgaatcggcgtgaggtgttgtatatagaaggcggggtcgggttgaaacgggtggtgaaaaaagaattggcggacggtagcgttacgcgtagcgggtatgacgcggtaggaaggtttacggcgtagacggacgcggcgggacggaggatagagtacggtttgaatgtggtgttcggcgatattacggatattattata

SEQ ID NO: 32896 - DNA, 921 bp, Artificial Sequence
  chemically treated genomic DNA (Homo sapiens) CpG-island No: 32896
tataataatatccgtaatatcgccgaacaccacattcaaaccgtactctatcctccgtcccgccgcgtccgtctacgccgtaaaccttcctaccgcgtcatacccgctacgcgtaacgctaccgtccgccaattcttttttcaccacccgtttcaacccgaccccgccttctatatacaacacctcacgccgattcaaactatcgataacgataatacgatcctactcataaaaataacgataacttaaccctaccgaattcaattactccaccacccgccccgtatcgtcgtaacgataacgcatctccgaccttcccgcgtaacgatacgccaccatccgacccgaatactacgcgtcatacgtaaaaacgcgcacctacgtattactacgatcatataccgccaacaattcaccgacttccgtatacgtataccgcaccaataacgcaacgaacaaactctccgaatataccgaatcgtacatcaaccacaccgccgaaaaacgaatacccctatcgaaaccgtattcgataccgaacaatatatcgaaaaacgctaaaactaaaaaaaaacgaaaactatcaaaaaaaaataacgaaaaaatacgaacctcttccgcacgctacgcctacgtaatcaacaccaaacgaaactcccgcccgacaccgtccgtcacgccgataatttccccgaccaaaatcaccgaacgacctcacgccgatacgtcaacgtccgcccaaaaacgatccgccatcccgataaacacaccaaatacgacgacaacgaaactaacaatacgtcctcaacaccaaaacaaccgatcaaacacacccacaatatacaacaacgaaccgctatacaactaaaaatacgaccaaaataaaaatacgaacttcacaaaatatccgacgaaaaacga

SEQ ID NO: 32897 - DNA, 547 bp, Artificial Sequence
  chemically treated genomic DNA (Homo sapiens) CpG-island No: 32897
tatttttagttatattgtcgttaatggaataggcgatttgtgaggaagggttcggtgcgtagtagagattatgcggtgtaacggtttgggagatcgttaggttacgtacgtttggttgtacgcgcgcgcggcgattaacggggttaatgtcgaggattttttttaagcgcgttattattaataatatatttttttttagtcggtagcgtcgttattagaaagttcggtgtttgtattacgggttattatcggtatacgtaggcgatggtagatagttagaatcgttgttatttgttttatttgtttaggtagaataattagtaatggacgcgtgcgatacgcgtttaattcgttatattcgtaaggaatgatttttttatcggtatgtaggattttaagtttagggatatgtttacgtagtgttattagtatcgatgtgcggtcgatatcgggtaaagcgttattaagacgtttttcgtataagatgtttatgagtaggtttcgttttgttgtgttgtgtggtagttgatttttgcgcgttgttttt

SEQ ID NO: 32898 - DNA, 547 bp, Artificial Sequence
  chemically treated genomic DNA (Homo sapiens) CpG-island No: 32898
aaaaacaacgcgcaaaaatcaactaccacacaacacaacaaaacgaaacctactcataaacatcttatacgaaaaacgtcttaataacgctttacccgatatcgaccgcacatcgatactaataacactacgtaaacatatccctaaacttaaaatcctacataccgataaaaaaatcattccttacgaatataacgaattaaacgcgtatcgcacgcgtccattactaattattctacctaaacaaataaaacaaataacaacgattctaactatctaccatcgcctacgtataccgataataacccgtaatacaaacaccgaactttctaataacgacgctaccgactaaaaaaaaatatattattaataataacgcgcttaaaaaaaatcctcgacattaaccccgttaatcgccgcgcgcgcgtacaaccaaacgtacgtaacctaacgatctcccaaaccgttacaccgcataatctctactacgcaccgaacccttcctcacaaatcgcctattccattaacgacaatataactaaaaata

SEQ ID NO: 32899 - DNA, 547 bp, Artificial Sequence
  chemically treated genomic DNA (Homo sapiens) CpG-island No: 32899
agaagtagcgcgtaaaaattagttgttatataatataataaagcgaagtttatttatgagtattttgtacgaagagcgttttgatggcgttttattcgatgtcgatcgtatatcggtattgatggtattgcgtgagtatgtttttggatttgagattttgtatatcgatgaggagattattttttacgagtgtgacgggttgagcgcgtatcgtacgcgtttattattggttgttttgtttaagtaaatggaataggtgatagcgattttggttgtttgttatcgtttgcgtgtatcggtggtgattcgtggtgtaggtatcgggttttttggtggcgacgttgtcgattggaaaaaggtgtgttgttggtgatggcgcgtttaaaagagattttcgatattaatttcgttggtcgtcgcgcgcgcgtgtagttaggcgtgcgtaatttggcgattttttaggtcgttgtatcgtataatttttattacgtatcggatttttttttataaatcgtttgttttattggcggtaatgtggttgaaaatg

SEQ ID NO: 32900 - DNA, 547 bp, Artificial Sequence
  chemically treated genomic DNA (Homo sapiens) CpG-island No: 32900
cattttcaaccacattaccgccaataaaacaaacgatttataaaaaaaaatccgatacgtaataaaaattatacgatacaacgacctaaaaaatcgccaaattacgcacgcctaactacacgcgcgcgcgacgaccaacgaaattaatatcgaaaatctcttttaaacgcgccatcaccaacaacacacctttttccaatcgacaacgtcgccaccaaaaaacccgatacctacaccacgaatcaccaccgatacacgcaaacgataacaaacaaccaaaatcgctatcacctattccatttacttaaacaaaacaaccaataataaacgcgtacgatacgcgctcaacccgtcacactcgtaaaaaataatctcctcatcgatatacaaaatctcaaatccaaaaacatactcacgcaataccatcaataccgatatacgatcgacatcgaataaaacgccatcaaaacgctcttcgtacaaaatactcataaataaacttcgctttattatattatataacaactaatttttacgcgctacttct

SEQ ID NO: 32901 - DNA, 804 bp, Artificial Sequence
  chemically treated genomic DNA (Homo sapiens) CpG-island No: 32901
attttattgatcgtttaggaaacgttgttattggtatagtgttttggtcgtattttggcgagcgatgtcgtttcgtcgtttgatgtttcggggtttgataatttcgtaatggacggttacgcggtgcgtttagtcgatattgttttcgggtaatcgttgttcgttgtcggtaaattttttgtcggttagttatattatggtgaatggtttgcgggtatttgtattcgtattatgatcggtgcgtcggtgtcggaaggttgcgaagcggtggtgatgtaggagtagattgaataaatggataatggcgtgcgttttattgttgaagtgcgtagcgggtaaaatattcgtcgtcgcggtgaagatatttttgtaggtgcggttgttttttcggcgggaattcgtttgattatcgtagagttgttagtaattgttttattggggattgtcgaagtttcggtgattcgtaaagtgcgtgtagcgtttttttttatcggtgatgaattttagttgttcggttagtcgttgggcgacggttaaatttacgatattaatcgtttcgtcgtatatttgatgttagaatagttgggatgcgaggtaattaatttagggattattcgcgacgatttttatgttttgcgcgtcgtatttattgaagtcgatagttaggcggatgtggtgattagtttcggcggtgttttagtgggtgaggcggattatattaaaacgatttttgaagagttgggggagatcgttttttggaagttggcgattaaattaggtaaatcgttcgcgttcggtaaattt

SEQ ID NO: 32902 - DNA, 804 bp, Artificial Sequence
  chemically treated genomic DNA (Homo sapiens) CpG-island No: 32902
aaatttaccgaacgcgaacgatttacctaatttaatcgccaacttccaaaaaacgatctcccccaactcttcaaaaatcgttttaatataatccgcctcacccactaaaacaccgccgaaactaatcaccacatccgcctaactatcgacttcaataaatacgacgcgcaaaacataaaaatcgtcgcgaataatccctaaattaattacctcgcatcccaactattctaacatcaaatatacgacgaaacgattaatatcgtaaatttaaccgtcgcccaacgactaaccgaacaactaaaattcatcaccgataaaaaaaaacgctacacgcactttacgaatcaccgaaacttcgacaatccccaataaaacaattactaacaactctacgataatcaaacgaattcccgccgaaaaaacaaccgcacctacaaaaatatcttcaccgcgacgacgaatattttacccgctacgcacttcaacaataaaacgcacgccattatccatttattcaatctactcctacatcaccaccgcttcgcaaccttccgacaccgacgcaccgatcataatacgaatacaaatacccgcaaaccattcaccataatataactaaccgacaaaaaatttaccgacaacgaacaacgattacccgaaaacaatatcgactaaacgcaccgcgtaaccgtccattacgaaattatcaaaccccgaaacatcaaacgacgaaacgacatcgctcgccaaaatacgaccaaaacactataccaataacaacgtttcctaaacgatcaataaaat

SEQ ID NO: 32903 - DNA, 804 bp, Artificial Sequence
  chemically treated genomic DNA (Homo sapiens) CpG-island No: 32903
gagtttatcgaacgcgaacggtttatttggtttaatcgttagtttttagaaggcgattttttttagttttttaagaatcgttttggtgtaattcgttttatttattgaaatatcgtcggaattgattattatattcgtttggttgtcggttttaataaatgcggcgcgtagggtatggggatcgtcgcggataatttttaagttaattatttcgtattttaattgttttaatattaggtgtacggcgagacggttggtatcgtagatttggtcgtcgtttagcggttgatcgggtaattggagtttattatcggtagaaaaaagcgttatacgtattttacgaattatcggaatttcggtaatttttagtgaagtaattattggtagttttgcggtagttaggcgagttttcgtcgggaaaataatcgtatttgtagagatatttttatcgcgacggcgaatattttgttcgttacgtattttagtagtaaaacgtacgttattgtttatttgtttagtttgtttttgtattattatcgtttcgtagtttttcggtatcggcgtatcggttataatacgaatgtaggtattcgtaggttatttattatggtatggttgatcggtaaaggatttatcggtaacgggtagcggttgttcggaggtaatatcggttaaacgtatcgcgtagtcgtttattgcggagttattaaatttcggaatattaagcggcgaaacgatatcgttcgttagaatacgattaaaatattgtattagtggtagcgttttttgggcggttagtggggt

SEQ ID NO: 32904 - DNA, 804 bp, Artificial Sequence
  chemically treated genomic DNA (Homo sapiens) CpG-island No: 32904
accccactaaccgcccaaaaaacgctaccactaatacaatattttaatcgtattctaacgaacgatatcgtttcgccgcttaatattccgaaatttaataactccgcaataaacgactacgcgatacgtttaaccgatattacctccgaacaaccgctacccgttaccgataaatcctttaccgatcaaccataccataataaataacctacgaatacctacattcgtattataaccgatacgccgataccgaaaaactacgaaacgataataatacaaaaacaaactaaacaaataaacaataacgtacgttttactactaaaatacgtaacgaacaaaatattcgccgtcgcgataaaaatatctctacaaatacgattattttcccgacgaaaactcgcctaactaccgcaaaactaccaataattacttcactaaaaattaccgaaattccgataattcgtaaaatacgtataacgcttttttctaccgataataaactccaattacccgatcaaccgctaaacgacgaccaaatctacgataccaaccgtctcgccgtacacctaatattaaaacaattaaaatacgaaataattaacttaaaaattatccgcgacgatccccataccctacgcgccgcatttattaaaaccgacaaccaaacgaatataataatcaattccgacgatatttcaataaataaaacgaattacaccaaaacgattcttaaaaaactaaaaaaaatcgccttctaaaaactaacgattaaaccaaataaaccgttcgcgttcgataaactc

SEQ ID NO: 32905 - DNA, 566 bp, Artificial Sequence
  chemically treated genomic DNA (Homo sapiens) CpG-island No: 32905
gacgtagcgcgaggattttttttattattttgttgttattttatttatcggcgtttgggttttgatcggaggcgcgggtgttgtaagcgcgatatatttttttacgtagagtttggttgtcgtagtaggttattatcggtaagtagtttgggatatttagcgttagtaaataattttttagttttttcgtttcggtttgggttttgtcgtagttagcgcgttttttggtattttcgttagtttcgtttcgtcggtaacgagttggtttagtttatgtcgtatcgaggacgtgttgttgtattggtgtttagtttagaaagacgggtcgtaatttcgtcgtaacgttgttgtttttttttcggtagatttatgttagagagtttaaagtcgcgtagtgcgttattaatcgatttaatttttagcgtcgatgtaatagcgtggcgtaatgatcgttatcgcgtaggtcgcgatacgtttatatatagttttttatgttgattttatttaggtgttgtattttagatagtagcggtagggtttgttcgtaagttttacgtagttttagg

SEQ ID NO: 32906 - DNA, 566 bp, Artificial Sequence
  chemically treated genomic DNA (Homo sapiens) CpG-island No: 32906
cctaaaactacgtaaaacttacgaacaaaccctaccgctactatctaaaatacaacacctaaataaaatcaacataaaaaactatatataaacgtatcgcgacctacgcgataacgatcattacgccacgctattacatcgacgctaaaaattaaatcgattaataacgcactacgcgactttaaactctctaacataaatctaccgaaaaaaaaacaacaacgttacgacgaaattacgacccgtctttctaaactaaacaccaatacaacaacacgtcctcgatacgacataaactaaaccaactcgttaccgacgaaacgaaactaacgaaaataccaaaaaacgcgctaactacgacaaaacccaaaccgaaacgaaaaaactaaaaaattatttactaacgctaaatatcccaaactacttaccgataataacctactacgacaaccaaactctacgtaaaaaaatatatcgcgcttacaacacccgcgcctccgatcaaaacccaaacgccgataaataaaataacaacaaaataataaaaaaaatcctcgcgctacgtc

SEQ ID NO: 32907 - DNA, 566 bp, Artificial Sequence
  chemically treated genomic DNA (Homo sapiens) CpG-island No: 32907
tttggaattgcgtgaagtttacgaataaattttgtcgttgttgtttggaatatagtatttgggtagggttaatatgaagggttgtatataagcgtatcgcgatttgcgcgatggcgattattacgttacgttgttatatcggcgttagaagttaagtcggttgataacgtattgcgcgattttgaattttttggtataggtttgtcgaaagagaaatagtagcgttacggcgaaattgcgattcgtttttttgaattgggtattagtatagtaatacgttttcgatgcgatatgggttggattaattcgttatcgacgaagcggagttggcggggatgttagaaagcgcgttggttgcggtaaagtttaggtcgaagcgaaagagttggaaggttatttgttgacgttggatattttaagttatttgtcggtaatgatttattgcgataattaggttttgcgtgaagagatgtatcgcgtttatagtattcgcgttttcgattaaggtttaaacgtcggtaaatgggataatagtaaggtgatggaagagattttcgcgttgcgtt

SEQ ID NO: 32908 - DNA, 566 bp, Artificial Sequence
  chemically treated genomic DNA (Homo sapiens) CpG-island No: 32908
aacgcaacgcgaaaatctcttccatcaccttactattatcccatttaccgacgtttaaaccttaatcgaaaacgcgaatactataaacgcgatacatctcttcacgcaaaacctaattatcgcaataaatcattaccgacaaataacttaaaatatccaacgtcaacaaataaccttccaactctttcgcttcgacctaaactttaccgcaaccaacgcgctttctaacatccccgccaactccgcttcgtcgataacgaattaatccaacccatatcgcatcgaaaacgtattactatactaatacccaattcaaaaaaacgaatcgcaatttcgccgtaacgctactatttctctttcgacaaacctataccaaaaaattcaaaatcgcgcaatacgttatcaaccgacttaacttctaacgccgatataacaacgtaacgtaataatcgccatcgcgcaaatcgcgatacgcttatatacaacccttcatattaaccctacccaaatactatattccaaacaacaacgacaaaatttattcgtaaacttcacgcaattccaaa

SEQ ID NO: 32909 - DNA, 529 bp, Artificial Sequence
  chemically treated genomic DNA (Homo sapiens) CpG-island No: 32909
ggcgaatgtgaaacgtcggtgcgtaaggcgaagtacggtgattttagcggcgtacgcggcgttgcgtggttatggttataagagtaaaaaacgtaggtaattggcgtattatgtttgatgcgacgtttgtcgcgttttattaggtttataaaaggtgttagaatcgtaagtcggataaggcgtttacgtcgtattcggtaataagtgtttcgatgtttgatgcgacgttgacgcgttttattcggtttataaatttgtacgcgaatcgcgtaggtcggataaggcgtttacgtcgtattcgatttgaaaatttttaaattaattttcgtcgggggttatgcgttttcgttgttgtggaggttatttatgtgcgaattgttcgggatgagcgttaacgtttttatcgatatttgttttagttttatcgggtttgtatagcgtggtggtggaatcgggttatataaagatggttggggtattattttttacgaaggtaaaggttgtcgtatatttaaagatttataattta

SEQ ID NO: 32910 - DNA, 529 bp, Artificial Sequence
  chemically treated genomic DNA (Homo sapiens) CpG-island No: 32910
taaattataaatctttaaatatacgacaacctttaccttcgtaaaaaataataccccaaccatctttatataacccgattccaccaccacgctatacaaacccgataaaactaaaacaaatatcgataaaaacgttaacgctcatcccgaacaattcgcacataaataacctccacaacaacgaaaacgcataacccccgacgaaaattaatttaaaaattttcaaatcgaatacgacgtaaacgccttatccgacctacgcgattcgcgtacaaatttataaaccgaataaaacgcgtcaacgtcgcatcaaacatcgaaacacttattaccgaatacgacgtaaacgccttatccgacttacgattctaacaccttttataaacctaataaaacgcgacaaacgtcgcatcaaacataatacgccaattacctacgttttttactcttataaccataaccacgcaacgccgcgtacgccgctaaaatcaccgtacttcgccttacgcaccgacgtttcacattcgcc

SEQ ID NO: 32911 - DNA, 529 bp, Artificial Sequence
  chemically treated genomic DNA (Homo sapiens) CpG-island No: 32911
tgggttgtggatttttaaatgtgcgatagtttttattttcgtaaaaggtaatgttttagttatttttatgtggttcggttttattattacgttgtataagttcggtgaaattaaagtagatatcggtagggacgttggcgtttatttcgagtaattcgtatatgggtaatttttataatagcgggagcgtatggttttcggcgaagattgatttaagaatttttaggtcggatgcggcgtaaacgttttattcggtttacgcggttcgcgtatagatttgtaggtcggataagacgcgttagcgtcgtattaggtatcggagtatttattgtcggatgcggcgtgaacgttttattcggtttacggttttggtattttttgtaggtttgataagacgcggtaagcgtcgtattaggtatgatgcgttaattgtttacgttttttatttttgtggttataattacgtagcgtcgcgtacgtcgttggaattatcgtgtttcgttttacgtatcggcgttttatattcgtt

SEQ ID NO: 32912 - DNA, 529 bp, Artificial Sequence
  chemically treated genomic DNA (Homo sapiens) CpG-island No: 32912
aacgaatataaaacgccgatacgtaaaacgaaacacgataattccaacgacgtacgcgacgctacgtaattataaccacaaaaataaaaaacgtaaacaattaacgcatcatacctaatacgacgcttaccgcgtcttatcaaacctacaaaaaataccaaaaccgtaaaccgaataaaacgttcacgccgcatccgacaataaatactccgatacctaatacgacgctaacgcgtcttatccgacctacaaatctatacgcgaaccgcgtaaaccgaataaaacgtttacgccgcatccgacctaaaaattcttaaatcaatcttcgccgaaaaccatacgctcccgctattataaaaattacccatatacgaattactcgaaataaacgccaacgtccctaccgatatctactttaatttcaccgaacttatacaacgtaataataaaaccgaaccacataaaaataactaaaacattaccttttacgaaaataaaaactatcgcacatttaaaaatccacaaccca

SEQ ID NO: 32913 - DNA, 522 bp, Artificial Sequence
  chemically treated genomic DNA (Homo sapiens) CpG-island No: 32913
ggcgtagtataagtttgttgcgggcgatgagtatattattgcggatatggcgatttggtcgtggtttggtaacgtggtgttaggtggtgtgtatgatgtcgttgagttttttgatgcgggtagttatagtatgtataacgttgggcgaaagaagtaggcgaacgttcggcggtgaaacgtgggcgtattgttaatcgtattaacggatcgttgaatgagtagttgtatgagcgttatgacgttagtgatttcgagacgaatacggaagataagcgttaggggtaagggttggtgttcgtcgtagataagttatttaggttcggaaacggtgtttacgtcgtattcggtaatcggtgtttaatgtttgatgcgacgtttatcgcgttttattaggtttataacgatataaatttgtaggtcggataaggcgtttacgtcgtattcggtatgaataacgcgtatttagttaataattaggatgtgaggttattttttattttgttatattcgtaaaaacggtat

SEQ ID NO: 32914 - DNA, 522 bp, Artificial Sequence
  chemically treated genomic DNA (Homo sapiens) CpG-island No: 32914
ataccgtttttacgaatataacaaaataaaaaataacctcacatcctaattattaactaaatacgcgttattcataccgaatacgacgtaaacgccttatccgacctacaaatttatatcgttataaacctaataaaacgcgataaacgtcgcatcaaacattaaacaccgattaccgaatacgacgtaaacaccgtttccgaacctaaataacttatctacgacgaacaccaacccttacccctaacgcttatcttccgtattcgtctcgaaatcactaacgtcataacgctcatacaactactcattcaacgatccgttaatacgattaacaatacgcccacgtttcaccgccgaacgttcgcctacttctttcgcccaacgttatacatactataactacccgcatcaaaaaactcaacgacatcatacacaccacctaacaccacgttaccaaaccacgaccaaatcgccatatccgcaataatatactcatcgcccgcaacaaacttatactacgcc

SEQ ID NO: 32915 - DNA, 522 bp, Artificial Sequence
  chemically treated genomic DNA (Homo sapiens) CpG-island No: 32915
atgtcgtttttacggatatgatagggtgaggggtaattttatattttgattattgattaagtgcgcgttgtttatgtcggatgcggcgtgaacgttttattcggtttataggtttgtatcgttgtaggtttgataagacgcggtaagcgtcgtattaggtattgagtatcgattgtcggatgcggcgtgaatatcgttttcgggtttggatggtttgtttgcgacgaatattaatttttatttttgacgtttatttttcgtattcgtttcgaaattattggcgttatggcgtttatgtaattgtttatttagcggttcgttggtgcggttaataatacgtttacgttttatcgtcggacgttcgtttatttttttcgtttagcgttgtatatgttataattgttcgtattaagaaatttagcggtattatatatattatttaatattacgttgttaaattacggttaaatcgttatattcgtaatggtgtatttatcgttcgtaataaatttatgttgcgtt

SEQ ID NO: 32916 - DNA, 522 bp, Artificial Sequence
  chemically treated genomic DNA (Homo sapiens) CpG-island No: 32916
aacgcaacataaatttattacgaacgataaatacaccattacgaatataacgatttaaccgtaatttaacaacgtaatattaaataatatatataataccgctaaatttcttaatacgaacaattataacatatacaacgctaaacgaaaaaaataaacgaacgtccgacgataaaacgtaaacgtattattaaccgcaccaacgaaccgctaaataaacaattacataaacgccataacgccaataatttcgaaacgaatacgaaaaataaacgtcaaaaataaaaattaatattcgtcgcaaacaaaccatccaaacccgaaaacgatattcacgccgcatccgacaatcgatactcaatacctaatacgacgcttaccgcgtcttatcaaacctacaacgatacaaacctataaaccgaataaaacgttcacgccgcatccgacataaacaacgcgcacttaatcaataatcaaaatataaaattacccctcaccctatcatatccgtaaaaacgacat

SEQ ID NO: 32917 - DNA, 1004 bp, Artificial Sequence
  chemically treated genomic DNA (Homo sapiens) CpG-island No: 32917
  unsure (900)
gcggttgtcgtttttggcgtaaataaggtacgtagtggtggcgtagattgtttttcgttagcgaaaatcgtcgatttcggtagttagcgtattaatagcggtattagaattaacggtattatattatttatttaaaatatcgtttgttatgttaagtttgttttcgcgaaatttagtgtcgtcgttagcgtcgcgttaatgggaatatcgtaatatattaggtttattgtcgttttacgaaaacgtggattcgcggttttagacgttagggcgataagattcggtaacgtcgtttttagttcgatatcggttattagtcgcgtaaagattagtgaggggaaattttaggtaatcgtcgttgttagtgagaataaattaaatagcgtaattgagttaattaaaatgcgtttgcgattataacggttcgttagtatttcgttaattaacgcgtcgggtagtaaatcgagtatttcggcgttaaatatttagtttatttgtattttatcgagtgcgaaagtttgggcgatgttattcgtcgtaatgttagtcgtttgaagatttagtttttttattagagcgattaaaaaataaagttcgatggttagtattaggcgggatgaagatgatgaagggggtacgagtcgatataagatgaatttcgttgcgagtgtaggtgaatcgcgattgatatatcgttatttacgtcgggtcggagaagtagtcgttgttggcgataaatttaaatatttcgcgttgttgttcgacggaataattcgtttgaataattttcggcgttagcgtttgaattagtagtgtcgtttcggcgttattgcggttatggtatttatcgtttatatgtagcgtttgcgttagtattaagcgtagatcgatttcgtcgantatttttatcgcgtcgcgtagtattggtttttgtatattacgtatttagtttaggcggttaattacgttttggtcgttagcgtttatacgtaaaattttcgtta

SEQ ID NO: 32918 - DNA, 1004 bp, Artificial Sequence
  chemically treated genomic DNA (Homo sapiens) CpG-island No: 32918
  unsure (105)
taacgaaaattttacgtataaacgctaacgaccaaaacgtaattaaccgcctaaactaaatacgtaatatacaaaaaccaatactacgcgacgcgataaaaatantcgacgaaatcgatctacgcttaatactaacgcaaacgctacatataaacgataaataccataaccgcaataacgccgaaacgacactactaattcaaacgctaacgccgaaaattattcaaacgaattattccgtcgaacaacaacgcgaaatatttaaatttatcgccaacaacgactacttctccgacccgacgtaaataacgatatatcaatcgcgattcacctacactcgcaacgaaattcatcttatatcgactcgtacccccttcatcatcttcatcccgcctaatactaaccatcgaactttattttttaatcgctctaataaaaaaactaaatcttcaaacgactaacattacgacgaataacatcgcccaaactttcgcactcgataaaatacaaataaactaaatatttaacgccgaaatactcgatttactacccgacgcgttaattaacgaaatactaacgaaccgttataatcgcaaacgcattttaattaactcaattacgctatttaatttattctcactaacaacgacgattacctaaaatttcccctcactaatctttacgcgactaataaccgatatcgaactaaaaacgacgttaccgaatcttatcgccctaacgtctaaaaccgcgaatccacgttttcgtaaaacgacaataaacctaatatattacgatattcccattaacgcgacgctaacgacgacactaaatttcgcgaaaacaaacttaacataacaaacgatattttaaataaataatataataccgttaattctaataccgctattaatacgctaactaccgaaatcgacgattttcgctaacgaaaaacaatctacgccaccactacgtaccttatttacgccaaaaacgacaaccgc

SEQ ID NO: 32919 - DNA, 1004 bp, Artificial Sequence
  chemically treated genomic DNA (Homo sapiens) CpG-island No: 32919
  unsure (105)
tggcgaagattttgcgtatgggcgttaacgattagagcgtgattgatcgtttgaattggatgcgtgatgtgtagggattaatattgcgcgacgcgatgaaaatantcggcgaaatcgatttgcgtttaatgttggcgtaggcgttgtatatgggcgatgagtgttataatcgtaataacgtcgggacgatattgttgatttaggcgttgacgtcggggattatttaggcgggttatttcgtcgagtaatagcgcgaagtgtttgagtttgtcgttagtagcgattattttttcggttcgacgtggatggcgatgtattagtcgcgatttatttgtattcgtaacgaggtttattttatgtcgattcgtattttttttattatttttatttcgtttgatgttgattatcgggttttgttttttggtcgttttgatggaagggttggatttttaggcggttggtattgcggcgggtggtatcgtttaggttttcgtattcgataaaatgtaaatgggttggatatttagcgtcggaatattcggtttgttattcggcgcgttggttggcggaatgttggcggatcgttatggtcgtaagcgtattttgattggtttagttgcgttgtttggtttgtttttattggtaacggcgattgtttgggatttttttttattggtttttgcgcggttgatgatcggtgtcgggttgggggcggcgttgtcgaattttatcgttttgacgtttgaagtcgcgggtttacgttttcgtgggacggtagtgagtttgatgtattgcggtgtttttattggcgcggcgttggcggcgatattgggtttcgcgggggtaaatttagtatggtaaacggtgttttgggtaggtggtgtggtgtcgttgattttggtgtcgttattaatgcgttggttgtcggagtcggcggttttcgttggcgaaaaatagtttgcgttattattgcgtgttttatttgcgttagaaacggtaatcgt

SEQ ID NO: 32920 - DNA, 1004 bp, Artificial Sequence
  chemically treated genomic DNA (Homo sapiens) CpG-island No: 32920
  unsure (900)
acgattaccgtttctaacgcaaataaaacacgcaataataacgcaaactatttttcgccaacgaaaaccgccgactccgacaaccaacgcattaataacgacaccaaaatcaacgacaccacaccacctacccaaaacaccgtttaccatactaaatttacccccgcgaaacccaatatcgccgccaacgccgcgccaataaaaacaccgcaatacatcaaactcactaccgtcccacgaaaacgtaaacccgcgacttcaaacgtcaaaacgataaaattcgacaacgccgcccccaacccgacaccgatcatcaaccgcgcaaaaaccaataaaaaaaaatcccaaacaatcgccgttaccaataaaaacaaaccaaacaacgcaactaaaccaatcaaaatacgcttacgaccataacgatccgccaacattccgccaaccaacgcgccgaataacaaaccgaatattccgacgctaaatatccaacccatttacattttatcgaatacgaaaacctaaacgataccacccgccgcaataccaaccgcctaaaaatccaacccttccatcaaaacgaccaaaaaacaaaacccgataatcaacatcaaacgaaataaaaataataaaaaaaatacgaatcgacataaaataaacctcgttacgaatacaaataaatcgcgactaatacatcgccatccacgtcgaaccgaaaaaataatcgctactaacgacaaactcaaacacttcgcgctattactcgacgaaataacccgcctaaataatccccgacgtcaacgcctaaatcaacaatatcgtcccgacgttattacgattataacactcatcgcccatatacaacgcctacgccaacattaaacgcaaatcgatttcgccgantattttcatcgcgtcgcgcaatattaatccctacacatcacgcatccaattcaaacgatcaatcacgctctaatcgttaacgcccatacgcaaaatcttcgcca

SEQ ID NO: 32921 - DNA, 843 bp, Artificial Sequence
  chemically treated genomic DNA (Homo sapiens) CpG-island No: 32921
atgtcggatatatttatcggtaagtttatttgttttgtcgttagtttttcggcgattttaatcggtagcgtgatcgtgttgttatcgtaattaaaggagacgcgtgtatttgcgtttatatttaatttcgcggtattcgttgggttgagtttgatgtacggttgcggtatacggttttggaagatcggagtacgttgtgataatttatcgttgttaaataggtggtaatacggcgcgatacgttatttttcgttttgcggttggaagcgtgtcggtacgttggtgaagtaatttagattattttcgttggttttaaatagacgtacgttcggatcgttaaagcgtagtttgtcgtttatttcgttttggaatttgttttacgtttgcggggagttttagttcggcgtttaggtaaacggtatttgcgaacggtgcgtagtcggttggttgttattttttatcgagaaggtgaatatggtgttaatattttgcggttgacgcggtttatgaacgttgatattggcgcgtatggcggtacgatcgttgtaacggtgcggtttacgggttagtttttgtttacgaatacggaatgtcgtattcggcgtagtatttttgatatttgttagtttcgggattttcgttataatagcgttaattatatggtcgagttgcgtttagtttattttacggtttagtagggtgttgtgtagcgagtgtaattagcgttagttttttagtatgatagttttgttgtcgtaataagtaggatcgtaaatttggaagaaacgttgggcgcggttttcgttgttgattatcgtatcgtcgtttttagtaaagttggta

SEQ ID NO: 32922 - DNA, 843 bp, Artificial Sequence
  chemically treated genomic DNA (Homo sapiens) CpG-island No: 32922
taccaactttactaaaaacgacgatacgataatcaacaacgaaaaccgcgcccaacgtttcttccaaatttacgatcctacttattacgacaacaaaactatcatactaaaaaactaacgctaattacactcgctacacaacaccctactaaaccgtaaaataaactaaacgcaactcgaccatataattaacgctattataacgaaaatcccgaaactaacaaatatcaaaaatactacgccgaatacgacattccgtattcgtaaacaaaaactaacccgtaaaccgcaccgttacaacgatcgtaccgccatacgcgccaatatcaacgttcataaaccgcgtcaaccgcaaaatattaacaccatattcaccttctcgataaaaaataacaaccaaccgactacgcaccgttcgcaaataccgtttacctaaacgccgaactaaaactccccgcaaacgtaaaacaaattccaaaacgaaataaacgacaaactacgctttaacgatccgaacgtacgtctatttaaaaccaacgaaaataatctaaattacttcaccaacgtaccgacacgcttccaaccgcaaaacgaaaaataacgtatcgcgccgtattaccacctatttaacaacgataaattatcacaacgtactccgatcttccaaaaccgtataccgcaaccgtacatcaaactcaacccaacgaataccgcgaaattaaatataaacgcaaatacacgcgtctcctttaattacgataacaacacgatcacgctaccgattaaaatcgccgaaaaactaacgacaaaacaaataaacttaccgataaatatatccgacat

SEQ ID NO: 32923 - DNA, 843 bp, Artificial Sequence
  chemically treated genomic DNA (Homo sapiens) CpG-island No: 32923
tgttagttttgttgaaagcgacggtacggtgattaataacgaaggtcgcgtttaacgttttttttaggtttacgattttgtttattacgatagtaaaattgttatgttggaaagttggcgttggttatattcgttgtatagtattttgttgagtcgtgaagtggattggacgtagttcgattatgtgattgacgttgttgtggcgaaaatttcggaattggtaggtattaaagatgttgcgtcggatgcgatatttcgtattcgtgggtagaaattggttcgtgaatcgtatcgttatagcggtcgtatcgttatgcgcgttaatattagcgtttatgagtcgcgttagtcgtaggatattgatattatgtttattttttcgatggaaggtaataattagtcgattgcgtatcgttcgtaagtgtcgtttgtttgggcgtcgggttggaatttttcgtaggcgtggaataaattttaggacgaagtgggcggtaaattgcgttttggcgattcgggcgtgcgtttgtttgaaattagcgaaaatggtttggattattttattagcgtatcggtacgtttttagtcgtaggacgggaaatggcgtatcgcgtcgtattattatttgtttggtagcgatgaattgttatagcgtgtttcggttttttagagtcgtatgtcgtagtcgtatattaaatttaatttagcggatgtcgcgaagttgggtgtgaacgtaggtatacgcgttttttttagttacgatggtaatacggttacgttgtcggttgaaatcgtcgaaggattgacggtagggtaggtgggtttgtcgatgggtatgttcggtat

SEQ ID NO: 32924 - DNA, 843 bp, Artificial Sequence
  chemically treated genomic DNA (Homo sapiens) CpG-island No: 32924
ataccgaacatacccatcgacaaacccacctaccctaccgtcaatccttcgacgatttcaaccgacaacgtaaccgtattaccatcgtaactaaaaaaaacgcgtatacctacgttcacacccaacttcgcgacatccgctaaattaaatttaatatacgactacgacatacgactctaaaaaaccgaaacacgctataacaattcatcgctaccaaacaaataataatacgacgcgatacgccatttcccgtcctacgactaaaaacgtaccgatacgctaataaaataatccaaaccattttcgctaatttcaaacaaacgcacgcccgaatcgccaaaacgcaatttaccgcccacttcgtcctaaaatttattccacgcctacgaaaaattccaacccgacgcccaaacaaacgacacttacgaacgatacgcaatcgactaattattaccttccatcgaaaaaataaacataatatcaatatcctacgactaacgcgactcataaacgctaatattaacgcgcataacgatacgaccgctataacgatacgattcacgaaccaatttctacccacgaatacgaaatatcgcatccgacgcaacatctttaatacctaccaattccgaaattttcgccacaacaacgtcaatcacataatcgaactacgtccaatccacttcacgactcaacaaaatactatacaacgaatataaccaacgccaactttccaacataacaattttactatcgtaataaacaaaatcgtaaacctaaaaaaaacgttaaacgcgaccttcgttattaatcaccgtaccgtcgctttcaacaaaactaaca

SEQ ID NO: 32925 - DNA, 567 bp, Artificial Sequence
  chemically treated genomic DNA (Homo sapiens) CpG-island No: 32925
gtagagaagtagaaattacgttggtgagtaaggcgttgaattattcgaatattcgcgtgttggagcgtagtaacgcggttgatttgattgtttttgataaaagtggtttgtcgggtacgcgacgggttgttggcgcgtgggtatggaatcgtaataaagaaacggtggaaatttgttacgtaaaagcggtggtgttggtaatcggcggtgcgtcgaaggtttattagtatattattaattcggatattttttttggcgatggtattgttatggcgtggcgcgtaggttgtcgggttgttaatttcgaatttaattagttttattttatcgcgttatattatttataggtacgtaattttttgttaatagaagtattgcgcggcgaaggcgtttattttaagcgttcggatggtacgcgtataatgttcgatttgatgagcgcggcgaattggtttcgcgcgatattgtcgttcgcgttattgattatgaaatgaaacgtttcggcgtagattgtatgttttttgatattagttataagttcgtcgattttattcgttagtatttttt

SEQ ID NO: 32926 - DNA, 567 bp, Artificial Sequence
  chemically treated genomic DNA (Homo sapiens) CpG-island No: 32926
aaaaaatactaacgaataaaatcgacgaacttataactaatatcaaaaaacatacaatctacgccgaaacgtttcatttcataatcaataacgcgaacgacaatatcgcgcgaaaccaattcgccgcgctcatcaaatcgaacattatacgcgtaccatccgaacgcttaaaataaacgccttcgccgcgcaatacttctattaacaaaaaattacgtacctataaataatataacgcgataaaataaaactaattaaattcgaaattaacaacccgacaacctacgcgccacgccataacaataccatcgccaaaaaaaatatccgaattaataatatactaataaaccttcgacgcaccgccgattaccaacaccaccgcttttacgtaacaaatttccaccgtttctttattacgattccatacccacgcgccaacaacccgtcgcgtacccgacaaaccacttttatcaaaaacaatcaaatcaaccgcgttactacgctccaacacgcgaatattcgaataattcaacgccttactcaccaacgtaatttctacttctctac

SEQ ID NO: 32927 - DNA, 567 bp, Artificial Sequence
  chemically treated genomic DNA (Homo sapiens) CpG-island No: 32927
gggaaatgttggcgaataaaatcggcgggtttatggttgatattaaggaatatataatttgcgtcgaggcgttttattttatggttaatggcgcgggcgataatatcgcgcggggttagttcgtcgcgtttattaaatcgggtattatacgcgtattattcgggcgtttgagataagcgttttcgtcgcgtagtgtttttgttaataggaaattgcgtgtttgtgggtgatatagcgcggtagggtggaattgattaaattcgagattggtaattcggtagtttgcgcgttacgttatagtaatgttatcgttagaagaaatattcggattggtggtgtattgataaattttcgacgtatcgtcggttgttagtattatcgtttttgcgtggtaggtttttatcgtttttttattacggttttatatttacgcgttaataattcgtcgcgtgttcggtaggttatttttgttagaaataattagattaatcgcgttgttgcgttttagtacgcgaatattcggatggtttagcgttttgtttattagcgtggtttttatttttttat

SEQ ID NO: 32928 - DNA, 567 bp, Artificial Sequence
  chemically treated genomic DNA (Homo sapiens) CpG-island No: 32928
ataaaaaaataaaaaccacgctaataaacaaaacgctaaaccatccgaatattcgcgtactaaaacgcaacaacgcgattaatctaattatttctaacaaaaataacctaccgaacacgcgacgaattattaacgcgtaaatataaaaccgtaataaaaaaacgataaaaacctaccacgcaaaaacgataatactaacaaccgacgatacgtcgaaaatttatcaatacaccaccaatccgaatatttcttctaacgataacattactataacgtaacgcgcaaactaccgaattaccaatctcgaatttaatcaattccaccctaccgcgctatatcacccacaaacacgcaatttcctattaacaaaaacactacgcgacgaaaacgcttatctcaaacgcccgaataatacgcgtataatacccgatttaataaacgcgacgaactaaccccgcgcgatattatcgcccgcgccattaaccataaaataaaacgcctcgacgcaaattatatattccttaatatcaaccataaacccgccgattttattcgccaacatttccc

SEQ ID NO: 32929 - DNA, 570 bp, Artificial Sequence
  chemically treated genomic DNA (Homo sapiens) CpG-island No: 32929
gcgcgtttggaaaaaagagaatatcggatttcgtttattacgggcgggttattattcgggaaatgggggtaaattttggcggtttaggtaacgcgcgggtagggtttggaaaatttagtttatggggtcggaatgtgtggttaacgtttcgttgtttaatattgcgggcgaattagcggaagggttgttggtgattaagtcgaagaattacgattaggtttcggcgaataaatttattgttgacgcgattaaagcgaaaaaataggatttaagtggcgtattcgtttggattatttacgtcgcgttgtaatttttgtaggcgggtttgaattagtttgacgattcggttgaaatcgttaaatatttgaaagcgaatttcgtggatatcgtaatgggatcgttgatttgggatgagaaaggcgatttgaaaggttttgagttcggcgtatttgattggtacgttaacggtacggcgatcgatgcgaagtaattattaatcggtaattttgggttgtcgttaaattgttaatatcgagtacgttgttttatgtcggatgcggcgtaacgttt

SEQ ID NO: 32930 - DNA, 570 bp, Artificial Sequence
  chemically treated genomic DNA (Homo sapiens) CpG-island No: 32930
aaacgttacgccgcatccgacataaaacaacgtactcgatattaacaatttaacgacaacccaaaattaccgattaataattacttcgcatcgatcgccgtaccgttaacgtaccaatcaaatacgccgaactcaaaacctttcaaatcgcctttctcatcccaaatcaacgatcccattacgatatccacgaaattcgctttcaaatatttaacgatttcaaccgaatcgtcaaactaattcaaacccgcctacaaaaattacaacgcgacgtaaataatccaaacgaatacgccacttaaatcctattttttcgctttaatcgcgtcaacaataaatttattcgccgaaacctaatcgtaattcttcgacttaatcaccaacaacccttccgctaattcgcccgcaatattaaacaacgaaacgttaaccacacattccgaccccataaactaaattttccaaaccctacccgcgcgttacctaaaccgccaaaatttacccccatttcccgaataataacccgcccgtaataaacgaaatccgatattctcttttttccaaacgcgc

SEQ ID NO: 32931 - DNA, 570 bp, Artificial Sequence
  chemically treated genomic DNA (Homo sapiens) CpG-island No: 32931
aggcgttacgtcgtattcggtatgaagtaacgtattcgatattagtaatttggcggtaatttaaagttgtcgattaatgattatttcgtatcggtcgtcgtgtcgttggcgtgttagttaaatacgtcgaatttaaagttttttagatcgttttttttattttaggttagcggttttattacggtatttacggagttcgtttttaggtatttggcgattttagtcggatcgttagattgatttaggttcgtttgtaaagattgtagcgcggcgtaggtggtttaaacgaatgcgttatttgggttttgttttttcgttttgatcgcgttaataatgggtttgttcgtcggaatttgatcgtagtttttcggtttggttattagtagttttttcgttgattcgttcgtaatgttagatagcgaaacgttagttatatatttcggttttataaattgagttttttaagttttgttcgcgcgttgtttgaatcgttaggatttgtttttatttttcgggtgataattcgttcgtagtaaacggagttcgatatttttttttttttagacgcgt

SEQ ID NO: 32932 - DNA, 570 bp, Artificial Sequence
  chemically treated genomic DNA (Homo sapiens) CpG-island No: 32932
acgcgtctaaaaaaaaaaaaatatcgaactccgtttactacgaacgaattatcacccgaaaaataaaaacaaatcctaacgattcaaacaacgcgcgaacaaaacttaaaaaactcaatttataaaaccgaaatatataactaacgtttcgctatctaacattacgaacgaatcaacgaaaaaactactaataaccaaaccgaaaaactacgatcaaattccgacgaacaaacccattattaacgcgatcaaaacgaaaaaacaaaacccaaataacgcattcgtttaaaccacctacgccgcgctacaatctttacaaacgaacctaaatcaatctaacgatccgactaaaatcgccaaatacctaaaaacgaactccgtaaataccgtaataaaaccgctaacctaaaataaaaaaaacgatctaaaaaactttaaattcgacgtatttaactaacacgccaacgacacgacgaccgatacgaaataatcattaatcgacaactttaaattaccgccaaattactaatatcgaatacgttacttcataccgaatacgacgtaacgcct

SEQ ID NO: 32933 - DNA, 560 bp, Artificial Sequence
  chemically treated genomic DNA (Homo sapiens) CpG-island No: 32933
cggttaatatataatacgcgtttacgcggtagtagcgtttaggtgttgcgtttattcgtcggtttcggtagtaatcgttgtgtttttgtttgcgttagttcgttatattgcgtatataacgtttgtaattttggacgatttgttgtttattttcgtagtgtatttagcggttgagttaatgcggtttttaattgcgtatcgatcggatattttgtattttgacgcgcgagcgttattgttagcgtatttttcgggcgattcgttagtagacggtagagatagagcggatcgtttgttttcggttcggtatcggataatttttcgtcgtcgaacggttgtatattaattattgcgtttattatattacggttaatatataggttattaatatgggtcgagttagtgatttgggcgatggttttattaatgcgcgtatgacgttaagcgttagattataatcggaagcgttaatttgttcgattagttttggtagttggttacggttgtaacgtattatatgtagtatcggattaaagatttttttttgtaattcggtaaag

SEQ ID NO: 32934 - DNA, 560 bp, Artificial Sequence
  chemically treated genomic DNA (Homo sapiens) CpG-island No: 32934
ctttaccgaattacaaaaaaaaatctttaatccgatactacatataatacgttacaaccgtaaccaactaccaaaactaatcgaacaaattaacgcttccgattataatctaacgcttaacgtcatacgcgcattaataaaaccatcgcccaaatcactaactcgacccatattaataacctatatattaaccgtaatataataaacgcaataattaatatacaaccgttcgacgacgaaaaattatccgataccgaaccgaaaacaaacgatccgctctatctctaccgtctactaacgaatcgcccgaaaaatacgctaacaataacgctcgcgcgtcaaaatacaaaatatccgatcgatacgcaattaaaaaccgcattaactcaaccgctaaatacactacgaaaataaacaacaaatcgtccaaaattacaaacgttatatacgcaatataacgaactaacgcaaacaaaaacacaacgattactaccgaaaccgacgaataaacgcaacacctaaacgctactaccgcgtaaacgcgtattatatattaaccg

SEQ ID NO: 32935 - DNA, 560 bp, Artificial Sequence
  chemically treated genomic DNA (Homo sapiens) CpG-island No: 32935
ttttgtcgaattgtaaaaagaggtttttggttcggtgttgtatgtggtgcgttataatcgtaattagttattagagttgatcgagtagattaacgttttcggttatggtttgacgtttggcgttatacgcgtattgatgaaattatcgtttaggttattggttcggtttatgttggtaatttgtatgttaatcgtaatatggtgggcgtagtggttggtgtgtagtcgttcggcggcgaagggttgttcggtatcgggtcgaaagtaggcggttcgttttatttttatcgtttgttggcgaatcgttcggaaagtgcgttggtagtgacgttcgcgcgttaggatgtaaagtattcggtcgatgcgtagttgaaagtcgtattgatttagtcgttaaatgtattgcgggaatgggtagtaaatcgtttagaattgtaggcgttatgtacgtaatatggcgagttggcgtaggtaggaatataacgattgttgtcggggtcgacgggtgaacgtaatatttggacgttgttgtcgcgtgagcgcgtgttgtgtattagtcg

SEQ ID NO: 32936 - DNA, 560 bp, Artificial Sequence
  chemically treated genomic DNA (Homo sapiens) CpG-island No: 32936
cgactaatacacaacacgcgctcacgcgacaacaacgtccaaatattacgttcacccgtcgaccccgacaacaatcgttatattcctacctacgccaactcgccatattacgtacataacgcctacaattctaaacgatttactacccattcccgcaatacatttaacgactaaatcaatacgactttcaactacgcatcgaccgaatactttacatcctaacgcgcgaacgtcactaccaacgcactttccgaacgattcgccaacaaacgataaaaataaaacgaaccgcctactttcgacccgataccgaacaacccttcgccgccgaacgactacacaccaaccactacgcccaccatattacgattaacatacaaattaccaacataaaccgaaccaataacctaaacgataatttcatcaatacgcgtataacgccaaacgtcaaaccataaccgaaaacgttaatctactcgatcaactctaataactaattacgattataacgcaccacatacaacaccgaaccaaaaacctctttttacaattcgacaaaa

SEQ ID NO: 32937 - DNA, 885 bp, Artificial Sequence
  chemically treated genomic DNA (Homo sapiens) CpG-island No: 32937
attttggtaggcgttgtcggaagaatttcgtttaagttcgtatcgttatttggcgataaatagttcgtaggggtcgtggtggttgttcggttggtgtgagcgggtgtcggaagcggatgaggtgttgtttgcgtcgttgtcgtcgtatcgggtattgatcgggttggtggatcgtttcgggcgtatatagacgttttatcgcgaagtcgtcggtgaatttagcggcgaaattatcggcgtgacggatggtgtttggcgttattttcggttggtattgattacgtaggcgtagcgggtagaagaagttcggtagtaggttattttcggcgggacggaatcgttcgttttttttgatattttgtcgggttatatcgaatatggtcgggataacggtattcgtttgtttgtcgtgtggttgacgtacgattcggaatattcggagaatttatttgtcgcgtcgttggtgcgttatggttggacgttacgcggcgaattggcggtggtgtatgatcgtagtggtaaataggtgcgtagtttatatttacgatgataatatcggggtcggatggtggcgtatcgttatacgggtcggtcggaaattcgttatcgttatagatagacgacgggcgggtgatagaatagttaaattcggtaggtttaagtttatacgtattagtatgaagaaagatcgtattattattatacgatagtttggatcgtcgtgaaatgttgtatacgtaggggcgaatgtcgggtttgaagcgggtggtgaaaaaggaatacgcggacggaagagtttacgtagagttagtttgatagttttggagtaggtttagggtatagatagatggcgttaaggtagatagagagggaattaaatggcgg

SEQ ID NO: 32938 - DNA, 885 bp, Artificial Sequence
  chemically treated genomic DNA (Homo sapiens) CpG-island No: 32938
ccgccatttaattccctctctatctaccttaacgccatctatctataccctaaacctactccaaaactatcaaactaactctacgtaaactcttccgtccgcgtattcctttttcaccacccgcttcaaacccgacattcgcccctacgtatacaacatttcacgacgatccaaactatcgtataataataatacgatctttcttcatactaatacgtataaacttaaacctaccgaatttaactattctatcacccgcccgtcgtctatctataacgataacgaatttccgaccgacccgtataacgatacgccaccatccgaccccgatattatcatcgtaaatataaactacgcacctatttaccactacgatcatacaccaccgccaattcgccgcgtaacgtccaaccataacgcaccaacgacgcgacaaataaattctccgaatattccgaatcgtacgtcaaccacacgacaaacaaacgaataccgttatcccgaccatattcgatataacccgacaaaatatcaaaaaaaacgaacgattccgtcccgccgaaaataacctactaccgaacttcttctacccgctacgcctacgtaatcaataccaaccgaaaataacgccaaacaccatccgtcacgccgataatttcgccgctaaattcaccgacgacttcgcgataaaacgtctatatacgcccgaaacgatccaccaacccgatcaatacccgatacgacgacaacgacgcaaacaacacctcatccgcttccgacacccgctcacaccaaccgaacaaccaccacgacccctacgaactatttatcgccaaataacgatacgaacttaaacgaaattcttccgacaacgcctaccaaaat

SEQ ID NO: 32939 - DNA, 885 bp, Artificial Sequence
  chemically treated genomic DNA (Homo sapiens) CpG-island No: 32939
tcgttatttaattttttttttgtttgttttaacgttatttgtttgtgttttgagtttgttttaagattgttaaattgattttgcgtagattttttcgttcgcgtgttttttttttattattcgttttagattcggtattcgtttttgcgtgtgtagtattttacggcggtttaggttgtcgtgtgatggtgatgcggtttttttttatattgatacgtgtagatttaagtttgtcgggtttagttgttttgttattcgttcgtcgtttgtttgtaacggtaacggattttcggtcggttcgtgtgacggtgcgttattattcggtttcggtattattatcgtaagtataagttgcgtatttgtttgttattacggttatatattatcgttagttcgtcgcgtggcgtttagttatagcgtattagcggcgcggtaggtaaatttttcgggtatttcgggtcgtgcgttagttatacggtagatagacggatgtcgttgtttcggttatattcggtgtaattcggtagggtattaggaaaagcggacggtttcgtttcgtcggaaatggtttgttgtcgggttttttttgttcgttgcgtttgcgtggttagtattagtcggaagtgacgttaggtattattcgttacgtcggtgatttcgtcgttgaatttatcggcggtttcgcggtggaacgtttgtgtgcgttcgaagcggtttattagttcggttagtattcggtacggcggtagcggcgtaggtagtattttattcgttttcggtattcgtttatattaatcgagtagttattacggtttttgcggattgtttgtcgttagataacgatgcggatttaagcggagttttttcggtagcgtttgttagagt

SEQ ID NO: 32940 - DNA, 885 bp, Artificial Sequence
  chemically treated genomic DNA (Homo sapiens) CpG-island No: 32940
actctaacaaacgctaccgaaaaaactccgcttaaatccgcatcgttatctaacgacaaacaatccgcaaaaaccgtaataactactcgattaatataaacgaataccgaaaacgaataaaatactacctacgccgctaccgccgtaccgaatactaaccgaactaataaaccgcttcgaacgcacacaaacgttccaccgcgaaaccgccgataaattcaacgacgaaatcaccgacgtaacgaataatacctaacgtcacttccgactaatactaaccacgcaaacgcaacgaacaaaaaaaacccgacaacaaaccatttccgacgaaacgaaaccgtccgcttttcctaataccctaccgaattacaccgaatataaccgaaacaacgacatccgtctatctaccgtataactaacgcacgacccgaaatacccgaaaaatttacctaccgcgccgctaatacgctataactaaacgccacgcgacgaactaacgataatatataaccgtaataacaaacaaatacgcaacttatacttacgataataataccgaaaccgaataataacgcaccgtcacacgaaccgaccgaaaatccgttaccgttacaaacaaacgacgaacgaataacaaaacaactaaacccgacaaacttaaatctacacgtatcaatataaaaaaaaaccgcatcaccatcacacgacaacctaaaccgccgtaaaatactacacacgcaaaaacgaataccgaatctaaaacgaataataaaaaaaaaacacgcgaacgaaaaaatctacgcaaaatcaatttaacaatcttaaaacaaactcaaaacacaaacaaataacgttaaaacaaacaaaaaaaaaattaaataacga

SEQ ID NO: 32941 - DNA, 759 bp, Artificial Sequence
  chemically treated genomic DNA (Homo sapiens) CpG-island No: 32941
tggtaatcgtcgttaaaggtaaaatcgtagtcgttgcgttttgcgaaggtatcgttcgttatttttcgatggttggtcgggataataaaacgatttttatagttggtaatggcgagatagcgatatattttttcgatttgggcgacgtttaggtttatttcgtcgatggtacgagtattagtaacgttttttacggtttgtgaacgtatatagtggcgtatcgttattattcgttttagcgttcgtagtatcggatcggtatcgtcggtatttaatatattggcgagatattgtatcggaatacgtaggttttcgatggcgggtagtacgttttcgtttttcggtaaatcgttcgtatttgcgtaggattgaatcggtgatagcggaggaacgtattagattatcggtagggtgcggtatttagggtgtaacggtagtgttagtttttagtttatcgttattttgtagattggcgaacgttgggtagcgttaattatattttgtggaatattttgtttttagggttttttcgattattgagggatcgtgtggatcgaggaatatttcgtattggcggtttatagaggttaatttcgcgttcggtgttcgtcgttttttcgatgcggtcggcgtcgtaaagtagtacgtttagatatcggatgcgatttatcgtaggtttttgagtatacggtcggttgatcggatttaattcgtgggtaatagaagatgtatttttttgatttgtcgtttttttagttg

SEQ ID NO: 32942 - DNA, 759 bp, Artificial Sequence
  chemically treated genomic DNA (Homo sapiens) CpG-island No: 32942
caactaaaaaaacgacaaatcaaaaaaatacatcttctattacccacgaattaaatccgatcaaccgaccgtatactcaaaaacctacgataaatcgcatccgatatctaaacgtactactttacgacgccgaccgcatcgaaaaaacgacgaacaccgaacgcgaaattaacctctataaaccgccaatacgaaatattcctcgatccacacgatccctcaataatcgaaaaaaccctaaaaacaaaatattccacaaaatataattaacgctacccaacgttcgccaatctacaaaataacgataaactaaaaactaacactaccgttacaccctaaataccgcaccctaccgataatctaatacgttcctccgctatcaccgattcaatcctacgcaaatacgaacgatttaccgaaaaacgaaaacgtactacccgccatcgaaaacctacgtattccgatacaatatctcgccaatatattaaataccgacgataccgatccgatactacgaacgctaaaacgaataataacgatacgccactatatacgttcacaaaccgtaaaaaacgttactaatactcgtaccatcgacgaaataaacctaaacgtcgcccaaatcgaaaaaatatatcgctatctcgccattaccaactataaaaatcgttttattatcccgaccaaccatcgaaaaataacgaacgataccttcgcaaaacgcaacgactacgattttacctttaacgacgattacca

SEQ ID NO: 32943 - DNA, 759 bp, Artificial Sequence
  chemically treated genomic DNA (Homo sapiens) CpG-island No: 32943
taattggaaaagcggtaagttagaaaaatgtattttttgttatttacgaattgagttcggttaatcgatcgtgtgtttagaaatttgcgatgggtcgtattcggtatttgggcgtgttgttttacgacgtcgatcgtatcgaggaagcggcgagtatcgagcgcgaagttgatttttatgaatcgttagtgcgaagtgtttttcgatttatacgattttttagtgatcgaggaagttttggaaataaggtattttataaaatgtgattgacgttgtttagcgttcgttagtttataaaatggcgatggattggaaattggtattatcgttgtattttgaatatcgtattttgtcgatggtttggtacgttttttcgttgttatcgatttagttttacgtagatgcgggcggtttgtcgaaaagcgaaggcgtgttgttcgttatcgaaagtttgcgtatttcggtgtaatatttcgttaatatgttgagtgtcggcgatatcggttcggtattgcgggcgttgaaacggatgatggcgatgcgttattatatgcgtttataaatcgtggaaggcgttattgatattcgtgttatcgacgaagtaggtttgagcgtcgtttaggtcgaagagatgtatcgttatttcgttattgttaattatgaagatcgttttgttatttcgattagttatcgggaaatggcgggcgatgttttcgtagaacgtaacggttgcggttttatttttggcgacggttgtta

SEQ ID NO: 32944 - DNA, 759 bp, Artificial Sequence
  chemically treated genomic DNA (Homo sapiens) CpG-island No: 32944
taacaaccgtcgccaaaaataaaaccgcaaccgttacgttctacgaaaacatcgcccgccatttcccgataactaatcgaaataacaaaacgatcttcataattaacaataacgaaataacgatacatctcttcgacctaaacgacgctcaaacctacttcgtcgataacacgaatatcaataacgccttccacgatttataaacgcatataataacgcatcgccatcatccgtttcaacgcccgcaataccgaaccgatatcgccgacactcaacatattaacgaaatattacaccgaaatacgcaaactttcgataacgaacaacacgccttcgcttttcgacaaaccgcccgcatctacgtaaaactaaatcgataacaacgaaaaaacgtaccaaaccatcgacaaaatacgatattcaaaatacaacgataataccaatttccaatccatcgccattttataaactaacgaacgctaaacaacgtcaatcacattttataaaataccttatttccaaaacttcctcgatcactaaaaaatcgtataaatcgaaaaacacttcgcactaacgattcataaaaatcaacttcgcgctcgatactcgccgcttcctcgatacgatcgacgtcgtaaaacaacacgcccaaataccgaatacgacccatcgcaaatttctaaacacacgatcgattaaccgaactcaattcgtaaataacaaaaaatacatttttctaacttaccgcttttccaatta

SEQ ID NO: 32945 - DNA, 509 bp, Artificial Sequence
  chemically treated genomic DNA (Homo sapiens) CpG-island No: 32945
  unsure (424, 472, 492)
gcgttggagtgcgtgaaagagttcgtcgagtcggtatgtgtgattgtgaagtacgttaatttttgcggcgtggttatcggtaattttatttttgatgtttacgatcgcgcgtataaaatcgatttaattttcgtattcggcggtattattgtttttaatcgcgagttggatgcggaaatcgtataggttattatttttcgttagtttgtcgaagtgattattgcgtcgttcgttagcgaagaagttttgaaaattatcgtcgttaaatagaacgtacgcgttttgatttgcggttagtggggcgagcgtgtttcgggtttcgattttaaacgcgtgaacggcggtttgttggtttaggatcgtgatttggggatggtcggtgcggaagaattgcgcgtggtgattaaacgttagtcgagcgaantaggaaatttggcgtgattgcgtttgtttttgcgtggataggtggcgnaagtttggtgaaatttaatngttattcgtttatgtta

SEQ ID NO: 32946 - DNA, 509 bp, Artificial Sequence
  chemically treated genomic DNA (Homo sapiens) CpG-island No: 32946
  unsure (18, 38, 86)
taacataaacgaataacnattaaatttcaccaaacttncgccacctatccacgcaaaaacaaacgcaatcacgccaaatttcctanttcgctcgactaacgtttaatcaccacgcgcaattcttccgcaccgaccatccccaaatcacgatcctaaaccaacaaaccgccgttcacgcgtttaaaatcgaaacccgaaacacgctcgccccactaaccgcaaatcaaaacgcgtacgttctatttaacgacgataattttcaaaacttcttcgctaacgaacgacgcaataatcacttcgacaaactaacgaaaaataataacctatacgatttccgcatccaactcgcgattaaaaacaataataccgccgaatacgaaaattaaatcgattttatacgcgcgatcgtaaacatcaaaaataaaattaccgataaccacgccgcaaaaattaacgtacttcacaatcacacataccgactcgacgaactctttcacgcactccaacgc

SEQ ID NO: 32947 - DNA, 509 bp, Artificial Sequence
  chemically treated genomic DNA (Homo sapiens) CpG-island No: 32947
  unsure (18, 38, 86)
tggtatagacggatagtngttggattttattaaatttncgttatttgtttacgtaagaataagcgtaattacgttaagttttttgnttcgttcggttgacgtttggttattacgcgtagttttttcgtatcgattatttttaggttacgattttgaattagtagatcgtcgtttacgcgtttgaaatcgaggttcggaatacgttcgttttattgatcgtaggttagaacgcgtacgttttgtttggcggcggtgatttttagggttttttcgttggcggacggcgtaataattatttcgataaattgacgagaaatgatggtttgtgcggttttcgtatttagttcgcggttaaaggtaatgatgtcgtcgaatgcggaggttgggtcggttttgtacgcgcgatcgtaagtattaagaatggaattgtcgatagttacgtcgtaagggttggcgtgttttataattatatatgtcggttcggcgaatttttttacgtattttagcgt

SEQ ID NO: 32948 - DNA, 509 bp, Artificial Sequence
  chemically treated genomic DNA (Homo sapiens) CpG-island No: 32948
  unsure (424, 472, 492)
acgctaaaatacgtaaaaaaattcgccgaaccgacatatataattataaaacacgccaacccttacgacgtaactatcgacaattccattcttaatacttacgatcgcgcgtacaaaaccgacccaacctccgcattcgacgacatcattacctttaaccgcgaactaaatacgaaaaccgcacaaaccatcatttctcgtcaatttatcgaaataattattacgccgtccgccaacgaaaaaaccctaaaaatcaccgccgccaaacaaaacgtacgcgttctaacctacgatcaataaaacgaacgtattccgaacctcgatttcaaacgcgtaaacgacgatctactaattcaaaatcgtaacctaaaaataatcgatacgaaaaaactacgcgtaataaccaaacgtcaaccgaacgaancaaaaaacttaacgtaattacgcttattcttacgtaaacaaataacgnaaatttaataaaatccaacnactatccgtctatacca

SEQ ID NO: 32949 - DNA, 946 bp, Artificial Sequence
  chemically treated genomic DNA (Homo sapiens) CpG-island No: 32949
attgttatcgttcggttgcgtttttggttttagtagatggaaaaaagtttcgtttatgaggtacgtttttgttgcggttcgataagttcgcgtattaggtttattagtttcgtttacgggtgaatattatttagtacgtcgcgatagttttcgtcggtaaatattaaagtggtaggaaagcgaaagacgttaaagcgatcgtcgatggtttcgttttgtttaaggttagtaatcgttatttgttatgtatagtcgggaaattcgcgtagtaattcgttaattattatcggattatcgttgatttttggcgtgcgtttcgggttattgttaaataatattacgtcgtttggcgtttgcgtaagttagtcgttaagacggggatttattgattggcgtttagtcgcgcgttagtattcgttgttataacgtattaaatggcgtgtcgttgtttatttttgttttttttgtgttattcggtattggcgtaagcgaacgttttcgtaattttttatcgatagatagttataattgagatagcgcgatttattagtcggttgcggtataattttttacgtagtaagttgcgttagcgtcgtttgtttcgtagcgggtagttgttttcgtgttagttcgtttaggttatcgtcgtagtcgtcgagtattgcgggttgtagatcgacgagggtaatatgtgttggtagatgttcgcggatattcgtagcgttaatatttcggagaaattgttttgatgtaggtttatttttttcgcgttgagataagtcggaatgcgtttttcggtataggttcgtagcgttttaggttttagttcgtagttaatggtatcgagaattaatagatggttggcgttttcgatatattttagtaagtttagtttttgagtatcgttatcgataatttttatatattcgggttagtggtaatgggt

SEQ ID NO: 32950 - DNA, 946 bp, Artificial Sequence
  chemically treated genomic DNA (Homo sapiens) CpG-island No: 32950
acccattaccactaacccgaatatataaaaattatcgataacgatactcaaaaactaaacttactaaaatatatcgaaaacgccaaccatctattaattctcgataccattaactacgaactaaaacctaaaacgctacgaacctataccgaaaaacgcattccgacttatctcaacgcgaaaaaaataaacctacatcaaaacaatttctccgaaatattaacgctacgaatatccgcgaacatctaccaacacatattaccctcgtcgatctacaacccgcaatactcgacgactacgacgataacctaaacgaactaacacgaaaacaactacccgctacgaaacaaacgacgctaacgcaacttactacgtaaaaaattataccgcaaccgactaataaatcgcgctatctcaattataactatctatcgataaaaaattacgaaaacgttcgcttacgccaataccgaataacacaaaaaaaacaaaaataaacaacgacacgccatttaatacgttataacaacgaatactaacgcgcgactaaacgccaatcaataaatccccgtcttaacgactaacttacgcaaacgccaaacgacgtaatattatttaacaataacccgaaacgcacgccaaaaatcaacgataatccgataataattaacgaattactacgcgaatttcccgactatacataacaaataacgattactaaccttaaacaaaacgaaaccatcgacgatcgctttaacgtctttcgctttcctaccactttaatatttaccgacgaaaactatcgcgacgtactaaataatattcacccgtaaacgaaactaataaacctaatacgcgaacttatcgaaccgcaacaaaaacgtacctcataaacgaaacttttttccatctactaaaaccaaaaacgcaaccgaacgataacaat

SEQ ID NO: 32951 - DNA, 946 bp, Artificial Sequence
  chemically treated genomic DNA (Homo sapiens) CpG-island No: 32951
gtttattattattggttcgagtatgtggagattgtcgatggcggtatttagggattgaatttgttggggtatgtcgaaagcgttagttatttgttgattttcgatgttattgattacgggttggaatttggaacgttgcgaatttatgtcggagaacgtatttcggtttattttagcgcgaagaaaatgagtttgtattagaatagttttttcgaagtgttggcgttgcggatattcgcggatatttgttagtatatattgttttcgtcggtttgtaattcgtaatgttcgacgattacggcggtagtttgagcgaattggtacgggagtaattgttcgttgcggaataggcggcgttggcgtagtttgttgcgtggggaattgtgtcgtaatcggttaatgaatcgcgttgttttaattatgattgtttgtcgatggaaaattacgaaggcgttcgtttgcgttagtatcggatgatataggaggagtagggatgagtaacgatacgttatttgatgcgttgtggtaacgaatgttggcgcgcggttggacgttagttagtgaattttcgttttgacgattggtttacgtaagcgttagacggcgtggtgttatttagtagtgattcgaaacgtacgttagaggttagcgataattcggtaatgattggcgaattattgcgcgagtttttcgattatatatggtaggtggcgattgttgattttgagtagagcgaagttatcggcgatcgttttggcgtttttcgtttttttgttattttagtgtttatcggcggaaattatcgcggcgtgttgaatggtatttattcgtgggcggaattgataaatttgatgcgcgggtttgtcgaatcgtagtaggagcgtgttttatgagcgaaatttttttttatttgttggggttaggaacgtaatcgaacgatgatagt

SEQ ID NO: 32952 - DNA, 946 bp, Artificial Sequence
  chemically treated genomic DNA (Homo sapiens) CpG-island No: 32952
actatcatcgttcgattacgttcctaaccccaacaaataaaaaaaaatttcgctcataaaacacgctcctactacgattcgacaaacccgcgcatcaaatttatcaattccgcccacgaataaataccattcaacacgccgcgataatttccgccgataaacactaaaataacaaaaaaacgaaaaacgccaaaacgatcgccgataacttcgctctactcaaaatcaacaatcgccacctaccatatataatcgaaaaactcgcgcaataattcgccaatcattaccgaattatcgctaacctctaacgtacgtttcgaatcactactaaataacaccacgccgtctaacgcttacgtaaaccaatcgtcaaaacgaaaattcactaactaacgtccaaccgcgcgccaacattcgttaccacaacgcatcaaataacgtatcgttactcatccctactcctcctatatcatccgatactaacgcaaacgaacgccttcgtaattttccatcgacaaacaatcataattaaaacaacgcgattcattaaccgattacgacacaattccccacgcaacaaactacgccaacgccgcctattccgcaacgaacaattactcccgtaccaattcgctcaaactaccgccgtaatcgtcgaacattacgaattacaaaccgacgaaaacaatatatactaacaaatatccgcgaatatccgcaacgccaacacttcgaaaaaactattctaatacaaactcattttcttcgcgctaaaataaaccgaaatacgttctccgacataaattcgcaacgttccaaattccaacccgtaatcaataacatcgaaaatcaacaaataactaacgctttcgacataccccaacaaattcaatccctaaataccgccatcgacaatctccacatactcgaaccaataataataaac

SEQ ID NO: 32953 - DNA, 573 bp, Artificial Sequence
  chemically treated genomic DNA (Homo sapiens) CpG-island No: 32953
  unsure (2, 251, 274, 288)
tntggttagttgtggttgtaacgtgcgattaaacgtcgaatcgcgatgacgcgttaatttttttagattaatatcgttcggttgttgttgtattaatagcgttttatcgttgtcggtataatcgttaattagtattatcggtttttgtgttagtttaatagtcgtttgaatcgcggtttggcgtagtgttttataatcgttttttattagcggataattaattttcgttgtatgtaattagttttgtatanatatgtgagcgttgatcgttatngggcgtagtagagnaatattttgcggattttgtaggtacgttgttcgttaggcgtttatgcgttgttgacgaattttattcgttattagtttatgttttagcgttagcgttgcgtttgagttttgttgtttatagtaggtgttaacggcggcgcgtttatcgttatttattaacggtagattgatagcggcgggtattgcgtcgtgtttaaattcgataggggcgcgaatattaataatgggcgtattagtaattagtagggtacgatagttttgtttcgtgtgttttttttgtatagt

SEQ ID NO: 32954 - DNA, 573 bp, Artificial Sequence
  chemically treated genomic DNA (Homo sapiens) CpG-island No: 32954
  unsure (286, 300, 323, 572)
actatacaaaaaaaacacacgaaacaaaactatcgtaccctactaattactaatacgcccattattaatattcgcgcccctatcgaatttaaacacgacgcaatacccgccgctatcaatctaccgttaataaataacgataaacgcgccgccgttaacacctactataaacaacaaaactcaaacgcaacgctaacgctaaaacataaactaataacgaataaaattcgtcaacaacgcataaacgcctaacgaacaacgtacctacaaaatccgcaaaatattnctctactacgcccnataacgatcaacgctcacatatntatacaaaactaattacatacaacgaaaattaattatccgctaataaaaaacgattataaaacactacgccaaaccgcgattcaaacgactattaaactaacacaaaaaccgataatactaattaacgattataccgacaacgataaaacgctattaatacaacaacaaccgaacgatattaatctaaaaaaattaacgcgtcatcgcgattcgacgtttaatcgcacgttacaaccacaactaaccana

SEQ ID NO: 32955 - DNA, 573 bp, Artificial Sequence
  chemically treated genomic DNA (Homo sapiens) CpG-island No: 32955
  unsure (286, 300, 323, 572)
attatgtaagagagatatacggaataggattatcgtgttttgttgattgttgatacgtttattattgatgttcgcgtttttatcgagtttgagtacggcgtaatgttcgtcgttattaatttgtcgttaatgaataacgatgaacgcgtcgtcgttggtatttgttataaatagtaaggtttagacgtagcgttggcgttgggatataaattggtggcgggtgaaattcgttagtagcgtatggacgtttggcgggtagcgtgtttgtaaaattcgtaaggtattnttttgttgcgtttngtggcggttagcgtttatatatntgtgtaaagttggttgtatgtagcggggattgattattcgttggtggaaggcggttataaggtattgcgttagatcgcgatttaggcgattattgaattggtataaaaatcgatagtgttgattggcggttgtatcggtagcggtaaaacgttgttagtgtagtaatagtcgaacggtgttgatttggaagggttggcgcgttatcgcggttcggcgtttggtcgtacgttataattataattagttang

SEQ ID NO: 32956 - DNA, 573 bp, Artificial Sequence
  chemically treated genomic DNA (Homo sapiens) CpG-island No: 32956
  unsure (2, 251, 274, 288)
cntaactaattataattataacgtacgaccaaacgccgaaccgcgataacgcgccaacccttccaaatcaacaccgttcgactattactacactaacaacgttttaccgctaccgatacaaccgccaatcaacactatcgatttttataccaattcaataatcgcctaaatcgcgatctaacgcaataccttataaccgccttccaccaacgaataatcaatccccgctacatacaaccaactttacacanatatataaacgctaaccgccacnaaacgcaacaaaanaataccttacgaattttacaaacacgctacccgccaaacgtccatacgctactaacgaatttcacccgccaccaatttatatcccaacgccaacgctacgtctaaaccttactatttataacaaataccaacgacgacgcgttcatcgttattcattaacgacaaattaataacgacgaacattacgccgtactcaaactcgataaaaacgcgaacatcaataataaacgtatcaacaatcaacaaaacacgataatcctattccgtatatctctcttacataat

SEQ ID NO: 32957 - DNA, 749 bp, Artificial Sequence
  chemically treated genomic DNA (Homo sapiens) CpG-island No: 32957
gcgattaatgtcggagtgtttgtagtcgttaacgggtatttttgtcggggattcgttttaggtgttgatttagtaaatattcgtttttagttgatgaatgacgcgatgcgcgcggtttaggttcgttgttacgatgttcgtcgttaggtcgtagtcggtatcgttagcgcggcgaatgatttcgtttttcgattcgtaggttagaatggatattattggttcgaagatttttttacgtacgatggttatatcgtcgttgtaatcggtgaatattgtcggtgtaatttatgcgtcgttatcgaagttatcgttttttagtatatcgtcgtcgtatagtacgcgcgcgtttttttttttgtttttggcgatatagcgtagtacgttatcgcgatgcgggaagttgattagcgggtcgaagttagtttgcggatcgaaaacgtcgttcgcgcgaatgcgtttaacgcgcgttagaattttttgtttaaatgcggttttgtatttcgtcggaacgaagacgcgggtgttattggtatatatttgatcggagttgaagaagtttgttattatggcgatatcggcggcgagatcgagattcgtattatcgaaaacgattagcggtgatttatcgtttagttttatggttattttttttagggaagaggtcgtcgagttagttattatttttttgtcgttggcgatatcgtcggtaaatgatattttggtaatgttcggatgtttcggttagatat

SEQ ID NO: 32958 - DNA, 749 bp, Artificial Sequence
  chemically treated genomic DNA (Homo sapiens) CpG-island No: 32958
atatctaaccgaaacatccgaacattaccaaaatatcatttaccgacgatatcgccaacgacaaaaaaataataactaactcgacgacctcttccctaaaaaaaataaccataaaactaaacgataaatcaccgctaatcgttttcgataatacgaatctcgatctcgccgccgatatcgccataataacaaacttcttcaactccgatcaaatatataccaataacacccgcgtcttcgttccgacgaaatacaaaaccgcatttaaacaaaaaattctaacgcgcgttaaacgcattcgcgcgaacgacgttttcgatccgcaaactaacttcgacccgctaatcaacttcccgcatcgcgataacgtactacgctatatcgccaaaaacaaaaaaaaaaacgcgcgcgtactatacgacgacgatatactaaaaaacgataacttcgataacgacgcataaattacaccgacaatattcaccgattacaacgacgatataaccatcgtacgtaaaaaaatcttcgaaccaataatatccattctaacctacgaatcgaaaaacgaaatcattcgccgcgctaacgataccgactacgacctaacgacgaacatcgtaacaacgaacctaaaccgcgcgcatcgcgtcattcatcaactaaaaacgaatatttactaaatcaacacctaaaacgaatccccgacaaaaatacccgttaacgactacaaacactccgacattaatcgc

SEQ ID NO: 32959 - DNA, 749 bp, Artificial Sequence
  chemically treated genomic DNA (Homo sapiens) CpG-island No: 32959
atatttgatcgagatattcgggtattgttaaagtgttatttatcggcggtgtcgttagcggtaaaaaagtgatggttaattcggcggttttttttttgaaagaagtgattatggaattgggcggtaaattatcgttgatcgttttcgatgatgcggatttcgatttcgtcgtcgatatcgttatgatggtaaatttttttagtttcggttaggtgtgtattaatggtattcgcgttttcgtttcggcgaaatgtaaagtcgtatttgagtagaaaattttggcgcgcgttgagcgtattcgcgcgggcgacgttttcgattcgtaaattaatttcggttcgttggttagtttttcgtatcgcgataacgtgttgcgttatatcgttaaaggtaaagaggaaggcgcgcgcgtattgtgcggcggcgatgtattgaaaggcgatggtttcgataacggcgtatgggttgtatcgatagtgtttatcgattgtagcgacgatatgattatcgtgcgtgaagagattttcgggttagtgatgtttattttgatttacgagtcggaagacgaagttattcgtcgcgttaacgatatcgattacggtttggcggcgggtatcgtgatagcggatttgaatcgcgcgtatcgcgttatttattagttggaagcgggtatttgttggattaatatttggggcgaattttcggtagagatgttcgttggcggttataaatatttcggtattggtcgt

SEQ ID NO: 32960 - DNA, 749 bp, Artificial Sequence
  chemically treated genomic DNA (Homo sapiens) CpG-island No: 32960
acgaccaataccgaaatatttataaccgccaacgaacatctctaccgaaaattcgccccaaatattaatccaacaaatacccgcttccaactaataaataacgcgatacgcgcgattcaaatccgctatcacgatacccgccgccaaaccgtaatcgatatcgttaacgcgacgaataacttcgtcttccgactcgtaaatcaaaataaacatcactaacccgaaaatctcttcacgcacgataatcatatcgtcgctacaatcgataaacactatcgatacaacccatacgccgttatcgaaaccatcgcctttcaatacatcgccgccgcacaatacgcgcgcgccttcctctttacctttaacgatataacgcaacacgttatcgcgatacgaaaaactaaccaacgaaccgaaattaatttacgaatcgaaaacgtcgcccgcgcgaatacgctcaacgcgcgccaaaattttctactcaaatacgactttacatttcgccgaaacgaaaacgcgaataccattaatacacacctaaccgaaactaaaaaaatttaccatcataacgatatcgacgacgaaatcgaaatccgcatcatcgaaaacgatcaacgataatttaccgcccaattccataatcacttctttcaaaaaaaaaaccgccgaattaaccatcacttttttaccgctaacgacaccgccgataaataacactttaacaatacccgaatatctcgatcaaatat

SEQ ID NO: 32961 - DNA, 762 bp, Artificial Sequence
  chemically treated genomic DNA (Homo sapiens) CpG-island No: 32961
tttacggttagtaatatgtttggttgtagcgtcgtggtgtttcgcggtgaaaaacgcggatttttatgaattttaatgtcgatgcgtgatcggtgttatgatcgaaatagtcgttataatttgtttttgtaatgattcggcgcgcggtatcgttaatttgttggtagcgtacgtcggggcgaatcgcggagattgttgcgagttgtgtttgtaggataatttgatagacgttaaatagtaggtgagattcggcgtttattttttcgttatttattagtaaggtgcgcgttatattagagtagtagttttgatatagcgtatcgaaatcgagagtgataaattcgttcgttgtaataattttgtcgttgttttgtcgtgcggtagcgttttacgttagttattggcgataatggtgttaaagaggttttttttgcgttttgttggcgtataaattattttagtttagcggttatttcgcgttcgtttattttcgtttgaataaagcggcgaatatgttttgtatcgcgattagtaattttataggcgaggcggattttttttattttttttggcgttttgatttgtcgtagtatattcggcgtggcgttaattagtttcgtattgagtttagattgttagcggtgcgcggttttttaatttatttgttggtttttaaaatcgagcgtttgtaattgtttatcggtaatgatttgattgacgatagtggtaagcgtgttcgtcgcgttaagtaaatgtagttgg

SEQ ID NO: 32962 - DNA, 762 bp, Artificial Sequence
  chemically treated genomic DNA (Homo sapiens) CpG-island No: 32962
ccaactacatttacttaacgcgacgaacacgcttaccactatcgtcaatcaaatcattaccgataaacaattacaaacgctcgattttaaaaaccaacaaataaattaaaaaaccgcgcaccgctaacaatctaaactcaatacgaaactaattaacgccacgccgaatatactacgacaaatcaaaacgccaaaaaaaataaaaaaaatccgcctcgcctataaaattactaatcgcgatacaaaacatattcgccgctttattcaaacgaaaataaacgaacgcgaaataaccgctaaactaaaataatttatacgccaacaaaacgcaaaaaaaacctctttaacaccattatcgccaataactaacgtaaaacgctaccgcacgacaaaacaacgacaaaattattacaacgaacgaatttatcactctcgatttcgatacgctatatcaaaactactactctaatataacgcgcaccttactaataaataacgaaaaaataaacgccgaatctcacctactatttaacgtctatcaaattatcctacaaacacaactcgcaacaatctccgcgattcgccccgacgtacgctaccaacaaattaacgataccgcgcgccgaatcattacaaaaacaaattataacgactatttcgatcataacaccgatcacgcatcgacattaaaattcataaaaatccgcgtttttcaccgcgaaacaccacgacgctacaaccaaacatattactaaccgtaaa

SEQ ID NO: 32963 - DNA, 762 bp, Artificial Sequence
  chemically treated genomic DNA (Homo sapiens) CpG-island No: 32963
ttagttgtatttgtttgacgcgacgaatacgtttattattatcgttaattaaattattgtcgatgaatagttgtaaacgttcggttttgagggttagtaggtgagttgggaaatcgcgtatcgttggtagtttgaatttaatgcgaaattggttagcgttacgtcggatgtgttgcggtaaattaaaacgttagaggaggtggagaaaattcgtttcgtttgtgggattgttgatcgcggtgtagagtatattcgtcgttttatttaggcggggatgagcgagcgcgagatagtcgttgaattggagtggtttatgcgttagtagggcgtagaaaaagtttttttgatattattgtcgttagtggttggcgtggggcgttgtcgtacggtaaagtagcgataagattgttgtagcgggcgagtttgttattttcgatttcggtgcgttgtattagggttattgttttgatatgacgcgtattttgttggtgaatggcgaaggggtgagcgtcgaattttatttgttgtttaacgtttattaaattgttttgtaggtatagttcgtagtaattttcgcgattcgtttcggcgtgcgttgttagtaggttgacgatgtcgcgcgtcgggttattatagaagtaggttatggcgattatttcggttataatatcggttacgtatcggtattgaagtttatgaagattcgcgttttttatcgcgggatattacgacgttatagttaggtatgttattgatcgtgga

SEQ ID NO: 32964 - DNA, 762 bp, Artificial Sequence
  chemically treated genomic DNA (Homo sapiens) CpG-island No: 32964
tccacgatcaataacatacctaactataacgtcgtaatatcccgcgataaaaaacgcgaatcttcataaacttcaataccgatacgtaaccgatattataaccgaaataatcgccataacctacttctataataacccgacgcgcgacatcgtcaacctactaacaacgcacgccgaaacgaatcgcgaaaattactacgaactatacctacaaaacaatttaataaacgttaaacaacaaataaaattcgacgctcaccccttcgccattcaccaacaaaatacgcgtcatatcaaaacaataaccctaatacaacgcaccgaaatcgaaaataacaaactcgcccgctacaacaatcttatcgctactttaccgtacgacaacgccccacgccaaccactaacgacaataatatcaaaaaaactttttctacgccctactaacgcataaaccactccaattcaacgactatctcgcgctcgctcatccccgcctaaataaaacgacgaatatactctacaccgcgatcaacaatcccacaaacgaaacgaattttctccacctcctctaacgttttaatttaccgcaacacatccgacgtaacgctaaccaatttcgcattaaattcaaactaccaacgatacgcgatttcccaactcacctactaaccctcaaaaccgaacgtttacaactattcatcgacaataatttaattaacgataataataaacgtattcgtcgcgtcaaacaaatacaactaa

SEQ ID NO: 32965 - DNA, 987 bp, Artificial Sequence
  chemically treated genomic DNA (Homo sapiens) CpG-island No: 32965
tgatgtgtgggttcgtggttaggtgtcgtgtcgtttaatttgtcgcggttattatcgtttagtttcgatagtttattatcggtgaagcgatggcgattggcgagtcgtgcgttcggttgcgttgttggatttcgtcgttttttgttcgtttggcggtcggtgaatgcgttaatttaatatcgttcgtaatttataaattggcgatattaaacgtattaaatttttcgttaattggatggcgtgcggtaggttattttttggtgaagatgcgggtttgtatgaagtcgttaaattcgtgggtcgaagagttttgttcggcgttgggtttgacgatttcggtgggtaaagatttttatgtcgatgaaaatttgttgttaggaaggtaacgaagagcgcgaaatgacgtcgtcgttgtcgttggtgatttttgtatttgttcgcgtggaagatgtacgttatattattacgtcgtagttttttatcgaagataacgtattgttgttgattgatttgggtaaaggtaataacgcgttgggcgtaacggcgttggcgtaggtttatcgttagtttggcgataatcggtagatgtcgcgatgttcgtaattaaaggtttttatacgcgatttaggcgttggttgtatagcgtaagttgttggcgtattacgatcgttttgatggcggtttgttggtaacgttgcggaaatggtttttgttggttattgtggtattgacgcggattcgttattttgggtgacgatcgtttggcggcgttgtttaacgaagaattgggtgcggtgatttaggttcgtgtcgttatcgtgaagcggtcgagttcgtattggtatagtatgggtttgttgattgtgtttattatgtaggtaggcggttttcggtgatcgttttgtgattatcgttacgggtagattgtatttagcgaaagtcgtattacgttgcgtgtttggtgggtagaaaattatttggtagatg

SEQ ID NO: 32966 - DNA, 987 bp, Artificial Sequence
  chemically treated genomic DNA (Homo sapiens) CpG-island No: 32966
catctaccaaataattttctacccaccaaacacgcaacgtaatacgactttcgctaaatacaatctacccgtaacgataatcacaaaacgatcaccgaaaaccgcctacctacataataaacacaatcaacaaacccatactataccaatacgaactcgaccgcttcacgataacgacacgaacctaaatcaccgcacccaattcttcgttaaacaacgccgccaaacgatcgtcacccaaaataacgaatccgcgtcaataccacaataaccaacaaaaaccatttccgcaacgttaccaacaaaccgccatcaaaacgatcgtaatacgccaacaacttacgctatacaaccaacgcctaaatcgcgtataaaaacctttaattacgaacatcgcgacatctaccgattatcgccaaactaacgataaacctacgccaacgccgttacgcccaacgcgttattacctttacccaaatcaatcaacaacaatacgttatcttcgataaaaaactacgacgtaataatataacgtacatcttccacgcgaacaaatacaaaaatcaccaacgacaacgacgacgtcatttcgcgctcttcgttaccttcctaacaacaaattttcatcgacataaaaatctttacccaccgaaatcgtcaaacccaacgccgaacaaaactcttcgacccacgaatttaacgacttcatacaaacccgcatcttcaccaaaaaataacctaccgcacgccatccaattaacgaaaaatttaatacgtttaatatcgccaatttataaattacgaacgatattaaattaacgcattcaccgaccgccaaacgaacaaaaaacgacgaaatccaacaacgcaaccgaacgcacgactcgccaatcgccatcgcttcaccgataataaactatcgaaactaaacgataataaccgcgacaaattaaacgacacgacacctaaccacgaacccacacatca

SEQ ID NO: 32967 - DNA, 987 bp, Artificial Sequence
  chemically treated genomic DNA (Homo sapiens) CpG-island No: 32967
tatttgttaggtagttttttgtttattagatacgtaacgtggtgcggttttcgttgaatatagtttgttcgtggcggtaattataaaacggttatcggaaatcgtttgtttatataatggatataattagtaagtttatgttgtgttagtacggattcgatcgttttacggtagcggtacgaatttgaattatcgtatttagtttttcgttaaataacgtcgttaggcgatcgttatttagagtggcgaattcgcgttaatgttataatgattagtaaaggttattttcgtagcgttattagtaggtcgttattagagcggtcgtgatacgttagtagtttacgttgtgtaattagcgtttgaatcgcgtatagaagtttttagttgcggatatcgcgatatttgtcggttgtcgttaagttgacgataaatttgcgttagcgtcgttgcgtttagcgcgttattgtttttgtttaaattaattagtagtagtgcgttattttcggtagaaagttgcggcgtgatggtgtgacgtatattttttacgcgggtaaatgtagaaattattagcgatagcggcgacgttatttcgcgtttttcgttatttttttgatagtaggtttttatcgatatggagatttttatttatcgggatcgttaggtttagcgtcggataaagtttttcgatttacggatttaacggttttatataggttcgtatttttattagaggatggtttgtcgtacgttatttagttggcggaaagtttgatgcgtttgatatcgttaatttgtaggttgcgagcgatgttaggttaacgtatttatcgatcgttagacgggtagagagcggcgaaatttagtagcgtaatcggacgtacgattcgttaatcgttatcgttttatcgatagtagattgtcgaggttggacggtagtgatcgcgatagattaagcgatacggtatttgattacggatttatatatta

SEQ ID NO: 32968 - DNA, 987 bp, Artificial Sequence
  chemically treated genomic DNA (Homo sapiens) CpG-island No: 32968
taatatataaatccgtaatcaaataccgtatcgcttaatctatcgcgatcactaccgtccaacctcgacaatctactatcgataaaacgataacgattaacgaatcgtacgtccgattacgctactaaatttcgccgctctctacccgtctaacgatcgataaatacgttaacctaacatcgctcgcaacctacaaattaacgatatcaaacgcatcaaactttccgccaactaaataacgtacgacaaaccatcctctaataaaaatacgaacctatataaaaccgttaaatccgtaaatcgaaaaactttatccgacgctaaacctaacgatcccgataaataaaaatctccatatcgataaaaacctactatcaaaaaaataacgaaaaacgcgaaataacgtcgccgctatcgctaataatttctacatttacccgcgtaaaaaatatacgtcacaccatcacgccgcaactttctaccgaaaataacgcactactactaattaatttaaacaaaaacaataacgcgctaaacgcaacgacgctaacgcaaatttatcgtcaacttaacgacaaccgacaaatatcgcgatatccgcaactaaaaacttctatacgcgattcaaacgctaattacacaacgtaaactactaacgtatcacgaccgctctaataacgacctactaataacgctacgaaaataacctttactaatcattataacattaacgcgaattcgccactctaaataacgatcgcctaacgacgttatttaacgaaaaactaaatacgataattcaaattcgtaccgctaccgtaaaacgatcgaatccgtactaacacaacataaacttactaattatatccattatataaacaaacgatttccgataaccgttttataattaccgccacgaacaaactatattcaacgaaaaccgcaccacgttacgtatctaataaacaaaaaactacctaacaaata

SEQ ID NO: 32969 - DNA, 610 bp, Artificial Sequence
  chemically treated genomic DNA (Homo sapiens) CpG-island No: 32969
gtacggcgggtaggcgtaggcgaagttcgacgaatattaatcggtgtttatgttagtcggcgcgttttgttcgtcgttggaaaaataattggcgatgcgttggcggatgggcgtgcgtaatagtgtatatattttggcgaaattggcgacgttatttgtcgaaggtgaggcgttgcgtttttttagcgtttcgtattcggaatatattggacgcgtcgcgaagttttttagcgatatcggcgggcgggcgttattaatgtatggtattgaaggtgaagtgtatgttaattcgtagcgttgttcgtagattaattttattgatcgtgaagggatgcgggtgttgtatgaaaaataggatattgttggtagcgagttattgttataagtaaaagattcggaaattacggcgtagtggattgagcgttgttttgttggtagcgaatcgattttcgaatcgttgaaaatttagatggtttgttgtttggtggttacgggtgaagcggtaattattagcgacggtttggcgcgcgttaattaggtattttaattttttttttagtcggatgagttatgttattcggtttttattttatcgtaatatgaaattttt

SEQ ID NO: 32970 - DNA, 610 bp, Artificial Sequence
  chemically treated genomic DNA (Homo sapiens) CpG-island No: 32970
aaaaatttcatattacgataaaataaaaaccgaataacataactcatccgactaaaaaaaaaattaaaatacctaattaacgcgcgccaaaccgtcgctaataattaccgcttcacccgtaaccaccaaacaacaaaccatctaaattttcaacgattcgaaaatcgattcgctaccaacaaaacaacgctcaatccactacgccgtaatttccgaatcttttacttataacaataactcgctaccaacaatatcctatttttcatacaacacccgcatcccttcacgatcaataaaattaatctacgaacaacgctacgaattaacatacacttcaccttcaataccatacattaataacgcccgcccgccgatatcgctaaaaaacttcgcgacgcgtccaatatattccgaatacgaaacgctaaaaaaacgcaacgcctcaccttcgacaaataacgtcgccaatttcgccaaaatatatacactattacgcacgcccatccgccaacgcatcgccaattatttttccaacgacgaacaaaacgcgccgactaacataaacaccgattaatattcgtcgaacttcgcctacgcctacccgccgtac

SEQ ID NO: 32971 - DNA, 610 bp, Artificial Sequence
  chemically treated genomic DNA (Homo sapiens) CpG-island No: 32971
aggaattttatattgcggtggggtaaaagtcggatgatatggtttattcggttgagaaaagaattaaaatgtttgattaacgcgcgttaggtcgtcgttgatagttgtcgttttattcgtagttattaggtagtaagttatttggatttttagcgattcgggaatcggttcgttgttagtaaggtaacgtttaatttattgcgtcgtggttttcggattttttgtttgtggtagtaattcgttattagtagtgttttgttttttatatagtattcgtatttttttacggttaatgagattgatttgcgggtagcgttgcggattagtatatattttatttttagtattatgtattagtagcgttcgttcgtcgatatcgttaaagaatttcgcgacgcgtttaatgtatttcggatgcgaaacgttggaaagacgtagcgttttattttcggtaaatggcgtcgttagtttcgttagggtatgtgtattgttacgtacgtttattcgttagcgtatcgttagttgtttttttagcggcgggtaaaacgcgtcgattggtataaatatcggttgatgttcgtcgagtttcgtttgcgtttgttcgtcgtgt

SEQ ID NO: 32972 - DNA, 610 bp, Artificial Sequence
  chemically treated genomic DNA (Homo sapiens) CpG-island No: 32972
acacgacgaacaaacgcaaacgaaactcgacgaacatcaaccgatatttataccaatcgacgcgttttacccgccgctaaaaaaacaactaacgatacgctaacgaataaacgtacgtaacaatacacataccctaacgaaactaacgacgccatttaccgaaaataaaacgctacgtctttccaacgtttcgcatccgaaatacattaaacgcgtcgcgaaattctttaacgatatcgacgaacgaacgctactaatacataatactaaaaataaaatatatactaatccgcaacgctacccgcaaatcaatctcattaaccgtaaaaaaatacgaatactatataaaaaacaaaacactactaataacgaattactaccacaaacaaaaaatccgaaaaccacgacgcaataaattaaacgttaccttactaacaacgaaccgattcccgaatcgctaaaaatccaaataacttactacctaataactacgaataaaacgacaactatcaacgacgacctaacgcgcgttaatcaaacattttaattcttttctcaaccgaataaaccatatcatccgacttttaccccaccgcaatataaaattcct

SEQ ID NO: 32973 - DNA, 648 bp, Artificial Sequence
  chemically treated genomic DNA (Homo sapiens) CpG-island No: 32973
gtgtgggcgtcgttagggaagtatcgataagtatatagagagggggtcgtgtgggcgtcgttagggaagtgcggataagtatatagagagggggtcgtgtgggcgtcgttagggaagtatcgataagtatatagagagggggtcgtgtgggcgtcgttagggaagtatcgataagtatattggagaggggttcgcgtgggttttattagggaagtatcgataagtatacggagaggggttcgcgtgggtttcgttagggaagtatcgataagtatacggagaggggttcgcgtgggcgtcgttagggaagtatcgataagtatatagagaggggttcgtgtgggcgtcgttagggaagtgcggataagtatacggagaggggttcgcgtgggcgtcgttagggaagtatcgataagtatatagagagggggtcgtgtgggcgtcgttagggaagtgcggataagtatattggagaggggttcgcgtgggtttcgttagggaagtatcgataagtatatagagagggggtcgcgtgggcgtcgttagggaagtgcggataagtatacggagagggggtcgcgtgggcgtcgttagggaagtgtagatggaaattatagcgaggtttttgtatattttttagggggttta

SEQ ID NO: 32974 - DNA, 648 bp, Artificial Sequence
  chemically treated genomic DNA (Homo sapiens) CpG-island No: 32974
taaaccccctaaaaaatatacaaaaacctcgctataatttccatctacacttccctaacgacgcccacgcgaccccctctccgtatacttatccgcacttccctaacgacgcccacgcgaccccctctctatatacttatcgatacttccctaacgaaacccacgcgaacccctctccaatatacttatccgcacttccctaacgacgcccacacgaccccctctctatatacttatcgatacttccctaacgacgcccacgcgaacccctctccgtatacttatccgcacttccctaacgacgcccacacgaacccctctctatatacttatcgatacttccctaacgacgcccacgcgaacccctctccgtatacttatcgatacttccctaacgaaacccacgcgaacccctctccgtatacttatcgatacttccctaataaaacccacgcgaacccctctccaatatacttatcgatacttccctaacgacgcccacacgaccccctctctatatacttatcgatacttccctaacgacgcccacacgaccccctctctatatacttatccgcacttccctaacgacgcccacacgaccccctctctatatacttatcgatacttccctaacgacgcccacac

SEQ ID NO: 32975 - DNA, 648 bp, Artificial Sequence
  chemically treated genomic DNA (Homo sapiens) CpG-island No: 32975
tgagttttttggagagtgtgtaggggtttcgttgtggtttttatttgtatttttttgacggcgtttacgcggtttttttttcgtgtgtttgttcgtatttttttgacggcgtttacgcggttttttttttgtgtgtttgtcggtatttttttgacgaggtttacgcggatttttttttagtgtgtttgttcgtatttttttgacggcgtttatacggttttttttttgtgtgtttgtcggtatttttttgacggcgtttacgcggattttttttcgtgtgtttgttcgtatttttttgacggcgtttatacggatttttttttgtgtgtttgtcggtatttttttgacggcgtttacgcggattttttttcgtgtgtttgtcggtatttttttgacggggtttacgcggattttttttcgtgtgtttgtcggtatttttttgatggggtttacgcggatttttttttagtgtgtttgtcggtatttttttgacggcgtttatacggttttttttttgtgtgtttgtcggtatttttttgacggcgtttatacggttttttttttgtgtgtttgttcgtatttttttgacggcgtttatacggttttttttttgtgtgtttgtcggtatttttttgacggcgtttatat

SEQ ID NO: 32976 - DNA, 648 bp, Artificial Sequence
  chemically treated genomic DNA (Homo sapiens) CpG-island No: 32976
atataaacgccgtcaaaaaaataccgacaaacacacaaaaaaaaaaccgtataaacgccgtcaaaaaaatacgaacaaacacacaaaaaaaaaaccgtataaacgccgtcaaaaaaataccgacaaacacacaaaaaaaaaaccgtataaacgccgtcaaaaaaataccgacaaacacactaaaaaaaaatccgcgtaaaccccatcaaaaaaataccgacaaacacacgaaaaaaaatccgcgtaaaccccgtcaaaaaaataccgacaaacacacgaaaaaaaatccgcgtaaacgccgtcaaaaaaataccgacaaacacacaaaaaaaaatccgtataaacgccgtcaaaaaaatacgaacaaacacacgaaaaaaaatccgcgtaaacgccgtcaaaaaaataccgacaaacacacaaaaaaaaaaccgtataaacgccgtcaaaaaaatacgaacaaacacactaaaaaaaaatccgcgtaaacctcgtcaaaaaaataccgacaaacacacaaaaaaaaaaccgcgtaaacgccgtcaaaaaaatacgaacaaacacacgaaaaaaaaaccgcgtaaacgccgtcaaaaaaatacaaataaaaaccacaacgaaacccctacacactctccaaaaaactca

SEQ ID NO: 32977 - DNA, 844 bp, Artificial Sequence
  chemically treated genomic DNA (Homo sapiens) CpG-island No: 32977
ttggcgcggtcgacggtgattttcgttcgcggtttttgtaaagttttttcgtcgcgttttcgtatcgagttcgtagcgtcgaatttcgggtattttaattcgggggtttagggacgcgtagggcggttcgggaatgtggttcgggggagcgcggggggtaggggttgcggcgtaggtggttgttggggttgacgggtttagttttcgttttcgggtgtttttcgcgtcgcgttcgtaggatcgagtttcgcgttcgtttattttggagacgtagtaattgtagcggaggttttttcggcgattcggtcgcgcgcgattaagtgtttagcgtagcgttttttttgtcgtttcgtttcgtttttagtttcgtttttagcgtttcgcgttcgtttttcgtgtttattggtagtttcgttttcgtcgttttattaggttcggagtatgcgcgggcgtattgagattttagttttataagatcggtttcgttgaggtttcgtcggtcgttaggtattcgtttagcgtagggcgcggcggatttgcgggtcgtgggaatcgttgggtagtggtagcgaggttttttatttgtttttggggtttttcggggacgatcggatttcgatttttgcgtttcgtaggacgcgcgttgacggtgcggcgggggatggatgagcgcggtcgcggttttttggggtggggtgggttggcggcggggtttcgaggatagtgcggggcgagtttcgatcgcgtttagttttttaaggagtcgtagacggtgtagggaagcggtagggtcgggttgtgagggtgttcggattttaaggcggggcgtatttaggggattggg

SEQ ID NO: 32978 - DNA, 844 bp, Artificial Sequence
  chemically treated genomic DNA (Homo sapiens) CpG-island No: 32978
cccaatcccctaaatacgccccgccttaaaatccgaacaccctcacaacccgaccctaccgcttccctacaccgtctacgactccttaaaaaactaaacgcgatcgaaactcgccccgcactatcctcgaaaccccgccgccaacccaccccaccccaaaaaaccgcgaccgcgctcatccatcccccgccgcaccgtcaacgcgcgtcctacgaaacgcaaaaatcgaaatccgatcgtccccgaaaaaccccaaaaacaaataaaaaacctcgctaccactacccaacgattcccacgacccgcaaatccgccgcgccctacgctaaacgaatacctaacgaccgacgaaacctcaacgaaaccgatcttataaaactaaaatctcaatacgcccgcgcatactccgaacctaataaaacgacgaaaacgaaactaccaataaacacgaaaaacgaacgcgaaacgctaaaaacgaaactaaaaacgaaacgaaacgacaaaaaaaacgctacgctaaacacttaatcgcgcgcgaccgaatcgccgaaaaaacctccgctacaattactacgtctccaaaataaacgaacgcgaaactcgatcctacgaacgcgacgcgaaaaacacccgaaaacgaaaactaaacccgtcaaccccaacaaccacctacgccgcaacccctaccccccgcgctcccccgaaccacattcccgaaccgccctacgcgtccctaaacccccgaattaaaatacccgaaattcgacgctacgaactcgatacgaaaacgcgacgaaaaaactttacaaaaaccgcgaacgaaaatcaccgtcgaccgcgccaa

SEQ ID NO: 32979 - DNA, 844 bp, Artificial Sequence
  chemically treated genomic DNA (Homo sapiens) CpG-island No: 32979
tttagttttttgggtgcgtttcgttttggggttcgagtatttttatagttcggttttgtcgtttttttgtatcgtttgcggttttttaaagaattgggcgcggtcggggttcgtttcgtattgttttcgaggtttcgtcgttaatttattttattttaggaggtcgcggtcgcgtttatttatttttcgtcgtatcgttaacgcgcgttttgcggggcgtagagatcggggttcggtcgttttcggggggttttagagataggtgaggggtttcgttgttattgtttagcggtttttacggttcgtaggttcgtcgcgttttgcgttgagcggatatttggcggtcggcggagttttagcggagtcggttttgtaaggttgaggttttagtgcgttcgcgtatgtttcgggtttggtggggcggcgggggcggggttgttaatgaatacgaggggcgggcgcgggacgttgggggcggggttgggggcggggcggggcggtagggggagcgttgcgttgagtatttggtcgcgcgcggtcgggtcgtcgggggagttttcgttgtagttgttgcgtttttaaggtaagcgggcgcggggttcggttttgcgggcgcggcgcggggggtattcgggggcggagattgggttcgttagttttagtagttatttgcgtcgtagtttttgtttttcgcgttttttcgagttatattttcgggtcgttttgcgcgtttttgagttttcggattgggatgttcggagttcggcgttgcgggttcggtgcgaggacgcgacggggaggttttgtaaaggtcgcgagcgggggttatcgtcggtcgcgttag

SEQ ID NO: 32980 - DNA, 844 bp, Artificial Sequence
  chemically treated genomic DNA (Homo sapiens) CpG-island No: 32980
ctaacgcgaccgacgataacccccgctcgcgacctttacaaaacctccccgtcgcgtcctcgcaccgaacccgcaacgccgaactccgaacatcccaatccgaaaactcaaaaacgcgcaaaacgacccgaaaatataactcgaaaaaacgcgaaaaacaaaaactacgacgcaaataactactaaaactaacgaacccaatctccgcccccgaataccccccgcgccgcgcccgcaaaaccgaaccccgcgcccgcttaccttaaaaacgcaacaactacaacgaaaactcccccgacgacccgaccgcgcgcgaccaaatactcaacgcaacgctccccctaccgccccgccccgcccccaaccccgcccccaacgtcccgcgcccgcccctcgtattcattaacaaccccgcccccgccgccccaccaaacccgaaacatacgcgaacgcactaaaacctcaaccttacaaaaccgactccgctaaaactccgccgaccgccaaatatccgctcaacgcaaaacgcgacgaacctacgaaccgtaaaaaccgctaaacaataacaacgaaacccctcacctatctctaaaaccccccgaaaacgaccgaaccccgatctctacgccccgcaaaacgcgcgttaacgatacgacgaaaaataaataaacgcgaccgcgacctcctaaaataaaataaattaacgacgaaacctcgaaaacaatacgaaacgaaccccgaccgcgcccaattctttaaaaaaccgcaaacgatacaaaaaaacgacaaaaccgaactataaaaatactcgaaccccaaaacgaaacgcacccaaaaaactaaa

SEQ ID NO: 32981 - DNA, 1007 bp, Artificial Sequence
  chemically treated genomic DNA (Homo sapiens) CpG-island No: 32981
aattgggcgcggtcggggttcgtttcgtattgttttcgaggtttcgtcgttaatttattttattttaggaggtcgcggtcgcgttatttatttttcgtcgtatcgttaacgcgcgtttgcggggcgtagagatcggggttcggtcgttttcggggggttttagagttaggtgaggggttttcgtcgttttttgtttagcggtttttacgattcgcgggtcggttcgcgttttgcgttgagcggatattcggcggttcgcggggtttgagtagagtcggttttgtaaggtagaggtttcggtgcgttcgcgcgttttcgggtcgggtggggcggcgggggcggggttgttaatgagcgcgcggggcgggacgttgggcgggcgtcggacgttgggggtcgggggcgggttcgggatcgggttgggcggggttgggcggtgttgggcgggacgggcgggcgcggggcggcggttggagagtttcgttgagtatcgggtcgcgcgcggtcgagtcgcggaggcgttttcgttgtagtcgttgcgtttttaaggtaagcgggcgcggggttcggtttcgcgggcgcggcgcggggggtattcgggggcggagattgggttcgttagttttagtagttatttgcgtcgtagtttttgtttttcgcgttttttcgagtttttttttcggatcgtttcgcgcgtttttgagttttcggattgggatgttcggagttcggcgttgcgggttcggtgcgaggacgcgacggggaggttttgtaaaggtcgcgagcgggggttatcgtcggtcgcgttagggataggtttgttatcgttttcgggttttgtgtttggcgttttggttttttttcgcggttacggacgtttttgtagtttttttttttagattttttttagttcgggattcgaatcgtttttttatttttaggcgtaggggtcgtcgtgtgaggcgtgggaaattagggcgtggagggttggaatgaagttattgttt

SEQ ID NO: 32982 - DNA, 1007 bp, Artificial Sequence
  chemically treated genomic DNA (Homo sapiens) CpG-island No: 32982
aaacaataacttcattccaaccctccacgccctaatttcccacgcctcacacgacgacccctacgcctaaaaataaaaaaacgattcgaatcccgaactaaaaaaaatctaaaaaaaaaaactacaaaaacgtccgtaaccgcgaaaaaaaaccaaaacgccaaacacaaaacccgaaaacgataacaaacctatccctaacgcgaccgacgataacccccgctcgcgacctttacaaaacctccccgtcgcgtcctcgcaccgaacccgcaacgccgaactccgaacatcccaatccgaaaactcaaaaacgcgcgaaacgatccgaaaaaaaaactcgaaaaaacgcgaaaaacaaaaactacgacgcaaataactactaaaactaacgaacccaatctccgcccccgaataccccccgcgccgcgcccgcgaaaccgaaccccgcgcccgcttaccttaaaaacgcaacgactacaacgaaaacgcctccgcgactcgaccgcgcgcgacccgatactcaacgaaactctccaaccgccgccccgcgcccgcccgtcccgcccaacaccgcccaaccccgcccaacccgatcccgaacccgcccccgacccccaacgtccgacgcccgcccaacgtcccgccccgcgcgctcattaacaaccccgcccccgccgccccacccgacccgaaaacgcgcgaacgcaccgaaacctctaccttacaaaaccgactctactcaaaccccgcgaaccgccgaatatccgctcaacgcaaaacgcgaaccgacccgcgaatcgtaaaaaccgctaaacaaaaaacgacgaaaacccctcacctaactctaaaaccccccgaaaacgaccgaaccccgatctctacgccccgcaaacgcgcgttaacgatacgacgaaaaataaataacgcgaccgcgacctcctaaaataaaataaattaacgacgaaacctcgaaaacaatacgaaacgaaccccgaccgcgcccaatt

SEQ ID NO: 32983 - DNA, 1007 bp, Artificial Sequence
  chemically treated genomic DNA (Homo sapiens) CpG-island No: 32983
gggtagtggttttattttagttttttacgttttaattttttacgttttatacggcggtttttacgtttgggaatagggaaacggttcgagtttcgggttggggagggtttggagggaagggttgtaggggcgttcgtggtcgcgaagaaaggttaaagcgttaggtatagggttcggagacggtgatagatttgtttttggcgcggtcgacggtgattttcgttcgcggtttttgtaaagttttttcgtcgcgttttcgtatcgagttcgtagcgtcgaatttcgggtattttaattcgggggtttagggacgcgcggggcggttcgggaagggggttcgggggagcgcggggggtaggggttgcggcgtaggtggttgttggggttgacgggtttagttttcgttttcgggtgtttttcgcgtcgcgttcgcgggatcgagtttcgcgttcgtttattttggagacgtagcgattgtagcggaggcgttttcgcgattcggtcgcgcgcgattcggtgtttagcggagttttttagtcgtcgtttcgcgttcgttcgtttcgtttagtatcgtttagtttcgtttagttcggtttcgggttcgttttcggtttttagcgttcggcgttcgtttagcgtttcgtttcgcgcgtttattggtagtttcgttttcgtcgttttattcggttcggggacgcgcgggcgtatcgagatttttgttttataaggtcgattttgtttaggtttcgcggatcgtcgggtattcgtttagcgtagggcgcgggtcgattcgcgggtcgtgggaatcgttgggtagggggcggcgggggttttttatttggttttggggtttttcggggacgatcggatttcgatttttgcgtttcgtagacgcgcgttgacggtgcggcgggggatggatagcgcggtcgcggttttttggggtggggtgggttggcggcggggtttcgaggatagtgcggggcgagtttcgatcgcgtttagtt

SEQ ID NO: 32984 - DNA, 1007 bp, Artificial Sequence
  chemically treated genomic DNA (Homo sapiens) CpG-island No: 32984
aactaaacgcgatcgaaactcgccccgcactatcctcgaaaccccgccgccaacccaccccaccccaaaaaaccgcgaccgcgctatccatcccccgccgcaccgtcaacgcgcgtctacgaaacgcaaaaatcgaaatccgatcgtccccgaaaaaccccaaaaccaaataaaaaacccccgccgccccctacccaacgattcccacgacccgcgaatcgacccgcgccctacgctaaacgaatacccgacgatccgcgaaacctaaacaaaatcgaccttataaaacaaaaatctcgatacgcccgcgcgtccccgaaccgaataaaacgacgaaaacgaaactaccaataaacgcgcgaaacgaaacgctaaacgaacgccgaacgctaaaaaccgaaaacgaacccgaaaccgaactaaacgaaactaaacgatactaaacgaaacgaacgaacgcgaaacgacgactaaaaaactccgctaaacaccgaatcgcgcgcgaccgaatcgcgaaaacgcctccgctacaatcgctacgtctccaaaataaacgaacgcgaaactcgatcccgcgaacgcgacgcgaaaaacacccgaaaacgaaaactaaacccgtcaaccccaacaaccacctacgccgcaacccctaccccccgcgctcccccgaacccccttcccgaaccgccccgcgcgtccctaaacccccgaattaaaatacccgaaattcgacgctacgaactcgatacgaaaacgcgacgaaaaaactttacaaaaaccgcgaacgaaaatcaccgtcgaccgcgccaaaaacaaatctatcaccgtctccgaaccctatacctaacgctttaacctttcttcgcgaccacgaacgcccctacaacccttccctccaaaccctccccaacccgaaactcgaaccgtttccctattcccaaacgtaaaaaccgccgtataaaacgtaaaaaattaaaacgtaaaaaactaaaataaaaccactaccc

SEQ ID NO: 32985 - DNA, 768 bp, Artificial Sequence
  chemically treated genomic DNA (Homo sapiens) CpG-island No: 32985
ggtcgtcgtcgggatggtatggttggtggatgggcgttatgaaattatttcgatggcgattagtagtatgatcggcgatgttagcggtatgatttgcgatggtgcgtcgaatagttgcgcgatgaaggtttcgattagtgtttcggttgcgtggaaagcggtgttaatggcgttggatgatatcgtcgtgatcggtaatgaagggattgtggcgtatgatgttgagtagtcgattgttaatttgtgtgcgttagtaagttattcgatgtagtaaacggatcggtagattatcgagattatggcgagtaaggttagataaacgttaggttttggggatcgtgtcggatgcgatgttggcgtattttgttcggtttacgggttgtttaattcgttaatgttgttggattttgtaggtcggataaggcgttttcgtcgtattcggtattcggagtttgatgcgacgttggcgcgttttattaggtttataaatcgagtcgtagtcggataaggcgtttacgtcgtattcggtattttaatattagattttatatgcgtcgttttcgtagttatcgttttggattgacggtattagatcgttttgtgcgtttttagcgtcgtcgtcggtgttttgattaatatagtgttttgatttcgaatttgtaggcggtgagtaggttttttagtaattgttgtatcggtattttttttgacgggaagcgtgacggatcgtagttggtgttggtagagatcgattgatcgataaatttt

SEQ ID NO: 32986 - DNA, 768 bp, Artificial Sequence
  chemically treated genomic DNA (Homo sapiens) CpG-island No: 32986
aaaatttatcgatcaatcgatctctaccaacaccaactacgatccgtcacgcttcccgtcaaaaaaaataccgatacaacaattactaaaaaacctactcaccgcctacaaattcgaaatcaaaacactatattaatcaaaacaccgacgacgacgctaaaaacgcacaaaacgatctaataccgtcaatccaaaacgataactacgaaaacgacgcatataaaatctaatattaaaataccgaatacgacgtaaacgccttatccgactacgactcgatttataaacctaataaaacgcgccaacgtcgcatcaaactccgaataccgaatacgacgaaaacgccttatccgacctacaaaatccaacaacattaacgaattaaacaacccgtaaaccgaacaaaatacgccaacatcgcatccgacacgatccccaaaacctaacgtttatctaaccttactcgccataatctcgataatctaccgatccgtttactacatcgaataacttactaacgcacacaaattaacaatcgactactcaacatcatacgccacaatcccttcattaccgatcacgacgatatcatccaacgccattaacaccgctttccacgcaaccgaaacactaatcgaaaccttcatcgcgcaactattcgacgcaccatcgcaaatcataccgctaacatcgccgatcatactactaatcgccatcgaaataatttcataacgcccatccaccaaccataccatcccgacgacgacc

SEQ ID NO: 32987 - DNA, 768 bp, Artificial Sequence
  chemically treated genomic DNA (Homo sapiens) CpG-island No: 32987
gaaatttatcgattagtcgatttttgttaatattaattacgattcgttacgtttttcgttaggaaaagtgtcgatgtagtagttgttgaaagatttgtttatcgtttataaattcggggttaaaatattgtattaattagaatatcggcggcggcgttgaagacgtataagacgatttggtgtcgttaatttaggacgatggttgcgaaagcggcgtatgtaagatttgatattgagatgtcggatgcggcgtaaacgttttattcggttacggttcggtttgtaggtttgataagacgcgttagcgtcgtattaggtttcgggtgtcggatgcggcgaaaacgttttattcggtttataaaatttaataatattaacgaattaaataattcgtaggtcggataagatgcgttagtatcgtattcggtacgatttttaaaatttggcgtttatttggttttgttcgttataatttcgataatttgtcgattcgtttgttgtatcgaatggtttgttaacgtatataggttggtaatcgattgtttaatattatgcgttataatttttttattgtcggttacggcggtattatttagcgttattaatatcgttttttacgtagtcgaagtattggtcgaaatttttatcgcgtagttgttcgacgtattatcgtaaattatgtcgttgatatcgtcgattatattgttgatcgttatcgagatggttttataacgtttatttattagttatgttatttcggcggcggtt

SEQ ID NO: 32988 - DNA, 768 bp, Artificial Sequence
  chemically treated genomic DNA (Homo sapiens) CpG-island No: 32988
aaccgccgccgaaataacataactaataaataaacgttataaaaccatctcgataacgatcaacaatataatcgacgatatcaacgacataatttacgataatacgtcgaacaactacgcgataaaaatttcgaccaatacttcgactacgtaaaaaacgatattaataacgctaaataataccgccgtaaccgacaataaaaaaattataacgcataatattaaacaatcgattaccaacctatatacgttaacaaaccattcgatacaacaaacgaatcgacaaattatcgaaattataacgaacaaaaccaaataaacgccaaattttaaaaatcgtaccgaatacgatactaacgcatcttatccgacctacgaattatttaattcgttaatattattaaattttataaaccgaataaaacgttttcgccgcatccgacacccgaaacctaatacgacgctaacgcgtcttatcaaacctacaaaccgaaccgtaaccgaataaaacgtttacgccgcatccgacatctcaatatcaaatcttacatacgccgctttcgcaaccatcgtcctaaattaacgacaccaaatcgtcttatacgtcttcaacgccgccgccgatattctaattaatacaatattttaaccccgaatttataaacgataaacaaatctttcaacaactactacatcgacacttttcctaacgaaaaacgtaacgaatcgtaattaatattaacaaaaatcgactaatcgataaatttc

SEQ ID NO: 32989 - DNA, 782 bp, Artificial Sequence
  chemically treated genomic DNA (Homo sapiens) CpG-island No: 32989
gattggtttatgtgttaagcgttgtatgttttgtacggtggatttttatgatggattttcggtgttatttaattcgtttgaattgttgatgcgcgatcggatgcgttaattattggaatgggcgaacgattattacgatttggtgattgtcgatacgtcgtcgatgttggcggtgagtgatgtcgcggtcgtggggcgttttgttggtttagtttgttggtagtatattacggtttagatcggttatcgattatatgcggttttatggtcgtaatttagagtattgagtagcgtgcgggcgttacggtagcgagatcggcggagtacgttacgatcgtcgtcggcggcggagcgaaagagtagggtacggcgatacgcggcgtagacggagcgagagagttagtcgcgacgggacgagcgcgcgacgcgttagttaagaaggcgaatatcgacgattaaggcgcgcggcggtcgagagtagagggaacggagagggcggaatcgtagacgatacggagaggagatacgacgaaggtaacgacgtagcggcgattacgtcgacgtacgtcgacgtcgatcgaggtcgcgatcgacgagcggacgagattagcggtaggtagtacgaggtacgataatatatagatcgacggaggcgacgatcggacgcgcgacgagcgagtacgagtaggaaaaaagtagatcgatcggcgcgcgtacgttaatacgagcgtaggcggcgcgacgcggagttacggcgggttcgaaatagtagtatatagtat

SEQ ID NO: 32990 - DNA, 782 bp, Artificial Sequence
  chemically treated genomic DNA (Homo sapiens) CpG-island No: 32990
atactatatactactatttcgaacccgccgtaactccgcgtcgcgccgcctacgctcgtattaacgtacgcgcgccgatcgatctacttttttcctactcgtactcgctcgtcgcgcgtccgatcgtcgcctccgtcgatctatatattatcgtacctcgtactacctaccgctaatctcgtccgctcgtcgatcgcgacctcgatcgacgtcgacgtacgtcgacgtaatcgccgctacgtcgttaccttcgtcgtatctcctctccgtatcgtctacgattccgccctctccgttccctctactctcgaccgccgcgcgccttaatcgtcgatattcgccttcttaactaacgcgtcgcgcgctcgtcccgtcgcgactaactctctcgctccgtctacgccgcgtatcgccgtaccctactctttcgctccgccgccgacgacgatcgtaacgtactccgccgatctcgctaccgtaacgcccgcacgctactcaatactctaaattacgaccataaaaccgcatataatcgataaccgatctaaaccgtaatatactaccaacaaactaaaccaacaaaacgccccacgaccgcgacatcactcaccgccaacatcgacgacgtatcgacaatcaccaaatcgtaataatcgttcgcccattccaataattaacgcatccgatcgcgcatcaacaattcaaacgaattaaataacaccgaaaatccatcataaaaatccaccgtacaaaacatacaacgcttaacacataaaccaatc

SEQ ID NO: 32991 - DNA, 782 bp, Artificial Sequence
  chemically treated genomic DNA (Homo sapiens) CpG-island No: 32991
gtgttgtgtgttgttgtttcgggttcgtcgtggtttcgcgtcgcgtcgtttgcgttcgtgttggcgtgcgcgcgtcggtcggtttgttttttttttgttcgtgttcgttcgtcgcgcgttcggtcgtcgttttcgtcggtttgtgtgttgtcgtgtttcgtgttgtttgtcgttggtttcgttcgttcgtcggtcgcggtttcggtcggcgtcggcgtgcgtcggcgtggtcgtcgttgcgtcgttgttttcgtcgtgtttttttttcgtgtcgtttgcggtttcgtttttttcgttttttttgttttcggtcgtcgcgcgttttggtcgtcggtgttcgtttttttggttggcgcgtcgcgcgttcgtttcgtcgcggttggttttttcgtttcgtttgcgtcgcgtgtcgtcgtgttttgttttttcgtttcgtcgtcggcggcggtcgtgacgtgtttcgtcgatttcgttgtcgtgacgttcgtacgttgtttagtgttttgggttgcggttatgaggtcgtatgtggtcggtagtcggtttaggtcgtagtgtgttattagtaggttgggttaatagaacgttttacgatcgcggtattatttatcgttagtatcggcggcgtatcgataattattagatcgtaatggtcgttcgtttattttagtaattgacgtattcgatcgcgtattagtagtttagacgggttaggtggtatcggggatttattatagaagtttatcgtatagggtatgtaacgtttggtatataggttagtt

SEQ ID NO: 32992 - DNA, 782 bp, Artificial Sequence
  chemically treated genomic DNA (Homo sapiens) CpG-island No: 32992
aactaacctatataccaaacgttacataccctatacgataaacttctataataaatccccgataccacctaacccgtctaaactactaatacgcgatcgaatacgtcaattactaaaataaacgaacgaccattacgatctaataattatcgatacgccgccgatactaacgataaataataccgcgatcgtaaaacgttctattaacccaacctactaataacacactacgacctaaaccgactaccgaccacatacgacctcataaccgcaacccaaaacactaaacaacgtacgaacgtcacgacaacgaaatcgacgaaacacgtcacgaccgccgccgacgacgaaacgaaaaaacaaaacacgacgacacgcgacgcaaacgaaacgaaaaaaccaaccgcgacgaaacgaacgcgcgacgcgccaaccaaaaaaacgaacaccgacgaccaaaacgcgcgacgaccgaaaacaaaaaaaacgaaaaaaacgaaaccgcaaacgacacgaaaaaaaaacacgacgaaaacaacgacgcaacgacgaccacgccgacgcacgccgacgccgaccgaaaccgcgaccgacgaacgaacgaaaccaacgacaaacaacacgaaacacgacaacacacaaaccgacgaaaacgacgaccgaacgcgcgacgaacgaacacgaacaaaaaaaaaacaaaccgaccgacgcgcgcacgccaacacgaacgcaaacgacgcgacgcgaaaccacgacgaacccgaaacaacaacacacaacac

SEQ ID NO: 32993 - DNA, 658 bp, Artificial Sequence
  chemically treated genomic DNA (Homo sapiens) CpG-island No: 32993
cgtgggtttggagtttgttggaagcggaacggtaaattcgaggtcgtgattgtagattagttaatttgttatgggttaatcgtttttttgttgttttagtcgcgtattatcgtatagttatggttttcgagatatttcggatcgttgcgtatttttggtagaatatttttgcgtgttagagttggaggtacgttttacggcgggtttattattacgttgttaagggtattgtttattatcggcgttttgcgatcggggcgatcgataatgattcgcgaatttagtatttgattgtcgttttgatagtagattagcgaataggtcggaatgttaattatgatttcggtagaaagttttgttggtagtaagcgtaatcgttggatgttgagagttaatatattagtacgttgggcgggcgttacgtttaattagttacgtgttgtcgggttaatagtattatttgtttttaatttttgttatgtttgaaaacgtttaacggtttttattagtttatattcgtaggcggcgcgaacggtaggcgtaggtttattacgagacgtcgtttgtttatttatcggtttagtttttgttgttttaatagtaatagcggatgggttgattatcgcgttagttggcgtgttatcgttaggtagagtaa

SEQ ID NO: 32994 - DNA, 658 bp, Artificial Sequence
  chemically treated genomic DNA (Homo sapiens) CpG-island No: 32994
ttactctacctaacgataacacgccaactaacgcgataatcaacccatccgctattactattaaaacaacaaaaactaaaccgataaataaacaaacgacgtctcgtaataaacctacgcctaccgttcgcgccgcctacgaatataaactaataaaaaccgttaaacgttttcaaacataacaaaaattaaaaacaaataatactattaacccgacaacacgtaactaattaaacgtaacgcccgcccaacgtactaatatattaactctcaacatccaacgattacgcttactaccaacaaaactttctaccgaaatcataattaacattccgacctattcgctaatctactatcaaaacgacaatcaaatactaaattcgcgaatcattatcgatcgccccgatcgcaaaacgccgataataaacaatacccttaacaacgtaataataaacccgccgtaaaacgtacctccaactctaacacgcaaaaatattctaccaaaaatacgcaacgatccgaaatatctcgaaaaccataactatacgataatacgcgactaaaacaacaaaaaaacgattaacccataacaaattaactaatctacaatcacgacctcgaatttaccgttccgcttccaacaaactccaaacccacg

SEQ ID NO: 32995 - DNA, 658 bp, Artificial Sequence
  chemically treated genomic DNA (Homo sapiens) CpG-island No: 32995
ttattttatttggcgatgatacgttaattgacgcggtagttagtttattcgttgttattgttgaaatagtagaaattaagtcgatggataagtaaacgacgtttcgtagtaaatttgcgtttgtcgttcgcgtcgtttacgaatatgaattggtggaagtcgttaaacgtttttaggtatggtaaggattgggggtagatggtgttattggttcggtaatacgtgattggttaaacgtaacgttcgtttagcgtgttggtgtgttggtttttaatatttagcgattgcgtttgttgttaatagagttttttatcgggattatggttaatatttcggtttattcgttggtttattattagaacggtaattaggtgttggattcgcgagttattgtcggtcgtttcgatcgtaaaacgtcgatgatgagtagtgtttttaataacgtagtggtaaattcgtcgtggaacgtatttttaattttggtacgtaaagatattttgttaaaagtgcgtaacgattcgggatatttcgaaagttatggttatacggtgatgcgcggttggaatagtagagaagcgattgatttatggtaggttgattggtttataattacggtttcgaatttatcgtttcgtttttagtaggttttaggtttacg

SEQ ID NO: 32996 - DNA, 658 bp, Artificial Sequence
  chemically treated genomic DNA (Homo sapiens) CpG-island No: 32996
cgtaaacctaaaacctactaaaaacgaaacgataaattcgaaaccgtaattataaaccaatcaacctaccataaatcaatcgcttctctactattccaaccgcgcatcaccgtataaccataactttcgaaatatcccgaatcgttacgcacttttaacaaaatatctttacgtaccaaaattaaaaatacgttccacgacgaatttaccactacgttattaaaaacactactcatcatcgacgttttacgatcgaaacgaccgacaataactcgcgaatccaacacctaattaccgttctaataataaaccaacgaataaaccgaaatattaaccataatcccgataaaaaactctattaacaacaaacgcaatcgctaaatattaaaaaccaacacaccaacacgctaaacgaacgttacgtttaaccaatcacgtattaccgaaccaataacaccatctacccccaatccttaccatacctaaaaacgtttaacgacttccaccaattcatattcgtaaacgacgcgaacgacaaacgcaaatttactacgaaacgtcgtttacttatccatcgacttaatttctactatttcaacaataacaacgaataaactaactaccgcgtcaattaacgtatcatcgccaaataaaataa

SEQ ID NO: 32997 - DNA, 519 bp, Artificial Sequence
  chemically treated genomic DNA (Homo sapiens) CpG-island No: 32997
atcgaggttagttgattacgatcgtcgagaaagattattcgcgtatgatcgggtaaggcgtcgattagtttcgatattataggtagatcgattattgacgttttatttattattagtatattaagatgtagcgggttatcggtatgatgacgtaaacgttggttattcggttgcgcgtttagtaatcggtgtaaagtgttggtatttttcggaatgcgttttttttgtttatcggttagcggtaattgtcgtaaagttttgtcgagagattcggttaagcgcgcggtagttttattcgttggtgtagttagacggatacggtagcgttcgtcgtcggttatttgaattaacgttgttagtaatttcgttacggtggtcgttttatcggtgttagggtcgtcggaaattatcgagattcgtcgcgttagcgttattgtcgtcgtaattttttgttagttaattttatcgtttattggaaaaagtttgtttagggtttgcgttagtagagttttattaatt

SEQ ID NO: 32998 - DNA, 519 bp, Artificial Sequence
  chemically treated genomic DNA (Homo sapiens) CpG-island No: 32998
aattaataaaactctactaacgcaaaccctaaacaaactttttccaataaacgataaaattaactaacaaaaaattacgacgacaataacgctaacgcgacgaatctcgataatttccgacgaccctaacaccgataaaacgaccaccgtaacgaaattactaacaacgttaattcaaataaccgacgacgaacgctaccgtatccgtctaactacaccaacgaataaaactaccgcgcgcttaaccgaatctctcgacaaaactttacgacaattaccgctaaccgataaacaaaaaaaacgcattccgaaaaataccaacactttacaccgattactaaacgcgcaaccgaataaccaacgtttacgtcatcataccgataacccgctacatcttaatatactaataataaataaaacgtcaataatcgatctacctataatatcgaaactaatcgacgccttacccgatcatacgcgaataatctttctcgacgatcgtaatcaactaacctcgat

SEQ ID NO: 32999 - DNA, 519 bp, Artificial Sequence
  chemically treated genomic DNA (Homo sapiens) CpG-island No: 32999
ggttgatgaagttttattggcgtaaattttggataaattttttttagtaagcgatgaaattaattggtaaaaagttgcggcggtagtggcgttgacgcggcggatttcggtgattttcggcggttttggtatcggtaaaacgattatcgtagcgaagttgttggtagcgttaatttaaatggtcgacggcgaacgttgtcgtattcgtttggttgtattaacgggtaaagttgtcgcgcgtttaatcgaatttttcggtaaggttttgcgatagttatcgttgatcgatgaataaaagaaacgtatttcggaagatgttagtattttgtatcgattgttgggcgcgtagtcgggtagttagcgtttacgttattatgtcggtaattcgttgtattttgatgtgttggtggtagatgaagcgttaatgatcgatttgtttatgatgtcgagattgatcgacgttttgttcgattatgcgcgagtgatttttttcggcgatcgtgattaattggtttcggt

SEQ ID NO: 33000 - DNA, 519 bp, Artificial Sequence
  chemically treated genomic DNA (Homo sapiens) CpG-island No: 33000
accgaaaccaattaatcacgatcgccgaaaaaaatcactcgcgcataatcgaacaaaacgtcgatcaatctcgacatcataaacaaatcgatcattaacgcttcatctaccaccaacacatcaaaatacaacgaattaccgacataataacgtaaacgctaactacccgactacgcgcccaacaatcgatacaaaatactaacatcttccgaaatacgtttcttttattcatcgatcaacgataactatcgcaaaaccttaccgaaaaattcgattaaacgcgcgacaactttacccgttaatacaaccaaacgaatacgacaacgttcgccgtcgaccatttaaattaacgctaccaacaacttcgctacgataatcgttttaccgataccaaaaccgccgaaaatcaccgaaatccgccgcgtcaacgccactaccgccgcaactttttaccaattaatttcatcgcttactaaaaaaaatttatccaaaatttacgccaataaaacttcatcaacc

SEQ ID NO: 33001 - DNA, 749 bp, Artificial Sequence
  chemically treated genomic DNA (Homo sapiens) CpG-island No: 33001
ggaagtcgttttggaacgtgtttttgaatatttcgtcggcggtttttttttaagtcgttttcggagtcgatttaggtttcggagtagatataggtatcgagcgtcgagggtatagtagtaggtcggttttgtttcgaagaagggtggttgagtttttggttttcggatttgtagttattgatggtcggattcggacgcggtaacgttaagttcgcgatttttagtttttaagttgcgagtttagaacggaaattatagtaattatcgttcgcgtcgcggtattttttcgtttttaatggaggcggagggtcgttcgttgtttaaaatgaattttttcgtttatttgagttcgtttttcgggagcgcggggtttaatttcgttataaggattacggattttcgtttcgtttcgtttgtaagtttcgtttggtttcgtttttttttgaaaagagtttagttgttaaggaattattttttttgtcgtcgttttagagatgtttttggaaaagcggaagggtacggagggttttggagttcgttgttggtatttgcgtggtgttatgagaacgtggcggggcggtgagtgacgtgagggggcgtgacggttaggtcgggagtagttgttcgcgcgggagaataggggttgcgtagggaaagcggttttgaaaaagagttttttggcgtcgggcggacgtttaatatatgtttgtcggttaagtataggataaggttaaagggaattaattaat

SEQ ID NO: 33002 - DNA, 749 bp, Artificial Sequence
  chemically treated genomic DNA (Homo sapiens) CpG-island No: 33002
attaattaattccctttaaccttatcctatacttaaccgacaaacatatattaaacgtccgcccgacgccaaaaaactctttttcaaaaccgctttccctacgcaacccctattctcccgcgcgaacaactactcccgacctaaccgtcacgccccctcacgtcactcaccgccccgccacgttctcataacaccacgcaaataccaacaacgaactccaaaaccctccgtacccttccgcttttccaaaaacatctctaaaacgacgacaaaaaaaataattccttaacaactaaactcttttcaaaaaaaaacgaaaccaaacgaaacttacaaacgaaacgaaacgaaaatccgtaatccttataacgaaattaaaccccgcgctcccgaaaaacgaactcaaataaacgaaaaaattcattttaaacaacgaacgaccctccgcctccattaaaaacgaaaaaataccgcgacgcgaacgataattactataatttccgttctaaactcgcaacttaaaaactaaaaatcgcgaacttaacgttaccgcgtccgaatccgaccatcaataactacaaatccgaaaaccaaaaactcaaccacccttcttcgaaacaaaaccgacctactactataccctcgacgctcgatacctatatctactccgaaacctaaatcgactccgaaaacgacttaaaaaaaaaccgccgacgaaatattcaaaaacacgttccaaaacgacttcc

SEQ ID NO: 33003 - DNA, 749 bp, Artificial Sequence
  chemically treated genomic DNA (Homo sapiens) CpG-island No: 33003
attggttagttttttttaattttattttgtatttggtcgataagtatgtgttgggcgttcgttcgacgttaagaagtttttttttaaagtcgttttttttgcgtagtttttgttttttcgcgcgggtaattattttcggtttggtcgttacgtttttttacgttatttatcgtttcgttacgtttttatgatattacgtaggtgttagtaacgaattttagaatttttcgtgttttttcgtttttttaaaggtatttttgggacgacggtaagaaaaatagttttttgataattgagttttttttaggaggaggcgggattaggcgggatttataggcggaacgaaacggaagttcgtggtttttgtaacgggattgggtttcgcgttttcggggggcgggtttagatgggcggagggatttattttaagtaacgggcggtttttcgtttttattgaaggcggggaaatatcgcggcgcggacggtagttgttgtggttttcgttttgagttcgtagtttaggagttgaagatcgcggatttagcgttgtcgcgttcgagttcggttattagtggttgtagattcggaggttaggagtttaattattttttttcggaatagggtcggtttgttgttgtgttttcgacgttcggtgtttgtatttatttcggggtttaggtcggtttcgggggcggtttaggagaaggtcgtcggcgagatgtttaaaaatacgttttagagcggttttt

SEQ ID NO: 33004 - DNA, 749 bp, Artificial Sequence
  chemically treated genomic DNA (Homo sapiens) CpG-island No: 33004
aaaaaccgctctaaaacgtatttttaaacatctcgccgacgaccttctcctaaaccgcccccgaaaccgacctaaaccccgaaataaatacaaacaccgaacgtcgaaaacacaacaacaaaccgaccctattccgaaaaaaaataattaaactcctaacctccgaatctacaaccactaataaccgaactcgaacgcgacaacgctaaatccgcgatcttcaactcctaaactacgaactcaaaacgaaaaccacaacaactaccgtccgcgccgcgatatttccccgccttcaataaaaacgaaaaaccgcccgttacttaaaataaatccctccgcccatctaaacccgccccccgaaaacgcgaaacccaatcccgttacaaaaaccacgaacttccgtttcgttccgcctataaatcccgcctaatcccgcctcctcctaaaaaaaactcaattatcaaaaaactatttttcttaccgtcgtcccaaaaatacctttaaaaaaacgaaaaaacacgaaaaattctaaaattcgttactaacacctacgtaatatcataaaaacgtaacgaaacgataaataacgtaaaaaaacgtaacgaccaaaccgaaaataattacccgcgcgaaaaaacaaaaactacgcaaaaaaaacgactttaaaaaaaaacttcttaacgtcgaacgaacgcccaacacatacttatcgaccaaatacaaaataaaattaaaaaaaactaaccaat

SEQ ID NO: 33005 - DNA, 1009 bp, Artificial Sequence
  chemically treated genomic DNA (Homo sapiens) CpG-island No: 33005
  unsure (260, 308..309, 368, 394, 404, 573, 686, 989)
gtttatatttttttttacgttgacggttatttcgtaattatcgttttttattttttcgcgtcgttttattatttttcgttagtattttttaattatttttcgatttcgtttttttttgtaaatttattagtcgacgttttttttttttattttttttttattttttttcgttttcgttttcgttattttttttttttattcgtttttcgttttttttttattttatttattttataatcgttttttttttaattatttanttatttatttgacgttcgttttgttcgtttattcgttattaaattatnnatatttttcgggtacgttcgttttttttttttgatatattttttttatcgcggtatttnttcgatttttttattttcgttttcgnaaacgttcgngcgtcgcgttttattttttttatattttttatgttacgcgttttcgcgtttttttttttttttataatattatagtttttttttttcggtttttttttaatattattcgttcggtttcgttttatcgtatttttaaataataaaaattattcggtagtttcgtcgattngttttatatatacgttttatcgcgcgaattttcgaaattaattaatttatatttttttttacgggatttttcgttttttattataatatcgttaattattttcgtttcgtcgntcgtttattaatgaaaatatatagtgagagcgtcgtaggtttttcgttttttttataattagcggattattcgtacgcgttttttacgcgtcgaatatattttttatttatttttattatacgcgttcgtcgtttcgtttcgtattttattttttacgtttgtttacgtagttattttcgtcgttcgcgcgtttataacgcgatttaaatattttcgcgacggcggttcgttttttcgatttttttttcgttattcggattaatttatattattttcgtcgttttatttttcgttttaatcgntatatttatttattaacgtt

SEQ ID NO: 33006 - DNA, 1009 bp, Artificial Sequence
  chemically treated genomic DNA (Homo sapiens) CpG-island No: 33006
  unsure (21, 324, 437, 606, 616, 642, 701..702, 750)
aacgttaataaataaatatancgattaaaacgaaaaataaaacgacgaaaataatataaattaatccgaataacgaaaaaaaaatcgaaaaaacgaaccgccgtcgcgaaaatatttaaatcgcgttataaacgcgcgaacgacgaaaataactacgtaaacaaacgtaaaaaataaaatacgaaacgaaacgacgaacgcgtataataaaaataaataaaaaatatattcgacgcgtaaaaaacgcgtacgaataatccgctaattataaaaaaaacgaaaaacctacgacgctctcactatatattttcattaataaacgancgacgaaacgaaaataattaacgatattataataaaaaacgaaaaatcccgtaaaaaaaaatataaattaattaatttcgaaaattcgcgcgataaaacgtatatataaaacnaatcgacgaaactaccgaataatttttattatttaaaaatacgataaaacgaaaccgaacgaataatattaaaaaaaaaccgaaaaaaaaaaactataatattataaaaaaaaaaaaaaacgcgaaaacgcgtaacataaaaaatataaaaaaaataaaacgcgacgcncgaacgtttncgaaaacgaaaataaaaaaatcgaanaaataccgcgataaaaaaaatatatcaaaaaaaaaaaacgaacgtacccgaaaaatatnnataatttaataacgaataaacgaacaaaacgaacgtcaaataaataantaaataattaaaaaaaaaacgattataaaataaataaaataaaaaaaaaacgaaaaacgaataaaaaaaaaaaataacgaaaacgaaaacgaaaaaaaataaaaaaaaaataaaaaaaaaaaacgtcgactaataaatttacaaaaaaaaacgaaatcgaaaaataattaaaaaatactaacgaaaaataataaaacgacgcgaaaaaataaaaaacgataattacgaaataaccgtcaacgtaaaaaaaaatataaac

SEQ ID NO: 33007 - DNA, 1009 bp, Artificial Sequence
  chemically treated genomic DNA (Homo sapiens) CpG-island No: 33007
  unsure (21, 324, 437, 606, 616, 642, 701..702, 750)
aacgttagtgggtgagtatgncgattgaggcgaggggtggggcggcggagatggtgtgagttagttcggatggcggagagagagtcgagagggcgggtcgtcgtcgcgggggtgtttaagtcgcgttgtgggcgcgcgggcggcgggagtagttgcgtgggtaggcgtagagaatggagtgcgaagcggagcggcgggcgcgtgtggtggggataagtgagaggtgtgttcgacgcgtggagggcgcgtgcgggtggttcgttaattatgaggaaggcggggggtttgcgacgtttttattgtgtgtttttattggtgagcgancggcgggacggaggtggttggcggtgttgtagtgggggacgaggggtttcgtgggggagaatgtgggttaattgatttcgggggttcgcgcggtggggcgtatgtgtgggatnagtcggcggagttgtcgggtaatttttgttgtttaaagatgcggtggggcggggtcgaacgggtggtgttaagaagaggtcgaggggagggggttatggtgttataaggggaaagaaagacgcgggggcgcgtggtatgggagatgtagggaaaatggggcgcggcgtncgaacgtttncgaaggcgagggtggaaaggtcgggngggtgtcgcggtggagggggtgtgttagggggaaggggcgggcgtgttcgagggatatnngtggtttggtggcgaatgggcgggtagggcgggcgttaagtgggtgantgggtggttagagggggggcggttatggggtgagtggggtgaggggggggcggggggcgaatggggaggggaggtggcggggacgggggcgagagggggtggggagggggtaaagggggggggcgtcggttggtgggtttgtagggaggagcggaatcggggggtaattagggggtgttggcggggggtggtgggacggcgcgggggggtggggggcggtggttgcggggtggtcgttagcgtaggggggagtgtgagt

SEQ ID NO: 33008 - DNA, 1009 bp, Artificial Sequence
  chemically treated genomic DNA (Homo sapiens) CpG-island No: 33008
  unsure (260, 308..309, 368, 394, 404, 573, 686, 989)
actcacactcccccctacgctaacgaccaccccgcaaccaccgccccccacccccccgcgccgtcccaccaccccccgccaacaccccctaattaccccccgattccgctcctccctacaaacccaccaaccgacgccccccccctttaccccctccccaccccctctcgcccccgtccccgccacctcccctccccattcgccccccgcccccccctcaccccactcaccccataaccgccccccctctaaccacccantcacccacttaacgcccgccctacccgcccattcgccaccaaaccacnnatatccctcgaacacgcccgccccttccccctaacacaccccctccaccgcgacacccncccgacctttccaccctcgccttcgnaaacgttcgnacgccgcgccccattttccctacatctcccataccacgcgcccccgcgtctttctttccccttataacaccataaccccctcccctcgacctcttcttaacaccacccgttcgaccccgccccaccgcatctttaaacaacaaaaattacccgacaactccgccgactnatcccacacatacgccccaccgcgcgaacccccgaaatcaattaacccacattctcccccacgaaacccctcgtcccccactacaacaccgccaaccacctccgtcccgccgntcgctcaccaataaaaacacacaataaaaacgtcgcaaaccccccgccttcctcataattaacgaaccacccgcacgcgccctccacgcgtcgaacacacctctcacttatccccaccacacgcgcccgccgctccgcttcgcactccattctctacgcctacccacgcaactactcccgccgcccgcgcgcccacaacgcgacttaaacacccccgcgacgacgacccgccctctcgactctctctccgccatccgaactaactcacaccatctccgccgccccacccctcgcctcaatcgncatactcacccactaacgtt

SEQ ID NO: 33009 - DNA, 610 bp, Artificial Sequence
  chemically treated genomic DNA (Homo sapiens) CpG-island No: 33009
gggagcggcgagcggtgttcggcgtaggatagaaagggagtgcgcgttcgagttttttagatttttgggaattcgcgttattttttcgtttttgtttattttcggtcgcgttgttagtttttattagcgttaataggttttagacggagcgggtcgggcgttgggttaatgtaatcggcgcgttatttggggcgtaggttatattattagtttcggttttcgttaggtacggttagaattagttagttcgcgttttgtcggtcgtttcgcgtttttagttttttttcggtttcgttcgaacgttatacggcggagtttagttttagttcgcgttttagagtttgttaaggtattcgtcggtcgggggtcggtagggcgtaaggtattagggattttttcgtcgtcggatacgtgagtgcgttttgagcgcgggatagggttaggtttgtttgggaggttcgggtcgagacgcgttagtagagggttagcgagtttgtagtgtagtgacgttaagtgttcgagaaggtttttgtggttgttgaagtgtcgcggatttgagttggggagggggtcggtacgttgtttttagtttcggtgagtttaattttag

SEQ ID NO: 33010 - DNA, 610 bp, Artificial Sequence
  chemically treated genomic DNA (Homo sapiens) CpG-island No: 33010
ctaaaattaaactcaccgaaactaaaaacaacgtaccgaccccctccccaactcaaatccgcgacacttcaacaaccacaaaaaccttctcgaacacttaacgtcactacactacaaactcgctaaccctctactaacgcgtctcgacccgaacctcccaaacaaacctaaccctatcccgcgctcaaaacgcactcacgtatccgacgacgaaaaaatccctaataccttacgccctaccgacccccgaccgacgaataccttaacaaactctaaaacgcgaactaaaactaaactccgccgtataacgttcgaacgaaaccgaaaaaaaactaaaaacgcgaaacgaccgacaaaacgcgaactaactaattctaaccgtacctaacgaaaaccgaaactaataatataacctacgccccaaataacgcgccgattacattaacccaacgcccgacccgctccgtctaaaacctattaacgctaataaaaactaacaacgcgaccgaaaataaacaaaaacgaaaaaataacgcgaattcccaaaaatctaaaaaactcgaacgcgcactccctttctatcctacgccgaacaccgctcgccgctccc

SEQ ID NO: 33011 - DNA, 610 bp, Artificial Sequence
  chemically treated genomic DNA (Homo sapiens) CpG-island No: 33011
ttgggattgaatttatcgaggttgagggtagcgtgtcgattttttttttagtttaggttcgcgatattttaatagttataggagttttttcggatatttaacgttattgtattataaattcgttagttttttgttggcgcgtttcggttcgggttttttaggtagatttagttttgtttcgcgtttagggcgtatttacgtgttcggcggcgaggggatttttggtgttttgcgttttgtcggttttcgatcggcgggtgttttggtaggttttagggcgcgggttggggttgggtttcgtcgtgtggcgttcgggcggagtcggggaagagttggaggcgcggggcggtcggtagggcgcgggttgattggttttggtcgtgtttggcgggggtcggggttggtaatgtagtttgcgttttaggtaacgcgtcgattgtattaatttagcgttcggttcgtttcgtttggagtttgttagcgttaatggagattgatagcgcggtcggggatgggtaggggcgggagggtggcgcgggtttttagggatttgggggattcgggcgcgtattttttttttattttgcgtcgagtatcgttcgtcgttttt

SEQ ID NO: 33012 - DNA, 610 bp, Artificial Sequence
  chemically treated genomic DNA (Homo sapiens) CpG-island No: 33012
aaaaacgacgaacgatactcgacgcaaaataaaaaaaaaatacgcgcccgaatcccccaaatccctaaaaacccgcgccaccctcccgcccctacccatccccgaccgcgctatcaatctccattaacgctaacaaactccaaacgaaacgaaccgaacgctaaattaatacaatcgacgcgttacctaaaacgcaaactacattaccaaccccgacccccgccaaacacgaccaaaaccaatcaacccgcgccctaccgaccgccccgcgcctccaactcttccccgactccgcccgaacgccacacgacgaaacccaaccccaacccgcgccctaaaacctaccaaaacacccgccgatcgaaaaccgacaaaacgcaaaacaccaaaaatcccctcgccgccgaacacgtaaatacgccctaaacgcgaaacaaaactaaatctacctaaaaaacccgaaccgaaacgcgccaacaaaaaactaacgaatttataatacaataacgttaaatatccgaaaaaactcctataactattaaaatatcgcgaacctaaactaaaaaaaaaatcgacacgctaccctcaacctcgataaattcaatcccaa

SEQ ID NO: 33013 - DNA, 619 bp, Artificial Sequence
  chemically treated genomic DNA (Homo sapiens) CpG-island No: 33013
  unsure (439)
gataaagtggtgaagatgtttggcgtgagtgttgacgattagcgtttgttgaagaaattgaagttcgatatgtttagtattatcgagtatgtatcggtgtggattattatggcggtcgcgttggcgttaggtatcggtacgatgattggttggcgtcgtgtggtaacgattatcggtgagaaaatcggtaagaaaggtatgatttacgtttaggggatgtttgtttagatgacggcggtagtgtttatcggtttggcgagttatatcgggatgtcggtttttattatttacgtattttttttttttgtcgcggggacgatggtggtagatggtggcggtttatagcgtaaaatcgtgattagtattttgatggtttgggtgtttatttttttcgttgcggtattgtttttcggcgggttgtattggttttttttgtagnttttgtaatcgtacgtattaaaacgagcggggtaattgtttcgttttagattgttgattaagtgcgcgttgtatacgtcggatgcggcgtgaacgttttattcggtttacgaaatcgtgttaatttaatatattgtgggttttacgtaggtttgataagcgttacgtattacgtagtttt

SEQ ID NO: 33014 - DNA, 619 bp, Artificial Sequence
  chemically treated genomic DNA (Homo sapiens) CpG-island No: 33014
  unsure (181)
aaaactacgtaatacgtaacgcttatcaaacctacgtaaaacccacaatatattaaattaacacgatttcgtaaaccgaataaaacgttcacgccgcatccgacgtatacaacgcgcacttaatcaacaatctaaaacgaaacaattaccccgctcgttttaatacgtacgattacaaaanctacaaaaaaaaccaatacaacccgccgaaaaacaataccgcaacgaaaaaaataaacacccaaaccatcaaaatactaatcacgattttacgctataaaccgccaccatctaccaccatcgtccccgcgacaaaaaaaaaaaatacgtaaataataaaaaccgacatcccgatataactcgccaaaccgataaacactaccgccgtcatctaaacaaacatcccctaaacgtaaatcatacctttcttaccgattttctcaccgataatcgttaccacacgacgccaaccaatcatcgtaccgatacctaacgccaacgcgaccgccataataatccacaccgatacatactcgataatactaaacatatcgaacttcaatttcttcaacaaacgctaatcgtcaacactcacgccaaacatcttcaccactttatc

SEQ ID NO: 33015 - DNA, 619 bp, Artificial Sequence
  chemically treated genomic DNA (Homo sapiens) CpG-island No: 33015
  unsure (181)
aaaattgcgtgatgcgtaacgtttattaggtttacgtggagtttataatatattgaattagtacgatttcgtaggtcggataaggcgtttacgtcgtattcggcgtgtataacgcgtatttggttaataatttgaagcggggtagttgtttcgttcgttttggtgcgtacgattatagganttgtagggagagttagtatagttcgtcggaaagtagtatcgtagcggaaagggtaaatatttaggttattagaatgttggttacggttttacgttgtaagtcgttattatttattattatcgttttcgcgatagaagaggagagtacgtgagtagtggaaatcggtatttcggtataattcgttaggtcgatagatattgtcgtcgttatttgggtagatattttttgagcgtaggttatgttttttttatcgatttttttatcgatagtcgttgttatacggcgttagttaattatcgtatcgatatttaacgttagcgcgatcgttatgatgatttatatcggtgtatattcgatggtgttaagtatgtcggattttagtttttttaataggcgttgatcgttagtatttacgttaggtatttttattattttgtt

SEQ ID NO: 33016 - DNA, 619 bp, Artificial Sequence
  chemically treated genomic DNA (Homo sapiens) CpG-island No: 33016
  unsure (439)
aacaaaataataaaaatacctaacgtaaatactaacgatcaacgcctattaaaaaaactaaaatccgacatacttaacaccatcgaatatacaccgatataaatcatcataacgatcgcgctaacgttaaatatcgatacgataattaactaacgccgtataacaacgactatcgataaaaaaatcgataaaaaaaacataacctacgctcaaaaaatatctacccaaataacgacgacaatatctatcgacctaacgaattataccgaaataccgatttccactactcacgtactctcctcttctatcgcgaaaacgataataataaataataacgacttacaacgtaaaaccgtaaccaacattctaataacctaaatatttaccctttccgctacgatactactttccgacgaactatactaactctccctacaantcctataatcgtacgcaccaaaacgaacgaaacaactaccccgcttcaaattattaaccaaatacgcgttatacacgccgaatacgacgtaaacgccttatccgacctacgaaatcgtactaattcaatatattataaactccacgtaaacctaataaacgttacgcatcacgcaatttt

SEQ ID NO: 33017 - DNA, 1007 bp, Artificial Sequence
  chemically treated genomic DNA (Homo sapiens) CpG-island No: 33017
ggacgagcgtggtttcgggacgcgcggtgtagttaggtgcgtcggcggtagtggtagtcgttgagcgtcgcgtcgtacgtggtaataggtgtagcgttgtttcgggttggcgtcggggggcgtggggcgcgttcgtatttagttcgggagcgcgcggagcgtcgggattgggattcgagagcgggagcggagagcgggagcgttcgagcggagtttagcgtttcgaggtacggtttcgtacgttatttaggtttttcgagggtcgttttttgggacggcggttggttttggtttttcgtagcgagtcgttggagtggagttttcggaaggagtcgtttcgggttggggcgggaggttcgagttcggttatttataagtttttcgaatttttcgttttgttttattttttggcggtttcggaggcggggaggcggggaggtcggggtttcgggtttcgtttggtagtcgtcgtaggcgtggggtggtgtcgcgtcgcgcgtttttaggtgtagacgtcgttttcgagattttcggggcgggttttcggcgatttcgttagtggtgtaaagggcgttagtttttttcgtttttgcgtttttgttttcggagcgtttgaaggagttgcgggtaagtgcgcgttggaatttgttttcgttgttcggcggtcggggtggggaggggataggcgagcgcgtcgtttagggtgacgggatcggttttcggggaggggagggggcgttttaggggtttgggggtcgaagttgagggttaaagggggcggtagcgtcggcggagcggaggcgggttttacgtgggttagcgtagagtttgcggaagggacggatgcggatttcgtcgttgttattttgaaagtgatcgaggggtttgattgtggattttttacgtcgtttattcgggttcggcggttttagttttttcgtagggtttttttttagtagaagtaagcggggtcgagaaagcgggtggaatagggttgttgtaggttt

SEQ ID NO: 33018 - DNA, 1007 bp, Artificial Sequence
  chemically treated genomic DNA (Homo sapiens) CpG-island No: 33018
aaacctacaacaaccctattccacccgctttctcgaccccgcttacttctactaaaaaaaaaccctacgaaaaaactaaaaccgccgaacccgaataaacgacgtaaaaaatccacaatcaaacccctcgatcactttcaaaataacaacgacgaaatccgcatccgtcccttccgcaaactctacgctaacccacgtaaaacccgcctccgctccgccgacgctaccgccccctttaaccctcaacttcgacccccaaacccctaaaacgccccctcccctccccgaaaaccgatcccgtcaccctaaacgacgcgctcgcctatcccctccccaccccgaccgccgaacaacgaaaacaaattccaacgcgcacttacccgcaactccttcaaacgctccgaaaacaaaaacgcaaaaacgaaaaaaactaacgccctttacaccactaacgaaatcgccgaaaacccgccccgaaaatctcgaaaacgacgtctacacctaaaaacgcgcgacgcgacaccaccccacgcctacgacgactaccaaacgaaacccgaaaccccgacctccccgcctccccgcctccgaaaccgccaaaaaataaaacaaaacgaaaaattcgaaaaacttataaataaccgaactcgaacctcccgccccaacccgaaacgactccttccgaaaactccactccaacgactcgctacgaaaaaccaaaaccaaccgccgtcccaaaaaacgaccctcgaaaaacctaaataacgtacgaaaccgtacctcgaaacgctaaactccgctcgaacgctcccgctctccgctcccgctctcgaatcccaatcccgacgctccgcgcgctcccgaactaaatacgaacgcgccccacgccccccgacgccaacccgaaacaacgctacacctattaccacgtacgacgcgacgctcaacgactaccactaccgccgacgcacctaactacaccgcgcgtcccgaaaccacgctcgtcc

SEQ ID NO: 33019 - DNA, 1007 bp, Artificial Sequence
  chemically treated genomic DNA (Homo sapiens) CpG-island No: 33019
ggatttgtagtaattttattttattcgttttttcggtttcgtttgtttttgttgagaaggggttttgcgagaaggttgggatcgtcgggttcgggtgggcggcgtaaggagtttatagttaagtttttcggttatttttaaggtgatagcgacgagattcgtattcgtttttttcgtaggttttgcgttggtttacgtgagattcgttttcgtttcgtcggcgttgtcgttttttttagtttttagtttcggtttttaggtttttggaacgttttttttttttttcgaggatcggtttcgttattttgggcggcgcgttcgtttgttttttttttatttcggtcgtcgggtagcgggaatagattttagcgcgtatttattcgtagtttttttaagcgtttcgggagtaaagacgtagaggcggggagggttggcgttttttgtattattggcggggtcgtcgagaattcgtttcggaggtttcgggggcggcgtttgtatttgggggcgcgcggcgcggtattattttacgtttgcggcggttattaggcgggattcggagtttcggttttttcgttttttcgttttcggggtcgttagggggtggagtagggcggggagttcgggaaatttgtaaatagtcgaattcgggtttttcgttttaattcggggcggtttttttcgaaggttttattttagcggttcgttgcgggagattaaggttagtcgtcgttttaggggacggttttcggggaatttgaatgacgtgcgaggtcgtatttcggggcgttggatttcgttcgggcgttttcgtttttcgttttcgttttcgggttttaatttcgacgtttcgcgcgttttcggattaagtgcggacgcgttttacgtttttcggcgttagttcgggatagcgttgtatttgttgttacgtgcgacgcggcgtttagcggttgttattgtcgtcggcgtatttggttgtatcgcgcgtttcgggattacgttcgttt

SEQ ID NO: 33020 - DNA, 1007 bp, Artificial Sequence
  chemically treated genomic DNA (Homo sapiens) CpG-island No: 33020
aaacgaacgtaatcccgaaacgcgcgatacaaccaaatacgccgacgacaataacaaccgctaaacgccgcgtcgcacgtaacaacaaatacaacgctatcccgaactaacgccgaaaaacgtaaaacgcgtccgcacttaatccgaaaacgcgcgaaacgtcgaaattaaaacccgaaaacgaaaacgaaaaacgaaaacgcccgaacgaaatccaacgccccgaaatacgacctcgcacgtcattcaaattccccgaaaaccgtcccctaaaacgacgactaaccttaatctcccgcaacgaaccgctaaaataaaaccttcgaaaaaaaccgccccgaattaaaacgaaaaacccgaattcgactatttacaaatttcccgaactccccgccctactccaccccctaacgaccccgaaaacgaaaaaacgaaaaaaccgaaactccgaatcccgcctaataaccgccgcaaacgtaaaataataccgcgccgcgcgcccccaaatacaaacgccgcccccgaaacctccgaaacgaattctcgacgaccccgccaataatacaaaaaacgccaaccctccccgcctctacgtctttactcccgaaacgcttaaaaaaactacgaataaatacgcgctaaaatctattcccgctacccgacgaccgaaataaaaaaaaaacaaacgaacgcgccgcccaaaataacgaaaccgatcctcgaaaaaaaaaaaaaacgttccaaaaacctaaaaaccgaaactaaaaactaaaaaaaacgacaacgccgacgaaacgaaaacgaatctcacgtaaaccaacgcaaaacctacgaaaaaaacgaatacgaatctcgtcgctatcaccttaaaaataaccgaaaaacttaactataaactccttacgccgcccacccgaacccgacgatcccaaccttctcgcaaaaccccttctcaacaaaaacaaacgaaaccgaaaaaacgaataaaataaaattactacaaatcc

SEQ ID NO: 33021 - DNA, 902 bp, Artificial Sequence
  chemically treated genomic DNA (Homo sapiens) CpG-island No: 33021
cgtcgtcgggggtaggggcgatgggagtgggcgtagggcgataaggggggacggtcggggacgcggagggggttgtttcgtcggttttgttcgttagtttaattacggttatttatgttttgtttgtggtttttgggcgggttggcggtcggggtagcgtaatggtatggttttggtttggatgacggtttcgttttcggtttttttgggttcgtagggcggttggcgagggttataagttggacgagaggcgcgagcgcgcggagttttgggggtttaggtcgttggcggcgtcgggtgaggcggagtttttgcgattcgggttgggcgcggcggttcgggtagcgggcgtgggttttagaagcggtgtggagttgttggtcgggcgtgtggaggtcgttgggacgggcgtttcgtggggtagcgagggttgcgaggcggatagtgggcgtaacgcgcggtttaggcggcgcgagggtagggcggttttagtaaggggggcggcgggtaagttgtcgtagggcgaggttcgcggtgttcgggggttggcgggcgcgtttagggggttggcggggggcgggggttcgggtgaggcggcggtaggtgcgggtttcgggggcgggcggcgtacgaggcgcggcgagtcgagcgttagcggttttacgagcggtcgcgttatttgcgggtagaagtttatgattacggtttgttgtagcgtggcgatggtcgaggtgatttgcggcggcggcggcggcgggaagaggtttaggcgttgatttagttcggtttgttgtattatttcgtcgtcgtatttgacgattttttggatgatggcgttttattggttgttgaatacgttcgagttaaggttatgttgtattttgtgtaggaggatggaattt

SEQ ID NO: 33022 - DNA, 902 bp, Artificial Sequence
  chemically treated genomic DNA (Homo sapiens) CpG-island No: 33022
aaattccatcctcctacacaaaatacaacataaccttaactcgaacgtattcaacaaccaataaaacgccatcatccaaaaaatcgtcaaatacgacgacgaaataatacaacaaaccgaactaaatcaacgcctaaacctcttcccgccgccgccgccgccgcaaatcacctcgaccatcgccacgctacaacaaaccgtaatcataaacttctacccgcaaataacgcgaccgctcgtaaaaccgctaacgctcgactcgccgcgcctcgtacgccgcccgcccccgaaacccgcacctaccgccgcctcacccgaacccccgccccccgccaaccccctaaacgcgcccgccaacccccgaacaccgcgaacctcgccctacgacaacttacccgccgccccccttactaaaaccgccctaccctcgcgccgcctaaaccgcgcgttacgcccactatccgcctcgcaaccctcgctaccccacgaaacgcccgtcccaacgacctccacacgcccgaccaacaactccacaccgcttctaaaacccacgcccgctacccgaaccgccgcgcccaacccgaatcgcaaaaactccgcctcacccgacgccgccaacgacctaaacccccaaaactccgcgcgctcgcgcctctcgtccaacttataaccctcgccaaccgccctacgaacccaaaaaaaccgaaaacgaaaccgtcatccaaaccaaaaccataccattacgctaccccgaccgccaacccgcccaaaaaccacaaacaaaacataaataaccgtaattaaactaacgaacaaaaccgacgaaacaaccccctccgcgtccccgaccgtccccccttatcgccctacgcccactcccatcgcccctacccccgacgacg

SEQ ID NO: 33023 - DNA, 902 bp, Artificial Sequence
  chemically treated genomic DNA (Homo sapiens) CpG-island No: 33023
gaattttatttttttgtataaggtgtagtatgattttaattcgggcgtatttaataattagtagaacgttattatttaggagatcgttaagtacgacggcgagatggtgtagtaggtcgagttgggttagcgtttgggttttttttcgtcgtcgtcgtcgtcgtaggttatttcggttatcgttacgttgtagtaggtcgtggttatgagtttttgttcgtaggtggcgcggtcgttcgtggggtcgttggcgttcggttcgtcgcgtttcgtgcgtcgttcgttttcggggttcgtatttgtcgtcgttttattcgggttttcgtttttcgttagttttttgggcgcgttcgttagttttcgggtatcgcggatttcgttttacggtagtttgttcgtcgttttttttgttgggatcgttttgttttcgcgtcgtttgagtcgcgcgttgcgtttattgttcgtttcgtagttttcgttgttttacggaacgttcgttttagcggtttttatacgttcggttagtagttttatatcgtttttgggatttacgttcgttgttcgggtcgtcgcgtttagttcggatcgtagggatttcgttttattcggcgtcgttagcggtttggatttttaggatttcgcgcgttcgcgtttttcgtttaatttgtgattttcgttaatcgttttgcgggtttaggagggtcggaggcggggtcgttatttagattaaagttatgttattgcgttgtttcggtcgttagttcgtttagaaattatagataagatataggtagtcgtagttggattgacgggtagggtcggcggggtagtttttttcgcgttttcggtcgtttttttttatcgttttgcgtttatttttatcgtttttgttttcggcggcg

SEQ ID NO: 33024 - DNA, 902 bp, Artificial Sequence
  chemically treated genomic DNA (Homo sapiens) CpG-island No: 33024
cgccgccgaaaacaaaaacgataaaaataaacgcaaaacgataaaaaaaaacgaccgaaaacgcgaaaaaaactaccccgccgaccctacccgtcaatccaactacgactacctatatcttatctataatttctaaacgaactaacgaccgaaacaacgcaataacataactttaatctaaataacgaccccgcctccgaccctcctaaacccgcaaaacgattaacgaaaatcacaaattaaacgaaaaacgcgaacgcgcgaaatcctaaaaatccaaaccgctaacgacgccgaataaaacgaaatccctacgatccgaactaaacgcgacgacccgaacaacgaacgtaaatcccaaaaacgatataaaactactaaccgaacgtataaaaaccgctaaaacgaacgttccgtaaaacaacgaaaactacgaaacgaacaataaacgcaacgcgcgactcaaacgacgcgaaaacaaaacgatcccaacaaaaaaaacgacgaacaaactaccgtaaaacgaaatccgcgatacccgaaaactaacgaacgcgcccaaaaaactaacgaaaaacgaaaacccgaataaaacgacgacaaatacgaaccccgaaaacgaacgacgcacgaaacgcgacgaaccgaacgccaacgaccccacgaacgaccgcgccacctacgaacaaaaactcataaccacgacctactacaacgtaacgataaccgaaataacctacgacgacgacgacgacgaaaaaaaacccaaacgctaacccaactcgacctactacaccatctcgccgtcgtacttaacgatctcctaaataataacgttctactaattattaaatacgcccgaattaaaatcatactacaccttatacaaaaaaataaaattc

SEQ ID NO: 33025 - DNA, 709 bp, Artificial Sequence
  chemically treated genomic DNA (Homo sapiens) CpG-island No: 33025
gtcgatgcggtttaggcggtcgatggttatcgtttcgaaggcgcgtcgtattatggggtatttttttagtatttcgttgaagttgtttacgtttagcgaaaggaggcggtaataggtgttggttcgtacgttcgttatgcggtggtttcgggtgagtaggtagattttttcgaagtaggagttatcgaatagttttatttttttgttgtttttagcgagtacgttgattacgtcgtgttgaatgaagtatattttttcgatggtgttttcgcggatgaggtagttattcggttggaagatttcgaatttgagtttggttagtatggtcgtgacgaagttggggttagtattggcgaatagcggtatggaggttattagttttcggtagttgaagttgataattttttttcgtaggggttcgttgagttcgtttaggatgttgttttcgtcgaatattttgttttggtaacggtgttcgtagtagtcgtggattttttggcggaagtcggtcggtagtttgtggaaggatatgtattgttttatttgtttgtatttttggtattggcgtcgcgaggagtttagcgattggatgagggtagtggcgtggtcgatgaatatggcgtagtaggtgttatttataattatgttgagtatggttagttagatgttcgttatgttttcgggcgtttgtcggttatatttaatgtat

SEQ ID NO: 33026 - DNA, 709 bp, Artificial Sequence
  chemically treated genomic DNA (Homo sapiens) CpG-island No: 33026
atacattaaatataaccgacaaacgcccgaaaacataacgaacatctaactaaccatactcaacataattataaataacacctactacgccatattcatcgaccacgccactaccctcatccaatcgctaaactcctcgcgacgccaataccaaaaatacaaacaaataaaacaatacatatccttccacaaactaccgaccgacttccgccaaaaaatccacgactactacgaacaccgttaccaaaacaaaatattcgacgaaaacaacatcctaaacgaactcaacgaacccctacgaaaaaaaattatcaacttcaactaccgaaaactaataacctccataccgctattcgccaatactaaccccaacttcgtcacgaccatactaaccaaactcaaattcgaaatcttccaaccgaataactacctcatccgcgaaaacaccatcgaaaaaatatacttcattcaacacgacgtaatcaacgtactcgctaaaaacaacaaaaaaataaaactattcgataactcctacttcgaaaaaatctacctactcacccgaaaccaccgcataacgaacgtacgaaccaacacctattaccgcctcctttcgctaaacgtaaacaacttcaacgaaatactaaaaaaataccccataatacgacgcgccttcgaaacgataaccatcgaccgcctaaaccgcatcgac

SEQ ID NO: 33027 - DNA, 709 bp, Artificial Sequence
  chemically treated genomic DNA (Homo sapiens) CpG-island No: 33027
gtgtattgggtatggtcggtaggcgttcgagagtatgacggatatttggttgattatgtttagtatgattgtgagtgatatttgttacgttatgtttatcggttacgttattgtttttatttagtcgttggatttttcgcggcgttaatattagaagtataagtaggtggagtagtatatgtttttttataagttgtcggtcgattttcgttagaagatttacgattattacgagtatcgttattagggtaagatgttcgacgaggatagtattttgggcgagtttaacgggtttttgcgggaggagattgttaattttaattgtcggaagttggtgatttttatgtcgttgttcgttaatgttgattttaatttcgttacggttatgttgattaagtttaagttcgaggttttttagtcgggtgattattttattcgcgaaggtattatcgggaagatgtattttatttagtacggcgtggttagcgtgttcgttaagggtaataaggagatgaagttgttcgatggtttttatttcggagagatttgtttgtttattcggggttatcgtatggcgagcgtgcgggttaatatttattgtcgttttttttcgttgagcgtggataattttaacgaggtgttggaggagtattttatgatgcggcgcgttttcgagacggtggttatcgatcgtttggatcgtatcggt

SEQ ID NO: 33028 - DNA, 709 bp, Artificial Sequence
  chemically treated genomic DNA (Homo sapiens) CpG-island No: 33028
accgatacgatccaaacgatcgataaccaccgtctcgaaaacgcgccgcatcataaaatactcctccaacacctcgttaaaattatccacgctcaacgaaaaaaaacgacaataaatattaacccgcacgctcgccatacgataaccccgaataaacaaacaaatctctccgaaataaaaaccatcgaacaacttcatctccttattacccttaacgaacacgctaaccacgccgtactaaataaaatacatcttcccgataataccttcgcgaataaaataatcacccgactaaaaaacctcgaacttaaacttaatcaacataaccgtaacgaaattaaaatcaacattaacgaacaacgacataaaaatcaccaacttccgacaattaaaattaacaatctcctcccgcaaaaacccgttaaactcgcccaaaatactatcctcgtcgaacatcttaccctaataacgatactcgtaataatcgtaaatcttctaacgaaaatcgaccgacaacttataaaaaaacatatactactccacctacttatacttctaatattaacgccgcgaaaaatccaacgactaaataaaaacaataacgtaaccgataaacataacgtaacaaatatcactcacaatcatactaaacataatcaaccaaatatccgtcatactctcgaacgcctaccgaccatacccaatacac

SEQ ID NO: 33029 - DNA, 557 bp, Artificial Sequence
  chemically treated genomic DNA (Homo sapiens) CpG-island No: 33029
  unsure (469)
tttttgttcgcgttttacggttttttggttgtcgaatattcgtagcgagaatttgttgacgtttagttgtaggagcgcgtcgaagtggcgttgtatgaagttggtttaagttgcggcgcggtttcgtcgtcgggtcgttatttcgttgtcggtttttttcgtcggtttcggtttcggtttcggcgcgggtttcgaggtcgtttcggggtataagaattatattttgggttttcgcgtcgggttttcgggtttcgcggggttgtattgcggttagtcgcgttcgtattcggtcgtttcggttgtttttggtcgtgttcgtcgtgttcgggatgtcggggttgtcgtattagttgtcgcggttgcggcgttggtttcgcgggtcgttttttttcgtcgttttcgggggtaacgtttcggttcggggcggttgttgttgggggggagcgacggtggcggggtttttttcggntcgttcgtcgttttcgcgcgcgtttatggcgaggcggcgttcggtagtgcggagcggagtcgtcgattagtttaagtttttatatggt

SEQ ID NO: 33030 - DNA, 557 bp, Artificial Sequence
  chemically treated genomic DNA (Homo sapiens) CpG-island No: 33030
  unsure (89)
accatataaaaacttaaactaatcgacgactccgctccgcactaccgaacgccgcctcgccataaacgcgcgcgaaaacgacgaacganccgaaaaaaaccccgccaccgtcgctcccccccaacaacaaccgccccgaaccgaaacgttacccccgaaaacgacgaaaaaaaacgacccgcgaaaccaacgccgcaaccgcgacaactaatacgacaaccccgacatcccgaacacgacgaacacgaccaaaaacaaccgaaacgaccgaatacgaacgcgactaaccgcaatacaaccccgcgaaacccgaaaacccgacgcgaaaacccaaaatataattcttataccccgaaacgacctcgaaacccgcgccgaaaccgaaaccgaaaccgacgaaaaaaaccgacaacgaaataacgacccgacgacgaaaccgcgccgcaacttaaaccaacttcatacaacgccacttcgacgcgctcctacaactaaacgtcaacaaattctcgctacgaatattcgacaaccaaaaaaccgtaaaacgcgaacaaaaa

SEQ ID NO: 33031 - DNA, 557 bp, Artificial Sequence
  chemically treated genomic DNA (Homo sapiens) CpG-island No: 33031
  unsure (89)
gttatgtaaagatttgaattggtcggcggtttcgtttcgtattgtcgggcgtcgtttcgttatggacgcgcgcgggggcggcgggcggntcggggagagtttcgttatcgtcgtttttttttaatagtagtcgtttcgggtcgaggcgttgttttcggaggcggcggaggagggcggttcgcggggttagcgtcgtagtcgcgatagttagtgcggtagtttcggtatttcgggtacggcgagtacggttaagggtagtcggaacggtcgagtgcgggcgcggttagtcgtagtgtagtttcgcggggttcgagggttcggcgcgggggtttaaggtgtagtttttgtgtttcggggcggtttcggggttcgcgtcggggtcggggtcggggtcggcggaggaggtcggtagcgaggtggcggttcggcggcggagtcgcgtcgtagtttgggttagttttatgtagcgttatttcggcgcgtttttgtagttgggcgttaataagttttcgttgcggatgttcggtagttagaaggtcgtggagcgcgagtaggag

SEQ ID NO: 33032 - DNA, 557 bp, Artificial Sequence
  chemically treated genomic DNA (Homo sapiens) CpG-island No: 33032
  unsure (469)
ctcctactcgcgctccacgaccttctaactaccgaacatccgcaacgaaaacttattaacgcccaactacaaaaacgcgccgaaataacgctacataaaactaacccaaactacgacgcgactccgccgccgaaccgccacctcgctaccgacctcctccgccgaccccgaccccgaccccgacgcgaaccccgaaaccgccccgaaacacaaaaactacaccttaaacccccgcgccgaaccctcgaaccccgcgaaactacactacgactaaccgcgcccgcactcgaccgttccgactacccttaaccgtactcgccgtacccgaaataccgaaactaccgcactaactatcgcgactacgacgctaaccccgcgaaccgccctcctccgccgcctccgaaaacaacgcctcgacccgaaacgactactattaaaaaaaaacgacgataacgaaactctccccganccgcccgccgcccccgcgcgcgtccataacgaaacgacgcccgacaatacgaaacgaaaccgccgaccaattcaaatctttacataac

SEQ ID NO: 33033 - DNA, 527 bp, Artificial Sequence
  chemically treated genomic DNA (Homo sapiens) CpG-island No: 33033
gcgggcggacgcggggttattaaacggtgatatttcgatttttggggtttggcgtttatcgcgggataaattaagagtaggattgagttcgcggtgggaattgtaattcggaaatttatgggcgtcggaattatttggttagatttcggggaggtgttttgaattatttcgggaatttttcgtttttaatttattttttttcgcggagagttcgggtttaacgcggagagaaggcgagagaagtcgcggtgttttagcgttgggatcggggatttgcggggaagtaaaggcgattcgtcgtagagaagtcgtgggaagggcgcggggaggtgtatgaagtgggcgtgcggagagaagtgggtgttgggcgcgtgggatttcgtcgcgtttgtttcgttgaggaggagttggaagaatatgttcgcgcgattttggggagtttttggcgtagagtggggtgtgtcggaggtatcggcggtgcgtaggattggttgtttttttgagcgtttttgttttgtcgtagtcgt

SEQ ID NO: 33034 - DNA, 527 bp, Artificial Sequence
  chemically treated genomic DNA (Homo sapiens) CpG-island No: 33034
acgactacgacaaaacaaaaacgctcaaaaaaacaaccaatcctacgcaccgccgatacctccgacacaccccactctacgccaaaaactccccaaaatcgcgcgaacatattcttccaactcctcctcaacgaaacaaacgcgacgaaatcccacgcgcccaacacccacttctctccgcacgcccacttcatacacctccccgcgcccttcccacgacttctctacgacgaatcgcctttacttccccgcaaatccccgatcccaacgctaaaacaccgcgacttctctcgccttctctccgcgttaaacccgaactctccgcgaaaaaaaataaattaaaaacgaaaaattcccgaaataattcaaaacacctccccgaaatctaaccaaataattccgacgcccataaatttccgaattacaattcccaccgcgaactcaatcctactcttaatttatcccgcgataaacgccaaaccccaaaaatcgaaatatcaccgtttaataaccccgcgtccgcccgc

SEQ ID NO: 33035 - DNA, 527 bp, Artificial Sequence
  chemically treated genomic DNA (Homo sapiens) CpG-island No: 33035
acggttgcggtaaggtaggggcgtttagaaaggtagttagttttgcgtatcgtcggtgttttcggtatattttattttgcgttaggggttttttagggtcgcgcgagtatgtttttttagtttttttttagcgaagtaggcgcggcggggttttacgcgtttagtatttattttttttcgtacgtttattttatgtattttttcgcgttttttttacggtttttttgcggcgagtcgtttttgttttttcgtaggttttcggttttagcgttaaggtatcgcggtttttttcgtttttttttcgcgttgaattcgggtttttcgcggggagaaataggttgggggcgaggggttttcgagataatttaggatattttttcggggtttagttaggtaatttcgacgtttatggattttcggattatagtttttatcgcgggtttagttttatttttagtttatttcgcggtgagcgttaagttttaaaagtcggagtgttatcgtttggtgatttcgcgttcgttcgt

SEQ ID NO: 33036 - DNA, 527 bp, Artificial Sequence
  chemically treated genomic DNA (Homo sapiens) CpG-island No: 33036
acgaacgaacgcgaaatcaccaaacgataacactccgacttttaaaacttaacgctcaccgcgaaataaactaaaaataaaactaaacccgcgataaaaactataatccgaaaatccataaacgtcgaaattacctaactaaaccccgaaaaaatatcctaaattatctcgaaaacccctcgcccccaacctatttctccccgcgaaaaacccgaattcaacgcgaaaaaaaaacgaaaaaaaccgcgataccttaacgctaaaaccgaaaacctacgaaaaaacaaaaacgactcgccgcaaaaaaaccgtaaaaaaaacgcgaaaaaatacataaaataaacgtacgaaaaaaaataaatactaaacgcgtaaaaccccgccgcgcctacttcgctaaaaaaaaactaaaaaaacatactcgcgcgaccctaaaaaacccctaacgcaaaataaaatataccgaaaacaccgacgatacgcaaaactaactacctttctaaacgcccctaccttaccgcaaccgt

SEQ ID NO: 33037 - DNA, 950 bp, Artificial Sequence
  chemically treated genomic DNA (Homo sapiens) CpG-island No: 33037
tttatggtatgtacggtattttcgcggttggtgaagtgtacgaaggcgtagtcgcggatttttttgacgcgttttacgtagtcggggttgaattggtcgaagttttttttgatggtgttttcggtggtttcgattatgaggttgcgtacgtagaggatttttacggtttttattacgttttcgtttacgtcgattttaggttcggtttagtttacggcgatttggtggttttatagttggatgcggttaggtatgagtttgcggcgagttatggtagtcgcgcggtggttttcgtattttacgaaggcgaagtcgcggttttttattttgtcggtcgcgttggcgtagacgattacgtttagtacgttttcggtgattttggtaattttttttaggattttttcgcgtttttttattttggggatttcgtcgatgaagaggcggtagttgtttacgttgtagtatacgtcgagtaggcggttcgggcggatttcgtagttgttgagtttacgtattgcgcgtttggtttcgtgtttgtggtagtatatgacgaaggcgtagtcgcggtttttgtcgttaaagtttattatgaggcgtagttcgtagatgcggtttacggtttcgaatacgggtattagttcgttttcgtatacgtcgcgcgggattttgtttacgaagatttcgtagttacgttgcgggtgcgggtttttttagtcgggcggtgggtcgtcgtatttgcgttgttcgtttttttgtattatgttgtagttcgtgcgttttattagcgttagtagtgttgtttcgttgggcgcgttcgttacgttttcgggtattttggcggaggattcggcggtcgagttattgtttatggttgcggtggaattttttgcggttataatgttaaaggtatttatagttggcggaaatttggggaagtagaaagaagcgtg

SEQ ID NO: 33038 - DNA, 950 bp, Artificial Sequence
  chemically treated genomic DNA (Homo sapiens) CpG-island No: 33038
cacgcttctttctacttccccaaatttccgccaactataaatacctttaacattataaccgcaaaaaattccaccgcaaccataaacaataactcgaccgccgaatcctccgccaaaatacccgaaaacgtaacgaacgcgcccaacgaaacaacactactaacgctaataaaacgcacgaactacaacataatacaaaaaaacgaacaacgcaaatacgacgacccaccgcccgactaaaaaaacccgcacccgcaacgtaactacgaaatcttcgtaaacaaaatcccgcgcgacgtatacgaaaacgaactaatacccgtattcgaaaccgtaaaccgcatctacgaactacgcctcataataaactttaacgacaaaaaccgcgactacgccttcgtcatatactaccacaaacacgaaaccaaacgcgcaatacgtaaactcaacaactacgaaatccgcccgaaccgcctactcgacgtatactacaacgtaaacaactaccgcctcttcatcgacgaaatccccaaaataaaaaaacgcgaaaaaatcctaaaaaaaattaccaaaatcaccgaaaacgtactaaacgtaatcgtctacgccaacgcgaccgacaaaataaaaaaccgcgacttcgccttcgtaaaatacgaaaaccaccgcgcgactaccataactcgccgcaaactcatacctaaccgcatccaactataaaaccaccaaatcgccgtaaactaaaccgaacctaaaatcgacgtaaacgaaaacgtaataaaaaccgtaaaaatcctctacgtacgcaacctcataatcgaaaccaccgaaaacaccatcaaaaaaaacttcgaccaattcaaccccgactacgtaaaacgcgtcaaaaaaatccgcgactacgccttcgtacacttcaccaaccgcgaaaataccgtacataccataaa

SEQ ID NO: 33039 - DNA, 950 bp, Artificial Sequence
  chemically treated genomic DNA (Homo sapiens) CpG-island No: 33039
tacgtttttttttgtttttttaggttttcgttagttgtggatgtttttgatattatgatcgtagaggattttatcgtagttatgagtagtgattcggtcgtcgggtttttcgttaaggtgttcgagggcgtggcgggcgcgtttaacgaggtagtattgttggcgttgatggagcgtacgggttatagtatggtgtaagagaacgggtagcgtaagtacggcggtttatcgttcggttgggagggttcgtattcgtagcgtggttgcgaggttttcgtgggtaagatttcgcgcgacgtgtacgaggacgagttggtgttcgtgttcgaggtcgtgggtcgtatttacgagttgcgttttatgatggattttgacggtaagaatcgcggttacgttttcgttatgtattgttataagtacgaggttaagcgcgtagtgcgtgagtttaataattacgagattcgttcgggtcgtttgttcggcgtgtgttgtagcgtggataattgtcgtttttttatcggcgggatttttaagatgaagaagcgcgaggaaattttggaggagattgttaaggttatcgagggcgtgttggacgtgatcgtttacgttagcgcggtcgataagatgaagaatcgcggtttcgttttcgtggagtacgagagttatcgcgcggttgttatggttcgtcgtaagtttatgtttggtcgtatttagttgtggggttattagatcgtcgtggattgggtcgaatttgagatcgacgtggacgaggacgtgatggagatcgtgaagattttttacgtgcgtaattttatgatcgagattatcgaggatattattaagaagagtttcggttagtttaatttcggttgcgtggagcgcgttaagaagattcgcgattacgttttcgtgtattttattagtcgcgaggatgtcgtgtatgttatgaa

SEQ ID NO: 33040 - DNA, 950 bp, Artificial Sequence
  chemically treated genomic DNA (Homo sapiens) CpG-island No: 33040
ttcataacatacacgacatcctcgcgactaataaaatacacgaaaacgtaatcgcgaatcttcttaacgcgctccacgcaaccgaaattaaactaaccgaaactcttcttaataatatcctcgataatctcgatcataaaattacgcacgtaaaaaatcttcacgatctccatcacgtcctcgtccacgtcgatctcaaattcgacccaatccacgacgatctaataaccccacaactaaatacgaccaaacataaacttacgacgaaccataacaaccgcgcgataactctcgtactccacgaaaacgaaaccgcgattcttcatcttatcgaccgcgctaacgtaaacgatcacgtccaacacgccctcgataaccttaacaatctcctccaaaatttcctcgcgcttcttcatcttaaaaatcccgccgataaaaaaacgacaattatccacgctacaacacacgccgaacaaacgacccgaacgaatctcgtaattattaaactcacgcactacgcgcttaacctcgtacttataacaatacataacgaaaacgtaaccgcgattcttaccgtcaaaatccatcataaaacgcaactcgtaaatacgacccacgacctcgaacacgaacaccaactcgtcctcgtacacgtcgcgcgaaatcttacccacgaaaacctcgcaaccacgctacgaatacgaaccctcccaaccgaacgataaaccgccgtacttacgctacccgttctcttacaccatactataacccgtacgctccatcaacgccaacaatactacctcgttaaacgcgcccgccacgccctcgaacaccttaacgaaaaacccgacgaccgaatcactactcataactacgataaaatcctctacgatcataatatcaaaaacatccacaactaacgaaaacctaaaaaaacaaaaaaaaacgta

SEQ ID NO: 33041 - DNA, 603 bp, Artificial Sequence
  chemically treated genomic DNA (Homo sapiens) CpG-island No: 33041
aaaggggcgaaggggcggggtggcgttgggtgggagcgcggcggcggggaggagggtttgggagttcgggtgcgatttgtaagcgttttgagtttgcgttcgtcgagggggagggtttttttagttcggtcggagttgcggttgtgcgttgtttttggtttataacgtcgacgattgttaagagagttggggagtggaattgtcggaagtgtttgcgcgtcgtgagagaaatttttttgtttcggtcgcggtcggagtttcgtcgttttcgcgtttcgaacgacgatgcgtttagatgataataatttgaggggattcgcgtttcggttcgtcgttcgcgtttgcgtcgtttagtttcgggggaggaagattgagttcggcgtagcgggcggcgtcggggttcgatttttttcgcgtaattagttttttcgcgtttcggcgtttttttcgcgatcggcgattttagcgtcgtcgcgtcgtcggtgttttcgttttgatttcggttcggacgtgtcgcggttcgttggtagttttggtgttatgggttgttattttggagtttagcgatttttatttggatagtttagattttagggagcgttt

SEQ ID NO: 33042 - DNA, 603 bp, Artificial Sequence
  chemically treated genomic DNA (Homo sapiens) CpG-island No: 33042
aaacgctccctaaaatctaaactatccaaataaaaatcgctaaactccaaaataacaacccataacaccaaaactaccaacgaaccgcgacacgtccgaaccgaaatcaaaacgaaaacaccgacgacgcgacgacgctaaaatcgccgatcgcgaaaaaaacgccgaaacgcgaaaaaactaattacgcgaaaaaaatcgaaccccgacgccgcccgctacgccgaactcaatcttcctcccccgaaactaaacgacgcaaacgcgaacgacgaaccgaaacgcgaatcccctcaaattattatcatctaaacgcatcgtcgttcgaaacgcgaaaacgacgaaactccgaccgcgaccgaaacaaaaaaatttctctcacgacgcgcaaacacttccgacaattccactccccaactctcttaacaatcgtcgacgttataaaccaaaaacaacgcacaaccgcaactccgaccgaactaaaaaaaccctccccctcgacgaacgcaaactcaaaacgcttacaaatcgcacccgaactcccaaaccctcctccccgccgccgcgctcccacccaacgccaccccgccccttcgccccttt

SEQ ID NO: 33043 - DNA, 603 bp, Artificial Sequence
  chemically treated genomic DNA (Homo sapiens) CpG-island No: 33043
aagcgttttttgaaatttgggttgtttaagtaggaatcgttgaattttagagtggtagtttatggtattagggttgttagcgggtcgcgatacgttcgggtcgaggttagggcgggggtatcggcggcgcggcggcgttggggtcgtcgatcgcggggaaggcgtcgggacgcgaggggattgattgcgcggaggaaatcgggtttcgacgtcgttcgttgcgtcgggtttagtttttttttttcgaggttaggcgacgtaggcgcgggcggcgggtcgaggcgcgagtttttttaggttgttgttatttggacgtatcgtcgttcggaacgcgggggcggcgaggtttcggtcgcggtcggagtaggaaagttttttttacggcgcgtagatattttcggtagttttattttttaatttttttgatagtcgtcggcgttgtgagttagaagtagcgtatagtcgtaatttcggtcgggttggggaaattttttttttcggcggacgtaggtttagagcgtttgtaaatcgtattcgggtttttagattttttttttcgtcgtcgcgtttttatttagcgttatttcgttttttcgttttttt

SEQ ID NO: 33044 - DNA, 603 bp, Artificial Sequence
  chemically treated genomic DNA (Homo sapiens) CpG-island No: 33044
aaaaaaacgaaaaaacgaaataacgctaaataaaaacgcgacgacgaaaaaaaaaatctaaaaacccgaatacgatttacaaacgctctaaacctacgtccgccgaaaaaaaaaatttccccaacccgaccgaaattacgactatacgctacttctaactcacaacgccgacgactatcaaaaaaattaaaaaataaaactaccgaaaatatctacgcgccgtaaaaaaaactttcctactccgaccgcgaccgaaacctcgccgcccccgcgttccgaacgacgatacgtccaaataacaacaacctaaaaaaactcgcgcctcgacccgccgcccgcgcctacgtcgcctaacctcgaaaaaaaaaaactaaacccgacgcaacgaacgacgtcgaaacccgatttcctccgcgcaatcaatcccctcgcgtcccgacgccttccccgcgatcgacgaccccaacgccgccgcgccgccgatacccccgccctaacctcgacccgaacgtatcgcgacccgctaacaaccctaataccataaactaccactctaaaattcaacgattcctacttaaacaacccaaatttcaaaaaacgctt

SEQ ID NO: 33045 - DNA, 820 bp, Artificial Sequence
  chemically treated genomic DNA (Homo sapiens) CpG-island No: 33045
  unsure (279)
agcgcgagacggggtttcgaggattgttaattttattacggtggttttttcggggtttcgtttttttttgagcgtgcgtgggtttttttgatttcgtgatatagtgtacgcggcgtattggtttttaggagttggggcgtaggtttggttcggaattttcggcggagcggtttgggcggtggggacgttttatcgggcggttggcgtgtacgtcgtcggggttacgcggttttttcgacggattcgagtttttcgtggcggggatggggcggtattagnttcggttttttcgaacgatcgggttcggtttagttttagagcgtttagtcgttgcgtttatttttttgcgtacgtttagtaacgagtaatagtttttattgtttagttttttttcgtttaaggtcgtcgttattttcgtaattttttatttcgttaaatcggtaaggtcgtgtttaagaggggttagtgattcgcgttagggatagcgcgggttagtcggttgcgttatagcggttcgttggggttcggtagcgtatcgcgttcggcggagatgcgtttgcgttgtgtcgttcgtaggaaaatagtggggtatgtgcgaggttattggtgggttttcggtttgtagcgtggatagacgtgatttatgagaattgggcgcggtagatttatcgcgtgttatgtttgattttttatataacgtagcgatatcggcgtatattagtttattatttcgtggtttcgattgatatttagagggttacgtgggtttttttatcgtgtgatatagggggtaatacggttgtttttcgtatttttgaga

SEQ ID NO: 33046 - DNA, 820 bp, Artificial Sequence
  chemically treated genomic DNA (Homo sapiens) CpG-island No: 33046
  unsure (542)
tctcaaaaatacgaaaaacaaccgtattaccccctatatcacacgataaaaaaacccacgtaaccctctaaatatcaatcgaaaccacgaaataataaactaatatacgccgatatcgctacgttatataaaaaatcaaacataacacgcgataaatctaccgcgcccaattctcataaatcacgtctatccacgctacaaaccgaaaacccaccaataacctcgcacataccccactattttcctacgaacgacacaacgcaaacgcatctccgccgaacgcgatacgctaccgaaccccaacgaaccgctataacgcaaccgactaacccgcgctatccctaacgcgaatcactaacccctcttaaacacgaccttaccgatttaacgaaataaaaaattacgaaaataacgacgaccttaaacgaaaaaaaactaaacaataaaaactattactcgttactaaacgtacgcaaaaaaataaacgcaacgactaaacgctctaaaactaaaccgaacccgatcgttcgaaaaaaccgaanctaataccgccccatccccgccacgaaaaactcgaatccgtcgaaaaaaccgcgtaaccccgacgacgtacacgccaaccgcccgataaaacgtccccaccgcccaaaccgctccgccgaaaattccgaaccaaacctacgccccaactcctaaaaaccaatacgccgcgtacactatatcacgaaatcaaaaaaacccacgcacgctcaaaaaaaaacgaaaccccgaaaaaaccaccgtaataaaattaacaatcctcgaaaccccgtctcgcgct

SEQ ID NO: 33047 - DNA, 820 bp, Artificial Sequence
  chemically treated genomic DNA (Homo sapiens) CpG-island No: 33047
  unsure (542)
ttttaaaagtacggaaagtaatcgtgttgttttttatgttatacgataaaaagatttacgtaattttttgagtgttagtcgaggttacgagatggtgagttaatatgcgtcggtgtcgttgcgttatatggaagattagatatagtacgcggtgggtttatcgcgtttagtttttataagttacgtttatttacgttataggtcgggggtttattaatagtttcgtatatattttattatttttttgcgggcggtataacgtaggcgtattttcgtcgggcgcggtacgttatcgggttttagcgggtcgttgtgacgtagtcggttggttcgcgttgtttttgacgcggattattggttttttttgagtacggttttgtcggtttggcggggtgaaaggttgcgaagatggcgacggttttgagcgaggaggagttggataatgaagattattattcgttgttgaacgtgcgtagggaggtgagcgtagcggttggacgttttggggttgagtcgagttcggtcgttcgggagggtcgggnttggtgtcgttttattttcgttacgggaggttcgggttcgtcggggaggtcgcgtgatttcggcgacgtgtacgttagtcgttcgatggagcgtttttatcgtttagatcgtttcgtcgggggtttcgggttaagtttacgttttagtttttgaaggttagtgcgtcgcgtgtattgtgttacgggattagagaggtttacgtacgtttaagaggaaacggggtttcgaggaggttatcgtagtggggttagtagttttcgagatttcgtttcgcgtt

SEQ ID NO: 33048 - DNA, 820 bp, Artificial Sequence
  chemically treated genomic DNA (Homo sapiens) CpG-island No: 33048
  unsure (279)
aacgcgaaacgaaatctcgaaaactactaaccccactacgataacctcctcgaaaccccgtttcctcttaaacgtacgtaaacctctctaatcccgtaacacaatacacgcgacgcactaaccttcaaaaactaaaacgtaaacttaacccgaaacccccgacgaaacgatctaaacgataaaaacgctccatcgaacgactaacgtacacgtcgccgaaatcacgcgacctccccgacgaacccgaacctcccgtaacgaaaataaaacgacaccaancccgaccctcccgaacgaccgaactcgactcaaccccaaaacgtccaaccgctacgctcacctccctacgcacgttcaacaacgaataataatcttcattatccaactcctcctcgctcaaaaccgtcgccatcttcgcaacctttcaccccgccaaaccgacaaaaccgtactcaaaaaaaaccaataatccgcgtcaaaaacaacgcgaaccaaccgactacgtcacaacgacccgctaaaacccgataacgtaccgcgcccgacgaaaatacgcctacgttataccgcccgcaaaaaaataataaaatatatacgaaactattaataaacccccgacctataacgtaaataaacgtaacttataaaaactaaacgcgataaacccaccgcgtactatatctaatcttccatataacgcaacgacaccgacgcatattaactcaccatctcgtaacctcgactaacactcaaaaaattacgtaaatctttttatcgtataacataaaaaacaacacgattactttccgtacttttaaaa

SEQ ID NO: 33049 - DNA, 964 bp, Artificial Sequence
  chemically treated genomic DNA (Homo sapiens) CpG-island No: 33049
  unsure (424)
cgtacgtttagtcgtttcgagagtcgtattcggcggattcggtttttaggttcgttttcggggtatttggcgggcgtttatttttcggggggtacgtgttttcgtacgtagcgcgagggtagcgggtgtttggttatttattaggaaaagtttcgcgcggatttttcggattgaggagggtgggaaattcggttgtttagcgttttattcgggcggtcgggttggcgtttttttgttttcggtcggcgttttattttgggataggtaattatgagttattcgtttcgcggttatatgggtaacgtgattaaaataaagtttcggtattttaagtcgttagaaaaggggataacggagtttatcgggggcgggtataggaggcgggcgtaggcgggcggcgcggggtcgtggggacgcggttagngtgggcggtggtttggcgggaggttcgtttttttttacggtcggtagcgacgttcggatttttaggtagtcggattttagggcgcggtatttttgcggattttagtttcgaggtttttcgcgttcggttttttatcggtagcggcggcgggttgcgggatttcggagatttcggcgcgtttttatagttatcgggattttacgcgttagtagcggttttttcgggaacgttttttagtttcgggagtaacgcgggaaaagtttagcgtgttaatgagggagcgttttttttatgacgtttacgttcgggggcgggttttttttcgtcgttttcgagtttcggaattttttttgattggtttggacggtttgggaaatattgtagtgacgtttaattaaaacgttacgtttcggtttcgaggaaatatttcgtgtcgggttcgttttgattggatagttttttcgggttttggttattaggaagttttgtttaggttcggaaggcgggtttttttgggagtgggtggggagggggcgttga

SEQ ID NO: 33050 - DNA, 964 bp, Artificial Sequence
  chemically treated genomic DNA (Homo sapiens) CpG-island No: 33050
  unsure (541)
tcaacgccccctccccacccactcccaaaaaaacccgccttccgaacctaaacaaaacttcctaataaccaaaacccgaaaaaactatccaatcaaaacgaacccgacacgaaatatttcctcgaaaccgaaacgtaacgttttaattaaacgtcactacaatatttcccaaaccgtccaaaccaatcaaaaaaaattccgaaactcgaaaacgacgaaaaaaaacccgcccccgaacgtaaacgtcataaaaaaaacgctccctcattaacacgctaaacttttcccgcgttactcccgaaactaaaaaacgttcccgaaaaaaccgctactaacgcgtaaaatcccgataactataaaaacgcgccgaaatctccgaaatcccgcaacccgccgccgctaccgataaaaaaccgaacgcgaaaaacctcgaaactaaaatccgcaaaaataccgcgccctaaaatccgactacctaaaaatccgaacgtcgctaccgaccgtaaaaaaaaacgaacctcccgccaaaccaccgcccacnctaaccgcgtccccacgaccccgcgccgcccgcctacgcccgcctcctatacccgcccccgataaactccgttatccccttttctaacgacttaaaataccgaaactttattttaatcacgttacccatataaccgcgaaacgaataactcataattacctatcccaaaataaaacgccgaccgaaaacaaaaaaacgccaacccgaccgcccgaataaaacgctaaacaaccgaatttcccaccctcctcaatccgaaaaatccgcgcgaaacttttcctaataaataaccaaacacccgctaccctcgcgctacgtacgaaaacacgtaccccccgaaaaataaacgcccgccaaataccccgaaaacgaacctaaaaaccgaatccgccgaatacgactctcgaaacgactaaacgtacg

SEQ ID NO: 33051 - DNA, 964 bp, Artificial Sequence
  chemically treated genomic DNA (Homo sapiens) CpG-island No: 33051
  unsure (541)
ttaacgttttttttttatttatttttaggaaagttcgtttttcggatttaaataaagttttttagtggttagaattcgaaagaattgtttaattaggacgggttcgatacggaatattttttcgaggtcgagacgtggcgttttgattgggcgttattatagtgttttttaggtcgtttagattaattaaagggggtttcggaattcgggagcggcgaagggaagttcgttttcgagcgtgaacgttatgaggaaggcgtttttttattggtacgttgggtttttttcgcgttgttttcggggttgaaggacgttttcggggaagtcgttgttggcgcgtggggtttcggtggttgtggggacgcgtcgggattttcgggatttcgtagttcgtcgtcgttgtcggtggggagtcggacgcggggggtttcggggttgaggttcgtaggggtgtcgcgttttggagttcgattgtttaggagttcgggcgtcgttgtcggtcgtgggggagggcgagtttttcgttaggttatcgtttatnttagtcgcgtttttacggtttcgcgtcgttcgtttgcgttcgttttttgtgttcgttttcggtgagtttcgttgtttttttttttggcggtttaaaatatcgaaattttattttggttacgttgtttatgtgatcgcggagcggatgatttatggttgtttgttttaggatgaagcgtcggtcgaaagtagagaagcgttagttcggtcgttcgggtggagcgttgggtagtcgagttttttattttttttaattcggagagttcgcgcggggttttttttaataaatagttaggtattcgttgttttcgcgttgcgtacgggagtacgtgtttttcgggaggtgggcgttcgttaggtgtttcgggaacgagtttaggaatcgggttcgtcgagtgcggttttcggggcggttaggcgtgcg

SEQ ID NO: 33052 - DNA, 964 bp, Artificial Sequence
  chemically treated genomic DNA (Homo sapiens) CpG-island No: 33052
  unsure (424)
cgcacgcctaaccgccccgaaaaccgcactcgacgaacccgattcctaaactcgttcccgaaacacctaacgaacgcccacctcccgaaaaacacgtactcccgtacgcaacgcgaaaacaacgaatacctaactatttattaaaaaaaaccccgcgcgaactctccgaattaaaaaaaataaaaaactcgactacccaacgctccacccgaacgaccgaactaacgcttctctactttcgaccgacgcttcatcctaaaacaaacaaccataaatcatccgctccgcgatcacataaacaacgtaaccaaaataaaatttcgatattttaaaccgccaaaaaaaaaaacaacgaaactcaccgaaaacgaacacaaaaaacgaacgcaaacgaacgacgcgaaaccgtaaaaacgcgactaanataaacgataacctaacgaaaaactcgccctcccccacgaccgacaacgacgcccgaactcctaaacaatcgaactccaaaacgcgacacccctacgaacctcaaccccgaaaccccccgcgtccgactccccaccgacaacgacgacgaactacgaaatcccgaaaatcccgacgcgtccccacaaccaccgaaaccccacgcgccaacaacgacttccccgaaaacgtccttcaaccccgaaaacaacgcgaaaaaaacccaacgtaccaataaaaaaacgccttcctcataacgttcacgctcgaaaacgaacttcccttcgccgctcccgaattccgaaaccccctttaattaatctaaacgacctaaaaaacactataataacgcccaatcaaaacgccacgtctcgacctcgaaaaaatattccgtatcgaacccgtcctaattaaacaattctttcgaattctaaccactaaaaaactttatttaaatccgaaaaacgaactttcctaaaaataaataaaaaaaaaacgttaa

SEQ ID NO: 33053 - DNA, 704 bp, Artificial Sequence
  chemically treated genomic DNA (Homo sapiens) CpG-island No: 33053
atcgcgcgtttttatgttggaataggtatcgcgcgtttttatgttggaatagatatcgcgcgattttatgttggaatatatattataagattttagattggaataaattttggtacgtttttatattggaatacgtatcgtacgattttatattggaatacgtatcgtacgattttatattggaatacgtatcgtacgattttatattggaatacgtatcgtacgattttatattggaatacgtatcgtacgattttatattggaatacgtatcgtacgattttatattggaatacgtatcgtacgattttatattggaatacgtatcgtacgattttatattggaatacgtatcgtacgattttatattggaatacgtatcgtacgattttatattggaatacgtatcgtacgattttatattggaatacgtatcgtacgattttatattggaatacgtatcgtacgattttatattggaatacgtatcgtacgattttatattggaatacgtatcgtacgattttatattggaatacgtatcgtacgattttatattggaatacgtatcgtacgattttatattggaatacgtatcgtacgattttatattggaatacgtatcgtacgattttatattggaatacgtatcgtacgattttatattggaatacgtatcgtacgattttatattggaatacgta

SEQ ID NO: 33054 - DNA, 704 bp, Artificial Sequence
  chemically treated genomic DNA (Homo sapiens) CpG-island No: 33054
tacgtattccaatataaaatcgtacgatacgtattccaatataaaatcgtacgatacgtattccaatataaaatcgtacgatacgtattccaatataaaatcgtacgatacgtattccaatataaaatcgtacgatacgtattccaatataaaatcgtacgatacgtattccaatataaaatcgtacgatacgtattccaatataaaatcgtacgatacgtattccaatataaaatcgtacgatacgtattccaatataaaatcgtacgatacgtattccaatataaaatcgtacgatacgtattccaatataaaatcgtacgatacgtattccaatataaaatcgtacgatacgtattccaatataaaatcgtacgatacgtattccaatataaaatcgtacgatacgtattccaatataaaatcgtacgatacgtattccaatataaaatcgtacgatacgtattccaatataaaatcgtacgatacgtattccaatataaaatcgtacgatacgtattccaatataaaatcgtacgatacgtattccaatataaaatcgtacgatacgtattccaatataaaaacgtaccaaaatttattccaatctaaaatcttataatatatattccaacataaaatcgcgcgatatctattccaacataaaaacgcgcgatacctattccaacataaaaacgcgcgat

SEQ ID NO: 33055 - DNA, 704 bp, Artificial Sequence
  chemically treated genomic DNA (Homo sapiens) CpG-island No: 33055
tgcgtgttttagtgtagggtcgtgcggtgcgtgttttagtgtagggtcgtgcggtgcgtgttttagtgtagggtcgtgcggtgcgtgttttagtgtagggtcgtgcggtgcgtgttttagtgtagggtcgtgcggtgcgtgttttagtgtagggtcgtgcggtgcgtgttttagtgtagggtcgtgcggtgcgtgttttagtgtagggtcgtgcggtgcgtgttttagtgtagggtcgtgcggtgcgtgttttagtgtagggtcgtgcggtgcgtgttttagtgtagggtcgtgcggtgcgtgttttagtgtagggtcgtgcggtgcgtgttttagtgtagggtcgtgcggtgcgtgttttagtgtagggtcgtgcggtgcgtgttttagtgtagggtcgtgcggtgcgtgttttagtgtagggtcgtgcggtgcgtgttttagtgtagggtcgtgcggtgcgtgttttagtgtagggtcgtgcggtgcgtgttttagtgtagggtcgtgcggtgcgtgttttagtgtagggtcgtgcggtgcgtgttttagtgtagggtcgtgcggtgcgtgttttagtgtaggaacgtgttagggtttgttttagtttaggattttgtgatgtgtgttttagtataggatcgcgcggtgtttgttttagtataggaacgcgcggtgtttgttttagtataggaacgcgcggt

SEQ ID NO: 33056 - DNA, 704 bp, Artificial Sequence
  chemically treated genomic DNA (Homo sapiens) CpG-island No: 33056
accgcgcgttcctatactaaaacaaacaccgcgcgttcctatactaaaacaaacaccgcgcgatcctatactaaaacacacatcacaaaatcctaaactaaaacaaaccctaacacgttcctacactaaaacacgcaccgcacgaccctacactaaaacacgcaccgcacgaccctacactaaaacacgcaccgcacgaccctacactaaaacacgcaccgcacgaccctacactaaaacacgcaccgcacgaccctacactaaaacacgcaccgcacgaccctacactaaaacacgcaccgcacgaccctacactaaaacacgcaccgcacgaccctacactaaaacacgcaccgcacgaccctacactaaaacacgcaccgcacgaccctacactaaaacacgcaccgcacgaccctacactaaaacacgcaccgcacgaccctacactaaaacacgcaccgcacgaccctacactaaaacacgcaccgcacgaccctacactaaaacacgcaccgcacgaccctacactaaaacacgcaccgcacgaccctacactaaaacacgcaccgcacgaccctacactaaaacacgcaccgcacgaccctacactaaaacacgcaccgcacgaccctacactaaaacacgcaccgcacgaccctacactaaaacacgcaccgcacgaccctacactaaaacacgca

SEQ ID NO: 33057 - DNA, 601 bp, Artificial Sequence
  chemically treated genomic DNA (Homo sapiens) CpG-island No: 33057
cgagaagtgacgatattacggggcggaggggaacggagaggaaagttgttgacgttagggagagatgtcgttgggttaggtacggttgttcgtaggagaggttttcgtagggagaggtatcgttggattaggcgagggtgcgcgtaggagaggttttcgtagggagaggtatcgttggattaggcgagggtgcgcgtaggggaggttttcgtagggagaggtatcgttggattaggcgagggtgcgcgtaggggaggttttcgtagggagaggtatcgttggattaggcgagggtgcgcgtaggggaggttttcgtagggagaggtatcgttggattaggcgagggtgcgcgtaggggaggttttcgtagggagaggtatcgttggattaggcgagggtgttcgtaggagaggttttcgtagggagaggtatcgttggattaggcgagggtgcgcgtaggagaggttttcgtagggagaggtatcgttggattaggcgagggtgcgcgtaggggaggttttcgtagggagcggtgtcgttgggttaggtacgggtgttcgtaggagaggttttcgtagggagaggtgtcgttgggttaggt

SEQ ID NO: 33058 - DNA, 601 bp, Artificial Sequence
  chemically treated genomic DNA (Homo sapiens) CpG-island No: 33058
acctaacccaacgacacctctccctacgaaaacctctcctacgaacacccgtacctaacccaacgacaccgctccctacgaaaacctcccctacgcgcaccctcgcctaatccaacgatacctctccctacgaaaacctctcctacgcgcaccctcgcctaatccaacgatacctctccctacgaaaacctctcctacgaacaccctcgcctaatccaacgatacctctccctacgaaaacctcccctacgcgcaccctcgcctaatccaacgatacctctccctacgaaaacctcccctacgcgcaccctcgcctaatccaacgatacctctccctacgaaaacctcccctacgcgcaccctcgcctaatccaacgatacctctccctacgaaaacctcccctacgcgcaccctcgcctaatccaacgatacctctccctacgaaaacctctcctacgcgcaccctcgcctaatccaacgatacctctccctacgaaaacctctcctacgaacaaccgtacctaacccaacgacatctctccctaacgtcaacaactttcctctccgttcccctccgccccgtaatatcgtcacttctcg

SEQ ID NO: 33059 - DNA, 601 bp, Artificial Sequence
  chemically treated genomic DNA (Homo sapiens) CpG-island No: 33059
gtttggtttagcggtatttttttttgcggaggttttttttgcgggtattcgtgtttggtttagcggtatcgttttttgcggaggttttttttgcgcgtattttcgtttgatttagcggtatttttttttgcggaggttttttttgcgcgtattttcgtttgatttagcggtatttttttttgcggaggttttttttgcgggtattttcgtttgatttagcggtatttttttttgcggaggttttttttgcgcgtattttcgtttgatttagcggtatttttttttgcggaggttttttttgcgcgtattttcgtttgatttagcggtatttttttttgcggaggttttttttgcgcgtattttcgtttgatttagcggtatttttttttgcggaggttttttttgcgcgtattttcgtttgatttagcggtatttttttttgcggaggttttttttgcgcgtattttcgtttgatttagcggtatttttttttgcggaggttttttttgcgggtagtcgtgtttggtttagcggtatttttttttggcgttagtagttttttttttcgttttttttcgtttcgtggtgtcgttatttttcg

SEQ ID NO: 33060 - DNA, 601 bp, Artificial Sequence
  chemically treated genomic DNA (Homo sapiens) CpG-island No: 33060
cgaaaaataacgacaccacgaaacgaaaaaaaacgaaaaaaaaaactactaacgccaaaaaaaaataccgctaaaccaaacacgactacccgcaaaaaaaacctccgcaaaaaaaaataccgctaaatcaaacgaaaatacgcgcaaaaaaaacctccgcaaaaaaaaataccgctaaatcaaacgaaaatacgcgcaaaaaaaacctccgcaaaaaaaaataccgctaaatcaaacgaaaatacgcgcaaaaaaaacctccgcaaaaaaaaataccgctaaatcaaacgaaaatacgcgcaaaaaaaacctccgcaaaaaaaaataccgctaaatcaaacgaaaatacgcgcaaaaaaaacctccgcaaaaaaaaataccgctaaatcaaacgaaaatacccgcaaaaaaaacctccgcaaaaaaaaataccgctaaatcaaacgaaaatacgcgcaaaaaaaacctccgcaaaaaaaaataccgctaaatcaaacgaaaatacgcgcaaaaaaaacctccgcaaaaaacgataccgctaaaccaaacacgaatacccgcaaaaaaaacctccgcaaaaaaaaataccgctaaaccaaac

SEQ ID NO: 33061 - DNA, 857 bp, Artificial Sequence
  chemically treated genomic DNA (Homo sapiens) CpG-island No: 33061
tttatagaatttagagtgtagggagatatataggtgtgtatcgtgtggacgcgttcgtagaatttagagtgtagggagatacgtaggtgtgtatcgtgtggacgcgatcgtagaatttagagtgtggggagacgtgtaggcgtgtatcgtgtggacgcgttcgtagaatttagagtgtggggagacgtgtaggcgtgtatcgtgtggacgcgttcgtagaatttagagtgtagggagacgtgtaggtatgtatcgtgtagacgcgtttttagaatttagagtgtggggaaaagtgtaggcgtgtattatgtggacgcgttcgtagaatttagagtgtagggaaacgtgtaggcgtgtatcgtgtagacgcgttcgtagaatttaaagtgtggggagacgtgtaggcgtgtatcgtgtggatacgttcgtagaatttagagtgtggggagacgtgtaggcgtgtatcgtgtggacgcgttcgtagaatttagagtgtggggagacgtgtaggcgtgtatcgtgtggacgcgttcgtagaatttagagtgtggggagacgtgtaggcgtgtatcgtgtggacgcgttcgtagaatttagagtgtggggagacgtgtaggcgtgtatcgtgtggacgcgttcgtagaatttagagtgtggggagacgtgtagacgtgtatcgtgtggacgcgttcgtagaatttagagtgtggggagacgtgtaggcgtgtatcgtgtagacgcgtttatataatttagagtgtacggagatatgtaggtgtgtatcgtgtagatgcgtttgtagaatttagagtgtggggagacgtataggttaaacggtttggggaaagaggagtagg

SEQ ID NO: 33062 - DNA, 857 bp, Artificial Sequence
  chemically treated genomic DNA (Homo sapiens) CpG-island No: 33062
cctactcctctttccccaaaccgtttaacctatacgtctccccacactctaaattctacaaacgcatctacacgatacacacctacatatctccgtacactctaaattatataaacgcgtctacacgatacacgcctacacgtctccccacactctaaattctacgaacgcgtccacacgatacacgtctacacgtctccccacactctaaattctacgaacgcgtccacacgatacacgcctacacgtctccccacactctaaattctacgaacgcgtccacacgatacacgcctacacgtctccccacactctaaattctacgaacgcgtccacacgatacacgcctacacgtctccccacactctaaattctacgaacgcgtccacacgatacacgcctacacgtctccccacactctaaattctacgaacgtatccacacgatacacgcctacacgtctccccacactttaaattctacgaacgcgtctacacgatacacgcctacacgtttccctacactctaaattctacgaacgcgtccacataatacacgcctacacttttccccacactctaaattctaaaaacgcgtctacacgatacatacctacacgtctccctacactctaaattctacgaacgcgtccacacgatacacgcctacacgtctccccacactctaaattctacgaacgcgtccacacgatacacgcctacacgtctccccacactctaaattctacgatcgcgtccacacgatacacacctacgtatctccctacactctaaattctacgaacgcgtccacacgatacacacctatatatctccctacactctaaattctataaa

SEQ ID NO: 33063 - DNA, 857 bp, Artificial Sequence
  chemically treated genomic DNA (Homo sapiens) CpG-island No: 33063
tttgtttttttttttttaggtcgtttggtttgtacgtttttttatattttgggttttgtaagcgtatttatacggtgtatatttgtatgttttcgtatattttggattgtgtgagcgcgtttatacggtgtacgtttgtacgtttttttatattttggattttgcgagcgcgtttatacggtgtacgtttgtacgtttttttatattttggattttgcgagcgcgtttatacggtgtacgtttgtacgtttttttatattttggattttgcgagcgcgtttatacggtgtacgtttgtacgtttttttatattttggattttgcgagcgcgtttatacggtgtacgtttgtacgtttttttatattttggattttgcgagcgcgtttatacggtgtacgtttgtacgtttttttatattttggattttgcgagcgtgtttatacggtgtacgtttgtacgtttttttatattttggattttgcgagcgcgtttatacggtgtacgtttgtacgtttttttatattttggattttgcgagcgcgtttatatggtgtacgtttgtatttttttttatattttggattttgggagcgcgtttatacggtatatgtttgtacgtttttttatattttggattttgcgagcgcgtttatacggtgtacgtttgtacgtttttttatattttggattttgcgagcgcgtttatacggtgtacgtttgtacgtttttttatattttggattttgcgatcgcgtttatacggtgtatatttgcgtgtttttttatattttggattttgcgagcgcgtttatacggtgtatatttgtatgtttttttatattttggattttgtgag

SEQ ID NO: 33064 - DNA, 857 bp, Artificial Sequence
  chemically treated genomic DNA (Homo sapiens) CpG-island No: 33064
ctcacaaaatccaaaatataaaaaaacatacaaatatacaccgtataaacgcgctcgcaaaatccaaaatataaaaaaacacgcaaatatacaccgtataaacgcgatcgcaaaatccaaaatataaaaaaacgtacaaacgtacaccgtataaacgcgctcgcaaaatccaaaatataaaaaaacgtacaaacgtacaccgtataaacgcgctcgcaaaatccaaaatataaaaaaacgtacaaacatataccgtataaacgcgctcccaaaatccaaaatataaaaaaaaatacaaacgtacaccatataaacgcgctcgcaaaatccaaaatataaaaaaacgtacaaacgtacaccgtataaacgcgctcgcaaaatccaaaatataaaaaaacgtacaaacgtacaccgtataaacacgctcgcaaaatccaaaatataaaaaaacgtacaaacgtacaccgtataaacgcgctcgcaaaatccaaaatataaaaaaacgtacaaacgtacaccgtataaacgcgctcgcaaaatccaaaatataaaaaaacgtacaaacgtacaccgtataaacgcgctcgcaaaatccaaaatataaaaaaacgtacaaacgtacaccgtataaacgcgctcgcaaaatccaaaatataaaaaaacgtacaaacgtacaccgtataaacgcgctcgcaaaatccaaaatataaaaaaacgtacaaacgtacaccgtataaacgcgctcacacaatccaaaatatacgaaaacatacaaatatacaccgtataaatacgcttacaaaacccaaaatataaaaaaacgtacaaaccaaacgacctaaaaaaaaaaaaacaaa

SEQ ID NO: 33065 - DNA, 885 bp, Artificial Sequence
  chemically treated genomic DNA (Homo sapiens) CpG-island No: 33065
tttcgcgattttttttttatggcgttagacgattcggagaagttgagtcgtcgtagttatgatttttatacgttgtgattcgaggtttacggggttcgcgtttgtttttttttttcgttatcgggttttttgttattaaagttttcgtgtttcgttttttttttttggtttattttttgggcgttattttcgggttcgtagggtgttgggcgttgcggttttcgaggtgcggggagtagttgggggtttgcgagttttagtttagtaaggtgcgatttcggggagcgaggcggtagtttcggtcgcggtttgagcgtagggcgttgcggggcgggggttttcgggttggggcgacgtggttagtttagttttgtcgaggggtggggttggttttggggttcgttggtttcgcgtcgtcgcggagagagcgcgttcgggttatttcggttggaaggtattttcggaatgcggcggtttagtattcgttttttcgggaatttttcgggggagtcgttgggagggattcggttttcgggttgggtcggtcgggtttcgggttttgagcggtgggattagaggttttagtttcgtcgatttgtagacgtgagatcgggtatatttgagcggcggcggggcggtcgtggttatattcggggcgacgtgtttgagttatttcgtttcgttagcgtttgttagtttagttagttcgtttagtttttcgcgttcgagattcgtttttagttttttattttcgttcgggtcgcgcgagtttcgcgggggcgggggcggggcgttaaggggcggggttgttttttaaagggtttcgggtcgttgtttttaggttattttttgggggcggagaggattttagcggttgcggcgata

SEQ ID NO: 33066 - DNA, 885 bp, Artificial Sequence
  chemically treated genomic DNA (Homo sapiens) CpG-island No: 33066
tatcgccgcaaccgctaaaatcctctccgcccccaaaaaataacctaaaaacaacgacccgaaaccctttaaaaaacaaccccgccccttaacgccccgcccccgcccccgcgaaactcgcgcgacccgaacgaaaataaaaaactaaaaacgaatctcgaacgcgaaaaactaaacgaactaactaaactaacaaacgctaacgaaacgaaataactcaaacacgtcgccccgaatataaccacgaccgccccgccgccgctcaaatatacccgatctcacgtctacaaatcgacgaaactaaaacctctaatcccaccgctcaaaacccgaaacccgaccgacccaacccgaaaaccgaatccctcccaacgactcccccgaaaaattcccgaaaaaacgaatactaaaccgccgcattccgaaaataccttccaaccgaaataacccgaacgcgctctctccgcgacgacgcgaaaccaacgaaccccaaaaccaaccccacccctcgacaaaactaaactaaccacgtcgccccaacccgaaaacccccgccccgcaacgccctacgctcaaaccgcgaccgaaactaccgcctcgctccccgaaatcgcaccttactaaactaaaactcgcaaacccccaactactccccgcacctcgaaaaccgcaacgcccaacaccctacgaacccgaaaataacgcccaaaaaataaaccaaaaaaaaaaaacgaaacacgaaaactttaataacaaaaaacccgataacgaaaaaaaaaaacaaacgcgaaccccgtaaacctcgaatcacaacgtataaaaatcataactacgacgactcaacttctccgaatcgtctaacgccataaaaaaaaaatcgcgaaa

SEQ ID NO: 33067 - DNA, 885 bp, Artificial Sequence
  chemically treated genomic DNA (Homo sapiens) CpG-island No: 33067
tgtcgtcgtagtcgttgaggtttttttcgtttttaggaagtggtttaagggtagcggttcggggttttttaagagatagtttcgttttttggcgtttcgttttcgttttcgcgaggttcgcgcggttcgggcggaggtgggaggttggaggcgagtttcggacgcgagagattgggcggattggttggattggtagacgttggcgggacggggtgatttaggtacgtcgtttcggatgtggttacgatcgtttcgtcgtcgtttaggtgtgttcgattttacgtttgtaagtcggcggggttggagtttttaattttatcgtttagagttcgaggttcggtcggtttagttcgggagtcgagttttttttagcggttttttcggggaattttcgagggggcgggtgttgagtcgtcgtatttcggggatgttttttagtcggggtggttcgggcgcgtttttttcgcggcggcgcggggttagcgagttttagggttagttttatttttcggtaggattgggttggttacgtcgttttagttcgagagttttcgtttcgtagcgttttgcgtttaggtcgcggtcgaagttgtcgtttcgtttttcggagtcgtattttgttggattggagttcgtaaatttttagttgtttttcgtatttcgggagtcgtagcgtttaatattttacgggttcgaaggtggcgtttaagaagtgaattagaagggaagagcgaagtacggaggttttaatggtagagggttcggtggcggggaagggaggtaggcgcgggtttcgtgggtttcgggttatagcgtgtggaggttatgattgcgacggtttagttttttcgggtcgtttgacgttatgagggagaagtcgcggaa

SEQ ID NO: 33068 - DNA, 885 bp, Artificial Sequence
  chemically treated genomic DNA (Homo sapiens) CpG-island No: 33068
ttccgcgacttctccctcataacgtcaaacgacccgaaaaaactaaaccgtcgcaatcataacctccacacgctataacccgaaacccacgaaacccgcgcctacctcccttccccgccaccgaaccctctaccattaaaacctccgtacttcgctcttcccttctaattcacttcttaaacgccaccttcgaacccgtaaaatattaaacgctacgactcccgaaatacgaaaaacaactaaaaatttacgaactccaatccaacaaaatacgactccgaaaaacgaaacgacaacttcgaccgcgacctaaacgcaaaacgctacgaaacgaaaactctcgaactaaaacgacgtaaccaacccaatcctaccgaaaaataaaactaaccctaaaactcgctaaccccgcgccgccgcgaaaaaaacgcgcccgaaccaccccgactaaaaaacatccccgaaatacgacgactcaacacccgccccctcgaaaattccccgaaaaaaccgctaaaaaaaactcgactcccgaactaaaccgaccgaacctcgaactctaaacgataaaattaaaaactccaaccccgccgacttacaaacgtaaaatcgaacacacctaaacgacgacgaaacgatcgtaaccacatccgaaacgacgtacctaaatcaccccgtcccgccaacgtctaccaatccaaccaatccgcccaatctctcgcgtccgaaactcgcctccaacctcccacctccgcccgaaccgcgcgaacctcgcgaaaacgaaaacgaaacgccaaaaaacgaaactatctcttaaaaaaccccgaaccgctacccttaaaccacttcctaaaaacgaaaaaaacctcaacgactacgacgaca

SEQ ID NO: 33069 - DNA, 578 bp, Artificial Sequence
  chemically treated genomic DNA (Homo sapiens) CpG-island No: 33069
gttatttttcgttttttttttagatagaaacggtttcggggcgcggggtacggggcgcgtcgagggtcgaagggcggtgcggttggttagagtgggtcgtcgtttgttgtttttaattttatcggtcgattagtcgaagttataaattcggtggtttcgatagcgggtttagagtagggacgtcggttggtatgtgcgtcgcgcggggtttcggattatcgtttcggttttttttcgttgtatttttttatttttttttttatttaggatagttttatcgaaatttcggcgtttcgggcggatttttgagcggagagggcggggcgggagtaggaaggtcgcgttgtcgggaggggcggggatttgttcgtttggtttaggttttggatatttgggcgtttttggttttcggtagaatacggcgtcggatagaagaggtttagcggttagtgggcgcggtcggcggtacgaaggttggagtcgtttgtatttttagtaatgacggcgtttttttttttcgttcgtagcggttttgtaggttattcgagttttaatggtggtttttttggtgttgggtt

SEQ ID NO: 33070 - DNA, 578 bp, Artificial Sequence
  chemically treated genomic DNA (Homo sapiens) CpG-island No: 33070
aacccaacaccaaaaaaaccaccattaaaactcgaataacctacaaaaccgctacgaacgaaaaaaaaaaacgccgtcattactaaaaatacaaacgactccaaccttcgtaccgccgaccgcgcccactaaccgctaaacctcttctatccgacgccgtattctaccgaaaaccaaaaacgcccaaatatccaaaacctaaaccaaacgaacaaatccccgcccctcccgacaacgcgaccttcctactcccgccccgccctctccgctcaaaaatccgcccgaaacgccgaaatttcgataaaactatcctaaataaaaaaaaaaataaaaaaatacaacgaaaaaaaaccgaaacgataatccgaaaccccgcgcgacgcacataccaaccgacgtccctactctaaacccgctatcgaaaccaccgaatttataacttcgactaatcgaccgataaaattaaaaacaacaaacgacgacccactctaaccaaccgcaccgcccttcgaccctcgacgcgccccgtaccccgcgccccgaaaccgtttctatctaaaaaaaaaacgaaaaataac

SEQ ID NO: 33071 - DNA, 578 bp, Artificial Sequence
  chemically treated genomic DNA (Homo sapiens) CpG-island No: 33071
agtttagtattagggagattattattagggttcgagtggtttgtaaggtcgttgcgggcgaggggaaagggcgtcgttattgttggaaatgtaggcggttttagttttcgtgtcgtcggtcgcgtttattaatcgttggattttttttgttcggcgtcgtgttttgtcgagggttaggggcgtttaggtgtttaagatttgggttaagcgggtaggttttcgtttttttcgatagcgcggtttttttgttttcgtttcgtttttttcgtttaaggattcgttcggggcgtcggggtttcggtgaaattgttttggatagggggaagggtgaaagggtgtagcgaagagaagtcgagacggtggttcgaagtttcgcgcggcgtatatgttagtcggcgtttttgttttgagttcgttatcgaggttatcgggtttgtggtttcggttaatcggtcgataagattagaggtagtaggcggcggtttattttgattagtcgtatcgtttttcggttttcggcgcgtttcgtgtttcgcgtttcggggtcgtttttgtttgagaaaaggacgggagatgat

SEQ ID NO: 33072 - DNA, 578 bp, Artificial Sequence
  chemically treated genomic DNA (Homo sapiens) CpG-island No: 33072
atcatctcccgtccttttctcaaacaaaaacgaccccgaaacgcgaaacacgaaacgcgccgaaaaccgaaaaacgatacgactaatcaaaataaaccgccgcctactacctctaatcttatcgaccgattaaccgaaaccacaaacccgataacctcgataacgaactcaaaacaaaaacgccgactaacatatacgccgcgcgaaacttcgaaccaccgtctcgacttctcttcgctacaccctttcacccttccccctatccaaaacaatttcaccgaaaccccgacgccccgaacgaatccttaaacgaaaaaaacgaaacgaaaacaaaaaaaccgcgctatcgaaaaaaacgaaaacctacccgcttaacccaaatcttaaacacctaaacgcccctaaccctcgacaaaacacgacgccgaacaaaaaaaatccaacgattaataaacgcgaccgacgacacgaaaactaaaaccgcctacatttccaacaataacgacgccctttcccctcgcccgcaacgaccttacaaaccactcgaaccctaataataatctccctaatactaaact

SEQ ID NO: 33073 - DNA, 726 bp, Artificial Sequence
  chemically treated genomic DNA (Homo sapiens) CpG-island No: 33073
tcggtttttttttcgcgcgttttttttcggagttcgcgttttttggggtgttattaggtgggttcgcgaaattaaagagagttgaggatgttaaggttagtttgtagtcgtcgtcgtttacgttttcggcgacggggtttgtacgtcgcgggtattcgtcgtagcgcgttttcgtttttttttatttgtgaggtcggtcgtcgtcgtgatttcggaaggattcggtcgggtcgtcggatgtgacgtaggggttagggcgcgtcggagtcgttgagaaagcgtagagaaggcgggtaggaagggtagtcgttcgcgttggttgggtagggagcggtagtagcgagtcggggatttcggcgtcgttcgcgcgcggtgggattggggttgcggtttcggtcgggtggcgggtttttgggatacgtgatcggggcggcgagcgggtcgggcggacgggttttcgtttgggtcgggcgcggttttttttgagcgttcgttttttcgtaggtttcgtttgaggtttggtagttagagatagtcgggcgtttacggttcgagcgtttacggtagtattatgttcgtatttttggagcgttttaagttttttaacgttatggttagggcgttgtatcggtatattatgatggagcgggagcgtaagcggtagggtgagtcggggttatagtagggggacgtacggtttagaatggtttttgtattttaaggttg

SEQ ID NO: 33074 - DNA, 726 bp, Artificial Sequence
  chemically treated genomic DNA (Homo sapiens) CpG-island No: 33074
caaccttaaaatacaaaaaccattctaaaccgtacgtccccctactataaccccgactcaccctaccgcttacgctcccgctccatcataatataccgatacaacgccctaaccataacgttaaaaaacttaaaacgctccaaaaatacgaacataatactaccgtaaacgctcgaaccgtaaacgcccgactatctctaactaccaaacctcaaacgaaacctacgaaaaaacgaacgctcaaaaaaaaccgcgcccgacccaaacgaaaacccgtccgcccgacccgctcgccgccccgatcacgtatcccaaaaacccgccacccgaccgaaaccgcaaccccaatcccaccgcgcgcgaacgacgccgaaatccccgactcgctactaccgctccctacccaaccaacgcgaacgactacccttcctacccgccttctctacgctttctcaacgactccgacgcgccctaacccctacgtcacatccgacgacccgaccgaatccttccgaaatcacgacgacgaccgacctcacaaataaaaaaaaacgaaaacgcgctacgacgaatacccgcgacgtacaaaccccgtcgccgaaaacgtaaacgacgacgactacaaactaaccttaacatcctcaactctctttaatttcgcgaacccacctaataacaccccaaaaaacgcgaactccgaaaaaaaacgcgcgaaaaaaaaaccga

SEQ ID NO: 33075 - DNA, 726 bp, Artificial Sequence
  chemically treated genomic DNA (Homo sapiens) CpG-island No: 33075
tagttttgaggtataggagttattttgggtcgtgcgtttttttgttatggtttcggtttattttgtcgtttgcgttttcgttttattataatgtgtcggtgtagcgttttggttatggcgttggaaagtttggggcgttttaggagtgcgggtatggtgttgtcgtgggcgttcgggtcgtgggcgttcggttgtttttgattgttagattttagacggggtttgcggggaggcgggcgtttagagggggtcgcgttcggtttaggcggaagttcgttcgttcggttcgttcgtcgtttcggttacgtgttttaggagttcgttattcggtcgggatcgtagttttagttttatcgcgcgcgggcggcgtcggggttttcggttcgttgttgtcgttttttgtttagttagcgcggacgattgttttttttattcgttttttttgcgtttttttagcggtttcgacgcgttttggtttttgcgttatattcggcggttcggtcgagttttttcggagttacggcggcggtcgattttataggtgaaagaaggcggaagcgcgttgcgacgggtgttcgcggcgtataaatttcgtcgtcgggaacgtgagcgacgacggttgtagattggttttggtatttttagttttttttaatttcgcgggtttatttggtggtattttaggggacgcgggtttcggagaggggcgcgcgagagagaggtcga

SEQ ID NO: 33076 - DNA, 726 bp, Artificial Sequence
  chemically treated genomic DNA (Homo sapiens) CpG-island No: 33076
tcgacctctctctcgcgcgcccctctccgaaacccgcgtcccctaaaataccaccaaataaacccgcgaaattaaaaaaaactaaaaataccaaaaccaatctacaaccgtcgtcgctcacgttcccgacgacgaaatttatacgccgcgaacacccgtcgcaacgcgcttccgccttctttcacctataaaatcgaccgccgccgtaactccgaaaaaactcgaccgaaccgccgaatataacgcaaaaaccaaaacgcgtcgaaaccgctaaaaaaacgcaaaaaaaacgaataaaaaaaacaatcgtccgcgctaactaaacaaaaaacgacaacaacgaaccgaaaaccccgacgccgcccgcgcgcgataaaactaaaactacgatcccgaccgaataacgaactcctaaaacacgtaaccgaaacgacgaacgaaccgaacgaacgaacttccgcctaaaccgaacgcgaccccctctaaacgcccgcctccccgcaaaccccgtctaaaatctaacaatcaaaaacaaccgaacgcccacgacccgaacgcccacgacaacaccatacccgcactcctaaaacgccccaaactttccaacgccataaccaaaacgctacaccgacacattataataaaacgaaaacgcaaacgacaaaataaaccgaaaccataacaaaaaaacgcacgacccaaaataactcctatacctcaaaacta

SEQ ID NO: 33077 - DNA, 894 bp, Artificial Sequence
  chemically treated genomic DNA (Homo sapiens) CpG-island No: 33077
gcggcgtggtttttttaacgtttggcgtattgacggcgtttgaggtggaaggggttgtttaggatttcgaatacgtatgcgttttgagatttaggcgttttttttagagggtgtggagtgtagggttttttattgcgtaggcgtaaggattgttcggtaggacgagcggtttattaaggggagggaagatgaggttgaagagattaaaaaatcgggtgcgtttgcgcgttgtagattagttgaaaacgtttagggtttgtgaggggcggggttacgtatgcgcgttattggacgggtcggtgggagggagggtggagatgggtagggtgtgtgcgtttgcgtagtgcgggggtggagggcggaggagatagatagtacgtttgcgcggttgttatagggttgtttggttggttagtggggagtcggcgtttgcgtattaagattcgtgtgtagtagcggcggcggcggtagaggcggcggcggcggcggtagcgggttcggaggtagcggttgggttcgcggcgagcggacggggtcgagttagtgcgttcgcgcgaggtgagagcgggtagggcgcgtgtgcgcggtattttggtttgggttcgggagaagatggaattgcgcgggggtcggggagggggtagaggggagcggcggtcgtcgtcgtacgggttcggttagagagcggcgcgaggtgaggagaggcgcgggcgcgcgtttcggttggcgcgcggggtgacggttggggttggttcggtgacgttggagcgacgtagggcgggggacggcgagtcgcgaggtagttacgcggtgagaggtcgttaggcggttacgtcggggcgagggttaggggttagatcggtttatcggggtaagggtatttgggtcgttgag

SEQ ID NO: 33078 - DNA, 894 bp, Artificial Sequence
  chemically treated genomic DNA (Homo sapiens) CpG-island No: 33078
ctcaacgacccaaatacccttaccccgataaaccgatctaacccctaaccctcgccccgacgtaaccgcctaacgacctctcaccgcgtaactacctcgcgactcgccgtcccccgccctacgtcgctccaacgtcaccgaaccaaccccaaccgtcaccccgcgcgccaaccgaaacgcgcgcccgcgcctctcctcacctcgcgccgctctctaaccgaacccgtacgacgacgaccgccgctcccctctaccccctccccgacccccgcgcaattccatcttctcccgaacccaaaccaaaataccgcgcacacgcgccctacccgctctcacctcgcgcgaacgcactaactcgaccccgtccgctcgccgcgaacccaaccgctacctccgaacccgctaccgccgccgccgccgcctctaccgccgccgccgctactacacacgaatcttaatacgcaaacgccgactccccactaaccaaccaaacaaccctataacaaccgcgcaaacgtactatctatctcctccgccctccacccccgcactacgcaaacgcacacaccctacccatctccaccctccctcccaccgacccgtccaataacgcgcatacgtaaccccgcccctcacaaaccctaaacgttttcaactaatctacaacgcgcaaacgcacccgattttttaatctcttcaacctcatcttccctccccttaataaaccgctcgtcctaccgaacaatccttacgcctacgcaataaaaaaccctacactccacaccctctaaaaaaaacgcctaaatctcaaaacgcatacgtattcgaaatcctaaacaaccccttccacctcaaacgccgtcaatacgccaaacgttaaaaaaaccacgccgc

SEQ ID NO: 33079 - DNA, 894 bp, Artificial Sequence
  chemically treated genomic DNA (Homo sapiens) CpG-island No: 33079
tttaacggtttaggtatttttgtttcggtgggtcgatttggtttttggttttcgtttcggcgtggtcgtttggcggttttttatcgcgtggttgtttcgcggttcgtcgtttttcgttttgcgtcgttttaacgttatcgggttaattttaatcgttatttcgcgcgttaatcggggcgcgcgttcgcgtttttttttatttcgcgtcgttttttggtcgaattcgtgcggcggcggtcgtcgtttttttttgtttttttttcgattttcgcgtagttttattttttttcgggtttaagttaaggtatcgcgtatacgcgttttgttcgtttttatttcgcgcgaacgtattgattcgatttcgttcgttcgtcgcgagtttaatcgttgttttcgagttcgttgtcgtcgtcgtcgtcgtttttatcgtcgtcgtcgttgttgtatacgggttttagtacgtaggcgtcgattttttattgattaattaagtagttttatgatagtcgcgtaagcgtgttatttatttttttcgttttttattttcgtattgcgtaagcgtatatattttatttatttttatttttttttttatcgattcgtttaatgacgcgtatacgtgatttcgttttttataaattttgagcgtttttaattaatttgtaacgcgtaggcgtattcggttttttaatttttttaattttattttttttttttttgatagatcgttcgttttatcgggtagtttttgcgtttgcgtaataaggagttttgtattttatattttttaaaggaaacgtttgggttttagaacgtatgcgtgttcggaattttaaataattttttttattttagacgtcgttagtacgttaggcgttgaaaagattacgtcgt

SEQ ID NO: 33080 - DNA, 894 bp, Artificial Sequence
  chemically treated genomic DNA (Homo sapiens) CpG-island No: 33080
acgacgtaatcttttcaacgcctaacgtactaacgacgtctaaaataaaaaaaattatttaaaattccgaacacgcatacgttctaaaacccaaacgtttcctttaaaaaatataaaatacaaaactccttattacgcaaacgcaaaaactacccgataaaacgaacgatctatcaaaaaaaaaaaaaataaaattaaaaaaattaaaaaaccgaatacgcctacgcgttacaaattaattaaaaacgctcaaaatttataaaaaacgaaatcacgtatacgcgtcattaaacgaatcgataaaaaaaaaaataaaaataaataaaatatatacgcttacgcaatacgaaaataaaaaacgaaaaaaataaataacacgcttacgcgactatcataaaactacttaattaatcaataaaaaatcgacgcctacgtactaaaacccgtatacaacaacgacgacgacgataaaaacgacgacgacgacgacaacgaactcgaaaacaacgattaaactcgcgacgaacgaacgaaatcgaatcaatacgttcgcgcgaaataaaaacgaacaaaacgcgtatacgcgataccttaacttaaacccgaaaaaaaataaaactacgcgaaaatcgaaaaaaaaacaaaaaaaaacgacgaccgccgccgcacgaattcgaccaaaaaacgacgcgaaataaaaaaaaacgcgaacgcgcgccccgattaacgcgcgaaataacgattaaaattaacccgataacgttaaaacgacgcaaaacgaaaaacgacgaaccgcgaaacaaccacgcgataaaaaaccgccaaacgaccacgccgaaacgaaaaccaaaaaccaaatcgacccaccgaaacaaaaatacctaaaccgttaaa

SEQ ID NO: 33081 - DNA, 553 bp, Artificial Sequence
  chemically treated genomic DNA (Homo sapiens) CpG-island No: 33081
cgatacggtatatatatatatatattcgtatatattttcgagcgagtgtatattcgtatttttattcgatagtcggttagggatagttatttttaagattaatatcgtagtttgaattgtttcggtaaattttttttcgggttcgacggatgtgcgttttagatgtgttgatatatgttcgatgtttcgttgttttggaggttttttcgttcgcgtgtttttttttttcgtattagcggcggaaatcgtattagtagcggcggcggcggcggcggcggtagtagttatttgaagttattaatattgggtttttttagtaaaaacgagatttcgattcgtttggcgttttaagaagatatagacgatagtttttcgtcgggttgcgtcgtgtaatttcgggttttcgggagcgcgtagttcgttggttaagtttaggtagttcgcggtaagttgttttcgaagttcgttttttttatcggggtatggtcggagggtggttgttgcgtttcggggtagttttttttttgttttcggggggcggggaaggagtaga

SEQ ID NO: 33082 - DNA, 553 bp, Artificial Sequence
  chemically treated genomic DNA (Homo sapiens) CpG-island No: 33082
tctactccttccccgccccccgaaaacaaaaaaaaaactaccccgaaacgcaacaaccaccctccgaccataccccgataaaaaaaacgaacttcgaaaacaacttaccgcgaactacctaaacttaaccaacgaactacgcgctcccgaaaacccgaaattacacgacgcaacccgacgaaaaactatcgtctatatcttcttaaaacgccaaacgaatcgaaatctcgtttttactaaaaaaacccaatattaataacttcaaataactactaccgccgccgccgccgccgccgctactaatacgatttccgccgctaatacgaaaaaaaaaaacacgcgaacgaaaaaacctccaaaacaacgaaacatcgaacatatatcaacacatctaaaacgcacatccgtcgaacccgaaaaaaaatttaccgaaacaattcaaactacgatattaatcttaaaaataactatccctaaccgactatcgaataaaaatacgaatatacactcgctcgaaaatatatacgaatatatatatatatataccgtatcg

SEQ ID NO: 33083 - DNA, 553 bp, Artificial Sequence
  chemically treated genomic DNA (Homo sapiens) CpG-island No: 33083
tttgtttttttttcgtttttcggaagtaggagaagaattgtttcggagcgtagtagttatttttcgattatgtttcggtgaggggggcggatttcgagggtaatttgtcgcggattgtttgggtttagttagcgagttacgcgttttcgggagttcggaattgtacggcgtagttcggcggggggttatcgtttatgtttttttggggcgttagacgaatcggggtttcgtttttgttggaagagtttagtgttggtggttttaggtggttgttgtcgtcgtcgtcgtcgtcgtcgttgttagtgcggttttcgtcgttggtgcgaagagaagagatacgcgagcggggagatttttaaggtagcgaggtatcggatatgtgttagtatatttggggcgtatattcgtcgagttcgaggggagatttgtcggaataatttaaattgcgatattgattttgggggtgattgtttttggtcggttgtcgggtgggagtgcgagtgtgtattcgttcggaagtgtgtgcgagtgtgtatgtgtgtgtgtcgtgtcg

SEQ ID NO: 33084 - DNA, 553 bp, Artificial Sequence
  chemically treated genomic DNA (Homo sapiens) CpG-island No: 33084
cgacacgacacacacacatacacactcgcacacacttccgaacgaatacacactcgcactcccacccgacaaccgaccaaaaacaatcacccccaaaatcaatatcgcaatttaaattattccgacaaatctcccctcgaactcgacgaatatacgccccaaatatactaacacatatccgatacctcgctaccttaaaaatctccccgctcgcgtatctcttctcttcgcaccaacgacgaaaaccgcactaacaacgacgacgacgacgacgacgacaacaaccacctaaaaccaccaacactaaactcttccaacaaaaacgaaaccccgattcgtctaacgccccaaaaaaacataaacgataaccccccgccgaactacgccgtacaattccgaactcccgaaaacgcgtaactcgctaactaaacccaaacaatccgcgacaaattaccctcgaaatccgcccccctcaccgaaacataatcgaaaaataactactacgctccgaaacaattcttctcctacttccgaaaaacgaaaaaaaaacaaa

SEQ ID NO: 33085 - DNA, 1098 bp, Artificial Sequence
  chemically treated genomic DNA (Homo sapiens) CpG-island No: 33085
aaaagggcgattcgagtttttcgatacggaaaacgggattttaggttttggggcgtacgggtagagtgattttcggcgcgggttgtttatttgcgcgggagcgtacgagatataaaagtatacgttcgtttatattggtaatcgcgcgcgcgcgcgttcgcgtttgtatttttgtttttttgggtagtatttcgtttaattggttttgaaattgaggatgggaaagttaaaagttggttgtcgcgcgagttcggttcgttcggtcgttggcgatttttggaatgtatggtattagtgtttagtatacgttcggcgttcgggtcgagattttgcgggttttgatacgcgtacgagcgtcgcgtcgttatcgcggggacgtaggttatagcgttagcgggcggcgcgggcgtgcgcgttcgttgtttttatttttttttttcgtgtttcgcggtcgagtatgcgtagtgcgcgcgaggagcgggcgggttttttaaggcgggcgttgcggagcgcgcgtcggtttcgttcgcggtttcgtttcgacgggaggtgagcgttttttgttcggtcgttttttgtgcgtttttcggggtgggggtggcggtagagggaggttgcgacggtatttgtcggcgaggacggcgagttgcgttttttttcggattttttagggatcgttttcgagtgcgagagagaaggaaggaggatttgaggggcgggtcggggcggtgcgcgttggtttttttcgcgcgtattttttttcgtcgtttattagggcggacgttttttcgggtttcgcgcgttttgttgttttttgtttcgggagtcgtcgggttcgtcgcgttttttgcgtttcgttgcggatcgtttcgtagagcggttgggttcgcggtttatagagtcgtttaagatttttatagagggacgtttttttaaaataatgaggttatgcggtcgtagtcgtatacgggttgattggggagatttcgtggtgtcgcggggcggtttcggggttcgaaggtagaggtttttttaggtgtgttttgtttgatttcggttataggaacgagcgttgtgggtttcggttttttattcgta

SEQ ID NO: 33086 - DNA, 1098 bp, Artificial Sequence
  chemically treated genomic DNA (Homo sapiens) CpG-island No: 33086
tacgaataaaaaaccgaaacccacaacgctcgttcctataaccgaaatcaaacaaaacacacctaaaaaaacctctaccttcgaaccccgaaaccgccccgcgacaccacgaaatctccccaatcaacccgtatacgactacgaccgcataacctcattattttaaaaaaacgtccctctataaaaatcttaaacgactctataaaccgcgaacccaaccgctctacgaaacgatccgcaacgaaacgcaaaaaacgcgacgaacccgacgactcccgaaacaaaaaacaacaaaacgcgcgaaacccgaaaaaacgtccgccctaataaacgacgaaaaaaaatacgcgcgaaaaaaaccaacgcgcaccgccccgacccgcccctcaaatcctccttccttctctctcgcactcgaaaacgatccctaaaaaatccgaaaaaaaacgcaactcgccgtcctcgccgacaaataccgtcgcaacctccctctaccgccacccccaccccgaaaaacgcacaaaaaacgaccgaacaaaaaacgctcacctcccgtcgaaacgaaaccgcgaacgaaaccgacgcgcgctccgcaacgcccgccttaaaaaacccgcccgctcctcgcgcgcactacgcatactcgaccgcgaaacacgaaaaaaaaaaataaaaacaacgaacgcgcacgcccgcgccgcccgctaacgctataacctacgtccccgcgataacgacgcgacgctcgtacgcgtatcaaaacccgcaaaatctcgacccgaacgccgaacgtatactaaacactaataccatacattccaaaaatcgccaacgaccgaacgaaccgaactcgcgcgacaaccaacttttaactttcccatcctcaatttcaaaaccaattaaacgaaatactacccaaaaaaacaaaaatacaaacgcgaacgcgcgcgcgcgcgattaccaatataaacgaacgtatacttttatatctcgtacgctcccgcgcaaataaacaacccgcgccgaaaatcactctacccgtacgccccaaaacctaaaatcccgttttccgtatcgaaaaactcgaatcgccctttt

SEQ ID NO: 33087 - DNA, 1098 bp, Artificial Sequence
  chemically treated genomic DNA (Homo sapiens) CpG-island No: 33087
tacgggtgagaaatcgaggtttatagcgttcgtttttgtagtcggggttaggtagggtatatttaggggagtttttgttttcgagtttcgggatcgtttcgcggtattacgagatttttttagttagttcgtgtgcggttgcggtcgtatggttttattgttttgggaagacgtttttttgtgaggattttgggcgattttatgaatcgcgggtttagtcgttttgcggaacgattcgtagcgggacgtaaagggcgcggcgagttcggcggttttcggaataaaggatagtagagcgcgcggggttcgaaggggcgttcgttttagtgggcggcggagggggatgcgcgcggagaggattagcgcgtatcgtttcggttcgttttttaaattttttttttttttttttcgtattcggagacggtttttgggagattcgggagggggcgtagttcgtcgttttcgtcggtaagtgtcgtcgtaatttttttttgtcgttatttttatttcgagaagcgtataaagagcggtcgggtagggagcgtttatttttcgtcggggcggggtcgcgggcggggtcggcgcgcgtttcgtagcgttcgttttaaagggttcgttcgtttttcgcgcgtattgcgtatgttcggtcgcggggtacggaggggagggatgggaatagcgggcgcgtacgttcgcgtcgttcgttggcgttgtggtttgcgttttcgcggtggcggcgcggcgttcgtgcgcgtgttagaattcgtagggtttcggttcgggcgtcgggcgtgtgttggatattggtgttatgtattttagaggtcgttagcggtcgggcgggtcgagttcgcgcggtagttagtttttagtttttttatttttagttttagggttagttgggcgaagtgttgtttaaggagatagaaatgtaggcgcgggcgcgcgcgcgcgcggttgttagtgtgggcgggcgtgtgtttttgtgtttcgtgcgttttcgcgtaggtggataattcgcgtcgggagttattttgttcgtgcgttttaagatttggagtttcgtttttcgtgtcggagggttcgggtcgttttttt

SEQ ID NO: 33088 - DNA, 1098 bp, Artificial Sequence
  chemically treated genomic DNA (Homo sapiens) CpG-island No: 33088
aaaaaaacgacccgaaccctccgacacgaaaaacgaaactccaaatcttaaaacgcacgaacaaaataactcccgacgcgaattatccacctacgcgaaaacgcacgaaacacaaaaacacacgcccgcccacactaacaaccgcgcgcgcgcgcgcccgcgcctacatttctatctccttaaacaacacttcgcccaactaaccctaaaactaaaaataaaaaaactaaaaactaactaccgcgcgaactcgacccgcccgaccgctaacgacctctaaaatacataacaccaatatccaacacacgcccgacgcccgaaccgaaaccctacgaattctaacacgcgcacgaacgccgcgccgccaccgcgaaaacgcaaaccacaacgccaacgaacgacgcgaacgtacgcgcccgctattcccatccctcccctccgtaccccgcgaccgaacatacgcaatacgcgcgaaaaacgaacgaaccctttaaaacgaacgctacgaaacgcgcgccgaccccgcccgcgaccccgccccgacgaaaaataaacgctccctacccgaccgctctttatacgcttctcgaaataaaaataacgacaaaaaaaaattacgacgacacttaccgacgaaaacgacgaactacgccccctcccgaatctcccaaaaaccgtctccgaatacgaaaaaaaaaaaaaaaaaatttaaaaaacgaaccgaaacgatacgcgctaatcctctccgcgcgcatccccctccgccgcccactaaaacgaacgccccttcgaaccccgcgcgctctactatcctttattccgaaaaccgccgaactcgccgcgccctttacgtcccgctacgaatcgttccgcaaaacgactaaacccgcgattcataaaatcgcccaaaatcctcacaaaaaaacgtcttcccaaaacaataaaaccatacgaccgcaaccgcacacgaactaactaaaaaaatctcgtaataccgcgaaacgatcccgaaactcgaaaacaaaaactcccctaaatataccctacctaaccccgactacaaaaacgaacgctataaacctcgatttctcacccgta

SEQ ID NO: 33089 - DNA, 1342 bp, Artificial Sequence
  chemically treated genomic DNA (Homo sapiens) CpG-island No: 33089
gtttgcgattaacgcggggatagttttcgtcgcgcgttatcgtcgtattttaggtatcgggtttttacgtagggacggcgtggattattttattttcgaatttcgaggttttggttaatattgaggttttttgtgtttcgaggtcgcgtttaatttttttcgcggcgtcggtttatatggtttcgttcgtcgcgggtcgcgttatttaggagatcgattcgtcgcggtcgcgtcggaggttacggagtttacgttttttagagagtttttattcgacggatttagaggttcggcggtcggtgtttaacggagttataagtttgaggatcgaggattggtcgaggggcgcgtttcgttcgttgttattcgcgggaggagtttcggaaggcggcgtatcgcgtcgtatatttagtttaagaattcgtttcgcgttattgtcgtcgttagggtcgcggagttaattagagtttaagtcgagggttacgttttgcgagcgttagttaatcggtgcggcggcgggtttattttgatttgtatgttcgacgattttttaattaatggtaatgtgattggcgtgaataatagttaattagaagttggaagaggcgtggtttcgggcgttttacgaggtgaagatgttgttggcggaatttgtaggagttagcgggattcgggggcgttaaagtcgtaggggtagggcgggaaggaagattcggcgcggggtataggattcggagttggagtttttaggtgagtatcggggagatttcggcggggcgcgttttttattaagttgtttcgggacggcggcggcgggtattcgcgaggttcgcgttgcggtaggcgtcgcggtttcgtttttattttttttttttcggttttgcgtttttgttttcgtcgttgttttattttttttttagtttttttatttttttttttatcgtttttttttttttatttttttttgtttttttttttttgttttttcgttcgttcgattttttagttcgtatttttgatttttgtttttgtcgtcgttttttttttcggtgtattttttttttatttttgttcgtttcggttttagtagtttcgttttttttttttttttattttttttttattttttttttcggtttttgcgtagttttatcggggcgttgttgttttcggttttttttatttttttttttgatcgttttttaaggtttattcgtcgttttcgttgtttgtttttgtgtcgtttcggtttttttttttatttttttattttgtttttagttttttcgattttttttcgcgggtacgtttttattattttattttgttttttaagattgtg

SEQ ID NO: 33090 - DNA, 1342 bp, Artificial Sequence
  chemically treated genomic DNA (Homo sapiens) CpG-island No: 33090
cacaatcttaaaaaacaaaataaaataataaaaacgtacccgcgaaaaaaaatcgaaaaaactaaaaacaaaataaaaaaataaaaaaaaaaaccgaaacgacacaaaaacaaacaacgaaaacgacgaataaaccttaaaaaacgatcaaaaaaaaaaataaaaaaaaccgaaaacaacaacgccccgataaaactacgcaaaaaccgaaaaaaaaaataaaaaaaaaataaaaaaaaaaaaaaaacgaaactactaaaaccgaaacgaacaaaaataaaaaaaaaatacaccgaaaaaaaaaacgacgacaaaaacaaaaatcaaaaatacgaactaaaaaatcgaacgaacgaaaaaacaaaaaaaaaaaaacaaaaaaaaataaaaaaaaaaaaacgataaaaaaaaaaataaaaaaactaaaaaaaaaataaaacaacgacgaaaacaaaaacgcaaaaccgaaaaaaaaaaaataaaaacgaaaccgcgacgcctaccgcaacgcgaacctcgcgaatacccgccgccgccgtcccgaaacaacttaataaaaaacgcgccccgccgaaatctccccgatactcacctaaaaactccaactccgaatcctataccccgcgccgaatcttccttcccgccctacccctacgactttaacgcccccgaatcccgctaactcctacaaattccgccaacaacatcttcacctcgtaaaacgcccgaaaccacgcctcttccaacttctaattaactattattcacgccaatcacattaccattaattaaaaaatcgtcgaacatacaaatcaaaataaacccgccgccgcaccgattaactaacgctcgcaaaacgtaaccctcgacttaaactctaattaactccgcgaccctaacgacgacaataacgcgaaacgaattcttaaactaaatatacgacgcgatacgccgccttccgaaactcctcccgcgaataacaacgaacgaaacgcgcccctcgaccaatcctcgatcctcaaacttataactccgttaaacaccgaccgccgaacctctaaatccgtcgaataaaaactctctaaaaaacgtaaactccgtaacctccgacgcgaccgcgacgaatcgatctcctaaataacgcgacccgcgacgaacgaaaccatataaaccgacgccgcgaaaaaaattaaacgcgacctcgaaacacaaaaaacctcaatattaaccaaaacctcgaaattcgaaaataaaataatccacgccgtccctacgtaaaaacccgatacctaaaatacgacgataacgcgcgacgaaaactatccccgcgttaatcgcaaac

SEQ ID NO: 33091 - DNA, 1342 bp, Artificial Sequence
  chemically treated genomic DNA (Homo sapiens) CpG-island No: 33091
tatagttttggggagtagggtaaggtggtgagagcgtgttcgcggggagaggtcggaggggttgggggtagaatgggagggtggggaaagggatcggagcgatatagggataggtagcgagaacgacggatgagttttgagaagcgattaggaggagagatggggaggatcgggaatagtagcgtttcggtggggttgcgtagaggtcgggagaggggatgagaggaggatggaggaaaggggagggcgaggttgttaggatcggagcgggtagagatggggaagaggtgtatcgggaagagggacggcggtaggggtaggggttagggatgcgagttgaagggtcgggcgggcgggaggatagggaaggaaagatagaaagggatgggggaagggagacgatggagaaggaggtgaggaggttggagaggaggtgagatagcggcggaggtagggacgtagggtcggggaagaagagatggagacgggatcgcggcgtttgtcgtagcgcgggtttcgcggatattcgtcgtcgtcgtttcggagtagtttggtggaaagcgcgtttcgtcggggttttttcggtatttatttgggggttttagtttcggattttgtgtttcgcgtcggattttttttttcgttttgtttttgcgattttagcgttttcgaatttcgttagtttttgtaggtttcgttagtagtatttttatttcgtgggacgttcggggttacgttttttttagtttttgattggttattgtttacgttagttatattattattggttgaggggtcgtcggatatgtaaattaagatgggttcgtcgtcgtatcgattggttggcgttcgtaaagcgtagttttcgatttgggttttgattggtttcgcggttttgacggcgatagtgacgcgaggcgggtttttggattgagtgtgcggcgcggtgcgtcgtttttcgaggtttttttcgcgggtggtagcggacggggcgcgtttttcggttagttttcggtttttaggtttgtggtttcgttgagtatcggtcgtcgggtttttgggttcgtcgagtggagattttttgaaaagcgtgggtttcgtggttttcggcgcggtcgcggcgggtcggttttttaggtaacgcggttcgcggcgggcggaattatgtgggtcggcgtcgcgggggaggttggacgcggtttcgaggtatagggggttttagtgttggttagagtttcggggttcgggggtagggtggtttacgtcgtttttgcgtgggggttcggtgtttggggtgcggcggtggcgcgcggcgggggttgttttcgcgttagtcgtaggt

SEQ ID NO: 33092 - DNA, 1342 bp, Artificial Sequence
  chemically treated genomic DNA (Homo sapiens) CpG-island No: 33092
acctacgactaacgcgaaaacaacccccgccgcgcgccaccgccgcaccccaaacaccgaacccccacgcaaaaacgacgtaaaccaccctacccccgaaccccgaaactctaaccaacactaaaaccccctatacctcgaaaccgcgtccaacctcccccgcgacgccgacccacataattccgcccgccgcgaaccgcgttacctaaaaaaccgacccgccgcgaccgcgccgaaaaccacgaaacccacgcttttcaaaaaatctccactcgacgaacccaaaaacccgacgaccgatactcaacgaaaccacaaacctaaaaaccgaaaactaaccgaaaaacgcgccccgtccgctaccacccgcgaaaaaaacctcgaaaaacgacgcaccgcgccgcacactcaatccaaaaacccgcctcgcgtcactatcgccgtcaaaaccgcgaaaccaatcaaaacccaaatcgaaaactacgctttacgaacgccaaccaatcgatacgacgacgaacccatcttaatttacatatccgacgacccctcaaccaataataatataactaacgtaaacaataaccaatcaaaaactaaaaaaaacgtaaccccgaacgtcccacgaaataaaaatactactaacgaaacctacaaaaactaacgaaattcgaaaacgctaaaatcgcaaaaacaaaacgaaaaaaaaaatccgacgcgaaacacaaaatccgaaactaaaacccccaaataaataccgaaaaaaccccgacgaaacgcgctttccaccaaactactccgaaacgacgacgacgaatatccgcgaaacccgcgctacgacaaacgccgcgatcccgtctccatctcttcttccccgaccctacgtccctacctccgccgctatctcacctcctctccaacctcctcacctccttctccatcgtctcccttcccccatccctttctatctttccttccctatcctcccgcccgcccgacccttcaactcgcatccctaacccctacccctaccgccgtccctcttcccgatacacctcttccccatctctacccgctccgatcctaacaacctcgccctcccctttcctccatcctcctctcatcccctctcccgacctctacgcaaccccaccgaaacgctactattcccgatcctccccatctctcctcctaatcgcttctcaaaactcatccgtcgttctcgctacctatccctatatcgctccgatccctttccccaccctcccattctacccccaacccctccgacctctccccgcgaacacgctctcaccaccttaccctactccccaaaactata

SEQ ID NO: 33093 - DNA, 527 bp, Artificial Sequence
  chemically treated genomic DNA (Homo sapiens) CpG-island No: 33093
ggtatcgtgcggattggtagggaggtttcggacgtcgtaagtcgggtacgtagtgataggtcgcggacgttaggggcgggatttatttaggttttttaggatttattcgtttgtgttgcgcgttaatacggcgttggtttttttttagtagcgcggttcggcgtttgttttcgatgcgttcgttaatagaggtggtttggttgtaaaggttgcggatcgcggcgcggagatcgttcgttagaacgttgagttttgtttcgatcgtcgttattcgtaatgtcgtcgttatttttgttgtgtcggcgcgttttttatcggcgtatttgagtacgtatgtgttaaagcgtgggtacggcgtttgcgtagtatcggttggttgtagggagtcgcgggggttggattatagaatttgtttgggagtaaggcgtgagagttcgagattcggtgttgttcgaggagggtcgcgtagagaaaaagtatagggtttgtttggttgtataaaaaagggatatagtttttgttttttt

SEQ ID NO: 33094 - DNA, 527 bp, Artificial Sequence
  chemically treated genomic DNA (Homo sapiens) CpG-island No: 33094
aaaaaaacaaaaactatatcccttttttatacaaccaaacaaaccctatactttttctctacgcgaccctcctcgaacaacaccgaatctcgaactctcacgccttactcccaaacaaattctataatccaacccccgcgactccctacaaccaaccgatactacgcaaacgccgtacccacgctttaacacatacgtactcaaatacgccgataaaaaacgcgccgacacaacaaaaataacgacgacattacgaataacgacgatcgaaacaaaactcaacgttctaacgaacgatctccgcgccgcgatccgcaacctttacaaccaaaccacctctattaacgaacgcatcgaaaacaaacgccgaaccgcgctactaaaaaaaaaccaacgccgtattaacgcgcaacacaaacgaataaatcctaaaaaacctaaataaatcccgcccctaacgtccgcgacctatcactacgtacccgacttacgacgtccgaaacctccctaccaatccgcacgatacc

SEQ ID NO: 33095 - DNA, 527 bp, Artificial Sequence
  chemically treated genomic DNA (Homo sapiens) CpG-island No: 33095
agaagagtaaggattatgttttttttttgtgtagttaggtaggttttgtattttttttttgcgcgatttttttcgggtagtatcgggtttcgaatttttacgttttatttttaagtaggttttgtagtttagttttcgcggttttttatagttagtcgatgttgcgtaagcgtcgtatttacgttttagtatatgcgtatttaggtgcgtcggtaggggacgcgtcggtatagtaaaaatggcggcggtattacgggtggcggcggtcggggtaaggtttagcgttttggcgagcggttttcgcgtcgcggttcgtagtttttgtagttaggttatttttgttaacgaacgtatcgaaaataagcgtcggatcgcgttgttgggagggggttaacgtcgtattgacgcgtagtataagcgagtgagttttgaggggtttaagtgagtttcgtttttggcgttcgcgatttattattgcgtgttcggtttgcggcgttcgaggtttttttgttaattcgtacggtgtt

SEQ ID NO: 33096 - DNA, 527 bp, Artificial Sequence
  chemically treated genomic DNA (Homo sapiens) CpG-island No: 33096
aacaccgtacgaattaacaaaaaaacctcgaacgccgcaaaccgaacacgcaataataaatcgcgaacgccaaaaacgaaactcacttaaacccctcaaaactcactcgcttatactacgcgtcaatacgacgttaaccccctcccaacaacgcgatccgacgcttattttcgatacgttcgttaacaaaaataacctaactacaaaaactacgaaccgcgacgcgaaaaccgctcgccaaaacgctaaaccttaccccgaccgccgccacccgtaataccgccgccatttttactataccgacgcgtcccctaccgacgcacctaaatacgcatatactaaaacgtaaatacgacgcttacgcaacatcgactaactataaaaaaccgcgaaaactaaactacaaaacctacttaaaaataaaacgtaaaaattcgaaacccgatactacccgaaaaaaatcgcgcaaaaaaaaaatacaaaacctacctaactacacaaaaaaaaaacataatccttactcttct

SEQ ID NO: 33097 - DNA, 899 bp, Artificial Sequence
  chemically treated genomic DNA (Homo sapiens) CpG-island No: 33097
gagcgggacgaggaggtggggtttagggggtttcggggcggatagattgatcgtcggatagtttaggtgtcggtatagcgtgggcggtgtttagagtcgcgtttcgtttttcgtaggttagcgtttagggttcgcgggtcgtgttcgtttttagtatggtcgttcgtcgcgtttgattcgcggttttttcgtttcgattgtttgtaggcgatgtttaggtaaagatcgtgattgatattttcgtttatacgtacgtacggatttaggtttacgttcggagatcgagtttcgggttcgtaatcgttgtcgttttcggcgtcgcggttagagttcggattacggttttcgcgtcgtcgtcgtttcgtcgagaagggtcgcgtcggatttcgagcgcggcggttttcggtcggtagggatggggaagcgggcgggaggaggagtaatcggagttattatcgtcgtcgtttttacgttcgtcggggtcgggttggaatttgcggtcgttcgtagcgggggttcgcggagcgcggtcgtcggttttttaggcgcgttgtatttggtgatgattttcgtagtggttgcggcgcgggtcgagaaggaaggtgggtgtttttcggcggcgtttttgcggcggggttgttatttcgttttcgcggaggtcgggagggttgggtcgggaggaagggtcgcggtcggggtttcggcgtaaagttgggcggtcgggtatcgtttcgagtcgggatttcgcggcgttcgtcgtacggagtggttttcgtttttcgtgattttttttcgtgttttttttcgttttttgttattgttattttaaaattttttgatttttcgtacgtttttgttatttggttcgttaggtaggaggggtatattttttggtttta

SEQ ID NO: 33098 - DNA, 899 bp, Artificial Sequence
  chemically treated genomic DNA (Homo sapiens) CpG-island No: 33098
taaaaccaaaaaatatacccctcctacctaacgaaccaaataacaaaaacgtacgaaaaatcaaaaaattttaaaataacaataacaaaaaacgaaaaaaaacacgaaaaaaaatcacgaaaaacgaaaaccactccgtacgacgaacgccgcgaaatcccgactcgaaacgatacccgaccgcccaactttacgccgaaaccccgaccgcgacccttcctcccgacccaaccctcccgacctccgcgaaaacgaaataacaaccccgccgcaaaaacgccgccgaaaaacacccaccttccttctcgacccgcgccgcaaccactacgaaaatcatcaccaaatacaacgcgcctaaaaaaccgacgaccgcgctccgcgaacccccgctacgaacgaccgcaaattccaacccgaccccgacgaacgtaaaaacgacgacgataataactccgattactcctcctcccgcccgcttccccatccctaccgaccgaaaaccgccgcgctcgaaatccgacgcgacccttctcgacgaaacgacgacgacgcgaaaaccgtaatccgaactctaaccgcgacgccgaaaacgacaacgattacgaacccgaaactcgatctccgaacgtaaacctaaatccgtacgtacgtataaacgaaaatatcaatcacgatctttacctaaacatcgcctacaaacaatcgaaacgaaaaaaccgcgaatcaaacgcgacgaacgaccatactaaaaacgaacacgacccgcgaaccctaaacgctaacctacgaaaaacgaaacgcgactctaaacaccgcccacgctataccgacacctaaactatccgacgatcaatctatccgccccgaaaccccctaaaccccacctcctcgtcccgctc

SEQ ID NO: 33099 - DNA, 899 bp, Artificial Sequence
  chemically treated genomic DNA (Homo sapiens) CpG-island No: 33099
taaagttaaaaaatatgttttttttatttagcgggttaagtggtaagaacgtacgagaagttaggaagttttgaaatggtagtgataggagacgggggaaggtacgggaaggaattacggagagcgaaggttatttcgtgcggcgggcgtcgcgaggtttcggttcgggacggtattcgatcgtttaattttgcgtcggagtttcggtcgcggttttttttttcggtttagttttttcggttttcgcgagagcggggtgatagtttcgtcgtagggacgtcgtcgggggatatttattttttttttcggttcgcgtcgtagttattacgagggttattattaggtgtagcgcgtttaggaggtcggcggtcgcgtttcgcgggttttcgttacgggcggtcgtaggttttagttcggtttcggcggacgtggagacggcggcggtggtggtttcggttgttttttttttcgttcgtttttttatttttgtcggtcgggggtcgtcgcgttcgaggttcggcgcggtttttttcggcgaggcggcggcggcgcggaagtcgtggttcgggttttggtcgcggcgtcgggagcgataacggttgcgagttcggggttcgattttcgagcgtgggtttgggttcgtgcgtgcgtgtgagcgagagtgttagttacggtttttgtttgggtatcgtttataagtagtcggagcggagaggtcgcgggttaggcgcggcgggcggttatattggaaacgggtacggttcgcgagttttgagcgttggtttgcgaggggcggggcgcggttttgggtatcgtttacgttgtgtcgatatttgggttgttcggcggttagtttgttcgtttcggagttttttgggttttattttttcgtttcgttt

SEQ ID NO: 33100 - DNA, 899 bp, Artificial Sequence
  chemically treated genomic DNA (Homo sapiens) CpG-island No: 33100
aaacgaaacgaaaaaataaaacccaaaaaactccgaaacgaacaaactaaccgccgaacaacccaaatatcgacacaacgtaaacgatacccaaaaccgcgccccgcccctcgcaaaccaacgctcaaaactcgcgaaccgtacccgtttccaatataaccgcccgccgcgcctaacccgcgacctctccgctccgactacttataaacgatacccaaacaaaaaccgtaactaacactctcgctcacacgcacgcacgaacccaaacccacgctcgaaaatcgaaccccgaactcgcaaccgttatcgctcccgacgccgcgaccaaaacccgaaccacgacttccgcgccgccgccgcctcgccgaaaaaaaccgcgccgaacctcgaacgcgacgacccccgaccgacaaaaataaaaaaacgaacgaaaaaaaaaacaaccgaaaccaccaccgccgccgtctccacgtccgccgaaaccgaactaaaacctacgaccgcccgtaacgaaaacccgcgaaacgcgaccgccgacctcctaaacgcgctacacctaataataaccctcgtaataactacgacgcgaaccgaaaaaaaaaataaatatcccccgacgacgtccctacgacgaaactatcaccccgctctcgcgaaaaccgaaaaaactaaaccgaaaaaaaaaaccgcgaccgaaactccgacgcaaaattaaacgatcgaataccgtcccgaaccgaaacctcgcgacgcccgccgcacgaaataaccttcgctctccgtaattccttcccgtaccttcccccgtctcctatcactaccatttcaaaacttcctaacttctcgtacgttcttaccacttaacccgctaaataaaaaaaacatattttttaacttta

SEQ ID NO: 33101 - DNA, 510 bp, Artificial Sequence
  chemically treated genomic DNA (Homo sapiens) CpG-island No: 33101
gttgttttttttcgggtttttcgtgttgcggaattgtagggttttttagcgttttttgtttttttcgtcggcggcgcggaagtcggggtttttcggacgttttcgatgagggtatttatttttttgtcggggatattttgtagacggttttaatattggtaaatattatagagaattgatttcgttcggtcgtcgtcggtttttatttttcgggtttttcgtttttcgttttcgttcgttttcgttcgttttttcggcgttttcgtcgcgttttttcgcgttcgcgtcgcgcgttttcgtttgcgtagtcgttttcgcgttttagtacgttcggtcggcgcgcgcgttcggtatcggttttatttttatttcgtttttcgtcggttcgcgattaagcgcggttattgttcgcgacgtagttttcgttttttggcggttgtcgggttttagtagttgtaggttttgcggggttagcggcggcgagttgggtttttgggcgagggttatttt

SEQ ID NO: 33102 - DNA, 510 bp, Artificial Sequence
  chemically treated genomic DNA (Homo sapiens) CpG-island No: 33102
aaaataaccctcgcccaaaaacccaactcgccgccgctaaccccgcaaaacctacaactactaaaacccgacaaccgccaaaaaacgaaaactacgtcgcgaacaataaccgcgcttaatcgcgaaccgacgaaaaacgaaataaaaataaaaccgataccgaacgcgcgcgccgaccgaacgtactaaaacgcgaaaacgactacgcaaacgaaaacgcgcgacgcgaacgcgaaaaaacgcgacgaaaacgccgaaaaaacgaacgaaaacgaacgaaaacgaaaaacgaaaaacccgaaaaataaaaaccgacgacgaccgaacgaaatcaattctctataatatttaccaatattaaaaccgtctacaaaatatccccgacaaaaaaataaataccctcatcgaaaacgtccgaaaaaccccgacttccgcgccgccgacgaaaaaaacaaaaaacgctaaaaaaccctacaattccgcaacacgaaaaacccgaaaaaaaacaac

SEQ ID NO: 33103 - DNA, 510 bp, Artificial Sequence
  chemically treated genomic DNA (Homo sapiens) CpG-island No: 33103
ggaatggttttcgtttaggggtttagttcgtcgtcgttagtttcgtagagtttgtagttgttggggttcggtagtcgttagggggcgggagttgcgtcgcgaataatggtcgcgtttggtcgcgggtcggcgggaggcggagtggaggtagagtcggtgtcgggcgcgcgcgtcggtcgggcgtgttggggcgcgggagcggttgcgtaggcgggggcgcgcggcgcgagcgcgggagggcgcggcgggagcgtcggggaggcgggcggaggcgggcggaggcggggggcggggagttcgaggggtggaagtcggcggcggtcgagcggggttagttttttgtagtgtttgttaatgttggagtcgtttgtaaagtgttttcggtaagaaggtaaatatttttatcgggggcgttcgggagatttcgattttcgcgtcgtcggcgaagaaggtagagggcgttggggagttttgtagtttcgtagtacggggaattcggagaaaagtagt

SEQ ID NO: 33104 - DNA, 510 bp, Artificial Sequence
  chemically treated genomic DNA (Homo sapiens) CpG-island No: 33104
actacttttctccgaattccccgtactacgaaactacaaaactccccaacgccctctaccttcttcgccgacgacgcgaaaatcgaaatctcccgaacgcccccgataaaaatatttaccttcttaccgaaaacactttacaaacgactccaacattaacaaacactacaaaaaactaaccccgctcgaccgccgccgacttccacccctcgaactccccgccccccgcctccgcccgcctccgcccgcctccccgacgctcccgccgcgccctcccgcgctcgcgccgcgcgcccccgcctacgcaaccgctcccgcgccccaacacgcccgaccgacgcgcgcgcccgacaccgactctacctccactccgcctcccgccgacccgcgaccaaacgcgaccattattcgcgacgcaactcccgccccctaacgactaccgaaccccaacaactacaaactctacgaaactaacgacgacgaactaaacccctaaacgaaaaccattcc

SEQ ID NO: 33105 - DNA, 2386 bp, Artificial Sequence
  chemically treated genomic DNA (Homo sapiens) CpG-island No: 33105
gttcggaaggaattattcgttcgttttttatttgcgttcggaaggaattttttttttatttgcgttcggaaggaagttattcgttcgtcgtttatttgcgttcggaaggaagttattcgttcgttttttatttgcgttcggaaggaagttattcgttcgttttttatttgcgttcggaaggaagttattcgttcgtcgtttatttgcgttcggaaggaagttattcgttcgttttttatttgcgttcggaaggaagttattcgttcgttttttatttgcgtttcgaaggaattattcgttcgttttttatttgcgttcggaaggaagttattcgttcgttttttatttgtgttcggaaggaagttattagttcgttttttatttgcgttcggaaggaagttattcgttcgttttttatttgcgttcggaaggaagttattcgttcgttttttatttgcgtttggaaggaagttatttgttcgttttttatttgcgttcggaaggaagttatttgttcgttttttatttgcgttcggaaggaagttattcgtttattttttatttgcgtttggaaggaagttatttattcgtcgtttatttgcgttcggaaggaagttattcgttcgttttttatttgcgttcggaaggaattattcgttcgttttttatttgcgtttggaaggaagttattcgttcgttttttatttgcgttttgaaggaagttattcgttttttttttatttgcgtttggaaggaagttattcgttcgttttttatttgcgttttgaaggaattatttattcgttttttatcggcgtttcgaaggaagttattcgttcgttttttatttgcgtttggaaggaagttattcgttcgttttttatttgcgttcggaaggaagttattcgttcgttttttatttgcgttttgaaggaagttattcgttcgttttttatttgcgtttggaaggaattatttattcgttttttatttgcgtttggaaggaagttatttattcgttttttatttgcgttttgaaggaattatttattcgttttttatttgcgtttggaaggaagttattcgttcgttttttatttgcgtttggaaggaagttattcgttcgttttttatttgcgttcggaaggaggttattcgttcgttttttatgtgcgttttgaaggaattatttattcgttttttatcggcgtttcgaaggaagttattcgttcgttttttatttgcgtttggaaggaagttattcgttcgttttttatttgcgttttgaaggaattattcgttcgttttttatttgcgttcggaaggaggttattcgttcgttttttatttgcgtttggaaggaattatttattcgttttttatttgcgttcggaaggaagttatttgttcgttttttatttgcgtttggaaggaattatttattcgttttttatttgcgttttgaaggaattatttattcgttttttatttgcgttcggaaggaggttattcgttcgttttttatttgcgttcggaaggaattatttattcgttttttatttgcgttttgaaggaattatttatttattttttatttgcgtttggaaggaagttattcgttcgttttttatttgcgttttgaaggaagttattcgttcgttttttatttgcgtttggaaggaagttattcgttcgttttttatttgcgttttgaaggaattatttattcgttttttatttgcgttttgaaggaagttatttattcgttttttatttgcgtttggaaggaattatttattcgttttttatttgcgttttgaaggaattatttattcgttttttatttgcgtttggaaggaagttattcgttcgttttttatttgcgttttgaaggaattatttattcgttttttatttgcgttttgaaggaattatttattcgttttttatcggcgtttcgaaggaagttattcgttcgttttttatttgcgtttggaaggaattattcgttcgttttttatttgcgttcggaaggaattattcgttcgttttttatttgcgtttcgaaggaagttattcgttcgttttttatttgcgtttcgaaggaagttattcgttcgttttttatttgcgttcggaaggaagttattcgttcgttttttatttgcgttcggaaggaagttatttattcgttttttatttgcgttcggaaggaagttatttattcgttttttatttgcgttcggaaggaagttattcgttcgttttttatttgcgttcggaaggaattatttattcgttttttatttgcgttttgaaggaattatttattcgttttttattaggttgtgttggacggggtatgattagcgttttttttgtaggt

SEQ ID NO: 33106 - DNA, 2386 bp, Artificial Sequence
  chemically treated genomic DNA (Homo sapiens) CpG-island No: 33106
acctacaaaaaaaacgctaatcataccccgtccaacacaacctaataaaaaacgaataaataattccttcaaaacgcaaataaaaaacgaataaataattccttccgaacgcaaataaaaaacgaacgaataacttccttccgaacgcaaataaaaaacgaataaataacttccttccgaacgcaaataaaaaacgaataaataacttccttccgaacgcaaataaaaaacgaacgaataacttccttccgaacgcaaataaaaaacgaacgaataacttccttcgaaacgcaaataaaaaacgaacgaataacttccttcgaaacgcaaataaaaaacgaacgaataattccttccgaacgcaaataaaaaacgaacgaataattccttccaaacgcaaataaaaaacgaacgaataacttccttcgaaacgccgataaaaaacgaataaataattccttcaaaacgcaaataaaaaacgaataaataattccttcaaaacgcaaataaaaaacgaacgaataacttccttccaaacgcaaataaaaaacgaataaataattccttcaaaacgcaaataaaaaacgaataaataattccttccaaacgcaaataaaaaacgaataaataacttccttcaaaacgcaaataaaaaacgaataaataattccttcaaaacgcaaataaaaaacgaacgaataacttccttccaaacgcaaataaaaaacgaacgaataacttccttcaaaacgcaaataaaaaacgaacgaataacttccttccaaacgcaaataaaaaataaataaataattccttcaaaacgcaaataaaaaacgaataaataattccttccgaacgcaaataaaaaacgaacgaataacctccttccgaacgcaaataaaaaacgaataaataattccttcaaaacgcaaataaaaaacgaataaataattccttccaaacgcaaataaaaaacgaacaaataacttccttccgaacgcaaataaaaaacgaataaataattccttccaaacgcaaataaaaaacgaacgaataacctccttccgaacgcaaataaaaaacgaacgaataattccttcaaaacgcaaataaaaaacgaacgaataacttccttccaaacgcaaataaaaaacgaacgaataacttccttcgaaacgccgataaaaaacgaataaataattccttcaaaacgcacataaaaaacgaacgaataacctccttccgaacgcaaataaaaaacgaacgaataacttccttccaaacgcaaataaaaaacgaacgaataacttccttccaaacgcaaataaaaaacgaataaataattccttcaaaacgcaaataaaaaacgaataaataacttccttccaaacgcaaataaaaaacgaataaataattccttccaaacgcaaataaaaaacgaacgaataacttccttcaaaacgcaaataaaaaacgaacgaataacttccttccgaacgcaaataaaaaacgaacgaataacttccttccaaacgcaaataaaaaacgaacgaataacttccttcgaaacgccgataaaaaacgaataaataattccttcaaaacgcaaataaaaaacgaacgaataacttccttccaaacgcaaataaaaaaaaaacgaataacttccttcaaaacgcaaataaaaaacgaacgaataacttccttccaaacgcaaataaaaaacgaacgaataattccttccgaacgcaaataaaaaacgaacgaataacttccttccgaacgcaaataaacgacgaataaataacttccttccaaacgcaaataaaaaataaacgaataacttccttccgaacgcaaataaaaaacgaacaaataacttccttccgaacgcaaataaaaaacgaacaaataacttccttccaaacgcaaataaaaaacgaacgaataacttccttccgaacgcaaataaaaaacgaacgaataacttccttccgaacgcaaataaaaaacgaactaataacttccttccgaacacaaataaaaaacgaacgaataacttccttccgaacgcaaataaaaaacgaacgaataattccttcgaaacgcaaataaaaaacgaacgaataacttccttccgaacgcaaataaaaaacgaacgaataacttccttccgaacgcaaataaacgacgaacgaataacttccttccgaacgcaaataaaaaacgaacgaataacttccttccgaacgcaaataaaaaacgaacgaataacttccttccgaacgcaaataaacgacgaacgaataacttccttccgaacgcaaataaaaaaaaaattccttccgaacgcaaataaaaaacgaacgaataattccttccgaac

SEQ ID NO: 33107 - DNA, 2386 bp, Artificial Sequence
  chemically treated genomic DNA (Homo sapiens) CpG-island No: 33107
gtttgtagaggaagcgttagttatgtttcgtttagtatagtttgatgagaaacgggtggatgatttttttaggacgtagatgagggacgggtggatgatttttttcggacgtagatgagggacgggcggatgattttttttcggacgtagatgagggacgggtggatgattttttttcggacgtagatgagggacgggtggatgattttttttcggacgtagatgagggacgggcggatgattttttttcggacgtagatgagggacgggcggatgatttttttcgggacgtagatgagggacgggcggatgatttttttcgggacgtagatgagggacgggcggatgatttttttcggacgtagatgaggaacgggcggatgattttttttagacgtagatgagggacgggcggatgatttttttcgggacgtcgatgaggaacgggtggatgatttttttaggacgtagatgagggacgggtggatgatttttttaggacgtagatgagggacgggcggatgatttttttttagacgtagatgagggacgggtggatgatttttttaggacgtagatgagggacgggtggatgattttttttagacgtagatgagggacgggtggatgattttttttaggacgtagatgaggaacgggtggatgatttttttaggacgtagatgagggacgggcggatgatttttttttagacgtagatgaggaacgggcggatgattttttttaggacgtagatgagggacgggcggatgatttttttttagacgtagatgagggatgggtggatgatttttttaggacgtagatgagggacgggtggatgatttttttcggacgtagatgaggaacgggcggatgattttttttcggacgtagatgagggacgggtggatgatttttttaggacgtagatgagggacgggtggatgattttttttagacgtagatgagggacgggtagatgattttttttcggacgtagatgagggacgggtggatgattttttttagacgtagatgaggaacgggcggatgattttttttcggacgtagatgagggacgggcggatgatttttttaggacgtagatgagggacgggcggatgatttttttttagacgtagatgagggacgggcggatgatttttttcgggacgtcgatgaggaacgggtggatgatttttttaggacgtatatgagggacgggcggatgattttttttcggacgtagatgagggacgggcggatgatttttttttagacgtagatgagggacgggcggatgatttttttttagacgtaaatgagggacgggtggatgatttttttaggacgtaaatgagggacgggtggatgatttttttttagacgtagatgagggacgggtggatgattttttttagacgtagatgagggacgggcggatgattttttttaggacgtagatgagggacgggcggatgattttttttcggacgtagatgagggacgggcggatgatttttttttagacgtagatgagggacgggcggatgatttttttcgggacgtcgatgaggaacgggtggatgatttttttaggacgtagatgaggaacgggcggatgatttttttttagacgtagatgaggaaagggcggatgattttttttaggacgtagatgagggacgggcggatgatttttttttagacgtagatgagggacgggcggatgatttttttcggacgtagatgagggacgggcggatgattttttttcggacgtagatgagcgacgggtggatgatttttttttagacgtagatgagggatgggcggatgattttttttcggacgtagatgaggaacgagtagatgattttttttcggacgtagatgaggaacgagtagatgatttttttttagacgtagatgagggacgggcggatgattttttttcggacgtagatgagggacgggcggatgattttttttcggacgtagatgagggacgggttgatgattttttttcggatatagatgagggacgggcggatgattttttttcggacgtagatgagggacgggcggatgattttttcgggacgtagatgagggacgggcggatgattttttttcggacgtagatgagggacgggcggatgattttttttcggacgtagatgagcgacgggcggatgattttttttcggacgtagatgagggacgggcggatgattttttttcggacgtagatgagggacgggcggatgattttttttcggacgtagatgagcgacgggcggatgattttttttcggacgtagatgaggaagggatttttttcggacgtagatgagggacgggcggatgatttttttcggat

SEQ ID NO: 33108 - DNA, 2386 bp, Artificial Sequence
  chemically treated genomic DNA (Homo sapiens) CpG-island No: 33108
atccgaaaaaaatcatccgcccgtccctcatctacgtccgaaaaaaatcccttcctcatctacgtccgaaaaaaaatcatccgcccgtcgctcatctacgtccgaaaaaaaatcatccgcccgtccctcatctacgtccgaaaaaaaatcatccgcccgtccctcatctacgtccgaaaaaaaatcatccgcccgtcgctcatctacgtccgaaaaaaaatcatccgcccgtccctcatctacgtccgaaaaaaaatcatccgcccgtccctcatctacgtcccgaaaaaatcatccgcccgtccctcatctacgtccgaaaaaaaatcatccgcccgtccctcatctatatccgaaaaaaaatcatcaacccgtccctcatctacgtccgaaaaaaaatcatccgcccgtccctcatctacgtccgaaaaaaaatcatccgcccgtccctcatctacgtctaaaaaaaaatcatctactcgttcctcatctacgtccgaaaaaaaatcatctactcgttcctcatctacgtccgaaaaaaaatcatccgcccatccctcatctacgtctaaaaaaaaatcatccacccgtcgctcatctacgtccgaaaaaaaatcatccgcccgtccctcatctacgtccgaaaaaaatcatccgcccgtccctcatctacgtctaaaaaaaaatcatccgcccgtccctcatctacgtcctaaaaaaaatcatccgccctttcctcatctacgtctaaaaaaaaatcatccgcccgttcctcatctacgtcctaaaaaaatcatccacccgttcctcatcgacgtcccgaaaaaaatcatccgcccgtccctcatctacgtctaaaaaaaaatcatccgcccgtccctcatctacgtccgaaaaaaaatcatccgcccgtccctcatctacgtcctaaaaaaaatcatccgcccgtccctcatctacgtctaaaaaaaatcatccacccgtccctcatctacgtctaaaaaaaaatcatccacccgtccctcatttacgtcctaaaaaaatcatccacccgtccctcatttacgtctaaaaaaaaatcatccgcccgtccctcatctacgtctaaaaaaaaatcatccgcccgtccctcatctacgtccgaaaaaaaatcatccgcccgtccctcatatacgtcctaaaaaaatcatccacccgttcctcatcgacgtcccgaaaaaaatcatccgcccgtccctcatctacgtctaaaaaaaaatcatccgcccgtccctcatctacgtcctaaaaaaatcatccgcccgtccctcatctacgtccgaaaaaaaatcatccgcccgttcctcatctacgtctaaaaaaaatcatccacccgtccctcatctacgtccgaaaaaaaatcatctacccgtccctcatctacgtctaaaaaaaatcatccacccgtccctcatctacgtcctaaaaaaatcatccacccgtccctcatctacgtccgaaaaaaaatcatccgcccgttcctcatctacgtccgaaaaaaatcatccacccgtccctcatctacgtcctaaaaaaatcatccacccatccctcatctacgtctaaaaaaaaatcatccgcccgtccctcatctacgtcctaaaaaaaatcatccgcccgttcctcatctacgtctaaaaaaaaatcatccgcccgtccctcatctacgtcctaaaaaaatcatccacccgttcctcatctacgtcctaaaaaaaatcatccacccgtccctcatctacgtctaaaaaaaatcatccacccgtccctcatctacgtcctaaaaaaatcatccacccgtccctcatctacgtctaaaaaaaaatcatccgcccgtccctcatctacgtcctaaaaaaatcatccacccgtccctcatctacgtcctaaaaaaatcatccacccgttcctcatcgacgtcccgaaaaaaatcatccgcccgtccctcatctacgtctaaaaaaaatcatccgcccgttcctcatctacgtccgaaaaaaatcatccgcccgtccctcatctacgtcccgaaaaaaatcatccgcccgtccctcatctacgtcccgaaaaaaatcatccgcccgtccctcatctacgtccgaaaaaaaatcatccgcccgtccctcatctacgtccgaaaaaaaatcatccacccgtccctcatctacgtccgaaaaaaaatcatccacccgtccctcatctacgtccgaaaaaaaatcatccgcccgtccctcatctacgtccgaaaaaaatcatccacccgtccctcatctacgtcctaaaaaaatcatccacccgtttctcatcaaactatactaaacgaaacataactaacgcttcctctacaaac

SEQ ID NO: 33109 - DNA, 676 bp, Artificial Sequence
  chemically treated genomic DNA (Homo sapiens) CpG-island No: 33109
gaggtcggtgtaggacgagtgtggtttaggcgtagtatttgaaaagggcgtttagggagggagtcggcggtcgttgggcgttttttcggttcgtattcgggtatttttcgattcgggttggaggggtagtgtttcgggatgtatcgttgcggggatttttcgttcggtttcgcggattcgtttcggtttaggacggaggaggaggtaggtgcggggttcggggcgggtgcggggacggtaggtggagggaagagggtatcgggttttgtttatcgcggtgtgtggggttgttcgatcgcgtttttcgtaggtgtcgtttagatttcggtcgagggttttcgttttcgcgtaggtttaggtcgaggtcgagagagggttcgtgttttcgcgtagatttaggtcgagagagggttcgtgatttcgcgtaggttaaggtcgagagagggttcgtgttttcgcggaggttaaggtcgagagagggttcgtgttttcgcgtaggttaaggtttagagttttcgtgttcgtatagatggtgttttggggtttagtcgcgtttttcgttcgcggtagttttcgtgtattgggttttgtaaagttcgttaggagcgttttagggcgatagtgtttagcggttaataagtttgtaattattttcgtgggtttttacgttgtaaat

SEQ ID NO: 33110 - DNA, 676 bp, Artificial Sequence
  chemically treated genomic DNA (Homo sapiens) CpG-island No: 33110
atttacaacgtaaaaacccacgaaaataattacaaacttattaaccgctaaacactatcgccctaaaacgctcctaacgaactttacaaaacccaatacacgaaaactaccgcgaacgaaaaacgcgactaaaccccaaaacaccatctatacgaacacgaaaactctaaaccttaacctacgcgaaaacacgaaccctctctcgaccttaacctccgcgaaaacacgaaccctctctcgaccttaacctacgcgaaatcacgaaccctctctcgacctaaatctacgcgaaaacacgaaccctctctcgacctcgacctaaacctacgcgaaaacgaaaaccctcgaccgaaatctaaacgacacctacgaaaaacgcgatcgaacaaccccacacaccgcgataaacaaaacccgataccctcttccctccacctaccgtccccgcacccgccccgaaccccgcacctacctcctcctccgtcctaaaccgaaacgaatccgcgaaaccgaacgaaaaatccccgcaacgatacatcccgaaacactacccctccaacccgaatcgaaaaatacccgaatacgaaccgaaaaaacgcccaacgaccgccgactccctccctaaacgcccttttcaaatactacgcctaaaccacactcgtcctacaccgacctc

SEQ ID NO: 33111 - DNA, 676 bp, Artificial Sequence
  chemically treated genomic DNA (Homo sapiens) CpG-island No: 33111
atttgtaacgtagaaatttacgaaagtaattataaatttgttaatcgttgggtattgtcgttttggagcgtttttaacggattttgtaaggtttagtatacgggggttgtcgcgagcggggagcgcgattgggttttaggatattatttgtgcgagtacggggattttgggttttgatttgcgcggggatacgggttttttttcggttttgattttcgcggggatacgggttttttttcggttttgatttgcgcggggttacgggttttttttcggtttaggtttgcgcggggatacgggttttttttcggtttcgatttgggtttgcgcggggacgaggattttcggtcggggtttgggcggtatttgcggggggcgcggtcgggtagttttatatatcgcggtgagtagggttcgatgtttttttttttttatttgtcgttttcgtattcgtttcgggtttcgtatttgttttttttttcgttttgggtcgaggcgggttcgcgaggtcgggcggggggttttcgtagcggtgtatttcgggatattgtttttttagttcgggtcgagggatgttcgggtgcgggtcgagagagcgtttaacgatcgtcggttttttttttgggcgttttttttaggtattgcgtttggattatattcgttttatatcggtttt

SEQ ID NO: 33112 - DNA, 676 bp, Artificial Sequence
  chemically treated genomic DNA (Homo sapiens) CpG-island No: 33112
aaaaccgatataaaacgaatataatccaaacgcaatacctaaaaaaaacgcccaaaaaaaaaaccgacgatcgttaaacgctctctcgacccgcacccgaacatccctcgacccgaactaaaaaaacaatatcccgaaatacaccgctacgaaaaccccccgcccgacctcgcgaacccgcctcgacccaaaacgaaaaaaaaaacaaatacgaaacccgaaacgaatacgaaaacgacaaataaaaaaaaaaaaacatcgaaccctactcaccgcgatatataaaactacccgaccgcgccccccgcaaataccgcccaaaccccgaccgaaaatcctcgtccccgcgcaaacccaaatcgaaaccgaaaaaaaacccgtatccccgcgcaaacctaaaccgaaaaaaaacccgtaaccccgcgcaaatcaaaaccgaaaaaaaacccgtatccccgcgaaaatcaaaaccgaaaaaaaacccgtatccccgcgcaaatcaaaacccaaaatccccgtactcgcacaaataatatcctaaaacccaatcgcgctccccgctcgcgacaacccccgtatactaaaccttacaaaatccgttaaaaacgctccaaaacgacaatacccaacgattaacaaatttataattactttcgtaaatttctacgttacaaat

SEQ ID NO: 33113 - DNA, 517 bp, Artificial Sequence
  chemically treated genomic DNA (Homo sapiens) CpG-island No: 33113
gaatcgtttttacgggacgtatgagtttcgttaggtgtcggttaggaatgtatcgcgtttttttgttcggttagattttgggagaggcgggttcgttgttatttgattttcgttatttgattcgtggggtcggatttcggcgagatgagttttgggagttgtagttttcgcgcgttttagacggatagagcgtagttgggtcgggtcggggcgtagagatcggggtttcggcgtgagggaagatgaggttcgttgttagggatatagagatttttggagtcgttagcgtttttcggtttttttcgtgagcgaagtttagatcgttttttattgggcggaaattagagttcgtgggggcggggttttttttaggtttcgtttttcgtcgttttttcgtttatagtcggggttcgtcgagaggttgcgtggaagttcgtttttttcggttagtgggaagacgagaagtttttatgttgggtgtggttgaaagattggtaggcgatttttcgtttttgtt

SEQ ID NO: 33114 - DNA, 517 bp, Artificial Sequence
  chemically treated genomic DNA (Homo sapiens) CpG-island No: 33114
aacaaaaacgaaaaatcgcctaccaatctttcaaccacacccaacataaaaacttctcgtcttcccactaaccgaaaaaaacgaacttccacgcaacctctcgacgaaccccgactataaacgaaaaaacgacgaaaaacgaaacctaaaaaaaaccccgcccccacgaactctaatttccgcccaataaaaaacgatctaaacttcgctcacgaaaaaaaccgaaaaacgctaacgactccaaaaatctctatatccctaacaacgaacctcatcttccctcacgccgaaaccccgatctctacgccccgacccgacccaactacgctctatccgtctaaaacgcgcgaaaactacaactcccaaaactcatctcgccgaaatccgaccccacgaatcaaataacgaaaatcaaataacaacgaacccgcctctcccaaaatctaaccgaacaaaaaaacgcgatacattcctaaccgacacctaacgaaactcatacgtcccgtaaaaacgattc

SEQ ID NO: 33115 - DNA, 517 bp, Artificial Sequence
  chemically treated genomic DNA (Homo sapiens) CpG-island No: 33115
ggtaggggcggggagtcgtttgttaattttttagttatatttaatatggaggtttttcgtttttttattggtcggggaaggcgagtttttacgtaatttttcggcgggtttcggttataggcggagaggcggcggaaggcgggatttaaagggggtttcgtttttacgggttttgattttcgtttaatggagggcggtttgagtttcgtttacgaaaggagtcgggaggcgttggcggttttaagagtttttgtgtttttggtagcggattttatttttttttacgtcggagtttcgatttttgcgtttcggttcgatttagttgcgttttgttcgtttaagacgcgcggaaattataatttttagagtttatttcgtcgagattcggttttacgagttaggtggcggaggttaggtgatagcggattcgttttttttaaagtttagtcgggtaggggaacgcggtgtatttttgatcggtatttggcgaggtttatgcgtttcgtgagggcggttt

SEQ ID NO: 33116 - DNA, 517 bp, Artificial Sequence
  chemically treated genomic DNA (Homo sapiens) CpG-island No: 33116
aaaccgccctcacgaaacgcataaacctcgccaaataccgatcaaaaatacaccgcgttcccctacccgactaaactttaaaaaaaacgaatccgctatcacctaacctccgccacctaactcgtaaaaccgaatctcgacgaaataaactctaaaaattataatttccgcgcgtcttaaacgaacaaaacgcaactaaatcgaaccgaaacgcaaaaatcgaaactccgacgtaaaaaaaaataaaatccgctaccaaaaacacaaaaactcttaaaaccgccaacgcctcccgactcctttcgtaaacgaaactcaaaccgccctccattaaacgaaaatcaaaacccgtaaaaacgaaaccccctttaaatcccgccttccgccgcctctccgcctataaccgaaacccgccgaaaaattacgtaaaaactcgccttccccgaccaataaaaaaacgaaaaacctccatattaaatataactaaaaaattaacaaacgactccccgcccctacc

SEQ ID NO: 33117 - DNA, 681 bp, Artificial Sequence
  chemically treated genomic DNA (Homo sapiens) CpG-island No: 33117
gtcgttcgttcgtttcgcgttcgggggtttcgcgtttggagttgcgtcggcggtagttatggatttgggtttcggggacgcggtaggagggggatcgttcgcgtttcggtttcgtcgtcgtcgttttttgcgtcgtttgtttagtcgttttttgttggcgttgggtagtcgtttacgtttcggggatttatcgtttcggttttagtcgggatattgtgatggcgacggtgaggggggtttcgtttgcgtttcgggtttagttttagcggttttcgggagtttcggggaggaacgttcgttcggattttagttttagttttagtttttcgtcggcgatggggcgcggtcgtcgggcgtttagggtttgaagaattacggtaatatttgttttatgaacgcggtggtgtagtgttttagtaatatcgatttgttggtcgagtttttggcgttggggcgttatcgggcggtttcgggtcgcgtcgaggttatcgagtagttggcggcgttggtgcgcgcgttttggattcgcgaatatacgttttaatttttcgcggagtttaaggtaggtagcgttgcgtcgtcgatcgttttgtttttttggtttcgttttttgaaaagtgtgtgtacgattaggaaagggtttttttggggttttttttaaatgtcgttgattagtttagt

SEQ ID NO: 33118 - DNA, 681 bp, Artificial Sequence
  chemically treated genomic DNA (Homo sapiens) CpG-island No: 33118
actaaactaatcaacgacatttaaaaaaaaccccaaaaaaaccctttcctaatcgtacacacacttttcaaaaaacgaaaccaaaaaaacaaaacgatcgacgacgcaacgctacctaccttaaactccgcgaaaaattaaaacgtatattcgcgaatccaaaacgcgcgcaccaacgccgccaactactcgataacctcgacgcgacccgaaaccgcccgataacgccccaacgccaaaaactcgaccaacaaatcgatattactaaaacactacaccaccgcgttcataaaacaaatattaccgtaattcttcaaaccctaaacgcccgacgaccgcgccccatcgccgacgaaaaactaaaactaaaactaaaatccgaacgaacgttcctccccgaaactcccgaaaaccgctaaaactaaacccgaaacgcaaacgaaacccccctcaccgtcgccatcacaatatcccgactaaaaccgaaacgataaatccccgaaacgtaaacgactacccaacgccaacaaaaaacgactaaacaaacgacgcaaaaaacgacgacgacgaaaccgaaacgcgaacgatccccctcctaccgcgtccccgaaacccaaatccataactaccgccgacgcaactccaaacgcgaaacccccgaacgcgaaacgaacgaacgac

SEQ ID NO: 33119 - DNA, 681 bp, Artificial Sequence
  chemically treated genomic DNA (Homo sapiens) CpG-island No: 33119
gttgaattggttaacggtatttaaagaaggttttaagaaaatttttttttgatcgtgtatatattttttaagaggcgaaattagggggatagggcggtcggcggcgtagcgttgtttattttgaatttcgcggaaagttggggcgtgtattcgcgagtttagagcgcgcgtattagcgtcgttagttgttcggtgatttcggcgcggttcggagtcgttcggtagcgttttagcgttaggaattcggttagtaggtcggtgttgttgagatattgtattatcgcgtttatgaaataggtgttgtcgtggttttttaagttttgagcgttcggcggtcgcgttttatcgtcggcggggagttggagttggggttggggttcgggcgggcgttttttttcggggttttcgggggtcgttggaattgggttcggggcgtaggcgaagttttttttatcgtcgttattatagtgtttcggttggggtcggggcggtgagttttcggggcgtgagcggttgtttagcgttagtaggaagcggttgaataggcggcgtagggagcggcggcggcggggtcggggcgcgagcggttttttttttgtcgcgttttcggggtttaggtttatggttgtcgtcggcgtagttttaggcgcggagttttcgggcgcgaggcggacgagcggt

SEQ ID NO: 33120 - DNA, 681 bp, Artificial Sequence
  chemically treated genomic DNA (Homo sapiens) CpG-island No: 33120
accgctcgtccgcctcgcgcccgaaaactccgcgcctaaaactacgccgacgacaaccataaacctaaaccccgaaaacgcgacaaaaaaaaaaccgctcgcgccccgaccccgccgccgccgctccctacgccgcctattcaaccgcttcctactaacgctaaacaaccgctcacgccccgaaaactcaccgccccgaccccaaccgaaacactataataacgacgataaaaaaaacttcgcctacgccccgaacccaattccaacgacccccgaaaaccccgaaaaaaaacgcccgcccgaaccccaaccccaactccaactccccgccgacgataaaacgcgaccgccgaacgctcaaaacttaaaaaaccacgacaacacctatttcataaacgcgataatacaatatctcaacaacaccgacctactaaccgaattcctaacgctaaaacgctaccgaacgactccgaaccgcgccgaaatcaccgaacaactaacgacgctaatacgcgcgctctaaactcgcgaatacacgccccaactttccgcgaaattcaaaataaacaacgctacgccgccgaccgccctatccccctaatttcgcctcttaaaaaatatatacacgatcaaaaaaaaattttcttaaaaccttctttaaataccgttaaccaattcaac

SEQ ID NO: 33121 - DNA, 931 bp, Artificial Sequence
  chemically treated genomic DNA (Homo sapiens) CpG-island No: 33121
tttcgcgcggatattttttttagaagtagatgtgattattttgtttcgggttatttacgtgttttacggtgacgtgcgtaattagttcgtgtatggtgttgaaagttttgttgtacgattttttggggttggttagttgttcgggttcgatttatttgtagatgagtttttgtttgatgggttggcgtatgtagcggaagaaggcgtcggcgtcgtgatgcgcggttatgtttacgtttatgggttcgtagtcgtgtagttgcggcgtagtatagtgtttcgaacgcgggttggttatttggtcgtattgtttcggtcgcgggtatatgtttttcgagaagtcgagttttatttgttcgttgattacgttaggcgacgcgtggtcggtagtttgttcgtgaagttcggggaagaggaggtggttcgcggcgttcgtgtggtcgtgtgggttttcgaagttttcggtcgatgtagtaaagaggttgtgttgtgcgttggttgtcgtcgtcgcgtcgttaaaatttcggttgcggaatagaaagtttcgcgtggagttgaaggttgcgttggaataggagtcgacgtggttcgggtgatggtgatggtttagggtcgtagtagtcgcgtagtttggcgtttgcgacgtgaaggtcgtttggtcggtcgaagttagttcgtgcgaattggggttgagtttgaaggcgtttatgtcgtcggcgaacgggttgatgtttaggtttacgtttcgttcggttacgtcgttcgcggagtggtggcgggacgcgttaaaggtggttacgtcgatcgttgggtattgggggtcggcgtttaggagtatcgtggttgttcggggcgagtttcggtttttttcgttttttttattttcgttagtcgaggagggaaaatcgggaggaggaggaggaataagagg

SEQ ID NO: 33122 - DNA, 931 bp, Artificial Sequence
  chemically treated genomic DNA (Homo sapiens) CpG-island No: 33122
cctcttattcctcctcctcctcccgattttccctcctcgactaacgaaaataaaaaaaacgaaaaaaaccgaaactcgccccgaacaaccacgatactcctaaacgccgacccccaatacccaacgatcgacgtaaccacctttaacgcgtcccgccaccactccgcgaacgacgtaaccgaacgaaacgtaaacctaaacatcaacccgttcgccgacgacataaacgccttcaaactcaaccccaattcgcacgaactaacttcgaccgaccaaacgaccttcacgtcgcaaacgccaaactacgcgactactacgaccctaaaccatcaccatcacccgaaccacgtcgactcctattccaacgcaaccttcaactccacgcgaaactttctattccgcaaccgaaattttaacgacgcgacgacgacaaccaacgcacaacacaacctctttactacatcgaccgaaaacttcgaaaacccacacgaccacacgaacgccgcgaaccacctcctcttccccgaacttcacgaacaaactaccgaccacgcgtcgcctaacgtaatcaacgaacaaataaaactcgacttctcgaaaaacatatacccgcgaccgaaacaatacgaccaaataaccaacccgcgttcgaaacactatactacgccgcaactacacgactacgaacccataaacgtaaacataaccgcgcatcacgacgccgacgccttcttccgctacatacgccaacccatcaaacaaaaactcatctacaaataaatcgaacccgaacaactaaccaaccccaaaaaatcgtacaacaaaactttcaacaccatacacgaactaattacgcacgtcaccgtaaaacacgtaaataacccgaaacaaaataatcacatctacttctaaaaaaaatatccgcgcgaaa

SEQ ID NO: 33123 - DNA, 931 bp, Artificial Sequence
  chemically treated genomic DNA (Homo sapiens) CpG-island No: 33123
ttttttgttttttttttttttttcgatttttttttttcggttggcgagggtggggggggcgggggaggtcggggttcgtttcgagtagttacgatgtttttggacgtcggtttttagtatttagcgatcggcgtgattatttttggcgcgtttcgttattatttcgcgggcgacgtggtcgaacgagacgtgggtttgggtattaattcgttcgtcgacggtatgggcgtttttaagtttaattttagttcgtacgagttggtttcggtcggttagacggtttttacgtcgtaggcgttaggttacgcggttgttgcggttttgggttattattattattcgggttacgtcggtttttattttagcgtagtttttaattttacgcgggattttttgtttcgtaatcggggttttggcgacgcggcggcggtagttagcgtatagtatagtttttttgttgtatcggtcgggggtttcgggggtttatacggttatacggacgtcgcgggttattttttttttttcgggttttacgagtaggttgtcggttacgcgtcgtttaacgtggttaacgggtagatgaggttcggtttttcgggggatatgtattcgcgatcggagtagtacggttaggtgattagttcgcgttcggagtattatgttgcgtcgtagttgtacggttacgggtttatgaacgtgaatatggtcgcgtattacggcgtcggcgttttttttcgttatatgcgttaatttattaagtaagagtttatttgtaagtggatcgagttcgagtagttggttaattttaaaaagtcgtgtaataaaatttttagtattatgtacgagttagttacgtacgttatcgtggagtacgtaggtggttcggagtagagtaattatatttgtttttgggaggagtgttcgcgcgagg

SEQ ID NO: 33124 - DNA, 931 bp, Artificial Sequence
  chemically treated genomic DNA (Homo sapiens) CpG-island No: 33124
cctcgcgcgaacactcctcccaaaaacaaatataattactctactccgaaccacctacgtactccacgataacgtacgtaactaactcgtacataatactaaaaattttattacacgactttttaaaattaaccaactactcgaactcgatccacttacaaataaactcttacttaataaattaacgcatataacgaaaaaaaacgccgacgccgtaatacgcgaccatattcacgttcataaacccgtaaccgtacaactacgacgcaacataatactccgaacgcgaactaatcacctaaccgtactactccgatcgcgaatacatatcccccgaaaaaccgaacctcatctacccgttaaccacgttaaacgacgcgtaaccgacaacctactcgtaaaacccgaaaaaaaaaaaataacccgcgacgtccgtataaccgtataaacccccgaaacccccgaccgatacaacaaaaaaactatactatacgctaactaccgccgccgcgtcgccaaaaccccgattacgaaacaaaaaatcccgcgtaaaattaaaaactacgctaaaataaaaaccgacgtaacccgaataataataataacccaaaaccgcaacaaccgcgtaacctaacgcctacgacgtaaaaaccgtctaaccgaccgaaaccaactcgtacgaactaaaattaaacttaaaaacgcccataccgtcgacgaacgaattaatacccaaacccacgtctcgttcgaccacgtcgcccgcgaaataataacgaaacgcgccaaaaataatcacgccgatcgctaaatactaaaaaccgacgtccaaaaacatcgtaactactcgaaacgaaccccgacctcccccgccccccccaccctcgccaaccgaaaaaaaaaaatcgaaaaaaaaaaaaaaaacaaaaaa

SEQ ID NO: 33125 - DNA, 592 bp, Artificial Sequence
  chemically treated genomic DNA (Homo sapiens) CpG-island No: 33125
tgttttcgttaggcgagaagttttttagatgcgagttcgagggttgcgagcggcgtttcgttaatagtagcgatcgtaagaagtattcgtacgtgtatattagcgataagttatatacgtgtaaggtgcggggttgcgataagtgttatacgtattttagttcgttgcgtaagtatatgaaggtgtacgggcgttcgtcgtcgtttagttttggttacgattcggttatatcgtttgttttcgtgtcgttttcgtcggattgcggttataagttttaggtggttttttcggcggcggtggcggcgcgtatcgtcgatttgagcgaatggtacgtgtgttagggtttgggttttatagcggttgttttcgtcgcgatttttagtttcgagttattatttggttttgttgttgtcgtcgtcgttttcggtattagggttgtttttgtgattgttgttttcgtatatatcgaatgtagagtaggttacgtttttgaggtatgaagagggcgagggcggaaggaaggaaggtcggtcggttatttgtaatagttgttggagtttattgaatacgttaatataatgtttattatttt

SEQ ID NO: 33126 - DNA, 592 bp, Artificial Sequence
  chemically treated genomic DNA (Homo sapiens) CpG-island No: 33126
aaaataataaacattatattaacgtattcaataaactccaacaactattacaaataaccgaccgaccttccttccttccgccctcgccctcttcatacctcaaaaacgtaacctactctacattcgatatatacgaaaacaacaatcacaaaaacaaccctaataccgaaaacgacgacgacaacaacaaaaccaaataataactcgaaactaaaaatcgcgacgaaaacaaccgctataaaacccaaaccctaacacacgtaccattcgctcaaatcgacgatacgcgccgccaccgccgccgaaaaaaccacctaaaacttataaccgcaatccgacgaaaacgacacgaaaacaaacgatataaccgaatcgtaaccaaaactaaacgacgacgaacgcccgtacaccttcatatacttacgcaacgaactaaaatacgtataacacttatcgcaaccccgcaccttacacgtatataacttatcgctaatatacacgtacgaatacttcttacgatcgctactattaacgaaacgccgctcgcaaccctcgaactcgcatctaaaaaacttctcgcctaacgaaaaca

SEQ ID NO: 33127 - DNA, 592 bp, Artificial Sequence
  chemically treated genomic DNA (Homo sapiens) CpG-island No: 33127
aaaataatggatattatattagcgtatttagtgagttttagtaattattataggtggtcggtcggtttttttttttttcgttttcgttttttttatgttttagaaacgtggtttattttgtattcggtgtgtgcggaagtagtaattatagaggtagttttaatatcggaggcggcggcggtagtagtagggttaggtggtagttcggggttgaggatcgcggcgggggtagtcgttatggggtttaagttttgatatacgtattattcgtttaagtcggcggtacgcgtcgttatcgtcgtcgaggaggttatttgggatttgtggtcgtagttcgacgagggcgatacgagggtagacggtgtagtcgaatcgtagttagagttgggcggcggcgagcgttcgtgtatttttatgtgtttacgtagcgagttggggtgcgtgtagtatttgtcgtagtttcgtattttgtacgtgtatggtttgtcgttagtgtgtacgtgcgaatgttttttacggtcgttgttgttggcgaagcgtcgttcgtagttttcgaattcgtatttgaagggtttttcgtttggcggaggta

SEQ ID NO: 33128 - DNA, 592 bp, Artificial Sequence
  chemically treated genomic DNA (Homo sapiens) CpG-island No: 33128
tacctccgccaaacgaaaaacccttcaaatacgaattcgaaaactacgaacgacgcttcgccaacaacaacgaccgtaaaaaacattcgcacgtacacactaacgacaaaccatacacgtacaaaatacgaaactacgacaaatactacacgcaccccaactcgctacgtaaacacataaaaatacacgaacgctcgccgccgcccaactctaactacgattcgactacaccgtctaccctcgtatcgccctcgtcgaactacgaccacaaatcccaaataacctcctcgacgacgataacgacgcgtaccgccgacttaaacgaataatacgtatatcaaaacttaaaccccataacgactacccccgccgcgatcctcaaccccgaactaccacctaaccctactactaccgccgccgcctccgatattaaaactacctctataattactacttccgcacacaccgaatacaaaataaaccacgtttctaaaacataaaaaaaacgaaaacgaaaaaaaaaaaaaccgaccgaccacctataataattactaaaactcactaaatacgctaatataatatccattatttt

SEQ ID NO: 33129 - DNA, 695 bp, Artificial Sequence
  chemically treated genomic DNA (Homo sapiens) CpG-island No: 33129
gtagttgcgcgtggggaagagaaggaagaggcgtttagggaagggaagggaggaagaaggaaggcggaggaaagagaaggggacgagcgggagcgcgggttcggtcgggtggcgtttcggggagtgtttgtcgcgcgggggtcgggcggggcggggtcgcgggcgtttagagttcggcgggggttgtcgggattggggcgtcgtagttagcgttggtttcggtggtagttttttcgcgtcgtaggattcggttttacgggatatgttcgtgtcgcgttcgtcgcgcgttcgggtttgttagtttttttgtgttttttgaacgcgcggcgtcgtatttggtagcggtttcggagttcggttcgggtaggagcgcgcggtcgtgcgtatcgcgtagcgatcgttgtcgttatggggttgtagtttttggagtttagcgattgttatttcgatagttcgtggtttcgggagaggattcgcgtttacgaagcggaattcgagaggattaataagtttattaaagagtttattaaggacgggaagaattttatcgttgcgacgaaaagtaagcggggacgcgggcgcggacgggttgcggcgtggcgaggcggttgggggagtttttttcggtaggagacggagggttttgtgttcggggttagtagttagaggaacggggaatttatttcggattagtt

SEQ ID NO: 33130 - DNA, 695 bp, Artificial Sequence
  chemically treated genomic DNA (Homo sapiens) CpG-island No: 33130
aactaatccgaaataaattccccgttcctctaactactaaccccgaacacaaaaccctccgtctcctaccgaaaaaaactcccccaaccgcctcgccacgccgcaacccgtccgcgcccgcgtccccgcttacttttcgtcgcaacgataaaattcttcccgtccttaataaactctttaataaacttattaatcctctcgaattccgcttcgtaaacgcgaatcctctcccgaaaccacgaactatcgaaataacaatcgctaaactccaaaaactacaaccccataacgacaacgatcgctacgcgatacgcacgaccgcgcgctcctacccgaaccgaactccgaaaccgctaccaaatacgacgccgcgcgttcaaaaaacacaaaaaaactaacaaacccgaacgcgcgacgaacgcgacacgaacatatcccgtaaaaccgaatcctacgacgcgaaaaaactaccaccgaaaccaacgctaactacgacgccccaatcccgacaacccccgccgaactctaaacgcccgcgaccccgccccgcccgacccccgcgcgacaaacactccccgaaacgccacccgaccgaacccgcgctcccgctcgtccccttctctttcctccgccttccttcttcctcccttcccttccctaaacgcctcttccttctcttccccacgcgcaactac

SEQ ID NO: 33131 - DNA, 695 bp, Artificial Sequence
  chemically treated genomic DNA (Homo sapiens) CpG-island No: 33131
ggttggttcggaatgaatttttcgtttttttggttgttggtttcggatataagatttttcgttttttgtcgagagaggtttttttagtcgtttcgttacgtcgtagttcgttcgcgttcgcgttttcgtttatttttcgtcgtagcgatgaggtttttttcgtttttaatgagttttttgatgaatttgttggttttttcgagtttcgtttcgtgagcgcggattttttttcggaattacgggttgtcgaggtagtagtcgttgaattttaggggttgtagttttatgacggtagcggtcgttgcgcggtgcgtacggtcgcgcgtttttgttcgagtcgagtttcgaggtcgttgttaggtgcggcgtcgcgcgtttagggagtatagaggagttagtaggttcgggcgcgcggcgagcgcggtacggatatgtttcgtagagtcgagttttgcggcgcggaggagttgttatcgagattagcgttagttgcggcgttttaatttcggtagttttcgtcgagttttgagcgttcgcggtttcgtttcgttcggttttcgcgcggtagatatttttcgaggcgttattcggtcgggttcgcgttttcgttcgtttttttttttttttttcgttttttttttttttttttttttttttttggacgtttttttttttttttttttacgcgtagttgt

SEQ ID NO: 33132 - DNA, 695 bp, Artificial Sequence
  chemically treated genomic DNA (Homo sapiens) CpG-island No: 33132
acaactacgcgtaaaaaaaaaaaaaaaaaaacgtccaaaaaaaaaaaaaaaaaaaaaaaaaaaacgaaaaaaaaaaaaaaaaacgaacgaaaacgcgaacccgaccgaataacgcctcgaaaaatatctaccgcgcgaaaaccgaacgaaacgaaaccgcgaacgctcaaaactcgacgaaaactaccgaaattaaaacgccgcaactaacgctaatctcgataacaactcctccgcgccgcaaaactcgactctacgaaacatatccgtaccgcgctcgccgcgcgcccgaacctactaactcctctatactccctaaacgcgcgacgccgcacctaacaacgacctcgaaactcgactcgaacaaaaacgcgcgaccgtacgcaccgcgcaacgaccgctaccgtcataaaactacaacccctaaaattcaacgactactacctcgacaacccgtaattccgaaaaaaaatccgcgctcacgaaacgaaactcgaaaaaaccaacaaattcatcaaaaaactcattaaaaacgaaaaaaacctcatcgctacgacgaaaaataaacgaaaacgcgaacgcgaacgaactacgacgtaacgaaacgactaaaaaaacctctctcgacaaaaaacgaaaaatcttatatccgaaaccaacaaccaaaaaaacgaaaaattcattccgaaccaacc

SEQ ID NO: 33133 - DNA, 530 bp, Artificial Sequence
  chemically treated genomic DNA (Homo sapiens) CpG-island No: 33133
tggttcgttttttttttattttcgttttagattttgtatattaggcgattggattggcgtaaattttcgtttatttgcgtcgtcgtttgggggtgttgtttcgtgacgttagggttgagttagggggcgttcgtttttggttgttcgtttttttcggttttgcggttttcgtttgttttttaaaagagcggggtttgcgtcggtcgcgttatatcgcggggattaggaggtacgttggtttttcggggtcgttttatcgcgttttttttttgcgtttcgttttttcggtttagtcgttattttttttttcgtataggggtcgtcgagcggggttatgtagttaacgttgttttttagttttttgggagtcgtggggttggcgggtgagtgggcgcggcgggtcggttagtatcgcggatagcgttagtttcgttttttttcgtcgttttcgtagttaggttggcggatttcgggagagagggagggttgaggggaaggtttattttttgtttcgtttttttttttttttg

SEQ ID NO: 33134 - DNA, 530 bp, Artificial Sequence
  chemically treated genomic DNA (Homo sapiens) CpG-island No: 33134
caaaaaaaaaaaaaaacgaaacaaaaaataaaccttcccctcaaccctccctctctcccgaaatccgccaacctaactacgaaaacgacgaaaaaaaacgaaactaacgctatccgcgatactaaccgacccgccgcgcccactcacccgccaaccccacgactcccaaaaaactaaaaaacaacgttaactacataaccccgctcgacgacccctatacgaaaaaaaaaataacgactaaaccgaaaaaacgaaacgcaaaaaaaaaacgcgataaaacgaccccgaaaaaccaacgtacctcctaatccccgcgatataacgcgaccgacgcaaaccccgctcttttaaaaaacaaacgaaaaccgcaaaaccgaaaaaaacgaacaaccaaaaacgaacgccccctaactcaaccctaacgtcacgaaacaacacccccaaacgacgacgcaaataaacgaaaatttacgccaatccaatcgcctaatatacaaaatctaaaacgaaaataaaaaaaaaacgaacca

SEQ ID NO: 33135 - DNA, 530 bp, Artificial Sequence
  chemically treated genomic DNA (Homo sapiens) CpG-island No: 33135
tagggaggagaagaaacgaagtaagaggtaaattttttttttaattttttttttttttcgggattcgttagtttggttgcgggagcggcggggaagagcgaggttggcgttgttcgcggtgttgatcggttcgtcgcgtttatttattcgttagttttacggtttttaggaggttgagaagtagcgttggttgtatggtttcgttcggcggtttttgtgcggaaaggaagatggcggttggatcggagaagcgaggcgtaggaggaaggcgcgatggagcggtttcggaaaattagcgtgttttttggttttcgcggtgtggcgcggtcggcgtaggtttcgtttttttaaagggtaggcgggggtcgtagggtcgggaggagcgggtagttaggagcgggcgttttttagtttagttttgacgttacgaagtagtatttttaggcggcgacgtaaatgggcggaaatttacgttagtttagtcgtttggtgtgtagggtttggagcgggggtgggggaaaggcgggtta

SEQ ID NO: 33136 - DNA, 530 bp, Artificial Sequence
  chemically treated genomic DNA (Homo sapiens) CpG-island No: 33136
taacccgcctttcccccacccccgctccaaaccctacacaccaaacgactaaactaacgtaaatttccgcccatttacgtcgccgcctaaaaatactacttcgtaacgtcaaaactaaactaaaaaacgcccgctcctaactacccgctcctcccgaccctacgacccccgcctaccctttaaaaaaacgaaacctacgccgaccgcgccacaccgcgaaaaccaaaaaacacgctaattttccgaaaccgctccatcgcgccttcctcctacgcctcgcttctccgatccaaccgccatcttcctttccgcacaaaaaccgccgaacgaaaccatacaaccaacgctacttctcaacctcctaaaaaccgtaaaactaacgaataaataaacgcgacgaaccgatcaacaccgcgaacaacgccaacctcgctcttccccgccgctcccgcaaccaaactaacgaatcccgaaaaaaaaaaaaaattaaaaaaaaaatttacctcttacttcgtttcttctcctcccta

SEQ ID NO: 33137 - DNA, 668 bp, Artificial Sequence
  chemically treated genomic DNA (Homo sapiens) CpG-island No: 33137
tgtatcgcgatgttggttatgttttcgttcgtagttgattcgtattcgtttttttcgttatcgttacgattatcggtatcgtcgttatttttttttttatcgttttttttttcggcgatttagatttgagtatacgaatattgttattattatttcggtcgtcgcgttcgttttagtgtggaattattttcgcgttcggttattaaaatggcgtcgggtcggcgtatgcgtacgacgttgattcggtcgggcggcgtagtcgttttcgttggagtttttatacgttcgagttacgagttcgcgtttcggttggggttgcggtcgcgtggtttcgttttgtcggcgtttggggtcgcgagggtgcggtttttaagttggtcggttttagtcggttttttcggtttttttcggcgttttcgtttttgtttaaattcgggtgttgtggtttgggtttttagcgttggtttttgatcgaaggttcgggcgtaatcgaacgggttttcgacgtcgtattcggttggaacgtcgttttgatttagttagattcggaattcggaggttgaacgtcgtgtttagcgtaggaaaacgttttttcggatttcggttcggtttatttttagttggtgtagttttagaaaatttattgtagtcgtttttgttttgtaata

SEQ ID NO: 33138 - DNA, 668 bp, Artificial Sequence
  chemically treated genomic DNA (Homo sapiens) CpG-island No: 33138
tattacaaaacaaaaacgactacaataaattttctaaaactacaccaactaaaaataaaccgaaccgaaatccgaaaaaacgttttcctacgctaaacacgacgttcaacctccgaattccgaatctaactaaatcaaaacgacgttccaaccgaatacgacgtcgaaaacccgttcgattacgcccgaaccttcgatcaaaaaccaacgctaaaaacccaaaccacaacacccgaatttaaacaaaaacgaaaacgccgaaaaaaaccgaaaaaaccgactaaaaccgaccaacttaaaaaccgcaccctcgcgaccccaaacgccgacaaaacgaaaccacgcgaccgcaaccccaaccgaaacgcgaactcgtaactcgaacgtataaaaactccaacgaaaacgactacgccgcccgaccgaatcaacgtcgtacgcatacgccgacccgacgccattttaataaccgaacgcgaaaataattccacactaaaacgaacgcgacgaccgaaataataataacaatattcgtatactcaaatctaaatcgccgaaaaaaaaaacgataaaaaaaaaaataacgacgataccgataatcgtaacgataacgaaaaaaacgaatacgaatcaactacgaacgaaaacataaccaacatcgcgataca

SEQ ID NO: 33139 - DNA, 668 bp, Artificial Sequence
  chemically treated genomic DNA (Homo sapiens) CpG-island No: 33139
tgttgtagaataaaaacgattgtagtagattttttggggttatattaattgaaaatgggtcggatcgagattcgggagagcgtttttttgcgttagatacggcgtttagttttcgggtttcgggtttagttgagttagggcggcgttttagtcgagtgcggcgtcggaaattcgttcggttgcgttcgaattttcggttagaggttagcgttggaagtttagattatagtattcgggtttaaataggagcggaggcgtcgggaagggtcgggggggtcggttagggtcggttagtttggaagtcgtattttcgcggttttagacgtcggtagggcggagttacgcggtcgtagttttagtcgagacgcgagttcgtggttcgggcgtatgggggttttaacgggagcggttgcgtcgttcggtcgggttaacgtcgtgcgtatgcgtcgattcggcgttattttggtggtcgggcgcggaggtgattttatattgaggcgagcgcggcggtcggggtggtagtggtagtgttcgtgtgtttaggtttgaatcgtcgagggaggaggcggtggaggaagaggtggcggcggtgtcggtggtcgtagcggtggcggaggaggcgggtacgaattagttgcgggcggagatatggttaatatcgcggtgta

SEQ ID NO: 33140 - DNA, 668 bp, Artificial Sequence
  chemically treated genomic DNA (Homo sapiens) CpG-island No: 33140
tacaccgcgatattaaccatatctccgcccgcaactaattcgtacccgcctcctccgccaccgctacgaccaccgacaccgccgccacctcttcctccaccgcctcctccctcgacgattcaaacctaaacacacgaacactaccactaccaccccgaccgccgcgctcgcctcaatataaaatcacctccgcgcccgaccaccaaaataacgccgaatcgacgcatacgcacgacgttaacccgaccgaacgacgcaaccgctcccgttaaaacccccatacgcccgaaccacgaactcgcgtctcgactaaaactacgaccgcgtaactccgccctaccgacgtctaaaaccgcgaaaatacgacttccaaactaaccgaccctaaccgacccccccgacccttcccgacgcctccgctcctatttaaacccgaatactataatctaaacttccaacgctaacctctaaccgaaaattcgaacgcaaccgaacgaatttccgacgccgcactcgactaaaacgccgccctaactcaactaaacccgaaacccgaaaactaaacgccgtatctaacgcaaaaaaacgctctcccgaatctcgatccgacccattttcaattaatataaccccaaaaaatctactacaatcgtttttattctacaaca

SEQ ID NO: 33141 - DNA, 589 bp, Artificial Sequence
  chemically treated genomic DNA (Homo sapiens) CpG-island No: 33141
gtggggagaaacgcgatgaaagcgtagtcggatattcgatatcggattaaggggatcgagaggataaaagggaaagagaaggaggtaaaaaggaagggatacgaagggaacgggaagaaatgaaggaggacggtaagagtattaaaggagtaggagaaggagggggggagattaacggggttcgcggagggagtcgggaaggaaaggggaggaagtagagaggcgacgaagtaatagaaagagaagacggacggggattcggaacgttaagggagaagcggcgcgaaaaatcgggcggaagcgcgacgagggagagcgaaagatcgcgggaaggggttagaggaaggggaaaaaaaggaggagaaaacgcgataagggaaagggaggagaaacgggcgcgggggggatacgagtcgagaaagagggtacgacgcggtagagagggcggagggcgaaggggatataattaaggagggacgaataaggaaaggtcgaaggaagcgaggggggagagacggacggggggaaaaggtaagtaggcggaggaaggggaggcgcgagagcgggcgtataaatagacggattggaa

SEQ ID NO: 33142 - DNA, 589 bp, Artificial Sequence
  chemically treated genomic DNA (Homo sapiens) CpG-island No: 33142
ttccaatccgtctatttatacgcccgctctcgcgcctccccttcctccgcctacttaccttttccccccgtccgtctctcccccctcgcttccttcgacctttccttattcgtccctccttaattatatccccttcgccctccgccctctctaccgcgtcgtaccctctttctcgactcgtatcccccccgcgcccgtttctcctccctttcccttatcgcgttttctcctcctttttttccccttcctctaaccccttcccgcgatctttcgctctccctcgtcgcgcttccgcccgatttttcgcgccgcttctcccttaacgttccgaatccccgtccgtcttctctttctattacttcgtcgcctctctacttcctcccctttccttcccgactccctccgcgaaccccgttaatctccccccctccttctcctactcctttaatactcttaccgtcctccttcatttcttcccgttcccttcgtatcccttcctttttacctccttctctttcccttttatcctctcgatccccttaatccgatatcgaatatccgactacgctttcatcgcgtttctccccac

SEQ ID NO: 33143 - DNA, 589 bp, Artificial Sequence
  chemically treated genomic DNA (Homo sapiens) CpG-island No: 33143
ttttagttcgtttgtttgtgcgttcgttttcgcgtttttttttttttcgtttgtttgtttttttttttcgttcgttttttttttttcgtttttttcggtttttttttgttcgtttttttttggttgtgtttttttcgtttttcgttttttttgtcgcgtcgtgttttttttttcggttcgtgtttttttcgcgttcgtttttttttttttttttttgtcgcgtttttttttttttttttttttttttttttggttttttttcgcgatttttcgttttttttcgtcgcgttttcgttcggtttttcgcgtcgttttttttttggcgtttcgggttttcgttcgttttttttttttgttgtttcgtcgtttttttgtttttttttttttttttttcggtttttttcgcgggtttcgttggttttttttttttttttttttgtttttttggtgtttttgtcgtttttttttattttttttcgtttttttcgtgtttttttttttttgttttttttttttttttttttgttttttcggtttttttggttcggtgtcggatgttcggttgcgtttttatcgcgtttttttttat

SEQ ID NO: 33144 - DNA, 589 bp, Artificial Sequence
  chemically treated genomic DNA (Homo sapiens) CpG-island No: 33144
ataaaaaaaaacgcgataaaaacgcaaccgaacatccgacaccgaaccaaaaaaaccgaaaaaacaaaaaaaaaaaaaaaaaaaacaaaaaaaaaaaaacacgaaaaaaacgaaaaaaaataaaaaaaaacgacaaaaacaccaaaaaaacaaaaaaaaaaaaaaaaaaaaccaacgaaacccgcgaaaaaaaccgaaaaaaaaaaaaaaaaaaacaaaaaaacgacgaaacaacaaaaaaaaaaaacgaacgaaaacccgaaacgccaaaaaaaaaacgacgcgaaaaaccgaacgaaaacgcgacgaaaaaaaacgaaaaatcgcgaaaaaaaaccaaaaaaaaaaaaaaaaaaaaaaaaaaaaacgcgacaaaaaaaaaaaaaaaaaaacgaacgcgaaaaaaacacgaaccgaaaaaaaaaacacgacgcgacaaaaaaaacgaaaaacgaaaaaaacacaaccaaaaaaaaacgaacaaaaaaaaaccgaaaaaaacgaaaaaaaaaaaacgaacgaaaaaaaaaaacaaacaaacgaaaaaaaaaaaaacgcgaaaacgaacgcacaaacaaacgaactaaaa

SEQ ID NO: 33145 - DNA, 529 bp, Artificial Sequence
  chemically treated genomic DNA (Homo sapiens) CpG-island No: 33145
tttcgtgagttcgtttaagttggagtcgcggcgcgttgagcgagtaggcggggcgggagcgtttatagttcggagttattaggcgttgacgaggagttcggttgagggaggatgcgtcgttgacgtttgcgggagtcgcgcgtttggggcgggaggatgttttagaggggtttttggtcgtggcgtacgcggttgttgtcgatttttggtatttggcgtttagcgcgttcgtggtcgttgtcgttttcgttttaggtaagagcgggtgtcgggttgtgggggttcggggtaggttggtgtaaagtttgcgttggataattttggcgggagtaaaagtcgagcggtcgagtagttaattgcgttttgttggttgtcgggtttcgcgcgtcgggcggtttcgataggtggtggtcgggcggtcgacgtgggttacggaggtttgggttgaggttaagatttcgggttcggggaaggtgaagttagagcgttgcggttggggggtgttttattcgggtcgagatagggtgcg

SEQ ID NO: 33146 - DNA, 529 bp, Artificial Sequence
  chemically treated genomic DNA (Homo sapiens) CpG-island No: 33146
cgcaccctatctcgacccgaataaaacaccccccaaccgcaacgctctaacttcaccttccccgaacccgaaatcttaacctcaacccaaacctccgtaacccacgtcgaccgcccgaccaccacctatcgaaaccgcccgacgcgcgaaacccgacaaccaacaaaacgcaattaactactcgaccgctcgacttttactcccgccaaaattatccaacgcaaactttacaccaacctaccccgaacccccacaacccgacacccgctcttacctaaaacgaaaacgacaacgaccacgaacgcgctaaacgccaaataccaaaaatcgacaacaaccgcgtacgccacgaccaaaaacccctctaaaacatcctcccgccccaaacgcgcgactcccgcaaacgtcaacgacgcatcctccctcaaccgaactcctcgtcaacgcctaataactccgaactataaacgctcccgccccgcctactcgctcaacgcgccgcgactccaacttaaacgaactcacgaaa

SEQ ID NO: 33147 - DNA, 529 bp, Artificial Sequence
  chemically treated genomic DNA (Homo sapiens) CpG-island No: 33147
cgtattttatttcggttcgggtgaggtattttttagtcgtagcgttttggttttatttttttcgggttcggagttttgattttagtttaggttttcgtgatttacgtcggtcgttcggttattatttgtcgggatcgttcggcgcgcggagttcggtagttagtaaaacgtagttgattgttcggtcgttcggtttttgttttcgttaaagttgtttaacgtaaattttgtattagtttatttcgaatttttatagttcggtattcgtttttatttggggcggaggcggtagcggttacgggcgcgttgggcgttaggtgttaggggtcggtagtagtcgcgtgcgttacggttagaggtttttttggagtattttttcgttttaggcgcgcggttttcgtaggcgttagcggcgtatttttttttagtcgggtttttcgttagcgtttggtggtttcgagttgtgggcgttttcgtttcgtttgttcgtttagcgcgtcgcggttttagtttgggcgggtttacggga

SEQ ID NO: 33148 - DNA, 529 bp, Artificial Sequence
  chemically treated genomic DNA (Homo sapiens) CpG-island No: 33148
tcccgtaaacccgcccaaactaaaaccgcgacgcgctaaacgaacaaacgaaacgaaaacgcccacaactcgaaaccaccaaacgctaacgaaaaacccgactaaaaaaaaatacgccgctaacgcctacgaaaaccgcgcgcctaaaacgaaaaaatactccaaaaaaacctctaaccgtaacgcacgcgactactaccgacccctaacacctaacgcccaacgcgcccgtaaccgctaccgcctccgccccaaataaaaacgaataccgaactataaaaattcgaaataaactaatacaaaatttacgttaaacaactttaacgaaaacaaaaaccgaacgaccgaacaatcaactacgttttactaactaccgaactccgcgcgccgaacgatcccgacaaataataaccgaacgaccgacgtaaatcacgaaaacctaaactaaaatcaaaactccgaacccgaaaaaaataaaaccaaaacgctacgactaaaaaatacctcacccgaaccgaaataaaatacg

SEQ ID NO: 33149 - DNA, 761 bp, Artificial Sequence
  chemically treated genomic DNA (Homo sapiens) CpG-island No: 33149
  unsure (240, 244)
ggcgtagtgggaaacggcgaggttgttagttcggtatagttagcgggatcgcgtgggggaggggtcgagcgtcgggggcggtttgaagttaggaaaagaattgagggagaaaattttttcgttattgataggaagcgttaggaggttcgtttaaggttttaagtaagttgacggagaattgatacgattttggttacgagtattgggcggaggaggagaagggtgaatgaatgggaaatntcgngtttaaggtttggcgcgagtttagtcgggaaggatcggtttttttcgggttagagatcgaattagatgtttacgtaggcgcgcgattttttcgtcgtaggtcggagggattcgaaggggggcgggaaaaggaattgtacggcgagaaaatcgaagttacgatttagaattcgtttttaattttttataatttcgcgttatggaataaatcgtcggaaatttacggtttaagggagtacgatttttgtggttttttagatgtttgggtcgtcgtttttaagagatttttatttatcgagtcgatcggatgtttgcgtaatatttttcgtcgtcgttttggttgtatatgcgtatattaaagttttcgattacgtcggatttcgttattgggcgtttgcgtaagagggtggggttttttttcgtcgttttggttagttagaagagcggttacgggaatgaagttcgtggatgattttaaaaaatagggtgaattataaggttaagggtttagtatgatt

SEQ ID NO: 33150 - DNA, 761 bp, Artificial Sequence
  chemically treated genomic DNA (Homo sapiens) CpG-island No: 33150
  unsure (518, 522)
aatcatactaaacccttaaccttataattcaccctattttttaaaatcatccacgaacttcattcccgtaaccgctcttctaactaaccaaaacgacgaaaaaaaaccccaccctcttacgcaaacgcccaataacgaaatccgacgtaatcgaaaactttaatatacgcatatacaaccaaaacgacgacgaaaaatattacgcaaacatccgatcgactcgataaataaaaatctcttaaaaacgacgacccaaacatctaaaaaaccacaaaaatcgtactcccttaaaccgtaaatttccgacgatttattccataacgcgaaattataaaaaattaaaaacgaattctaaatcgtaacttcgattttctcgccgtacaattccttttcccgccccccttcgaatccctccgacctacgacgaaaaaatcgcgcgcctacgtaaacatctaattcgatctctaacccgaaaaaaaccgatccttcccgactaaactcgcgccaaaccttaaacncganatttcccattcattcacccttctcctcctccgcccaatactcgtaaccaaaatcgtatcaattctccgtcaacttacttaaaaccttaaacgaacctcctaacgcttcctatcaataacgaaaaaattttctccctcaattcttttcctaacttcaaaccgcccccgacgctcgacccctcccccacgcgatcccgctaactataccgaactaacaacctcgccgtttcccactacgcc

SEQ ID NO: 33151 - DNA, 761 bp, Artificial Sequence
  chemically treated genomic DNA (Homo sapiens) CpG-island No: 33151
  unsure (518, 522)
aattatgttgggtttttagttttatggtttattttgttttttaagattatttacgggttttattttcgtaatcgtttttttagttggttaaggcggcgggaagaaattttatttttttgcgtaaacgtttagtagcggaattcggcgtggtcgagggttttagtgtgcgtatgtgtaattagagcggcggcgggaagtgttgcgtaggtattcgatcgattcggtaggtggggattttttggagacggcgatttaggtatttggggagttatagaagtcgtatttttttaaatcgtgagttttcgacggtttgttttatggcgcgggattgtgagggattaggaacgaattttggatcgtgatttcggttttttcgtcgtgtagttttttttttcgttttttttcggattttttcgatttgcggcgggaaagtcgcgcgtttacgtaagtatttggttcggtttttggttcgagggaagtcggtttttttcggttgagttcgcgttaggttttgggtncggnattttttatttatttattttttttttttttcgtttagtattcgtggttagggtcgtattagtttttcgttaatttgtttggggttttggacgagttttttggcgttttttgttagtggcgaaaaggtttttttttttagttttttttttgattttaaatcgttttcggcgttcggttttttttttacgcggtttcgttggttgtgtcggattggtagtttcgtcgttttttattgcgtt

SEQ ID NO: 33152 - DNA, 761 bp, Artificial Sequence
  chemically treated genomic DNA (Homo sapiens) CpG-island No: 33152
  unsure (240, 244)
aacgcaataaaaaacgacgaaactaccaatccgacacaaccaacgaaaccgcgtaaaaaaaaaaccgaacgccgaaaacgatttaaaatcaaaaaaaaaactaaaaaaaaaaaccttttcgccactaacaaaaaacgccaaaaaactcgtccaaaaccccaaacaaattaacgaaaaactaatacgaccctaaccacgaatactaaacgaaaaaaaaaaaaaataaataaataaaaaatnccgnacccaaaacctaacgcgaactcaaccgaaaaaaaccgacttccctcgaaccaaaaaccgaaccaaatacttacgtaaacgcgcgactttcccgccgcaaatcgaaaaaatccgaaaaaaaacgaaaaaaaaaactacacgacgaaaaaaccgaaatcacgatccaaaattcgttcctaatccctcacaatcccgcgccataaaacaaaccgtcgaaaactcacgatttaaaaaaatacgacttctataactccccaaatacctaaatcgccgtctccaaaaaatccccacctaccgaatcgatcgaatacctacgcaacacttcccgccgccgctctaattacacatacgcacactaaaaccctcgaccacgccgaattccgctactaaacgtttacgcaaaaaaataaaatttcttcccgccgccttaaccaactaaaaaaacgattacgaaaataaaacccgtaaataatcttaaaaaacaaaataaaccataaaactaaaaacccaacataatt

SEQ ID NO: 33153 - DNA, 572 bp, Artificial Sequence
  chemically treated genomic DNA (Homo sapiens) CpG-island No: 33153
gatcgtatcggcgtagtagggtcgttcggtcggtggtcgttttttgtagttcggtcggcgattcgcggttagtcgggggagcgtcgttcgcggggaatttcgggcgtacggggagttgggcggacggcggttttcgtttttttcggggacgcggtacgagacgcggggacgcgcggacgttacgtttagcggtcgttttcggtttcgcgtcgtttttttttcgggagtagtttcgacgcgcgcgggttcggatcgtcgggttgttatggtagtagttttatttttgatcgttattttttttcggtgtcgtttcggagcgagcgggttggcgggcggcgcggattgcgcgtttatttcgacggcgggcgtttattttaattttcgtcgcgtttatcgggttggggatgtttgcggggatgagttcgtatcgcgtttatttcgtttcgtttcgatattcgcgttagcggagagaacgcggcgtttttcgtagcggttttttttatagaggggcggggtggggggagcggggagggagaggggagggcgggagagggagttttggggaaagtagt

SEQ ID NO: 33154 - DNA, 572 bp, Artificial Sequence
  chemically treated genomic DNA (Homo sapiens) CpG-island No: 33154
actactttccccaaaactccctctcccgccctcccctctccctccccgctccccccaccccgcccctctataaaaaaaaccgctacgaaaaacgccgcgttctctccgctaacgcgaatatcgaaacgaaacgaaataaacgcgatacgaactcatccccgcaaacatccccaacccgataaacgcgacgaaaattaaaataaacgcccgccgtcgaaataaacgcgcaatccgcgccgcccgccaacccgctcgctccgaaacgacaccgaaaaaaaataacgatcaaaaataaaactactaccataacaacccgacgatccgaacccgcgcgcgtcgaaactactcccgaaaaaaaaacgacgcgaaaccgaaaacgaccgctaaacgtaacgtccgcgcgtccccgcgtctcgtaccgcgtccccgaaaaaaacgaaaaccgccgtccgcccaactccccgtacgcccgaaattccccgcgaacgacgctcccccgactaaccgcgaatcgccgaccgaactacaaaaaacgaccaccgaccgaacgaccctactacgccgatacgatc

SEQ ID NO: 33155 - DNA, 572 bp, Artificial Sequence
  chemically treated genomic DNA (Homo sapiens) CpG-island No: 33155
gttgttttttttagaattttttttttcgttttttttttttttttttcgttttttttatttcgtttttttgtaggggaagtcgttgcgaggggcgtcgcgtttttttcgttggcgcgggtgtcgggacggagcgaagtgggcgcggtgcgggtttattttcgtaggtatttttagttcggtgggcgcggcggaggttaaggtgggcgttcgtcgtcgggatgagcgcgtagttcgcgtcgttcgttagttcgttcgtttcgaggcggtatcgggagaaagtggcggttagggatggagttgttgttatgataattcggcggttcgggttcgcgcgcgtcggggttgttttcgggaggaaggcggcgcggagtcgggggcggtcgttgagcgtggcgttcgcgcgttttcgcgtttcgtgtcgcgttttcggaggaagcgggggtcgtcgttcgtttagtttttcgtgcgttcggagtttttcgcgggcggcgttttttcggttggtcgcgagtcgtcgatcgggttgtagaggacggttatcgatcggacgattttgttgcgtcggtgcggtt

SEQ ID NO: 33156 - DNA, 572 bp, Artificial Sequence
  chemically treated genomic DNA (Homo sapiens) CpG-island No: 33156
aaccgcaccgacgcaacaaaatcgtccgatcgataaccgtcctctacaacccgatcgacgactcgcgaccaaccgaaaaaacgccgcccgcgaaaaactccgaacgcacgaaaaactaaacgaacgacgacccccgcttcctccgaaaacgcgacacgaaacgcgaaaacgcgcgaacgccacgctcaacgaccgcccccgactccgcgccgccttcctcccgaaaacaaccccgacgcgcgcgaacccgaaccgccgaattatcataacaacaactccatccctaaccgccactttctcccgataccgcctcgaaacgaacgaactaacgaacgacgcgaactacgcgctcatcccgacgacgaacgcccaccttaacctccgccgcgcccaccgaactaaaaatacctacgaaaataaacccgcaccgcgcccacttcgctccgtcccgacacccgcgccaacgaaaaaaacgcgacgcccctcgcaacgacttcccctacaaaaaaacgaaataaaaaaaacgaaaaaaaaaaaaaaaaaacgaaaaaaaaaattctaaaaaaaacaac

SEQ ID NO: 33157 - DNA, 541 bp, Artificial Sequence
  chemically treated genomic DNA (Homo sapiens) CpG-island No: 33157
  unsure (412, 430)
ttttttgattaaaacggaatgtgcgaggtgtggaaggaagaggggtcgttcgcggagttttgcgggatatcgcggcgttcgagtttacgagtttttcgtagttgggataaggaagttcgagttcgtcgtttgaggttttcgcgtcgtttagttgatacgcgtcgtcgataaaggttcgttatttttttacggttcgcgtttcgtatcgcggcggattcgcgtttttttatcggcgtacgtagatagcgagtgagttatttttttttatttttttagagtttattatacggcgggattagtttattttaggtaggttaaatttaaagtatataatttgcgttcgggcgttatttttatttttcgtcgttttttttttgtttcgtttcggttcggttttagttcggcgattttncgttgttgttttaagcgntagtagttatttattggcggcggcggggtttcgggtggggttcgcggagtcggtgttcgtgtagaagaggtggggtgagggtttttatttttagaaggcgggttttttggg

SEQ ID NO: 33158 - DNA, 541 bp, Artificial Sequence
  chemically treated genomic DNA (Homo sapiens) CpG-island No: 33158
  unsure (112, 130)
cccaaaaaacccgccttctaaaaataaaaaccctcaccccacctcttctacacgaacaccgactccgcgaaccccacccgaaaccccgccgccgccaataaataactactancgcttaaaacaacaacgnaaaatcgccgaactaaaaccgaaccgaaacgaaacaaaaaaaaaacgacgaaaaataaaaataacgcccgaacgcaaattatatactttaaatttaacctacctaaaataaactaatcccgccgtataataaactctaaaaaaataaaaaaaaataactcactcgctatctacgtacgccgataaaaaaacgcgaatccgccgcgatacgaaacgcgaaccgtaaaaaaataacgaacctttatcgacgacgcgtatcaactaaacgacgcgaaaacctcaaacgacgaactcgaacttccttatcccaactacgaaaaactcgtaaactcgaacgccgcgatatcccgcaaaactccgcgaacgacccctcttccttccacacctcgcacattccgttttaatcaaaaaa

SEQ ID NO: 33159 - DNA, 541 bp, Artificial Sequence
  chemically treated genomic DNA (Homo sapiens) CpG-island No: 33159
  unsure (112, 130)
tttagagagttcgttttttggaggtagagatttttattttattttttttgtacgggtatcggtttcgcggattttattcgagatttcgtcgtcgttagtgggtaattgttgncgtttagggtagtagcgnggggtcgtcgggttggggtcgggtcggggcggggtaggggaagggcggcggggagtggaggtggcgttcgagcgtaggttgtgtattttgggtttgatttgtttgagatgagttaatttcgtcgtataatagattttggggagatagggaaagatggtttattcgttatttgcgtgcgtcgatgggggagcgcgagttcgtcgcggtgcggggcgcgagtcgtggaaaaatgacgagtttttgtcggcggcgcgtgttagttagacggcgcggggattttaggcggcgggttcgggtttttttgttttagttgcgagaggttcgtgggttcggacgtcgcggtgtttcgtaaagtttcgcggacggttttttttttttttatatttcgtatatttcgttttggttaagaaa

SEQ ID NO: 33160 - DNA, 541 bp, Artificial Sequence
  chemically treated genomic DNA (Homo sapiens) CpG-island No: 33160
  unsure (412, 430)
tttcttaaccaaaacgaaatatacgaaatataaaaaaaaaaaaaaccgtccgcgaaactttacgaaacaccgcgacgtccgaacccacgaacctctcgcaactaaaacaaaaaaacccgaacccgccgcctaaaatccccgcgccgtctaactaacacgcgccgccgacaaaaactcgtcatttttccacgactcgcgccccgcaccgcgacgaactcgcgctcccccatcgacgcacgcaaataacgaataaaccatctttccctatctccccaaaatctattatacgacgaaattaactcatctcaaacaaatcaaacccaaaatacacaacctacgctcgaacgccacctccactccccgccgcccttcccctaccccgccccgacccgaccccaacccgacgaccccncgctactaccctaaacgncaacaattacccactaacgacgacgaaatctcgaataaaatccgcgaaaccgatacccgtacaaaaaaaataaaataaaaatctctacctccaaaaaacgaactctctaaa

SEQ ID NO: 33161 - DNA, 1005 bp, Artificial Sequence
  chemically treated genomic DNA (Homo sapiens) CpG-island No: 33161
gcgtcgggggttgtggtttgggttcgagcgttttatattagcgtttttcggggaggttgtgggaggggttcgtgcgattatagacgttgtttcggagttagcgttttggacggaaggtgggagtcgcggatcggggagtcgcggagagggaggcgttaggaaatgtttcgcgttaggtcgtcggggttcggttggcgttggagatttcggtaattagcgtttgggacggagaggtcgtattttgaggattaagggagtcgagggcggtttggaacggggaaggcggcgttgacggagacggaatgtgggacgaaggatagcgggaggtatcgacgcgtaattgttttagtcgcgcggatggtacggatcgatcgttttgttatttttagttcgagacgtttcgtcgtttcgtttttgtagttgagagtcgagtagtttttagttttagttcgttcgtttcgtatttcgttcgcgttttcgtcggcgtttaaattatcgttcgttcgtttcgttcgggtaggtttggcgttcgcgggttacgtttcgttttatatttatttttttgttcgtttcgtttttcgtatcgttagcgaacgtacgttacgtcggcgcgtaaacgttattttcggggtttttgattttggacgggaggaagtgcgagtggatttaaagggtcgagcggagtggggtatcgttttgacgtttaagagtaaatggaagagggcggttttcggggtaaaggtggggcgttggggagtttcggagaaatcggcgttttttagtttgtcgtttagtttttgttttcggttttcgacgcgtaatagttggagggcgacgttgcgttcgcggcgatttttgggttgcggtcgcggtggtagcgcgaatgggaggtggagcggagttattgcgtcgagggacgttttagaaattttgttttagtttttcgcggattttaggatgtgataggtgttcgagttaaaaggttttaaggcgatcggttgattt

SEQ ID NO: 33162 - DNA, 1005 bp, Artificial Sequence
  chemically treated genomic DNA (Homo sapiens) CpG-island No: 33162
aaatcaaccgatcgccttaaaaccttttaactcgaacacctatcacatcctaaaatccgcgaaaaactaaaacaaaatttctaaaacgtccctcgacgcaataactccgctccacctcccattcgcgctaccaccgcgaccgcaacccaaaaatcgccgcgaacgcaacgtcgccctccaactattacgcgtcgaaaaccgaaaacaaaaactaaacgacaaactaaaaaacgccgatttctccgaaactccccaacgccccacctttaccccgaaaaccgccctcttccatttactcttaaacgtcaaaacgataccccactccgctcgaccctttaaatccactcgcacttcctcccgtccaaaatcaaaaaccccgaaaataacgtttacgcgccgacgtaacgtacgttcgctaacgatacgaaaaacgaaacgaacaaaaaaataaatataaaacgaaacgtaacccgcgaacgccaaacctacccgaacgaaacgaacgaacgataatttaaacgccgacgaaaacgcgaacgaaatacgaaacgaacgaactaaaactaaaaactactcgactctcaactacaaaaacgaaacgacgaaacgtctcgaactaaaaataacaaaacgatcgatccgtaccatccgcgcgactaaaacaattacgcgtcgatacctcccgctatccttcgtcccacattccgtctccgtcaacgccgccttccccgttccaaaccgccctcgactcccttaatcctcaaaatacgacctctccgtcccaaacgctaattaccgaaatctccaacgccaaccgaaccccgacgacctaacgcgaaacatttcctaacgcctccctctccgcgactccccgatccgcgactcccaccttccgtccaaaacgctaactccgaaacaacgtctataatcgcacgaacccctcccacaacctccccgaaaaacgctaatataaaacgctcgaacccaaaccacaacccccgacgc

SEQ ID NO: 33163 - DNA, 1005 bp, Artificial Sequence
  chemically treated genomic DNA (Homo sapiens) CpG-island No: 33163
ggattaatcgatcgttttaagattttttaattcgaatatttgttatattttaggattcgcgaaggattgaaatagagtttttgaagcgtttttcggcgtagtagtttcgttttattttttattcgcgttattatcgcggtcgtagtttaggagtcgtcgcggacgtagcgtcgttttttagttgttgcgcgtcggaagtcggaagtagggattgagcgatagattaggaaacgtcggttttttcggggttttttagcgttttatttttatttcggaggtcgtttttttttatttgtttttgggcgttagggcggtattttatttcgttcgattttttggatttattcgtattttttttcgtttagagttaaaggtttcggaagtgacgtttacgcgtcggcgtaacgtgcgttcgttggcggtgcggggggcggggcgagtaggagggtgggtgtgaggcgggacgtggttcgcggacgttagatttattcgggcgaagcgggcgagcggtggtttggacgtcggcggagacgcgggcgaggtacggagcggacggattggggttgagagttgttcggtttttagttataggagcggggcggcggggcgtttcgggttgggggtggtagggcggtcggttcgtgttattcgcgcggttggggtagttgcgcgtcggtgtttttcgttgtttttcgttttatatttcgttttcgttagcgtcgtttttttcgttttaggtcgttttcggtttttttaatttttagagtgcggttttttcgttttagacgttagttgtcgggatttttagcgttagtcgagtttcgacggtttgacgcggagtattttttggcgttttttttttcgcggtttttcggttcgcggtttttatttttcgtttaaggcgttggtttcgaagtagcgtttgtggtcgtacgggttttttttataattttttcggaaagcgttggtatgggacgttcggatttagattatagttttcggcgt

SEQ ID NO: 33164 - DNA, 1005 bp, Artificial Sequence
  chemically treated genomic DNA (Homo sapiens) CpG-island No: 33164
acgccgaaaactataatctaaatccgaacgtcccataccaacgctttccgaaaaaattataaaaaaaacccgtacgaccacaaacgctacttcgaaaccaacgccttaaacgaaaaataaaaaccgcgaaccgaaaaaccgcgaaaaaaaaaacgccaaaaaatactccgcgtcaaaccgtcgaaactcgactaacgctaaaaatcccgacaactaacgtctaaaacgaaaaaaccgcactctaaaaattaaaaaaaccgaaaacgacctaaaacgaaaaaaacgacgctaacgaaaacgaaatataaaacgaaaaacaacgaaaaacaccgacgcgcaactaccccaaccgcgcgaataacacgaaccgaccgccctaccacccccaacccgaaacgccccgccgccccgctcctataactaaaaaccgaacaactctcaaccccaatccgtccgctccgtacctcgcccgcgtctccgccgacgtccaaaccaccgctcgcccgcttcgcccgaataaatctaacgtccgcgaaccacgtcccgcctcacacccaccctcctactcgccccgccccccgcaccgccaacgaacgcacgttacgccgacgcgtaaacgtcacttccgaaacctttaactctaaacgaaaaaaaatacgaataaatccaaaaaatcgaacgaaataaaataccgccctaacgcccaaaaacaaataaaaaaaaacgacctccgaaataaaaataaaacgctaaaaaaccccgaaaaaaccgacgtttcctaatctatcgctcaatccctacttccgacttccgacgcgcaacaactaaaaaacgacgctacgtccgcgacgactcctaaactacgaccgcgataataacgcgaataaaaaataaaacgaaactactacgccgaaaaacgcttcaaaaactctatttcaatccttcgcgaatcctaaaatataacaaatattcgaattaaaaaatcttaaaacgatcgattaatcc

SEQ ID NO: 33165 - DNA, 521 bp, Artificial Sequence
  chemically treated genomic DNA (Homo sapiens) CpG-island No: 33165
cggttttcgtttaggaagttttatttagcgggagttatgacgtcgcggcgtcggtagagtttacgagcgattcggcgagggcgcgtgcggcgtgacgacgcgattcgcggcgcgtttcgtgacgttatcgcgttcgtttttgaaagttggcgttcggggtcgttttttatgttgttttgcgttaatttttttttttattttttttttttcgttttttattcgtcgttcggtcggtttttttattcgtttttttttttattagtattcgcggtttcggtagcgtcgacgtaggcgtattgtatcgcgtcgtcgttattttgtgtttgagtttgtggagcgattaaatcgtgcgcggagttgtttttttggcggtagcggcggcggcggttgtcggtgcggacgttcggagtttcgtcggaaacgtcgggtggttcgaatcgtggaacggcggttggatcggttttttttagggggggcggttgatatattttggcggttttttgtttgttttttattttttt

SEQ ID NO: 33166 - DNA, 521 bp, Artificial Sequence
  chemically treated genomic DNA (Homo sapiens) CpG-island No: 33166
aaaaaaataaaaaacaaacaaaaaaccgccaaaatatatcaaccgccccccctaaaaaaaaccgatccaaccgccgttccacgattcgaaccacccgacgtttccgacgaaactccgaacgtccgcaccgacaaccgccgccgccgctaccgccaaaaaaacaactccgcgcacgatttaatcgctccacaaactcaaacacaaaataacgacgacgcgatacaatacgcctacgtcgacgctaccgaaaccgcgaatactaataaaaaaaaaaacgaataaaaaaaccgaccgaacgacgaataaaaaacgaaaaaaaaaaaataaaaaaaaaaattaacgcaaaacaacataaaaaacgaccccgaacgccaactttcaaaaacgaacgcgataacgtcacgaaacgcgccgcgaatcgcgtcgtcacgccgcacgcgccctcgccgaatcgctcgtaaactctaccgacgccgcgacgtcataactcccgctaaataaaacttcctaaacgaaaaccg

SEQ ID NO: 33167 - DNA, 521 bp, Artificial Sequence
  chemically treated genomic DNA (Homo sapiens) CpG-island No: 33167
ggagagatgaggagtaggtagggggtcgttagagtatgttagtcgttttttttagagggagtcggtttagtcgtcgttttacggttcgggttattcggcgttttcggcgaagtttcgggcgttcgtatcggtaatcgtcgtcgtcgttgtcgttaaagaaatagtttcgcgtacggtttaatcgttttataggtttagatataaaatggcggcggcgcggtgtagtgcgtttgcgtcggcgttgtcggggtcgcgggtgttgataagggaagggacgggtggggggatcggtcgggcggcgagtagagggcgggggaggaaaggtgaggggaggggttggcgtagggtagtatgggaggcggtttcgggcgttaatttttaaaagcgggcgcgatggcgttacgggacgcgtcgcgagtcgcgtcgttacgtcgtacgcgttttcgtcgggtcgttcgtgggttttgtcggcgtcgcggcgttatggttttcgttgggtggggttttttgggcggaggtcg

SEQ ID NO: 33168 - DNA, 521 bp, Artificial Sequence
  chemically treated genomic DNA (Homo sapiens) CpG-island No: 33168
cgacctccgcccaaaaaaccccacccaacgaaaaccataacgccgcgacgccgacaaaacccacgaacgacccgacgaaaacgcgtacgacgtaacgacgcgactcgcgacgcgtcccgtaacgccatcgcgcccgcttttaaaaattaacgcccgaaaccgcctcccatactaccctacgccaacccctcccctcacctttcctcccccgccctctactcgccgcccgaccgatccccccacccgtcccttcccttatcaacacccgcgaccccgacaacgccgacgcaaacgcactacaccgcgccgccgccattttatatctaaacctataaaacgattaaaccgtacgcgaaactatttctttaacgacaacgacgacgacgattaccgatacgaacgcccgaaacttcgccgaaaacgccgaataacccgaaccgtaaaacgacgactaaaccgactccctctaaaaaaaacgactaacatactctaacgaccccctacctactcctcatctctcc

SEQ ID NO: 33169 - DNA, 613 bp, Artificial Sequence
  chemically treated genomic DNA (Homo sapiens) CpG-island No: 33169
  unsure (54)
tcgagtcgtcgcgtaaattggcgtgttttttagattcgtcgttcgttagcgagntaatcggaatcggaattcgtcgcggttattattattgagcgttgcggggagggggagtaaggatcggacgagacgttacgtttgaaaataggcggcgggcgagggacgaggtttattacggtattacgcgagtggaaagggtcgttttcgttagcggcggtttatattagtttatcgaggggcggtagcgcgcggttcggttgtcggatcgtattatttcgggcggtggagtcgtcgaggaggggcgcgcgcgatcgaaggcgtattcgggaggtttaggtagttcgggggtcggtgttggggcgtcggtaggtcgttttcgtttcgatttattcggagttagttttttttgcggatacgatattttatggggacggtggcgcgaaacgttttattttgtcgtatttaaattttgtagatttttagtttttttgggcggtcgcgatttttcgttttttcgtttgtcgttgagggttcgcggcgtatataataggttttttagaagggttaagaggtagaggtagaagaaatacggattttaatgaagagtttttttttt

SEQ ID NO: 33170 - DNA, 613 bp, Artificial Sequence
  chemically treated genomic DNA (Homo sapiens) CpG-island No: 33170
  unsure (560)
aaaaaaaaaactcttcattaaaatccgtatttcttctacctctacctcttaacccttctaaaaaacctattatatacgccgcgaaccctcaacgacaaacgaaaaaacgaaaaatcgcgaccgcccaaaaaaactaaaaatctacaaaatttaaatacgacaaaataaaacgtttcgcgccaccgtccccataaaatatcgtatccgcaaaaaaaactaactccgaataaatcgaaacgaaaacgacctaccgacgccccaacaccgacccccgaactacctaaacctcccgaatacgccttcgatcgcgcgcgcccctcctcgacgactccaccgcccgaaataatacgatccgacaaccgaaccgcgcgctaccgcccctcgataaactaatataaaccgccgctaacgaaaacgaccctttccactcgcgtaataccgtaataaacctcgtccctcgcccgccgcctattttcaaacgtaacgtctcgtccgatccttactccccctccccgcaacgctcaataataataaccgcgacgaattccgattccgattanctcgctaacgaacgacgaatctaaaaaacacgccaatttacgcgacgactcga

SEQ ID NO: 33171 - DNA, 613 bp, Artificial Sequence
  chemically treated genomic DNA (Homo sapiens) CpG-island No: 33171
  unsure (560)
aaagggaaaattttttattaaagttcgtattttttttatttttgttttttaatttttttgggaagtttattgtgtacgtcgcgggtttttagcggtagacggggaggcgggaggtcgcggtcgtttagggaagttgggggtttgtagagtttgggtgcggtagagtggggcgtttcgcgttatcgtttttatgggatgtcgtgttcgtagagggggttggtttcgggtgggtcgaggcgggaacggtttgtcggcgttttagtatcggttttcgggttatttgggtttttcgggtgcgttttcggtcgcgcgcgttttttttcggcggttttatcgttcgggatggtacggttcggtagtcgggtcgcgcgttgtcgtttttcggtgagttggtgtgggtcgtcgttagcggagacgattttttttattcgcgtggtgtcgtggtaagtttcgtttttcgttcgtcgtttgtttttaggcgtagcgtttcgttcggtttttgtttttttttttcgtagcgtttagtggtggtggtcgcgacgagtttcggtttcggttgnttcgttggcgggcggcgagtttggagagtacgttagtttgcgcggcggttcgg

SEQ ID NO: 33172 - DNA, 613 bp, Artificial Sequence
  chemically treated genomic DNA (Homo sapiens) CpG-island No: 33172
  unsure (54)
ccgaaccgccgcgcaaactaacgtactctccaaactcgccgcccgccaacgaancaaccgaaaccgaaactcgtcgcgaccaccaccactaaacgctacgaaaaaaaaaaacaaaaaccgaacgaaacgctacgcctaaaaacaaacgacgaacgaaaaacgaaacttaccacgacaccacgcgaataaaaaaaatcgtctccgctaacgacgacccacaccaactcaccgaaaaacgacaacgcgcgacccgactaccgaaccgtaccatcccgaacgataaaaccgccgaaaaaaaacgcgcgcgaccgaaaacgcacccgaaaaacccaaataacccgaaaaccgatactaaaacgccgacaaaccgttcccgcctcgacccacccgaaaccaaccccctctacgaacacgacatcccataaaaacgataacgcgaaacgccccactctaccgcacccaaactctacaaacccccaacttccctaaacgaccgcgacctcccgcctccccgtctaccgctaaaaacccgcgacgtacacaataaacttcccaaaaaaattaaaaaacaaaaataaaaaaaatacgaactttaataaaaaattttcccttt

SEQ ID NO: 33173 - DNA, 1532 bp, Artificial Sequence
  chemically treated genomic DNA (Homo sapiens) CpG-island No: 33173
atttatcgtttttggtaggacgtggagttgttcggaagttatttcgggttggtttttttattcgtgtgttacgatttttcggcgggtttttgtcgttcgagtgtttttatcgttagttttcggagcggcggagtttcggttttttcgagtacgagcggtttgttttgtttgtttagttttcgtttagttcgttgtcggtttcgttttttcgagcgttcgaggattgggaggggtggaatagggttttttcgattttcggggattttttgcggggcgttttaattaatttttagggtttaaggttacgcgttcggtagtcggttttttcggagcgttttcgacgcgagtttcggcgtcgtttcgttttggtttttttttcggattcgttggggttgattttgcgtttttggtcgcggggtttttttcggtttttcgtttttatttttcgcgatttaggagtcgttagtgtttcgaggttttttcggtttaaggcgttcgggggcggtgcggggcgttttttgcgcgattaattcggtttcgaagttggttaatttggtttcgggcggggcgcgcggagtttgtttaagttaggttggacgacgtttggggagggggcggcggggtacgcgggatagggttaggtcggcgggggtttcggggagtaggggtcgggtcgtatttatttggggggtcggcggcggcggcgagtttggcgttcgcgggcggcggcggcggcggtaggagcggcggcggtagtagtagtagtagtagtagtagcgcggggtagagtaggcggcgagcggttttcgtcggcggatttatggtagtcggattgtagtcggggtttcgtattcgtagtcggcgcgaaagtttttcgcgagtcgtttagtttatatttgggggtagttggagtcgttcgtagttgtagtatcgtagggcgcggggcggaggaggcgaggcgcggaggggcgggcgggggagcgcggagggaaggcggggagagggaaggagcgagcgagcgaagggaggtaggcgggagggagggaggcgagcgaggggggtagggtaggaggaacggagagagtagtttgcgagatatagatgatggattacgagtataataattagagaagtaggatcgagatagaacgaacgcgtacgattaattatatgacgtagacgataggtcgagatcgagcgaatttcgagcgagaaggaatcggtagaaatgcgtagaggacgtatagggtaatagtattagcggggtttagaaagaggagagcgatacgaggagagaaggagaaagatttatacgaagggggagaacgacgagtcgcgagagggtagaaaggtagtagggagacggaatagatacgaaattatataagggggagggtagaaagattcgtgtcgataagcgtatatagggggcgtacgcgtgacgtagaagagcgagtttatataataaatcgtgtacggatgaaagtgtttttatggtgcggcgtttggagatattgggagatgtatttata

SEQ ID NO: 33174 - DNA, 1532 bp, Artificial Sequence
  chemically treated genomic DNA (Homo sapiens) CpG-island No: 33174
tataaatacatctcccaatatctccaaacgccgcaccataaaaacactttcatccgtacacgatttattatataaactcgctcttctacgtcacgcgtacgccccctatatacgcttatcgacacgaatctttctaccctcccccttatataatttcgtatctattccgtctccctactacctttctaccctctcgcgactcgtcgttctcccccttcgtataaatctttctccttctctcctcgtatcgctctcctctttctaaaccccgctaatactattaccctatacgtcctctacgcatttctaccgattccttctcgctcgaaattcgctcgatctcgacctatcgtctacgtcatataattaatcgtacgcgttcgttctatctcgatcctacttctctaattattatactcgtaatccatcatctatatctcgcaaactactctctccgttcctcctaccctacccccctcgctcgcctccctccctcccgcctacctcccttcgctcgctcgctccttccctctccccgccttccctccgcgctcccccgcccgcccctccgcgcctcgcctcctccgccccgcgccctacgatactacaactacgaacgactccaactacccccaaatataaactaaacgactcgcgaaaaactttcgcgccgactacgaatacgaaaccccgactacaatccgactaccataaatccgccgacgaaaaccgctcgccgcctactctaccccgcgctactactactactactactactaccgccgccgctcctaccgccgccgccgccgcccgcgaacgccaaactcgccgccgccgccgaccccccaaataaatacgacccgacccctactccccgaaacccccgccgacctaaccctatcccgcgtaccccgccgccccctccccaaacgtcgtccaacctaacttaaacaaactccgcgcgccccgcccgaaaccaaattaaccaacttcgaaaccgaattaatcgcgcaaaaaacgccccgcaccgcccccgaacgccttaaaccgaaaaaacctcgaaacactaacgactcctaaatcgcgaaaaataaaaacgaaaaaccgaaaaaaaccccgcgaccaaaaacgcaaaatcaaccccaacgaatccgaaaaaaaaaccaaaacgaaacgacgccgaaactcgcgtcgaaaacgctccgaaaaaaccgactaccgaacgcgtaaccttaaaccctaaaaattaattaaaacgccccgcaaaaaatccccgaaaatcgaaaaaaccctattccacccctcccaatcctcgaacgctcgaaaaaacgaaaccgacaacgaactaaacgaaaactaaacaaacaaaacaaaccgctcgtactcgaaaaaaccgaaactccgccgctccgaaaactaacgataaaaacactcgaacgacaaaaacccgccgaaaaatcgtaacacacgaataaaaaaaccaacccgaaataacttccgaacaactccacgtcctaccaaaaacgataaat

SEQ ID NO: 33175 - DNA, 1532 bp, Artificial Sequence
  chemically treated genomic DNA (Homo sapiens) CpG-island No: 33175
tgtgggtgtattttttagtgtttttaagcgtcgtattataagggtatttttattcgtgtacggtttattgtgtgaattcgtttttttgcgttacgcgtgcgttttttgtgtacgtttatcggtacgagtttttttgtttttttttttgtgtggtttcgtgtttgtttcgtttttttgttgtttttttgttttttcgcggttcgtcgtttttttttttcgtgtgggttttttttttttttttttcgtgtcgtttttttttttttgagtttcgttggtattgttgttttatgcgttttttacgtatttttatcggttttttttcgttcgagattcgttcgatttcggtttatcgtttacgttatgtggttagtcgtgcgcgttcgttttgtttcggttttgtttttttaattattgtgttcgtggtttattatttatgtttcgtaggttgtttttttcgttttttttattttatttttttcgttcgtttttttttttttcgtttgttttttttcgttcgttcgtttttttttttttttcgtttttttttcgcgttttttcgttcgttttttcgcgtttcgtttttttcgtttcgcgttttgcggtgttgtagttgcgggcggttttagttgtttttagatgtgggttgggcggttcgcggggaattttcgcgtcggttgcgagtgcggggtttcggttgtagttcggttgttatggattcgtcggcgggagtcgttcgtcgtttgttttgtttcgcgttgttgttgttgttgttgttgttgtcgtcgtcgtttttgtcgtcgtcgtcgtcgttcgcgaacgttaggttcgtcgtcgtcgtcgattttttaggtaggtgcggttcggtttttatttttcgggattttcgtcggtttggttttgtttcgcgtgtttcgtcgttttttttttaggcgtcgtttagtttgatttgggtaaatttcgcgcgtttcgttcggggttaagttggttaatttcggggtcgggttggtcgcgtagggggcgtttcgtatcgttttcgagcgttttgggtcgggggagtttcggagtattggcggtttttgagtcgcggagggtggggacggagggtcgggaaaagtttcgcggttaagagcgtagagttagttttagcgggttcgaggggggagttagggcgaggcggcgtcggggttcgcgtcggggacgtttcggaggagtcggttgtcgagcgcgtagttttgggttttaaggattggttggggcgtttcgtagggaattttcggagatcggagggattttgttttattttttttagttttcgggcgttcggggagacggggtcggtagcgggttgagcgggagttggataggtaggataggtcgttcgtgttcggggaagtcgagatttcgtcgtttcggaggttggcggtgagggtattcgggcggtaggggttcgtcgaggggtcgtggtatacgggtaagggggttaattcggaatggttttcgagtagttttacgttttgttaaggacggtaggt

SEQ ID NO: 33176 - DNA, 1532 bp, Artificial Sequence
  chemically treated genomic DNA (Homo sapiens) CpG-island No: 33176
acctaccgtccttaacaaaacgtaaaactactcgaaaaccattccgaattaacccccttacccgtataccacgacccctcgacgaacccctaccgcccgaataccctcaccgccaacctccgaaacgacgaaatctcgacttccccgaacacgaacgacctatcctacctatccaactcccgctcaacccgctaccgaccccgtctccccgaacgcccgaaaactaaaaaaaataaaacaaaatccctccgatctccgaaaattccctacgaaacgccccaaccaatccttaaaacccaaaactacgcgctcgacaaccgactcctccgaaacgtccccgacgcgaaccccgacgccgcctcgccctaactcccccctcgaacccgctaaaactaactctacgctcttaaccgcgaaacttttcccgaccctccgtccccaccctccgcgactcaaaaaccgccaatactccgaaactcccccgacccaaaacgctcgaaaacgatacgaaacgccccctacgcgaccaacccgaccccgaaattaaccaacttaaccccgaacgaaacgcgcgaaatttacccaaatcaaactaaacgacgcctaaaaaaaaaacgacgaaacacgcgaaacaaaaccaaaccgacgaaaatcccgaaaaataaaaaccgaaccgcacctacctaaaaaatcgacgacgacgacgaacctaacgttcgcgaacgacgacgacgacgacaaaaacgacgacgacaacaacaacaacaacaacaacaacgcgaaacaaaacaaacgacgaacgactcccgccgacgaatccataacaaccgaactacaaccgaaaccccgcactcgcaaccgacgcgaaaattccccgcgaaccgcccaacccacatctaaaaacaactaaaaccgcccgcaactacaacaccgcaaaacgcgaaacgaaaaaaacgaaacgcgaaaaaacgaacgaaaaaacgcgaaaaaaaaacgaaaaaaaaaaaaaaacgaacgaacgaaaaaaaacaaacgaaaaaaaaaaaaacgaacgaaaaaaataaaataaaaaaaacgaaaaaaacaacctacgaaacataaataataaaccacgaacacaataattaaaaaaacaaaaccgaaacaaaacgaacgcgcacgactaaccacataacgtaaacgataaaccgaaatcgaacgaatctcgaacgaaaaaaaaccgataaaaatacgtaaaaaacgcataaaacaacaataccaacgaaactcaaaaaaaaaaaaacgacacgaaaaaaaaaaaaaaaaaacccacacgaaaaaaaaaaacgacgaaccgcgaaaaaacaaaaaaacaacaaaaaaacgaaacaaacacgaaaccacacaaaaaaaaaaacaaaaaaactcgtaccgataaacgtacacaaaaaacgcacgcgtaacgcaaaaaaacgaattcacacaataaaccgtacacgaataaaaatacccttataatacgacgcttaaaaacactaaaaaatacacccaca

SEQ ID NO: 33177 - DNA, 572 bp, Artificial Sequence
  chemically treated genomic DNA (Homo sapiens) CpG-island No: 33177
cggatggttttgatcgattatcgatgagtgatttgggttcgcggtaaattagtgggcgaatttaatttcgaagtttttcgtcgtgtcgttttcgcgttaacgaagcgggaaagatttagtattatgcgcgtcgacgtagtagataatttttatgcggcgtggtgtcgatgggaaattcgtattgcgtgatttaggtcgatgatgtcgatatcgcgggcggtagaagacgtttggttttgttttggaaaggtatcgagcgttgtttcggagttgcgttaatatcggttgtatgtaagtggttaggcgcgagtatatacgtttacgcgtttatgagcgtggggtaggagaaatttaggtttgcgtgtagttggcgcgatgtgcggcggtgtgtagtagggatttagtaaggttagtggtcgaagaagtacgcgtggaatttttcggcggtacgtcgttgatatcgtttggaaaggttcgggttattcgtatatatgattggtcggcggtatatgttacgacggatttatttatttatgaagtaattaggggaagaattgtaggaaatatttacg

SEQ ID NO: 33178 - DNA, 572 bp, Artificial Sequence
  chemically treated genomic DNA (Homo sapiens) CpG-island No: 33178
cgtaaatatttcctacaattcttcccctaattacttcataaataaataaatccgtcgtaacatataccgccgaccaatcatatatacgaataacccgaacctttccaaacgatatcaacgacgtaccgccgaaaaattccacgcgtacttcttcgaccactaaccttactaaatccctactacacaccgccgcacatcgcgccaactacacgcaaacctaaatttctcctaccccacgctcataaacgcgtaaacgtatatactcgcgcctaaccacttacatacaaccgatattaacgcaactccgaaacaacgctcgatacctttccaaaacaaaaccaaacgtcttctaccgcccgcgatatcgacatcatcgacctaaatcacgcaatacgaatttcccatcgacaccacgccgcataaaaattatctactacgtcgacgcgcataatactaaatctttcccgcttcgttaacgcgaaaacgacacgacgaaaaacttcgaaattaaattcgcccactaatttaccgcgaacccaaatcactcatcgataatcgatcaaaaccatccg

SEQ ID NO: 33179 - DNA, 572 bp, Artificial Sequence
  chemically treated genomic DNA (Homo sapiens) CpG-island No: 33179
cgtgagtgttttttgtagttttttttttggttgttttatagatgaataaattcgtcgtaatatgtatcgtcggttagttatatatacgggtgattcggatttttttaggcgatattaacgacgtatcgtcggggagttttacgcgtattttttcggttattaattttgttgaatttttattgtatatcgtcgtatatcgcgttagttgtacgtaggtttgggttttttttgttttacgtttataaacgcgtaaacgtatatgttcgcgtttaattatttgtatataatcgatattggcgtagtttcggaataacgttcgatgtttttttagaataggattaagcgttttttatcgttcgcggtatcgatattatcgatttgaattacgtaatgcggattttttatcgatattacgtcgtataagaattgtttgttacgtcggcgcgtataatattaggtttttttcgtttcgttagcgcgaaagcggtacgacggaaggtttcgaagttgggttcgtttattagtttatcgcggatttagattatttatcggtgatcggttagaattattcg

SEQ ID NO: 33180 - DNA, 572 bp, Artificial Sequence
  chemically treated genomic DNA (Homo sapiens) CpG-island No: 33180
cgaataattctaaccgatcaccgataaataatctaaatccgcgataaactaataaacgaacccaacttcgaaaccttccgtcgtaccgctttcgcgctaacgaaacgaaaaaaacctaatattatacgcgccgacgtaacaaacaattcttatacgacgtaatatcgataaaaaatccgcattacgtaattcaaatcgataatatcgataccgcgaacgataaaaaacgcttaatcctattctaaaaaaacatcgaacgttattccgaaactacgccaatatcgattatatacaaataattaaacgcgaacatatacgtttacgcgtttataaacgtaaaacaaaaaaaacccaaacctacgtacaactaacgcgatatacgacgatatacaataaaaattcaacaaaattaataaccgaaaaaatacgcgtaaaactccccgacgatacgtcgttaatatcgcctaaaaaaatccgaatcacccgtatatataactaaccgacgatacatattacgacgaatttattcatctataaaacaaccaaaaaaaaaactacaaaaaacactcacg

SEQ ID NO: 33181 - DNA, 951 bp, Artificial Sequence
  chemically treated genomic DNA (Homo sapiens) CpG-island No: 33181
  unsure (608, 622, 666)
cgtagttacgtaggtaatcgggttattcgtataggtgtcgtttagatcgtttggagcgacggtatttattattttcgcgcgttcggtgacgttcgttagcgggaagtcgttcgcgatcgatttcgtaaaggtggtaagattcggcgtaacgtttatttgttttatcgtaaatagcgtgtcggtacgtttcgcgtcgttttgtattttatcggtaattagtatgatttcgtgttcgttatatagagcgcgtaaacgttgtataaaggttggcgacgaggcgtagaaatcgttttcgttttgaatcggtttaattacgatggcggcgatatttttcggcgcggtattatttttgaagattcggtggatgttggcgatagcgttattttcgtttatgtcgtgtagcgggtaaggataaagcgcgcgataaatatgattcggtattagttttatgttcgtagagtacggatttattttgtcggttagcgtttagcgtgtaatgcgtgcgttcgtgatacgcgtcgttaaaagcgatggtgtcgttacgtttggtggtcggcgtcgggcgatttttatcgcgttttttatcgtttcggaatcggtcgtaatangtagcgttttttgngcgaaatcgttcggtattttttgattataatttcgtatagtttnagatacggttcgtaagttagtatttggaagtaggtgtgcgatagtttttttaattgcgtttttatcgcggttattattttcggatgtaggtgttcggtattgagtatcgtaatttcgttcgcgaaattaagatatttacggttttaacgttttatattcggtagtttttcgcgcggttagcgaaaatcgggtgaatttgtttaacgttacggggaatcgtttgattgcggcgttgtataatttttattgttgtttattcgtattttttagttaaagatcgatgta

SEQ ID NO: 33182 - DNA, 951 bp, Artificial Sequence
  chemically treated genomic DNA (Homo sapiens) CpG-island No: 33182
  unsure (286, 330, 344)
tacatcgatctttaactaaaaaatacgaataaacaacaataaaaattatacaacgccgcaatcaaacgattccccgtaacgttaaacaaattcacccgattttcgctaaccgcgcgaaaaactaccgaatataaaacgttaaaaccgtaaatatcttaatttcgcgaacgaaattacgatactcaataccgaacacctacatccgaaaataataaccgcgataaaaacgcaattaaaaaaactatcgcacacctacttccaaatactaacttacgaaccgtatctnaaactatacgaaattataatcaaaaaataccgaacgatttcgcncaaaaaacgctacntattacgaccgattccgaaacgataaaaaacgcgataaaaatcgcccgacgccgaccaccaaacgtaacgacaccatcgcttttaacgacgcgtatcacgaacgcacgcattacacgctaaacgctaaccgacaaaataaatccgtactctacgaacataaaactaataccgaatcatatttatcgcgcgctttatccttacccgctacacgacataaacgaaaataacgctatcgccaacatccaccgaatcttcaaaaataataccgcgccgaaaaatatcgccgccatcgtaattaaaccgattcaaaacgaaaacgatttctacgcctcgtcgccaacctttatacaacgtttacgcgctctatataacgaacacgaaatcatactaattaccgataaaatacaaaacgacgcgaaacgtaccgacacgctatttacgataaaacaaataaacgttacgccgaatcttaccacctttacgaaatcgatcgcgaacgacttcccgctaacgaacgtcaccgaacgcgcgaaaataataaataccgtcgctccaaacgatctaaacgacacctatacgaataacccgattacctacgtaactacg

SEQ ID NO: 33183 - DNA, 951 bp, Artificial Sequence
  chemically treated genomic DNA (Homo sapiens) CpG-island No: 33183
  unsure (286, 330, 344)
tgtatcggtttttaattggagaatgcgaatgaatagtaataagagttatgtagcgtcgtagttaggcgatttttcgtggcgttgggtaaatttattcgattttcgttgatcgcgcggaaaattgtcgggtgtgggacgttaaggtcgtgagtattttgatttcgcgggcgggattgcggtgtttaatatcgggtatttgtattcgaaggtggtggtcgcggtggaagcgtagttgaaaaaattgtcgtatatttgtttttaggtgttggtttacgagtcgtatttngagttgtgcgagattataattagaaggtgtcgggcgatttcgtntagaaaacgttgtntgttacgatcggtttcgaagcggtggaaaacgcggtaaaaatcgttcggcgtcggttattaaacgtagcggtattatcgtttttagcggcgcgtattacgggcgtacgtattatacgttgggcgttgatcggtaaggtgaattcgtattttgcgggtatggggttgatgtcgggttatgtttatcgcgcgttttatttttgttcgttgtacggtataagcgaggatgacgttatcgttagtatttatcggatttttaaaaatgatgtcgcgtcggaagatatcgtcgttatcgtgattgagtcggtttagggcgaaggcggtttttacgtttcgtcgttagtttttatgtagcgtttacgcgttttgtgtgacgagtacgggattatgttgattgtcgatgaagtgtagagcggcgcggggcgtatcggtacgttgtttgcgatggagtagatgggcgttgcgtcggattttattatttttgcgaaatcgatcgcgggcggtttttcgttggcgggcgttatcgggcgcgcggaagtaatggatgtcgtcgttttaggcggtttgggcggtatttatgcgggtaattcgattgtttgcgtggttgcg

SEQ ID NO: 33184 - DNA, 951 bp, Artificial Sequence
  chemically treated genomic DNA (Homo sapiens) CpG-island No: 33184
  unsure (608, 622, 666)
cgcaaccacgcaaacaatcgaattacccgcataaataccgcccaaaccgcctaaaacgacgacatccattacttccgcgcgcccgataacgcccgccaacgaaaaaccgcccgcgatcgatttcgcaaaaataataaaatccgacgcaacgcccatctactccatcgcaaacaacgtaccgatacgccccgcgccgctctacacttcatcgacaatcaacataatcccgtactcgtcacacaaaacgcgtaaacgctacataaaaactaacgacgaaacgtaaaaaccgccttcgccctaaaccgactcaatcacgataacgacgatatcttccgacgcgacatcatttttaaaaatccgataaatactaacgataacgtcatcctcgcttataccgtacaacgaacaaaaataaaacgcgcgataaacataacccgacatcaaccccatacccgcaaaatacgaattcaccttaccgatcaacgcccaacgtataatacgtacgcccgtaatacgcgccgctaaaaacgataataccgctacgtttaataaccgacgccgaacgatttttaccgcgttttccaccgcttcgaaaccgatcgtaacanacaacgttttctanacgaaatcgcccgacaccttctaattataatctcgcacaactcnaaatacgactcgtaaaccaacacctaaaaacaaatatacgacaattttttcaactacgcttccaccgcgaccaccaccttcgaatacaaatacccgatattaaacaccgcaatcccgcccgcgaaatcaaaatactcacgaccttaacgtcccacacccgacaattttccgcgcgatcaacgaaaatcgaataaatttacccaacgccacgaaaaatcgcctaactacgacgctacataactcttattactattcattcgcattctccaattaaaaaccgataca

SEQ ID NO: 33185 - DNA, 738 bp, Artificial Sequence
  chemically treated genomic DNA (Homo sapiens) CpG-island No: 33185
gtaggcggatgggggttcggcggtcgcggagatgtaatatttttatttcgggcgaagattttatagtttgcgggagatgggagttcgggacgcggataggacgggtatttatttacgaatagttagagggagtttttcgatacgaggaagaaggttagtatggcggttagcggggttcggttcggttcggttcggttttttcgattcgtagtttcgtagtttcgtagtttagtagttttagtagtagtcgcgtcgtcgtagtcgttgtcgggtatttttagtttttcgtttttcggtttcgtagttttcgcgtttcgtcgcgtcgttgcggagacggtttaagggggagggcgcggcgcgtattcgtaatcgagttttattttttgttttgtagtttggtcggtcgggtttggggtttgtttcgtattgatcgcggtgtcggaatcgttaagttttcgggcggggggaggggttcggtcgtagagcgaattagtttttttcggtttcgttttttaacgttagtatttggtattttgcggaaatcggttggaagggggagtacgggcgacgagcgttagagcgtgatattgagtttatttcgtcgttatttatttattaatacgcgattttgttttcgcgcgattcgtagatttgggttttatggttgggtaggttcgaatggtagtcgggtcgcggttatttgttttaggaggtgtatatttttgtgggttgttgttt

SEQ ID NO: 33186 - DNA, 738 bp, Artificial Sequence
  chemically treated genomic DNA (Homo sapiens) CpG-island No: 33186
aaacaacaacccacaaaaatatacacctcctaaaacaaataaccgcgacccgactaccattcgaacctacccaaccataaaacccaaatctacgaatcgcgcgaaaacaaaatcgcgtattaataaataaataacgacgaaataaactcaatatcacgctctaacgctcgtcgcccgtactcccccttccaaccgatttccgcaaaataccaaatactaacgttaaaaaacgaaaccgaaaaaaactaattcgctctacgaccgaacccctccccccgcccgaaaacttaacgattccgacaccgcgatcaatacgaaacaaaccccaaacccgaccgaccaaactacaaaacaaaaaataaaactcgattacgaatacgcgccgcgccctcccccttaaaccgtctccgcaacgacgcgacgaaacgcgaaaactacgaaaccgaaaaacgaaaaactaaaaatacccgacaacgactacgacgacgcgactactactaaaactactaaactacgaaactacgaaactacgaatcgaaaaaaccgaaccgaaccgaaccgaaccccgctaaccgccatactaaccttcttcctcgtatcgaaaaactccctctaactattcgtaaataaatacccgtcctatccgcgtcccgaactcccatctcccgcaaactataaaatcttcgcccgaaataaaaatattacatctccgcgaccgccgaacccccatccgcctac

SEQ ID NO: 33187 - DNA, 738 bp, Artificial Sequence
  chemically treated genomic DNA (Homo sapiens) CpG-island No: 33187
gggtaatagtttataggagtgtgtattttttaggataggtaatcgcgattcggttgttattcgagtttgtttagttataaaatttaggtttgcgagtcgcgcgggggtagggtcgcgtgttgatgggtgggtggcggcggggtgggtttaatgttacgttttggcgttcgtcgttcgtgtttttttttttagtcggttttcgtagaatgttaggtattgacgttggagagcggggtcggagagggttggttcgttttgcggtcgggttttttttttcgttcgggagtttggcggtttcgatatcgcggttagtgcggggtaagttttagattcggtcggttaggttgtagggtagggagtaaggttcggttgcgagtgcgcgtcgcgtttttttttttgagtcgttttcgtagcggcgcggcggagcgcgggagttgcggggtcggagggcggggggttaaaaatattcggtagcggttgcggcggcgcggttattgttggggttgttgggttgcggggttgcggggttgcgggtcggggaggtcgggtcgggtcgggtcgggtttcgttgatcgttatgttgattttttttttcgtgtcggggggttttttttggttattcgtaggtaagtgttcgttttgttcgcgtttcggatttttatttttcgtaggttatgaggttttcgttcgaggtggaggtgttatattttcgcggtcgtcgagtttttattcgtttgt

SEQ ID NO: 33188 - DNA, 738 bp, Artificial Sequence
  chemically treated genomic DNA (Homo sapiens) CpG-island No: 33188
acaaacgaataaaaactcgacgaccgcgaaaatataacacctccacctcgaacgaaaacctcataacctacgaaaaataaaaatccgaaacgcgaacaaaacgaacacttacctacgaataaccaaaaaaaaccccccgacacgaaaaaaaaaatcaacataacgatcaacgaaacccgacccgacccgacccgacctccccgacccgcaaccccgcaaccccgcaacccaacaaccccaacaataaccgcgccgccgcaaccgctaccgaatatttttaaccccccgccctccgaccccgcaactcccgcgctccgccgcgccgctacgaaaacgactcaaaaaaaaaaacgcgacgcgcactcgcaaccgaaccttactccctaccctacaacctaaccgaccgaatctaaaacttaccccgcactaaccgcgatatcgaaaccgccaaactcccgaacgaaaaaaaaaacccgaccgcaaaacgaaccaaccctctccgaccccgctctccaacgtcaatacctaacattctacgaaaaccgactaaaaaaaaaaacacgaacgacgaacgccaaaacgtaacattaaacccaccccgccgccacccacccatcaacacgcgaccctacccccgcgcgactcgcaaacctaaattttataactaaacaaactcgaataacaaccgaatcgcgattacctatcctaaaaaatacacactcctataaactattaccc

SEQ ID NO: 33189 - DNA, 582 bp, Artificial Sequence
  chemically treated genomic DNA (Homo sapiens) CpG-island No: 33189
tcgtcgcgggtcgggtcgggtcgggtaaggcggggcggggcggggcgggagaggtcgcggggttgggtcgggttaggtttgtagcgggtcggggttttgggatggttggggacgggcgcgggggcgtcgtatcgataggattcgggtcgaggggagagtaaggggcgaatagagagaaggtaggatgtcgttatttatattgggtcgtagtcgtcgtcgtcgtcgtttcgttgtgggtgaatttaaagtagttgtcggtcgttattttggtatttttttttagtcggttgggtattgcggcgggtacgaagagtcgggttttatggcgggataagagatatagaggagtcgagacgtcgagggagggtagggagagaaagagagaggcgtcgtgagagtagttttggcggggtttaggtcgcggtcgcgtcgtttttttttttcgtttcgtatttttttatttattcgtacgttcgggtggcggtcgtcgtttttttttcggagtttgttttaattttcgcggtttttcgttgttcggggttagggagggggtcgggtagaggtttcgcgggttatattaga

SEQ ID NO: 33190 - DNA, 582 bp, Artificial Sequence
  chemically treated genomic DNA (Homo sapiens) CpG-island No: 33190
tctaatataacccgcgaaacctctacccgaccccctccctaaccccgaacaacgaaaaaccgcgaaaattaaaacaaactccgaaaaaaaaacgacgaccgccacccgaacgtacgaataaataaaaaaatacgaaacgaaaaaaaaaaacgacgcgaccgcgacctaaaccccgccaaaactactctcacgacgcctctctctttctctccctaccctccctcgacgtctcgactcctctatatctcttatcccgccataaaacccgactcttcgtacccgccgcaatacccaaccgactaaaaaaaaataccaaaataacgaccgacaactactttaaattcacccacaacgaaacgacgacgacgacgactacgacccaatataaataacgacatcctaccttctctctattcgccccttactctcccctcgacccgaatcctatcgatacgacgcccccgcgcccgtccccaaccatcccaaaaccccgacccgctacaaacctaacccgacccaaccccgcgacctctcccgccccgccccgccccgccttacccgacccgacccgacccgcgacga

SEQ ID NO: 33191 - DNA, 582 bp, Artificial Sequence
  chemically treated genomic DNA (Homo sapiens) CpG-island No: 33191
tttaatgtggttcgcgaggtttttgttcggttttttttttggtttcgggtagcggggagtcgcgggggttggggtaggtttcggggaggaggcggcggtcgttattcgggcgtgcgagtgagtgagggagtgcgaggcgggagggggaggcggcgcggtcgcggtttgggtttcgttagggttgtttttacggcgtttttttttttttttttttgttttttttcggcgtttcggtttttttgtgttttttgtttcgttatgggattcgatttttcgtgttcgtcgtagtgtttagtcggttgggggaagatgttaaaatggcgatcggtaattattttggatttatttatagcggggcggcggcggcggcggttgcggtttaatataggtaacggtattttgttttttttttgttcgttttttgtttttttttcggttcggattttgtcgatgcgacgttttcgcgttcgtttttagttattttagagtttcggttcgttgtaggtttggttcggtttagtttcgcggtttttttcgtttcgtttcgtttcgttttgttcggttcggttcggttcgcggcgg

SEQ ID NO: 33192 - DNA, 582 bp, Artificial Sequence
  chemically treated genomic DNA (Homo sapiens) CpG-island No: 33192
ccgccgcgaaccgaaccgaaccgaacaaaacgaaacgaaacgaaacgaaaaaaaccgcgaaactaaaccgaaccaaacctacaacgaaccgaaactctaaaataactaaaaacgaacgcgaaaacgtcgcatcgacaaaatccgaaccgaaaaaaaaacaaaaaacgaacaaaaaaaaaacaaaataccgttacctatattaaaccgcaaccgccgccgccgccgccccgctataaataaatccaaaataattaccgatcgccattttaacatcttcccccaaccgactaaacactacgacgaacacgaaaaatcgaatcccataacgaaacaaaaaacacaaaaaaaccgaaacgccgaaaaaaaacaaaaaaaaaaaaaaaaaaacgccgtaaaaacaaccctaacgaaacccaaaccgcgaccgcgccgcctccccctcccgcctcgcactccctcactcactcgcacgcccgaataacgaccgccgcctcctccccgaaacctaccccaacccccgcgactccccgctacccgaaaccaaaaaaaaaaccgaacaaaaacctcgcgaaccacattaaa

SEQ ID NO: 33193 - DNA, 835 bp, Artificial Sequence
  chemically treated genomic DNA (Homo sapiens) CpG-island No: 33193
tttgattattacgttacgttaggtgttggagtgcgatgcgtttgcgttgttacgttacgattcgcggtagtttatttcgtttgttatcgacggtttggtaaaggatgtattcggtagacgttttgcgttggaagggtatttacggttggaagcgattgttcgcgtcggggatgtggtgcgttttttcgtagatagcgaattgttcgatttttatgacggtttgatttttgggtaggagagtttgaaggtttacgtttgcgttggtttgttattgtttgtcgggtaaaatttgatcggcgtattgacgttcgacgggatgtagttcgattagttcgatgtttttagcgacgaagagttacggttgattgttgcgttggcggcgggagcgttaagtaatgcgttgttgatttgaataattggaaagttataatatgttgttaggcgatgttacgtcgtttgaagcggtgaaatagacgtagatgattggtttgttttttggtatgacgtaattgaaaaaagagattgagattgtggcggcgttcgattttaacgttttgtattagtcggtgtacgacgtgggaatcgcgtaagggagttggtggcgaaagcgatttatgaagtttcgttacgggcggtgaattcgttggtttattttaattgtgttgtattgtcggaaagtgtggcggaaagtgagttgttcgggtatgtgaaaggagcgtttattggcgttattagtaatcgtagcgggaagtttgaaatggcggataacggtacgttgtttttggatgagatcggcgagttgtcgttggtattgtaggttaagttgttgagggtg

SEQ ID NO: 33194 - DNA, 835 bp, Artificial Sequence
  chemically treated genomic DNA (Homo sapiens) CpG-island No: 33194
caccctcaacaacttaacctacaataccaacgacaactcgccgatctcatccaaaaacaacgtaccgttatccgccatttcaaacttcccgctacgattactaataacgccaataaacgctcctttcacatacccgaacaactcactttccgccacactttccgacaatacaacacaattaaaataaaccaacgaattcaccgcccgtaacgaaacttcataaatcgctttcgccaccaactcccttacgcgattcccacgtcgtacaccgactaatacaaaacgttaaaatcgaacgccgccacaatctcaatctcttttttcaattacgtcataccaaaaaacaaaccaatcatctacgtctatttcaccgcttcaaacgacgtaacatcgcctaacaacatattataactttccaattattcaaatcaacaacgcattacttaacgctcccgccgccaacgcaacaatcaaccgtaactcttcgtcgctaaaaacatcgaactaatcgaactacatcccgtcgaacgtcaatacgccgatcaaattttacccgacaaacaataacaaaccaacgcaaacgtaaaccttcaaactctcctacccaaaaatcaaaccgtcataaaaatcgaacaattcgctatctacgaaaaaacgcaccacatccccgacgcgaacaatcgcttccaaccgtaaatacccttccaacgcaaaacgtctaccgaatacatcctttaccaaaccgtcgataacaaacgaaataaactaccgcgaatcgtaacgtaacaacgcaaacgcatcgcactccaacacctaacgtaacgtaataatcaaa

SEQ ID NO: 33195 - DNA, 835 bp, Artificial Sequence
  chemically treated genomic DNA (Homo sapiens) CpG-island No: 33195
tatttttagtagtttggtttgtaatgttaacgataattcgtcgattttatttagaaatagcgtgtcgttattcgttattttaaatttttcgttgcgattattgatagcgttagtaaacgttttttttatatgttcgaataatttatttttcgttatatttttcggtagtgtagtatagttgagatagattagcggatttatcgttcgtggcgaggttttatgaatcgttttcgttattagtttttttacgcggtttttacgtcgtgtatcggttgatgtaggacgttgagatcggacgtcgttataattttaatttttttttttagttgcgttatgttaggggataagttaattatttgcgtttgttttatcgttttaaacggcgtggtatcgtttggtagtatattgtggttttttagttgtttaagttagtaacgtattgtttaacgttttcgtcgttagcgtagtaattagtcgtagtttttcgtcgttgaaaatatcgaattgatcgggttgtatttcgtcgagcgttagtgcgtcgattaggttttgttcggtaaataatggtagattaacgtaggcgtgaatttttagatttttttgtttaggaattaaatcgttatagggatcgggtaattcgttgtttgcgggaaagcgtattatattttcggcgcgggtaatcgtttttagtcgtggatgtttttttagcgtaaagcgtttatcgagtatattttttgttagatcgtcgatggtaagcggaataaattgtcgcgaatcgtaacgtagtaacgtagacgtatcgtattttagtatttgacgtagcgtggtgattagg

SEQ ID NO: 33196 - DNA, 835 bp, Artificial Sequence
  chemically treated genomic DNA (Homo sapiens) CpG-island No: 33196
cctaatcaccacgctacgtcaaatactaaaatacgatacgtctacgttactacgttacgattcgcgacaatttattccgcttaccatcgacgatctaacaaaaaatatactcgataaacgctttacgctaaaaaaacatccacgactaaaaacgattacccgcgccgaaaatataatacgctttcccgcaaacaacgaattacccgatccctataacgatttaattcctaaacaaaaaaatctaaaaattcacgcctacgttaatctaccattatttaccgaacaaaacctaatcgacgcactaacgctcgacgaaatacaacccgatcaattcgatattttcaacgacgaaaaactacgactaattactacgctaacgacgaaaacgttaaacaatacgttactaacttaaacaactaaaaaaccacaatatactaccaaacgataccacgccgtttaaaacgataaaacaaacgcaaataattaacttatcccctaacataacgcaactaaaaaaaaaaattaaaattataacgacgtccgatctcaacgtcctacatcaaccgatacacgacgtaaaaaccgcgtaaaaaaactaataacgaaaacgattcataaaacctcgccacgaacgataaatccgctaatctatctcaactatactacactaccgaaaaatataacgaaaaataaattattcgaacatataaaaaaaacgtttactaacgctatcaataatcgcaacgaaaaatttaaaataacgaataacgacacgctatttctaaataaaatcgacgaattatcgttaacattacaaaccaaactactaaaaata

SEQ ID NO: 33197 - DNA, 581 bp, Artificial Sequence
  chemically treated genomic DNA (Homo sapiens) CpG-island No: 33197
ttcggaatcgtcgggcggcgcgttttttttcgtttagttttgtaatttatgtcgagaggaaggtagtgcgagttcgcgttagcgtttagttttcgggatagggtcggtaatgttgttgagtagaatttgatcgcgtttttttttcgttgttagtggaagcgatgttgtacggtatagttagcgttttttcggtttttttttaagttgaaggttatcgattcgcgtagttagttttagtattgtgagttgcgcgttttaggttcgggtttcggttgtttggcggcggcgtttagggtaataatcgggtcgttcgcgtcggggcgtattgtattagcggtttcggtttggtggatgtgtatgtatgagttttgtatcgaatgggcgtaaaaagcgttttagtcggtttattcgtttttcgattttttagattagtaagttttcgttgtagagcggagattgggagcgtaggggtagcggtttcgagagcgtttataaaatttaacgagttttggacgattgtaagatggtgggtgaaaattgcgtttttttttttttttttttaattgagagggggtgggggg

SEQ ID NO: 33198 - DNA, 581 bp, Artificial Sequence
  chemically treated genomic DNA (Homo sapiens) CpG-island No: 33198
ccccccaccccctctcaattaaaaaaaaaaaaaaaaaaacgcaattttcacccaccatcttacaatcgtccaaaactcgttaaattttataaacgctctcgaaaccgctacccctacgctcccaatctccgctctacaacgaaaacttactaatctaaaaaatcgaaaaacgaataaaccgactaaaacgctttttacgcccattcgatacaaaactcatacatacacatccaccaaaccgaaaccgctaatacaatacgccccgacgcgaacgacccgattattaccctaaacgccgccgccaaacaaccgaaacccgaacctaaaacgcgcaactcacaatactaaaactaactacgcgaatcgataaccttcaacttaaaaaaaaaccgaaaaaacgctaactataccgtacaacatcgcttccactaacaacgaaaaaaaaacgcgatcaaattctactcaacaacattaccgaccctatcccgaaaactaaacgctaacgcgaactcgcactaccttcctctcgacataaattacaaaactaaacgaaaaaaaacgcgccgcccgacgattccgaa

SEQ ID NO: 33199 - DNA, 581 bp, Artificial Sequence
  chemically treated genomic DNA (Homo sapiens) CpG-island No: 33199
ttttttatttttttttaattaaaaaaaaaaaaaaagaggcgtagtttttatttattattttgtagtcgtttagggttcgttgggttttgtgggcgttttcggagtcgttgtttttgcgtttttaattttcgttttgtagcgggggtttgttgatttggaagatcgaggagcgggtggatcggttggggcgttttttgcgtttattcggtgtagaatttatgtatatatatttattaagtcgaagtcgttggtgtagtgcgtttcggcgcgggcggttcggttgttgttttgggcgtcgtcgttaagtagtcggagttcggatttgaggcgcgtagtttatagtgttggggttggttgcgcgggtcggtaatttttagtttgaaggagagtcggggaagcgttagttgtgtcgtgtagtatcgtttttattagtagcgaggaaggagcgcgattaagttttgtttagtagtattgtcgattttgtttcgggagttgggcgttggcgcgggttcgtattgtttttttttcggtatggattgtaaggttgggcgagaaggaacgcgtcgttcggcggtttcgag

SEQ ID NO: 33200 - DNA, 581 bp, Artificial Sequence
  chemically treated genomic DNA (Homo sapiens) CpG-island No: 33200
ctcgaaaccgccgaacgacgcgttccttctcgcccaaccttacaatccataccgaaaaaaaaacaatacgaacccgcgccaacgcccaactcccgaaacaaaatcgacaatactactaaacaaaacttaatcgcgctccttcctcgctactaataaaaacgatactacacgacacaactaacgcttccccgactctccttcaaactaaaaattaccgacccgcgcaaccaaccccaacactataaactacgcgcctcaaatccgaactccgactacttaacgacgacgcccaaaacaacaaccgaaccgcccgcgccgaaacgcactacaccaacgacttcgacttaataaatatatatacataaattctacaccgaataaacgcaaaaaacgccccaaccgatccacccgctcctcgatcttccaaatcaacaaacccccgctacaaaacgaaaattaaaaacgcaaaaacaacgactccgaaaacgcccacaaaacccaacgaaccctaaacgactacaaaataataaataaaaactacgcctctttttttttttttttaattaaaaaaaaataaaaaa

SEQ ID NO: 33201 - DNA, 725 bp, Artificial Sequence
  chemically treated genomic DNA (Homo sapiens) CpG-island No: 33201
cgattcgcggggcgttgttcgtttaagattcgttttaaagagcgtaggaacgcgagtcgtagtagttttagggtttagtttaggtgatataaacgtagttaatgggaggtcgtcgtcgatttttttattcgtttttattagtattttcgcgttttttttcgttatttttgttcggcgcgtcggcgatgttttttgttcgcggggattcgagtttcgcgcgtttttcgttttttttattttggattttgtatttattatatttggggtattgtcgttcgtcgagtttgggcgcgcggtagcgagaaggtattggaggaggagtagtcggggcgtacgcgttttggtttttagtaggtcggggagggcgcgtatggcgttagagggttcgtttgggttttcgtggagattgtttttttagttcgtcgtcgcgggtgtttagagtttttgcgtatattcgtaggtggttcggcgttcgtagttagtgtcgcgggtaggacgttgaagaaaaggcggaatgggaggggttcggtcgttttgttttattttttcgagacgtttttatcgcgttcggttttttattagttatgtagtttttagtcggttgttggcgttttcggatgtgcggtggcggtgttatttttcggttgtagttttttcggttttcgttttttcggttttagtaggtcgggagagagtttgggtaggtgatgtttagttaatttcgt

SEQ ID NO: 33202 - DNA, 725 bp, Artificial Sequence
  chemically treated genomic DNA (Homo sapiens) CpG-island No: 33202
acgaaattaactaaacatcacctacccaaactctctcccgacctactaaaaccgaaaaaacgaaaaccgaaaaaactacaaccgaaaaataacaccgccaccgcacatccgaaaacgccaacaaccgactaaaaactacataactaataaaaaaccgaacgcgataaaaacgtctcgaaaaaataaaacaaaacgaccgaacccctcccattccgccttttcttcaacgtcctacccgcgacactaactacgaacgccgaaccacctacgaatatacgcaaaaactctaaacacccgcgacgacgaactaaaaaaacaatctccacgaaaacccaaacgaaccctctaacgccatacgcgccctccccgacctactaaaaaccaaaacgcgtacgccccgactactcctcctccaataccttctcgctaccgcgcgcccaaactcgacgaacgacaataccccaaatataataaatacaaaatccaaaataaaaaaaacgaaaaacgcgcgaaactcgaatccccgcgaacaaaaaacatcgccgacgcgccgaacaaaaataacgaaaaaaaacgcgaaaatactaataaaaacgaataaaaaaatcgacgacgacctcccattaactacgtttatatcacctaaactaaaccctaaaactactacgactcgcgttcctacgctctttaaaacgaatcttaaacgaacaacgccccgcgaatcg

SEQ ID NO: 33203 - DNA, 725 bp, Artificial Sequence
  chemically treated genomic DNA (Homo sapiens) CpG-island No: 33203
acgagattggttagatattatttgtttaagttttttttcgatttgttagagtcgagagggcggaggtcggagaggttgtagtcgggaagtagtatcgttatcgtatattcgggaacgttagtagtcggttgagggttgtataattgatggagggtcgggcgcggtaagagcgtttcgggggagtggggtaaggcggtcgggttttttttatttcgttttttttttagcgttttattcgcggtattggttgcgagcgtcgggttatttgcgagtgtgcgtagggattttggatattcgcggcggcgagttgagggagtagtttttacgaggatttaggcggattttttggcgttatgcgcgtttttttcggtttgttggaggttagggcgcgtacgtttcggttgttttttttttagtgttttttcgttgtcgcgcgtttaagttcggcggacggtagtgttttaggtgtgatgggtatagggtttagggtagggagggcggagggcgcgcgaggttcgggttttcgcgggtagagggtatcgtcggcgcgtcgggtaagggtggcggggagaggcgcggggatgttggtaagggcgggtgggagagtcggcggcggttttttattagttacgtttgtgttatttaagttgaattttgaaattgttgcggttcgcgtttttgcgttttttggggcgagttttgaacgaatagcgtttcgcgagtcg

SEQ ID NO: 33204 - DNA, 725 bp, Artificial Sequence
  chemically treated genomic DNA (Homo sapiens) CpG-island No: 33204
cgactcgcgaaacgctattcgttcaaaactcgccccaaaaaacgcaaaaacgcgaaccgcaacaatttcaaaattcaacttaaataacacaaacgtaactaataaaaaaccgccgccgactctcccacccgcccttaccaacatccccgcgcctctccccgccacccttacccgacgcgccgacgataccctctacccgcgaaaacccgaacctcgcgcgccctccgccctccctaccctaaaccctatacccatcacacctaaaacactaccgtccgccgaacttaaacgcgcgacaacgaaaaaacactaaaaaaaaaacaaccgaaacgtacgcgccctaacctccaacaaaccgaaaaaaacgcgcataacgccaaaaaatccgcctaaatcctcgtaaaaactactccctcaactcgccgccgcgaatatccaaaatccctacgcacactcgcaaataacccgacgctcgcaaccaataccgcgaataaaacgctaaaaaaaaaacgaaataaaaaaaacccgaccgccttaccccactcccccgaaacgctcttaccgcgcccgaccctccatcaattatacaaccctcaaccgactactaacgttcccgaatatacgataacgatactacttcccgactacaacctctccgacctccgccctctcgactctaacaaatcgaaaaaaaacttaaacaaataatatctaaccaatctcgt

SEQ ID NO: 33205 - DNA, 959 bp, Artificial Sequence
  chemically treated genomic DNA (Homo sapiens) CpG-island No: 33205
ggaacgggagtcgtttttacgtttcgttcggttgtcgagagtcgtatttttgggcggatgtcgtaggtcgggagggatgaggtcgacggcgttgattggttgatcgtcgcggtttggggtttttttggtttcgtttttgttgtatttttttcgttcgcgaattcgcgcgttgttcggttttgcgttgtttagcgggaggggttggatttcgcgttttttttttttgtcggtttttatttttaaagcgagagtttggacgtttcgtttgtgggagagagcgtcgggattcggacggggagtaatcggggtaggtcgtgtcggttgaggaggttttgaggttatagagttgtcgcggttggtatacgagcgtttcggtattaatcgagtgttcgcgggggttgtgaggggagggtttcgggcgttattgttggcggtgggagcgtcgttcggttttagttcgttttcggttgtttttttttttcggttgggaggggtcgtagttcggggtcgtcgttagtttcggttcgggttcgagaattaagggtttcggtcgtcgtttcgtagtttagtttatcgtttttgtcgggtagttcgggtagagattatgtttgataagacgcggttgtcgtacgtggttttcgatgtgttttgcgtgttgttgggtacgtacgcgtcgtcgggttcgaggggcgtgtgcggttgtttcgggagggttttagcgtagagtcgcgacgggtagcgggggtgtgttgtttgacgcgtgcgtagttgtggggcgatatacgggggcggtttttgtagtcgagggatttcgttttgtagtttgtatttcggttttcgcgtgttcgtcgttgtttgtcgttcgtcggtgcgatgagtttagttttgtttggacgttgtttacgtttttgcgttttatattttgtttttgttttttgtttgtagttttattttagtag

SEQ ID NO: 33206 - DNA, 959 bp, Artificial Sequence
  chemically treated genomic DNA (Homo sapiens) CpG-island No: 33206
ctactaaaataaaactacaaacaaaaaacaaaaacaaaatataaaacgcaaaaacgtaaacaacgtccaaacaaaactaaactcatcgcaccgacgaacgacaaacaacgacgaacacgcgaaaaccgaaatacaaactacaaaacgaaatccctcgactacaaaaaccgcccccgtatatcgccccacaactacgcacgcgtcaaacaacacacccccgctacccgtcgcgactctacgctaaaaccctcccgaaacaaccgcacacgcccctcgaacccgacgacgcgtacgtacccaacaacacgcaaaacacatcgaaaaccacgtacgacaaccgcgtcttatcaaacataatctctacccgaactacccgacaaaaacgataaactaaactacgaaacgacgaccgaaacccttaattctcgaacccgaaccgaaactaacgacgaccccgaactacgacccctcccaaccgaaaaaaaaaaacaaccgaaaacgaactaaaaccgaacgacgctcccaccgccaacaataacgcccgaaaccctcccctcacaacccccgcgaacactcgattaataccgaaacgctcgtataccaaccgcgacaactctataacctcaaaacctcctcaaccgacacgacctaccccgattactccccgtccgaatcccgacgctctctcccacaaacgaaacgtccaaactctcgctttaaaaataaaaaccgacaaaaaaaaaaaacgcgaaatccaacccctcccgctaaacaacgcaaaaccgaacaacgcgcgaattcgcgaacgaaaaaaatacaacaaaaacgaaaccaaaaaaaccccaaaccgcgacgatcaaccaatcaacgccgtcgacctcatccctcccgacctacgacatccgcccaaaaatacgactctcgacaaccgaacgaaacgtaaaaacgactcccgttcc

SEQ ID NO: 33207 - DNA, 959 bp, Artificial Sequence
  chemically treated genomic DNA (Homo sapiens) CpG-island No: 33207
ttgttagagtggaattgtaaatagaggataggagtaaggtatggagcgtagaggcgtgaatagcgtttaagtagggttgggtttatcgtatcggcgggcgatagatagcggcgggtacgcgggagtcggggtgtaggttgtaaagcggggtttttcggttgtagaagtcgttttcgtgtgtcgttttatagttgcgtacgcgttaggtaatatattttcgttgttcgtcgcggttttgcgttaaagttttttcgggatagtcgtatacgtttttcggattcggcggcgcgtacgtatttagtaatacgtagagtatatcgagggttacgtacggtagtcgcgttttgttaaatatggtttttgttcgggttgttcggtaagggcgatggattgagttgcgggacggcggtcgaggtttttgattttcgagttcgggtcggggttggcgacggtttcgagttacggttttttttagtcggaggaggagagtagtcgagggcgggttgagatcgggcggcgtttttatcgttagtaatggcgttcggggttttttttttatagttttcgcgaatattcggttagtgtcgaggcgttcgtgtgttagtcgcggtagttttgtagttttaggatttttttagtcggtacggtttgtttcggttgtttttcgttcggatttcggcgtttttttttataggcggggcgtttagattttcgttttaaggatggggatcggtagggaggaggaacgcggggtttagtttttttcgttgagtagcgtaggatcgggtagcgcgcgggttcgcgggcggggggagtgtagtaggggcggggttagggaaattttaggtcgcggcggttagttaattagcgtcgtcggttttatttttttcgatttgcggtattcgtttagaagtgcggttttcggtagtcgggcggggcgtgggggcggttttcgtttt

SEQ ID NO: 33208 - DNA, 959 bp, Artificial Sequence
  chemically treated genomic DNA (Homo sapiens) CpG-island No: 33208
aaaacgaaaaccgcccccacgccccgcccgactaccgaaaaccgcacttctaaacgaataccgcaaatcgaaaaaaataaaaccgacgacgctaattaactaaccgccgcgacctaaaatttccctaaccccgcccctactacactccccccgcccgcgaacccgcgcgctacccgatcctacgctactcaacgaaaaaaactaaaccccgcgttcctcctccctaccgatccccatccttaaaacgaaaatctaaacgccccgcctataaaaaaaaacgccgaaatccgaacgaaaaacaaccgaaacaaaccgtaccgactaaaaaaatcctaaaactacaaaactaccgcgactaacacacgaacgcctcgacactaaccgaatattcgcgaaaactataaaaaaaaaaccccgaacgccattactaacgataaaaacgccgcccgatctcaacccgccctcgactactctcctcctccgactaaaaaaaaccgtaactcgaaaccgtcgccaaccccgacccgaactcgaaaatcaaaaacctcgaccgccgtcccgcaactcaatccatcgcccttaccgaacaacccgaacaaaaaccatatttaacaaaacgcgactaccgtacgtaaccctcgatatactctacgtattactaaatacgtacgcgccgccgaatccgaaaaacgtatacgactatcccgaaaaaactttaacgcaaaaccgcgacgaacaacgaaaatatattacctaacgcgtacgcaactataaaacgacacacgaaaacgacttctacaaccgaaaaaccccgctttacaacctacaccccgactcccgcgtacccgccgctatctatcgcccgccgatacgataaacccaaccctacttaaacgctattcacgcctctacgctccataccttactcctatcctctatttacaattccactctaacaa

SEQ ID NO: 33209 - DNA, 706 bp, Artificial Sequence
  chemically treated genomic DNA (Homo sapiens) CpG-island No: 33209
attacgggtaaaggggcgtacgaggggtaaagggattggcgggagtagggtatcgttttttagtaaattcgtttcgcggggcgtggcggggacgacgggtcgcgtagtttgcgtatgcgcgtcggcgattacgtttaaatagtcgtagtttttgcgcgtcgttttttacggttatttcggtttttcgtttttttttttcgcggcgttcgagggattatggtcgattttcgcgtgagatagattaagattaagatcggcgtggtgaagcggtaaggagtcgggagcggcgttttgtatttttttttcgttattttatggcggttcgcgaggttgagcggagcgtaggttcgaggaggttcgaggcgggtttcgaattttaggtcgtattcggggtttcgtagttggttgggattggtagggatttagcggggcgcgttgacgttcgagttcgttagtttcgtacgtcgtttttcgttttttttcgtttattggtcgttttgatttgtcggaagagtcggcggtggttcggtttttcggcgttcgcggtgggaaggtggtgggtcgcggtttgcgagggcgggtcgggttttgatttcgtgttttttgtgtgcgcgcgtcggtttttttttgttgaatttggttcggggaagcgggattttagttgtgtttttaaatgggtttgaaagtaggttttgaagtttagggg

SEQ ID NO: 33210 - DNA, 706 bp, Artificial Sequence
  chemically treated genomic DNA (Homo sapiens) CpG-island No: 33210
cccctaaacttcaaaacctactttcaaacccatttaaaaacacaactaaaatcccgcttccccgaaccaaattcaacaaaaaaaaaccgacgcgcgcacacaaaaaacacgaaatcaaaacccgacccgccctcgcaaaccgcgacccaccaccttcccaccgcgaacgccgaaaaaccgaaccaccgccgactcttccgacaaatcaaaacgaccaataaacgaaaaaaaacgaaaaacgacgtacgaaactaacgaactcgaacgtcaacgcgccccgctaaatccctaccaatcccaaccaactacgaaaccccgaatacgacctaaaattcgaaacccgcctcgaacctcctcgaacctacgctccgctcaacctcgcgaaccgccataaaataacgaaaaaaaaatacaaaacgccgctcccgactccttaccgcttcaccacgccgatcttaatcttaatctatctcacgcgaaaatcgaccataatccctcgaacgccgcgaaaaaaaaaaacgaaaaaccgaaataaccgtaaaaaacgacgcgcaaaaactacgactatttaaacgtaatcgccgacgcgcatacgcaaactacgcgacccgtcgtccccgccacgccccgcgaaacgaatttactaaaaaacgataccctactcccgccaatccctttacccctcgtacgcccctttacccgtaat

SEQ ID NO: 33211 - DNA, 706 bp, Artificial Sequence
  chemically treated genomic DNA (Homo sapiens) CpG-island No: 33211
tttttaaattttagagtttgtttttaagtttatttgagagtatagttgggatttcgttttttcgggttaagtttagtaaggagaggtcggcgcgcgtatataggaggtacgggattagggttcggttcgttttcgtaggtcgcggtttattatttttttatcgcgggcgtcgagaaatcgggttatcgtcgattttttcggtaaattagagcggttagtgagcggagagggacgggaagcggcgtgcgaggttggcgggttcgggcgttagcgcgtttcgttgggtttttgttagttttagttaattgcggagtttcgggtgcggtttggagttcggagttcgtttcgggttttttcgggtttgcgtttcgtttagtttcgcgggtcgttatgaggtgacgaagaggaggtgtagggcgtcgttttcggttttttatcgttttattacgtcggttttgattttgatttgttttacgcgaggatcggttatggtttttcgagcgtcgcgagaaggaggggcggagagtcggggtaatcgtggagggcgacgcgtagaggttgcggttatttaggcgtggtcgtcggcgcgtatgcgtaggttgcgcggttcgtcgttttcgttacgtttcgcggggcgggtttattagagggcggtattttgttttcgttagtttttttatttttcgtgcgtttttttattcgtagt

SEQ ID NO: 33212 - DNA, 706 bp, Artificial Sequence
  chemically treated genomic DNA (Homo sapiens) CpG-island No: 33212
actacgaataaaaaaacgcacgaaaaataaaaaaactaacgaaaacaaaataccgccctctaataaacccgccccgcgaaacgtaacgaaaacgacgaaccgcgcaacctacgcatacgcgccgacgaccacgcctaaataaccgcaacctctacgcgtcgccctccacgattaccccgactctccgcccctccttctcgcgacgctcgaaaaaccataaccgatcctcgcgtaaaacaaatcaaaatcaaaaccgacgtaataaaacgataaaaaaccgaaaacgacgccctacacctcctcttcgtcacctcataacgacccgcgaaactaaacgaaacgcaaacccgaaaaaacccgaaacgaactccgaactccaaaccgcacccgaaactccgcaattaactaaaactaacaaaaacccaacgaaacgcgctaacgcccgaacccgccaacctcgcacgccgcttcccgtccctctccgctcactaaccgctctaatttaccgaaaaaatcgacgataacccgatttctcgacgcccgcgataaaaaaataataaaccgcgacctacgaaaacgaaccgaaccctaatcccgtacctcctatatacgcgcgccgacctctccttactaaacttaacccgaaaaaacgaaatcccaactatactctcaaataaacttaaaaacaaactctaaaatttaaaaa

SEQ ID NO: 33213 - DNA, 519 bp, Artificial Sequence
  chemically treated genomic DNA (Homo sapiens) CpG-island No: 33213
ggttttcggagcgtttttttttgtcgtttttttttttacgtggggtcgagaaagtcggagtttttagttgtacgcgcgttgttcgttcgatttcgggcgggaggtttgcgtgaatggtcgttgggtgtaaggaacggagtagagggttgagtcggttcgagagtttcgtttagatcggtggagtgtagtggtttttcgttgtttagtcgtacgggggtgtggtttagaggattcggtttttcggcgtttcgcgttaatttttgggagttttgtagtatttacggcgtgtttgtacgtagttacgtaggaagatttttttagcgcgtcgtaatcgttgaattttttttttttatttattcgttttacgtaagttgaggaggagaggtggaaatatgcgggattacgacgaggtgatcgttttcgtgggcgagtgggggtttttttagcgttttattttttttttgtttagcgttagtattatttttaatggttttaatggtatgttagtcgtgtttttgg

SEQ ID NO: 33214 - DNA, 519 bp, Artificial Sequence
  chemically treated genomic DNA (Homo sapiens) CpG-island No: 33214
ccaaaaacacgactaacataccattaaaaccattaaaaataatactaacgctaaacaaaaaaaaaataaaacgctaaaaaaacccccactcgcccacgaaaacgatcacctcgtcgtaatcccgcatatttccacctctcctcctcaacttacgtaaaacgaataaataaaaaaaaaaaattcaacgattacgacgcgctaaaaaaatcttcctacgtaactacgtacaaacacgccgtaaatactacaaaactcccaaaaattaacgcgaaacgccgaaaaaccgaatcctctaaaccacacccccgtacgactaaacaacgaaaaaccactacactccaccgatctaaacgaaactctcgaaccgactcaaccctctactccgttccttacacccaacgaccattcacgcaaacctcccgcccgaaatcgaacgaacaacgcgcgtacaactaaaaactccgactttctcgaccccacgtaaaaaaaaaaacgacaaaaaaaaacgctccgaaaacc

SEQ ID NO: 33215 - DNA, 519 bp, Artificial Sequence
  chemically treated genomic DNA (Homo sapiens) CpG-island No: 33215
ttaagaatacgattgatatattattgaagttattggggatgatgttggcgttgagtagaaagaagatgaggcgttggaagggtttttattcgtttacgaaggcgattatttcgtcgtagtttcgtatgtttttattttttttttttagtttgcgtgaggcgagtgggtggagagaaaggatttagcgattgcggcgcgttgaggggatttttttacgtggttgcgtgtaaatacgtcgtgggtgttgtaaaatttttaagggttggcgcggagcgtcgggaagtcgagttttttggattatattttcgtgcggttaggtagcgaaaggttattgtattttatcgatttgggcggaattttcgggtcggtttagttttttgtttcgttttttgtatttagcggttatttacgtaggtttttcgttcggaatcggacggataacgcgcgtgtagttaggagtttcggttttttcggttttacgtgggagggagagcgatagggaggagcgtttcgaaagtt

SEQ ID NO: 33216 - DNA, 519 bp, Artificial Sequence
  chemically treated genomic DNA (Homo sapiens) CpG-island No: 33216
aactttcgaaacgctcctccctatcgctctccctcccacgtaaaaccgaaaaaaccgaaactcctaactacacgcgcgttatccgtccgattccgaacgaaaaacctacgtaaataaccgctaaatacaaaaaacgaaacaaaaaactaaaccgacccgaaaattccgcccaaatcgataaaatacaataacctttcgctacctaaccgcacgaaaatataatccaaaaaactcgacttcccgacgctccgcgccaacccttaaaaattttacaacacccacgacgtatttacacgcaaccacgtaaaaaaatcccctcaacgcgccgcaatcgctaaatcctttctctccacccactcgcctcacgcaaactaaaaaaaaaaaataaaaacatacgaaactacgacgaaataatcgccttcgtaaacgaataaaaacccttccaacgcctcatcttctttctactcaacgccaacatcatccccaataacttcaataatatatcaatcgtattcttaa

SEQ ID NO: 33217 - DNA, 634 bp, Artificial Sequence
  chemically treated genomic DNA (Homo sapiens) CpG-island No: 33217
tttcgtcgttatttcgggtttcgatttcgcgtggttaggtatttcgggttattatttttcgatttagggcgagtttacgtcgtcgtttgcgcgttgaattgggagttgggagtagtcgatatcggtttttgaaattttgcgttgggaggttttcggttgggcgaggatttttgggcgttgaataagttttttcggcggtgtttgttcgagcgtagatagaagtcgcgcgagggaacgcggggtcgtgttttggggcggcggggaggggttgggagggcgggtgtgtaggggtttgggttgttcgtcggttaggggcggttattttggtcggagattcgacgcgcggggattttcggttcgcgtttttttagtaggtcggattcgcgcggtagttttgggtttcgttttttatttttttgtcgcggtcgcgtttcgttggggaaggtgcgaggtgcggcggacgaggacgatttttgacgttgagtttgtgggttaggttcgcgtttattataggaatttttttcgggaaagttcggaaagatgttagcggttttgaagtaggaagattttgcggcgtgcgttttgagtagatgtattaggaggtttttttgggcgagaggaaaggataatggag

SEQ ID NO: 33218 - DNA, 634 bp, Artificial Sequence
  chemically treated genomic DNA (Homo sapiens) CpG-island No: 33218
ctccattatcctttcctctcgcccaaaaaaacctcctaatacatctactcaaaacgcacgccgcaaaatcttcctacttcaaaaccgctaacatctttccgaactttcccgaaaaaaattcctataataaacgcgaacctaacccacaaactcaacgtcaaaaatcgtcctcgtccgccgcacctcgcaccttccccaacgaaacgcgaccgcgacaaaaaaataaaaaacgaaacccaaaactaccgcgcgaatccgacctactaaaaaaacgcgaaccgaaaatccccgcgcgtcgaatctccgaccaaaataaccgcccctaaccgacgaacaacccaaacccctacacacccgccctcccaacccctccccgccgccccaaaacacgaccccgcgttccctcgcgcgacttctatctacgctcgaacaaacaccgccgaaaaaacttattcaacgcccaaaaatcctcgcccaaccgaaaacctcccaacgcaaaatttcaaaaaccgatatcgactactcccaactcccaattcaacgcgcaaacgacgacgtaaactcgccctaaatcgaaaaataataacccgaaatacctaaccacgcgaaatcgaaacccgaaataacgacgaaa

SEQ ID NO: 33219 - DNA, 634 bp, Artificial Sequence
  chemically treated genomic DNA (Homo sapiens) CpG-island No: 33219
ttttattatttttttttttcgtttaggaaggttttttgatgtatttgtttaaagcgtacgtcgtagggtttttttgttttagggtcgttggtattttttcgggttttttcgggagagatttttgtggtgggcgcgggtttggtttataggtttagcgttaagaatcgttttcgttcgtcgtatttcgtattttttttagcggggcgcggtcgcggtaggaggatgaggagcggagtttaggattgtcgcgcggattcggtttgttggaggagcgcggatcgggagttttcgcgcgtcggattttcggttaaggtggtcgtttttagtcggcgggtagtttaggtttttgtatattcgtttttttagttttttttcgtcgttttaggatacgatttcgcgttttttcgcgcggtttttgtttgcgttcggatagatatcgtcgggaaaatttgtttagcgtttaggaattttcgtttagtcgagggttttttagcgtagggttttagagatcgatgtcggttgtttttagtttttagtttagcgcgtaggcggcggcgtgagttcgttttgggtcgagaggtggtgattcggggtgtttggttacgcggagtcgaaattcggagtggcgacgaag

SEQ ID NO: 33220 - DNA, 634 bp, Artificial Sequence
  chemically treated genomic DNA (Homo sapiens) CpG-island No: 33220
cttcgtcgccactccgaatttcgactccgcgtaaccaaacaccccgaatcaccacctctcgacccaaaacgaactcacgccgccgcctacgcgctaaactaaaaactaaaaacaaccgacatcgatctctaaaaccctacgctaaaaaaccctcgactaaacgaaaattcctaaacgctaaacaaattttcccgacgatatctatccgaacgcaaacaaaaaccgcgcgaaaaaacgcgaaatcgtatcctaaaacgacgaaaaaaaactaaaaaaacgaatatacaaaaacctaaactacccgccgactaaaaacgaccaccttaaccgaaaatccgacgcgcgaaaactcccgatccgcgctcctccaacaaaccgaatccgcgcgacaatcctaaactccgctcctcatcctcctaccgcgaccgcgccccgctaaaaaaaatacgaaatacgacgaacgaaaacgattcttaacgctaaacctataaaccaaacccgcgcccaccacaaaaatctctcccgaaaaaacccgaaaaaataccaacgaccctaaaacaaaaaaaccctacgacgtacgctttaaacaaatacatcaaaaaaccttcctaaacgaaaaaaaaaaataataaaa

SEQ ID NO: 33221 - DNA, 846 bp, Artificial Sequence
  chemically treated genomic DNA (Homo sapiens) CpG-island No: 33221
tcggtcgtcgaggcgtttttcgcgttgcgggttttttttttaggattttcggtaaagacggacgaggagttcgagtttttgcggaaggattggcgtattggcgagtcgcggttgggcggtttcgagtaggggttgtgcggtggcgggggattttcggggggtgttgttacgtcggttagtttttgcggtgacgaaggcggtaggcggaagtcgtagtcgtcgtcgtatagcgggtcgtcgtcgttcgtcgttttgtatagggagttttttagatcggattgtagcgcggcggtcgagtaggtgttgagcgagcgtatcgagtcgcgtttgtagaggtcgtcggcgttcgggtaggcgaacgggtcgtcggcggtcgcggttaggtttagacggttttcgtgtagtagttcgtaggggttagtatagaggttttcgttttttattagtattatgtcgttcgttttgttcgttaggttttcgttcggttttacgtcgcgtcgttttaggatggcgttggggttggggttgacgttttgggcggtcggggcgttttttagtttttcggtcgcgtggtgtatcgggttgtcggcgtacgaaggcgggcgtttttcggcgtacgataggcgcgaacgcgacggcgaatcggattgtagttcggacggtagtttcgacggtagttcgggcggcggcgagtcggatgttaggtgcggcgttggtgataggttgttgaggcgtcgcgtgggcgaggattttcgcgatgcgtatattatttttttttgcgtagaagatagttcggaattttacggggttggttattaaggatatttttgttttttgtttgaggag

SEQ ID NO: 33222 - DNA, 846 bp, Artificial Sequence
  chemically treated genomic DNA (Homo sapiens) CpG-island No: 33222
ctcctcaaacaaaaaacaaaaatatccttaataaccaaccccgtaaaattccgaactatcttctacgcaaaaaaaaataatatacgcatcgcgaaaatcctcgcccacgcgacgcctcaacaacctatcaccaacgccgcacctaacatccgactcgccgccgcccgaactaccgtcgaaactaccgtccgaactacaatccgattcgccgtcgcgttcgcgcctatcgtacgccgaaaaacgcccgccttcgtacgccgacaacccgatacaccacgcgaccgaaaaactaaaaaacgccccgaccgcccaaaacgtcaaccccaaccccaacgccatcctaaaacgacgcgacgtaaaaccgaacgaaaacctaacgaacaaaacgaacgacataatactaataaaaaacgaaaacctctatactaacccctacgaactactacacgaaaaccgtctaaacctaaccgcgaccgccgacgacccgttcgcctacccgaacgccgacgacctctacaaacgcgactcgatacgctcgctcaacacctactcgaccgccgcgctacaatccgatctaaaaaactccctatacaaaacgacgaacgacgacgacccgctatacgacgacgactacgacttccgcctaccgccttcgtcaccgcaaaaactaaccgacgtaacaacaccccccgaaaatcccccgccaccgcacaacccctactcgaaaccgcccaaccgcgactcgccaatacgccaatccttccgcaaaaactcgaactcctcgtccgtctttaccgaaaatcctaaaaaaaaaacccgcaacgcgaaaaacgcctcgacgaccga

SEQ ID NO: 33223 - DNA, 846 bp, Artificial Sequence
  chemically treated genomic DNA (Homo sapiens) CpG-island No: 33223
ttttttaagtaagggataggggtgtttttggtgattagtttcgtggggtttcgggttgttttttgcgtagagagagatggtgtacgtatcgcgggagttttcgtttacgcggcgttttaataatttgttattagcgtcgtatttggtattcggttcgtcgtcgttcgggttgtcgtcggggttgtcgttcgggttgtagttcggttcgtcgtcgcgttcgcgtttatcgtacgtcggggggcgttcgttttcgtacgtcggtagttcggtgtattacgcggtcgagaggttgggaggcgtttcggtcgtttagggcgttagttttagttttagcgttattttggagcggcgcgacgtgaagtcggacgaggatttggcgagtaaggcgggcggtatggtgttggtgaaaggcgagggtttttatgttgatttttacgggttgttgtacgagggtcgtttgagtttggtcgcggtcgtcggcgattcgttcgtttattcgggcgtcggcggtttttataagcgcggttcggtgcgttcgtttagtatttattcggtcgtcgcgttgtagttcgatttggaggattttttgtataaggcggcgggcggcggcggttcgttgtacggcgacggttacggttttcgtttgtcgttttcgttatcgtagaagttggtcgacgtggtagtatttttcggaggtttttcgttatcgtatagtttttattcggggtcgtttagtcgcggttcgttagtgcgttagttttttcgtaaggattcgggtttttcgttcgtttttgtcgagagttttggagggaagattcgtagcgcggggagcgtttcgacggtcgg

SEQ ID NO: 33224 - DNA, 846 bp, Artificial Sequence
  chemically treated genomic DNA (Homo sapiens) CpG-island No: 33224
ccgaccgtcgaaacgctccccgcgctacgaatcttccctccaaaactctcgacaaaaacgaacgaaaaacccgaatccttacgaaaaaactaacgcactaacgaaccgcgactaaacgaccccgaataaaaactatacgataacgaaaaacctccgaaaaatactaccacgtcgaccaacttctacgataacgaaaacgacaaacgaaaaccgtaaccgtcgccgtacaacgaaccgccgccgcccgccgccttatacaaaaaatcctccaaatcgaactacaacgcgacgaccgaataaatactaaacgaacgcaccgaaccgcgcttataaaaaccgccgacgcccgaataaacgaacgaatcgccgacgaccgcgaccaaactcaaacgaccctcgtacaacaacccgtaaaaatcaacataaaaaccctcgcctttcaccaacaccataccgcccgccttactcgccaaatcctcgtccgacttcacgtcgcgccgctccaaaataacgctaaaactaaaactaacgccctaaacgaccgaaacgcctcccaacctctcgaccgcgtaatacaccgaactaccgacgtacgaaaacgaacgccccccgacgtacgataaacgcgaacgcgacgacgaaccgaactacaacccgaacgacaaccccgacgacaacccgaacgacgacgaaccgaataccaaatacgacgctaataacaaattattaaaacgccgcgtaaacgaaaactcccgcgatacgtacaccatctctctctacgcaaaaaacaacccgaaaccccacgaaactaatcaccaaaaacacccctatcccttacttaaaaaa

SEQ ID NO: 33225 - DNA, 695 bp, Artificial Sequence
  chemically treated genomic DNA (Homo sapiens) CpG-island No: 33225
ggggttgcgcggtgcgcggagggggcgtcggtagtcggcgttttttggcggtttttcgagtcggttttttcgtaggcggtcgttttggttttcggcgtaaattcggagtgtttaaggcgaagtttttcgcgtaatattaaagtttcgatcggcggattagacgatcgaaatgtttttggcggagattttcgggtgcggtcggagtcgggttggtcgtcgaggggttggtcgttggagtttcgggggcggtcggcggggggtttttatcgatttcggtaggttggtcgggtaggaacggtcgcggcgtcgtttcgggattcgcgggttcggtggagaggttcgtaggtggcgacggaggtcgggaattgggtttttgaggcgggttggcggttgggttacgttgaggttcgagattcggggtcgggcgaggcggggtcgaggcgaagttggtcgtagattttcgagggtgcgggggcgtagggtagcggttcggaggtgtataggagcgaacgtcgaagtgcgggaaatcgttttcgttttttttttttttttcgcggcgggggtacgttgcgacgttcgtattttcgtcggcggcggtgttaggaacgtcgggtcgttcggtcggtgtttagaggtgttttaggttattcggggtttagtcgttagggcgtaggggggtttgagggtttcgtagt

SEQ ID NO: 33226 - DNA, 695 bp, Artificial Sequence
  chemically treated genomic DNA (Homo sapiens) CpG-island No: 33226
actacgaaaccctcaaacccccctacgccctaacgactaaaccccgaataacctaaaacacctctaaacaccgaccgaacgacccgacgttcctaacaccgccgccgacgaaaatacgaacgtcgcaacgtacccccgccgcgaaaaaaaaaaaaaaaacgaaaacgatttcccgcacttcgacgttcgctcctatacacctccgaaccgctaccctacgcccccgcaccctcgaaaatctacgaccaacttcgcctcgaccccgcctcgcccgaccccgaatctcgaacctcaacgtaacccaaccgccaacccgcctcaaaaacccaattcccgacctccgtcgccacctacgaacctctccaccgaacccgcgaatcccgaaacgacgccgcgaccgttcctacccgaccaacctaccgaaatcgataaaaaccccccgccgaccgcccccgaaactccaacgaccaacccctcgacgaccaacccgactccgaccgcacccgaaaatctccgccaaaaacatttcgatcgtctaatccgccgatcgaaactttaatattacgcgaaaaacttcgccttaaacactccgaatttacgccgaaaaccaaaacgaccgcctacgaaaaaaccgactcgaaaaaccgccaaaaaacgccgactaccgacgccccctccgcgcaccgcgcaacccc

SEQ ID NO: 33227 - DNA, 695 bp, Artificial Sequence
  chemically treated genomic DNA (Homo sapiens) CpG-island No: 33227
gttgcggggtttttaggtttttttgcgttttggcggttgggtttcggatggtttgaagtatttttgggtatcgatcgggcggttcggcgtttttaatatcgtcgtcggcgaggatgcggacgtcgtagcgtgttttcgtcgcggagaggaggaagagggcggaggcggtttttcgtatttcggcgttcgtttttgtgtattttcgggtcgttgttttgcgttttcgtattttcgggaatttacgattagtttcgtttcggtttcgtttcgttcggtttcgggtttcgagttttagcgtggtttagtcgttagttcgttttaggaatttagttttcggttttcgtcgttatttgcgggtttttttatcgagttcgcgggtttcgggacggcgtcgcggtcgtttttgttcggttagtttgtcgaagtcgatggaaatttttcgtcggtcgttttcgaggttttagcggttagtttttcgacggttagttcggtttcggtcgtattcggagattttcgttaggaatatttcgatcgtttgattcgtcggtcgaaattttggtgttacgcgaagggtttcgttttggatatttcgagtttgcgtcgggggttagagcggtcgtttgcgaaagggtcggttcggggagtcgttaagaaacgtcggttgtcggcgtttttttcgcgtatcgcgtagtttt

SEQ ID NO: 33228 - DNA, 695 bp, Artificial Sequence
  chemically treated genomic DNA (Homo sapiens) CpG-island No: 33228
aaaactacgcgatacgcgaaaaaaacgccgacaaccgacgtttcttaacgactccccgaaccgaccctttcgcaaacgaccgctctaacccccgacgcaaactcgaaatatccaaaacgaaacccttcgcgtaacaccaaaatttcgaccgacgaatcaaacgatcgaaatattcctaacgaaaatctccgaatacgaccgaaaccgaactaaccgtcgaaaaactaaccgctaaaacctcgaaaacgaccgacgaaaaatttccatcgacttcgacaaactaaccgaacaaaaacgaccgcgacgccgtcccgaaacccgcgaactcgataaaaaaacccgcaaataacgacgaaaaccgaaaactaaattcctaaaacgaactaacgactaaaccacgctaaaactcgaaacccgaaaccgaacgaaacgaaaccgaaacgaaactaatcgtaaattcccgaaaatacgaaaacgcaaaacaacgacccgaaaatacacaaaaacgaacgccgaaatacgaaaaaccgcctccgccctcttcctcctctccgcgacgaaaacacgctacgacgtccgcatcctcgccgacgacgatattaaaaacgccgaaccgcccgatcgatacccaaaaatacttcaaaccatccgaaacccaaccgccaaaacgcaaaaaaacctaaaaaccccgcaac

SEQ ID NO: 33229 - DNA, 699 bp, Artificial Sequence
  chemically treated genomic DNA (Homo sapiens) CpG-island No: 33229
gtcgacggggaggtttttgtttacgggcgttttcggttcgttattcggggtcgtagagttcgggtttttttttcgttttttttacgcggttttttcggcggtcggatttttgggtttttgtgagtttcggcggggtcggtcgtttttttgtcgtcgcgtttttttcgtaatttcggcgggagattttttcgagtcgttcgaagcgtagaggtaggggaaataaagcggtcggcggtcgcgggaggcgggaaggatttcgggttcggtattcggtgttcgggtttaggcggcggggagggcgtttttcgttcgttcggtttttttttttttcgttggttttcggagatcgcgttatagagaattgttttttcgttgttttaatattagcgtcggggtcgcgagttcgtcgttgattgggtcgtatcgttcgtgacgttagttcggattttattttttcggcggtatcgttttcgtttttatttcgtatatagatatatatacgtggattcggcgcggcggcggttgggagggagcgcgggagggagcgtgcgcgggtgggatcgcgagcggttagatgcgtcgtcgtacgtggttcggtggcgttttgggatttcgtcgtcgtaaagttattcgttttttttcgagtagttacggttttgtatttgtaaaatgggacggtttatatttgtttttttggga

SEQ ID NO: 33230 - DNA, 699 bp, Artificial Sequence
  chemically treated genomic DNA (Homo sapiens) CpG-island No: 33230
tcccaaaaaaacaaatataaaccgtcccattttacaaatacaaaaccgtaactactcgaaaaaaaacgaataactttacgacgacgaaatcccaaaacgccaccgaaccacgtacgacgacgcatctaaccgctcgcgatcccacccgcgcacgctccctcccgcgctccctcccaaccgccgccgcgccgaatccacgtatatatatctatatacgaaataaaaacgaaaacgataccgccgaaaaaataaaatccgaactaacgtcacgaacgatacgacccaatcaacgacgaactcgcgaccccgacgctaatattaaaacaacgaaaaaacaattctctataacgcgatctccgaaaaccaacgaaaaaaaaaaaaaccgaacgaacgaaaaacgccctccccgccgcctaaacccgaacaccgaataccgaacccgaaatccttcccgcctcccgcgaccgccgaccgctttatttcccctacctctacgcttcgaacgactcgaaaaaatctcccgccgaaattacgaaaaaaacgcgacgacaaaaaaacgaccgaccccgccgaaactcacaaaaacccaaaaatccgaccgccgaaaaaaccgcgtaaaaaaaacgaaaaaaaaacccgaactctacgaccccgaataacgaaccgaaaacgcccgtaaacaaaaacctccccgtcgac

SEQ ID NO: 33231 - DNA, 699 bp, Artificial Sequence
  chemically treated genomic DNA (Homo sapiens) CpG-island No: 33231
ttttaagagggtagatatgaatcgttttattttatagatgtaaaatcgtgattgttcgggaaaaaacgagtggttttgcgacgacgaaattttaggacgttatcgggttacgtgcggcggcgtatttggtcgttcgcgattttattcgcgtacgttttttttcgcgtttttttttagtcgtcgtcgcgtcgggtttacgtgtgtgtgtttgtgtgcggaatggggacgggggcggtgtcgtcggaggggtggggttcgggttaacgttacgggcggtgcggtttaattagcggcgggttcgcggtttcggcgttggtattggggtagcgagggggtagttttttataacgcggttttcgggagttagcggggaagaaagaaatcgagcgggcggaaggcgtttttttcgtcgtttgggttcgggtatcgggtgtcgggttcggggtttttttcgtttttcgcggtcgtcggtcgttttgttttttttgtttttgcgtttcgggcgattcgagagggtttttcgtcggggttgcgaaggggacgcggcggtagaagggcggtcgatttcgtcgggatttatagggatttaggagttcggtcgtcgggagggtcgcgtgaggagagcgaagagggagttcgagttttgcggtttcgggtggcgggtcgggggcgttcgtgagtagagattttttcgtcgat

SEQ ID NO: 33232 - DNA, 699 bp, Artificial Sequence
  chemically treated genomic DNA (Homo sapiens) CpG-island No: 33232
atcgacgaaaaaatctctactcacgaacgcccccgacccgccacccgaaaccgcaaaactcgaactccctcttcgctctcctcacgcgaccctcccgacgaccgaactcctaaatccctataaatcccgacgaaatcgaccgcccttctaccgccgcgtccccttcgcaaccccgacgaaaaaccctctcgaatcgcccgaaacgcaaaaacaaaaaaaacaaaacgaccgacgaccgcgaaaaacgaaaaaaaccccgaacccgacacccgatacccgaacccaaacgacgaaaaaaacgccttccgcccgctcgatttctttcttccccgctaactcccgaaaaccgcgttataaaaaactaccccctcgctaccccaataccaacgccgaaaccgcgaacccgccgctaattaaaccgcaccgcccgtaacgttaacccgaaccccacccctccgacgacaccgcccccgtccccattccgcacacaaacacacacacgtaaacccgacgcgacgacgactaaaaaaaaacgcgaaaaaaaacgtacgcgaataaaatcgcgaacgaccaaatacgccgccgcacgtaacccgataacgtcctaaaatttcgtcgtcgcaaaaccactcgttttttcccgaacaatcacgattttacatctataaaataaaacgattcatatctaccctcttaaaa

SEQ ID NO: 33233 - DNA, 587 bp, Artificial Sequence
  chemically treated genomic DNA (Homo sapiens) CpG-island No: 33233
ttcgagtcggttttcggttaatgtatttgtttttatcgtggcgcgaagattatttggggtgggacgaagtaggtggcgcgggaaggagagagtgagcgcgtttcgcgttcggtttcggtcgcgcgcgtgcgggattacgcggtgaagttggagggcgcgagaaggcgtagtgtttttttttttttttcgttttcgtcgtttcgggcggttttttgtaagtttcggtatacgcgcgcgttcgcgtcgcgcgcgcgttcgttcgtagtgatatattcgcgtcggttcgcgcgcgcgtagatatatatttaaatatatatatattcgttttcgtatattcggtgatacgttcgcgcgcgcgtttatttatacgttcggtcgtcggcgtttttttagttggtttatttcggcggggttcgcgttttcggttcgttcgtttgggtatcgcgtttcggggttggggtcgagcgaggagttcgcgaggcggcgagagggcgagcgttaggtaggtcggttcggggttttcgtttttcgcgttttcgttcgatggggaacgtttcgttttaaggtatgtttttgttttttttttt

SEQ ID NO: 33234 - DNA, 587 bp, Artificial Sequence
  chemically treated genomic DNA (Homo sapiens) CpG-island No: 33234
aaaaaaaaaaacaaaaacataccttaaaacgaaacgttccccatcgaacgaaaacgcgaaaaacgaaaaccccgaaccgacctacctaacgctcgccctctcgccgcctcgcgaactcctcgctcgaccccaaccccgaaacgcgatacccaaacgaacgaaccgaaaacgcgaaccccgccgaaataaaccaactaaaaaaacgccgacgaccgaacgtataaataaacgcgcgcgcgaacgtatcaccgaatatacgaaaacgaatatatatatatttaaatatatatctacgcgcgcgcgaaccgacgcgaatatatcactacgaacgaacgcgcgcgcgacgcgaacgcgcgcgtataccgaaacttacaaaaaaccgcccgaaacgacgaaaacgaaaaaaaaaaaaaaacactacgccttctcgcgccctccaacttcaccgcgtaatcccgcacgcgcgcgaccgaaaccgaacgcgaaacgcgctcactctctccttcccgcgccacctacttcgtcccaccccaaataatcttcgcgccacgataaaaacaaatacattaaccgaaaaccgactcgaa

SEQ ID NO: 33235 - DNA, 587 bp, Artificial Sequence
  chemically treated genomic DNA (Homo sapiens) CpG-island No: 33235
gaggagagagatagggatatgttttgggacggagcgttttttatcgggcgggggcgcggggggcgggggtttcgggtcggtttgtttggcgttcgttttttcgtcgtttcgcgggtttttcgttcggttttagtttcggggcgcggtgtttaggcgggcgggtcgggggcgcgggtttcgtcggggtggattagttgggagggcgtcggcggtcgggcgtgtgggtgagcgcgcgcgcgggcgtgttatcgagtgtgcgagagcgagtgtgtgtgtgtttgagtgtgtgtttgcgcgcgcgcgggtcggcgcgggtgtgttattgcgggcgggcgcgcgcgcggcgcgggcgcgcgcgtgtgtcggaatttataaagggtcgttcggggcggcgggggcgggggaggggagggggtattgcgttttttcgcgttttttagttttatcgcgtgatttcgtacgcgcgcggtcggggtcgggcgcggggcgcgtttattttttttttttcgcgttatttgtttcgttttattttaagtagttttcgcgttacgatagagataaatatattgatcgaggatcggttcgga

SEQ ID NO: 33236 - DNA, 587 bp, Artificial Sequence
  chemically treated genomic DNA (Homo sapiens) CpG-island No: 33236
tccgaaccgatcctcgatcaatatatttatctctatcgtaacgcgaaaactacttaaaataaaacgaaacaaataacgcgaaaaaaaaaaaataaacgcgccccgcgcccgaccccgaccgcgcgcgtacgaaatcacgcgataaaactaaaaaacgcgaaaaaacgcaataccccctcccctcccccgcccccgccgccccgaacgaccctttataaattccgacacacgcgcgcgcccgcgccgcgcgcgcgcccgcccgcaataacacacccgcgccgacccgcgcgcgcgcaaacacacactcaaacacacacacactcgctctcgcacactcgataacacgcccgcgcgcgcgctcacccacacgcccgaccgccgacgccctcccaactaatccaccccgacgaaacccgcgcccccgacccgcccgcctaaacaccgcgccccgaaactaaaaccgaacgaaaaacccgcgaaacgacgaaaaaacgaacgccaaacaaaccgacccgaaacccccgccccccgcgcccccgcccgataaaaaacgctccgtcccaaaacatatccctatctctctcctc

SEQ ID NO: 33237 - DNA, 641 bp, Artificial Sequence
  chemically treated genomic DNA (Homo sapiens) CpG-island No: 33237
tgcgcgttttcgaaggtggggcgcgagttcggtttttttcgtttttttagttagtgaattaacgggatttttattgggttttgtgagtggttagcggcggtttcgttttcggtagtggttattttttggcgcgtattcggggattaattttggttttattttttttttcggtttcgttttcgtttggtttcgtttttttagtcgcgttcggttcggtcgggttcgaatcgcggagttatagtgtgttttgagtagaagttgtattggggtcgggattcggaggcgcgttgcgtgagtcggtcgtagagttatggcgggcggggaagatcgcggggacggagagtcggtattagtggtgatcgtgagggtgtagtatttggaagatatcgattttttcgtatgtgttaatttttcggagtcgcgtcgggtttttatttgtagtttggacggggcgttgtttttgggcgcgtagatattcgcggtgtatcgtttgttgggagcgtcgtttaaggtgagggaggtcggagaaaggttggggcgatcgggggtttagggtgggcgttatgaaaattggtgggaggtgtttcgcgggaagaggttggagcgagtgttttttttcggaaaagttttgggttggggtt

SEQ ID NO: 33238 - DNA, 641 bp, Artificial Sequence
  chemically treated genomic DNA (Homo sapiens) CpG-island No: 33238
aaccccaacccaaaacttttccgaaaaaaaacactcgctccaacctcttcccgcgaaacacctcccaccaattttcataacgcccaccctaaacccccgatcgccccaacctttctccgacctccctcaccttaaacgacgctcccaacaaacgatacaccgcgaatatctacgcgcccaaaaacaacgccccgtccaaactacaaataaaaacccgacgcgactccgaaaaattaacacatacgaaaaaatcgatatcttccaaatactacaccctcacgatcaccactaataccgactctccgtccccgcgatcttccccgcccgccataactctacgaccgactcacgcaacgcgcctccgaatcccgaccccaatacaacttctactcaaaacacactataactccgcgattcgaacccgaccgaaccgaacgcgactaaaaaaacgaaaccaaacgaaaacgaaaccgaaaaaaaaaataaaaccaaaattaatccccgaatacgcgccaaaaaataaccactaccgaaaacgaaaccgccgctaaccactcacaaaacccaataaaaatcccgttaattcactaactaaaaaaacgaaaaaaaccgaactcgcgccccaccttcgaaaacgcgca

SEQ ID NO: 33239 - DNA, 641 bp, Artificial Sequence
  chemically treated genomic DNA (Homo sapiens) CpG-island No: 33239
gattttagtttaagattttttcggagaagaatattcgttttagttttttttcgcggagtattttttattagtttttatggcgtttattttgaattttcgatcgttttaattttttttcggttttttttattttgagcggcgtttttagtaggcggtgtatcgcgggtatttgcgcgtttaagggtagcgtttcgtttaggttgtaggtgggggttcggcgcggtttcggaaagttggtatatgcgaaggggtcggtgttttttaggtattgtatttttacggttattattgatatcggtttttcgttttcgcggtttttttcgttcgttatggttttgcggtcggtttacgtagcgcgttttcgagtttcggttttagtgtagtttttatttaaagtatattgtagtttcgcggttcgggttcggtcggatcggacgcggttggaggggcggggttagacggaggcggggtcgaggaagggggtggagttaagattagttttcgagtgcgcgttaggaggtaattattgtcggaggcggggtcgtcgttagttatttatagggtttaatgggaatttcgttagtttattggttaggagggcgggaaaaatcgagttcgcgttttattttcgagaacgcgta

SEQ ID NO: 33240 - DNA, 641 bp, Artificial Sequence
  chemically treated genomic DNA (Homo sapiens) CpG-island No: 33240
tacgcgttctcgaaaataaaacgcgaactcgatttttcccgccctcctaaccaataaactaacgaaattcccattaaaccctataaataactaacgacgaccccgcctccgacaataattacctcctaacgcgcactcgaaaactaatcttaactccacccccttcctcgaccccgcctccgtctaaccccgcccctccaaccgcgtccgatccgaccgaacccgaaccgcgaaactacaatatactttaaataaaaactacactaaaaccgaaactcgaaaacgcgctacgtaaaccgaccgcaaaaccataacgaacgaaaaaaaccgcgaaaacgaaaaaccgatatcaataataaccgtaaaaatacaatacctaaaaaacaccgaccccttcgcatataccaactttccgaaaccgcgccgaacccccacctacaacctaaacgaaacgctacccttaaacgcgcaaatacccgcgatacaccgcctactaaaaacgccgctcaaaataaaaaaaaccgaaaaaaaattaaaacgatcgaaaattcaaaataaacgccataaaaactaataaaaaatactccgcgaaaaaaaactaaaacgaatattcttctccgaaaaaatcttaaactaaaatc

SEQ ID NO: 33241 - DNA, 506 bp, Artificial Sequence
  chemically treated genomic DNA (Homo sapiens) CpG-island No: 33241
gtcgtacgcgttttagtagttgttcgcggtcgcgtacgaagttcgggtgttggaattcgacgtggtcgcgtttcggtttaagtaggtcgttttgttcgatgtttattatttttcgaaaatcgtttggggagtggggcgtgggggcgtgggtcgttttattttcggtatcgagttttttattttcgtttttcgttcggtcgtagggatttatatatgttgagttggcgtacgaagttcgttatgttgttatgtttgaaatattggggtagtatttttttggcgaaacggttttggtcgtttacgaggaaattggtttcgttttattaagaacgtcgttcgtttatcgtgcgggcggagattaggagggtgagcggtgttcgtttacggttagttttgcgttttagcgcgcgtatatatttatgtttatttttgggtttaggtttgtcgtttacggggatatgggtcgaggttaggttagaacgggtttcgaggtttagtttggagcg

SEQ ID NO: 33242 - DNA, 506 bp, Artificial Sequence
  chemically treated genomic DNA (Homo sapiens) CpG-island No: 33242
cgctccaaactaaacctcgaaacccgttctaacctaacctcgacccatatccccgtaaacgacaaacctaaacccaaaaataaacataaatatatacgcgcgctaaaacgcaaaactaaccgtaaacgaacaccgctcaccctcctaatctccgcccgcacgataaacgaacgacgttcttaataaaacgaaaccaatttcctcgtaaacgaccaaaaccgtttcgccaaaaaaatactaccccaatatttcaaacataacaacataacgaacttcgtacgccaactcaacatatataaatccctacgaccgaacgaaaaacgaaaataaaaaactcgataccgaaaataaaacgacccacgcccccacgccccactccccaaacgattttcgaaaaataataaacatcgaacaaaacgacctacttaaaccgaaacgcgaccacgtcgaattccaacacccgaacttcgtacgcgaccgcgaacaactactaaaacgcgtacgac

SEQ ID NO: 33243 - DNA, 506 bp, Artificial Sequence
  chemically treated genomic DNA (Homo sapiens) CpG-island No: 33243
cgttttaggttaggtttcggagttcgttttggtttggtttcgatttatattttcgtaagcggtaggtttggatttaagagtgagtatgagtgtgtgcgcgcgttggagcgtaggattggtcgtgagcgggtatcgtttatttttttggttttcgttcgtacggtgggcgggcggcgtttttggtagagcgggattagttttttcgtaagcgattagagtcgtttcgttaaggaagtgttgttttagtattttaagtatagtaatatggcgagtttcgtgcgttaatttaatatgtgtgagtttttacggtcgggcggggagcggggatgggggattcggtgtcggggatggggcgatttacgtttttacgttttattttttagacggttttcggaaggtggtgagtatcgagtagggcggtttgtttaggtcggagcgcgattacgtcgagttttagtattcgagtttcgtgcgcggtcgcgagtagttattggagcgcgtgcggt

SEQ ID NO: 33244 - DNA, 506 bp, Artificial Sequence
  chemically treated genomic DNA (Homo sapiens) CpG-island No: 33244
accgcacgcgctccaataactactcgcgaccgcgcacgaaactcgaatactaaaactcgacgtaatcgcgctccgacctaaacaaaccgccctactcgatactcaccaccttccgaaaaccgtctaaaaaataaaacgtaaaaacgtaaatcgccccatccccgacaccgaatcccccatccccgctccccgcccgaccgtaaaaactcacacatattaaattaacgcacgaaactcgccatattactatacttaaaatactaaaacaacacttccttaacgaaacgactctaatcgcttacgaaaaaactaatcccgctctaccaaaaacgccgcccgcccaccgtacgaacgaaaaccaaaaaaataaacgatacccgctcacgaccaatcctacgctccaacgcgcgcacacactcatactcactcttaaatccaaacctaccgcttacgaaaatataaatcgaaaccaaaccaaaacgaactccgaaacctaacctaaaacg

SEQ ID NO: 33245 - DNA, 723 bp, Artificial Sequence
  chemically treated genomic DNA (Homo sapiens) CpG-island No: 33245
ggggcgcgtttggatattttttttcgtttttttttagagcgtttacgtttacggggacgggggagagaagtcgtttaattacgttacgagcgtaggtttttagggatgcggttcgcgcgtgagtttgagggtataggtgcgtaggcgcgggtagtgcgcgcggaaggcgtttagtatcgagtggtttattacgtagaaataatgtatttcgcgtagggtcgcgtagcgcgtcgttagtttttttagcgcggcgtttagttcggtcgaagcggttgcgcgtatttcgagcgcgtatagggttgcggcgtagtggtgtgttgcgaagcgtattgggtttacggtgtcgtttgagaggttgaggcgtagcgtagttacggggacggttggttgtaggacgcgcgttacgtttttagcgggtagcgcgggttttagttttagttttattgttagtttagggtggcggcggcgtaacgcgatttaggtttcgttgggtagcggggacgcgcgtgtattttcggggtacgcgtattcgtagagttaagagcgcgaaaggcgttcggtttggcgtcgttagtgtttcgaggatggcgtgcgataaattggttaggtgtaggtcgagagcgcgtaggcgcgggtaggtttttagtagttcgagtattgagtcgggatttacgttgtttattagggtattgttgtttagaaaaaggttgtggagttcgggat

SEQ ID NO: 33246 - DNA, 723 bp, Artificial Sequence
  chemically treated genomic DNA (Homo sapiens) CpG-island No: 33246
atcccgaactccacaacctttttctaaacaacaataccctaataaacaacgtaaatcccgactcaatactcgaactactaaaaacctacccgcgcctacgcgctctcgacctacacctaaccaatttatcgcacgccatcctcgaaacactaacgacgccaaaccgaacgcctttcgcgctcttaactctacgaatacgcgtaccccgaaaatacacgcgcgtccccgctacccaacgaaacctaaatcgcgttacgccgccgccaccctaaactaacaataaaactaaaactaaaacccgcgctacccgctaaaaacgtaacgcgcgtcctacaaccaaccgtccccgtaactacgctacgcctcaacctctcaaacgacaccgtaaacccaatacgcttcgcaacacaccactacgccgcaaccctatacgcgctcgaaatacgcgcaaccgcttcgaccgaactaaacgccgcgctaaaaaaactaacgacgcgctacgcgaccctacgcgaaatacattatttctacgtaataaaccactcgatactaaacgccttccgcgcgcactacccgcgcctacgcacctataccctcaaactcacgcgcgaaccgcatccctaaaaacctacgctcgtaacgtaattaaacgacttctctcccccgtccccgtaaacgtaaacgctctaaaaaaaaacgaaaaaaaatatccaaacgcgcccc

SEQ ID NO: 33247 - DNA, 723 bp, Artificial Sequence
  chemically treated genomic DNA (Homo sapiens) CpG-island No: 33247
gtttcgagttttatagtttttttttggataatagtattttagtgggtagcgtgggtttcggtttagtgttcgagttattggaggtttgttcgcgtttgcgcgttttcggtttgtatttagttagtttgtcgtacgttattttcgaagtattggcggcgttagatcgagcgtttttcgcgtttttggttttgcgagtgcgcgtgtttcgaagatgtacgcgcgttttcgttgtttaacgaagtttgggtcgcgttgcgtcgtcgttattttgggttggtagtggagttggagttggagttcgcgttgttcgttgagagcgtgacgcgcgttttgtagttagtcgttttcgtggttgcgttgcgttttaattttttaggcgatatcgtaggtttagtgcgtttcgtagtatattattacgtcgtaattttgtgcgcgttcgaggtgcgcgtagtcgtttcggtcgagttgaacgtcgcgttggaggagttggcggcgcgttgcgcggttttgcgcgaggtgtattgtttttgcgtggtgagttattcggtgttggacgtttttcgcgcgtattgttcgcgtttgcgtatttatatttttaagtttacgcgcgagtcgtatttttggaggtttacgttcgtggcgtgattgggcgatttttttttttcgttttcgtggacgtaagcgttttgagagggaacgggggggggtgtttaggcgcgtttt

SEQ ID NO: 33248 - DNA, 723 bp, Artificial Sequence
  chemically treated genomic DNA (Homo sapiens) CpG-island No: 33248
aaaacgcgcctaaacacccccccccgttccctctcaaaacgcttacgtccacgaaaacgaaaaaaaaaaatcgcccaatcacgccacgaacgtaaacctccaaaaatacgactcgcgcgtaaacttaaaaatataaatacgcaaacgcgaacaatacgcgcgaaaaacgtccaacaccgaataactcaccacgcaaaaacaatacacctcgcgcaaaaccgcgcaacgcgccgccaactcctccaacgcgacgttcaactcgaccgaaacgactacgcgcacctcgaacgcgcacaaaattacgacgtaataatatactacgaaacgcactaaacctacgatatcgcctaaaaaattaaaacgcaacgcaaccacgaaaacgactaactacaaaacgcgcgtcacgctctcaacgaacaacgcgaactccaactccaactccactaccaacccaaaataacgacgacgcaacgcgacccaaacttcgttaaacaacgaaaacgcgcgtacatcttcgaaacacgcgcactcgcaaaaccaaaaacgcgaaaaacgctcgatctaacgccgccaatacttcgaaaataacgtacgacaaactaactaaatacaaaccgaaaacgcgcaaacgcgaacaaacctccaataactcgaacactaaaccgaaacccacgctacccactaaaatactattatccaaaaaaaaactataaaactcgaaac

SEQ ID NO: 33249 - DNA, 649 bp, Artificial Sequence
  chemically treated genomic DNA (Homo sapiens) CpG-island No: 33249
agaacggtcgagtttggggatcgttcggcgtttgatcgttcgttttcgtagagagcggcgggagttcggacgtgttgtagatgttgaagatttatcgtagcgattcgtagttgatcgtgtagttgcgattttgcgggcggtagttttgtggtcgtttttttcgcgtttatcgcgagggggcgttgcgcgtcgcgttgtagaggagtttggcggtcgcgttcgtttagtattcggtgtcgttgtaattggagttgcgcgtcggcgtcgagcggttggacgttttgttggcggacgaggagcgttgtttgagttgtattttagtttagtaggtgcggtcgggttagggttaggatggggtagggcggggattcgcggttaagtttttcgtgacggtacgttttatttttttagttcgatcggtttcgggatgaagaattggttgagttggaggatgcgttgcgaaatttgaagtgcggttcgggggttcggggtggcgacggggaggtcgtttcggtttttttgtagttttcggtgttttttttgtcggaggtgaagtcgtcgtcgtcgtcgttatttgtttagatttttttgttttagggttagtttgtaggtgaggcgtaggtggagaggcggggttattaggaggttg

SEQ ID NO: 33250 - DNA, 649 bp, Artificial Sequence
  chemically treated genomic DNA (Homo sapiens) CpG-island No: 33250
caacctcctaataaccccgcctctccacctacgcctcacctacaaactaaccctaaaacaaaaaaatctaaacaaataacgacgacgacgacgacttcacctccgacaaaaaaaacaccgaaaactacaaaaaaaccgaaacgacctccccgtcgccaccccgaacccccgaaccgcacttcaaatttcgcaacgcatcctccaactcaaccaattcttcatcccgaaaccgatcgaactaaaaaaataaaacgtaccgtcacgaaaaacttaaccgcgaatccccgccctaccccatcctaaccctaacccgaccgcacctactaaactaaaatacaactcaaacaacgctcctcgtccgccaacaaaacgtccaaccgctcgacgccgacgcgcaactccaattacaacgacaccgaatactaaacgaacgcgaccgccaaactcctctacaacgcgacgcgcaacgccccctcgcgataaacgcgaaaaaaacgaccacaaaactaccgcccgcaaaatcgcaactacacgatcaactacgaatcgctacgataaatcttcaacatctacaacacgtccgaactcccgccgctctctacgaaaacgaacgatcaaacgccgaacgatccccaaactcgaccgttct

SEQ ID NO: 33251 - DNA, 649 bp, Artificial Sequence
  chemically treated genomic DNA (Homo sapiens) CpG-island No: 33251
taattttttggtgatttcgtttttttatttgcgttttatttataggttgattttggaatagaaaagtttgggtaggtggcggcggcggcggcggttttattttcgatagagagggtatcgggggttgtaagggggtcgaagcgattttttcgtcgttatttcgggttttcgagtcgtattttagatttcgtagcgtattttttagtttagttagttttttatttcggagtcggtcgggttaggggaatggaacgtgtcgttacgggggatttaatcgcggattttcgttttattttattttgattttagttcggtcgtatttgttgggttaggatgtaatttaaatagcgtttttcgttcgttagtaaagcgtttagtcgttcggcgtcggcgcgtagttttagttgtagcggtatcgagtgttgggcgagcgcggtcgttaggtttttttgtagcgcggcgcgtagcgttttttcgcggtaggcgcggaggaagcggttatagggttgtcgttcgtagaatcgtagttgtacgattagttgcgggtcgttgcggtggatttttagtatttgtagtacgttcgggttttcgtcgttttttgcggaggcgggcggttaggcgtcgggcggtttttaagttcggtcgtttt

SEQ ID NO: 33252 - DNA, 649 bp, Artificial Sequence
  chemically treated genomic DNA (Homo sapiens) CpG-island No: 33252
aaaacgaccgaacttaaaaaccgcccgacgcctaaccgcccgcctccgcaaaaaacgacgaaaacccgaacgtactacaaatactaaaaatccaccgcaacgacccgcaactaatcgtacaactacgattctacgaacgacaaccctataaccgcttcctccgcgcctaccgcgaaaaaacgctacgcgccgcgctacaaaaaaacctaacgaccgcgctcgcccaacactcgataccgctacaactaaaactacgcgccgacgccgaacgactaaacgctttactaacgaacgaaaaacgctatttaaattacatcctaacccaacaaatacgaccgaactaaaatcaaaataaaataaaacgaaaatccgcgattaaatcccccgtaacgacacgttccattcccctaacccgaccgactccgaaataaaaaactaactaaactaaaaaatacgctacgaaatctaaaatacgactcgaaaacccgaaataacgacgaaaaaatcgcttcgacccccttacaacccccgataccctctctatcgaaaataaaaccgccgccgccgccgccacctacccaaacttttctattccaaaatcaacctataaataaaacgcaaataaaaaaacgaaatcaccaaaaaatta

SEQ ID NO: 33253 - DNA, 1204 bp, Artificial Sequence
  chemically treated genomic DNA (Homo sapiens) CpG-island No: 33253
cgcgcggagatgaggaggaggttgcgtttacgtagggacgtattgtttacgttgttttttggcgtttttttgggttttttattttatgcgtagcgcgacggcgcggtttcgacggcgagcgcgtcgcgagggcgagggagggcggtatcgaggtttattttcggatttcgcgcgttttagttattcgacgcgggtgtagtttcgtcggtttacgaaggggatatatcggcgtcgtttacgtttacgggattttttgatttcgttcgttatttgcgcgttaaggattagcggcggtttttattgtttattaattagtcgtataagtgtcgcggcgacggcgtattcggtggtcgttcggatttgtttattgttgttaagtcggtggtagaggatttcgagcggcgttaagtcgtgcgttagacgtggggcgcggagggtcgcgtgtagggggcgttggtgcgtcgcgtgtttttgttgggcgtgtttaggggcgtaggttcgggcggggtcgacgaagttggggagggcgcgcgaatttattggcgcgttttgttgcgggtcgagagttttgcgtatgcggatattttgttttgggttttcgacgatattttttttaatttaacgtttaaggagatttattttttagtttgggttttagttttttgtttcgacgtgcgtttcgtttttaagggcgacgtagatgtgttcgtgaacgtgggaaattttttggagtttttggcgtcgcgggattcggcgtaagatttgtttgttggtgacgtaattgtgtatgcgcggtttattcgtacgcgggttagtaagtattatattttcgaggtcgtgtacggtttgttcgtttattcggtttacgcgggcggcggtggttttgtgtttttcggggttacgttgtatcgtttggttggcgtttgtgcgtaggtcgagtttttttttatcgacgacgtttttttgggtatgtgtttgtagcgtttgcggtttacgttcgagttttattttgtttttcgtatttttggtattttttagtttttagtcgcgtcgtatttgagtattttcgatttttgtttttatcgtgagttggttgtagtgtacgggttttcggtcgttgatatttggtttatgtggcgtttgttgtacgggtcgtatgggttagtttgtgcgtatttatagtttgtcgttgtaggtttttttt

SEQ ID NO: 33254 - DNA, 1204 bp, Artificial Sequence
  chemically treated genomic DNA (Homo sapiens) CpG-island No: 33254
aaaaaaaacctacaacgacaaactataaatacgcacaaactaacccatacgacccgtacaacaaacgccacataaaccaaatatcaacgaccgaaaacccgtacactacaaccaactcacgataaaaacaaaaatcgaaaatactcaaatacgacgcgactaaaaactaaaaaataccaaaaatacgaaaaacaaaataaaactcgaacgtaaaccgcaaacgctacaaacacatacccaaaaaaacgtcgtcgataaaaaaaaactcgacctacgcacaaacgccaaccaaacgatacaacgtaaccccgaaaaacacaaaaccaccgccgcccgcgtaaaccgaataaacgaacaaaccgtacacgacctcgaaaatataatacttactaacccgcgtacgaataaaccgcgcatacacaattacgtcaccaacaaacaaatcttacgccgaatcccgcgacgccaaaaactccaaaaaatttcccacgttcacgaacacatctacgtcgcccttaaaaacgaaacgcacgtcgaaacaaaaaactaaaacccaaactaaaaaataaatctccttaaacgttaaattaaaaaaaatatcgtcgaaaacccaaaacaaaatatccgcatacgcaaaactctcgacccgcaacaaaacgcgccaataaattcgcgcgccctccccaacttcgtcgaccccgcccgaacctacgcccctaaacacgcccaacaaaaacacgcgacgcaccaacgccccctacacgcgaccctccgcgccccacgtctaacgcacgacttaacgccgctcgaaatcctctaccaccgacttaacaacaataaacaaatccgaacgaccaccgaatacgccgtcgccgcgacacttatacgactaattaataaacaataaaaaccgccgctaatccttaacgcgcaaataacgaacgaaatcaaaaaatcccgtaaacgtaaacgacgccgatatatccccttcgtaaaccgacgaaactacacccgcgtcgaataactaaaacgcgcgaaatccgaaaataaacctcgataccgccctccctcgccctcgcgacgcgctcgccgtcgaaaccgcgccgtcgcgctacgcataaaataaaaaacccaaaaaaacgccaaaaaacaacgtaaacaatacgtccctacgtaaacgcaacctcctcctcatctccgcgcg

SEQ ID NO: 33255 - DNA, 1204 bp, Artificial Sequence
  chemically treated genomic DNA (Homo sapiens) CpG-island No: 33255
ggaaggggtttgtagcgataggttgtggatgcgtataggttggtttatgcggttcgtgtagtaggcgttatataagttagatgttagcggtcgagagttcgtgtattataattagtttacggtaaaagtaggggtcgaaggtgtttaaatgcggcgcggttgaaggttgggggatgttaaaggtgcggaaggtagggtgaggttcgggcgtgagtcgtaggcgttgtagatatatgtttagaaagacgtcgtcgatggggaagagttcgatttgcgtataggcgttagttaggcggtgtagcgtggtttcggaaagtataaagttatcgtcgttcgcgtaggtcggataggcgggtaggtcgtatacggtttcggggatgtagtatttgttagttcgcgtgcggatgggtcgcgtatgtataattacgttattagtaagtaggttttgcgtcgggtttcgcggcgttaggaattttaggagattttttacgtttacgaatatatttgcgtcgtttttaaaaacgaagcgtacgtcggggtagaaagttgaggtttaggttagaaagtggatttttttgagcgttaggttaaaaaaggtgtcgtcgaaggtttagagtaggatgttcgtatacgtaaggttttcggttcgtagtagggcgcgttagtgggttcgcgcgttttttttaatttcgtcggtttcgttcgagtttgcgtttttgggtacgtttagtaagaatacgcggcgtattagcgttttttgtacgcgatttttcgcgttttacgtttggcgtacggtttggcgtcgttcgaagttttttgttatcgatttgatagtaataagtaggttcgggcggttatcgggtgcgtcgtcgtcgcggtatttgtgcggttggttaatgagtagtggaaatcgtcgttggtttttggcgcgtaaatagcgggcgaagttaaagggtttcgtaggcgtgggcggcgtcggtgtgtttttttcgtaggtcggcggggttgtattcgcgtcgggtaattggaacgcgcggggttcgggggtgggtttcggtgtcgttttttttcgttttcgcggcgcgttcgtcgtcggggtcgcgtcgtcgcgttgcgtatagagtaagaggtttagggaggcgttaaggagtagcgtgagtaatgcgtttttgcgtaggcgtagttttttttttattttcgcgcg

SEQ ID NO: 33256 - DNA, 1204 bp, Artificial Sequence
  chemically treated genomic DNA (Homo sapiens) CpG-island No: 33256
cgcgcgaaaataaaaaaaaaactacgcctacgcaaaaacgcattactcacgctactccttaacgcctccctaaacctcttactctatacgcaacgcgacgacgcgaccccgacgacgaacgcgccgcgaaaacgaaaaaaaacgacaccgaaacccacccccgaaccccgcgcgttccaattacccgacgcgaatacaaccccgccgacctacgaaaaaaacacaccgacgccgcccacgcctacgaaaccctttaacttcgcccgctatttacgcgccaaaaaccaacgacgatttccactactcattaaccaaccgcacaaataccgcgacgacgacgcacccgataaccgcccgaacctacttattactatcaaatcgataacaaaaaacttcgaacgacgccaaaccgtacgccaaacgtaaaacgcgaaaaatcgcgtacaaaaaacgctaatacgccgcgtattcttactaaacgtacccaaaaacgcaaactcgaacgaaaccgacgaaattaaaaaaaacgcgcgaacccactaacgcgccctactacgaaccgaaaaccttacgtatacgaacatcctactctaaaccttcgacgacaccttttttaacctaacgctcaaaaaaatccactttctaacctaaacctcaactttctaccccgacgtacgcttcgtttttaaaaacgacgcaaatatattcgtaaacgtaaaaaatctcctaaaattcctaacgccgcgaaacccgacgcaaaacctacttactaataacgtaattatacatacgcgacccatccgcacgcgaactaacaaatactacatccccgaaaccgtatacgacctacccgcctatccgacctacgcgaacgacgataactttatactttccgaaaccacgctacaccgcctaactaacgcctatacgcaaatcgaactcttccccatcgacgacgtctttctaaacatatatctacaacgcctacgactcacgcccgaacctcaccctaccttccgcacctttaacatcccccaaccttcaaccgcgccgcatttaaacaccttcgacccctacttttaccgtaaactaattataatacacgaactctcgaccgctaacatctaacttatataacgcctactacacgaaccgcataaaccaacctatacgcatccacaacctatcgctacaaaccccttcc

SEQ ID NO: 33257 - DNA, 714 bp, Artificial Sequence
  chemically treated genomic DNA (Homo sapiens) CpG-island No: 33257
ttcgtttttttatatagaaggtttttttttttcgtcggtttatttagtcgcggaagtttttgggagatttcgtttcgtttcgtttcgcggtgtttttcgcgtatttattttcgtttatttacgcggtttttttggcgggagagcgttttcggcgttttcgttaggttcggggagtgggtacggtggagttgtcgatcgttggtcgttgttttaatttacgtattgcgacgtcgcgggtgaggcgcgcggtttgcggggttcgggggtgcggcggggcggggttggcgggttgttcgggtttacggagaggacggcggcgggcgggggttgttgtagggttcgtattttgtttttcgcgtcggtagggttgtgtttcgtcgagatttgttcgggttgtggtttcgtttttcggtttttagggggcggcgcggcgttgcgcggcgtttcggcggtattgttttttttttttagcggttaggaggcggtgtttcgtgacgtcgcgcggtcgcgttgtagtggtcgtcgaggtcgtcgtttgttcgaaggttgttcgattttacggtttttcgcggttcggttcgggggcgtgagtgtcgttagcgggcgacgggggggcgcgcggtaggttttgtaataaggttagggtttgggggggtcggtaggagagcgaattcgaggtatcgtggtgttatggcggggtcgtttttacgggta

SEQ ID NO: 33258 - DNA, 714 bp, Artificial Sequence
  chemically treated genomic DNA (Homo sapiens) CpG-island No: 33258
tacccgtaaaaacgaccccgccataacaccacgatacctcgaattcgctctcctaccgacccccccaaaccctaaccttattacaaaacctaccgcgcgcccccccgtcgcccgctaacgacactcacgcccccgaaccgaaccgcgaaaaaccgtaaaatcgaacaaccttcgaacaaacgacgacctcgacgaccactacaacgcgaccgcgcgacgtcacgaaacaccgcctcctaaccgctaaaaaaaaaaaacaataccgccgaaacgccgcgcaacgccgcgccgccccctaaaaaccgaaaaacgaaaccacaacccgaacaaatctcgacgaaacacaaccctaccgacgcgaaaaacaaaatacgaaccctacaacaacccccgcccgccgccgtcctctccgtaaacccgaacaacccgccaaccccgccccgccgcacccccgaaccccgcaaaccgcgcgcctcacccgcgacgtcgcaatacgtaaattaaaacaacgaccaacgatcgacaactccaccgtacccactccccgaacctaacgaaaacgccgaaaacgctctcccgccaaaaaaaccgcgtaaataaacgaaaataaatacgcgaaaaacaccgcgaaacgaaacgaaacgaaatctcccaaaaacttccgcgactaaataaaccgacgaaaaaaaaaaaccttctatataaaaaaacgaa

SEQ ID NO: 33259 - DNA, 714 bp, Artificial Sequence
  chemically treated genomic DNA (Homo sapiens) CpG-island No: 33259
tgttcgtgggggcggtttcgttatggtattacgatgtttcgggttcgtttttttgtcggtttttttaggttttggttttgttgtagggtttatcgcgcgttttttcgtcgttcgttggcgatatttacgttttcgggtcgagtcgcggggaatcgtgaagtcggatagttttcgaatagacggcggtttcgacggttattatagcgcggtcgcgcggcgttacgggatatcgttttttggtcgttgggaagggagggtagtgtcgtcggggcgtcgcgtagcgtcgcgtcgttttttggaggtcggaggacggagttatagttcgagtaggtttcgacggggtatagttttgtcggcgcggaagataaggtgcgggttttgtagtaattttcgttcgtcgtcgtttttttcgtgggttcggatagttcgttagtttcgtttcgtcgtattttcgggtttcgtagatcgcgcgttttattcgcggcgtcgtagtgcgtgggttggggtagcgattaacggtcggtagttttatcgtgtttatttttcgggtttggcgaggacgtcggaagcgttttttcgttaggaaggtcgcgtgggtgagcgagggtgagtgcgcggggggtatcgcgggacggggcggggcggggttttttaggggttttcgcggttgaatgagtcgacgggaggggaaggttttttgtgtagggaagcggg

SEQ ID NO: 33260 - DNA, 714 bp, Artificial Sequence
  chemically treated genomic DNA (Homo sapiens) CpG-island No: 33260
cccgcttccctacacaaaaaaccttcccctcccgtcgactcattcaaccgcgaaaacccctaaaaaaccccgccccgccccgtcccgcgataccccccgcgcactcaccctcgctcacccacgcgaccttcctaacgaaaaaacgcttccgacgtcctcgccaaacccgaaaaataaacacgataaaactaccgaccgttaatcgctaccccaacccacgcactacgacgccgcgaataaaacgcgcgatctacgaaacccgaaaatacgacgaaacgaaactaacgaactatccgaacccacgaaaaaaacgacgacgaacgaaaattactacaaaacccgcaccttatcttccgcgccgacaaaactataccccgtcgaaacctactcgaactataactccgtcctccgacctccaaaaaacgacgcgacgctacgcgacgccccgacgacactaccctcccttcccaacgaccaaaaaacgatatcccgtaacgccgcgcgaccgcgctataataaccgtcgaaaccgccgtctattcgaaaactatccgacttcacgattccccgcgactcgacccgaaaacgtaaatatcgccaacgaacgacgaaaaaacgcgcgataaaccctacaacaaaaccaaaacctaaaaaaaccgacaaaaaaacgaacccgaaacatcgtaataccataacgaaaccgcccccacgaaca

SEQ ID NO: 33261 - DNA, 540 bp, Artificial Sequence
  chemically treated genomic DNA (Homo sapiens) CpG-island No: 33261
atttcgacgtgtttagggtttggaggagaacgcgtattgcgcgtcggtgttgttcgttttgagggagttgttaaattttcgcgatttcgcgttgttgggtttggaggtggttggtttgcggtaataatttttcgacgtgaggtgcggattgggggttagaagggaagagaagtcggagggcggggaggacggggttgacgcgtttttttggtgtttttgtagcgaggattacgttttcgtttttttgggtttgcgcggggatttgtttcgggagtagtatttggtcgcgtttagttttttgtaggttgcgttgtcgtcgtcgtttcgcgcgagtcgtcgcgttttttttagtttagtgttcgcgttcgcgttcgcgtcggttttttgtttgttttcggggttttgcgttcgagttttgttgttcgtagaataaattacggttgtcggacgtttgagtttgtgtgtgttggggaaggtgggatggaataaaagtgtttacgagggttgagggaatttttgtagagtgatacgtttaaagta

SEQ ID NO: 33262 - DNA, 540 bp, Artificial Sequence
  chemically treated genomic DNA (Homo sapiens) CpG-island No: 33262
tactttaaacgtatcactctacaaaaattccctcaaccctcgtaaacacttttattccatcccaccttccccaacacacacaaactcaaacgtccgacaaccgtaatttattctacgaacaacaaaactcgaacgcaaaaccccgaaaacaaacaaaaaaccgacgcgaacgcgaacgcgaacactaaactaaaaaaaacgcgacgactcgcgcgaaacgacgacgacaacgcaacctacaaaaaactaaacgcgaccaaatactactcccgaaacaaatccccgcgcaaacccaaaaaaacgaaaacgtaatcctcgctacaaaaacaccaaaaaaacgcgtcaaccccgtcctccccgccctccgacttctcttcccttctaacccccaatccgcacctcacgtcgaaaaattattaccgcaaaccaaccacctccaaacccaacaacgcgaaatcgcgaaaatttaacaactccctcaaaacgaacaacaccgacgcgcaatacgcgttctcctccaaaccctaaacacgtcgaaat

SEQ ID NO: 33263 - DNA, 540 bp, Artificial Sequence
  chemically treated genomic DNA (Homo sapiens) CpG-island No: 33263
tattttaagcgtgttattttgtaagaatttttttaattttcgtgggtatttttattttattttattttttttaatatatatagatttaggcgttcggtagtcgtggtttattttgcgagtagtagggttcgggcgtaggatttcgagggtaggtaggaggtcggcgcgagcgcgggcgcgggtattaggttgaagaggacgcggcggttcgcgcggggcgacggcggtagcgtagtttgtagggagttgagcgcggttaggtgttgttttcgggataagttttcgcgtaggtttaagagggcggagacgtggttttcgttgtaggggtattaaggaggcgcgttagtttcgtttttttcgtttttcggtttttttttttttttggtttttagttcgtattttacgtcgggaaattgttgtcgtaggttagttatttttaggtttagtagcgcggggtcgcggaggtttagtagtttttttagggcgagtagtatcggcgcgtagtgcgcgtttttttttaggttttgagtacgtcggggt

SEQ ID NO: 33264 - DNA, 540 bp, Artificial Sequence
  chemically treated genomic DNA (Homo sapiens) CpG-island No: 33264
accccgacgtactcaaaacctaaaaaaaaacgcgcactacgcgccgatactactcgccctaaaaaaactactaaacctccgcgaccccgcgctactaaacctaaaaataactaacctacgacaacaatttcccgacgtaaaatacgaactaaaaaccaaaaaaaaaaaaaaaccgaaaaacgaaaaaaacgaaactaacgcgcctccttaatacccctacaacgaaaaccacgtctccgccctcttaaacctacgcgaaaacttatcccgaaaacaacacctaaccgcgctcaactccctacaaactacgctaccgccgtcgccccgcgcgaaccgccgcgtcctcttcaacctaatacccgcgcccgcgctcgcgccgacctcctacctaccctcgaaatcctacgcccgaaccctactactcgcaaaataaaccacgactaccgaacgcctaaatctatatatattaaaaaaaataaaataaaataaaaatacccacgaaaattaaaaaaattcttacaaaataacacgcttaaaata

SEQ ID NO: 33265 - DNA, 551 bp, Artificial Sequence
  chemically treated genomic DNA (Homo sapiens) CpG-island No: 33265
tttcgcggatataggggcggggtcgtcgagggggattggttgcgggaggggtttaggttttcgtttttagttcggaatttttttttttcggttttggtaggtttcgggagtttcggttcgtgggtgtcggaagtggaggcggttggtggggttggcggggtttagcgacgttgcgcgggtggcggtttgcgaattgcgggtggattgtgtagtgatcggcgtttcgttgtttcgtttcgtggcgggtgagcgagggtgcgtggtgcgcggcggcggcggaacgaacgcggtgcgggcggggcgttcgtcgtagggtttatggttttttgcgcgagtatcgatatcgaggacgttacgtagtatttgcgggatatttttaagttggatcggttcgcgggcggtgagcgggggttgcgggggtgggttttaggcgagttgataaaagggcggcgcgcgtttgaatcgttattggggtttatagtttttttaggattagttttggattttttcggcgggtaagggtggacggggattgattgtgtttttcgaag

SEQ ID NO: 33266 - DNA, 551 bp, Artificial Sequence
  chemically treated genomic DNA (Homo sapiens) CpG-island No: 33266
cttcgaaaaacacaatcaatccccgtccacccttacccgccgaaaaaatccaaaactaatcctaaaaaaactataaaccccaataacgattcaaacgcgcgccgcccttttatcaactcgcctaaaacccacccccgcaacccccgctcaccgcccgcgaaccgatccaacttaaaaatatcccgcaaatactacgtaacgtcctcgatatcgatactcgcgcaaaaaaccataaaccctacgacgaacgccccgcccgcaccgcgttcgttccgccgccgccgcgcaccacgcaccctcgctcacccgccacgaaacgaaacaacgaaacgccgatcactacacaatccacccgcaattcgcaaaccgccacccgcgcaacgtcgctaaaccccgccaaccccaccaaccgcctccacttccgacacccacgaaccgaaactcccgaaacctaccaaaaccgaaaaaaaaaaattccgaactaaaaacgaaaacctaaacccctcccgcaaccaatccccctcgacgaccccgcccctatatccgcgaaa

SEQ ID NO: 33267 - DNA, 551 bp, Artificial Sequence
  chemically treated genomic DNA (Homo sapiens) CpG-island No: 33267
tttcgaggggtatagttaattttcgtttatttttattcgtcgggaggatttagagttagttttaagggagttgtgggttttaatggcggtttagacgcgcgtcgtttttttgttagttcgtttggggtttattttcgtaattttcgtttatcgttcgcgggtcggtttagtttgaggatgtttcgtaggtgttgcgtggcgttttcgatgtcgatgttcgcgtaggaggttatgggttttgcggcgggcgtttcgttcgtatcgcgttcgtttcgtcgtcgtcgcgtattacgtattttcgtttattcgttacggggcgagatagcgggacgtcggttattatatagtttattcgtagttcgtaaatcgttattcgcgtagcgtcgttgagtttcgttaattttattaatcgtttttattttcggtatttacgagtcgaggttttcggaatttgttagggtcggagaagaaaggtttcgggttgggggcggaagtttaaatttttttcgtagttagtttttttcggcggtttcgtttttgtgttcgcgagg

SEQ ID NO: 33268 - DNA, 551 bp, Artificial Sequence
  chemically treated genomic DNA (Homo sapiens) CpG-island No: 33268
cctcgcgaacacaaaaacgaaaccgccgaaaaaaactaactacgaaaaaaatttaaacttccgcccccaacccgaaacctttcttctccgaccctaacaaattccgaaaacctcgactcgtaaataccgaaaataaaaacgattaataaaattaacgaaactcaacgacgctacgcgaataacgatttacgaactacgaataaactatataataaccgacgtcccgctatctcgccccgtaacgaataaacgaaaatacgtaatacgcgacgacgacgaaacgaacgcgatacgaacgaaacgcccgccgcaaaacccataacctcctacgcgaacatcgacatcgaaaacgccacgcaacacctacgaaacatcctcaaactaaaccgacccgcgaacgataaacgaaaattacgaaaataaaccccaaacgaactaacaaaaaaacgacgcgcgtctaaaccgccattaaaacccacaactcccttaaaactaactctaaatcctcccgacgaataaaaataaacgaaaattaactatacccctcgaaa

SEQ ID NO: 33269 - DNA, 625 bp, Artificial Sequence
  chemically treated genomic DNA (Homo sapiens) CpG-island No: 33269
tatttttttaggagagtgttcgttttcgtttcgaagaggttgattggtaggttacgttcggagattcgttagtcgcgtagtttagtttcgggagagttcgttttcgattcgttttcgattcgtttcgtaggtttgttttggcgttagttgcgcgttgtgatgacgttacgacgttaacgttcgagaatggcggcggcggcggcggcggcggcggtcgttgttattgttcggagatggtcggtagagtcgtcgagacgtcgaagagttcgtcgttcgcgcgaggtgaggcggttcggtttaggacgacggttcgacgggcgggaggggtagtcgaattgtggtcgtggtcgttttttggcgtttcggggtttgtttttggttagtttgtagcgtcggttcgtgtttcgtgcgttagggtttatagggttggagagtaggtcgggcgatggttgttcgggttttcggcgttcgagtttggattggtttcggaacgtgttgtcgtgttggatagttcgtttttaggttcgtttgggtttggtggacgtggtcggttgttttgtttgtttgttgtttagtcgtttcgcgtttagagcgggttaggttgatttaatttggttgtttttgt

SEQ ID NO: 33270 - DNA, 625 bp, Artificial Sequence
  chemically treated genomic DNA (Homo sapiens) CpG-island No: 33270
acaaaaacaaccaaattaaatcaacctaacccgctctaaacgcgaaacgactaaacaacaaacaaacaaaacaaccgaccacgtccaccaaacccaaacgaacctaaaaacgaactatccaacacgacaacacgttccgaaaccaatccaaactcgaacgccgaaaacccgaacaaccatcgcccgacctactctccaaccctataaaccctaacgcacgaaacacgaaccgacgctacaaactaaccaaaaacaaaccccgaaacgccaaaaaacgaccacgaccacaattcgactacccctcccgcccgtcgaaccgtcgtcctaaaccgaaccgcctcacctcgcgcgaacgacgaactcttcgacgtctcgacgactctaccgaccatctccgaacaataacaacgaccgccgccgccgccgccgccgccgccattctcgaacgttaacgtcgtaacgtcatcacaacgcgcaactaacgccaaaacaaacctacgaaacgaatcgaaaacgaatcgaaaacgaactctcccgaaactaaactacgcgactaacgaatctccgaacgtaacctaccaatcaacctcttcgaaacgaaaacgaacactctcctaaaaaaata

SEQ ID NO: 33271 - DNA, 625 bp, Artificial Sequence
  chemically treated genomic DNA (Homo sapiens) CpG-island No: 33271
ataaggataattaggttggattaatttgattcgttttggacgcggggcggttgaatagtaagtaggtagggtaatcgattacgtttattaggtttaagcgggtttggagacgggttatttagtacgatagtacgtttcgaggttagtttagattcggacgtcgggaattcgagtagttatcgttcggtttgttttttaattttgtaggttttggcgtacggggtacgggtcgacgttgtaggttgattaggggtaggtttcggagcgttagaaagcgattacgattatagttcggttgtttttttcgttcgtcgggtcgtcgttttgggtcgggtcgttttatttcgcgcgggcggcgggtttttcggcgtttcggcggttttgtcggttattttcgggtaatggtagcggtcgtcgtcgtcgtcgtcgtcgtcgttattttcgggcgttagcgtcgtggcgttattatagcgcgtagttgacgttaaaataagtttacggggcgggtcgggggcgggtcgggggcggattttttcgaaattgggttacgcggttggcggattttcgagcgtggtttgttaattaattttttcggggcggggacgggtatttttttgaaggggtg

SEQ ID NO: 33272 - DNA, 625 bp, Artificial Sequence
  chemically treated genomic DNA (Homo sapiens) CpG-island No: 33272
caccccttcaaaaaaatacccgtccccgccccgaaaaaattaattaacaaaccacgctcgaaaatccgccaaccgcgtaacccaatttcgaaaaaatccgcccccgacccgcccccgacccgccccgtaaacttattttaacgtcaactacgcgctataataacgccacgacgctaacgcccgaaaataacgacgacgacgacgacgacgacgaccgctaccattacccgaaaataaccgacaaaaccgccgaaacgccgaaaaacccgccgcccgcgcgaaataaaacgacccgacccaaaacgacgacccgacgaacgaaaaaaacaaccgaactataatcgtaatcgctttctaacgctccgaaacctacccctaatcaacctacaacgtcgacccgtaccccgtacgccaaaacctacaaaattaaaaaacaaaccgaacgataactactcgaattcccgacgtccgaatctaaactaacctcgaaacgtactatcgtactaaataacccgtctccaaacccgcttaaacctaataaacgtaatcgattaccctacctacttactattcaaccgccccgcgtccaaaacgaatcaaattaatccaacctaattatccttat

SEQ ID NO: 33273 - DNA, 532 bp, Artificial Sequence
  chemically treated genomic DNA (Homo sapiens) CpG-island No: 33273
atttggttcgtcgcggtttcgtttttttttttgtttcgttttttaatggttttaatttcgtaattatttttgtcggggttttgttagttttgttttcgtatttgaagagcgtttggcgtaggatgcgagtgatcgtggttacgcggggttcgcggttcgtagataacgcgtgtagttttattttggacgttattattcgtgtggttatttcggcgttcgcggttattttagttttatagtagttgaggtaaaagggaggatcggtgtgggttagggttggacgtgcggggatcggagtgggaatcgagggggtcgtttttttttgcgtagcgggaattgggttcgggagtttataattagattttgggggtagatgaagtggattttttcgtagtttttgttcgttacgatcgaatcgttagtggttcgcgtatcggcgttttagaatgatttcgttttgaggagagggagggagtcgtagttttagtgtttgttcgatattttcggtttttttttagtttttcgttttttt

SEQ ID NO: 33274 - DNA, 532 bp, Artificial Sequence
  chemically treated genomic DNA (Homo sapiens) CpG-island No: 33274
aaaaaaacgaaaaactaaaaaaaaaccgaaaatatcgaacaaacactaaaactacgactccctccctctcctcaaaacgaaatcattctaaaacgccgatacgcgaaccactaacgattcgatcgtaacgaacaaaaactacgaaaaaatccacttcatctacccccaaaatctaattataaactcccgaacccaattcccgctacgcaaaaaaaaacgaccccctcgattcccactccgatccccgcacgtccaaccctaacccacaccgatcctcccttttacctcaactactataaaactaaaataaccgcgaacgccgaaataaccacacgaataataacgtccaaaataaaactacacgcgttatctacgaaccgcgaaccccgcgtaaccacgatcactcgcatcctacgccaaacgctcttcaaatacgaaaacaaaactaacaaaaccccgacaaaaataattacgaaattaaaaccattaaaaaacgaaacaaaaaaaaaaacgaaaccgcgacgaaccaaat

SEQ ID NO: 33275 - DNA, 532 bp, Artificial Sequence
  chemically treated genomic DNA (Homo sapiens) CpG-island No: 33275
ggagggacggggagttggaggggagtcgagagtatcgagtaggtattgaagttgcggttttttttttttttttaggacggggttattttggggcgtcgatacgcgagttattaacgattcggtcgtggcggataagagttgcgagaagatttattttatttgtttttaaaatttagttgtagattttcgagtttagttttcgttacgtaaaaaagaacggttttttcggtttttatttcggttttcgtacgtttagttttggtttatatcgatttttttttttgttttagttgttgtggggttggagtagtcgcggacgtcgagatgattatacggatggtggcgtttaagatggagttatacgcgttatttacgggtcgcgagtttcgcgtggttacggttattcgtattttgcgttagacgttttttaggtgcgggggtagggttaataggatttcggtaggggtagttacggggttggggttattggaaggcgggatagaaagaagggcgggatcgcgacgggttaggt

SEQ ID NO: 33276 - DNA, 532 bp, Artificial Sequence
  chemically treated genomic DNA (Homo sapiens) CpG-island No: 33276
acctaacccgtcgcgatcccgcccttctttctatcccgccttccaataaccccaaccccgtaactacccctaccgaaatcctattaaccctacccccgcacctaaaaaacgtctaacgcaaaatacgaataaccgtaaccacgcgaaactcgcgacccgtaaataacgcgtataactccatcttaaacgccaccatccgtataatcatctcgacgtccgcgactactccaaccccacaacaactaaaacaaaaaaaaaaatcgatataaaccaaaactaaacgtacgaaaaccgaaataaaaaccgaaaaaaccgttcttttttacgtaacgaaaactaaactcgaaaatctacaactaaattttaaaaacaaataaaataaatcttctcgcaactcttatccgccacgaccgaatcgttaataactcgcgtatcgacgccccaaaataaccccgtcctaaaaaaaaaaaaaaaaccgcaacttcaatacctactcgatactctcgactcccctccaactccccgtccctcc

SEQ ID NO: 33277 - DNA, 557 bp, Artificial Sequence
  chemically treated genomic DNA (Homo sapiens) CpG-island No: 33277
gtcgggcgcgggcgtcgggggtcgaggaaaatcgtgtttgcgcgcgtagggcggggagttagtggtagcggcgcggtttaaaaaaagttgagttcgtatcgacgtgtgcgcgtaaggtttcgggataggtgcgggcgcgggttcgggatggcggtttcgggtggtaggtttcgttgtttcgttacggttttttagaacgcgtttttatcgttcgagttatttagttcggcgcgtttttcgtagtttatttaattgagtttttcgaggttgttatagtcgtcgcgtttcggttcgtttattggtattacggtgaagtgaggtatcgtgcgggttcggtttcgtcgtattcgtcgttttagtcgttcgtcgttgttttcgtcgttgttttcgtcgtttcgggtcgatacgtttcgttcgttcgtattttttttcgttgcgtttatttttttcgttcgtttttcgggtcgtttttcgggggcggagagcgggaggggttcggtcggttttttttagagcgggggttttggtggcgggaagatttttgggcgggagtattt

SEQ ID NO: 33278 - DNA, 557 bp, Artificial Sequence
  chemically treated genomic DNA (Homo sapiens) CpG-island No: 33278
aaatactcccgcccaaaaatcttcccgccaccaaaacccccgctctaaaaaaaaccgaccgaacccctcccgctctccgcccccgaaaaacgacccgaaaaacgaacgaaaaaaataaacgcaacgaaaaaaaatacgaacgaacgaaacgtatcgacccgaaacgacgaaaacaacgacgaaaacaacgacgaacgactaaaacgacgaatacgacgaaaccgaacccgcacgatacctcacttcaccgtaataccaataaacgaaccgaaacgcgacgactataacaacctcgaaaaactcaattaaataaactacgaaaaacgcgccgaactaaataactcgaacgataaaaacgcgttctaaaaaaccgtaacgaaacaacgaaacctaccacccgaaaccgccatcccgaacccgcgcccgcacctatcccgaaaccttacgcgcacacgtcgatacgaactcaactttttttaaaccgcgccgctaccactaactccccgccctacgcgcgcaaacacgattttcctcgacccccgacgcccgcgcccgac

SEQ ID NO: 33279 - DNA, 557 bp, Artificial Sequence
  chemically treated genomic DNA (Homo sapiens) CpG-island No: 33279
gagtgttttcgtttaggggttttttcgttattagggttttcgttttgggaggagtcggtcgagtttttttcgtttttcgttttcgaggggcggttcggggggcgggcggaggaagtgagcgtagcggggaggaatgcgagcgggcggggcgtgtcggttcggggcggcggggatagcggcggggatagcggcgggcggttgggacggcgggtgcggcggggtcgagttcgtacgatgttttattttatcgtggtgttagtggacgggtcgaggcgcggcgattatgataatttcgaggggtttagttgggtggattacggggagcgcgtcgagttggatgattcggacggtgagggcgcgttttgaggggtcgtggcggggtagcggggtttgttattcggggtcgttatttcgggttcgcgttcgtatttatttcgggattttgcgcgtatacgtcggtgcggatttaattttttttggatcgcgtcgttgttattggtttttcgttttgcgcgcgtagatacgatttttttcggttttcggcgttcgcgttcggt

SEQ ID NO: 33280 - DNA, 557 bp, Artificial Sequence
  chemically treated genomic DNA (Homo sapiens) CpG-island No: 33280
accgaacgcgaacgccgaaaaccgaaaaaaatcgtatctacgcgcgcaaaacgaaaaaccaataacaacgacgcgatccaaaaaaaattaaatccgcaccgacgtatacgcgcaaaatcccgaaataaatacgaacgcgaacccgaaataacgaccccgaataacaaaccccgctaccccgccacgacccctcaaaacgcgccctcaccgtccgaatcatccaactcgacgcgctccccgtaatccacccaactaaacccctcgaaattatcataatcgccgcgcctcgacccgtccactaacaccacgataaaataaaacatcgtacgaactcgaccccgccgcacccgccgtcccaaccgcccgccgctatccccgccgctatccccgccgccccgaaccgacacgccccgcccgctcgcattcctccccgctacgctcacttcctccgcccgccccccgaaccgcccctcgaaaacgaaaaacgaaaaaaactcgaccgactcctcccaaaacgaaaaccctaataacgaaaaaacccctaaacgaaaacactc

SEQ ID NO: 33281 - DNA, 1063 bp, Artificial Sequence
  chemically treated genomic DNA (Homo sapiens) CpG-island No: 33281
tgtcgtcgatttaaaggggttcggggttggggaattggttttggtaaatagtataatttcgttcgaattttggttcgtagtaattcgattttttttttaggcggcgtttcggagggaaggcgtttagtttagcgcgaggtattacgggatttgtagttttcgtgggtatatatttatcgcgtttgcgtatcggtgaggcgcgtatcgtttcgttttacgtttttattaggattcgggttttcgtgaggagtagtttaggcgatagcgttttaatttaatacgtttttttcgttcgtcggggataagacgggttggggaaagaatttgtttttcggaggttatcgtagtgttttggaaggcggtaggaattcgtatatattcgtttcggaagtgagtcgtttttggcgcggggtattgtggggggcgtagttttttttttaggcggtttttcgcggcgttttcggggtttattttcgagcgtaggcgggtagttaggcgggcggcgcggcgcgggtcggtaggaagcgtattttgggtacggggcgtcgggcgggtcggttgcgtcgagcggtagtggtgggatattatttaaggtttcgcgcggcgtcgttcgtcgaggggcgggcggcggcgtagttattgggtcgtcgaagagcgtaggaggtcggtgggtcgggtcgggtcgcgcggcgtagttatgtttggttttacgtgttgcgtgttaggttgttataataattcgtatcgggataaggcgttgtatttttatacgtttttaaaggacgttgagttgcggcgtttttggtttaagaacgtgtcgcgtgtcggcgttagtgggtgtttttttattttttagtttattataggttatcgtttttgtagcgtttatttttagggcggtcgtaagatttatacggtacgcgtttttattattttttcgttgcgcggcgttaatgagcgtaaagtagcgcgtagattcgttggggtcgcggtcgttcgtcgtaggtagtagtagtaatagtagtagtagtagtaatagtagtaatagtagtagtagtagtaa

SEQ ID NO: 33282 - DNA, 1063 bp, Artificial Sequence
  chemically treated genomic DNA (Homo sapiens) CpG-island No: 33282
ttactactactactactattactactattactactactactactattactactactacctacgacgaacgaccgcgaccccaacgaatctacgcgctactttacgctcattaacgccgcgcaacgaaaaaataataaaaacgcgtaccgtataaatcttacgaccgccctaaaaataaacgctacaaaaacgataacctataataaactaaaaaataaaaaaacacccactaacgccgacacgcgacacgttcttaaaccaaaaacgccgcaactcaacgtcctttaaaaacgtataaaaatacaacgccttatcccgatacgaattattataacaacctaacacgcaacacgtaaaaccaaacataactacgccgcgcgacccgacccgacccaccgacctcctacgctcttcgacgacccaataactacgccgccgcccgcccctcgacgaacgacgccgcgcgaaaccttaaataatatcccaccactaccgctcgacgcaaccgacccgcccgacgccccgtacccaaaatacgcttcctaccgacccgcgccgcgccgcccgcctaactacccgcctacgctcgaaaataaaccccgaaaacgccgcgaaaaaccgcctaaaaaaaaaactacgccccccacaataccccgcgccaaaaacgactcacttccgaaacgaatatatacgaattcctaccgccttccaaaacactacgataacctccgaaaaacaaattctttccccaacccgtcttatccccgacgaacgaaaaaaacgtattaaattaaaacgctatcgcctaaactactcctcacgaaaacccgaatcctaataaaaacgtaaaacgaaacgatacgcgcctcaccgatacgcaaacgcgataaatatatacccacgaaaactacaaatcccgtaatacctcgcgctaaactaaacgccttccctccgaaacgccgcctaaaaaaaaaatcgaattactacgaaccaaaattcgaacgaaattatactatttaccaaaaccaattccccaaccccgaacccctttaaatcgacgaca

SEQ ID NO: 33283 - DNA, 1063 bp, Artificial Sequence
  chemically treated genomic DNA (Homo sapiens) CpG-island No: 33283
ttgttgttgttgttgttgttgttgttgttgttgttgttgttgttgttgttgttgttgtttgcggcgggcggtcgcggttttagcgggtttgcgcgttattttgcgtttattgacgtcgcgtagcgggaagatggtggggacgcgtatcgtgtaggttttgcggtcgttttggaagtgaacgttgtagagacggtggtttgtggtgggttggaaggtggagaagtatttattgacgtcggtacgcgatacgtttttgagttagaggcgtcgtaatttagcgttttttggaaacgtgtagaagtgtagcgttttgtttcggtgcgagttgttgtagtagtttggtacgtagtacgtaaagttaggtatggttgcgtcgcgcggttcggttcggtttatcggttttttgcgtttttcgacggtttagtggttacgtcgtcgttcgtttttcgacgggcggcgtcgcgcgaggttttgggtggtattttattattgtcgttcggcgtagtcggttcgttcggcgtttcgtgtttagaatacgttttttgtcggttcgcgtcgcgtcgttcgtttggttgttcgtttgcgttcgggagtgggtttcggggacgtcgcgaaggatcgtttgagaaagagattacgttttttataatgtttcgcgttagaagcggtttattttcggggcgggtgtgtgcggatttttgtcgttttttaaggtattgcgatagttttcgaagagtagattttttttttagttcgttttgttttcggcgggcgagagaggcgtattaggttggaacgttgtcgtttggattgttttttacgaggattcgaattttgataggggcgtggagcggggcggtgcgcgttttatcggtgcgtaagcgcggtgggtatatgtttacggagattataaatttcgtgatgtttcgcgttgaattaggcgtttttttttcgaagcgtcgtttaagggaaagatcgagttattgcggattaggattcgggcgaggttgtgttgtttgttagaattagttttttagtttcgagtttttttgagtcgacggta

SEQ ID NO: 33284 - DNA, 1063 bp, Artificial Sequence
  chemically treated genomic DNA (Homo sapiens) CpG-island No: 33284
taccgtcgactcaaaaaaactcgaaactaaaaaactaattctaacaaacaacacaacctcgcccgaatcctaatccgcaataactcgatctttcccttaaacgacgcttcgaaaaaaaaacgcctaattcaacgcgaaacatcacgaaatttataatctccgtaaacatatacccaccgcgcttacgcaccgataaaacgcgcaccgccccgctccacgcccctatcaaaattcgaatcctcgtaaaaaacaatccaaacgacaacgttccaacctaatacgcctctctcgcccgccgaaaacaaaacgaactaaaaaaaaaatctactcttcgaaaactatcgcaataccttaaaaaacgacaaaaatccgcacacacccgccccgaaaataaaccgcttctaacgcgaaacattataaaaaacgtaatctctttctcaaacgatccttcgcgacgtccccgaaacccactcccgaacgcaaacgaacaaccaaacgaacgacgcgacgcgaaccgacaaaaaacgtattctaaacacgaaacgccgaacgaaccgactacgccgaacgacaataataaaataccacccaaaacctcgcgcgacgccgcccgtcgaaaaacgaacgacgacgtaaccactaaaccgtcgaaaaacgcaaaaaaccgataaaccgaaccgaaccgcgcgacgcaaccatacctaactttacgtactacgtaccaaactactacaacaactcgcaccgaaacaaaacgctacacttctacacgtttccaaaaaacgctaaattacgacgcctctaactcaaaaacgtatcgcgtaccgacgtcaataaatacttctccaccttccaacccaccacaaaccaccgtctctacaacgttcacttccaaaacgaccgcaaaacctacacgatacgcgtccccaccatcttcccgctacgcgacgtcaataaacgcaaaataacgcgcaaacccgctaaaaccgcgaccgcccgccgcaaacaacaacaacaacaacaacaacaacaacaacaacaacaacaacaacaacaacaacaa

SEQ ID NO: 33285 - DNA, 887 bp, Artificial Sequence
  chemically treated genomic DNA (Homo sapiens) CpG-island No: 33285
gtttttagcggttttagcggtcgtgtcgagggcggtttcggggattgcgtcgtttgtttagtcgtttcgaaaaggttttggcgtagagtatgttaggggagcggtggggtttcgttattgcgatataattgttttcgtttaattttcgtcgttcgaacgttatatgttgttcgcggtcgtcgcgggtgggaggttttttcgttagttttttagataaggtcgggagggttttttttattcgcgttcgaggtaagaataagcgtcgttttcgttttttatttttcgaagcgggtacgttcgaattagcgtttgattaagttcgtcgagttatatttgtcggaggtaattcgcgtaggcgttttcgatttttatttggggtttttgtcgttaattattacggagggaaatgtcgggaggcgcgggtcgtaaaattatttcgggtcgcgtcgttcgtcgtttagcgcgggacgttatttgagtacgcggtcgcgtcggttttttttttttttttagggtaatgttaggcgcggtaattacggcgggagaagtcggtttcggttcgcgtggatatggtcgtttttttttaaatcgcgtattttttaaggtcgtcgaagcgattttaggtcgtagatttgtttttaattgaaagttgagggaattcgggttttattcgtggttggtgtttcggcggcggcgatagtttttaggttcggatgttagcgagcgtttcggggatttattttgggatagtgcgaagatttttagatttttggtttgcgtcgggttgttgtcgggagaattaaatttttagtagtttttcggttttttcgaaaaaatgtgtagtttttattatcgtgagattagcgaataattaataattatagaaa

SEQ ID NO: 33286 - DNA, 887 bp, Artificial Sequence
  chemically treated genomic DNA (Homo sapiens) CpG-island No: 33286
tttctataattattaattattcgctaatctcacgataataaaaactacacattttttcgaaaaaaccgaaaaactactaaaaatttaattctcccgacaacaacccgacgcaaaccaaaaatctaaaaatcttcgcactatcccaaaataaatccccgaaacgctcgctaacatccgaacctaaaaactatcgccgccgccgaaacaccaaccacgaataaaacccgaattccctcaactttcaattaaaaacaaatctacgacctaaaatcgcttcgacgaccttaaaaaatacgcgatttaaaaaaaaacgaccatatccacgcgaaccgaaaccgacttctcccgccgtaattaccgcgcctaacattaccctaaaaaaaaaaaaaaaaccgacgcgaccgcgtactcaaataacgtcccgcgctaaacgacgaacgacgcgacccgaaataattttacgacccgcgcctcccgacatttccctccgtaataattaacgacaaaaaccccaaataaaaatcgaaaacgcctacgcgaattacctccgacaaatataactcgacgaacttaatcaaacgctaattcgaacgtacccgcttcgaaaaataaaaaacgaaaacgacgcttattcttacctcgaacgcgaataaaaaaaaccctcccgaccttatctaaaaaactaacgaaaaaacctcccacccgcgacgaccgcgaacaacatataacgttcgaacgacgaaaattaaacgaaaacaattatatcgcaataacgaaaccccaccgctcccctaacatactctacgccaaaaccttttcgaaacgactaaacaaacgacgcaatccccgaaaccgccctcgacacgaccgctaaaaccgctaaaaac

SEQ ID NO: 33287 - DNA, 887 bp, Artificial Sequence
  chemically treated genomic DNA (Homo sapiens) CpG-island No: 33287
tttttgtggttgttggttgttcgttagttttacggtgatggaagttgtatattttttcgaagggatcgagaagttgttggaggtttggttttttcggtagtagttcgacgtaaattaaggatttggggattttcgtattattttaaggtgggttttcggggcgttcgttgatattcgggtttgggggttgtcgtcgtcgtcgaggtattagttacgggtggagttcgagtttttttagtttttagttgggggtaagtttgcggtttggggtcgtttcggcggttttggaaggtgcgcggtttgggggagagcggttatgtttacgcgggtcggagtcggtttttttcgtcgtggttgtcgcgtttggtattgttttgggggaggggaggaggtcggcgcggtcgcgtgtttaggtaacgtttcgcgttgggcggcgggcggcgcggttcggggtggttttgcggttcgcgtttttcgatattttttttcgtagtagttggcggtaggggttttaggtgggggtcgggggcgtttgcgcgggttgttttcggtaggtgtggttcggcgggtttagttaggcgttaattcgggcgtgttcgtttcggggaatggagggcgggagcggcgtttgtttttgtttcgggcgcggataggaggggttttttcggttttgtttgaggggttggcgaagaggttttttattcgcggcggtcgcgggtagtatgtggcgttcgggcggcggggattgggcgggagtagttatgtcgtagtggcggggttttatcgtttttttaatatgttttgcgttagagttttttcggggcggttgggtagacggcgtagttttcggggtcgttttcgatacggtcgttgaggtcgttgggggt

SEQ ID NO: 33288 - DNA, 887 bp, Artificial Sequence
  chemically treated genomic DNA (Homo sapiens) CpG-island No: 33288
acccccaacgacctcaacgaccgtatcgaaaacgaccccgaaaactacgccgtctacccaaccgccccgaaaaaactctaacgcaaaacatattaaaaaaacgataaaaccccgccactacgacataactactcccgcccaatccccgccgcccgaacgccacatactacccgcgaccgccgcgaataaaaaacctcttcgccaacccctcaaacaaaaccgaaaaaacccctcctatccgcgcccgaaacaaaaacaaacgccgctcccgccctccattccccgaaacgaacacgcccgaattaacgcctaactaaacccgccgaaccacacctaccgaaaacaacccgcgcaaacgcccccgacccccacctaaaacccctaccgccaactactacgaaaaaaaatatcgaaaaacgcgaaccgcaaaaccaccccgaaccgcgccgcccgccgcccaacgcgaaacgttacctaaacacgcgaccgcgccgacctcctcccctcccccaaaacaataccaaacgcgacaaccacgacgaaaaaaaccgactccgacccgcgtaaacataaccgctctcccccaaaccgcgcaccttccaaaaccgccgaaacgaccccaaaccgcaaacttacccccaactaaaaactaaaaaaactcgaactccacccgtaactaatacctcgacgacgacgacaacccccaaacccgaatatcaacgaacgccccgaaaacccaccttaaaataatacgaaaatccccaaatccttaatttacgtcgaactactaccgaaaaaaccaaacctccaacaacttctcgatcccttcgaaaaaatatacaacttccatcaccgtaaaactaacgaacaaccaacaaccacaaaaa

SEQ ID NO: 33289 - DNA, 858 bp, Artificial Sequence
  chemically treated genomic DNA (Homo sapiens) CpG-island No: 33289
gagagcggggcgtttaggtattagtcggcggaggaatttggaaatcgcgcgtcgggtagagtcgcggtcgttggaatttgggtcgtcgcgatgtagtcggtttttcgtttttagttcggatttcgtagatcgtttttttttttttagtttttatcgttaggtcgggaacggcgggggtcgtacgcgcggaggtcggaggcgcggtagcgttgggttttcggggtcgggttaggggaggtcggcgttcgtttttttttcggattttcgttcgggttttatcgcgtcgggttttattagaggtttcgcgtcgcgataggtggtatattcggcggagaggtcgcgttttgtcgttcgttttggcgatgtttagttttcgcgtcgttcggttttttttttttgcgagtttttcggagtcgtcgttagtttaggtttatattggcgcgggcggttttatacgtagaggcggttcgaagagcggtcgagagaggggagggcgcgaggagtcggttagtcgcggggttcggaaggcgtggtttacggtggagacggacgggttcgcgggttaattggaggtaggaatcggtcggaggggcgggtttcgtttggaggtttagttgtcggcgttggggtttttgtttttcgcgttttttttaatttagtttttggaggttacggttttgaggcggggcgggcggtttcgtggacgcgatgttgaggatgtgagaagtgtagtgcggaggaggaggtggagtttcgtcgttttatgaaggaagtcggggttggtcgatcgcgtttttagtatttttggttcgggggttttagttttcgaattcgcggaggttagggaagttgggagtt

SEQ ID NO: 33290 - DNA, 858 bp, Artificial Sequence
  chemically treated genomic DNA (Homo sapiens) CpG-island No: 33290
aactcccaacttccctaacctccgcgaattcgaaaactaaaacccccgaaccaaaaatactaaaaacgcgatcgaccaaccccgacttccttcataaaacgacgaaactccacctcctcctccgcactacacttctcacatcctcaacatcgcgtccacgaaaccgcccgccccgcctcaaaaccgtaacctccaaaaactaaattaaaaaaaacgcgaaaaacaaaaaccccaacgccgacaactaaacctccaaacgaaacccgcccctccgaccgattcctacctccaattaacccgcgaacccgtccgtctccaccgtaaaccacgccttccgaaccccgcgactaaccgactcctcgcgccctcccctctctcgaccgctcttcgaaccgcctctacgtataaaaccgcccgcgccaatataaacctaaactaacgacgactccgaaaaactcgcaaaaaaaaaaaaccgaacgacgcgaaaactaaacatcgccaaaacgaacgacaaaacgcgacctctccgccgaatataccacctatcgcgacgcgaaacctctaataaaacccgacgcgataaaacccgaacgaaaatccgaaaaaaaaacgaacgccgacctcccctaacccgaccccgaaaacccaacgctaccgcgcctccgacctccgcgcgtacgacccccgccgttcccgacctaacgataaaaactaaaaaaaaaaaaacgatctacgaaatccgaactaaaaacgaaaaaccgactacatcgcgacgacccaaattccaacgaccgcgactctacccgacgcgcgatttccaaattcctccgccgactaatacctaaacgccccgctctc

SEQ ID NO: 33291 - DNA, 858 bp, Artificial Sequence
  chemically treated genomic DNA (Homo sapiens) CpG-island No: 33291
aatttttagtttttttggttttcgcgggttcggagattgggattttcgggttaggagtgttgggggcgcggtcggttagtttcggttttttttatggagcggcggagttttattttttttttcgtattgtattttttatatttttagtatcgcgtttacgaggtcgttcgtttcgttttagaatcgtaatttttaggagttgggttgaggaaggcgcggaggataggaattttagcgtcggtagttaagtttttagacggagttcgttttttcggtcggtttttgtttttaattggttcgcgagttcgttcgtttttatcgtgggttacgtttttcgggtttcgcggttggtcggtttttcgcgtttttttttttttcggtcgtttttcgggtcgtttttgcgtgtggggtcgttcgcgttagtgtgagtttgagttgacggcggtttcgggaggttcgtagaaggggagggtcgggcggcgcgggagttgagtatcgttagggcgggcggtagggcgcggttttttcgtcgggtgtattatttgtcgcggcgcgagatttttggtaaggttcggcgcggtggggttcgggcgggggttcgggagaggagcgggcgtcggttttttttggttcggtttcgagagtttagcgttgtcgcgttttcggttttcgcgcgtgcggttttcgtcgttttcggtttggcggtgggggttgggggaagggaagcggtttgcggagttcgggttgagggcgagggatcggttatatcgcggcgatttaggttttagcggtcgcggttttattcggcgcgcgatttttaggttttttcgtcggttggtgtttgggcgtttcgttttt

SEQ ID NO: 33292 - DNA, 858 bp, Artificial Sequence
  chemically treated genomic DNA (Homo sapiens) CpG-island No: 33292
aaaaacgaaacgcccaaacaccaaccgacgaaaaaacctaaaaatcgcgcgccgaataaaaccgcgaccgctaaaacctaaatcgccgcgatataaccgatccctcgccctcaacccgaactccgcaaaccgcttcccttcccccaacccccaccgccaaaccgaaaacgacgaaaaccgcacgcgcgaaaaccgaaaacgcgacaacgctaaactctcgaaaccgaaccaaaaaaaaccgacgcccgctcctctcccgaacccccgcccgaaccccaccgcgccgaaccttaccaaaaatctcgcgccgcgacaaataatacacccgacgaaaaaaccgcgccctaccgcccgccctaacgatactcaactcccgcgccgcccgaccctccccttctacgaacctcccgaaaccgccgtcaactcaaactcacactaacgcgaacgaccccacacgcaaaaacgacccgaaaaacgaccgaaaaaaaaaaaaacgcgaaaaaccgaccaaccgcgaaacccgaaaaacgtaacccacgataaaaacgaacgaactcgcgaaccaattaaaaacaaaaaccgaccgaaaaaacgaactccgtctaaaaacttaactaccgacgctaaaattcctatcctccgcgccttcctcaacccaactcctaaaaattacgattctaaaacgaaacgaacgacctcgtaaacgcgatactaaaaatataaaaaatacaatacgaaaaaaaaaataaaactccgccgctccataaaaaaaaccgaaactaaccgaccgcgcccccaacactcctaacccgaaaatcccaatctccgaacccgcgaaaaccaaaaaaactaaaaatt

SEQ ID NO: 33293 - DNA, 526 bp, Artificial Sequence
  chemically treated genomic DNA (Homo sapiens) CpG-island No: 33293
  unsure (201)
gcggatatgttgcgggcgtagggttgtagttattagtagagagggagcgcggcgtttttttgttttcgtattttcgggttcgtgcgggagcgttagcgcgcgttttcggcgttgggagagcgcgattgcggaaacgtagcgttcgtcgcggagcggtttttacgtgatcggcggaggcgtcgcgtttttttaggtttatancgggggcgggagttgcggagggcgtcgggtgcggggtcgggggcgtttagcgcggggtcggttcgcgtttcggattatgttgggcggggaggtcgttttagcggcggatgtgggtttcggggtttttttggtgggttcgttcgcgtttggttttttgttggtttttagtttttaaggattttttttttttgttttttaatgcgtcggattcgtcggttttttttatttattttttatttgtttttttgtcgttcgttttgtatttacgtcgtagtggaattggtataattcgggggttttgggtattattatagaagtttaggat

SEQ ID NO: 33294 - DNA, 526 bp, Artificial Sequence
  chemically treated genomic DNA (Homo sapiens) CpG-island No: 33294
  unsure (326)
atcctaaacttctataataatacccaaaacccccgaattataccaattccactacgacgtaaatacaaaacgaacgacaaaaaaacaaataaaaaataaataaaaaaaaccgacgaatccgacgcattaaaaaacaaaaaaaaaaaatccttaaaaactaaaaaccaacaaaaaaccaaacgcgaacgaacccaccaaaaaaaccccgaaacccacatccgccgctaaaacgacctccccgcccaacataatccgaaacgcgaaccgaccccgcgctaaacgcccccgaccccgcacccgacgccctccgcaactcccgcccccgntataaacctaaaaaaacgcgacgcctccgccgatcacgtaaaaaccgctccgcgacgaacgctacgtttccgcaatcgcgctctcccaacgccgaaaacgcgcgctaacgctcccgcacgaacccgaaaatacgaaaacaaaaaaacgccgcgctccctctctactaataactacaaccctacgcccgcaacatatccgc

SEQ ID NO: 33295 - DNA, 526 bp, Artificial Sequence
  chemically treated genomic DNA (Homo sapiens) CpG-island No: 33295
  unsure (326)
gttttaagtttttatgatgatatttagggttttcgagttgtgttagttttattacggcgtggatgtaaggcgagcggtaggggagtaggtaaaggatgagtaagggaagtcggcggattcgacgtattagagaataagaaaaagaaatttttagagattgggggttaataaagagttaggcgcgggcgaatttattaggggggtttcggagtttatattcgtcgttgggacgattttttcgtttagtatggttcggggcgcggatcggtttcgcgttaggcgttttcggtttcgtattcggcgtttttcgtagttttcgttttcgntgtgaatttgggaaaacgcggcgttttcgtcggttacgtgggggtcgtttcgcggcgagcgttgcgttttcgtaatcgcgtttttttagcgtcggggacgcgcgttggcgttttcgtacgagttcggggatacggagataaggaggcgtcgcgttttttttttgttggtggttgtagttttgcgttcgtagtatgttcgt

SEQ ID NO: 33296 - DNA, 526 bp, Artificial Sequence
  chemically treated genomic DNA (Homo sapiens) CpG-island No: 33296
  unsure (201)
acgaacatactacgaacgcaaaactacaaccaccaacaaaaaaaaaacgcgacgcctccttatctccgtatccccgaactcgtacgaaaacgccaacgcgcgtccccgacgctaaaaaaacgcgattacgaaaacgcaacgctcgccgcgaaacgacccccacgtaaccgacgaaaacgccgcgttttcccaaattcacancgaaaacgaaaactacgaaaaacgccgaatacgaaaccgaaaacgcctaacgcgaaaccgatccgcgccccgaaccatactaaacgaaaaaatcgtcccaacgacgaatataaactccgaaacccccctaataaattcgcccgcgcctaactctttattaacccccaatctctaaaaatttctttttcttattctctaatacgtcgaatccgccgacttcccttactcatcctttacctactcccctaccgctcgccttacatccacgccgtaataaaactaacacaactcgaaaaccctaaatatcatcataaaaacttaaaac

SEQ ID NO: 33297 - DNA, 652 bp, Artificial Sequence
  chemically treated genomic DNA (Homo sapiens) CpG-island No: 33297
gaaggttcggtcgggcgttcgggaggaggggcggtcgcgggttataggttttaagtgtcgtttcgagagcggtcgggttcgttcgttttttgggttcgtttttttttagttttttcggatatagttaattcggggcgtcgcgttttcgtttcgtcgttcgtatagggttcgtatttgtattatgatggttattcggagcgagtttttggggatgttttcgttgtattttttgtaagaggcgcgttcgtttttggcgtattcgattcgatagagtttattcgaagatttcgttatttttttttagttgtcgttaaagtttcggaagttcgacgttacgatttagaaatacgttgtcgtttcgtcgtttcgcgtgcgtttatttagtcgtagtttttgagcggttagagtcgttatcgaatacgtcgtatcggttatcgtcgttttttgatagattgttgatgtttggtcgcgggaacgtttacggaattcgcgtttacggggcggggtcggcggcgcgcgttttttgtcggtcggggggcggagtttttcgggcgtttgtcgggtggagttttgcggtcgttgtttgggggtcgaggcggggtttgggttgagttagtagttttttggaggattcggcgttatttttttgatt

SEQ ID NO: 33298 - DNA, 652 bp, Artificial Sequence
  chemically treated genomic DNA (Homo sapiens) CpG-island No: 33298
aatcaaaaaaataacgccgaatcctccaaaaaactactaactcaacccaaaccccgcctcgacccccaaacaacgaccgcaaaactccacccgacaaacgcccgaaaaactccgccccccgaccgacaaaaaacgcgcgccgccgaccccgccccgtaaacgcgaattccgtaaacgttcccgcgaccaaacatcaacaatctatcaaaaaacgacgataaccgatacgacgtattcgataacgactctaaccgctcaaaaactacgactaaataaacgcacgcgaaacgacgaaacgacaacgtatttctaaatcgtaacgtcgaacttccgaaactttaacgacaactaaaaaaaaataacgaaatcttcgaataaactctatcgaatcgaatacgccaaaaacgaacgcgcctcttacaaaaaatacaacgaaaacatccccaaaaactcgctccgaataaccatcataatacaaatacgaaccctatacgaacgacgaaacgaaaacgcgacgccccgaattaactatatccgaaaaaactaaaaaaaaacgaacccaaaaaacgaacgaacccgaccgctctcgaaacgacacttaaaacctataacccgcgaccgcccctcctcccgaacgcccgaccgaaccttc

SEQ ID NO: 33299 - DNA, 652 bp, Artificial Sequence
  chemically treated genomic DNA (Homo sapiens) CpG-island No: 33299
aattaaaggggtggcgtcgggttttttaaagagttattagtttagtttaagtttcgtttcggtttttaggtagcggtcgtagagttttattcggtaggcgttcgggaaatttcgtttttcggtcggtagggggcgcgcgtcgtcggtttcgtttcgtggacgcgggtttcgtgggcgttttcgcggttaggtattagtaatttattagggaacggcggtggtcggtgcggcgtgttcggtggcggttttggtcgtttaagagttgcggttgggtgagcgtacgcgaggcggcgaggcggtagcgtgtttttaggtcgtggcgtcgggttttcggagttttggcggtagttaggggaggatggcggagttttcggataagttttatcgagtcgagtacgttaagagcgggcgcgttttttgtaagaaatgtagcgagagtatttttaaggattcgtttcggatggttattatggtgtaggtgcgggttttgtgcgggcggcggggcggggacgcggcgtttcgggttaattgtgttcgggaaggttgggggagggcgggtttagggagcgagcgggttcggtcgttttcggagcggtatttggggtttatggttcgcggtcgttttttttttcgagcgttcggtcgggttttt

SEQ ID NO: 33300 - DNA, 652 bp, Artificial Sequence
  chemically treated genomic DNA (Homo sapiens) CpG-island No: 33300
aaaaacccgaccgaacgctcgaaaaaaaaaacgaccgcgaaccataaaccccaaataccgctccgaaaacgaccgaacccgctcgctccctaaacccgccctcccccaaccttcccgaacacaattaacccgaaacgccgcgtccccgccccgccgcccgcacaaaacccgcacctacaccataataaccatccgaaacgaatccttaaaaatactctcgctacatttcttacaaaaaacgcgcccgctcttaacgtactcgactcgataaaacttatccgaaaactccgccatcctcccctaactaccgccaaaactccgaaaacccgacgccacgacctaaaaacacgctaccgcctcgccgcctcgcgtacgctcacccaaccgcaactcttaaacgaccaaaaccgccaccgaacacgccgcaccgaccaccgccgttccctaataaattactaatacctaaccgcgaaaacgcccacgaaacccgcgtccacgaaacgaaaccgacgacgcgcgccccctaccgaccgaaaaacgaaatttcccgaacgcctaccgaataaaactctacgaccgctacctaaaaaccgaaacgaaacttaaactaaactaataactctttaaaaaacccgacgccacccctttaatt

SEQ ID NO: 33301 - DNA, 751 bp, Artificial Sequence
  chemically treated genomic DNA (Homo sapiens) CpG-island No: 33301
  unsure (528)
ttaatattcgggaaaggcgtgttcggatcgcgaggggtcgttgggatcgagtttcggacgtcgcgacgcgtagggggttgttgcggtcggcggtttcgggaaaagtgaggggacggaggcgtttaagtaacgtgggtttcgggaattgtgagtattttattttgcgtagagttttttcgggtaatgcgatttagaatcgagggttttttttttttcgtcggggtttttttttcgttttttattcggaataaatagtttgtagttttcgtagttgtagcgcgggtcgcggaatatgcgtcgggagcggggttcgggcgggatttcggagttggtattgtttttttcgcgtttcggcgtcgggtttcgtcgtgcggttttttttttttttttttttcgttcggttcggcggaggcggcggcggaggggcgaggcgcggtttttttcggcggtatttttttttcgggtaggcgcgggcggagtcgggttcgttttagttagtcgcggcgggatagttacgcgcgtcgtttnagcgagtttcgtattcgaatttttttcgtaaagatagttttcgttttataatgtatcgcggcgggtagtttttgaaaaagcggcgcggttcgtttaagatggcggttcgattagttgtttgacgagagtgagtagtattttaaagtattttttttttttttcgtttgttgtttgtttagcggttgtatcggtcgggacggattcgtgtttttcgttgggtagg

SEQ ID NO: 33302 - DNA, 751 bp, Artificial Sequence
  chemically treated genomic DNA (Homo sapiens) CpG-island No: 33302
  unsure (224)
cctacccaacgaaaaacacgaatccgtcccgaccgatacaaccgctaaacaaacaacaaacgaaaaaaaaaaaaaatactttaaaatactactcactctcgtcaaacaactaatcgaaccgccatcttaaacgaaccgcgccgctttttcaaaaactacccgccgcgatacattataaaacgaaaactatctttacgaaaaaaattcgaatacgaaactcgctnaaacgacgcgcgtaactatcccgccgcgactaactaaaacgaacccgactccgcccgcgcctacccgaaaaaaaaataccgccgaaaaaaaccgcgcctcgcccctccgccgccgcctccgccgaaccgaacgaaaaaaaaaaaaaaaaaaaaccgcacgacgaaacccgacgccgaaacgcgaaaaaaacaataccaactccgaaatcccgcccgaaccccgctcccgacgcatattccgcgacccgcgctacaactacgaaaactacaaactatttattccgaataaaaaacgaaaaaaaaaccccgacgaaaaaaaaaaaaccctcgattctaaatcgcattacccgaaaaaactctacgcaaaataaaatactcacaattcccgaaacccacgttacttaaacgcctccgtcccctcacttttcccgaaaccgccgaccgcaacaaccccctacgcgtcgcgacgtccgaaactcgatcccaacgacccctcgcgatccgaacacgcctttcccgaatattaa

SEQ ID NO: 33303 - DNA, 751 bp, Artificial Sequence
  chemically treated genomic DNA (Homo sapiens) CpG-island No: 33303
  unsure (224)
tttgtttagcggagggtacgagttcgtttcggtcggtgtaatcgttgggtaagtagtaggcgggaaaaggggggggtgttttgaggtgttatttattttcgttaggtaattggtcgagtcgttattttgaacgagtcgcgtcgtttttttaaaggttgttcgtcgcggtgtattgtggggcggagattgtttttgcgagggaggttcgaatgcggagttcgttnagacggcgcgcgtggttgtttcgtcgcggttggttgaggcgggttcggtttcgttcgcgtttgttcggggaggaggtgtcgtcgaagggggtcgcgtttcgttttttcgtcgtcgttttcgtcgagtcgggcgggaggaagggaggaaggaggtcgtacggcgaggttcggcgtcggagcgcggggggagtagtattagtttcggagtttcgttcgggtttcgttttcggcgtatgtttcgcggttcgcgttgtagttgcgggaattgtaggttgtttgtttcgagtggagaacgggagggaggtttcggcggggggaaagaagttttcggttttgggtcgtattgttcgagggggttttacgtaaagtgaaatatttatagttttcgaaatttacgttgtttgggcgttttcgtttttttatttttttcgagatcgtcggtcgtagtagttttttgcgcgtcgcgacgttcgggattcggttttagcggtttttcgcgattcgggtacgtttttttcgaatgttgg

SEQ ID NO: 33304 - DNA, 751 bp, Artificial Sequence
  chemically treated genomic DNA (Homo sapiens) CpG-island No: 33304
  unsure (528)
ccaacattcgaaaaaaacgtacccgaatcgcgaaaaaccgctaaaaccgaatcccgaacgtcgcgacgcgcaaaaaactactacgaccgacgatctcgaaaaaaataaaaaaacgaaaacgcccaaacaacgtaaatttcgaaaactataaatatttcactttacgtaaaaccccctcgaacaatacgacccaaaaccgaaaacttctttccccccgccgaaacctccctcccgttctccactcgaaacaaacaacctacaattcccgcaactacaacgcgaaccgcgaaacatacgccgaaaacgaaacccgaacgaaactccgaaactaatactactccccccgcgctccgacgccgaacctcgccgtacgacctccttcctcccttcctcccgcccgactcgacgaaaacgacgacgaaaaaacgaaacgcgacccccttcgacgacacctcctccccgaacaaacgcgaacgaaaccgaacccgcctcaaccaaccgcgacgaaacaaccacgcgcgccgtctnaacgaactccgcattcgaacctccctcgcaaaaacaatctccgccccacaatacaccgcgacgaacaacctttaaaaaaacgacgcgactcgttcaaaataacgactcgaccaattacctaacgaaaataaataacacctcaaaacaccccccccttttcccgcctactacttacccaacgattacaccgaccgaaacgaactcgtaccctccgctaaacaaa

SEQ ID NO: 33305 - DNA, 533 bp, Artificial Sequence
  chemically treated genomic DNA (Homo sapiens) CpG-island No: 33305
tcgagtcgcgggcgtagatggtcggcggtcgttttttattcgatttgttgttgttgttgttgtagtcgtcgttttcggtgttgatgttgcgggagcgaagcggtttttagtagatcgtaaattagattgagtcggtcggtttttatttttcgtcgtattttcgcgtcgggatcggcggcgtttagggcggacgaggcgcggttagttagcgggggcggcgttcgcgggtatcgggggtatcgcgtcgtgggtgcgggggtttcggaacgtcgcggtttaggttgttattttcgcggggaatatttttgttttgtttagttggcgggagtattatttgttttttcgttatttagtcgggagttcgattcgatttacgattatattgatattattgcgagagatgttgggattatttttcgggggagggaaggaaagacgcgtgttagttttagtagtcgcggcgttttttgtaggttttggtaagtttttttgtattagtttggggggagcgggagagtgtggatgaggatgta

SEQ ID NO: 33306 - DNA, 533 bp, Artificial Sequence
  chemically treated genomic DNA (Homo sapiens) CpG-island No: 33306
tacatcctcatccacactctcccgctccccccaaactaatacaaaaaaacttaccaaaacctacaaaaaacgccgcgactactaaaactaacacgcgtctttccttccctcccccgaaaaataatcccaacatctctcgcaataatatcaatataatcgtaaatcgaatcgaactcccgactaaataacgaaaaaacaaataatactcccgccaactaaacaaaacaaaaatattccccgcgaaaataacaacctaaaccgcgacgttccgaaacccccgcacccacgacgcgatacccccgatacccgcgaacgccgcccccgctaactaaccgcgcctcgtccgccctaaacgccgccgatcccgacgcgaaaatacgacgaaaaataaaaaccgaccgactcaatctaatttacgatctactaaaaaccgcttcgctcccgcaacatcaacaccgaaaacgacgactacaacaacaacaacaacaaatcgaataaaaaacgaccgccgaccatctacgcccgcgactcga

SEQ ID NO: 33307 - DNA, 533 bp, Artificial Sequence
  chemically treated genomic DNA (Homo sapiens) CpG-island No: 33307
tgtatttttatttatattttttcgttttttttaaattagtgtaaaaaagtttgttagggtttgtagaaagcgtcgcgattgttgaggttgatacgcgtttttttttttttttttcggggaatgattttagtatttttcgtagtgatgttagtgtaatcgtgagtcggatcgggttttcggttgggtggcgggggggtagatgatgttttcgttagttgggtagagtaagggtgtttttcgcggaggtggtagtttgggtcgcggcgtttcggaattttcgtatttacggcgcggtgttttcggtgttcgcgagcgtcgttttcgttggttagtcgcgtttcgttcgttttggacgtcgtcggtttcggcgcggaggtgcggcggggagtgggagtcggtcggtttagtttgatttacggtttgttgaaaatcgtttcgttttcgtagtattagtatcggagacggcggttgtagtagtagtagtaataagtcgggtaagaggcggtcgtcggttatttgcgttcgcggttcgg

SEQ ID NO: 33308 - DNA, 533 bp, Artificial Sequence
  chemically treated genomic DNA (Homo sapiens) CpG-island No: 33308
ccgaaccgcgaacgcaaataaccgacgaccgcctcttacccgacttattactactactactacaaccgccgtctccgatactaatactacgaaaacgaaacgattttcaacaaaccgtaaatcaaactaaaccgaccgactcccactccccgccgcacctccgcgccgaaaccgacgacgtccaaaacgaacgaaacgcgactaaccaacgaaaacgacgctcgcgaacaccgaaaacaccgcgccgtaaatacgaaaattccgaaacgccgcgacccaaactaccacctccgcgaaaaacacccttactctacccaactaacgaaaacatcatctacccccccgccacccaaccgaaaacccgatccgactcacgattacactaacatcactacgaaaaatactaaaatcattccccgaaaaaaaaaaaaaaaaacgcgtatcaacctcaacaatcgcgacgctttctacaaaccctaacaaacttttttacactaatttaaaaaaaacgaaaaaatataaataaaaataca

SEQ ID NO: 33309 - DNA, 986 bp, Artificial Sequence
  chemically treated genomic DNA (Homo sapiens) CpG-island No: 33309
tgggttgggttggcggcgtgggttggtcgcggtgcgggttggcggttgttcgcgttgcgcgcgtcgtcggtcggcgtggcggtgtttttggggcgagcgttggttcgcgggtggcgcgttcgggcggtggtttttgtttcgtttcgcgggttcggggcgtttttcgtttcgttcgcgcgcgggtcgcgcgcgggcgcggtttcgcgttcgtcgtcgcgttcggttcgggttttcggttcgcggcgcgttttcgcgtttggtttcgggttggcgcgcgcgcgcgcgtcggtgtttggtttgttgtgtcgcgttggcgttcgcgtcgggttcgtttttggttcggttcgtgtgttcgtgtcgtcgtttagtggtggttggggcggtgcggttcgttttcgcgcggttgcggtgtgttttgtttgcgttcgcgttacgtcgtcgcgcgtggttcgtcggtttgttgtgggcgcgtgtgcgtgcgtttgcgtttcgcgcggttttgtcggtcgcgcgcgggttgttttgcgtcgcggtgttcggtttttttcggttcgcggtttgcgcgtttcgtttggttcgcgtggggtggcgggcgcgcggagtgcgggcgtgcgtcgtaggcgggcggcgggcggacgcgggtgggtgggtgggggtgggggcggcgtggggtcgttgcggtgtgcgcgtgtgcggggttggttggtcgaggtcggtggcgtttgtttgtcgtcgcgcgggcgcgtcggcgtttgcgcgtgggggggggcgggggggggggggagtggggggtgtggcgtgggcgcgtgggtcgggggtgggggcgcggtgcgttggcgcgttgtcgttgcgcggtgcgcgttgcgcgttgttcgtgtgcgttgtgtgcgtgtgtttgttgtttgttttgtcgttgttttgttttgcgcgtgtgtcgtgtgtatgtcgttgtttgtcgtttgtttgtttgttgttttttggtttgt

SEQ ID NO: 33310 - DNA, 986 bp, Artificial Sequence
  chemically treated genomic DNA (Homo sapiens) CpG-island No: 33310
acaaaccaaaaaacaacaaacaaacaaacgacaaacaacgacatacacacgacacacgcgcaaaacaaaacaacgacaaaacaaacaacaaacacacgcacacaacgcacacgaacaacgcgcaacgcgcaccgcgcaacgacaacgcgccaacgcaccgcgcccccacccccgacccacgcgcccacgccacaccccccactcccccccccccccgcccccccccacgcgcaaacgccgacgcgcccgcgcgacgacaaacaaacgccaccgacctcgaccaaccaaccccgcacacgcgcacaccgcaacgaccccacgccgcccccacccccacccacccacccgcgtccgcccgccgcccgcctacgacgcacgcccgcactccgcgcgcccgccaccccacgcgaaccaaacgaaacgcgcaaaccgcgaaccgaaaaaaaccgaacaccgcgacgcaaaacaacccgcgcgcgaccgacaaaaccgcgcgaaacgcaaacgcacgcacacgcgcccacaacaaaccgacgaaccacgcgcgacgacgtaacgcgaacgcaaacaaaacacaccgcaaccgcgcgaaaacgaaccgcaccgccccaaccaccactaaacgacgacacgaacacacgaaccgaaccaaaaacgaacccgacgcgaacgccaacgcgacacaacaaaccaaacaccgacgcgcgcgcgcgcgccaacccgaaaccaaacgcgaaaacgcgccgcgaaccgaaaacccgaaccgaacgcgacgacgaacgcgaaaccgcgcccgcgcgcgacccgcgcgcgaacgaaacgaaaaacgccccgaacccgcgaaacgaaacaaaaaccaccgcccgaacgcgccacccgcgaaccaacgctcgccccaaaaacaccgccacgccgaccgacgacgcgcgcaacgcgaacaaccgccaacccgcaccgcgaccaacccacgccgccaacccaaccca

SEQ ID NO: 33311 - DNA, 986 bp, Artificial Sequence
  chemically treated genomic DNA (Homo sapiens) CpG-island No: 33311
gtaagttaaggagtagtaagtaggtaagcggtaagtaacggtatgtatacggtatacgcgtagggtagggtaacggtaaggtaagtaataggtatacgtatatagcgtatacggatagcgcgtagcgcgtatcgcgtagcggtagcgcgttaacgtatcgcgtttttattttcggtttacgcgtttacgttatattttttattttttttttttttcgtttttttttacgcgtaggcgtcggcgcgttcgcgcgacggtaagtagacgttatcggtttcggttagttaatttcgtatacgcgtatatcgtaacggttttacgtcgtttttatttttatttatttattcgcgttcgttcgtcgttcgtttacggcgtacgttcgtatttcgcgcgttcgttattttacgcgagttaggcgagacgcgtaggtcgcgagtcgggaggagtcgagtatcgcggcgtaaggtagttcgcgcgcggtcggtagggtcgcgcgggacgtaggcgtacgtatacgcgtttatagtaggtcgacggattacgcgcggcggcgtggcgcgaacgtagataaagtatatcgtagtcgcgcggagacgagtcgtatcgttttagttattattgggcgacgatacgaatatacgggtcgagttagggacggattcggcgcggacgttagcgcgatatagtagattaggtatcgacgcgcgcgcgcgcgttagttcggagttaggcgcgggggcgcgtcgcgagtcgaaggttcgagtcggacgcggcggcgggcgcgaagtcgcgttcgcgcgcggttcgcgcgcggacggagcgaggagcgtttcgagttcgcgaggcggagtagaagttatcgttcgagcgcgttattcgcgagttagcgttcgttttaggagtatcgttacgtcgatcggcgacgcgcgtagcgcggatagtcgttagttcgtatcgcgattagtttacgtcgttagtttaattta

SEQ ID NO: 33312 - DNA, 986 bp, Artificial Sequence
  chemically treated genomic DNA (Homo sapiens) CpG-island No: 33312
taaattaaactaacgacgtaaactaatcgcgatacgaactaacgactatccgcgctacgcgcgtcgccgatcgacgtaacgatactcctaaaacgaacgctaactcgcgaataacgcgctcgaacgataacttctactccgcctcgcgaactcgaaacgctcctcgctccgtccgcgcgcgaaccgcgcgcgaacgcgacttcgcgcccgccgccgcgtccgactcgaaccttcgactcgcgacgcgcccccgcgcctaactccgaactaacgcgcgcgcgcgcgtcgatacctaatctactatatcgcgctaacgtccgcgccgaatccgtccctaactcgacccgtatattcgtatcgtcgcccaataataactaaaacgatacgactcgtctccgcgcgactacgatatactttatctacgttcgcgccacgccgccgcgcgtaatccgtcgacctactataaacgcgtatacgtacgcctacgtcccgcgcgaccctaccgaccgcgcgcgaactaccttacgccgcgatactcgactcctcccgactcgcgacctacgcgtctcgcctaactcgcgtaaaataacgaacgcgcgaaatacgaacgtacgccgtaaacgaacgacgaacgaacgcgaataaataaataaaaataaaaacgacgtaaaaccgttacgatatacgcgtatacgaaattaactaaccgaaaccgataacgtctacttaccgtcgcgcgaacgcgccgacgcctacgcgtaaaaaaaaacgaaaaaaaaaaaaaataaaaaatataacgtaaacgcgtaaaccgaaaataaaaacgcgatacgttaacgcgctaccgctacgcgatacgcgctacgcgctatccgtatacgctatatacgtatacctattacttaccttaccgttaccctaccctacgcgtataccgtatacataccgttacttaccgcttacctacttactactccttaacttac

SEQ ID NO: 33313 - DNA, 777 bp, Artificial Sequence
  chemically treated genomic DNA (Homo sapiens) CpG-island No: 33313
cggtcgcgtcgcgtcgtgcggttattttagtacgttatcgtattaagttgggtatttgtttatacgtttttatcgcgtattcgttgttagttttagcggtttttggtttttgtttgttattcgttatttgtagtttttttttgttcgcgttttcggagcgcgtcggggcgttttaagcgttgttttcgttagggggtatttcgcgtggtcgtagcgattcgttttaattatgaggtttcgtttagtgcgttgatacggtttttgtgcgtttttgtttcggcgtttggtggggtttcgtcgttgaacgggcgcgtcggtcgaagtttcgttttttcggagttttgtggcgtcgttttggggggttcgttttgttattcgttttggttttgtcgtgttagttttttcgtcgtttgcgcgtcgtggtgtagtcgcgtttcgcgttttcggttaggacgcgtgcgatattttgcgtgtcgttcgtcgtcgtcgttgttttcgtcgtttaggcgttttttcgtttcgttattagcgttggtagaggtcgtgttttttggcgtttttttttgcgcgttttcgtgtgtcgttcgtcgttttttattcgttgcgtgtgtcgcggcggcgtcggcgtttcgtttatattttttttcggttcgcgtgtagtacgcgcgtatgttttgcgtgtcgttttttcgttttttgggcgttatatggcgcggtcgttttttttttttcgtttcgcgggtcgttgattatcgttgtttgcgttcgtttgtattt

SEQ ID NO: 33314 - DNA, 777 bp, Artificial Sequence
  chemically treated genomic DNA (Homo sapiens) CpG-island No: 33314
aaatacaaacgaacgcaaacaacgataatcaacgacccgcgaaacgaaaaaaaaaaaacgaccgcgccatataacgcccaaaaaacgaaaaaacgacacgcaaaacatacgcgcgtactacacgcgaaccgaaaaaaaatataaacgaaacgccgacgccgccgcgacacacgcaacgaataaaaaacgacgaacgacacacgaaaacgcgcaaaaaaaaacgccaaaaaacacgacctctaccaacgctaataacgaaacgaaaaaacgcctaaacgacgaaaacaacgacgacgacgaacgacacgcaaaatatcgcacgcgtcctaaccgaaaacgcgaaacgcgactacaccacgacgcgcaaacgacgaaaaaactaacacgacaaaaccaaaacgaataacaaaacgaaccccccaaaacgacgccacaaaactccgaaaaaacgaaacttcgaccgacgcgcccgttcaacgacgaaaccccaccaaacgccgaaacaaaaacgcacaaaaaccgtatcaacgcactaaacgaaacctcataattaaaacgaatcgctacgaccacgcgaaataccccctaacgaaaacaacgcttaaaacgccccgacgcgctccgaaaacgcgaacaaaaaaaaactacaaataacgaataacaaacaaaaaccaaaaaccgctaaaactaacaacgaatacgcgataaaaacgtataaacaaatacccaacttaatacgataacgtactaaaataaccgcacgacgcgacgcgaccg

SEQ ID NO: 33315 - DNA, 777 bp, Artificial Sequence
  chemically treated genomic DNA (Homo sapiens) CpG-island No: 33315
gaatgtaaacgagcgtagatagcgatgattagcggttcgcgaggcgaaggaaaaggggcgatcgcgttatatggcgtttaaagaacgggggggcggtacgtagaatatacgcgcgtattgtacgcgagtcgaggagaggtgtggacgggacgtcggcgtcgtcgcggtatacgtaacggatagggggcggcgggcggtatacgggggcgcgtaggagggagcgttaggagatacggtttttattagcgttgatggcgaagcggagaggcgtttagacgacgggagtagcgacggcggcgggcggtacgtagagtgtcgtacgcgttttgatcgagggcgcgaaacgcggttgtattacggcgcgtaaacgacggaggggttgatacgatagggttaagacggatagtagagcgagttttttaaaacggcgttataaggtttcgggggagcggggtttcggtcggcgcgttcgtttaacggcgggattttattaagcgtcggagtaaaggcgtataaaggtcgtgttagcgtattgggcgagattttatggttggggcggatcgttgcggttacgcggggtgttttttagcgggggtagcgtttggagcgtttcgacgcgtttcgagaacgcgggtagggaagggttgtaggtggcgagtggtaggtagaggttaggggtcgttagagttggtagcgagtacgcggtaagagcgtgtgagtagatgtttagtttgatgcggtagcgtattggggtagtcgtacggcgcggcgcggtcg

SEQ ID NO: 33316 - DNA, 777 bp, Artificial Sequence
  chemically treated genomic DNA (Homo sapiens) CpG-island No: 33316
cgaccgcgccgcgccgtacgactaccccaatacgctaccgcatcaaactaaacatctactcacacgctcttaccgcgtactcgctaccaactctaacgacccctaacctctacctaccactcgccacctacaacccttccctacccgcgttctcgaaacgcgtcgaaacgctccaaacgctacccccgctaaaaaacaccccgcgtaaccgcaacgatccgccccaaccataaaatctcgcccaatacgctaacacgacctttatacgcctttactccgacgcttaataaaatcccgccgttaaacgaacgcgccgaccgaaaccccgctcccccgaaaccttataacgccgttttaaaaaactcgctctactatccgtcttaaccctatcgtatcaacccctccgtcgtttacgcgccgtaatacaaccgcgtttcgcgccctcgatcaaaacgcgtacgacactctacgtaccgcccgccgccgtcgctactcccgtcgtctaaacgcctctccgcttcgccatcaacgctaataaaaaccgtatctcctaacgctccctcctacgcgcccccgtataccgcccgccgccccctatccgttacgtataccgcgacgacgccgacgtcccgtccacacctctcctcgactcgcgtacaatacgcgcgtatattctacgtaccgcccccccgttctttaaacgccatataacgcgatcgccccttttccttcgcctcgcgaaccgctaatcatcgctatctacgctcgtttacattc

SEQ ID NO: 33317 - DNA, 572 bp, Artificial Sequence
  chemically treated genomic DNA (Homo sapiens) CpG-island No: 33317
atcgttatacgggtttttcgtataaatcgcggtttcgaaatcgggggggtagtatcgcggtttttcgcgaaaacgcgtttttttgttagtaagaagaacgtcgtcgcggtcgggcgagtattagtcggtcgcgattaaaaataagttggtcgtatcgcgttttttcgtcgcgttattatacgggcgtttttcgtttttttgaattatatattgtttcgtggtggcgatatgtttttttatagcgttggaggagaggtttatttatattggcggggggttgttacgaagataggggcgggtataaagaattacgagtttcgcgaaataaaaattatacgtttacgtttttttcgtcgtcggatgggggggtggggtgttgttggtgtgaggggggggtgggaggtgcgtttcggtaggttcggtcgtcggtcggtgcggggtatggaaggaacgggggaggtaggtttttttttcgattcggtcggcgttttcgttcgttttcgtcgtcgtttgagtgtaggaaaaataaaaatatattgagtatttatttttttttttattcgagtcggtgt

SEQ ID NO: 33318 - DNA, 572 bp, Artificial Sequence
  chemically treated genomic DNA (Homo sapiens) CpG-island No: 33318
acaccgactcgaataaaaaaaaaaataaatactcaatatatttttatttttcctacactcaaacgacgacgaaaacgaacgaaaacgccgaccgaatcgaaaaaaaaacctacctcccccgttccttccataccccgcaccgaccgacgaccgaacctaccgaaacgcacctcccacccccccctcacaccaacaacaccccacccccccatccgacgacgaaaaaaacgtaaacgtataatttttatttcgcgaaactcgtaattctttatacccgcccctatcttcgtaacaaccccccgccaatataaataaacctctcctccaacgctataaaaaaacatatcgccaccacgaaacaatatataattcaaaaaaacgaaaaacgcccgtataataacgcgacgaaaaaacgcgatacgaccaacttatttttaatcgcgaccgactaatactcgcccgaccgcgacgacgttcttcttactaacaaaaaaacgcgttttcgcgaaaaaccgcgatactacccccccgatttcgaaaccgcgatttatacgaaaaacccgtataacgat

SEQ ID NO: 33319 - DNA, 572 bp, Artificial Sequence
  chemically treated genomic DNA (Homo sapiens) CpG-island No: 33319
atatcgattcggatgaaaaagagagtaagtatttagtatgtttttgttttttttgtatttaggcggcggcgggggcgggcgaggacgtcggtcgagtcgaggaggaggtttgtttttttcgttttttttatatttcgtatcggtcggcggtcgagtttgtcgggacgtattttttattttttttttatattaataatattttatttttttattcggcggcgggaggggcgtggacgtatgatttttgtttcgcgaggttcgtagttttttatgttcgtttttgttttcgtgatagtttttcgttagtgtgggtaggttttttttttagcgttatgaaaagatatgtcgttattacgagatagtgtgtaatttagagaggcggggggcgttcgtgtggtggcgcgacgagagagcgcgatgcggttagtttgtttttggtcgcggtcgattggtgttcgttcggtcgcgacggcgttttttttattggtaaaaaaacgcgttttcgcggggggtcgcgatgttattttttcggtttcggggtcgcggtttgtgcggggggttcgtgtggcggt

SEQ ID NO: 33320 - DNA, 572 bp, Artificial Sequence
  chemically treated genomic DNA (Homo sapiens) CpG-island No: 33320
accgccacacgaaccccccgcacaaaccgcgaccccgaaaccgaaaaaataacatcgcgaccccccgcgaaaacgcgtttttttaccaataaaaaaaacgccgtcgcgaccgaacgaacaccaatcgaccgcgaccaaaaacaaactaaccgcatcgcgctctctcgtcgcgccaccacacgaacgccccccgcctctctaaattacacactatctcgtaataacgacatatcttttcataacgctaaaaaaaaaacctacccacactaacgaaaaactatcacgaaaacaaaaacgaacataaaaaactacgaacctcgcgaaacaaaaatcatacgtccacgcccctcccgccgccgaataaaaaaataaaatattattaatataaaaaaaaaataaaaaatacgtcccgacaaactcgaccgccgaccgatacgaaatataaaaaaaacgaaaaaaacaaacctcctcctcgactcgaccgacgtcctcgcccgcccccgccgccgcctaaatacaaaaaaaacaaaaacatactaaatacttactctctttttcatccgaatcgatat

SEQ ID NO: 33321 - DNA, 502 bp, Artificial Sequence
  chemically treated genomic DNA (Homo sapiens) CpG-island No: 33321
tagggttcgcgtcgtgtgagtggggggggtagcgttcgcgtcgtgtgagtagggggggtagcgttcgcgtcgtttgagtaggggagtagcgttcgcgtcgtttgagtagggggggtagcgttcgcgtcgtttgagtagggggggtagcgttcgcgtcgtttgagtagggggggtagcgttcgcgtcgtttgagtaggggggggtagcgttcgcgtcgtgtgagtagggggggtagcgttcgcgtcgtgtgagtaggggagtagcgttcgcgtcgtttgagtagggggggtagcgttcgcgtcgtttgagtagggggggtagcgttcgcgtcgtttgagtggggggggtagcgttcgcgtcgtgtgagtagggggggtagcgttcgcgtcgtttgagtagggggggtagcgttcgcgtcgtgtgagtagggaatagggtttggggtaaggaagtgggttcgtggtttttattttgtagttatggtaagaaaatcgaagagaat

SEQ ID NO: 33322 - DNA, 502 bp, Artificial Sequence
  chemically treated genomic DNA (Homo sapiens) CpG-island No: 33322
attctcttcgattttcttaccataactacaaaataaaaaccacgaacccacttccttaccccaaaccctattccctactcacacgacgcgaacgctaccccccctactcaaacgacgcgaacgctaccccccctactcacacgacgcgaacgctaccccccccactcaaacgacgcgaacgctaccccccctactcaaacgacgcgaacgctaccccccctactcaaacgacgcgaacgctactcccctactcacacgacgcgaacgctaccccccctactcacacgacgcgaacgctacccccccctactcaaacgacgcgaacgctaccccccctactcaaacgacgcgaacgctaccccccctactcaaacgacgcgaacgctaccccccctactcaaacgacgcgaacgctactcccctactcaaacgacgcgaacgctaccccccctactcacacgacgcgaacgctaccccccccactcacacgacgcgaacccta

SEQ ID NO: 33323 - DNA, 502 bp, Artificial Sequence
  chemically treated genomic DNA (Homo sapiens) CpG-island No: 33323
atttttttcggtttttttgttatgattgtagaatggaggttacgagtttatttttttgttttaagttttgttttttatttatacggcgcgagcgttgttttttttatttagacggcgcgagcgttgttttttttatttatacggcgcgagcgttgttttttttatttagacggcgcgagcgttgttttttttatttagacggcgcgagcgttgttttttttatttagacggcgcgagcgttgtttttttatttatacggcgcgagcgttgttttttttatttatacggcgcgagcgttgtttttttttatttagacggcgcgagcgttgttttttttatttagacggcgcgagcgttgttttttttatttagacggcgcgagcgttgttttttttatttagacggcgcgagcgttgtttttttatttagacggcgcgagcgttgttttttttatttatacggcgcgagcgttgttttttttatttatacggcgcgagttttg

SEQ ID NO: 33324 - DNA, 502 bp, Artificial Sequence
  chemically treated genomic DNA (Homo sapiens) CpG-island No: 33324
caaaactcgcgccgtataaataaaaaaaacaacgctcgcgccgtataaataaaaaaaacaacgctcgcgccgtctaaataaaaaaacaacgctcgcgccgtctaaataaaaaaaacaacgctcgcgccgtctaaataaaaaaaacaacgctcgcgccgtctaaataaaaaaaacaacgctcgcgccgtctaaataaaaaaaaacaacgctcgcgccgtataaataaaaaaaacaacgctcgcgccgtataaataaaaaaacaacgctcgcgccgtctaaataaaaaaaacaacgctcgcgccgtctaaataaaaaaaacaacgctcgcgccgtctaaataaaaaaaacaacgctcgcgccgtataaataaaaaaaacaacgctcgcgccgtctaaataaaaaaaacaacgctcgcgccgtataaataaaaaacaaaacttaaaacaaaaaaataaactcgtaacctccattctacaatcataacaaaaaaaccgaaaaaaat

SEQ ID NO: 33325 - DNA, 708 bp, Artificial Sequence
  chemically treated genomic DNA (Homo sapiens) CpG-island No: 33325
cgcgtcgtttgagtagggggggtagcgttcgcgtcgtgtgagtagggggggtagcgttcgcgtcgtttgagtagggggggtagcgttcgcgtcgtttgagtagggggggtagcgttcgcgtcgtttgagtggggggggtagcgttcgcgtcgtttgaggggggggtagcgttcgcgtcgtttgagtagggggggtagcgttcgcgtcgtttgagtagggggggtagcgttcgcgtcgtttgagtagggggggtagcgttcgcgtcgtttgagtagggggggtagcgttcgcgtcgtttgagtagggggggtagcgttcgcgtcgtttgagtaggggaggtagggttcgcgtcgtgtgagtagggggggtagcgttcgcgtcgtgtgagtaggggaggtagggttcgcgtcgtttgagtagggggggtagcgttcgcgtcgtttgagtagggggggtagcgttcgcgtcgtgtgagtagggggggtagcgttcgcgtcgtttgagtagggggggtagcgttcgcgtcggtgagtagggggggtagcgttcgcgtcgtttgagtagggggggtagacgttcgcgtcgtttgagtagggggggtagcgttcgcgtcgtttagagtggggggggtagcgttcgcgtcgtttgaggggggggtagcgttcgacgcgtttgagtagggggggtagagttcgcgtcgtttagagt

SEQ ID NO: 33326 - DNA, 708 bp, Artificial Sequence
  chemically treated genomic DNA (Homo sapiens) CpG-island No: 33326
actctaaacgacgcgaactctaccccccctactcaaacgcgtcgaacgctacccccccctcaaacgacgcgaacgctaccccccccactctaaacgacgcgaacgctaccccccctactcaaacgacgcgaacgtctaccccccctactcaaacgacgcgaacgctaccccccctactcaccgacgcgaacgctaccccccctactcaaacgacgcgaacgctaccccccctactcacacgacgcgaacgctaccccccctactcaaacgacgcgaacgctaccccccctactcaaacgacgcgaaccctacctcccctactcacacgacgcgaacgctaccccccctactcacacgacgcgaaccctacctcccctactcaaacgacgcgaacgctaccccccctactcaaacgacgcgaacgctaccccccctactcaaacgacgcgaacgctaccccccctactcaaacgacgcgaacgctaccccccctactcaaacgacgcgaacgctaccccccctactcaaacgacgcgaacgctacccccccctcaaacgacgcgaacgctaccccccccactcaaacgacgcgaacgctaccccccctactcaaacgacgcgaacgctaccccccctactcaaacgacgcgaacgctaccccccctactcacacgacgcgaacgctaccccccctactcaaacgacgcg

SEQ ID NO: 33327 - DNA, 708 bp, Artificial Sequence
  chemically treated genomic DNA (Homo sapiens) CpG-island No: 33327
attttagacggcgcgagttttgttttttttatttagacgcgtcgagcgttgttttttttttagacggcgcgagcgttgttttttttattttagacggcgcgagcgttgttttttttatttagacggcgcgagcgtttgttttttttatttagacggcgcgagcgttgttttttttatttatcggcgcgagcgttgttttttttatttagacggcgcgagcgttgttttttttatttatacggcgcgagcgttgttttttttatttagacggcgcgagcgttgttttttttatttagacggcgcgagttttgttttttttatttatacggcgcgagcgttgttttttttatttatacggcgcgagttttgttttttttatttagacggcgcgagcgttgttttttttatttagacggcgcgagcgttgttttttttatttagacggcgcgagcgttgttttttttatttagacggcgcgagcgttgttttttttatttagacggcgcgagcgttgttttttttatttagacggcgcgagcgttgttttttttttagacggcgcgagcgttgttttttttatttagacggcgcgagcgttgttttttttatttagacggcgcgagcgttgttttttttatttagacggcgcgagcgttgttttttttatttatacggcgcgagcgttgttttttttatttagacggcgcg

SEQ ID NO: 33328 - DNA, 708 bp, Artificial Sequence
  chemically treated genomic DNA (Homo sapiens) CpG-island No: 33328
cgcgccgtctaaataaaaaaaacaacgctcgcgccgtataaataaaaaaaacaacgctcgcgccgtctaaataaaaaaaacaacgctcgcgccgtctaaataaaaaaaacaacgctcgcgccgtctaaataaaaaaaacaacgctcgcgccgtctaaaaaaaaaacaacgctcgcgccgtctaaataaaaaaaacaacgctcgcgccgtctaaataaaaaaaacaacgctcgcgccgtctaaataaaaaaaacaacgctcgcgccgtctaaataaaaaaaacaacgctcgcgccgtctaaataaaaaaaacaacgctcgcgccgtctaaataaaaaaaacaaaactcgcgccgtataaataaaaaaaacaacgctcgcgccgtataaataaaaaaaacaaaactcgcgccgtctaaataaaaaaaacaacgctcgcgccgtctaaataaaaaaaacaacgctcgcgccgtataaataaaaaaaacaacgctcgcgccgtctaaataaaaaaaacaacgctcgcgccgataaataaaaaaaacaacgctcgcgccgtctaaataaaaaaaacaaacgctcgcgccgtctaaataaaaaaaacaacgctcgcgccgtctaaaataaaaaaaacaacgctcgcgccgtctaaaaaaaaaacaacgctcgacgcgtctaaataaaaaaaacaaaactcgcgccgtctaaaat

SEQ ID NO: 33329 - DNA, 608 bp, Artificial Sequence
  chemically treated genomic DNA (Homo sapiens) CpG-island No: 33329
ggcgtatcggcgacgcgtgcgtagtgtagtgcggcgttttttgtaggtagcgcgtaggagacggtagcggcgaaggggcgtttagtgcgtttgcgcgtttgtggagttggtggcggcgtttcgtaggggttcggttgtttttcgcgcggtaggcgcggttatggcgtagttgggaaagttgtttaaggagtagaagtacgatcggtagttgaggtgagtcgaggtttatcgagtcgagggcgggtcggcgggttttttagtattcgggtcgggtttaagggcgcgggcggcgcggtcgggttttttttaggtttttttttaggttgggtcgggtcgtgcggggcgcgggaagtcggcgttcggagttttcgttttgggttaaaggtgtttcgcgagggttgggattttttttttcgttacgcggtgtgtagttcgggggacggggtttttagcgttagtcgggtagttaaggcggttgtcggtttcgttgcgtttaggtttttcgtttttcgaatggggaggttcggggcgtatcgtatttcggtcgcgagggcggtatagagggttaggttttgtttttagttagcgttgtttaatggaaataaaat

SEQ ID NO: 33330 - DNA, 608 bp, Artificial Sequence
  chemically treated genomic DNA (Homo sapiens) CpG-island No: 33330
attttatttccattaaacaacgctaactaaaaacaaaacctaaccctctataccgccctcgcgaccgaaatacgatacgccccgaacctccccattcgaaaaacgaaaaacctaaacgcaacgaaaccgacaaccgccttaactacccgactaacgctaaaaaccccgtcccccgaactacacaccgcgtaacgaaaaaaaaaatcccaaccctcgcgaaacacctttaacccaaaacgaaaactccgaacgccgacttcccgcgccccgcacgacccgacccaacctaaaaaaaaacctaaaaaaaacccgaccgcgccgcccgcgcccttaaacccgacccgaatactaaaaaacccgccgacccgccctcgactcgataaacctcgactcacctcaactaccgatcgtacttctactccttaaacaactttcccaactacgccataaccgcgcctaccgcgcgaaaaacaaccgaacccctacgaaacgccgccaccaactccacaaacgcgcaaacgcactaaacgccccttcgccgctaccgtctcctacgcgctacctacaaaaaacgccgcactacactacgcacgcgtcgccgatacgcc

SEQ ID NO: 33331 - DNA, 608 bp, Artificial Sequence
  chemically treated genomic DNA (Homo sapiens) CpG-island No: 33331
attttatttttattggatagcgttggttgagaataaaatttaattttttgtgtcgttttcgcggtcgggatgcggtgcgtttcgggtttttttattcggaaaacgaggagtttgggcgtaacggggtcggtagtcgttttagttattcggttggcgttggggatttcgtttttcgaattgtatatcgcgtggcgggggaaggggttttagttttcgcggagtatttttggtttagggcgggagtttcgagcgtcggtttttcgcgtttcgtacggttcggtttagtttggaagaaggtttgaggaaggttcgatcgcgtcgttcgcgtttttaggttcggttcgaatgttggaaagttcgtcggttcgttttcggttcggtgagtttcggtttattttagttgtcggtcgtatttttgttttttgagtagtttttttagttgcgttatggtcgcgtttgtcgcgcggaaaatagtcgagtttttgcggagcgtcgttattagttttataagcgcgtaggcgtattgagcgttttttcgtcgttatcgttttttgcgcgttgtttgtagggggcgtcgtattgtattgcgtacgcgtcgtcggtacgtt

SEQ ID NO: 33332 - DNA, 608 bp, Artificial Sequence
  chemically treated genomic DNA (Homo sapiens) CpG-island No: 33332
aacgtaccgacgacgcgtacgcaatacaatacgacgccccctacaaacaacgcgcaaaaaacgataacgacgaaaaaacgctcaatacgcctacgcgcttataaaactaataacgacgctccgcaaaaactcgactattttccgcgcgacaaacgcgaccataacgcaactaaaaaaactactcaaaaaacaaaaatacgaccgacaactaaaataaaccgaaactcaccgaaccgaaaacgaaccgacgaactttccaacattcgaaccgaacctaaaaacgcgaacgacgcgatcgaaccttcctcaaaccttcttccaaactaaaccgaaccgtacgaaacgcgaaaaaccgacgctcgaaactcccgccctaaaccaaaaatactccgcgaaaactaaaaccccttcccccgccacgcgatatacaattcgaaaaacgaaatccccaacgccaaccgaataactaaaacgactaccgaccccgttacgcccaaactcctcgttttccgaataaaaaaacccgaaacgcaccgcatcccgaccgcgaaaacgacacaaaaaattaaattttattctcaaccaacgctatccaataaaaataaaat

SEQ ID NO: 33333 - DNA, 901 bp, Artificial Sequence
  chemically treated genomic DNA (Homo sapiens) CpG-island No: 33333
gttttttttatacgggggttttgtttataaggaggtcgtagtagttttcgagtgatttcggtgtaaatttgtagagaaaaattattttattttacggaagcgggtggaggagtcgcgtttttcggtaggttacgtggggcggaaagatttatttagttttttcgtattttcgtttcgatttaggaaaacgttttggggaattttagttttgaaaaggcgcgttttattttttacgtcgggtgttggcgataaggtttagtgaaaaagcgtttcggggtcgttcgcgcggaggggaaagtgttgagggaagttaaggaattcgcgtttgcggtcgtcggaaacgtggcggggatacgattttcgcgtcggggttattttgtttattgttgaggaggtttttcgttacgtttcgttttcgtttttttcgaggatcgggcgcggtggcgtttttggtttatagtaggaaggaaggggtagtaatttacgttattaattttgtttttttgagcggcgcgcgttcgtttatcggtttcgttgttgtcgtagtcgttatcgtcgttacgcgtattttcgggttggtgaacgcggtgacgttattaacgtatatgggttggcggcgaatgggaagtcgcggcggggcgagggcgagtgcgggggcggggttcggatcgaagggttttcgtttttcgtcgtttttttttatcgtgaggcgaattttagtcggttttttagtttcgtcgaggttcgttggggcgaagcggagtttcggggggttttgaggaaatcggcgcgggttcgtttaattacgtttttttcgttagatttttggttggttttgagttgtttagaagtttatttgcgcggtatgttcgtgcgatttgagataattggtagttgtttt

SEQ ID NO: 33334 - DNA, 901 bp, Artificial Sequence
  chemically treated genomic DNA (Homo sapiens) CpG-island No: 33334
aaaacaactaccaattatctcaaatcgcacgaacataccgcgcaaataaacttctaaacaactcaaaaccaaccaaaaatctaacgaaaaaaacgtaattaaacgaacccgcgccgatttcctcaaaaccccccgaaactccgcttcgccccaacgaacctcgacgaaactaaaaaaccgactaaaattcgcctcacgataaaaaaaaacgacgaaaaacgaaaacccttcgatccgaaccccgcccccgcactcgccctcgccccgccgcgacttcccattcgccgccaacccatatacgttaataacgtcaccgcgttcaccaacccgaaaatacgcgtaacgacgataacgactacgacaacaacgaaaccgataaacgaacgcgcgccgctcaaaaaaacaaaattaataacgtaaattactaccccttccttcctactataaaccaaaaacgccaccgcgcccgatcctcgaaaaaaacgaaaacgaaacgtaacgaaaaacctcctcaacaataaacaaaataaccccgacgcgaaaatcgtatccccgccacgtttccgacgaccgcaaacgcgaattccttaacttccctcaacactttcccctccgcgcgaacgaccccgaaacgctttttcactaaaccttatcgccaacacccgacgtaaaaaataaaacgcgccttttcaaaactaaaattccccaaaacgttttcctaaatcgaaacgaaaatacgaaaaaactaaataaatctttccgccccacgtaacctaccgaaaaacgcgactcctccacccgcttccgtaaaataaaataatttttctctacaaatttacaccgaaatcactcgaaaactactacgacctccttataaacaaaacccccgtataaaaaaaac

SEQ ID NO: 33335 - DNA, 901 bp, Artificial Sequence
  chemically treated genomic DNA (Homo sapiens) CpG-island No: 33335
aagatagttgttagttgttttagatcgtacgggtatgtcgcgtagatgggtttttgagtagtttagggttagttagaggtttggcgagaagggcgtaattaaacgaattcgcgtcggtttttttagggtttttcggggtttcgtttcgttttagcgggtttcggcggggttgggaaatcggttgaggttcgttttacggtggggaggagcgacgggaggcggaagtttttcggttcgggtttcgttttcgtattcgttttcgtttcgtcgcgattttttattcgtcgttaatttatgtgcgttggtgacgttatcgcgtttattagttcggaagtgcgcgtggcggcggtggcggttgcggtaatagcggggtcggtaagcgggcgcgcgtcgtttagaggggtagagttggtggcgtgagttgttgtttttttttttttgttgtgggttagaggcgttatcgcgttcggttttcgaggaagacgggagcgggacgtggcgagaggtttttttagtagtgggtaaaatagtttcgacgcggaggtcgtgttttcgttacgttttcggcgatcgtaggcgcggattttttggttttttttagtattttttttttcgcgcggacggtttcgagacgtttttttattgggttttgtcgttagtattcggcgtggggggtgagacgcgtttttttagggttggggttttttagagcgtttttttaagtcgaggcggaggtgcgaggaaattgagtgggttttttcgttttacgtggtttgtcgggaagcgcggtttttttattcgttttcgtggaatggaatggtttttttttgtaggtttatatcggggttattcgagagttgttgcggtttttttatgggtaggattttcgtatggggagaat

SEQ ID NO: 33336 - DNA, 901 bp, Artificial Sequence
  chemically treated genomic DNA (Homo sapiens) CpG-island No: 33336
attctccccatacgaaaatcctacccataaaaaaaccgcaacaactctcgaataaccccgatataaacctacaaaaaaaaaccattccattccacgaaaacgaataaaaaaaccgcgcttcccgacaaaccacgtaaaacgaaaaaacccactcaatttcctcgcacctccgcctcgacttaaaaaaacgctctaaaaaaccccaaccctaaaaaaacgcgtctcaccccccacgccgaatactaacgacaaaacccaataaaaaaacgtctcgaaaccgtccgcgcgaaaaaaaaaatactaaaaaaaaccaaaaaatccgcgcctacgatcgccgaaaacgtaacgaaaacacgacctccgcgtcgaaactattttacccactactaaaaaaacctctcgccacgtcccgctcccgtcttcctcgaaaaccgaacgcgataacgcctctaacccacaacaaaaaaaaaaaaacaacaactcacgccaccaactctacccctctaaacgacgcgcgcccgcttaccgaccccgctattaccgcaaccgccaccgccgccacgcgcacttccgaactaataaacgcgataacgtcaccaacgcacataaattaacgacgaataaaaaatcgcgacgaaacgaaaacgaatacgaaaacgaaacccgaaccgaaaaacttccgcctcccgtcgctcctccccaccgtaaaacgaacctcaaccgatttcccaaccccgccgaaacccgctaaaacgaaacgaaaccccgaaaaaccctaaaaaaaccgacgcgaattcgtttaattacgcccttctcgccaaacctctaactaaccctaaactactcaaaaacccatctacgcgacatacccgtacgatctaaaacaactaacaactatctt

SEQ ID NO: 33337 - DNA, 804 bp, Artificial Sequence
  chemically treated genomic DNA (Homo sapiens) CpG-island No: 33337
  unsure (536, 598)
tcggttatacgtaagcggcggcgggtgtggttggtgtgattaagatggtgatggcgatgcggtacgggtagttgttacgtacgttgtacgtggaatcgtcgtcgtcggaggtggattggtcggcggggacggtttaattttttacggagaatacgttttggtttaggagtggtcgtgttcgtcgggtgggggtgtcgtcgttcgggattagtggtattaacgcgtacgttattttcgaatagttttcgggagtgtcgagttagtttgcggggtcgggttcgggttttgtcgtggatgtttcggtggtgtcgtggatggtgtcgggtaaaatattcgaagcgttattcgcgtaggcgacggcgttgatgatttatttggacgagcgatttgatgttttttcgttggatgttgggtattcgttggcgttgatacggtcggcgttgtatgagcgagcggtggtgtttgggtcggatcgtgaaacgtttgtgtgtcggtgtaaaagcgttgtttgtcggttatgaaggtttttgggtggngattcgattttgtgggggttgggggtcgtattagtttttggtttttcggttagggtggaaantggttgggttgtggcgggggtttgacgcgggtttgggggggtgggggcgggtgtgtgaggattttggggggagcggttcgggtgtgttggagaggcgggagggtggttattgggatcggaggtagcggagattggcggggcgggtggcgttcgtgttaattatcgtgggggtgtacggtgacggcggttattattaatatgagcgg

SEQ ID NO: 33338 - DNA, 804 bp, Artificial Sequence
  chemically treated genomic DNA (Homo sapiens) CpG-island No: 33338
  unsure (207, 269)
ccgctcatattaataataaccgccgtcaccgtacacccccacgataattaacacgaacgccacccgccccgccaatctccgctacctccgatcccaataaccaccctcccgcctctccaacacacccgaaccgctccccccaaaatcctcacacacccgcccccacccccccaaacccgcgtcaaacccccgccacaacccaaccantttccaccctaaccgaaaaaccaaaaactaatacgacccccaacccccacaaaatcgaatcnccacccaaaaaccttcataaccgacaaacaacgcttttacaccgacacacaaacgtttcacgatccgacccaaacaccaccgctcgctcatacaacgccgaccgtatcaacgccaacgaatacccaacatccaacgaaaaaacatcaaatcgctcgtccaaataaatcatcaacgccgtcgcctacgcgaataacgcttcgaatattttacccgacaccatccacgacaccaccgaaacatccacgacaaaacccgaacccgaccccgcaaactaactcgacactcccgaaaactattcgaaaataacgtacgcgttaataccactaatcccgaacgacgacacccccacccgacgaacacgaccactcctaaaccaaaacgtattctccgtaaaaaattaaaccgtccccgccgaccaatccacctccgacgacgacgattccacgtacaacgtacgtaacaactacccgtaccgcatcgccatcaccatcttaatcacaccaaccacacccgccgccgcttacgtataaccga

SEQ ID NO: 33339 - DNA, 804 bp, Artificial Sequence
  chemically treated genomic DNA (Homo sapiens) CpG-island No: 33339
  unsure (207, 269)
tcgtttatattaatagtagtcgtcgttatcgtatatttttacgatggttaatacgagcgttattcgtttcgttaattttcgttgttttcgattttagtaattattttttcgtttttttaatatattcgaatcgttttttttaaaatttttatatattcgtttttatttttttaaattcgcgttaagttttcgttataatttaattantttttattttgatcgaaaaattaaaaattaatgcggtttttagtttttataaaatcgggttnttatttagaaatttttatgatcggtagatagcgtttttatatcggtatataaacgttttacggttcgatttaagtattatcgttcgtttatatagcgtcggtcgtgttaacgttagcgagtatttaatatttagcgaggagatattaggtcgttcgtttagataggttattaacgtcgtcgtttgcgcggatagcgtttcgggtgttttgttcgatattatttacggtattatcggaatatttacgatagaattcgaattcggtttcgtagattgattcggtattttcgggggttgttcgaggatgacgtgcgcgttagtattattgatttcgaacgacgatatttttattcgacgaatacgattatttttgggttagggcgtgtttttcgtaaggagttgaatcgttttcgtcgattaatttattttcggcgacggcgattttacgtgtaacgtgcgtggtagttgttcgtgtcgtatcgttattattattttgattatattagttatattcgtcgtcgtttgcgtatgatcga

SEQ ID NO: 33340 - DNA, 804 bp, Artificial Sequence
  chemically treated genomic DNA (Homo sapiens) CpG-island No: 33340
  unsure (536, 598)
tcgatcatacgcaaacgacgacgaatataactaatataatcaaaataataataacgatacgacacgaacaactaccacgcacgttacacgtaaaatcgccgtcgccgaaaataaattaatcgacgaaaacgattcaactccttacgaaaaacacgccctaacccaaaaataatcgtattcgtcgaataaaaatatcgtcgttcgaaatcaataatactaacgcgcacgtcatcctcgaacaacccccgaaaataccgaatcaatctacgaaaccgaattcgaattctatcgtaaatattccgataataccgtaaataatatcgaacaaaacacccgaaacgctatccgcgcaaacgacgacgttaataacctatctaaacgaacgacctaatatctcctcgctaaatattaaatactcgctaacgttaacacgaccgacgctatataaacgaacgataatacttaaatcgaaccgtaaaacgtttatataccgatataaaaacgctatctaccgatcataaaaatttctaaataanaacccgattttataaaaactaaaaaccgcattaatttttaatttttcgatcaaaataaaaantaattaaattataacgaaaacttaacgcgaatttaaaaaaataaaaacgaatatataaaaattttaaaaaaaacgattcgaatatattaaaaaaacgaaaaaataattactaaaatcgaaaacaacgaaaattaacgaaacgaataacgctcgtattaaccatcgtaaaaatatacgataacgacgactactattaatataaacga

SEQ ID NO: 33341 - DNA, 572 bp, Artificial Sequence
  chemically treated genomic DNA (Homo sapiens) CpG-island No: 33341
gggtgtggttggtgtgattaagatggtgatggcgatgcggtacgggtagttgttacgtacgttgtacgtggaatcgtcgtcgtcggaggtggattggtcggcggggacggtttaattttttacggagaatacgttttggtttaggagtggtcgtgttcgtcgggtgggggtgtcgtcgttcgggattagtggtattaacgcgtacgttattttcgaatagttttcgggagtgtcgagttagtttgcggggtcgggttcgggttttgtcgtggatgtttcggtggtgtcgtggatggtgtcgggtaaaatattcgaagcgttattcgcgtaggtaacggcgttgatgatttatttggacgagcgatttgatgttttttcgttggatgttgggtattcgttggcgttgatacggtcggcgttggatgagcgagcggtggtgttggggtcggatcgtgaaacgttgttgtgcggtgtgaaagcgttgtttgtcggttatgaggtttttgggtttgggatacgatttgtgggggttgtgggtcgtattggatttgtgtttatcggataagtgttta

SEQ ID NO: 33342 - DNA, 572 bp, Artificial Sequence
  chemically treated genomic DNA (Homo sapiens) CpG-island No: 33342
taaacacttatccgataaacacaaatccaatacgacccacaacccccacaaatcgtatcccaaacccaaaaacctcataaccgacaaacaacgctttcacaccgcacaacaacgtttcacgatccgaccccaacaccaccgctcgctcatccaacgccgaccgtatcaacgccaacgaatacccaacatccaacgaaaaaacatcaaatcgctcgtccaaataaatcatcaacgccgttacctacgcgaataacgcttcgaatattttacccgacaccatccacgacaccaccgaaacatccacgacaaaacccgaacccgaccccgcaaactaactcgacactcccgaaaactattcgaaaataacgtacgcgttaataccactaatcccgaacgacgacacccccacccgacgaacacgaccactcctaaaccaaaacgtattctccgtaaaaaattaaaccgtccccgccgaccaatccacctccgacgacgacgattccacgtacaacgtacgtaacaactacccgtaccgcatcgccatcaccatcttaatcacaccaaccacaccc

SEQ ID NO: 33343 - DNA, 572 bp, Artificial Sequence
  chemically treated genomic DNA (Homo sapiens) CpG-island No: 33343
tgggtatttgttcggtaaatataaatttaatgcggtttatagtttttatagatcgtgttttaaatttagaagttttatgatcggtagatagcgtttttatatcgtataataacgttttacggttcgattttagtattatcgttcgtttatttagcgtcgatcgtgttaacgttagcgagtatttaatatttagcgaggagatattaggtcgttcgtttagataggttattaacgtcgttgtttgcgcggatagcgtttcgggtgttttgttcgatattatttacggtattatcggaatatttacgatagaattcgaattcggtttcgtagattgattcggtattttcgggggttgttcgaggatgacgtgcgcgttagtattattgatttcgaacgacgatatttttattcgacgaatacgattatttttgggttagggcgtgtttttcgtaaggagttgaatcgttttcgtcgattaatttattttcggcgacggcgattttacgtgtaacgtgcgtggtagttgttcgtgtcgtatcgttattattattttgattatattagttatattt

SEQ ID NO: 33344 - DNA, 572 bp, Artificial Sequence
  chemically treated genomic DNA (Homo sapiens) CpG-island No: 33344
aaatataactaatataatcaaaataataataacgatacgacacgaacaactaccacgcacgttacacgtaaaatcgccgtcgccgaaaataaattaatcgacgaaaacgattcaactccttacgaaaaacacgccctaacccaaaaataatcgtattcgtcgaataaaaatatcgtcgttcgaaatcaataatactaacgcgcacgtcatcctcgaacaacccccgaaaataccgaatcaatctacgaaaccgaattcgaattctatcgtaaatattccgataataccgtaaataatatcgaacaaaacacccgaaacgctatccgcgcaaacaacgacgttaataacctatctaaacgaacgacctaatatctcctcgctaaatattaaatactcgctaacgttaacacgatcgacgctaaataaacgaacgataatactaaaatcgaaccgtaaaacgttattatacgatataaaaacgctatctaccgatcataaaacttctaaatttaaaacacgatctataaaaactataaaccgcattaaatttatatttaccgaacaaataccca

SEQ ID NO: 33345 - DNA, 721 bp, Artificial Sequence
  chemically treated genomic DNA (Homo sapiens) CpG-island No: 33345
atttcgcgcgttattcgcggtttttttcgttcggggttttcgttcggtttttgttggttttcgcgatttcgcggtgttcgttttcgttgagtttaaaaggacgcgcggagcggcgtcggttttttattagtagttcgttcgattggaaaggtgagtacgagggaagggcgggggcgtcggagagtcgggtcgtttatattcgtcgtagttatttcggtcgtggtaggaatcgaaattcggagcggtcgaagtttagcgtttcgttggggtagagggtcgcggcggttgggaacgtcgtttttcgacgtatcggtcgtttttagcgtagcgcgtttcgcggggtgttggtaacgcggggggttcggggcgggggcggggacgggggcggggtcgcggggcgaggattaatttagttcgtcgcgtttatttcgcgttcgtaggggcgtcgaggattttcggggcgcggggcgcgggttggggtttagtgaggtttggtaggttgtgcgcggatcgcgttttggacggcgaaagtaggttcggagggggcggttagttcggcgttttagcgttcgaggcgagttagaaggcggtttacggtcgtcgtttttcggtttcggttcggttattgcgttgcgtttatttcgttttggagtttgggcgcgggttttgattttttcggtttttttttgatatttggtggatggcgttattagaattttta

SEQ ID NO: 33346 - DNA, 721 bp, Artificial Sequence
  chemically treated genomic DNA (Homo sapiens) CpG-island No: 33346
taaaaattctaataacgccatccaccaaatatcaaaaaaaaaccgaaaaaatcaaaacccgcgcccaaactccaaaacgaaataaacgcaacgcaataaccgaaccgaaaccgaaaaacgacgaccgtaaaccgccttctaactcgcctcgaacgctaaaacgccgaactaaccgccccctccgaacctactttcgccgtccaaaacgcgatccgcgcacaacctaccaaacctcactaaaccccaacccgcgccccgcgccccgaaaatcctcgacgcccctacgaacgcgaaataaacgcgacgaactaaattaatcctcgccccgcgaccccgcccccgtccccgcccccgccccgaaccccccgcgttaccaacaccccgcgaaacgcgctacgctaaaaacgaccgatacgtcgaaaaacgacgttcccaaccgccgcgaccctctaccccaacgaaacgctaaacttcgaccgctccgaatttcgattcctaccacgaccgaaataactacgacgaatataaacgacccgactctccgacgcccccgcccttccctcgtactcacctttccaatcgaacgaactactaataaaaaaccgacgccgctccgcgcgtccttttaaactcaacgaaaacgaacaccgcgaaatcgcgaaaaccaacaaaaaccgaacgaaaaccccgaacgaaaaaaaccgcgaataacgcgcgaaat

SEQ ID NO: 33347 - DNA, 721 bp, Artificial Sequence
  chemically treated genomic DNA (Homo sapiens) CpG-island No: 33347
taggagttttggtgacgttatttattaggtgttaggagagggtcgggaaggttaggattcgcgtttaggttttagagcggagtgggcgtagcgtagtagtcgggtcgggatcgggaggcgacggtcgtgggtcgttttttggttcgtttcggacgttgggacgtcggattggtcgtttttttcgggtttgttttcgtcgtttagggcgcggttcgcgtatagtttgttaagttttattgggttttagttcgcgtttcgcgtttcggagattttcgacgtttttgcgaacgcggggtggacgcgacgggttgggttggttttcgtttcgcggtttcgttttcgttttcgttttcgtttcgagtttttcgcgttattagtatttcgcggagcgcgttgcgttgggggcggtcggtgcgtcggggagcggcgtttttagtcgtcgcgattttttgttttagcggagcgttgagtttcggtcgtttcgggtttcggtttttgttacggtcgaggtggttgcggcgaatgtgggcgattcggtttttcggcgttttcgtttttttttcgtgtttatttttttagtcggacgggttgttggtgaagggtcggcgtcgtttcgcgcgtttttttgaatttaacgggggcgggtatcgcggagtcgcggaggttagtagaggtcgaacgaggatttcgagcggaggaagtcgcgggtggcgcgcggggt

SEQ ID NO: 33348 - DNA, 721 bp, Artificial Sequence
  chemically treated genomic DNA (Homo sapiens) CpG-island No: 33348
accccgcgcgccacccgcgacttcctccgctcgaaatcctcgttcgacctctactaacctccgcgactccgcgatacccgcccccgttaaattcaaaaaaacgcgcgaaacgacgccgacccttcaccaacaacccgtccgactaaaaaaataaacacgaaaaaaaaacgaaaacgccgaaaaaccgaatcgcccacattcgccgcaaccacctcgaccgtaacaaaaaccgaaacccgaaacgaccgaaactcaacgctccgctaaaacaaaaaatcgcgacgactaaaaacgccgctccccgacgcaccgaccgcccccaacgcaacgcgctccgcgaaatactaataacgcgaaaaactcgaaacgaaaacgaaaacgaaaacgaaaccgcgaaacgaaaaccaacccaacccgtcgcgtccaccccgcgttcgcaaaaacgtcgaaaatctccgaaacgcgaaacgcgaactaaaacccaataaaacttaacaaactatacgcgaaccgcgccctaaacgacgaaaacaaacccgaaaaaaacgaccaatccgacgtcccaacgtccgaaacgaaccaaaaaacgacccacgaccgtcgcctcccgatcccgacccgactactacgctacgcccactccgctctaaaacctaaacgcgaatcctaaccttcccgaccctctcctaacacctaataaataacgtcaccaaaactccta

SEQ ID NO: 33349 - DNA, 524 bp, Artificial Sequence
  chemically treated genomic DNA (Homo sapiens) CpG-island No: 33349
cgaaggagggcgtcgtgagggtagagtcgcggttatttttatcgtagtagttcgtcgggtcggatattagtcgtagtcgttagttcggtagacgttggaagcgcgtataggggtgttttcgttttcggtcgttagagggcgcggtcggcgatggcgcggcggagacggagggaggaggggagtcggtagagaagggttagtcgcggcggtagggcggcggcgttagcggcgtagtttcgtttttcgcgcgtttttttttttcgcgtttaggtagggcgtttagttttcgtcgttaggatgcgttcgttcgtttgttggtggttgttcgcgtcgtcggcgttgttcgcgttttttaaaagatttttgggtaagtagcgggcggttaggcgcgtaagggcgaggcgtggggttcgcgggtatagtcgttcgtgtttcggtcggcgcggggagggaggcgtagggcggtttagttttgtttcgtcggcgcgcgcgtttcgtcgttcggtttttatcgcgtcgcgtcg

SEQ ID NO: 33350 - DNA, 524 bp, Artificial Sequence
  chemically treated genomic DNA (Homo sapiens) CpG-island No: 33350
cgacgcgacgcgataaaaaccgaacgacgaaacgcgcgcgccgacgaaacaaaactaaaccgccctacgcctccctccccgcgccgaccgaaacacgaacgactatacccgcgaaccccacgcctcgcccttacgcgcctaaccgcccgctacttacccaaaaatcttttaaaaaacgcgaacaacgccgacgacgcgaacaaccaccaacaaacgaacgaacgcatcctaacgacgaaaactaaacgccctacctaaacgcgaaaaaaaaaaacgcgcgaaaaacgaaactacgccgctaacgccgccgccctaccgccgcgactaacccttctctaccgactcccctcctccctccgtctccgccgcgccatcgccgaccgcgccctctaacgaccgaaaacgaaaacacccctatacgcgcttccaacgtctaccgaactaacgactacgactaatatccgacccgacgaactactacgataaaaataaccgcgactctaccctcacgacgccctccttcg

SEQ ID NO: 33351 - DNA, 524 bp, Artificial Sequence
  chemically treated genomic DNA (Homo sapiens) CpG-island No: 33351
cggcgcggcgcggtggggatcggacggcgggacgcgcgcgtcggcggggtagggttgggtcgttttgcgttttttttttcgcgtcgatcggggtacgggcgattgtgttcgcgaattttacgtttcgtttttgcgcgtttggtcgttcgttatttatttagggattttttgaggagcgcgagtagcgtcggcggcgcgagtagttattagtaggcgggcgggcgtattttggcggcggaggttgagcgttttatttgggcgcggggaagggagacgcgcggggagcggagttgcgtcgttggcgtcgtcgttttgtcgtcgcggttgatttttttttgtcggtttttttttttttttcgttttcgtcgcgttatcgtcggtcgcgttttttggcggtcgggagcgggagtatttttgtgcgcgtttttagcgtttgtcgggttggcggttgcggttggtgttcggttcgacgggttgttgcggtagaggtggtcgcggttttgtttttacggcgttttttttcg

SEQ ID NO: 33352 - DNA, 524 bp, Artificial Sequence
  chemically treated genomic DNA (Homo sapiens) CpG-island No: 33352
cgaaaaaaaacgccgtaaaaacaaaaccgcgaccacctctaccgcaacaacccgtcgaaccgaacaccaaccgcaaccgccaacccgacaaacgctaaaaacgcgcacaaaaatactcccgctcccgaccgccaaaaaacgcgaccgacgataacgcgacgaaaacgaaaaaaaaaaaaaaaccgacaaaaaaaaatcaaccgcgacgacaaaacgacgacgccaacgacgcaactccgctccccgcgcgtctcccttccccgcgcccaaataaaacgctcaacctccgccgccaaaatacgcccgcccgcctactaataactactcgcgccgccgacgctactcgcgctcctcaaaaaatccctaaataaataacgaacgaccaaacgcgcaaaaacgaaacgtaaaattcgcgaacacaatcgcccgtaccccgatcgacgcgaaaaaaaaaacgcaaaacgacccaaccctaccccgccgacgcgcgcgtcccgccgtccgatccccaccgcgccgcgccg

SEQ ID NO: 33353 - DNA, 580 bp, Artificial Sequence
  chemically treated genomic DNA (Homo sapiens) CpG-island No: 33353
gaatcgcgaagttatcgtttatggtacgcgttttattattgtcgtattcggttttagcgtttaaattcgtagtatcgtaatttttatggtcgattaatgttgacgcgaggttttattcgtatgtgtcgtttcgttttacgcgataatcgttcgttatcgcgttaaatcgttattaatcgttttagttattcgtcgttttcgtttttttttttcgtgtttttcgcgattgtttttttttattttttttatatggtatgtcgatttcgagttttcgcgattttgttcgtcgttttcgatttcgtattttatcgtcgattaatttcgttattttcggtattatttcgtcgtttcgattttcggttgttcggttttcgcgcgcgtcgtatgtttttcgtaaatacgttatcgcgcgtttcgtgatgttcgcgtttttttttattttttatttttattcgcgtcgtaatatgatggatttattcgttatttatcgcgcgtttttagttagtttcgtagtcgacgattttttcggttatatattttttttcgttttatacggttggtcgcgtcgcgggatatttcg

SEQ ID NO: 33354 - DNA, 580 bp, Artificial Sequence
  chemically treated genomic DNA (Homo sapiens) CpG-island No: 33354
cgaaatatcccgcgacgcgaccaaccgtataaaacgaaaaaaaatatataaccgaaaaaatcgtcgactacgaaactaactaaaaacgcgcgataaataacgaataaatccatcatattacgacgcgaataaaaataaaaaataaaaaaaaacgcgaacatcacgaaacgcgcgataacgtatttacgaaaaacatacgacgcgcgcgaaaaccgaacaaccgaaaatcgaaacgacgaaataataccgaaaataacgaaattaatcgacgataaaatacgaaatcgaaaacgacgaacaaaatcgcgaaaactcgaaatcgacataccatataaaaaaaataaaaaaaaacaatcgcgaaaaacacgaaaaaaaaaaacgaaaacgacgaataactaaaacgattaataacgatttaacgcgataacgaacgattatcgcgtaaaacgaaacgacacatacgaataaaacctcgcgtcaacattaatcgaccataaaaattacgatactacgaatttaaacgctaaaaccgaatacgacaataataaaacgcgtaccataaacgataacttcgcgattc

SEQ ID NO: 33355 - DNA, 580 bp, Artificial Sequence
  chemically treated genomic DNA (Homo sapiens) CpG-island No: 33355
cgaaatatttcgcggcgcggttaatcgtatggggcgggaggggatatatgatcggggggatcgtcggttgcgggattaattgagagcgcgcgatggatagcgggtggatttattatattacggcgcgggtggggatgggggataagagggggcgcgagtattacggggcgcgcggtggcgtgtttacggggaatatacggcgcgcgcggaaatcggatagtcggggatcggaacggcgggataatgtcgaagatagcgaaattggtcggcggtagggtgcggaatcgggggcggcgggtaaaatcgcggggattcggaatcggtatattatgtgggggagatggaaagggataatcgcgggggatacggaggggaaaagcgggggcgacgaatgattaaaacggttaatggcggtttaacgcggtaacggacggttatcgcgtggggcggggcggtatatacgaataaaatttcgcgttagtattggtcggttatgggggttgcgatattgcgggtttgggcgttggaatcgggtgcggtaatagtggggcgcgtattatagacgatagtttcgcggttt

SEQ ID NO: 33356 - DNA, 580 bp, Artificial Sequence
  chemically treated genomic DNA (Homo sapiens) CpG-island No: 33356
aaaccgcgaaactatcgtctataatacgcgccccactattaccgcacccgattccaacgcccaaacccgcaatatcgcaacccccataaccgaccaatactaacgcgaaattttattcgtatataccgccccgccccacgcgataaccgtccgttaccgcgttaaaccgccattaaccgttttaatcattcgtcgcccccgcttttcccctccgtatcccccgcgattatccctttccatctcccccacataatataccgattccgaatccccgcgattttacccgccgcccccgattccgcaccctaccgccgaccaatttcgctatcttcgacattatcccgccgttccgatccccgactatccgatttccgcgcgcgccgtatattccccgtaaacacgccaccgcgcgccccgtaatactcgcgccccctcttatcccccatccccacccgcgccgtaatataataaatccacccgctatccatcgcgcgctctcaattaatcccgcaaccgacgatccccccgatcatatatcccctcccgccccatacgattaaccgcgccgcgaaatatttcg

SEQ ID NO: 33357 - DNA, 688 bp, Artificial Sequence
  chemically treated genomic DNA (Homo sapiens) CpG-island No: 33357
cgcggtgtggcggaggaggcggcggtttttttttgtaggtttcgggagttcggcggcgttgagagataggcgggtcgtttggagcgcggcgttcgggttttagcgcggcgtagttttcgggttcgtgtttcgttggtttcgggtaggggttgcggtttagtttagagtcgtcggatcgcggaggagtcgtttcgttttcgcgtttttcgtttttcgtttttagtttcggtgcgattttcgtgttgttcggcgtattcgtttgtttacggtttggttagttagttgttttatgcggttgaattgtttttttatggcggcggtggcggcggcggttcgcggggttcgggtcgggtagggcgggggatagtttggtagttattatatcgtttttcggtttaaacggcggcgcggcggtggtttttcgggtcggcggtttcgttttcgtttcgttatttttagtggtatcgttcgttcgttttttaggtttggtcgagtcgagttgagttcgagtagagtcgagtcgaatcgagtcgaggttaatagtgttttatttgatacgggcgaagagttagaaggtttcgggcgagaagattattaggtttttttcgtttggttttttcgattttaacgttgttcggttattttttcgtttattttaacgtatgaaaagttgtttttagtagggcgt

SEQ ID NO: 33358 - DNA, 688 bp, Artificial Sequence
  chemically treated genomic DNA (Homo sapiens) CpG-island No: 33358
acgccctactaaaaacaacttttcatacgttaaaataaacgaaaaaataaccgaacaacgttaaaatcgaaaaaaccaaacgaaaaaaacctaataatcttctcgcccgaaaccttctaactcttcgcccgtatcaaataaaacactattaacctcgactcgattcgactcgactctactcgaactcaactcgactcgaccaaacctaaaaaacgaacgaacgataccactaaaaataacgaaacgaaaacgaaaccgccgacccgaaaaaccaccgccgcgccgccgtttaaaccgaaaaacgatataataactaccaaactatcccccgccctacccgacccgaaccccgcgaaccgccgccgccaccgccgccataaaaaaacaattcaaccgcataaaacaactaactaaccaaaccgtaaacaaacgaatacgccgaacaacacgaaaatcgcaccgaaactaaaaacgaaaaacgaaaaacgcgaaaacgaaacgactcctccgcgatccgacgactctaaactaaaccgcaacccctacccgaaaccaacgaaacacgaacccgaaaactacgccgcgctaaaacccgaacgccgcgctccaaacgacccgcctatctctcaacgccgccgaactcccgaaacctacaaaaaaaaaccgccgcctcctccgccacaccgcg

SEQ ID NO: 33359 - DNA, 688 bp, Artificial Sequence
  chemically treated genomic DNA (Homo sapiens) CpG-island No: 33359
gcgttttgttagaaatagttttttatacgttgaaataaacgagagggtgatcgggtagcgttggggtcggggaggttaggcggaggaggtttagtggttttttcgttcggggttttttagtttttcgttcgtgttaggtaaggtattgttagtttcggttcggttcgattcggttttattcgggtttagttcggttcggttagatttagagggcgggcgggcggtgttattggaagtgacgaggcgagggcggggtcgtcggttcggggagttatcgtcgcgtcgtcgtttgggtcgggaagcgatgtagtagttgttaggttgtttttcgttttgttcggttcgagtttcgcgggtcgtcgtcgttatcgtcgttatgaagaagtagtttaatcgtatgaagtagttggttaattagatcgtgggtaggcgagtgcgtcgggtagtacgggggtcgtatcggggttgggggcggagggcggagggcgcgggggcgggacggttttttcgcggttcggcggttttgagttgggtcgtagtttttgttcgagattagcggggtacgggttcgggggttgcgtcgcgttgaggttcgagcgtcgcgttttaggcggttcgtttgttttttagcgtcgtcgggttttcgagatttgtaggggagggtcgtcgtttttttcgttatatcgcg

SEQ ID NO: 33360 - DNA, 688 bp, Artificial Sequence
  chemically treated genomic DNA (Homo sapiens) CpG-island No: 33360
cgcgatataacgaaaaaaacgacgaccctcccctacaaatctcgaaaacccgacgacgctaaaaaacaaacgaaccgcctaaaacgcgacgctcgaacctcaacgcgacgcaacccccgaacccgtaccccgctaatctcgaacaaaaactacgacccaactcaaaaccgccgaaccgcgaaaaaaccgtcccgcccccgcgccctccgccctccgcccccaaccccgatacgacccccgtactacccgacgcactcgcctacccacgatctaattaaccaactacttcatacgattaaactacttcttcataacgacgataacgacgacgacccgcgaaactcgaaccgaacaaaacgaaaaacaacctaacaactactacatcgcttcccgacccaaacgacgacgcgacgataactccccgaaccgacgaccccgccctcgcctcgtcacttccaataacaccgcccgcccgccctctaaatctaaccgaaccgaactaaacccgaataaaaccgaatcgaaccgaaccgaaactaacaataccttacctaacacgaacgaaaaactaaaaaaccccgaacgaaaaaaccactaaacctcctccgcctaacctccccgaccccaacgctacccgatcaccctctcgtttatttcaacgtataaaaaactatttctaacaaaacgc

SEQ ID NO: 33361 - DNA, 508 bp, Artificial Sequence
  chemically treated genomic DNA (Homo sapiens) CpG-island No: 33361
gtcgtatacggacgggaaagggttaatttcggtttgtttttggcgaattttggagaggcggtgttatggtaatcggtataatttaagttgttgacgattttcggatcgtcgcgcgtttatttatcgtggaagtagttattttcgtcgtttttttggattagacgcgttatattcgggtttttataattttagtatgttatcggtagcggattatttttagcgtttttcggcgtatcggtacgtagggttttacgtatatcggttatagtaaaagtatgtttacgcggtttgttgtaatcgcgcgagaagggatatttcgtttataggattattagtcgtggatttttcgttagggcgttaatacgttttgattgtttcgaggtggttttttaggagagatattgatcgggatgttgcggggtataggatttatttttcgttttatagatataggttttgcgggagtatacgtttgtttagcgtgaattgaagtgtaaaaaggttgaga

SEQ ID NO: 33362 - DNA, 508 bp, Artificial Sequence
  chemically treated genomic DNA (Homo sapiens) CpG-island No: 33362
tctcaacctttttacacttcaattcacgctaaacaaacgtatactcccgcaaaacctatatctataaaacgaaaaataaatcctataccccgcaacatcccgatcaatatctctcctaaaaaaccacctcgaaacaatcaaaacgtattaacgccctaacgaaaaatccacgactaataatcctataaacgaaatatcccttctcgcgcgattacaacaaaccgcgtaaacatacttttactataaccgatatacgtaaaaccctacgtaccgatacgccgaaaaacgctaaaaataatccgctaccgataacatactaaaattataaaaacccgaatataacgcgtctaatccaaaaaaacgacgaaaataactacttccacgataaataaacgcgcgacgatccgaaaatcgtcaacaacttaaattataccgattaccataacaccgcctctccaaaattcgccaaaaacaaaccgaaattaaccctttcccgtccgtatacgac

SEQ ID NO: 33363 - DNA, 508 bp, Artificial Sequence
  chemically treated genomic DNA (Homo sapiens) CpG-island No: 33363
ttttagtttttttatattttagtttacgttgaataagcgtgtgttttcgtaaaatttgtatttgtgaagcgaagaatgaattttgtgtttcgtagtatttcgattaatattttttttggaaagttatttcggaatagttagagcgtgttgacgttttggcggaagatttacggttggtgattttgtgggcggggtattttttttcgcgcgattataataagtcgcgtggatatgtttttgttgtgatcgatgtgcgtgaaattttgcgtatcggtgcgtcgaaaaacgttgaagatggttcgttatcgatggtatgttggagttgtaaaagttcggatgtggcgcgtttgatttagaaagacggcgaagatggttatttttacggtaaatgggcgcgcggcggttcggaaatcgttaataatttaggttgtgtcgattgttataatatcgtttttttagagttcgttaaaggtaaatcggagttaattttttttcgttcgtatgcggt

SEQ ID NO: 33364 - DNA, 508 bp, Artificial Sequence
  chemically treated genomic DNA (Homo sapiens) CpG-island No: 33364
accgcatacgaacgaaaaaaaattaactccgatttacctttaacgaactctaaaaaaacgatattataacaatcgacacaacctaaattattaacgatttccgaaccgccgcgcgcccatttaccgtaaaaataaccatcttcgccgtctttctaaatcaaacgcgccacatccgaacttttacaactccaacataccatcgataacgaaccatcttcaacgtttttcgacgcaccgatacgcaaaatttcacgcacatcgatcacaacaaaaacatatccacgcgacttattataatcgcgcgaaaaaaaataccccgcccacaaaatcaccaaccgtaaatcttccgccaaaacgtcaacacgctctaactattccgaaataactttccaaaaaaaatattaatcgaaatactacgaaacacaaaattcattcttcgcttcacaaatacaaattttacgaaaacacacgcttattcaacgtaaactaaaatataaaaaaactaaaa

SEQ ID NO: 33365 - DNA, 659 bp, Artificial Sequence
  chemically treated genomic DNA (Homo sapiens) CpG-island No: 33365
attaatcgtcggaattttcgcgcggggcggggtatatgtagggtttgagggcgcggaggtgggttcggcgcggagttgagtcgggcgtcgtgacgttggcgggtgggcggagatttagttcgggttagggtttgaagggaattttttggtgagttagggaggcggggtcgggcgggaggcggggtcgggcgggaggcggggtcgggcgcggcgacggcgttgttattttagtattaggaagtaagtggtttagtcggttagtagtagcgtttcgatgagtatcgtgtagttgaggagtacgaaggcgagtagttttcgtagtagttgtagtacgtggacggtggacgaggtcggtatcgcgttgcgcgggagttttaggacggtcggcggtttgtcgggttggcgtcgttttagaggggcggacgggaatatacgaggttttggttttcgaaatagtaaacgaaggttaggaagtttatagtgtcgatttttttaatagttttttggacgttcgtttttcggttatattggagaattttttttaatttaaattgttttcgtttttcggttttgatgtcgggttgaggaggtagaagttcggttttttttcgcgtttcgtagttgtatgagtttttttttttggttcgttttttttatta

SEQ ID NO: 33366 - DNA, 659 bp, Artificial Sequence
  chemically treated genomic DNA (Homo sapiens) CpG-island No: 33366
taataaaaaaaacgaaccaaaaaaaaaaactcatacaactacgaaacgcgaaaaaaaaccgaacttctacctcctcaacccgacatcaaaaccgaaaaacgaaaacaatttaaattaaaaaaaattctccaatataaccgaaaaacgaacgtccaaaaaactattaaaaaaatcgacactataaacttcctaaccttcgtttactatttcgaaaaccaaaacctcgtatattcccgtccgcccctctaaaacgacgccaacccgacaaaccgccgaccgtcctaaaactcccgcgcaacgcgataccgacctcgtccaccgtccacgtactacaactactacgaaaactactcgccttcgtactcctcaactacacgatactcatcgaaacgctactactaaccgactaaaccacttacttcctaatactaaaataacaacgccgtcgccgcgcccgaccccgcctcccgcccgaccccgcctcccgcccgaccccgcctccctaactcaccaaaaaattcccttcaaaccctaacccgaactaaatctccgcccacccgccaacgtcacgacgcccgactcaactccgcgccgaacccacctccgcgccctcaaaccctacatataccccgccccgcgcgaaaattccgacgattaat

SEQ ID NO: 33367 - DNA, 659 bp, Artificial Sequence
  chemically treated genomic DNA (Homo sapiens) CpG-island No: 33367
tggtgggaggagcgggttagggaggaaaatttatgtagttgcggggcgcggggaagagtcgggtttttgtttttttagttcggtattagagtcgaagaacgagggtagtttgggttgagaaggattttttagtgtaatcgagaagcgagcgtttaggaggttgttggggaggtcggtattgtgggttttttggttttcgtttgttgtttcgagggttaggatttcgtgtgttttcgttcgtttttttgggacggcgttagttcggtaggtcgtcgatcgttttggggttttcgcgtagcgcgatgtcggtttcgtttatcgtttacgtgttgtagttgttgcgggagttgttcgttttcgtgttttttagttatacggtgtttatcggggcgttgttgttggtcggttggattatttattttttggtgttgaagtgatagcgtcgtcgtcgcgttcggtttcgtttttcgttcggtttcgtttttcgttcggtttcgtttttttaatttattaggaaattttttttaagttttggttcgaattgagttttcgtttattcgttagcgttacggcgttcgatttagtttcgcgtcggatttattttcgcgtttttaggttttgtatatgtttcgtttcgcgcggaagtttcggcggttggt

SEQ ID NO: 33368 - DNA, 659 bp, Artificial Sequence
  chemically treated genomic DNA (Homo sapiens) CpG-island No: 33368
accaaccgccgaaacttccgcgcgaaacgaaacatatacaaaacctaaaaacgcgaaaataaatccgacgcgaaactaaatcgaacgccgtaacgctaacgaataaacgaaaactcaattcgaaccaaaacttaaaaaaaatttcctaataaattaaaaaaacgaaaccgaacgaaaaacgaaaccgaacgaaaaacgaaaccgaacgcgacgacgacgctatcacttcaacaccaaaaaataaataatccaaccgaccaacaacaacgccccgataaacaccgtataactaaaaaacacgaaaacgaacaactcccgcaacaactacaacacgtaaacgataaacgaaaccgacatcgcgctacgcgaaaaccccaaaacgatcgacgacctaccgaactaacgccgtcccaaaaaaacgaacgaaaacacacgaaatcctaaccctcgaaacaacaaacgaaaaccaaaaaacccacaataccgacctccccaacaacctcctaaacgctcgcttctcgattacactaaaaaatccttctcaacccaaactaccctcgttcttcgactctaataccgaactaaaaaaacaaaaacccgactcttccccgcgccccgcaactacataaattttcctccctaacccgctcctcccacca

SEQ ID NO: 33369 - DNA, 1374 bp, Artificial Sequence
  chemically treated genomic DNA (Homo sapiens) CpG-island No: 33369
ttcgtatttaaatttttttagaaaagtcgaaagtcgtgatttcgatttacgaaggcgattattattttgagtttttgatcgtagaggtgtagatttagttgaattagtgtcgttcggcggaggaggttttgcgtatgttcgtcgtgtagggcgtgggtagtaaaggttgtttttagtattttcgttttcgtttttgtttcgtcgtacgcgtcggggggcgggtgtggcgtcggcgttttggggaggaggagtagtttttgttcgattcggttcgtgcggattttaggatcgggcgcgggacgcgtgcgtttagttttcggcgttgcggagattcgcggttgggttcggggaggttttaaattcgttttcgttagaatttcgttttaaatttttattttttttagaagtttcgtttattttcgagtttcgagagtttcgcgtatttgggcgttattcgttttggtttcgttgtacgagttttacgttcgtatttcggcgttacgtttaggtaggttgggggtcgggacgtcgttgttgtgagggaggttgggttatcgtgtagggaggggcgtcgttagggcggtcgtgtttttgtatttcgcggttcgtttttcggttttttagggttttcgcgaggacgtcggtttcgttcgggtgcggcgcgagtttggtttcggcgggtacggttcggggtttacgggtcgttcggtttcggttttttaggttggggatagaggttggagtcgggcgcggtagatttcgttagtttgggtcgttcgcgttcgacgcgtagcgttgttgttaatttcggttcgggggttttcgtagagtgggtttttgttgtcgttagtttttcggagattgtcgcgttgaaagaatgaattagagttcgttttttgttcgcgttagggcgttttgggttatcgagttttgtggggattcgaggcggttgtcgtttaaggtcgagcgtagttttaggattcgcgttttattagacggggtcgtgcgtttcgcggcgggtggagagtcgggttttggggttttcgcggttcggagggcggcggggcgaggtcgtgcggttagcgtttggggacgttcgcggcgggataggggttattcgggtcgcggcgtagtttgggttgaaattttttgggacggaattaagttatttgttgtgcgtttttttcggtgaatggtatcgtcgttcgttcgggtttttcgtttatagttcgcggtgttcgtatatttgagatttatttcgtttcgatttcgtcgtcgtcgtcgttcggtattttgagtacggagatagtttttagttgtcgtttatgttttttttttagtttttcgtagtttattagggaaggggcggtagga

SEQ ID NO: 33370 - DNA, 1374 bp, Artificial Sequence
  chemically treated genomic DNA (Homo sapiens) CpG-island No: 33370
tcctaccgccccttccctaataaactacgaaaaactaaaaaaaaaacataaacgacaactaaaaactatctccgtactcaaaataccgaacgacgacgacgacgaaatcgaaacgaaataaatctcaaatatacgaacaccgcgaactataaacgaaaaacccgaacgaacgacgataccattcaccgaaaaaaacgcacaacaaataacttaattccgtcccaaaaaatttcaacccaaactacgccgcgacccgaataacccctatcccgccgcgaacgtccccaaacgctaaccgcacgacctcgccccgccgccctccgaaccgcgaaaaccccaaaacccgactctccacccgccgcgaaacgcacgaccccgtctaataaaacgcgaatcctaaaactacgctcgaccttaaacgacaaccgcctcgaatccccacaaaactcgataacccaaaacgccctaacgcgaacaaaaaacgaactctaattcattctttcaacgcgacaatctccgaaaaactaacgacaacaaaaacccactctacgaaaacccccgaaccgaaattaacaacaacgctacgcgtcgaacgcgaacgacccaaactaacgaaatctaccgcgcccgactccaacctctatccccaacctaaaaaaccgaaaccgaacgacccgtaaaccccgaaccgtacccgccgaaaccaaactcgcgccgcacccgaacgaaaccgacgtcctcgcgaaaaccctaaaaaaccgaaaaacgaaccgcgaaatacaaaaacacgaccgccctaacgacgcccctccctacacgataacccaacctccctcacaacaacgacgtcccgacccccaacctacctaaacgtaacgccgaaatacgaacgtaaaactcgtacaacgaaaccaaaacgaataacgcccaaatacgcgaaactctcgaaactcgaaaataaacgaaacttctaaaaaaaataaaaatttaaaacgaaattctaacgaaaacgaatttaaaacctccccgaacccaaccgcgaatctccgcaacgccgaaaactaaacgcacgcgtcccgcgcccgatcctaaaatccgcacgaaccgaatcgaacaaaaactactcctcctccccaaaacgccgacgccacacccgccccccgacgcgtacgacgaaacaaaaacgaaaacgaaaatactaaaaacaacctttactacccacgccctacacgacgaacatacgcaaaacctcctccgccgaacgacactaattcaactaaatctacacctctacgatcaaaaactcaaaataataatcgccttcgtaaatcgaaatcacgactttcgacttttctaaaaaaatttaaatacgaa

SEQ ID NO: 33371 - DNA, 1374 bp, Artificial Sequence
  chemically treated genomic DNA (Homo sapiens) CpG-island No: 33371
ttttatcgttttttttttggtgggttgcggaaggttggggaggaagtatgaacggtagttggagattgttttcgtgtttaggatgtcgggcggcggcggcggcggggtcgaagcgagatgagttttaggtgtgcgagtatcgcgggttgtggacgagaggttcgggcgggcggcggtgttatttatcgagaagggcgtatagtaggtggtttggtttcgttttaggaggttttagtttaggttgcgtcgcggttcgggtggtttttgtttcgtcgcgggcgtttttaggcgttggtcgtacggtttcgtttcgtcgtttttcgagtcgcggagattttagagttcggttttttattcgtcgcggagcgtacgatttcgtttggtggggcgcgggttttgaggttgcgttcggttttgggcggtagtcgtttcggatttttataggattcggtgatttaaaacgttttggcgcgggtagggggcgaattttggtttatttttttaacgcgatagttttcgaagggttgacggtagtagagatttattttgcggggattttcgggtcggggttggtagtagcgttgcgcgtcgggcgcgggcggtttaggttggcggggtttatcgcgttcggttttagtttttgtttttagtttggagaatcgaagtcgagcggttcgtgggtttcgagtcgtgttcgtcgaggttagattcgcgtcgtattcgggcggggtcggcgttttcgcggggattttgggggatcggggagcgggtcgcggggtgtaaaggtacggtcgttttggcgacgtttttttttgtacggtgatttagttttttttatagtagcggcgtttcggtttttaatttatttgagcgtgacgtcggggtacgggcgtggagttcgtgtagcggagttagggcggatggcgtttaggtgcgcggagttttcggggttcgggagtgggcggggtttttggaggaggtgggaatttggggcggggttttggcgggggcgggtttggggttttttcggatttagtcgcgggttttcgtagcgtcggaggttggacgtacgcgtttcgcgttcggttttggggttcgtacgagtcgggtcgggtagaggttgttttttttttttaggacgtcggcgttatattcgtttttcgacgcgtgcggcgggatagaagcggaggcgggagtgttgggaatagtttttattgtttacgttttatacggcgaatatgcgtagagtttttttcgtcgagcggtattggtttagttggatttgtatttttacggttaggggtttagggtggtaatcgttttcgtagatcggaattacggttttcggtttttttgagaaaatttaagtgcgag

SEQ ID NO: 33372 - DNA, 1374 bp, Artificial Sequence
  chemically treated genomic DNA (Homo sapiens) CpG-island No: 33372
ctcgcacttaaattttctcaaaaaaaccgaaaaccgtaattccgatctacgaaaacgattaccaccctaaacccctaaccgtaaaaatacaaatccaactaaaccaataccgctcgacgaaaaaaactctacgcatattcgccgtataaaacgtaaacaataaaaactattcccaacactcccgcctccgcttctatcccgccgcacgcgtcgaaaaacgaatataacgccgacgtcctaaaaaaaaaaaacaacctctacccgacccgactcgtacgaaccccaaaaccgaacgcgaaacgcgtacgtccaacctccgacgctacgaaaacccgcgactaaatccgaaaaaaccccaaacccgcccccgccaaaaccccgccccaaattcccacctcctccaaaaaccccgcccactcccgaaccccgaaaactccgcgcacctaaacgccatccgccctaactccgctacacgaactccacgcccgtaccccgacgtcacgctcaaataaattaaaaaccgaaacgccgctactataaaaaaaactaaatcaccgtacaaaaaaaaacgtcgccaaaacgaccgtacctttacaccccgcgacccgctccccgatcccccaaaatccccgcgaaaacgccgaccccgcccgaatacgacgcgaatctaacctcgacgaacacgactcgaaacccacgaaccgctcgacttcgattctccaaactaaaaacaaaaactaaaaccgaacgcgataaaccccgccaacctaaaccgcccgcgcccgacgcgcaacgctactaccaaccccgacccgaaaatccccgcaaaataaatctctactaccgtcaacccttcgaaaactatcgcgttaaaaaaataaaccaaaattcgccccctacccgcgccaaaacgttttaaatcaccgaatcctataaaaatccgaaacgactaccgcccaaaaccgaacgcaacctcaaaacccgcgccccaccaaacgaaatcgtacgctccgcgacgaataaaaaaccgaactctaaaatctccgcgactcgaaaaacgacgaaacgaaaccgtacgaccaacgcctaaaaacgcccgcgacgaaacaaaaaccacccgaaccgcgacgcaacctaaactaaaacctcctaaaacgaaaccaaaccacctactatacgcccttctcgataaataacaccgccgcccgcccgaacctctcgtccacaacccgcgatactcgcacacctaaaactcatctcgcttcgaccccgccgccgccgccgcccgacatcctaaacacgaaaacaatctccaactaccgttcatacttcctccccaaccttccgcaacccaccaaaaaaaaaacgataaaa

SEQ ID NO: 33373 - DNA, 547 bp, Artificial Sequence
  chemically treated genomic DNA (Homo sapiens) CpG-island No: 33373
gcgattcgggttttatcgttatttttaagttttattcgtttttatgtcggcggtttttagaatgcgtagattttaggttttagggattagttcgtttcgttcgttcgggttcgtgttttttcgtagtcggtttaggtttttagagtttcggtttcggcgttcgtatttagttgtcggtatcgtacgggaattcgcgtagatatagttttcgtaagtgttcgcgtacggtcgcgtttacggtttcggtttcgggtcgttgagttttaggttcggttttagattcggagttcggattcggattcgtacgacgtttttatggttcgggtcgcgttgttcggtaatcgttaggacgcgtgcgcgggggtaggggtttttttaggcgtttttatttgcgtcgagggaaaagttttttattcggattagatagtcgggtttaaaaaatttgcgttttttttcgagtttttatttataaaaatgggataatagttggtggttttaagtgcggtagttttcgtaggtagtaagcgttatagttgatttgtttttt

SEQ ID NO: 33374 - DNA, 547 bp, Artificial Sequence
  chemically treated genomic DNA (Homo sapiens) CpG-island No: 33374
aaaaaacaaatcaactataacgcttactacctacgaaaactaccgcacttaaaaccaccaactattatcccatttttataaataaaaactcgaaaaaaaacgcaaattttttaaacccgactatctaatccgaataaaaaacttttccctcgacgcaaataaaaacgcctaaaaaaacccctacccccgcgcacgcgtcctaacgattaccgaacaacgcgacccgaaccataaaaacgtcgtacgaatccgaatccgaactccgaatctaaaaccgaacctaaaactcaacgacccgaaaccgaaaccgtaaacgcgaccgtacgcgaacacttacgaaaactatatctacgcgaattcccgtacgataccgacaactaaatacgaacgccgaaaccgaaactctaaaaacctaaaccgactacgaaaaaacacgaacccgaacgaacgaaacgaactaatccctaaaacctaaaatctacgcattctaaaaaccgccgacataaaaacgaataaaacttaaaaataacgataaaacccgaatcgc

SEQ ID NO: 33375 - DNA, 547 bp, Artificial Sequence
  chemically treated genomic DNA (Homo sapiens) CpG-island No: 33375
aagaaataggttagttatggcgtttattgtttgcgggagttgtcgtatttagaattattagttgttattttatttttatagatgagggttcgagagaaaacgtaggttttttgggttcggttgtttgattcgggtgggggatttttttttcggcgtaggtgagagcgtttggagaggtttttgttttcgcgtacgcgttttagcggttgtcgggtaacgcggttcgggttatggaggcgtcgtacgagttcgagttcgagtttcgagtttgaggtcgggtttgggatttagcggttcgggatcgggatcgtgagcgcggtcgtgcgcgagtatttgcggaagttgtgtttgcgcgagttttcgtgcggtgtcggtagttgggtgcgggcgtcggggtcggaattttgggggtttggatcggttgcggggaggtacgggttcgggcgagcggagcgggttggtttttggggtttgggatttgcgtattttgggggtcgtcgatatgggggcgggtggggtttgagggtgacggtggggttcgagtcgt

SEQ ID NO: 33376 - DNA, 547 bp, Artificial Sequence
  chemically treated genomic DNA (Homo sapiens) CpG-island No: 33376
acgactcgaaccccaccgtcaccctcaaaccccacccgcccccatatcgacgacccccaaaatacgcaaatcccaaaccccaaaaaccaacccgctccgctcgcccgaacccgtacctccccgcaaccgatccaaacccccaaaattccgaccccgacgcccgcacccaactaccgacaccgcacgaaaactcgcgcaaacacaacttccgcaaatactcgcgcacgaccgcgctcacgatcccgatcccgaaccgctaaatcccaaacccgacctcaaactcgaaactcgaactcgaactcgtacgacgcctccataacccgaaccgcgttacccgacaaccgctaaaacgcgtacgcgaaaacaaaaacctctccaaacgctctcacctacgccgaaaaaaaaatcccccacccgaatcaaacaaccgaacccaaaaaacctacgttttctctcgaaccctcatctataaaaataaaataacaactaataattctaaatacgacaactcccgcaaacaataaacgccataactaacctatttctt

SEQ ID NO: 33377 - DNA, 1020 bp, Artificial Sequence
  chemically treated genomic DNA (Homo sapiens) CpG-island No: 33377
gtcgtttttgtttcggatgtaagatggcggcgcggggggcggtttggcggggcggttacgtggtgaggagtagcgcgcgagtttttttaagtgatttttaaggttcgttcggacgtataggagtagcggagcgcgagacgggttttgtgttcgtacgcgtcgagtcgtcgtagtcgttattcgggttatcgtcgggttcggttttattgttaaggggttttcgtttgtttcgttttcgttttttgtagagttgaacgggaatttttcgaagggtgttggggaacgggtggtttggggatttttcggttatgttttggttgttgtttggcggagtcggcggtagtttttgcgggatgttcgtcggcgattatcggcgtcgagagcgggtcggcggcgggttcgatagcgcggcgcgggtgggggttcgggtatcggattcggtcgtagtttagtttttatcggggattcggagtagggaggggcgcgagcggcgtagttcgggacgtggcggtagtttttagcgggcgaagcgcgggagcgttgttcgttgtttttcgggggtagtttagaattagttggtgtttgattgcgtttttgtcgtttattttttgttttcgagcggttgaggcgacgcgtttttttcgggtagtggagggagcggtttttttcgtaggatatcgtcgtttttttttttttagagcggtggttgacgtatagaacgtcggttgtattattcgggcgtcggcgtcgttttttattttcgtagttttcggggcgcgtcgggagtagtcgagtcgttgggtgttgggcggggttttcgggcgcggcgcgggggaaaggtaaaggaaaagaaggggcggcgggtcgacgtcggcggcgaggaaggacggaggagcgtcggagtcgttttgttgtttttcgcgtggtttcgtgttttttcgatattatggttttggttgaggtagtagtttgtgttgttggtcgggttgtgatattgttcgttgtggagataattgcgta

SEQ ID NO: 33378 - DNA, 1020 bp, Artificial Sequence
  chemically treated genomic DNA (Homo sapiens) CpG-island No: 33378
tacgcaattatctccacaacgaacaatatcacaacccgaccaacaacacaaactactacctcaaccaaaaccataatatcgaaaaaacacgaaaccacgcgaaaaacaacaaaacgactccgacgctcctccgtccttcctcgccgccgacgtcgacccgccgccccttcttttcctttacctttcccccgcgccgcgcccgaaaaccccgcccaacacccaacgactcgactactcccgacgcgccccgaaaactacgaaaataaaaaacgacgccgacgcccgaataatacaaccgacgttctatacgtcaaccaccgctctaaaaaaaaaaaaacgacgatatcctacgaaaaaaaccgctccctccactacccgaaaaaaacgcgtcgcctcaaccgctcgaaaacaaaaaataaacgacaaaaacgcaatcaaacaccaactaattctaaactacccccgaaaaacaacgaacaacgctcccgcgcttcgcccgctaaaaactaccgccacgtcccgaactacgccgctcgcgcccctccctactccgaatccccgataaaaactaaactacgaccgaatccgatacccgaacccccacccgcgccgcgctatcgaacccgccgccgacccgctctcgacgccgataatcgccgacgaacatcccgcaaaaactaccgccgactccgccaaacaacaaccaaaacataaccgaaaaatccccaaaccacccgttccccaacacccttcgaaaaattcccgttcaactctacaaaaaacgaaaacgaaacaaacgaaaaccccttaacaataaaaccgaacccgacgataacccgaataacgactacgacgactcgacgcgtacgaacacaaaacccgtctcgcgctccgctactcctatacgtccgaacgaaccttaaaaatcacttaaaaaaactcgcgcgctactcctcaccacgtaaccgccccgccaaaccgccccccgcgccgccatcttacatccgaaacaaaaacgac

SEQ ID NO: 33379 - DNA, 1020 bp, Artificial Sequence
  chemically treated genomic DNA (Homo sapiens) CpG-island No: 33379
tgcgtagttatttttatagcgggtaatgttataattcgattaatagtataaattattattttagttagggttatggtgtcggggaggtacgggattacgcggagggtagtaaagcggtttcggcgttttttcgttttttttcgtcgtcgacgtcggttcgtcgttttttttttttttttgtttttttttcgcgtcgcgttcggagatttcgtttagtatttagcggttcggttattttcggcgcgtttcgagagttacggggatgagaggcggcgtcggcgttcgggtgatatagtcggcgttttgtacgttagttatcgttttgaagagagaaaagcggcggtgttttgcggagagagtcgttttttttattgttcgaggggagcgcgtcgttttagtcgttcgaaagtaggaaatgggcggtaaaagcgtagttagatattaattggttttggattgttttcgagaggtagcgagtagcgttttcgcgtttcgttcgttaggagttgtcgttacgtttcgagttgcgtcgttcgcgtttttttttgtttcgagttttcggtgggggttgggttgcggtcgagttcggtattcgggtttttattcgcgtcgcgttgtcgaattcgtcgtcggttcgttttcggcgtcgataatcgtcggcgggtatttcgtagaggttgtcgtcggtttcgttaaatagtagttaaggtatagtcgggaagtttttaggttattcgttttttagtatttttcggggaattttcgtttagttttataggaggcgaaaacggaataaacgaaaattttttaatagtgaaatcgggttcggcgatggttcgggtggcgattgcgacgattcgacgcgtgcggatataagattcgtttcgcgtttcgttgtttttgtgcgttcggacgaattttagagattatttaaggaggttcgcgcgttattttttattacgtgatcgtttcgttaggtcgtttttcgcgtcgttattttatattcgggatagaggcggt

SEQ ID NO: 33380 - DNA, 1020 bp, Artificial Sequence
  chemically treated genomic DNA (Homo sapiens) CpG-island No: 33380
accgcctctatcccgaatataaaataacgacgcgaaaaacgacctaacgaaacgatcacgtaataaaaaataacgcgcgaacctccttaaataatctctaaaattcgtccgaacgcacaaaaacaacgaaacgcgaaacgaatcttatatccgcacgcgtcgaatcgtcgcaatcgccacccgaaccatcgccgaacccgatttcactattaaaaaattttcgtttattccgttttcgcctcctataaaactaaacgaaaattccccgaaaaatactaaaaaacgaataacctaaaaacttcccgactataccttaactactatttaacgaaaccgacgacaacctctacgaaatacccgccgacgattatcgacgccgaaaacgaaccgacgacgaattcgacaacgcgacgcgaataaaaacccgaataccgaactcgaccgcaacccaacccccaccgaaaactcgaaacaaaaaaaaacgcgaacgacgcaactcgaaacgtaacgacaactcctaacgaacgaaacgcgaaaacgctactcgctacctctcgaaaacaatccaaaaccaattaatatctaactacgcttttaccgcccatttcctactttcgaacgactaaaacgacgcgctcccctcgaacaataaaaaaaacgactctctccgcaaaacaccgccgcttttctctcttcaaaacgataactaacgtacaaaacgccgactatatcacccgaacgccgacgccgcctctcatccccgtaactctcgaaacgcgccgaaaataaccgaaccgctaaatactaaacgaaatctccgaacgcgacgcgaaaaaaaaacaaaaaaaaaaaaaaaacgacgaaccgacgtcgacgacgaaaaaaaacgaaaaaacgccgaaaccgctttactaccctccgcgtaatcccgtacctccccgacaccataaccctaactaaaataataatttatactattaatcgaattataacattacccgctataaaaataactacgca

SEQ ID NO: 33381 - DNA, 538 bp, Artificial Sequence
  chemically treated genomic DNA (Homo sapiens) CpG-island No: 33381
aattatggattggggggtttaatggcggaggttagcggttatgaatcgggagaaaaggggcgggggggaggggggaaagtcggtaaggcggcgaggggggggaagggggggaacgtcgaaaaaatcggagggacgtaataaagttcgggcgcgcgatcggaaagggaaaacggggaaggcggggggagcgaagcgagaaaagggagataagggggggggggggtggaaagaagaaattggtggggaatggggtttacgggaaggcgaagcggggacggcgaaagggaataacggaaggggggggaaataggggggaaaagggggggggataaaaacgcgggggaaagggaggagcgggggatggaaaggaattacggggaggggaaaaagggcggggatttggggacggagtcggatggggaaagggcggaaaaattcgggtaaggaataggatagacggggaaggggtggggggaggtaacgaatttttggttcgacgagggtatggtgggtaatcggtatttttttttgtgagcga

SEQ ID NO: 33382 - DNA, 538 bp, Artificial Sequence
  chemically treated genomic DNA (Homo sapiens) CpG-island No: 33382
tcgctcacaaaaaaaaataccgattacccaccataccctcgtcgaaccaaaaattcgttacctccccccaccccttccccgtctatcctattccttacccgaatttttccgccctttccccatccgactccgtccccaaatccccgccctttttcccctccccgtaattcctttccatcccccgctcctccctttcccccgcgtttttatcccccccccttttcccccctatttccccccccttccgttattccctttcgccgtccccgcttcgccttcccgtaaaccccattccccaccaatttcttctttccacccccccccccccttatctcccttttctcgcttcgctccccccgccttccccgttttccctttccgatcgcgcgcccgaactttattacgtccctccgattttttcgacgttcccccccttcccccccctcgccgccttaccgactttcccccctcccccccgccccttttctcccgattcataaccgctaacctccgccattaaaccccccaatccataatt

SEQ ID NO: 33383 - DNA, 538 bp, Artificial Sequence
  chemically treated genomic DNA (Homo sapiens) CpG-island No: 33383
tcgtttatagagggggatgtcgattgtttattatattttcgtcgggttaggggttcgttatttttttttatttttttttcgtttgttttattttttgttcggattttttcgttttttttttattcggtttcgtttttaagttttcgttttttttttttttttcgtggtttttttttatttttcgtttttttttttttttcgcgtttttatttttttttttttttttttttgttttttttttttttcgttattttttttcgtcgttttcgtttcgttttttcgtggattttattttttattagttttttttttttatttttttttttttttgttttttttttttcgtttcgtttttttcgtttttttcgtttttttttttcggtcgcgcgttcggattttattgcgttttttcgattttttcggcgttttttttttttttttttttcgtcgttttatcggtttttttttttttttttcgttttttttttttcgatttatggtcgttagttttcgttattaagttttttagtttataatt

SEQ ID NO: 33384 - DNA, 538 bp, Artificial Sequence
  chemically treated genomic DNA (Homo sapiens) CpG-island No: 33384
aattataaactaaaaaacttaataacgaaaactaacgaccataaatcgaaaaaaaaaaaacgaaaaaaaaaaaaaaaaaccgataaaacgacgaaaaaaaaaaaaaaaaaaaacgccgaaaaaatcgaaaaaacgcaataaaatccgaacgcgcgaccgaaaaaaaaaaacgaaaaaaacgaaaaaaacgaaacgaaaaaaaaaaaacaaaaaaaaaaaaaaataaaaaaaaaaaactaataaaaaataaaatccacgaaaaaacgaaacgaaaacgacgaaaaaaaataacgaaaaaaaaaaaaaacaaaaaaaaaaaaaaaaaaaaataaaaacgcgaaaaaaaaaaaaaaacgaaaaataaaaaaaaaccacgaaaaaaaaaaaaaaaacgaaaacttaaaaacgaaaccgaataaaaaaaaaacgaaaaaatccgaacaaaaaataaaacaaacgaaaaaaaaataaaaaaaaataacgaacccctaacccgacgaaaatataataaacaatcgacatccccctctataaacga

SEQ ID NO: 33385 - DNA, 806 bp, Artificial Sequence
  chemically treated genomic DNA (Homo sapiens) CpG-island No: 33385
ttttcgttttttttgcgtttttcgtttgcgcggtttggtttcgtgtattgtttcgttgtcgtttttttcgtttcgcgttgtcggtttttcggtttgtttttgttttcgcgttttttggttttttgtcgttttttgttttttcgttttttttcgtgcggtttttttggttcgttgttttgttgtttttttttgtgtgcggcgtttttgcgttgtttcggttttgtttcgtttcggtttcgtgtttcgcgtcggtttgggtttgttgtcgcggttcgatcgttttttgtcgtcgtttttgtttcgtttcggcgtcgcgttgtcgcgttcgcgcgagcgggttttttgtcgttgcgcgtcgcgtgtggtttgtgtcgttcgtgttgcgcgttgtgcgggtgttcgttgtttttttcggtgggcgggcgttttgcgtttttttttcgttcggcgttcgttgcggttttttggcgcgtgggttcgtcgttcgcggcggtttggttcgttttcggtttcgtttggcggcgtttgttttgtgttcgtggggttcgcgtcgcggtttcggtttttcgtcgggtttcggtcgttgcggtgttcgttcggtcgttttgttttttggtttgtttcgcgtcggtggttgcgtggcgtgttcggtcgttcgcggtcgttcgtttcgcgtggttttgcgttttgtttgcgtcgtttttgtttttttttcgtttttgtttgttttcgtgttttttcgcgttttttcgtttcgtttcgttcgtcggttcgttttttcgttttcgttttcggtcgtcgtcgtt

SEQ ID NO: 33386 - DNA, 806 bp, Artificial Sequence
  chemically treated genomic DNA (Homo sapiens) CpG-island No: 33386
aacgacgacgaccgaaaacgaaaacgaaaaaacgaaccgacgaacgaaacgaaacgaaaaaacgcgaaaaaacacgaaaacaaacaaaaacgaaaaaaaaacaaaaacgacgcaaacaaaacgcaaaaccacgcgaaacgaacgaccgcgaacgaccgaacacgccacgcaaccaccgacgcgaaacaaaccaaaaaacaaaacgaccgaacgaacaccgcaacgaccgaaacccgacgaaaaaccgaaaccgcgacgcgaaccccacgaacacaaaacaaacgccgccaaacgaaaccgaaaacgaaccaaaccgccgcgaacgacgaacccacgcgccaaaaaaccgcaacgaacgccgaacgaaaaaaaaacgcaaaacgcccgcccaccgaaaaaaacaacgaacacccgcacaacgcgcaacacgaacgacacaaaccacacgcgacgcgcaacgacaaaaaacccgctcgcgcgaacgcgacaacgcgacgccgaaacgaaacaaaaacgacgacaaaaaacgatcgaaccgcgacaacaaacccaaaccgacgcgaaacacgaaaccgaaacgaaacaaaaccgaaacaacgcaaaaacgccgcacacaaaaaaaaacaacaaaacaacgaaccaaaaaaaccgcacgaaaaaaaacgaaaaaacaaaaaacgacaaaaaaccaaaaaacgcgaaaacaaaaacaaaccgaaaaaccgacaacgcgaaacgaaaaaaacgacaacgaaacaatacacgaaaccaaaccgcgcaaacgaaaaacgcaaaaaaaacgaaaa

SEQ ID NO: 33387 - DNA, 806 bp, Artificial Sequence
  chemically treated genomic DNA (Homo sapiens) CpG-island No: 33387
gacgacgacggtcgggagcggaagcggggaggcggatcgacgggcgggacggggcgagaaggcgcgaaggagtacgaggataggtaggaacgagagggaagtaggggcggcgtagataggacgtagaattacgcgaggcgaacggtcgcggacgatcggatacgttacgtagttatcgacgcgagataaattaggaaatagagcgatcgggcgaatatcgtagcgatcggaattcggcgaaggatcgaggtcgcggcgcgggttttacgggtatagagtagacgtcgttaggcgaagtcggaggcgagttagatcgtcgcggacgacggatttacgcgttaggaggtcgtaacgggcgtcgagcgagaagagaacgtaaagcgttcgtttatcgaggaggatagcgggtattcgtataacgcgtaatacggacgatatagattatacgcggcgcgtagcggtaagggattcgttcgcgcggacgcggtagcgcggcgtcgggacggagtagagacgacggtagaggacggtcgagtcgcgatagtagatttaggtcggcgcggaatacggggtcgagacggaatagggtcgaagtagcgtagaagcgtcgtatatagggagagataataagatagcgagttaagagaatcgtacggaaaggagcgaggagatagaaagcgataagagattagggagcgcggaagtagaggtagatcgagggatcgatagcgcggagcggagagggcggtagcgaagtagtgtacgagattaggtcgcgtaagcggagagcgtagagaggacggagg

SEQ ID NO: 33388 - DNA, 806 bp, Artificial Sequence
  chemically treated genomic DNA (Homo sapiens) CpG-island No: 33388
cctccgtcctctctacgctctccgcttacgcgacctaatctcgtacactacttcgctaccgccctctccgctccgcgctatcgatccctcgatctacctctacttccgcgctccctaatctcttatcgctttctatctcctcgctcctttccgtacgattctcttaactcgctatcttattatctctccctatatacgacgcttctacgctacttcgaccctattccgtctcgaccccgtattccgcgccgacctaaatctactatcgcgactcgaccgtcctctaccgtcgtctctactccgtcccgacgccgcgctaccgcgtccgcgcgaacgaatcccttaccgctacgcgccgcgtataatctatatcgtccgtattacgcgttatacgaatacccgctatcctcctcgataaacgaacgctttacgttctcttctcgctcgacgcccgttacgacctcctaacgcgtaaatccgtcgtccgcgacgatctaactcgcctccgacttcgcctaacgacgtctactctatacccgtaaaacccgcgccgcgacctcgatccttcgccgaattccgatcgctacgatattcgcccgatcgctctatttcctaatttatctcgcgtcgataactacgtaacgtatccgatcgtccgcgaccgttcgcctcgcgtaattctacgtcctatctacgccgcccctacttccctctcgttcctacctatcctcgtactccttcgcgccttctcgccccgtcccgcccgtcgatccgcctccccgcttccgctcccgaccgtcgtcgtc

SEQ ID NO: 33389 - DNA, 686 bp, Artificial Sequence
  chemically treated genomic DNA (Homo sapiens) CpG-island No: 33389
  unsure (35, 524..525, 535, 557)
gggtagttcggacgttcgttttgcgagcggcgtanaaacgttagtttttggaattttggggtttttcgattttcggagtagtgttaatttagagtattataaaaatagcgggacgggagagagtagtagcgggacgggaggagtcgggtcgttttcgcggtcgcgtatttgtgagtattaggagttgcgggcgtcgtaggtagggtttaggtttgagtaaagcgcgttatcggcgtttgaggttttcggttagttgataggtcgaaagcgtgtcggcggggttgaggggcgtgtcgatttcggagattttaaggggaaggttcgggtttcgattttaattataattcggttagattcgttttatttattagaatttagcgtcgtagtcgtttaattcggcgattgcggttggttttcggttaataatattttttattttcgcgaatcggaatttcgggggttagatattttattttcggtcgcgggcgcggcgtgggtcgtattaagtgcgttttgttttgtgnnttttatttgncgttttacgtgggttcgatagntaattgtgttatcgatcgtatttggggtgatgtttacggggaagggttgggtaagaggttcgagaggtggtcggaaggtaataaggtaataggggggagtcggaggtttttttattatttattagttat

SEQ ID NO: 33390 - DNA, 686 bp, Artificial Sequence
  chemically treated genomic DNA (Homo sapiens) CpG-island No: 33390
  unsure (130, 152, 162..163, 652)
ataactaataaataataaaaaaacctccgactcccccctattaccttattaccttccgaccacctctcgaacctcttacccaacccttccccgtaaacatcaccccaaatacgatcgataacacaattanctatcgaacccacgtaaaacgncaaataaaanncacaaaacaaaacgcacttaatacgacccacgccgcgcccgcgaccgaaaataaaatatctaacccccgaaattccgattcgcgaaaataaaaaatattattaaccgaaaaccaaccgcaatcgccgaattaaacgactacgacgctaaattctaataaataaaacgaatctaaccgaattataattaaaatcgaaacccgaaccttccccttaaaatctccgaaatcgacacgcccctcaaccccgccgacacgctttcgacctatcaactaaccgaaaacctcaaacgccgataacgcgctttactcaaacctaaaccctacctacgacgcccgcaactcctaatactcacaaatacgcgaccgcgaaaacgacccgactcctcccgtcccgctactactctctcccgtcccgctatttttataatactctaaattaacactactccgaaaatcgaaaaaccccaaaattccaaaaactaacgtttntacgccgctcgcaaaacgaacgtccgaactaccc

SEQ ID NO: 33391 - DNA, 686 bp, Artificial Sequence
  chemically treated genomic DNA (Homo sapiens) CpG-island No: 33391
  unsure (130, 152, 162..163, 652)
gtgattaataaataatagggggattttcgatttttttttgttgttttattatttttcgattatttttcggattttttgtttagttttttttcgtagatattattttagatacggtcggtgatataattgnttatcgggtttacgtagggcgntagatggagnntatagggtaggacgtatttggtacgatttacgtcgcgttcgcgatcggaagtgaggtgtttgattttcgaagtttcggttcgcgggggtggggagtgttgttaatcggaggttagtcgtagtcgtcggattgagcggttgcggcgttgggttttggtgagtggggcgaatttggtcgagttgtggttggggtcgggattcgaattttttttttgaggttttcggagtcggtacgttttttagtttcgtcgatacgttttcggtttgttagttggtcggagattttagacgtcggtggcgcgttttgtttaagtttgggttttgtttgcgacgttcgtaatttttggtgtttataggtgcgcggtcgcgagggcgattcggtttttttcgtttcgttgttgttttttttcgtttcgttgtttttgtggtgttttgagttgatattatttcgggggtcgggggattttaggattttaaaggttgacgtttntacgtcgttcgtagggcgggcgttcgaattgttt

SEQ ID NO: 33392 - DNA, 686 bp, Artificial Sequence
  chemically treated genomic DNA (Homo sapiens) CpG-island No: 33392
  unsure (35, 524..525, 535, 557)
aaacaattcgaacgcccgccctacgaacgacgtanaaacgtcaacctttaaaatcctaaaatcccccgacccccgaaataatatcaactcaaaacaccacaaaaacaacgaaacgaaaaaaaacaacaacgaaacgaaaaaaaccgaatcgccctcgcgaccgcgcacctataaacaccaaaaattacgaacgtcgcaaacaaaacccaaacttaaacaaaacgcgccaccgacgtctaaaatctccgaccaactaacaaaccgaaaacgtatcgacgaaactaaaaaacgtaccgactccgaaaacctcaaaaaaaaaattcgaatcccgaccccaaccacaactcgaccaaattcgccccactcaccaaaacccaacgccgcaaccgctcaatccgacgactacgactaacctccgattaacaacactccccacccccgcgaaccgaaacttcgaaaatcaaacacctcacttccgatcgcgaacgcgacgtaaatcgtaccaaatacgtcctaccctatannctccatctancgccctacgtaaacccgataancaattatatcaccgaccgtatctaaaataatatctacgaaaaaaaactaaacaaaaaatccgaaaaataatcgaaaaataataaaacaacaaaaaaaaatcgaaaatccccctattatttattaatcac

SEQ ID NO: 33393 - DNA, 568 bp, Artificial Sequence
  chemically treated genomic DNA (Homo sapiens) CpG-island No: 33393
acggggtgcggaggcgtattttgggaatgtcgagagggtttcgtagagacgttatgggcgcgtgcgggtcggcggggagttggggggttagggcggacgttcgacgtgatggtttttttcgtaggcgtcgcggttttgttattgttgttgttcgttattatgttttatttgtttttggcggttcgttcgggtttcgcgcgtttgttgggtttattcgcgtttttgtcggggttggaggtgttgtggagtttacgggcgttgttgttgtggttcgtttggttcggtttgtaggcggcgttttatttattgtcggcgcgtaaggtgcgggtttcgttcgcggacgttcgggggagggaagcgaatgggttcggcgagggaaaggacgtttcgggttttattagagtttttttggattcgtaggtggtcgaggggtaggaattgaaggataagagtcgtttgcgttattttattaacggtgtttaggggacgggttttcgcgttggagttaagcggtcgggggtggagttttaggtttagcggggaggtttacggagattggtttttattt

SEQ ID NO: 33394 - DNA, 568 bp, Artificial Sequence
  chemically treated genomic DNA (Homo sapiens) CpG-island No: 33394
aaataaaaaccaatctccgtaaacctccccgctaaacctaaaactccacccccgaccgcttaactccaacgcgaaaacccgtcccctaaacaccgttaataaaataacgcaaacgactcttatccttcaattcctacccctcgaccacctacgaatccaaaaaaactctaataaaacccgaaacgtcctttccctcgccgaacccattcgcttccctcccccgaacgtccgcgaacgaaacccgcaccttacgcgccgacaataaataaaacgccgcctacaaaccgaaccaaacgaaccacaacaacaacgcccgtaaactccacaacacctccaaccccgacaaaaacgcgaataaacccaacaaacgcgcgaaacccgaacgaaccgccaaaaacaaataaaacataataacgaacaacaacaataacaaaaccgcgacgcctacgaaaaaaaccatcacgtcgaacgtccgccctaaccccccaactccccgccgacccgcacgcgcccataacgtctctacgaaaccctctcgacattcccaaaatacgcctccgcaccccgt

SEQ ID NO: 33395 - DNA, 568 bp, Artificial Sequence
  chemically treated genomic DNA (Homo sapiens) CpG-island No: 33395
gggtgggggttaattttcgtggattttttcgttaggtttggagttttattttcggtcgtttaattttagcgcgagggttcgttttttaggtatcgttaataggatagcgtaggcgatttttgttttttaatttttgtttttcggttatttgcgggtttaagggggttttgataaggttcggggcgttttttttttcgtcgagtttattcgtttttttttttcgagcgttcgcgagcggggttcgtattttgcgcgtcggtagtaggtagagcgtcgtttgtaggtcgagttaggcgagttatagtagtagcgttcgtgggttttatagtatttttagtttcggtagggacgcgggtggatttagtaggcgcgcggggttcgaacgggtcgttaggagtaggtggaatatggtggcgggtagtagtagtagtagagtcgcggcgtttgcgggaagggttattacgtcgggcgttcgttttagttttttagtttttcgtcggttcgtacgcgtttatgacgtttttgcgggattttttcggtatttttagagtgcgttttcgtatttcgt

SEQ ID NO: 33396 - DNA, 568 bp, Artificial Sequence
  chemically treated genomic DNA (Homo sapiens) CpG-island No: 33396
acgaaatacgaaaacgcactctaaaaataccgaaaaaatcccgcaaaaacgtcataaacgcgtacgaaccgacgaaaaactaaaaaactaaaacgaacgcccgacgtaataacccttcccgcaaacgccgcgactctactactactactacccgccaccatattccacctactcctaacgacccgttcgaaccccgcgcgcctactaaatccacccgcgtccctaccgaaactaaaaatactataaaacccacgaacgctactactataactcgcctaactcgacctacaaacgacgctctacctactaccgacgcgcaaaatacgaaccccgctcgcgaacgctcgaaaaaaaaaaacgaataaactcgacgaaaaaaaaaacgccccgaaccttatcaaaacccccttaaacccgcaaataaccgaaaaacaaaaattaaaaaacaaaaatcgcctacgctatcctattaacgatacctaaaaaacgaaccctcgcgctaaaattaaacgaccgaaaataaaactccaaacctaacgaaaaaatccacgaaaattaacccccaccc

SEQ ID NO: 33397 - DNA, 979 bp, Artificial Sequence
  chemically treated genomic DNA (Homo sapiens) CpG-island No: 33397
  unsure (3)
ttncggtagggattatatcggtgtattatgggagcggttcgggttatacgttaaaaatattaaggggagcgcgcgacgtgaatttggcgttcgatgggggtcgttagtcgttttagagcgcgcggagcgagagaggcgtagttggattataacgtagtgtatttcgggaggttaattcgattggattgggtgagaggatagaggtggttcgatgggcggttcgaaggtcggggattatggcgggaaggcgggtttagataggtttagtttcgtttcgattcgtcgttttttatttttcggtcggtttcgcgtgttttttcgtagtattgtcgttttcgggatgttgagcgtttatcgttttttcgtagtttttttatgttcggttgcgagttgttcgtgtatttgttcggatatgtgttcggtcgtcgaggcgtttagtaaatgggagtatcgtttgtatcgtttggaggtggtgtcgggttgtcgttagattcgtttcggtcgagttcgtagagtcggtggaaggagtatagtcgattcgtcgtcggtaagtttcggttttcgtttagttagttgcgttcgtttttcgtgttgttggttatcgtgcgttatttggtcggtgaggtggcggagagcgtcgatatcgttcgcgtcgaggtggttagtttcgtggtagatcgtttgcgagttgtgtttttggatttggcgttgtagggagcgggcgacgtcgaggtagttgtggtgttggaggcggcgttggttacgttgttgatcgtagtggcgcggttcgggttcgacgcggcgcggggattcgcggattcggtgttgttgtaggtttaggtgtaggagggtttcggttcgttgcggcgttgttatcgcggggcgtcgggtcgtattttcgttaattcgttttttagggtttttttttgttttataatttgggtgagtcgggattttggcggttgggtagagcgtgggg

SEQ ID NO: 33398 - DNA, 979 bp, Artificial Sequence
  chemically treated genomic DNA (Homo sapiens) CpG-island No: 33398
  unsure (977)
ccccacgctctacccaaccgccaaaatcccgactcacccaaattataaaacaaaaaaaaaccctaaaaaacgaattaacgaaaatacgacccgacgccccgcgataacaacgccgcaacgaaccgaaaccctcctacacctaaacctacaacaacaccgaatccgcgaatccccgcgccgcgtcgaacccgaaccgcgccactacgatcaacaacgtaaccaacgccgcctccaacaccacaactacctcgacgtcgcccgctccctacaacgccaaatccaaaaacacaactcgcaaacgatctaccacgaaactaaccacctcgacgcgaacgatatcgacgctctccgccacctcaccgaccaaataacgcacgataaccaacaacacgaaaaacgaacgcaactaactaaacgaaaaccgaaacttaccgacgacgaatcgactatactccttccaccgactctacgaactcgaccgaaacgaatctaacgacaacccgacaccacctccaaacgatacaaacgatactcccatttactaaacgcctcgacgaccgaacacatatccgaacaaatacacgaacaactcgcaaccgaacataaaaaaactacgaaaaaacgataaacgctcaacatcccgaaaacgacaatactacgaaaaaacacgcgaaaccgaccgaaaaataaaaaacgacgaatcgaaacgaaactaaacctatctaaacccgccttcccgccataatccccgaccttcgaaccgcccatcgaaccacctctatcctctcacccaatccaatcgaattaacctcccgaaatacactacgttataatccaactacgcctctctcgctccgcgcgctctaaaacgactaacgacccccatcgaacgccaaattcacgtcgcgcgctccccttaatatttttaacgtataacccgaaccgctcccataatacaccgatataatccctaccgnaa

SEQ ID NO: 33399 - DNA, 979 bp, Artificial Sequence
  chemically treated genomic DNA (Homo sapiens) CpG-island No: 33399
  unsure (977)
ttttacgttttgtttagtcgttaggatttcgatttatttaggttatagagtagaaagaggttttggaaggcgggttggcgggggtgcggttcggcgtttcgcggtagtagcgtcgtagcgagtcgaagtttttttgtatttgggtttgtagtagtatcgggttcgcgggttttcgcgtcgcgtcgggttcgagtcgcgttattacggttagtagcgtggttagcgtcgtttttagtattatagttgtttcggcgtcgttcgttttttgtagcgttaggtttaggagtatagttcgtaagcggtttgttacgaagttggttatttcggcgcgggcgatgtcggcgtttttcgttattttatcggttaggtagcgtacggtggttagtagtacggagggcggacgtaattggttgggcgggggtcggggtttgtcggcggcgggtcggttgtattttttttatcggttttgcggattcggtcggggcgggtttggcggtaattcggtattatttttaagcggtgtaggcggtgtttttatttgttgggcgtttcggcggtcgggtatatgttcgggtaggtgtacgggtagttcgtagtcgggtatgagggggttgcggggagacggtgggcgtttagtatttcggggacggtagtgttgcgggaaggtacgcgaggtcggtcggggggtggggagcggcgggtcggggcggggttgaatttgtttgggttcgttttttcgttatgattttcggttttcgggtcgtttatcgagttatttttgtttttttatttagtttagtcgagttggtttttcgagatgtattgcgttgtagtttagttacgtttttttcgtttcgcgcgttttagggcggttaacggtttttatcgagcgttaagtttacgtcgcgcgttttttttagtgtttttaacgtgtagttcgggtcgtttttatgatatatcggtgtagtttttgtcgnaa

SEQ ID NO: 33400 - DNA, 979 bp, Artificial Sequence
  chemically treated genomic DNA (Homo sapiens) CpG-island No: 33400
  unsure (3)
ttncgacaaaaactacaccgatatatcataaaaacgacccgaactacacgttaaaaacactaaaaaaaacgcgcgacgtaaacttaacgctcgataaaaaccgttaaccgccctaaaacgcgcgaaacgaaaaaaacgtaactaaactacaacgcaatacatctcgaaaaaccaactcgactaaactaaataaaaaaacaaaaataactcgataaacgacccgaaaaccgaaaatcataacgaaaaaacgaacccaaacaaattcaaccccgccccgacccgccgctccccaccccccgaccgacctcgcgtaccttcccgcaacactaccgtccccgaaatactaaacgcccaccgtctccccgcaaccccctcatacccgactacgaactacccgtacacctacccgaacatatacccgaccgccgaaacgcccaacaaataaaaacaccgcctacaccgcttaaaaataataccgaattaccgccaaacccgccccgaccgaatccgcaaaaccgataaaaaaaatacaaccgacccgccgccgacaaaccccgacccccgcccaaccaattacgtccgccctccgtactactaaccaccgtacgctacctaaccgataaaataacgaaaaacgccgacatcgcccgcgccgaaataaccaacttcgtaacaaaccgcttacgaactatactcctaaacctaacgctacaaaaaacgaacgacgccgaaacaactataatactaaaaacgacgctaaccacgctactaaccgtaataacgcgactcgaacccgacgcgacgcgaaaacccgcgaacccgatactactacaaacccaaatacaaaaaaacttcgactcgctacgacgctactaccgcgaaacgccgaaccgcacccccgccaacccgccttccaaaacctctttctactctataacctaaataaatcgaaatcctaacgactaaacaaaacgtaaaa

SEQ ID NO: 33401 - DNA, 567 bp, Artificial Sequence
  chemically treated genomic DNA (Homo sapiens) CpG-island No: 33401
  unsure (28, 477)
agcggtagggaagaggtaatttttttanttatgttttttttaaacggttcgattttatttttttcgcgcgtttttttttatcggagttttgagcggtttttcggacgcggttcgttttttagatataatttaggttttttttcgagttttttttacggttcgtttcggcgcgcgttaatcgggaaggttattcgttgtaaaaaacgttcgaattttatcgttgcgggaaaggaagcggaagtgacgtagggttagcggtttgcggttttcggaatttcgagttttttttattcgtttttatttttagcggtagcggaggcgtggtttaggggcgcgatggcgttattagcgcgcgtcgtattcggaagagacgtggtagcggagggataatcggggcggtcggggttgaagggagaggcgtaggagttttggggagagtggtttttgttttttcgcgtttcgagttattcgtatcgnttttcggaattagtgtagcggtcgattagtaaatatagagattggggtttgtagagaaggggcgggatttggagggggtggggtttagga

SEQ ID NO: 33402 - DNA, 567 bp, Artificial Sequence
  chemically treated genomic DNA (Homo sapiens) CpG-island No: 33402
  unsure (91, 540)
tcctaaaccccaccccctccaaatcccgccccttctctacaaaccccaatctctatatttactaatcgaccgctacactaattccgaaaancgatacgaataactcgaaacgcgaaaaaacaaaaaccactctccccaaaactcctacgcctctcccttcaaccccgaccgccccgattatccctccgctaccacgtctcttccgaatacgacgcgcgctaataacgccatcgcgcccctaaaccacgcctccgctaccgctaaaaataaaaacgaataaaaaaaactcgaaattccgaaaaccgcaaaccgctaaccctacgtcacttccgcttcctttcccgcaacgataaaattcgaacgttttttacaacgaataaccttcccgattaacgcgcgccgaaacgaaccgtaaaaaaaactcgaaaaaaaacctaaattatatctaaaaaacgaaccgcgtccgaaaaaccgctcaaaactccgataaaaaaaaacgcgcgaaaaaaataaaatcgaaccgtttaaaaaaaacataantaaaaaaattacctcttccctaccgct

SEQ ID NO: 33403 - DNA, 567 bp, Artificial Sequence
  chemically treated genomic DNA (Homo sapiens) CpG-island No: 33403
  unsure (91, 540)
ttttgagttttattttttttaagtttcgttttttttttatagattttagtttttgtgtttattgatcggtcgttgtattggtttcgaaggncggtacggatggttcgaggcgcggaagggtagggattattttttttagggtttttgcgtttttttttttagtttcggtcgtttcgattattttttcgttgttacgtttttttcgggtgcggcgcgcgttgatgacgttatcgcgtttttgggttacgttttcgttgtcgttagaggtgaagacgggtggaaaagattcggggtttcgagggtcgtagatcgttagttttacgttattttcgttttttttttcgtagcggtgagattcgaacgttttttgtagcgagtggttttttcggttggcgcgcgtcggggcgggtcgtaggaggagttcgagaaggagtttaagttatgtttgggaggcgaatcgcgttcggagaatcgtttagagtttcggtgagagagggcgcgcgggaaaagtgaggtcgagtcgtttgggggaagtatggntggaaagattgttttttttttatcgtt

SEQ ID NO: 33404 - DNA, 567 bp, Artificial Sequence
  chemically treated genomic DNA (Homo sapiens) CpG-island No: 33404
  unsure (28, 477)
aacgataaaaaaaaaacaatctttccanccatacttcccccaaacgactcgacctcacttttcccgcgcgccctctctcaccgaaactctaaacgattctccgaacgcgattcgcctcccaaacataacttaaactccttctcgaactcctcctacgacccgccccgacgcgcgccaaccgaaaaaaccactcgctacaaaaaacgttcgaatctcaccgctacgaaaaaaaaaacgaaaataacgtaaaactaacgatctacgaccctcgaaaccccgaatcttttccacccgtcttcacctctaacgacaacgaaaacgtaacccaaaaacgcgataacgtcatcaacgcgcgccgcacccgaaaaaaacgtaacaacgaaaaaataatcgaaacgaccgaaactaaaaaaaaaaacgcaaaaaccctaaaaaaaataatccctacccttccgcgcctcgaaccatccgtaccgnccttcgaaaccaatacaacgaccgatcaataaacacaaaaactaaaatctataaaaaaaaaacgaaacttaaaaaaaataaaactcaaaa

SEQ ID NO: 33405 - DNA, 973 bp, Artificial Sequence
  chemically treated genomic DNA (Homo sapiens) CpG-island No: 33405
acgcgacgggcgaacggcgtcgcgtagagcgagcgaggtcgcggcgatcggcggcgagcgggagcgcgcggggagagaaggattcgcggggatagcgagcgggaagcgcgcgagaacgagggacgagggggcgggagggagggacggtcgtcggcgcgaggggcggcggagagagttagcgaagtcgggggcggcgagcggacggcggcggcgagcgcggaggcggcggggggcgttacggcgggtaggcggcggaataggagcggtaggcggagggcgaggacgaggacgggcgaggacgggaggagggcggtagtagggcgggcgcgcgtcgaaggcgcgagcgggggagagagcgggagcgagtcggcggcgtagcggaggtacgcgaagggacggggcgcggagtagagagggaggcgcgaagcgtaggggtagcgcgtcgtcggaggcgatcgcgggagaggcggtaggcgaggcgggagcggggagaggggcggaaggtaggcggggcggcgcgtagacgcgtaggagcgagagggggcgaggacgggggtacggggcggggggtcggaggcggcgggtcgcggtcgcggggtagggcgggcgacgggagggcgagatcggggcggcgcggagcgtcgtagcgtagcgagcggggtcgcgggcgcggtaggtcgcgcgcgtaggggatcggcggggaggattagtcgcggtaaggtcgcgtcggcgacgtagatcgagcgtagtcgggtcgtagcgggcggattagcgtcggggtcgtggggcggggcgcgcgcgcggagcgaggaggagaggggggggagagagaggtagcgaggggaggagggggaggggcggggagagggggcgggggcgggagaggggcggcgacggggggggagtgtcggggagcgtcggttagacggggggcgggtaggagggcggagttttgtttttttttttgtttttt

SEQ ID NO: 33406 - DNA, 973 bp, Artificial Sequence
  chemically treated genomic DNA (Homo sapiens) CpG-island No: 33406
aaaaaacaaaaaaaaaaacaaaactccgccctcctacccgccccccgtctaaccgacgctccccgacactccccccccgtcgccgcccctctcccgcccccgccccctctccccgcccctccccctcctcccctcgctacctctctctcccccccctctcctcctcgctccgcgcgcgcgccccgccccacgaccccgacgctaatccgcccgctacgacccgactacgctcgatctacgtcgccgacgcgaccttaccgcgactaatcctccccgccgatcccctacgcgcgcgacctaccgcgcccgcgaccccgctcgctacgctacgacgctccgcgccgccccgatctcgccctcccgtcgcccgccctaccccgcgaccgcgacccgccgcctccgaccccccgccccgtacccccgtcctcgccccctctcgctcctacgcgtctacgcgccgccccgcctaccttccgcccctctccccgctcccgcctcgcctaccgcctctcccgcgatcgcctccgacgacgcgctacccctacgcttcgcgcctccctctctactccgcgccccgtcccttcgcgtacctccgctacgccgccgactcgctcccgctctctcccccgctcgcgccttcgacgcgcgcccgccctactaccgccctcctcccgtcctcgcccgtcctcgtcctcgccctccgcctaccgctcctattccgccgcctacccgccgtaacgccccccgccgcctccgcgctcgccgccgccgtccgctcgccgcccccgacttcgctaactctctccgccgcccctcgcgccgacgaccgtccctccctcccgccccctcgtccctcgttctcgcgcgcttcccgctcgctatccccgcgaatccttctctccccgcgcgctcccgctcgccgccgatcgccgcgacctcgctcgctctacgcgacgccgttcgcccgtcgcgt

SEQ ID NO: 33407 - DNA, 973 bp, Artificial Sequence
  chemically treated genomic DNA (Homo sapiens) CpG-island No: 33407
agggggtaggggggagggtagagtttcgtttttttgttcgtttttcgtttagtcggcgtttttcggtatttttttttcgtcgtcgtttttttttcgttttcgtttttttttttcgtttttttttttttttttttcgttgttttttttttttttttttttttttttcgtttcgcgcgcgcgtttcgttttacggtttcggcgttggttcgttcgttgcggttcggttgcgttcggtttgcgtcgtcggcgcggttttgtcgcggttggtttttttcgtcggttttttgcgcgcgcggtttgtcgcgttcgcggtttcgttcgttgcgttgcggcgtttcgcgtcgtttcggtttcgttttttcgtcgttcgttttgtttcgcggtcgcggttcgtcgttttcggtttttcgtttcgtattttcgttttcgttttttttcgtttttgcgcgtttgcgcgtcgtttcgtttgtttttcgttttttttttcgttttcgtttcgtttgtcgtttttttcgcggtcgttttcggcggcgcgttgtttttgcgtttcgcgtttttttttttgtttcgcgtttcgttttttcgcgtgttttcgttgcgtcgtcggttcgttttcgttttttttttcgttcgcgttttcggcgcgcgttcgttttgttgtcgtttttttttcgttttcgttcgttttcgttttcgtttttcgtttgtcgtttttgtttcgtcgtttgttcgtcgtggcgtttttcgtcgttttcgcgttcgtcgtcgtcgttcgttcgtcgttttcggtttcgttggtttttttcgtcgtttttcgcgtcggcggtcgtttttttttttcgttttttcgtttttcgttttcgcgcgtttttcgttcgttgttttcgcggattttttttttttcgcgcgttttcgttcgtcgtcggtcgtcgcggtttcgttcgttttgcgcggcgtcgttcgttcgtcgcgt

SEQ ID NO: 33408 - DNA, 973 bp, Artificial Sequence
  chemically treated genomic DNA (Homo sapiens) CpG-island No: 33408
acgcgacgaacgaacgacgccgcgcaaaacgaacgaaaccgcgacgaccgacgacgaacgaaaacgcgcgaaaaaaaaaaaatccgcgaaaacaacgaacgaaaaacgcgcgaaaacgaaaaacgaaaaaacgaaaaaaaaaaacgaccgccgacgcgaaaaacgacgaaaaaaaccaacgaaaccgaaaacgacgaacgaacgacgacgacgaacgcgaaaacgacgaaaaacgccacgacgaacaaacgacgaaacaaaaacgacaaacgaaaaacgaaaacgaaaacgaacgaaaacgaaaaaaaaacgacaacaaaacgaacgcgcgccgaaaacgcgaacgaaaaaaaaaacgaaaacgaaccgacgacgcaacgaaaacacgcgaaaaaacgaaacgcgaaacaaaaaaaaaaacgcgaaacgcaaaaacaacgcgccgccgaaaacgaccgcgaaaaaaacgacaaacgaaacgaaaacgaaaaaaaaaacgaaaaacaaacgaaacgacgcgcaaacgcgcaaaaacgaaaaaaaacgaaaacgaaaatacgaaacgaaaaaccgaaaacgacgaaccgcgaccgcgaaacaaaacgaacgacgaaaaaacgaaaccgaaacgacgcgaaacgccgcaacgcaacgaacgaaaccgcgaacgcgacaaaccgcgcgcgcaaaaaaccgacgaaaaaaaccaaccgcgacaaaaccgcgccgacgacgcaaaccgaacgcaaccgaaccgcaacgaacgaaccaacgccgaaaccgtaaaacgaaacgcgcgcgcgaaacgaaaaaaaaaaaaaaaaaaaaaaaaaacaacgaaaaaaaaaaaaaaaaaaacgaaaaaaaaaaacgaaaacgaaaaaaaaacgacgacgaaaaaaaaataccgaaaaacgccgactaaacgaaaaacgaacaaaaaaacgaaactctaccctcccccctaccccct

SEQ ID NO: 33409 - DNA, 563 bp, Artificial Sequence
  chemically treated genomic DNA (Homo sapiens) CpG-island No: 33409
tttttttcggttttttcgtatttttgttttttattttttttttttttcgtcggatcgatcgaagtagaggtgagcgagggtagcgtaagtagcgtagcgagttaggtgaaggcggagttaagaattgcgagagttgttattagagtttatcgggcgttttgtttgttttttttcggatttacgcgatttaggtttagggagtcgcggattcgggcgtttttaggatgttgggtttgatgtttgcgaggggtaggacgaggcgaaggttatttcgttgtttttttagttttagaattatttaatgtacgggttttaatcgtagtcggtaagttgttttttttcggtttttcgaggttttggagtttgtataattgttttataaaaggcggtggtttcgtttaacgttagatggacgtttgttttgcgtggtgatattagagcgagagtcgattgtttttgtgtcgtagtcgggtggtgtgtttgtttttaagtttggaggcgggtggttcgagttcgttttatggaacgttttttgtattttaaaaatgtttaaatcgttggta

SEQ ID NO: 33410 - DNA, 563 bp, Artificial Sequence
  chemically treated genomic DNA (Homo sapiens) CpG-island No: 33410
taccaacgatttaaacatttttaaaatacaaaaaacgttccataaaacgaactcgaaccacccgcctccaaacttaaaaacaaacacaccacccgactacgacacaaaaacaatcgactctcgctctaatatcaccacgcaaaacaaacgtccatctaacgttaaacgaaaccaccgccttttataaaacaattatacaaactccaaaacctcgaaaaaccgaaaaaaaacaacttaccgactacgattaaaacccgtacattaaataattctaaaactaaaaaaacaacgaaataaccttcgcctcgtcctacccctcgcaaacatcaaacccaacatcctaaaaacgcccgaatccgcgactccctaaacctaaatcgcgtaaatccgaaaaaaaacaaacaaaacgcccgataaactctaataacaactctcgcaattcttaactccgccttcacctaactcgctacgctacttacgctaccctcgctcacctctacttcgatcgatccgacgaaaaaaaaaaaaaataaaaaacaaaaatacgaaaaaaccgaaaaaaa

SEQ ID NO: 33411 - DNA, 563 bp, Artificial Sequence
  chemically treated genomic DNA (Homo sapiens) CpG-island No: 33411
tgttagcggtttaagtatttttaaaatgtaggaaacgttttatagaacgagttcgaattattcgtttttagatttggaagtaagtatattattcgattgcgatataggaatagtcgattttcgttttggtattattacgtagagtaagcgtttatttaacgttaggcggagttatcgttttttgtagaataattgtgtaggttttaaagtttcggaaaatcggagaggggtagtttgtcggttacggttgaaattcgtgtattgggtgattttgaagttggaagggtagcggaatggttttcgtttcgttttgtttttcgtaggtattagatttagtattttggaaacgttcgggttcgcgattttttgagtttgaatcgcgtgggttcgaagggaagtaagtagaacgttcggtgggttttagtgatagttttcgtagtttttggtttcgtttttatttgattcgttacgttgtttgcgttattttcgtttatttttgtttcggtcggttcggcgggagagaggaagggtgaaaagtagaaatacggagaggtcggagagaa

SEQ ID NO: 33412 - DNA, 563 bp, Artificial Sequence
  chemically treated genomic DNA (Homo sapiens) CpG-island No: 33412
ttctctccgacctctccgtatttctacttttcacccttcctctctcccgccgaaccgaccgaaacaaaaataaacgaaaataacgcaaacaacgtaacgaatcaaataaaaacgaaaccaaaaactacgaaaactatcactaaaacccaccgaacgttctacttacttcccttcgaacccacgcgattcaaactcaaaaaatcgcgaacccgaacgtttccaaaatactaaatctaatacctacgaaaaacaaaacgaaacgaaaaccattccgctacccttccaacttcaaaatcacccaatacacgaatttcaaccgtaaccgacaaactacccctctccgattttccgaaactttaaaacctacacaattattctacaaaaaacgataactccgcctaacgttaaataaacgcttactctacgtaataataccaaaacgaaaatcgactattcctatatcgcaatcgaataatatacttacttccaaatctaaaaacgaataattcgaactcgttctataaaacgtttcctacattttaaaaatacttaaaccgctaaca

SEQ ID NO: 33413 - DNA, 505 bp, Artificial Sequence
  chemically treated genomic DNA (Homo sapiens) CpG-island No: 33413
tcgtaagcgaggaatttagcgtagggaaagtagtttcggtggggttcggcgcgttagtttattcgcgtggtaaaatttgcggggttttcgcgtgtcgcgttttagtttagttgtgcgttcgtaggttttagattcgtcgttcgtttgatttggcgcggcgtttttatttcggaacgttgggtggatttcgtagtaaattttaattttttatttaggcggtagcggcgcggtgtttcggtttcgtttttggtatcgtaggtcgttcgtttcgcgtttttaaaagtattaggtttatttagaagtttaggtagtttcgcgatttttatttattttttttagtatcgtcgttgtttttatcgtcgtttagcgtaggcgtagtagagatttaaaaggatacggtcgtttttatcgtataacgggttggagtaggttaggggtcgtaggggttgagaaaacgagtaacggaggatagagtgtagtggggacggggaaatttttttttttt

SEQ ID NO: 33414 - DNA, 505 bp, Artificial Sequence
  chemically treated genomic DNA (Homo sapiens) CpG-island No: 33414
aaaaaaaaaaaatttccccgtccccactacactctatcctccgttactcgttttctcaacccctacgacccctaacctactccaacccgttatacgataaaaacgaccgtatccttttaaatctctactacgcctacgctaaacgacgataaaaacaacgacgatactaaaaaaaataaataaaaatcgcgaaactacctaaacttctaaataaacctaatacttttaaaaacgcgaaacgaacgacctacgataccaaaaacgaaaccgaaacaccgcgccgctaccgcctaaataaaaaattaaaatttactacgaaatccacccaacgttccgaaataaaaacgccgcgccaaatcaaacgaacgacgaatctaaaacctacgaacgcacaactaaactaaaacgcgacacgcgaaaaccccgcaaattttaccacgcgaataaactaacgcgccgaaccccaccgaaactactttccctacgctaaattcctcgcttacga

SEQ ID NO: 33415 - DNA, 505 bp, Artificial Sequence
  chemically treated genomic DNA (Homo sapiens) CpG-island No: 33415
ggaggagagggattttttcgtttttattgtattttgtttttcgttattcgtttttttagtttttgcggtttttaatttgttttaattcgttgtgcggtagaggcggtcgtgtttttttaagtttttgttacgtttgcgttgggcggcggtagagatagcggcggtgttgggaggggtaggtgagggtcgcgaggttgtttgagtttttaagtgagtttgatgtttttgggaacgcggaacgggcgatttgcggtgttaggagcgaagtcgaggtatcgcgtcgttgtcgtttggatgggaagttaaggtttattgcgaagtttatttagcgtttcgaggtgagggcgtcgcgttaggttaggcgggcggcgagtttgggatttgcgggcgtatagttgggttgaggcgcggtacgcggagatttcgtaagttttgttacgcgagtgggttgacgcgtcgggttttatcggggttattttttttgcgttggatttttcgtttgcgg

SEQ ID NO: 33416 - DNA, 505 bp, Artificial Sequence
  chemically treated genomic DNA (Homo sapiens) CpG-island No: 33416
ccgcaaacgaaaaatccaacgcaaaaaaaataaccccgataaaacccgacgcgtcaacccactcgcgtaacaaaacttacgaaatctccgcgtaccgcgcctcaacccaactatacgcccgcaaatcccaaactcgccgcccgcctaacctaacgcgacgccctcacctcgaaacgctaaataaacttcgcaataaaccttaacttcccatccaaacgacaacgacgcgatacctcgacttcgctcctaacaccgcaaatcgcccgttccgcgttcccaaaaacatcaaactcacttaaaaactcaaacaacctcgcgaccctcacctacccctcccaacaccgccgctatctctaccgccgcccaacgcaaacgtaacaaaaacttaaaaaaacacgaccgcctctaccgcacaacgaattaaaacaaattaaaaaccgcaaaaactaaaaaaacgaataacgaaaaacaaaatacaataaaaacgaaaaaatccctctcctcc

SEQ ID NO: 33417 - DNA, 550 bp, Artificial Sequence
  chemically treated genomic DNA (Homo sapiens) CpG-island No: 33417
cggcggtcgtcgaggagtcggttttaggtaagtgagggtcggttcggagggcgggcggggtcgggggtttttttttgttcgtcgttatcgttttttttttttgcgttttttttgcgtagcgcgggttagtgtttaagaataacgtgttattttttcggcggtttggtcgcgagggggggagggggcggcggttcggttgtcgtcgtttttgttttcgggggttcgtttttttgttttttcggcgcggcgtgcgcgttggtgcggcgtggcggttgggttgtcgggggtgggggtttggtcggcgtgcgtggtgtttttttcgttcgttggtcggggttgtgtcgtttttcgtttgtgcggttggtggcggggtggggtgcgtttgtcgtcgcggggggttggcggtttttggggcgtcgggcgggggggtcgttcggcgtcgggtttgtcgcgggtgttggttgcgttttgcgggggggtgcgtttcggcgcgttggcggtcggtgcggggcgttcgtgtgtgtgcgtgcgtcgcggtcgcgtgtgtgtg

SEQ ID NO: 33418 - DNA, 550 bp, Artificial Sequence
  chemically treated genomic DNA (Homo sapiens) CpG-island No: 33418
cacacacacgcgaccgcgacgcacgcacacacacgaacgccccgcaccgaccgccaacgcgccgaaacgcacccccccgcaaaacgcaaccaacacccgcgacaaacccgacgccgaacgacccccccgcccgacgccccaaaaaccgccaaccccccgcgacgacaaacgcaccccaccccgccaccaaccgcacaaacgaaaaacgacacaaccccgaccaacgaacgaaaaaaacaccacgcacgccgaccaaacccccacccccgacaacccaaccgccacgccgcaccaacgcgcacgccgcgccgaaaaaacaaaaaaacgaacccccgaaaacaaaaacgacgacaaccgaaccgccgccccctccccccctcgcgaccaaaccgccgaaaaaataacacgttattcttaaacactaacccgcgctacgcaaaaaaaacgcaaaaaaaaaaaacgataacgacgaacaaaaaaaaacccccgaccccgcccgccctccgaaccgaccctcacttacctaaaaccgactcctcgacgaccgccg

SEQ ID NO: 33419 - DNA, 550 bp, Artificial Sequence
  chemically treated genomic DNA (Homo sapiens) CpG-island No: 33419
tatatatacgcgatcgcgacgtacgtatatatacgggcgtttcgtatcggtcgttagcgcgtcgggacgtattttttcgtagggcgtaattaatattcgcggtagattcggcgtcgggcgattttttcgttcggcgttttagaggtcgttagtttttcgcggcggtaaacgtattttatttcgttattagtcgtatagacggggggcgatatagtttcggttaacgggcggaggggatattacgtacgtcgattaggtttttattttcggtagtttaatcgttacgtcgtattagcgcgtacgtcgcgtcgagaaagtaggaaggcgagttttcgggagtaggaacgacggtaatcgggtcgtcgttttttttttttttcgcggttaggtcgtcgggaaagtaatacgttgtttttgggtattggttcgcgttgcgtagggagggcgtaggggagggaggcggtggcggcgggtagggaggagttttcggtttcgttcgtttttcgggtcgatttttatttgtttgaaatcggtttttcgacggtcgtcg

SEQ ID NO: 33420 - DNA, 550 bp, Artificial Sequence
  chemically treated genomic DNA (Homo sapiens) CpG-island No: 33420
cgacgaccgtcgaaaaaccgatttcaaacaaataaaaatcgacccgaaaaacgaacgaaaccgaaaactcctccctacccgccgccaccgcctccctcccctacgccctccctacgcaacgcgaaccaatacccaaaaacaacgtattactttcccgacgacctaaccgcgaaaaaaaaaaaaaacgacgacccgattaccgtcgttcctactcccgaaaactcgccttcctactttctcgacgcgacgtacgcgctaatacgacgtaacgattaaactaccgaaaataaaaacctaatcgacgtacgtaatatcccctccgcccgttaaccgaaactatatcgccccccgtctatacgactaataacgaaataaaatacgtttaccgccgcgaaaaactaacgacctctaaaacgccgaacgaaaaaatcgcccgacgccgaatctaccgcgaatattaattacgccctacgaaaaaatacgtcccgacgcgctaacgaccgatacgaaacgcccgtatatatacgtacgtcgcgatcgcgtatatata

SEQ ID NO: 33421 - DNA, 922 bp, Artificial Sequence
  chemically treated genomic DNA (Homo sapiens) CpG-island No: 33421
  unsure (426)
ttatcgaggttacggagatattgggttttgatatcgattacggcgatatcgttatcgatatcgatcgcggtattttttatacgcgggcgcgcgcgatcgattcgggcgttgttgcgtagttttacgtcgtttttttagaaatcgaatttgttttgcgcgcggcgcgaatgtaggaatagtattgcgtagcggttagggtgcggtacgcggtatgtataacgatattggttttgtattcggcgtatcgatcgttacgcgtcggaacgttttgttttcggttagtagatttatgtcggggcgtatgaaatttttgtcgttggcgggatagagttttagtcggagtaggttagtgcggttttttaagttcgaaacgttgatttgaatggcgggttcgcgtttcgaagcgtagtggttggcgttcgtttntattatattattcgcgagagtcgcgttcgggtacgtcgcgagcgcgattagcgttagaaagaaagtcgataatattatttttatgatcggttttgaaatcgtttcggtacgcggtttcgtacgaaacgaattatcgaatttatgggttgcgcgaaacgcgtttggggcggatggttaaatcggcgtataatttaacgacgtcgttttcgggggaattttttcgtcgtttgggtcgtgggataagcgtttcgttttgaggtcgaacgggaatttttttttttggggggcgtaagttcggttagttatacgggtatgtaatttcgattaggtaatgttcggattttgttcggggggacgtttcggtttatgggtttgtttcggagggtcgggtataatcgggttcgttcgtgtttagagaagaatgttttttttttttggttatataaaattttcgggaggttttggttttttttttatacgtgcggcgttatataaa

SEQ ID NO: 33422 - DNA, 922 bp, Artificial Sequence
  chemically treated genomic DNA (Homo sapiens) CpG-island No: 33422
  unsure (497)
tttatataacgccgcacgtataaaaaaaaaaccaaaacctcccgaaaattttatataaccaaaaaaaaaaaacattcttctctaaacacgaacgaacccgattatacccgaccctccgaaacaaacccataaaccgaaacgtccccccgaacaaaatccgaacattacctaatcgaaattacatacccgtataactaaccgaacttacgccccccaaaaaaaaaaattcccgttcgacctcaaaacgaaacgcttatcccacgacccaaacgacgaaaaaattcccccgaaaacgacgtcgttaaattatacgccgatttaaccatccgccccaaacgcgtttcgcgcaacccataaattcgataattcgtttcgtacgaaaccgcgtaccgaaacgatttcaaaaccgatcataaaaataatattatcgactttctttctaacgctaatcgcgctcgcgacgtacccgaacgcgactctcgcgaataatataatanaaacgaacgccaaccactacgcttcgaaacgcgaacccgccattcaaatcaacgtttcgaacttaaaaaaccgcactaacctactccgactaaaactctatcccgccaacgacaaaaatttcatacgccccgacataaatctactaaccgaaaacaaaacgttccgacgcgtaacgatcgatacgccgaatacaaaaccaatatcgttatacataccgcgtaccgcaccctaaccgctacgcaatactattcctacattcgcgccgcgcgcaaaacaaattcgatttctaaaaaaacgacgtaaaactacgcaacaacgcccgaatcgatcgcgcgcgcccgcgtataaaaaataccgcgatcgatatcgataacgatatcgccgtaatcgatatcaaaacccaatatctccgtaacctcgataa

SEQ ID NO: 33423 - DNA, 922 bp, Artificial Sequence
  chemically treated genomic DNA (Homo sapiens) CpG-island No: 33423
  unsure (497)
tttgtgtggcgtcgtacgtataagaggagggttaaagtttttcgaaggttttgtataattaaaaagaaagggtatttttttttaaatacgggcgggttcggttatattcgatttttcggaataagtttatgagtcgaaacgttttttcgggtaaggttcggatattgtttggtcggaattgtatattcgtgtaattgatcgagtttacgttttttaaaagaaggggttttcgttcgattttaaaacggaacgtttgttttacggtttaggcggcgaaggggttttttcggggacggcgtcgttgaattatacgtcggtttaattattcgttttaggcgcgtttcgcgtagtttatgggttcggtggttcgtttcgtacggggtcgcgtgtcgaagcgattttaggatcggttataaaagtgatgttatcggttttttttttaacgttggtcgcgttcgcggcgtgttcgggcgcggttttcgcgggtggtgtgatgngggcggacgttagttattgcgtttcgggacgcggattcgttatttaagttaacgtttcggatttgaaagatcgtattggtttgtttcggttggagttttatttcgttaacgataaggattttatgcgtttcgatatggatttgttggtcgagggtaagacgtttcggcgcgtgacgatcgatgcgtcgagtgtagggttagtgtcgttgtgtatatcgcgtgtcgtattttggtcgttacgtagtgttgtttttgtattcgcgtcgcgcgtaggataaattcgatttttggaaagacggcgtggggttgcgtagtaacgttcggatcggtcgcgcgcgttcgcgtgtggaggatgtcgcgatcgatgtcggtagcggtgtcgtcgtggtcgatattaagatttaatattttcgtggtttcggtgg

SEQ ID NO: 33424 - DNA, 922 bp, Artificial Sequence
  chemically treated genomic DNA (Homo sapiens) CpG-island No: 33424
  unsure (426)
ccaccgaaaccacgaaaatattaaatcttaatatcgaccacgacgacaccgctaccgacatcgatcgcgacatcctccacacgcgaacgcgcgcgaccgatccgaacgttactacgcaaccccacgccgtctttccaaaaatcgaatttatcctacgcgcgacgcgaatacaaaaacaacactacgtaacgaccaaaatacgacacgcgatatacacaacgacactaaccctacactcgacgcatcgatcgtcacgcgccgaaacgtcttaccctcgaccaacaaatccatatcgaaacgcataaaatccttatcgttaacgaaataaaactccaaccgaaacaaaccaatacgatctttcaaatccgaaacgttaacttaaataacgaatccgcgtcccgaaacgcaataactaacgtccgcccncatcacaccacccgcgaaaaccgcgcccgaacacgccgcgaacgcgaccaacgttaaaaaaaaaaccgataacatcacttttataaccgatcctaaaatcgcttcgacacgcgaccccgtacgaaacgaaccaccgaacccataaactacgcgaaacgcgcctaaaacgaataattaaaccgacgtataattcaacgacgccgtccccgaaaaaaccccttcgccgcctaaaccgtaaaacaaacgttccgttttaaaatcgaacgaaaaccccttcttttaaaaaacgtaaactcgatcaattacacgaatatacaattccgaccaaacaatatccgaaccttacccgaaaaaacgtttcgactcataaacttattccgaaaaatcgaatataaccgaacccgcccgtatttaaaaaaaaataccctttctttttaattatacaaaaccttcgaaaaactttaaccctcctcttatacgtacgacgccacacaaa

SEQ ID NO: 33425 - DNA, 786 bp, Artificial Sequence
  chemically treated genomic DNA (Homo sapiens) CpG-island No: 33425
attcgaggacggagagaaggcgttggagttttgcgaggcgtaggatttgggcgagttgttgtcgttgagagggtaggggaagattatcgaggggtcgatgtattttgaggcggcggcgtttagattttgtaggtataagttggaggtggagtagacgttgtggtcgcgggcggggttcgggttgtcgttgtttttgcgcgtagtttggtaggaggttagtttttttgagacgagtttggcggcggtcgagaagtcgttttatatatagttttggatgatgatgtttttgatgaaggtttcgtcgttcgggtcgtagatgaaattttggtttattatgtttttttttagtagttcggttattatttatagttggtcggtcgtggagaagttttcgttatcgtcgtcgttgttttttcgaagggagaagggtgtgatcgtaacgtaggagggcgagtagagttcggagcggcggttaggggataggggcggggtgggtagtagttcgaattttttttagatattttcgttgggcgtcgggggttgtagttcgttttgttgttgttgttggtagaagttttttttttcgtcgtagtagaaatacggttgtatcgagtcgtagtcgaggttatagtttttgtggtgaagttaacgtaaggggtatcgtcgcgggaggttgttgttttttattattcgaaaaaaatttagcgtttaagtagttgtaaggagagttttttagagaagcgggttttggtagcggcggggaagtgtttttaaatgggtagaata

SEQ ID NO: 33426 - DNA, 786 bp, Artificial Sequence
  chemically treated genomic DNA (Homo sapiens) CpG-island No: 33426
tattctacccatttaaaaacacttccccgccgctaccaaaacccgcttctctaaaaaactctccttacaactacttaaacgctaaatttttttcgaataataaaaaacaacaacctcccgcgacgataccccttacgttaacttcaccacaaaaactataacctcgactacgactcgatacaaccgtatttctactacgacgaaaaaaaaaacttctaccaacaacaacaacaaaacgaactacaacccccgacgcccaacgaaaatatctaaaaaaaattcgaactactacccaccccgcccctatcccctaaccgccgctccgaactctactcgccctcctacgttacgatcacacccttctcccttcgaaaaaacaacgacgacgataacgaaaacttctccacgaccgaccaactataaataataaccgaactactaaaaaaaaacataataaaccaaaatttcatctacgacccgaacgacgaaaccttcatcaaaaacatcatcatccaaaactatatataaaacgacttctcgaccgccgccaaactcgtctcaaaaaaactaacctcctaccaaactacgcgcaaaaacaacgacaacccgaaccccgcccgcgaccacaacgtctactccacctccaacttatacctacaaaatctaaacgccgccgcctcaaaatacatcgacccctcgataatcttcccctaccctctcaacgacaacaactcgcccaaatcctacgcctcgcaaaactccaacgccttctctccgtcctcgaat

SEQ ID NO: 33427 - DNA, 786 bp, Artificial Sequence
  chemically treated genomic DNA (Homo sapiens) CpG-island No: 33427
tattttgtttatttggggatattttttcgtcgttgttaggattcgtttttttgaaaggttttttttgtagttgtttagacgttggatttttttcgggtagtggaaaatagtagtttttcgcgacgatgttttttacgttagttttattataggagttatgatttcgattacgattcggtgtagtcgtatttttattgcgacgaggaggagaatttttattagtagtaatagtagaacgagttgtagttttcggcgtttagcgaggatatttggaagaaattcgagttgttgtttatttcgtttttgttttttagtcgtcgtttcgggttttgttcgtttttttacgttgcggttatattttttttttttcggggagataacgacggcggtggcgggagtttttttacggtcgattagttgtagatggtgatcgagttgttgggaggagatatggtgaattagagttttatttgcgattcggacgacgagatttttattaaaaatattattatttaggattgtatgtggagcggtttttcggtcgtcgttaagttcgttttagagaagttggttttttattaggttgcgcgtaaagatagcggtagttcgaatttcgttcgcggttatagcgtttgttttatttttagtttgtatttgtaggatttgagcgtcgtcgttttagagtgtatcgatttttcggtggtttttttttatttttttaacgatagtagttcgtttaagttttgcgtttcgtaagattttagcgtttttttttcgttttcggat

SEQ ID NO: 33428 - DNA, 786 bp, Artificial Sequence
  chemically treated genomic DNA (Homo sapiens) CpG-island No: 33428
atccgaaaacgaaaaaaaaacgctaaaatcttacgaaacgcaaaacttaaacgaactactatcgttaaaaaaataaaaaaaaaccaccgaaaaatcgatacactctaaaacgacgacgctcaaatcctacaaatacaaactaaaaataaaacaaacgctataaccgcgaacgaaattcgaactaccgctatctttacgcgcaacctaataaaaaaccaacttctctaaaacgaacttaacgacgaccgaaaaaccgctccacatacaatcctaaataataatatttttaataaaaatctcgtcgtccgaatcgcaaataaaactctaattcaccatatctcctcccaacaactcgatcaccatctacaactaatcgaccgtaaaaaaactcccgccaccgccgtcgttatctccccgaaaaaaaaaaaatataaccgcaacgtaaaaaaacgaacaaaacccgaaacgacgactaaaaaacaaaaacgaaataaacaacaactcgaatttcttccaaatatcctcgctaaacgccgaaaactacaactcgttctactattactactaataaaaattctcctcctcgtcgcaataaaaatacgactacaccgaatcgtaatcgaaatcataactcctataataaaactaacgtaaaaaacatcgtcgcgaaaaactactattttccactacccgaaaaaaatccaacgtctaaacaactacaaaaaaaacctttcaaaaaaacgaatcctaacaacgacgaaaaaatatccccaaataaacaaaata

SEQ ID NO: 33429 - DNA, 559 bp, Artificial Sequence
  chemically treated genomic DNA (Homo sapiens) CpG-island No: 33429
gttttgttcgattgtgacggggtgttgtggaacggcgagcgcgtcgtgtcgggcgtttcggagttgttggagcggttggcgcgggtcggtaaggcgggtgtgtttgtgagtaataatagtcggcgcgcgcggttcgagttggttttgcgtttcgcgcgtttcggtttcggggggttgcgcgtcgagtagttttttagtttcgcgttgtgcgtcgcgcgtttgttgcgttagcgtttgttcgggttttcggacgcgtcgggcgtcgtgttcgtgttgggcggcgaggggttgcgcgtcgagttgcgcgtcgcggggttgcgtttgggtcgggattcgagcgcgggggacggcgcggtttcgcgcgtgcgcgtcgtgtttgtgggttacgacgagtatttttttttcgtaagttgagggagcgtgcgcgtatttgggcgattcgagtgttatttttggttatcgacgggatttttggtttcgttgagggaaggagtcggattttggtatcggagtttggtcgttgatggagatcgtttcgggacgttagttttgggggtgg

SEQ ID NO: 33430 - DNA, 559 bp, Artificial Sequence
  chemically treated genomic DNA (Homo sapiens) CpG-island No: 33430
ccacccccaaaactaacgtcccgaaacgatctccatcaacgaccaaactccgataccaaaatccgactccttccctcaacgaaaccaaaaatcccgtcgataaccaaaaataacactcgaatcgcccaaatacgcgcacgctccctcaacttacgaaaaaaaaatactcgtcgtaacccacaaacacgacgcgcacgcgcgaaaccgcgccgtcccccgcgctcgaatcccgacccaaacgcaaccccgcgacgcgcaactcgacgcgcaacccctcgccgcccaacacgaacacgacgcccgacgcgtccgaaaacccgaacaaacgctaacgcaacaaacgcgcgacgcacaacgcgaaactaaaaaactactcgacgcgcaaccccccgaaaccgaaacgcgcgaaacgcaaaaccaactcgaaccgcgcgcgccgactattattactcacaaacacacccgccttaccgacccgcgccaaccgctccaacaactccgaaacgcccgacacgacgcgctcgccgttccacaacaccccgtcacaatcgaacaaaac

SEQ ID NO: 33431 - DNA, 559 bp, Artificial Sequence
  chemically treated genomic DNA (Homo sapiens) CpG-island No: 33431
ttatttttagggttggcgtttcgaggcggtttttattaacggttaggtttcggtgttagggttcggtttttttttttaacggggttaagggtttcgtcggtggttagaggtagtattcgggtcgtttaggtgcgcgtacgtttttttagtttgcgaaggagaagtgttcgtcgtagtttataagtacggcgcgtacgcgcggggtcgcgtcgtttttcgcgttcgggtttcggtttaggcgtagtttcgcggcgcgtagttcggcgcgtagtttttcgtcgtttagtacgaatacggcgttcggcgcgttcggaggttcgggtaggcgttggcgtagtaggcgcgcggcgtatagcgcggagttgaagagttgttcggcgcgtagtttttcgaagtcgaggcgcgcgaagcgtagggttagttcgggtcgcgcgcgtcggttgttgttgtttataaatatattcgttttgtcggttcgcgttagtcgttttagtagtttcggggcgttcggtacggcgcgttcgtcgttttatagtatttcgttatagtcgaataggat

SEQ ID NO: 33432 - DNA, 559 bp, Artificial Sequence
  chemically treated genomic DNA (Homo sapiens) CpG-island No: 33432
atcctattcgactataacgaaatactataaaacgacgaacgcgccgtaccgaacgccccgaaactactaaaacgactaacgcgaaccgacaaaacgaatatatttataaacaacaacaaccgacgcgcgcgacccgaactaaccctacgcttcgcgcgcctcgacttcgaaaaactacgcgccgaacaactcttcaactccgcgctatacgccgcgcgcctactacgccaacgcctacccgaacctccgaacgcgccgaacgccgtattcgtactaaacgacgaaaaactacgcgccgaactacgcgccgcgaaactacgcctaaaccgaaacccgaacgcgaaaaacgacgcgaccccgcgcgtacgcgccgtacttataaactacgacgaacacttctccttcgcaaactaaaaaaacgtacgcgcacctaaacgacccgaatactacctctaaccaccgacgaaacccttaaccccgttaaaaaaaaaaaccgaaccctaacaccgaaacctaaccgttaataaaaaccgcctcgaaacgccaaccctaaaaataa

SEQ ID NO: 33433 - DNA, 535 bp, Artificial Sequence
  chemically treated genomic DNA (Homo sapiens) CpG-island No: 33433
cgggtatcgcggcgtttgggttaggggatagagggagtttgagcgtatcgaattatagtatatttcgttttatttttttcgacgttcgttagaaataaattacgtatagtttaatcgtttttttagaagtaggattattgtttttcgtgtaggggcgggagtagcggcgggttcgtttcggttttgcgtttatatttgttatttttaggcgttttcgtttttacgggtgtttgtagtgtttgcgtttagttttgtttgcgtaaggtaggaggtcgtaggaattttatcgttagcgttatcgttattttttaatgtgacgcggaattggggaagttaacgttgggattgtttcgtcgggagtgtaattattgagattgtagcgttaggtatagtcgcgacgttaacggttgcgttttcgttaagatttttttaaaggtttttatcgttacgttttaattttaagtttcgtggtcgacgtttttattttaacgcgaagattttatttttatcgttaagatttaggttttaaagttta

SEQ ID NO: 33434 - DNA, 535 bp, Artificial Sequence
  chemically treated genomic DNA (Homo sapiens) CpG-island No: 33434
taaactttaaaacctaaatcttaacgataaaaataaaatcttcgcgttaaaataaaaacgtcgaccacgaaacttaaaattaaaacgtaacgataaaaacctttaaaaaaatcttaacgaaaacgcaaccgttaacgtcgcgactatacctaacgctacaatctcaataattacactcccgacgaaacaatcccaacgttaacttccccaattccgcgtcacattaaaaaataacgataacgctaacgataaaattcctacgacctcctaccttacgcaaacaaaactaaacgcaaacactacaaacacccgtaaaaacgaaaacgcctaaaaataacaaatataaacgcaaaaccgaaacgaacccgccgctactcccgcccctacacgaaaaacaataatcctacttctaaaaaaacgattaaactatacgtaatttatttctaacgaacgtcgaaaaaaataaaacgaaatatactataattcgatacgctcaaactccctctatcccctaacccaaacgccgcgatacccg

SEQ ID NO: 33435 - DNA, 535 bp, Artificial Sequence
  chemically treated genomic DNA (Homo sapiens) CpG-island No: 33435
tgagttttagaatttgaattttagcgatagaaatgggattttcgcgttggaatgaggacgtcggttacggagtttggagttagaacgtggcgatggggatttttgggggagttttggcggggacgtaatcgttagcgtcgcggttgtgtttggcgttgtaattttaatggttgtattttcggcgaggtagttttagcgttggtttttttagtttcgcgttatattgaagggtggcggtggcgttggcgatggggtttttacggttttttgttttgcgtaagtagaattgggcgtaggtattataggtattcgtgggggcgaggacgtttagaggtgataggtgtggacgtagagtcggggcgaattcgtcgttgttttcgtttttgtacgaggggtagtggttttgtttttgggagggcggttgaattgtgcgtggtttgtttttggcgggcgtcgggggagatggagcgggatgtgttgtgattcggtgcgtttaggttttttttgttttttaatttagacgtcgcgatgttcg

SEQ ID NO: 33436 - DNA, 535 bp, Artificial Sequence
  chemically treated genomic DNA (Homo sapiens) CpG-island No: 33436
cgaacatcgcgacgtctaaattaaaaaacaaaaaaaacctaaacgcaccgaatcacaacacatcccgctccatctcccccgacgcccgccaaaaacaaaccacgcacaattcaaccgccctcccaaaaacaaaaccactacccctcgtacaaaaacgaaaacaacgacgaattcgccccgactctacgtccacacctatcacctctaaacgtcctcgcccccacgaatacctataatacctacgcccaattctacttacgcaaaacaaaaaaccgtaaaaaccccatcgccaacgccaccgccacccttcaatataacgcgaaactaaaaaaaccaacgctaaaactacctcgccgaaaatacaaccattaaaattacaacgccaaacacaaccgcgacgctaacgattacgtccccgccaaaactcccccaaaaatccccatcgccacgttctaactccaaactccgtaaccgacgtcctcattccaacgcgaaaatcccatttctatcgctaaaattcaaattctaaaactca

SEQ ID NO: 33437 - DNA, 583 bp, Artificial Sequence
  chemically treated genomic DNA (Homo sapiens) CpG-island No: 33437
attcgggattcgtagtcggtaggttaggagtttgtagcgttgaggatttcgggcgtttgtcgagttttttttagatgggtcgtcgtttatatttgcgttaggcggcggttcgagtgaggttagcggggaggggtcgcggtcgtcgggaaggggcgttgacggtagtcggtttcgcgggatttcgttcgtttgttttttcggaaatttggggcggggacggtggggatcggagtcggggcgcggaggtattggtcgtaggatggggcgtcggcgcggggtcgtttttgtattatttttggagatttgttgacgagaatacgcgtgtagggggtaaagggagggatagagagattgagagaagcgtacgattaaatataggcgtacgagagagttagagggcgagataaagatcgagatttatacggagacgacggagaaatatagggtagatatatacgaaagggatacggtcgtagaattaatgtagaacgtagacgggcgagagtagagtaagagagagagagagagaaagagagagagagagagaatggggggtaagtgggagcggagttttatttttttt

SEQ ID NO: 33438 - DNA, 583 bp, Artificial Sequence
  chemically treated genomic DNA (Homo sapiens) CpG-island No: 33438
aaaaaaaataaaactccgctcccacttaccccccattctctctctctctctctttctctctctctctctcttactctactctcgcccgtctacgttctacattaattctacgaccgtatccctttcgtatatatctaccctatatttctccgtcgtctccgtataaatctcgatctttatctcgccctctaactctctcgtacgcctatatttaatcgtacgcttctctcaatctctctatccctccctttaccccctacacgcgtattctcgtcaacaaatctccaaaaataatacaaaaacgaccccgcgccgacgccccatcctacgaccaatacctccgcgccccgactccgatccccaccgtccccgccccaaatttccgaaaaaacaaacgaacgaaatcccgcgaaaccgactaccgtcaacgccccttcccgacgaccgcgacccctccccgctaacctcactcgaaccgccgcctaacgcaaatataaacgacgacccatctaaaaaaaactcgacaaacgcccgaaatcctcaacgctacaaactcctaacctaccgactacgaatcccgaat

SEQ ID NO: 33439 - DNA, 583 bp, Artificial Sequence
  chemically treated genomic DNA (Homo sapiens) CpG-island No: 33439
aaaaaaagtagagtttcgtttttatttgttttttatttttttttttttttttttttttttttttttttttttgttttattttcgttcgtttgcgttttatattggttttgcggtcgtgtttttttcgtgtgtgtttgttttgtgttttttcgtcgttttcgtgtggatttcggtttttgtttcgttttttagttttttcgtgcgtttgtgtttaatcgtgcgttttttttaatttttttgtttttttttttgttttttatacgcgtgttttcgttaatagatttttagaggtggtgtagaaacgatttcgcgtcggcgttttattttgcggttagtgttttcgcgtttcggtttcggtttttatcgttttcgttttagattttcggaggagtaggcgggcggggtttcgcggggtcggttgtcgttagcgttttttttcggcggtcgcgattttttttcgttgattttattcgagtcgtcgtttggcgtagatataagcggcggtttatttgaagagggttcggtaggcgttcggggtttttagcgttgtagatttttgatttgtcgattgcggatttcgagt

SEQ ID NO: 33440 - DNA, 583 bp, Artificial Sequence
  chemically treated genomic DNA (Homo sapiens) CpG-island No: 33440
actcgaaatccgcaatcgacaaatcaaaaatctacaacgctaaaaaccccgaacgcctaccgaaccctcttcaaataaaccgccgcttatatctacgccaaacgacgactcgaataaaatcaacgaaaaaaaatcgcgaccgccgaaaaaaaacgctaacgacaaccgaccccgcgaaaccccgcccgcctactcctccgaaaatctaaaacgaaaacgataaaaaccgaaaccgaaacgcgaaaacactaaccgcaaaataaaacgccgacgcgaaatcgtttctacaccacctctaaaaatctattaacgaaaacacgcgtataaaaaacaaaaaaaaaaacaaaaaaattaaaaaaaacgcacgattaaacacaaacgcacgaaaaaactaaaaaacgaaacaaaaaccgaaatccacacgaaaacgacgaaaaaacacaaaacaaacacacacgaaaaaaacacgaccgcaaaaccaatataaaacgcaaacgaacgaaaataaaacaaaaaaaaaaaaaaaaaaaaaaaaaaaaaaaaaaaaataaaaaacaaataaaaacgaaactctacttttttt

SEQ ID NO: 33441 - DNA, 711 bp, Artificial Sequence
  chemically treated genomic DNA (Homo sapiens) CpG-island No: 33441
tttttttggtagcggtggatggggtatagcgcgatttcgtagcggcggcggcggttgtttttattatcgggaggatgttcgggcggatagcgtaggtaattttcgtcgtttcgtagttttcgattggattaaaggatttcgaatatatagttttaggtaaggaaatttaggtgtgtagtattgttcgattcgatttaattcgttttcggtattagcgtttttggttaacgaggtatttaagtaaagaaagatttcgtcgtagtcgtcgtcgtcgcgcgaaagcggcgtttaggaggatgttgttattcgattttttttacgtcgggcgttcgtaacgcgttcggattagtttttgcgcggtttttgttagtcggcgttcggttggtgcgcgtcgtcgtttgtcgtcgcggtttttttttttcgtcgcgtagtttttttttttcgtcggtttcgttttcgtttttaacgtcgagtcggtttttatcgtcgttgcgtttcgggggttggagacgcgattcgttttatcgcgacgcgcgggggttgttgtttttgtttcgaaggtttagttttgcgcgtaaagcgtcgggatgcgaacgcgggatttggagttcgtcggtgtcgagagttgttagagagttggattttgcgtgtagttgtcggattcggttttatgtttttgtttttagaaagagttggtgatgaagtttgggt

SEQ ID NO: 33442 - DNA, 711 bp, Artificial Sequence
  chemically treated genomic DNA (Homo sapiens) CpG-island No: 33442
acccaaacttcatcaccaactctttctaaaaacaaaaacataaaaccgaatccgacaactacacgcaaaatccaactctctaacaactctcgacaccgacgaactccaaatcccgcgttcgcatcccgacgctttacgcgcaaaactaaaccttcgaaacaaaaacaacaacccccgcgcgtcgcgataaaacgaatcgcgtctccaacccccgaaacgcaacgacgataaaaaccgactcgacgttaaaaacgaaaacgaaaccgacgaaaaaaaaaaactacgcgacgaaaaaaaaaaaccgcgacgacaaacgacgacgcgcaccaaccgaacgccgactaacaaaaaccgcgcaaaaactaatccgaacgcgttacgaacgcccgacgtaaaaaaaatcgaataacaacatcctcctaaacgccgctttcgcgcgacgacgacgactacgacgaaatctttctttacttaaatacctcgttaaccaaaaacgctaataccgaaaacgaattaaatcgaatcgaacaatactacacacctaaatttccttacctaaaactatatattcgaaatcctttaatccaatcgaaaactacgaaacgacgaaaattacctacgctatccgcccgaacatcctcccgataataaaaacaaccgccgccgccgctacgaaatcgcgctataccccatccaccgctaccaaaaaaa

SEQ ID NO: 33443 - DNA, 711 bp, Artificial Sequence
  chemically treated genomic DNA (Homo sapiens) CpG-island No: 33443
gtttaaattttattattaattttttttgagagtaaaaatatggggtcgagttcggtagttgtacgtagaatttaattttttggtagttttcggtatcgacgagttttagatttcgcgttcgtatttcggcgttttgcgcgtagagttaagttttcggaataagaataatagttttcgcgcgtcgcggtaaagcgggtcgcgtttttagttttcgaggcgtagcgacggtgggagtcggttcggcgttgggggcgggggcggggtcggcgaagggggagggttgcgcggcggaggggaggagtcgcggcgatagacggcggcgcgtattaatcgggcgtcggttggtaggagtcgcgtagaggttggttcgagcgcgttgcgggcgttcggcgtaaggggagtcgggtagtagtatttttttgggcgtcgttttcgcgcggcggcggcggttgcggcggggtttttttttgtttaaatatttcgttggttagaagcgttggtatcgggggcgggttgggtcgggtcgggtagtgttgtatatttgggtttttttgtttagagttgtgtgttcggggttttttggtttagtcggaggttgcggagcggcgggggttgtttgcgttgttcgttcgggtattttttcggtgatggaagtagtcgtcgtcgtcgttgcggggtcgcgttgtgttttatttatcgttgttagagagg

SEQ ID NO: 33444 - DNA, 711 bp, Artificial Sequence
  chemically treated genomic DNA (Homo sapiens) CpG-island No: 33444
cctctctaacaacgataaataaaacacaacgcgaccccgcaacgacgacgacgactacttccatcaccgaaaaaatacccgaacgaacaacgcaaacaacccccgccgctccgcaacctccgactaaaccaaaaaaccccgaacacacaactctaaacaaaaaaacccaaatatacaacactacccgacccgacccaacccgcccccgataccaacgcttctaaccaacgaaatatttaaacaaaaaaaaaccccgccgcaaccgccgccgccgcgcgaaaacgacgcccaaaaaaatactactacccgactccccttacgccgaacgcccgcaacgcgctcgaaccaacctctacgcgactcctaccaaccgacgcccgattaatacgcgccgccgtctatcgccgcgactcctcccctccgccgcgcaaccctcccccttcgccgaccccgcccccgcccccaacgccgaaccgactcccaccgtcgctacgcctcgaaaactaaaaacgcgacccgctttaccgcgacgcgcgaaaactattattcttattccgaaaacttaactctacgcgcaaaacgccgaaatacgaacgcgaaatctaaaactcgtcgataccgaaaactaccaaaaaattaaattctacgtacaactaccgaactcgaccccatatttttactctcaaaaaaaattaataataaaatttaaac

SEQ ID NO: 33445 - DNA, 815 bp, Artificial Sequence
  chemically treated genomic DNA (Homo sapiens) CpG-island No: 33445
  unsure (594, 757)
tcggttatacgtaagcggcggcgggtgtggttggtgtgattaagatggtgatggcgatgcggtacgggtagttgttacgttcgttgtacgtggaatcgtcgtcgtcggaggtggattggtcggcggggacggtttaattttttacggagaatacgttttggtttaggagtggtcgtgttcgtcgggtgggggtgtcgtcgttcgggattagtggtattaacgcgtacgttattttcgaatagttttcgggagtgtcgagttagtttgcggggtcgggttcgggttttgtcgtggatgtttcggtggtgtcgtggatggtgtcgggtaaaatattcgaagcgttattcgcgtaggtaacggcgttgatgatttatttggacgagcgatttgatgttttttcgttggatgttgggtattcgttggcgttgatacggtcggcgttggatgagcgagcggtggtgttggggtcggatcgtgaaacgttgttgtgcggggtgaaagcgttgtttgtcggatatgaggtttttgggttggtgatcggatttgttggggtttggggtcgtatcgtatttgtgtttttcggttcgtagattncggattggattggatacgcgttttatgtcgcgtttttttttgtttcgtgtggcgtttcgttgtgtttgttggttgtgttgtgggcggttttttgttgttgtgttgtgtcgtgtgcgcgtcgcggtttatttcgattttttttttttcgtggcgtcgcgcggtnttcggtgtgcgttttgcggttttttgggtcgtcgttgttgttcgtgcgtgtgtggcgt

SEQ ID NO: 33446 - DNA, 815 bp, Artificial Sequence
  chemically treated genomic DNA (Homo sapiens) CpG-island No: 33446
  unsure (59, 222)
acgccacacacgcacgaacaacaacgacgacccaaaaaaccgcaaaacgcacaccgaanaccgcgcgacgccacgaaaaaaaaaaaatcgaaataaaccgcgacgcgcacacgacacaacacaacaacaaaaaaccgcccacaacacaaccaacaaacacaacgaaacgccacacgaaacaaaaaaaaacgcgacataaaacgcgtatccaatccaatccgnaatctacgaaccgaaaaacacaaatacgatacgaccccaaaccccaacaaatccgatcaccaacccaaaaacctcatatccgacaaacaacgctttcaccccgcacaacaacgtttcacgatccgaccccaacaccaccgctcgctcatccaacgccgaccgtatcaacgccaacgaatacccaacatccaacgaaaaaacatcaaatcgctcgtccaaataaatcatcaacgccgttacctacgcgaataacgcttcgaatattttacccgacaccatccacgacaccaccgaaacatccacgacaaaacccgaacccgaccccgcaaactaactcgacactcccgaaaactattcgaaaataacgtacgcgttaataccactaatcccgaacgacgacacccccacccgacgaacacgaccactcctaaaccaaaacgtattctccgtaaaaaattaaaccgtccccgccgaccaatccacctccgacgacgacgattccacgtacaacgaacgtaacaactacccgtaccgcatcgccatcaccatcttaatcacaccaaccacacccgccgccgcttacgtataaccga

SEQ ID NO: 33447 - DNA, 815 bp, Artificial Sequence
  chemically treated genomic DNA (Homo sapiens) CpG-island No: 33447
  unsure (59, 222)
gcgttatatacgtacgagtagtagcgacgatttaggaggtcgtagagcgtatatcgaanatcgcgcgacgttacgaagagaaaaaaatcgaggtgaatcgcgacgcgtatacgatatagtataataatagaagatcgtttatagtataattaatagatataacgaagcgttatacgggataaaaaaaagcgcggtataaagcgcgtgtttagtttaattcgngatttgcggatcgaaaaatataaatgcgatgcggttttaggttttaatagattcggttattaatttagaagttttatgttcggtagatagcgtttttatttcgtataataacgttttacggttcgattttagtattatcgttcgtttatttagcgtcgatcgtgttaacgttagcgagtatttaatatttagcgaggagatattaggtcgttcgtttagataggttattaacgtcgttgtttgcgcggatagcgtttcgggtgttttgttcgatattatttacggtattatcggaatatttacgatagaattcgaattcggtttcgtagattgattcggtattttcgggggttgttcgaggatgacgtgcgcgttagtattattgatttcgaacgacgatatttttattcgacgaatacgattatttttgggttagggcgtgtttttcgtaaggagttgaatcgttttcgtcgattaatttattttcggcgacggcgattttacgtgtaacgagcgtggtagttgttcgtgtcgtatcgttattattattttgattatattagttatattcgtcgtcgtttgcgtatgatcga

SEQ ID NO: 33448 - DNA, 815 bp, Artificial Sequence
  chemically treated genomic DNA (Homo sapiens) CpG-island No: 33448
  unsure (594, 757)
tcgatcatacgcaaacgacgacgaatataactaatataatcaaaataataataacgatacgacacgaacaactaccacgctcgttacacgtaaaatcgccgtcgccgaaaataaattaatcgacgaaaacgattcaactccttacgaaaaacacgccctaacccaaaaataatcgtattcgtcgaataaaaatatcgtcgttcgaaatcaataatactaacgcgcacgtcatcctcgaacaacccccgaaaataccgaatcaatctacgaaaccgaattcgaattctatcgtaaatattccgataataccgtaaataatatcgaacaaaacacccgaaacgctatccgcgcaaacaacgacgttaataacctatctaaacgaacgacctaatatctcctcgctaaatattaaatactcgctaacgttaacacgatcgacgctaaataaacgaacgataatactaaaatcgaaccgtaaaacgttattatacgaaataaaaacgctatctaccgaacataaaacttctaaattaataaccgaatctattaaaacctaaaaccgcatcgcatttatatttttcgatccgcaaatcncgaattaaactaaacacgcgctttataccgcgcttttttttatcccgtataacgcttcgttatatctattaattatactataaacgatcttctattattatactatatcgtatacgcgtcgcgattcacctcgatttttttctcttcgtaacgtcgcgcgatnttcgatatacgctctacgacctcctaaatcgtcgctactactcgtacgtatataacgc

SEQ ID NO: 33449 - DNA, 527 bp, Artificial Sequence
  chemically treated genomic DNA (Homo sapiens) CpG-island No: 33449
  unsure (310, 404)
gttaggattttagtttcggtaggtgagcggtgtaaaatacgtatttagttgtttttagtttttttcgttttcgttgagttggttgtttttatttcgtattacggtattcgagtttgtgagttttcgatttcggttttagtcgtagtcgttaataattttataataaataagaggataggattgagcgttcgcgtttcggagcgtattggttgggggtaattttttattttcggcgcgtcgttcgttgtttcgattcgagagtatcgggagagtcgagggaagggaaggcggcgaggggaaggtaggcggngatggagggaggtacggcgcggcgcggagcgaggaggtgggttgtaggggacgtcgagaagcggtggggttggcgtaaagggcgggcgttcggngcgcgcgttattttcgttttgttttcgtagtggtagtatacggtttataggtatttgagcgttcgttagagtaagatgatgaagaggttttcgaagaaagttattatgcgaggaggtaggaaa

SEQ ID NO: 33450 - DNA, 527 bp, Artificial Sequence
  chemically treated genomic DNA (Homo sapiens) CpG-island No: 33450
  unsure (124, 218)
tttcctacctcctcgcataataactttcttcgaaaacctcttcatcatcttactctaacgaacgctcaaatacctataaaccgtatactaccactacgaaaacaaaacgaaaataacgcgcgcnccgaacgcccgccctttacgccaaccccaccgcttctcgacgtcccctacaacccacctcctcgctccgcgccgcgccgtacctccctccatcnccgcctaccttcccctcgccgccttcccttccctcgactctcccgatactctcgaatcgaaacaacgaacgacgcgccgaaaataaaaaattacccccaaccaatacgctccgaaacgcgaacgctcaatcctatcctcttatttattataaaattattaacgactacgactaaaaccgaaatcgaaaactcacaaactcgaataccgtaatacgaaataaaaacaaccaactcaacgaaaacgaaaaaaactaaaaacaactaaatacgtattttacaccgctcacctaccgaaactaaaatcctaac

SEQ ID NO: 33451 - DNA, 527 bp, Artificial Sequence
  chemically treated genomic DNA (Homo sapiens) CpG-island No: 33451
  unsure (124, 218)
ttttttgttttttcgtatggtgatttttttcgggggtttttttattattttgttttggcggacgtttaagtatttgtggatcgtgtgttgttattgcgggggtaagacgaaggtaacgcgcgtntcgggcgttcgttttttgcgttagttttatcgtttttcggcgttttttgtagtttattttttcgtttcgcgtcgcgtcgtgtttttttttattntcgtttgtttttttttcgtcgtttttttttttttcggttttttcggtgttttcggatcggggtagcgggcggcgcgtcgggggtgaggagttgtttttagttagtgcgtttcgggacgcggacgtttaattttgtttttttgtttattgtagggttgttggcggttgcggttggggtcggggtcggggatttataggttcgggtgtcgtggtgcggggtggggatagttaatttagcggggacggaggaagttgggggtagttgggtgcgtgttttgtatcgtttatttgtcggggttaaaattttggt

SEQ ID NO: 33452 - DNA, 527 bp, Artificial Sequence
  chemically treated genomic DNA (Homo sapiens) CpG-island No: 33452
  unsure (310, 404)
accaaaattttaaccccgacaaataaacgatacaaaacacgcacccaactacccccaacttcctccgtccccgctaaattaactatccccaccccgcaccacgacacccgaacctataaatccccgaccccgaccccaaccgcaaccgccaacaaccctacaataaacaaaaaaacaaaattaaacgtccgcgtcccgaaacgcactaactaaaaacaactcctcacccccgacgcgccgcccgctaccccgatccgaaaacaccgaaaaaaccgaaaaaaaaaaaaacgacgaaaaaaaaacaaacganaataaaaaaaaacacgacgcgacgcgaaacgaaaaaataaactacaaaaaacgccgaaaaacgataaaactaacgcaaaaaacgaacgcccganacgcgcgttaccttcgtcttacccccgcaataacaacacacgatccacaaatacttaaacgtccgccaaaacaaaataataaaaaaacccccgaaaaaaatcaccatacgaaaaaacaaaaaa

SEQ ID NO: 33453 - DNA, 807 bp, Artificial Sequence
  chemically treated genomic DNA (Homo sapiens) CpG-island No: 33453
  unsure (762)
tatatgcgttggtttcggttgtcgtacggtatttttatggttatcgggatgatgagcgtatttattttgggttcgtggatcgaggacgaggaggaagaggaggaggaagaagaagaagaggaagaggaggaggaggaggaggaggacgcgtttaggttgagatggttcgcgtggatattgttatttattttaagattgttgttttcgtcgtcgtcgtcgtcgtcgttgttgtcgtcgtcgtcgtcgttattatttgttatagttagtaacgggtagtcggcgtaggggttcgggggagtttttttcgtcgttagcgttattttaaatatttattaatagttatattgttgttattgttgtcgtcgtcgtcgtcgtcgcggagcgcgggaggggggcggggaggcgtttgggttcggggcgttgtgcgcgatttggcggggtgcgcgagatatatatagcgagtcgtcgtcgttcgttcgggggggagggggatggagtgcgcgggtagtttttttttttcggttcgcgttttattcgtttcgggttgcgttggtttcgagcgtcgagagttagggggcgtcgcgggtcgttcgcgttcggggtttgcgtcgttttcgggttcgtttcggtttcgcgcgcggtttcgggtgttttttgcgtcgcgtttttcgtcgtgcgttacgggtgtgcgttgcgttcggtcggggattttttttttcggggcgtttttcgcgttgttttcggttcgtttttttttttttngggggtatttcggtgttttggggtgtgggttttttttgttcgggt

SEQ ID NO: 33454 - DNA, 807 bp, Artificial Sequence
  chemically treated genomic DNA (Homo sapiens) CpG-island No: 33454
  unsure (46)
acccgaacaaaaaaaacccacaccccaaaacaccgaaatacccccnaaaaaaaaaaaaacgaaccgaaaacaacgcgaaaaacgccccgaaaaaaaaaatccccgaccgaacgcaacgcacacccgtaacgcacgacgaaaaacgcgacgcaaaaaacacccgaaaccgcgcgcgaaaccgaaacgaacccgaaaacgacgcaaaccccgaacgcgaacgacccgcgacgccccctaactctcgacgctcgaaaccaacgcaacccgaaacgaataaaacgcgaaccgaaaaaaaaaaactacccgcgcactccatccccctcccccccgaacgaacgacgacgactcgctatatatatctcgcgcaccccgccaaatcgcgcacaacgccccgaacccaaacgcctccccgcccccctcccgcgctccgcgacgacgacgacgacgacaacaataacaacaatataactattaataaatatttaaaataacgctaacgacgaaaaaaactcccccgaacccctacgccgactacccgttactaactataacaaataataacgacgacgacgacgacaacaacgacgacgacgacgacgacgaaaacaacaatcttaaaataaataacaatatccacgcgaaccatctcaacctaaacgcgtcctcctcctcctcctcctcctcttcctcttcttcttcttcctcctcctcttcctcctcgtcctcgatccacgaacccaaaataaatacgctcatcatcccgataaccataaaaataccgtacgacaaccgaaaccaacgcatata

SEQ ID NO: 33455 - DNA, 807 bp, Artificial Sequence
  chemically treated genomic DNA (Homo sapiens) CpG-island No: 33455
  unsure (46)
gttcgggtagagggggtttatattttaaaatatcgaggtgtttttnagaaaggggagagcgggtcgagaatagcgcggaaggcgtttcggggaagggggttttcggtcgagcgtagcgtatattcgtggcgtacggcggggggcgcggcgtagaggatattcgggatcgcgcgcggagtcggggcgggttcgggggcggcgtagatttcgggcgcgggcggttcgcggcgttttttggttttcggcgttcggggttagcgtagttcggggcgagtggggcgcgggtcggggagggggagttgttcgcgtattttatttttttttttttcgggcgggcggcggcggttcgttgtatatatttcgcgtatttcgttaggtcgcgtatagcgtttcgagtttaggcgttttttcgtttttttttcgcgtttcgcggcggcggcggcggcggtagtagtagtagtaatatggttgttgatgggtgtttggggtggcgttggcggcgggaggagttttttcgagtttttgcgtcggttgttcgttgttagttatggtaaatggtggcggcggcggcggcggtagtagcggcggcggcggcggcggcggaggtagtagttttagaatgagtagtaatatttacgcgaattattttagtttagacgcgttttttttttttttttttttttttttttttttttttttttttttttttttttttttttcgttttcggtttacgagtttaagatggatgcgtttattatttcggtgattatggaggtgtcgtgcgatagtcggggttaacgtatgtg

SEQ ID NO: 33456 - DNA, 807 bp, Artificial Sequence
  chemically treated genomic DNA (Homo sapiens) CpG-island No: 33456
  unsure (762)
cacatacgttaaccccgactatcgcacgacacctccataatcaccgaaataataaacgcatccatcttaaactcgtaaaccgaaaacgaaaaaaaaaaaaaaaaaaaaaaaaaaaaaaaaaaaaaaaaaaaaaaaaaaaaaaaaaacgcgtctaaactaaaataattcgcgtaaatattactactcattctaaaactactacctccgccgccgccgccgccgccgctactaccgccgccgccgccgccaccatttaccataactaacaacgaacaaccgacgcaaaaactcgaaaaaactcctcccgccgccaacgccaccccaaacacccatcaacaaccatattactactactactaccgccgccgccgccgccgcgaaacgcgaaaaaaaaacgaaaaaacgcctaaactcgaaacgctatacgcgacctaacgaaatacgcgaaatatatacaacgaaccgccgccgcccgcccgaaaaaaaaaaaaataaaatacgcgaacaactccccctccccgacccgcgccccactcgccccgaactacgctaaccccgaacgccgaaaaccaaaaaacgccgcgaaccgcccgcgcccgaaatctacgccgcccccgaacccgccccgactccgcgcgcgatcccgaatatcctctacgccgcgccccccgccgtacgccacgaatatacgctacgctcgaccgaaaacccccttccccgaaacgccttccgcgctattctcgacccgctctcccctttctnaaaaacacctcgatattttaaaatataaaccccctctacccgaac

SEQ ID NO: 33457 - DNA, 564 bp, Artificial Sequence
  chemically treated genomic DNA (Homo sapiens) CpG-island No: 33457
cgttgttcgttgcggcggttttgttggttcgattttgttttttttcgtttcgcggttttcggtgttttttttcggtgtttatttcggtgatattttcgcgcgtaaagtcgcgtttttcgaggtcggttttttttttttttatttttttttttttgcgtttttttttcgttatattcgtttttttatttacggtagcgttttttcgttatagttcgatttttttttttttttttttcgacggcgatacgttttttcgcgttttcgtttgcgttcgtttggggtttttttttttcgcgttttttttttcgtgttattcgcgttttatcgtacgtcggtcgttcggtcggcgttttttttcggatcgacgatgggagttttgttattgttcgtattttagttttcgttttttagtttttttttttttttttatatttgcgcgcgtatttttatttcgttcgttttttttttttttttttttcgaattagcgggcggtcgtcgatttttagttttttttaacgttaacgtttgtcgatttatcggtcgtattatatttcggtagtatt

SEQ ID NO: 33458 - DNA, 564 bp, Artificial Sequence
  chemically treated genomic DNA (Homo sapiens) CpG-island No: 33458
aatactaccgaaatataatacgaccgataaatcgacaaacgttaacgttaaaaaaaactaaaaatcgacgaccgcccgctaattcgaaaaaaaaaaaaaaaaaaaacgaacgaaataaaaatacgcgcgcaaatataaaaaaaaaaaaaaaaactaaaaaacgaaaactaaaatacgaacaataacaaaactcccatcgtcgatccgaaaaaaaacgccgaccgaacgaccgacgtacgataaaacgcgaataacacgaaaaaaaaaacgcgaaaaaaaaaaaccccaaacgaacgcaaacgaaaacgcgaaaaaacgtatcgccgtcgaaaaaaaaaaaaaaaaaaatcgaactataacgaaaaaacgctaccgtaaataaaaaaacgaatataacgaaaaaaaaacgcaaaaaaaaaaaaataaaaaaaaaaaaaaccgacctcgaaaaacgcgactttacgcgcgaaaatatcaccgaaataaacaccgaaaaaaaacaccgaaaaccgcgaaacgaaaaaaaacaaaatcgaaccaacaaaaccgccgcaacgaacaacg

SEQ ID NO: 33459 - DNA, 564 bp, Artificial Sequence
  chemically treated genomic DNA (Homo sapiens) CpG-island No: 33459
ggtattgtcggaatataatgcggtcgataaatcggtagacgttggcgttggagggggttggaagtcggcggtcgttcgttggttcgaaaaggggaaggggggggggcgggcgaggtgggaatacgcgcgtagatataagaggagaaggaggaattagggggcgggagttaaagtgcggataataataaaatttttatcgtcgattcgggaggaagcgtcggtcggacggtcgacgtgcgatgggacgcgggtgatacgggggggagagcgcgaggggagggggttttagacggacgtaaacgggggcgcggggggacgtatcgtcgtcgggaaagaagggaagaggggtcgaattgtgacggggaggcgttgtcgtagatagaggggcggatataacggggggaaaacgtaaaagagggggagtgggggggggggaggtcggtttcggggagcgcgattttgcgcgcggaaatattatcgaggtggatatcggggggggatatcgggggtcgcggggcgaaaaggggtagagtcgggttagtagggtcgtcgtagcgggtagcg

SEQ ID NO: 33460 - DNA, 564 bp, Artificial Sequence
  chemically treated genomic DNA (Homo sapiens) CpG-island No: 33460
cgctacccgctacgacgaccctactaacccgactctaccccttttcgccccgcgacccccgatatccccccccgatatccacctcgataatatttccgcgcgcaaaatcgcgctccccgaaaccgacctcccccccccccactccccctcttttacgttttccccccgttatatccgcccctctatctacgacaacgcctccccgtcacaattcgacccctcttcccttctttcccgacgacgatacgtccccccgcgcccccgtttacgtccgtctaaaaccccctcccctcgcgctctcccccccgtatcacccgcgtcccatcgcacgtcgaccgtccgaccgacgcttcctcccgaatcgacgataaaaattttattattatccgcactttaactcccgccccctaattcctccttctcctcttatatctacgcgcgtattcccacctcgcccgccccccccccttccccttttcgaaccaacgaacgaccgccgacttccaaccccctccaacgccaacgtctaccgatttatcgaccgcattatattccgacaatacc

SEQ ID NO: 33461 - DNA, 510 bp, Artificial Sequence
  chemically treated genomic DNA (Homo sapiens) CpG-island No: 33461
agtatgatcgtatggtagtagttgatagttttatttttgtatttgttattttattttttttcggttttgttatttgttcgtcgtatggatttcgggtttttttttatgcgattcgtcgttcgagttttattgcgagtatatatgatatcggtttcgttgcgcgtttttttagtcgtatcgtcggttcggtatacggttttttatagtggtacggggtattgtgcggcggttggttcgggaagacggcgttcgtagttgggatgggtcgttttatatttaaatttcgtcgttacgtgtcgttattttgttttattttgtcggttattagtcggttattttttatattcgttattttttttttcgcgcggtttcgatatttcgtttattcgttttttttttcgtttattttgttttgcgattgtacgttttcgtttataatagggcgagtttattagggtcgttattacgggagaaaatggtcgtttagaatattattatataagatatcgt

SEQ ID NO: 33462 - DNA, 510 bp, Artificial Sequence
  chemically treated genomic DNA (Homo sapiens) CpG-island No: 33462
acgatatcttatataataatattctaaacgaccattttctcccgtaataacgaccctaataaactcgccctattataaacgaaaacgtacaatcgcaaaacaaaataaacgaaaaaaaaaacgaataaacgaaatatcgaaaccgcgcgaaaaaaaaaataacgaatataaaaaataaccgactaataaccgacaaaataaaacaaaataacgacacgtaacgacgaaatttaaatataaaacgacccatcccaactacgaacgccgtcttcccgaaccaaccgccgcacaataccccgtaccactataaaaaaccgtataccgaaccgacgatacgactaaaaaaacgcgcaacgaaaccgatatcatatatactcgcaataaaactcgaacgacgaatcgcataaaaaaaaacccgaaatccatacgacgaacaaataacaaaaccgaaaaaaaataaaataacaaatacaaaaataaaactatcaactactaccatacgatcatact

SEQ ID NO: 33463 - DNA, 510 bp, Artificial Sequence
  chemically treated genomic DNA (Homo sapiens) CpG-island No: 33463
gcgatgttttatgtggtaatattttaggcggttattttttttcgtgatgacggttttgatgggttcgttttattatgggcggggacgtgtagtcgtaaaataggataaacggaggagaaggcggatggacggaatatcggggtcgcgcgaaaaggggaataacgggtgtaaaaagtggtcggttgatgatcggtagagtaaaataaggtggcggtacgtagcggcgagatttggatgtagagcggtttattttaattgcggacgtcgttttttcggattagtcgtcgtatagtgtttcgtattattgtgagagatcgtatatcgagtcggcggtgcggttggaagggcgcgtagcgggatcgatattatatatattcgtagtagggttcgggcggcggatcgtatagaaggaagttcgagatttatgcggcggataggtaataaaatcgggaagaggtgggatagtaggtataagggtagagttattaattgttgttatgcggttatatt

SEQ ID NO: 33464 - DNA, 510 bp, Artificial Sequence
  chemically treated genomic DNA (Homo sapiens) CpG-island No: 33464
aatataaccgcataacaacaattaataactctacccttatacctactatcccacctcttcccgattttattacctatccgccgcataaatctcgaacttccttctatacgatccgccgcccgaaccctactacgaatatatataatatcgatcccgctacgcgcccttccaaccgcaccgccgactcgatatacgatctctcacaataatacgaaacactatacgacgactaatccgaaaaaacgacgtccgcaattaaaataaaccgctctacatccaaatctcgccgctacgtaccgccaccttattttactctaccgatcatcaaccgaccactttttacacccgttattccccttttcgcgcgaccccgatattccgtccatccgccttctcctccgtttatcctattttacgactacacgtccccgcccataataaaacgaacccatcaaaaccgtcatcacgaaaaaaaataaccgcctaaaatattaccacataaaacatcgc

SEQ ID NO: 33465 - DNA, 708 bp, Artificial Sequence
  chemically treated genomic DNA (Homo sapiens) CpG-island No: 33465
  unsure (129)
cgttagagtttttcggggttcgcgttttgggagacgtgcgggtgatcgcgttttcgtttcgtttttatcggttacggtttcgttttcgcgagcggattatattttttagtagttttagcgggtagcggnggcggtagcgcgggcgggaggggcggtggtgagaggcggagggggcggcgcgcgtcgggtacgcgcgtcggcgattatggcgttcgtcgggttggagcgagtatattaatttttggaggcggcggcggcggcgagggagcgagtttcgagcgggcgggttttagtttgagggaagggaggaaggggcggggagagcgttagagggaggtcggtcggtcgcgggcgggcgggtagcgtagcgtcgagcggggttcgcgggtttatgaggaggtttggggattatgggttttaggattaagtgagtgcggtcgggtcgggcggagtcgggtcgggcgcggggcggcgaggttcggttagggttgtaggtcgcgggtcgcgcgggggatttgttgtcgagattagaggggcgtttcgcgtgacgtcggtacgcggggagggggacggttgttatggcgatttagggaggcgcgggggcggggtgcgcgcggggtggtagggcgtcggggtttaggtgttttttttttatttgggggtcggaatagttgagattatagggcggtttttttttcgggtttacgg

SEQ ID NO: 33466 - DNA, 708 bp, Artificial Sequence
  chemically treated genomic DNA (Homo sapiens) CpG-island No: 33466
  unsure (580)
ccgtaaacccgaaaaaaaaaccgccctataatctcaactattccgacccccaaataaaaaaaaaacacctaaaccccgacgccctaccaccccgcgcgcaccccgcccccgcgcctccctaaatcgccataacaaccgtccccctccccgcgtaccgacgtcacgcgaaacgcccctctaatctcgacaacaaatcccccgcgcgacccgcgacctacaaccctaaccgaacctcgccgccccgcgcccgacccgactccgcccgacccgaccgcactcacttaatcctaaaacccataatccccaaacctcctcataaacccgcgaaccccgctcgacgctacgctacccgcccgcccgcgaccgaccgacctccctctaacgctctccccgccccttcctcccttccctcaaactaaaacccgcccgctcgaaactcgctccctcgccgccgccgccgcctccaaaaattaatatactcgctccaacccgacgaacgccataatcgccgacgcgcgtacccgacgcgcgccgccccctccgcctctcaccaccgcccctcccgcccgcgctaccgccnccgctacccgctaaaactactaaaaaatataatccgctcgcgaaaacgaaaccgtaaccgataaaaacgaaacgaaaacgcgatcacccgcacgtctcccaaaacgcgaaccccgaaaaactctaacg

SEQ ID NO: 33467 - DNA, 708 bp, Artificial Sequence
  chemically treated genomic DNA (Homo sapiens) CpG-island No: 33467
  unsure (580)
tcgtaaattcggggagggggtcgttttgtaattttagttgtttcgatttttaggtgaggaggggatatttgaatttcggcgttttgttatttcgcgcgtatttcgttttcgcgtttttttggatcgttatagtaatcgttttttttttcgcgtgtcggcgttacgcggggcgtttttttggtttcggtaataagtttttcgcgcggttcgcggtttgtagttttggtcgggtttcgtcgtttcgcgttcggttcggtttcgttcggttcggtcgtatttatttgattttggagtttatggtttttaggtttttttatgggttcgcgggtttcgttcggcgttgcgttgttcgttcgttcgcggtcgatcggtttttttttggcgtttttttcgtttttttttttttttttttaggttggggttcgttcgttcgaggttcgttttttcgtcgtcgtcgtcgtttttaggggttaatgtattcgttttagttcggcgaacgttatggtcgtcggcgcgcgtgttcggcgcgcgtcgtttttttcgttttttattatcgtttttttcgttcgcgttatcgttntcgttgttcgttggggttgttgggaagtgtagttcgttcgcgggggcggggtcgtggtcggtgggggcggggcgggagcgcggttattcgtacgttttttagggcgcgggtttcggaggattttggcg

SEQ ID NO: 33468 - DNA, 708 bp, Artificial Sequence
  chemically treated genomic DNA (Homo sapiens) CpG-island No: 33468
  unsure (129)
cgccaaaatcctccgaaacccgcgccctaaaaaacgtacgaataaccgcgctcccgccccgcccccaccgaccacgaccccgcccccgcgaacgaactacacttcccaacaaccccaacgaacaacganaacgataacgcgaacgaaaaaaacgataataaaaaacgaaaaaaacgacgcgcgccgaacacgcgcgccgacgaccataacgttcgccgaactaaaacgaatacattaacccctaaaaacgacgacgacgacgaaaaaacgaacctcgaacgaacgaaccccaacctaaaaaaaaaaaaaaaaaaacgaaaaaaacgccaaaaaaaaaccgatcgaccgcgaacgaacgaacaacgcaacgccgaacgaaacccgcgaacccataaaaaaacctaaaaaccataaactccaaaatcaaataaatacgaccgaaccgaacgaaaccgaaccgaacgcgaaacgacgaaacccgaccaaaactacaaaccgcgaaccgcgcgaaaaacttattaccgaaaccaaaaaaacgccccgcgtaacgccgacacgcgaaaaaaaaaacgattactataacgatccaaaaaaacgcgaaaacgaaatacgcgcgaaataacaaaacgccgaaattcaaatatcccctcctcacctaaaaatcgaaacaactaaaattacaaaacgaccccctccccgaatttacga

SEQ ID NO: 33469 - DNA, 599 bp, Artificial Sequence
  chemically treated genomic DNA (Homo sapiens) CpG-island No: 33469
  unsure (221..222, 261, 460, 508, 539, 570)
ggcgattaagatattttcgcgagggtttagggcgcgtttttttcgttaggttttagatttcggttttgcgttatttttttttacgtttcggcgcgggcgtagttagttcggttttttttaggtttttaagtttcggatcgagtgtggggtcgtttttttttttcggaaggagttatcgtcgttttaagtggaagaggagaggaagggggcggcggagcggnngggcgggagcggaggcggaggaggggaagggggattttnttgttttttacgtgggttcgggcgcgtgtgaatcgcgtttatcggatggttttatagcgaaatataaaagtatttgggaagtcgtcgtgtattcgtaatttttatcggtcggtcggatcgttcggatagagtttcgtagcgtttcggggtcgggatgggtttcgaagttttttaagtttcggagtttattaatttgcgngtgtcgtttttttcgttgtgattcggcggtttgtgttcgtttttgaantgggaggcgcgtttttgtttttttcgggtgntgttttttttgtttgagtcgtcgcgttgcgntcggcgtcgtacggttgttgttttcgacg

SEQ ID NO: 33470 - DNA, 599 bp, Artificial Sequence
  chemically treated genomic DNA (Homo sapiens) CpG-island No: 33470
  unsure (30, 61, 92, 140, 339, 378..)
cgtcgaaaacaacaaccgtacgacgccgancgcaacgcgacgactcaaacaaaaaaaacancacccgaaaaaaacaaaaacgcgcctcccanttcaaaaacgaacacaaaccgccgaatcacaacgaaaaaaacgacacncgcaaattaataaactccgaaacttaaaaaacttcgaaacccatcccgaccccgaaacgctacgaaactctatccgaacgatccgaccgaccgataaaaattacgaatacacgacgacttcccaaatacttttatatttcgctataaaaccatccgataaacgcgattcacacgcgcccgaacccacgtaaaaaacaanaaaatcccccttcccctcctccgcctccgctcccgcccnnccgctccgccgcccccttcctctcctcttccacttaaaacgacgataactccttccgaaaaaaaaaaacgaccccacactcgatccgaaacttaaaaacctaaaaaaaaccgaactaactacgcccgcgccgaaacgtaaaaaaaaataacgcaaaaccgaaatctaaaacctaacgaaaaaaacgcgccctaaaccctcgcgaaaatatcttaatcgcc

SEQ ID NO: 33471 - DNA, 599 bp, Artificial Sequence
  chemically treated genomic DNA (Homo sapiens) CpG-island No: 33471
  unsure (30, 61, 92, 140, 339, 378..)
cgtcgggaataataatcgtgcggcgtcggncgtaacgcggcggtttaaataaagggagtantattcgagaaaaataaagacgcgttttttantttaaaaacgagtataggtcgtcgggttataacggaaaaggcggtatncgtaagttagtggatttcgggatttgaggggtttcggggtttatttcggtttcggggcgttgcggggttttgttcggacggttcgatcggtcgataggaattgcgagtatacggcgattttttagatgtttttgtatttcgttgtaaaattattcggtgggcgcgatttatacgcgttcgggtttacgtgggaggtagnaggatttttttttttttttttcgttttcgttttcgtttnntcgtttcgtcgttttttttttttttttttttatttaaagcggcgatggtttttttcgagagggagaggcggttttatattcggttcgggatttgggggtttggaggaagtcggattggttgcgttcgcgtcggggcgtaggagggggtggcgtagagtcggagtttggggtttggcgggagggacgcgttttgggttttcgcgggggtgttttggtcgtt

SEQ ID NO: 33472 - DNA, 599 bp, Artificial Sequence
  chemically treated genomic DNA (Homo sapiens) CpG-island No: 33472
  unsure (221..222, 261, 460, 508, 539, 570)
aacgaccaaaacacccccgcgaaaacccaaaacgcgtccctcccgccaaaccccaaactccgactctacgccaccccctcctacgccccgacgcgaacgcaaccaatccgacttcctccaaacccccaaatcccgaaccgaatataaaaccgcctctccctctcgaaaaaaaccatcgccgctttaaataaaaaaaaaaaaaaaaaaaacgacgaaacgannaaacgaaaacgaaaacgaaaaaaaaaaaaaaaaatcctnctacctcccacgtaaacccgaacgcgtataaatcgcgcccaccgaataattttacaacgaaatacaaaaacatctaaaaaatcgccgtatactcgcaattcctatcgaccgatcgaaccgtccgaacaaaaccccgcaacgccccgaaaccgaaataaaccccgaaacccctcaaatcccgaaatccactaacttacgnataccgccttttccgttataacccgacgacctatactcgtttttaaantaaaaaacgcgtctttatttttctcgaatantactccctttatttaaaccgccgcgttacgnccgacgccgcacgattattattcccgacg

SEQ ID NO: 33473 - DNA, 819 bp, Artificial Sequence
  chemically treated genomic DNA (Homo sapiens) CpG-island No: 33473
  unsure (536, 543..544, 779, 804)
tatacgtaagcggcggcgggtgtggttggtgtgattaagatggtgatggcgatgcggtacgggtagttgttacgtacgttgtacgtggaatcgtcgtcgtcggaggtggattggtcggcggggacggtttaattttttacggagaatacgttttggtttaggagtggtcgtgttcgtcgggtgggggtgtcgtcgttcgggattagtggtattaacgcgtacgttattttcgaatagttttcgggagtgtcgagttagtttgcggggtcgggttcgggttttgtcgtggatgtttcggtggtgtcgtggatggtgtcgggtaaaatattcgaagcgttattcgcgtaggtaacggcgttgatgatttatttggacgagcgatttgatgttttttcgttggatgttgggtattcgttggcgttgatacggtcggcgttggatgagcgagcggtggtgttggggtcggatcgtgaaacgttgttgtgcggtgtgaaagcgttgtttgtcggttatgaggtttttgggtttgtgatcgnatttgtnnggggttggggtcgtatcgggtttgtgtttttcggttagggtggttagtggttggggatgggttcggggttttatcgggttttttcggtggtcgttgttggttttgacgaattttgtgtcgagttggatgttatttgggttagaaatcggggttgggaggggttgttcgtttcgttttttttttttgtcggtttttggttttttttcgttgttgtcgcgttcgcggtcgttcgtgnttgttttcgcgcgtttgttttcgtncgtgttttttttttt

SEQ ID NO: 33474 - DNA, 819 bp, Artificial Sequence
  chemically treated genomic DNA (Homo sapiens) CpG-island No: 33474
  unsure (16, 41, 276..277, 284)
aaaaaaaaaaacacgnacgaaaacaaacgcgcgaaaacaancacgaacgaccgcgaacgcgacaacaacgaaaaaaaaccaaaaaccgacaaaaaaaaaaaacgaaacgaacaacccctcccaaccccgatttctaacccaaataacatccaactcgacacaaaattcgtcaaaaccaacaacgaccaccgaaaaaacccgataaaaccccgaacccatccccaaccactaaccaccctaaccgaaaaacacaaacccgatacgaccccaaccccnnacaaatncgatcacaaacccaaaaacctcataaccgacaaacaacgctttcacaccgcacaacaacgtttcacgatccgaccccaacaccaccgctcgctcatccaacgccgaccgtatcaacgccaacgaatacccaacatccaacgaaaaaacatcaaatcgctcgtccaaataaatcatcaacgccgttacctacgcgaataacgcttcgaatattttacccgacaccatccacgacaccaccgaaacatccacgacaaaacccgaacccgaccccgcaaactaactcgacactcccgaaaactattcgaaaataacgtacgcgttaataccactaatcccgaacgacgacacccccacccgacgaacacgaccactcctaaaccaaaacgtattctccgtaaaaaattaaaccgtccccgccgaccaatccacctccgacgacgacgattccacgtacaacgtacgtaacaactacccgtaccgcatcgccatcaccatcttaatcacaccaaccacacccgccgccgcttacgtata

SEQ ID NO: 33475 - DNA, 819 bp, Artificial Sequence
  chemically treated genomic DNA (Homo sapiens) CpG-island No: 33475
  unsure (16, 41, 276..277, 284)
gggagaggagatacgngcgaaagtaggcgcgcgaagataantacgaacggtcgcgagcgcggtaataacggagggggattaagggtcgataagagaggggagcgaaacggataattttttttaatttcgatttttggtttagatggtatttagttcggtataaggttcgttaaagttagtagcgattatcggaaaagttcggtaaagtttcgggtttatttttagttattgattattttgatcggaaaatataaattcgatgcggttttagttttnnatagatncggttataaatttagaagttttatgatcggtagatagcgtttttatatcgtataataacgttttacggttcgattttagtattatcgttcgtttatttagcgtcgatcgtgttaacgttagcgagtatttaatatttagcgaggagatattaggtcgttcgtttagataggttattaacgtcgttgtttgcgcggatagcgtttcgggtgttttgttcgatattatttacggtattatcggaatatttacgatagaattcgaattcggtttcgtagattgattcggtattttcgggggttgttcgaggatgacgtgcgcgttagtattattgatttcgaacgacgatatttttattcgacgaatacgattatttttgggttagggcgtgtttttcgtaaggagttgaatcgttttcgtcgattaatttattttcggcgacggcgattttacgtgtaacgtgcgtggtagttgttcgtgtcgtatcgttattattattttgattatattagttatattcgtcgtcgtttgcgtatg

SEQ ID NO: 33476 - DNA, 819 bp, Artificial Sequence
  chemically treated genomic DNA (Homo sapiens) CpG-island No: 33476
  unsure (536, 543..544, 779, 804)
catacgcaaacgacgacgaatataactaatataatcaaaataataataacgatacgacacgaacaactaccacgcacgttacacgtaaaatcgccgtcgccgaaaataaattaatcgacgaaaacgattcaactccttacgaaaaacacgccctaacccaaaaataatcgtattcgtcgaataaaaatatcgtcgttcgaaatcaataatactaacgcgcacgtcatcctcgaacaacccccgaaaataccgaatcaatctacgaaaccgaattcgaattctatcgtaaatattccgataataccgtaaataatatcgaacaaaacacccgaaacgctatccgcgcaaacaacgacgttaataacctatctaaacgaacgacctaatatctcctcgctaaatattaaatactcgctaacgttaacacgatcgacgctaaataaacgaacgataatactaaaatcgaaccgtaaaacgttattatacgatataaaaacgctatctaccgatcataaaacttctaaatttataaccgnatctatnnaaaactaaaaccgcatcgaatttatattttccgatcaaaataatcaataactaaaaataaacccgaaactttaccgaacttttccgataatcgctactaactttaacgaaccttataccgaactaaataccatctaaaccaaaaatcgaaattaaaaaaaattatccgtttcgctcccctctcttatcgacccttaatccccctccgttattaccgcgctcgcgaccgttcgtanttatcttcgcgcgcctactttcgcncgtatctcctctccc

SEQ ID NO: 33477 - DNA, 813 bp, Artificial Sequence
  chemically treated genomic DNA (Homo sapiens) CpG-island No: 33477
  unsure (342, 370, 590, 593, 595, 686, 751, 794)
ggttaagtcgaatatcggttatacgtaagcggcggcgggtgtggttggtgtgattaagatggtgatggcgatgcggtacgggtagttgttattttcgttgtacgtggaatcgtcgtcgtcggaggtggattggtcggtggggacggtttaattgtttacggagaatacgttttggtttacgtagtggtcgagttcgtcgggtgggggtgtcgtcgttcgggattagtggtattaacgcgtacgttattttcgaatagttttcgggagtgtcgagttattttgcggcgtcgggtttcggttttgtcgcggatgtttcggtggtgtcgggatggggtcgggtanatattcgaagtcgttttcgcgtaggttncggcgttgttgatttatttgggcgagcgatttggcgttttttcgttggatgttgggtatttcgtttgtttttgttcgggtcgcgttggttgatcgatcggtggggcgggggcggttcgtgaacgtgttgcgcggtgtgaagttttgttttttttatgtcgttttttggtggtatcgtgtttgtgcggtcgggttttttcggtttggggttttcgttacgnggntntcgttcgggtcggtcgggcgttttcggtttttttcggttgttgttttttgcgatttttgtcgagttggtttttttcgtttcgatttttcgntttttcggcgtttttttcgttttatcgttggttttttttttggcgtcgcgggtttttttttttgncgtcgttcgttcgtttttttttcggtggcgcggtcgtcggcgngtgttttttttacgcgtgt

SEQ ID NO: 33478 - DNA, 813 bp, Artificial Sequence
  chemically treated genomic DNA (Homo sapiens) CpG-island No: 33478
  unsure (20, 63, 128, 219, 221, 224, 444, 472)
acacgcgtaaaaaaaacacncgccgacgaccgcgccaccgaaaaaaaaacgaacgaacgacgncaaaaaaaaaaacccgcgacgccaaaaaaaaaaccaacgataaaacgaaaaaaacgccgaaaaancgaaaaatcgaaacgaaaaaaaccaactcgacaaaaatcgcaaaaaacaacaaccgaaaaaaaccgaaaacgcccgaccgacccgaacgananccncgtaacgaaaaccccaaaccgaaaaaacccgaccgcacaaacacgataccaccaaaaaacgacataaaaaaaacaaaacttcacaccgcgcaacacgttcacgaaccgcccccgccccaccgatcgatcaaccaacgcgacccgaacaaaaacaaacgaaatacccaacatccaacgaaaaaacgccaaatcgctcgcccaaataaatcaacaacgccgnaacctacgcgaaaacgacttcgaatatntacccgaccccatcccgacaccaccgaaacatccgcgacaaaaccgaaacccgacgccgcaaaataactcgacactcccgaaaactattcgaaaataacgtacgcgttaataccactaatcccgaacgacgacacccccacccgacgaactcgaccactacgtaaaccaaaacgtattctccgtaaacaattaaaccgtccccaccgaccaatccacctccgacgacgacgattccacgtacaacgaaaataacaactacccgtaccgcatcgccatcaccatcttaatcacaccaaccacacccgccgccgcttacgtataaccgatattcgacttaacc

SEQ ID NO: 33479 - DNA, 813 bp, Artificial Sequence
  chemically treated genomic DNA (Homo sapiens) CpG-island No: 33479
  unsure (20, 63, 128, 219, 221, 224, 444, 472)
gtacgcgtaagaagagtatncgtcgacggtcgcgttatcgagaaggagacgaacgagcggcgntaagagagaaaattcgcggcgttaaagggagggttagcggtggaacggggagggcgtcgagaggncgagagatcggggcgagaggaattagttcggtaaagatcgtaaagagtagtaatcgggaagggtcgaaagcgttcggtcgattcgggcggngnttncgtggcggaaattttaaatcgaaggggttcggtcgtatagatacggtattattaaaaagcggtataaaggaaatagggttttatatcgcgtaatacgtttacgggtcgttttcgttttatcggtcggttagttagcgcggttcgggtaagggtaagcgaggtatttaatatttagcgaggagacgttaggtcgttcgtttagataggttaataacgtcgnagtttgcgcggaagcggtttcgggtgtntgttcgattttatttcggtattatcggaatattcgcgatagaatcggaattcggcgtcgtagagtgattcggtattttcgggggttgttcgaggatgacgtgcgcgttagtattattgatttcgaacgacgatatttttattcgacgaattcgattattgcgtgggttagggcgtgtttttcgtaagtagttgaatcgtttttatcgattaatttattttcggcgacggcgattttacgtgtaacgaagatggtagttgttcgtgtcgtatcgttattattattttgattatattagttatattcgtcgtcgtttgcgtatgatcgatgttcgatttgatt

SEQ ID NO: 33480 - DNA, 813 bp, Artificial Sequence
  chemically treated genomic DNA (Homo sapiens) CpG-island No: 33480
  unsure (342, 370, 590, 593, 595, 686, 751, 794)
aatcaaatcgaacatcgatcatacgcaaacgacgacgaatataactaatataatcaaaataataataacgatacgacacgaacaactaccatcttcgttacacgtaaaatcgccgtcgccgaaaataaattaatcgataaaaacgattcaactacttacgaaaaacacgccctaacccacgcaataatcgaattcgtcgaataaaaatatcgtcgttcgaaatcaataatactaacgcgcacgtcatcctcgaacaacccccgaaaataccgaatcactctacgacgccgaattccgattctatcgcgaatattccgataataccgaaataaaatcgaacanacacccgaaaccgcttccgcgcaaactncgacgttattaacctatctaaacgaacgacctaacgtctcctcgctaaatattaaatacctcgcttacccttacccgaaccgcgctaactaaccgaccgataaaacgaaaacgacccgtaaacgtattacgcgatataaaaccctatttcctttataccgctttttaataataccgtatctatacgaccgaaccccttcgatttaaaatttccgccacgnaancnccgcccgaatcgaccgaacgctttcgacccttcccgattactactctttacgatctttaccgaactaattcctctcgccccgatctctcgncctctcgacgccctccccgttccaccgctaaccctccctttaacgccgcgaattttctctcttancgccgctcgttcgtctccttctcgataacgcgaccgtcgacgnatactcttcttacgcgtac

SEQ ID NO: 33481 - DNA, 582 bp, Artificial Sequence
  chemically treated genomic DNA (Homo sapiens) CpG-island No: 33481
agtcgtttcggaatcggatatttggcgcgtacgtttcgggaaaggcggagggtgtattgtttttttttacgttttttgttttttgtatttgcggcggcggcgtgtttggcgggatttagtagcgcggggcgtgtttcgattatttaaaagttataaagtgaaatttcggcgttttttgtatatgcgtagagttgcggttattttttttttaatttggagttttggttcgcggcggcgtaagtttgtacgtagttgattgcgtttttcgcggtggttttcggcggttttttgtttcggtttggttttttggtcgtcgtttagtttcgtagtttttttcggaggtttgtaagtttcggatcggttagtttacgtttaggttttaagaagggattcgtcggggcgtattttttttcgtttttcggtacgagtttagtttttggacgttttcgggagaattgggttaagtatagggtggtcgcggcgtagggagagtatttgtaaacgttggtttttgtagtgttttgaattttttcgaagagtttttagattcgtttcgggagagtggggttgcgggggtggtag

SEQ ID NO: 33482 - DNA, 582 bp, Artificial Sequence
  chemically treated genomic DNA (Homo sapiens) CpG-island No: 33482
ctaccacccccgcaaccccactctcccgaaacgaatctaaaaactcttcgaaaaaattcaaaacactacaaaaaccaacgtttacaaatactctccctacgccgcgaccaccctatacttaacccaattctcccgaaaacgtccaaaaactaaactcgtaccgaaaaacgaaaaaaaatacgccccgacgaatcccttcttaaaacctaaacgtaaactaaccgatccgaaacttacaaacctccgaaaaaaactacgaaactaaacgacgaccaaaaaaccaaaccgaaacaaaaaaccgccgaaaaccaccgcgaaaaacgcaatcaactacgtacaaacttacgccgccgcgaaccaaaactccaaattaaaaaaaaaataaccgcaactctacgcatatacaaaaaacgccgaaatttcactttataacttttaaataatcgaaacacgccccgcgctactaaatcccgccaaacacgccgccgccgcaaatacaaaaaacaaaaaacgtaaaaaaaaacaatacaccctccgcctttcccgaaacgtacgcgccaaatatccgattccgaaacgact

SEQ ID NO: 33483 - DNA, 582 bp, Artificial Sequence
  chemically treated genomic DNA (Homo sapiens) CpG-island No: 33483
ttattattttcgtaattttattttttcggggcgggtttaagagtttttcggggaaatttaaagtattatagggattaacgtttgtagatgttttttttgcgtcgcgattattttgtgtttggtttagttttttcggaggcgtttagagattgggttcgtgtcgggggacggaagagggtgcgtttcggcggatttttttttggagtttggacgtgagttggtcggttcggggtttgtagattttcgggaggagttgcggggttgagcggcgattaggaggttaggtcggggtagaggatcgtcgagggttatcgcgggaggcgtagttagttgcgtataggtttgcgtcgtcgcgggttaagattttaaattgggaaaggggtggtcgtagttttgcgtatgtgtaggaggcgtcggagttttattttgtaatttttaagtggtcggaatacgtttcgcgttgttgggtttcgttagatacgtcgtcgtcgtaggtataggggatagggggcgtgaggaggggtaatgtatttttcgtttttttcgggacgtgcgcgttaggtgttcggtttcggaacggtt

SEQ ID NO: 33484 - DNA, 582 bp, Artificial Sequence
  chemically treated genomic DNA (Homo sapiens) CpG-island No: 33484
aaccgttccgaaaccgaacacctaacgcgcacgtcccgaaaaaaacgaaaaatacattacccctcctcacgccccctatcccctatacctacgacgacgacgtatctaacgaaacccaacaacgcgaaacgtattccgaccacttaaaaattacaaaataaaactccgacgcctcctacacatacgcaaaactacgaccacccctttcccaatttaaaatcttaacccgcgacgacgcaaacctatacgcaactaactacgcctcccgcgataaccctcgacgatcctctaccccgacctaacctcctaatcgccgctcaaccccgcaactcctcccgaaaatctacaaaccccgaaccgaccaactcacgtccaaactccaaaaaaaaatccgccgaaacgcaccctcttccgtcccccgacacgaacccaatctctaaacgcctccgaaaaaactaaaccaaacacaaaataatcgcgacgcaaaaaaaacatctacaaacgttaatccctataatactttaaatttccccgaaaaactcttaaacccgccccgaaaaaataaaattacgaaaataataa

SEQ ID NO: 33485 - DNA, 1003 bp, Artificial Sequence
  chemically treated genomic DNA (Homo sapiens) CpG-island No: 33485
tcggtagtcgcgtttcgtcgttttttttttagtttggttttaacggttcgtaatggcggaatagggagttaggggtatcgtcgtttggggaattttattcgtcggtttagggtttagttcgtcgtgtgatagtttcgggtattttgtttagcggggtgtaagttcggatcgcggtaagcgttattttcgggtagtcgcggttataattgttttcgggtgagtgggtcgtcgattttgtggtttcgtttatttttcgtttttttagtcggtcgtttaggttgcggtttttttcggggtcggttttcgttgttttagtcgcggcgtagagggtatatcggtttgatcgattagtcggttgttagtgtcgggagtcgtcgcgtttattttcgttcgtttggtcggggatttaggattgagtcgtttagttgcgtttttcgtttatagttttagcgggcgtcgggcgggcgagtagtttttcggtttttttcggatagcgacgtagtcgtagcgcgcgttttaatataggtaagggtcgtttttttcgttagttcggtgggagtagggagcggggagttgggaatttttttttcggttttcgtagtttcgtgggattcgcgtcgttttcgatttcggttagggggtcgggtttttttggggattggtcggttcgcggcgggttttcgggttggggtcgttttttgtttgcggcgtttttagatatttcgtttgatttttaacgtttatttttttatcgcgttggggaaaaggtacgtgttatttttattgtgggagaaattaaattgggtagttgttttttcgtttcgggtgttttaggcgttttttttttttttttagacgttatattacggttttgttttaggacgagtatttttagggaacggtgttaggacggtgtagggcgtagtattttttgggaattttatttttttttttttgatttgagttggatcgcgcgggtttaataggcgttagttgggttaat

SEQ ID NO: 33486 - DNA, 1003 bp, Artificial Sequence
  chemically treated genomic DNA (Homo sapiens) CpG-island No: 33486
attaacccaactaacgcctattaaacccgcgcgatccaactcaaatcaaaaaaaaaaaaataaaattcccaaaaaatactacgccctacaccgtcctaacaccgttccctaaaaatactcgtcctaaaacaaaaccgtaatataacgtctaaaaaaaaaaaaaaaacgcctaaaacacccgaaacgaaaaaacaactacccaatttaatttctcccacaataaaaataacacgtaccttttccccaacgcgataaaaaaataaacgttaaaaatcaaacgaaatatctaaaaacgccgcaaacaaaaaacgaccccaacccgaaaacccgccgcgaaccgaccaatccccaaaaaaacccgaccccctaaccgaaatcgaaaacgacgcgaatcccacgaaactacgaaaaccgaaaaaaaaattcccaactccccgctccctactcccaccgaactaacgaaaaaaacgacccttacctatattaaaacgcgcgctacgactacgtcgctatccgaaaaaaaccgaaaaactactcgcccgcccgacgcccgctaaaactataaacgaaaaacgcaactaaacgactcaatcctaaatccccgaccaaacgaacgaaaataaacgcgacgactcccgacactaacaaccgactaatcgatcaaaccgatataccctctacgccgcgactaaaacaacgaaaaccgaccccgaaaaaaaccgcaacctaaacgaccgactaaaaaaacgaaaaataaacgaaaccacaaaatcgacgacccactcacccgaaaacaattataaccgcgactacccgaaaataacgcttaccgcgatccgaacttacaccccgctaaacaaaatacccgaaactatcacacgacgaactaaaccctaaaccgacgaataaaattccccaaacgacgatacccctaactccctattccgccattacgaaccgttaaaaccaaactaaaaaaaaaacgacgaaacgcgactaccga

SEQ ID NO: 33487 - DNA, 1003 bp, Artificial Sequence
  chemically treated genomic DNA (Homo sapiens) CpG-island No: 33487
attaatttagttagcgtttgttaaattcgcgcgatttagtttaggttaaggaggaagaagtaaaatttttaaaaaatgttacgttttatatcgttttgatatcgttttttgggggtgttcgttttgggatagaatcgtagtgtggcgtttaaggaggaagagaaggcgtttagggtattcgaaacggagggatagttgtttaatttaattttttttatagtgggaataatacgtattttttttttagcgcggtggaagggtgagcgttagaaattagacgggatgtttgagaacgtcgtaggtagggggcgattttagttcgggagttcgtcgcgggtcggttagtttttagggaagttcggttttttagtcgaggtcggaggcggcgcggattttacgggattgcggaggtcgggaaaaaggtttttaatttttcgttttttgtttttatcgggttggcgggaggagcggtttttatttgtgttagggcgcgcgttgcgattgcgtcgttgttcgggaagggtcgaagagttgttcgttcgttcggcgttcgttggggttatgggcgaggggcgtagttggacgatttagttttgggttttcggttaggcgggcggggatggacgcggcggttttcggtattggtagtcggttagtcggttaggtcgatgtgttttttgcgtcgcggttgagatagcgggaatcggtttcgggaggagtcgtagtttgagcggtcgattgaggaggcgaaggatgggcggggttatagggtcgacgatttatttattcggaagtagttgtggtcgcgattgttcgggagtggcgtttgtcgcggttcgggtttgtatttcgttgggtaaagtattcggggttgttatacggcgagttgagttttgggtcggcgggtgaggttttttaagcggcgatgtttttggttttttgtttcgttattgcgagtcgttagggttaagttggagggagggcggcgaggcgcggttgtcgg

SEQ ID NO: 33488 - DNA, 1003 bp, Artificial Sequence
  chemically treated genomic DNA (Homo sapiens) CpG-island No: 33488
ccgacaaccgcgcctcgccgccctccctccaacttaaccctaacgactcgcaataacgaaacaaaaaaccaaaaacatcgccgcttaaaaaacctcacccgccgacccaaaactcaactcgccgtataacaaccccgaatactttacccaacgaaatacaaacccgaaccgcgacaaacgccactcccgaacaatcgcgaccacaactacttccgaataaataaatcgtcgaccctataaccccgcccatccttcgcctcctcaatcgaccgctcaaactacgactcctcccgaaaccgattcccgctatctcaaccgcgacgcaaaaaacacatcgacctaaccgactaaccgactaccaataccgaaaaccgccgcgtccatccccgcccgcctaaccgaaaacccaaaactaaatcgtccaactacgcccctcgcccataaccccaacgaacgccgaacgaacgaacaactcttcgacccttcccgaacaacgacgcaatcgcaacgcgcgccctaacacaaataaaaaccgctcctcccgccaacccgataaaaacaaaaaacgaaaaattaaaaacctttttcccgacctccgcaatcccgtaaaatccgcgccgcctccgacctcgactaaaaaaccgaacttccctaaaaactaaccgacccgcgacgaactcccgaactaaaatcgccccctacctacgacgttctcaaacatcccgtctaatttctaacgctcacccttccaccgcgctaaaaaaaaaatacgtattattcccactataaaaaaaattaaattaaacaactatccctccgtttcgaataccctaaacgccttctcttcctccttaaacgccacactacgattctatcccaaaacgaacacccccaaaaaacgatatcaaaacgatataaaacgtaacattttttaaaaattttacttcttcctccttaacctaaactaaatcgcgcgaatttaacaaacgctaactaaattaat

SEQ ID NO: 33489 - DNA, 969 bp, Artificial Sequence
  chemically treated genomic DNA (Homo sapiens) CpG-island No: 33489
ttagaagttattaatataaaatttcgatattgtatttagtttacgagtagatcggtttgggaggcgtcgtagtcgtattcgtttggcggagtaggagtcgtagttttaatttgtcgttcgtttcgtttttcggcggtttatttgtgataggtgtgtaggtgttttatacgttttcggtcgtttttcgttttcggtttttcgcggtttcgggttcgagttttttagtttgtcgttttttcgggagtttttcgttttttcgtaggtttcggagcgtttttcgttcgtttttgggcggtcgcgttcgtatttatatagcgttttaattttttttcgggaggcgatttttttagttagtcggtgtatattacgtcgtcgtcgtcgtttatgttgtcggtttggagtttttcgtcgggtcgcgcggacgagggcgcgggttcgggtagttggggtagcggtcggcggtgcgtagttcgcgggaggttaggggcgggggcgggcggttcggcggggattaggcggcgcgggcgcggcgcgagttcggtagtttcgcgcgcgttcgttttttcgtttcgagcgcgcgtaattcgtatttttcgttcggtcgtcgggggagtagttgtagtaggaaggtcggttcgttcgttacgttcgttttcgtcgcgttttcgaggtcgtcgcgtacgcggacgcggggttagggattcgcgaggatatagaaagttatcgtcgtcggcgcgtttcggagtttcgtttttttttgaggttttaagtcgcgggcgcggaggttagggaggcgatcgcgtttttggcgttggcgggtgtgaggggaagggattgcgcgttttcggtcgtcgatcgattttttatcgagcgtcgacggggaagggatattagggttgtttatattttcgatatattttgcgggttaggtttcggttgaaaggagggatttttttttagtaagaagtt

SEQ ID NO: 33490 - DNA, 969 bp, Artificial Sequence
  chemically treated genomic DNA (Homo sapiens) CpG-island No: 33490
aacttcttactaaaaaaaaatccctcctttcaaccgaaacctaacccgcaaaatatatcgaaaatataaacaaccctaatatcccttccccgtcgacgctcgataaaaaatcgatcgacgaccgaaaacgcgcaatcccttcccctcacacccgccaacgccaaaaacgcgatcgcctccctaacctccgcgcccgcgacttaaaacctcaaaaaaaaacgaaactccgaaacgcgccgacgacgataactttctatatcctcgcgaatccctaaccccgcgtccgcgtacgcgacgacctcgaaaacgcgacgaaaacgaacgtaacgaacgaaccgaccttcctactacaactactcccccgacgaccgaacgaaaaatacgaattacgcgcgctcgaaacgaaaaaacgaacgcgcgcgaaactaccgaactcgcgccgcgcccgcgccgcctaatccccgccgaaccgcccgcccccgcccctaacctcccgcgaactacgcaccgccgaccgctaccccaactacccgaacccgcgccctcgtccgcgcgacccgacgaaaaactccaaaccgacaacataaacgacgacgacgacgtaatatacaccgactaactaaaaaaatcgcctcccgaaaaaaaattaaaacgctatataaatacgaacgcgaccgcccaaaaacgaacgaaaaacgctccgaaacctacgaaaaaacgaaaaactcccgaaaaaacgacaaactaaaaaactcgaacccgaaaccgcgaaaaaccgaaaacgaaaaacgaccgaaaacgtataaaacacctacacacctatcacaaataaaccgccgaaaaacgaaacgaacgacaaattaaaactacgactcctactccgccaaacgaatacgactacgacgcctcccaaaccgatctactcgtaaactaaatacaatatcgaaattttatattaataacttctaa

SEQ ID NO: 33491 - DNA, 969 bp, Artificial Sequence
  chemically treated genomic DNA (Homo sapiens) CpG-island No: 33491
agttttttgttgggaaggggtttttttttttagtcggaatttgattcgtagaatgtatcggaaatgtgagtagttttagtatttttttttcgtcgacgttcggtgaaaaatcgatcgacgatcgagggcgcgtagttttttttttttatattcgttagcgttaggggcgcggtcgtttttttggttttcgcgttcgcggtttggggttttaggagaaagcgagatttcggggcgcgtcggcggcggtggttttttgtattttcgcgggtttttagtttcgcgttcgcgtgcgcggcggtttcgggggcgcggcgggagcgggcgtggcgagcgagtcggtttttttgttgtagttgttttttcggcggtcgggcggagagtgcggattgcgcgcgttcggggcgggggagcgggcgcgcgcgaggttgtcgggttcgcgtcgcgttcgcgtcgtttagttttcgtcgggtcgttcgttttcgtttttggtttttcgcgagttgcgtatcgtcggtcgttgttttagttgttcgagttcgcgttttcgttcgcgcgattcggcggggggttttaggtcggtagtatgagcggcggcggcgacgtggtgtgtatcggttggttgaggaaatcgtttttcgagaagaagttgaggcgttatgtgagtgcgggcgcggtcgtttaggggcgggcggggggcgtttcggggtttgcggaggggcgggggattttcggaggggcggtaggttggggagttcgggttcggagtcgcggggggtcgggggcgaggagcggtcgggggcgtgtggggtatttgtatatttgttataggtgggtcgtcgaggggcggggcgggcggtaggttgaggttgcggtttttgtttcgttaggcgggtgcggttgcggcgttttttaagtcggtttgttcgtgaattaaatatagtgtcgaagttttgtattgatggtttttgg

SEQ ID NO: 33492 - DNA, 969 bp, Artificial Sequence
  chemically treated genomic DNA (Homo sapiens) CpG-island No: 33492
ccaaaaaccatcaatacaaaacttcgacactatatttaattcacgaacaaaccgacttaaaaaacgccgcaaccgcacccgcctaacgaaacaaaaaccgcaacctcaacctaccgcccgccccgcccctcgacgacccacctataacaaatatacaaataccccacacgcccccgaccgctcctcgcccccgaccccccgcgactccgaacccgaactccccaacctaccgcccctccgaaaatcccccgcccctccgcaaaccccgaaacgccccccgcccgcccctaaacgaccgcgcccgcactcacataacgcctcaacttcttctcgaaaaacgatttcctcaaccaaccgatacacaccacgtcgccgccgccgctcatactaccgacctaaaaccccccgccgaatcgcgcgaacgaaaacgcgaactcgaacaactaaaacaacgaccgacgatacgcaactcgcgaaaaaccaaaaacgaaaacgaacgacccgacgaaaactaaacgacgcgaacgcgacgcgaacccgacaacctcgcgcgcgcccgctcccccgccccgaacgcgcgcaatccgcactctccgcccgaccgccgaaaaaacaactacaacaaaaaaaccgactcgctcgccacgcccgctcccgccgcgcccccgaaaccgccgcgcacgcgaacgcgaaactaaaaacccgcgaaaatacaaaaaaccaccgccgccgacgcgccccgaaatctcgctttctcctaaaaccccaaaccgcgaacgcgaaaaccaaaaaaacgaccgcgcccctaacgctaacgaatataaaaaaaaaaaactacgcgccctcgatcgtcgatcgatttttcaccgaacgtcgacgaaaaaaaaatactaaaactactcacatttccgatacattctacgaatcaaattccgactaaaaaaaaaaaccccttcccaacaaaaaact

SEQ ID NO: 33493 - DNA, 532 bp, Artificial Sequence
  chemically treated genomic DNA (Homo sapiens) CpG-island No: 33493
ggtagcgcgttttgaaagtttatgatcgtcgtagttaatttttggtcggagttggagacgtagcgagcgatcggtcggtttcgaatttttatagttggagggcgaggttagttgtattcggttttagtgttttttcgcggttataagcggtcgtttttttggttcggtgtttcggcgtttgatttaggtttatggagtcggggttgtggttttttttcgggtttatagtgattttcgtcgtaggtaagcgtacggggcggcgcgttttttttggcgcgagcgtatataaaaggatttagggcgggggattcgaggcgcggagaagatgtgcgtcgcggggagtaaatttttgtttgggttttgtatttgtgaagacgtttgggggagggttggggagtagaagcggcgcgtaacgattattcgtacgggtttcgggagttgtagttcgcgtattggttggagatttgttgtttgggtcgatttggttaattttttatgaaattggggattttttagaaagtttgcgaattat

SEQ ID NO: 33494 - DNA, 532 bp, Artificial Sequence
  chemically treated genomic DNA (Homo sapiens) CpG-island No: 33494
ataattcgcaaactttctaaaaaatccccaatttcataaaaaattaaccaaatcgacccaaacaacaaatctccaaccaatacgcgaactacaactcccgaaacccgtacgaataatcgttacgcgccgcttctactccccaaccctcccccaaacgtcttcacaaatacaaaacccaaacaaaaatttactccccgcgacgcacatcttctccgcgcctcgaatcccccgccctaaatccttttatatacgctcgcgccaaaaaaaacgcgccgccccgtacgcttacctacgacgaaaatcactataaacccgaaaaaaaaccacaaccccgactccataaacctaaatcaaacgccgaaacaccgaaccaaaaaaacgaccgcttataaccgcgaaaaaacactaaaaccgaatacaactaacctcgccctccaactataaaaattcgaaaccgaccgatcgctcgctacgtctccaactccgaccaaaaattaactacgacgatcataaactttcaaaacgcgctacc

SEQ ID NO: 33495 - DNA, 532 bp, Artificial Sequence
  chemically treated genomic DNA (Homo sapiens) CpG-island No: 33495
atagttcgtaaattttttgaaaagtttttagttttatgaaaaattgattaagtcggtttaggtagtaggtttttagttagtgcgcgggttgtaattttcggagttcgtgcgggtagtcgttgcgcgtcgtttttgttttttagtttttttttaggcgtttttataagtgtagagtttaggtaagagtttgtttttcgcgacgtatatttttttcgcgtttcgggtttttcgttttgggtttttttgtgtgcgttcgcgttaggagaggcgcgtcgtttcgtgcgtttatttgcggcggaggttattgtgagttcgaaaaggagttatagtttcggttttatgaatttagattaggcgtcggagtatcggattaggaggacggtcgtttgtggtcgcgaaagggtattggggtcgggtatagttggtttcgttttttagttgtgggggttcgaggtcggtcgatcgttcgttgcgtttttagtttcggttaggagttggttgcggcggttataaatttttagagcgcgttgtt

SEQ ID NO: 33496 - DNA, 532 bp, Artificial Sequence
  chemically treated genomic DNA (Homo sapiens) CpG-island No: 33496
aacaacgcgctctaaaaatttataaccgccgcaaccaactcctaaccgaaactaaaaacgcaacgaacgatcgaccgacctcgaacccccacaactaaaaaacgaaaccaactatacccgaccccaataccctttcgcgaccacaaacgaccgtcctcctaatccgatactccgacgcctaatctaaattcataaaaccgaaactataactccttttcgaactcacaataacctccgccgcaaataaacgcacgaaacgacgcgcctctcctaacgcgaacgcacacaaaaaaacccaaaacgaaaaacccgaaacgcgaaaaaaatatacgtcgcgaaaaacaaactcttacctaaactctacacttataaaaacgcctaaaaaaaaactaaaaaacaaaaacgacgcgcaacgactacccgcacgaactccgaaaattacaacccgcgcactaactaaaaacctactacctaaaccgacttaatcaatttttcataaaactaaaaacttttcaaaaaatttacgaactat

SEQ ID NO: 33497 - DNA, 762 bp, Artificial Sequence
  chemically treated genomic DNA (Homo sapiens) CpG-island No: 33497
ttttcgttggtttacgcggacgtttcgcgattttcgtagtttggcgggtagcgcgttacgggagcggattagaatatagttcgtttcgttttatcgttcgcggtttcgttttttttggtcgataaggggcgggtattatcggagtgggtttcgtgggtgttggggtaggagtttttttatttttcgtttggtcgtcgttttttcgttgatttcgcgtttttttacgggtcgttttttattttttgagcggacgtagggagtcgatgtcgggcgaatcgggcgttatgaagggtagttgtttaacgggcgtcgcggcggaggggttggtcggttgagggttcgcgttgggtcgaggtatgcggagttcgggcgggattttgttttaggcgttgtttcggttgttgaaatacgtcgttttttcgggttttatcgatttgtcggttcgttgggttttgtcgttgggtgcgggcggggaaggttcggcggacgttttttcgagggggcggggtaatcgcggcggtgaatataacgtcggtttcgggcgtttttgttcggggtttatttggagcggttttcgttcggttcgaggttttcgaatttgtcgaattcgggggggggttttggcgggtcgttttcggaattggcggcggaggatttgtggttcggcgttggtttaaggtgaaaaaattgggcgttggttgttggtttcggaaagtatttgtttgttgtcggaagttttttgttgggttttgggtgtttggt

SEQ ID NO: 33498 - DNA, 762 bp, Artificial Sequence
  chemically treated genomic DNA (Homo sapiens) CpG-island No: 33498
accaaacacccaaaacccaacaaaaaacttccgacaacaaacaaatactttccgaaaccaacaaccaacgcccaattttttcaccttaaaccaacgccgaaccacaaatcctccgccgccaattccgaaaacgacccgccaaaacccccccccgaattcgacaaattcgaaaacctcgaaccgaacgaaaaccgctccaaataaaccccgaacaaaaacgcccgaaaccgacgttatattcaccgccgcgattaccccgccccctcgaaaaaacgtccgccgaaccttccccgcccgcacccaacgacaaaacccaacgaaccgacaaatcgataaaacccgaaaaaacgacgtatttcaacaaccgaaacaacgcctaaaacaaaatcccgcccgaactccgcatacctcgacccaacgcgaaccctcaaccgaccaacccctccgccgcgacgcccgttaaacaactacccttcataacgcccgattcgcccgacatcgactccctacgtccgctcaaaaaataaaaaacgacccgtaaaaaaacgcgaaatcaacgaaaaaacgacgaccaaacgaaaaataaaaaaactcctaccccaacacccacgaaacccactccgataatacccgccccttatcgaccaaaaaaaacgaaaccgcgaacgataaaacgaaacgaactatattctaatccgctcccgtaacgcgctacccgccaaactacgaaaatcgcgaaacgtccgcgtaaaccaacgaaaa

SEQ ID NO: 33499 - DNA, 762 bp, Artificial Sequence
  chemically treated genomic DNA (Homo sapiens) CpG-island No: 33499
gttaaatatttaaaatttagtaggaggttttcggtaataaataggtgtttttcgaggttagtaattagcgtttagtttttttattttaagttaacgtcgaattataaatttttcgtcgttaatttcgggggcggttcgttaaagttttttttcgggttcggtaagttcgaaagtttcgggtcggacgggggtcgttttagataggtttcggataagggcgttcgaggtcggcgttgtgtttatcgtcgcggttgtttcgttttttcgggaagacgttcgtcgggtttttttcgttcgtatttaacggtagggtttaacgggtcggtagatcggtgaggttcgggagggcggcgtgttttagtagtcggggtagcgtttggagtaggatttcgttcgggtttcgtatgtttcggtttagcgcgggtttttagtcggttagttttttcgtcgcggcgttcgttaggtagttgttttttatggcgttcggttcgttcggtatcgattttttgcgttcgtttagagggtgggagacggttcgtagaagggcgcggagttagcggaggagcgacggttaggcggggagtgaggaaatttttgttttagtatttacggagtttatttcggtggtgttcgttttttgtcggttagagggggcggggtcgcgggcgatggggcggagcgggttgtgttttggttcgttttcgtgacgcgttgttcgttaggttgcgggggtcgcggggcgttcgcgtgggttagcggagg

SEQ ID NO: 33500 - DNA, 762 bp, Artificial Sequence
  chemically treated genomic DNA (Homo sapiens) CpG-island No: 33500
cctccgctaacccacgcgaacgccccgcgacccccgcaacctaacgaacaacgcgtcacgaaaacgaaccaaaacacaacccgctccgccccatcgcccgcgaccccgccccctctaaccgacaaaaaacgaacaccaccgaaataaactccgtaaatactaaaacaaaaatttcctcactccccgcctaaccgtcgctcctccgctaactccgcgcccttctacgaaccgtctcccaccctctaaacgaacgcaaaaaatcgataccgaacgaaccgaacgccataaaaaacaactacctaacgaacgccgcgacgaaaaaactaaccgactaaaaacccgcgctaaaccgaaacatacgaaacccgaacgaaatcctactccaaacgctaccccgactactaaaacacgccgccctcccgaacctcaccgatctaccgacccgttaaaccctaccgttaaatacgaacgaaaaaaacccgacgaacgtcttcccgaaaaaacgaaacaaccgcgacgataaacacaacgccgacctcgaacgcccttatccgaaacctatctaaaacgacccccgtccgacccgaaactttcgaacttaccgaacccgaaaaaaaactttaacgaaccgcccccgaaattaacgacgaaaaatttataattcgacgttaacttaaaataaaaaaactaaacgctaattactaacctcgaaaaacacctatttattaccgaaaacctcctactaaattttaaatatttaac

SEQ ID NO: 33501 - DNA, 865 bp, Artificial Sequence
  chemically treated genomic DNA (Homo sapiens) CpG-island No: 33501
cgggagtgtttgggtcgtggcggggtcgttttaatcgcgttgcgttttcggcggtcgcgatttcggttttttgttaggagttagttgttttcggtggcgcgggaacggcgtttcgtagagagtggcgttgcggtttttttcggatacggttttgcggtttttttttttttcggttgggtttcgcgatcgttttcgttcgtttcgttcggtcgcgttacgttttttttcgttcggtttgggatagtttttttttttttttcgcgttttttatttattcggtcgggggtcgttgtttcggggttcgtcggggcgtcggcgagttttgcgcggggaaacggcgtaattagggttcgcgatttcgggatttagcggtagtcgaggtcgtcgttttcggaaaagttcgcggttcgggaggggaggagagcgggcgggacgcggggttttagaggcgttcgcgcggtcgatttcgggagcggggcgggaattaggggaaggggcgggggttttcgaggttggggttcgggggtcggacggggcgggcgttcggtcgtcgggttgacgtggagttcgtttagaaaggtttttcggggttatttgcgaaagtcgacgttttgtattttatttatggaggagcgagttcgttagcgtttaggagggttcgaggtcggtgcgcgtcgttggaggtcggatttcggttgttcgtttttcgtttagtttagtcgtcgaggttttcggttcgtttcgattttgcggtcgtcggcgtgtttcgcgggtgaattttgggggttggtattttgggggacggtagtcgggttttaattgttcgtaggtttttgtttagttcggcgtttagttcggttagttt

SEQ ID NO: 33502 - DNA, 865 bp, Artificial Sequence
  chemically treated genomic DNA (Homo sapiens) CpG-island No: 33502
aaactaaccgaactaaacgccgaactaaacaaaaacctacgaacaattaaaacccgactaccgtcccccaaaataccaacccccaaaattcacccgcgaaacacgccgacgaccgcaaaatcgaaacgaaccgaaaacctcgacgactaaactaaacgaaaaacgaacaaccgaaatccgacctccaacgacgcgcaccgacctcgaaccctcctaaacgctaacgaactcgctcctccataaataaaatacaaaacgtcgactttcgcaaataaccccgaaaaacctttctaaacgaactccacgtcaacccgacgaccgaacgcccgccccgtccgacccccgaaccccaacctcgaaaacccccgccccttcccctaattcccgccccgctcccgaaatcgaccgcgcgaacgcctctaaaaccccgcgtcccgcccgctctcctcccctcccgaaccgcgaacttttccgaaaacgacgacctcgactaccgctaaatcccgaaatcgcgaaccctaattacgccgtttccccgcgcaaaactcgccgacgccccgacgaaccccgaaacaacgacccccgaccgaataaataaaaaacgcgaaaaaaaaaaaaaaactatcccaaaccgaacgaaaaaaaacgtaacgcgaccgaacgaaacgaacgaaaacgatcgcgaaacccaaccgaaaaaaaaaaaaaccgcaaaaccgtatccgaaaaaaaccgcaacgccactctctacgaaacgccgttcccgcgccaccgaaaacaactaactcctaacaaaaaaccgaaatcgcgaccgccgaaaacgcaacgcgattaaaacgaccccgccacgacccaaacactcccg

SEQ ID NO: 33503 - DNA, 865 bp, Artificial Sequence
  chemically treated genomic DNA (Homo sapiens) CpG-island No: 33503
gagttggtcgagttgagcgtcgagttggataaggatttgcgggtaattgagattcgattgtcgttttttaaggtattagtttttagggtttattcgcggggtacgtcggcgatcgtagggtcggggcgagtcgggagtttcggcggttgggttgggcggaggacgggtagtcgaggttcggtttttagcggcgcgtatcggtttcgggtttttttgggcgttggcgggttcgtttttttataaataaaatatagggcgtcgattttcgtaagtgatttcgaggagtttttttaagcggattttacgttagttcgacgatcgggcgttcgtttcgttcggttttcgggttttagtttcggggattttcgtttttttttttagttttcgtttcgttttcgggatcggtcgcgcgggcgtttttaggatttcgcgtttcgttcgttttttttttttttcgagtcgcgaattttttcggaggcggcggtttcggttgtcgttgggtttcggggtcgcgggttttgattgcgtcgttttttcgcgtagagttcgtcggcgtttcgacgggtttcggagtagcggttttcggtcgggtgagtgggagacgcgggaggaggaagggggttgttttaggtcgggcgggagggaacgtggcgcggtcgggcggggcggacgggggcgatcgcggggtttagtcgggggaggaaggaatcgtagagtcgtgttcgggagggatcgtagcgttattttttgcggggcgtcgttttcgcgttatcgagggtagttaatttttagtagaggatcggggtcgcggtcgtcgggggcgtagcgcggttagggcggtttcgttacggtttaggtattttcg

SEQ ID NO: 33504 - DNA, 865 bp, Artificial Sequence
  chemically treated genomic DNA (Homo sapiens) CpG-island No: 33504
cgaaaatacctaaaccgtaacgaaaccgccctaaccgcgctacgcccccgacgaccgcgaccccgatcctctactaaaaattaactaccctcgataacgcgaaaacgacgccccgcaaaaaataacgctacgatccctcccgaacacgactctacgattccttcctcccccgactaaaccccgcgatcgcccccgtccgccccgcccgaccgcgccacgttccctcccgcccgacctaaaacaacccccttcctcctcccgcgtctcccactcacccgaccgaaaaccgctactccgaaacccgtcgaaacgccgacgaactctacgcgaaaaaacgacgcaatcaaaacccgcgaccccgaaacccaacgacaaccgaaaccgccgcctccgaaaaaattcgcgactcgaaaaaaaaaaaaaacgaacgaaacgcgaaatcctaaaaacgcccgcgcgaccgatcccgaaaacgaaacgaaaactaaaaaaaaaaacgaaaatccccgaaactaaaacccgaaaaccgaacgaaacgaacgcccgatcgtcgaactaacgtaaaatccgcttaaaaaaactcctcgaaatcacttacgaaaatcgacgccctatattttatttataaaaaaacgaacccgccaacgcccaaaaaaacccgaaaccgatacgcgccgctaaaaaccgaacctcgactacccgtcctccgcccaacccaaccgccgaaactcccgactcgccccgaccctacgatcgccgacgtaccccgcgaataaaccctaaaaactaataccttaaaaaacgacaatcgaatctcaattacccgcaaatccttatccaactcgacgctcaactcgaccaactc

SEQ ID NO: 33505 - DNA, 828 bp, Artificial Sequence
  chemically treated genomic DNA (Homo sapiens) CpG-island No: 33505
ttagcgttttagtcgcggttcgcgttttttcgtttcgttttttttttttttttttttttttttttttttttttaggtattttcgttttttttttttagcggttgtagtttttagttttaatttttcgcgtttatttttgggacgcgcgttttcgttttattttttgttttttttttttttttttttttttttttttttttggttttcgttttttttttttaggtcgttttttcggggttcgattgtttcggtgtttcgttttcggttcgcgttttgtttcgttttttttttgtattttttgagtcgttcgtcgtcgtcgtcgtagattcgtcgcgggagttttagtttaattcgagttcgatagttattgtttcggttttagttttagttttatagttcgcggcgttcgttcgagggagtttcggcgttcggggaaggttttagtgggttagcgcgttttcgtttagtttcgcgttttagttttgttcggttcggcgaggaaggatcgggaagatgaataacggcggtaaagtcgagaaggagaatatttcgagcgaggttaatttttaggaggaggaggtattgggcggttcggtgtggtggcgggggcgacgcgggatttagtgcgggcggtcggcggggcgcgggttcggggcgcggcggtggaagaaggtttaggtatggttcgtgtttcggacgtagttttatagtgtggttcggggagggtggatttcgggagcgtgtgtttttgtgtttacgcgcgtttgcgggttttaaattgcgtaattttaaggatttttcggagatttttgtaagtataatgtttag

SEQ ID NO: 33506 - DNA, 828 bp, Artificial Sequence
  chemically treated genomic DNA (Homo sapiens) CpG-island No: 33506
ctaaacattatacttacaaaaatctccgaaaaatccttaaaattacgcaatttaaaacccgcaaacgcgcgtaaacacaaaaacacacgctcccgaaatccaccctccccgaaccacactataaaactacgtccgaaacacgaaccatacctaaaccttcttccaccgccgcgccccgaacccgcgccccgccgaccgcccgcactaaatcccgcgtcgcccccgccaccacaccgaaccgcccaatacctcctcctcctaaaaattaacctcgctcgaaatattctccttctcgactttaccgccgttattcatcttcccgatccttcctcgccgaaccgaacaaaactaaaacgcgaaactaaacgaaaacgcgctaacccactaaaaccttccccgaacgccgaaactccctcgaacgaacgccgcgaactataaaactaaaactaaaaccgaaacaataactatcgaactcgaattaaactaaaactcccgcgacgaatctacgacgacgacgacgaacgactcaaaaaatacaaaaaaaaaacgaaacaaaacgcgaaccgaaaacgaaacaccgaaacaatcgaaccccgaaaaaacgacctaaaaaaaaaaaacgaaaaccaaaaaaaaaaaaaaaaaaaaaaaaaaaaaaaaaacaaaaaataaaacgaaaacgcgcgtcccaaaaataaacgcgaaaaattaaaactaaaaactacaaccgctaaaaaaaaaaaacgaaaatacctaaaaaaaaaaaaaaaaaaaaaaaaaaaaaaaaaaaacgaaacgaaaaaacgcgaaccgcgactaaaacgctaa

SEQ ID NO: 33507 - DNA, 828 bp, Artificial Sequence
  chemically treated genomic DNA (Homo sapiens) CpG-island No: 33507
ttgagtattatatttataaaagttttcgaaaagtttttggagttacgtaatttggggttcgtagacgcgcgtggatataaaaatatacgttttcgagatttatttttttcgggttatattgtggggttgcgttcggggtacgggttatgtttgaatttttttttatcgtcgcgtttcgggttcgcgtttcgtcggtcgttcgtattgggtttcgcgtcgttttcgttattatatcgagtcgtttagtattttttttttttgaaggttggtttcgttcggggtgttttttttttcggttttgtcgtcgttgtttattttttcggttttttttcgtcgggtcgggtagggttggggcgcggggttgggcgagggcgcgttagtttattggagtttttttcgggcgtcggggttttttcgggcgggcgtcgcgggttgtggggttggagttggagtcggggtagtggttgtcgggttcgggttgggttggggttttcgcggcgagtttgcgacggcggcggcgggcgatttaggaagtgtaagggagagacggggtagggcgcgggtcgggagcggggtatcgagataatcgggtttcgggagggcgatttggagagggagggcgggagttaggggaggaaggaagaaggaaggaaggaaggaagtaaaggatggggcgaggacgcgcgttttaggagtaagcgcggagagttggggttgggggttgtagtcgttggaaggaggggacgggggtgtttagagaggaggaggaggaggaagaggaggaggaggagcggggcggaggagcgcgggtcgcggttgggacgttgg

SEQ ID NO: 33508 - DNA, 828 bp, Artificial Sequence
  chemically treated genomic DNA (Homo sapiens) CpG-island No: 33508
ccaacgtcccaaccgcgacccgcgctcctccgccccgctcctcctcctcctcttcctcctcctcctcctctctaaacacccccgtcccctccttccaacgactacaacccccaaccccaactctccgcgcttactcctaaaacgcgcgtcctcgccccatcctttacttccttccttccttccttcttccttcctcccctaactcccgccctccctctccaaatcgccctcccgaaacccgattatctcgataccccgctcccgacccgcgccctaccccgtctctcccttacacttcctaaatcgcccgccgccgccgtcgcaaactcgccgcgaaaaccccaacccaacccgaacccgacaaccactaccccgactccaactccaaccccacaacccgcgacgcccgcccgaaaaaaccccgacgcccgaaaaaaactccaataaactaacgcgccctcgcccaaccccgcgccccaaccctacccgacccgacgaaaaaaaaccgaaaaaataaacaacgacgacaaaaccgaaaaaaaaaacaccccgaacgaaaccaaccttcaaaaaaaaaaaatactaaacgactcgatataataacgaaaacgacgcgaaacccaatacgaacgaccgacgaaacgcgaacccgaaacgcgacgataaaaaaaaattcaaacataacccgtaccccgaacgcaaccccacaatataacccgaaaaaaataaatctcgaaaacgtatatttttatatccacgcgcgtctacgaaccccaaattacgtaactccaaaaacttttcgaaaacttttataaatataatactcaa

SEQ ID NO: 33509 - DNA, 742 bp, Artificial Sequence
  chemically treated genomic DNA (Homo sapiens) CpG-island No: 33509
cggcgtcggatttattataaattttagtaggtatcgcgcgttcgtaatatgttagtttacgtttagtcgtcgttgggttttttggggtttgtagtttttacgtttttcgttttcggtaagtatttgaaagcgataaaggaaggtttcgggttagaggaagaggtaggtcgggttgatgaggtcgagtttgtcgattaagggtacggcgacggtggcggcgaattaatagcgcgtgatcgtcgggatgtttttgaattagttttcgatgttcgatattttcgatttataggtagttaagatgtataagatcgttcgatttttcgtgtcgatttttttacgacgcggtcggtttcgcgattgttaggtgtttaggtggaagtcgtcgaagtcgcgatgtagaaggcggagacgggcggacgtggcgttatcgaattcggattagcgaggtagttttttgaggcgaaattttttttttcggcgatcgcggacgacgtgattagaagtttcgtcgtttaaagggtaagcgtcgattttatcgttcggtcgaggttcggcgttttggggggcggagttaggtagagcgattatacgattggtgggaaaatagtggttgtttggattaacggtaaacgtttcggttagtggcgaggttaaatgttatttatttagtttttagagttttaatgcggttgggtttatttggagggtatttaaaggggacgaaggtaaacgaagtgtttag

SEQ ID NO: 33510 - DNA, 742 bp, Artificial Sequence
  chemically treated genomic DNA (Homo sapiens) CpG-island No: 33510
ctaaacacttcgtttaccttcgtcccctttaaataccctccaaataaacccaaccgcattaaaactctaaaaactaaataaataacatttaacctcgccactaaccgaaacgtttaccgttaatccaaacaaccactattttcccaccaatcgtataatcgctctacctaactccgccccccaaaacgccgaacctcgaccgaacgataaaatcgacgcttaccctttaaacgacgaaacttctaatcacgtcgtccgcgatcgccgaaaaaaaaaatttcgcctcaaaaaactacctcgctaatccgaattcgataacgccacgtccgcccgtctccgccttctacatcgcgacttcgacgacttccacctaaacacctaacaatcgcgaaaccgaccgcgtcgtaaaaaaatcgacacgaaaaatcgaacgatcttatacatcttaactacctataaatcgaaaatatcgaacatcgaaaactaattcaaaaacatcccgacgatcacgcgctattaattcgccgccaccgtcgccgtacccttaatcgacaaactcgacctcatcaacccgacctacctcttcctctaacccgaaaccttcctttatcgctttcaaatacttaccgaaaacgaaaaacgtaaaaactacaaaccccaaaaaacccaacgacgactaaacgtaaactaacatattacgaacgcgcgatacctactaaaatttataataaatccgacgccg

SEQ ID NO: 33511 - DNA, 742 bp, Artificial Sequence
  chemically treated genomic DNA (Homo sapiens) CpG-island No: 33511
ttagatatttcgtttgttttcgttttttttaaatattttttaggtggatttagtcgtattaaaattttgagaattaggtgaatggtatttggtttcgttattggtcggagcgtttgtcgttgatttaggtaattattgtttttttattagtcgtgtagtcgttttatttggtttcgttttttaggacgtcgagtttcggtcgggcggtaaaatcggcgtttattttttaagcggcgggatttttggttacgtcgttcgcggtcgtcggaaggggaagtttcgttttagaaggttgtttcgttggttcgaattcggtggcgttacgttcgttcgttttcgttttttgtatcgcggtttcggcggtttttatttagatatttaatagtcgcggagtcggtcgcgtcgtgagggggtcggtacggggagtcgggcggttttgtgtattttggttatttgtgggtcgaagatgtcggatatcggagattggtttaggagtatttcggcgattacgcgttattggttcgtcgttatcgtcgtcgtgtttttggtcggtaaattcggttttattagttcggtttatttttttttttggttcgaagtttttttttatcgtttttaggtatttatcggagacggggggcgtggagattataggttttaggaggtttagcggcggttaagcgtaggttggtatgttgcgggcgcgcggtgtttgttgggatttgtagtgggttcggcgtcg

SEQ ID NO: 33512 - DNA, 742 bp, Artificial Sequence
  chemically treated genomic DNA (Homo sapiens) CpG-island No: 33512
cgacgccgaacccactacaaatcccaacaaacaccgcgcgcccgcaacataccaacctacgcttaaccgccgctaaacctcctaaaacctataatctccacgccccccgtctccgataaatacctaaaaacgataaaaaaaaacttcgaaccaaaaaaaaaaataaaccgaactaataaaaccgaatttaccgaccaaaaacacgacgacgataacgacgaaccaataacgcgtaatcgccgaaatactcctaaaccaatctccgatatccgacatcttcgacccacaaataaccaaaatacacaaaaccgcccgactccccgtaccgaccccctcacgacgcgaccgactccgcgactattaaatatctaaataaaaaccgccgaaaccgcgatacaaaaaacgaaaacgaacgaacgtaacgccaccgaattcgaaccaacgaaacaaccttctaaaacgaaacttccccttccgacgaccgcgaacgacgtaaccaaaaatcccgccgcttaaaaaataaacgccgattttaccgcccgaccgaaactcgacgtcctaaaaaacgaaaccaaataaaacgactacacgactaataaaaaaacaataattacctaaatcaacgacaaacgctccgaccaataacgaaaccaaataccattcacctaattctcaaaattttaatacgactaaatccacctaaaaaatatttaaaaaaaacgaaaacaaacgaaatatctaa

SEQ ID NO: 33513 - DNA, 577 bp, Artificial Sequence
  chemically treated genomic DNA (Homo sapiens) CpG-island No: 33513
acggtgatgttggatcgaaaagataagcgtagttaggtaggttatcgcggttagttttaagttgattcggtattttcgcggtcggatcgtcggttttagagggagatatagagcggacgagttatcgagataacgcggaaaaaatcgtttcgtacgtcggaggataacgagagttgtcgggttgacgttatttttatttattgggtcgcgacgtttttatcggttgggcgaatttgtagtcgggcgtgtaggtattgttgtaggagcgttcgggtttgaggaattcggttatttttagttatggtttaagttagcgtcgcggtcggatagttattaggttatgtgtcgttggtttttttttcgacgcgttggcggggtagacgaggcggggtacgacgaagggtttgcgtcgattgtttagtggtttcgtttttaggagggcggggtttcggattgattttcgaatgtttcggatgtgcggttttggaggtcggcgtagcgttaagtttttcggtagtatttgtttaattttgtagaaggcgtttagtgtatatttttattaaacgattgaaaagat

SEQ ID NO: 33514 - DNA, 577 bp, Artificial Sequence
  chemically treated genomic DNA (Homo sapiens) CpG-island No: 33514
atcttttcaatcgtttaataaaaatatacactaaacgccttctacaaaattaaacaaatactaccgaaaaacttaacgctacgccgacctccaaaaccgcacatccgaaacattcgaaaatcaatccgaaaccccgccctcctaaaaacgaaaccactaaacaatcgacgcaaacccttcgtcgtaccccgcctcgtctaccccgccaacgcgtcgaaaaaaaaaccaacgacacataacctaataactatccgaccgcgacgctaacttaaaccataactaaaaataaccgaattcctcaaacccgaacgctcctacaacaatacctacacgcccgactacaaattcgcccaaccgataaaaacgtcgcgacccaataaataaaaataacgtcaacccgacaactctcgttatcctccgacgtacgaaacgattttttccgcgttatctcgataactcgtccgctctatatctccctctaaaaccgacgatccgaccgcgaaaataccgaatcaacttaaaactaaccgcgataacctacctaactacgcttatcttttcgatccaacatcaccgt

SEQ ID NO: 33515 - DNA, 577 bp, Artificial Sequence
  chemically treated genomic DNA (Homo sapiens) CpG-island No: 33515
gtttttttaatcgtttaataaaagtatatattgagcgttttttatagagttgggtaggtgttgtcgagaagtttagcgttacgtcggtttttaagatcgtatattcgggatattcgagagttagttcgaggtttcgtttttttaagggcggggttattgggtaatcggcgtaggtttttcgtcgtgtttcgtttcgtttgtttcgttagcgcgtcgagggaggggttagcgatatatggtttagtaattgttcggtcgcggcgttggtttaagttatggttgagggtagtcggattttttaggttcgggcgtttttatagtagtgtttgtacgttcggttgtaaattcgtttagtcgatggggacgtcgcggtttagtgggtggaggtaacgttagttcggtagttttcgttatttttcggcgtgcggggcggtttttttcgcgttgtttcggtgattcgttcgttttgtgtttttttttgagatcggcggttcggtcgcggggatatcgggttagtttgaagttggtcgcggtggtttgtttggttgcgtttgttttttcggtttagtattatcgt

SEQ ID NO: 33516 - DNA, 577 bp, Artificial Sequence
  chemically treated genomic DNA (Homo sapiens) CpG-island No: 33516
acgataatactaaaccgaaaaaacaaacgcaaccaaacaaaccaccgcgaccaacttcaaactaacccgatatccccgcgaccgaaccgccgatctcaaaaaaaaacacaaaacgaacgaatcaccgaaacaacgcgaaaaaaaccgccccgcacgccgaaaaataacgaaaactaccgaactaacgttacctccacccactaaaccgcgacgtccccatcgactaaacgaatttacaaccgaacgtacaaacactactataaaaacgcccgaacctaaaaaatccgactaccctcaaccataacttaaaccaacgccgcgaccgaacaattactaaaccatatatcgctaacccctccctcgacgcgctaacgaaacaaacgaaacgaaacacgacgaaaaacctacgccgattacccaataaccccgcccttaaaaaaacgaaacctcgaactaactctcgaatatcccgaatatacgatcttaaaaaccgacgtaacgctaaacttctcgacaacacctacccaactctataaaaaacgctcaatatatacttttattaaacgattaaaaaaac

SEQ ID NO: 33517 - DNA, 856 bp, Artificial Sequence
  chemically treated genomic DNA (Homo sapiens) CpG-island No: 33517
tcgtttttttagtttcgtatgttttatcgtatttatttatttacgcgtttagttatttaagttggcgcgggtttatttattttttgtttttttgttatttttcgtttgtatttcgcgtacgtcgtattttcgcgtttttgttcggttttgcgtttattatttgcgtttcggtcgggcgttgtcgggaggacgcgcgggtttagtcgcggttgcgcggggtcggggttggcggggagtcgggttgggggcggggggcgggcgttttttgcgggaagtcgggcggggtgggggagtttcggtcgcgtcgttttcggtcgtttcgcgtttcggaggggagggggcggcggtagcggcggcggcggtgagcggcgcggttgttttggggttatgtggattggcggtcgtcggtcgggtcggttgcgtcgggcggtgagtatttgcgagtcgggagggtagggcgcgggcgcgggcgcggaggcggggcgggcgttatttacgtttggggcggtttttgtttagcgcgggaggtggtcggtttttcgtttcgttttttttcgcgttgcgttttcgtcgtggaggttttattggttcgggaggagtcgggtcgggttttttgggaattgggtattttcgggtggggcggggatgtttagttttcgcgcgtcgtcgggagcgttcgggttttatcgcggggtttttgcgttttgatacgcgcgtttttgcggcggaaggaaaggagggacgggtgattaagggcgcggtcggaggattggggattcgtcgttgtttcgggcgggtggcgagggtgcgggtaggtttggattcgtttgcgtttgggggtagggttagtttttgt

SEQ ID NO: 33518 - DNA, 856 bp, Artificial Sequence
  chemically treated genomic DNA (Homo sapiens) CpG-island No: 33518
acaaaaactaaccctacccccaaacgcaaacgaatccaaacctacccgcaccctcgccacccgcccgaaacaacgacgaatccccaatcctccgaccgcgcccttaatcacccgtccctcctttccttccgccgcaaaaacgcgcgtatcaaaacgcaaaaaccccgcgataaaacccgaacgctcccgacgacgcgcgaaaactaaacatccccgccccacccgaaaatacccaattcccaaaaaacccgacccgactcctcccgaaccaataaaacctccacgacgaaaacgcaacgcgaaaaaaaacgaaacgaaaaaccgaccacctcccgcgctaaacaaaaaccgccccaaacgtaaataacgcccgccccgcctccgcgcccgcgcccgcgccctaccctcccgactcgcaaatactcaccgcccgacgcaaccgacccgaccgacgaccgccaatccacataaccccaaaacaaccgcgccgctcaccgccgccgccgctaccgccgccccctcccctccgaaacgcgaaacgaccgaaaacgacgcgaccgaaactcccccaccccgcccgacttcccgcaaaaaacgcccgccccccgcccccaacccgactccccgccaaccccgaccccgcgcaaccgcgactaaacccgcgcgtcctcccgacaacgcccgaccgaaacgcaaataataaacgcaaaaccgaacaaaaacgcgaaaatacgacgtacgcgaaatacaaacgaaaaataacaaaaaaacaaaaaataaataaacccgcgccaacttaaataactaaacgcgtaaataaataaatacgataaaacatacgaaactaaaaaaacga

SEQ ID NO: 33519 - DNA, 856 bp, Artificial Sequence
  chemically treated genomic DNA (Homo sapiens) CpG-island No: 33519
gtaggggttggttttgtttttagacgtaggcgggtttaggtttgttcgtattttcgttattcgttcgggatagcggcgggtttttagtttttcggtcgcgtttttggttattcgtttttttttttttttcgtcgtaggggcgcgcgtgttagggcgtaaggatttcgcgataggattcgggcgttttcggcggcgcgcggaggttgggtattttcgttttattcgagagtgtttagtttttaggagattcggttcggtttttttcgggttagtgaagtttttacggcgggggcgtagcgcggaggggagcggggcggggggtcggttatttttcgcgttgagtagggatcgttttaggcgtgggtggcgttcgtttcgttttcgcgttcgcgttcgcgttttgttttttcggttcgtaggtatttatcgttcggcgtagtcggttcggtcggcgatcgttagtttatatggttttagggtagtcgcgtcgtttatcgtcgtcgtcgttatcgtcgttttttttttttcgaggcgcgaagcggtcgggagcggcgcggtcggggtttttttatttcgttcggtttttcgtagggagcgttcgtttttcgtttttagttcggtttttcgttagtttcggtttcgcgtagtcgcggttgagttcgcgcgttttttcggtagcgttcggtcggggcgtaagtggtgggcgtagggtcgggtaggggcgcgggggtgcggcgtgcgcggggtataggcgaggaatggtagaggggtagggaatgaatgaattcgcgttagtttgaatggttgagcgcgtgaatgaatgagtgcggtagagtatgcggggttgggggggcgg

SEQ ID NO: 33520 - DNA, 856 bp, Artificial Sequence
  chemically treated genomic DNA (Homo sapiens) CpG-island No: 33520
ccgcccccccaaccccgcatactctaccgcactcattcattcacgcgctcaaccattcaaactaacgcgaattcattcattccctacccctctaccattcctcgcctataccccgcgcacgccgcacccccgcgcccctacccgaccctacgcccaccacttacgccccgaccgaacgctaccgaaaaaacgcgcgaactcaaccgcgactacgcgaaaccgaaactaacgaaaaaccgaactaaaaacgaaaaacgaacgctccctacgaaaaaccgaacgaaataaaaaaaccccgaccgcgccgctcccgaccgcttcgcgcctcgaaaaaaaaaaaacgacgataacgacgacgacgataaacgacgcgactaccctaaaaccatataaactaacgatcgccgaccgaaccgactacgccgaacgataaatacctacgaaccgaaaaaacaaaacgcgaacgcgaacgcgaaaacgaaacgaacgccacccacgcctaaaacgatccctactcaacgcgaaaaataaccgaccccccgccccgctcccctccgcgctacgcccccgccgtaaaaacttcactaacccgaaaaaaaccgaaccgaatctcctaaaaactaaacactctcgaataaaacgaaaatacccaacctccgcgcgccgccgaaaacgcccgaatcctatcgcgaaatccttacgccctaacacgcgcgcccctacgacgaaaaaaaaaaaaaaacgaataaccaaaaacgcgaccgaaaaactaaaaacccgccgctatcccgaacgaataacgaaaatacgaacaaacctaaacccgcctacgtctaaaaacaaaaccaacccctac

SEQ ID NO: 33521 - DNA, 635 bp, Artificial Sequence
  chemically treated genomic DNA (Homo sapiens) CpG-island No: 33521
cgcggcggttgtcggttggggcggggtattttacgattttttcggttagatacggtcgtttttttaggtgttttggtttgcgaggtattcgtagttcgttttttttttaggtgacgtatattggagacgtcgtcgtttagcgattcgggttcgagttttcgtttcggtcgttatggcggatgcggagtcggaggttgggggcggtagcgaggatggcggcggcggcggcggttcggttttttcgggttagagcggtagcgtcgtacgtgtggtttcgttgggtttcgagtagttgcggtaggttttggagtaggtgacgaaggcgtagtcgtcgtcgtcgtcgttttttttcgtgttgcgggacgcggcgcggcggttgcgggacgcggtttaataggtcgttttgtagcggggtcggggtatcgagttttcgcgtttgtcgcgtttgttttcgttttaggtgaggcgtcgggagggacgtggggaaattgaggttcgaagggggtcgacgtttcgcggcggggtagttgtttgttcggggaggttagtattcgttcgggttaagatttagggcgtttttaggttgagttttttagggacggcgttcggtttttatttgttattattttggtatt

SEQ ID NO: 33522 - DNA, 635 bp, Artificial Sequence
  chemically treated genomic DNA (Homo sapiens) CpG-island No: 33522
aataccaaaataataacaaataaaaaccgaacgccgtccctaaaaaactcaacctaaaaacgccctaaatcttaacccgaacgaatactaacctccccgaacaaacaactaccccgccgcgaaacgtcgacccccttcgaacctcaatttccccacgtccctcccgacgcctcacctaaaacgaaaacaaacgcgacaaacgcgaaaactcgataccccgaccccgctacaaaacgacctattaaaccgcgtcccgcaaccgccgcgccgcgtcccgcaacacgaaaaaaaacgacgacgacgacgactacgccttcgtcacctactccaaaacctaccgcaactactcgaaacccaacgaaaccacacgtacgacgctaccgctctaacccgaaaaaaccgaaccgccgccgccgccgccatcctcgctaccgcccccaacctccgactccgcatccgccataacgaccgaaacgaaaactcgaacccgaatcgctaaacgacgacgtctccaatatacgtcacctaaaaaaaaaacgaactacgaatacctcgcaaaccaaaacacctaaaaaaacgaccgtatctaaccgaaaaaatcgtaaaataccccgccccaaccgacaaccgccgcg

SEQ ID NO: 33523 - DNA, 635 bp, Artificial Sequence
  chemically treated genomic DNA (Homo sapiens) CpG-island No: 33523
aatgttagggtggtgataggtgggggtcgaacgtcgtttttaagaagtttagtttggggacgttttgagttttaattcgggcggatattggttttttcggataagtagttatttcgtcgcggggcgtcggtttttttcgggttttagtttttttacgtttttttcgacgttttatttggggcgggagtaggcgcggtaggcgcgggggttcggtgtttcggtttcgttgtagggcggtttgttgggtcgcgtttcgtagtcgtcgcgtcgcgtttcgtagtacgaaggggggcggcggcggcggcggttgcgttttcgttatttgttttaggatttgtcgtagttgttcggggtttagcggggttatacgtgcgacgttgtcgttttggttcggaggagtcgggtcgtcgtcgtcgtcgttattttcgttgtcgtttttagttttcggtttcgtattcgttatggcggtcgaggcggggattcgaattcgggtcgttgagcgacggcgtttttaatgtacgttatttaggagaggggcgggttacgagtgtttcgtaggttaagatatttaggaaggcgatcgtgtttggtcgggaaagtcgtggagtgtttcgttttagtcgataatcgtcgcg

SEQ ID NO: 33524 - DNA, 635 bp, Artificial Sequence
  chemically treated genomic DNA (Homo sapiens) CpG-island No: 33524
cgcgacgattatcgactaaaacgaaacactccacgactttcccgaccaaacacgatcgccttcctaaatatcttaacctacgaaacactcgtaacccgcccctctcctaaataacgtacattaaaaacgccgtcgctcaacgacccgaattcgaatccccgcctcgaccgccataacgaatacgaaaccgaaaactaaaaacgacaacgaaaataacgacgacgacgacgacccgactcctccgaaccaaaacgacaacgtcgcacgtataaccccgctaaaccccgaacaactacgacaaatcctaaaacaaataacgaaaacgcaaccgccgccgccgccgccccccttcgtactacgaaacgcgacgcgacgactacgaaacgcgacccaacaaaccgccctacaacgaaaccgaaacaccgaacccccgcgcctaccgcgcctactcccgccccaaataaaacgtcgaaaaaaacgtaaaaaaactaaaacccgaaaaaaaccgacgccccgcgacgaaataactacttatccgaaaaaaccaatatccgcccgaattaaaactcaaaacgtccccaaactaaacttcttaaaaacgacgttcgacccccacctatcaccaccctaacatt

SEQ ID NO: 33525 - DNA, 1113 bp, Artificial Sequence
  chemically treated genomic DNA (Homo sapiens) CpG-island No: 33525
gttttagacgtttcgtcggttattagcgtttcgggaaaggtcgttcgcgttttttcgttttttttttttagggttcgtcgtttagagttcggatgttggatttaatttttgagtcgggttttttatttttataaaagggtagcgtttcgcggggtcgagattgtcgtttcgtcgcgtttttcgttattttcgcgtcgtttcgttttacgtcgtttcgtttcgttcgggattcgtagttttttttttcgagcgcggcgtcgggagggcgggggtagaggcgaggtcggtcggattcgtttagggtagttttgcgggcggcgaaggagggagttagcgcgtttagtttagttaggttcggatagagggggcggggagagggtggagcgcggggagttaggcgaggggtcgcgacgacgggattttattagtcgtttcggttataggtagcgttcgttagtcgaggaatcggacgcggatatcgtcgtttcgcgagtttttagtttttcgtttgttgtcgcgcgagtttcgggttcggagcgttaggagcgcgcggtgagggagcgggatttcgtcgggattcgagggggcgcggcggggaggggtacggggcgttagttcgcgttgtgtttcggggtcggtcggtaggtgaagtttttcgcggttcgttaggcggggacggtgtggggcgggcggcgtcgggatcgaggaacgttgcggggcgagcggggcgtagggttttttcgtagtttcggtcgtcgtcgttttttcgagtttttgtcgaaagtttcgggttttttattattttttagttcgtggtcggcgttgcgaattcggtgggattcgtttttttttgggggagtgacgtttacgagagttatttttttcgcgttcgtaggaaggagttatggttttggacgggataaggatgttagatggttgttacgcggacgggacgtgggaattgagtgtttatgtgacggatttgaatcgcgatgttattttgagagtgatcggcgaggtgtatattggaggcgtgatgtttaagttggtggagaaattcggtgagtagtattttagtcgcgtttaattaatgattttttagaattggtaggg

SEQ ID NO: 33526 - DNA, 1113 bp, Artificial Sequence
  chemically treated genomic DNA (Homo sapiens) CpG-island No: 33526
ccctaccaattctaaaaaatcattaattaaacgcgactaaaatactactcaccgaatttctccaccaacttaaacatcacgcctccaatatacacctcgccgatcactctcaaaataacatcgcgattcaaatccgtcacataaacactcaattcccacgtcccgtccgcgtaacaaccatctaacatccttatcccgtccaaaaccataactccttcctacgaacgcgaaaaaaataactctcgtaaacgtcactcccccaaaaaaaaacgaatcccaccgaattcgcaacgccgaccacgaactaaaaaataataaaaaacccgaaactttcgacaaaaactcgaaaaaacgacgacgaccgaaactacgaaaaaaccctacgccccgctcgccccgcaacgttcctcgatcccgacgccgcccgccccacaccgtccccgcctaacgaaccgcgaaaaacttcacctaccgaccgaccccgaaacacaacgcgaactaacgccccgtacccctccccgccgcgccccctcgaatcccgacgaaatcccgctccctcaccgcgcgctcctaacgctccgaacccgaaactcgcgcgacaacaaacgaaaaactaaaaactcgcgaaacgacgatatccgcgtccgattcctcgactaacgaacgctacctataaccgaaacgactaataaaatcccgtcgtcgcgacccctcgcctaactccccgcgctccaccctctccccgccccctctatccgaacctaactaaactaaacgcgctaactccctccttcgccgcccgcaaaactaccctaaacgaatccgaccgacctcgcctctacccccgccctcccgacgccgcgctcgaaaaaaaaaactacgaatcccgaacgaaacgaaacgacgtaaaacgaaacgacgcgaaaataacgaaaaacgcgacgaaacgacaatctcgaccccgcgaaacgctacccttttataaaaataaaaaacccgactcaaaaattaaatccaacatccgaactctaaacgacgaaccctaaaaaaaaaaaacgaaaaaacgcgaacgacctttcccgaaacgctaataaccgacgaaacgtctaaaac

SEQ ID NO: 33527 - DNA, 1113 bp, Artificial Sequence
  chemically treated genomic DNA (Homo sapiens) CpG-island No: 33527
ttttattaattttgggaagttattagttggacgcggttgggatgttatttatcgagtttttttattagtttaagtattacgtttttaatgtgtatttcgtcggttatttttagggtgatatcgcggtttaggttcgttatatggatatttagtttttacgtttcgttcgcgtagtagttatttggtatttttatttcgtttagagttatggtttttttttgcgagcgcggaggaaatggttttcgtaagcgttatttttttaaagaaaggcgaattttatcgaattcgtagcgtcggttacgggttgggaggtggtggaggattcggggttttcggtagaaattcgggagggcggcggcggtcggggttgcgggaggattttacgtttcgttcgtttcgtagcgtttttcggtttcggcgtcgttcgttttatatcgttttcgtttagcggatcgcggagggttttatttgtcggtcggtttcgagatatagcgcgggttgacgtttcgtgttttttttcgtcgcgttttttcgggtttcggcggggtttcgtttttttatcgcgcgtttttagcgtttcgggttcgggattcgcgcggtaataggcgaggggttggaggttcgcggggcggcggtgttcgcgttcggtttttcggttggcgaacgttgtttgtggtcggagcggttaatggagtttcgtcgtcgcggtttttcgtttggtttttcgcgttttatttttttttcgttttttttgttcgagtttggttgggttgggcgcgttggttttttttttcgtcgttcgtagagttgttttgagcgggttcggtcggtttcgtttttgttttcgttttttcggcgtcgcgttcgggggagggggttgcgggtttcgggcggggcggggcggcgtggggcggggcggcgcgggggtggcggggggcgcggcggggcggtaatttcggtttcgcggagcgttgtttttttatggaaatgaaggattcggtttaggaattgaatttaatattcgggttttaggcggcgggttttgaggagggggagcgggggagcgcgggcggtttttttcggggcgttggtggtcggcggggcgtttagagt

SEQ ID NO: 33528 - DNA, 1113 bp, Artificial Sequence
  chemically treated genomic DNA (Homo sapiens) CpG-island No: 33528
actctaaacgccccgccgaccaccaacgccccgaaaaaaaccgcccgcgctcccccgctccccctcctcaaaacccgccgcctaaaacccgaatattaaattcaattcctaaaccgaatccttcatttccataaaaaaacaacgctccgcgaaaccgaaattaccgccccgccgcgccccccgccacccccgcgccgccccgccccacgccgccccgccccgcccgaaacccgcaaccccctcccccgaacgcgacgccgaaaaaacgaaaacaaaaacgaaaccgaccgaacccgctcaaaacaactctacgaacgacgaaaaaaaaaaccaacgcgcccaacccaaccaaactcgaacaaaaaaaacgaaaaaaaaataaaacgcgaaaaaccaaacgaaaaaccgcgacgacgaaactccattaaccgctccgaccacaaacaacgttcgccaaccgaaaaaccgaacgcgaacaccgccgccccgcgaacctccaacccctcgcctattaccgcgcgaatcccgaacccgaaacgctaaaaacgcgcgataaaaaaacgaaaccccgccgaaacccgaaaaaacgcgacgaaaaaaaacacgaaacgtcaacccgcgctatatctcgaaaccgaccgacaaataaaaccctccgcgatccgctaaacgaaaacgatataaaacgaacgacgccgaaaccgaaaaacgctacgaaacgaacgaaacgtaaaatcctcccgcaaccccgaccgccgccgccctcccgaatttctaccgaaaaccccgaatcctccaccacctcccaacccgtaaccgacgctacgaattcgataaaattcgcctttctttaaaaaaataacgcttacgaaaaccatttcctccgcgctcgcaaaaaaaaaccataactctaaacgaaataaaaataccaaataactactacgcgaacgaaacgtaaaaactaaatatccatataacgaacctaaaccgcgatatcaccctaaaaataaccgacgaaatacacattaaaaacgtaatacttaaactaataaaaaaactcgataaataacatcccaaccgcgtccaactaataacttcccaaaattaataaaa

SEQ ID NO: 33529 - DNA, 709 bp, Artificial Sequence
  chemically treated genomic DNA (Homo sapiens) CpG-island No: 33529
  unsure (209)
ttcggaattcgtttttcgttattaggcgtcggagttgtcgttttcgaggtttttaggagatgtagaagatattgttttgaatgtttatagtcggttggtaatgtcgttttagagtagagcggcgggtgtcgtttcgtttttttataggttcgtagtatttttagtcgcgcgcgaggttttttgggaagtgaagttcggagattaggggnggtcggtttttagcgcgttaagttgttaattttttaattttcgttttttttcggcgttttttttttaagttcgaagttagggtttaggattgttgcgatgtattagtttcgttttttattttttatttagaggaggcggaaatgtttaggtgaacgcgaagttttttattacgagtcggtttttagtaaggtcgtgcgtagtgtgggcgggagttttaagttagttagcggcgacgttgggagggttcggagtaggtcgggtttcgaatagcgaaagttttaatatggcggttagattggttatagagcgggaagagaaagtcggggattagtaggtcgtacggcgtagacggggttcgttttttttatttattttcggaatttaaagtcggttttcggaagtcgggacgatgttcgtatgataatcgacgttggagtttggaggtgagagtgattgacgaggagtgggttaagtgattagaagttagaatttttggtgt

SEQ ID NO: 33530 - DNA, 709 bp, Artificial Sequence
  chemically treated genomic DNA (Homo sapiens) CpG-island No: 33530
  unsure (501)
acaccaaaaattctaacttctaatcacttaacccactcctcgtcaatcactctcacctccaaactccaacgtcgattatcatacgaacatcgtcccgacttccgaaaaccgactttaaattccgaaaataaataaaaaaaacgaaccccgtctacgccgtacgacctactaatccccgactttctcttcccgctctataaccaatctaaccgccatattaaaactttcgctattcgaaacccgacctactccgaaccctcccaacgtcgccgctaactaacttaaaactcccgcccacactacgcacgaccttactaaaaaccgactcgtaataaaaaacttcgcgttcacctaaacatttccgcctcctctaaataaaaaataaaaaacgaaactaatacatcgcaacaatcctaaaccctaacttcgaacttaaaaaaaaaacgccgaaaaaaaacgaaaattaaaaaattaacaacttaacgcgctaaaaaccgaccncccctaatctccgaacttcacttcccaaaaaacctcgcgcgcgactaaaaatactacgaacctataaaaaaacgaaacgacacccgccgctctactctaaaacgacattaccaaccgactataaacattcaaaacaatatcttctacatctcctaaaaacctcgaaaacgacaactccgacgcctaataacgaaaaacgaattccgaa

SEQ ID NO: 33531 - DNA, 709 bp, Artificial Sequence
  chemically treated genomic DNA (Homo sapiens) CpG-island No: 33531
  unsure (501)
gtattaaaaattttgatttttggttatttaatttatttttcgttaattatttttatttttaaattttaacgtcggttgttatgcggatatcgtttcggttttcggaagtcggttttaaatttcggaagtaaatggaggaggcgggtttcgtttgcgtcgtgcggtttgttagttttcggtttttttttttcgttttatggttagtttggtcgttatgttggagttttcgttgttcggggttcggtttgtttcgggtttttttagcgtcgtcgttagttgatttagggttttcgtttatattgcgtacggttttgttgagggtcggttcgtagtgggaggtttcgcgtttatttgaatattttcgttttttttggatgggggatgagaggcggggttgatgtatcgtagtagttttggattttgatttcggatttggagaagaaacgtcgaggaggaacgggagttagggggttagtagtttggcgcgttgggagtcggttntttttggttttcggattttattttttaggaggtttcgcgcgcgattggaagtgttgcgagtttataagaaggcgaggcggtattcgtcgttttgttttggggcggtattgttagtcggttgtaggtatttagggtagtgttttttgtattttttaggaatttcgggagcggtagtttcggcgtttggtagcgagaggcgggtttcgga

SEQ ID NO: 33532 - DNA, 709 bp, Artificial Sequence
  chemically treated genomic DNA (Homo sapiens) CpG-island No: 33532
  unsure (209)
tccgaaacccgcctctcgctaccaaacgccgaaactaccgctcccgaaattcctaaaaaatacaaaaaacactaccctaaatacctacaaccgactaacaataccgccccaaaacaaaacgacgaataccgcctcgccttcttataaactcgcaacacttccaatcgcgcgcgaaacctcctaaaaaataaaatccgaaaaccaaaaanaaccgactcccaacgcgccaaactactaaccccctaactcccgttcctcctcgacgtttcttctccaaatccgaaatcaaaatccaaaactactacgatacatcaaccccgcctctcatcccccatccaaaaaaaacgaaaatattcaaataaacgcgaaacctcccactacgaaccgaccctcaacaaaaccgtacgcaatataaacgaaaaccctaaatcaactaacgacgacgctaaaaaaacccgaaacaaaccgaaccccgaacaacgaaaactccaacataacgaccaaactaaccataaaacgaaaaaaaaaaaccgaaaactaacaaaccgcacgacgcaaacgaaacccgcctcctccatttacttccgaaatttaaaaccgacttccgaaaaccgaaacgatatccgcataacaaccgacgttaaaatttaaaaataaaaataattaacgaaaaataaattaaataaccaaaaatcaaaatttttaatac

SEQ ID NO: 33533 - DNA, 741 bp, Artificial Sequence
  chemically treated genomic DNA (Homo sapiens) CpG-island No: 33533
  unsure (160, 170..171, 173)
gttcgtcgcgagttaggtttagtatatatagtttcgtcgggtggagtagagcgcgcgatttagttagttttattcgggatatttttcgcgtcgggaattttattgggggttgggcggtcggtttaggggcggggcgtagtagaagggttttcgacggttngttattattnnnnttatttaaaagttttcgttttcggtcgatttttttcgtttgtttaagcgtggtttcgtttagtatgcgggtgttaattggttgtcggaggtgttttttataatttttcggttgtcgtagcgcgcggagagcgtgataggattttacggagtttgcgcggaagggcgggattaattgtggcgagggttgaggtgggaggtcgggggcgttttcgcgggttaagcgtgcgagagagcgaggtgtattagcgggtatggatggtttgtgtagagtttagttttgtgagggcggcgaattaggtagcgaatcgcgggagttttttattggtagtagttcgagttttagacgttaatttgtaataaaagtagcgatggttaagtttataaagggggtatttcggaaagtcgttcgtatgtacggaagagatgaaagtttcgtgcgcgttagaaaacggtttcgtaatttatttcgggaagtaaatgcgttgttttttaaaatataaagttggcgaattgtgtttgatttcgttggggttttggaatgtttcgtttttataggaaaaaaattta

SEQ ID NO: 33534 - DNA, 741 bp, Artificial Sequence
  chemically treated genomic DNA (Homo sapiens) CpG-island No: 33534
  unsure (569..570, 572, 582)
taaatttttttcctataaaaacgaaacattccaaaaccccaacgaaatcaaacacaattcgccaactttatattttaaaaaacaacgcatttacttcccgaaataaattacgaaaccgttttctaacgcgcacgaaactttcatctcttccgtacatacgaacgactttccgaaataccccctttataaacttaaccatcgctacttttattacaaattaacgtctaaaactcgaactactaccaataaaaaactcccgcgattcgctacctaattcgccgccctcacaaaactaaactctacacaaaccatccatacccgctaatacacctcgctctctcgcacgcttaacccgcgaaaacgcccccgacctcccacctcaaccctcgccacaattaatcccgcccttccgcgcaaactccgtaaaatcctatcacgctctccgcgcgctacgacaaccgaaaaattataaaaaacacctccgacaaccaattaacacccgcatactaaacgaaaccacgcttaaacaaacgaaaaaaatcgaccgaaaacgaaaacttttaaataannnnaataataacnaaccgtcgaaaacccttctactacgccccgcccctaaaccgaccgcccaacccccaataaaattcccgacgcgaaaaatatcccgaataaaactaactaaatcgcgcgctctactccacccgacgaaactatatatactaaacctaactcgcgacgaac

SEQ ID NO: 33535 - DNA, 741 bp, Artificial Sequence
  chemically treated genomic DNA (Homo sapiens) CpG-island No: 33535
  unsure (569..570, 572, 582)
tggattttttttttgtgaggacgaggtattttaaaattttagcggggttaggtatagttcgttaattttatgttttggggggtagcgtatttgtttttcgaagtgagttgcgaaatcgttttttagcgcgtacggggtttttatttttttcgtgtatgcgaacggtttttcgagatgttttttttatgggtttggttatcgttatttttgttataaattaacgtttgggattcggattgttgttaataggaaattttcgcgattcgttgtttagttcgtcgtttttataagattggattttgtataggttatttatgttcgttggtgtatttcgttttttcgtacgtttaattcgcggggacgttttcgattttttattttagttttcgttatagttagtttcgttttttcgcgtagatttcgtggagttttgttacgtttttcgcgcgttgcggtagtcgggagattgtgaagggtattttcggtagttaattaatattcgtatattgggcgggattacgtttgggtaggcggagggggtcgatcgaaggcggggatttttgagtgannnngatgatggtnaatcgtcggaggtttttttattgcgtttcgtttttgagtcggtcgtttagtttttagtggggttttcggcgcggggaatgtttcgggtggagttggttgagtcgcgcgttttgttttattcgacggggttgtgtgtgttgggtttggttcgcggcgaat

SEQ ID NO: 33536 - DNA, 741 bp, Artificial Sequence
  chemically treated genomic DNA (Homo sapiens) CpG-island No: 33536
  unsure (160, 170..171, 173)
attcgccgcgaaccaaacccaacacacacaaccccgtcgaataaaacaaaacgcgcgactcaaccaactccacccgaaacattccccgcgccgaaaaccccactaaaaactaaacgaccgactcaaaaacgaaacgcaataaaaaaacctccgacgattnaccatcatcnnnntcactcaaaaatccccgccttcgatcgaccccctccgcctacccaaacgtaatcccgcccaatatacgaatattaattaactaccgaaaatacccttcacaatctcccgactaccgcaacgcgcgaaaaacgtaacaaaactccacgaaatctacgcgaaaaaacgaaactaactataacgaaaactaaaataaaaaatcgaaaacgtccccgcgaattaaacgtacgaaaaaacgaaatacaccaacgaacataaataacctatacaaaatccaatcttataaaaacgacgaactaaacaacgaatcgcgaaaatttcctattaacaacaatccgaatcccaaacgttaatttataacaaaaataacgataaccaaacccataaaaaaaacatctcgaaaaaccgttcgcatacacgaaaaaaataaaaaccccgtacgcgctaaaaaacgatttcgcaactcacttcgaaaaacaaatacgctaccccccaaaacataaaattaacgaactatacctaaccccgctaaaattttaaaatacctcgtcctcacaaaaaaaaaatcca

SEQ ID NO: 33537 - DNA, 802 bp, Artificial Sequence
  chemically treated genomic DNA (Homo sapiens) CpG-island No: 33537
gtcgcgcgttttcggttttttcgggtagcgtcggggttttgttaggcgcgcgttgttgtttgtttggattgcgtttattttgattttgaagttagcggttttattgatacgttttgaaaagtgggagttatacgcgggattcggagatcgcgttaaagttttacgtacgacggcgttcggcggatgatttacgttcgtacgtcggcgtatgcgcggttaagtcggtgttcgcgtttattagcgttatgcgttcgtttttttttttttttcgtgttttgtttcgatggttcggttcgcgtcggggggggtttagggcgttcgcgggaaatttggcgggaatcgcgttcgttttttttttttttttttttttttttgttttcgtcgcgtatttcgtcgttatggagtagcgtcgcgttatcgattttttcgcgcgtcgtcgtttcgggttttttcgtatcgcggcgtttaagttggtttgtcgtatttttagtttcgttaggttcgtatttcgcgtttcggttttcgttattagtggtagtcgtaagcgcgttcgttcgttcgtcgttttcggacgcgattaggttagtatatcggttcgtaggagattgcggttgttagtggacgaggtgaggggcgtggggagattgaggtcggggagttgggggcggggagattgaggttcgggggtagggttcggggaaattgaggcggagggacgggggcggggaaataggcgggggggacggggcgtagggaattttgggataggtcgggggattttgggggcgttttgttattattg

SEQ ID NO: 33538 - DNA, 802 bp, Artificial Sequence
  chemically treated genomic DNA (Homo sapiens) CpG-island No: 33538
caataataacaaaacgcccccaaaatcccccgacctatcccaaaattccctacgccccgtcccccccgcctatttccccgcccccgtccctccgcctcaatttccccgaaccctacccccgaacctcaatctccccgcccccaactccccgacctcaatctccccacgcccctcacctcgtccactaacaaccgcaatctcctacgaaccgatatactaacctaatcgcgtccgaaaacgacgaacgaacgaacgcgcttacgactaccactaataacgaaaaccgaaacgcgaaatacgaacctaacgaaactaaaaatacgacaaaccaacttaaacgccgcgatacgaaaaaacccgaaacgacgacgcgcgaaaaaatcgataacgcgacgctactccataacgacgaaatacgcgacgaaaacaaaaaaaaaaaaaaaaaaaaaaaaaacgaacgcgattcccgccaaatttcccgcgaacgccctaaaccccccccgacgcgaaccgaaccatcgaaacaaaacacgaaaaaaaaaaaaaaacgaacgcataacgctaataaacgcgaacaccgacttaaccgcgcatacgccgacgtacgaacgtaaatcatccgccgaacgccgtcgtacgtaaaactttaacgcgatctccgaatcccgcgtataactcccacttttcaaaacgtatcaataaaaccgctaacttcaaaatcaaaataaacgcaatccaaacaaacaacaacgcgcgcctaacaaaaccccgacgctacccgaaaaaaccgaaaacgcgcgac

SEQ ID NO: 33539 - DNA, 802 bp, Artificial Sequence
  chemically treated genomic DNA (Homo sapiens) CpG-island No: 33539
tagtggtggtagggcgtttttaggatttttcggtttgttttagagttttttgcgtttcgtttttttcgtttgttttttcgttttcgttttttcgttttagttttttcgagttttgttttcgggttttagttttttcgtttttaatttttcggttttagtttttttacgttttttatttcgtttattgatagtcgtagttttttgcgggtcggtatgttggtttggtcgcgttcgggggcggcgggcgggcgggcgcgtttgcggttgttattggtagcggaggtcggggcgcggagtgcgggtttggcggggttgggggtgcggtaggttagtttgggcgtcgcgatgcgggggggttcggggcggcggcgcgcgaagaagtcggtgacgcggcgttgttttatggcggcggagtgcgcggcgaaagtaaggaaagaaggaagggaggaagaggcgggcgcggttttcgttaaatttttcgcgggcgttttggatttttttcggcgcggatcgaattatcggggtagagtacggggggagggaagggacgggcgtatggcgttggtgggcgcgggtatcggtttggtcgcgtatgcgtcgacgtgcgggcgtggattattcgtcgggcgtcgtcgtgcgtgggattttagcgcggttttcggatttcgcgtgtggtttttattttttagggcgtgttagtggggtcgttggttttagggttagaatgagcgtaatttaggtaaatagtagcgcgcgtttgataaaatttcggcgttgttcgggggagtcgaggacgcgcggt

SEQ ID NO: 33540 - DNA, 802 bp, Artificial Sequence
  chemically treated genomic DNA (Homo sapiens) CpG-island No: 33540
accgcgcgtcctcgactcccccgaacaacgccgaaattttatcaaacgcgcgctactatttacctaaattacgctcattctaaccctaaaaccaacgaccccactaacacgccctaaaaaataaaaaccacacgcgaaatccgaaaaccgcgctaaaatcccacgcacgacgacgcccgacgaataatccacgcccgcacgtcgacgcatacgcgaccaaaccgatacccgcgcccaccaacgccatacgcccgtcccttccctccccccgtactctaccccgataattcgatccgcgccgaaaaaaatccaaaacgcccgcgaaaaatttaacgaaaaccgcgcccgcctcttcctcccttccttctttccttactttcgccgcgcactccgccgccataaaacaacgccgcgtcaccgacttcttcgcgcgccgccgccccgaacccccccgcatcgcgacgcccaaactaacctaccgcacccccaaccccgccaaacccgcactccgcgccccgacctccgctaccaataacaaccgcaaacgcgcccgcccgcccgccgcccccgaacgcgaccaaaccaacataccgacccgcaaaaaactacgactatcaataaacgaaataaaaaacgtaaaaaaactaaaaccgaaaaattaaaaacgaaaaaactaaaacccgaaaacaaaactcgaaaaaactaaaacgaaaaaacgaaaacgaaaaaacaaacgaaaaaaacgaaacgcaaaaaactctaaaacaaaccgaaaaatcctaaaaacgccctaccaccacta

SEQ ID NO: 33541 - DNA, 646 bp, Artificial Sequence
  chemically treated genomic DNA (Homo sapiens) CpG-island No: 33541
tggtagtgcgggtggcgatggtagtgcgggtggcgatggtagtgcgggtggggatggtagtgcgggtggcgatggtagtgcgggtggggatggtattgtgggtggcgatggtagttagggtggcgatggtagtgcgggtggggatggtagtgtgggtggcgatggtagttagggtggcgatggtagtgcgggtggcgatggtagtgcgggtggcgatggtagtgcgggtggggatggtagttagagtggcgatggtagtgcgggtggcgatggtagtgtgggtggcgatggtagtgcgggtggggatggtagtgtgggtggcgatggtagtgcgggtggcgatggtagttagggtggcgatggtagtgcgggtggggatggtagttagagtggcgatggtagtgcgggtggcgatggtagtgcgggtggcgatggtagtgcgggtggcgatggtagtgtgggtggggatggtagtgcgggtggggatggtagtgcgggtggcgatggtagttagggtggcgatggtagttagggtggcgatggtagtgcgggtggggatggtagtgcgggtggcgatggtagttagggtggcgatggttgttgaggtattttgcggtttgtttggaagttgttgtagtgaggcggt

SEQ ID NO: 33542 - DNA, 646 bp, Artificial Sequence
  chemically treated genomic DNA (Homo sapiens) CpG-island No: 33542
accgcctcactacaacaacttccaaacaaaccgcaaaatacctcaacaaccatcgccaccctaactaccatcgccacccgcactaccatccccacccgcactaccatcgccaccctaactaccatcgccaccctaactaccatcgccacccgcactaccatccccacccgcactaccatccccacccacactaccatcgccacccgcactaccatcgccacccgcactaccatcgccacccgcactaccatcgccactctaactaccatccccacccgcactaccatcgccaccctaactaccatcgccacccgcactaccatcgccacccacactaccatccccacccgcactaccatcgccacccacactaccatcgccacccgcactaccatcgccactctaactaccatccccacccgcactaccatcgccacccgcactaccatcgccacccgcactaccatcgccaccctaactaccatcgccacccacactaccatccccacccgcactaccatcgccaccctaactaccatcgccacccacaataccatccccacccgcactaccatcgccacccgcactaccatccccacccgcactaccatcgccacccgcactaccatcgccacccgcactacca

SEQ ID NO: 33543 - DNA, 646 bp, Artificial Sequence
  chemically treated genomic DNA (Homo sapiens) CpG-island No: 33543
gtcgttttattgtagtagtttttaaataagtcgtagggtattttagtagttatcgttattttgattgttatcgttattcgtattgttatttttattcgtattgttatcgttattttgattgttatcgttattttgattgttatcgttattcgtattgttatttttattcgtattgttatttttatttatattgttatcgttattcgtattgttatcgttattcgtattgttatcgttattcgtattgttatcgttattttgattgttatttttattcgtattgttatcgttattttgattgttatcgttattcgtattgttatcgttatttatattgttatttttattcgtattgttatcgttatttatattgttatcgttattcgtattgttatcgttattttgattgttatttttattcgtattgttatcgttattcgtattgttatcgttattcgtattgttatcgttattttgattgttatcgttatttatattgttatttttattcgtattgttatcgttattttgattgttatcgttatttataatgttatttttattcgtattgttatcgttattcgtattgttatttttattcgtattgttatcgttattcgtattgttatcgttattcgtattgtta

SEQ ID NO: 33544 - DNA, 646 bp, Artificial Sequence
  chemically treated genomic DNA (Homo sapiens) CpG-island No: 33544
taacaatacgaataacgataacaatacgaataacgataacaatacgaataaaaataacaatacgaataacgataacaatacgaataaaaataacattataaataacgataacaatcaaaataacgataacaatacgaataaaaataacaatataaataacgataacaatcaaaataacgataacaatacgaataacgataacaatacgaataacgataacaatacgaataaaaataacaatcaaaataacgataacaatacgaataacgataacaatataaataacgataacaatacgaataaaaataacaatataaataacgataacaatacgaataacgataacaatcaaaataacgataacaatacgaataaaaataacaatcaaaataacgataacaatacgaataacgataacaatacgaataacgataacaatacgaataacgataacaatataaataaaaataacaatacgaataaaaataacaatacgaataacgataacaatcaaaataacgataacaatcaaaataacgataacaatacgaataaaaataacaatacgaataacgataacaatcaaaataacgataactactaaaataccctacgacttatttaaaaactactacaataaaacgac

SEQ ID NO: 33545 - DNA, 1073 bp, Artificial Sequence
  chemically treated genomic DNA (Homo sapiens) CpG-island No: 33545
ttcgtgtcgtttttcgcggaaacgtcggggtcgtacgtagttaacggtgttttgagttgttgttgttgtatgtggggtgttttttacggtttttaaagacggaagcggggcgggacgagggggtagacggatggtttttatagttagttagcggtgggaggagggttaggcgcggtagatcggttttcggtttcggtgggttttgaattttgaaaggtgggcgcgggtaggtggggtgtgggggggcgtcggggtagaaggggaggggtaggtgggtgcgggataggggtcggagtgagaatcgggggtcggggtagggggtagggagtgagagttcgggggtcggggtagcgggtgagagtcgggggtcggggtagggggtgagagtcgggggtcggggtagcgggtgagagtcggggtcggggtaggaggtgagagtcgggggtcggggtagcgggtgagagtcggggtcggggtaggaggtgagagtcgggggtcggggtagcgggtgagagtcgggggtcggggtagggggtgagagtcgggggtcggggtagcgggtgagagtcgggggtaggggtagggggtgagagtcggggtcggggtagggggtgagagtcgaggtcggggtaggaggtgagagtcgggggtcggggtagcgggtgagagtcgggggtcggggtaggaggtgagagtcgggggtcggggtagcgggtgagagtcggggtcggggtaggaggtgagagtcgggggtcggggtagcgggtgagagtcgggggtcggggtagggggtgagagtcggggtcggggtaggaggtgagagtcgggggtcggggtagcgggtgagagtcgggggtaggggtagcgggtgagagtcgggggtaggggtagcgggtgagagtcgggggtcggggtaggaggtgagagtcgggggtcggggtagcgggtgagagtcgggggtcggggtagcgggtgagagtcgggggtcggggtagcgggtgagagtcgggggtcggggtagggggtgagtgtcgggggtttggttaggttgcgattgattgcgagtttttatt

SEQ ID NO: 33546 - DNA, 1073 bp, Artificial Sequence
  chemically treated genomic DNA (Homo sapiens) CpG-island No: 33546
aataaaaactcgcaatcaatcgcaacctaaccaaacccccgacactcaccccctaccccgacccccgactctcacccgctaccccgacccccgactctcacccgctaccccgacccccgactctcacccgctaccccgacccccgactctcacctcctaccccgacccccgactctcacccgctacccctacccccgactctcacccgctacccctacccccgactctcacccgctaccccgacccccgactctcacctcctaccccgaccccgactctcaccccctaccccgacccccgactctcacccgctaccccgacccccgactctcacctcctaccccgaccccgactctcacccgctaccccgacccccgactctcacctcctaccccgacccccgactctcacccgctaccccgacccccgactctcacctcctaccccgacctcgactctcaccccctaccccgaccccgactctcaccccctacccctacccccgactctcacccgctaccccgacccccgactctcaccccctaccccgacccccgactctcacccgctaccccgacccccgactctcacctcctaccccgaccccgactctcacccgctaccccgacccccgactctcacctcctaccccgaccccgactctcacccgctaccccgacccccgactctcaccccctaccccgacccccgactctcacccgctaccccgacccccgaactctcactccctaccccctaccccgacccccgattctcactccgacccctatcccgcacccacctacccctccccttctaccccgacgcccccccacaccccacctacccgcgcccacctttcaaaattcaaaacccaccgaaaccgaaaaccgatctaccgcgcctaaccctcctcccaccgctaactaactataaaaaccatccgtctaccccctcgtcccgccccgcttccgtctttaaaaaccgtaaaaaacaccccacatacaacaacaacaactcaaaacaccgttaactacgtacgaccccgacgtttccgcgaaaaacgacacgaa

SEQ ID NO: 33547 - DNA, 1073 bp, Artificial Sequence
  chemically treated genomic DNA (Homo sapiens) CpG-island No: 33547
ggtgggggttcgtagttagtcgtagtttggttaggttttcggtatttattttttatttcggttttcgatttttattcgttatttcggttttcggtttttattcgttatttcggttttcggtttttattcgttatttcggttttcggtttttattttttatttcggttttcggtttttattcgttatttttgttttcggtttttattcgttatttttgttttcggtttttattcgttatttcggttttcggtttttattttttatttcggtttcggtttttattttttatttcggttttcggtttttattcgttatttcggttttcggtttttattttttatttcggtttcggtttttattcgttatttcggttttcggtttttattttttatttcggttttcggtttttattcgttatttcggttttcggtttttattttttatttcggtttcggtttttattttttatttcggtttcggtttttattttttatttttgttttcggtttttattcgttatttcggttttcggtttttattttttatttcggttttcggtttttattcgttatttcggttttcggtttttattttttatttcggtttcggtttttattcgttatttcggttttcggtttttattttttatttcggtttcggtttttattcgttatttcggttttcggtttttattttttatttcggttttcggtttttattcgttatttcggttttcgggtttttattttttattttttatttcggttttcggtttttatttcggtttttgtttcgtatttatttgtttttttttttttgtttcggcgtttttttatattttatttgttcgcgtttattttttagggtttagagtttatcggaatcggaagtcgatttgtcgcgtttggttttttttttatcgttgattggttgtaaaagttattcgtttattttttcgtttcgtttcgttttcgtttttagggatcgtaaaaaatattttatatatagtagtagtagtttaaggtatcgttagttacgtgcggtttcggcgttttcgcgaagggcggtacggg

SEQ ID NO: 33548 - DNA, 1073 bp, Artificial Sequence
  chemically treated genomic DNA (Homo sapiens) CpG-island No: 33548
cccgtaccgcccttcgcgaaaacgccgaaaccgcacgtaactaacgataccttaaactactactactatatataaaatattttttacgatccctaaaaacgaaaacgaaacgaaacgaaaaaataaacgaataacttttacaaccaatcaacgataaaaaaaaaaccaaacgcgacaaatcgacttccgattccgataaactctaaaccctaaaaaataaacgcgaacaaataaaatataaaaaaacgccgaaacaaaaaaaaaaaaacaaataaatacgaaacaaaaaccgaaataaaaaccgaaaaccgaaataaaaaataaaaaataaaaacccgaaaaccgaaataacgaataaaaaccgaaaaccgaaataaaaaataaaaaccgaaaaccgaaataacgaataaaaaccgaaaccgaaataaaaaataaaaaccgaaaaccgaaataacgaataaaaaccgaaaccgaaataaaaaataaaaaccgaaaaccgaaataacgaataaaaaccgaaaaccgaaataaaaaataaaaaccgaaaaccgaaataacgaataaaaaccgaaaacaaaaataaaaaataaaaaccgaaaccgaaataaaaaataaaaaccgaaaccgaaataaaaaataaaaaccgaaaaccgaaataacgaataaaaaccgaaaaccgaaataaaaaataaaaaccgaaaaccgaaataacgaataaaaaccgaaaccgaaataaaaaataaaaaccgaaaaccgaaataacgaataaaaaccgaaaaccgaaataaaaaataaaaaccgaaaccgaaataaaaaataaaaaccgaaaaccgaaataacgaataaaaaccgaaaacaaaaataacgaataaaaaccgaaaacaaaaataacgaataaaaaccgaaaaccgaaataaaaaataaaaaccgaaaaccgaaataacgaataaaaaccgaaaaccgaaataacgaataaaaaccgaaaaccgaaataacgaataaaaatcgaaaaccgaaataaaaaataaataccgaaaacctaaccaaactacgactaactacgaacccccacc

SEQ ID NO: 33549 - DNA, 1199 bp, Artificial Sequence
  chemically treated genomic DNA (Homo sapiens) CpG-island No: 33549
gttttcggttcgttcggttcgttcggtttcgggtcgggtttcggcggtttcgagttcgggggcgaggtcggcggggtcgacgttatgttttcgagaggttagtggtgcggagggcgcgggcggtagataaaggcgtttagggcgcggcggcgggcgcgggtattttttcggcggcgcgggcgggcgcgcgcggggcgttcgggttgttggggttggcgttcgggttttgttttgttttcgtttattttcgtatcgcgttttagttgttttcggttcggcggcgcggcgggcgtaggtttatggcggcggggcggtttagggagggcggcgaggattcgggcggcggatggcgggggacgggggtcgaggaggtcgggggacgggggtcgaggaggtcggaggtcgcggagtttgtgaagtaggatgaggagattaaggaggttgaggcgtttgaggtattcggagaattaacgtcgtcgtcgtttaggtttcgtttttcgtcgggtttgacgttagtacgtttcggcggggttttagtttttcgtcggtttgttgtagaggtaggcgtcgggtgtgtcgcggtagtgtagcggtcgcgaaggggtgttttgttgtatgttatatttttcgtttcgttagagcgggggtttcgagtttcgggcgtgggacgcgggggtgtttcgaggttgcgagtggaggcgtgacgtgacgtttttggtaagaggcgcgcggagttaggttttatttagaacgtgttttcgtcgtatagttattagcgggcgcgatcgttatttacgtatggtgcggtcgagtaaacggtatcgtttggcgagcgagagacgtaaagggatatagttttttaggagttgagtttttcgggggtaaagcgtttttacgttgatgagattaggaggcggcgtacgtttggtttcgcggtttaggggttgtaggtgttttagggttcgcggggcgtagacgtcgtagagggcgacgttttgttcgggtttcgcgcggattcgggggacgtagggtttgatacggagtgcggaggggttttagatacgtagtttatgttttttgaaattagaggtacgcgcggttacgcgttaggttttttttttaagtttgtgattaagattttcgggatttttagcgttgggacgggcgcgttggtttacgtttaagcgggaggatcgttt

SEQ ID NO: 33550 - DNA, 1199 bp, Artificial Sequence
  chemically treated genomic DNA (Homo sapiens) CpG-island No: 33550
aaacgatcctcccgcttaaacgtaaaccaacgcgcccgtcccaacgctaaaaatcccgaaaatcttaatcacaaacttaaaaaaaaaacctaacgcgtaaccgcgcgtacctctaatttcaaaaaacataaactacgtatctaaaacccctccgcactccgtatcaaaccctacgtcccccgaatccgcgcgaaacccgaacaaaacgtcgccctctacgacgtctacgccccgcgaaccctaaaacacctacaacccctaaaccgcgaaaccaaacgtacgccgcctcctaatctcatcaacgtaaaaacgctttacccccgaaaaactcaactcctaaaaaactatatccctttacgtctctcgctcgccaaacgataccgtttactcgaccgcaccatacgtaaataacgatcgcgcccgctaataactatacgacgaaaacacgttctaaataaaacctaactccgcgcgcctcttaccaaaaacgtcacgtcacgcctccactcgcaacctcgaaacacccccgcgtcccacgcccgaaactcgaaacccccgctctaacgaaacgaaaaatataacatacaacaaaacaccccttcgcgaccgctacactaccgcgacacacccgacgcctacctctacaacaaaccgacgaaaaactaaaaccccgccgaaacgtactaacgtcaaacccgacgaaaaacgaaacctaaacgacgacgacgttaattctccgaatacctcaaacgcctcaacctccttaatctcctcatcctacttcacaaactccgcgacctccgacctcctcgacccccgtcccccgacctcctcgacccccgtcccccgccatccgccgcccgaatcctcgccgccctccctaaaccgccccgccgccataaacctacgcccgccgcgccgccgaaccgaaaacaactaaaacgcgatacgaaaataaacgaaaacaaaacaaaacccgaacgccaaccccaacaacccgaacgccccgcgcgcgcccgcccgcgccgccgaaaaaatacccgcgcccgccgccgcgccctaaacgcctttatctaccgcccgcgccctccgcaccactaacctctcgaaaacataacgtcgaccccgccgacctcgcccccgaactcgaaaccgccgaaacccgacccgaaaccgaacgaaccgaacgaaccgaaaac

SEQ ID NO: 33551 - DNA, 1199 bp, Artificial Sequence
  chemically treated genomic DNA (Homo sapiens) CpG-island No: 33551
aagcgattttttcgtttgggcgtgggttagcgcgttcgttttaacgttgggagtttcggagattttggttataggtttaagggaaaggtttagcgcgtggtcgcgcgtgtttttggttttaagggatatggattgcgtgtttggggttttttcgtatttcgtgttagattttgcgtttttcgggttcgcgcgggattcgggtagggcgtcgttttttgcggcgtttgcgtttcgcgaattttggggtatttgtaatttttgggtcgcggagttaggcgtgcgtcgttttttggttttattaacgtgagaacgttttattttcgaagagtttagtttttagggggttatgtttttttgcgtttttcgttcgttaggcggtgtcgtttattcgatcgtattatgcgtgggtagcggtcgcgttcgttggtagttgtgcggcgggaatacgttttaagtaaggtttgatttcgcgcgttttttgttagggacgttacgttacgtttttattcgtagtttcggagtattttcgcgttttacgttcgaagttcgggattttcgttttggcgaaacgaggaatatgatatatagtaaaatattttttcgcggtcgttgtattgtcgcgatatattcggcgtttgtttttatagtaagtcggcgaggggttgggatttcgtcgggacgtgttgacgttaggttcgacggggggcggggtttgggcggcggcggcgttagtttttcgggtattttaggcgttttagtttttttagtttttttattttgttttataggtttcgcggttttcggttttttcggttttcgtttttcggttttttcggttttcgtttttcgttattcgtcgttcggattttcgtcgttttttttaggtcgtttcgtcgttatgggtttgcgttcgtcgcgtcgtcgggtcgagggtagttgaggcgcggtgcgaagatgggcgaggatagagtagggttcgagcgttagttttagtagttcgggcgtttcgcgcgcgttcgttcgcgtcgtcgaggggatgttcgcgttcgtcgtcgcgttttgagcgtttttgtttgtcgttcgcgtttttcgtattattagtttttcgggagtatggcgtcggtttcgtcggtttcgttttcgggttcggagtcgtcggggttcgattcggagtcgggcgggtcggacgggtcgggggt

SEQ ID NO: 33552 - DNA, 1199 bp, Artificial Sequence
  chemically treated genomic DNA (Homo sapiens) CpG-island No: 33552
acccccgacccgtccgacccgcccgactccgaatcgaaccccgacgactccgaacccgaaaacgaaaccgacgaaaccgacgccatactcccgaaaaactaataatacgaaaaacgcgaacgacaaacaaaaacgctcaaaacgcgacgacgaacgcgaacatcccctcgacgacgcgaacgaacgcgcgcgaaacgcccgaactactaaaactaacgctcgaaccctactctatcctcgcccatcttcgcaccgcgcctcaactaccctcgacccgacgacgcgacgaacgcaaacccataacgacgaaacgacctaaaaaaaacgacgaaaatccgaacgacgaataacgaaaaacgaaaaccgaaaaaaccgaaaaacgaaaaccgaaaaaaccgaaaaccgcgaaacctataaaacaaaataaaaaaactaaaaaaactaaaacgcctaaaatacccgaaaaactaacgccgccgccgcccaaaccccgccccccgtcgaacctaacgtcaacacgtcccgacgaaatcccaacccctcgccgacttactataaaaacaaacgccgaatatatcgcgacaatacaacgaccgcgaaaaaatattttactatatatcatattcctcgtttcgccaaaacgaaaatcccgaacttcgaacgtaaaacgcgaaaatactccgaaactacgaataaaaacgtaacgtaacgtccctaacaaaaaacgcgcgaaatcaaaccttacttaaaacgtattcccgccgcacaactaccaacgaacgcgaccgctacccacgcataatacgatcgaataaacgacaccgcctaacgaacgaaaaacgcaaaaaaacataaccccctaaaaactaaactcttcgaaaataaaacgttctcacgttaataaaaccaaaaaacgacgcacgcctaactccgcgacccaaaaattacaaataccccaaaattcgcgaaacgcaaacgccgcaaaaaacgacgccctacccgaatcccgcgcgaacccgaaaaacgcaaaatctaacacgaaatacgaaaaaaccccaaacacgcaatccatatcccttaaaaccaaaaacacgcgcgaccacgcgctaaacctttcccttaaacctataaccaaaatctccgaaactcccaacgttaaaacgaacgcgctaacccacgcccaaacgaaaaaatcgctt

SEQ ID NO: 33553 - DNA, 1145 bp, Artificial Sequence
  chemically treated genomic DNA (Homo sapiens) CpG-island No: 33553
tcgcgagtacgcggagttcgttgttcggttaattatttcgttttattttcgttatttttagcggttttttattttaggcggtttttcgggtttcgcggttgtaaattaggttttatcgtacgttttttacgcggtttcggttttgtgaagggcggcggcggggtaaagaggggtagagattattcggggtgaggcgggcgtttttatttttgggcgtattcgggcggggggcggggggcgggacggttggtcggcgttttcgtttcggttaggtttgtagttcgagttttcgtaattatttttcgagttaggcgaggaggagttcgtagttcggtcgttttcgttggcgtattttttttttatttagacgtagaggtttaggtttcgtttttttattggtcgtttagtaatagttgcgtcgtcgtcgtcgtcgtcgtcgcgttttttttattcgtttttttatcgttcgcgatcggttgttgaagagcggacgggtagtggtacgtttattggttgaggttcgtagtcgcgttagtcggtttcgatcgtatttcgcgacgtgattggttggagcggcgttttttttcgatattcgtttttgattggttttcgcgtatatttttattcgtaggattagttatttttttttttgttttagttttttatttttaattcggttttttttcgggcgggagtggggcgggagcggacgttcgcggaacgcgaacggttaatgggggcgcggagagagggtcgggaggtgggttttgcggtcgggaggttcgcgggggaatgtttagttaatgggttcgcgttttatatttcgagttttggagcgttttcgtcggttgttggcgttttgtcgggtcgcgtttagggttacgttcggttgttcgtcgcgcgggaggggcgttaatttttaaggttgggagtacgtagcgaggttcgcgcgggagatagcggggttgttattgtggcgtgtttagcgttattatggtggggttcgggggtttttcggttattgttgggcgtgagggattcgttcggagaattattagtttggcgggtgtggttcgggtcggtgagagcgaagagttttacggatttttggagtttttacgggtttcgtttagttttaggggatt

SEQ ID NO: 33554 - DNA, 1145 bp, Artificial Sequence
  chemically treated genomic DNA (Homo sapiens) CpG-island No: 33554
aatcccctaaaactaaacgaaacccgtaaaaactccaaaaatccgtaaaactcttcgctctcaccgacccgaaccacacccgccaaactaataattctccgaacgaatccctcacgcccaacaataaccgaaaaacccccgaaccccaccataataacgctaaacacgccacaataacaaccccgctatctcccgcgcgaacctcgctacgtactcccaaccttaaaaattaacgcccctcccgcgcgacgaacaaccgaacgtaaccctaaacgcgacccgacaaaacgccaacaaccgacgaaaacgctccaaaactcgaaatataaaacgcgaacccattaactaaacattcccccgcgaacctcccgaccgcaaaacccacctcccgaccctctctccgcgcccccattaaccgttcgcgttccgcgaacgtccgctcccgccccactcccgcccgaaaaaaaaccgaattaaaaataaaaaactaaaacaaaaaaaaaaataactaatcctacgaataaaaatatacgcgaaaaccaatcaaaaacgaatatcgaaaaaaaacgccgctccaaccaatcacgtcgcgaaatacgatcgaaaccgactaacgcgactacgaacctcaaccaataaacgtaccactacccgtccgctcttcaacaaccgatcgcgaacgataaaaaaacgaataaaaaaaacgcgacgacgacgacgacgacgacgcaactattactaaacgaccaataaaaaaacgaaacctaaacctctacgtctaaataaaaaaaaaatacgccaacgaaaacgaccgaactacgaactcctcctcgcctaactcgaaaaataattacgaaaactcgaactacaaacctaaccgaaacgaaaacgccgaccaaccgtcccgccccccgccccccgcccgaatacgcccaaaaataaaaacgcccgcctcaccccgaataatctctacccctctttaccccgccgccgcccttcacaaaaccgaaaccgcgtaaaaaacgtacgataaaacctaatttacaaccgcgaaacccgaaaaaccgcctaaaataaaaaaccgctaaaaataacgaaaataaaacgaaataattaaccgaacaacgaactccgcgtactcgcga

SEQ ID NO: 33555 - DNA, 1145 bp, Artificial Sequence
  chemically treated genomic DNA (Homo sapiens) CpG-island No: 33555
agttttttgggattgggcgagattcgtggaggttttaggggttcgtagagtttttcgtttttatcgattcgggttatattcgttaagttggtagtttttcgaacggattttttacgtttagtaatggtcggagggttttcgggttttattataatagcgttaagtacgttataatggtagtttcgttgtttttcgcgcgggtttcgttgcgtgtttttaattttgggagttggcgtttttttcgcgcgacggatagtcgggcgtggttttgggcgcgattcgataggacgttagtagtcggcgggggcgttttaggattcgagatgtggggcgcgggtttattggttgagtattttttcgcgagtttttcggtcgtagggtttatttttcggtttttttttcgcgtttttattggtcgttcgcgtttcgcgggcgttcgttttcgttttattttcgttcggagggaaatcgggttgggggtgagaggttaaagtaaggaggaggatgattggttttgcggataagggtgtgcgcgagagttaattaaaagcggatgtcgaaaagaggcgtcgttttagttagttacgtcgcgaggtgcggtcggggtcggttgacgcgattgcgggttttagttaatgggcgtgttattgttcgttcgttttttagtagtcggtcgcgggcggtggaaaagcgagtgaagagagcgcgacggcggcggcggcggcggcgtagttattgttggacggttagtgggagagcgaggtttgagtttttgcgtttaggtgagaagggggtgcgttagcgggagcggtcgggttgcgggttttttttcgtttggttcgggaagtggttgcgggagttcgggttgtaggtttggtcgaggcgggggcgtcgattagtcgtttcgtttttcgtttttcgttcgggtacgtttagaagtgagggcgttcgttttatttcgggtggtttttgtttttttttgtttcgtcgtcgttttttatagggtcgggatcgcgtgggggacgtacggtggggtttggtttgtagtcgcggagttcggggagtcgtttggggtgggaggtcgttagaggtggcgaaggtggggcggggtggttagtcgagtagcgggtttcgcgtgttcgcgg

SEQ ID NO: 33556 - DNA, 1145 bp, Artificial Sequence
  chemically treated genomic DNA (Homo sapiens) CpG-island No: 33556
ccgcgaacacgcgaaacccgctactcgactaaccaccccgccccaccttcgccacctctaacgacctcccaccccaaacgactccccgaactccgcgactacaaaccaaaccccaccgtacgtcccccacgcgatcccgaccctataaaaaacgacgacgaaacaaaaaaaaacaaaaaccacccgaaataaaacgaacgccctcacttctaaacgtacccgaacgaaaaacgaaaaacgaaacgactaatcgacgcccccgcctcgaccaaacctacaacccgaactcccgcaaccacttcccgaaccaaacgaaaaaaaacccgcaacccgaccgctcccgctaacgcacccccttctcacctaaacgcaaaaactcaaacctcgctctcccactaaccgtccaacaataactacgccgccgccgccgccgccgtcgcgctctcttcactcgcttttccaccgcccgcgaccgactactaaaaaacgaacgaacaataacacgcccattaactaaaacccgcaatcgcgtcaaccgaccccgaccgcacctcgcgacgtaactaactaaaacgacgcctcttttcgacatccgcttttaattaactctcgcgcacacccttatccgcaaaaccaatcatcctcctccttactttaacctctcacccccaacccgatttccctccgaacgaaaataaaacgaaaacgaacgcccgcgaaacgcgaacgaccaataaaaacgcgaaaaaaaaaccgaaaaataaaccctacgaccgaaaaactcgcgaaaaaatactcaaccaataaacccgcgccccacatctcgaatcctaaaacgcccccgccgactactaacgtcctatcgaatcgcgcccaaaaccacgcccgactatccgtcgcgcgaaaaaaacgccaactcccaaaattaaaaacacgcaacgaaacccgcgcgaaaaacaacgaaactaccattataacgtacttaacgctattataataaaacccgaaaaccctccgaccattactaaacgtaaaaaatccgttcgaaaaactaccaacttaacgaatataacccgaatcgataaaaacgaaaaactctacgaacccctaaaacctccacgaatctcgcccaatcccaaaaaact

SEQ ID NO: 33557 - DNA, 1504 bp, Artificial Sequence
  chemically treated genomic DNA (Homo sapiens) CpG-island No: 33557
cgataattcgatttttcgttaggagagattcgatttaggtttgcgtcgcgaggtttttagttcgtttttttttgcgattttaaatttgggttttgatttttcgtcggtcgcggtggttcgggttattcggcggcggttgatagttgagcgtaaaggcgtcgcggttaaggttttcgcggagtagttcgggatgcgtacgtcgagggttaaggaggaggtcgttcggtttggagttgggatcgtaggttgggggtcgggatattcgggtttcgtcgggtcgggggtagggtcgcgggtttgatagttgttgcggttcgcgcggacgcgcgttttttgtagttcgttttttttatgtttgatttattattttttgttttttttttttttgttgttttaaaatatttttcgacgttagtaaaatataatgcgtttcggtcgtcgtaaatagtcgggagggagagtatatattcggcgcggcgcggtcgtcggttcggtttttatttttttttcgtttttagaaaatgttataaaagcgggtagggcgcggggagggcggttgcgcgttcggcggtcggggtttttttttcgcgtcgtttttttacgttttttcgttcgtttcgcgcgttcgtttttttcgtaaatttgtttcgttatttcgtttagcggcggggttcggggttcggggttcgggatttatttcgtcggagaattttgcgttttttttcgttttttttttttcgcgttttttcggttcgtagttttttttcggtagtcggcgaggtgggtagttcgtgggttatcgaaagttcgcggaggggacgcgtattatatggtagttcgtttttagtttttcgagtgcgtcgggaagggggaggggaaggggcgaggggaggtcggggggaaagcgagagcggggcggcggcgggagtgggtaggcggggtggcgagggcggcggtcgtttacgttagcgttgtgcgatcgtagttcgggcgtgtacggtcgttgttgtcgttgttgttgttgttgttgttgttgaggcggcggcggttcggcgttgtttgtttcgcgtcgcgcggtttgcgtttttttcggaacgtttatatttttaatcgttatattgttgatattcggcgttgacgttattcgttttttatttataataattttacgggagtcgggtagcgtattttttcggtcgttggggcgcggtacgttcggcgattagcgtaagtcgtttcgcgaatggcgtttcgggggttggggcggggggcgggggacgggggcgggcgcgcgcgtttcgttggttcgcgggagggggcgcgtttttatgtcgtcgtagtagtagattttttcgttttgtgcggtcgcgcggttcggagagttttttttttttcggttcggttgatcgtttcgttcggtttggttttttcggttacgaaagacgagggttgggggtatagtagggtgagagtagtggtgagggttggtgtggtacgtggggag

SEQ ID NO: 33558 - DNA, 1504 bp, Artificial Sequence
  chemically treated genomic DNA (Homo sapiens) CpG-island No: 33558
ctccccacgtaccacaccaaccctcaccactactctcaccctactatacccccaaccctcgtctttcgtaaccgaaaaaaccaaaccgaacgaaacgatcaaccgaaccgaaaaaaaaaaaactctccgaaccgcgcgaccgcacaaaacgaaaaaatctactactacgacgacataaaaacgcgccccctcccgcgaaccaacgaaacgcgcgcgcccgcccccgtcccccgccccccgccccaacccccgaaacgccattcgcgaaacgacttacgctaatcgccgaacgtaccgcgccccaacgaccgaaaaaatacgctacccgactcccgtaaaattattataaataaaaaacgaataacgtcaacgccgaatatcaacaatataacgattaaaaatataaacgttccgaaaaaaacgcaaaccgcgcgacgcgaaacaaacaacgccgaaccgccgccgcctcaacaacaacaacaacaacaacaacgacaacaacgaccgtacacgcccgaactacgatcgcacaacgctaacgtaaacgaccgccgccctcgccaccccgcctacccactcccgccgccgccccgctctcgctttccccccgacctcccctcgccccttcccctcccccttcccgacgcactcgaaaaactaaaaacgaactaccatataatacgcgtcccctccgcgaactttcgataacccacgaactacccacctcgccgactaccgaaaaaaaactacgaaccgaaaaaacgcgaaaaaaaaaaaacgaaaaaaaacgcaaaattctccgacgaaataaatcccgaaccccgaaccccgaaccccgccgctaaacgaaataacgaaacaaatttacgaaaaaaacgaacgcgcgaaacgaacgaaaaaacgtaaaaaaacgacgcgaaaaaaaaaccccgaccgccgaacgcgcaaccgccctccccgcgccctacccgcttttataacattttctaaaaacgaaaaaaaaataaaaaccgaaccgacgaccgcgccgcgccgaatatatactctccctcccgactatttacgacgaccgaaacgcattatattttactaacgtcgaaaaatattttaaaacaacaaaaaaaaaaaaaacaaaaaataataaatcaaacataaaaaaaacgaactacaaaaaacgcgcgtccgcgcgaaccgcaacaactatcaaacccgcgaccctacccccgacccgacgaaacccgaatatcccgacccccaacctacgatcccaactccaaaccgaacgacctcctccttaaccctcgacgtacgcatcccgaactactccgcgaaaaccttaaccgcgacgcctttacgctcaactatcaaccgccgccgaataacccgaaccaccgcgaccgacgaaaaatcaaaacccaaatttaaaatcgcaaaaaaaaacgaactaaaaacctcgcgacgcaaacctaaatcgaatctctcctaacgaaaaatcgaattatcg

SEQ ID NO: 33559 - DNA, 1504 bp, Artificial Sequence
  chemically treated genomic DNA (Homo sapiens) CpG-island No: 33559
ttttttacgtgttatattagtttttattattatttttattttgttatgtttttaattttcgtttttcgtggtcgggaaggttaggtcgagcggggcggttagtcgggtcgggagggagggggtttttcgggtcgcgcggtcgtataaagcggggagatttgttgttgcggcggtatggaggcgcgttttttttcgcgagttagcggagcgcgcgcgttcgttttcgtttttcgtttttcgttttagttttcggagcgttattcgcggagcggtttacgttagtcgtcgggcgtatcgcgttttagcggtcggggaggtgcgttgttcggttttcgtaaagttattgtgaatggggagcgggtgacgttagcgtcgaatgttaataatgtagcgattgagagtgtgggcgtttcggggagagcgtaagtcgcgcggcgcggagtaaatagcgtcgagtcgtcgtcgttttagtagtagtagtagtagtagtagcggtagtagcggtcgtgtacgttcgggttgcggtcgtatagcgttaacgtgagcggtcgtcgttttcgttatttcgtttgtttattttcgtcgtcgtttcgttttcgtttttttttcggttttttttcgttttttttttttttttttttcggcgtattcggggggttgggaacgagttgttatgtgatgcgcgtttttttcgcgagttttcggtgatttacgaattgtttatttcgtcggttgtcgggagggggttgcgagtcgggaagacgcggggaagaggaggcggaaaaggacgtaaagtttttcggcgaggtgagtttcgggtttcgggtttcgggtttcgtcgttgggcggggtggcggggtaagtttgcggggggagcgggcgcgcggggcgggcggggaggcgtggggaaacggcgcgggaagggagtttcggtcgtcgggcgcgtagtcgtttttttcgcgttttgttcgtttttatggtattttttaggaacgggaagggggtgggagtcgagtcggcggtcgcgtcgcgtcgaatgtgtgttttttttttcggttgtttacggcggtcgaggcgtattgtattttgttggcgtcgaagggtgttttggaatagtagagggaggaggagtagagagtaataagttaggtatggggagggcgggttgtaggaggcgcgcgttcgcgcgagtcgtagtagttgttagattcgcggttttgttttcggttcggcgaggttcgggtgtttcggtttttagtttgcgattttagttttaggtcgggcggttttttttttaattttcggcgtgcgtatttcgggttgtttcgcgaggattttggtcgcggcgtttttgcgtttagttgttagtcgtcgtcgggtggttcggattatcgcgatcggcggggaattaaagtttaagtttagggtcgtaggaagaggcgagttgggggtttcgcggcgtagatttggatcgaattttttttagcgaaagatcgggttgtcg

SEQ ID NO: 33560 - DNA, 1504 bp, Artificial Sequence
  chemically treated genomic DNA (Homo sapiens) CpG-island No: 33560
cgacaacccgatctttcgctaaaaaaaattcgatccaaatctacgccgcgaaacccccaactcgcctcttcctacgaccctaaacttaaactttaattccccgccgatcgcgataatccgaaccacccgacgacgactaacaactaaacgcaaaaacgccgcgaccaaaatcctcgcgaaacaacccgaaatacgcacgccgaaaattaaaaaaaaaaccgcccgacctaaaactaaaatcgcaaactaaaaaccgaaacacccgaacctcgccgaaccgaaaacaaaaccgcgaatctaacaactactacgactcgcgcgaacgcgcgcctcctacaacccgccctccccatacctaacttattactctctactcctcctccctctactattccaaaacacccttcgacgccaacaaaatacaatacgcctcgaccgccgtaaacaaccgaaaaaaaaaacacacattcgacgcgacgcgaccgccgactcgactcccacccccttcccgttcctaaaaaataccataaaaacgaacaaaacgcgaaaaaaacgactacgcgcccgacgaccgaaactcccttcccgcgccgtttccccacgcctccccgcccgccccgcgcgcccgctccccccgcaaacttaccccgccaccccgcccaacgacgaaacccgaaacccgaaacccgaaactcacctcgccgaaaaactttacgtccttttccgcctcctcttccccgcgtcttcccgactcgcaaccccctcccgacaaccgacgaaataaacaattcgtaaatcaccgaaaactcgcgaaaaaaacgcgcatcacataacaactcgttcccaaccccccgaatacgccgaaaaaaaaaaaaaaaaaaaacgaaaaaaaaccgaaaaaaaaacgaaaacgaaacgacgacgaaaataaacaaacgaaataacgaaaacgacgaccgctcacgttaacgctatacgaccgcaacccgaacgtacacgaccgctactaccgctactactactactactactactaaaacgacgacgactcgacgctatttactccgcgccgcgcgacttacgctctccccgaaacgcccacactctcaatcgctacattattaacattcgacgctaacgtcacccgctccccattcacaataactttacgaaaaccgaacaacgcacctccccgaccgctaaaacgcgatacgcccgacgactaacgtaaaccgctccgcgaataacgctccgaaaactaaaacgaaaaacgaaaaacgaaaacgaacgcgcgcgctccgctaactcgcgaaaaaaaacgcgcctccataccgccgcaacaacaaatctccccgctttatacgaccgcgcgacccgaaaaaccccctccctcccgacccgactaaccgccccgctcgacctaaccttcccgaccacgaaaaacgaaaattaaaaacataacaaaataaaaataataataaaaactaatataacacgtaaaaaa

SEQ ID NO: 33561 - DNA, 625 bp, Artificial Sequence
  chemically treated genomic DNA (Homo sapiens) CpG-island No: 33561
ttttttcgttttgtttttaggtagtcgatcggggatatacgggttaaaattgcgtttgggcggcgcggcgatgcgcggtttcgggtagtcgcgtaggggcgtttcgagtttcgggagtcgtaggttcgtttaaggattcgtcgcgcggcgggcgtttgggtttttcgggggtttttttggggtcgtttggattcgtaggtttttcgcgttattttttattttatttttcgtttgcgttttttgttgcgttcggcgcgcgttttgttgtagtttgttggggatagcgtacgtagtgatcgggcgcggtagtcgttttttttttttatcgatttcgttgttttttggttttttttaaagttttttttttagagttagatagtagacgtttcggcgatgttttcgtcgtttatttggtcgaggtagtttaggtttgtttttgttgttttcgtcggtcgtttcgtcgcggtttaaagtcggggaagcgttttaagttcgcgcggtttgtttcggagtttcggaggattcgaatatttagcggaatgttattttggtcgggttttttggattttttttcggggttattttacggaatttagtcgtttttataagttattttatgtaattg

SEQ ID NO: 33562 - DNA, 625 bp, Artificial Sequence
  chemically treated genomic DNA (Homo sapiens) CpG-island No: 33562
caattacataaaataacttataaaaacgactaaattccgtaaaataaccccgaaaaaaaatccaaaaaacccgaccaaaataacattccgctaaatattcgaatcctccgaaactccgaaacaaaccgcgcgaacttaaaacgcttccccgactttaaaccgcgacgaaacgaccgacgaaaacaacaaaaacaaacctaaactacctcgaccaaataaacgacgaaaacatcgccgaaacgtctactatctaactctaaaaaaaaaactttaaaaaaaaccaaaaaacaacgaaatcgataaaaaaaaaaaacgactaccgcgcccgatcactacgtacgctatccccaacaaactacaacaaaacgcgcgccgaacgcaacaaaaaacgcaaacgaaaaataaaataaaaaataacgcgaaaaacctacgaatccaaacgaccccaaaaaaacccccgaaaaacccaaacgcccgccgcgcgacgaatccttaaacgaacctacgactcccgaaactcgaaacgcccctacgcgactacccgaaaccgcgcatcgccgcgccgcccaaacgcaattttaacccgtatatccccgatcgactacctaaaaacaaaacgaaaaaa

SEQ ID NO: 33563 - DNA, 625 bp, Artificial Sequence
  chemically treated genomic DNA (Homo sapiens) CpG-island No: 33563
tagttatatgaggtagtttgtggggacggttggatttcgtaggatggtttcggaggggaatttaaagaattcggttagggtgatatttcgttgagtattcgggtttttcggggtttcggggtagatcgcgcgggtttgggacgttttttcggttttgggtcgcggcggagcggtcggcggaggtagtaagggtaggtttgggttatttcggttaaatgggcggcgaaggtatcgtcggggcgtttgttgtttggttttggagaaaaggttttgagaaaagttagaaggtagcgaggtcgatgggaaagggaagcggttgtcgcgttcggttattgcgtgcgttgtttttagtaggttgtagtaggacgcgcgtcgagcgtagtagggggcgtaggcggggaatggggtagggggtggcgcgggagatttgcgagtttaggcggttttagaggggttttcggagggtttaggcgttcgtcgcgcggcggatttttggacgagtttgcggttttcggggttcgggacgtttttgcgcggttgttcgagatcgcgtatcgtcgcgtcgtttaaacgtaattttgattcgtgtgttttcggtcggttgtttgagggtaaggcgaggagg

SEQ ID NO: 33564 - DNA, 625 bp, Artificial Sequence
  chemically treated genomic DNA (Homo sapiens) CpG-island No: 33564
cctcctcgccttaccctcaaacaaccgaccgaaaacacacgaatcaaaattacgtttaaacgacgcgacgatacgcgatctcgaacaaccgcgcaaaaacgtcccgaaccccgaaaaccgcaaactcgtccaaaaatccgccgcgcgacgaacgcctaaaccctccgaaaacccctctaaaaccgcctaaactcgcaaatctcccgcgccaccccctaccccattccccgcctacgccccctactacgctcgacgcgcgtcctactacaacctactaaaaacaacgcacgcaataaccgaacgcgacaaccgcttccctttcccatcgacctcgctaccttctaacttttctcaaaaccttttctccaaaaccaaacaacaaacgccccgacgataccttcgccgcccatttaaccgaaataacccaaacctacccttactacctccgccgaccgctccgccgcgacccaaaaccgaaaaaacgtcccaaacccgcgcgatctaccccgaaaccccgaaaaacccgaatactcaacgaaatatcaccctaaccgaattctttaaattcccctccgaaaccatcctacgaaatccaaccgtccccacaaactacctcatataacta

SEQ ID NO: 33565 - DNA, 538 bp, Artificial Sequence
  chemically treated genomic DNA (Homo sapiens) CpG-island No: 33565
ttattcgtcgtcgttttcggattttgtacgtttgatttcggttacgcgttttttcgtcgtttttgttgttagtttgaacggatgtttgatttcgtttgtcgttagttgtagatttcggtattcgaaattgttttcgtttttcgcggtcggcgagttatattttttttttttcgcgtttattttcgcgtttttcgttttttttttttttttttttttcgcgcgttttcgtttttttttgttaggaaacgtcggtttttgttcggtttttcgcgttgttttttttttttttttattttttttaggtttgagttttttttgtttttttagtattcgtttcgcgtttttttatcgcgtttttcgtcgttttttttttgttttcgttcgtgttttgttgtcgtcgttttttcgtagcgtttcgcggttgttatttataatcgcgtttttatttaattttatttaaatggttaggttcgcgttttagtcgtcgggtagtgtttatttaaggattagtttttagtttttttcgttttttttgtcg

SEQ ID NO: 33566 - DNA, 538 bp, Artificial Sequence
  chemically treated genomic DNA (Homo sapiens) CpG-island No: 33566
cgacaaaaaaaacgaaaaaaactaaaaactaatccttaaataaacactacccgacgactaaaacgcgaacctaaccatttaaataaaattaaataaaaacgcgattataaataacaaccgcgaaacgctacgaaaaaacgacgacaacaaaacacgaacgaaaacaaaaaaaaaacgacgaaaaacgcgataaaaaaacgcgaaacgaatactaaaaaaacaaaaaaaactcaaacctaaaaaaaataaaaaaaaaaaaaaaacaacgcgaaaaaccgaacaaaaaccgacgtttcctaacaaaaaaaaacgaaaacgcgcgaaaaaaaaaaaaaaaaaaaaaacgaaaaacgcgaaaataaacgcgaaaaaaaaaaaatataactcgccgaccgcgaaaaacgaaaacaatttcgaataccgaaatctacaactaacgacaaacgaaatcaaacatccgttcaaactaacaacaaaaacgacgaaaaaacgcgtaaccgaaatcaaacgtacaaaatccgaaaacgacgacgaataa

SEQ ID NO: 33567 - DNA, 538 bp, Artificial Sequence
  chemically treated genomic DNA (Homo sapiens) CpG-island No: 33567
cggtagaagaagcgggaggggttggaggttggtttttaggtaggtattgttcggcgattggagcgcggatttggttatttgggtggggttgagtgggggcgcgattgtgagtagtagtcgcgggacgttgcgaaggggcggcggtaatagagtacgggcgggggtagaaaagaggcggcggagggcgcggtgggggagcgcgaggcgagtgttgagagagtagaaaggatttaagtttgaggggagtagagaggaagaaggggtaacgcgagaaatcgaataggagtcggcgttttttggtaagggagggcggaggcgcgcgggagagagggagagagggagggcggggggcgcgggggtaggcgcggggagaggggagtataattcgtcggtcgcgaggagcgggggtagtttcgggtgtcgaggtttgtagttagcggtaagcggagttaggtattcgtttagattgatagtagaggcggcgaaggagcgcgtagtcgagattaggcgtatagagttcggaggcggcggcgggtga

SEQ ID NO: 33568 - DNA, 538 bp, Artificial Sequence
  chemically treated genomic DNA (Homo sapiens) CpG-island No: 33568
tcacccgccgccgcctccgaactctatacgcctaatctcgactacgcgctccttcgccgcctctactatcaatctaaacgaatacctaactccgcttaccgctaactacaaacctcgacacccgaaactacccccgctcctcgcgaccgacgaattatactcccctctccccgcgcctacccccgcgccccccgccctccctctctccctctctcccgcgcgcctccgccctcccttaccaaaaaacgccgactcctattcgatttctcgcgttaccccttcttcctctctactcccctcaaacttaaatcctttctactctctcaacactcgcctcgcgctcccccaccgcgccctccgccgcctcttttctacccccgcccgtactctattaccgccgccccttcgcaacgtcccgcgactactactcacaatcgcgcccccactcaaccccacccaaataaccaaatccgcgctccaatcgccgaacaatacctacctaaaaaccaacctccaacccctcccgcttcttctaccg

SEQ ID NO: 33569 - DNA, 701 bp, Artificial Sequence
  chemically treated genomic DNA (Homo sapiens) CpG-island No: 33569
  unsure (362, 430, 444, 463, 517, 529, 605, 648)
gtggtcgtttttttttttttgtttttttgttttgttttttttttcgtgttttttgtgttgcgtttcgttttttttttcgttgttgttttttcgtttttttttgttttttttttttggcgcgggcgtttttttgtttcgtttttttcgttttttttcgttcgtgttttttgtttttcgttttttcgtttttggttttttggtgttggtgcgtttcgtcgtttttcgttgcggtcgtttttcggttttttttgttcggtgttttttttcgcgtcgggtgtcggttttgtggttgttggtgcgcgcgcgttgtttgttttttttgtgtttttcgcgttttgtgtgtcgtttcgtttcgttttttncgttttcgtgtgttttgagtgttcggcgttttttcgtcgttggtgcgcgcgtttttttcgtttgttantgttcgtcgtattngtcggggcgtcgttgcgtncggcgtttttgcgtgtcgtttttgtttttttttttttttttttcgttttttttnttttttttcggntttttttcgattcgcgtttattttatttgtgcggttttttgcgcgtttttcgttgtttcgtcgtttttgtcgttangttttttggcgcgtcgtcgcgattgtttttcgcgcgtttcgtnttcgcgttcggagaatgttcgttggcgttttttgtcgttacgtcgtgtcgata

SEQ ID NO: 33570 - DNA, 701 bp, Artificial Sequence
  chemically treated genomic DNA (Homo sapiens) CpG-island No: 33570
  unsure (54, 97, 173, 185, 239, 258, 272, 340)
tatcgacacgacgtaacgacaaaaaacgccaacgaacattctccgaacgcgaanacgaaacgcgcgaaaaacaatcgcgacgacgcgccaaaaaacntaacgacaaaaacgacgaaacaacgaaaaacgcgcaaaaaaccgcacaaataaaataaacgcgaatcgaaaaaaanccgaaaaaaaanaaaaaaaacgaaaaaaaaaaaaaaaaaaacaaaaacgacacgcaaaaacgccgnacgcaacgacgccccgacnaatacgacgaacantaacaaacgaaaaaaacgcgcgcaccaacgacgaaaaaacgccgaacactcaaaacacacgaaaacgnaaaaaacgaaacgaaacgacacacaaaacgcgaaaaacacaaaaaaaacaaacaacgcgcgcgcaccaacaaccacaaaaccgacacccgacgcgaaaaaaaacaccgaacaaaaaaaaccgaaaaacgaccgcaacgaaaaacgacgaaacgcaccaacaccaaaaaaccaaaaacgaaaaaacgaaaaacaaaaaacacgaacgaaaaaaaacgaaaaaaacgaaacaaaaaaacgcccgcgccaaaaaaaaaaaacaaaaaaaaacgaaaaaacaacaacgaaaaaaaaaacgaaacgcaacacaaaaaacacgaaaaaaaaaacaaaacaaaaaaacaaaaaaaaaaaaacgaccac

SEQ ID NO: 33571 - DNA, 701 bp, Artificial Sequence
  chemically treated genomic DNA (Homo sapiens) CpG-island No: 33571
  unsure (54, 97, 173, 185, 239, 258, 272, 340)
tgtcgatacggcgtgacgatagagggcgttagcgagtatttttcgggcgcgganacgaagcgcgcgaaagatagtcgcggcggcgcgttaggggatntaacggtaagggcgacggagtaacgaaagacgcgtaagagatcgtatagatagaataggcgcggatcgaaggagantcgagagagganaagaaagacggagagaaaaggagaggagatagggacgatacgtaagagcgtcgngcgtagcggcgtttcgatngatgcggcgaatantggtaaacgagagaggcgcgcgtattaacgacgaggaagcgtcggatatttagaatatacgagagcgngagagacgaggcgaagcggtatataaagcgcggaaagtatagagaaaataggtagcgcgcgcgtattagtagttataaggtcgatattcggcgcggaggggagtatcgggtagagaggatcgagggacgatcgtagcgaggggcgacggagcgtattaatattaaagggttaagagcgggagggcggggaataagaaatacgaacggagaggggcgggaaaggcgagataaaagagcgttcgcgttaaaaagaaggaataaaaagaggcgggggagtaatagcgggaaggagggcgaagcgtagtatagaggatacggggaagaaaatagaataagaaaataaagaaaaaaagacgattat

SEQ ID NO: 33572 - DNA, 701 bp, Artificial Sequence
  chemically treated genomic DNA (Homo sapiens) CpG-island No: 33572
  unsure (362, 430, 444, 463, 517, 529, 605, 648)
ataatcgtctttttttctttattttcttattctattttcttccccgtatcctctatactacgcttcgccctccttcccgctattactcccccgcctctttttattccttctttttaacgcgaacgctcttttatctcgcctttcccgcccctctccgttcgtatttcttattccccgccctcccgctcttaaccctttaatattaatacgctccgtcgcccctcgctacgatcgtccctcgatcctctctacccgatactcccctccgcgccgaatatcgaccttataactactaatacgcgcgcgctacctattttctctatactttccgcgctttatataccgcttcgcctcgtctctcncgctctcgtatattctaaatatccgacgcttcctcgtcgttaatacgcgcgcctctctcgtttaccantattcgccgcatcnatcgaaacgccgctacgcncgacgctcttacgtatcgtccctatctcctctccttttctctccgtctttcttntcctctctcgantctccttcgatccgcgcctattctatctatacgatctcttacgcgtctttcgttactccgtcgcccttaccgttanatcccctaacgcgccgccgcgactatctttcgcgcgcttcgtntccgcgcccgaaaaatactcgctaacgccctctatcgtcacgccgtatcgaca

SEQ ID NO: 33573 - DNA, 604 bp, Artificial Sequence
  chemically treated genomic DNA (Homo sapiens) CpG-island No: 33573
  unsure (292, 312, 410, 435, 563)
gggggggcgcggtttggtggttgcgcgtttgttcggttggtgcgcgtcgttcgcgtgtcgtgcgtgtttgtttttcgcgcggttgtgtttggttgttcgcgttttcgtcgttttggttcgggttggtgtttttgggcgttcgcgtttcgtcgttttcgttgcggttttttcgtcgtcgtttcgtgtgtgtgtgcggtgtgggcgtttttcggtcgttcgcgcgttcggttgtttttcggtgggttcgttttttttgcgtcgtattttttttgttcgttcgttcgtttttttngagtgtttcggtgcgggttntgtcgttttcgttgtcgtcgggtcgtgcgcgcgtgttcgtgttttcgttcgtttgtttgtttgtgtgcggtgtgcgttcgtggtttgcgttcgggcgntcgcgtttggcgcgcgtttttggtnttttttacgtttttttcgtttgtggttggttttgtttcgtcgtcgtgtcgtcgttcgcgtttcgttgcgggggtcgtgttgcgcgcgtttttttgttcgtttttttgttgtttgtttggttcgtttgnttttgggtttgcgtgttcgtcgtgtcggtttttcgtcgttg

SEQ ID NO: 33574 - DNA, 604 bp, Artificial Sequence
  chemically treated genomic DNA (Homo sapiens) CpG-island No: 33574
  unsure (42, 170, 195, 293, 313)
caacgacgaaaaaccgacacgacgaacacgcaaacccaaaancaaacgaaccaaacaaacaacaaaaaaacgaacaaaaaaacgcgcgcaacacgacccccgcaacgaaacgcgaacgacgacacgacgacgaaacaaaaccaaccacaaacgaaaaaaacgtaaaaaanaccaaaaacgcgcgccaaacgcgancgcccgaacgcaaaccacgaacgcacaccgcacacaaacaaacaaacgaacgaaaacacgaacacgcgcgcacgacccgacgacaacgaaaacgacanaacccgcaccgaaacactcnaaaaaaacgaacgaacgaacaaaaaaaatacgacgcaaaaaaaacgaacccaccgaaaaacaaccgaacgcgcgaacgaccgaaaaacgcccacaccgcacacacacacgaaacgacgacgaaaaaaccgcaacgaaaacgacgaaacgcgaacgcccaaaaacaccaacccgaaccaaaacgacgaaaacgcgaacaaccaaacacaaccgcgcgaaaaacaaacacgcacgacacgcgaacgacgcgcaccaaccgaacaaacgcgcaaccaccaaaccgcgccccccc

SEQ ID NO: 33575 - DNA, 604 bp, Artificial Sequence
  chemically treated genomic DNA (Homo sapiens) CpG-island No: 33575
  unsure (42, 170, 195, 293, 313)
tagcgacggagagtcggtacggcgaatacgtagatttaggantaggcgaattaaatagatagtaagggaacggataggaagacgcgcgtagtacgattttcgtagcgagacgcgggcgacgatacgacgacgaagtaagattaattatagacgaaagggacgtaaggggngttaggagcgcgcgttagacgcgancgttcggacgtaggttacgggcgtatatcgtatatagatagataggcgaacgaaagtacggatacgcgcgtacggttcgacgataacgggggcggtangattcgtatcggggtatttnaagagggcgggcgagcgggtaggaggagtgcgacgtaagggagacgaatttatcggggaataatcgagcgcgcgagcggtcgagggacgtttatatcgtatatatatacgggacggcgacgggggagtcgtagcggaagcggcggaacgcggacgtttaggggtattagttcgggttagggcgacggaggcgcgagtagttagatataatcgcgcgggggataagtacgtacggtacgcgggcgacgcgtattaatcgaataggcgcgtagttattaaatcgcgttttttt

SEQ ID NO: 33576 - DNA, 604 bp, Artificial Sequence
  chemically treated genomic DNA (Homo sapiens) CpG-island No: 33576
  unsure (292, 312, 410, 435, 563)
aaaaaaacgcgatttaataactacgcgcctattcgattaatacgcgtcgcccgcgtaccgtacgtacttatcccccgcgcgattatatctaactactcgcgcctccgtcgccctaacccgaactaatacccctaaacgtccgcgttccgccgcttccgctacgactcccccgtcgccgtcccgtatatatatacgatataaacgtccctcgaccgctcgcgcgctcgattattccccgataaattcgtctcccttacgtcgcactcctcctacccgctcgcccgccctcttnaaataccccgatacgaatcntaccgcccccgttatcgtcgaaccgtacgcgcgtatccgtactttcgttcgcctatctatctatatacgatatacgcccgtaacctacgtccgaacgntcgcgtctaacgcgcgctcctaacnccccttacgtccctttcgtctataattaatcttacttcgtcgtcgtatcgtcgcccgcgtctcgctacgaaaatcgtactacgcgcgtcttcctatccgttcccttactatctatttaattcgcctantcctaaatctacgtattcgccgtaccgactctccgtcgcta

SEQ ID NO: 33577 - DNA, 555 bp, Artificial Sequence
  chemically treated genomic DNA (Homo sapiens) CpG-island No: 33577
gttgcggcggtttcgtttttgtcgtcgcgggtcgggtcgcggttggcgtttgttgggtcgtcggattgtttgggttttttttttcgtgtgcgtcgcgtacgtcgttttttgttttttttgttcgcgtttttcgttttggttttttggttttcgtcgggttttttttttgttgttttttgcgggcgtttgtttttttttcgcggagtgttgcggggttcgtttcgtgtcgcgcgttcgttggttttcgtgtgtttttcgtttcgtttgttggtcgggtttgggcgtttagcgcgtttcggtgcggcggcgtgtggtcgttttaggaggcgtgttttcgttcgcgtcgtcggggtgttgtgtcgcgtgtttttgttcgtgttcgtttttttacgttcgcgtgcgcgttttacgcgtttgtaggttggcgcgcggtttttattgatgtgttaggcgcgggtttttacggtggttttttgtttgcgtgggcgtggtttggtcgtgttttcgtttgttcgttgtggttgtcgcggttaggtcgcggtgttttcgttttag

SEQ ID NO: 33578 - DNA, 555 bp, Artificial Sequence
  chemically treated genomic DNA (Homo sapiens) CpG-island No: 33578
ctaaaacgaaaacaccgcgacctaaccgcgacaaccacaacgaacaaacgaaaacacgaccaaaccacgcccacgcaaacaaaaaaccaccgtaaaaacccgcgcctaacacatcaataaaaaccgcgcgccaacctacaaacgcgtaaaacgcgcacgcgaacgtaaaaaaacgaacacgaacaaaaacacgcgacacaacaccccgacgacgcgaacgaaaacacgcctcctaaaacgaccacacgccgccgcaccgaaacgcgctaaacgcccaaacccgaccaacaaacgaaacgaaaaacacacgaaaaccaacgaacgcgcgacacgaaacgaaccccgcaacactccgcgaaaaaaaaacaaacgcccgcaaaaaacaacaaaaaaaaaacccgacgaaaaccaaaaaaccaaaacgaaaaacgcgaacaaaaaaaacaaaaaacgacgtacgcgacgcacacgaaaaaaaaaacccaaacaatccgacgacccaacaaacgccaaccgcgacccgacccgcgacgacaaaaacgaaaccgccgcaac

SEQ ID NO: 33579 - DNA, 555 bp, Artificial Sequence
  chemically treated genomic DNA (Homo sapiens) CpG-island No: 33579
ttgaggcggagatatcgcggtttaatcgcggtagttatagcggatagacgggggtacggttaagttacgtttacgtaggtaggagattatcgtgaaggttcgcgtttgatatattaataagaatcgcgcgttagtttatagacgcgtagaacgcgtacgcgaacgtggggaggcgaatacggataagagtacgcgatataatatttcggcgacgcgggcgggagtacgttttttaggacggttatacgtcgtcgtatcgagacgcgttaagcgtttagattcgattaataaacgagacgggggatatacgagggttagcgagcgcgcggtacgaggcgagtttcgtagtatttcgcgggagggggatagacgttcgtaaagagtaataggaaaggggttcggcgaaagttaggaaattagggcggggggcgcgagtaagaaagatagagagcggcgtacgcgacgtatacgaggggagggatttaagtaattcggcgatttagtaagcgttagtcgcggttcgattcgcggcggtaagaacggggtcgtcgtagt

SEQ ID NO: 33580 - DNA, 555 bp, Artificial Sequence
  chemically treated genomic DNA (Homo sapiens) CpG-island No: 33580
actacgacgaccccgttcttaccgccgcgaatcgaaccgcgactaacgcttactaaatcgccgaattacttaaatccctcccctcgtatacgtcgcgtacgccgctctctatctttcttactcgcgccccccgccctaatttcctaactttcgccgaacccctttcctattactctttacgaacgtctatccccctcccgcgaaatactacgaaactcgcctcgtaccgcgcgctcgctaaccctcgtatatcccccgtctcgtttattaatcgaatctaaacgcttaacgcgtctcgatacgacgacgtataaccgtcctaaaaaacgtactcccgcccgcgtcgccgaaatattatatcgcgtactcttatccgtattcgcctccccacgttcgcgtacgcgttctacgcgtctataaactaacgcgcgattcttattaatatatcaaacgcgaaccttcacgataatctcctacctacgtaaacgtaacttaaccgtacccccgtctatccgctataactaccgcgattaaaccgcgatatctccgcctcaa

SEQ ID NO: 33581 - DNA, 594 bp, Artificial Sequence
  chemically treated genomic DNA (Homo sapiens) CpG-island No: 33581
tgtattattcgattatatttacgtattgcggtttttttatatgtttcgtttatcggtatttttaacgttttattttatagggttttagtatcgacgcgttgattttcgattttttttttatttttattattttcgtcgttttattttatttatttcgtcgtattttttttttttattttttttaattttttttttatattttttttatttttttattttttcgtttttttttttttcgatttcgtttatttcgttttttttttttattttttatttttttttttttttttttattttttttagtttatatttattttttttttttcgttttttattatttttttttatttatttcgttttttttcgtttttttttcgtttttttatttttttttattttttttttttttttttttttttttttcgttagttttcgtttcgtcgtttatttttttacgtttttcgttttttttttgtttttcgtttttcgttatttttcgttattgtaatttttcgcgtttaatattgtttttagtttttttcgtagttttttttcgatttcgcggtcggttttttcgttcgatttttttttatt

SEQ ID NO: 33582 - DNA, 594 bp, Artificial Sequence
  chemically treated genomic DNA (Homo sapiens) CpG-island No: 33582
aataaaaaaaaatcgaacgaaaaaaccgaccgcgaaatcgaaaaaaaactacgaaaaaaactaaaaacaatattaaacgcgaaaaattacaataacgaaaaataacgaaaaacgaaaaacaaaaaaaaaacgaaaaacgtaaaaaaataaacgacgaaacgaaaactaacgaaaaaaaaaaaaaaaaaaaaaaaaaaaataaaaaaaaataaaaaaacgaaaaaaaaacgaaaaaaaacgaaataaataaaaaaaaataataaaaaacgaaaaaaaaaaaataaatataaactaaaaaaaataaaaaaaaaaaaaaaaaaataaaaaataaaaaaaaaaaacgaaataaacgaaatcgaaaaaaaaaaaaacgaaaaaataaaaaaataaaaaaaatataaaaaaaaaattaaaaaaaataaaaaaaaaaaatacgacgaaataaataaaataaaacgacgaaaataataaaaataaaaaaaaaatcgaaaatcaacgcgtcgatactaaaaccctataaaataaaacgttaaaaataccgataaacgaaacatataaaaaaaccgcaatacgtaaatataatcgaataataca

SEQ ID NO: 33583 - DNA, 594 bp, Artificial Sequence
  chemically treated genomic DNA (Homo sapiens) CpG-island No: 33583
ggtggggaaaaatcggacgggagagtcgatcgcgagatcgggggggggttacggggaggattgggaatagtattgggcgcgggggattgtaatggcgagaaatggcggggggcgaaaagtaaaaaaggagcgggggacgtgggaaggtaaacggcggggcggggattggcgaaaaagggggggggggggggggggaaggtgggggggaatgggggggcgggaaaggggcgggggggggcggaataaatggaggggggtggtggggggcgaagagggaagggtgggtatggattagaggaaatggggggggggaggggggaatggggggtgaaaggggggggcgaaatgagcggggtcggggaaagaaaaggcgaaaaaataggggggtgggggggatataggggggaagttggaaagggtggggggggggggtacgacggaatggatggggtggggcggcggggatggtggggataaaaaggaaatcggggattagcgcgtcggtgttggggttttataggatgggacgttgggaatgtcgatggacggaatatgtggggaagtcgtagtgcgtaggtgtagtcggatggtgta

SEQ ID NO: 33584 - DNA, 594 bp, Artificial Sequence
  chemically treated genomic DNA (Homo sapiens) CpG-island No: 33584
tacaccatccgactacacctacgcactacgacttccccacatattccgtccatcgacattcccaacgtcccatcctataaaaccccaacaccgacgcgctaatccccgatttcctttttatccccaccatccccgccgccccaccccatccattccgtcgtaccccccccccccaccctttccaacttcccccctatatcccccccacccccctattttttcgccttttctttccccgaccccgctcatttcgcccccccctttcaccccccattcccccctccccccccccatttcctctaatccatacccacccttccctcttcgccccccaccacccccctccatttattccgcccccccccgcccctttcccgcccccccattcccccccaccttccccccccccccccccccctttttcgccaatccccgccccgccgtttaccttcccacgtcccccgctccttttttacttttcgccccccgccatttctcgccattacaatcccccgcgcccaatactattcccaatcctccccgtaacccccccccgatctcgcgatcgactctcccgtccgatttttccccacc

SEQ ID NO: 33585 - DNA, 576 bp, Artificial Sequence
  chemically treated genomic DNA (Homo sapiens) CpG-island No: 33585
gggtttcggggcgtatggttttatacggaggatttttcggtggttttttttcgggtggagagtgcgggggagggcgtgcgggtgggtgttatggcggaaggttttgttacggtggtcgttagtttttcggttcgttcgtcgttcgtgtgacgttcggttttttgatattatttttcggatcgtgcgcgcgggtcggttttcggtgcggtcgagttgtgtgtgtggggggggttcgttcgtatcgttttttcgtttcggttttttagtcgttttatatttagtttgattcgtttatcgtttttttttttattttcgtacggtatgttttttttttttagtatggttattcgtttttattcgtggggtcggattatcgtgtttttagtatattaggcgatttcgtgttttcgcggatcgagtttcgatacgcggtcgcggattgttttttatcgcgtttttttgtcgatttggatcgttgcgcggtgcgcgttatcgattcggtagcgcgcggcggtgggtcgggttattcgttttcgtagttattatattcgcgattacgtcgcgaagtttttattt

SEQ ID NO: 33586 - DNA, 576 bp, Artificial Sequence
  chemically treated genomic DNA (Homo sapiens) CpG-island No: 33586
aaataaaaacttcgcgacgtaatcgcgaatataataactacgaaaacgaataacccgacccaccgccgcgcgctaccgaatcgataacgcgcaccgcgcaacgatccaaatcgacaaaaaaacgcgataaaaaacaatccgcgaccgcgtatcgaaactcgatccgcgaaaacacgaaatcgcctaatatactaaaaacacgataatccgaccccacgaataaaaacgaataaccatactaaaaaaaaaaaacataccgtacgaaaataaaaaaaaaaacgataaacgaatcaaactaaatataaaacgactaaaaaaccgaaacgaaaaaacgatacgaacgaaccccccccacacacacaactcgaccgcaccgaaaaccgacccgcgcgcacgatccgaaaaataatatcaaaaaaccgaacgtcacacgaacgacgaacgaaccgaaaaactaacgaccaccgtaacaaaaccttccgccataacacccacccgcacgccctcccccgcactctccacccgaaaaaaaaccaccgaaaaatcctccgtataaaaccatacgccccgaaaccc

SEQ ID NO: 33587 - DNA, 576 bp, Artificial Sequence
  chemically treated genomic DNA (Homo sapiens) CpG-island No: 33587
aaatggggatttcgcggcgtggtcgcgggtatgatggttgcgggaacgagtggttcggtttatcgtcgcgcgttgtcgggtcggtaacgcgtatcgcgtaacggtttaaatcgataggggagcgcggtgggggataattcgcggtcgcgtgtcggggttcgattcgcggggatacggaatcgtttggtgtattagaggtacggtggttcggttttacggatggaggcggataattatgttggggagggaggatatatcgtgcggaaatgggggggggggcggtggacgagttaggttgggtatgggacggttgaggggtcggggcgggggggcggtgcggacgggttttttttatatatataattcggtcgtatcgggggtcggttcgcgcgtacggttcggggggtagtgttaggggatcgggcgttatacgagcggcgggcggatcgggaggttgacgattatcgtgatagggtttttcgttatagtatttattcgtacgttttttttcgtattttttattcggaagaaggttatcggggggtttttcgtgtagagttatgcgtttcggggttt

SEQ ID NO: 33588 - DNA, 576 bp, Artificial Sequence
  chemically treated genomic DNA (Homo sapiens) CpG-island No: 33588
aaaccccgaaacgcataactctacacgaaaaaccccccgataaccttcttccgaataaaaaatacgaaaaaaaacgtacgaataaatactataacgaaaaaccctatcacgataatcgtcaacctcccgatccgcccgccgctcgtataacgcccgatcccctaacactaccccccgaaccgtacgcgcgaaccgacccccgatacgaccgaattatatatataaaaaaaacccgtccgcaccgcccccccgccccgacccctcaaccgtcccatacccaacctaactcgtccaccgcccccccccccatttccgcacgatatatcctccctccccaacataattatccgcctccatccgtaaaaccgaaccaccgtacctctaatacaccaaacgattccgtatccccgcgaatcgaaccccgacacgcgaccgcgaattatcccccaccgcgctcccctatcgatttaaaccgttacgcgatacgcgttaccgacccgacaacgcgcgacgataaaccgaaccactcgttcccgcaaccatcatacccgcgaccacgccgcgaaatccccattt

SEQ ID NO: 33589 - DNA, 716 bp, Artificial Sequence
  chemically treated genomic DNA (Homo sapiens) CpG-island No: 33589
ttggtcggtcgttgtggttggggtcggttaagtcgaatatcggttatacgtaagcggcggcgggtgtggttggtgtgattaagatggtgatggcgatgcggtacgggtagttgttacgtacgttgtacgtggaatcgtcgtcgtcggaggtggattggtcggcggggacggtttaattttttacggagaatacgttttggtttaggagtggtcgtgttcgtcgggtgggggtgtcgtcgttcgggattagtggtattaacgcgtacgttattttcgaatagttttcgggagtgtcgagttagtttgcggggtcgggttcgggttttgtcgtggatgtttcggtggtgtcgtggatggtgtcgggtaaaatattcgaagcgttattcgcgtaggtaacggcgttgatgatttatttggacgagcgatttgatgttttttcgttggatgttgggtattcgttggcgttgatacggtcggcgttggatgagcgagcggtggtgttggggtcggatcgtgaaacgttgttgtgcggtgtgaaagcgttgtttgtcggttatgaggtttttgggttggtgatcggatttgtgggggttgggggtcgtatcggttttggttttttcggttcggcgggtattggtttgggatggtttcggggtttatcgggtttttcggtgttcgttggtgtttttgttaaatttgggttatttggggtttat

SEQ ID NO: 33590 - DNA, 716 bp, Artificial Sequence
  chemically treated genomic DNA (Homo sapiens) CpG-island No: 33590
ataaaccccaaataacccaaatttaacaaaaacaccaacgaacaccgaaaaacccgataaaccccgaaaccatcccaaaccaatacccgccgaaccgaaaaaaccaaaaccgatacgacccccaacccccacaaatccgatcaccaacccaaaaacctcataaccgacaaacaacgctttcacaccgcacaacaacgtttcacgatccgaccccaacaccaccgctcgctcatccaacgccgaccgtatcaacgccaacgaatacccaacatccaacgaaaaaacatcaaatcgctcgtccaaataaatcatcaacgccgttacctacgcgaataacgcttcgaatattttacccgacaccatccacgacaccaccgaaacatccacgacaaaacccgaacccgaccccgcaaactaactcgacactcccgaaaactattcgaaaataacgtacgcgttaataccactaatcccgaacgacgacacccccacccgacgaacacgaccactcctaaaccaaaacgtattctccgtaaaaaattaaaccgtccccgccgaccaatccacctccgacgacgacgattccacgtacaacgtacgtaacaactacccgtaccgcatcgccatcaccatcttaatcacaccaaccacacccgccgccgcttacgtataaccgatattcgacttaaccgaccccaaccacaacgaccgaccaa

SEQ ID NO: 33591 - DNA, 716 bp, Artificial Sequence
  chemically treated genomic DNA (Homo sapiens) CpG-island No: 33591
atgggttttaggtggtttaagtttggtaagagtattaacgaatatcggaaagttcggtaagtttcggggttattttaagttaatgttcgtcgggtcggaaaaattaaaatcgatgcggtttttagtttttatagattcggttattaatttagaagttttatgatcggtagatagcgtttttatatcgtataataacgttttacggttcgattttagtattatcgttcgtttatttagcgtcgatcgtgttaacgttagcgagtatttaatatttagcgaggagatattaggtcgttcgtttagataggttattaacgtcgttgtttgcgcggatagcgtttcgggtgttttgttcgatattatttacggtattatcggaatatttacgatagaattcgaattcggtttcgtagattgattcggtattttcgggggttgttcgaggatgacgtgcgcgttagtattattgatttcgaacgacgatatttttattcgacgaatacgattatttttgggttagggcgtgtttttcgtaaggagttgaatcgttttcgtcgattaatttattttcggcgacggcgattttacgtgtaacgtgcgtggtagttgttcgtgtcgtatcgttattattattttgattatattagttatattcgtcgtcgtttgcgtatgatcgatgttcgatttgatcgattttaattataacggtcggttag

SEQ ID NO: 33592 - DNA, 716 bp, Artificial Sequence
  chemically treated genomic DNA (Homo sapiens) CpG-island No: 33592
ctaaccgaccgttataattaaaatcgatcaaatcgaacatcgatcatacgcaaacgacgacgaatataactaatataatcaaaataataataacgatacgacacgaacaactaccacgcacgttacacgtaaaatcgccgtcgccgaaaataaattaatcgacgaaaacgattcaactccttacgaaaaacacgccctaacccaaaaataatcgtattcgtcgaataaaaatatcgtcgttcgaaatcaataatactaacgcgcacgtcatcctcgaacaacccccgaaaataccgaatcaatctacgaaaccgaattcgaattctatcgtaaatattccgataataccgtaaataatatcgaacaaaacacccgaaacgctatccgcgcaaacaacgacgttaataacctatctaaacgaacgacctaatatctcctcgctaaatattaaatactcgctaacgttaacacgatcgacgctaaataaacgaacgataatactaaaatcgaaccgtaaaacgttattatacgatataaaaacgctatctaccgatcataaaacttctaaattaataaccgaatctataaaaactaaaaaccgcatcgattttaatttttccgacccgacgaacattaacttaaaataaccccgaaacttaccgaactttccgatattcgttaatactcttaccaaacttaaaccacctaaaacccat

SEQ ID NO: 33593 - DNA, 601 bp, Artificial Sequence
  chemically treated genomic DNA (Homo sapiens) CpG-island No: 33593
tatacgtaagcggcggcgggtgtggttggtgtgattaagatggtgatggcgatgcggtacgggtagttgttacgtacgttgtacgtggaatcgtcgtcgtcggaggtggattggtcggcggggacggtttaattttttacggagaatacgttttggtttaggagtggtcgtgttcgtcgggtgggggtgtcgtcgttcgggattagtggtattaacgcgtacgttattttcgaatagttttcgggagtgtcgagttagtttgcggggtcgggttcgggttttgtcgtggatgtttcggtggtgtcgtggatggtgtcgggtaaaatattcgaagcgttattcgcgtaggtaacggcgttgatgatttatttggacgagcgatttgatgttttttcgttggatgttgggtattcgttggcgttgatacggtcggcgttggatgagcgagcggtggggttggggtcggatcgtgaaacgttgttgtgcggtgtgaaagggatgtttgtcggttatgaggtttttgggtggggatcgatatgggggggttgggggtcggaatggttttgggttttaggagaggggggaagtggttgggttaggg

SEQ ID NO: 33594 - DNA, 601 bp, Artificial Sequence
  chemically treated genomic DNA (Homo sapiens) CpG-island No: 33594
ccctaacccaaccacttcccccctctcctaaaacccaaaaccattccgacccccaacccccccatatcgatccccacccaaaaacctcataaccgacaaacatccctttcacaccgcacaacaacgtttcacgatccgaccccaaccccaccgctcgctcatccaacgccgaccgtatcaacgccaacgaatacccaacatccaacgaaaaaacatcaaatcgctcgtccaaataaatcatcaacgccgttacctacgcgaataacgcttcgaatattttacccgacaccatccacgacaccaccgaaacatccacgacaaaacccgaacccgaccccgcaaactaactcgacactcccgaaaactattcgaaaataacgtacgcgttaataccactaatcccgaacgacgacacccccacccgacgaacacgaccactcctaaaccaaaacgtattctccgtaaaaaattaaaccgtccccgccgaccaatccacctccgacgacgacgattccacgtacaacgtacgtaacaactacccgtaccgcatcgccatcaccatcttaatcacaccaaccacacccgccgccgcttacgtata

SEQ ID NO: 33595 - DNA, 601 bp, Artificial Sequence
  chemically treated genomic DNA (Homo sapiens) CpG-island No: 33595
ttttaatttaattatttttttttttttttaaaatttaaaattatttcggtttttagtttttttatatcggtttttatttaaaagttttatgatcggtaaatattttttttatatcgtataataacgttttacggttcgattttagttttatcgttcgtttatttagcgtcgatcgtgttaacgttagcgagtatttaatatttagcgaggagatattaggtcgttcgtttagataggttattaacgtcgttgtttgcgcggatagcgtttcgggtgttttgttcgatattatttacggtattatcggaatatttacgatagaattcgaattcggtttcgtagattgattcggtattttcgggggttgttcgaggatgacgtgcgcgttagtattattgatttcgaacgacgatatttttattcgacgaatacgattatttttgggttagggcgtgtttttcgtaaggagttgaatcgttttcgtcgattaatttattttcggcgacggcgattttacgtgtaacgtgcgtggtagttgttcgtgtcgtatcgttattattattttgattatattagttatattcgtcgtcgtttgcgtatg

SEQ ID NO: 33596 - DNA, 601 bp, Artificial Sequence
  chemically treated genomic DNA (Homo sapiens) CpG-island No: 33596
catacgcaaacgacgacgaatataactaatataatcaaaataataataacgatacgacacgaacaactaccacgcacgttacacgtaaaatcgccgtcgccgaaaataaattaatcgacgaaaacgattcaactccttacgaaaaacacgccctaacccaaaaataatcgtattcgtcgaataaaaatatcgtcgttcgaaatcaataatactaacgcgcacgtcatcctcgaacaacccccgaaaataccgaatcaatctacgaaaccgaattcgaattctatcgtaaatattccgataataccgtaaataatatcgaacaaaacacccgaaacgctatccgcgcaaacaacgacgttaataacctatctaaacgaacgacctaatatctcctcgctaaatattaaatactcgctaacgttaacacgatcgacgctaaataaacgaacgataaaactaaaatcgaaccgtaaaacgttattatacgatataaaaaaaatatttaccgatcataaaacttttaaataaaaaccgatataaaaaaactaaaaaccgaaataattttaaattttaaaaaaaaaaaaaaataattaaattaaaa

SEQ ID NO: 33597 - DNA, 537 bp, Artificial Sequence
  chemically treated genomic DNA (Homo sapiens) CpG-island No: 33597
  unsure (226)
tttttttttttttttttttttttttttttttttttttttttttttttttaatcggtcgttgtttgcgttgtttttgttttttttcgttttttttttttcgcgttgtgttttttttgttcgtcggtttcgttcgcggtttttgcgcgtttttgcggttcgtttcgcggttcgtcgttcgttttttttgttttgttttttgttttcgcgttttgttttcgggcgcggnggttttttcgttgttttttgtttttcgtcgggggggttttcgggtgtttttgtcgggtttcgtgtcgttgttttttttttcgtcgttttcgcgcgtgtttgggtcgtcggcgcgttcgggtttttcgtgttttcgggcgtttcgttttttcgtttcgcgcgtggtcggttgtcgttttgcgcgttttttttttcggtcgcgttgcggtcgttttcgcgcgttgtttcgtttttttcgttttttttttttttcgcgtcgtgggtcggtgtcggtttgttgtttttcgttggtcggtttcggcgggtgcgttg

SEQ ID NO: 33598 - DNA, 537 bp, Artificial Sequence
  chemically treated genomic DNA (Homo sapiens) CpG-island No: 33598
  unsure (312)
caacgcacccgccgaaaccgaccaacgaaaaacaacaaaccgacaccgacccacgacgcgaaaaaaaaaaaaaacgaaaaaaacgaaacaacgcgcgaaaacgaccgcaacgcgaccgaaaaaaaaaacgcgcaaaacgacaaccgaccacgcgcgaaacgaaaaaacgaaacgcccgaaaacacgaaaaacccgaacgcgccgacgacccaaacacgcgcgaaaacgacgaaaaaaaaaacaacgacacgaaacccgacaaaaacacccgaaaacccccccgacgaaaaacaaaaaacaacgaaaaaaccnccgcgcccgaaaacaaaacgcgaaaacaaaaaacaaaacaaaaaaaacgaacgacgaaccgcgaaacgaaccgcaaaaacgcgcaaaaaccgcgaacgaaaccgacgaacaaaaaaaacacaacgcgaaaaaaaaaaaacgaaaaaaaacaaaaacaacgcaaacaacgaccgattaaaaaaaaaaaaaaaaaaaaaaaaaaaaaaaaaaaaaaaaaaaaaaaaa

SEQ ID NO: 33599 - DNA, 537 bp, Artificial Sequence
  chemically treated genomic DNA (Homo sapiens) CpG-island No: 33599
  unsure (312)
tagcgtattcgtcgagatcggttaacgggaggtagtaggtcgatatcggtttacgacgcggggaaagggagagacgaggggaacgagatagcgcgcgagggcggtcgtagcgcgatcgagggaaaaaacgcgtagagcgataatcgattacgcgcggggcgggagagcgagacgttcgagggtacgaagagttcgggcgcgtcgacggtttaggtacgcgcgagggcgacgggagggagggtagcggtacggagttcggtagaagtattcgagggttttttcggcgggaaataggggataacgaggaggttntcgcgttcgaggatagagcgcgggagtaagagataaggtagaggggacgggcggcggatcgcggggcgggtcgtaagggcgcgtaggggtcgcgggcgaggtcggcgagtaaggagggtataacgcggggggaaagaaacgagggaaggtaagggtagcgtaggtaacggtcggttaaggggaaggggaaggggaaggggaaggggaagggaaaggggaagggaa

SEQ ID NO: 33600 - DNA, 537 bp, Artificial Sequence
  chemically treated genomic DNA (Homo sapiens) CpG-island No: 33600
  unsure (226)
ttcccttcccctttcccttccccttccccttccccttccccttccccttaaccgaccgttacctacgctacccttaccttccctcgtttctttccccccgcgttataccctccttactcgccgacctcgcccgcgacccctacgcgcccttacgacccgccccgcgatccgccgcccgtcccctctaccttatctcttactcccgcgctctatcctcgaacgcganaacctcctcgttatcccctatttcccgccgaaaaaaccctcgaatacttctaccgaactccgtaccgctaccctccctcccgtcgccctcgcgcgtacctaaaccgtcgacgcgcccgaactcttcgtaccctcgaacgtctcgctctcccgccccgcgcgtaatcgattatcgctctacgcgttttttccctcgatcgcgctacgaccgccctcgcgcgctatctcgttcccctcgtctctccctttccccgcgtcgtaaaccgatatcgacctactacctcccgttaaccgatctcgacgaatacgcta

SEQ ID NO: 33601 - DNA, 560 bp, Artificial Sequence
  chemically treated genomic DNA (Homo sapiens) CpG-island No: 33601
cgttatttttttgatttgttttcgacgcgcgttgacgttagcggcgagatgttaatggattttgtattttttttgtttatatgatgttttatatcgttattcgtttttattttttattttcgcgtttcgtcgcgcgtttttttttttttttcgtgtgttttcgggcgttcgatcgtcgtcgttcgatttcgttttttttttttttcggtatgttttcggttcgtttcgtttttgtggttatttggtagtatcgtgtagtgttgtttgcgattgaacggttcgttttgcgtcgcgcgtttcgtttttattttttcgttaattttggtacgtttttcgtcgtattttacgattttcgttttcgcgcgtttcgcgtttttttttttattcgattagattttcgttgttcgttttttcgttttcgtaatattcgttattttttttcgcgttttttttttatttttttatacgtatttttttcgtttatgttcgcgcgtgtttagtttattttttcgtttttcgtcgggtttgtatatgaaggttttgttattggtttacgttaa

SEQ ID NO: 33602 - DNA, 560 bp, Artificial Sequence
  chemically treated genomic DNA (Homo sapiens) CpG-island No: 33602
ttaacgtaaaccaataacaaaaccttcatatacaaacccgacgaaaaacgaaaaaataaactaaacacgcgcgaacataaacgaaaaaaatacgtataaaaaaataaaaaaaaaacgcgaaaaaaaataacgaatattacgaaaacgaaaaaacgaacaacgaaaatctaatcgaataaaaaaaaaaacgcgaaacgcgcgaaaacgaaaatcgtaaaatacgacgaaaaacgtaccaaaattaacgaaaaaataaaaacgaaacgcgcgacgcaaaacgaaccgttcaatcgcaaacaacactacacgatactaccaaataaccacaaaaacgaaacgaaccgaaaacataccgaaaaaaaaaaaaaacgaaatcgaacgacgacgatcgaacgcccgaaaacacacgaaaaaaaaaaaaaaacgcgcgacgaaacgcgaaaataaaaaataaaaacgaataacgatataaaacatcatataaacaaaaaaaatacaaaatccattaacatctcgccgctaacgtcaacgcgcgtcgaaaacaaatcaaaaaaataacg

SEQ ID NO: 33603 - DNA, 560 bp, Artificial Sequence
  chemically treated genomic DNA (Homo sapiens) CpG-island No: 33603
ttggcgtgaattagtgatagggtttttatgtgtagattcggcgaggggcgggggggtgagttggatacgcgcgggtatgggcgagggggatacgtatagaggagtaaagggggagcgcgggggggggtagcgagtattgcgagggcgagagggcggatagcgggggtttggtcgggtggggggggggacgcggggcgcgcgggagcgggggtcgtggggtgcggcgaggggcgtgttagggttggcggaagggtgggggcgaggcgcgcgacgtagggcgggtcgtttaatcgtaggtaatattgtacggtgttgttaggtggttataggggcggaacgggtcgggggtatgtcggggagggggggggacggggtcgggcgacggcggtcgggcgttcgagggtatacggggaaggaaggggagcgcgcggcgggacgcggaagtgaggggtaggagcgggtgacgatataaggtattatgtgggtaggaggggtgtaaggtttattggtatttcgtcgttagcgttaacgcgcgtcggagataaattaagaaagtggcg

SEQ ID NO: 33604 - DNA, 560 bp, Artificial Sequence
  chemically treated genomic DNA (Homo sapiens) CpG-island No: 33604
cgccactttcttaatttatctccgacgcgcgttaacgctaacgacgaaataccaataaaccttacacccctcctacccacataataccttatatcgtcacccgctcctacccctcacttccgcgtcccgccgcgcgctccccttccttccccgtataccctcgaacgcccgaccgccgtcgcccgaccccgtccccccccctccccgacatacccccgacccgttccgcccctataaccacctaacaacaccgtacaatattacctacgattaaacgacccgccctacgtcgcgcgcctcgcccccacccttccgccaaccctaacacgcccctcgccgcaccccacgacccccgctcccgcgcgccccgcgtccccccccccacccgaccaaacccccgctatccgccctctcgccctcgcaatactcgctacccccccccgcgctccccctttactcctctatacgtatccccctcgcccatacccgcgcgtatccaactcacccccccgcccctcgccgaatctacacataaaaaccctatcactaattcacgccaa

SEQ ID NO: 33605 - DNA, 785 bp, Artificial Sequence
  chemically treated genomic DNA (Homo sapiens) CpG-island No: 33605
  unsure (547, 649, 660)
attcggttggtgggagttacggcgattttttcgtcgtcgtcgaaggttcgtagtaatgaaaatttcgataaaatagatatgtttttgggtgaggggtcgagttggatcgagttggagtgcgggggagggcgcgggtggaagtcggcggcgcggtttgtgggggtaggggcggtcggtagtagttgtcggcggagttttttcgttggtgggcggattcgagcggaggttcggaggatagtcgggagcgtaggttcgacgttaggtgttcggttggatcgcgagggattcgggcgttttttcggtcgcggtagtcggaggaggggttgtggaggcgggggtaggggcgttgcgggttcgaaggttcgtagggtcgcggggggcgtttttttttttcggaggggttacggttcgtcgttcgtcggttttttgtgaggaaagatttgtcggttttttcggagcgcgttcgcggtgggcgttatcggggagcgaggggaatggttcgatcgagtcgttttttttgaagaaaggtttggagagttcggtcggngttgcggtcggttaaattagcgttttcggagttttttttggtcgtcgggcgttttaggtcggcgtcggttatggttgtcggtcgcgattttcggggttattnttcgtcgcggnttcggagcgtttgttaaaaagaagtagcgttcggtcgttgtggatgtcgttgggtatgagcgttgttagaaaatatagttttttttttaggtttagattagttaatggggagaaagaaatatttt

SEQ ID NO: 33606 - DNA, 785 bp, Artificial Sequence
  chemically treated genomic DNA (Homo sapiens) CpG-island No: 33606
  unsure (126, 137, 239)
aaaatatttctttctccccattaactaatctaaacctaaaaaaaaaactatattttctaacaacgctcatacccaacgacatccacaacgaccgaacgctacttctttttaacaaacgctccgaanccgcgacgaanaataaccccgaaaatcgcgaccgacaaccataaccgacgccgacctaaaacgcccgacgaccaaaaaaaactccgaaaacgctaatttaaccgaccgcaacnccgaccgaactctccaaacctttcttcaaaaaaaacgactcgatcgaaccattcccctcgctccccgataacgcccaccgcgaacgcgctccgaaaaaaccgacaaatctttcctcacaaaaaaccgacgaacgacgaaccgtaacccctccgaaaaaaaaaaacgccccccgcgaccctacgaaccttcgaacccgcaacgcccctacccccgcctccacaacccctcctccgactaccgcgaccgaaaaaacgcccgaatccctcgcgatccaaccgaacacctaacgtcgaacctacgctcccgactatcctccgaacctccgctcgaatccgcccaccaacgaaaaaactccgccgacaactactaccgaccgcccctacccccacaaaccgcgccgccgacttccacccgcgccctcccccgcactccaactcgatccaactcgacccctcacccaaaaacatatctattttatcgaaattttcattactacgaaccttcgacgacgacgaaaaaatcgccgtaactcccaccaaccgaat

SEQ ID NO: 33607 - DNA, 785 bp, Artificial Sequence
  chemically treated genomic DNA (Homo sapiens) CpG-island No: 33607
  unsure (126, 137, 239)
agaatgtttttttttttttattagttagtttgagtttggagaggagattgtgttttttagtagcgtttatatttaacgatatttatagcggtcgagcgttgtttttttttgatagacgtttcgggntcgcggcgganggtggtttcgagagtcgcggtcggtagttatggtcggcgtcggtttgaaacgttcggcgattagggaaagtttcggaagcgttggtttaatcgatcgtagtntcggtcgggttttttagatttttttttagagagaacggttcggtcggattatttttttcgtttttcgataacgtttatcgcgaacgcgtttcggggaaatcggtagatttttttttataaagagtcggcgagcggcgagtcgtagttttttcggggagaagagacgtttttcgcgattttgcgaattttcgggttcgtagcgtttttgttttcgtttttatagtttttttttcgattgtcgcggtcgaggggacgttcgggtttttcgcggtttagtcgggtatttggcgtcgagtttgcgttttcggttgtttttcgggttttcgttcgggttcgtttattagcgagaaaatttcgtcggtaattgttgtcgatcgtttttgtttttataaatcgcgtcgtcggtttttattcgcgttttttttcgtattttaattcggtttaattcggttttttatttaaagatatatttattttgtcgaggtttttattgttgcgggttttcggcggcggcgaagaagtcgtcgtggtttttattaatcgggt

SEQ ID NO: 33608 - DNA, 785 bp, Artificial Sequence
  chemically treated genomic DNA (Homo sapiens) CpG-island No: 33608
  unsure (547, 649, 660)
acccgattaataaaaaccacgacgacttcttcgccgccgccgaaaacccgcaacaataaaaacctcgacaaaataaatatatctttaaataaaaaaccgaattaaaccgaattaaaatacgaaaaaaaacgcgaataaaaaccgacgacgcgatttataaaaacaaaaacgatcgacaacaattaccgacgaaattttctcgctaataaacgaacccgaacgaaaacccgaaaaacaaccgaaaacgcaaactcgacgccaaatacccgactaaaccgcgaaaaacccgaacgtcccctcgaccgcgacaatcgaaaaaaaaactataaaaacgaaaacaaaaacgctacgaacccgaaaattcgcaaaatcgcgaaaaacgtctcttctccccgaaaaaactacgactcgccgctcgccgactctttataaaaaaaaatctaccgatttccccgaaacgcgttcgcgataaacgttatcgaaaaacgaaaaaaataatccgaccgaaccgttctctctaaaaaaaaatctaaaaaacccgaccganactacgatcgattaaaccaacgcttccgaaactttccctaatcgccgaacgtttcaaaccgacgccgaccataactaccgaccgcgactctcgaaaccaccntccgccgcgancccgaaacgtctatcaaaaaaaaacaacgctcgaccgctataaatatcgttaaatataaacgctactaaaaaacacaatctcctctccaaactcaaactaactaataaaaaaaaaaaaacattct

SEQ ID NO: 33609 - DNA, 506 bp, Artificial Sequence
  chemically treated genomic DNA (Homo sapiens) CpG-island No: 33609
  unsure (219, 275, 327..328, 389, 433)
ggacgaggaagaggaggaggaggaataggagaaggaggaggagaaggacgaagaggaggaggaggtttatatttcgtttagttttttgtgcgcgggcgcgcgagtcgtttcggtattttcgagcggttcggcggtgcgtgtcgggattcgcgagcgtgtattttcgaatttgcgcggttgagtattttatatttcgcgtttcgcgcgtcgcgtcgaggncgttcgataggtcggtgttatttcggtcgcgtcgtcgcgttatgatgcgtagtttnatgtacgtaacgtttcggtgagcgcgcggacggtacggcggttgcggtcgtnntttcgaggtggggttggcgttagagcgttcgatcgatcggtcgcgtatcgtaggggagagngtcgatcggtatgagattcggagatgttggtaggtcgagttgtnttgtcgatagaatatatgtttcggacgcgggaggcggcgggtcgttttttgtttcgtgtgtattattggggtt

SEQ ID NO: 33610 - DNA, 506 bp, Artificial Sequence
  chemically treated genomic DNA (Homo sapiens) CpG-island No: 33610
  unsure (74, 118, 179..180, 232, 288)
aaccccaataatacacacgaaacaaaaaacgacccgccgcctcccgcgtccgaaacatatattctatcgacaanacaactcgacctaccaacatctccgaatctcataccgatcgacnctctcccctacgatacgcgaccgatcgatcgaacgctctaacgccaaccccacctcgaaannacgaccgcaaccgccgtaccgtccgcgcgctcaccgaaacgttacgtacatnaaactacgcatcataacgcgacgacgcgaccgaaataacaccgacctatcgaacgncctcgacgcgacgcgcgaaacgcgaaatataaaatactcaaccgcgcaaattcgaaaatacacgctcgcgaatcccgacacgcaccgccgaaccgctcgaaaataccgaaacgactcgcgcgcccgcgcacaaaaaactaaacgaaatataaacctcctcctcctcttcgtccttctcctcctccttctcctattcctcctcctcctcttcctcgtcc

SEQ ID NO: 33611 - DNA, 506 bp, Artificial Sequence
  chemically treated genomic DNA (Homo sapiens) CpG-island No: 33611
  unsure (74, 118, 179..180, 232, 288)
ggttttaatgatgtatacggggtagggggcggttcgtcgtttttcgcgttcggaatatatattttgtcggtaangtaattcggtttgttaatattttcgagttttatgtcgatcggtntttttttttgcggtgcgcgatcggtcgatcgggcgttttggcgttagttttatttcgaaanngcggtcgtagtcgtcgtgtcgttcgcgcgtttatcggggcgttgcgtatatngggttacgtattataacgcgacggcgcggtcggggtagtatcggtttgtcgggcgntttcggcgcggcgcgcggagcgcggaatgtgaaatgtttagtcgcgtaaattcgggggtgtacgttcgcgaatttcggtacgtatcgtcggatcgttcggggatatcggggcggttcgcgcgttcgcgtataaagaattaagcggggtatgaatttttttttttttttcgttttttttttttttttttttttgttttttttttttttttttttcgttt

SEQ ID NO: 33612 - DNA, 506 bp, Artificial Sequence
  chemically treated genomic DNA (Homo sapiens) CpG-island No: 33612
  unsure (219, 275, 327..328, 389, 433)
aaacgaaaaaaaaaaaaaaaaaaaacaaaaaaaaaaaaaaaaaaaaaacgaaaaaaaaaaaaaaattcataccccgcttaattctttatacgcgaacgcgcgaaccgccccgatatccccgaacgatccgacgatacgtaccgaaattcgcgaacgtacacccccgaatttacgcgactaaacatttcacattccgcgctccgcgcgccgcgccgaaancgcccgacaaaccgatactaccccgaccgcgccgtcgcgttataatacgtaacccnatatacgcaacgccccgataaacgcgcgaacgacacgacgactacgaccgcnntttcgaaataaaactaacgccaaaacgcccgatcgaccgatcgcgcaccgcaaaaaaaaanaccgatcgacataaaactcgaaaatattaacaaaccgaattacnttaccgacaaaatatatattccgaacgcgaaaaacgacgaaccgccccctaccccgtatacatcattaaaacc

SEQ ID NO: 33613 - DNA, 619 bp, Artificial Sequence
  chemically treated genomic DNA (Homo sapiens) CpG-island No: 33613
ggtcgcggcgtttacgtgagcggcgtcgttttttttttatcggttcggggttttcggtcgttcgtcgtttttcgggtcgcggaggggaagggcggggggtttcggttcgggagagcgtcgtcggagggcgtggggggcgcggcgaggaaggggtttcggtcgggagggaggtcgcgtttattttttttatcgatagcgagatgttttttaggattcggttttttatttttttcggttttatggcgttgttatcgtcgtcgttatcgttatcgttatcgtcgtcgtcgtttcgtcgtcgtttttcgcgtcgggggtcgggggtcgtcgttaatcgttgtcgtcggtcgtacgggggtttcgtcgtgtcggtcgcggggttcggcgttcgtcgttcggttttcgtttcgtttgggttttcgttttatcgcggttcggaggtttcggagcgcggtcggcggggaaggaggtcgcgggttgtgcgtcgcggcggcggcggcggtaggaattgatgttaggcggcgtcggcgttagggttcgtttgcgtttggagatttcggggattcggagattcgtatagatttttggtcgcggttttttttagagatttttagatttattt

SEQ ID NO: 33614 - DNA, 619 bp, Artificial Sequence
  chemically treated genomic DNA (Homo sapiens) CpG-island No: 33614
aaataaatctaaaaatctctaaaaaaaaccgcgaccaaaaatctatacgaatctccgaatccccgaaatctccaaacgcaaacgaaccctaacgccgacgccgcctaacatcaattcctaccgccgccgccgccgcgacgcacaacccgcgacctccttccccgccgaccgcgctccgaaacctccgaaccgcgataaaacgaaaacccaaacgaaacgaaaaccgaacgacgaacgccgaaccccgcgaccgacacgacgaaacccccgtacgaccgacgacaacgattaacgacgacccccgacccccgacgcgaaaaacgacgacgaaacgacgacgacgataacgataacgataacgacgacgataacaacgccataaaaccgaaaaaaataaaaaaccgaatcctaaaaaacatctcgctatcgataaaaaaaataaacgcgacctccctcccgaccgaaaccccttcctcgccgcgccccccacgccctccgacgacgctctcccgaaccgaaaccccccgcccttcccctccgcgacccgaaaaacgacgaacgaccgaaaaccccgaaccgataaaaaaaaaacgacgccgctcacgtaaacgccgcgacc

SEQ ID NO: 33615 - DNA, 619 bp, Artificial Sequence
  chemically treated genomic DNA (Homo sapiens) CpG-island No: 33615
gggtgggtttgggggtttttggggagggtcgcgattaagggtttgtgcgggttttcgggttttcggagtttttaggcgtaggcgggttttggcgtcggcgtcgtttggtattagtttttgtcgtcgtcgtcgtcgcggcgtatagttcgcggttttttttttcgtcggtcgcgtttcggagttttcgggtcgcggtggagcgagggtttaggcgaggcgagggtcgggcggcgggcgtcgggtttcgcggtcggtacgacggagttttcgtacggtcggcggtagcggttggcggcggttttcggttttcggcgcgggaagcggcggcggggcggcggcggcggtggcggtggcggtggcggcgacggtggtagcgttatggagtcgggggaggtgaaggatcggattttggagaatatttcgttgtcggtgaagaaggtgagcgcggtttttttttcggtcggggtttttttttcgtcgcgttttttacgtttttcggcggcgttttttcgggtcggggtttttcgtttttttttttcgcgattcggggggcgacgagcggtcgggagtttcgggtcggtagaggggaagcggcgtcgtttacgtgagcgtcgcggtt

SEQ ID NO: 33616 - DNA, 619 bp, Artificial Sequence
  chemically treated genomic DNA (Homo sapiens) CpG-island No: 33616
aaccgcgacgctcacgtaaacgacgccgcttcccctctaccgacccgaaactcccgaccgctcgtcgccccccgaatcgcgaaaaaaaaaaacgaaaaaccccgacccgaaaaaacgccgccgaaaaacgtaaaaaacgcgacgaaaaaaaaaccccgaccgaaaaaaaaaccgcgctcaccttcttcaccgacaacgaaatattctccaaaatccgatccttcacctcccccgactccataacgctaccaccgtcgccgccaccgccaccgccaccgccgccgccgccccgccgccgcttcccgcgccgaaaaccgaaaaccgccgccaaccgctaccgccgaccgtacgaaaactccgtcgtaccgaccgcgaaacccgacgcccgccgcccgaccctcgcctcgcctaaaccctcgctccaccgcgacccgaaaactccgaaacgcgaccgacgaaaaaaaaaaccgcgaactatacgccgcgacgacgacgacgacaaaaactaataccaaacgacgccgacgccaaaacccgcctacgcctaaaaactccgaaaacccgaaaacccgcacaaacccttaatcgcgaccctccccaaaaacccccaaacccaccc

SEQ ID NO: 33617 - DNA, 721 bp, Artificial Sequence
  chemically treated genomic DNA (Homo sapiens) CpG-island No: 33617
cggcgtttcggcggggtttgcggagggggagggggtcgcggtttttcggcgggtcgcgtggatgcgtataggaggggtcgcggtttgaaaagtgggggttattgttttttttcgtttttcgttcggtttcgttacgtcgcggcgattatggtcgcgcgggtagtagcggcggcggcggcggcggcggcgcgggcgcgggcgcgggtaggtagcggcgaacggcgggcgtttttcgggtcgcggtcggcgttcggagttcgggatttggaggcgggggcgcgcggcgcggcggcggcggcggcggtatcgggatttatgttggggggcggcggcgacggcggcggcggtttgaatagtgtgtattattattttttgttttttcgttacgaatttaatatggtttataacgcgggcgtcgcggtcgtcgtcggtatttatagcgttaagagcggcggtttcgaggcggtttttaaggagggtggaagcgtcgtcgcgttgttttttttttttttttttttcgcggcggtagcggcggtatttttttttttttcgtcgggttcgggttcggttatggagacggggttgttttttaattataaattgaaaatcgttggcgaagttttcgtcgcgtcgttttattagtagtattattattattattatgtttattattattattattatgtttattatttttattattattacgtattatagtagt

SEQ ID NO: 33618 - DNA, 721 bp, Artificial Sequence
  chemically treated genomic DNA (Homo sapiens) CpG-island No: 33618
actactataatacgtaataataataaaaataataaacataataataataataataaacataataataataataatactactaataaaacgacgcgacgaaaacttcgccaacgattttcaatttataattaaaaaacaaccccgtctccataaccgaacccgaacccgacgaaaaaaaaaaaaataccgccgctaccgccgcgaaaaaaaaaaaaaaaaaaaacaacgcgacgacgcttccaccctccttaaaaaccgcctcgaaaccgccgctcttaacgctataaataccgacgacgaccgcgacgcccgcgttataaaccatattaaattcgtaacgaaaaaacaaaaaataataatacacactattcaaaccgccgccgccgtcgccgccgccccccaacataaatcccgataccgccgccgccgccgccgcgccgcgcgcccccgcctccaaatcccgaactccgaacgccgaccgcgacccgaaaaacgcccgccgttcgccgctacctacccgcgcccgcgcccgcgccgccgccgccgccgccgccgctactacccgcgcgaccataatcgccgcgacgtaacgaaaccgaacgaaaaacgaaaaaaaacaataacccccacttttcaaaccgcgacccctcctatacgcatccacgcgacccgccgaaaaaccgcgaccccctccccctccgcaaaccccgccgaaacgccg

SEQ ID NO: 33619 - DNA, 721 bp, Artificial Sequence
  chemically treated genomic DNA (Homo sapiens) CpG-island No: 33619
gttgttgtagtgcgtggtggtggtggaggtggtgggtatggtggtggtggtggtgggtatggtggtggtggtggtgttgttggtggggcggcgcggcgggggtttcgttaacggtttttagtttgtggttggggagtagtttcgtttttatggtcgagttcgggttcgacgaggaggaagaggatgtcgtcgttgtcgtcgcggaggaggaggaggaggaggatagcgcggcggcgtttttattttttttgagagtcgtttcggagtcgtcgtttttggcgttgtgggtgtcggcggcggtcgcggcgttcgcgttatgggttatgttgagttcgtgacgggggagtagggggtggtggtgtatattgtttaggtcgtcgtcgtcgtcgtcgtcgttttttagtatgggtttcggtgtcgtcgtcgtcgtcgtcgcgtcgcgcgttttcgtttttaggtttcgggtttcgggcgtcggtcgcggttcggggggcgttcgtcgttcgtcgttgtttgttcgcgttcgcgttcgcgtcgtcgtcgtcgtcgtcgtcgttgttgttcgcgcggttatgatcgtcgcggcgtggcgaggtcgggcggggggcggggggagataataatttttattttttaggtcgcggttttttttgtgcgtatttacgcggttcgtcgggaagtcgcgatttttttttttttcgtaggtttcgtcggagcgtcg

SEQ ID NO: 33620 - DNA, 721 bp, Artificial Sequence
  chemically treated genomic DNA (Homo sapiens) CpG-island No: 33620
cgacgctccgacgaaacctacgaaaaaaaaaaaaatcgcgacttcccgacgaaccgcgtaaatacgcacaaaaaaaaccgcgacctaaaaaataaaaattattatctccccccgccccccgcccgacctcgccacgccgcgacgatcataaccgcgcgaacaacaacgacgacgacgacgacgacgacgcgaacgcgaacgcgaacaaacaacgacgaacgacgaacgccccccgaaccgcgaccgacgcccgaaacccgaaacctaaaaacgaaaacgcgcgacgcgacgacgacgacgacgacaccgaaacccatactaaaaaacgacgacgacgacgacgacgacctaaacaatatacaccaccaccccctactcccccgtcacgaactcaacataacccataacgcgaacgccgcgaccgccgccgacacccacaacgccaaaaacgacgactccgaaacgactctcaaaaaaaataaaaacgccgccgcgctatcctcctcctcctcctcctccgcgacgacaacgacgacatcctcttcctcctcgtcgaacccgaactcgaccataaaaacgaaactactccccaaccacaaactaaaaaccgttaacgaaacccccgccgcgccgccccaccaacaacaccaccaccaccaccatacccaccaccaccaccaccatacccaccacctccaccaccaccacgcactacaacaac

SEQ ID NO: 33621 - DNA, 1168 bp, Artificial Sequence
  chemically treated genomic DNA (Homo sapiens) CpG-island No: 33621
ggcgcgttttagttcggtttcgatatggagtagtcgtaatatggaggcgttaaggatagtgttgcgggcggttaggtcgatttttcgggttcgtcgttgttgagtaagtcgggcgacgaggacgacgcgtcgtttaagatgggggagtcggcgggcggtcgttacgagtattcgggtttgggcgttttgggtacgtagtagtcgtcggtcgtcgtgttcgggggcggcggcggttcggcggtcgtttcggagtttaataattattatggtagcgttgtttttgcgagcggcggtttcggcggtcgcgttgggttttgttttgattaatatggcggataataaagtttcgggatggggatgatgtatttcgttttcgtcgtcgtcgtcggggttttcggtagtatggattttttgtagaatttttacgaagggtattttaatagttagtgtaattattattcgggttatagtcggttcggcgcgggcggcggcggcggcggcggcggcggaggaggaggaggtagcggaggaggaggaggaggaggaggagtaggagtaggaggagtaggagcgggagttgtggcggcggcggtcgcggcggcggcggtagtagtaggaggcggcggcggcggcggttatgggggttcgttcgcggggtacggggtgttgagtttttttcggtagtagggcggcggtatgatgatgggtttcgggggcggcggggtcgcgagttttagtaaggcggtcgtcggttcggcggcggggggtttttagcgtttcgtcggttagaattagtattcgtcgggggttatttcgatttttaattagttgtttatttcgtttagttttatgatgcggagttacggcggtagttatttcgagtatagtagttttagcgcgtcgtcgtcgtcgtcgtcgtagttttagttttaggcggcggcggcgggggcggcggcgggcggttagtaggcggtcgcgggtatgggtttgggtaaggatatgggcgtttagtacgtcgttgttagttcggtttgggcggtcgcgtaataaaggagttattcggcgatgagtttcggtattttcggatcgattatgggtagattttaggtaattttcgcgttagtcgggtttgttttcgttcggcggtttcgtcgcgtcgcgagtttga

SEQ ID NO: 33622 - DNA, 1168 bp, Artificial Sequence
  chemically treated genomic DNA (Homo sapiens) CpG-island No: 33622
tcaaactcgcgacgcgacgaaaccgccgaacgaaaacaaacccgactaacgcgaaaattacctaaaatctacccataatcgatccgaaaataccgaaactcatcgccgaataactcctttattacgcgaccgcccaaaccgaactaacaacgacgtactaaacgcccatatccttacccaaacccatacccgcgaccgcctactaaccgcccgccgccgcccccgccgccgccgcctaaaactaaaactacgacgacgacgacgacgacgcgctaaaactactatactcgaaataactaccgccgtaactccgcatcataaaactaaacgaaataaacaactaattaaaaatcgaaataacccccgacgaatactaattctaaccgacgaaacgctaaaaaccccccgccgccgaaccgacgaccgccttactaaaactcgcgaccccgccgcccccgaaacccatcatcataccgccgccctactaccgaaaaaaactcaacaccccgtaccccgcgaacgaacccccataaccgccgccgccgccgcctcctactactaccgccgccgccgcgaccgccgccgccacaactcccgctcctactcctcctactcctactcctcctcctcctcctcctcctccgctacctcctcctcctccgccgccgccgccgccgccgccgcccgcgccgaaccgactataacccgaataataattacactaactattaaaatacccttcgtaaaaattctacaaaaaatccatactaccgaaaaccccgacgacgacgacgaaaacgaaatacatcatccccatcccgaaactttattatccgccatattaatcaaaacaaaacccaacgcgaccgccgaaaccgccgctcgcaaaaacaacgctaccataataattattaaactccgaaacgaccgccgaaccgccgccgcccccgaacacgacgaccgacgactactacgtacccaaaacgcccaaacccgaatactcgtaacgaccgcccgccgactcccccatcttaaacgacgcgtcgtcctcgtcgcccgacttactcaacaacgacgaacccgaaaaatcgacctaaccgcccgcaacactatccttaacgcctccatattacgactactccatatcgaaaccgaactaaaacgcgcc

SEQ ID NO: 33623 - DNA, 1168 bp, Artificial Sequence
  chemically treated genomic DNA (Homo sapiens) CpG-island No: 33623
ttaggttcgcggcgcggcgaggtcgtcgggcggaagtaggttcggttggcgcgagggttatttgggatttgtttatggtcggttcgggggtgtcggggtttatcgtcgggtgatttttttgttgcgcggtcgtttaggtcgggttggtagcggcgtattgggcgtttatgtttttgtttaagtttatgttcgcggtcgtttgttggtcgttcgtcgtcgttttcgtcgtcgtcgtttgggattggggttgcgacggcggcggcggcggcgcgttggggttgttgtattcggggtagttgtcgtcgtagtttcgtattatggggttgggcgaggtgagtagttgattgagggtcggggtggttttcgacgggtgttggttttggtcggcgaagcgttggaagtttttcgtcgtcgagtcggcggtcgttttgttgaggttcgcggtttcgtcgttttcggggtttattattatgtcgtcgttttgttgtcggggggagtttagtatttcgtatttcgcggacgagtttttatagtcgtcgtcgtcgtcgttttttgttgttgtcgtcgtcgtcgcggtcgtcgtcgttatagttttcgtttttgttttttttgtttttgttttttttttttttttttttttttcgttgtttttttttttttcgtcgtcgtcgtcgtcgtcgtcgttcgcgtcgggtcggttgtagttcggataatggttgtattggttgttggggtatttttcgtgggagttttgtagggggtttatgttgtcgggggtttcggcggcggcggcggaggcggagtgtattatttttatttcggggttttgttgttcgttatgttgattaaagtaaggtttagcgcggtcgtcggggtcgtcgttcgtaggggtagcgttgttatagtaattattaaatttcgggacggtcgtcgggtcgtcgtcgttttcgggtacggcgatcggcggttgttgcgtgtttagggcgtttaagttcgggtgttcgtagcggtcgttcgtcggtttttttattttgggcggcgcgtcgttttcgtcgttcggtttgtttagtagcggcgggttcggggggtcggtttggtcgttcgtagtattgtttttggcgtttttatgttgcggttgttttatgtcggggtcgggttgaggcgcgtt

SEQ ID NO: 33624 - DNA, 1168 bp, Artificial Sequence
  chemically treated genomic DNA (Homo sapiens) CpG-island No: 33624
aacgcgcctcaacccgaccccgacataaaacaaccgcaacataaaaacgccaaaaacaatactacgaacgaccaaaccgaccccccgaacccgccgctactaaacaaaccgaacgacgaaaacgacgcgccgcccaaaataaaaaaaccgacgaacgaccgctacgaacacccgaacttaaacgccctaaacacgcaacaaccgccgatcgccgtacccgaaaacgacgacgacccgacgaccgtcccgaaatttaataattactataacaacgctacccctacgaacgacgaccccgacgaccgcgctaaaccttactttaatcaacataacgaacaacaaaaccccgaaataaaaataatacactccgcctccgccgccgccgccgaaacccccgacaacataaaccccctacaaaactcccacgaaaaataccccaacaaccaatacaaccattatccgaactacaaccgacccgacgcgaacgacgacgacgacgacgacgacgaaaaaaaaaaaaacaacgaaaaaaaaaaaaaaaaaaaaaaaacaaaaacaaaaaaaacaaaaacgaaaactataacgacgacgaccgcgacgacgacgacaacaacaaaaaacgacgacgacgacgactataaaaactcgtccgcgaaatacgaaatactaaactccccccgacaacaaaacgacgacataataataaaccccgaaaacgacgaaaccgcgaacctcaacaaaacgaccgccgactcgacgacgaaaaacttccaacgcttcgccgaccaaaaccaacacccgtcgaaaaccaccccgaccctcaatcaactactcacctcgcccaaccccataatacgaaactacgacgacaactaccccgaatacaacaaccccaacgcgccgccgccgccgccgtcgcaaccccaatcccaaacgacgacgacgaaaacgacgacgaacgaccaacaaacgaccgcgaacataaacttaaacaaaaacataaacgcccaatacgccgctaccaacccgacctaaacgaccgcgcaacaaaaaaatcacccgacgataaaccccgacacccccgaaccgaccataaacaaatcccaaataaccctcgcgccaaccgaacctacttccgcccgacgacctcgccgcgccgcgaacctaa

SEQ ID NO: 33625 - DNA, 556 bp, Artificial Sequence
  chemically treated genomic DNA (Homo sapiens) CpG-island No: 33625
tcgtagcgttttcgttgttttttttcggcggcggggagattttaaatttggtttaggcgcggggcgtatagaggcgttcgggatgtgttcgggattttacggaggagtggagggcggggaggtagtggttttatcgtgtaggagcgacgcggttagcgttagttagacgtttttcggcgagtagcgtatgttgagtttcggagttgtagcgagtcggcgcgttttacgtttcggttgtcgttcgggtttgcgtttgcggttatagaggtatttcgtcgttcggttcgcgcgtttttaaggagtcgggcgcgcgttttcgtttcgttcgttttcgcgcgtttttttacgtgacgagtttcgttttcgttttcgttttcgtttttttatttttttagttcgggttagcgtttcggcggttatttagggaattgtagttcgaggtgtgagcgggaggtattttcggcgttgggtacgtttcgggtatttttatttttagtttttatcgagcgggttttcggtttcgcgtttttggttaggttaggggttgtttaaggtt

SEQ ID NO: 33626 - DNA, 556 bp, Artificial Sequence
  chemically treated genomic DNA (Homo sapiens) CpG-island No: 33626
aaccttaaacaacccctaacctaaccaaaaacgcgaaaccgaaaacccgctcgataaaaactaaaaataaaaatacccgaaacgtacccaacgccgaaaatacctcccgctcacacctcgaactacaattccctaaataaccgccgaaacgctaacccgaactaaaaaaataaaaaaacgaaaacgaaaacgaaaacgaaactcgtcacgtaaaaaaacgcgcgaaaacgaacgaaacgaaaacgcgcgcccgactccttaaaaacgcgcgaaccgaacgacgaaatacctctataaccgcaaacgcaaacccgaacgacaaccgaaacgtaaaacgcgccgactcgctacaactccgaaactcaacatacgctactcgccgaaaaacgtctaactaacgctaaccgcgtcgctcctacacgataaaaccactacctccccgccctccactcctccgtaaaatcccgaacacatcccgaacgcctctatacgccccgcgcctaaaccaaatttaaaatctccccgccgccgaaaaaaaacaacgaaaacgctacga

SEQ ID NO: 33627 - DNA, 556 bp, Artificial Sequence
  chemically treated genomic DNA (Homo sapiens) CpG-island No: 33627
ggttttgggtagtttttggtttggttagaggcgcgaggtcgagagttcgttcggtggagattgggggtggaggtgttcggagcgtatttagcgtcgggagtatttttcgtttatatttcgggttgtagttttttgggtggtcgtcgagacgttggttcgggttggagggatgggggggcggggacgggggcgggggcggggttcgttacgtggagaggcgcgcgggggcgggcggggcgggggcgcgcgttcggttttttaaaggcgcgcgagtcgagcggcgaggtgtttttgtggtcgtaggcgtaggttcgggcgatagtcgagacgtggagcgcgtcggttcgttgtagtttcgggatttaatatgcgttgttcgtcgggaggcgtttggttggcgttggtcgcgtcgtttttgtacggtaaagttattgttttttcgttttttattttttcgtgggatttcgggtatatttcgggcgtttttgtgcgtttcgcgtttgggttaggtttgggattttttcgtcgtcggggaggggtagcgggggcgttgcgg

SEQ ID NO: 33628 - DNA, 556 bp, Artificial Sequence
  chemically treated genomic DNA (Homo sapiens) CpG-island No: 33628
ccgcaacgcccccgctacccctccccgacgacgaaaaaatcccaaacctaacccaaacgcgaaacgcacaaaaacgcccgaaatatacccgaaatcccacgaaaaaataaaaaacgaaaaaacaataactttaccgtacaaaaacgacgcgaccaacgccaaccaaacgcctcccgacgaacaacgcatattaaatcccgaaactacaacgaaccgacgcgctccacgtctcgactatcgcccgaacctacgcctacgaccacaaaaacacctcgccgctcgactcgcgcgcctttaaaaaaccgaacgcgcgcccccgccccgcccgcccccgcgcgcctctccacgtaacgaaccccgcccccgcccccgtccccgcccccccatccctccaacccgaaccaacgtctcgacgaccacccaaaaaactacaacccgaaatataaacgaaaaatactcccgacgctaaatacgctccgaacacctccacccccaatctccaccgaacgaactctcgacctcgcgcctctaaccaaaccaaaaactacccaaaacc

SEQ ID NO: 33629 - DNA, 505 bp, Artificial Sequence
  chemically treated genomic DNA (Homo sapiens) CpG-island No: 33629
cgattacggatttgtattgtcgaggacgggattttagggtagcgaagtaggtaattttgtagcggtcggggttcggcgaggcggggaggggtcggggtgtaggtgcggggggcgtttggcggcgggcgttggtaagttgagttcgatgggtggggtagggaagcggtcgggacgttgcggttgtggtagtagcgcgaggggaataaaggcggcgcgggcgcgggggtcggggcgcggcgattcgggcgcggggcgcgggcgcgggcggatttttatttgggttagcggagcggcgcgttttgttttcgtttttttagtttcggcgttttggtcgttcggaaggcggggtgcgggtaggagttgttcggggttggcgggcggtcgcggtttttttattttagcgtcgtcgttcgttcggtcgttttaattttggggggtttcgtttatcgggttgtgagttttttaggggggtgggggtgggagttattgcgtcggttttgattag

SEQ ID NO: 33630 - DNA, 505 bp, Artificial Sequence
  chemically treated genomic DNA (Homo sapiens) CpG-island No: 33630
ctaatcaaaaccgacgcaataactcccacccccacccccctaaaaaactcacaacccgataaacgaaaccccccaaaattaaaacgaccgaacgaacgacgacgctaaaataaaaaaaccgcgaccgcccgccaaccccgaacaactcctacccgcaccccgccttccgaacgaccaaaacgccgaaactaaaaaaacgaaaacaaaacgcgccgctccgctaacccaaataaaaatccgcccgcgcccgcgccccgcgcccgaatcgccgcgccccgacccccgcgcccgcgccgcctttattcccctcgcgctactaccacaaccgcaacgtcccgaccgcttccctaccccacccatcgaactcaacttaccaacgcccgccgccaaacgccccccgcacctacaccccgacccctccccgcctcgccgaaccccgaccgctacaaaattacctacttcgctaccctaaaatcccgtcctcgacaatacaaatccgtaatcg

SEQ ID NO: 33631 - DNA, 505 bp, Artificial Sequence
  chemically treated genomic DNA (Homo sapiens) CpG-island No: 33631
ttggttagagtcggcgtaatgatttttatttttatttttttggaagatttatagttcggtggacgagattttttaaagttagagcggtcgggcgggcggcggcgttggggtggggaggtcgcggtcgttcgttaatttcgggtagtttttgttcgtatttcgtttttcgagcggttaggacgtcggagttggggaggcgggggtagggcgcgtcgtttcgttgatttagatgggagttcgttcgcgttcgcgtttcgcgttcgggtcgtcgcgtttcggttttcgcgttcgcgtcgtttttatttttttcgcgttgttgttatagtcgtagcgtttcggtcgtttttttattttatttatcgggtttaatttgttagcgttcgtcgttaggcgtttttcgtatttgtatttcgattttttttcgtttcgtcgggtttcgatcgttgtaggattatttgtttcgttgttttggggtttcgttttcggtaatgtaaattcgtggtcg

SEQ ID NO: 33632 - DNA, 505 bp, Artificial Sequence
  chemically treated genomic DNA (Homo sapiens) CpG-island No: 33632
cgaccacgaatttacattaccgaaaacgaaaccccaaaacaacgaaacaaataatcctacaacgatcgaaacccgacgaaacgaaaaaaaatcgaaatacaaatacgaaaaacgcctaacgacgaacgctaacaaattaaacccgataaataaaataaaaaaacgaccgaaacgctacgactataacaacaacgcgaaaaaaataaaaacgacgcgaacgcgaaaaccgaaacgcgacgacccgaacgcgaaacgcgaacgcgaacgaactcccatctaaatcaacgaaacgacgcgccctacccccgcctccccaactccgacgtcctaaccgctcgaaaaacgaaatacgaacaaaaactacccgaaattaacgaacgaccgcgacctccccaccccaacgccgccgcccgcccgaccgctctaactttaaaaaatctcgtccaccgaactataaatcttccaaaaaaataaaaataaaaatcattacgccgactctaaccaa

SEQ ID NO: 33633 - DNA, 572 bp, Artificial Sequence
  chemically treated genomic DNA (Homo sapiens) CpG-island No: 33633
taacgttaaggatttttacgattttttttgttcggcgggagattaaaggtcggaaaagtatagttcgtttaggggtgggagtcgagttagttttatttttcggtggtttttcgcgatcgtggagacgtagcgagtttatgtaattttcggtcgcgatttattagtttttcggcgattggttcgtttttacggtcggttgggtgacgttatcgtcgggttttggggttgtacgtgtggtgaggtttatagaagcggtttttagttggattttggttttttcgtcggatttcgagggtgttatcgtcgtttttgttgggggtgagcgtcgcgcggttgtagtatggtgagtaagttttgtttgtttcggcggtcgagcgttgtggttttgtagaggttaggttgttttcggtaatattttggttattgcggttcgggtttgggttatgttagaggttgtttgcggtacggtatttcgaaatgggttaacgttattatcgtgggtattttttgtaagttatagttttttatcgtcgagtttttttgggatgtggttcggagaggagaatggtttt

SEQ ID NO: 33634 - DNA, 572 bp, Artificial Sequence
  chemically treated genomic DNA (Homo sapiens) CpG-island No: 33634
aaaaccattctcctctccgaaccacatcccaaaaaaactcgacgataaaaaactataacttacaaaaaatacccacgataataacgttaacccatttcgaaataccgtaccgcaaacaacctctaacataacccaaacccgaaccgcaataaccaaaatattaccgaaaacaacctaacctctacaaaaccacaacgctcgaccgccgaaacaaacaaaacttactcaccatactacaaccgcgcgacgctcacccccaacaaaaacgacgataacaccctcgaaatccgacgaaaaaaccaaaatccaactaaaaaccgcttctataaacctcaccacacgtacaaccccaaaacccgacgataacgtcacccaaccgaccgtaaaaacgaaccaatcgccgaaaaactaataaatcgcgaccgaaaattacataaactcgctacgtctccacgatcgcgaaaaaccaccgaaaaataaaactaactcgactcccacccctaaacgaactatacttttccgacctttaatctcccgccgaacaaaaaaaatcgtaaaaatccttaacgtta

SEQ ID NO: 33635 - DNA, 572 bp, Artificial Sequence
  chemically treated genomic DNA (Homo sapiens) CpG-island No: 33635
aaggttattttttttttcgggttatattttagggaggttcggcggtgggagattgtaatttgtaaagaatgtttacggtggtgacgttggtttatttcggggtatcgtgtcgtaagtagtttttggtatgatttagattcgggtcgtagtagttaaggtattatcggaagtagtttggtttttgtaaaattatagcgttcggtcgtcgaaataagtaaggtttgtttattatgttgtagtcgcgcggcgtttatttttaataggggcggcgatgatattttcgaagttcggcggggagattaaggtttagttgaaggtcgtttttgtaggttttattatacgtgtagttttaggattcggcgataacgttatttagtcggtcgtggaaacggattaatcgtcgaggagttgatgggtcgcgatcggaagttatataggttcgttgcgtttttacgatcgcgagaagttatcgggaggtggggttagttcggtttttatttttgggcgggttgtattttttcggtttttagtttttcgtcgggtaaagggaatcgtgggggtttttaacgttg

SEQ ID NO: 33636 - DNA, 572 bp, Artificial Sequence
  chemically treated genomic DNA (Homo sapiens) CpG-island No: 33636
caacgttaaaaacccccacgattccctttacccgacgaaaaactaaaaaccgaaaaaatacaacccgcccaaaaataaaaaccgaactaaccccacctcccgataacttctcgcgatcgtaaaaacgcaacgaacctatataacttccgatcgcgacccatcaactcctcgacgattaatccgtttccacgaccgactaaataacgttatcgccgaatcctaaaactacacgtataataaaacctacaaaaacgaccttcaactaaaccttaatctccccgccgaacttcgaaaatatcatcgccgcccctattaaaaataaacgccgcgcgactacaacataataaacaaaccttacttatttcgacgaccgaacgctataattttacaaaaaccaaactacttccgataataccttaactactacgacccgaatctaaatcataccaaaaactacttacgacacgataccccgaaataaaccaacgtcaccaccgtaaacattctttacaaattacaatctcccaccgccgaacctccctaaaatataacccgaaaaaaaaaataacctt

SEQ ID NO: 33637 - DNA, 600 bp, Artificial Sequence
  chemically treated genomic DNA (Homo sapiens) CpG-island No: 33637
tagagcgttttttttgtgtcgcgatgaggtaggtgtattcgttattttatttttttttttttatttgattcggaatgggaggaacgtaatgcgtttcgcgcggcgatttgggatagttgcgtaggcgtagttttcggttttgtgtttcgggaattatttgacgttatcggtttagtttcgtagaaagttttgattaggcgtatcgcgtacgcgtagtggtttatttggttggggagttatttgacgtcgtcgtttttggtagtcggaagttgtttgagtagattttagtcggttggttcgagtggttttcgtcgttttttggcgttttgggagagtcgttgacgggtggattgacggatcgtttgaggacggtcggttagggcggtgaaagcgttagttttatggcgcgggtcgcgtgaggcggaaggtcgaggacggtcggcggcggcgttcgtttcggcgatgcgggtttcgttcgtcgttttaggtaatcgggtagtcggtttcgtcgcggtcggattttttttttttttttttttttttttttatttggcggttaagggacggttgaggtttgtttttcggttttgggtgttttag

SEQ ID NO: 33638 - DNA, 600 bp, Artificial Sequence
  chemically treated genomic DNA (Homo sapiens) CpG-island No: 33638
ctaaaacacccaaaaccgaaaaacaaacctcaaccgtcccttaaccgccaaataaaaaaaaaaaaaaaaaaaaaaaaaaaatccgaccgcgacgaaaccgactacccgattacctaaaacgacgaacgaaacccgcatcgccgaaacgaacgccgccgccgaccgtcctcgaccttccgcctcacgcgacccgcgccataaaactaacgctttcaccgccctaaccgaccgtcctcaaacgatccgtcaatccacccgtcaacgactctcccaaaacgccaaaaaacgacgaaaaccactcgaaccaaccgactaaaatctactcaaacaacttccgactaccaaaaacgacgacgtcaaataactccccaaccaaataaaccactacgcgtacgcgatacgcctaatcaaaactttctacgaaactaaaccgataacgtcaaataattcccgaaacacaaaaccgaaaactacgcctacgcaactatcccaaatcgccgcgcgaaacgcattacgttcctcccattccgaatcaaataaaaaaaaaaaaataaaataacgaatacacctacctcatcgcgacacaaaaaaaacgctcta

SEQ ID NO: 33639 - DNA, 600 bp, Artificial Sequence
  chemically treated genomic DNA (Homo sapiens) CpG-island No: 33639
ttggagtatttagagtcgagaaataagttttagtcgttttttgatcgttaggtggggaagagagggaaggagaggggagggttcggtcgcggcggggtcggttgttcggttatttgaggcgacgggcggggttcgtatcgtcggggcgggcgtcgtcgtcggtcgttttcggtttttcgttttacgcgattcgcgttatagggttggcgtttttatcgttttggtcggtcgtttttaggcggttcgttagtttattcgttagcgatttttttagggcgttaagggacgacgaaggttattcgagttagtcggttgggatttgtttaggtaattttcgattgttaggggcggcggcgttaaataattttttagttaagtgggttattgcgcgtgcgcggtgcgtttaattagagttttttacggggttgaatcggtggcgttaaataattttcgagatatagagtcggaagttgcgtttgcgtagttattttagatcgtcgcgcgggacgtattgcgttttttttatttcggattaagtggagagggaggagtgaagtgacggatgtatttattttatcgcggtatagaggaggcgtttta

SEQ ID NO: 33640 - DNA, 600 bp, Artificial Sequence
  chemically treated genomic DNA (Homo sapiens) CpG-island No: 33640
taaaacgcctcctctataccgcgataaaataaatacatccgtcacttcactcctccctctccacttaatccgaaataaaaaaaacgcaatacgtcccgcgcgacgatctaaaataactacgcaaacgcaacttccgactctatatctcgaaaattatttaacgccaccgattcaaccccgtaaaaaactctaattaaacgcaccgcgcacgcgcaataacccacttaactaaaaaattatttaacgccgccgcccctaacaatcgaaaattacctaaacaaatcccaaccgactaactcgaataaccttcgtcgtcccttaacgccctaaaaaaatcgctaacgaataaactaacgaaccgcctaaaaacgaccgaccaaaacgataaaaacgccaaccctataacgcgaatcgcgtaaaacgaaaaaccgaaaacgaccgacgacgacgcccgccccgacgatacgaaccccgcccgtcgcctcaaataaccgaacaaccgaccccgccgcgaccgaaccctcccctctccttccctctcttccccacctaacgatcaaaaaacgactaaaacttatttctcgactctaaatactccaa

SEQ ID NO: 33641 - DNA, 639 bp, Artificial Sequence
  chemically treated genomic DNA (Homo sapiens) CpG-island No: 33641
attgcgttttttttattgtaaaggataatgtcgttggattttacgtgttaaacgattgcgttttttttattgtaaaggatagtgtcgtttgattttacgtgttaaacgattgcgttttttttattgtaaaggatagtgtcgttagattttacgtgttaaacgattgcgttttttttattgtaaaggatagtgtcgttggattttacgtgttaaacgattgcgttttttttattgtaaaggatagtgtcgtttgattttacgtgttaaacgattgcgttttttttattgtaaaggatagtgtcgtttgattttacgtgttaaacgattgcgttttttttattgtaaaggatagtgtcgttagattttacgtgttaaacgattgcgttttttttattgtaaaggatagtgtcgttggattttacgtgttaaacgattgcgttttttttattgtaaaggatagtgtcgtttgattttacgtgttaaacgattgcgttttttttattgtaaaggatagtgtcgtttgattttacgtgttaaacgattgcgttttttttattgtaaaggatagtgtcgttggattttatttgtgtttttaaacgattgtattttttttattgcgaaggacggtgttattggatt

SEQ ID NO: 33642 - DNA, 639 bp, Artificial Sequence
  chemically treated genomic DNA (Homo sapiens) CpG-island No: 33642
aatccaataacaccgtccttcgcaataaaaaaaatacaatcgtttaaaaacacaaataaaatccaacgacactatcctttacaataaaaaaaacgcaatcgtttaacacgtaaaatcaaacgacactatcctttacaataaaaaaaacgcaatcgtttaacacgtaaaatcaaacgacactatcctttacaataaaaaaaacgcaatcgtttaacacgtaaaatccaacgacactatcctttacaataaaaaaaacgcaatcgtttaacacgtaaaatctaacgacactatcctttacaataaaaaaaacgcaatcgtttaacacgtaaaatcaaacgacactatcctttacaataaaaaaaacgcaatcgtttaacacgtaaaatcaaacgacactatcctttacaataaaaaaaacgcaatcgtttaacacgtaaaatccaacgacactatcctttacaataaaaaaaacgcaatcgtttaacacgtaaaatctaacgacactatcctttacaataaaaaaaacgcaatcgtttaacacgtaaaatcaaacgacactatcctttacaataaaaaaaacgcaatcgtttaacacgtaaaatccaacgacattatcctttacaataaaaaaaacgcaat

SEQ ID NO: 33643 - DNA, 639 bp, Artificial Sequence
  chemically treated genomic DNA (Homo sapiens) CpG-island No: 33643
gatttagtgatatcgtttttcgtagtgagggagatgtagtcgtttaagagtataggtgggatttagcgatattgttttttgtagtgagggagacgtagtcgtttaatacgtgggattaagcgatattgttttttgtagtgagggagacgtagtcgtttaatacgtgggattaagcgatattgttttttgtagtgagggagacgtagtcgtttaatacgtgggatttagcgatattgttttttgtagtgagggagacgtagtcgtttaatacgtgggatttggcgatattgttttttgtagtgagggagacgtagtcgtttaatacgtgggattaagcgatattgttttttgtagtgagggagacgtagtcgtttaatacgtgggattaagcgatattgttttttgtagtgagggagacgtagtcgtttaatacgtgggatttagcgatattgttttttgtagtgagggagacgtagtcgtttaatacgtgggatttggcgatattgttttttgtagtgagggagacgtagtcgtttaatacgtgggattaagcgatattgttttttgtagtgagggagacgtagtcgtttaatacgtgggatttagcgatattgttttttgtagtgagggagacgtagt

SEQ ID NO: 33644 - DNA, 639 bp, Artificial Sequence
  chemically treated genomic DNA (Homo sapiens) CpG-island No: 33644
actacgtctccctcactacaaaaaacaatatcgctaaatcccacgtattaaacgactacgtctccctcactacaaaaaacaatatcgcttaatcccacgtattaaacgactacgtctccctcactacaaaaaacaatatcgccaaatcccacgtattaaacgactacgtctccctcactacaaaaaacaatatcgctaaatcccacgtattaaacgactacgtctccctcactacaaaaaacaatatcgcttaatcccacgtattaaacgactacgtctccctcactacaaaaaacaatatcgcttaatcccacgtattaaacgactacgtctccctcactacaaaaaacaatatcgccaaatcccacgtattaaacgactacgtctccctcactacaaaaaacaatatcgctaaatcccacgtattaaacgactacgtctccctcactacaaaaaacaatatcgcttaatcccacgtattaaacgactacgtctccctcactacaaaaaacaatatcgcttaatcccacgtattaaacgactacgtctccctcactacaaaaaacaatatcgctaaatcccacctatactcttaaacgactacatctccctcactacgaaaaacgatatcactaaatc

SEQ ID NO: 33645 - DNA, 589 bp, Artificial Sequence
  chemically treated genomic DNA (Homo sapiens) CpG-island No: 33645
ggggcgtcgggaggggaagagggttcgcggttaggttcgtatttatttcgttttcgaagcgtattattttttggttcgtgggttcgcgtaagtcggggaagcgcgtgagttttttcgagttttcggggtttcggggcgtcggggcgcgcggttttattaggtatcggtcgatgatttcgttttgttgcgcgggcggtagtcgcgtttattcgggttcgtatttttcgcggattttttttttgttttgtatgatttttttggttatggggtttagcgacgagaagtaagtgaagcgttttcgttttcggtcgtgtagaggtcggtttttgtttatgatcgtcgagcgcgaagtcgcgatcgtcgtcgttatggacgttatgttcggtttgttcgtcgttttcggttcgcgtttcgtttttcgttgtgttcgttttagtttcgtatcgcgttattcggagtttcgtttttttcgggaatttcgttttgtatcgtcgcgtattcgggtttttaagttaatttagttttttaagtttcgggatttcggtttttcgtggtttttttttcgggagttttttttttcgggtttttt

SEQ ID NO: 33646 - DNA, 589 bp, Artificial Sequence
  chemically treated genomic DNA (Homo sapiens) CpG-island No: 33646
aaaaaacccgaaaaaaaaaactcccgaaaaaaaaaccacgaaaaaccgaaatcccgaaacttaaaaaactaaattaacttaaaaacccgaatacgcgacgatacaaaacgaaattcccgaaaaaaacgaaactccgaataacgcgatacgaaactaaaacgaacacaacgaaaaacgaaacgcgaaccgaaaacgacgaacaaaccgaacataacgtccataacgacgacgatcgcgacttcgcgctcgacgatcataaacaaaaaccgacctctacacgaccgaaaacgaaaacgcttcacttacttctcgtcgctaaaccccataaccaaaaaaatcatacaaaacaaaaaaaaaatccgcgaaaaatacgaacccgaataaacgcgactaccgcccgcgcaacaaaacgaaatcatcgaccgatacctaataaaaccgcgcgccccgacgccccgaaaccccgaaaactcgaaaaaactcacgcgcttccccgacttacgcgaacccacgaaccaaaaaataatacgcttcgaaaacgaaataaatacgaacctaaccgcgaaccctcttcccctcccgacgcccc

SEQ ID NO: 33647 - DNA, 589 bp, Artificial Sequence
  chemically treated genomic DNA (Homo sapiens) CpG-island No: 33647
ggggggttcggagggaggagttttcggggagggggttacggagggtcggggtttcggggtttggggagttgggttggtttggagattcgggtacgcggcggtgtagggcggggttttcggagggggcggagtttcgggtggcgcggtgcggggttagggcgggtatagcgaggggcggggcgcgggtcgggagcggcgggtaggtcgggtatggcgtttatggcggcggcgatcgcggtttcgcgttcggcggttatgagtaggaatcggtttttgtacgatcgggagcgaaagcgttttatttatttttcgtcgttgagttttatggttaggaagattatgtaggataaggagaagattcgcgagaagtacgggttcgagtgggcgcggttgtcgttcgcgtagtaggacgagattatcgatcggtgtttggtggggtcgcgcgtttcggcgtttcgagatttcggggattcggaggagtttacgcgttttttcggtttgcgcgggtttacgggttagaaggtggtgcgtttcggggacgaggtaggtgcgggtttggtcgcggattttttttttttttcggcgtttt

SEQ ID NO: 33648 - DNA, 589 bp, Artificial Sequence
  chemically treated genomic DNA (Homo sapiens) CpG-island No: 33648
aaaacgccgaaaaaaaaaaaaaatccgcgaccaaacccgcacctacctcgtccccgaaacgcaccaccttctaacccgtaaacccgcgcaaaccgaaaaaacgcgtaaactcctccgaatccccgaaatctcgaaacgccgaaacgcgcgaccccaccaaacaccgatcgataatctcgtcctactacgcgaacgacaaccgcgcccactcgaacccgtacttctcgcgaatcttctccttatcctacataatcttcctaaccataaaactcaacgacgaaaaataaataaaacgctttcgctcccgatcgtacaaaaaccgattcctactcataaccgccgaacgcgaaaccgcgatcgccgccgccataaacgccatacccgacctacccgccgctcccgacccgcgccccgcccctcgctatacccgccctaaccccgcaccgcgccacccgaaactccgccccctccgaaaaccccgccctacaccgccgcgtacccgaatctccaaaccaacccaactccccaaaccccgaaaccccgaccctccgtaaccccctccccgaaaactcctccctccgaacccccc

SEQ ID NO: 33649 - DNA, 639 bp, Artificial Sequence
  chemically treated genomic DNA (Homo sapiens) CpG-island No: 33649
gtaagtttaggaacgggggtgggtagagtatttttcgggtattgtcgttcgtttttaaaagaagattatcgggggttttagggttacggcgaggacgggtattggttagatttcggataggcggttttggtttcgggcgtacgaaaggtggagacgaagaaaagtcggatttattggtttttgatttttttgtagtgggtttcgcgttttcgttttagtcggtttttcgtgttaaattgtagggtagtgttttgtttttgaggacgcgcgtggtcggtattttttatttcggtgatttcgagatttcgtagttttgcggagagtttacgatggtcgtttgtagaggagttggatcgcgggcgtaggaagatttcggggaaggttttttttaagtaggagtttgtgttatttatttgggaattggacgtcgtcgtcggttgtttcgaagtttgaggaatttgttttttaaatgttttttggtttttttttttcgtcgttattcgttgtttgggacgttcgcggggtggagttggatggaaatcgttttgcggtttttttgtttcggggggttgcgtggaggagggtttttatagttcgcgttttatttaattttgacggttaggggagggtttcgtttag

SEQ ID NO: 33650 - DNA, 639 bp, Artificial Sequence
  chemically treated genomic DNA (Homo sapiens) CpG-island No: 33650
ctaaacgaaaccctcccctaaccgtcaaaattaaataaaacgcgaactataaaaaccctcctccacgcaaccccccgaaacaaaaaaaccgcaaaacgatttccatccaactccaccccgcgaacgtcccaaacaacgaataacgacgaaaaaaaaaaaccaaaaaacatttaaaaaacaaattcctcaaacttcgaaacaaccgacgacgacgtccaattcccaaataaataacacaaactcctacttaaaaaaaaccttccccgaaatcttcctacgcccgcgatccaactcctctacaaacgaccatcgtaaactctccgcaaaactacgaaatctcgaaatcaccgaaataaaaaataccgaccacgcgcgtcctcaaaaacaaaacactaccctacaatttaacacgaaaaaccgactaaaacgaaaacgcgaaacccactacaaaaaaatcaaaaaccaataaatccgacttttcttcgtctccacctttcgtacgcccgaaaccaaaaccgcctatccgaaatctaaccaatacccgtcctcgccgtaaccctaaaacccccgataatcttcttttaaaaacgaacgacaatacccgaaaaatactctacccacccccgttcctaaacttac

SEQ ID NO: 33651 - DNA, 639 bp, Artificial Sequence
  chemically treated genomic DNA (Homo sapiens) CpG-island No: 33651
ttagacggggtttttttttgatcgttaaggttaagtagggcgcgggttgtgaggatttttttttacgtagtttttcgaggtagaggggtcgtaaagcggtttttatttaattttatttcgcggacgttttaggtagcggatggcggcgggggggggaggttaggggatatttaggggataaattttttagatttcgaggtagtcggcgacggcgtttaatttttaaataaatagtataaatttttatttggaaaaggtttttttcggggtttttttgcgttcgcggtttagtttttttgtagacggttatcgtgggtttttcgtagggttgcggagtttcggagttatcgaggtgggaggtgtcggttacgcgcgtttttaggaatagagtattgttttgtagtttagtacgaagggtcggttggagcgggagcgcgaggtttattgtaagaggattaggagttagtaagttcggttttttttcgtttttatttttcgtgcgttcggggttaggatcgtttgttcggaatttgattagtgttcgttttcgtcgtggttttgggattttcggtggtttttttttggggacgaacggtagtgttcgaaggatgttttatttattttcgtttttagatttgt

SEQ ID NO: 33652 - DNA, 639 bp, Artificial Sequence
  chemically treated genomic DNA (Homo sapiens) CpG-island No: 33652
acaaatctaaaaacgaaaataaataaaacatccttcgaacactaccgttcgtccccaaaaaaaaaccaccgaaaatcccaaaaccacgacgaaaacgaacactaatcaaattccgaacaaacgatcctaaccccgaacgcacgaaaaataaaaacgaaaaaaaaccgaacttactaactcctaatcctcttacaataaacctcgcgctcccgctccaaccgacccttcgtactaaactacaaaacaatactctattcctaaaaacgcgcgtaaccgacacctcccacctcgataactccgaaactccgcaaccctacgaaaaacccacgataaccgtctacaaaaaaactaaaccgcgaacgcaaaaaaaccccgaaaaaaaccttttccaaataaaaatttatactatttatttaaaaattaaacgccgtcgccgactacctcgaaatctaaaaaatttatcccctaaatatcccctaacctcccccccccgccgccatccgctacctaaaacgtccgcgaaataaaattaaataaaaaccgctttacgacccctctacctcgaaaaactacgtaaaaaaaaatcctcacaacccgcgccctacttaaccttaacgatcaaaaaaaaaccccgtctaa

SEQ ID NO: 33653 - DNA, 519 bp, Artificial Sequence
  chemically treated genomic DNA (Homo sapiens) CpG-island No: 33653
gcggtaggtataggtcgcggttgtttaaataaaatttacgaagaagtattcgggtcgtgtagtttcggagtttcggtgttttttgtaggtgatattcggtaagggttagttcgggaagttgggtaaagagataaacgttttcggagacgtaattttcgacgcgtttgttttcggtacgttattttcggcgtattgatttcgtttggggtcggttgagtggtatttaagcgggttatgttatgtaattttgggcgttgttaatcgtgggcgagttttgggtgtgcgggcggtttggcgcggcgtttcggtaaggcgtgtgtgcggtagggcggggatagaatcgttttttcgggttttgggcgtgttcgagatcgcgtttttcgtcgaaattaagtttcgagttattcgtgtggggtattcgttttttttggtatagttggtttttttttagaagttcgttttgtttgttttacgtttaaattcgcgtcggtttttatttttttttttggtaaggtttga

SEQ ID NO: 33654 - DNA, 519 bp, Artificial Sequence
  chemically treated genomic DNA (Homo sapiens) CpG-island No: 33654
tcaaaccttaccaaaaaaaaaaataaaaaccgacgcgaatttaaacgtaaaacaaacaaaacgaacttctaaaaaaaaaccaactataccaaaaaaaacgaataccccacacgaataactcgaaacttaatttcgacgaaaaacgcgatctcgaacacgcccaaaacccgaaaaaacgattctatccccgccctaccgcacacacgccttaccgaaacgccgcgccaaaccgcccgcacacccaaaactcgcccacgattaacaacgcccaaaattacataacataacccgcttaaataccactcaaccgaccccaaacgaaatcaatacgccgaaaataacgtaccgaaaacaaacgcgtcgaaaattacgtctccgaaaacgtttatctctttacccaacttcccgaactaacccttaccgaatatcacctacaaaaaacaccgaaactccgaaactacacgacccgaatacttcttcgtaaattttatttaaacaaccgcgacctatacctaccgc

SEQ ID NO: 33655 - DNA, 519 bp, Artificial Sequence
  chemically treated genomic DNA (Homo sapiens) CpG-island No: 33655
ttagattttgttagggagagaaataagaatcgacgcgaatttagacgtaaaataaataaaacgggtttttggaaagaggttaattgtgttaggggggacgaatgttttatacggatgattcggagtttgatttcggcggggagcgcggtttcggatacgtttagagttcgagaggacggttttgttttcgttttgtcgtatatacgttttatcggagcgtcgcgttaggtcgttcgtatatttagagttcgtttacggttggtagcgtttaaggttgtatggtatggttcgtttaagtgttatttagtcggttttaggcgggattagtgcgtcggaagtggcgtgtcggaaataggcgcgtcggaagttgcgttttcggaagcgtttgtttttttatttagtttttcgggttaatttttatcgagtgttatttgtaggaggtatcgggatttcggggttgtacggttcgaatgttttttcgtgggttttgtttaagtagtcgcgatttgtgtttgtcgt

SEQ ID NO: 33656 - DNA, 519 bp, Artificial Sequence
  chemically treated genomic DNA (Homo sapiens) CpG-island No: 33656
acgacaaacacaaatcgcgactacttaaacaaaacccacgaaaaaacattcgaaccgtacaaccccgaaatcccgatacctcctacaaataacactcgataaaaattaacccgaaaaactaaataaaaaaacaaacgcttccgaaaacgcaacttccgacgcgcctatttccgacacgccacttccgacgcactaatcccgcctaaaaccgactaaataacacttaaacgaaccataccatacaaccttaaacgctaccaaccgtaaacgaactctaaatatacgaacgacctaacgcgacgctccgataaaacgtatatacgacaaaacgaaaacaaaaccgtcctctcgaactctaaacgtatccgaaaccgcgctccccgccgaaatcaaactccgaatcatccgtataaaacattcgtcccccctaacacaattaacctctttccaaaaacccgttttatttattttacgtctaaattcgcgtcgattcttatttctctccctaacaaaatctaa

SEQ ID NO: 33657 - DNA, 557 bp, Artificial Sequence
  chemically treated genomic DNA (Homo sapiens) CpG-island No: 33657
cgcgtttttcgttcggggtttcgtcggttttttagcggttagtcgttttttttttttttgttttcgagttttttttttcgttttcgtttttcggttttagagttcgagttgtcgtttcgtagttttaatttgtttaggttacggagtatgtttagtgcggcgcgtcgggttgggttgggggtgggtaggggtcgggtcggtcgtttagttgtcgcgagttcgtagggcgaggagtgggcgtcgattgggtcgggggcgtagtttcgcgagtcgggggtcgagtagtcgaggtaggtggtgggtagcgttaagaggaggtgggtggggtattcggggaagtcggttcgcggcgcgtttttttggggtttttttggcggtttttcgcggtatgtgttttatgtttaagggtcgggggcgtacgggatggcgttgggcgtagaatttagggagcgggggtagaaaagcggtatttttttcggatgggagattcgtagttcgtcgtgggtcgtgtggaggggtttaggattggttagaacggggtttttaaagtcgttggt

SEQ ID NO: 33658 - DNA, 557 bp, Artificial Sequence
  chemically treated genomic DNA (Homo sapiens) CpG-island No: 33658
accaacgactttaaaaaccccgttctaaccaatcctaaacccctccacacgacccacgacgaactacgaatctcccatccgaaaaaaataccgcttttctacccccgctccctaaattctacgcccaacgccatcccgtacgcccccgacccttaaacataaaacacataccgcgaaaaaccgccaaaaaaaccccaaaaaaacgcgccgcgaaccgacttccccgaataccccacccacctcctcttaacgctacccaccacctacctcgactactcgacccccgactcgcgaaactacgcccccgacccaatcgacgcccactcctcgccctacgaactcgcgacaactaaacgaccgacccgacccctacccacccccaacccaacccgacgcgccgcactaaacatactccgtaacctaaacaaattaaaactacgaaacgacaactcgaactctaaaaccgaaaaacgaaaacgaaaaaaaaaactcgaaaacaaaaaaaaaaaaaacgactaaccgctaaaaaaccgacgaaaccccgaacgaaaaacgcg

SEQ ID NO: 33659 - DNA, 557 bp, Artificial Sequence
  chemically treated genomic DNA (Homo sapiens) CpG-island No: 33659
gttaacggttttgggggtttcgttttggttagttttgagtttttttatacggtttacggcgggttgcgggttttttattcgaggagggtgtcgtttttttgttttcgttttttgggttttgcgtttagcgttatttcgtgcgttttcgatttttgggtatggggtatatgtcgcggggagtcgttagggagattttagaggagcgcgtcgcgggtcggttttttcggatgttttatttatttttttttggcgttgtttattatttgtttcggttgttcggttttcggttcgcgaggttgcgttttcgatttagtcggcgtttatttttcgttttgcgggttcgcggtaattgggcggtcggttcggtttttgtttatttttagtttagttcggcgcgtcgtattgggtatgtttcgtagtttgggtaggttggggttgcgaggcgatagttcgggttttggagtcgggaggcgagaacgaggagggaggttcgggggtaggggaggaggaagcggttggtcgttgaagggtcggcggggtttcgagcggaggacgcg

SEQ ID NO: 33660 - DNA, 557 bp, Artificial Sequence
  chemically treated genomic DNA (Homo sapiens) CpG-island No: 33660
cgcgtcctccgctcgaaaccccgccgacccttcaacgaccaaccgcttcctcctcccctacccccgaacctccctcctcgttctcgcctcccgactccaaaacccgaactatcgcctcgcaaccccaacctacccaaactacgaaacatacccaatacgacgcgccgaactaaactaaaaataaacaaaaaccgaaccgaccgcccaattaccgcgaacccgcaaaacgaaaaataaacgccgactaaatcgaaaacgcaacctcgcgaaccgaaaaccgaacaaccgaaacaaataataaacaacgccaaaaaaaaataaataaaacatccgaaaaaaccgacccgcgacgcgctcctctaaaatctccctaacgactccccgcgacatataccccatacccaaaaatcgaaaacgcacgaaataacgctaaacgcaaaacccaaaaaacgaaaacaaaaaaacgacaccctcctcgaataaaaaacccgcaacccgccgtaaaccgtataaaaaaactcaaaactaaccaaaacgaaacccccaaaaccgttaac

SEQ ID NO: 33661 - DNA, 557 bp, Artificial Sequence
  chemically treated genomic DNA (Homo sapiens) CpG-island No: 33661
taacgtttttagggtatttttggaaggttcgggtacggcgttgaggttttcgttttcgttttcgttcgttcgggcgaggttgcggtttcgggcgggttaaggtcgtagcggagtttttcggagttttcgttcggcggagaggtcggtttcgcgtggcggcgtcgttttcggttttggtttcggtttcgtttcgtcggcgttttttcgcggtttcggtttcgtttcgcggtttttcggcgggatgcgtggtcgtggcggggggcgcgttcgttgttttgcgtttttgcgttcgttgttgggcgttttcggggttcgggacgttgtcgtcgtcgttcgagattttgcgtaaggtaagcgcgcgttgcggggaggggacgcgggacgtggggttcggggtgttcgtcgggtacgaggcgttgggggacgattttttttgaattttttgtttttggtcgttgcgggtggtcgggaggttcgttgcgtttttagttatagaggtgggcgtttcgggtttcgggtttatcgttttttttttttttttcgtagtaaagttatta

SEQ ID NO: 33662 - DNA, 557 bp, Artificial Sequence
  chemically treated genomic DNA (Homo sapiens) CpG-island No: 33662
taataactttactacgaaaaaaaaaaaaaaaacgataaacccgaaacccgaaacgcccacctctataactaaaaacgcaacgaacctcccgaccacccgcaacgaccaaaaacaaaaaattcaaaaaaaatcgtcccccaacgcctcgtacccgacgaacaccccgaaccccacgtcccgcgtcccctccccgcaacgcgcgcttaccttacgcaaaatctcgaacgacgacgacaacgtcccgaaccccgaaaacgcccaacaacgaacgcaaaaacgcaaaacaacgaacgcgccccccgccacgaccacgcatcccgccgaaaaaccgcgaaacgaaaccgaaaccgcgaaaaaacgccgacgaaacgaaaccgaaaccaaaaccgaaaacgacgccgccacgcgaaaccgacctctccgccgaacgaaaactccgaaaaactccgctacgaccttaacccgcccgaaaccgcaacctcgcccgaacgaacgaaaacgaaaacgaaaacctcaacgccgtacccgaaccttccaaaaataccctaaaaacgtta

SEQ ID NO: 33663 - DNA, 557 bp, Artificial Sequence
  chemically treated genomic DNA (Homo sapiens) CpG-island No: 33663
tggtgattttgttgcgagggggaggaggggggcggtaagttcgagattcggggcgtttatttttgtggttgggggcgtagcgggtttttcggttattcgtaacggttaagggtaagggatttaggaggagtcgttttttagcgtttcgtgttcggcgggtatttcgggttttacgtttcgcgtttttttttcgtagcgcgcgtttattttgcgtaggatttcgggcggcggcggtagcgtttcgggtttcgaaggcgtttagtagcgagcgtaggggcgtaggatagcgggcgcgtttttcgttacggttacgtatttcgtcggagggtcgcggagcggagtcggggtcgcggggaggcgtcggcggggcgggatcgggattagggtcgggggcggcgtcgttacgcgaggtcggttttttcgtcgggcgggggtttcgaggggtttcgttgcgattttgattcgttcggagtcgtagtttcgttcgggcgagcgggagcgggagcggagattttagcgtcgtgttcgggttttttagggatgttttagaaacgtta

SEQ ID NO: 33664 - DNA, 557 bp, Artificial Sequence
  chemically treated genomic DNA (Homo sapiens) CpG-island No: 33664
taacgtttctaaaacatccctaaaaaacccgaacacgacgctaaaatctccgctcccgctcccgctcgcccgaacgaaactacgactccgaacgaatcaaaatcgcaacgaaacccctcgaaacccccgcccgacgaaaaaaccgacctcgcgtaacgacgccgcccccgaccctaatcccgatcccgccccgccgacgcctccccgcgaccccgactccgctccgcgaccctccgacgaaatacgtaaccgtaacgaaaaacgcgcccgctatcctacgcccctacgctcgctactaaacgccttcgaaacccgaaacgctaccgccgccgcccgaaatcctacgcaaaataaacgcgcgctacgaaaaaaaaacgcgaaacgtaaaacccgaaatacccgccgaacacgaaacgctaaaaaacgactcctcctaaatcccttacccttaaccgttacgaataaccgaaaaacccgctacgcccccaaccacaaaaataaacgccccgaatctcgaacttaccgcccccctcctccccctcgcaacaaaatcacca

SEQ ID NO: 33665 - DNA, 660 bp, Artificial Sequence
  chemically treated genomic DNA (Homo sapiens) CpG-island No: 33665
ttcgagtcggttcgggtgggggcggggtgggggcggcgcggagggtacggagattacggcggcgttattcgggatatttagggtttcgaggttttgggcggtttttacgcgagatcgtaaattatgataataggtagttattcgaggttaaataaaaacggagtgggtttttcgcgcgtcgtcgtttttcgcgtttttggcggtttttttcgaggttttcggcggttttacgagttcgtagtagtcggtggcgacgtcgttttcgttttatttttttgcgtaagtgcgaggttgtcggtagcgcggcgtacgtttcggtcgttttcggttttcgcgtaaaatttttattttgtttacgtgaagttgtcgttgttttagagagggggaaagagttgcgggaaaagtcggggagtgacgattgcggcggttgggcgcgtttttttattttttttttttttttttttttttttgtcgtagttcggagttttggttttttttttttttttttttttttcggagtcggttttttttttcgtttcgtttttttttcgtttgtgtacgttatttgttgtggggtggtcgaaggggatgttttgtttttattagaggtatagcgcgaaggggaaatttcgatattggaaggaacgagaataaatattt

SEQ ID NO: 33666 - DNA, 660 bp, Artificial Sequence
  chemically treated genomic DNA (Homo sapiens) CpG-island No: 33666
aaatatttattctcgttccttccaatatcgaaatttccccttcgcgctatacctctaataaaaacaaaacatccccttcgaccaccccacaacaaataacgtacacaaacgaaaaaaaaacgaaacgaaaaaaaaaaccgactccgaaaaaaaaaaaaaaaaaaaaaaaaccaaaactccgaactacgacaaaaaaaaaaaaaaaaaaaaaaaaaataaaaaaacgcgcccaaccgccgcaatcgtcactccccgacttttcccgcaactctttccccctctctaaaacaacgacaacttcacgtaaacaaaataaaaattttacgcgaaaaccgaaaacgaccgaaacgtacgccgcgctaccgacaacctcgcacttacgcaaaaaaataaaacgaaaacgacgtcgccaccgactactacgaactcgtaaaaccgccgaaaacctcgaaaaaaaccgccaaaaacgcgaaaaacgacgacgcgcgaaaaacccactccgtttttatttaacctcgaataactacctattatcataatttacgatctcgcgtaaaaaccgcccaaaacctcgaaaccctaaatatcccgaataacgccgccgtaatctccgtaccctccgcgccgcccccaccccgcccccacccgaaccgactcgaa

SEQ ID NO: 33667 - DNA, 660 bp, Artificial Sequence
  chemically treated genomic DNA (Homo sapiens) CpG-island No: 33667
aagtatttattttcgttttttttagtgtcgaagtttttttttcgcgttgtgtttttggtgaaaataggatatttttttcggttattttataataaatagcgtatataagcgggggagaagcggggcggagggagaagtcggtttcgagggggaggaggaaaggagaggagttaaaatttcggattgcgataggggggaaaggagaagaaaagaaaatgagagagcgcgtttagtcgtcgtagtcgttatttttcggtttttttcgtagttttttttttttttttaaggtagcgataattttacgtggataggatggaagttttgcgcggaagtcgggaacggtcggagcgtgcgtcgcgttgtcggtagtttcgtatttgcgtagggaggtggggcgggggcgacgtcgttatcggttattgcgggttcgtgaggtcgtcgggggtttcgggggaggtcgttagggacgcggggggcggcggcgcgcgggggatttatttcgtttttatttgatttcgggtgattgtttattgttatggtttgcgatttcgcgtggggatcgtttagggtttcggggttttggatgtttcgggtggcgtcgtcgtaattttcgtgtttttcgcgtcgtttttatttcgtttttattcgggtcgattcgag

SEQ ID NO: 33668 - DNA, 660 bp, Artificial Sequence
  chemically treated genomic DNA (Homo sapiens) CpG-island No: 33668
ctcgaatcgacccgaataaaaacgaaataaaaacgacgcgaaaaacacgaaaattacgacgacgccacccgaaacatccaaaaccccgaaaccctaaacgatccccacgcgaaatcgcaaaccataacaataaacaatcacccgaaatcaaataaaaacgaaataaatcccccgcgcgccgccgccccccgcgtccctaacgacctcccccgaaacccccgacgacctcacgaacccgcaataaccgataacgacgtcgcccccgccccacctccctacgcaaatacgaaactaccgacaacgcgacgcacgctccgaccgttcccgacttccgcgcaaaacttccatcctatccacgtaaaattatcgctaccttaaaaaaaaaaaaaaaactacgaaaaaaaccgaaaaataacgactacgacgactaaacgcgctctctcattttcttttcttctcctttcccccctatcgcaatccgaaattttaactcctctcctttcctcctccccctcgaaaccgacttctccctccgccccgcttctcccccgcttatatacgctatttattataaaataaccgaaaaaaatatcctattttcaccaaaaacacaacgcgaaaaaaaaacttcgacactaaaaaaaacgaaaataaatactt

SEQ ID NO: 33669 - DNA, 551 bp, Artificial Sequence
  chemically treated genomic DNA (Homo sapiens) CpG-island No: 33669
attacggacgtattgaatcgcggttgggatagatatttcgggaattcgaggcggatcgggcgacgaggtgagtgatttttttttttaattttcgttttagggttttcgggggagtttgagttgagagaatttttaaatttttcgggaaagtgcgcgaggtttcgtcggggacgtcgagcgttgggtattgaggacgcgtagttggacggtgcgtgggcgtttgcgttttcggggggcgtttggaggtcgggtgttttacgtttgagggttcgggtcgttcggatcgtagcggtgttttttgttttagaagacgtttttaagttttaagggtttttttcgagtttgtttgtttttttcggggtcggcgcggagtttgcgcgtaacggagtttatttagtagtttagcgcgcggtttttatttgtatttcgtttttatttggtagaggcgcgagtatcggggttttttttatattttttttatgacgtgtattattttttgatgattttttagatggtttaggcgcgaggatgttgatttagagtttttcgga

SEQ ID NO: 33670 - DNA, 551 bp, Artificial Sequence
  chemically treated genomic DNA (Homo sapiens) CpG-island No: 33670
tccgaaaaactctaaatcaacatcctcgcgcctaaaccatctaaaaaatcatcaaaaaataatacacgtcataaaaaaaatataaaaaaaaccccgatactcgcgcctctaccaaataaaaacgaaatacaaataaaaaccgcgcgctaaactactaaataaactccgttacgcgcaaactccgcgccgaccccgaaaaaaacaaacaaactcgaaaaaaacccttaaaacttaaaaacgtcttctaaaacaaaaaacaccgctacgatccgaacgacccgaaccctcaaacgtaaaacacccgacctccaaacgccccccgaaaacgcaaacgcccacgcaccgtccaactacgcgtcctcaatacccaacgctcgacgtccccgacgaaacctcgcgcactttcccgaaaaatttaaaaattctctcaactcaaactcccccgaaaaccctaaaacgaaaattaaaaaaaaaaatcactcacctcgtcgcccgatccgcctcgaattcccgaaatatctatcccaaccgcgattcaatacgtccgtaat

SEQ ID NO: 33671 - DNA, 551 bp, Artificial Sequence
  chemically treated genomic DNA (Homo sapiens) CpG-island No: 33671
ttcgaaggattttgggttagtattttcgcgtttggattatttagggggttattagaaagtaatatacgttataagaaagatgtgggggagatttcgatgttcgcgtttttgttaggtggaggcggggtgtaggtagaagtcgcgcgttggattgttggatgaatttcgttacgcgtaggtttcgcgtcgatttcggaagggataggtaggttcggaagggatttttggggtttggggacgttttttagggtagagagtatcgttgcggttcgagcggttcgggtttttaggcgtggggtattcggtttttaagcgtttttcggggacgtaggcgtttacgtatcgtttagttgcgcgtttttagtatttagcgttcggcgttttcggcggagtttcgcgtattttttcggaaagtttgggggtttttttaatttaggttttttcgggagttttggggcgggggttggaagaaggggttatttatttcgtcgttcggttcgtttcgggttttcgaagtgtttgttttagtcgcggtttagtgcgttcgtaat

SEQ ID NO: 33672 - DNA, 551 bp, Artificial Sequence
  chemically treated genomic DNA (Homo sapiens) CpG-island No: 33672
attacgaacgcactaaaccgcgactaaaacaaacacttcgaaaacccgaaacgaaccgaacgacgaaataaataaccccttcttccaacccccgccccaaaactcccgaaaaaacctaaattaaaaaaacccccaaactttccgaaaaaatacgcgaaactccgccgaaaacgccgaacgctaaatactaaaaacgcgcaactaaacgatacgtaaacgcctacgtccccgaaaaacgcttaaaaaccgaataccccacgcctaaaaacccgaaccgctcgaaccgcaacgatactctctaccctaaaaaacgtccccaaaccccaaaaatcccttccgaacctacctatcccttccgaaatcgacgcgaaacctacgcgtaacgaaattcatccaacaatccaacgcgcgacttctacctacaccccgcctccacctaacaaaaacgcgaacatcgaaatctcccccacatctttcttataacgtatattactttctaataaccccctaaataatccaaacgcgaaaatactaacccaaaatccttcgaa

SEQ ID NO: 33673 - DNA, 593 bp, Artificial Sequence
  chemically treated genomic DNA (Homo sapiens) CpG-island No: 33673
tttttttttttgcgtatgtgtattttcgtttttcgttttaggcgagtttttttttggattttagttttttgtgggaaataatttttcgttttcggaggcggcgaggagcggcgggtgagtttcggagtattgggcgagggttagggggttttcgcgttgttttgaaggcgggcgggcggcggttagatttcggcggtggggagggatttttggcgtttgcggcgacggtgggacgagggcgtttttgttagaaggggatgaggtttggcgtgggaacgcgagtttcggggttttcgggggttcgtatgcgtttagtttttgcgtttggcgtttagcgaagttttgtagtacggggtaggtaatgcgtattggttcgaaggggagggaattggttgcggggaggggatagtacgcgcgtgcgtagcgtgtgacgtttgttgtgcgcgtgcgtatggcgtttgatgtgtgcgtgtgcgttttttgtgttttgagttcgcggggaggaggcggggttgcgggggagagcgattgcgttaggttcgcgataaatgaattagatataattatttacgggagattcggttttttttttt

SEQ ID NO: 33674 - DNA, 593 bp, Artificial Sequence
  chemically treated genomic DNA (Homo sapiens) CpG-island No: 33674
aaaaaaaaaaaccgaatctcccgtaaataattatatctaattcatttatcgcgaacctaacgcaatcgctctcccccgcaaccccgcctcctccccgcgaactcaaaacacaaaaaacgcacacgcacacatcaaacgccatacgcacgcgcacaacaaacgtcacacgctacgcacgcgcgtactatcccctccccgcaaccaattccctccccttcgaaccaatacgcattacctaccccgtactacaaaacttcgctaaacgccaaacgcaaaaactaaacgcatacgaacccccgaaaaccccgaaactcgcgttcccacgccaaacctcatccccttctaacaaaaacgccctcgtcccaccgtcgccgcaaacgccaaaaatccctccccaccgccgaaatctaaccgccgcccgcccgccttcaaaacaacgcgaaaaccccctaaccctcgcccaatactccgaaactcacccgccgctcctcgccgcctccgaaaacgaaaaattatttcccacaaaaaactaaaatccaaaaaaaaactcgcctaaaacgaaaaacgaaaatacacatacgcaaaaaaaaaaa

SEQ ID NO: 33675 - DNA, 593 bp, Artificial Sequence
  chemically treated genomic DNA (Homo sapiens) CpG-island No: 33675
agagaggaaaatcgagtttttcgtggataattgtgtttaatttatttgtcgcggatttggcgtagtcgttttttttcgtagtttcgtttttttttcgcgggtttagggtataaaaagcgtatacgtatatattaaacgttatgcgtacgcgtataataaacgttatacgttacgtacgcgcgtgttgtttttttttcgtagttagttttttttttttcgggttagtgcgtattgtttatttcgtgttataggatttcgttgagcgttaggcgtagggattggacgtatacggattttcgggagtttcggaattcgcgtttttacgttagattttatttttttttgatagagacgttttcgttttatcgtcgtcgtaggcgttaggggtttttttttatcgtcgaggtttagtcgtcgttcgttcgtttttagggtagcgcggggattttttggttttcgtttagtgtttcggggtttattcgtcgtttttcgtcgttttcggaggcgagggattgttttttataagggattggagtttagggaaggattcgtttggagcgggaggcggggatgtatatgcgtagagggagagg

SEQ ID NO: 33676 - DNA, 593 bp, Artificial Sequence
  chemically treated genomic DNA (Homo sapiens) CpG-island No: 33676
cctctccctctacgcatatacatccccgcctcccgctccaaacgaatccttccctaaactccaatcccttataaaaaacaatccctcgcctccgaaaacgacgaaaaacgacgaataaaccccgaaacactaaacgaaaaccaaaaaatccccgcgctaccctaaaaacgaacgaacgacgactaaacctcgacgataaaaaaaaacccctaacgcctacgacgacgataaaacgaaaacgtctctatcaaaaaaaaataaaatctaacgtaaaaacgcgaattccgaaactcccgaaaatccgtatacgtccaatccctacgcctaacgctcaacgaaatcctataacacgaaataaacaatacgcactaacccgaaaaaaaaaaaactaactacgaaaaaaaaacaacacgcgcgtacgtaacgtataacgtttattatacgcgtacgcataacgtttaatatatacgtatacgctttttataccctaaacccgcgaaaaaaaaacgaaactacgaaaaaaaacgactacgccaaatccgcgacaaataaattaaacacaattatccacgaaaaactcgattttcctctct

SEQ ID NO: 33677 - DNA, 936 bp, Artificial Sequence
  chemically treated genomic DNA (Homo sapiens) CpG-island No: 33677
tttcggttcgttgattagggattcgttagcgggtgtcgttgagttatattttcgtagttggcgttagtatttaggtatcgcgcgttatagtatttgtttgggcgttttcgcgtttggggcggggtttttcgcgttttttttaagaggtcgtattattcgtttttgacgttagagtgttttttcgtaagagttcgtgtttcgttaggtttcgcgttttcgcgtttatagtttcggcggcggtacgattagaggcggttaggggagcgcgtcgtttcgttcggttttttagttttttttcgttttttttttttcgtatagtagtcgttagcgcggttttttgtattatgtcggtggtcggttttaagaagtagttttataaagttatttaggtaaggcgcgcggtaggtgcgtttcggggtagttcggggcgaagttgcgaggggcgcgttcggcgttggtcgttcggcggtagtttggggagttcggtatcgagtttcgttcgcgtcggtcgcgtttcgtttcgtaagttaaggcggcggttcggggtattttcggtttgggcgtttattttcggtttttcgttttcggtttggtgcgcgttgttttttcgcgggttttcggcgttttgtttggtagcgttgttcgtcgttttcgtattatttcgcgttcgtgttgtaggaaggggatcgcggttgtattgttgtcgcggcgcgtaggtgttttggcggcgcggtgggagattatgtaaagtcgtttttttacgggtgattttgcggagtcggtgtattcggttttttcgggatgtgttggtatgagcggtggtcgtattgggggtggcggggcggaggtcggcggtttgcgttttttttttttattttgttgttagaatttttttttttcgtcgttcgtaggttttaggggaatggaaggttgggg

SEQ ID NO: 33678 - DNA, 936 bp, Artificial Sequence
  chemically treated genomic DNA (Homo sapiens) CpG-island No: 33678
ccccaaccttccattcccctaaaacctacgaacgacgaaaaaaaaaaattctaacaacaaaataaaaaaaaaaaacgcaaaccgccgacctccgccccgccacccccaatacgaccaccgctcataccaacacatcccgaaaaaaccgaatacaccgactccgcaaaatcacccgtaaaaaaacgactttacataatctcccaccgcgccgccaaaacacctacgcgccgcgacaacaatacaaccgcgatccccttcctacaacacgaacgcgaaataatacgaaaacgacgaacaacgctaccaaacaaaacgccgaaaacccgcgaaaaaacaacgcgcaccaaaccgaaaacgaaaaaccgaaaataaacgcccaaaccgaaaataccccgaaccgccgccttaacttacgaaacgaaacgcgaccgacgcgaacgaaactcgataccgaactccccaaactaccgccgaacgaccaacgccgaacgcgcccctcgcaacttcgccccgaactaccccgaaacgcacctaccgcgcgccttacctaaataactttataaaactacttcttaaaaccgaccaccgacataatacaaaaaaccgcgctaacgactactatacgaaaaaaaaaaaacgaaaaaaaactaaaaaaccgaacgaaacgacgcgctcccctaaccgcctctaatcgtaccgccgccgaaactataaacgcgaaaacgcgaaacctaacgaaacacgaactcttacgaaaaaacactctaacgtcaaaaacgaataatacgacctcttaaaaaaaacgcgaaaaaccccgccccaaacgcgaaaacgcccaaacaaatactataacgcgcgatacctaaatactaacgccaactacgaaaatataactcaacgacacccgctaacgaatccctaatcaacgaaccgaaa

SEQ ID NO: 33679 - DNA, 936 bp, Artificial Sequence
  chemically treated genomic DNA (Homo sapiens) CpG-island No: 33679
ttttagttttttatttttttggagtttgcgggcggcggggaaggagggttttgataatagggtaagggagaggagcgtaaatcgtcggttttcgtttcgttatttttagtgcggttatcgtttatgttaatatatttcgggaaagtcgggtgtatcgatttcgtaaggttattcgtgaagaggcgattttatataattttttatcgcgtcgttaaggtatttgcgcgtcgcggtagtagtgtagtcgcggttttttttttgtagtacgggcgcgagatgatgcgggggcggcgagtagcgttattaggtaggacgtcggggattcgcgggaaggtagcgcgtattaagtcgggggcgggggatcgagggtggacgtttagatcggggatgtttcgagtcgtcgttttggtttgcgaggcggggcgcggtcggcgcgggcgaggttcggtgtcgaattttttaagttgtcgtcggacggttagcgtcgagcgcgtttttcgtagtttcgtttcggattgtttcgggacgtatttgtcgcgcgttttatttgagtggttttatggaattgttttttgaggtcggttatcgatatggtgtaggaggtcgcgttggcggttgttgtgcgggagggaggaggcggagggggattggagggtcgagcggggcggcgcgtttttttggtcgtttttggtcgtgtcgtcgtcggggttatgggcgcgagggcgcggagtttagcgggatacgggtttttgcggagaaatattttgacgttaagggcgggtgatgcggttttttaaaggggacgcgggaagtttcgttttaagcgcgggaacgtttaggtaggtgttgtggcgcgcggtatttggatgttggcgttaattgcggggatgtggtttagcggtattcgttggcggatttttagttagcgggtcgagg

SEQ ID NO: 33680 - DNA, 936 bp, Artificial Sequence
  chemically treated genomic DNA (Homo sapiens) CpG-island No: 33680
cctcgacccgctaactaaaaatccgccaacgaataccgctaaaccacatccccgcaattaacgccaacatccaaataccgcgcgccacaacacctacctaaacgttcccgcgcttaaaacgaaacttcccgcgtcccctttaaaaaaccgcatcacccgcccttaacgtcaaaatatttctccgcaaaaacccgtatcccgctaaactccgcgccctcgcgcccataaccccgacgacgacacgaccaaaaacgaccaaaaaaacgcgccgccccgctcgaccctccaatccccctccgcctcctccctcccgcacaacaaccgccaacgcgacctcctacaccatatcgataaccgacctcaaaaaacaattccataaaaccactcaaataaaacgcgcgacaaatacgtcccgaaacaatccgaaacgaaactacgaaaaacgcgctcgacgctaaccgtccgacgacaacttaaaaaattcgacaccgaacctcgcccgcgccgaccgcgccccgcctcgcaaaccaaaacgacgactcgaaacatccccgatctaaacgtccaccctcgatcccccgcccccgacttaatacgcgctaccttcccgcgaatccccgacgtcctacctaataacgctactcgccgcccccgcatcatctcgcgcccgtactacaaaaaaaaaaccgcgactacactactaccgcgacgcgcaaataccttaacgacgcgataaaaaattatataaaatcgcctcttcacgaataaccttacgaaatcgatacacccgactttcccgaaatatattaacataaacgataaccgcactaaaaataacgaaacgaaaaccgacgatttacgctcctctcccttaccctattatcaaaaccctccttccccgccgcccgcaaactccaaaaaaataaaaaactaaaa

SEQ ID NO: 33681 - DNA, 694 bp, Artificial Sequence
  chemically treated genomic DNA (Homo sapiens) CpG-island No: 33681
agcgttttagtgacgtagtcgaatattcgcgtttgtgattcgttaaaggtttatttttatggtgtcggcgaaggcgcgtttttgcggcgtcggggaaggcgcgttcgtgcggcgtcggggaaggcgcgttcgtgcggcgtcggggaaggcgcgtttttgcggcgtcggggaaggcgcgtttttgcggcgtcgcggaaggcgcgtttttgcggcgtcgcggaaggcgcgtttttgcggcgtcgcggaaggcgcgtttttgcggcgtcgcggaaggcgcgtttttgcgacgttataggggatcgttatttacgcggagttaatcggaatttatggcggggttgttgggttttttaggagcgcgtatgagcggacgttgtttatgggttgtcgggcgagatgtaatcggttgttgagttggtagttttgtgtcgttaggtttcggttcggtcgtcgttatatataagttgcgatgaggagttttacgatttttcggttttcggggtcgggcgtagtaagggttagattttgcgttagtaggcgttgcgcgttaatcggtcggtatttgtcgtagaaggtgtaatcgatcgtattgtcgcgtagaagttttttaatggttagtattagttgtagtttcggtcgtttattcgttttatttgagtttgtgtacgtgcgttttataacgttttttttagtt

SEQ ID NO: 33682 - DNA, 694 bp, Artificial Sequence
  chemically treated genomic DNA (Homo sapiens) CpG-island No: 33682
aactaaaaaaaacgttataaaacgcacgtacacaaactcaaataaaacgaataaacgaccgaaactacaactaatactaaccattaaaaaacttctacgcgacaatacgatcgattacaccttctacgacaaataccgaccgattaacgcgcaacgcctactaacgcaaaatctaacccttactacgcccgaccccgaaaaccgaaaaatcgtaaaactcctcatcgcaacttatatataacgacgaccgaaccgaaacctaacgacacaaaactaccaactcaacaaccgattacatctcgcccgacaacccataaacaacgtccgctcatacgcgctcctaaaaaacccaacaaccccgccataaattccgattaactccgcgtaaataacgatcccctataacgtcgcaaaaacgcgccttccgcgacgccgcaaaaacgcgccttccgcgacgccgcaaaaacgcgccttccgcgacgccgcaaaaacgcgccttccgcgacgccgcaaaaacgcgccttccccgacgccgcaaaaacgcgccttccccgacgccgcacgaacgcgccttccccgacgccgcacgaacgcgccttccccgacgccgcaaaaacgcgccttcgccgacaccataaaaataaacctttaacgaatcacaaacgcgaatattcgactacgtcactaaaacgct

SEQ ID NO: 33683 - DNA, 694 bp, Artificial Sequence
  chemically treated genomic DNA (Homo sapiens) CpG-island No: 33683
ggttgggggaggcgttgtggggcgtacgtatataggtttaagtgaggcgagtgggcggtcggggttgtagttggtgttggttattgaggagtttttgcgcgatagtgcgatcggttgtattttttgcgataggtgtcggtcggttggcgcgtagcgtttgttagcgtagagtttggtttttgttgcgttcggtttcgaagatcgggaagtcgtaaagttttttatcgtagtttatgtgtggcggcggtcgggtcgaagtttagcgatatagaattgttagtttagtagtcggttatatttcgttcggtaatttataggtagcgttcgtttatgcgcgtttttggaagatttagtagtttcgttatgagtttcgattggtttcgcgtgagtggcggttttttgtgacgtcgtaagggcgcgtttttcgcggcgtcgtaagggcgcgtttttcgcggcgtcgtaagggcgcgtttttcgcggcgtcgtaagggcgcgtttttcgcggcgtcgtaagggcgcgtttttttcggcgtcgtaagggcgcgtttttttcggcgtcgtacgggcgcgtttttttcggcgtcgtacgggcgcgtttttttcggcgtcgtaagggcgcgttttcgtcgatattatagaggtgggtttttggcgagttataggcgcgggtgttcggttacgttattggggcgtt

SEQ ID NO: 33684 - DNA, 694 bp, Artificial Sequence
  chemically treated genomic DNA (Homo sapiens) CpG-island No: 33684
aacgccccaataacgtaaccgaacacccgcgcctataactcgccaaaaacccacctctataatatcgacgaaaacgcgcccttacgacgccgaaaaaaacgcgcccgtacgacgccgaaaaaaacgcgcccgtacgacgccgaaaaaaacgcgcccttacgacgccgaaaaaaacgcgcccttacgacgccgcgaaaaacgcgcccttacgacgccgcgaaaaacgcgcccttacgacgccgcgaaaaacgcgcccttacgacgccgcgaaaaacgcgcccttacgacgtcacaaaaaaccgccactcacgcgaaaccaatcgaaactcataacgaaactactaaatcttccaaaaacgcgcataaacgaacgctacctataaattaccgaacgaaatataaccgactactaaactaacaattctatatcgctaaacttcgacccgaccgccgccacacataaactacgataaaaaactttacgacttcccgatcttcgaaaccgaacgcaacaaaaaccaaactctacgctaacaaacgctacgcgccaaccgaccgacacctatcgcaaaaaatacaaccgatcgcactatcgcgcaaaaactcctcaataaccaacaccaactacaaccccgaccgcccactcgcctcacttaaacctatatacgtacgccccacaacgcctcccccaacc

SEQ ID NO: 33685 - DNA, 506 bp, Artificial Sequence
  chemically treated genomic DNA (Homo sapiens) CpG-island No: 33685
gtcggtcggagtttcgcgtagggagcggatttttgttataggttcgttcgttaggtcggtttcgttgttcgggtcgcgcgcgttagtcgttcgttttttttagttttcgtttaattttgttcggttttaattttggtagttaaagtttagggagtcggcgtcgcgtcgtcgtcgtcgttcgtttttttttcgcggtttgggtcgtcgtcgtttcggttttatttgtaattggtgagtacgtttttatttattattacgattaggaaggagtttacgtcgtaaaagtcggcggttagtagttttagaaatacggttagcgtttcggtcgacgttatttttagtttttttttatttcggagtgtggaggatttcgcgggggttttttttttaattcgagtatgttgacgtttatgaattttcgttatggttgtcgtagtagcggtggtttggcggcggggtttagcggttcgggggtttgtagcggtagtttttaggggattttagga

SEQ ID NO: 33686 - DNA, 506 bp, Artificial Sequence
  chemically treated genomic DNA (Homo sapiens) CpG-island No: 33686
tcctaaaatcccctaaaaactaccgctacaaacccccgaaccgctaaaccccgccgccaaaccaccgctactacgacaaccataacgaaaattcataaacgtcaacatactcgaattaaaaaaaaaacccccgcgaaatcctccacactccgaaataaaaaaaaactaaaaataacgtcgaccgaaacgctaaccgtatttctaaaactactaaccgccgacttttacgacgtaaactccttcctaatcgtaataataaataaaaacgtactcaccaattacaaataaaaccgaaacgacgacgacccaaaccgcgaaaaaaaaacgaacgacgacgacgacgcgacgccgactccctaaactttaactaccaaaattaaaaccgaacaaaattaaacgaaaactaaaaaaaacgaacgactaacgcgcgcgacccgaacaacgaaaccgacctaacgaacgaacctataacaaaaatccgctccctacgcgaaactccgaccgac

SEQ ID NO: 33687 - DNA, 506 bp, Artificial Sequence
  chemically treated genomic DNA (Homo sapiens) CpG-island No: 33687
ttttggagttttttgggagttgtcgttgtaggttttcgagtcgttaggtttcgtcgttaggttatcgttgttgcggtagttatggcggaagtttatagacgttagtatgttcgggttaaaggagaagttttcgcgaaattttttatatttcgagatgaggaggagttggggatggcgtcggtcgaaacgttgatcgtgtttttgaagttgttggtcgtcggtttttacggcgtgagtttttttttgatcgtggtggtgaataagagcgtgtttattaattataggtagggtcgaggcggcggcggtttaggtcgcggaggaggagcgggcggcggcggcggcgcggcgtcggttttttggattttgattgttaaagttaaagtcgaataaagttgggcgggagttggggagggcgggcggttgacgcgcgcggttcgggtagcggagtcggtttggcgagcgggtttgtggtaggggttcgttttttgcgcggagtttcggtcggt

SEQ ID NO: 33688 - DNA, 506 bp, Artificial Sequence
  chemically treated genomic DNA (Homo sapiens) CpG-island No: 33688
accgaccgaaactccgcgcaaaaaacgaacccctaccacaaacccgctcgccaaaccgactccgctacccgaaccgcgcgcgtcaaccgcccgccctccccaactcccgcccaactttattcgactttaactttaacaatcaaaatccaaaaaaccgacgccgcgccgccgccgccgcccgctcctcctccgcgacctaaaccgccgccgcctcgaccctacctataattaataaacacgctcttattcaccaccacgatcaaaaaaaaactcacgccgtaaaaaccgacgaccaacaacttcaaaaacacgatcaacgtttcgaccgacgccatccccaactcctcctcatctcgaaatataaaaaatttcgcgaaaacttctcctttaacccgaacatactaacgtctataaacttccgccataactaccgcaacaacgataacctaacgacgaaacctaacgactcgaaaacctacaacgacaactcccaaaaaactccaaaa

SEQ ID NO: 33689 - DNA, 1034 bp, Artificial Sequence
  chemically treated genomic DNA (Homo sapiens) CpG-island No: 33689
gtatgcgcgttagtatcgcgtgttagggttttgaaagttaggtttcgcgtcggtgcggtagcgcgaggtttgtagttttaagttcggggtcgtttcgggttttcgagggggtgtgttttttatcgttttaatatggaaggggcggttttagtggtcggggaagtcggcgatttgtaggattgaaggttggtgttttgaaagagaggcggagggcgagagcgattttttcgttttttttgtatttcgtttaattttttcgttttttttttttttcggtcggttcgttcggtttttaatttgttttaatttattttgcggtagaggttgtcgggtttttttaaggttttttcgcgtttgcgttttgggtttttttgacgcggtcgggtcggatttcggaggaattagttggttagttggtaaggggttggttgtagtttcgatagcggcggtgtcgggaggggtaggtgagggtcgcgaggcggttttgagtttttgagtgagcgtggtgtttttgggaattcgggacgggcgattcgtggagttaggagcggggtcgaggcgttgagacgcggcggcgcggttgtcggttggatgggaagttaatgtttacggcgaagtttatttaacgtttttaaggtgaggggcgttgcgttaggtcgggcgggtcgggaggtcgggcgggcggtgagttcgtgtttcgttggcgtatagttgggtcgaggcgcggcgggcgggggtcgtcgtaagttttgttgtgggagcggggcgggcgcgtttggtttcgttagggtttaagttttttgtattcgttttttcgtttgtcgtcgtcgtcgtcgttcgtagttttttttttcgtgggcgttggggaagaaattcgtcggcgggtttaattgtggcgttttagggcggtggagggacggagtagtttcgggggtacgttttcgtaaatttcgtggaggatattgattttgtattttattttcgaggttagaagtcggttttttttggggatttgaggggcgagagtattcgtt

SEQ ID NO: 33690 - DNA, 1034 bp, Artificial Sequence
  chemically treated genomic DNA (Homo sapiens) CpG-island No: 33690
aacgaatactctcgcccctcaaatccccaaaaaaaaccgacttctaacctcgaaaataaaatacaaaatcaatatcctccacgaaatttacgaaaacgtacccccgaaactactccgtccctccaccgccctaaaacgccacaattaaacccgccgacgaatttcttccccaacgcccacgaaaaaaaaaactacgaacgacgacgacgacgacaaacgaaaaaacgaatacaaaaaacttaaaccctaacgaaaccaaacgcgcccgccccgctcccacaacaaaacttacgacgacccccgcccgccgcgcctcgacccaactatacgccaacgaaacacgaactcaccgcccgcccgacctcccgacccgcccgacctaacgcaacgcccctcaccttaaaaacgttaaataaacttcgccgtaaacattaacttcccatccaaccgacaaccgcgccgccgcgtctcaacgcctcgaccccgctcctaactccacgaatcgcccgtcccgaattcccaaaaacaccacgctcactcaaaaactcaaaaccgcctcgcgaccctcacctacccctcccgacaccgccgctatcgaaactacaaccaaccccttaccaactaaccaactaattcctccgaaatccgacccgaccgcgtcaaaaaaacccaaaacgcaaacgcgaaaaaaccttaaaaaaacccgacaacctctaccgcaaaataaattaaaacaaattaaaaaccgaacgaaccgaccgaaaaaaaaaaaaaacgaaaaaattaaacgaaatacaaaaaaaacgaaaaaatcgctctcgccctccgcctctctttcaaaacaccaaccttcaatcctacaaatcgccgacttccccgaccactaaaaccgccccttccatattaaaacgataaaaaacacaccccctcgaaaacccgaaacgaccccgaacttaaaactacaaacctcgcgctaccgcaccgacgcgaaacctaactttcaaaaccctaacacgcgatactaacgcgcatac

SEQ ID NO: 33691 - DNA, 1034 bp, Artificial Sequence
  chemically treated genomic DNA (Homo sapiens) CpG-island No: 33691
ggcgagtgttttcgttttttaggtttttaaagggaatcgatttttggtttcgagggtggggtgtagggttagtgttttttacgggatttacgaggacgtgttttcgaagttgtttcgtttttttatcgttttgggacgttatagttagattcgtcgacgagttttttttttagcgtttacgagaaggagggttgcgggcggcggcggcggcgataggcgaggaagcgagtgtagggaatttaggttttggcggggttaggcgcgttcgtttcgtttttatagtaaaatttgcggcggttttcgttcgtcgcgtttcggtttagttgtgcgttagcggaatacggatttatcgttcgttcggtttttcggttcgttcggtttggcgtagcgttttttattttggaaacgttgagtagatttcgtcgtaaatattaattttttatttagtcggtagtcgcgtcgtcgcgttttagcgtttcggtttcgtttttggttttacgggtcgttcgtttcgagtttttaaaagtattacgtttatttagaagtttagggtcgtttcgcgatttttatttatttttttcggtatcgtcgttgtcggaattgtagttagttttttgttagttggttagttggttttttcggggttcggttcggtcgcgttaggagagtttaaggcgtaggcgcgggagggttttaaagagattcggtagtttttatcgtagaatgggttggagtaggttaggggtcgggcgggtcggtcgagaaaaggagaaggcgaagggattggacggagtgtagaggaggcggggaaatcgttttcgtttttcgttttttttttaaagtattagtttttagttttgtaagtcgtcgattttttcggttattggaatcgttttttttatgttaaaacggtagaagatatattttttcgggggttcgaagcgatttcgagtttaggattgtaggtttcgcgttgtcgtatcgacgcggagtttgatttttagggttttggtacgcggtgttgacgcgtatgt

SEQ ID NO: 33692 - DNA, 1034 bp, Artificial Sequence
  chemically treated genomic DNA (Homo sapiens) CpG-island No: 33692
acatacgcgtcaacaccgcgtaccaaaaccctaaaaatcaaactccgcgtcgatacgacaacgcgaaacctacaatcctaaactcgaaatcgcttcgaacccccgaaaaaatatatcttctaccgttttaacataaaaaaaacgattccaataaccgaaaaaatcgacgacttacaaaactaaaaactaatactttaaaaaaaaaacgaaaaacgaaaacgatttccccgcctcctctacactccgtccaatcccttcgccttctccttttctcgaccgacccgcccgacccctaacctactccaacccattctacgataaaaactaccgaatctctttaaaaccctcccgcgcctacgccttaaactctcctaacgcgaccgaaccgaaccccgaaaaaaccaactaaccaactaacaaaaaactaactacaattccgacaacgacgataccgaaaaaaataaataaaaatcgcgaaacgaccctaaacttctaaataaacgtaatacttttaaaaactcgaaacgaacgacccgtaaaaccaaaaacgaaaccgaaacgctaaaacgcgacgacgcgactaccgactaaataaaaaattaatatttacgacgaaatctactcaacgtttccaaaataaaaaacgctacgccaaaccgaacgaaccgaaaaaccgaacgaacgataaatccgtattccgctaacgcacaactaaaccgaaacgcgacgaacgaaaaccgccgcaaattttactataaaaacgaaacgaacgcgcctaaccccgccaaaacctaaattccctacactcgcttcctcgcctatcgccgccgccgccgcccgcaaccctccttctcgtaaacgctaaaaaaaaaactcgtcgacgaatctaactataacgtcccaaaacgataaaaaaacgaaacaacttcgaaaacacgtcctcgtaaatcccgtaaaaaacactaaccctacaccccaccctcgaaaccaaaaatcgattccctttaaaaacctaaaaaacgaaaacactcgcc

SEQ ID NO: 33693 - DNA, 755 bp, Artificial Sequence
  chemically treated genomic DNA (Homo sapiens) CpG-island No: 33693
gtaggtttggttcgttgcgggtagttagggtaaagtggagcgtttcgttttcgttttggggcgtattttcgtcgtcgtcgggatttttcgtttttgttttttcgaatttagcggattagaggttggaggcgggaggcggagcggcgcgcgtacgcgggcggggtagagggttcggagtcgacgagtcgacgtgtcgacgttggcgttgtagcggggcggtgacgtgtaggtcggcgttagttttattttgttttttttcgtcgggtttgtgcgtttttgcgtttgtttgtttgattgatggtttttatacgcggttttttgtgattgggcgcgatttcggtaagcgcggtttggagggcggacggggcgcggcgatatagttgttcgttcgtatttttggttttgcgtttagttttttattcggcgtgggaagttaaagtaaaatcgaaagggaagaaggcgcggtggtaggagttgatagagtgatgggaaacgcgtgagttaggtcgagaggtgagtaggtgaaggtggaggtgggaggacgagaagggttttcgcgtttagggaagttggttgaagtcggggacggcgaggcgggttacgcgattcgttagagattttttttttgttttcggggtaagtttcgatttgttattttttttagtggtatgaggtcgagttcggggtttcgtaataatatcgtttatttttagagtttgtaggtggggttggggatagaaaatttaatttaagtt

SEQ ID NO: 33694 - DNA, 755 bp, Artificial Sequence
  chemically treated genomic DNA (Homo sapiens) CpG-island No: 33694
aacttaaattaaattttctatccccaaccccacctacaaactctaaaaataaacgatattattacgaaaccccgaactcgacctcataccactaaaaaaaataacaaatcgaaacttaccccgaaaacaaaaaaaaaatctctaacgaatcgcgtaacccgcctcgccgtccccgacttcaaccaacttccctaaacgcgaaaacccttctcgtcctcccacctccaccttcacctactcacctctcgacctaactcacgcgtttcccatcactctatcaactcctaccaccgcgccttcttccctttcgattttactttaacttcccacgccgaataaaaaactaaacgcaaaaccaaaaatacgaacgaacaactatatcgccgcgccccgtccgccctccaaaccgcgcttaccgaaatcgcgcccaatcacaaaaaaccgcgtataaaaaccatcaatcaaacaaacaaacgcaaaaacgcacaaacccgacgaaaaaaaacaaaataaaactaacgccgacctacacgtcaccgccccgctacaacgccaacgtcgacacgtcgactcgtcgactccgaaccctctaccccgcccgcgtacgcgcgccgctccgcctcccgcctccaacctctaatccgctaaattcgaaaaaacaaaaacgaaaaatcccgacgacgacgaaaatacgccccaaaacgaaaacgaaacgctccactttaccctaactacccgcaacgaaccaaacctac

SEQ ID NO: 33695 - DNA, 755 bp, Artificial Sequence
  chemically treated genomic DNA (Homo sapiens) CpG-island No: 33695
agtttaggttaagttttttatttttaattttatttataaattttaggaatgggcggtattgttgcgagatttcggattcgattttatgttattgaaaaggatgataggtcgggatttgtttcggaggtaggaagagaatttttggcgggtcgcgtagttcgtttcgtcgttttcggttttagttagtttttttgggcgcggggatttttttcgtttttttatttttatttttatttatttatttttcggtttggtttacgcgttttttattattttgttagtttttgttatcgcgtttttttttttttcggttttattttaattttttacgtcgggtgaggagttgagcgtagggttaaagatgcgagcgggtagttgtatcgtcgcgtttcgttcgttttttaagtcgcgtttgtcggggtcgcgtttagttatagggaatcgcgtgtgaggattattagttagatagatagacgtaaagacgtatagattcggcgaggagggatagagtggagttggcgtcggtttatacgttatcgtttcgttgtagcgttaacgtcggtacgtcgattcgtcgatttcgggttttttgtttcgttcgcgtgcgcgcgtcgtttcgtttttcgtttttagtttttagttcgttgggttcggaggagtagaggcggaaggtttcggcggcggcgaggatgcgttttagggcgggagcgggacgttttattttattttggttgttcgtaacgggttaggtttgt

SEQ ID NO: 33696 - DNA, 755 bp, Artificial Sequence
  chemically treated genomic DNA (Homo sapiens) CpG-island No: 33696
acaaacctaacccgttacgaacaaccaaaataaaataaaacgtcccgctcccgccctaaaacgcatcctcgccgccgccgaaaccttccgcctctactcctccgaacccaacgaactaaaaactaaaaacgaaaaacgaaacgacgcgcgcacgcgaacgaaacaaaaaacccgaaatcgacgaatcgacgtaccgacgttaacgctacaacgaaacgataacgtataaaccgacgccaactccactctatccctcctcgccgaatctatacgtctttacgtctatctatctaactaataatcctcacacgcgattccctataactaaacgcgaccccgacaaacgcgacttaaaaaacgaacgaaacgcgacgatacaactacccgctcgcatctttaaccctacgctcaactcctcacccgacgtaaaaaattaaaataaaaccgaaaaaaaaaaaaacgcgataacaaaaactaacaaaataataaaaaacgcgtaaaccaaaccgaaaaataaataaataaaaataaaaataaaaaaacgaaaaaaatccccgcgcccaaaaaaactaactaaaaccgaaaacgacgaaacgaactacgcgacccgccaaaaattctcttcctacctccgaaacaaatcccgacctatcatccttttcaataacataaaatcgaatccgaaatctcgcaacaataccgcccattcctaaaatttataaataaaattaaaaataaaaaacttaacctaaact

SEQ ID NO: 33697 - DNA, 760 bp, Artificial Sequence
  chemically treated genomic DNA (Homo sapiens) CpG-island No: 33697
ggcgtcgggtagggattaattatcggcggcgatcggttattcgcgttttagcgaggagattttgagattcgcggggagagtatagggtcgcgtcgttttttggcggtttaatgatagagttgaggttcggcggttggcgattgcggcgtttggtagttttaggaaaggattttttttgtgaagaaacgtttttacgaagattgttttgttttgtttttgttttttcgttttcgttcgttttttttttttttttttatttttttttttttttttttttttattttttttattttttttgtttttttttttttttcgtttttatttttttttttatttttatttttttttttcgtttttcgtttatcgtttttcgttttcgcggggtagcgtttcggtgtattcgtttggtagttagtttattagatttcgtattattgattcgtttttgagtaaaagttgatagtattttttttcgggttttttacgtttttatttttcgcgtttttttttaggtagttttggtttgcgttttttttcgttttttacgcgggtcgcgtcgaagtttcgtttttacgaaggacgagaataaatgtaattaaagcgatcggcgaggggggtgtgtttttattaacgtaggtacgagcgagggttttagcggtcggcgttcggtttgttatttttttttttttcgttttcgttttttggagcgggagtatttgggttgagttgcgtttgttttataaatttatatataattttt

SEQ ID NO: 33698 - DNA, 760 bp, Artificial Sequence
  chemically treated genomic DNA (Homo sapiens) CpG-island No: 33698
aaaaattatatataaatttataaaacaaacgcaactcaacccaaatactcccgctccaaaaaacgaaaacgaaaaaaaaaaaaataacaaaccgaacgccgaccgctaaaaccctcgctcgtacctacgttaataaaaacacacccccctcgccgatcgctttaattacatttattctcgtccttcgtaaaaacgaaacttcgacgcgacccgcgtaaaaaacgaaaaaaaacgcaaaccaaaactacctaaaaaaaaacgcgaaaaataaaaacgtaaaaaacccgaaaaaaaatactatcaacttttactcaaaaacgaatcaataatacgaaatctaataaactaactaccaaacgaatacaccgaaacgctaccccgcgaaaacgaaaaacgataaacgaaaaacgaaaaaaaaaaataaaaataaaaaaaaaaataaaaacgaaaaaaaaaaaaaaacaaaaaaaataaaaaaaataaaaaaaaaaaaaaaaaaaaaaataaaaaaaaaaaaaaaaaacgaacgaaaacgaaaaaacaaaaacaaaacaaaacaatcttcgtaaaaacgtttcttcacaaaaaaaatcctttcctaaaactaccaaacgccgcaatcgccaaccgccgaacctcaactctatcattaaaccgccaaaaaacgacgcgaccctatactctccccgcgaatctcaaaatctcctcgctaaaacgcgaataaccgatcgccgccgataattaatccctacccgacgcc

SEQ ID NO: 33699 - DNA, 760 bp, Artificial Sequence
  chemically treated genomic DNA (Homo sapiens) CpG-island No: 33699
gagaattatatgtggatttataggataggcgtagtttaatttaaatgttttcgttttagggggcggggacgagggggagggaggtggtaggtcgggcgtcggtcgttgggattttcgttcgtgtttgcgttggtgggggtatatttttttcgtcggtcgttttaattatatttgttttcgtttttcgtgagggcgagatttcggcgcggttcgcgtggggggcgggaggaggcgtaggttaggattgtttggaggggggcgcggggaatgggaacgtggggagttcgggagggggtgttgttagtttttgtttagaagcggattaatagtacgagatttaatgggttaattgttaagcgggtgtatcgaggcgttgtttcgcgggggcgggaggcggtgggcgaaggacgagagaaaggaatgggggtgggagagggagtgaggacggggaggggggaagggtaggaagagtggaagaggtggggggaggaggaagagagaaaataaagaaggggagagaaggcgagcgggagcgggagggtagggataggataggatagttttcgtaggggcgtttttttataagggggatttttttttggagttgttagacgtcgtagtcgttagtcgtcgggttttaattttgttattgagtcgttagggggcggcgcgattttgtgtttttttcgcggattttagggttttttcgttggggcgcgagtgatcggtcgtcgtcgatgattggtttttgttcggcgtt

SEQ ID NO: 33700 - DNA, 760 bp, Artificial Sequence
  chemically treated genomic DNA (Homo sapiens) CpG-island No: 33700
aacgccgaacaaaaaccaatcatcgacgacgaccgatcactcgcgccccaacgaaaaaaccctaaaatccgcgaaaaaaacacaaaatcgcgccgccccctaacgactcaataacaaaattaaaacccgacgactaacgactacgacgtctaacaactccaaaaaaaaatcccccttataaaaaaacgcccctacgaaaactatcctatcctatccctaccctcccgctcccgctcgccttctctccccttctttattttctctcttcctcctccccccacctcttccactcttcctacccttcccccctccccgtcctcactccctctcccacccccattcctttctctcgtccttcgcccaccgcctcccgcccccgcgaaacaacgcctcgatacacccgcttaacaattaacccattaaatctcgtactattaatccgcttctaaacaaaaactaacaacaccccctcccgaactccccacgttcccattccccgcgcccccctccaaacaatcctaacctacgcctcctcccgccccccacgcgaaccgcgccgaaatctcgccctcacgaaaaacgaaaacaaatataattaaaacgaccgacgaaaaaaatatacccccaccaacgcaaacacgaacgaaaatcccaacgaccgacgcccgacctaccacctccctccccctcgtccccgccccctaaaacgaaaacatttaaattaaactacgcctatcctataaatccacatataattctc

SEQ ID NO: 33701 - DNA, 511 bp, Artificial Sequence
  chemically treated genomic DNA (Homo sapiens) CpG-island No: 33701
tgggagttgcggtttacggcgtagttttagttttttttttgggggaagttttagaattataaatttcgtgagttagtgggttttcgtttgcgtacggagaagtcgattttttttggttttttagtttgcgtttgagaggtaagagagggcggggggaaggaagaggaggcgggattcgggcgttgcgttggttgcggtttggtattaaaggggcggtttcggcggagagcggatttagtggtttcggcgattatggattcggtcgaggcggtgttgtaagagaaggtatttaagtttatggtgaggagacggtggaggtcggggaacggtggaggcgttggcgttggcggcgtcgttggtttgggtcgttcgtttattgcgggatcgggtagcgggattttgggtcgaggttggcggcggagcggttggagggatgggatgggagttttagaaaggaggttgggggttgcggagcggatttaggggtgggggtagcggtttcgttattttg

SEQ ID NO: 33702 - DNA, 511 bp, Artificial Sequence
  chemically treated genomic DNA (Homo sapiens) CpG-island No: 33702
caaaataacgaaaccgctacccccacccctaaatccgctccgcaacccccaacctcctttctaaaactcccatcccatccctccaaccgctccgccgccaacctcgacccaaaatcccgctacccgatcccgcaataaacgaacgacccaaaccaacgacgccgccaacgccaacgcctccaccgttccccgacctccaccgtctcctcaccataaacttaaataccttctcttacaacaccgcctcgaccgaatccataatcgccgaaaccactaaatccgctctccgccgaaaccgcccctttaataccaaaccgcaaccaacgcaacgcccgaatcccgcctcctcttccttccccccgccctctcttacctctcaaacgcaaactaaaaaaccaaaaaaaatcgacttctccgtacgcaaacgaaaacccactaactcacgaaatttataattctaaaacttcccccaaaaaaaaaactaaaactacgccgtaaaccgcaactccca

SEQ ID NO: 33703 - DNA, 511 bp, Artificial Sequence
  chemically treated genomic DNA (Homo sapiens) CpG-island No: 33703
taagatggcggagtcgttgtttttatttttgggttcgtttcgtaatttttagttttttttttggagtttttattttatttttttagtcgtttcgtcgttagtttcggtttagggtttcgttgttcggtttcgtagtgggcgggcggtttaggttagcgacgtcgttaacgttagcgtttttatcgtttttcggtttttatcgtttttttattataaatttgagtgtttttttttgtagtatcgtttcggtcgggtttataatcgtcgaggttattgggttcgtttttcgtcggggtcgtttttttggtgttaggtcgtagttaacgtagcgttcggatttcgttttttttttttttttttcgtttttttttattttttaggcgtaggttgaggggttaaggagaatcggttttttcgtgcgtaggcgaaagtttattggtttacgggatttgtagttttggaattttttttaggaaaaaaattgaggttacgtcgtgaatcgtaattttta

SEQ ID NO: 33704 - DNA, 511 bp, Artificial Sequence
  chemically treated genomic DNA (Homo sapiens) CpG-island No: 33704
taaaaattacgattcacgacgtaacctcaatttttttcctaaaaaaaattccaaaactacaaatcccgtaaaccaataaactttcgcctacgcacgaaaaaaccgattctccttaacccctcaacctacgcctaaaaaataaaaaaaaacgaaaaaaaaaaaaaaaaaacgaaatccgaacgctacgttaactacgacctaacaccaaaaaaacgaccccgacgaaaaacgaacccaataacctcgacgattataaacccgaccgaaacgatactacaaaaaaaaacactcaaatttataataaaaaaacgataaaaaccgaaaaacgataaaaacgctaacgttaacgacgtcgctaacctaaaccgcccgcccactacgaaaccgaacaacgaaaccctaaaccgaaactaacgacgaaacgactaaaaaaataaaataaaaactccaaaaaaaaaactaaaaattacgaaacgaacccaaaaataaaaacaacgactccgccatctta

SEQ ID NO: 33705 - DNA, 604 bp, Artificial Sequence
  chemically treated genomic DNA (Homo sapiens) CpG-island No: 33705
tacgttttagtttaagattatcgtcgttagttatttcgtatagtcgatattagggatcggtatttttaggttttatttgttcgttttttagggatttggttaggtacgcggcggcggcggcggcggcggcgttcgttgggcggtagaggcgggattttttttcggttttttatttttcgcggagtttttttcggtcggaagcgttcggtaggttagatcggaaagggttcgggttatttcggcgtttagggttatttttttacgggttggtatttgggcgcgggcgttgtttcggagtcggtcggcgggatttggcgtttaattttgggggattcggtgtcgtggtttaggggtcgggtcgaggtttcgggggcggtgttttgcgggttcgtttcggggcggtgtttggtgggttggtttcgcggttttttttttttttgcgggtttagtcgttttttggtcgggcgagttaatcgtcggtttaatgacgacgaggttcgatttttttcgtttaggatttatagagataatcgaaggagagtttaaggcggtttttttgttgtcgtcgtttttattgaagtaagagtttttcggttttattgaa

SEQ ID NO: 33706 - DNA, 604 bp, Artificial Sequence
  chemically treated genomic DNA (Homo sapiens) CpG-island No: 33706
ttcaataaaaccgaaaaactcttacttcaataaaaacgacgacaacaaaaaaaccgccttaaactctccttcgattatctctataaatcctaaacgaaaaaaatcgaacctcgtcgtcattaaaccgacgattaactcgcccgaccaaaaaacgactaaacccgcaaaaaaaaaaaaaaccgcgaaaccaacccaccaaacaccgccccgaaacgaacccgcaaaacaccgcccccgaaacctcgacccgacccctaaaccacgacaccgaatcccccaaaattaaacgccaaatcccgccgaccgactccgaaacaacgcccgcgcccaaataccaacccgtaaaaaaataaccctaaacgccgaaataacccgaaccctttccgatctaacctaccgaacgcttccgaccgaaaaaaactccgcgaaaaataaaaaaccgaaaaaaaatcccgcctctaccgcccaacgaacgccgccgccgccgccgccgccgcgtacctaaccaaatccctaaaaaacgaacaaataaaacctaaaaataccgatccctaatatcgactatacgaaataactaacgacgataatcttaaactaaaacgta

SEQ ID NO: 33707 - DNA, 604 bp, Artificial Sequence
  chemically treated genomic DNA (Homo sapiens) CpG-island No: 33707
tttagtggagtcggggagtttttgttttagtgggggcggcgatagtaaagaagtcgttttgggttttttttcggttgtttttgtaggttttggacgggaagggtcgggtttcgtcgttattgagtcgacgattagttcgttcggttaaagggcgattgggttcgtagagaggggaggagtcgcggggttagtttattaggtatcgtttcgggacgggttcgtaaggtatcgttttcgggatttcggttcggtttttgggttacggtatcgggttttttaggattgggcgttaggtttcgtcggtcggtttcggggtagcgttcgcgtttaggtgttagttcgtgggaaggtgattttgggcgtcgggatgattcgagtttttttcggtttggtttgtcgggcgttttcggtcggaagggatttcgcggagggtgggggatcgaagggaagtttcgtttttatcgtttagcggacgtcgtcgtcgtcgtcgtcgtcgcgtatttagttaggtttttgaggggcgggtagatgaggtttaggggtgtcgatttttagtgtcgattatgcgaggtgattagcggcggtgattttgggttgggacgtg

SEQ ID NO: 33708 - DNA, 604 bp, Artificial Sequence
  chemically treated genomic DNA (Homo sapiens) CpG-island No: 33708
cacgtcccaacccaaaatcaccgccgctaatcacctcgcataatcgacactaaaaatcgacacccctaaacctcatctacccgcccctcaaaaacctaactaaatacgcgacgacgacgacgacgacgacgtccgctaaacgataaaaacgaaacttcccttcgatcccccaccctccgcgaaatcccttccgaccgaaaacgcccgacaaaccaaaccgaaaaaaactcgaatcatcccgacgcccaaaatcaccttcccacgaactaacacctaaacgcgaacgctaccccgaaaccgaccgacgaaacctaacgcccaatcctaaaaaacccgataccgtaacccaaaaaccgaaccgaaatcccgaaaacgataccttacgaacccgtcccgaaacgatacctaataaactaaccccgcgactcctcccctctctacgaacccaatcgccctttaaccgaacgaactaatcgtcgactcaataacgacgaaacccgacccttcccgtccaaaacctacaaaaacaaccgaaaaaaaacccaaaacgacttctttactatcgccgcccccactaaaacaaaaactccccgactccactaaa

SEQ ID NO: 33709 - DNA, 744 bp, Artificial Sequence
  chemically treated genomic DNA (Homo sapiens) CpG-island No: 33709
gggggtttcggggtttcggtttcgttttttattttaagttagaaaaaggaagagttttagtttgaaagggaattcgggcgtcgttttggcgtttttttcggattgcgtcgtattttcgttttttgttagggaggggttgtcgggttttggcggttttcgagtatcgagaacggggttagagtagttttttgtttgtttttcgcgattatagagcgcgggtttagggcgtcgttcgcgggtgggggacgtttttaggacggaagtggtcgagagagtgtcgaagggagggcgaggtcggagttcgagggcgattcgagaagcggcggggcggcgggtcggcgggcggggcgtagagttaggtagcgtaggtaggttagatcgggtcgggcgggggttttagggtggggtcgcggggtttggtttcggggcgggcgggttttgttttttttgcgtgttcggttcgggttttattagttggagaggttagcgtttagcgtatttcggtttgagttcggcgtgaagtaggtcgttttggggaagataggttttttttgggagtagttttatgtttgggataggttttggggagcgtgaggagtcgggtggtagcggggcgtagggcggggacgggttttggtgttagttgatagcgggtatgtgggtaggaaagttttgggtgagttggggattaggtggggttcgtttaggaattaagggtcgttataggagttaaaagttggggtt

SEQ ID NO: 33710 - DNA, 744 bp, Artificial Sequence
  chemically treated genomic DNA (Homo sapiens) CpG-island No: 33710
aaccccaacttttaactcctataacgacccttaattcctaaacgaaccccacctaatccccaactcacccaaaactttcctacccacatacccgctatcaactaacaccaaaacccgtccccgccctacgccccgctaccacccgactcctcacgctccccaaaacctatcccaaacataaaactactcccaaaaaaaacctatcttccccaaaacgacctacttcacgccgaactcaaaccgaaatacgctaaacgctaacctctccaactaataaaacccgaaccgaacacgcaaaaaaaacaaaacccgcccgccccgaaaccaaaccccgcgaccccaccctaaaacccccgcccgacccgatctaacctacctacgctacctaactctacgccccgcccgccgacccgccgccccgccgcttctcgaatcgccctcgaactccgacctcgccctcccttcgacactctctcgaccacttccgtcctaaaaacgtcccccacccgcgaacgacgccctaaacccgcgctctataatcgcgaaaaacaaacaaaaaactactctaaccccgttctcgatactcgaaaaccgccaaaacccgacaacccctccctaacaaaaaacgaaaatacgacgcaatccgaaaaaaacgccaaaacgacgcccgaattccctttcaaactaaaactcttcctttttctaacttaaaataaaaaacgaaaccgaaaccccgaaaccccc

SEQ ID NO: 33711 - DNA, 744 bp, Artificial Sequence
  chemically treated genomic DNA (Homo sapiens) CpG-island No: 33711
aattttagtttttaatttttatagcgatttttgatttttaaacggattttatttaatttttaatttatttaaagtttttttatttatatgttcgttattagttaatattaaagttcgttttcgttttgcgtttcgttgttattcgattttttacgttttttaaagtttattttagatataggattgtttttaggaaaggtttgttttttttaagacggtttattttacgtcgagtttaagtcgagatgcgttggacgttgatttttttaattaataggattcgaatcggatacgtaagagaggtagggttcgttcgtttcggggttaggtttcgcggttttattttaaggttttcgttcggttcggtttggtttatttgcgttgtttggttttgcgtttcgttcgtcggttcgtcgtttcgtcgtttttcgggtcgttttcgggtttcggtttcgtttttttttcgatattttttcggttattttcgttttgggaacgttttttattcgcgggcggcgttttgggttcgcgttttatggtcgcggggggtaggtaggaagttgttttggtttcgttttcgatgttcgggagtcgttaaagttcggtagtttttttttggtaggaagcgagggtgcggcgtaattcggagaggacgttaggacgacgttcgagtttttttttaggttagaattttttttttttttagtttggggtagaaggcggagtcggagtttcggaattttt

SEQ ID NO: 33712 - DNA, 744 bp, Artificial Sequence
  chemically treated genomic DNA (Homo sapiens) CpG-island No: 33712
aaaaattccgaaactccgactccgccttctaccccaaactaaaaaaaaaaaaaattctaacctaaaaaaaaactcgaacgtcgtcctaacgtcctctccgaattacgccgcaccctcgcttcctaccaaaaaaaaactaccgaactttaacgactcccgaacatcgaaaacgaaaccaaaacaacttcctacctaccccccgcgaccataaaacgcgaacccaaaacgccgcccgcgaataaaaaacgttcccaaaacgaaaataaccgaaaaaatatcgaaaaaaaaacgaaaccgaaacccgaaaacgacccgaaaaacgacgaaacgacgaaccgacgaacgaaacgcaaaaccaaacaacgcaaataaaccaaaccgaaccgaacgaaaaccttaaaataaaaccgcgaaacctaaccccgaaacgaacgaaccctacctctcttacgtatccgattcgaatcctattaattaaaaaaatcaacgtccaacgcatctcgacttaaactcgacgtaaaataaaccgtcttaaaaaaaacaaacctttcctaaaaacaatcctatatctaaaataaactttaaaaaacgtaaaaaatcgaataacaacgaaacgcaaaacgaaaacgaactttaatattaactaataacgaacatataaataaaaaaactttaaataaattaaaaattaaataaaatccgtttaaaaatcaaaaatcgctataaaaattaaaaactaaaatt

SEQ ID NO: 33713 - DNA, 830 bp, Artificial Sequence
  chemically treated genomic DNA (Homo sapiens) CpG-island No: 33713
ttttatacgtttttaggcgtttttttatacgttgttaggcgtttttttatagatttttaggcgtttttttttacgtttttaggcgtttttttatagatttttaggcgtttttttatacgtttttaggcgtttttttatacgttgttaggcgtttttttatacgtttttaggcgtttttttatagatttttaggcgtttttttatacgtttttaggcgtttttttatagatttttaggcgtttttttatacgttgttaggcgtttttttatacgtttttaggcgtttttttatacgttgttaggcgtttttttatacgttgttaggcgtttttttatagatttttaggcgtttatttatacgttgttaggcgtttttttatacgtttttaggcgtttgtttatacgttgttaggcgtttttttttacgtttttaggcgtttttttatagatttttaggcgtttttttatacgttgttaggcgtttttttatacgttgttaggcgtttttttatacgtttttaggcgtttttttatagatttttaggcgtttttttatacgtttttaggcgtttttttatagatttttaggcgtttttttatacgttgttaggcgtttttttatacgtttttaggcgtttttttatacgttgttaggcgtttttttatacgttgttaggcgtttttttatagatttttaggcgtttttttatacgttgttaggcgtttttttatacgtttttaggcgtttttttatacgttgttaggcgtttttttatacgttgttaggcgtttttttataggttgttaggcgtttttttatatatttttag

SEQ ID NO: 33714 - DNA, 830 bp, Artificial Sequence
  chemically treated genomic DNA (Homo sapiens) CpG-island No: 33714
ctaaaaatatataaaaaaacgcctaacaacctataaaaaaacgcctaacaacgtataaaaaaacgcctaacaacgtataaaaaaacgcctaaaaacgtataaaaaaacgcctaacaacgtataaaaaaacgcctaaaaatctataaaaaaacgcctaacaacgtataaaaaaacgcctaacaacgtataaaaaaacgcctaaaaacgtataaaaaaacgcctaacaacgtataaaaaaacgcctaaaaatctataaaaaaacgcctaaaaacgtataaaaaaacgcctaaaaatctataaaaaaacgcctaaaaacgtataaaaaaacgcctaacaacgtataaaaaaacgcctaacaacgtataaaaaaacgcctaaaaatctataaaaaaacgcctaaaaacgtaaaaaaaaacgcctaacaacgtataaacaaacgcctaaaaacgtataaaaaaacgcctaacaacgtataaataaacgcctaaaaatctataaaaaaacgcctaacaacgtataaaaaaacgcctaacaacgtataaaaaaacgcctaaaaacgtataaaaaaacgcctaacaacgtataaaaaaacgcctaaaaatctataaaaaaacgcctaaaaacgtataaaaaaacgcctaaaaatctataaaaaaacgcctaaaaacgtataaaaaaacgcctaacaacgtataaaaaaacgcctaaaaacgtataaaaaaacgcctaaaaatctataaaaaaacgcctaaaaacgtaaaaaaaaacgcctaaaaatctataaaaaaacgcctaacaacgtataaaaaaacgcctaaaaacgtataaaa

SEQ ID NO: 33715 - DNA, 830 bp, Artificial Sequence
  chemically treated genomic DNA (Homo sapiens) CpG-island No: 33715
ttgggagtgtgtggggaggcgtttggtagtttgtggggaggcgtttggtagcgtgtggggaggcgtttggtagcgtgtggggaggcgtttgggagcgtgtggggaggcgtttggtagcgtgtggggaggcgtttgggagtttgtggggaggcgtttggtagcgtgtggggaggcgtttggtagcgtgtggggaggcgtttgggagcgtgtggggaggcgtttggtagcgtgtggggaggcgtttgggagtttgtggggaggcgtttgggagcgtgtggggaggcgtttgggagtttgtggggaggcgtttgggagcgtgtagggaggcgtttggtagcgtgtggggaggcgtttggtagcgtgtggggaggcgtttgggagtttgtaaggaggcgtttgggagcgtggggggaggcgtttggtagcgtgtgggtaggcgtttgggagcgtgtggggaggcgtttggtagcgtgtgggtaggcgtttgggagtttgtggagaggcgtttggtagcgtgtgggaaggcgtttggtagcgtgtggggaggcgtttgggagcgtgtggggaggcgtttggtagcgtgtggggaggcgtttgggagtttgtggggaggcgtttgggagcgtgtggggaggcgtttgggagtttgtggggaggcgtttgggagcgtgtagggaggcgtttggtagcgtgtggggaggcgtttgggagcgtgtggggaggcgtttgggagtttgtggggaggcgtttgggagcgtggggggaggcgtttgggagtttgtggggaggcgtttggtagcgtgtggggaggcgtttgggagcgtgtgggg

SEQ ID NO: 33716 - DNA, 830 bp, Artificial Sequence
  chemically treated genomic DNA (Homo sapiens) CpG-island No: 33716
ccccacacgctcccaaacgcctccccacacgctaccaaacgcctccccacaaactcccaaacgcctccccccacgctcccaaacgcctccccacaaactcccaaacgcctccccacacgctcccaaacgcctccccacacgctaccaaacgcctccctacacgctcccaaacgcctccccacaaactcccaaacgcctccccacacgctcccaaacgcctccccacaaactcccaaacgcctccccacacgctaccaaacgcctccccacacgctcccaaacgcctccccacacgctaccaaacgccttcccacacgctaccaaacgcctctccacaaactcccaaacgcctacccacacgctaccaaacgcctccccacacgctcccaaacgcctacccacacgctaccaaacgcctccccccacgctcccaaacgcctccttacaaactcccaaacgcctccccacacgctaccaaacgcctccccacacgctaccaaacgcctccctacacgctcccaaacgcctccccacaaactcccaaacgcctccccacacgctcccaaacgcctccccacaaactcccaaacgcctccccacacgctaccaaacgcctccccacacgctcccaaacgcctccccacacgctaccaaacgcctccccacacgctaccaaacgcctccccacaaactcccaaacgcctccccacacgctaccaaacgcctccccacacgctcccaaacgcctccccacacgctaccaaacgcctccccacacgctaccaaacgcctccccacaaactaccaaacgcctccccacacactcccaa

SEQ ID NO: 33717 - DNA, 706 bp, Artificial Sequence
  chemically treated genomic DNA (Homo sapiens) CpG-island No: 33717
  unsure (371)
tgatacggaattcgagatcgagaacgagtcgatcgtatatttcgtcggagtattatttagtagacgttttttattataatagttgcggaatgagttatttatttacgacgaatcgtttattgtgtacgtcgcgatttattcggtagcggattcgtacgttaatttttattatagatattttatgtatatatacgatatttaaatatacgcggagaggcgcgtagtatatacgtaagtaggtattattgcggcgatgcgacgacgtagatatgagatatagagtacgtagtacgcgagatgagagatgcgatgtacgagtgcgcgatttttatattagacgacgtatcgcgtagtgcgtatgatgatatganttacgtgtcgcgagttacgtcgttacgagaagcgatacgattatacgttgttacgttatatatagtgtattattatagtagtgtttatagttagacgacggagtcgcgtatacgatagtacgttcgagttcgatgcgcgtttttgatacgtgttattacgtagtttagttattcgcgttcgtttagtcgttacgtcgtcgcgttacgttacgcgagaatagatttacgacgcgtcgatgcgtacgtcgagatattacgaacgtgtatatagtaatgacgaatatttatacgcgatcgatcgtcgttatttgatacgtttattagtttaattgata

SEQ ID NO: 33718 - DNA, 706 bp, Artificial Sequence
  chemically treated genomic DNA (Homo sapiens) CpG-island No: 33718
  unsure (336)
tatcaattaaactaataaacgtatcaaataacgacgatcgatcgcgtataaatattcgtcattactatatacacgttcgtaatatctcgacgtacgcatcgacgcgtcgtaaatctattctcgcgtaacgtaacgcgacgacgtaacgactaaacgaacgcgaataactaaactacgtaataacacgtatcaaaaacgcgcatcgaactcgaacgtactatcgtatacgcgactccgtcgtctaactataaacactactataataatacactatatataacgtaacaacgtataatcgtatcgcttctcgtaacgacgtaactcgcgacacgtaantcatatcatcatacgcactacgcgatacgtcgtctaatataaaaatcgcgcactcgtacatcgcatctctcatctcgcgtactacgtactctatatctcatatctacgtcgtcgcatcgccgcaataatacctacttacgtatatactacgcgcctctccgcgtatatttaaatatcgtatatatacataaaatatctataataaaaattaacgtacgaatccgctaccgaataaatcgcgacgtacacaataaacgattcgtcgtaaataaataactcattccgcaactattataataaaaaacgtctactaaataatactccgacgaaatatacgatcgactcgttctcgatctcgaattccgtatca

SEQ ID NO: 33719 - DNA, 706 bp, Artificial Sequence
  chemically treated genomic DNA (Homo sapiens) CpG-island No: 33719
  unsure (336)
tattagttgagttggtaagcgtgttaagtagcgacgatcgatcgcgtatgagtattcgttattattgtatgtacgttcgtagtgtttcggcgtgcgtatcgacgcgtcgtaggtttgttttcgcgtgacgtggcgcgacgacgtgacggttggacgagcgcgagtaattgagttacgtagtagtacgtgttaaggacgcgtatcggattcgaacgtgttgtcgtgtgcgcgatttcgtcgtttgattgtaggtattgttgtgatgatatattgtgtatgacgtgatagcgtgtagtcgtgtcgtttttcgtggcgacgtagttcgcgatacgtagnttatgttattatgcgtattacgcggtacgtcgtttggtatgagagtcgcgtattcgtgtatcgtattttttatttcgcgtattgcgtattttgtgttttatgtttgcgtcgtcgtatcgtcgtagtgatgtttgtttacgtgtgtgttacgcgttttttcgcgtatgtttgagtgtcgtgtatatatatagagtgtttgtgatagaggttgacgtacggattcgttgtcgagtgagtcgcggcgtgtataataggcggttcgtcgtgagtgagtggtttatttcgtagttgttatgatgaagggcgtttgttgagtggtgtttcgacgaggtatacgatcgattcgttttcgatttcggatttcgtatta

SEQ ID NO: 33720 - DNA, 706 bp, Artificial Sequence
  chemically treated genomic DNA (Homo sapiens) CpG-island No: 33720
  unsure (371)
taatacgaaatccgaaatcgaaaacgaatcgatcgtatacctcgtcgaaacaccactcaacaaacgcccttcatcataacaactacgaaataaaccactcactcacgacgaaccgcctattatacacgccgcgactcactcgacaacgaatccgtacgtcaacctctatcacaaacactctatatatatacacgacactcaaacatacgcgaaaaaacgcgtaacacacacgtaaacaaacatcactacgacgatacgacgacgcaaacataaaacacaaaatacgcaatacgcgaaataaaaaatacgatacacgaatacgcgactctcataccaaacgacgtaccgcgtaatacgcataataacataanctacgtatcgcgaactacgtcgccacgaaaaacgacacgactacacgctatcacgtcatacacaatatatcatcacaacaatacctacaatcaaacgacgaaatcgcgcacacgacaacacgttcgaatccgatacgcgtccttaacacgtactactacgtaactcaattactcgcgctcgtccaaccgtcacgtcgtcgcgccacgtcacgcgaaaacaaacctacgacgcgtcgatacgcacgccgaaacactacgaacgtacatacaataataacgaatactcatacgcgatcgatcgtcgctacttaacacgcttaccaactcaactaata

SEQ ID NO: 33721 - DNA, 699 bp, Artificial Sequence
  chemically treated genomic DNA (Homo sapiens) CpG-island No: 33721
  unsure (549)
acgcgacgaggcgattcgtttattttggtatatttattcgtaattacgtatacgatacgtcgtttcgatttacgtcgtatcgtgtagacgcgtttgaagtcgagtaatttagttcgatttttcgacgttgagatatattacgtttgtaatatttgcgatacgattttatgtatacgatgttcggttttacgatttagcgtatcgtatttttaattttttgcgatcgttcgatacgtggataattattttgtattttttacgtacgacgattatgtttggtataacgttatatttcgatttttatttatttatcgaatacgattgttttatagtatatatcgagacgcgttgtggtttttgttattagcgatttatatggtcgcgtcgttgcgttttcgcgattttttttttttatttttagtcgtagtattcgatttgtttttatatattatatgacgtttatttgcgatttttttatcgtattatcgttttttagttacgatgttatcgtttattattatacgatatagttatatcgatatacgatantaatgtagtatcgtatttatatattcgtttcgatatttacgtgacgagtattttagtattttattgacggaattacgattatattgattcgtttttatttgacgcgataatcgttcgttagtatagtttcgttatcgcggtatattttta
